United States Patent Application Publication US 2005/0244851 A1 - sequence listing, part 94

SEQ ID NO: 3663125 - DNA, 25 bp, Homo sapien
tcaggagcagagcatacttaatctc

SEQ ID NO: 3663126 - DNA, 25 bp, Homo sapien
tccccaaatcgtagaatgattaatc

SEQ ID NO: 3663127 - DNA, 25 bp, Homo sapien
tcgtagaatgattaatctaatttcc

SEQ ID NO: 3663128 - DNA, 25 bp, Homo sapien
cttcacactgaattccccaaatcgt

SEQ ID NO: 3663129 - DNA, 25 bp, Homo sapien
actgaattccccaaatcgtagaatg

SEQ ID NO: 3663130 - DNA, 25 bp, Homo sapien
tacgaggcctggcatgtcagaggca

SEQ ID NO: 3663131 - DNA, 25 bp, Homo sapien
gcatcctgggattgtgtacgaggcc

SEQ ID NO: 3663132 - DNA, 25 bp, Homo sapien
ttaaggactgtcctggggagtggag

SEQ ID NO: 3663133 - DNA, 25 bp, Homo sapien
tgccatgcctcacactgcatcctgg

SEQ ID NO: 3663134 - DNA, 25 bp, Homo sapien
agtgcctgacgctggagacaagcct

SEQ ID NO: 3663135 - DNA, 25 bp, Homo sapien
tgacgctggagacaagcctctgctg

SEQ ID NO: 3663136 - DNA, 25 bp, Homo sapien
catcagtgcctgacgctggagacaa

SEQ ID NO: 3663137 - DNA, 25 bp, Homo sapien
tgtcatcagtgcctgacgctggaga

SEQ ID NO: 3663138 - DNA, 25 bp, Homo sapien
tcagaccctgcatgcaatcacctgg

SEQ ID NO: 3663139 - DNA, 25 bp, Homo sapien
tgtcagaccctgcatgcaatcacct

SEQ ID NO: 3663140 - DNA, 25 bp, Homo sapien
agaccctgcatgcaatcacctggct

SEQ ID NO: 3663141 - DNA, 25 bp, Homo sapien
ctgtgtcagaccctgcatgcaatca

SEQ ID NO: 3663142 - DNA, 25 bp, Homo sapien
tccaccattctatcagggctcagtg

SEQ ID NO: 3663143 - DNA, 25 bp, Homo sapien
cactggcagaatcatgttgctggga

SEQ ID NO: 3663144 - DNA, 25 bp, Homo sapien
cccacatctactcagtgacatggca

SEQ ID NO: 3663145 - DNA, 25 bp, Homo sapien
tatgactgatttcactggcacccca

SEQ ID NO: 3663146 - DNA, 25 bp, Homo sapien
cacagatagctccatagtgaaactg

SEQ ID NO: 3663147 - DNA, 25 bp, Homo sapien
cactgttgccgtgaactgccacaga

SEQ ID NO: 3663148 - DNA, 25 bp, Homo sapien
tgttgccgtgaactgccacagatag

SEQ ID NO: 3663149 - DNA, 25 bp, Homo sapien
agatagctccatagtgaaactgagg

SEQ ID NO: 3663150 - DNA, 25 bp, Homo sapien
cctgggaatcgcaatgccaattgtt

SEQ ID NO: 3663151 - DNA, 25 bp, Homo sapien
tcaagttggtgcctctgcgagcggc

SEQ ID NO: 3663152 - DNA, 25 bp, Homo sapien
aacaccatttcctcacgcctatttt

SEQ ID NO: 3663153 - DNA, 25 bp, Homo sapien
gagcggctgcggtcctgcttgtcct

SEQ ID NO: 3663154 - DNA, 25 bp, Homo sapien
ctggaattcagtggttccaagtggt

SEQ ID NO: 3663155 - DNA, 25 bp, Homo sapien
aattcagtggttccaagtggttgca

SEQ ID NO: 3663156 - DNA, 25 bp, Homo sapien
attcagtggttccaagtggttgcat

SEQ ID NO: 3663157 - DNA, 25 bp, Homo sapien
ggaattcagtggttccaagtggttg

SEQ ID NO: 3663158 - DNA, 25 bp, Homo sapien
catctgaaatctggcggaggcgaaa

SEQ ID NO: 3663159 - DNA, 25 bp, Homo sapien
cgggacttgtattgagagcatgaca

SEQ ID NO: 3663160 - DNA, 25 bp, Homo sapien
gcttcagaccgacagcgggacttgt

SEQ ID NO: 3663161 - DNA, 25 bp, Homo sapien
gcatgacagcgatggcttctcactt

SEQ ID NO: 3663162 - DNA, 25 bp, Homo sapien
tccttggtgggttctagaattcttc

SEQ ID NO: 3663163 - DNA, 25 bp, Homo sapien
gtaagtctcagggaaaagcgtgtcc

SEQ ID NO: 3663164 - DNA, 25 bp, Homo sapien
gaaaagcgtgtccacgcgtgcctcc

SEQ ID NO: 3663165 - DNA, 25 bp, Homo sapien
cgtgtccacgcgtgcctccttggtg

SEQ ID NO: 3663166 - DNA, 25 bp, Homo sapien
cacacaattgccaatgacttgttcc

SEQ ID NO: 3663167 - DNA, 25 bp, Homo sapien
atgtgcaagccaactctcagctggc

SEQ ID NO: 3663168 - DNA, 25 bp, Homo sapien
tcaccagcttgcacgcttttaccag

SEQ ID NO: 3663169 - DNA, 25 bp, Homo sapien
ttaccagatgctaaaatgtgcaagc

SEQ ID NO: 3663170 - DNA, 25 bp, Homo sapien
gcccattgtcctaaccctctgcctc

SEQ ID NO: 3663171 - DNA, 25 bp, Homo sapien
aagcccattgtcctaaccctctgcc

SEQ ID NO: 3663172 - DNA, 25 bp, Homo sapien
agtccctcactcttggtggtctctc

SEQ ID NO: 3663173 - DNA, 25 bp, Homo sapien
caaagcccattgtcctaaccctctg

SEQ ID NO: 3663174 - DNA, 25 bp, Homo sapien
ggcctttgctgagcgtgcctgcatg

SEQ ID NO: 3663175 - DNA, 25 bp, Homo sapien
ctcgcttgtcttctggttcgttggg

SEQ ID NO: 3663176 - DNA, 25 bp, Homo sapien
tggtcctcaggatcatggaggcgaa

SEQ ID NO: 3663177 - DNA, 25 bp, Homo sapien
tgaaatatgtggcccagcgccatcc

SEQ ID NO: 3663178 - DNA, 25 bp, Homo sapien
cggcaggcagccagcaaatccatga

SEQ ID NO: 3663179 - DNA, 25 bp, Homo sapien
tagctgaggacttccagggccggca

SEQ ID NO: 3663180 - DNA, 25 bp, Homo sapien
atcaccctagctgaggacttccagg

SEQ ID NO: 3663181 - DNA, 25 bp, Homo sapien
tgacatatgaacaaacccagccaag

SEQ ID NO: 3663182 - DNA, 25 bp, Homo sapien
tcactcagggttctgggaaggttta

SEQ ID NO: 3663183 - DNA, 25 bp, Homo sapien
cactcagggttctgggaaggtttag

SEQ ID NO: 3663184 - DNA, 25 bp, Homo sapien
tctgctccacgatgttgtcttcgaa

SEQ ID NO: 3663185 - DNA, 25 bp, Homo sapien
gctccacgatgttgtcttcgaagtt

SEQ ID NO: 3663186 - DNA, 25 bp, Homo sapien
ttttttctgctccacgatgttgtct

SEQ ID NO: 3663187 - DNA, 25 bp, Homo sapien
tatcccatgtccccttttttctgct

SEQ ID NO: 3663188 - DNA, 25 bp, Homo sapien
cagttttctccccacttacatgaga

SEQ ID NO: 3663189 - DNA, 25 bp, Homo sapien
ttggaccgtggactttaccagtgct

SEQ ID NO: 3663190 - DNA, 25 bp, Homo sapien
tgattaggtcttggtgagcctgtgc

SEQ ID NO: 3663191 - DNA, 25 bp, Homo sapien
ccctcaggttggttaggcactggga

SEQ ID NO: 3663192 - DNA, 25 bp, Homo sapien
catgtgcttgtgtctttttagcagc

SEQ ID NO: 3663193 - DNA, 25 bp, Homo sapien
catacatgtgcttgtgtctttttag

SEQ ID NO: 3663194 - DNA, 25 bp, Homo sapien
aacatacatgtgcttgtgtcttttt

SEQ ID NO: 3663195 - DNA, 25 bp, Homo sapien
tacatgtgcttgtgtctttttagca

SEQ ID NO: 3663196 - DNA, 25 bp, Homo sapien
ttttgtttctgttagggatctcacc

SEQ ID NO: 3663197 - DNA, 25 bp, Homo sapien
tttctgttagggatctcaccagccc

SEQ ID NO: 3663198 - DNA, 25 bp, Homo sapien
tctgttagggatctcaccagccctc

SEQ ID NO: 3663199 - DNA, 25 bp, Homo sapien
ttgtttctgttagggatctcaccag

SEQ ID NO: 3663200 - DNA, 25 bp, Homo sapien
gcaggtcttatcacactaagctgtt

SEQ ID NO: 3663201 - DNA, 25 bp, Homo sapien
tctccagttgcctaatgttgcaggt

SEQ ID NO: 3663202 - DNA, 25 bp, Homo sapien
gcctaatgttgcaggtcttatcaca

SEQ ID NO: 3663203 - DNA, 25 bp, Homo sapien
cacactaagctgtttgtacaattgt

SEQ ID NO: 3663204 - DNA, 25 bp, Homo sapien
tcgtgaggcaatacctcacacaagg

SEQ ID NO: 3663205 - DNA, 25 bp, Homo sapien
gtgaggcaatacctcacacaaggag

SEQ ID NO: 3663206 - DNA, 25 bp, Homo sapien
ttcatcgtgaggcaatacctcacac

SEQ ID NO: 3663207 - DNA, 25 bp, Homo sapien
tcttcatcgtgaggcaatacctcac

SEQ ID NO: 3663208 - DNA, 25 bp, Homo sapien
accacccacctaaagatccgacgca

SEQ ID NO: 3663209 - DNA, 25 bp, Homo sapien
ccacccacctaaagatccgacgcat

SEQ ID NO: 3663210 - DNA, 25 bp, Homo sapien
ccatggtcccattgtgcaggtgggc

SEQ ID NO: 3663211 - DNA, 25 bp, Homo sapien
ggcggtatggggcaccgtcctggac

SEQ ID NO: 3663212 - DNA, 25 bp, Homo sapien
caggtgggcggtatggggcaccgtc

SEQ ID NO: 3663213 - DNA, 25 bp, Homo sapien
tatggggcaccgtcctggactgcgt

SEQ ID NO: 3663214 - DNA, 25 bp, Homo sapien
aaaggcaggcacagatacatccttc

SEQ ID NO: 3663215 - DNA, 25 bp, Homo sapien
taaaggcaggcacagatacatcctt

SEQ ID NO: 3663216 - DNA, 25 bp, Homo sapien
ctaaaggcaggcacagatacatcct

SEQ ID NO: 3663217 - DNA, 25 bp, Homo sapien
ccccaacctcccacactctccaaag

SEQ ID NO: 3663218 - DNA, 25 bp, Homo sapien
cccaacctcccacactctccaaagg

SEQ ID NO: 3663219 - DNA, 25 bp, Homo sapien
aacctcccacactctccaaaggatt

SEQ ID NO: 3663220 - DNA, 25 bp, Homo sapien
ctcccacactctccaaaggattttt

SEQ ID NO: 3663221 - DNA, 25 bp, Homo sapien
catccgcatccatgttgcctgatag

SEQ ID NO: 3663222 - DNA, 25 bp, Homo sapien
tgcctgatagcttcagggccacacg

SEQ ID NO: 3663223 - DNA, 25 bp, Homo sapien
tctgcgccagggctacaggtccctt

SEQ ID NO: 3663224 - DNA, 25 bp, Homo sapien
agtcaacgcactttgcaggcaagca

SEQ ID NO: 3663225 - DNA, 25 bp, Homo sapien
gcagcggattctccaccgacctttt

SEQ ID NO: 3663226 - DNA, 25 bp, Homo sapien
gctcctgcagcggattctccaccga

SEQ ID NO: 3663227 - DNA, 25 bp, Homo sapien
ctgcagcggattctccaccgacctt

SEQ ID NO: 3663228 - DNA, 25 bp, Homo sapien
tcctgcagcggattctccaccgacc

SEQ ID NO: 3663229 - DNA, 25 bp, Homo sapien
taaagtttcttggatgagagttcat

SEQ ID NO: 3663230 - DNA, 25 bp, Homo sapien
tacggtctaaagtttcttggatgag

SEQ ID NO: 3663231 - DNA, 25 bp, Homo sapien
tatacggtctaaagtttcttggatg

SEQ ID NO: 3663232 - DNA, 25 bp, Homo sapien
tctaaagtttcttggatgagagttc

SEQ ID NO: 3663233 - DNA, 25 bp, Homo sapien
ggtaagccagttaggagcacgtcca

SEQ ID NO: 3663234 - DNA, 25 bp, Homo sapien
tggctccgtgggacataaggcccaa

SEQ ID NO: 3663235 - DNA, 25 bp, Homo sapien
gaagggattgctcctccattgagtg

SEQ ID NO: 3663236 - DNA, 25 bp, Homo sapien
gctcctgtggagtaccggtgatgaa

SEQ ID NO: 3663237 - DNA, 25 bp, Homo sapien
gctattggacaatttgaaccctgag

SEQ ID NO: 3663238 - DNA, 25 bp, Homo sapien
agatgctattggacaatttgaaccc

SEQ ID NO: 3663239 - DNA, 25 bp, Homo sapien
tggacaatttgaaccctgagagctg

SEQ ID NO: 3663240 - DNA, 25 bp, Homo sapien
caatttgaaccctgagagctggcca

SEQ ID NO: 3663241 - DNA, 25 bp, Homo sapien
ccatttgtaaggatgcttcctcccc

SEQ ID NO: 3663242 - DNA, 25 bp, Homo sapien
tcctcactcgagtgggtccaggaat

SEQ ID NO: 3663243 - DNA, 25 bp, Homo sapien
ccttcctcactcgagtgggtccagg

SEQ ID NO: 3663244 - DNA, 25 bp, Homo sapien
tgttccatttgtaaggatgcttcct

SEQ ID NO: 3663245 - DNA, 25 bp, Homo sapien
caactgctccgagcaaactctgctt

SEQ ID NO: 3663246 - DNA, 25 bp, Homo sapien
aactgctccgagcaaactctgcttt

SEQ ID NO: 3663247 - DNA, 25 bp, Homo sapien
catgtttacccatgagagcaggaga

SEQ ID NO: 3663248 - DNA, 25 bp, Homo sapien
gatgtgttccaaaccgtcacaatgg

SEQ ID NO: 3663249 - DNA, 25 bp, Homo sapien
cagaggtggcccaatatcacttcca

SEQ ID NO: 3663250 - DNA, 25 bp, Homo sapien
ggagaccggcagagctgtgtcacct

SEQ ID NO: 3663251 - DNA, 25 bp, Homo sapien
atcctcagaggtttagcagaggtca

SEQ ID NO: 3663252 - DNA, 25 bp, Homo sapien
ggtttagcagaggtcaatttgacac

SEQ ID NO: 3663253 - DNA, 25 bp, Homo sapien
gcagaggtcaatttgacactcccca

SEQ ID NO: 3663254 - DNA, 25 bp, Homo sapien
tcagaggtttagcagaggtcaattt

SEQ ID NO: 3663255 - DNA, 25 bp, Homo sapien
tttgccagtagcctccagattggct

SEQ ID NO: 3663256 - DNA, 25 bp, Homo sapien
tctacatctcttgagacaaagtctg

SEQ ID NO: 3663257 - DNA, 25 bp, Homo sapien
tgtgaagtcaccctcatcttttggc

SEQ ID NO: 3663258 - DNA, 25 bp, Homo sapien
tattagtgaggctggattcagttgc

SEQ ID NO: 3663259 - DNA, 25 bp, Homo sapien
gatgggctgagaaacaggaacgact

SEQ ID NO: 3663260 - DNA, 25 bp, Homo sapien
tatcgcgcagatgtgccagatgggc

SEQ ID NO: 3663261 - DNA, 25 bp, Homo sapien
tatcctgtgctagcaacagagcacc

SEQ ID NO: 3663262 - DNA, 25 bp, Homo sapien
tcaagtacgcgagtcactcagcact

SEQ ID NO: 3663263 - DNA, 25 bp, Homo sapien
tttgtcctaaggtcaccagtttgta

SEQ ID NO: 3663264 - DNA, 25 bp, Homo sapien
ttgtcctaaggtcaccagtttgtaa

SEQ ID NO: 3663265 - DNA, 25 bp, Homo sapien
tgtcctaaggtcaccagtttgtaac

SEQ ID NO: 3663266 - DNA, 25 bp, Homo sapien
catactaaaacttttaaggcctatg

SEQ ID NO: 3663267 - DNA, 25 bp, Homo sapien
tcatacatactaaaacttttaaggc

SEQ ID NO: 3663268 - DNA, 25 bp, Homo sapien
cacaggatgatccttggtaactcat

SEQ ID NO: 3663269 - DNA, 25 bp, Homo sapien
aggatgatccttggtaactcataca

SEQ ID NO: 3663270 - DNA, 25 bp, Homo sapien
gcaaagagctactttcactggctgt

SEQ ID NO: 3663271 - DNA, 25 bp, Homo sapien
acaacaaaatggggctgtagtaatg

SEQ ID NO: 3663272 - DNA, 25 bp, Homo sapien
aacaaaatggggctgtagtaatgaa

SEQ ID NO: 3663273 - DNA, 25 bp, Homo sapien
caacaaaatggggctgtagtaatga

SEQ ID NO: 3663274 - DNA, 25 bp, Homo sapien
tgacctggggaagacctttcgcaaa

SEQ ID NO: 3663275 - DNA, 25 bp, Homo sapien
cctttcgcaaaaggggtcagggcag

SEQ ID NO: 3663276 - DNA, 25 bp, Homo sapien
ggtcagggcagtaagctgcgaccag

SEQ ID NO: 3663277 - DNA, 25 bp, Homo sapien
tcagtagtcctgacctggggaagac

SEQ ID NO: 3663278 - DNA, 25 bp, Homo sapien
cattagcaaattgccctcctgagaa

SEQ ID NO: 3663279 - DNA, 25 bp, Homo sapien
tttctgaaggttggctgccagggcc

SEQ ID NO: 3663280 - DNA, 25 bp, Homo sapien
tacacatccagttggtgaattgggt

SEQ ID NO: 3663281 - DNA, 25 bp, Homo sapien
gcaacttctgttgctccattagcaa

SEQ ID NO: 3663282 - DNA, 25 bp, Homo sapien
caataaacatatatgtgtgcatgtg

SEQ ID NO: 3663283 - DNA, 25 bp, Homo sapien
gccgcaataaacatatatgtgtgca

SEQ ID NO: 3663284 - DNA, 25 bp, Homo sapien
ttgacccaagcctaagcagaaagca

SEQ ID NO: 3663285 - DNA, 25 bp, Homo sapien
cactcagcacccagcggaattctag

SEQ ID NO: 3663286 - DNA, 25 bp, Homo sapien
gccattgttccaaacccgcaggtgg

SEQ ID NO: 3663287 - DNA, 25 bp, Homo sapien
gcagaaagcacctcgaggcagagat

SEQ ID NO: 3663288 - DNA, 25 bp, Homo sapien
gtcttcttgtaagcgctttgtacat

SEQ ID NO: 3663289 - DNA, 25 bp, Homo sapien
ttgtaagcgctttgtacatttcagt

SEQ ID NO: 3663290 - DNA, 25 bp, Homo sapien
ttgtcttcttgtaagcgctttgtac

SEQ ID NO: 3663291 - DNA, 25 bp, Homo sapien
ttcttgtaagcgctttgtacatttc

SEQ ID NO: 3663292 - DNA, 25 bp, Homo sapien
gacacttggtcacccgctgtctgaa

SEQ ID NO: 3663293 - DNA, 25 bp, Homo sapien
gatgctgccctgtgcaattgtctcc

SEQ ID NO: 3663294 - DNA, 25 bp, Homo sapien
ctgtccttccacaaactgacacttg

SEQ ID NO: 3663295 - DNA, 25 bp, Homo sapien
ccacggtgacatccacgggtggcag

SEQ ID NO: 3663296 - DNA, 25 bp, Homo sapien
ttctggaagatcacatcctccagca

SEQ ID NO: 3663297 - DNA, 25 bp, Homo sapien
tccagcagcaggattggaaacaatc

SEQ ID NO: 3663298 - DNA, 25 bp, Homo sapien
cccagtttaggttctggaagatcac

SEQ ID NO: 3663299 - DNA, 25 bp, Homo sapien
ctcttagtccccaagcccagtttag

SEQ ID NO: 3663300 - DNA, 25 bp, Homo sapien
tgataccattcccatgcaactgtct

SEQ ID NO: 3663301 - DNA, 25 bp, Homo sapien
ggatagtcaactccctcacatgata

SEQ ID NO: 3663302 - DNA, 25 bp, Homo sapien
cattcccatgcaactgtctaccatg

SEQ ID NO: 3663303 - DNA, 25 bp, Homo sapien
ctccagaactacttcgaagcagggg

SEQ ID NO: 3663304 - DNA, 25 bp, Homo sapien
ccccagctgagtaacatccacttca

SEQ ID NO: 3663305 - DNA, 25 bp, Homo sapien
gtaacatccacttcagatttaagca

SEQ ID NO: 3663306 - DNA, 25 bp, Homo sapien
cagatttaagcaagatgattatcat

SEQ ID NO: 3663307 - DNA, 25 bp, Homo sapien
ccacttcagatttaagcaagatgat

SEQ ID NO: 3663308 - DNA, 25 bp, Homo sapien
taaagggttaggcttcgtggactga

SEQ ID NO: 3663309 - DNA, 25 bp, Homo sapien
aagggcaccccaaatatctatgatg

SEQ ID NO: 3663310 - DNA, 25 bp, Homo sapien
tgaagggcaccccaaatatctatga

SEQ ID NO: 3663311 - DNA, 25 bp, Homo sapien
ggcaccccaaatatctatgatgagg

SEQ ID NO: 3663312 - DNA, 25 bp, Homo sapien
caaatatctatgatgaggtattaca

SEQ ID NO: 3663313 - DNA, 25 bp, Homo sapien
gattcctggtgaaataggatttcct

SEQ ID NO: 3663314 - DNA, 25 bp, Homo sapien
cacatatcctaatgtcagactgcat

SEQ ID NO: 3663315 - DNA, 25 bp, Homo sapien
tggattcctggtgaaataggatttc

SEQ ID NO: 3663316 - DNA, 25 bp, Homo sapien
ggctgtattcttcacatatcctaat

SEQ ID NO: 3663317 - DNA, 25 bp, Homo sapien
acctcttcatttttaagcccttgca

SEQ ID NO: 3663318 - DNA, 25 bp, Homo sapien
ctcttcatttttaagcccttgcatt

SEQ ID NO: 3663319 - DNA, 25 bp, Homo sapien
cttcatttttaagcccttgcatttc

SEQ ID NO: 3663320 - DNA, 25 bp, Homo sapien
cctcttcatttttaagcccttgcat

SEQ ID NO: 3663321 - DNA, 25 bp, Homo sapien
ctggatttctgtcccaaatatgaaa

SEQ ID NO: 3663322 - DNA, 25 bp, Homo sapien
tatgaaattgtcatgcttgactttg

SEQ ID NO: 3663323 - DNA, 25 bp, Homo sapien
aattgtcatgcttgactttggccat

SEQ ID NO: 3663324 - DNA, 25 bp, Homo sapien
tttctgtcccaaatatgaaattgtc

SEQ ID NO: 3663325 - DNA, 25 bp, Homo sapien
caccctccgcgaaaagctccttggt

SEQ ID NO: 3663326 - DNA, 25 bp, Homo sapien
gggtccaggcccacatgctcaggag

SEQ ID NO: 3663327 - DNA, 25 bp, Homo sapien
gccttcccgtatctcctgggtctgg

SEQ ID NO: 3663328 - DNA, 25 bp, Homo sapien
ggtgactcctctgtgcgtgccttcc

SEQ ID NO: 3663329 - DNA, 25 bp, Homo sapien
taaagagcatctgaattggagggaa

SEQ ID NO: 3663330 - DNA, 25 bp, Homo sapien
tgcagtatacaaaatcgtcctacaa

SEQ ID NO: 3663331 - DNA, 25 bp, Homo sapien
ttatatgccaatagcagacaatttg

SEQ ID NO: 3663332 - DNA, 25 bp, Homo sapien
gaggactccatcaaaacactattag

SEQ ID NO: 3663333 - DNA, 25 bp, Homo sapien
acagctggactagggcaaatttcct

SEQ ID NO: 3663334 - DNA, 25 bp, Homo sapien
tatagggtagagatgtccagtcaaa

SEQ ID NO: 3663335 - DNA, 25 bp, Homo sapien
tagggtagagatgtccagtcaaatt

SEQ ID NO: 3663336 - DNA, 25 bp, Homo sapien
gtcacaaacagctggactagggcaa

SEQ ID NO: 3663337 - DNA, 25 bp, Homo sapien
acagcagcagccattacaacaacag

SEQ ID NO: 3663338 - DNA, 25 bp, Homo sapien
attggtaccactcccctcgatgaag

SEQ ID NO: 3663339 - DNA, 25 bp, Homo sapien
aatgcccagagatgggagttaggca

SEQ ID NO: 3663340 - DNA, 25 bp, Homo sapien
tacatattagatagccaaggattca

SEQ ID NO: 3663341 - DNA, 25 bp, Homo sapien
cccacaaagcgagcatcagaagcca

SEQ ID NO: 3663342 - DNA, 25 bp, Homo sapien
cgagcatcagaagccagttcttgaa

SEQ ID NO: 3663343 - DNA, 25 bp, Homo sapien
cagttcttgaaaattccgattcagg

SEQ ID NO: 3663344 - DNA, 25 bp, Homo sapien
tgaaaattccgattcaggtccagct

SEQ ID NO: 3663345 - DNA, 25 bp, Homo sapien
ctgcaaatgttaggaccacacctgg

SEQ ID NO: 3663346 - DNA, 25 bp, Homo sapien
tattccatggaaaacgtaagactat

SEQ ID NO: 3663347 - DNA, 25 bp, Homo sapien
tggaaaacgtaagactattggccca

SEQ ID NO: 3663348 - DNA, 25 bp, Homo sapien
cgtaagactattggcccaagtccat

SEQ ID NO: 3663349 - DNA, 25 bp, Homo sapien
catggaaaacgtaagactattggcc

SEQ ID NO: 3663350 - DNA, 25 bp, Homo sapien
tgtatggggtcacatccaggtaact

SEQ ID NO: 3663351 - DNA, 25 bp, Homo sapien
tatgggtaaggatgtatggggtcac

SEQ ID NO: 3663352 - DNA, 25 bp, Homo sapien
aggtaactgtccagaataagtctca

SEQ ID NO: 3663353 - DNA, 25 bp, Homo sapien
ggtaactgtccagaataagtctcag

SEQ ID NO: 3663354 - DNA, 25 bp, Homo sapien
aatgttgtgtgtgttagtggcatga

SEQ ID NO: 3663355 - DNA, 25 bp, Homo sapien
tgttagtggcatgagttggtaaggg

SEQ ID NO: 3663356 - DNA, 25 bp, Homo sapien
ttggcagggtcataaacgtctacgt

SEQ ID NO: 3663357 - DNA, 25 bp, Homo sapien
taaggggccattaggagtgatgacc

SEQ ID NO: 3663358 - DNA, 25 bp, Homo sapien
acagagcctgcggacagtgccagcg

SEQ ID NO: 3663359 - DNA, 25 bp, Homo sapien
cagtgccagcggtattgcagagcca

SEQ ID NO: 3663360 - DNA, 25 bp, Homo sapien
ccagcggtattgcagagccagcctt

SEQ ID NO: 3663361 - DNA, 25 bp, Homo sapien
gcctgcggacagtgccagcggtatt

SEQ ID NO: 3663362 - DNA, 25 bp, Homo sapien
tgatttcaaataaacccttggaatc

SEQ ID NO: 3663363 - DNA, 25 bp, Homo sapien
ttcagagtctcccttgactggtagt

SEQ ID NO: 3663364 - DNA, 25 bp, Homo sapien
gagtctcccttgactggtagttgac

SEQ ID NO: 3663365 - DNA, 25 bp, Homo sapien
ggtagttgactaagagatgtctgat

SEQ ID NO: 3663366 - DNA, 25 bp, Homo sapien
ccttgactggtagttgactaagaga

SEQ ID NO: 3663367 - DNA, 25 bp, Homo sapien
caaaccctttgtactatacccattg

SEQ ID NO: 3663368 - DNA, 25 bp, Homo sapien
gaaactccagttttacaaggtcata

SEQ ID NO: 3663369 - DNA, 25 bp, Homo sapien
atgtgtccaggcctacagactccag

SEQ ID NO: 3663370 - DNA, 25 bp, Homo sapien
tccagactcagaaacgaatcttcag

SEQ ID NO: 3663371 - DNA, 25 bp, Homo sapien
tcttgagttatagcaatatggattc

SEQ ID NO: 3663372 - DNA, 25 bp, Homo sapien
gaccacttttatggtcctgcttcca

SEQ ID NO: 3663373 - DNA, 25 bp, Homo sapien
tcatctccaacctaggcattgctct

SEQ ID NO: 3663374 - DNA, 25 bp, Homo sapien
cacttttatggtcctgcttccagaa

SEQ ID NO: 3663375 - DNA, 25 bp, Homo sapien
tgaggttcccctgccagatgcacag

SEQ ID NO: 3663376 - DNA, 25 bp, Homo sapien
gcctctgatccgtaatctgtctgct

SEQ ID NO: 3663377 - DNA, 25 bp, Homo sapien
tcctgactgaggttcccctgccaga

SEQ ID NO: 3663378 - DNA, 25 bp, Homo sapien
gcacaggagcctctgatccgtaatc

SEQ ID NO: 3663379 - DNA, 25 bp, Homo sapien
ctggggcaggcatctcaactgccag

SEQ ID NO: 3663380 - DNA, 25 bp, Homo sapien
ggcatctcaactgccaggaaaaaaa

SEQ ID NO: 3663381 - DNA, 25 bp, Homo sapien
tggggcaggcatctcaactgccagg

SEQ ID NO: 3663382 - DNA, 25 bp, Homo sapien
actggggcaggcatctcaactgcca

SEQ ID NO: 3663383 - DNA, 25 bp, Homo sapien
tcaagcaggccaagcacacactttg

SEQ ID NO: 3663384 - DNA, 25 bp, Homo sapien
gaattttgtgtagccctcgctaagg

SEQ ID NO: 3663385 - DNA, 25 bp, Homo sapien
ttgaattttgtgtagccctcgctaa

SEQ ID NO: 3663386 - DNA, 25 bp, Homo sapien
aagcaggccaagcacacactttgaa

SEQ ID NO: 3663387 - DNA, 25 bp, Homo sapien
tctaataggaggactccttgtaata

SEQ ID NO: 3663388 - DNA, 25 bp, Homo sapien
aatctaataggaggactccttgtaa

SEQ ID NO: 3663389 - DNA, 25 bp, Homo sapien
taatctaataggaggactccttgta

SEQ ID NO: 3663390 - DNA, 25 bp, Homo sapien
attaatctaataggaggactccttg

SEQ ID NO: 3663391 - DNA, 25 bp, Homo sapien
gagttccaggttgcaaaagaggact

SEQ ID NO: 3663392 - DNA, 25 bp, Homo sapien
ttgcacctatccacaagtctttgtc

SEQ ID NO: 3663393 - DNA, 25 bp, Homo sapien
tgagttccaggttgcaaaagaggac

SEQ ID NO: 3663394 - DNA, 25 bp, Homo sapien
ttccaggttgcaaaagaggacttat

SEQ ID NO: 3663395 - DNA, 25 bp, Homo sapien
aaggtcactttagatcctctaaaga

SEQ ID NO: 3663396 - DNA, 25 bp, Homo sapien
ccaaatggaggatccaggtaagctg

SEQ ID NO: 3663397 - DNA, 25 bp, Homo sapien
tcgacaagggttgactaagaagcca

SEQ ID NO: 3663398 - DNA, 25 bp, Homo sapien
gtgggatttacagggaagtcgacaa

SEQ ID NO: 3663399 - DNA, 25 bp, Homo sapien
tcaggtataaaggacaatgtctgtg

SEQ ID NO: 3663400 - DNA, 25 bp, Homo sapien
ttggaataaaaggtgatctcctacg

SEQ ID NO: 3663401 - DNA, 25 bp, Homo sapien
tccagacttgcgcaatggctgggcc

SEQ ID NO: 3663402 - DNA, 25 bp, Homo sapien
tctgtgtttcccctaatgtttccat

SEQ ID NO: 3663403 - DNA, 25 bp, Homo sapien
ttaatattcccactagttgctggag

SEQ ID NO: 3663404 - DNA, 25 bp, Homo sapien
gtctgaaagaatggacgagacacca

SEQ ID NO: 3663405 - DNA, 25 bp, Homo sapien
gaaagaatggacgagacaccaccat

SEQ ID NO: 3663406 - DNA, 25 bp, Homo sapien
tggacgagacaccaccatcagtacc

SEQ ID NO: 3663407 - DNA, 25 bp, Homo sapien
gaatggacgagacaccaccatcagt

SEQ ID NO: 3663408 - DNA, 25 bp, Homo sapien
acctattttgcccacaagacagttg

SEQ ID NO: 3663409 - DNA, 25 bp, Homo sapien
gcccacaagacagttggatgccatg

SEQ ID NO: 3663410 - DNA, 25 bp, Homo sapien
acaagacagttggatgccatgtgac

SEQ ID NO: 3663411 - DNA, 25 bp, Homo sapien
tccatgacctattttgcccacaaga

SEQ ID NO: 3663412 - DNA, 25 bp, Homo sapien
cctcaaaaacagctaaaggagtcat

SEQ ID NO: 3663413 - DNA, 25 bp, Homo sapien
atacaaaggcacagccccgtagcga

SEQ ID NO: 3663414 - DNA, 25 bp, Homo sapien
gtagcgagtgacacccggcatccca

SEQ ID NO: 3663415 - DNA, 25 bp, Homo sapien
aggttatctatgaaactcctgtggg

SEQ ID NO: 3663416 - DNA, 25 bp, Homo sapien
tgtccagccttataaatgcatgatc

SEQ ID NO: 3663417 - DNA, 25 bp, Homo sapien
ttcctgtccagccttataaatgcat

SEQ ID NO: 3663418 - DNA, 25 bp, Homo sapien
ccttaaattcctgtccagccttata

SEQ ID NO: 3663419 - DNA, 25 bp, Homo sapien
gtggccccttaaattcctgtccagc

SEQ ID NO: 3663420 - DNA, 25 bp, Homo sapien
ctttctggtcacaagtgcggtcagg

SEQ ID NO: 3663421 - DNA, 25 bp, Homo sapien
tggaggcagccttgtggatccactt

SEQ ID NO: 3663422 - DNA, 25 bp, Homo sapien
gaactgaaatcccatatcctgctga

SEQ ID NO: 3663423 - DNA, 25 bp, Homo sapien
tcccagggacacgagtgtggacaag

SEQ ID NO: 3663424 - DNA, 25 bp, Homo sapien
ccggtagaaagagaatgggcctgcc

SEQ ID NO: 3663425 - DNA, 25 bp, Homo sapien
ctggactctgagttttcttgctccc

SEQ ID NO: 3663426 - DNA, 25 bp, Homo sapien
tcacatcccgcttggcccctttttc

SEQ ID NO: 3663427 - DNA, 25 bp, Homo sapien
ttgctcccaggggagtatatttcac

SEQ ID NO: 3663428 - DNA, 25 bp, Homo sapien
ccacatcccttgcagctgtgacata

SEQ ID NO: 3663429 - DNA, 25 bp, Homo sapien
gctgtgacataatcttctgcttcat

SEQ ID NO: 3663430 - DNA, 25 bp, Homo sapien
gcagctgtgacataatcttctgctt

SEQ ID NO: 3663431 - DNA, 25 bp, Homo sapien
agcatttggtcccacatcccttgca

SEQ ID NO: 3663432 - DNA, 25 bp, Homo sapien
tgctttaggtgcagaggccttcagg

SEQ ID NO: 3663433 - DNA, 25 bp, Homo sapien
ccttcagggagaacagccagttgga

SEQ ID NO: 3663434 - DNA, 25 bp, Homo sapien
gagatgctgagacccctggaacagt

SEQ ID NO: 3663435 - DNA, 25 bp, Homo sapien
ggtagagcttgtgaaccacggtaac

SEQ ID NO: 3663436 - DNA, 25 bp, Homo sapien
ttgtgtaagatatatttgaagtttc

SEQ ID NO: 3663437 - DNA, 25 bp, Homo sapien
taaaattaccatgattgctttatgt

SEQ ID NO: 3663438 - DNA, 25 bp, Homo sapien
tgccttttgtccattaatcagcaaa

SEQ ID NO: 3663439 - DNA, 25 bp, Homo sapien
tgtacaaacaagattgtgtaagata

SEQ ID NO: 3663440 - DNA, 25 bp, Homo sapien
ttgttggtttatggacatactgccc

SEQ ID NO: 3663441 - DNA, 25 bp, Homo sapien
ggtttatggacatactgccctttca

SEQ ID NO: 3663442 - DNA, 25 bp, Homo sapien
tatggacatactgccctttcatttt

SEQ ID NO: 3663443 - DNA, 25 bp, Homo sapien
gttggtttatggacatactgccctt

SEQ ID NO: 3663444 - DNA, 25 bp, Homo sapien
catcattaggctttatgactgggtg

SEQ ID NO: 3663445 - DNA, 25 bp, Homo sapien
aaatgcacagctgaatattgaactg

SEQ ID NO: 3663446 - DNA, 25 bp, Homo sapien
ggcaaggtgacaaaaagctattcat

SEQ ID NO: 3663447 - DNA, 25 bp, Homo sapien
gaatattgaactggaagcagcacat

SEQ ID NO: 3663448 - DNA, 25 bp, Homo sapien
gagaagacaggaccgtctctggcaa

SEQ ID NO: 3663449 - DNA, 25 bp, Homo sapien
caaaagcacactgccttgttgattg

SEQ ID NO: 3663450 - DNA, 25 bp, Homo sapien
gattgtgcattgtagcagtaatgta

SEQ ID NO: 3663451 - DNA, 25 bp, Homo sapien
ctatcatttgggacgcagagggaga

SEQ ID NO: 3663452 - DNA, 25 bp, Homo sapien
ttggccacggctgatccccttccta

SEQ ID NO: 3663453 - DNA, 25 bp, Homo sapien
ttccagtacgggtcctgcttggcca

SEQ ID NO: 3663454 - DNA, 25 bp, Homo sapien
ccaggacagccactgaagtgacgca

SEQ ID NO: 3663455 - DNA, 25 bp, Homo sapien
ctctgcagggttccagtacgggtcc

SEQ ID NO: 3663456 - DNA, 25 bp, Homo sapien
tctcttcctgcgttcccaaattgta

SEQ ID NO: 3663457 - DNA, 25 bp, Homo sapien
tgtctttctcttcctgcgttcccaa

SEQ ID NO: 3663458 - DNA, 25 bp, Homo sapien
tgcgttcccaaattgtaaactctta

SEQ ID NO: 3663459 - DNA, 25 bp, Homo sapien
aattgtaaactcttataatccttca

SEQ ID NO: 3663460 - DNA, 25 bp, Homo sapien
tagcttccccatcggatgagtcggt

SEQ ID NO: 3663461 - DNA, 25 bp, Homo sapien
gcagctctagcttccccatcggatg

SEQ ID NO: 3663462 - DNA, 25 bp, Homo sapien
ggtaatgaaacccttgctgaagtga

SEQ ID NO: 3663463 - DNA, 25 bp, Homo sapien
gaaagcaggtagcacgcttcccaca

SEQ ID NO: 3663464 - DNA, 25 bp, Homo sapien
gagagcacagctagaaggaatccct

SEQ ID NO: 3663465 - DNA, 25 bp, Homo sapien
ttgtaaggcagtggcccacagaagg

SEQ ID NO: 3663466 - DNA, 25 bp, Homo sapien
tcagttgtaaggcagtggcccacag

SEQ ID NO: 3663467 - DNA, 25 bp, Homo sapien
tccaaaggtactctgggccttgaca

SEQ ID NO: 3663468 - DNA, 25 bp, Homo sapien
tccttctcgtgcactccacacgggc

SEQ ID NO: 3663469 - DNA, 25 bp, Homo sapien
tggagttttccttctcgtgcactcc

SEQ ID NO: 3663470 - DNA, 25 bp, Homo sapien
catggagttttccttctcgtgcact

SEQ ID NO: 3663471 - DNA, 25 bp, Homo sapien
agttttccttctcgtgcactccaca

SEQ ID NO: 3663472 - DNA, 25 bp, Homo sapien
ctttgcatatcccacaatgatagtt

SEQ ID NO: 3663473 - DNA, 25 bp, Homo sapien
ttgcatatcccacaatgatagttaa

SEQ ID NO: 3663474 - DNA, 25 bp, Homo sapien
tgctcctttgcatatcccacaatga

SEQ ID NO: 3663475 - DNA, 25 bp, Homo sapien
tcctttgcatatcccacaatgatag

SEQ ID NO: 3663476 - DNA, 25 bp, Homo sapien
ttttctcagcgcttctcgtgtccct

SEQ ID NO: 3663477 - DNA, 25 bp, Homo sapien
catacagatatgtttttctcagcgc

SEQ ID NO: 3663478 - DNA, 25 bp, Homo sapien
atccacaccacccatggctttaatt

SEQ ID NO: 3663479 - DNA, 25 bp, Homo sapien
ggctttaattatcaccttataccag

SEQ ID NO: 3663480 - DNA, 25 bp, Homo sapien
ttacttccaccaactttgccggcat

SEQ ID NO: 3663481 - DNA, 25 bp, Homo sapien
ttgctcttacttccaccaactttgc

SEQ ID NO: 3663482 - DNA, 25 bp, Homo sapien
gcattgctcttacttccaccaactt

SEQ ID NO: 3663483 - DNA, 25 bp, Homo sapien
cggcattgctcttacttccaccaac

SEQ ID NO: 3663484 - DNA, 25 bp, Homo sapien
cagagcactcaacactcggtagcac

SEQ ID NO: 3663485 - DNA, 25 bp, Homo sapien
gcatctttatcagggaccgcccacg

SEQ ID NO: 3663486 - DNA, 25 bp, Homo sapien
ttttgcatctttatcagggaccgcc

SEQ ID NO: 3663487 - DNA, 25 bp, Homo sapien
tttgcatctttatcagggaccgccc

SEQ ID NO: 3663488 - DNA, 25 bp, Homo sapien
ttgcatctttatcagggaccgccca

SEQ ID NO: 3663489 - DNA, 25 bp, Homo sapien
tgtctcactaatactgtttcatgtg

SEQ ID NO: 3663490 - DNA, 25 bp, Homo sapien
cactaatactgtttcatgtgcagta

SEQ ID NO: 3663491 - DNA, 25 bp, Homo sapien
ttcatgtgcagtaatgacgtaagtg

SEQ ID NO: 3663492 - DNA, 25 bp, Homo sapien
tactgtttcatgtgcagtaatgacg

SEQ ID NO: 3663493 - DNA, 25 bp, Homo sapien
ccacttcagggatggcagttggcaa

SEQ ID NO: 3663494 - DNA, 25 bp, Homo sapien
ctcacagcaggagtatgaagtgagc

SEQ ID NO: 3663495 - DNA, 25 bp, Homo sapien
cttcagggatggcagttggcaaatc

SEQ ID NO: 3663496 - DNA, 25 bp, Homo sapien
gctccaaggtatctcttcttccact

SEQ ID NO: 3663497 - DNA, 25 bp, Homo sapien
aagaaacaaccaaatctgcaatctc

SEQ ID NO: 3663498 - DNA, 25 bp, Homo sapien
cattgtgcttgaaagggtgtagtgt

SEQ ID NO: 3663499 - DNA, 25 bp, Homo sapien
tagtgtgtgaattgttggactgtca

SEQ ID NO: 3663500 - DNA, 25 bp, Homo sapien
ctgttcggcctctttcacggccatt

SEQ ID NO: 3663501 - DNA, 25 bp, Homo sapien
gaattgttggactgtcactctgcag

SEQ ID NO: 3663502 - DNA, 25 bp, Homo sapien
ataatgctttttcacaaggaaacac

SEQ ID NO: 3663503 - DNA, 25 bp, Homo sapien
gtgcatttcagcaactgtaggttgt

SEQ ID NO: 3663504 - DNA, 25 bp, Homo sapien
gacaccagctccgatacatgaaaaa

SEQ ID NO: 3663505 - DNA, 25 bp, Homo sapien
aactgtaggttgtcaacactaagga

SEQ ID NO: 3663506 - DNA, 25 bp, Homo sapien
gaaggaggccaaaacaacagacttg

SEQ ID NO: 3663507 - DNA, 25 bp, Homo sapien
tgtcacagatatggtcgctgggctt

SEQ ID NO: 3663508 - DNA, 25 bp, Homo sapien
tctgtgcagtagatatttggtgaat

SEQ ID NO: 3663509 - DNA, 25 bp, Homo sapien
gccatctatagcacagaaggaggcc

SEQ ID NO: 3663510 - DNA, 25 bp, Homo sapien
catcctaagtgaggcagcaaatgcc

SEQ ID NO: 3663511 - DNA, 25 bp, Homo sapien
caggacctgtgcgaccctgagatac

SEQ ID NO: 3663512 - DNA, 25 bp, Homo sapien
ccacttcgagtatggcccaggtgag

SEQ ID NO: 3663513 - DNA, 25 bp, Homo sapien
aggagattggcagcttcttatgagg

SEQ ID NO: 3663514 - DNA, 25 bp, Homo sapien
tgatgccactttccacacttgaagg

SEQ ID NO: 3663515 - DNA, 25 bp, Homo sapien
gatgcacatgatctccagtgatgcc

SEQ ID NO: 3663516 - DNA, 25 bp, Homo sapien
tcactaccacgaggatctgactgtg

SEQ ID NO: 3663517 - DNA, 25 bp, Homo sapien
gaagggatttcctcgaagatacatc

SEQ ID NO: 3663518 - DNA, 25 bp, Homo sapien
tctaactagccccagtattttgtca

SEQ ID NO: 3663519 - DNA, 25 bp, Homo sapien
tcttctgaatagtgaaggcgcaggt

SEQ ID NO: 3663520 - DNA, 25 bp, Homo sapien
tatgccgttgggtagacagaaacct

SEQ ID NO: 3663521 - DNA, 25 bp, Homo sapien
ccacgttggtaatgggaaattctca

SEQ ID NO: 3663522 - DNA, 25 bp, Homo sapien
gccaggtgtcccagttgcctctgag

SEQ ID NO: 3663523 - DNA, 25 bp, Homo sapien
tcagaagacccatgagagggcatct

SEQ ID NO: 3663524 - DNA, 25 bp, Homo sapien
cagccaggtgtcccagttgcctctg

SEQ ID NO: 3663525 - DNA, 25 bp, Homo sapien
aatcagaagacccatgagagggcat

SEQ ID NO: 3663526 - DNA, 25 bp, Homo sapien
tcagcagggtctggtccaggccctc

SEQ ID NO: 3663527 - DNA, 25 bp, Homo sapien
agcagggtctggtccaggccctctc

SEQ ID NO: 3663528 - DNA, 25 bp, Homo sapien
cagcagggtctggtccaggccctct

SEQ ID NO: 3663529 - DNA, 25 bp, Homo sapien
cagggtctggtccaggccctctcat

SEQ ID NO: 3663530 - DNA, 25 bp, Homo sapien
gaatcttttgtgcggccaccctggg

SEQ ID NO: 3663531 - DNA, 25 bp, Homo sapien
ggaatcttttgtgcggccaccctgg

SEQ ID NO: 3663532 - DNA, 25 bp, Homo sapien
gggaatcttttgtgcggccaccctg

SEQ ID NO: 3663533 - DNA, 25 bp, Homo sapien
tgggggaatcttttgtgcggccacc

SEQ ID NO: 3663534 - DNA, 25 bp, Homo sapien
agcaccaggaaacgaataaatagtc

SEQ ID NO: 3663535 - DNA, 25 bp, Homo sapien
gagcaccaggaaacgaataaatagt

SEQ ID NO: 3663536 - DNA, 25 bp, Homo sapien
ctagagcaccaggaaacgaataaat

SEQ ID NO: 3663537 - DNA, 25 bp, Homo sapien
agagcaccaggaaacgaataaatag

SEQ ID NO: 3663538 - DNA, 25 bp, Homo sapien
tcccagaatagccagtcagctctct

SEQ ID NO: 3663539 - DNA, 25 bp, Homo sapien
cttgaatggaaaatcacctgatatt

SEQ ID NO: 3663540 - DNA, 25 bp, Homo sapien
gataggacttgaatggaaaatcacc

SEQ ID NO: 3663541 - DNA, 25 bp, Homo sapien
tgaatggaaaatcacctgatattac

SEQ ID NO: 3663542 - DNA, 25 bp, Homo sapien
cagataggacttgaatggaaaatca

SEQ ID NO: 3663543 - DNA, 25 bp, Homo sapien
agaaaattctgcagttgttcttgag

SEQ ID NO: 3663544 - DNA, 25 bp, Homo sapien
gaaaattctgcagttgttcttgagg

SEQ ID NO: 3663545 - DNA, 25 bp, Homo sapien
aaattctgcagttgttcttgaggtg

SEQ ID NO: 3663546 - DNA, 25 bp, Homo sapien
aaaattctgcagttgttcttgaggt

SEQ ID NO: 3663547 - DNA, 25 bp, Homo sapien
ctgaaggctcctcaattctgaggaa

SEQ ID NO: 3663548 - DNA, 25 bp, Homo sapien
aattctgaggaagtttgttccagcc

SEQ ID NO: 3663549 - DNA, 25 bp, Homo sapien
tgaggaagtttgttccagccagttt

SEQ ID NO: 3663550 - DNA, 25 bp, Homo sapien
aggagcacgatggtaaaaggccaga

SEQ ID NO: 3663551 - DNA, 25 bp, Homo sapien
gcctgagggtcagcaaggccagaac

SEQ ID NO: 3663552 - DNA, 25 bp, Homo sapien
agtaagggtgctgcgggcctgaggg

SEQ ID NO: 3663553 - DNA, 25 bp, Homo sapien
gctcctcagagcattcggggaccag

SEQ ID NO: 3663554 - DNA, 25 bp, Homo sapien
tctgggtgcagtaagggtgctgcgg

SEQ ID NO: 3663555 - DNA, 25 bp, Homo sapien
tagggcagtctagtgggtctacagc

SEQ ID NO: 3663556 - DNA, 25 bp, Homo sapien
ccctctagtagaaaagctgcccaca

SEQ ID NO: 3663557 - DNA, 25 bp, Homo sapien
gagactttctggacgcagactgaga

SEQ ID NO: 3663558 - DNA, 25 bp, Homo sapien
gcatccaatggtgtcccacatcagg

SEQ ID NO: 3663559 - DNA, 25 bp, Homo sapien
ggaaatgctgcaaagaatttctcac

SEQ ID NO: 3663560 - DNA, 25 bp, Homo sapien
tgtagatccaatgtgactgcaatgt

SEQ ID NO: 3663561 - DNA, 25 bp, Homo sapien
tcagtgtagatccaatgtgactgca

SEQ ID NO: 3663562 - DNA, 25 bp, Homo sapien
tgttaattcagtgtagatccaatgt

SEQ ID NO: 3663563 - DNA, 25 bp, Homo sapien
tccaatgtgactgcaatgtaagaat

SEQ ID NO: 3663564 - DNA, 25 bp, Homo sapien
tcaccctcctctggcggtccttcca

SEQ ID NO: 3663565 - DNA, 25 bp, Homo sapien
cgtcttatcccttggctgagcaaag

SEQ ID NO: 3663566 - DNA, 25 bp, Homo sapien
tctttgcccgtcttatcccttggct

SEQ ID NO: 3663567 - DNA, 25 bp, Homo sapien
tctgaatgtcctctttgcccgtctt

SEQ ID NO: 3663568 - DNA, 25 bp, Homo sapien
tgggatccggtgtgccctcaccgct

SEQ ID NO: 3663569 - DNA, 25 bp, Homo sapien
cctcaccgctctagcggtggctggg

SEQ ID NO: 3663570 - DNA, 25 bp, Homo sapien
ggtgtgccctcaccgctctagcggt

SEQ ID NO: 3663571 - DNA, 25 bp, Homo sapien
gcagatctgggatccggtgtgccct

SEQ ID NO: 3663572 - DNA, 25 bp, Homo sapien
gttgtctttgaaaaggaaagcaatc

SEQ ID NO: 3663573 - DNA, 25 bp, Homo sapien
ttgtctttgaaaaggaaagcaatca

SEQ ID NO: 3663574 - DNA, 25 bp, Homo sapien
tgtctttgaaaaggaaagcaatcac

SEQ ID NO: 3663575 - DNA, 25 bp, Homo sapien
ggaccaggccacgttctacgataag

SEQ ID NO: 3663576 - DNA, 25 bp, Homo sapien
aatacatggcccctgaggtggtggt

SEQ ID NO: 3663577 - DNA, 25 bp, Homo sapien
gaatttcctgacaaagactgggcac

SEQ ID NO: 3663578 - DNA, 25 bp, Homo sapien
tacatcatgctgagtggctacctgc

SEQ ID NO: 3663579 - DNA, 25 bp, Homo sapien
ataatgatatgagaagataaagaca

SEQ ID NO: 3663580 - DNA, 25 bp, Homo sapien
tcataatgatatgagaagataaaga

SEQ ID NO: 3663581 - DNA, 25 bp, Homo sapien
ctcataatgatatgagaagataaag

SEQ ID NO: 3663582 - DNA, 25 bp, Homo sapien
cataatgatatgagaagataaagac

SEQ ID NO: 3663583 - DNA, 25 bp, Homo sapien
ctgagaagtaacagcagcaattccc

SEQ ID NO: 3663584 - DNA, 25 bp, Homo sapien
gagaagtaacagcagcaattcccca

SEQ ID NO: 3663585 - DNA, 25 bp, Homo sapien
gtaacagcagcaattccccagtcat

SEQ ID NO: 3663586 - DNA, 25 bp, Homo sapien
gaagtaacagcagcaattccccagt

SEQ ID NO: 3663587 - DNA, 25 bp, Homo sapien
gggcttcgccaagaactgagaccat

SEQ ID NO: 3663588 - DNA, 25 bp, Homo sapien
tgacagtgctcgaaaacatcgcaga

SEQ ID NO: 3663589 - DNA, 25 bp, Homo sapien
tttgcaagcagcagagattgaccga

SEQ ID NO: 3663590 - DNA, 25 bp, Homo sapien
gattgaccgagctactgagaatata

SEQ ID NO: 3663591 - DNA, 25 bp, Homo sapien
acatgaccatgagtttttgagctaa

SEQ ID NO: 3663592 - DNA, 25 bp, Homo sapien
gcaatattgcagaggaaacatgact

SEQ ID NO: 3663593 - DNA, 25 bp, Homo sapien
catgactggtctgagaaatgaatat

SEQ ID NO: 3663594 - DNA, 25 bp, Homo sapien
ctgtagaagcaatattgcagaggaa

SEQ ID NO: 3663595 - DNA, 25 bp, Homo sapien
gctgagaatttctatcattaactga

SEQ ID NO: 3663596 - DNA, 25 bp, Homo sapien
gagtcaatgttcatcgaacgacaat

SEQ ID NO: 3663597 - DNA, 25 bp, Homo sapien
gaacgacaatttatcacatggctga

SEQ ID NO: 3663598 - DNA, 25 bp, Homo sapien
agcgcaggccgccttcctagtgaac

SEQ ID NO: 3663599 - DNA, 25 bp, Homo sapien
aaccctcctactgagacccgcacgg

SEQ ID NO: 3663600 - DNA, 25 bp, Homo sapien
tcctttagtgtgaagaggcgtttcc

SEQ ID NO: 3663601 - DNA, 25 bp, Homo sapien
ttcctttagtgtgaagaggcgtttc

SEQ ID NO: 3663602 - DNA, 25 bp, Homo sapien
ttcttcctttagtgtgaagaggcgt

SEQ ID NO: 3663603 - DNA, 25 bp, Homo sapien
tcttcctttagtgtgaagaggcgtt

SEQ ID NO: 3663604 - DNA, 25 bp, Homo sapien
ttagtccaggaagcaatagtaagga

SEQ ID NO: 3663605 - DNA, 25 bp, Homo sapien
tagtccaggaagcaatagtaaggaa

SEQ ID NO: 3663606 - DNA, 25 bp, Homo sapien
gtccaggaagcaatagtaaggaagt

SEQ ID NO: 3663607 - DNA, 25 bp, Homo sapien
ccaggaagcaatagtaaggaagtca

SEQ ID NO: 3663608 - DNA, 25 bp, Homo sapien
aaaatccagataggaagacaggctt

SEQ ID NO: 3663609 - DNA, 25 bp, Homo sapien
atccagataggaagacaggcttatt

SEQ ID NO: 3663610 - DNA, 25 bp, Homo sapien
aaatccagataggaagacaggctta

SEQ ID NO: 3663611 - DNA, 25 bp, Homo sapien
aaaaatccagataggaagacaggct

SEQ ID NO: 3663612 - DNA, 25 bp, Homo sapien
aaaactgcaaaagtagttaattatg

SEQ ID NO: 3663613 - DNA, 25 bp, Homo sapien
gaaataataaaggattaaaactgca

SEQ ID NO: 3663614 - DNA, 25 bp, Homo sapien
taattatgtagaacatgtatacaca

SEQ ID NO: 3663615 - DNA, 25 bp, Homo sapien
caaagtataagaaataataaaggat

SEQ ID NO: 3663616 - DNA, 25 bp, Homo sapien
catatatttccttcagtgtgaaaac

SEQ ID NO: 3663617 - DNA, 25 bp, Homo sapien
cagtgtgaaaactgtccccccttga

SEQ ID NO: 3663618 - DNA, 25 bp, Homo sapien
tattcatatatttccttcagtgtga

SEQ ID NO: 3663619 - DNA, 25 bp, Homo sapien
ttccttcagtgtgaaaactgtcccc

SEQ ID NO: 3663620 - DNA, 25 bp, Homo sapien
tttaggaacctttgcagtggtgctc

SEQ ID NO: 3663621 - DNA, 25 bp, Homo sapien
tgttcattgttttccccggtgcaga

SEQ ID NO: 3663622 - DNA, 25 bp, Homo sapien
taggaacctttgcagtggtgctcac

SEQ ID NO: 3663623 - DNA, 25 bp, Homo sapien
agctgaaagacattgttcattgttt

SEQ ID NO: 3663624 - DNA, 25 bp, Homo sapien
gtgaagtttcccaaacgtgctacat

SEQ ID NO: 3663625 - DNA, 25 bp, Homo sapien
tctgtatctgcccataactttctct

SEQ ID NO: 3663626 - DNA, 25 bp, Homo sapien
caaacgtgctacatggcttatgcct

SEQ ID NO: 3663627 - DNA, 25 bp, Homo sapien
gtgctacatggcttatgccttctgt

SEQ ID NO: 3663628 - DNA, 25 bp, Homo sapien
cccggcacgaccttgacagcggcgg

SEQ ID NO: 3663629 - DNA, 25 bp, Homo sapien
ttatggatctttctaagatccccag

SEQ ID NO: 3663630 - DNA, 25 bp, Homo sapien
cgatgtaggagtcgttgctggtata

SEQ ID NO: 3663631 - DNA, 25 bp, Homo sapien
gatccccagagtggacgatgtagga

SEQ ID NO: 3663632 - DNA, 25 bp, Homo sapien
gtcgttgctggtatagactagctgg

SEQ ID NO: 3663633 - DNA, 25 bp, Homo sapien
ctcttctgggcgtcttgtatattaa

SEQ ID NO: 3663634 - DNA, 25 bp, Homo sapien
cttctgggcgtcttgtatattaagg

SEQ ID NO: 3663635 - DNA, 25 bp, Homo sapien
tctgggcgtcttgtatattaaggtt

SEQ ID NO: 3663636 - DNA, 25 bp, Homo sapien
tgggcgtcttgtatattaaggttga

SEQ ID NO: 3663637 - DNA, 25 bp, Homo sapien
ccagcccccgactctgaaggggcga

SEQ ID NO: 3663638 - DNA, 25 bp, Homo sapien
cccagcccccgactctgaaggggcg

SEQ ID NO: 3663639 - DNA, 25 bp, Homo sapien
ctcctgcagccccggctcaggcagg

SEQ ID NO: 3663640 - DNA, 25 bp, Homo sapien
ccccggctcaggcagggcctggtac

SEQ ID NO: 3663641 - DNA, 25 bp, Homo sapien
ctacgagagtgagaggactttttgg

SEQ ID NO: 3663642 - DNA, 25 bp, Homo sapien
gagtgagaggactttttggcaaagt

SEQ ID NO: 3663643 - DNA, 25 bp, Homo sapien
tacgagagtgagaggactttttggc

SEQ ID NO: 3663644 - DNA, 25 bp, Homo sapien
cgagagtgagaggactttttggcaa

SEQ ID NO: 3663645 - DNA, 25 bp, Homo sapien
ctcatggccattgacacaggcccag

SEQ ID NO: 3663646 - DNA, 25 bp, Homo sapien
gtgtcctgtgttcgccatcaaggac

SEQ ID NO: 3663647 - DNA, 25 bp, Homo sapien
ccagaaatgttactacttcctcatg

SEQ ID NO: 3663648 - DNA, 25 bp, Homo sapien
tggcactttctgtctaccagaaatg

SEQ ID NO: 3663649 - DNA, 25 bp, Homo sapien
tctacgagatttatatcggcaccag

SEQ ID NO: 3663650 - DNA, 25 bp, Homo sapien
cgagatttatatcggcaccagaatc

SEQ ID NO: 3663651 - DNA, 25 bp, Homo sapien
gccatacacatctacgagatttata

SEQ ID NO: 3663652 - DNA, 25 bp, Homo sapien
tacacatctacgagatttatatcgg

SEQ ID NO: 3663653 - DNA, 25 bp, Homo sapien
tttgaaaataacattggttagtgtc

SEQ ID NO: 3663654 - DNA, 25 bp, Homo sapien
attttgaaaataacattggttagtg

SEQ ID NO: 3663655 - DNA, 25 bp, Homo sapien
gaaaataacattggttagtgtctac

SEQ ID NO: 3663656 - DNA, 25 bp, Homo sapien
atattttgaaaataacattggttag

SEQ ID NO: 3663657 - DNA, 25 bp, Homo sapien
catttatacttattaactgcattcg

SEQ ID NO: 3663658 - DNA, 25 bp, Homo sapien
tgctcacttcttttcgttatggata

SEQ ID NO: 3663659 - DNA, 25 bp, Homo sapien
cgttatggatagtaaaagtggtgtg

SEQ ID NO: 3663660 - DNA, 25 bp, Homo sapien
tacttattaactgcattcgcatttg

SEQ ID NO: 3663661 - DNA, 25 bp, Homo sapien
agtatcttgagtgctcaagtgttta

SEQ ID NO: 3663662 - DNA, 25 bp, Homo sapien
tcttgagtgctcaagtgtttatcct

SEQ ID NO: 3663663 - DNA, 25 bp, Homo sapien
atgtaccaacaaacataagtatctt

SEQ ID NO: 3663664 - DNA, 25 bp, Homo sapien
tgagtgctcaagtgtttatccttgt

SEQ ID NO: 3663665 - DNA, 25 bp, Homo sapien
taaaataacaaagagataacttcat

SEQ ID NO: 3663666 - DNA, 25 bp, Homo sapien
ctaaaataacaaagagataacttca

SEQ ID NO: 3663667 - DNA, 25 bp, Homo sapien
catatatctgcagcaaagacgtcaa

SEQ ID NO: 3663668 - DNA, 25 bp, Homo sapien
gaaatccacaagtaacagcataatg

SEQ ID NO: 3663669 - DNA, 25 bp, Homo sapien
gcagttactccacatatatctgcag

SEQ ID NO: 3663670 - DNA, 25 bp, Homo sapien
tctgcagcaaagacgtcaacatttt

SEQ ID NO: 3663671 - DNA, 25 bp, Homo sapien
tagtatatgtaccactgaagccagc

SEQ ID NO: 3663672 - DNA, 25 bp, Homo sapien
tgcagggacgatgctgatcttctca

SEQ ID NO: 3663673 - DNA, 25 bp, Homo sapien
cagggacgatgctgatcttctcaac

SEQ ID NO: 3663674 - DNA, 25 bp, Homo sapien
gacgatgctgatcttctcaacattg

SEQ ID NO: 3663675 - DNA, 25 bp, Homo sapien
attttcgtatatattccataatttg

SEQ ID NO: 3663676 - DNA, 25 bp, Homo sapien
ttttcgtatatattccataatttgt

SEQ ID NO: 3663677 - DNA, 25 bp, Homo sapien
cgaactttccagatgtcgctttctc

SEQ ID NO: 3663678 - DNA, 25 bp, Homo sapien
tcgaactttccagatgtcgctttct

SEQ ID NO: 3663679 - DNA, 25 bp, Homo sapien
gaactttccagatgtcgctttctcc

SEQ ID NO: 3663680 - DNA, 25 bp, Homo sapien
gggactcataatttccctaggtgtg

SEQ ID NO: 3663681 - DNA, 25 bp, Homo sapien
tacaaagttcgctctagcatcttac

SEQ ID NO: 3663682 - DNA, 25 bp, Homo sapien
ttacaaagttcgctctagcatctta

SEQ ID NO: 3663683 - DNA, 25 bp, Homo sapien
ctcttgtttggattctgatgggaac

SEQ ID NO: 3663684 - DNA, 25 bp, Homo sapien
cttgtttggattctgatgggaacct

SEQ ID NO: 3663685 - DNA, 25 bp, Homo sapien
tcatcttcctcttgtttggattctg

SEQ ID NO: 3663686 - DNA, 25 bp, Homo sapien
ccgagaatcacaagaatattcttca

SEQ ID NO: 3663687 - DNA, 25 bp, Homo sapien
tctttgcagaactctcaaagagact

SEQ ID NO: 3663688 - DNA, 25 bp, Homo sapien
gaaggcagatggcttcttaggaggc

SEQ ID NO: 3663689 - DNA, 25 bp, Homo sapien
aaggcagatggcttcttaggaggct

SEQ ID NO: 3663690 - DNA, 25 bp, Homo sapien
cttgaaggcagatggcttcttagga

SEQ ID NO: 3663691 - DNA, 25 bp, Homo sapien
ttgaaggcagatggcttcttaggag

SEQ ID NO: 3663692 - DNA, 25 bp, Homo sapien
tgctctcaatgtttgttcattcttc

SEQ ID NO: 3663693 - DNA, 25 bp, Homo sapien
aggctttatttggaacagagttttg

SEQ ID NO: 3663694 - DNA, 25 bp, Homo sapien
tgttcattcttcaattcaaaggctt

SEQ ID NO: 3663695 - DNA, 25 bp, Homo sapien
cattcttcaattcaaaggctttatt

SEQ ID NO: 3663696 - DNA, 25 bp, Homo sapien
ctctgtggcccgtatattctttttg

SEQ ID NO: 3663697 - DNA, 25 bp, Homo sapien
tctttttgtcgattacaataactac

SEQ ID NO: 3663698 - DNA, 25 bp, Homo sapien
actacttctatagtcattccattag

SEQ ID NO: 3663699 - DNA, 25 bp, Homo sapien
tagtcattccattagaattgaaatc

SEQ ID NO: 3663700 - DNA, 25 bp, Homo sapien
ttggattctggtgggaacatcggat

SEQ ID NO: 3663701 - DNA, 25 bp, Homo sapien
ttttgtttggattctggtgggaaca

SEQ ID NO: 3663702 - DNA, 25 bp, Homo sapien
tagtccttttgtttggattctggtg

SEQ ID NO: 3663703 - DNA, 25 bp, Homo sapien
tgtttggattctggtgggaacatcg

SEQ ID NO: 3663704 - DNA, 25 bp, Homo sapien
ttctttttgatgtgtagccttgggt

SEQ ID NO: 3663705 - DNA, 25 bp, Homo sapien
ccttcaattctaaggctttagttgg

SEQ ID NO: 3663706 - DNA, 25 bp, Homo sapien
tgaaagtttgcatgtccttcaattc

SEQ ID NO: 3663707 - DNA, 25 bp, Homo sapien
gctttgaaagtttgcatgtccttca

SEQ ID NO: 3663708 - DNA, 25 bp, Homo sapien
gctttagttggaatagaaactttca

SEQ ID NO: 3663709 - DNA, 25 bp, Homo sapien
gaaggcagatggcttccccggaggc

SEQ ID NO: 3663710 - DNA, 25 bp, Homo sapien
aaggcagatggcttccccggaggct

SEQ ID NO: 3663711 - DNA, 25 bp, Homo sapien
ctcgaaggcagatggcttccccgga

SEQ ID NO: 3663712 - DNA, 25 bp, Homo sapien
tcgaaggcagatggcttccccggag

SEQ ID NO: 3663713 - DNA, 25 bp, Homo sapien
ctgctctcaatgtttgttcattttt

SEQ ID NO: 3663714 - DNA, 25 bp, Homo sapien
aattccaaggctttatttgggacag

SEQ ID NO: 3663715 - DNA, 25 bp, Homo sapien
ttcaattccaaggctttatttggga

SEQ ID NO: 3663716 - DNA, 25 bp, Homo sapien
catttttcaattccaaggctttatt

SEQ ID NO: 3663717 - DNA, 25 bp, Homo sapien
caagggttatatcagtaagagatgg

SEQ ID NO: 3663718 - DNA, 25 bp, Homo sapien
gaagtaaaccgtggaatttgaatca

SEQ ID NO: 3663719 - DNA, 25 bp, Homo sapien
aacacaagggttatatcagtaagag

SEQ ID NO: 3663720 - DNA, 25 bp, Homo sapien
ggaatttgaatcaagcttcgaagag

SEQ ID NO: 3663721 - DNA, 25 bp, Homo sapien
ctcagtatcccaagaattttcttca

SEQ ID NO: 3663722 - DNA, 25 bp, Homo sapien
tagtccttttgtttggattctgatg

SEQ ID NO: 3663723 - DNA, 25 bp, Homo sapien
ccttttgtttggattctgatgggag

SEQ ID NO: 3663724 - DNA, 25 bp, Homo sapien
tgtttggattctgatgggagtatct

SEQ ID NO: 3663725 - DNA, 25 bp, Homo sapien
acacatccttctgtgaaacagtctc

SEQ ID NO: 3663726 - DNA, 25 bp, Homo sapien
ttttgatgcgcagccttgggtaaac

SEQ ID NO: 3663727 - DNA, 25 bp, Homo sapien
tctatttctttttgatgcgcagcct

SEQ ID NO: 3663728 - DNA, 25 bp, Homo sapien
acacacatccttctgtgaaacagtc

SEQ ID NO: 3663729 - DNA, 25 bp, Homo sapien
cttcagaagaccatctttaacagga

SEQ ID NO: 3663730 - DNA, 25 bp, Homo sapien
cagaagaccatctttaacaggagac

SEQ ID NO: 3663731 - DNA, 25 bp, Homo sapien
tcagaagaccatctttaacaggaga

SEQ ID NO: 3663732 - DNA, 25 bp, Homo sapien
agaagaccatctttaacaggagacc

SEQ ID NO: 3663733 - DNA, 25 bp, Homo sapien
gaaagtttgcatgtccatcaattct

SEQ ID NO: 3663734 - DNA, 25 bp, Homo sapien
gctttgaaagtttgcatgtccatca

SEQ ID NO: 3663735 - DNA, 25 bp, Homo sapien
tgaaagtttgcatgtccatcaattc

SEQ ID NO: 3663736 - DNA, 25 bp, Homo sapien
tttgaaagtttgcatgtccatcaat

SEQ ID NO: 3663737 - DNA, 25 bp, Homo sapien
taaagtaatgtggttgacaactata

SEQ ID NO: 3663738 - DNA, 25 bp, Homo sapien
tttctaaagtaatgtggttgacaac

SEQ ID NO: 3663739 - DNA, 25 bp, Homo sapien
tctaaagtaatgtggttgacaacta

SEQ ID NO: 3663740 - DNA, 25 bp, Homo sapien
aaattattagaagtgcgtgccacca

SEQ ID NO: 3663741 - DNA, 25 bp, Homo sapien
tcgaaggcagatggcttctcgggag

SEQ ID NO: 3663742 - DNA, 25 bp, Homo sapien
aaggcagatggcttctcgggaggct

SEQ ID NO: 3663743 - DNA, 25 bp, Homo sapien
ctcgaaggcagatggcttctcggga

SEQ ID NO: 3663744 - DNA, 25 bp, Homo sapien
gaaggcagatggcttctcgggaggc

SEQ ID NO: 3663745 - DNA, 25 bp, Homo sapien
gctctcaatgtttgttcattcttca

SEQ ID NO: 3663746 - DNA, 25 bp, Homo sapien
ggaacagacttttgcatttcaatgg

SEQ ID NO: 3663747 - DNA, 25 bp, Homo sapien
caattccaaggctttatttggaaca

SEQ ID NO: 3663748 - DNA, 25 bp, Homo sapien
tgttcattcttcaattccaaggctt

SEQ ID NO: 3663749 - DNA, 25 bp, Homo sapien
caagggttatatcagtaagagatgg

SEQ ID NO: 3663750 - DNA, 25 bp, Homo sapien
aacacaagggttatatcagtaagag

SEQ ID NO: 3663751 - DNA, 25 bp, Homo sapien
ggaatttgaatcaagcttcgaagag

SEQ ID NO: 3663752 - DNA, 25 bp, Homo sapien
gaagtaaaccgtggaatttgaatca

SEQ ID NO: 3663753 - DNA, 25 bp, Homo sapien
tatagtcattccaatagaactgaaa

SEQ ID NO: 3663754 - DNA, 25 bp, Homo sapien
ctatagtcattccaatagaactgaa

SEQ ID NO: 3663755 - DNA, 25 bp, Homo sapien
tcattccaatagaactgaaatctaa

SEQ ID NO: 3663756 - DNA, 25 bp, Homo sapien
tagtcattccaatagaactgaaatc

SEQ ID NO: 3663757 - DNA, 25 bp, Homo sapien
cttcagaagaccatctttaacagga

SEQ ID NO: 3663758 - DNA, 25 bp, Homo sapien
cagaagaccatctttaacaggagac

SEQ ID NO: 3663759 - DNA, 25 bp, Homo sapien
tcagaagaccatctttaacaggaga

SEQ ID NO: 3663760 - DNA, 25 bp, Homo sapien
agaagaccatctttaacaggagacc

SEQ ID NO: 3663761 - DNA, 25 bp, Homo sapien
gctttgaaagtttgcatgtccatca

SEQ ID NO: 3663762 - DNA, 25 bp, Homo sapien
gaaagtttgcatgtccatcaattct

SEQ ID NO: 3663763 - DNA, 25 bp, Homo sapien
tgaaagtttgcatgtccatcaattc

SEQ ID NO: 3663764 - DNA, 25 bp, Homo sapien
tttgaaagtttgcatgtccatcaat

SEQ ID NO: 3663765 - DNA, 25 bp, Homo sapien
taacagagaaacctaatgagtcact

SEQ ID NO: 3663766 - DNA, 25 bp, Homo sapien
aacagagaaacctaatgagtcactg

SEQ ID NO: 3663767 - DNA, 25 bp, Homo sapien
tgtaacagagaaacctaatgagtca

SEQ ID NO: 3663768 - DNA, 25 bp, Homo sapien
cagagaaacctaatgagtcactgtg

SEQ ID NO: 3663769 - DNA, 25 bp, Homo sapien
aaggcagatggcttctcgggaggct

SEQ ID NO: 3663770 - DNA, 25 bp, Homo sapien
ctcgaaggcagatggcttctcggga

SEQ ID NO: 3663771 - DNA, 25 bp, Homo sapien
tcgaaggcagatggcttctcgggag

SEQ ID NO: 3663772 - DNA, 25 bp, Homo sapien
gaaggcagatggcttctcgggaggc

SEQ ID NO: 3663773 - DNA, 25 bp, Homo sapien
tgctctcaatgtttgttcattcttc

SEQ ID NO: 3663774 - DNA, 25 bp, Homo sapien
gctttatttggaacagacttttgca

SEQ ID NO: 3663775 - DNA, 25 bp, Homo sapien
caattccaaggctttatttggaaca

SEQ ID NO: 3663776 - DNA, 25 bp, Homo sapien
tgttcattcttcaattccaaggctt

SEQ ID NO: 3663777 - DNA, 25 bp, Homo sapien
aacacaagggttatatcagtaagag

SEQ ID NO: 3663778 - DNA, 25 bp, Homo sapien
gaagtaaaccgtggaatttgaatca

SEQ ID NO: 3663779 - DNA, 25 bp, Homo sapien
ggaatttgaatcaagcttcgaagag

SEQ ID NO: 3663780 - DNA, 25 bp, Homo sapien
caagggttatatcagtaagagatgg

SEQ ID NO: 3663781 - DNA, 25 bp, Homo sapien
tatagtcattccaatagaactgaaa

SEQ ID NO: 3663782 - DNA, 25 bp, Homo sapien
ctatagtcattccaatagaactgaa

SEQ ID NO: 3663783 - DNA, 25 bp, Homo sapien
tcattccaatagaactgaaatctaa

SEQ ID NO: 3663784 - DNA, 25 bp, Homo sapien
tagtcattccaatagaactgaaatc

SEQ ID NO: 3663785 - DNA, 25 bp, Homo sapien
tagtccttttgtttggattctgatg

SEQ ID NO: 3663786 - DNA, 25 bp, Homo sapien
tgtttggattctgatgggagtatct

SEQ ID NO: 3663787 - DNA, 25 bp, Homo sapien
ctcagaatcccaagaactttcttca

SEQ ID NO: 3663788 - DNA, 25 bp, Homo sapien
agaactttcttcatagtccttttgt

SEQ ID NO: 3663789 - DNA, 25 bp, Homo sapien
acacatccttctgtgaaacagtctc

SEQ ID NO: 3663790 - DNA, 25 bp, Homo sapien
tctatttctttttgatgcgtagcct

SEQ ID NO: 3663791 - DNA, 25 bp, Homo sapien
acacacatccttctgtgaaacagtc

SEQ ID NO: 3663792 - DNA, 25 bp, Homo sapien
gcgtagccttgggtaaacacacatc

SEQ ID NO: 3663793 - DNA, 25 bp, Homo sapien
agaaaaccatcattatcaggagact

SEQ ID NO: 3663794 - DNA, 25 bp, Homo sapien
cagaaaaccatcattatcaggagac

SEQ ID NO: 3663795 - DNA, 25 bp, Homo sapien
tcagaaaaccatcattatcaggaga

SEQ ID NO: 3663796 - DNA, 25 bp, Homo sapien
cttcagaaaaccatcattatcagga

SEQ ID NO: 3663797 - DNA, 25 bp, Homo sapien
gctttgaaagtttgcatgtccatca

SEQ ID NO: 3663798 - DNA, 25 bp, Homo sapien
gaaagtttgcatgtccatcaattct

SEQ ID NO: 3663799 - DNA, 25 bp, Homo sapien
tgaaagtttgcatgtccatcaattc

SEQ ID NO: 3663800 - DNA, 25 bp, Homo sapien
tttgaaagtttgcatgtccatcaat

SEQ ID NO: 3663801 - DNA, 25 bp, Homo sapien
tctaaagtaatgtggttgacaatta

SEQ ID NO: 3663802 - DNA, 25 bp, Homo sapien
tttctaaagtaatgtggttgacaat

SEQ ID NO: 3663803 - DNA, 25 bp, Homo sapien
tataaaactgctggagttacaacca

SEQ ID NO: 3663804 - DNA, 25 bp, Homo sapien
ttctaaagtaatgtggttgacaatt

SEQ ID NO: 3663805 - DNA, 25 bp, Homo sapien
aaggcagatggcttctcgggaggct

SEQ ID NO: 3663806 - DNA, 25 bp, Homo sapien
tcgaaggcagatggcttctcgggag

SEQ ID NO: 3663807 - DNA, 25 bp, Homo sapien
ctcgaaggcagatggcttctcggga

SEQ ID NO: 3663808 - DNA, 25 bp, Homo sapien
gaaggcagatggcttctcgggaggc

SEQ ID NO: 3663809 - DNA, 25 bp, Homo sapien
gctctcaatgtttgttcattcttca

SEQ ID NO: 3663810 - DNA, 25 bp, Homo sapien
ggaacagacttttgcatttcaatgg

SEQ ID NO: 3663811 - DNA, 25 bp, Homo sapien
tgttcattcttcaattccaaggctt

SEQ ID NO: 3663812 - DNA, 25 bp, Homo sapien
caattccaaggctttatttggaaca

SEQ ID NO: 3663813 - DNA, 25 bp, Homo sapien
ggaatttgaatcaagcttcgaagaa

SEQ ID NO: 3663814 - DNA, 25 bp, Homo sapien
cacgagtgttatatcagtaaaagat

SEQ ID NO: 3663815 - DNA, 25 bp, Homo sapien
aaaacacgagtgttatatcagtaaa

SEQ ID NO: 3663816 - DNA, 25 bp, Homo sapien
gagtgttatatcagtaaaagatggg

SEQ ID NO: 3663817 - DNA, 25 bp, Homo sapien
ctcagaatcccaagaattttcttca

SEQ ID NO: 3663818 - DNA, 25 bp, Homo sapien
tttgattctgaagggaacatctgat

SEQ ID NO: 3663819 - DNA, 25 bp, Homo sapien
cagaatcccaagaattttcttcaac

SEQ ID NO: 3663820 - DNA, 25 bp, Homo sapien
tgttttgattctgaagggaacatct

SEQ ID NO: 3663821 - DNA, 25 bp, Homo sapien
ttctttttgatgtgtagccttgggt

SEQ ID NO: 3663822 - DNA, 25 bp, Homo sapien
gtatccaagatttttgataggctag

SEQ ID NO: 3663823 - DNA, 25 bp, Homo sapien
tatccaagatttttgataggctagt

SEQ ID NO: 3663824 - DNA, 25 bp, Homo sapien
ctgtatccaagatttttgataggct

SEQ ID NO: 3663825 - DNA, 25 bp, Homo sapien
tccaagatttttgataggctagttg

SEQ ID NO: 3663826 - DNA, 25 bp, Homo sapien
ttcctgtacgttgttcacagtgatc

SEQ ID NO: 3663827 - DNA, 25 bp, Homo sapien
ttcagtacacaaaacttctttttca

SEQ ID NO: 3663828 - DNA, 25 bp, Homo sapien
gcagagctcttgttcccatttaact

SEQ ID NO: 3663829 - DNA, 25 bp, Homo sapien
ttcttttgcttctgacagtttcttt

SEQ ID NO: 3663830 - DNA, 25 bp, Homo sapien
gcttctgacagtttctttttcagta

SEQ ID NO: 3663831 - DNA, 25 bp, Homo sapien
aattctatatcttgtattctgagag

SEQ ID NO: 3663832 - DNA, 25 bp, Homo sapien
ttcaattctatatcttgtattctga

SEQ ID NO: 3663833 - DNA, 25 bp, Homo sapien
caattctatatcttgtattctgaga

SEQ ID NO: 3663834 - DNA, 25 bp, Homo sapien
tcaattctatatcttgtattctgag

SEQ ID NO: 3663835 - DNA, 25 bp, Homo sapien
tctcctgcataattgagattaattt

SEQ ID NO: 3663836 - DNA, 25 bp, Homo sapien
ctaggatggtgtgattcaatttctg

SEQ ID NO: 3663837 - DNA, 25 bp, Homo sapien
gatggagcacctcattgttatatat

SEQ ID NO: 3663838 - DNA, 25 bp, Homo sapien
aaagtggttgatggagcacctcatt

SEQ ID NO: 3663839 - DNA, 25 bp, Homo sapien
tttgatacatgtgttcagcttcctt

SEQ ID NO: 3663840 - DNA, 25 bp, Homo sapien
attatcttgttcgttttgatacatg

SEQ ID NO: 3663841 - DNA, 25 bp, Homo sapien
tatcttgttcgttttgatacatgtg

SEQ ID NO: 3663842 - DNA, 25 bp, Homo sapien
cgttttgatacatgtgttcagcttc

SEQ ID NO: 3663843 - DNA, 25 bp, Homo sapien
tgtcagctttcttatgtgcatgaac

SEQ ID NO: 3663844 - DNA, 25 bp, Homo sapien
ttctcttttaggagatgatgttgca

SEQ ID NO: 3663845 - DNA, 25 bp, Homo sapien
aaaatgaatatcaattgttatcttg

SEQ ID NO: 3663846 - DNA, 25 bp, Homo sapien
cagctttcttatgtgcatgaactaa

SEQ ID NO: 3663847 - DNA, 25 bp, Homo sapien
gtttattgagatcagccaagttttt

SEQ ID NO: 3663848 - DNA, 25 bp, Homo sapien
taaatcctgtatctcatctttgaga

SEQ ID NO: 3663849 - DNA, 25 bp, Homo sapien
ttaaatcctgtatctcatctttgag

SEQ ID NO: 3663850 - DNA, 25 bp, Homo sapien
cactgtttattgagatcagccaagt

SEQ ID NO: 3663851 - DNA, 25 bp, Homo sapien
tctggtctgttgtttctccaaaaga

SEQ ID NO: 3663852 - DNA, 25 bp, Homo sapien
ctgttgacacagactattggtaaga

SEQ ID NO: 3663853 - DNA, 25 bp, Homo sapien
aacataaggtgatgctaggactggc

SEQ ID NO: 3663854 - DNA, 25 bp, Homo sapien
gactggcctcctagcatgagttgtg

SEQ ID NO: 3663855 - DNA, 25 bp, Homo sapien
tgggaatcctgtgcagctttatgca

SEQ ID NO: 3663856 - DNA, 25 bp, Homo sapien
ggaatcctgtgcagctttatgcaat

SEQ ID NO: 3663857 - DNA, 25 bp, Homo sapien
atcagggtagatgggaatcctgtgc

SEQ ID NO: 3663858 - DNA, 25 bp, Homo sapien
ggtagatgggaatcctgtgcagctt

SEQ ID NO: 3663859 - DNA, 25 bp, Homo sapien
ccagaaatgggctttaggtcttccg

SEQ ID NO: 3663860 - DNA, 25 bp, Homo sapien
tccgtctgagactggcatttgatgc

SEQ ID NO: 3663861 - DNA, 25 bp, Homo sapien
catttgatgccagtgatttcctcca

SEQ ID NO: 3663862 - DNA, 25 bp, Homo sapien
tagctcaatcatgtttaggtgcaac

SEQ ID NO: 3663863 - DNA, 25 bp, Homo sapien
gcaaggctctcgcataaacaatagt

SEQ ID NO: 3663864 - DNA, 25 bp, Homo sapien
tagtttttaaacgatgtcccataga

SEQ ID NO: 3663865 - DNA, 25 bp, Homo sapien
tctaaggtactacagaggacatagc

SEQ ID NO: 3663866 - DNA, 25 bp, Homo sapien
cagtattaagggataatgaagtcac

SEQ ID NO: 3663867 - DNA, 25 bp, Homo sapien
tattcaacaaccacgtgacaaacac

SEQ ID NO: 3663868 - DNA, 25 bp, Homo sapien
caaccacgtgacaaacactggaatt

SEQ ID NO: 3663869 - DNA, 25 bp, Homo sapien
ccgtagttgtgcattgaaataatta

SEQ ID NO: 3663870 - DNA, 25 bp, Homo sapien
cattatgattatgtatcagagcttc

SEQ ID NO: 3663871 - DNA, 25 bp, Homo sapien
aatatagattctagttcagcaccac

SEQ ID NO: 3663872 - DNA, 25 bp, Homo sapien
aaatcattagtagatcctagaggag

SEQ ID NO: 3663873 - DNA, 25 bp, Homo sapien
tttttctgatgctttactaacttca

SEQ ID NO: 3663874 - DNA, 25 bp, Homo sapien
gatcctagaggagccagtttcagaa

SEQ ID NO: 3663875 - DNA, 25 bp, Homo sapien
gagattatattgtagtcacgtagaa

SEQ ID NO: 3663876 - DNA, 25 bp, Homo sapien
atttctgtgagattatattgtagtc

SEQ ID NO: 3663877 - DNA, 25 bp, Homo sapien
ttgtagtcacgtagaatgtcctgac

SEQ ID NO: 3663878 - DNA, 25 bp, Homo sapien
tatattgtagtcacgtagaatgtcc

SEQ ID NO: 3663879 - DNA, 25 bp, Homo sapien
caagacctattgaccacgttaagta

SEQ ID NO: 3663880 - DNA, 25 bp, Homo sapien
tacaaatgcaattgaccctcgaatg

SEQ ID NO: 3663881 - DNA, 25 bp, Homo sapien
gacaggttactgtcagagacaggag

SEQ ID NO: 3663882 - DNA, 25 bp, Homo sapien
catagtgtgaactgcatgggtgctc

SEQ ID NO: 3663883 - DNA, 25 bp, Homo sapien
taatggtagctccagtgatttttgc

SEQ ID NO: 3663884 - DNA, 25 bp, Homo sapien
tgaatatgacttgcctctggtgaac

SEQ ID NO: 3663885 - DNA, 25 bp, Homo sapien
cagtttatcggacaaatgcaaggtt

SEQ ID NO: 3663886 - DNA, 25 bp, Homo sapien
tcacaatgaaactttgagacctagt

SEQ ID NO: 3663887 - DNA, 25 bp, Homo sapien
tgaaaggaggcatagcggtgaaaat

SEQ ID NO: 3663888 - DNA, 25 bp, Homo sapien
gctctcccgagtgcaagacctctgg

SEQ ID NO: 3663889 - DNA, 25 bp, Homo sapien
aagactcccagagtgaaaggaggca

SEQ ID NO: 3663890 - DNA, 25 bp, Homo sapien
ctggaagactcccagagtgaaagga

SEQ ID NO: 3663891 - DNA, 25 bp, Homo sapien
gagaacataccccatgtggcgtgaa

SEQ ID NO: 3663892 - DNA, 25 bp, Homo sapien
cacagcggatcttgaacttggacca

SEQ ID NO: 3663893 - DNA, 25 bp, Homo sapien
ttaggcaagctctcatcaggactcc

SEQ ID NO: 3663894 - DNA, 25 bp, Homo sapien
ggaaggagtcaacacactggaactg

SEQ ID NO: 3663895 - DNA, 25 bp, Homo sapien
gaggaggaaacgagaatacacacag

SEQ ID NO: 3663896 - DNA, 25 bp, Homo sapien
gggagctctggaacaatctttttga

SEQ ID NO: 3663897 - DNA, 25 bp, Homo sapien
tacagacagcgcttgatgagcccaa

SEQ ID NO: 3663898 - DNA, 25 bp, Homo sapien
gagacagggactgctactttagata

SEQ ID NO: 3663899 - DNA, 25 bp, Homo sapien
gctttctgacaatcagtaacaagaa

SEQ ID NO: 3663900 - DNA, 25 bp, Homo sapien
ctttctgacaatcagtaacaagaac

SEQ ID NO: 3663901 - DNA, 25 bp, Homo sapien
tctgacaatcagtaacaagaacata

SEQ ID NO: 3663902 - DNA, 25 bp, Homo sapien
cagctttctgacaatcagtaacaag

SEQ ID NO: 3663903 - DNA, 25 bp, Homo sapien
caatgagaatggtggaccagatggc

SEQ ID NO: 3663904 - DNA, 25 bp, Homo sapien
cagatggctgagtagatgccaaaga

SEQ ID NO: 3663905 - DNA, 25 bp, Homo sapien
tgtcctctcatatttggggcaatga

SEQ ID NO: 3663906 - DNA, 25 bp, Homo sapien
aagaacaccagactggtcagcatgc

SEQ ID NO: 3663907 - DNA, 25 bp, Homo sapien
cacagtctagacttgggttaaccca

SEQ ID NO: 3663908 - DNA, 25 bp, Homo sapien
tacttccgcagagtaagtgaggcag

SEQ ID NO: 3663909 - DNA, 25 bp, Homo sapien
taaacgtcggtggaaacaccagtgc

SEQ ID NO: 3663910 - DNA, 25 bp, Homo sapien
gatattagccaattgagccaccagg

SEQ ID NO: 3663911 - DNA, 25 bp, Homo sapien
tgcaggacaggtccatcccactcag

SEQ ID NO: 3663912 - DNA, 25 bp, Homo sapien
ttagagggcaagcacgcccgctcct

SEQ ID NO: 3663913 - DNA, 25 bp, Homo sapien
aggacaggtccatcccactcagcat

SEQ ID NO: 3663914 - DNA, 25 bp, Homo sapien
aagcaaaaatgcattagagggcaag

SEQ ID NO: 3663915 - DNA, 25 bp, Homo sapien
aggagcacacttgctgctatcccag

SEQ ID NO: 3663916 - DNA, 25 bp, Homo sapien
tctctttgacggattcttttaggag

SEQ ID NO: 3663917 - DNA, 25 bp, Homo sapien
catgccagcagtagggtggtattga

SEQ ID NO: 3663918 - DNA, 25 bp, Homo sapien
tttcctcctttagctgaaccattcc

SEQ ID NO: 3663919 - DNA, 25 bp, Homo sapien
tgtattaggatgtggagaaaaagct

SEQ ID NO: 3663920 - DNA, 25 bp, Homo sapien
taatctgtattaggatgtggagaaa

SEQ ID NO: 3663921 - DNA, 25 bp, Homo sapien
ttaatctgtattaggatgtggagaa

SEQ ID NO: 3663922 - DNA, 25 bp, Homo sapien
attaggatgtggagaaaaagctcgg

SEQ ID NO: 3663923 - DNA, 25 bp, Homo sapien
ggagttccgatctgatctgtttctg

SEQ ID NO: 3663924 - DNA, 25 bp, Homo sapien
tactgaccagcgcaggagttccgat

SEQ ID NO: 3663925 - DNA, 25 bp, Homo sapien
cagtgtcacattctacagcccagaa

SEQ ID NO: 3663926 - DNA, 25 bp, Homo sapien
ttctgacctgagcttgttcgcccct

SEQ ID NO: 3663927 - DNA, 25 bp, Homo sapien
aactttctcttacaatgcggtggca

SEQ ID NO: 3663928 - DNA, 25 bp, Homo sapien
gtcagaaggcctacacaccactctt

SEQ ID NO: 3663929 - DNA, 25 bp, Homo sapien
gaactctcgattacatcaggaacag

SEQ ID NO: 3663930 - DNA, 25 bp, Homo sapien
tggacctagctaacagtgacacgtg

SEQ ID NO: 3663931 - DNA, 25 bp, Homo sapien
ccaaatggttggtctaatcaaatag

SEQ ID NO: 3663932 - DNA, 25 bp, Homo sapien
tgtgttatccagaatgacccctgca

SEQ ID NO: 3663933 - DNA, 25 bp, Homo sapien
gcacccaattttagagaccaaatgg

SEQ ID NO: 3663934 - DNA, 25 bp, Homo sapien
gttggtggcaacatttaaactcttg

SEQ ID NO: 3663935 - DNA, 25 bp, Homo sapien
cagttagtaactgtgcacccttcaa

SEQ ID NO: 3663936 - DNA, 25 bp, Homo sapien
taaaggtggctgtgcaacgctgaca

SEQ ID NO: 3663937 - DNA, 25 bp, Homo sapien
tgtgcaacgctgacagttagtaact

SEQ ID NO: 3663938 - DNA, 25 bp, Homo sapien
aactgtgcacccttcaaagaggctg

SEQ ID NO: 3663939 - DNA, 25 bp, Homo sapien
gcaaagagtgcaacttccaagaaga

SEQ ID NO: 3663940 - DNA, 25 bp, Homo sapien
cagcagatagagacaggtagaagga

SEQ ID NO: 3663941 - DNA, 25 bp, Homo sapien
gaagagaagcaaagagtgcaacttc

SEQ ID NO: 3663942 - DNA, 25 bp, Homo sapien
ctggaaagatgaacaggattgcagc

SEQ ID NO: 3663943 - DNA, 25 bp, Homo sapien
cagttgcttgcaagaaacagaagtg

SEQ ID NO: 3663944 - DNA, 25 bp, Homo sapien
cagggattgtgggaaagacaattcc

SEQ ID NO: 3663945 - DNA, 25 bp, Homo sapien
ggaggtggcaagagacccatttctt

SEQ ID NO: 3663946 - DNA, 25 bp, Homo sapien
agggatagatgagccccgcactcat

SEQ ID NO: 3663947 - DNA, 25 bp, Homo sapien
atcaagataaagcacaagtttagat

SEQ ID NO: 3663948 - DNA, 25 bp, Homo sapien
tcaagataaagcacaagtttagatt

SEQ ID NO: 3663949 - DNA, 25 bp, Homo sapien
tatcaagataaagcacaagtttaga

SEQ ID NO: 3663950 - DNA, 25 bp, Homo sapien
caagataaagcacaagtttagattt

SEQ ID NO: 3663951 - DNA, 25 bp, Homo sapien
agataaaatacttcaggtcaaagca

SEQ ID NO: 3663952 - DNA, 25 bp, Homo sapien
agactgaggatagataaaatacttc

SEQ ID NO: 3663953 - DNA, 25 bp, Homo sapien
gagactgaggatagataaaatactt

SEQ ID NO: 3663954 - DNA, 25 bp, Homo sapien
gcttatgaaataaccctcagccagg

SEQ ID NO: 3663955 - DNA, 25 bp, Homo sapien
catggtctggatgcaaaacttttgc

SEQ ID NO: 3663956 - DNA, 25 bp, Homo sapien
ttttggtgtgaaaagagccactgcc

SEQ ID NO: 3663957 - DNA, 25 bp, Homo sapien
ccatggacttaggatgctagagtgc

SEQ ID NO: 3663958 - DNA, 25 bp, Homo sapien
gcacctcctccagcaatgtcttttt

SEQ ID NO: 3663959 - DNA, 25 bp, Homo sapien
tctgttaggtgtatttgttctagag

SEQ ID NO: 3663960 - DNA, 25 bp, Homo sapien
gctgtcagtaaagtattgaagttcc

SEQ ID NO: 3663961 - DNA, 25 bp, Homo sapien
gatgatttgtgtagtgctgtcagta

SEQ ID NO: 3663962 - DNA, 25 bp, Homo sapien
tttttctcagttcttaggtgtagta

SEQ ID NO: 3663963 - DNA, 25 bp, Homo sapien
tctttttgctgattccctgcaagaa

SEQ ID NO: 3663964 - DNA, 25 bp, Homo sapien
gaattcttgattcttctactgtaga

SEQ ID NO: 3663965 - DNA, 25 bp, Homo sapien
gaatagcgaggtataatcttctgca

SEQ ID NO: 3663966 - DNA, 25 bp, Homo sapien
tacagagtagccattgagcaagaga

SEQ ID NO: 3663967 - DNA, 25 bp, Homo sapien
gcaatgctaatgtatccacttctgt

SEQ ID NO: 3663968 - DNA, 25 bp, Homo sapien
tgcaatgctaatgtatccacttctg

SEQ ID NO: 3663969 - DNA, 25 bp, Homo sapien
caatgctaatgtatccacttctgta

SEQ ID NO: 3663970 - DNA, 25 bp, Homo sapien
ttcgattgcaaaagacgaaacaagc

SEQ ID NO: 3663971 - DNA, 25 bp, Homo sapien
cttcgattgcaaaagacgaaacaag

SEQ ID NO: 3663972 - DNA, 25 bp, Homo sapien
aacttcgattgcaaaagacgaaaca

SEQ ID NO: 3663973 - DNA, 25 bp, Homo sapien
agaacttcgattgcaaaagacgaaa

SEQ ID NO: 3663974 - DNA, 25 bp, Homo sapien
tgatggtaattcagagtaaacagaa

SEQ ID NO: 3663975 - DNA, 25 bp, Homo sapien
agtagactattatccactggtaagg

SEQ ID NO: 3663976 - DNA, 25 bp, Homo sapien
agctgatggtaattcagagtaaaca

SEQ ID NO: 3663977 - DNA, 25 bp, Homo sapien
ctattatccactggtaaggtagaga

SEQ ID NO: 3663978 - DNA, 25 bp, Homo sapien
acagtggaatggcattttcaaaatg

SEQ ID NO: 3663979 - DNA, 25 bp, Homo sapien
ctatgaaggagaccccatcagacta

SEQ ID NO: 3663980 - DNA, 25 bp, Homo sapien
tgaaggagaccccatcagactaaca

SEQ ID NO: 3663981 - DNA, 25 bp, Homo sapien
gcagaaatcataaaggccagaaaac

SEQ ID NO: 3663982 - DNA, 25 bp, Homo sapien
tttctgctaataacaataacacact

SEQ ID NO: 3663983 - DNA, 25 bp, Homo sapien
cagcttgccccatgtattttatggc

SEQ ID NO: 3663984 - DNA, 25 bp, Homo sapien
aacaaggctcttcaggtcattggtg

SEQ ID NO: 3663985 - DNA, 25 bp, Homo sapien
tctgagtcatcagatggagtcttcc

SEQ ID NO: 3663986 - DNA, 25 bp, Homo sapien
aagaaatcgagaaggcaatttcatc

SEQ ID NO: 3663987 - DNA, 25 bp, Homo sapien
atatttagggaatacacttgatcta

SEQ ID NO: 3663988 - DNA, 25 bp, Homo sapien
gtgaaaaagaaatcgagaaggcaat

SEQ ID NO: 3663989 - DNA, 25 bp, Homo sapien
acacttgatctataaggtgaaatac

SEQ ID NO: 3663990 - DNA, 25 bp, Homo sapien
ttaaaatagccacgtatgcaaattt

SEQ ID NO: 3663991 - DNA, 25 bp, Homo sapien
caacacaattctgtcaaattaccaa

SEQ ID NO: 3663992 - DNA, 25 bp, Homo sapien
aaatagccacgtatgcaaatttaaa

SEQ ID NO: 3663993 - DNA, 25 bp, Homo sapien
caatctgcagacacaacacaattct

SEQ ID NO: 3663994 - DNA, 25 bp, Homo sapien
ttttcctactttatgtcctcgctca

SEQ ID NO: 3663995 - DNA, 25 bp, Homo sapien
gctgctgactatttgaacctggtac

SEQ ID NO: 3663996 - DNA, 25 bp, Homo sapien
tgtcctcgctcattgattatgatga

SEQ ID NO: 3663997 - DNA, 25 bp, Homo sapien
acttttacttgatcacctctacgca

SEQ ID NO: 3663998 - DNA, 25 bp, Homo sapien
tgttgaccaggttgggtgcccttgg

SEQ ID NO: 3663999 - DNA, 25 bp, Homo sapien
tctggctgagcacactaatttgttg

SEQ ID NO: 3664000 - DNA, 25 bp, Homo sapien
accaccacgtagatactccagtcag

SEQ ID NO: 3664001 - DNA, 25 bp, Homo sapien
tcatcagagcgtggcttcccaaggg

SEQ ID NO: 3664002 - DNA, 25 bp, Homo sapien
agacagcagcacgtcctagtcgcat

SEQ ID NO: 3664003 - DNA, 25 bp, Homo sapien
cctgagacagcagcacgtcctagtc

SEQ ID NO: 3664004 - DNA, 25 bp, Homo sapien
gcacgtcctagtcgcatccttgaaa

SEQ ID NO: 3664005 - DNA, 25 bp, Homo sapien
gtcctagtcgcatccttgaaatgcc

SEQ ID NO: 3664006 - DNA, 25 bp, Homo sapien
gacttcagtcaaagggtccccactc

SEQ ID NO: 3664007 - DNA, 25 bp, Homo sapien
tgcactcatgtttcttcccaaaggg

SEQ ID NO: 3664008 - DNA, 25 bp, Homo sapien
cctgggagcctacttcttactgacc

SEQ ID NO: 3664009 - DNA, 25 bp, Homo sapien
ccctttgccccgtgctaagagtggg

SEQ ID NO: 3664010 - DNA, 25 bp, Homo sapien
cagaaaagagtttgtggccctattt

SEQ ID NO: 3664011 - DNA, 25 bp, Homo sapien
cttagtgagatgcagaagaaatctg

SEQ ID NO: 3664012 - DNA, 25 bp, Homo sapien
taatggtcaaacgatacaccaaggc

SEQ ID NO: 3664013 - DNA, 25 bp, Homo sapien
tcagaagtcccagtatgtgctatat

SEQ ID NO: 3664014 - DNA, 25 bp, Homo sapien
catatcatttagagaggaaacacca

SEQ ID NO: 3664015 - DNA, 25 bp, Homo sapien
tagagaggaaacaccagacaaatgc

SEQ ID NO: 3664016 - DNA, 25 bp, Homo sapien
tttgccagtgttctccttccacatc

SEQ ID NO: 3664017 - DNA, 25 bp, Homo sapien
ttccacatccacattacaaacatat

SEQ ID NO: 3664018 - DNA, 25 bp, Homo sapien
cataggttggggcaaaaaccctgca

SEQ ID NO: 3664019 - DNA, 25 bp, Homo sapien
cccgggatccactgggttgtgattt

SEQ ID NO: 3664020 - DNA, 25 bp, Homo sapien
ccctgcaacttgagaagcctgtcct

SEQ ID NO: 3664021 - DNA, 25 bp, Homo sapien
tctgcattgtccattgaggtcatta

SEQ ID NO: 3664022 - DNA, 25 bp, Homo sapien
tgataggagtgactgctgagatcct

SEQ ID NO: 3664023 - DNA, 25 bp, Homo sapien
attgataggagtgactgctgagatc

SEQ ID NO: 3664024 - DNA, 25 bp, Homo sapien
tctgattgataggagtgactgctga

SEQ ID NO: 3664025 - DNA, 25 bp, Homo sapien
tgattgataggagtgactgctgaga

SEQ ID NO: 3664026 - DNA, 25 bp, Homo sapien
tcgcacatgtcttctggatcatggg

SEQ ID NO: 3664027 - DNA, 25 bp, Homo sapien
agaattcgcacatgtcttctggatc

SEQ ID NO: 3664028 - DNA, 25 bp, Homo sapien
aattcgcacatgtcttctggatcat

SEQ ID NO: 3664029 - DNA, 25 bp, Homo sapien
ttcgcacatgtcttctggatcatgg

SEQ ID NO: 3664030 - DNA, 25 bp, Homo sapien
cggcaggcagccagcaaatccatga

SEQ ID NO: 3664031 - DNA, 25 bp, Homo sapien
tagctgaggacttccagggccggca

SEQ ID NO: 3664032 - DNA, 25 bp, Homo sapien
atcaccctagctgaggacttccagg

SEQ ID NO: 3664033 - DNA, 25 bp, Homo sapien
tgacatatgaacaaacccagccaag

SEQ ID NO: 3664034 - DNA, 25 bp, Homo sapien
tttatgttgtaaacctgtcaatggc

SEQ ID NO: 3664035 - DNA, 25 bp, Homo sapien
gttgtaaacctgtcaatggctgatt

SEQ ID NO: 3664036 - DNA, 25 bp, Homo sapien
ggctttatgttgtaaacctgtcaat

SEQ ID NO: 3664037 - DNA, 25 bp, Homo sapien
tatgttgtaaacctgtcaatggctg

SEQ ID NO: 3664038 - DNA, 25 bp, Homo sapien
gggcagagatatctgactaagaaca

SEQ ID NO: 3664039 - DNA, 25 bp, Homo sapien
gctgacaggaaatctccttaacatc

SEQ ID NO: 3664040 - DNA, 25 bp, Homo sapien
taagaacaagttgaggactaaggaa

SEQ ID NO: 3664041 - DNA, 25 bp, Homo sapien
tttgggcctttatcacgggggcaga

SEQ ID NO: 3664042 - DNA, 25 bp, Homo sapien
ctatcctgtgtccccttttttctgc

SEQ ID NO: 3664043 - DNA, 25 bp, Homo sapien
ctgtgtccccttttttctgctccat

SEQ ID NO: 3664044 - DNA, 25 bp, Homo sapien
tctgctccatgatgttgtcttcaaa

SEQ ID NO: 3664045 - DNA, 25 bp, Homo sapien
ttctgctccatgatgttgtcttcaa

SEQ ID NO: 3664046 - DNA, 25 bp, Homo sapien
cacacgcagccggactctaatatat

SEQ ID NO: 3664047 - DNA, 25 bp, Homo sapien
cacaaaattacaccccattagcagg

SEQ ID NO: 3664048 - DNA, 25 bp, Homo sapien
tgcagtggctcttttcgcagactgg

SEQ ID NO: 3664049 - DNA, 25 bp, Homo sapien
tgaagaggtagattgaacccacatc

SEQ ID NO: 3664050 - DNA, 25 bp, Homo sapien
ggtgatggccatactgcgtgccgcc

SEQ ID NO: 3664051 - DNA, 25 bp, Homo sapien
tgatggccatactgcgtgccgccat

SEQ ID NO: 3664052 - DNA, 25 bp, Homo sapien
ctgggtgatggccatactgcgtgcc

SEQ ID NO: 3664053 - DNA, 25 bp, Homo sapien
tgggtgatggccatactgcgtgccg

SEQ ID NO: 3664054 - DNA, 25 bp, Homo sapien
cactgcctggccacatagcctggtt

SEQ ID NO: 3664055 - DNA, 25 bp, Homo sapien
gaacctgagagaactgaccccatgt

SEQ ID NO: 3664056 - DNA, 25 bp, Homo sapien
gatttgcccgtcaaagactggtccc

SEQ ID NO: 3664057 - DNA, 25 bp, Homo sapien
gatccttgcaacttggcttccctaa

SEQ ID NO: 3664058 - DNA, 25 bp, Homo sapien
ccaatcccagagaagagacacacca

SEQ ID NO: 3664059 - DNA, 25 bp, Homo sapien
aaagaaatccttcctaatcggcagt

SEQ ID NO: 3664060 - DNA, 25 bp, Homo sapien
tcaaaaatcaacgatcaagctgcta

SEQ ID NO: 3664061 - DNA, 25 bp, Homo sapien
aaaagattgccaggatggttggaga

SEQ ID NO: 3664062 - DNA, 25 bp, Homo sapien
ccttgctgtttccactgctggctgg

SEQ ID NO: 3664063 - DNA, 25 bp, Homo sapien
tccactgctggctggaaacagaggc

SEQ ID NO: 3664064 - DNA, 25 bp, Homo sapien
actgctggctggaaacagaggctaa

SEQ ID NO: 3664065 - DNA, 25 bp, Homo sapien
tggctggaaacagaggctaagtaat

SEQ ID NO: 3664066 - DNA, 25 bp, Homo sapien
catccagttctctctaagacatact

SEQ ID NO: 3664067 - DNA, 25 bp, Homo sapien
cacaagttttagttcaatgaccact

SEQ ID NO: 3664068 - DNA, 25 bp, Homo sapien
gtctatcttgggctttggcacctct

SEQ ID NO: 3664069 - DNA, 25 bp, Homo sapien
tgatgtctatcttgggctttggcac

SEQ ID NO: 3664070 - DNA, 25 bp, Homo sapien
cttaagaaatgcatcatagtctgtt

SEQ ID NO: 3664071 - DNA, 25 bp, Homo sapien
ccttaagaaatgcatcatagtctgt

SEQ ID NO: 3664072 - DNA, 25 bp, Homo sapien
accttaagaaatgcatcatagtctg

SEQ ID NO: 3664073 - DNA, 25 bp, Homo sapien
catcctccaattcaaagtcagtgtc

SEQ ID NO: 3664074 - DNA, 25 bp, Homo sapien
gagagaaaatctggttgacatatta

SEQ ID NO: 3664075 - DNA, 25 bp, Homo sapien
caaagtcagtgtcttgccaccatct

SEQ ID NO: 3664076 - DNA, 25 bp, Homo sapien
tctgagatgttattcactgctgaga

SEQ ID NO: 3664077 - DNA, 25 bp, Homo sapien
ttgtttcgtttggggatctcaccat

SEQ ID NO: 3664078 - DNA, 25 bp, Homo sapien
gttactcaagcagcaaagaacaggg

SEQ ID NO: 3664079 - DNA, 25 bp, Homo sapien
ggttactcaagcagcaaagaacagg

SEQ ID NO: 3664080 - DNA, 25 bp, Homo sapien
caggttactcaagcagcaaagaaca

SEQ ID NO: 3664081 - DNA, 25 bp, Homo sapien
tgcaacgtggccacgggctgactga

SEQ ID NO: 3664082 - DNA, 25 bp, Homo sapien
tggcccattgttgcttgtcctggga

SEQ ID NO: 3664083 - DNA, 25 bp, Homo sapien
tctttacaggcccagggttgcaagg

SEQ ID NO: 3664084 - DNA, 25 bp, Homo sapien
ctgacaacatcccacaaccaaggtt

SEQ ID NO: 3664085 - DNA, 25 bp, Homo sapien
tcttgaggcaatgcctcatacaagg

SEQ ID NO: 3664086 - DNA, 25 bp, Homo sapien
ttcatcttgaggcaatgcctcatac

SEQ ID NO: 3664087 - DNA, 25 bp, Homo sapien
catcttgaggcaatgcctcatacaa

SEQ ID NO: 3664088 - DNA, 25 bp, Homo sapien
ttgaggcaatgcctcatacaaggag

SEQ ID NO: 3664089 - DNA, 25 bp, Homo sapien
tttccaaagctcttagcgtcctcct

SEQ ID NO: 3664090 - DNA, 25 bp, Homo sapien
ttccaaagctcttagcgtcctcctg

SEQ ID NO: 3664091 - DNA, 25 bp, Homo sapien
ttcatgctgcaaataactggttcca

SEQ ID NO: 3664092 - DNA, 25 bp, Homo sapien
tcttcatgctgcaaataactggttc

SEQ ID NO: 3664093 - DNA, 25 bp, Homo sapien
tcttacacagaagctcttcatgctg

SEQ ID NO: 3664094 - DNA, 25 bp, Homo sapien
tcatgctgcaaataactggttccat

SEQ ID NO: 3664095 - DNA, 25 bp, Homo sapien
cacctccaggttaataaggaccagt

SEQ ID NO: 3664096 - DNA, 25 bp, Homo sapien
gaattttacaagaaccctgtggtga

SEQ ID NO: 3664097 - DNA, 25 bp, Homo sapien
caggcgtggtgcatcttctctttca

SEQ ID NO: 3664098 - DNA, 25 bp, Homo sapien
caaggacagttaggaattttacaag

SEQ ID NO: 3664099 - DNA, 25 bp, Homo sapien
atagattccagaagcaagcaggatt

SEQ ID NO: 3664100 - DNA, 25 bp, Homo sapien
gccatttggactagccccacatgca

SEQ ID NO: 3664101 - DNA, 25 bp, Homo sapien
tagattccagaagcaagcaggattt

SEQ ID NO: 3664102 - DNA, 25 bp, Homo sapien
tttcaaagttgtctgccatttggac

SEQ ID NO: 3664103 - DNA, 25 bp, Homo sapien
tccccatgttgaccgggcactcctg

SEQ ID NO: 3664104 - DNA, 25 bp, Homo sapien
ttccccatgttgaccgggcactcct

SEQ ID NO: 3664105 - DNA, 25 bp, Homo sapien
acctggcctcatgcgtgttcttttt

SEQ ID NO: 3664106 - DNA, 25 bp, Homo sapien
agcacctggcctcatgcgtgttctt

SEQ ID NO: 3664107 - DNA, 25 bp, Homo sapien
tggtagagacctatccaaacctgtt

SEQ ID NO: 3664108 - DNA, 25 bp, Homo sapien
ggttggctttccgtcgttgtgacca

SEQ ID NO: 3664109 - DNA, 25 bp, Homo sapien
ttagaggatgtctggctgttggctg

SEQ ID NO: 3664110 - DNA, 25 bp, Homo sapien
tgtgaccagcgggtgacatttagag

SEQ ID NO: 3664111 - DNA, 25 bp, Homo sapien
tgtcatcattctatcccaaaccttc

SEQ ID NO: 3664112 - DNA, 25 bp, Homo sapien
ccctggcagaagattagcaggtttt

SEQ ID NO: 3664113 - DNA, 25 bp, Homo sapien
cggaaatgacgccaatactgccctc

SEQ ID NO: 3664114 - DNA, 25 bp, Homo sapien
gaagtaagtaagcacgatgtcatca

SEQ ID NO: 3664115 - DNA, 25 bp, Homo sapien
cattgataccatacagatgtgaagc

SEQ ID NO: 3664116 - DNA, 25 bp, Homo sapien
ctgttctgctgctactagtgtggga

SEQ ID NO: 3664117 - DNA, 25 bp, Homo sapien
gaggtcacatccagagtttctgttc

SEQ ID NO: 3664118 - DNA, 25 bp, Homo sapien
cacgacttggtcctgagagtggcac

SEQ ID NO: 3664119 - DNA, 25 bp, Homo sapien
gaagcctctagggtgactcccatgt

SEQ ID NO: 3664120 - DNA, 25 bp, Homo sapien
ggttttgttctgacggctgccagga

SEQ ID NO: 3664121 - DNA, 25 bp, Homo sapien
gctgccaggatacccgtggaatcct

SEQ ID NO: 3664122 - DNA, 25 bp, Homo sapien
cacaggctctagacaggagtttcca

SEQ ID NO: 3664123 - DNA, 25 bp, Homo sapien
ttttgtatcttgtgagtcagtttgc

SEQ ID NO: 3664124 - DNA, 25 bp, Homo sapien
ctttttgtatcttgtgagtcagttt

SEQ ID NO: 3664125 - DNA, 25 bp, Homo sapien
ttgtatcttgtgagtcagtttgcta

SEQ ID NO: 3664126 - DNA, 25 bp, Homo sapien
tgtatcttgtgagtcagtttgctac

SEQ ID NO: 3664127 - DNA, 25 bp, Homo sapien
agctgggcttatcccactgactagg

SEQ ID NO: 3664128 - DNA, 25 bp, Homo sapien
gctgggcttatcccactgactagga

SEQ ID NO: 3664129 - DNA, 25 bp, Homo sapien
ttgaagctgggcttatcccactgac

SEQ ID NO: 3664130 - DNA, 25 bp, Homo sapien
tgaagctgggcttatcccactgact

SEQ ID NO: 3664131 - DNA, 25 bp, Homo sapien
aacatgcacccaggcaagagactga

SEQ ID NO: 3664132 - DNA, 25 bp, Homo sapien
ctgagaacatgcacccaggcaagag

SEQ ID NO: 3664133 - DNA, 25 bp, Homo sapien
cacccaggcaagagactgagtttca

SEQ ID NO: 3664134 - DNA, 25 bp, Homo sapien
tgcacccaggcaagagactgagttt

SEQ ID NO: 3664135 - DNA, 25 bp, Homo sapien
tcctcattggtagcgtggacatccc

SEQ ID NO: 3664136 - DNA, 25 bp, Homo sapien
ctcattggtagcgtggacatcccta

SEQ ID NO: 3664137 - DNA, 25 bp, Homo sapien
cattggtagcgtggacatccctatt

SEQ ID NO: 3664138 - DNA, 25 bp, Homo sapien
ggtagcgtggacatccctattagaa

SEQ ID NO: 3664139 - DNA, 25 bp, Homo sapien
tatggtagacatgggagcactggaa

SEQ ID NO: 3664140 - DNA, 25 bp, Homo sapien
tggtagacatgggagcactggaaca

SEQ ID NO: 3664141 - DNA, 25 bp, Homo sapien
ggtagacatgggagcactggaacat

SEQ ID NO: 3664142 - DNA, 25 bp, Homo sapien
ttatggtagacatgggagcactgga

SEQ ID NO: 3664143 - DNA, 25 bp, Homo sapien
tggtggacacgtcttcttccacctt

SEQ ID NO: 3664144 - DNA, 25 bp, Homo sapien
tagcagatatatttgaactccgaac

SEQ ID NO: 3664145 - DNA, 25 bp, Homo sapien
aacttccactgctccatagcgacct

SEQ ID NO: 3664146 - DNA, 25 bp, Homo sapien
tatttgaactccgaaccactcttcc

SEQ ID NO: 3664147 - DNA, 25 bp, Homo sapien
ggactaaggaggcagaaatagcaga

SEQ ID NO: 3664148 - DNA, 25 bp, Homo sapien
cttctctgcagaggactccagcagc

SEQ ID NO: 3664149 - DNA, 25 bp, Homo sapien
caacacaggggccttctctgcagag

SEQ ID NO: 3664150 - DNA, 25 bp, Homo sapien
ctccacaggacaccaacacaggggc

SEQ ID NO: 3664151 - DNA, 25 bp, Homo sapien
aggacaccaacacaggggccttctc

SEQ ID NO: 3664152 - DNA, 25 bp, Homo sapien
ttgtcttatctgagtcgctgaggca

SEQ ID NO: 3664153 - DNA, 25 bp, Homo sapien
ttaatgtgagcatggttgtcttatc

SEQ ID NO: 3664154 - DNA, 25 bp, Homo sapien
catggttgtcttatctgagtcgctg

SEQ ID NO: 3664155 - DNA, 25 bp, Homo sapien
tgtgagcatggttgtcttatctgag

SEQ ID NO: 3664156 - DNA, 25 bp, Homo sapien
cgcatcctatccacagggctgtctt

SEQ ID NO: 3664157 - DNA, 25 bp, Homo sapien
tttgctgtcagactaccctgctggg

SEQ ID NO: 3664158 - DNA, 25 bp, Homo sapien
gacaaccctcacgaccagagatgtt

SEQ ID NO: 3664159 - DNA, 25 bp, Homo sapien
gatctccaaggaaagtataccttcc

SEQ ID NO: 3664160 - DNA, 25 bp, Homo sapien
gcttgtgtctgcttatcatagtcca

SEQ ID NO: 3664161 - DNA, 25 bp, Homo sapien
tgatgttgaaggagtacatgggtcc

SEQ ID NO: 3664162 - DNA, 25 bp, Homo sapien
tccaggccacaaatgaggatgaagc

SEQ ID NO: 3664163 - DNA, 25 bp, Homo sapien
tacatgggtcctactagcttgtgtc

SEQ ID NO: 3664164 - DNA, 25 bp, Homo sapien
ttacaggcagcaaaagctgcaggtg

SEQ ID NO: 3664165 - DNA, 25 bp, Homo sapien
aaagctgcaggtgtttttcaaggtc

SEQ ID NO: 3664166 - DNA, 25 bp, Homo sapien
gcagcaaaagctgcaggtgtttttc

SEQ ID NO: 3664167 - DNA, 25 bp, Homo sapien
caaaagctgcaggtgtttttcaagg

SEQ ID NO: 3664168 - DNA, 25 bp, Homo sapien
tgtgacctgtaacctgtctgccact

SEQ ID NO: 3664169 - DNA, 25 bp, Homo sapien
tctgccacttgtctgctgattatga

SEQ ID NO: 3664170 - DNA, 25 bp, Homo sapien
gaacctgtgacctgtaacctgtctg

SEQ ID NO: 3664171 - DNA, 25 bp, Homo sapien
cattttactcaatggaacgtcttcc

SEQ ID NO: 3664172 - DNA, 25 bp, Homo sapien
aatccatgcattatgagctatggcc

SEQ ID NO: 3664173 - DNA, 25 bp, Homo sapien
cactaatccatgcattatgagctat

SEQ ID NO: 3664174 - DNA, 25 bp, Homo sapien
ctaatccatgcattatgagctatgg

SEQ ID NO: 3664175 - DNA, 25 bp, Homo sapien
gcactaatccatgcattatgagcta

SEQ ID NO: 3664176 - DNA, 25 bp, Homo sapien
ccgagtcttgcctccctgtgccttc

SEQ ID NO: 3664177 - DNA, 25 bp, Homo sapien
tcccgagtcttgcctccctgtgcct

SEQ ID NO: 3664178 - DNA, 25 bp, Homo sapien
cccgagtcttgcctccctgtgcctt

SEQ ID NO: 3664179 - DNA, 25 bp, Homo sapien
ctcccgagtcttgcctccctgtgcc

SEQ ID NO: 3664180 - DNA, 25 bp, Homo sapien
gaattgtgttgaccaaagagttcct

SEQ ID NO: 3664181 - DNA, 25 bp, Homo sapien
tctttctcatctcataccctctaat

SEQ ID NO: 3664182 - DNA, 25 bp, Homo sapien
ccaggttggaccaatttcagatgca

SEQ ID NO: 3664183 - DNA, 25 bp, Homo sapien
tgcagccaggttggaccaatttcag

SEQ ID NO: 3664184 - DNA, 25 bp, Homo sapien
tgtgacgggtcagtcaaaccctggg

SEQ ID NO: 3664185 - DNA, 25 bp, Homo sapien
tttgcatggcaaggacaagatgacc

SEQ ID NO: 3664186 - DNA, 25 bp, Homo sapien
gatttcaaccactgtaggtgctgcc

SEQ ID NO: 3664187 - DNA, 25 bp, Homo sapien
tgcttgggtggtcctgatttcaacc

SEQ ID NO: 3664188 - DNA, 25 bp, Homo sapien
ttcttgaggagcagcctttgaggta

SEQ ID NO: 3664189 - DNA, 25 bp, Homo sapien
ctagaagggtgttcttgaggagcag

SEQ ID NO: 3664190 - DNA, 25 bp, Homo sapien
tgaggagcagcctttgaggtagatg

SEQ ID NO: 3664191 - DNA, 25 bp, Homo sapien
tcttgaggagcagcctttgaggtag

SEQ ID NO: 3664192 - DNA, 25 bp, Homo sapien
tcatcctggggaacaacatccctct

SEQ ID NO: 3664193 - DNA, 25 bp, Homo sapien
ttggtaatgcaagacctttctctct

SEQ ID NO: 3664194 - DNA, 25 bp, Homo sapien
ccttggtaatgcaagacctttctct

SEQ ID NO: 3664195 - DNA, 25 bp, Homo sapien
tcctggggaacaacatccctctgct

SEQ ID NO: 3664196 - DNA, 25 bp, Homo sapien
ttctgcaagacccttccacttcttc

SEQ ID NO: 3664197 - DNA, 25 bp, Homo sapien
tcttctgctccaacagctctgggtc

SEQ ID NO: 3664198 - DNA, 25 bp, Homo sapien
acagctctgggtctgttggtcctgc

SEQ ID NO: 3664199 - DNA, 25 bp, Homo sapien
ctgcaagacccttccacttcttctg

SEQ ID NO: 3664200 - DNA, 25 bp, Homo sapien
agtgccatggtgacatcaactgtga

SEQ ID NO: 3664201 - DNA, 25 bp, Homo sapien
tatcactatcccctttcagtgggag

SEQ ID NO: 3664202 - DNA, 25 bp, Homo sapien
tgtgagtcccaaatatcactatccc

SEQ ID NO: 3664203 - DNA, 25 bp, Homo sapien
tttcagtgggagaaacgagatttcc

SEQ ID NO: 3664204 - DNA, 25 bp, Homo sapien
aggggtgaccagagggtcccctgag

SEQ ID NO: 3664205 - DNA, 25 bp, Homo sapien
gggtgaccagagggtcccctgaggc

SEQ ID NO: 3664206 - DNA, 25 bp, Homo sapien
ccagagggtcccctgaggcctgtag

SEQ ID NO: 3664207 - DNA, 25 bp, Homo sapien
agagaggaaggggtgaccagagggt

SEQ ID NO: 3664208 - DNA, 25 bp, Homo sapien
ttggccctgagtttctcaagagcag

SEQ ID NO: 3664209 - DNA, 25 bp, Homo sapien
accagccctggtgcccccagcatat

SEQ ID NO: 3664210 - DNA, 25 bp, Homo sapien
cctggtgcccccagcatatccagtg

SEQ ID NO: 3664211 - DNA, 25 bp, Homo sapien
gccctggtgcccccagcatatccag

SEQ ID NO: 3664212 - DNA, 25 bp, Homo sapien
tggtgcccccagcatatccagtgac

SEQ ID NO: 3664213 - DNA, 25 bp, Homo sapien
agatcctggtgggactaaaacccag

SEQ ID NO: 3664214 - DNA, 25 bp, Homo sapien
atcctggtgggactaaaacccagtg

SEQ ID NO: 3664215 - DNA, 25 bp, Homo sapien
tagaagatcctggtgggactaaaac

SEQ ID NO: 3664216 - DNA, 25 bp, Homo sapien
ggtagaagatcctggtgggactaaa

SEQ ID NO: 3664217 - DNA, 25 bp, Homo sapien
cctccgcaggctgttgggacggcca

SEQ ID NO: 3664218 - DNA, 25 bp, Homo sapien
gaaacctccgcaggctgttgggacg

SEQ ID NO: 3664219 - DNA, 25 bp, Homo sapien
aacccgaaacctccgcaggctgttg

SEQ ID NO: 3664220 - DNA, 25 bp, Homo sapien
ccgaaacctccgcaggctgttggga

SEQ ID NO: 3664221 - DNA, 25 bp, Homo sapien
gtctaagttcgcgagcatggagctg

SEQ ID NO: 3664222 - DNA, 25 bp, Homo sapien
ctgaagtctaagttcgcgagcatgg

SEQ ID NO: 3664223 - DNA, 25 bp, Homo sapien
gctgccgacggtggcatgggtgtct

SEQ ID NO: 3664224 - DNA, 25 bp, Homo sapien
catggagctgccgacggtggcatgg

SEQ ID NO: 3664225 - DNA, 25 bp, Homo sapien
ctgttctactagtagaaggcgagcc

SEQ ID NO: 3664226 - DNA, 25 bp, Homo sapien
tagaaggcgagccacctagaagcct

SEQ ID NO: 3664227 - DNA, 25 bp, Homo sapien
catccttcccgccttacaaaagagt

SEQ ID NO: 3664228 - DNA, 25 bp, Homo sapien
tgtctgtagctaagggggtgcatcc

SEQ ID NO: 3664229 - DNA, 25 bp, Homo sapien
agggcgttagacagccccaaatcct

SEQ ID NO: 3664230 - DNA, 25 bp, Homo sapien
gcactcttcgcaaacgcagttcttc

SEQ ID NO: 3664231 - DNA, 25 bp, Homo sapien
tggcagactgcggagggcgttagac

SEQ ID NO: 3664232 - DNA, 25 bp, Homo sapien
ttcagccttcgctgatagagagttg

SEQ ID NO: 3664233 - DNA, 25 bp, Homo sapien
accaagaccgagccacaccgggaga

SEQ ID NO: 3664234 - DNA, 25 bp, Homo sapien
tggcaaatgggacgaccgcagcggg

SEQ ID NO: 3664235 - DNA, 25 bp, Homo sapien
gagcaaagacgggaggaacgcaggc

SEQ ID NO: 3664236 - DNA, 25 bp, Homo sapien
ggcggtggcaaatgggacgaccgca

SEQ ID NO: 3664237 - DNA, 25 bp, Homo sapien
atgagaagttcaaatagctcaaggg

SEQ ID NO: 3664238 - DNA, 25 bp, Homo sapien
agttcaaatagctcaaggggtggcg

SEQ ID NO: 3664239 - DNA, 25 bp, Homo sapien
tcagcagtggggtctgcgccaggag

SEQ ID NO: 3664240 - DNA, 25 bp, Homo sapien
cgccaggagcgctgatgctgaactc

SEQ ID NO: 3664241 - DNA, 25 bp, Homo sapien
ctgggcatttggccaggtgccagga

SEQ ID NO: 3664242 - DNA, 25 bp, Homo sapien
tcctgtttgtctacagctggtgacg

SEQ ID NO: 3664243 - DNA, 25 bp, Homo sapien
agaaacctgctcctgtttgtctaca

SEQ ID NO: 3664244 - DNA, 25 bp, Homo sapien
tgctcctgtttgtctacagctggtg

SEQ ID NO: 3664245 - DNA, 25 bp, Homo sapien
cagggccggctccagtggggagaac

SEQ ID NO: 3664246 - DNA, 25 bp, Homo sapien
gggagaacagagtgaaggatgcatg

SEQ ID NO: 3664247 - DNA, 25 bp, Homo sapien
aacagagtgaaggatgcatgccagc

SEQ ID NO: 3664248 - DNA, 25 bp, Homo sapien
gagaacagagtgaaggatgcatgcc

SEQ ID NO: 3664249 - DNA, 25 bp, Homo sapien
gtgaggagcacggtgcaccttgagg

SEQ ID NO: 3664250 - DNA, 25 bp, Homo sapien
cagtgaggagcacggtgcaccttga

SEQ ID NO: 3664251 - DNA, 25 bp, Homo sapien
tgaggagcacggtgcaccttgaggg

SEQ ID NO: 3664252 - DNA, 25 bp, Homo sapien
tcagtgaggagcacggtgcaccttg

SEQ ID NO: 3664253 - DNA, 25 bp, Homo sapien
ccaggtgcaactctgtggagctcag

SEQ ID NO: 3664254 - DNA, 25 bp, Homo sapien
tgggcaaagctgacccatagcagcc

SEQ ID NO: 3664255 - DNA, 25 bp, Homo sapien
catgttttgggtgccccgtactggg

SEQ ID NO: 3664256 - DNA, 25 bp, Homo sapien
gagtttgcgggtcagttccctcaga

SEQ ID NO: 3664257 - DNA, 25 bp, Homo sapien
gctcaggtctaggtggctccagcca

SEQ ID NO: 3664258 - DNA, 25 bp, Homo sapien
agtaattgccgcaagaacaaatgga

SEQ ID NO: 3664259 - DNA, 25 bp, Homo sapien
cagtaagtaattgccgcaagaacaa

SEQ ID NO: 3664260 - DNA, 25 bp, Homo sapien
caaatggatgtgtgctcaggtctag

SEQ ID NO: 3664261 - DNA, 25 bp, Homo sapien
ttcaaatccagctggagcctcattt

SEQ ID NO: 3664262 - DNA, 25 bp, Homo sapien
tcaaatccagctggagcctcatttc

SEQ ID NO: 3664263 - DNA, 25 bp, Homo sapien
actgcagttcctggcgactgagctg

SEQ ID NO: 3664264 - DNA, 25 bp, Homo sapien
gcagcaggctctgagagtaggcctg

SEQ ID NO: 3664265 - DNA, 25 bp, Homo sapien
ggtgcccggccgactgcagttcctg

SEQ ID NO: 3664266 - DNA, 25 bp, Homo sapien
cactgggaggcgcctctctggcctg

SEQ ID NO: 3664267 - DNA, 25 bp, Homo sapien
cacaagacatgcagtcagccagcca

SEQ ID NO: 3664268 - DNA, 25 bp, Homo sapien
gccagagtagggtggttgcttttgc

SEQ ID NO: 3664269 - DNA, 25 bp, Homo sapien
acaagacatgcagtcagccagccaa

SEQ ID NO: 3664270 - DNA, 25 bp, Homo sapien
agggtggttgcttttgcgtgcaaaa

SEQ ID NO: 3664271 - DNA, 25 bp, Homo sapien
agtggaggcaccaagcgttcatcat

SEQ ID NO: 3664272 - DNA, 25 bp, Homo sapien
tggaggcaccaagcgttcatcatct

SEQ ID NO: 3664273 - DNA, 25 bp, Homo sapien
gagatgggatagaaggtgcacagac

SEQ ID NO: 3664274 - DNA, 25 bp, Homo sapien
aggcaccaagcgttcatcatctacc

SEQ ID NO: 3664275 - DNA, 25 bp, Homo sapien
cactgcccaagcacatgtggctgct

SEQ ID NO: 3664276 - DNA, 25 bp, Homo sapien
ccaaagatagaaggcccccgagtga

SEQ ID NO: 3664277 - DNA, 25 bp, Homo sapien
gcatgactgcctgcactggcaagag

SEQ ID NO: 3664278 - DNA, 25 bp, Homo sapien
gtgatctcatcaaggccaagagggc

SEQ ID NO: 3664279 - DNA, 25 bp, Homo sapien
ttgcagaatgagtggtcacccatgg

SEQ ID NO: 3664280 - DNA, 25 bp, Homo sapien
tcctgtgcaatccagcaaatgctga

SEQ ID NO: 3664281 - DNA, 25 bp, Homo sapien
tcatccccttcaggagaccgcgggt

SEQ ID NO: 3664282 - DNA, 25 bp, Homo sapien
gggagcccctcagtatctctccgca

SEQ ID NO: 3664283 - DNA, 25 bp, Homo sapien
tattgaattagtcagccaaacagaa

SEQ ID NO: 3664284 - DNA, 25 bp, Homo sapien
gaacttgatggatctcttagtccaa

SEQ ID NO: 3664285 - DNA, 25 bp, Homo sapien
tagtccaatgcagatgccagatgca

SEQ ID NO: 3664286 - DNA, 25 bp, Homo sapien
gagctgttcccctagttgaacttga

SEQ ID NO: 3664287 - DNA, 25 bp, Homo sapien
gggcctgactcaggtctatgctgag

SEQ ID NO: 3664288 - DNA, 25 bp, Homo sapien
agcgagcaaaatgcccaggtaatgc

SEQ ID NO: 3664289 - DNA, 25 bp, Homo sapien
ggcctggtggcagtagcatggccct

SEQ ID NO: 3664290 - DNA, 25 bp, Homo sapien
ccaggtaatgctgccagactggctg

SEQ ID NO: 3664291 - DNA, 25 bp, Homo sapien
aaacccctaaatgacgcttcttgat

SEQ ID NO: 3664292 - DNA, 25 bp, Homo sapien
tgatgcaaacacgttccatgtggca

SEQ ID NO: 3664293 - DNA, 25 bp, Homo sapien
taaatgacgcttcttgatgcaaaca

SEQ ID NO: 3664294 - DNA, 25 bp, Homo sapien
cgcttcttgatgcaaacacgttcca

SEQ ID NO: 3664295 - DNA, 25 bp, Homo sapien
tccagtgttgtctacgtggccgtgg

SEQ ID NO: 3664296 - DNA, 25 bp, Homo sapien
ccttgctccgaggtcacagttgttt

SEQ ID NO: 3664297 - DNA, 25 bp, Homo sapien
ccaggtatttgcctgccacgcaaat

SEQ ID NO: 3664298 - DNA, 25 bp, Homo sapien
tgcctgccacgcaaatcatgacggg

SEQ ID NO: 3664299 - DNA, 25 bp, Homo sapien
catggaacctttgattctgtggcag

SEQ ID NO: 3664300 - DNA, 25 bp, Homo sapien
gaaggcagtaaagagtcggtcaaca

SEQ ID NO: 3664301 - DNA, 25 bp, Homo sapien
ttttaacagaacatgaccccagagt

SEQ ID NO: 3664302 - DNA, 25 bp, Homo sapien
ggtgagcagcaatctacttaggaag

SEQ ID NO: 3664303 - DNA, 25 bp, Homo sapien
aggaataatccccaaatcgccacat

SEQ ID NO: 3664304 - DNA, 25 bp, Homo sapien
aaggaataatccccaaatcgccaca

SEQ ID NO: 3664305 - DNA, 25 bp, Homo sapien
taaaggaataatccccaaatcgcca

SEQ ID NO: 3664306 - DNA, 25 bp, Homo sapien
cttttttccttgtagggtgagtcat

SEQ ID NO: 3664307 - DNA, 25 bp, Homo sapien
tagggtgagtcatcaaatactttgg

SEQ ID NO: 3664308 - DNA, 25 bp, Homo sapien
ccttgtagggtgagtcatcaaatac

SEQ ID NO: 3664309 - DNA, 25 bp, Homo sapien
gtgagtcatcaaatactttggagac

SEQ ID NO: 3664310 - DNA, 25 bp, Homo sapien
tcccatagacgagtgtgtaaccagt

SEQ ID NO: 3664311 - DNA, 25 bp, Homo sapien
tgctgtctcctcaagggccaaagaa

SEQ ID NO: 3664312 - DNA, 25 bp, Homo sapien
gaatctcaaaggtccgtagcaggcc

SEQ ID NO: 3664313 - DNA, 25 bp, Homo sapien
gtagcaggccagatctcgcatgacc

SEQ ID NO: 3664314 - DNA, 25 bp, Homo sapien
ttcaacaaatgctaccaaactgagt

SEQ ID NO: 3664315 - DNA, 25 bp, Homo sapien
aaactgcacagtaatatcccttatg

SEQ ID NO: 3664316 - DNA, 25 bp, Homo sapien
catgttgaaaagattgtgtaccagc

SEQ ID NO: 3664317 - DNA, 25 bp, Homo sapien
caaactgagttcaggaacatgttga

SEQ ID NO: 3664318 - DNA, 25 bp, Homo sapien
cactgcgccaaaccctcagtgattt

SEQ ID NO: 3664319 - DNA, 25 bp, Homo sapien
tgcgccaaaccctcagtgattttct

SEQ ID NO: 3664320 - DNA, 25 bp, Homo sapien
gaacttgtctgctgcgtcttggtta

SEQ ID NO: 3664321 - DNA, 25 bp, Homo sapien
tgcgtcttggttagcagaagcagat

SEQ ID NO: 3664322 - DNA, 25 bp, Homo sapien
tcatgacatgagaagagactctgct

SEQ ID NO: 3664323 - DNA, 25 bp, Homo sapien
tcagaggtgacgttgccgagctact

SEQ ID NO: 3664324 - DNA, 25 bp, Homo sapien
tgaagataacagtgcacaaggtggg

SEQ ID NO: 3664325 - DNA, 25 bp, Homo sapien
gatacttagagctgaaggcattcca

SEQ ID NO: 3664326 - DNA, 25 bp, Homo sapien
agtcacatcttacccagcttcggag

SEQ ID NO: 3664327 - DNA, 25 bp, Homo sapien
gaaatggagccgtatggatgcagta

SEQ ID NO: 3664328 - DNA, 25 bp, Homo sapien
cagtatttgcgggaagtccttctgc

SEQ ID NO: 3664329 - DNA, 25 bp, Homo sapien
ccatcagggagcttacacaagaaag

SEQ ID NO: 3664330 - DNA, 25 bp, Homo sapien
tgtgtaagtacatggttgaggtcag

SEQ ID NO: 3664331 - DNA, 25 bp, Homo sapien
agtaaatgtttgaggcttggcaggc

SEQ ID NO: 3664332 - DNA, 25 bp, Homo sapien
ctagaagtatccatttgaaaggcat

SEQ ID NO: 3664333 - DNA, 25 bp, Homo sapien
tggagataactcttataatcgagtc

SEQ ID NO: 3664334 - DNA, 25 bp, Homo sapien
tgcagcagctagcacaattccagac

SEQ ID NO: 3664335 - DNA, 25 bp, Homo sapien
tcattgagcggagaggattcatcct

SEQ ID NO: 3664336 - DNA, 25 bp, Homo sapien
cataagcactctaggaacagggacc

SEQ ID NO: 3664337 - DNA, 25 bp, Homo sapien
ttttcaccagtaggatttgcagcag

SEQ ID NO: 3664338 - DNA, 25 bp, Homo sapien
gtaggcaatgcgcactggcccgaag

SEQ ID NO: 3664339 - DNA, 25 bp, Homo sapien
tgacgtttgttgtgcgcgtgcgcat

SEQ ID NO: 3664340 - DNA, 25 bp, Homo sapien
gctcagcgaagtcctgtagcacggg

SEQ ID NO: 3664341 - DNA, 25 bp, Homo sapien
gggtccgtatgcgtccagtccctgc

SEQ ID NO: 3664342 - DNA, 25 bp, Homo sapien
aacgtaagcgcctccaattctcata

SEQ ID NO: 3664343 - DNA, 25 bp, Homo sapien
tgtcagacaccggtttaaatgcttt

SEQ ID NO: 3664344 - DNA, 25 bp, Homo sapien
cattttacaactgagggttgcggcc

SEQ ID NO: 3664345 - DNA, 25 bp, Homo sapien
gctaggtaggcactatcagcctcat

SEQ ID NO: 3664346 - DNA, 25 bp, Homo sapien
gtaatctctcaacccactatacaag

SEQ ID NO: 3664347 - DNA, 25 bp, Homo sapien
gtgggtaactgagacagtaatctct

SEQ ID NO: 3664348 - DNA, 25 bp, Homo sapien
tctcttggcttgtgtctaacaggca

SEQ ID NO: 3664349 - DNA, 25 bp, Homo sapien
attgatttgatccacaacctctggg

SEQ ID NO: 3664350 - DNA, 25 bp, Homo sapien
tgaattgctagcttctgtttttcct

SEQ ID NO: 3664351 - DNA, 25 bp, Homo sapien
catgatcgtgaatgaattcaagcac

SEQ ID NO: 3664352 - DNA, 25 bp, Homo sapien
cagagaataaccatactggtcacag

SEQ ID NO: 3664353 - DNA, 25 bp, Homo sapien
gtctttcagttaaacgttaccatgc

SEQ ID NO: 3664354 - DNA, 25 bp, Homo sapien
gtggccaagcaagtataagagataa

SEQ ID NO: 3664355 - DNA, 25 bp, Homo sapien
aactttgaacctctctagcctcctg

SEQ ID NO: 3664356 - DNA, 25 bp, Homo sapien
tggaggctacagtctttcaaggatg

SEQ ID NO: 3664357 - DNA, 25 bp, Homo sapien
cttgtgttgaatcggttcttgaagg

SEQ ID NO: 3664358 - DNA, 25 bp, Homo sapien
ttttatgctgatcctggaataatgt

SEQ ID NO: 3664359 - DNA, 25 bp, Homo sapien
ttatgctgatcctggaataatgtag

SEQ ID NO: 3664360 - DNA, 25 bp, Homo sapien
tatgctgatcctggaataatgtaga

SEQ ID NO: 3664361 - DNA, 25 bp, Homo sapien
tcattttatgctgatcctggaataa

SEQ ID NO: 3664362 - DNA, 25 bp, Homo sapien
ggtgaagcccacagtcacatcttca

SEQ ID NO: 3664363 - DNA, 25 bp, Homo sapien
cacagtcacatcttcaaatgacaag

SEQ ID NO: 3664364 - DNA, 25 bp, Homo sapien
tcacatcttcaaatgacaaggatcc

SEQ ID NO: 3664365 - DNA, 25 bp, Homo sapien
gtacagggtcatctgagcagggtcc

SEQ ID NO: 3664366 - DNA, 25 bp, Homo sapien
agatcacttctggtttagggatgca

SEQ ID NO: 3664367 - DNA, 25 bp, Homo sapien
ctatggctgctctccttgttccaat

SEQ ID NO: 3664368 - DNA, 25 bp, Homo sapien
tgaagatcacttctggtttagggat

SEQ ID NO: 3664369 - DNA, 25 bp, Homo sapien
cttgttccaatttgaagatcacttc

SEQ ID NO: 3664370 - DNA, 25 bp, Homo sapien
tagacctccttaatttttcagtgat

SEQ ID NO: 3664371 - DNA, 25 bp, Homo sapien
tacatatagacctccttaatttttc

SEQ ID NO: 3664372 - DNA, 25 bp, Homo sapien
tcataagataaagttgtgttgctct

SEQ ID NO: 3664373 - DNA, 25 bp, Homo sapien
ccacttgtattgatttggggtttca

SEQ ID NO: 3664374 - DNA, 25 bp, Homo sapien
tcgtgacacaggtctcaagaaatgt

SEQ ID NO: 3664375 - DNA, 25 bp, Homo sapien
ttgtgccccatcacataaggtgtgg

SEQ ID NO: 3664376 - DNA, 25 bp, Homo sapien
gaggcctccgagttatgtttcctat

SEQ ID NO: 3664377 - DNA, 25 bp, Homo sapien
cataagacgtgcttgtttgcccttc

SEQ ID NO: 3664378 - DNA, 25 bp, Homo sapien
tattgcaaactcataccacataagt

SEQ ID NO: 3664379 - DNA, 25 bp, Homo sapien
tgttacctctctctatagtcagtgt

SEQ ID NO: 3664380 - DNA, 25 bp, Homo sapien
tatgtctgtcctggatttcctgaca

SEQ ID NO: 3664381 - DNA, 25 bp, Homo sapien
ctattgttgatatatggagcttgcc

SEQ ID NO: 3664382 - DNA, 25 bp, Homo sapien
cattgtgtacacaaggactcgctcc

SEQ ID NO: 3664383 - DNA, 25 bp, Homo sapien
aaatgaagtcctccttatgactgag

SEQ ID NO: 3664384 - DNA, 25 bp, Homo sapien
gaccatgagagttgaattattacag

SEQ ID NO: 3664385 - DNA, 25 bp, Homo sapien
tttctgacattttatggaccatgag

SEQ ID NO: 3664386 - DNA, 25 bp, Homo sapien
tttcaatatgtttatagtgtttcac

SEQ ID NO: 3664387 - DNA, 25 bp, Homo sapien
ctttcaatatgtttatagtgtttca

SEQ ID NO: 3664388 - DNA, 25 bp, Homo sapien
gttaggaaagcttgatctgttaaaa

SEQ ID NO: 3664389 - DNA, 25 bp, Homo sapien
tgttaggaaagcttgatctgttaaa

SEQ ID NO: 3664390 - DNA, 25 bp, Homo sapien
gtgttaggaaagcttgatctgttaa

SEQ ID NO: 3664391 - DNA, 25 bp, Homo sapien
ttctcgcacaaagcttcccctgatt

SEQ ID NO: 3664392 - DNA, 25 bp, Homo sapien
cgcacaaagcttcccctgatttgtt

SEQ ID NO: 3664393 - DNA, 25 bp, Homo sapien
attaagtactgacttctcgcacaaa

SEQ ID NO: 3664394 - DNA, 25 bp, Homo sapien
gtactgacttctcgcacaaagcttc

SEQ ID NO: 3664395 - DNA, 25 bp, Homo sapien
ctttgatgtttggttagctttgact

SEQ ID NO: 3664396 - DNA, 25 bp, Homo sapien
gacttttcatagaatggttttacac

SEQ ID NO: 3664397 - DNA, 25 bp, Homo sapien
ttacacatggctcacatccacagac

SEQ ID NO: 3664398 - DNA, 25 bp, Homo sapien
gatgtttggttagctttgacttttc

SEQ ID NO: 3664399 - DNA, 25 bp, Homo sapien
tacttttaggcctgagttacgacta

SEQ ID NO: 3664400 - DNA, 25 bp, Homo sapien
gatgtactttgaggcctgagctgca

SEQ ID NO: 3664401 - DNA, 25 bp, Homo sapien
tatgaactcctagagaaagatttcc

SEQ ID NO: 3664402 - DNA, 25 bp, Homo sapien
tctgacttatgatagaaggacttcc

SEQ ID NO: 3664403 - DNA, 25 bp, Homo sapien
tgctaaattgtcataacatcaaaac

SEQ ID NO: 3664404 - DNA, 25 bp, Homo sapien
tgttaagagcctgagcttagaagta

SEQ ID NO: 3664405 - DNA, 25 bp, Homo sapien
tatatttatatgttaagagcctgag

SEQ ID NO: 3664406 - DNA, 25 bp, Homo sapien
acttgctaaattgtcataacatcaa

SEQ ID NO: 3664407 - DNA, 25 bp, Homo sapien
ctctggtccagcgtctgtaggtggt

SEQ ID NO: 3664408 - DNA, 25 bp, Homo sapien
ggagccgccatgtgaggcgcgctgg

SEQ ID NO: 3664409 - DNA, 25 bp, Homo sapien
tccaaagccgcagggacgtgggctc

SEQ ID NO: 3664410 - DNA, 25 bp, Homo sapien
tctgtaggtggtcccagtgcggctc

SEQ ID NO: 3664411 - DNA, 25 bp, Homo sapien
tgggcagtgggcgcccggagcagcc

SEQ ID NO: 3664412 - DNA, 25 bp, Homo sapien
gccagaggaggcctgcggtgctggg

SEQ ID NO: 3664413 - DNA, 25 bp, Homo sapien
gtgctgggcagtgggcgcccggagc

SEQ ID NO: 3664414 - DNA, 25 bp, Homo sapien
gcttgaggggcggccagaggaggcc

SEQ ID NO: 3664415 - DNA, 25 bp, Homo sapien
tagggctagggaaacgttctgcgca

SEQ ID NO: 3664416 - DNA, 25 bp, Homo sapien
agccgggccttctgggaagcgtagt

SEQ ID NO: 3664417 - DNA, 25 bp, Homo sapien
aagcgtagttctggagtagggctag

SEQ ID NO: 3664418 - DNA, 25 bp, Homo sapien
tagggaaacgttctgcgcatgtgca

SEQ ID NO: 3664419 - DNA, 25 bp, Homo sapien
gccagagaaagggtcgatggtagtc

SEQ ID NO: 3664420 - DNA, 25 bp, Homo sapien
cagagaaagggtcgatggtagtcat

SEQ ID NO: 3664421 - DNA, 25 bp, Homo sapien
ccagagaaagggtcgatggtagtca

SEQ ID NO: 3664422 - DNA, 25 bp, Homo sapien
aggccagagaaagggtcgatggtag

SEQ ID NO: 3664423 - DNA, 25 bp, Homo sapien
gccagctggtcaccccgggccattt

SEQ ID NO: 3664424 - DNA, 25 bp, Homo sapien
ttaggtgcatatggcctcctgctgg

SEQ ID NO: 3664425 - DNA, 25 bp, Homo sapien
tcttccatctggtttaggtgcatat

SEQ ID NO: 3664426 - DNA, 25 bp, Homo sapien
gacttgaggagtctgagcttgataa

SEQ ID NO: 3664427 - DNA, 25 bp, Homo sapien
atatgtattctgaaccccctccctg

SEQ ID NO: 3664428 - DNA, 25 bp, Homo sapien
ccatgtctacatcagtgttttgagc

SEQ ID NO: 3664429 - DNA, 25 bp, Homo sapien
ccacgttggtgccagccatgtctac

SEQ ID NO: 3664430 - DNA, 25 bp, Homo sapien
ctggagtatgtcctagagccacgtt

SEQ ID NO: 3664431 - DNA, 25 bp, Homo sapien
atagaaccaggagttcagtctataa

SEQ ID NO: 3664432 - DNA, 25 bp, Homo sapien
aaaaatagaaccaggagttcagtct

SEQ ID NO: 3664433 - DNA, 25 bp, Homo sapien
agaaaaaatagaaccaggagttcag

SEQ ID NO: 3664434 - DNA, 25 bp, Homo sapien
aaaatagaaccaggagttcagtcta

SEQ ID NO: 3664435 - DNA, 25 bp, Homo sapien
tagacgcagacgctcaaggaaagga

SEQ ID NO: 3664436 - DNA, 25 bp, Homo sapien
gctcaaggaaaggaccgctgcgtgt

SEQ ID NO: 3664437 - DNA, 25 bp, Homo sapien
cagtttagacgcagacgctcaagga

SEQ ID NO: 3664438 - DNA, 25 bp, Homo sapien
ctgtgggcagtttagacgcagacgc

SEQ ID NO: 3664439 - DNA, 25 bp, Homo sapien
ccgctaggcagtgggcagatgcggt

SEQ ID NO: 3664440 - DNA, 25 bp, Homo sapien
gcgagcagcccttcggattggtaga

SEQ ID NO: 3664441 - DNA, 25 bp, Homo sapien
tggtagagaagtgccccgctaggca

SEQ ID NO: 3664442 - DNA, 25 bp, Homo sapien
agatgcggtctgagttggtgctgga

SEQ ID NO: 3664443 - DNA, 25 bp, Homo sapien
cggacgaggcatgcgcagagcccac

SEQ ID NO: 3664444 - DNA, 25 bp, Homo sapien
aaacgcagacgtagccggcggacga

SEQ ID NO: 3664445 - DNA, 25 bp, Homo sapien
cacgcgcacagcttgatgctgttgg

SEQ ID NO: 3664446 - DNA, 25 bp, Homo sapien
aaaggcggaaacgcagacgtagccg

SEQ ID NO: 3664447 - DNA, 25 bp, Homo sapien
gttgcattcgccatagaaaagcgcg

SEQ ID NO: 3664448 - DNA, 25 bp, Homo sapien
cccactccctcgtcgggttgcattc

SEQ ID NO: 3664449 - DNA, 25 bp, Homo sapien
cgccatagaaaagcgcgtagaccct

SEQ ID NO: 3664450 - DNA, 25 bp, Homo sapien
agcgcgtagacccttgaaatcccgg

SEQ ID NO: 3664451 - DNA, 25 bp, Homo sapien
ggaaagacggagacaactctgaaga

SEQ ID NO: 3664452 - DNA, 25 bp, Homo sapien
ttgttctgttcttggaaagacggag

SEQ ID NO: 3664453 - DNA, 25 bp, Homo sapien
gttctgttcttggaaagacggagac

SEQ ID NO: 3664454 - DNA, 25 bp, Homo sapien
gacggagacaactctgaagatacag

SEQ ID NO: 3664455 - DNA, 25 bp, Homo sapien
gacttagccaggagaatcccttggg

SEQ ID NO: 3664456 - DNA, 25 bp, Homo sapien
ggagaatcccttgggccctgaaggc

SEQ ID NO: 3664457 - DNA, 25 bp, Homo sapien
ttgggagacttagccaggagaatcc

SEQ ID NO: 3664458 - DNA, 25 bp, Homo sapien
tagccaggagaatcccttgggccct

SEQ ID NO: 3664459 - DNA, 25 bp, Homo sapien
tacgttcttcataagcatagggcca

SEQ ID NO: 3664460 - DNA, 25 bp, Homo sapien
cagtagactaacattaggagcaaag

SEQ ID NO: 3664461 - DNA, 25 bp, Homo sapien
aagaagtatgggctaatccttacca

SEQ ID NO: 3664462 - DNA, 25 bp, Homo sapien
tatcaagttcctacaaagtacctgg

SEQ ID NO: 3664463 - DNA, 25 bp, Homo sapien
ctgactagggtccaggtgctgccac

SEQ ID NO: 3664464 - DNA, 25 bp, Homo sapien
ccactgagacaaggttgctgtagtt

SEQ ID NO: 3664465 - DNA, 25 bp, Homo sapien
caaggttgctgtagttctccagcat

SEQ ID NO: 3664466 - DNA, 25 bp, Homo sapien
agacaaggttgctgtagttctccag

SEQ ID NO: 3664467 - DNA, 25 bp, Homo sapien
cactgagacaaggttgctgtagttc

SEQ ID NO: 3664468 - DNA, 25 bp, Homo sapien
atttagaatgatacagtgaacagac

SEQ ID NO: 3664469 - DNA, 25 bp, Homo sapien
tgttgcagcctgaagatcacctctg

SEQ ID NO: 3664470 - DNA, 25 bp, Homo sapien
atcacctctggtttgtgaacacaat

SEQ ID NO: 3664471 - DNA, 25 bp, Homo sapien
ttcctcctgtttccatggctcttct

SEQ ID NO: 3664472 - DNA, 25 bp, Homo sapien
ctggaaagctttggcttgggaattc

SEQ ID NO: 3664473 - DNA, 25 bp, Homo sapien
gggaaacaacaaatcccctgatgtg

SEQ ID NO: 3664474 - DNA, 25 bp, Homo sapien
caacaaatcccctgatgtgaatctg

SEQ ID NO: 3664475 - DNA, 25 bp, Homo sapien
cctgatgtgaatctgtgcagtacat

SEQ ID NO: 3664476 - DNA, 25 bp, Homo sapien
aatcccctgatgtgaatctgtgcag

SEQ ID NO: 3664477 - DNA, 25 bp, Homo sapien
tccaaagttgccaaaccctgaatta

SEQ ID NO: 3664478 - DNA, 25 bp, Homo sapien
tatatcttttcgctaaatttgagaa

SEQ ID NO: 3664479 - DNA, 25 bp, Homo sapien
aatttgagaaggtccagccattact

SEQ ID NO: 3664480 - DNA, 25 bp, Homo sapien
tcccctccttctgatgttacaaatg

SEQ ID NO: 3664481 - DNA, 25 bp, Homo sapien
tgagagaaccaaactacatcccatt

SEQ ID NO: 3664482 - DNA, 25 bp, Homo sapien
tttcacaggaactaaaagtcaggtg

SEQ ID NO: 3664483 - DNA, 25 bp, Homo sapien
ggaatagagaacaccaccgatcata

SEQ ID NO: 3664484 - DNA, 25 bp, Homo sapien
ccccgcaggaagactaagattggca

SEQ ID NO: 3664485 - DNA, 25 bp, Homo sapien
tcaggtgagcacttacagagcatgg

SEQ ID NO: 3664486 - DNA, 25 bp, Homo sapien
tgtagtttggtttcattatggccag

SEQ ID NO: 3664487 - DNA, 25 bp, Homo sapien
tttcctattgtcactctattactga

SEQ ID NO: 3664488 - DNA, 25 bp, Homo sapien
tctactattgaatttgaggcccctt

SEQ ID NO: 3664489 - DNA, 25 bp, Homo sapien
gtaacccaagctttgtaacacaatc

SEQ ID NO: 3664490 - DNA, 25 bp, Homo sapien
ttatactgttaaatggatggtggag

SEQ ID NO: 3664491 - DNA, 25 bp, Homo sapien
tagagtacaatggagcagtatcagc

SEQ ID NO: 3664492 - DNA, 25 bp, Homo sapien
ccaaagaaccctatgtttcattagt

SEQ ID NO: 3664493 - DNA, 25 bp, Homo sapien
gatggtggagtgatattccctgttt

SEQ ID NO: 3664494 - DNA, 25 bp, Homo sapien
tgatcgatttctgaatgttgaacca

SEQ ID NO: 3664495 - DNA, 25 bp, Homo sapien
ttcttctttagcctatgctgggtta

SEQ ID NO: 3664496 - DNA, 25 bp, Homo sapien
ctattttctgaggacattgtgtaaa

SEQ ID NO: 3664497 - DNA, 25 bp, Homo sapien
gctgggttaattacattgatcgatt

SEQ ID NO: 3664498 - DNA, 25 bp, Homo sapien
gccaagggctgcatatctccaaaca

SEQ ID NO: 3664499 - DNA, 25 bp, Homo sapien
caagggctgcatatctccaaacacc

SEQ ID NO: 3664500 - DNA, 25 bp, Homo sapien
ctgccaagggctgcatatctccaaa

SEQ ID NO: 3664501 - DNA, 25 bp, Homo sapien
tgccaagggctgcatatctccaaac

SEQ ID NO: 3664502 - DNA, 25 bp, Homo sapien
ctgaggtcaggtgttcaagcctggc

SEQ ID NO: 3664503 - DNA, 25 bp, Homo sapien
cctgaggtcaggtgttcaagcctgg

SEQ ID NO: 3664504 - DNA, 25 bp, Homo sapien
gtcaggtgttcaagcctggccaaca

SEQ ID NO: 3664505 - DNA, 25 bp, Homo sapien
tgaggtcaggtgttcaagcctggcc

SEQ ID NO: 3664506 - DNA, 25 bp, Homo sapien
tgaggctgggcatagtggatagcac

SEQ ID NO: 3664507 - DNA, 25 bp, Homo sapien
aggctgggcatagtggatagcacct

SEQ ID NO: 3664508 - DNA, 25 bp, Homo sapien
gggcatagtggatagcacctgtaat

SEQ ID NO: 3664509 - DNA, 25 bp, Homo sapien
actgaggctgggcatagtggatagc

SEQ ID NO: 3664510 - DNA, 25 bp, Homo sapien
tatgtgtgtaccaagcagcatcctg

SEQ ID NO: 3664511 - DNA, 25 bp, Homo sapien
aaaggctgataaaagatattccatg

SEQ ID NO: 3664512 - DNA, 25 bp, Homo sapien
taaagggtcgttccatcaataagat

SEQ ID NO: 3664513 - DNA, 25 bp, Homo sapien
tcataagctgttacaagggacaaag

SEQ ID NO: 3664514 - DNA, 25 bp, Homo sapien
ttaggagctgatatctccttagaaa

SEQ ID NO: 3664515 - DNA, 25 bp, Homo sapien
attaggagctgatatctccttagaa

SEQ ID NO: 3664516 - DNA, 25 bp, Homo sapien
gttgttagtcctgtgcataggtcac

SEQ ID NO: 3664517 - DNA, 25 bp, Homo sapien
gtgggtgtttctgtaattcttcaaa

SEQ ID NO: 3664518 - DNA, 25 bp, Homo sapien
tctaacagtgcaactagtgattgac

SEQ ID NO: 3664519 - DNA, 25 bp, Homo sapien
actattttctagaatgactgtagca

SEQ ID NO: 3664520 - DNA, 25 bp, Homo sapien
tcaatgccagtaggaaactcaaacc

SEQ ID NO: 3664521 - DNA, 25 bp, Homo sapien
gagaagattctatgtacccctcacc

SEQ ID NO: 3664522 - DNA, 25 bp, Homo sapien
taataaagcctaggtggtcactccc

SEQ ID NO: 3664523 - DNA, 25 bp, Homo sapien
taaactgacatgcagctggaagaaa

SEQ ID NO: 3664524 - DNA, 25 bp, Homo sapien
taaatgtaatatggtgccctggaag

SEQ ID NO: 3664525 - DNA, 25 bp, Homo sapien
ctaaatgtaatatggtgccctggaa

SEQ ID NO: 3664526 - DNA, 25 bp, Homo sapien
aaatgtaatatggtgccctggaagg

SEQ ID NO: 3664527 - DNA, 25 bp, Homo sapien
tcaccaggactcctcaactgtcaag

SEQ ID NO: 3664528 - DNA, 25 bp, Homo sapien
caccaggactcctcaactgtcaagg

SEQ ID NO: 3664529 - DNA, 25 bp, Homo sapien
tgtttgccaagacatttcaggccaa

SEQ ID NO: 3664530 - DNA, 25 bp, Homo sapien
tcccagtcttatcttgagaaaaaca

SEQ ID NO: 3664531 - DNA, 25 bp, Homo sapien
gcatgcttgatataatgtgacaaaa

SEQ ID NO: 3664532 - DNA, 25 bp, Homo sapien
cagacacatcccaataaatggaatt

SEQ ID NO: 3664533 - DNA, 25 bp, Homo sapien
gtgtatttccctgttctgtcagctg

SEQ ID NO: 3664534 - DNA, 25 bp, Homo sapien
gaatgatccatgtggtagtgaagag

SEQ ID NO: 3664535 - DNA, 25 bp, Homo sapien
cacatgtttagcttaagagagatac

SEQ ID NO: 3664536 - DNA, 25 bp, Homo sapien
agcacaccattagcccctatcttgg

SEQ ID NO: 3664537 - DNA, 25 bp, Homo sapien
aatttctttaactgatattggtcca

SEQ ID NO: 3664538 - DNA, 25 bp, Homo sapien
cgaagtcatgagttcaggaggagcc

SEQ ID NO: 3664539 - DNA, 25 bp, Homo sapien
gccaggaataaaggcatcctgcacc

SEQ ID NO: 3664540 - DNA, 25 bp, Homo sapien
tatttcaaggaattacccattgcac

SEQ ID NO: 3664541 - DNA, 25 bp, Homo sapien
cactgtagagaacttatatatttct

SEQ ID NO: 3664542 - DNA, 25 bp, Homo sapien
gacactgtagagaacttatatattt

SEQ ID NO: 3664543 - DNA, 25 bp, Homo sapien
agacactgtagagaacttatatatt

SEQ ID NO: 3664544 - DNA, 25 bp, Homo sapien
aagacactgtagagaacttatatat

SEQ ID NO: 3664545 - DNA, 25 bp, Homo sapien
cgtacccggccacattaattgattt

SEQ ID NO: 3664546 - DNA, 25 bp, Homo sapien
tgagtggtcacagcatccaattatt

SEQ ID NO: 3664547 - DNA, 25 bp, Homo sapien
tctgcgttccaggttctaagcgatt

SEQ ID NO: 3664548 - DNA, 25 bp, Homo sapien
caaactctgaccagccttgagtggt

SEQ ID NO: 3664549 - DNA, 25 bp, Homo sapien
agtttaagaccagcccaggaacatg

SEQ ID NO: 3664550 - DNA, 25 bp, Homo sapien
caggagtttaagaccagcccaggaa

SEQ ID NO: 3664551 - DNA, 25 bp, Homo sapien
ctcaggagtttaagaccagcccagg

SEQ ID NO: 3664552 - DNA, 25 bp, Homo sapien
ggagtttaagaccagcccaggaaca

SEQ ID NO: 3664553 - DNA, 25 bp, Homo sapien
caataatggttaggacaactgggca

SEQ ID NO: 3664554 - DNA, 25 bp, Homo sapien
cactcgaacagtggagcaggtatgc

SEQ ID NO: 3664555 - DNA, 25 bp, Homo sapien
taagcctatgtactactaacagagc

SEQ ID NO: 3664556 - DNA, 25 bp, Homo sapien
gatgacactctaaagcaaccagatc

SEQ ID NO: 3664557 - DNA, 25 bp, Homo sapien
gttcctatctaccagaaacactcat

SEQ ID NO: 3664558 - DNA, 25 bp, Homo sapien
ttatgttttctaggaggtgactttc

SEQ ID NO: 3664559 - DNA, 25 bp, Homo sapien
catccagggcaattagatgtgttcc

SEQ ID NO: 3664560 - DNA, 25 bp, Homo sapien
aactcaaagcctcaaagacaaccct

SEQ ID NO: 3664561 - DNA, 25 bp, Homo sapien
cactgaaacatcacctctcaggctc

SEQ ID NO: 3664562 - DNA, 25 bp, Homo sapien
ctcactgaaacatcacctctcaggc

SEQ ID NO: 3664563 - DNA, 25 bp, Homo sapien
ttaggctatgtttgtcatatatttt

SEQ ID NO: 3664564 - DNA, 25 bp, Homo sapien
ctttttaggctatgtttgtcatata

SEQ ID NO: 3664565 - DNA, 25 bp, Homo sapien
atagtacatatatggatcttccaat

SEQ ID NO: 3664566 - DNA, 25 bp, Homo sapien
tagtacatatatggatcttccaata

SEQ ID NO: 3664567 - DNA, 25 bp, Homo sapien
tcttgggtgactccattagatttcc

SEQ ID NO: 3664568 - DNA, 25 bp, Homo sapien
tctgacataagcagggagttccact

SEQ ID NO: 3664569 - DNA, 25 bp, Homo sapien
catcttttgccagacatagctgcaa

SEQ ID NO: 3664570 - DNA, 25 bp, Homo sapien
gacaagtttcctgtctacttccaca

SEQ ID NO: 3664571 - DNA, 25 bp, Homo sapien
aacttcccacaaatgtttagattgg

SEQ ID NO: 3664572 - DNA, 25 bp, Homo sapien
cattattgatgaatacaacttccca

SEQ ID NO: 3664573 - DNA, 25 bp, Homo sapien
tttagattggttttcttggctcctc

SEQ ID NO: 3664574 - DNA, 25 bp, Homo sapien
ctctttcaggtgatcagctgtccag

SEQ ID NO: 3664575 - DNA, 25 bp, Homo sapien
tattcctattacatcaccttgttcc

SEQ ID NO: 3664576 - DNA, 25 bp, Homo sapien
atccacattaaatggtattcctatt

SEQ ID NO: 3664577 - DNA, 25 bp, Homo sapien
ggtattcctattacatcaccttgtt

SEQ ID NO: 3664578 - DNA, 25 bp, Homo sapien
catcaccttgttccttagtcagcat

SEQ ID NO: 3664579 - DNA, 25 bp, Homo sapien
aaattcatagtgattgtcccttgac

SEQ ID NO: 3664580 - DNA, 25 bp, Homo sapien
gtctcctcatgatgactcagtgtgt

SEQ ID NO: 3664581 - DNA, 25 bp, Homo sapien
gtgtttcatagataccccatgaggt

SEQ ID NO: 3664582 - DNA, 25 bp, Homo sapien
ccttgacggagatatctgatggaac

SEQ ID NO: 3664583 - DNA, 25 bp, Homo sapien
ggtgtactttaaggtgcgaagtcac

SEQ ID NO: 3664584 - DNA, 25 bp, Homo sapien
cgaagtcacacggaaggattttcca

SEQ ID NO: 3664585 - DNA, 25 bp, Homo sapien
tgagcaagttccgatttacggtaaa

SEQ ID NO: 3664586 - DNA, 25 bp, Homo sapien
tgttgagcaagttccgatttacggt

SEQ ID NO: 3664587 - DNA, 25 bp, Homo sapien
gatattacatagaatatcacttcct

SEQ ID NO: 3664588 - DNA, 25 bp, Homo sapien
aaaaatctgtaaggtgttatgcccg

SEQ ID NO: 3664589 - DNA, 25 bp, Homo sapien
cttcctaacaaaagctgtcctataa

SEQ ID NO: 3664590 - DNA, 25 bp, Homo sapien
gctgtcctataattgttgtagtcta

SEQ ID NO: 3664591 - DNA, 25 bp, Homo sapien
taccacttatgctgaaggctggaat

SEQ ID NO: 3664592 - DNA, 25 bp, Homo sapien
gactaagtctctatctaccagcaag

SEQ ID NO: 3664593 - DNA, 25 bp, Homo sapien
gactgtatcctgcaatcctgctgta

SEQ ID NO: 3664594 - DNA, 25 bp, Homo sapien
gaggcgagcctagatcttcacatgt

SEQ ID NO: 3664595 - DNA, 25 bp, Homo sapien
caaaaatactagtccttaatttcag

SEQ ID NO: 3664596 - DNA, 25 bp, Homo sapien
ttggcttcagatgtcaagagaacca

SEQ ID NO: 3664597 - DNA, 25 bp, Homo sapien
tttcaggtcacagttaccataattt

SEQ ID NO: 3664598 - DNA, 25 bp, Homo sapien
gatgatttacatgttcagtcagaaa

SEQ ID NO: 3664599 - DNA, 25 bp, Homo sapien
ctacctgtacaggtgggagcctcag

SEQ ID NO: 3664600 - DNA, 25 bp, Homo sapien
tcaagtcatgaagggatacagccaa

SEQ ID NO: 3664601 - DNA, 25 bp, Homo sapien
caggctgagcccaagtcaagtcatg

SEQ ID NO: 3664602 - DNA, 25 bp, Homo sapien
tagggatgttccatgcagccagtga

SEQ ID NO: 3664603 - DNA, 25 bp, Homo sapien
gggtttaatccaagggcatgagcat

SEQ ID NO: 3664604 - DNA, 25 bp, Homo sapien
tctccttatctagtattgcatctgg

SEQ ID NO: 3664605 - DNA, 25 bp, Homo sapien
gaccaccatccccatcttgtgggaa

SEQ ID NO: 3664606 - DNA, 25 bp, Homo sapien
ggctgtttccagatttgttgcaaga

SEQ ID NO: 3664607 - DNA, 25 bp, Homo sapien
tcagtgctgccataaagtcccgttt

SEQ ID NO: 3664608 - DNA, 25 bp, Homo sapien
gaactcgagtcaaaaggatgccctt

SEQ ID NO: 3664609 - DNA, 25 bp, Homo sapien
gaacccggtatcaacagaaggcctg

SEQ ID NO: 3664610 - DNA, 25 bp, Homo sapien
gaccactgggactcaacaccttgaa

SEQ ID NO: 3664611 - DNA, 25 bp, Homo sapien
cataaacgtagttgcatagagagaa

SEQ ID NO: 3664612 - DNA, 25 bp, Homo sapien
tatgttttcatacaactgactggtg

SEQ ID NO: 3664613 - DNA, 25 bp, Homo sapien
gagacaggtcttttgcctcatttaa

SEQ ID NO: 3664614 - DNA, 25 bp, Homo sapien
tgtttcagtgaatagccagcctttt

SEQ ID NO: 3664615 - DNA, 25 bp, Homo sapien
tgaatttgatagtctcgtagctgcc

SEQ ID NO: 3664616 - DNA, 25 bp, Homo sapien
agttgaggaaatcatatatcttcca

SEQ ID NO: 3664617 - DNA, 25 bp, Homo sapien
tttgcatactgcacaaaaagtttca

SEQ ID NO: 3664618 - DNA, 25 bp, Homo sapien
caaaaggaatcgttcctcatttaat

SEQ ID NO: 3664619 - DNA, 25 bp, Homo sapien
catctctgtgatcatagtgaagcta

SEQ ID NO: 3664620 - DNA, 25 bp, Homo sapien
aagcatgtctgtgcccttatgcaaa

SEQ ID NO: 3664621 - DNA, 25 bp, Homo sapien
gggcaggacggtccacaacttggaa

SEQ ID NO: 3664622 - DNA, 25 bp, Homo sapien
agcaaagggaaaatatcttctgcct

SEQ ID NO: 3664623 - DNA, 25 bp, Homo sapien
aaacaaacctggagccatatggcag

SEQ ID NO: 3664624 - DNA, 25 bp, Homo sapien
gagccctccccgtcagagtgccggg

SEQ ID NO: 3664625 - DNA, 25 bp, Homo sapien
catatggcagacatgcccagaaggc

SEQ ID NO: 3664626 - DNA, 25 bp, Homo sapien
gtcctctacccggacgccaggagat

SEQ ID NO: 3664627 - DNA, 25 bp, Homo sapien
tgaaaatgcccactggtgctaatgg

SEQ ID NO: 3664628 - DNA, 25 bp, Homo sapien
tacttcccgaagacatcaggcaatg

SEQ ID NO: 3664629 - DNA, 25 bp, Homo sapien
ggttcgaatcctcattcaagacaga

SEQ ID NO: 3664630 - DNA, 25 bp, Homo sapien
cttcctgtcacttgagccatgagct

SEQ ID NO: 3664631 - DNA, 25 bp, Homo sapien
ctgtctgctccttcggccttgccct

SEQ ID NO: 3664632 - DNA, 25 bp, Homo sapien
tgctgtcctccacttggctgctaag

SEQ ID NO: 3664633 - DNA, 25 bp, Homo sapien
agcgagtaacgaatccaggcatgga

SEQ ID NO: 3664634 - DNA, 25 bp, Homo sapien
ttcacaactccccaagaagcggtgc

SEQ ID NO: 3664635 - DNA, 25 bp, Homo sapien
ctagttgtgctgcagtgcgccagca

SEQ ID NO: 3664636 - DNA, 25 bp, Homo sapien
tctagttgtgctgcagtgcgccagc

SEQ ID NO: 3664637 - DNA, 25 bp, Homo sapien
gctgcagtgcgccagcagctcagca

SEQ ID NO: 3664638 - DNA, 25 bp, Homo sapien
ctgcagtgcgccagcagctcagcat

SEQ ID NO: 3664639 - DNA, 25 bp, Homo sapien
cctgagtcctcaagcgactctgtct

SEQ ID NO: 3664640 - DNA, 25 bp, Homo sapien
gcagcaaacaccctcctgagtcctc

SEQ ID NO: 3664641 - DNA, 25 bp, Homo sapien
tgttgtcaacgcagcaaacaccctc

SEQ ID NO: 3664642 - DNA, 25 bp, Homo sapien
caagcgactctgtctgttcttgact

SEQ ID NO: 3664643 - DNA, 25 bp, Homo sapien
ctctgaaagggagatactcacacgc

SEQ ID NO: 3664644 - DNA, 25 bp, Homo sapien
gaaagggagatactcacacgcccat

SEQ ID NO: 3664645 - DNA, 25 bp, Homo sapien
gggagatactcacacgcccatgcat

SEQ ID NO: 3664646 - DNA, 25 bp, Homo sapien
tctgaaagggagatactcacacgcc

SEQ ID NO: 3664647 - DNA, 25 bp, Homo sapien
agtgatgtcacttgccttaaaaggt

SEQ ID NO: 3664648 - DNA, 25 bp, Homo sapien
ttaaaaggtccacttcgcagccggc

SEQ ID NO: 3664649 - DNA, 25 bp, Homo sapien
aagaaaagatcatgagtgatgtcac

SEQ ID NO: 3664650 - DNA, 25 bp, Homo sapien
gtccacttcgcagccggcaaaacat

SEQ ID NO: 3664651 - DNA, 25 bp, Homo sapien
gttggaagagcagagcaaactgtga

SEQ ID NO: 3664652 - DNA, 25 bp, Homo sapien
gaagagcagagcaaactgtgagggt

SEQ ID NO: 3664653 - DNA, 25 bp, Homo sapien
agcagagcaaactgtgagggtgtag

SEQ ID NO: 3664654 - DNA, 25 bp, Homo sapien
cttccactggtgttggaagagcaga

SEQ ID NO: 3664655 - DNA, 25 bp, Homo sapien
atgaaatgtaatgtgacctctcctc

SEQ ID NO: 3664656 - DNA, 25 bp, Homo sapien
tatgaaagtaccaacagacaacaca

SEQ ID NO: 3664657 - DNA, 25 bp, Homo sapien
aaaccatccttcgtttgtggaccat

SEQ ID NO: 3664658 - DNA, 25 bp, Homo sapien
tgtggaccataaaaaaacatgcggc

SEQ ID NO: 3664659 - DNA, 25 bp, Homo sapien
caaaacatctatgagctaacaaata

SEQ ID NO: 3664660 - DNA, 25 bp, Homo sapien
cataggtaacatactccacagtgaa

SEQ ID NO: 3664661 - DNA, 25 bp, Homo sapien
tcatgaacaggcaatgatagtgctt

SEQ ID NO: 3664662 - DNA, 25 bp, Homo sapien
cattcaaattgaaaggcagaagtaa

SEQ ID NO: 3664663 - DNA, 25 bp, Homo sapien
tggaggagttagttattattaccca

SEQ ID NO: 3664664 - DNA, 25 bp, Homo sapien
tagcttccctgcattggatagaaca

SEQ ID NO: 3664665 - DNA, 25 bp, Homo sapien
ttgtctatccttttatcaagattct

SEQ ID NO: 3664666 - DNA, 25 bp, Homo sapien
caatttgtctatccttttatcaaga

SEQ ID NO: 3664667 - DNA, 25 bp, Homo sapien
taatgattgctattctaactggcat

SEQ ID NO: 3664668 - DNA, 25 bp, Homo sapien
ttgctattctaactggcatgagata

SEQ ID NO: 3664669 - DNA, 25 bp, Homo sapien
ttttagtcatgaagttttgcccatg

SEQ ID NO: 3664670 - DNA, 25 bp, Homo sapien
ggtgttttagtcatgaagttttgcc

SEQ ID NO: 3664671 - DNA, 25 bp, Homo sapien
aaaccttggaggttagaaggcactg

SEQ ID NO: 3664672 - DNA, 25 bp, Homo sapien
ccagatgaacaccagctaagggagt

SEQ ID NO: 3664673 - DNA, 25 bp, Homo sapien
gaaggcactggactgatatattcaa

SEQ ID NO: 3664674 - DNA, 25 bp, Homo sapien
gctgagaattctacgcctggcaaac

SEQ ID NO: 3664675 - DNA, 25 bp, Homo sapien
aatgccaccaaagtagagttgagac

SEQ ID NO: 3664676 - DNA, 25 bp, Homo sapien
tgaggaagcaatgccaccaaagtag

SEQ ID NO: 3664677 - DNA, 25 bp, Homo sapien
agcattagaggtagattgtctatac

SEQ ID NO: 3664678 - DNA, 25 bp, Homo sapien
cattagaggtagattgtctatacca

SEQ ID NO: 3664679 - DNA, 25 bp, Homo sapien
ttcctttaggccataggctccctgc

SEQ ID NO: 3664680 - DNA, 25 bp, Homo sapien
ccatcccaggtcattgatgcgaata

SEQ ID NO: 3664681 - DNA, 25 bp, Homo sapien
tcctttaggccataggctccctgct

SEQ ID NO: 3664682 - DNA, 25 bp, Homo sapien
agcagaagttgatggtgaactggaa

SEQ ID NO: 3664683 - DNA, 25 bp, Homo sapien
gatgaggtaaaggttgcagaggcat

SEQ ID NO: 3664684 - DNA, 25 bp, Homo sapien
tgatgaggtaaaggttgcagaggca

SEQ ID NO: 3664685 - DNA, 25 bp, Homo sapien
gtgatgaggtaaaggttgcagaggc

SEQ ID NO: 3664686 - DNA, 25 bp, Homo sapien
ctgtgatgaggtaaaggttgcagag

SEQ ID NO: 3664687 - DNA, 25 bp, Homo sapien
cagctatgtgtaacacagatggatc

SEQ ID NO: 3664688 - DNA, 25 bp, Homo sapien
gtaacacagatggatcataaaagtg

SEQ ID NO: 3664689 - DNA, 25 bp, Homo sapien
accacagctatgtgtaacacagatg

SEQ ID NO: 3664690 - DNA, 25 bp, Homo sapien
tatgtgtaacacagatggatcataa

SEQ ID NO: 3664691 - DNA, 25 bp, Homo sapien
ctggaaaatcacaattttgctcagt

SEQ ID NO: 3664692 - DNA, 25 bp, Homo sapien
tgctgccactcctcttgagtgaagc

SEQ ID NO: 3664693 - DNA, 25 bp, Homo sapien
acagtcacatccctaaacgacactg

SEQ ID NO: 3664694 - DNA, 25 bp, Homo sapien
ttgagtgaagcccacagtcacatcc

SEQ ID NO: 3664695 - DNA, 25 bp, Homo sapien
gtcacatccctaaacgacactgatc

SEQ ID NO: 3664696 - DNA, 25 bp, Homo sapien
ctactgagacaaggtggctgtagtt

SEQ ID NO: 3664697 - DNA, 25 bp, Homo sapien
gcatcacatccctgtacagggtcct

SEQ ID NO: 3664698 - DNA, 25 bp, Homo sapien
tccagcatcacatccctgtacaggg

SEQ ID NO: 3664699 - DNA, 25 bp, Homo sapien
tactgagacaaggtggctgtagttc

SEQ ID NO: 3664700 - DNA, 25 bp, Homo sapien
gatgactctggcttggaaatttttc

SEQ ID NO: 3664701 - DNA, 25 bp, Homo sapien
cctcgcctttctccaacttgagaat

SEQ ID NO: 3664702 - DNA, 25 bp, Homo sapien
caacttgagaatcacttctggttta

SEQ ID NO: 3664703 - DNA, 25 bp, Homo sapien
taatatccatggctcctcgcctttc

SEQ ID NO: 3664704 - DNA, 25 bp, Homo sapien
tgggtcacgtcaacatgttacttcc

SEQ ID NO: 3664705 - DNA, 25 bp, Homo sapien
tgttacttccaaaggtctggagcct

SEQ ID NO: 3664706 - DNA, 25 bp, Homo sapien
aagagtacaacagggagctttctgg

SEQ ID NO: 3664707 - DNA, 25 bp, Homo sapien
gagatgctgggtgattcagagtcac

SEQ ID NO: 3664708 - DNA, 25 bp, Homo sapien
ctaggtaagttcagctgtttgtccc

SEQ ID NO: 3664709 - DNA, 25 bp, Homo sapien
tctattccagctgtgggatttgccc

SEQ ID NO: 3664710 - DNA, 25 bp, Homo sapien
gagtgaacaagccatccttgccaca

SEQ ID NO: 3664711 - DNA, 25 bp, Homo sapien
tactgagtccaatgtcccaagaaca

SEQ ID NO: 3664712 - DNA, 25 bp, Homo sapien
cattaccatagtggttttctcttgg

SEQ ID NO: 3664713 - DNA, 25 bp, Homo sapien
aggactgacttaaatgagaaggttt

SEQ ID NO: 3664714 - DNA, 25 bp, Homo sapien
gcacagtaaggactgacttaaatga

SEQ ID NO: 3664715 - DNA, 25 bp, Homo sapien
ggagtgagatttaacttctggctga

SEQ ID NO: 3664716 - DNA, 25 bp, Homo sapien
tttagtaagggttgacttctcagag

SEQ ID NO: 3664717 - DNA, 25 bp, Homo sapien
ctgtgtgagttcttagatgtttagt

SEQ ID NO: 3664718 - DNA, 25 bp, Homo sapien
tgtgtgagttcttagatgtttagta

SEQ ID NO: 3664719 - DNA, 25 bp, Homo sapien
tgacttctcagagaatgacttccca

SEQ ID NO: 3664720 - DNA, 25 bp, Homo sapien
tgaaaccggagtagtagcagaaaaa

SEQ ID NO: 3664721 - DNA, 25 bp, Homo sapien
gaaaaattttccacactgaatacat

SEQ ID NO: 3664722 - DNA, 25 bp, Homo sapien
ctgtgaaaccggagtagtagcagaa

SEQ ID NO: 3664723 - DNA, 25 bp, Homo sapien
cagaaaaattttccacactgaatac

SEQ ID NO: 3664724 - DNA, 25 bp, Homo sapien
acaattagggctgacttctgacgga

SEQ ID NO: 3664725 - DNA, 25 bp, Homo sapien
aattagggctgacttctgacggaag

SEQ ID NO: 3664726 - DNA, 25 bp, Homo sapien
tagttttgacttaacatagaatgat

SEQ ID NO: 3664727 - DNA, 25 bp, Homo sapien
tagggctgacttctgacggaaggtt

SEQ ID NO: 3664728 - DNA, 25 bp, Homo sapien
tttgtaacatagtgtatggtccaaa

SEQ ID NO: 3664729 - DNA, 25 bp, Homo sapien
gttttgtaacatagtgtatggtcca

SEQ ID NO: 3664730 - DNA, 25 bp, Homo sapien
agttttgtaacatagtgtatggtcc

SEQ ID NO: 3664731 - DNA, 25 bp, Homo sapien
ttagttttgtaacatagtgtatggt

SEQ ID NO: 3664732 - DNA, 25 bp, Homo sapien
gctgctttgatccaccattctgaga

SEQ ID NO: 3664733 - DNA, 25 bp, Homo sapien
gtcactcacagcagaatgtcctggc

SEQ ID NO: 3664734 - DNA, 25 bp, Homo sapien
tgatggcatgttcaccaacccactg

SEQ ID NO: 3664735 - DNA, 25 bp, Homo sapien
aagagcactcttgtttgtgggtccc

SEQ ID NO: 3664736 - DNA, 25 bp, Homo sapien
gtaaatgggtatccatgacctcaag

SEQ ID NO: 3664737 - DNA, 25 bp, Homo sapien
tcaagcacccctcacaaaatctgag

SEQ ID NO: 3664738 - DNA, 25 bp, Homo sapien
tcattcctttgtcaaaagtggtcac

SEQ ID NO: 3664739 - DNA, 25 bp, Homo sapien
cattcctttgtcaaaagtggtcacc

SEQ ID NO: 3664740 - DNA, 25 bp, Homo sapien
gatcaagggagaggatccctcatta

SEQ ID NO: 3664741 - DNA, 25 bp, Homo sapien
tcactttgagaggtaatgctcagcg

SEQ ID NO: 3664742 - DNA, 25 bp, Homo sapien
tgctgtcctcacatcaaggcccata

SEQ ID NO: 3664743 - DNA, 25 bp, Homo sapien
ctaataacatttccacagtgcacga

SEQ ID NO: 3664744 - DNA, 25 bp, Homo sapien
ttttggccctatttctgccatacac

SEQ ID NO: 3664745 - DNA, 25 bp, Homo sapien
ggaaaactgacatctcgaaaatagt

SEQ ID NO: 3664746 - DNA, 25 bp, Homo sapien
actgatattaacaatggtcttccta

SEQ ID NO: 3664747 - DNA, 25 bp, Homo sapien
caggtggcgtttaattaatagaaca

SEQ ID NO: 3664748 - DNA, 25 bp, Homo sapien
tagcattggtattgaacactctccc

SEQ ID NO: 3664749 - DNA, 25 bp, Homo sapien
gggcatgttgcaaatcacaaactcc

SEQ ID NO: 3664750 - DNA, 25 bp, Homo sapien
ttttagtccattactcgcctttcca

SEQ ID NO: 3664751 - DNA, 25 bp, Homo sapien
tgctttgaagaacacaagcttttga

SEQ ID NO: 3664752 - DNA, 25 bp, Homo sapien
cacgaattcggctagtatttacctc

SEQ ID NO: 3664753 - DNA, 25 bp, Homo sapien
gatgcaggcttggtatgttagagaa

SEQ ID NO: 3664754 - DNA, 25 bp, Homo sapien
tatttacctctgtgtcaatggcatc

SEQ ID NO: 3664755 - DNA, 25 bp, Homo sapien
tggcatcctgctgaaagtagatgca

SEQ ID NO: 3664756 - DNA, 25 bp, Homo sapien
tagacctgccctgcaatatatgcta

SEQ ID NO: 3664757 - DNA, 25 bp, Homo sapien
tagacagtaactgaagcctctgata

SEQ ID NO: 3664758 - DNA, 25 bp, Homo sapien
ggaaggcaaatctgttgaatccagg

SEQ ID NO: 3664759 - DNA, 25 bp, Homo sapien
tttttaaatacccagtgtcagatac

SEQ ID NO: 3664760 - DNA, 25 bp, Homo sapien
tggataaacacgacagactggcctt

SEQ ID NO: 3664761 - DNA, 25 bp, Homo sapien
tatttaagccacgagcagggttgca

SEQ ID NO: 3664762 - DNA, 25 bp, Homo sapien
gatccacgatccagtacagccatag

SEQ ID NO: 3664763 - DNA, 25 bp, Homo sapien
gaaagccaacatacctgcctaggga

SEQ ID NO: 3664764 - DNA, 25 bp, Homo sapien
aagactcattgtgggttcagggaag

SEQ ID NO: 3664765 - DNA, 25 bp, Homo sapien
gagcagagcagctatgcttctgggt

SEQ ID NO: 3664766 - DNA, 25 bp, Homo sapien
cattcagaggtggtccaatgcagtc

SEQ ID NO: 3664767 - DNA, 25 bp, Homo sapien
cgatggtttaaacacagtcgtccct

SEQ ID NO: 3664768 - DNA, 25 bp, Homo sapien
tagcactgtctaggaggactacact

SEQ ID NO: 3664769 - DNA, 25 bp, Homo sapien
aagaaaagcggatagggactgctga

SEQ ID NO: 3664770 - DNA, 25 bp, Homo sapien
tgggttctgcattacatagggcaca

SEQ ID NO: 3664771 - DNA, 25 bp, Homo sapien
tcaaagaaagcatagcagttgcatc

SEQ ID NO: 3664772 - DNA, 25 bp, Homo sapien
tgcaggtacaagatgaggagtcaca

SEQ ID NO: 3664773 - DNA, 25 bp, Homo sapien
aaagggatggtgctgttgacactcg

SEQ ID NO: 3664774 - DNA, 25 bp, Homo sapien
tcatgcagacaggaaccttgagtgg

SEQ ID NO: 3664775 - DNA, 25 bp, Homo sapien
tgacactcgatggtgattacactca

SEQ ID NO: 3664776 - DNA, 25 bp, Homo sapien
aacaccatgggcttgaagtgtcctt

SEQ ID NO: 3664777 - DNA, 25 bp, Homo sapien
ccatgggcttgaagtgtccttgtta

SEQ ID NO: 3664778 - DNA, 25 bp, Homo sapien
tgaagtgtccttgttaacgtggcca

SEQ ID NO: 3664779 - DNA, 25 bp, Homo sapien
gtccttgttaacgtggccatggcca

SEQ ID NO: 3664780 - DNA, 25 bp, Homo sapien
accgccctgcattcctcctcagctt

SEQ ID NO: 3664781 - DNA, 25 bp, Homo sapien
agcttccagatcctgaggagctctg

SEQ ID NO: 3664782 - DNA, 25 bp, Homo sapien
gtgaccagggacaccgccctgcatt

SEQ ID NO: 3664783 - DNA, 25 bp, Homo sapien
ctcaaggtcagtgggagtgaccagg

SEQ ID NO: 3664784 - DNA, 25 bp, Homo sapien
ggagaagcccgggtcagagaggagc

SEQ ID NO: 3664785 - DNA, 25 bp, Homo sapien
tctgagaacccgttggggtgggtgc

SEQ ID NO: 3664786 - DNA, 25 bp, Homo sapien
gtgggtgctggagaagcccgggtca

SEQ ID NO: 3664787 - DNA, 25 bp, Homo sapien
gagcccgggtcggagaggagccctc

SEQ ID NO: 3664788 - DNA, 25 bp, Homo sapien
gtagatcttgctcatcaaacactcc

SEQ ID NO: 3664789 - DNA, 25 bp, Homo sapien
tggagctggcattggtgtcatcacc

SEQ ID NO: 3664790 - DNA, 25 bp, Homo sapien
tggtgtcatcacctccatgatgtag

SEQ ID NO: 3664791 - DNA, 25 bp, Homo sapien
acctccatgatgtagatcttgctca

SEQ ID NO: 3664792 - DNA, 25 bp, Homo sapien
tagcactagcaaatctctctgggct

SEQ ID NO: 3664793 - DNA, 25 bp, Homo sapien
ctagcactagcaaatctctctgggc

SEQ ID NO: 3664794 - DNA, 25 bp, Homo sapien
aaaggctgagacattgtttgtgcca

SEQ ID NO: 3664795 - DNA, 25 bp, Homo sapien
tgaagtactgaagatgtgacctcaa

SEQ ID NO: 3664796 - DNA, 25 bp, Homo sapien
caatttcacttgctgcttgatcaga

SEQ ID NO: 3664797 - DNA, 25 bp, Homo sapien
gctgcttgatcagactgaaaggctg

SEQ ID NO: 3664798 - DNA, 25 bp, Homo sapien
cagccctaggacagcattgtcttat

SEQ ID NO: 3664799 - DNA, 25 bp, Homo sapien
tctgggaagctttatcagatggcca

SEQ ID NO: 3664800 - DNA, 25 bp, Homo sapien
ggtccattactgcactttctgggaa

SEQ ID NO: 3664801 - DNA, 25 bp, Homo sapien
caccctctgatgtgagagctggcct

SEQ ID NO: 3664802 - DNA, 25 bp, Homo sapien
tggctctgctttcagaaaacatcaa

SEQ ID NO: 3664803 - DNA, 25 bp, Homo sapien
gctttcagaaaacatcaaggtactt

SEQ ID NO: 3664804 - DNA, 25 bp, Homo sapien
ctggagtgtggtcattggctctgct

SEQ ID NO: 3664805 - DNA, 25 bp, Homo sapien
tttgagaactcagtccctggagtgt

SEQ ID NO: 3664806 - DNA, 25 bp, Homo sapien
tttggatactgatcagaggctcctt

SEQ ID NO: 3664807 - DNA, 25 bp, Homo sapien
tttcatggacaaagcttctgaagct

SEQ ID NO: 3664808 - DNA, 25 bp, Homo sapien
aagccctttggatactgatcagagg

SEQ ID NO: 3664809 - DNA, 25 bp, Homo sapien
tagagttttcatggacaaagcttct

SEQ ID NO: 3664810 - DNA, 25 bp, Homo sapien
actcccgttgccctaggctgaggct

SEQ ID NO: 3664811 - DNA, 25 bp, Homo sapien
gtgtgaacccaacaagcactgagag

SEQ ID NO: 3664812 - DNA, 25 bp, Homo sapien
cctcccatgagttgacttctcttgg

SEQ ID NO: 3664813 - DNA, 25 bp, Homo sapien
ccagccagcttatttaataggtgtg

SEQ ID NO: 3664814 - DNA, 25 bp, Homo sapien
gggacacactgacccctggttctgg

SEQ ID NO: 3664815 - DNA, 25 bp, Homo sapien
ggacacactgacccctggttctggt

SEQ ID NO: 3664816 - DNA, 25 bp, Homo sapien
acagggacacactgacccctggttc

SEQ ID NO: 3664817 - DNA, 25 bp, Homo sapien
agggacacactgacccctggttctg

SEQ ID NO: 3664818 - DNA, 25 bp, Homo sapien
agcctctgcggtgtacatggaggcc

SEQ ID NO: 3664819 - DNA, 25 bp, Homo sapien
ggtgtacatggaggccctcatcagc

SEQ ID NO: 3664820 - DNA, 25 bp, Homo sapien
taatcagagcctctgcggtgtacat

SEQ ID NO: 3664821 - DNA, 25 bp, Homo sapien
aaagtaatcagagcctctgcggtgt

SEQ ID NO: 3664822 - DNA, 25 bp, Homo sapien
tattaactggtgtgtaaaatcactc

SEQ ID NO: 3664823 - DNA, 25 bp, Homo sapien
ccaccaagtggagtatgtttacaca

SEQ ID NO: 3664824 - DNA, 25 bp, Homo sapien
caaatgagacatacgtaaactgtgc

SEQ ID NO: 3664825 - DNA, 25 bp, Homo sapien
ttgtattgcaaagggccaaatgaga

SEQ ID NO: 3664826 - DNA, 25 bp, Homo sapien
gattttctcaggaatattgtgcttg

SEQ ID NO: 3664827 - DNA, 25 bp, Homo sapien
tcagaagggttggactccaaaggta

SEQ ID NO: 3664828 - DNA, 25 bp, Homo sapien
tctggatggtcagaagggttggact

SEQ ID NO: 3664829 - DNA, 25 bp, Homo sapien
catctatttgagattttctcaggaa

SEQ ID NO: 3664830 - DNA, 25 bp, Homo sapien
ttcttggcagaaaaaacaatgttgt

SEQ ID NO: 3664831 - DNA, 25 bp, Homo sapien
cttggcagaaaaaacaatgttgtct

SEQ ID NO: 3664832 - DNA, 25 bp, Homo sapien
tttcttggcagaaaaaacaatgttg

SEQ ID NO: 3664833 - DNA, 25 bp, Homo sapien
ggcagaaaaaacaatgttgtctcac

SEQ ID NO: 3664834 - DNA, 25 bp, Homo sapien
atctgtggttagagccccaagtcca

SEQ ID NO: 3664835 - DNA, 25 bp, Homo sapien
gtgtgttctctggatataccaaacc

SEQ ID NO: 3664836 - DNA, 25 bp, Homo sapien
agaaaatctgtggttagagccccaa

SEQ ID NO: 3664837 - DNA, 25 bp, Homo sapien
ctctggatataccaaacctgagaat

SEQ ID NO: 3664838 - DNA, 25 bp, Homo sapien
caattttcctaaagggcttctcagt

SEQ ID NO: 3664839 - DNA, 25 bp, Homo sapien
ccaattttcctaaagggcttctcag

SEQ ID NO: 3664840 - DNA, 25 bp, Homo sapien
tccaattttcctaaagggcttctca

SEQ ID NO: 3664841 - DNA, 25 bp, Homo sapien
ttctgagatgcttttcttcacatga

SEQ ID NO: 3664842 - DNA, 25 bp, Homo sapien
tgcttttcttcacatgacgatgcct

SEQ ID NO: 3664843 - DNA, 25 bp, Homo sapien
ttttcttcacatgacgatgcctcac

SEQ ID NO: 3664844 - DNA, 25 bp, Homo sapien
gagatgcttttcttcacatgacgat

SEQ ID NO: 3664845 - DNA, 25 bp, Homo sapien
tatgttaatatatcaccaaggtcac

SEQ ID NO: 3664846 - DNA, 25 bp, Homo sapien
gggtgtaaccgttcatcaaatatgc

SEQ ID NO: 3664847 - DNA, 25 bp, Homo sapien
tgtaaatgggtgtaaccgttcatca

SEQ ID NO: 3664848 - DNA, 25 bp, Homo sapien
taaatgggtgtaaccgttcatcaaa

SEQ ID NO: 3664849 - DNA, 25 bp, Homo sapien
caaatatgcccaaagatctatctgc

SEQ ID NO: 3664850 - DNA, 25 bp, Homo sapien
aaaccaatttgtgttaaggatcata

SEQ ID NO: 3664851 - DNA, 25 bp, Homo sapien
gaaaaccaatttgtgttaaggatca

SEQ ID NO: 3664852 - DNA, 25 bp, Homo sapien
aaccaatttgtgttaaggatcatat

SEQ ID NO: 3664853 - DNA, 25 bp, Homo sapien
ctgaaaaccaatttgtgttaaggat

SEQ ID NO: 3664854 - DNA, 25 bp, Homo sapien
tagcacgtgctaagagttccaaatg

SEQ ID NO: 3664855 - DNA, 25 bp, Homo sapien
tcattcctggccatgaagttgactt

SEQ ID NO: 3664856 - DNA, 25 bp, Homo sapien
tttcagggctttcattccaagtgca

SEQ ID NO: 3664857 - DNA, 25 bp, Homo sapien
aatgacttgcagctcctcgagaagg

SEQ ID NO: 3664858 - DNA, 25 bp, Homo sapien
tgcctcttacgtctaccttcactgg

SEQ ID NO: 3664859 - DNA, 25 bp, Homo sapien
tttcagttcccctgctccaatctgt

SEQ ID NO: 3664860 - DNA, 25 bp, Homo sapien
aatctgtgtgcaatgcctcttacgt

SEQ ID NO: 3664861 - DNA, 25 bp, Homo sapien
gtctaccttcactggtggtctgcat

SEQ ID NO: 3664862 - DNA, 25 bp, Homo sapien
gccagtaacgctgatattgtaatta

SEQ ID NO: 3664863 - DNA, 25 bp, Homo sapien
gaagataaactagcgaatacaggct

SEQ ID NO: 3664864 - DNA, 25 bp, Homo sapien
gctgttgtcatgtgccatggttcga

SEQ ID NO: 3664865 - DNA, 25 bp, Homo sapien
ccatggttcgaagattgaagtagaa

SEQ ID NO: 3664866 - DNA, 25 bp, Homo sapien
aatgaattaaatcatcagcactcaa

SEQ ID NO: 3664867 - DNA, 25 bp, Homo sapien
gacacggtctcattaagttgccaag

SEQ ID NO: 3664868 - DNA, 25 bp, Homo sapien
acatcaaaatgagggtttacactac

SEQ ID NO: 3664869 - DNA, 25 bp, Homo sapien
ggcaatatagcgaggcaccatctgt

SEQ ID NO: 3664870 - DNA, 25 bp, Homo sapien
aaggatatgaatggcaaatgctgtc

SEQ ID NO: 3664871 - DNA, 25 bp, Homo sapien
ttccactttccgcgtgcagcattct

SEQ ID NO: 3664872 - DNA, 25 bp, Homo sapien
actttccgcgtgcagcattctcaac

SEQ ID NO: 3664873 - DNA, 25 bp, Homo sapien
gcagcattctcaacggcacatcttc

SEQ ID NO: 3664874 - DNA, 25 bp, Homo sapien
tccgcgtgcagcattctcaacggca

SEQ ID NO: 3664875 - DNA, 25 bp, Homo sapien
catggggacgagtgcaagtgcccca

SEQ ID NO: 3664876 - DNA, 25 bp, Homo sapien
tgcagataagtttgatgaactatga

SEQ ID NO: 3664877 - DNA, 25 bp, Homo sapien
gacgagtgcaagtgccccaagtttt

SEQ ID NO: 3664878 - DNA, 25 bp, Homo sapien
ttttggagactggagttgcagataa

SEQ ID NO: 3664879 - DNA, 25 bp, Homo sapien
tcatcaaaagtgaaagcttacgttc

SEQ ID NO: 3664880 - DNA, 25 bp, Homo sapien
gctcttggaagtactttcataactc

SEQ ID NO: 3664881 - DNA, 25 bp, Homo sapien
gaagcagtttagctagttatttcca

SEQ ID NO: 3664882 - DNA, 25 bp, Homo sapien
tgccactactttccttagcctcatt

SEQ ID NO: 3664883 - DNA, 25 bp, Homo sapien
ctcaaacacgaagtgatgaaagcca

SEQ ID NO: 3664884 - DNA, 25 bp, Homo sapien
cctcaaacacgaagtgatgaaagcc

SEQ ID NO: 3664885 - DNA, 25 bp, Homo sapien
tcctccctcaaacacgaagtgatga

SEQ ID NO: 3664886 - DNA, 25 bp, Homo sapien
tccctcaaacacgaagtgatgaaag

SEQ ID NO: 3664887 - DNA, 25 bp, Homo sapien
gatcagtgcaaccagaatggcaaag

SEQ ID NO: 3664888 - DNA, 25 bp, Homo sapien
gtgcaaccagaatggcaaagcagca

SEQ ID NO: 3664889 - DNA, 25 bp, Homo sapien
ggctgaaaagatcagtgcaaccaga

SEQ ID NO: 3664890 - DNA, 25 bp, Homo sapien
catgatgtccacggctgaaaagatc

SEQ ID NO: 3664891 - DNA, 25 bp, Homo sapien
cctcatcctgtgcattggagagaag

SEQ ID NO: 3664892 - DNA, 25 bp, Homo sapien
tcatcctgtgcattggagagaagag

SEQ ID NO: 3664893 - DNA, 25 bp, Homo sapien
ctcatcctgtgcattggagagaaga

SEQ ID NO: 3664894 - DNA, 25 bp, Homo sapien
tcctgtgcattggagagaagagcaa

SEQ ID NO: 3664895 - DNA, 25 bp, Homo sapien
gcctggaccaatggctgaggctgcc

SEQ ID NO: 3664896 - DNA, 25 bp, Homo sapien
ggcctggaccaatggctgaggctgc

SEQ ID NO: 3664897 - DNA, 25 bp, Homo sapien
tgcatccagggtgagtaatatctga

SEQ ID NO: 3664898 - DNA, 25 bp, Homo sapien
caaacatatcgctgcatccagggtg

SEQ ID NO: 3664899 - DNA, 25 bp, Homo sapien
catgttgcaaacatatcgctgcatc

SEQ ID NO: 3664900 - DNA, 25 bp, Homo sapien
taagtttcatgttgcaaacatatcg

SEQ ID NO: 3664901 - DNA, 25 bp, Homo sapien
tcatcgcagcagccctgacttggcc

SEQ ID NO: 3664902 - DNA, 25 bp, Homo sapien
ctgtgactccctagcacaagggaca

SEQ ID NO: 3664903 - DNA, 25 bp, Homo sapien
attgtttgaatccagttgcctgctc

SEQ ID NO: 3664904 - DNA, 25 bp, Homo sapien
tgtgactccctagcacaagggacat

SEQ ID NO: 3664905 - DNA, 25 bp, Homo sapien
tggagcgttgattccgcaccaggca

SEQ ID NO: 3664906 - DNA, 25 bp, Homo sapien
gggctttacagctttggagcgttga

SEQ ID NO: 3664907 - DNA, 25 bp, Homo sapien
tacagctttggagcgttgattccgc

SEQ ID NO: 3664908 - DNA, 25 bp, Homo sapien
agccggggctttacagctttggagc

SEQ ID NO: 3664909 - DNA, 25 bp, Homo sapien
gggcactaccagaacctggacactc

SEQ ID NO: 3664910 - DNA, 25 bp, Homo sapien
tgggcactaccagaacctggacact

SEQ ID NO: 3664911 - DNA, 25 bp, Homo sapien
tttttctgactcctctgctgtcaca

SEQ ID NO: 3664912 - DNA, 25 bp, Homo sapien
ttttctgactcctctgctgtcacac

SEQ ID NO: 3664913 - DNA, 25 bp, Homo sapien
ctatttttctgactcctctgctgtc

SEQ ID NO: 3664914 - DNA, 25 bp, Homo sapien
tatttttctgactcctctgctgtca

SEQ ID NO: 3664915 - DNA, 25 bp, Homo sapien
cttcatggctttcggttgaagctgg

SEQ ID NO: 3664916 - DNA, 25 bp, Homo sapien
ggctttcggttgaagctggaagaac

SEQ ID NO: 3664917 - DNA, 25 bp, Homo sapien
catggctttcggttgaagctggaag

SEQ ID NO: 3664918 - DNA, 25 bp, Homo sapien
aagctggaagaacaggtctcctgaa

SEQ ID NO: 3664919 - DNA, 25 bp, Homo sapien
tgctctgttactggagcacattctc

SEQ ID NO: 3664920 - DNA, 25 bp, Homo sapien
tctgttactggagcacattctctcc

SEQ ID NO: 3664921 - DNA, 25 bp, Homo sapien
gtgctctgttactggagcacattct

SEQ ID NO: 3664922 - DNA, 25 bp, Homo sapien
gctctgttactggagcacattctct

SEQ ID NO: 3664923 - DNA, 25 bp, Homo sapien
caaggatgcttgtgtgatgtgacgc

SEQ ID NO: 3664924 - DNA, 25 bp, Homo sapien
gatgtgacgcgagcttgcctttcat

SEQ ID NO: 3664925 - DNA, 25 bp, Homo sapien
atgcttgtgtgatgtgacgcgagct

SEQ ID NO: 3664926 - DNA, 25 bp, Homo sapien
tgtgtgatgtgacgcgagcttgcct

SEQ ID NO: 3664927 - DNA, 25 bp, Homo sapien
tagaaaagattttgaaaaacagaca

SEQ ID NO: 3664928 - DNA, 25 bp, Homo sapien
tgagtaaattcatccagccttggaa

SEQ ID NO: 3664929 - DNA, 25 bp, Homo sapien
caacagactttttggccatgttgag

SEQ ID NO: 3664930 - DNA, 25 bp, Homo sapien
tgggaagacactatgtcaacagact

SEQ ID NO: 3664931 - DNA, 25 bp, Homo sapien
gatgagtgtggttgagatcccaatg

SEQ ID NO: 3664932 - DNA, 25 bp, Homo sapien
tgggattctgcagaaacagtcactt

SEQ ID NO: 3664933 - DNA, 25 bp, Homo sapien
acaacattatcttggtactgccttt

SEQ ID NO: 3664934 - DNA, 25 bp, Homo sapien
gacaacattatcttggtactgcctt

SEQ ID NO: 3664935 - DNA, 25 bp, Homo sapien
aacattatcttggtactgcctttca

SEQ ID NO: 3664936 - DNA, 25 bp, Homo sapien
caacattatcttggtactgcctttc

SEQ ID NO: 3664937 - DNA, 25 bp, Homo sapien
gtggtcatcacatgttcatggaagt

SEQ ID NO: 3664938 - DNA, 25 bp, Homo sapien
cagtgggccagtattttttggcaaa

SEQ ID NO: 3664939 - DNA, 25 bp, Homo sapien
cggtcagtgggccagtattttttgg

SEQ ID NO: 3664940 - DNA, 25 bp, Homo sapien
aaactcgtggtcatcacatgttcat

SEQ ID NO: 3664941 - DNA, 25 bp, Homo sapien
acagagtggaagttgcaccattgca

SEQ ID NO: 3664942 - DNA, 25 bp, Homo sapien
aacagagtggaagttgcaccattgc

SEQ ID NO: 3664943 - DNA, 25 bp, Homo sapien
gcacatccagctgtgctctagcctg

SEQ ID NO: 3664944 - DNA, 25 bp, Homo sapien
ctttgaatcagctgttacatcactc

SEQ ID NO: 3664945 - DNA, 25 bp, Homo sapien
aatttcaaggcttctaatacctttg

SEQ ID NO: 3664946 - DNA, 25 bp, Homo sapien
gcttctaatacctttgaatcagctg

SEQ ID NO: 3664947 - DNA, 25 bp, Homo sapien
gctgttacatcactcactagcttga

SEQ ID NO: 3664948 - DNA, 25 bp, Homo sapien
ggcttcctaatatccccaagcttta

SEQ ID NO: 3664949 - DNA, 25 bp, Homo sapien
cagtagcaaatattcagcaactcca

SEQ ID NO: 3664950 - DNA, 25 bp, Homo sapien
gtaaaccaggcctttattcgtgcat

SEQ ID NO: 3664951 - DNA, 25 bp, Homo sapien
caaagaaaatctgttaggcttccta

SEQ ID NO: 3664952 - DNA, 25 bp, Homo sapien
catcttgccctcattgaggttaaag

SEQ ID NO: 3664953 - DNA, 25 bp, Homo sapien
atcttgccctcattgaggttaaagt

SEQ ID NO: 3664954 - DNA, 25 bp, Homo sapien
agagacctaccatatgcactgccag

SEQ ID NO: 3664955 - DNA, 25 bp, Homo sapien
gaaagactaggatggcaaattccag

SEQ ID NO: 3664956 - DNA, 25 bp, Homo sapien
taaaaaggaaagactaggatggcaa

SEQ ID NO: 3664957 - DNA, 25 bp, Homo sapien
aggatttcccagcaaaaataaggat

SEQ ID NO: 3664958 - DNA, 25 bp, Homo sapien
gtggaaaactggcgacattgaaaaa

SEQ ID NO: 3664959 - DNA, 25 bp, Homo sapien
gtgtggaaaactggcgacattgaaa

SEQ ID NO: 3664960 - DNA, 25 bp, Homo sapien
tgtggaaaactggcgacattgaaaa

SEQ ID NO: 3664961 - DNA, 25 bp, Homo sapien
caatgacctggagacttaataagac

SEQ ID NO: 3664962 - DNA, 25 bp, Homo sapien
cacaatgacctggagacttaataag

SEQ ID NO: 3664963 - DNA, 25 bp, Homo sapien
tgctttcggaagtcctacgatttcg

SEQ ID NO: 3664964 - DNA, 25 bp, Homo sapien
ccgctgctttcggaagtcctacgat

SEQ ID NO: 3664965 - DNA, 25 bp, Homo sapien
gctgctttcggaagtcctacgattt

SEQ ID NO: 3664966 - DNA, 25 bp, Homo sapien
cgccgctgctttcggaagtcctacg

SEQ ID NO: 3664967 - DNA, 25 bp, Homo sapien
ctgctagccccggtaatcaaaacca

SEQ ID NO: 3664968 - DNA, 25 bp, Homo sapien
tgctagccccggtaatcaaaaccac

SEQ ID NO: 3664969 - DNA, 25 bp, Homo sapien
cggtaatcaaaaccacctttcgcat

SEQ ID NO: 3664970 - DNA, 25 bp, Homo sapien
ctccggggaacctaggcaaagccag

SEQ ID NO: 3664971 - DNA, 25 bp, Homo sapien
ggtcgcagacccctgctctctcgga

SEQ ID NO: 3664972 - DNA, 25 bp, Homo sapien
tgctctctcggacccctgatccgct

SEQ ID NO: 3664973 - DNA, 25 bp, Homo sapien
gggtccgttcgtggagggtcgcaga

SEQ ID NO: 3664974 - DNA, 25 bp, Homo sapien
ctcaagaggccgacatgccccacac

SEQ ID NO: 3664975 - DNA, 25 bp, Homo sapien
tactgatgctctagttttccttttc

SEQ ID NO: 3664976 - DNA, 25 bp, Homo sapien
gcgacactcatcacttactgatgct

SEQ ID NO: 3664977 - DNA, 25 bp, Homo sapien
tcatcactgcgacactcatcactta

SEQ ID NO: 3664978 - DNA, 25 bp, Homo sapien
tcacttactgatgctctagttttcc

SEQ ID NO: 3664979 - DNA, 25 bp, Homo sapien
cctgcacgccaaacacagatgaagc

SEQ ID NO: 3664980 - DNA, 25 bp, Homo sapien
cacagtgggtcaccctatacagact

SEQ ID NO: 3664981 - DNA, 25 bp, Homo sapien
cataactgcttacaccgcacctgtt

SEQ ID NO: 3664982 - DNA, 25 bp, Homo sapien
gtgttatgctgcacaatcacacgag

SEQ ID NO: 3664983 - DNA, 25 bp, Homo sapien
aagaaaacgtggtactgagacacag

SEQ ID NO: 3664984 - DNA, 25 bp, Homo sapien
aaaagccctctctgcccaaaaaatg

SEQ ID NO: 3664985 - DNA, 25 bp, Homo sapien
tggacccacccaactaatataagac

SEQ ID NO: 3664986 - DNA, 25 bp, Homo sapien
gaacaaatctttactggcctaggga

SEQ ID NO: 3664987 - DNA, 25 bp, Homo sapien
gatcgatatgtatcaggatgtactc

SEQ ID NO: 3664988 - DNA, 25 bp, Homo sapien
ttcaacacggatcacatacaaccat

SEQ ID NO: 3664989 - DNA, 25 bp, Homo sapien
atggtcttcaacacggatcacatac

SEQ ID NO: 3664990 - DNA, 25 bp, Homo sapien
gtcttcaacacggatcacatacaac

SEQ ID NO: 3664991 - DNA, 25 bp, Homo sapien
aacacggatcacatacaaccatttc

SEQ ID NO: 3664992 - DNA, 25 bp, Homo sapien
atgatcccagcatttagatatatac

SEQ ID NO: 3664993 - DNA, 25 bp, Homo sapien
gagaagtgctttgatatttagttgt

SEQ ID NO: 3664994 - DNA, 25 bp, Homo sapien
gaagtgctttgatatttagttgtgg

SEQ ID NO: 3664995 - DNA, 25 bp, Homo sapien
tgaaaagaggccaaagagaagtgct

SEQ ID NO: 3664996 - DNA, 25 bp, Homo sapien
cttgaaaagaggccaaagagaagtg

SEQ ID NO: 3664997 - DNA, 25 bp, Homo sapien
gataaaatggccaaagacatcggtc

SEQ ID NO: 3664998 - DNA, 25 bp, Homo sapien
caggccttcagctgtggagaacata

SEQ ID NO: 3664999 - DNA, 25 bp, Homo sapien
caaagacatcggtctcaaacacctc

SEQ ID NO: 3665000 - DNA, 25 bp, Homo sapien
cagcagtgatcttatcaccctgggt

SEQ ID NO: 3665001 - DNA, 25 bp, Homo sapien
tcttgaatgggatcctagaactgaa

SEQ ID NO: 3665002 - DNA, 25 bp, Homo sapien
taaatcagttaactggctgctcaac

SEQ ID NO: 3665003 - DNA, 25 bp, Homo sapien
ggtgtagggcatacagaaagtctct

SEQ ID NO: 3665004 - DNA, 25 bp, Homo sapien
aactataataatgccctgtgcccag

SEQ ID NO: 3665005 - DNA, 25 bp, Homo sapien
ccttgcctttgctgtgctggaagtc

SEQ ID NO: 3665006 - DNA, 25 bp, Homo sapien
agtcctcgaggctgaaattagattt

SEQ ID NO: 3665007 - DNA, 25 bp, Homo sapien
tgtgctggaagtcctcgaggctgaa

SEQ ID NO: 3665008 - DNA, 25 bp, Homo sapien
tgcgagatgatgtccagatgagctg

SEQ ID NO: 3665009 - DNA, 25 bp, Homo sapien
ctgctggttgaaagttcctgttcaa

SEQ ID NO: 3665010 - DNA, 25 bp, Homo sapien
gttgaaagttcctgttcaaagccac

SEQ ID NO: 3665011 - DNA, 25 bp, Homo sapien
ctggttgaaagttcctgttcaaagc

SEQ ID NO: 3665012 - DNA, 25 bp, Homo sapien
ggttgaaagttcctgttcaaagcca

SEQ ID NO: 3665013 - DNA, 25 bp, Homo sapien
tgacatacacagacgaatacagcac

SEQ ID NO: 3665014 - DNA, 25 bp, Homo sapien
atgacatacacagacgaatacagca

SEQ ID NO: 3665015 - DNA, 25 bp, Homo sapien
gttctccgagatttagtgtcctcat

SEQ ID NO: 3665016 - DNA, 25 bp, Homo sapien
tctccgagatttagtgtcctcatct

SEQ ID NO: 3665017 - DNA, 25 bp, Homo sapien
atggtaatacttagacccacctcca

SEQ ID NO: 3665018 - DNA, 25 bp, Homo sapien
ggtaatacttagacccacctccatg

SEQ ID NO: 3665019 - DNA, 25 bp, Homo sapien
catcattctaagagccagaacacag

SEQ ID NO: 3665020 - DNA, 25 bp, Homo sapien
gaataacacctgataaaggtagcaa

SEQ ID NO: 3665021 - DNA, 25 bp, Homo sapien
aataacacctgataaaggtagcaat

SEQ ID NO: 3665022 - DNA, 25 bp, Homo sapien
ataacacctgataaaggtagcaatt

SEQ ID NO: 3665023 - DNA, 25 bp, Homo sapien
ttgagacttaaatagaatcccagac

SEQ ID NO: 3665024 - DNA, 25 bp, Homo sapien
aattgagacttaaatagaatcccag

SEQ ID NO: 3665025 - DNA, 25 bp, Homo sapien
attgagacttaaatagaatcccaga

SEQ ID NO: 3665026 - DNA, 25 bp, Homo sapien
aaattggtcaatgctgtacctggac

SEQ ID NO: 3665027 - DNA, 25 bp, Homo sapien
tccatataaacggaggcagaattcc

SEQ ID NO: 3665028 - DNA, 25 bp, Homo sapien
gacaggccacattggaatagagacc

SEQ ID NO: 3665029 - DNA, 25 bp, Homo sapien
cggaggcagaattccatatgtcaaa

SEQ ID NO: 3665030 - DNA, 25 bp, Homo sapien
ttatatggtgtcaaagtgaatgcat

SEQ ID NO: 3665031 - DNA, 25 bp, Homo sapien
tgaatgcatttgcaaaaaagcgaag

SEQ ID NO: 3665032 - DNA, 25 bp, Homo sapien
atggtgtcaaagtgaatgcatttgc

SEQ ID NO: 3665033 - DNA, 25 bp, Homo sapien
tatggtgtcaaagtgaatgcatttg

SEQ ID NO: 3665034 - DNA, 25 bp, Homo sapien
gacagattcaggcttttggtggaaa

SEQ ID NO: 3665035 - DNA, 25 bp, Homo sapien
ggattgacagattcaggcttttggt

SEQ ID NO: 3665036 - DNA, 25 bp, Homo sapien
gatcagaggattgacagattcaggc

SEQ ID NO: 3665037 - DNA, 25 bp, Homo sapien
tcagaggattgacagattcaggctt

SEQ ID NO: 3665038 - DNA, 25 bp, Homo sapien
ccaccgatcccatctgagaatacta

SEQ ID NO: 3665039 - DNA, 25 bp, Homo sapien
caccaccgatcccatctgagaatac

SEQ ID NO: 3665040 - DNA, 25 bp, Homo sapien
accaccgatcccatctgagaatact

SEQ ID NO: 3665041 - DNA, 25 bp, Homo sapien
tgtgcttttccagttccagtaactt

SEQ ID NO: 3665042 - DNA, 25 bp, Homo sapien
ctaatgtgcttttccagttccagta

SEQ ID NO: 3665043 - DNA, 25 bp, Homo sapien
ttccagttccagtaacttttgataa

SEQ ID NO: 3665044 - DNA, 25 bp, Homo sapien
tttttcagcagtgtcttcatctagg

SEQ ID NO: 3665045 - DNA, 25 bp, Homo sapien
agtagaaatccatgtaccccagaat

SEQ ID NO: 3665046 - DNA, 25 bp, Homo sapien
ttatccaactcagtagaaatccatg

SEQ ID NO: 3665047 - DNA, 25 bp, Homo sapien
tacagaaggtatgcaatgttccaga

SEQ ID NO: 3665048 - DNA, 25 bp, Homo sapien
agagtgtcattgtcagctctggctt

SEQ ID NO: 3665049 - DNA, 25 bp, Homo sapien
tgaactccctcagaatcaataaaag

SEQ ID NO: 3665050 - DNA, 25 bp, Homo sapien
tgcaaatagtgttaagggtcgggcc

SEQ ID NO: 3665051 - DNA, 25 bp, Homo sapien
tatagtgtaccttacaccagcagtt

SEQ ID NO: 3665052 - DNA, 25 bp, Homo sapien
gggtcgggcccaatattagcatgaa

SEQ ID NO: 3665053 - DNA, 25 bp, Homo sapien
ctacagaccatccttcctgaagaac

SEQ ID NO: 3665054 - DNA, 25 bp, Homo sapien
gaccatccttcctgaagaacaacta

SEQ ID NO: 3665055 - DNA, 25 bp, Homo sapien
atccttcctgaagaacaactattaa

SEQ ID NO: 3665056 - DNA, 25 bp, Homo sapien
ccatccttcctgaagaacaactatt

SEQ ID NO: 3665057 - DNA, 25 bp, Homo sapien
taagtcctgtgtaagctaacagtgc

SEQ ID NO: 3665058 - DNA, 25 bp, Homo sapien
cagaatcgcgagtgaacagatgtca

SEQ ID NO: 3665059 - DNA, 25 bp, Homo sapien
ggacatgggtcagtaacctgatact

SEQ ID NO: 3665060 - DNA, 25 bp, Homo sapien
tgaggactacctaaatgcagaatcg

SEQ ID NO: 3665061 - DNA, 25 bp, Homo sapien
ttaagtggtgatgtgaggtacttca

SEQ ID NO: 3665062 - DNA, 25 bp, Homo sapien
taagtggtgatgtgaggtacttcac

SEQ ID NO: 3665063 - DNA, 25 bp, Homo sapien
tcactgagcattgtgacaggcacgg

SEQ ID NO: 3665064 - DNA, 25 bp, Homo sapien
tgagcattgtgacaggcacgggctt

SEQ ID NO: 3665065 - DNA, 25 bp, Homo sapien
cagggtcagagtcattcaagaagcc

SEQ ID NO: 3665066 - DNA, 25 bp, Homo sapien
tgtgcccagttaggaaagaacatgc

SEQ ID NO: 3665067 - DNA, 25 bp, Homo sapien
caggcctgtgcaccactgttaaata

SEQ ID NO: 3665068 - DNA, 25 bp, Homo sapien
catgccatattacggacagggtcag

SEQ ID NO: 3665069 - DNA, 25 bp, Homo sapien
ctctgacggccctttgtaatagcat

SEQ ID NO: 3665070 - DNA, 25 bp, Homo sapien
cttgacctctgacggccctttgtaa

SEQ ID NO: 3665071 - DNA, 25 bp, Homo sapien
gagcttgacctctgacggccctttg

SEQ ID NO: 3665072 - DNA, 25 bp, Homo sapien
cctctgacggccctttgtaatagca

SEQ ID NO: 3665073 - DNA, 25 bp, Homo sapien
cactgtcgcgcagaagctcctcaat

SEQ ID NO: 3665074 - DNA, 25 bp, Homo sapien
aaccgatcgcactgtcgcgcagaag

SEQ ID NO: 3665075 - DNA, 25 bp, Homo sapien
cagaaggtgcaaccgatcgcactgt

SEQ ID NO: 3665076 - DNA, 25 bp, Homo sapien
ctgtcgcagaaggtgcaaccgatcg

SEQ ID NO: 3665077 - DNA, 25 bp, Homo sapien
tcttagaaggtggggaataatcatc

SEQ ID NO: 3665078 - DNA, 25 bp, Homo sapien
ttagaaggtggggaataatcatcat

SEQ ID NO: 3665079 - DNA, 25 bp, Homo sapien
ctttgtctcttagaaggtggggaat

SEQ ID NO: 3665080 - DNA, 25 bp, Homo sapien
ttgtctcttagaaggtggggaataa

SEQ ID NO: 3665081 - DNA, 25 bp, Homo sapien
tcattttccattccccagcattggc

SEQ ID NO: 3665082 - DNA, 25 bp, Homo sapien
ttttccattccccagcattggcggg

SEQ ID NO: 3665083 - DNA, 25 bp, Homo sapien
agttgaactccctcattttccattc

SEQ ID NO: 3665084 - DNA, 25 bp, Homo sapien
ctggtggctgtggtggatcgttggt

SEQ ID NO: 3665085 - DNA, 25 bp, Homo sapien
gatgagtttcgtctcctccactgga

SEQ ID NO: 3665086 - DNA, 25 bp, Homo sapien
agatgcacctggcatgaggcgtgcc

SEQ ID NO: 3665087 - DNA, 25 bp, Homo sapien
acagaggcagatgagtttcgtctcc

SEQ ID NO: 3665088 - DNA, 25 bp, Homo sapien
aggagcatggcccctgtccacagat

SEQ ID NO: 3665089 - DNA, 25 bp, Homo sapien
tgtttacgcagatcagcgatacgat

SEQ ID NO: 3665090 - DNA, 25 bp, Homo sapien
ttcaatttgtttacgcagatcagcg

SEQ ID NO: 3665091 - DNA, 25 bp, Homo sapien
cagatcagcgatacgatgattccat

SEQ ID NO: 3665092 - DNA, 25 bp, Homo sapien
ttacgcagatcagcgatacgatgat

SEQ ID NO: 3665093 - DNA, 25 bp, Homo sapien
ttacaaggagaaacgtgtaaggata

SEQ ID NO: 3665094 - DNA, 25 bp, Homo sapien
aaggatagcatgactcgccggcagc

SEQ ID NO: 3665095 - DNA, 25 bp, Homo sapien
caaggagaaacgtgtaaggatagca

SEQ ID NO: 3665096 - DNA, 25 bp, Homo sapien
tgtgtaaacgcccatgaacataaga

SEQ ID NO: 3665097 - DNA, 25 bp, Homo sapien
aatctttacctgttgaattcataag

SEQ ID NO: 3665098 - DNA, 25 bp, Homo sapien
tatcaagttgtaaatctttacctgt

SEQ ID NO: 3665099 - DNA, 25 bp, Homo sapien
ttgtaaatctttacctgttgaattc

SEQ ID NO: 3665100 - DNA, 25 bp, Homo sapien
ctcacaaagttgatttatcaagttg

SEQ ID NO: 3665101 - DNA, 25 bp, Homo sapien
taagtatgtgtgctactgaggcaag

SEQ ID NO: 3665102 - DNA, 25 bp, Homo sapien
tcacagaggccgtgccaatctctct

SEQ ID NO: 3665103 - DNA, 25 bp, Homo sapien
acttaagtatgtgtgctactgaggc

SEQ ID NO: 3665104 - DNA, 25 bp, Homo sapien
gtatgtgtgctactgaggcaagcat

SEQ ID NO: 3665105 - DNA, 25 bp, Homo sapien
tttctcttcctggattcagaagtct

SEQ ID NO: 3665106 - DNA, 25 bp, Homo sapien
tcagaagtctttcatggtaggtcca

SEQ ID NO: 3665107 - DNA, 25 bp, Homo sapien
gaagtctttcatggtaggtccagct

SEQ ID NO: 3665108 - DNA, 25 bp, Homo sapien
cagtttctcttcctggattcagaag

SEQ ID NO: 3665109 - DNA, 25 bp, Homo sapien
tacaggtgacaacctaggacttgca

SEQ ID NO: 3665110 - DNA, 25 bp, Homo sapien
gaatgtccccgcaggactctgtgat

SEQ ID NO: 3665111 - DNA, 25 bp, Homo sapien
gcacacacatttggtcagaagcctg

SEQ ID NO: 3665112 - DNA, 25 bp, Homo sapien
gagaactggtgtagaaactctgcac

SEQ ID NO: 3665113 - DNA, 25 bp, Homo sapien
tataatgaaccatgataggaccact

SEQ ID NO: 3665114 - DNA, 25 bp, Homo sapien
taatgaaccatgataggaccactga

SEQ ID NO: 3665115 - DNA, 25 bp, Homo sapien
ggctataatgaaccatgataggacc

SEQ ID NO: 3665116 - DNA, 25 bp, Homo sapien
tgaggctataatgaaccatgatagg

SEQ ID NO: 3665117 - DNA, 25 bp, Homo sapien
tccctggtgccttctctacagcagc

SEQ ID NO: 3665118 - DNA, 25 bp, Homo sapien
ccattgagccatctgctctccctgg

SEQ ID NO: 3665119 - DNA, 25 bp, Homo sapien
tgccttctctacagcagcctgagcc

SEQ ID NO: 3665120 - DNA, 25 bp, Homo sapien
cattgagccatctgctctccctggt

SEQ ID NO: 3665121 - DNA, 25 bp, Homo sapien
tgagcctgggaagtctacactacag

SEQ ID NO: 3665122 - DNA, 25 bp, Homo sapien
ctgggaagtctacactacagtgagc

SEQ ID NO: 3665123 - DNA, 25 bp, Homo sapien
tctggggtgggagaaatcccttgag

SEQ ID NO: 3665124 - DNA, 25 bp, Homo sapien
gaagtctacactacagtgagccaag

SEQ ID NO: 3665125 - DNA, 25 bp, Homo sapien
ccagcctgggtgacagtgtgagacc

SEQ ID NO: 3665126 - DNA, 25 bp, Homo sapien
agtgagcagaggttgtgccactgta

SEQ ID NO: 3665127 - DNA, 25 bp, Homo sapien
ctccagcctgggtgacagtgtgaga

SEQ ID NO: 3665128 - DNA, 25 bp, Homo sapien
agcctgggtgacagtgtgagacctg

SEQ ID NO: 3665129 - DNA, 25 bp, Homo sapien
tcaacttgtagcacccctaagctcg

SEQ ID NO: 3665130 - DNA, 25 bp, Homo sapien
ctgctgctcacctccagctctgtgg

SEQ ID NO: 3665131 - DNA, 25 bp, Homo sapien
taagctcgcaggacatatgcttcaa

SEQ ID NO: 3665132 - DNA, 25 bp, Homo sapien
gcacccctaagctcgcaggacatat

SEQ ID NO: 3665133 - DNA, 25 bp, Homo sapien
gtctctcttcctggattcagaagtc

SEQ ID NO: 3665134 - DNA, 25 bp, Homo sapien
taacatgttgcccagtcagtctctc

SEQ ID NO: 3665135 - DNA, 25 bp, Homo sapien
ggattcagaagtctttcatggtaga

SEQ ID NO: 3665136 - DNA, 25 bp, Homo sapien
cagaagtctttcatggtagatccag

SEQ ID NO: 3665137 - DNA, 25 bp, Homo sapien
gctgtgatagcactattgtactcaa

SEQ ID NO: 3665138 - DNA, 25 bp, Homo sapien
tgatagcactattgtactcaagcct

SEQ ID NO: 3665139 - DNA, 25 bp, Homo sapien
tgtgatagcactattgtactcaagc

SEQ ID NO: 3665140 - DNA, 25 bp, Homo sapien
tcaggtaggaggatccttagcccag

SEQ ID NO: 3665141 - DNA, 25 bp, Homo sapien
gcagtcagctgcgatagcactacta

SEQ ID NO: 3665142 - DNA, 25 bp, Homo sapien
tctcagccacgtgggaggttgagat

SEQ ID NO: 3665143 - DNA, 25 bp, Homo sapien
acccctctggaatccacgtatacga

SEQ ID NO: 3665144 - DNA, 25 bp, Homo sapien
tccacgtatacgaaaattccaaata

SEQ ID NO: 3665145 - DNA, 25 bp, Homo sapien
gtgggcatgttaagcttgttttcct

SEQ ID NO: 3665146 - DNA, 25 bp, Homo sapien
gaatcagtgggcatgttaagcttgt

SEQ ID NO: 3665147 - DNA, 25 bp, Homo sapien
cagtgggcatgttaagcttgttttc

SEQ ID NO: 3665148 - DNA, 25 bp, Homo sapien
atcagtgggcatgttaagcttgttt

SEQ ID NO: 3665149 - DNA, 25 bp, Homo sapien
tagggtatgggcctaaataggccat

SEQ ID NO: 3665150 - DNA, 25 bp, Homo sapien
gtagggtatgggcctaaataggcca

SEQ ID NO: 3665151 - DNA, 25 bp, Homo sapien
gggtatgggcctaaataggccattg

SEQ ID NO: 3665152 - DNA, 25 bp, Homo sapien
agggtatgggcctaaataggccatt

SEQ ID NO: 3665153 - DNA, 25 bp, Homo sapien
gagacaaaaattgggcctggaaaga

SEQ ID NO: 3665154 - DNA, 25 bp, Homo sapien
gggaaggttgccatgagacaaaaat

SEQ ID NO: 3665155 - DNA, 25 bp, Homo sapien
attgggcctggaaagacccttgtga

SEQ ID NO: 3665156 - DNA, 25 bp, Homo sapien
aggttgccatgagacaaaaattggg

SEQ ID NO: 3665157 - DNA, 25 bp, Homo sapien
cttcataatccaccaggaggcagca

SEQ ID NO: 3665158 - DNA, 25 bp, Homo sapien
ttgggactagagagtctgactttaa

SEQ ID NO: 3665159 - DNA, 25 bp, Homo sapien
gactagagagtctgactttaagttt

SEQ ID NO: 3665160 - DNA, 25 bp, Homo sapien
gggactagagagtctgactttaagt

SEQ ID NO: 3665161 - DNA, 25 bp, Homo sapien
tagacccagccaagaggaagaggtg

SEQ ID NO: 3665162 - DNA, 25 bp, Homo sapien
acccagccaagaggaagaggtgggc

SEQ ID NO: 3665163 - DNA, 25 bp, Homo sapien
tgtagacccagccaagaggaagagg

SEQ ID NO: 3665164 - DNA, 25 bp, Homo sapien
ctgtagacccagccaagaggaagag

SEQ ID NO: 3665165 - DNA, 25 bp, Homo sapien
aactgggccaaaaaaggctgttgtg

SEQ ID NO: 3665166 - DNA, 25 bp, Homo sapien
actgggccaaaaaaggctgttgtga

SEQ ID NO: 3665167 - DNA, 25 bp, Homo sapien
cattggagggcaggagctgagcttg

SEQ ID NO: 3665168 - DNA, 25 bp, Homo sapien
gcctgcagatgccattggagggcag

SEQ ID NO: 3665169 - DNA, 25 bp, Homo sapien
gccattggagggcaggagctgagct

SEQ ID NO: 3665170 - DNA, 25 bp, Homo sapien
ttggagggcaggagctgagcttgga

SEQ ID NO: 3665171 - DNA, 25 bp, Homo sapien
gagctcggcagtagttgagccaaaa

SEQ ID NO: 3665172 - DNA, 25 bp, Homo sapien
cggcagtagttgagccaaaagagct

SEQ ID NO: 3665173 - DNA, 25 bp, Homo sapien
ttgggagctcggcagtagttgagcc

SEQ ID NO: 3665174 - DNA, 25 bp, Homo sapien
agaggtcgccaagaggcccaagctt

SEQ ID NO: 3665175 - DNA, 25 bp, Homo sapien
ttgggcatcaacaggccactgtgag

SEQ ID NO: 3665176 - DNA, 25 bp, Homo sapien
gggctcatgctgacctctcagcgtg

SEQ ID NO: 3665177 - DNA, 25 bp, Homo sapien
tctccaaccagtgctgggcctgtac

SEQ ID NO: 3665178 - DNA, 25 bp, Homo sapien
acctgtctcagcgtgggaggagcca

SEQ ID NO: 3665179 - DNA, 25 bp, Homo sapien
ggccggtgtgaggctaggagctgag

SEQ ID NO: 3665180 - DNA, 25 bp, Homo sapien
ccgcggacctctgtcagtgtcggag

SEQ ID NO: 3665181 - DNA, 25 bp, Homo sapien
gctcccgcggacctctgtcagtgtc

SEQ ID NO: 3665182 - DNA, 25 bp, Homo sapien
tcccgcggacctctgtcagtgtcgg

SEQ ID NO: 3665183 - DNA, 25 bp, Homo sapien
tggcgtgaggctaggggctcccgct

SEQ ID NO: 3665184 - DNA, 25 bp, Homo sapien
ggtggcctgttgaggcaggggctca

SEQ ID NO: 3665185 - DNA, 25 bp, Homo sapien
tggcctgttgaggcaggggctcacg

SEQ ID NO: 3665186 - DNA, 25 bp, Homo sapien
ctgttgaggcaggggctcacgctga

SEQ ID NO: 3665187 - DNA, 25 bp, Homo sapien
gcctgttgaggcaggggctcacgct

SEQ ID NO: 3665188 - DNA, 25 bp, Homo sapien
cacatcccgccaccagtagcctgaa

SEQ ID NO: 3665189 - DNA, 25 bp, Homo sapien
caccagtagcctgaacagtcccagc

SEQ ID NO: 3665190 - DNA, 25 bp, Homo sapien
ctcaggcccacatcccgccaccagt

SEQ ID NO: 3665191 - DNA, 25 bp, Homo sapien
ccaccagtagcctgaacagtcccag

SEQ ID NO: 3665192 - DNA, 25 bp, Homo sapien
cctcccacatgggggcctcttcagg

SEQ ID NO: 3665193 - DNA, 25 bp, Homo sapien
ctcccacatgggggcctcttcaggc

SEQ ID NO: 3665194 - DNA, 25 bp, Homo sapien
tctgcctcccacatgggggcctctt

SEQ ID NO: 3665195 - DNA, 25 bp, Homo sapien
tgcctcccacatgggggcctcttca

SEQ ID NO: 3665196 - DNA, 25 bp, Homo sapien
ggcttcaggaagttgtgggtctacc

SEQ ID NO: 3665197 - DNA, 25 bp, Homo sapien
gtctaccagggccgctgggagctgg

SEQ ID NO: 3665198 - DNA, 25 bp, Homo sapien
ttggcttcaggaagttgtgggtcta

SEQ ID NO: 3665199 - DNA, 25 bp, Homo sapien
cttcaggaagttgtgggtctaccag

SEQ ID NO: 3665200 - DNA, 25 bp, Homo sapien
tgccatcggagggcaggagctgagc

SEQ ID NO: 3665201 - DNA, 25 bp, Homo sapien
cagatgccatcggagggcaggagct

SEQ ID NO: 3665202 - DNA, 25 bp, Homo sapien
ctgcagatgccatcggagggcagga

SEQ ID NO: 3665203 - DNA, 25 bp, Homo sapien
gatgccatcggagggcaggagctga

SEQ ID NO: 3665204 - DNA, 25 bp, Homo sapien
ctggagaggccaacttcgggacgtt

SEQ ID NO: 3665205 - DNA, 25 bp, Homo sapien
gcctgcaaaggccgccaggaggccg

SEQ ID NO: 3665206 - DNA, 25 bp, Homo sapien
cctggagaggccaacttcgggacgt

SEQ ID NO: 3665207 - DNA, 25 bp, Homo sapien
tgcaaaggccgccaggaggccggag

SEQ ID NO: 3665208 - DNA, 25 bp, Homo sapien
cctgcaaaggtccactggagggcaa

SEQ ID NO: 3665209 - DNA, 25 bp, Homo sapien
tgcaaaggtccactggagggcaagt

SEQ ID NO: 3665210 - DNA, 25 bp, Homo sapien
aaaggtccactggagggcaagttct

SEQ ID NO: 3665211 - DNA, 25 bp, Homo sapien
gcctgcaaaggtccactggagggca

SEQ ID NO: 3665212 - DNA, 25 bp, Homo sapien
agggccttgggccacatggaggcgc

SEQ ID NO: 3665213 - DNA, 25 bp, Homo sapien
ggagtgtgaagagggccttgggcca

SEQ ID NO: 3665214 - DNA, 25 bp, Homo sapien
gtgaagagggccttgggccacatgg

SEQ ID NO: 3665215 - DNA, 25 bp, Homo sapien
ctacaagatggagtgtgaagagggc

SEQ ID NO: 3665216 - DNA, 25 bp, Homo sapien
tgtgggaccttcagagcttttcact

SEQ ID NO: 3665217 - DNA, 25 bp, Homo sapien
ctgcagctgtgccgggggaaaactg

SEQ ID NO: 3665218 - DNA, 25 bp, Homo sapien
cagctgtgccgggggaaaactgggc

SEQ ID NO: 3665219 - DNA, 25 bp, Homo sapien
ctgtgccgggggaaaactgggcagt

SEQ ID NO: 3665220 - DNA, 25 bp, Homo sapien
tccctcctctgagcccctgtacata

SEQ ID NO: 3665221 - DNA, 25 bp, Homo sapien
aggattacaggtgcacgctaccacg

SEQ ID NO: 3665222 - DNA, 25 bp, Homo sapien
attacaggtgcacgctaccacgtcc

SEQ ID NO: 3665223 - DNA, 25 bp, Homo sapien
ttacaggtgcacgctaccacgtccg

SEQ ID NO: 3665224 - DNA, 25 bp, Homo sapien
tgcaacctcttcccgccgggttcac

SEQ ID NO: 3665225 - DNA, 25 bp, Homo sapien
ggctgacccgaaagaagatcccagg

SEQ ID NO: 3665226 - DNA, 25 bp, Homo sapien
cgtggctgacccgaaagaagatccc

SEQ ID NO: 3665227 - DNA, 25 bp, Homo sapien
ggcacgtggctgacccgaaagaaga

SEQ ID NO: 3665228 - DNA, 25 bp, Homo sapien
ctgacccgaaagaagatcccaggac

SEQ ID NO: 3665229 - DNA, 25 bp, Homo sapien
actgcctctgccccagagttggggc

SEQ ID NO: 3665230 - DNA, 25 bp, Homo sapien
ctgcctctgccccagagttggggcc

SEQ ID NO: 3665231 - DNA, 25 bp, Homo sapien
tgcctctgccccagagttggggcct

SEQ ID NO: 3665232 - DNA, 25 bp, Homo sapien
gcatgggcaggatattctgcacaca

SEQ ID NO: 3665233 - DNA, 25 bp, Homo sapien
gagccactgcatggttcccagaggc

SEQ ID NO: 3665234 - DNA, 25 bp, Homo sapien
gcagcatgggcaggatattctgcac

SEQ ID NO: 3665235 - DNA, 25 bp, Homo sapien
ccgctgggagccactgcatggttcc

SEQ ID NO: 3665236 - DNA, 25 bp, Homo sapien
tgggactgatgactgcatgatcttc

SEQ ID NO: 3665237 - DNA, 25 bp, Homo sapien
gggactgatgactgcatgatcttct

SEQ ID NO: 3665238 - DNA, 25 bp, Homo sapien
ggacaggctcagggaaccggagacc

SEQ ID NO: 3665239 - DNA, 25 bp, Homo sapien
gacaggctcagggaaccggagaccg

SEQ ID NO: 3665240 - DNA, 25 bp, Homo sapien
acaggctcagggaaccggagaccga

SEQ ID NO: 3665241 - DNA, 25 bp, Homo sapien
aaacgcaagatgagaagatgctcca

SEQ ID NO: 3665242 - DNA, 25 bp, Homo sapien
gaagaccccaccacgcccaaacgca

SEQ ID NO: 3665243 - DNA, 25 bp, Homo sapien
ccacactggaagaccccaccacgcc

SEQ ID NO: 3665244 - DNA, 25 bp, Homo sapien
cccaaacgcaagatgagaagatgct

SEQ ID NO: 3665245 - DNA, 25 bp, Homo sapien
ccaccttctggtgcaagagacctga

SEQ ID NO: 3665246 - DNA, 25 bp, Homo sapien
taccaggctcctcagtcatcagggt

SEQ ID NO: 3665247 - DNA, 25 bp, Homo sapien
gcttttggcaaagtctatggtccca

SEQ ID NO: 3665248 - DNA, 25 bp, Homo sapien
atcagggtccctcccaacactaagg

SEQ ID NO: 3665249 - DNA, 25 bp, Homo sapien
cattttaagatgctcgaacttgtcc

SEQ ID NO: 3665250 - DNA, 25 bp, Homo sapien
tctttgtatcagtgctcagctgagt

SEQ ID NO: 3665251 - DNA, 25 bp, Homo sapien
tttaagatgctcgaacttgtcctcc

SEQ ID NO: 3665252 - DNA, 25 bp, Homo sapien
taagatgctcgaacttgtcctccag

SEQ ID NO: 3665253 - DNA, 25 bp, Homo sapien
ggcttaagtctgcaacatgtttctg

SEQ ID NO: 3665254 - DNA, 25 bp, Homo sapien
tcaaaaatggcttaagtctgcaaca

SEQ ID NO: 3665255 - DNA, 25 bp, Homo sapien
aatggcttaagtctgcaacatgttt

SEQ ID NO: 3665256 - DNA, 25 bp, Homo sapien
taacaaggtgatagtcagttcttca

SEQ ID NO: 3665257 - DNA, 25 bp, Homo sapien
ttcctttccattccattcgaatcct

SEQ ID NO: 3665258 - DNA, 25 bp, Homo sapien
ctttccattccattcgaatcctttc

SEQ ID NO: 3665259 - DNA, 25 bp, Homo sapien
cattcctttccattccattcgaatc

SEQ ID NO: 3665260 - DNA, 25 bp, Homo sapien
tcctttccattccattcgaatcctt

SEQ ID NO: 3665261 - DNA, 25 bp, Homo sapien
attccatcccattacattcgagtcc

SEQ ID NO: 3665262 - DNA, 25 bp, Homo sapien
ttacaatcctttagagtccattcca

SEQ ID NO: 3665263 - DNA, 25 bp, Homo sapien
cattacaatcctttagagtccattc

SEQ ID NO: 3665264 - DNA, 25 bp, Homo sapien
attacaatcctttagagtccattcc

SEQ ID NO: 3665265 - DNA, 25 bp, Homo sapien
ccattacaatcctttagagtccatt

SEQ ID NO: 3665266 - DNA, 25 bp, Homo sapien
gagtccattcaattccattgcattc

SEQ ID NO: 3665267 - DNA, 25 bp, Homo sapien
cgagtccattcaattccattgcatt

SEQ ID NO: 3665268 - DNA, 25 bp, Homo sapien
tcgagtccattcaattccattgcat

SEQ ID NO: 3665269 - DNA, 25 bp, Homo sapien
ccattcgagtccattgcattgcatt

SEQ ID NO: 3665270 - DNA, 25 bp, Homo sapien
gagtccattgcattgcattgcattc

SEQ ID NO: 3665271 - DNA, 25 bp, Homo sapien
cattcgagtcaattccactccattc

SEQ ID NO: 3665272 - DNA, 25 bp, Homo sapien
attcgagtccattgcattgcattgc

SEQ ID NO: 3665273 - DNA, 25 bp, Homo sapien
tccgttccattggagtccattccat

SEQ ID NO: 3665274 - DNA, 25 bp, Homo sapien
cgttccattggagtccattccattg

SEQ ID NO: 3665275 - DNA, 25 bp, Homo sapien
cattccgttccattggagtccattc

SEQ ID NO: 3665276 - DNA, 25 bp, Homo sapien
tccattggagtccattccattgcat

SEQ ID NO: 3665277 - DNA, 25 bp, Homo sapien
agtccattccattacatgctattcc

SEQ ID NO: 3665278 - DNA, 25 bp, Homo sapien
ccattacatgctattccatttgagt

SEQ ID NO: 3665279 - DNA, 25 bp, Homo sapien
tccattacatgctattccatttgag

SEQ ID NO: 3665280 - DNA, 25 bp, Homo sapien
gggggctgcaaaaagccgcggcggc

SEQ ID NO: 3665281 - DNA, 25 bp, Homo sapien
ggctgcaaaaagccgcggcggcggg

SEQ ID NO: 3665282 - DNA, 25 bp, Homo sapien
cggggggctgcaaaaagccgcggcg

SEQ ID NO: 3665283 - DNA, 25 bp, Homo sapien
gggctgcaaaaagccgcggcggcgg

SEQ ID NO: 3665284 - DNA, 25 bp, Homo sapien
aagctggagcgggcaaaaagcagcg

SEQ ID NO: 3665285 - DNA, 25 bp, Homo sapien
agccacggcggcggttgtgcaaaaa

SEQ ID NO: 3665286 - DNA, 25 bp, Homo sapien
acggcggcggttgtgcaaaaagctg

SEQ ID NO: 3665287 - DNA, 25 bp, Homo sapien
aaaaagctggagcgggcaaaaagca

SEQ ID NO: 3665288 - DNA, 25 bp, Homo sapien
gatgtggtgtgggtgcacgatatcc

SEQ ID NO: 3665289 - DNA, 25 bp, Homo sapien
atgtggtgtgggtgcacgatatcca

SEQ ID NO: 3665290 - DNA, 25 bp, Homo sapien
tcctggatgttgagataatcttccc

SEQ ID NO: 3665291 - DNA, 25 bp, Homo sapien
tggatgttgagataatcttccctcc

SEQ ID NO: 3665292 - DNA, 25 bp, Homo sapien
ggcactttagactcctggatgttga

SEQ ID NO: 3665293 - DNA, 25 bp, Homo sapien
tagactcctggatgttgagataatc

SEQ ID NO: 3665294 - DNA, 25 bp, Homo sapien
ggagctccagcaaggcgaggtcctt

SEQ ID NO: 3665295 - DNA, 25 bp, Homo sapien
tgcctgtgcccttgaaccatgaagg

SEQ ID NO: 3665296 - DNA, 25 bp, Homo sapien
ttttctcatgttgccaccgagggag

SEQ ID NO: 3665297 - DNA, 25 bp, Homo sapien
cctgcaggagccactttttctcatg

SEQ ID NO: 3665298 - DNA, 25 bp, Homo sapien
gggccatgccgattctctgcttctc

SEQ ID NO: 3665299 - DNA, 25 bp, Homo sapien
accacctggcaggatgtccttccag

SEQ ID NO: 3665300 - DNA, 25 bp, Homo sapien
tgtggtagaacatgcgggccatgcc

SEQ ID NO: 3665301 - DNA, 25 bp, Homo sapien
tgcttctcaccacctggcaggatgt

SEQ ID NO: 3665302 - DNA, 25 bp, Homo sapien
ttccacgtcgatgctcacggcactg

SEQ ID NO: 3665303 - DNA, 25 bp, Homo sapien
gatgctcacggcactggtgccttca

SEQ ID NO: 3665304 - DNA, 25 bp, Homo sapien
ttgccttccacgtcgatgctcacgg

SEQ ID NO: 3665305 - DNA, 25 bp, Homo sapien
aatgcctgcgtccttggccacctgg

SEQ ID NO: 3665306 - DNA, 25 bp, Homo sapien
tgcatcttgggaatgcccgccagct

SEQ ID NO: 3665307 - DNA, 25 bp, Homo sapien
tcaggctcaggtgggcagctgagtc

SEQ ID NO: 3665308 - DNA, 25 bp, Homo sapien
ggctcaggtgggcagctgagtccag

SEQ ID NO: 3665309 - DNA, 25 bp, Homo sapien
caggtgggcagctgagtccagcttc

SEQ ID NO: 3665310 - DNA, 25 bp, Homo sapien
agggccttgcaggctaggtgccggc

SEQ ID NO: 3665311 - DNA, 25 bp, Homo sapien
cagggccttgcaggctaggtgccgg

SEQ ID NO: 3665312 - DNA, 25 bp, Homo sapien
ggccttgcaggctaggtgccggcac

SEQ ID NO: 3665313 - DNA, 25 bp, Homo sapien
gggccttgcaggctaggtgccggca

SEQ ID NO: 3665314 - DNA, 25 bp, Homo sapien
ctccttcatgtgattcgagcttggg

SEQ ID NO: 3665315 - DNA, 25 bp, Homo sapien
gtctccttcatgtgattcgagcttg

SEQ ID NO: 3665316 - DNA, 25 bp, Homo sapien
ctccacatctactttcccgaggtcg

SEQ ID NO: 3665317 - DNA, 25 bp, Homo sapien
cacatctactttcccgaggtcggga

SEQ ID NO: 3665318 - DNA, 25 bp, Homo sapien
tgaataggtaatccaataaattaga

SEQ ID NO: 3665319 - DNA, 25 bp, Homo sapien
agggtagtcacattggccacagaga

SEQ ID NO: 3665320 - DNA, 25 bp, Homo sapien
ccccagggtactcagaggctgggcc

SEQ ID NO: 3665321 - DNA, 25 bp, Homo sapien
ctagcaagcaaaggtccgtgtggcc

SEQ ID NO: 3665322 - DNA, 25 bp, Homo sapien
ggtactcagaggctgggccgtcccc

SEQ ID NO: 3665323 - DNA, 25 bp, Homo sapien
taagtcctgtctctgtagtgtggcc

SEQ ID NO: 3665324 - DNA, 25 bp, Homo sapien
ggtatggccgtacagctgttctcag

SEQ ID NO: 3665325 - DNA, 25 bp, Homo sapien
tgttgatgaacactcaggctgtccc

SEQ ID NO: 3665326 - DNA, 25 bp, Homo sapien
ttgggaggctatggccatccatgca

SEQ ID NO: 3665327 - DNA, 25 bp, Homo sapien
tttttggtatcagtggacccacatt

SEQ ID NO: 3665328 - DNA, 25 bp, Homo sapien
ttttggtatcagtggacccacatta

SEQ ID NO: 3665329 - DNA, 25 bp, Homo sapien
ttttttggtatcagtggacccacat

SEQ ID NO: 3665330 - DNA, 25 bp, Homo sapien
caagatcctgttgaaaatattgata

SEQ ID NO: 3665331 - DNA, 25 bp, Homo sapien
cagacacaagccttttgtaaagtaa

SEQ ID NO: 3665332 - DNA, 25 bp, Homo sapien
ttcctcaatggaactttttgtatcc

SEQ ID NO: 3665333 - DNA, 25 bp, Homo sapien
taagtgactgaatagacaaaggatc

SEQ ID NO: 3665334 - DNA, 25 bp, Homo sapien
taggagaggagggtgtagtagccat

SEQ ID NO: 3665335 - DNA, 25 bp, Homo sapien
gataggagaggagggtgtagtagcc

SEQ ID NO: 3665336 - DNA, 25 bp, Homo sapien
gagataggagaggagggtgtagtag

SEQ ID NO: 3665337 - DNA, 25 bp, Homo sapien
ctggagataggagaggagggtgtag

SEQ ID NO: 3665338 - DNA, 25 bp, Homo sapien
ctgcgagtgggcgggtgggtcgctc

SEQ ID NO: 3665339 - DNA, 25 bp, Homo sapien
cgagtgggcgggtgggtcgctctcg

SEQ ID NO: 3665340 - DNA, 25 bp, Homo sapien
gcgagtgggcgggtgggtcgctctc

SEQ ID NO: 3665341 - DNA, 25 bp, Homo sapien
gagtgggcgggtgggtcgctctcgg

SEQ ID NO: 3665342 - DNA, 25 bp, Homo sapien
tactccattcccgaggaactgcggc

SEQ ID NO: 3665343 - DNA, 25 bp, Homo sapien
aaactactccattcccgaggaactg

SEQ ID NO: 3665344 - DNA, 25 bp, Homo sapien
ctgcacctgtctgccggtagggcca

SEQ ID NO: 3665345 - DNA, 25 bp, Homo sapien
cacatcctgcgtttcccaaggagcg

SEQ ID NO: 3665346 - DNA, 25 bp, Homo sapien
tgtagcccgtgatagagaggaccag

SEQ ID NO: 3665347 - DNA, 25 bp, Homo sapien
caaggagcgccggtgatctggttcc

SEQ ID NO: 3665348 - DNA, 25 bp, Homo sapien
taaggacattccacatcctgcgttt

SEQ ID NO: 3665349 - DNA, 25 bp, Homo sapien
tccttctttctgagcttgaccaaca

SEQ ID NO: 3665350 - DNA, 25 bp, Homo sapien
aatttgcacacaagttccatctgca

SEQ ID NO: 3665351 - DNA, 25 bp, Homo sapien
atctggtgatcctatactgcttgat

SEQ ID NO: 3665352 - DNA, 25 bp, Homo sapien
tggtgatcctatactgcttgatctt

SEQ ID NO: 3665353 - DNA, 25 bp, Homo sapien
ccatgaagtcaattgaagaaggtgc

SEQ ID NO: 3665354 - DNA, 25 bp, Homo sapien
tgggataactgccatgaagtcaatt

SEQ ID NO: 3665355 - DNA, 25 bp, Homo sapien
tgagcatagtttttacacttgccat

SEQ ID NO: 3665356 - DNA, 25 bp, Homo sapien
gactgattcccaggttgagcatagt

SEQ ID NO: 3665357 - DNA, 25 bp, Homo sapien
aagatgccatcatggaagtcaaagg

SEQ ID NO: 3665358 - DNA, 25 bp, Homo sapien
ggagaagatgccatcatggaagtca

SEQ ID NO: 3665359 - DNA, 25 bp, Homo sapien
gaagtcaaaggttcttgaccttcta

SEQ ID NO: 3665360 - DNA, 25 bp, Homo sapien
ttgaggaggagaagatgccatcatg

SEQ ID NO: 3665361 - DNA, 25 bp, Homo sapien
gagttctaaattaccaatctccacc

SEQ ID NO: 3665362 - DNA, 25 bp, Homo sapien
atgccaatgattttaccagcacgac

SEQ ID NO: 3665363 - DNA, 25 bp, Homo sapien
ccagcacgactagggcgtggcttga

SEQ ID NO: 3665364 - DNA, 25 bp, Homo sapien
taaattaccaatctccaccaacatg

SEQ ID NO: 3665365 - DNA, 25 bp, Homo sapien
tggaacaccagtggcaccattaact

SEQ ID NO: 3665366 - DNA, 25 bp, Homo sapien
caccagtggcaccattaactgcttt

SEQ ID NO: 3665367 - DNA, 25 bp, Homo sapien
gtacagctatacctttgtcaacctt

SEQ ID NO: 3665368 - DNA, 25 bp, Homo sapien
aattggaacaccagtggcaccatta

SEQ ID NO: 3665369 - DNA, 25 bp, Homo sapien
cagctccaaatggagctctacttat

SEQ ID NO: 3665370 - DNA, 25 bp, Homo sapien
gctccaaatggagctctacttatgg

SEQ ID NO: 3665371 - DNA, 25 bp, Homo sapien
ccaaatggagctctacttatgggca

SEQ ID NO: 3665372 - DNA, 25 bp, Homo sapien
tccaaatggagctctacttatgggc

SEQ ID NO: 3665373 - DNA, 25 bp, Homo sapien
aaccatatgcgaaggatgtgatgtc

SEQ ID NO: 3665374 - DNA, 25 bp, Homo sapien
gttaggtcctctggctctagaaaca

SEQ ID NO: 3665375 - DNA, 25 bp, Homo sapien
ctaaatgtaggctgtgttaggtcct

SEQ ID NO: 3665376 - DNA, 25 bp, Homo sapien
tctagaaacagcaagagtctctgca

SEQ ID NO: 3665377 - DNA, 25 bp, Homo sapien
ggagcactcatgtgctgctggagac

SEQ ID NO: 3665378 - DNA, 25 bp, Homo sapien
tgtggggagcactcatgtgctgctg

SEQ ID NO: 3665379 - DNA, 25 bp, Homo sapien
tggggagcactcatgtgctgctgga

SEQ ID NO: 3665380 - DNA, 25 bp, Homo sapien
acgtgccagccggggcaatggtgct

SEQ ID NO: 3665381 - DNA, 25 bp, Homo sapien
cacaggaaggcaggaagcccgccat

SEQ ID NO: 3665382 - DNA, 25 bp, Homo sapien
ccacacaggaaggcaggaagcccgc

SEQ ID NO: 3665383 - DNA, 25 bp, Homo sapien
ccacagtctgccacacaggaaggca

SEQ ID NO: 3665384 - DNA, 25 bp, Homo sapien
cacagtctgccacacaggaaggcag

SEQ ID NO: 3665385 - DNA, 25 bp, Homo sapien
acataatttctgcaaaaatgttctg

SEQ ID NO: 3665386 - DNA, 25 bp, Homo sapien
aaataattcaaacataatttctgca

SEQ ID NO: 3665387 - DNA, 25 bp, Homo sapien
ataatttctgcaaaaatgttctgta

SEQ ID NO: 3665388 - DNA, 25 bp, Homo sapien
ctggtacattaaataattcaaacat

SEQ ID NO: 3665389 - DNA, 25 bp, Homo sapien
ataaccttctacaactgggagaaca

SEQ ID NO: 3665390 - DNA, 25 bp, Homo sapien
aatacacagtatcacctacaatcag

SEQ ID NO: 3665391 - DNA, 25 bp, Homo sapien
atacacagtatcacctacaatcagg

SEQ ID NO: 3665392 - DNA, 25 bp, Homo sapien
tacacagtatcacctacaatcagga

SEQ ID NO: 3665393 - DNA, 25 bp, Homo sapien
aatcaggatgtgattgatgcagctc

SEQ ID NO: 3665394 - DNA, 25 bp, Homo sapien
cctggttgatcacattgatacctgt

SEQ ID NO: 3665395 - DNA, 25 bp, Homo sapien
attatgaacttctcctggttgatca

SEQ ID NO: 3665396 - DNA, 25 bp, Homo sapien
ttatgaacttctcctggttgatcac

SEQ ID NO: 3665397 - DNA, 25 bp, Homo sapien
tcctggttgatcacattgatacctg

SEQ ID NO: 3665398 - DNA, 25 bp, Homo sapien
aagaacaacattcttatacagtgga

SEQ ID NO: 3665399 - DNA, 25 bp, Homo sapien
tgggacagttttgtattcatcaaca

SEQ ID NO: 3665400 - DNA, 25 bp, Homo sapien
agaacaacattcttatacagtggac

SEQ ID NO: 3665401 - DNA, 25 bp, Homo sapien
gggacagttttgtattcatcaacaa

SEQ ID NO: 3665402 - DNA, 25 bp, Homo sapien
ctggcatgtaccactcttcaaatct

SEQ ID NO: 3665403 - DNA, 25 bp, Homo sapien
gatggattaccacccgaaactctgt

SEQ ID NO: 3665404 - DNA, 25 bp, Homo sapien
aactctgtaagcttaggtttgattc

SEQ ID NO: 3665405 - DNA, 25 bp, Homo sapien
tgtgatggattaccacccgaaactc

SEQ ID NO: 3665406 - DNA, 25 bp, Homo sapien
cactgagctccttactgagttttaa

SEQ ID NO: 3665407 - DNA, 25 bp, Homo sapien
cttgttccccaacatgacactatta

SEQ ID NO: 3665408 - DNA, 25 bp, Homo sapien
ttcagaatggtatttgtcaacaaaa

SEQ ID NO: 3665409 - DNA, 25 bp, Homo sapien
gttccccaacatgacactattaaat

SEQ ID NO: 3665410 - DNA, 25 bp, Homo sapien
gggaaaaggatttataccactgcat

SEQ ID NO: 3665411 - DNA, 25 bp, Homo sapien
caagaagtgccgagctaaggacgct

SEQ ID NO: 3665412 - DNA, 25 bp, Homo sapien
cctgtccgacttggcgggtgaacgc

SEQ ID NO: 3665413 - DNA, 25 bp, Homo sapien
cctaggacgagggtctgggccaaca

SEQ ID NO: 3665414 - DNA, 25 bp, Homo sapien
ggaagtgtgcaagcacgtgcctgca

SEQ ID NO: 3665415 - DNA, 25 bp, Homo sapien
gccgcgtccgcctcgagctaatggt

SEQ ID NO: 3665416 - DNA, 25 bp, Homo sapien
cgtccgcctcgagctaatggtcccg

SEQ ID NO: 3665417 - DNA, 25 bp, Homo sapien
gggccgcgtccgcctcgagctaatg

SEQ ID NO: 3665418 - DNA, 25 bp, Homo sapien
cgcctcgagctaatggtcccgccaa

SEQ ID NO: 3665419 - DNA, 25 bp, Homo sapien
gcgactcgggctcccgctgccttca

SEQ ID NO: 3665420 - DNA, 25 bp, Homo sapien
cttgggtcggctcgggcgccggagg

SEQ ID NO: 3665421 - DNA, 25 bp, Homo sapien
cagctccttgcgggggtcggccctt

SEQ ID NO: 3665422 - DNA, 25 bp, Homo sapien
ggcgccgacgtcggcggcgactcgg

SEQ ID NO: 3665423 - DNA, 25 bp, Homo sapien
gagcctccgaggctgcgccgacacc

SEQ ID NO: 3665424 - DNA, 25 bp, Homo sapien
gggaaaagtagcacctgagcctccg

SEQ ID NO: 3665425 - DNA, 25 bp, Homo sapien
tgtctccccgcaggtgccgcctact

SEQ ID NO: 3665426 - DNA, 25 bp, Homo sapien
ccgcctactgctctggtggactcca

SEQ ID NO: 3665427 - DNA, 25 bp, Homo sapien
ttcctgttccggatgcctccacaca

SEQ ID NO: 3665428 - DNA, 25 bp, Homo sapien
tgccaattcctgttccggatgcctc

SEQ ID NO: 3665429 - DNA, 25 bp, Homo sapien
ggcacagacccagagtgcacaggcc

SEQ ID NO: 3665430 - DNA, 25 bp, Homo sapien
gttccggatgcctccacacacaggg

SEQ ID NO: 3665431 - DNA, 25 bp, Homo sapien
tccttttggcccaagctctccggga

SEQ ID NO: 3665432 - DNA, 25 bp, Homo sapien
caagctctccgggaactggggtctg

SEQ ID NO: 3665433 - DNA, 25 bp, Homo sapien
tggcaggggccagtttcaacaaagg

SEQ ID NO: 3665434 - DNA, 25 bp, Homo sapien
gggccagtttcaacaaaggcactca

SEQ ID NO: 3665435 - DNA, 25 bp, Homo sapien
ggaataccactcagatacaaagaag

SEQ ID NO: 3665436 - DNA, 25 bp, Homo sapien
tacatgccgatgtgtactgcagcgc

SEQ ID NO: 3665437 - DNA, 25 bp, Homo sapien
ggcgctggccatttggtttaaccta

SEQ ID NO: 3665438 - DNA, 25 bp, Homo sapien
tactgccctttagcttgggtgacaa

SEQ ID NO: 3665439 - DNA, 25 bp, Homo sapien
taatttgaagtctgaagtattccat

SEQ ID NO: 3665440 - DNA, 25 bp, Homo sapien
tactaatttgaagtctgaagtattc

SEQ ID NO: 3665441 - DNA, 25 bp, Homo sapien
ctaatttgaagtctgaagtattcca

SEQ ID NO: 3665442 - DNA, 25 bp, Homo sapien
catactaatttgaagtctgaagtat

SEQ ID NO: 3665443 - DNA, 25 bp, Homo sapien
tctggtggtggttcgaggtatgacg

SEQ ID NO: 3665444 - DNA, 25 bp, Homo sapien
tgggctgagaaagctttatatggtg

SEQ ID NO: 3665445 - DNA, 25 bp, Homo sapien
gctttatatggtggcacaatatttg

SEQ ID NO: 3665446 - DNA, 25 bp, Homo sapien
gagaaagctttatatggtggcacaa

SEQ ID NO: 3665447 - DNA, 25 bp, Homo sapien
tccatttgattccattccatttgat

SEQ ID NO: 3665448 - DNA, 25 bp, Homo sapien
catttgattccattccatttgattc

SEQ ID NO: 3665449 - DNA, 25 bp, Homo sapien
ccatttgattccattccatttgatt

SEQ ID NO: 3665450 - DNA, 25 bp, Homo sapien
ttccatttgattccattccatttga

SEQ ID NO: 3665451 - DNA, 25 bp, Homo sapien
tattcctttctattctattcaattc

SEQ ID NO: 3665452 - DNA, 25 bp, Homo sapien
ttcgagtccattccattccgggcca

SEQ ID NO: 3665453 - DNA, 25 bp, Homo sapien
cgagtccattccattccgggccatt

SEQ ID NO: 3665454 - DNA, 25 bp, Homo sapien
cattcgagtccattccattccgggc

SEQ ID NO: 3665455 - DNA, 25 bp, Homo sapien
tgcagtccattccattcgagtccat

SEQ ID NO: 3665456 - DNA, 25 bp, Homo sapien
caattccattcaagtccattccatt

SEQ ID NO: 3665457 - DNA, 25 bp, Homo sapien
ccagccaattccattcaagtccatt

SEQ ID NO: 3665458 - DNA, 25 bp, Homo sapien
gccaattccattcaagtccattcca

SEQ ID NO: 3665459 - DNA, 25 bp, Homo sapien
cagccaattccattcaagtccattc

SEQ ID NO: 3665460 - DNA, 25 bp, Homo sapien
aatccattcgattccattccattcg

SEQ ID NO: 3665461 - DNA, 25 bp, Homo sapien
attccagtccattccattcgagtcc

SEQ ID NO: 3665462 - DNA, 25 bp, Homo sapien
tccagtccattccattcgagtccat

SEQ ID NO: 3665463 - DNA, 25 bp, Homo sapien
ttccagtccattccattcgagtcca

SEQ ID NO: 3665464 - DNA, 25 bp, Homo sapien
cagtccattccattcgagtccattc

SEQ ID NO: 3665465 - DNA, 25 bp, Homo sapien
ttctattccagtccattccattccg

SEQ ID NO: 3665466 - DNA, 25 bp, Homo sapien
tattccagtccattccattccgttc

SEQ ID NO: 3665467 - DNA, 25 bp, Homo sapien
ttgattccattccattcgattccat

SEQ ID NO: 3665468 - DNA, 25 bp, Homo sapien
cattccgttccattccatttgattc

SEQ ID NO: 3665469 - DNA, 25 bp, Homo sapien
attcgatgccattccactcgattct

SEQ ID NO: 3665470 - DNA, 25 bp, Homo sapien
ctattccattcgactccatttcatt

SEQ ID NO: 3665471 - DNA, 25 bp, Homo sapien
attctgttccatccgattccattcc

SEQ ID NO: 3665472 - DNA, 25 bp, Homo sapien
tgccattccactcgattctattcca

SEQ ID NO: 3665473 - DNA, 25 bp, Homo sapien
agtgcattccattcaagtccattcc

SEQ ID NO: 3665474 - DNA, 25 bp, Homo sapien
attccagtgcattccattcaagtcc

SEQ ID NO: 3665475 - DNA, 25 bp, Homo sapien
cagtgcattccattcaagtccattc

SEQ ID NO: 3665476 - DNA, 25 bp, Homo sapien
tccagtgcattccattcaagtccat

SEQ ID NO: 3665477 - DNA, 25 bp, Homo sapien
attccattccattcctttcgatgcc

SEQ ID NO: 3665478 - DNA, 25 bp, Homo sapien
tccattccattcctttcgatgccat

SEQ ID NO: 3665479 - DNA, 25 bp, Homo sapien
attccattcctttcgatgccattcc

SEQ ID NO: 3665480 - DNA, 25 bp, Homo sapien
cattccattcctttcgatgccattc

SEQ ID NO: 3665481 - DNA, 25 bp, Homo sapien
tgagtccattacatttgggtccact

SEQ ID NO: 3665482 - DNA, 25 bp, Homo sapien
gtccattacatttgggtccactcca

SEQ ID NO: 3665483 - DNA, 25 bp, Homo sapien
catttgagtccattacatttgggtc

SEQ ID NO: 3665484 - DNA, 25 bp, Homo sapien
cattacatttgggtccactccattc

SEQ ID NO: 3665485 - DNA, 25 bp, Homo sapien
ggaatggagtggaaggcattagaat

SEQ ID NO: 3665486 - DNA, 25 bp, Homo sapien
gaatggagtggaaggcattagaatc

SEQ ID NO: 3665487 - DNA, 25 bp, Homo sapien
tggaatggagtggaaggcattagaa

SEQ ID NO: 3665488 - DNA, 25 bp, Homo sapien
tcaacccgagtggaatggaatggaa

SEQ ID NO: 3665489 - DNA, 25 bp, Homo sapien
gaaatcaacccgattggaatggaat

SEQ ID NO: 3665490 - DNA, 25 bp, Homo sapien
aatggaatgaaatcaacccgattgg

SEQ ID NO: 3665491 - DNA, 25 bp, Homo sapien
gaatgaaatcaacccgattggaatg

SEQ ID NO: 3665492 - DNA, 25 bp, Homo sapien
tggaatgaaatcaacccgattggaa

SEQ ID NO: 3665493 - DNA, 25 bp, Homo sapien
ggaatggaatggaatcaagcagagt

SEQ ID NO: 3665494 - DNA, 25 bp, Homo sapien
tggaatggaatcaagcagagtggaa

SEQ ID NO: 3665495 - DNA, 25 bp, Homo sapien
gaatggaatcaagcagagtggaatg

SEQ ID NO: 3665496 - DNA, 25 bp, Homo sapien
aatggaatggaatcaagcagagtgg

SEQ ID NO: 3665497 - DNA, 25 bp, Homo sapien
aatggaaaggaatcaatccgggtgg

SEQ ID NO: 3665498 - DNA, 25 bp, Homo sapien
tggaaaggaatcaatccgggtggaa

SEQ ID NO: 3665499 - DNA, 25 bp, Homo sapien
gaaaggaatcaatccgggtggaatg

SEQ ID NO: 3665500 - DNA, 25 bp, Homo sapien
aggaatcaatccgggtggaatggaa

SEQ ID NO: 3665501 - DNA, 25 bp, Homo sapien
aatggaaatgactagaatggaatgg

SEQ ID NO: 3665502 - DNA, 25 bp, Homo sapien
gaagggaatggaatggaaatgacta

SEQ ID NO: 3665503 - DNA, 25 bp, Homo sapien
atggaatggaaatgactagaatgga

SEQ ID NO: 3665504 - DNA, 25 bp, Homo sapien
gggaatggaatggaaatgactagaa

SEQ ID NO: 3665505 - DNA, 25 bp, Homo sapien
tcgagtgcaatgtaatggaatagaa

SEQ ID NO: 3665506 - DNA, 25 bp, Homo sapien
gaatcaattcgagtgcaatgtaatg

SEQ ID NO: 3665507 - DNA, 25 bp, Homo sapien
atcaattcgagtgcaatgtaatgga

SEQ ID NO: 3665508 - DNA, 25 bp, Homo sapien
aatggaatcaattcgagtgcaatgt

SEQ ID NO: 3665509 - DNA, 25 bp, Homo sapien
acccgagtggagtcgaatggaatgg

SEQ ID NO: 3665510 - DNA, 25 bp, Homo sapien
gtggagtcgaatggaatggaaagta

SEQ ID NO: 3665511 - DNA, 25 bp, Homo sapien
gagtcgaatggaatggaaagtaaat

SEQ ID NO: 3665512 - DNA, 25 bp, Homo sapien
aacccgagtggagtcgaatggaatg

SEQ ID NO: 3665513 - DNA, 25 bp, Homo sapien
gtggaatggaataaacaccagtgga

SEQ ID NO: 3665514 - DNA, 25 bp, Homo sapien
tggaatggaataaacaccagtggaa

SEQ ID NO: 3665515 - DNA, 25 bp, Homo sapien
ggaatggaataaacaccagtggaat

SEQ ID NO: 3665516 - DNA, 25 bp, Homo sapien
aatccgagtggaatgtaatggaatg

SEQ ID NO: 3665517 - DNA, 25 bp, Homo sapien
gaatcaacccgagtgcaatggaatg

SEQ ID NO: 3665518 - DNA, 25 bp, Homo sapien
tggaatggaatcaatccgagtggaa

SEQ ID NO: 3665519 - DNA, 25 bp, Homo sapien
gaatggaatcaacccgagtgcaatg

SEQ ID NO: 3665520 - DNA, 25 bp, Homo sapien
ggaatcgaatagaatcaacctgagt

SEQ ID NO: 3665521 - DNA, 25 bp, Homo sapien
aatcgaatagaatcaacctgagtgc

SEQ ID NO: 3665522 - DNA, 25 bp, Homo sapien
tcgaatagaatcaacctgagtgcaa

SEQ ID NO: 3665523 - DNA, 25 bp, Homo sapien
cgaatagaatcaacctgagtgcaat

SEQ ID NO: 3665524 - DNA, 25 bp, Homo sapien
gattctatgcgatgattccattcca

SEQ ID NO: 3665525 - DNA, 25 bp, Homo sapien
tccattcgtttccatccgatgatga

SEQ ID NO: 3665526 - DNA, 25 bp, Homo sapien
cattcgtttccatccgatgatgatt

SEQ ID NO: 3665527 - DNA, 25 bp, Homo sapien
gattccattcgtttccatccgatga

SEQ ID NO: 3665528 - DNA, 25 bp, Homo sapien
atgattccattcgtttccatccgat

SEQ ID NO: 3665529 - DNA, 25 bp, Homo sapien
gattctattcggtgattccattcga

SEQ ID NO: 3665530 - DNA, 25 bp, Homo sapien
tgttccattcgattctattcggtga

SEQ ID NO: 3665531 - DNA, 25 bp, Homo sapien
cgattctattcggtgattccattcg

SEQ ID NO: 3665532 - DNA, 25 bp, Homo sapien
atgattgttccattcgattctattc

SEQ ID NO: 3665533 - DNA, 25 bp, Homo sapien
attccattcaataccaattgatgat

SEQ ID NO: 3665534 - DNA, 25 bp, Homo sapien
aattccattcaataccaattgatga

SEQ ID NO: 3665535 - DNA, 25 bp, Homo sapien
acaattccattcaataccaattgat

SEQ ID NO: 3665536 - DNA, 25 bp, Homo sapien
caattccattcaataccaattgatg

SEQ ID NO: 3665537 - DNA, 25 bp, Homo sapien
gatgattccatttgtttccgttcga

SEQ ID NO: 3665538 - DNA, 25 bp, Homo sapien
ccatttgtttccgttcgacgatgat

SEQ ID NO: 3665539 - DNA, 25 bp, Homo sapien
gattccatttgtttccgttcgacga

SEQ ID NO: 3665540 - DNA, 25 bp, Homo sapien
tttgtttccgttcgacgatgattcc

SEQ ID NO: 3665541 - DNA, 25 bp, Homo sapien
ttccattagtttccattggatgatg

SEQ ID NO: 3665542 - DNA, 25 bp, Homo sapien
gatgatggttatttttgattccatt

SEQ ID NO: 3665543 - DNA, 25 bp, Homo sapien
tgatgatggttatttttgattccat

SEQ ID NO: 3665544 - DNA, 25 bp, Homo sapien
ttcgagaccattcgatgattgcatt

SEQ ID NO: 3665545 - DNA, 25 bp, Homo sapien
cgagaccattcgatgattgcattca

SEQ ID NO: 3665546 - DNA, 25 bp, Homo sapien
cattcgagaccattcgatgattgca

SEQ ID NO: 3665547 - DNA, 25 bp, Homo sapien
gagaccattcgatgattgcattcaa

SEQ ID NO: 3665548 - DNA, 25 bp, Homo sapien
ttcgagaccattcgatgattgcatt

SEQ ID NO: 3665549 - DNA, 25 bp, Homo sapien
cgagaccattcgatgattgcattca

SEQ ID NO: 3665550 - DNA, 25 bp, Homo sapien
cattcgagaccattcgatgattgca

SEQ ID NO: 3665551 - DNA, 25 bp, Homo sapien
gagaccattcgatgattgcattcaa

SEQ ID NO: 3665552 - DNA, 25 bp, Homo sapien
cgatgatgagtccatccatttcaat

SEQ ID NO: 3665553 - DNA, 25 bp, Homo sapien
gaatccattcgatgatgagtccatc

SEQ ID NO: 3665554 - DNA, 25 bp, Homo sapien
cattcgatgatgagtccatccattt

SEQ ID NO: 3665555 - DNA, 25 bp, Homo sapien
tccattcgatgatgagtccatccat

SEQ ID NO: 3665556 - DNA, 25 bp, Homo sapien
atgattccattcaagtccattcgat

SEQ ID NO: 3665557 - DNA, 25 bp, Homo sapien
gattccattcaagtccattcgatga

SEQ ID NO: 3665558 - DNA, 25 bp, Homo sapien
tccattcaagtccattcgatgattc

SEQ ID NO: 3665559 - DNA, 25 bp, Homo sapien
ttccattcaagtccattcgatgatt

SEQ ID NO: 3665560 - DNA, 25 bp, Homo sapien
cttctgattccattcaatgaatcca

SEQ ID NO: 3665561 - DNA, 25 bp, Homo sapien
tctgattccattcaatgaatccatt

SEQ ID NO: 3665562 - DNA, 25 bp, Homo sapien
tgattccattcaatgaatccattcg

SEQ ID NO: 3665563 - DNA, 25 bp, Homo sapien
gattccattcaatgaatccattcga

SEQ ID NO: 3665564 - DNA, 25 bp, Homo sapien
ccattcgatgattctatttgattgc

SEQ ID NO: 3665565 - DNA, 25 bp, Homo sapien
cattcgatgattctatttgattgca

SEQ ID NO: 3665566 - DNA, 25 bp, Homo sapien
aattccattcgattctatgcgatga

SEQ ID NO: 3665567 - DNA, 25 bp, Homo sapien
ataattccattcgattctatgcgat

SEQ ID NO: 3665568 - DNA, 25 bp, Homo sapien
taattccattcgattctatgcgatg

SEQ ID NO: 3665569 - DNA, 25 bp, Homo sapien
gataattccattcgattctatgcga

SEQ ID NO: 3665570 - DNA, 25 bp, Homo sapien
tcgatgacgattcctttcaattccc

SEQ ID NO: 3665571 - DNA, 25 bp, Homo sapien
tgattccatgcgattccaatagatg

SEQ ID NO: 3665572 - DNA, 25 bp, Homo sapien
ccaatagatgatgactcctttcatt

SEQ ID NO: 3665573 - DNA, 25 bp, Homo sapien
ttcaatccattcgatgacgattcct

SEQ ID NO: 3665574 - DNA, 25 bp, Homo sapien
tgttgattccattagtttccattgg

SEQ ID NO: 3665575 - DNA, 25 bp, Homo sapien
tccattcgatgttgattccattagt

SEQ ID NO: 3665576 - DNA, 25 bp, Homo sapien
tgattccattagtttccattggatg

SEQ ID NO: 3665577 - DNA, 25 bp, Homo sapien
ttcgatgttgattccattagtttcc

SEQ ID NO: 3665578 - DNA, 25 bp, Homo sapien
catctgattccattcaatgaatcca

SEQ ID NO: 3665579 - DNA, 25 bp, Homo sapien
attcgatgattccatctgattccat

SEQ ID NO: 3665580 - DNA, 25 bp, Homo sapien
tccattcatttccatctgatgagga

SEQ ID NO: 3665581 - DNA, 25 bp, Homo sapien
ttccatctgattccattcaatgaat

SEQ ID NO: 3665582 - DNA, 25 bp, Homo sapien
taattccgtttgattccgtttgatg

SEQ ID NO: 3665583 - DNA, 25 bp, Homo sapien
tccattcgtttccatctgatgatga

SEQ ID NO: 3665584 - DNA, 25 bp, Homo sapien
ttccattcgtttccatctgatgatg

SEQ ID NO: 3665585 - DNA, 25 bp, Homo sapien
cgatgatgagtccatccatttcaat

SEQ ID NO: 3665586 - DNA, 25 bp, Homo sapien
gaatccattcgatgatgagtccatc

SEQ ID NO: 3665587 - DNA, 25 bp, Homo sapien
tgttccattcgattctattcggtga

SEQ ID NO: 3665588 - DNA, 25 bp, Homo sapien
gattctattcggtgattccattcga

SEQ ID NO: 3665589 - DNA, 25 bp, Homo sapien
cgattctattcggtgattccattcg

SEQ ID NO: 3665590 - DNA, 25 bp, Homo sapien
atgattgttccattcgattctattc

SEQ ID NO: 3665591 - DNA, 25 bp, Homo sapien
agatgattccattcgagaccattcg

SEQ ID NO: 3665592 - DNA, 25 bp, Homo sapien
cattcgagaccattcgatgattgca

SEQ ID NO: 3665593 - DNA, 25 bp, Homo sapien
ttgaagatgattccattcgagacca

SEQ ID NO: 3665594 - DNA, 25 bp, Homo sapien
gagaccattcgatgattgcattcaa

SEQ ID NO: 3665595 - DNA, 25 bp, Homo sapien
tcgatgatgagtccatccatttcaa

SEQ ID NO: 3665596 - DNA, 25 bp, Homo sapien
ttcgatgatgagtccatccatttca

SEQ ID NO: 3665597 - DNA, 25 bp, Homo sapien
ataattccattcgattctatgcgat

SEQ ID NO: 3665598 - DNA, 25 bp, Homo sapien
aattccattcgattctatgcgatga

SEQ ID NO: 3665599 - DNA, 25 bp, Homo sapien
taattccattcgattctatgcgatg

SEQ ID NO: 3665600 - DNA, 25 bp, Homo sapien
gataattccattcgattctatgcga

SEQ ID NO: 3665601 - DNA, 25 bp, Homo sapien
tttgattccgttcaatgattattcc

SEQ ID NO: 3665602 - DNA, 25 bp, Homo sapien
catacgattccattagatgatgact

SEQ ID NO: 3665603 - DNA, 25 bp, Homo sapien
cctttcatttccactcgatgatgat

SEQ ID NO: 3665604 - DNA, 25 bp, Homo sapien
ttccatacgattccattagatgatg

SEQ ID NO: 3665605 - DNA, 25 bp, Homo sapien
gattctatgcgatgattccattcca

SEQ ID NO: 3665606 - DNA, 25 bp, Homo sapien
gattgcattcgagtccatggattat

SEQ ID NO: 3665607 - DNA, 25 bp, Homo sapien
gcattcgagtccatggattattcca

SEQ ID NO: 3665608 - DNA, 25 bp, Homo sapien
ttgcattcgagtccatggattattc

SEQ ID NO: 3665609 - DNA, 25 bp, Homo sapien
tgattgcattcgagtccatggatta

SEQ ID NO: 3665610 - DNA, 25 bp, Homo sapien
catttgatgatgatttcaatcaatt

SEQ ID NO: 3665611 - DNA, 25 bp, Homo sapien
tccatttgatgatgatttcaatcaa

SEQ ID NO: 3665612 - DNA, 25 bp, Homo sapien
attccatttgatgatgatttcaatc

SEQ ID NO: 3665613 - DNA, 25 bp, Homo sapien
tgatgatgatttcaatcaatttcat

SEQ ID NO: 3665614 - DNA, 25 bp, Homo sapien
tcgagttcattgactattccattcc

SEQ ID NO: 3665615 - DNA, 25 bp, Homo sapien
cgagttcattgactattccattcca

SEQ ID NO: 3665616 - DNA, 25 bp, Homo sapien
gagttcattgactattccattccat

SEQ ID NO: 3665617 - DNA, 25 bp, Homo sapien
gcgattccattagatgatgactcct

SEQ ID NO: 3665618 - DNA, 25 bp, Homo sapien
cgattccattagatgatgactcctt

SEQ ID NO: 3665619 - DNA, 25 bp, Homo sapien
ttccattagatgatgactcctttca

SEQ ID NO: 3665620 - DNA, 25 bp, Homo sapien
ccattagatgatgactcctttcatt

SEQ ID NO: 3665621 - DNA, 25 bp, Homo sapien
taattccattcgattctatgcgatg

SEQ ID NO: 3665622 - DNA, 25 bp, Homo sapien
aattccattcgattctatgcgatga

SEQ ID NO: 3665623 - DNA, 25 bp, Homo sapien
gataattccattcgattctatgcga

SEQ ID NO: 3665624 - DNA, 25 bp, Homo sapien
tgataattccattcgattctatgcg

SEQ ID NO: 3665625 - DNA, 25 bp, Homo sapien
cgatgatgagtccatccatttcaat

SEQ ID NO: 3665626 - DNA, 25 bp, Homo sapien
cattcgatgatgagtccatccattt

SEQ ID NO: 3665627 - DNA, 25 bp, Homo sapien
tccattcgatgatgagtccatccat

SEQ ID NO: 3665628 - DNA, 25 bp, Homo sapien
gaatccattcgatgatgagtccatc

SEQ ID NO: 3665629 - DNA, 25 bp, Homo sapien
gttccattcgattctattcggtgat

SEQ ID NO: 3665630 - DNA, 25 bp, Homo sapien
gattctattcggtgattccattcga

SEQ ID NO: 3665631 - DNA, 25 bp, Homo sapien
cgattctattcggtgattccattcg

SEQ ID NO: 3665632 - DNA, 25 bp, Homo sapien
ttgttccattcgattctattcggtg

SEQ ID NO: 3665633 - DNA, 25 bp, Homo sapien
cttcctttagacagagcaggtttga

SEQ ID NO: 3665634 - DNA, 25 bp, Homo sapien
gagcaggtttgaaacactctttttg

SEQ ID NO: 3665635 - DNA, 25 bp, Homo sapien
ccttcctttagacagagcaggtttg

SEQ ID NO: 3665636 - DNA, 25 bp, Homo sapien
caggtttgaaacactctttttgtgg

SEQ ID NO: 3665637 - DNA, 25 bp, Homo sapien
gcgtgtattcaactcacacagttga

SEQ ID NO: 3665638 - DNA, 25 bp, Homo sapien
ctttgtgttgcgtgtattcaactca

SEQ ID NO: 3665639 - DNA, 25 bp, Homo sapien
cgggatttcttcatataatgctaga

SEQ ID NO: 3665640 - DNA, 25 bp, Homo sapien
cttcatataatgctagacagaagaa

SEQ ID NO: 3665641 - DNA, 25 bp, Homo sapien
agtctgcaagtgcatatttggactt

SEQ ID NO: 3665642 - DNA, 25 bp, Homo sapien
aaagtctgcaagtgcatatttggac

SEQ ID NO: 3665643 - DNA, 25 bp, Homo sapien
cgggatttcttcatataatgctaga

SEQ ID NO: 3665644 - DNA, 25 bp, Homo sapien
tgtaaagtctgcaagtgcatatttg

SEQ ID NO: 3665645 - DNA, 25 bp, Homo sapien
taattgagcagtttggaaacactct

SEQ ID NO: 3665646 - DNA, 25 bp, Homo sapien
gcgcttcgaggacaatggtagaaaa

SEQ ID NO: 3665647 - DNA, 25 bp, Homo sapien
gaagcgcttcgaggacaatggtaga

SEQ ID NO: 3665648 - DNA, 25 bp, Homo sapien
gatttgaagcgcttcgaggacaatg

SEQ ID NO: 3665649 - DNA, 25 bp, Homo sapien
tagtgcagatttgaagcgcttcgag

SEQ ID NO: 3665650 - DNA, 25 bp, Homo sapien
ttcttcatataatgctagatagaag

SEQ ID NO: 3665651 - DNA, 25 bp, Homo sapien
atttcttcatataatgctagataga

SEQ ID NO: 3665652 - DNA, 25 bp, Homo sapien
gatttcttcatataatgctagatag

SEQ ID NO: 3665653 - DNA, 25 bp, Homo sapien
cttcatataatgctagatagaagaa

SEQ ID NO: 3665654 - DNA, 25 bp, Homo sapien
cgagaccattcgatgattgcattca

SEQ ID NO: 3665655 - DNA, 25 bp, Homo sapien
agatgattccattcgagaccattcg

SEQ ID NO: 3665656 - DNA, 25 bp, Homo sapien
cattcgagaccattcgatgattgca

SEQ ID NO: 3665657 - DNA, 25 bp, Homo sapien
ttgaagatgattccattcgagacca

SEQ ID NO: 3665658 - DNA, 25 bp, Homo sapien
gattgcattcgagtccatggattat

SEQ ID NO: 3665659 - DNA, 25 bp, Homo sapien
gcattcgagtccatggattattcca

SEQ ID NO: 3665660 - DNA, 25 bp, Homo sapien
ttgcattcgagtccatggattattc

SEQ ID NO: 3665661 - DNA, 25 bp, Homo sapien
tgattgcattcgagtccatggatta

SEQ ID NO: 3665662 - DNA, 25 bp, Homo sapien
ccattggatgattccatctgattcc

SEQ ID NO: 3665663 - DNA, 25 bp, Homo sapien
catctgattccattcaatgaatcca

SEQ ID NO: 3665664 - DNA, 25 bp, Homo sapien
tcaagtccattggatgattccatct

SEQ ID NO: 3665665 - DNA, 25 bp, Homo sapien
aagtccattggatgattccatctga

SEQ ID NO: 3665666 - DNA, 25 bp, Homo sapien
tcgattccatttgatgatgattcca

SEQ ID NO: 3665667 - DNA, 25 bp, Homo sapien
cgattccatttgatgatgattccat

SEQ ID NO: 3665668 - DNA, 25 bp, Homo sapien
tgattccatttgattccatttgatg

SEQ ID NO: 3665669 - DNA, 25 bp, Homo sapien
cattagattccatctgatgatgatt

SEQ ID NO: 3665670 - DNA, 25 bp, Homo sapien
ttccattagatgatgactcctttca

SEQ ID NO: 3665671 - DNA, 25 bp, Homo sapien
ttccatgcgattccattagatgatg

SEQ ID NO: 3665672 - DNA, 25 bp, Homo sapien
tttccattagattccatctgatgat

SEQ ID NO: 3665673 - DNA, 25 bp, Homo sapien
aattccgtttgattccgttagatgt

SEQ ID NO: 3665674 - DNA, 25 bp, Homo sapien
attcgagtcaattcgatgataattc

SEQ ID NO: 3665675 - DNA, 25 bp, Homo sapien
ttagatgttgattccattcgagtca

SEQ ID NO: 3665676 - DNA, 25 bp, Homo sapien
ttccgtttgattccgttagatgttg

SEQ ID NO: 3665677 - DNA, 25 bp, Homo sapien
gaatccattcgatgatgagtccatc

SEQ ID NO: 3665678 - DNA, 25 bp, Homo sapien
atccattcgatgatgagtccatcca

SEQ ID NO: 3665679 - DNA, 25 bp, Homo sapien
aatccattcgatgatgagtccatcc

SEQ ID NO: 3665680 - DNA, 25 bp, Homo sapien
atagccttgaaacactaatgtcacg

SEQ ID NO: 3665681 - DNA, 25 bp, Homo sapien
tattgttgtattctcatagccttga

SEQ ID NO: 3665682 - DNA, 25 bp, Homo sapien
cttgaaacactaatgtcacgttgat

SEQ ID NO: 3665683 - DNA, 25 bp, Homo sapien
ctttctctgctaactcattcctcat

SEQ ID NO: 3665684 - DNA, 25 bp, Homo sapien
tgggaacatgaaggcctggagagct

SEQ ID NO: 3665685 - DNA, 25 bp, Homo sapien
ctcactgggaacatgaaggcctgga

SEQ ID NO: 3665686 - DNA, 25 bp, Homo sapien
ggaacatgaaggcctggagagcttg

SEQ ID NO: 3665687 - DNA, 25 bp, Homo sapien
actgggaacatgaaggcctggagag

SEQ ID NO: 3665688 - DNA, 25 bp, Homo sapien
agctttttagcctcgccaccatggc

SEQ ID NO: 3665689 - DNA, 25 bp, Homo sapien
cggctttttgtcctcaccgctgcgg

SEQ ID NO: 3665690 - DNA, 25 bp, Homo sapien
caccactatggttttttgaggctgt

SEQ ID NO: 3665691 - DNA, 25 bp, Homo sapien
gcttccgtgactttttgccaccgct

SEQ ID NO: 3665692 - DNA, 25 bp, Homo sapien
cctcgctgccgcggtttttgcggct

SEQ ID NO: 3665693 - DNA, 25 bp, Homo sapien
cacggctttttgctccggaagccac

SEQ ID NO: 3665694 - DNA, 25 bp, Homo sapien
cagcaccgcagctttttacggcttt

SEQ ID NO: 3665695 - DNA, 25 bp, Homo sapien
ttgccctcgctgccgcggtttttgc

SEQ ID NO: 3665696 - DNA, 25 bp, Homo sapien
tatctgctaatggacatggtagatt

SEQ ID NO: 3665697 - DNA, 25 bp, Homo sapien
aaatagagatacttctcctgcccct

SEQ ID NO: 3665698 - DNA, 25 bp, Homo sapien
taaatcagagtatctactctaagtc

SEQ ID NO: 3665699 - DNA, 25 bp, Homo sapien
aaaaatagagatacttctcctgccc

SEQ ID NO: 3665700 - DNA, 25 bp, Homo sapien
caatgagtaagcaacaaagtgtcca

SEQ ID NO: 3665701 - DNA, 25 bp, Homo sapien
gaaagttgcatacgtcaggaaaagg

SEQ ID NO: 3665702 - DNA, 25 bp, Homo sapien
cagagaatttgaatgataactggcc

SEQ ID NO: 3665703 - DNA, 25 bp, Homo sapien
gtaaatcaagaacacctggactcca

SEQ ID NO: 3665704 - DNA, 25 bp, Homo sapien
ttccattcgattccattcgatgatg

SEQ ID NO: 3665705 - DNA, 25 bp, Homo sapien
aattccattcgattccattcgatga

SEQ ID NO: 3665706 - DNA, 25 bp, Homo sapien
ataattccattcgattccattcgat

SEQ ID NO: 3665707 - DNA, 25 bp, Homo sapien
taattccattcgattccattcgatg

SEQ ID NO: 3665708 - DNA, 25 bp, Homo sapien
gcggagggcaaaatagtggagatgg

SEQ ID NO: 3665709 - DNA, 25 bp, Homo sapien
gtagaaggccggcacagcttggcat

SEQ ID NO: 3665710 - DNA, 25 bp, Homo sapien
gcggcggagggcaaaatagtggaga

SEQ ID NO: 3665711 - DNA, 25 bp, Homo sapien
tggagatggggtagaaggccggcac

SEQ ID NO: 3665712 - DNA, 25 bp, Homo sapien
cgcggcaggcaaataaccgcggcac

SEQ ID NO: 3665713 - DNA, 25 bp, Homo sapien
ccgcggcaggcaaataaccgcggca

SEQ ID NO: 3665714 - DNA, 25 bp, Homo sapien
gcggcaggcaaataaccgcggcacc

SEQ ID NO: 3665715 - DNA, 25 bp, Homo sapien
gccgcggcaggcaaataaccgcggc

SEQ ID NO: 3665716 - DNA, 25 bp, Homo sapien
gatacatctctggattcaaatgcgc

SEQ ID NO: 3665717 - DNA, 25 bp, Homo sapien
tctttgtgcataattttagcagtca

SEQ ID NO: 3665718 - DNA, 25 bp, Homo sapien
gctgccaggatccatatatccagat

SEQ ID NO: 3665719 - DNA, 25 bp, Homo sapien
cagaggactggatttctgggaaatg

SEQ ID NO: 3665720 - DNA, 25 bp, Homo sapien
cgctccccaccagactgttcttgga

SEQ ID NO: 3665721 - DNA, 25 bp, Homo sapien
ccctgaagttccagacagtactgag

SEQ ID NO: 3665722 - DNA, 25 bp, Homo sapien
gcaattaatcatgttatcagaggac

SEQ ID NO: 3665723 - DNA, 25 bp, Homo sapien
actgaccgagtataatcctagtgtt

SEQ ID NO: 3665724 - DNA, 25 bp, Homo sapien
gacagtactgagcacactgaccgag

SEQ ID NO: 3665725 - DNA, 25 bp, Homo sapien
gagactgggtcatctggatgtcaca

SEQ ID NO: 3665726 - DNA, 25 bp, Homo sapien
ggtcatctggatgtcacatctggca

SEQ ID NO: 3665727 - DNA, 25 bp, Homo sapien
actgggtcatctggatgtcacatct

SEQ ID NO: 3665728 - DNA, 25 bp, Homo sapien
ggagactgggtcatctggatgtcac

SEQ ID NO: 3665729 - DNA, 25 bp, Homo sapien
gtcactgaaccgagagggaatccca

SEQ ID NO: 3665730 - DNA, 25 bp, Homo sapien
gaaccgagagggaatcccactttgc

SEQ ID NO: 3665731 - DNA, 25 bp, Homo sapien
tgtcactgaaccgagagggaatccc

SEQ ID NO: 3665732 - DNA, 25 bp, Homo sapien
actgaaccgagagggaatcccactt

SEQ ID NO: 3665733 - DNA, 25 bp, Homo sapien
agaggtactgtcactctgttgacag

SEQ ID NO: 3665734 - DNA, 25 bp, Homo sapien
tatgacttgtaacactgtgggagag

SEQ ID NO: 3665735 - DNA, 25 bp, Homo sapien
gggagaggtactgtcactctgttga

SEQ ID NO: 3665736 - DNA, 25 bp, Homo sapien
actgtgggagaggtactgtcactct

SEQ ID NO: 3665737 - DNA, 25 bp, Homo sapien
tcagccaacggattttttacaaaga

SEQ ID NO: 3665738 - DNA, 25 bp, Homo sapien
taaaacataagggagatccttcagg

SEQ ID NO: 3665739 - DNA, 25 bp, Homo sapien
aatataaactactcatccggcagga

SEQ ID NO: 3665740 - DNA, 25 bp, Homo sapien
gcaaagaagcacaacaatctaatta

SEQ ID NO: 3665741 - DNA, 25 bp, Homo sapien
gatgccatttggatctaggagcaga

SEQ ID NO: 3665742 - DNA, 25 bp, Homo sapien
tgccatttggatctaggagcagagg

SEQ ID NO: 3665743 - DNA, 25 bp, Homo sapien
atgccatttggatctaggagcagag

SEQ ID NO: 3665744 - DNA, 25 bp, Homo sapien
tgttccttagctgccccttcagtgg

SEQ ID NO: 3665745 - DNA, 25 bp, Homo sapien
tgccccttcagtgggccagtgtttc

SEQ ID NO: 3665746 - DNA, 25 bp, Homo sapien
tgatgccctccagctttcaaagtgc

SEQ ID NO: 3665747 - DNA, 25 bp, Homo sapien
gctctgagtcatcacttacacagtg

SEQ ID NO: 3665748 - DNA, 25 bp, Homo sapien
tcctccacctgcttgaggagcacca

SEQ ID NO: 3665749 - DNA, 25 bp, Homo sapien
gaagagcagctggatggcagacacc

SEQ ID NO: 3665750 - DNA, 25 bp, Homo sapien
ccacctgcttgaggagcaccaaagc

SEQ ID NO: 3665751 - DNA, 25 bp, Homo sapien
ctccacctgcttgaggagcaccaaa

SEQ ID NO: 3665752 - DNA, 25 bp, Homo sapien
accctcgtcctaggccccgcgtcat

SEQ ID NO: 3665753 - DNA, 25 bp, Homo sapien
ccccttagtagcgtccttagctcgg

SEQ ID NO: 3665754 - DNA, 25 bp, Homo sapien
agtagcgtccttagctcggcacttc

SEQ ID NO: 3665755 - DNA, 25 bp, Homo sapien
cttagtagcgtccttagctcggcac

SEQ ID NO: 3665756 - DNA, 25 bp, Homo sapien
ggacaacaacaacaggagagacagc

SEQ ID NO: 3665757 - DNA, 25 bp, Homo sapien
aaaggacaacaacaacaggagagac

SEQ ID NO: 3665758 - DNA, 25 bp, Homo sapien
cgtgtaaaggacaacaacaacagga

SEQ ID NO: 3665759 - DNA, 25 bp, Homo sapien
gtgtaaaggacaacaacaacaggag

SEQ ID NO: 3665760 - DNA, 25 bp, Homo sapien
tcatccatactgctagcagccatta

SEQ ID NO: 3665761 - DNA, 25 bp, Homo sapien
tgtcatccatactgctagcagccat

SEQ ID NO: 3665762 - DNA, 25 bp, Homo sapien
gtcatccatactgctagcagccatt

SEQ ID NO: 3665763 - DNA, 25 bp, Homo sapien
atgatctggtggttgttatattttc

SEQ ID NO: 3665764 - DNA, 25 bp, Homo sapien
gaatgatctggtggttgttatattt

SEQ ID NO: 3665765 - DNA, 25 bp, Homo sapien
aaaaaaggtcatgaatgatctggtg

SEQ ID NO: 3665766 - DNA, 25 bp, Homo sapien
gatctggtggttgttatattttctt

SEQ ID NO: 3665767 - DNA, 25 bp, Homo sapien
tgaaatatcttccttggtctggaat

SEQ ID NO: 3665768 - DNA, 25 bp, Homo sapien
tcttccttggtctggaatgagcttt

SEQ ID NO: 3665769 - DNA, 25 bp, Homo sapien
tatcttccttggtctggaatgagct

SEQ ID NO: 3665770 - DNA, 25 bp, Homo sapien
taagccactgaaatatcttccttgg

SEQ ID NO: 3665771 - DNA, 25 bp, Homo sapien
ttgaaacatgactgataagaatatt

SEQ ID NO: 3665772 - DNA, 25 bp, Homo sapien
tttgaaacatgactgataagaatat

SEQ ID NO: 3665773 - DNA, 25 bp, Homo sapien
tgacagataccaatcatgaaggaaa

SEQ ID NO: 3665774 - DNA, 25 bp, Homo sapien
tttttgaaacatgactgataagaat

SEQ ID NO: 3665775 - DNA, 25 bp, Homo sapien
tagtcaaagaataagtcacaaggaa

SEQ ID NO: 3665776 - DNA, 25 bp, Homo sapien
tatatatctaactacctaccttaaa

SEQ ID NO: 3665777 - DNA, 25 bp, Homo sapien
tgaagaggacagtttatatatctaa

SEQ ID NO: 3665778 - DNA, 25 bp, Homo sapien
ctattggatctgaccctcttgagaa

SEQ ID NO: 3665779 - DNA, 25 bp, Homo sapien
tactttggattcatgggagccactg

SEQ ID NO: 3665780 - DNA, 25 bp, Homo sapien
ggattcatgggagccactgggaata

SEQ ID NO: 3665781 - DNA, 25 bp, Homo sapien
gcccaactggcatactttggattca

SEQ ID NO: 3665782 - DNA, 25 bp, Homo sapien
tctctctaacttgacgcccaactgg

SEQ ID NO: 3665783 - DNA, 25 bp, Homo sapien
ctagagccagaggacctagcacagc

SEQ ID NO: 3665784 - DNA, 25 bp, Homo sapien
cataagtagagctccatttggagct

SEQ ID NO: 3665785 - DNA, 25 bp, Homo sapien
cagaatgcccataagtagagctcca

SEQ ID NO: 3665786 - DNA, 25 bp, Homo sapien
gaatgcccataagtagagctccatt

SEQ ID NO: 3665787 - DNA, 25 bp, Homo sapien
gcccataagtagagctccatttgga

SEQ ID NO: 3665788 - DNA, 25 bp, Homo sapien
gatcaagcagtataggatcaccaga

SEQ ID NO: 3665789 - DNA, 25 bp, Homo sapien
ggcagatggaacttgtgtgcaaatt

SEQ ID NO: 3665790 - DNA, 25 bp, Homo sapien
cccaaaggttttggatttgtcagct

SEQ ID NO: 3665791 - DNA, 25 bp, Homo sapien
gatgttggtcaagctcagaaagaag

SEQ ID NO: 3665792 - DNA, 25 bp, Homo sapien
tggaatgtactcgaatggaatggag

SEQ ID NO: 3665793 - DNA, 25 bp, Homo sapien
gaatggaatggaatgtactcgaatg

SEQ ID NO: 3665794 - DNA, 25 bp, Homo sapien
atggaatggaatgtactcgaatgga

SEQ ID NO: 3665795 - DNA, 25 bp, Homo sapien
gaatgtactcgaatggaatggagtg

SEQ ID NO: 3665796 - DNA, 25 bp, Homo sapien
tggaatggaatgaaatggacccgaa

SEQ ID NO: 3665797 - DNA, 25 bp, Homo sapien
gaatggaatgaaatggacccgaatg

SEQ ID NO: 3665798 - DNA, 25 bp, Homo sapien
aatggaatgaaatggacccgaatgg

SEQ ID NO: 3665799 - DNA, 25 bp, Homo sapien
ggaatggaatgaaatggacccgaat

SEQ ID NO: 3665800 - DNA, 25 bp, Homo sapien
gaatggaatgaactctaatggaata

SEQ ID NO: 3665801 - DNA, 25 bp, Homo sapien
tggaatggaatgaactctaatggaa

SEQ ID NO: 3665802 - DNA, 25 bp, Homo sapien
tggaatgaactctaatggaatagaa

SEQ ID NO: 3665803 - DNA, 25 bp, Homo sapien
atggaatggaaactaatggaataga

SEQ ID NO: 3665804 - DNA, 25 bp, Homo sapien
gtacccgaatgaaatggaatacaat

SEQ ID NO: 3665805 - DNA, 25 bp, Homo sapien
taccagaatggaatagaatggaatg

SEQ ID NO: 3665806 - DNA, 25 bp, Homo sapien
accagaatggaatagaatggaatgg

SEQ ID NO: 3665807 - DNA, 25 bp, Homo sapien
ggcactgtctcctatacccttggat

SEQ ID NO: 3665808 - DNA, 25 bp, Homo sapien
gggcactgtctcctatacccttgga

SEQ ID NO: 3665809 - DNA, 25 bp, Homo sapien
tgggcactgtctcctatacccttgg

SEQ ID NO: 3665810 - DNA, 25 bp, Homo sapien
ttctccctgtatgggcactgtctcc

SEQ ID NO: 3665811 - DNA, 25 bp, Homo sapien
tacttatacttacacgatccccaca

SEQ ID NO: 3665812 - DNA, 25 bp, Homo sapien
tatttaaagttggatatcttgtaag

SEQ ID NO: 3665813 - DNA, 25 bp, Homo sapien
tacacatgtgattggtacttatact

SEQ ID NO: 3665814 - DNA, 25 bp, Homo sapien
ggatatcttgtaagataatgttgag

SEQ ID NO: 3665815 - DNA, 25 bp, Homo sapien
agttgctgtacagagggtgacttaa

SEQ ID NO: 3665816 - DNA, 25 bp, Homo sapien
gatggcatctttgagtagttgattg

SEQ ID NO: 3665817 - DNA, 25 bp, Homo sapien
tctctggccacaatacttagtggca

SEQ ID NO: 3665818 - DNA, 25 bp, Homo sapien
gaatgagagtgtttgaagttttcag

SEQ ID NO: 3665819 - DNA, 25 bp, Homo sapien
tcaggcagtaccatagctcacaggg

SEQ ID NO: 3665820 - DNA, 25 bp, Homo sapien
gctgacattagaacagtgacctgac

SEQ ID NO: 3665821 - DNA, 25 bp, Homo sapien
ccttttggcttgtaggctgtaggaa

SEQ ID NO: 3665822 - DNA, 25 bp, Homo sapien
caaggtgaccagcatagtcagagtg

SEQ ID NO: 3665823 - DNA, 25 bp, Homo sapien
taagcttggtgtgcctttgagagag

SEQ ID NO: 3665824 - DNA, 25 bp, Homo sapien
ggccagatgatgagaccctgtattt

SEQ ID NO: 3665825 - DNA, 25 bp, Homo sapien
tagcacagtctagtcatcatttgga

SEQ ID NO: 3665826 - DNA, 25 bp, Homo sapien
tagagctacagaatgaagagcaacg

SEQ ID NO: 3665827 - DNA, 25 bp, Homo sapien
gcaagggaagagaaacctgcagtct

SEQ ID NO: 3665828 - DNA, 25 bp, Homo sapien
gaaacctgcagtcttggctgtgtcc

SEQ ID NO: 3665829 - DNA, 25 bp, Homo sapien
ggttctgattcttgtgtgcggtcca

SEQ ID NO: 3665830 - DNA, 25 bp, Homo sapien
tgaaagtggatttggagcaagggaa

SEQ ID NO: 3665831 - DNA, 25 bp, Homo sapien
cctggagcagggtgaaatgcggaaa

SEQ ID NO: 3665832 - DNA, 25 bp, Homo sapien
ggagcagggtgaaatgcggaaagcc

SEQ ID NO: 3665833 - DNA, 25 bp, Homo sapien
tggagcagggtgaaatgcggaaagc

SEQ ID NO: 3665834 - DNA, 25 bp, Homo sapien
gagcagggtgaaatgcggaaagccc

SEQ ID NO: 3665835 - DNA, 25 bp, Homo sapien
gagagtgcaggcacgtggtgcctgg

SEQ ID NO: 3665836 - DNA, 25 bp, Homo sapien
ccagggagagtgcaggcacgtggtg

SEQ ID NO: 3665837 - DNA, 25 bp, Homo sapien
agggagagtgcaggcacgtggtgcc

SEQ ID NO: 3665838 - DNA, 25 bp, Homo sapien
ggagagtgcaggcacgtggtgcctg

SEQ ID NO: 3665839 - DNA, 25 bp, Homo sapien
ctgcccacggcggagcagcctccag

SEQ ID NO: 3665840 - DNA, 25 bp, Homo sapien
tgcccacggcggagcagcctccagc

SEQ ID NO: 3665841 - DNA, 25 bp, Homo sapien
cccacggcggagcagcctccagcat

SEQ ID NO: 3665842 - DNA, 25 bp, Homo sapien
gcccacggcggagcagcctccagca

SEQ ID NO: 3665843 - DNA, 25 bp, Homo sapien
aaggcgaggtcgctgcatgaggcag

SEQ ID NO: 3665844 - DNA, 25 bp, Homo sapien
tttcagggctggacgccacaggttc

SEQ ID NO: 3665845 - DNA, 25 bp, Homo sapien
gcgcggctgggttgccgtctcctcc

SEQ ID NO: 3665846 - DNA, 25 bp, Homo sapien
catccggagagagtgcaggcaggcg

SEQ ID NO: 3665847 - DNA, 25 bp, Homo sapien
ctttcccggcacgtcgctccccgag

SEQ ID NO: 3665848 - DNA, 25 bp, Homo sapien
cttcctctgccgccggtatcccaga

SEQ ID NO: 3665849 - DNA, 25 bp, Homo sapien
tgccgccggtatcccagactcccgg

SEQ ID NO: 3665850 - DNA, 25 bp, Homo sapien
ttcccggcacgtcgctccccgagag

SEQ ID NO: 3665851 - DNA, 25 bp, Homo sapien
gtcgcctcgcgctgttgctgcgtca

SEQ ID NO: 3665852 - DNA, 25 bp, Homo sapien
tatatgaggccgctccaaagtcgcc

SEQ ID NO: 3665853 - DNA, 25 bp, Homo sapien
tccaaagtcgcctcgcgctgttgct

SEQ ID NO: 3665854 - DNA, 25 bp, Homo sapien
gcgaggtcgctatatgaggccgctc

SEQ ID NO: 3665855 - DNA, 25 bp, Homo sapien
cctcggctgggttgccgtcttctcc

SEQ ID NO: 3665856 - DNA, 25 bp, Homo sapien
ctcctttcagagatggatgccacag

SEQ ID NO: 3665857 - DNA, 25 bp, Homo sapien
ggttgccgtcttctcctttcagaga

SEQ ID NO: 3665858 - DNA, 25 bp, Homo sapien
cggctgggttgccgtcttctccttt

SEQ ID NO: 3665859 - DNA, 25 bp, Homo sapien
caagataatcagagaattttgtgaa

SEQ ID NO: 3665860 - DNA, 25 bp, Homo sapien
cagaatcaaaacaacagcctacgta

SEQ ID NO: 3665861 - DNA, 25 bp, Homo sapien
agtgcaaagaatacaggatgaaggc

SEQ ID NO: 3665862 - DNA, 25 bp, Homo sapien
caacatagttaataaaccactagca

SEQ ID NO: 3665863 - DNA, 25 bp, Homo sapien
cccatgtgcagtggcaatgccctga

SEQ ID NO: 3665864 - DNA, 25 bp, Homo sapien
gattttctgtaagcgtctcactctg

SEQ ID NO: 3665865 - DNA, 25 bp, Homo sapien
ccatgtcccgccttatgttgttagt

SEQ ID NO: 3665866 - DNA, 25 bp, Homo sapien
gagctcccgcatgttgcaggctgct

SEQ ID NO: 3665867 - DNA, 25 bp, Homo sapien
tggtaaagcccatatcaaagctgag

SEQ ID NO: 3665868 - DNA, 25 bp, Homo sapien
ctgggatgggacaaactcactcttg

SEQ ID NO: 3665869 - DNA, 25 bp, Homo sapien
gggtctctaactaataagcaggtcc

SEQ ID NO: 3665870 - DNA, 25 bp, Homo sapien
gggacaagcagttcagctaaacttt

SEQ ID NO: 3665871 - DNA, 25 bp, Homo sapien
gaaacttataaccagcacactgagg

SEQ ID NO: 3665872 - DNA, 25 bp, Homo sapien
tcatcacttggaaacttataaccag

SEQ ID NO: 3665873 - DNA, 25 bp, Homo sapien
agctgcttgtagataattcacatct

SEQ ID NO: 3665874 - DNA, 25 bp, Homo sapien
cttgtagataattcacatctttgcc

SEQ ID NO: 3665875 - DNA, 25 bp, Homo sapien
tttgagccccttgttggacgccact

SEQ ID NO: 3665876 - DNA, 25 bp, Homo sapien
tgttggacgccacttgatgagacca

SEQ ID NO: 3665877 - DNA, 25 bp, Homo sapien
ccccttgttggacgccacttgatga

SEQ ID NO: 3665878 - DNA, 25 bp, Homo sapien
gagccccttgttggacgccacttga

SEQ ID NO: 3665879 - DNA, 25 bp, Homo sapien
agtgtagttccacgttctccgtcgc

SEQ ID NO: 3665880 - DNA, 25 bp, Homo sapien
actctggtgtcctccagtgtagttc

SEQ ID NO: 3665881 - DNA, 25 bp, Homo sapien
tccacgttctccgtcgctccagcaa

SEQ ID NO: 3665882 - DNA, 25 bp, Homo sapien
agtactctggtgtcctccagtgtag

SEQ ID NO: 3665883 - DNA, 25 bp, Homo sapien
tgtagctggtcatccgctttcttca

SEQ ID NO: 3665884 - DNA, 25 bp, Homo sapien
atctgtgtcaacttcttgatctggc

SEQ ID NO: 3665885 - DNA, 25 bp, Homo sapien
gctgtgcccgatgaatgttgcttgc

SEQ ID NO: 3665886 - DNA, 25 bp, Homo sapien
cattagattactcattgtagctggt

SEQ ID NO: 3665887 - DNA, 25 bp, Homo sapien
tgatgactgggaggtaagcacctgt

SEQ ID NO: 3665888 - DNA, 25 bp, Homo sapien
cctacagcaggtcgtatcatttggg

SEQ ID NO: 3665889 - DNA, 25 bp, Homo sapien
tgtcactggccatgaaactggtgga

SEQ ID NO: 3665890 - DNA, 25 bp, Homo sapien
aagtagcaatgaaaccctgagagtg

SEQ ID NO: 3665891 - DNA, 25 bp, Homo sapien
tcatggtcagtttaaggcctgttta

SEQ ID NO: 3665892 - DNA, 25 bp, Homo sapien
gaaatcctgttcatggtcagtttaa

SEQ ID NO: 3665893 - DNA, 25 bp, Homo sapien
caacttctagcagtgggcgtcatag

SEQ ID NO: 3665894 - DNA, 25 bp, Homo sapien
gccatcaggagcacgtcacattcgt

SEQ ID NO: 3665895 - DNA, 25 bp, Homo sapien
tacagtattggtcaggttccaggcc

SEQ ID NO: 3665896 - DNA, 25 bp, Homo sapien
cagtaggtccgtatgggcagtttcc

SEQ ID NO: 3665897 - DNA, 25 bp, Homo sapien
ggcctacatgcacagagggttgact

SEQ ID NO: 3665898 - DNA, 25 bp, Homo sapien
tacatgcatatgtgccgagaccagc

SEQ ID NO: 3665899 - DNA, 25 bp, Homo sapien
tacacatggcttgagtatccagcac

SEQ ID NO: 3665900 - DNA, 25 bp, Homo sapien
tgggtggcaaccctggacaactgaa

SEQ ID NO: 3665901 - DNA, 25 bp, Homo sapien
catgggtacattaatttctctcaca

SEQ ID NO: 3665902 - DNA, 25 bp, Homo sapien
tatagttgtctaatgctgtgccagc

SEQ ID NO: 3665903 - DNA, 25 bp, Homo sapien
cgtgcactgtggaagtgtatattag

SEQ ID NO: 3665904 - DNA, 25 bp, Homo sapien
tggaagtgtatattagtacaaccac

SEQ ID NO: 3665905 - DNA, 25 bp, Homo sapien
cactgtggaagtgtatattagtaca

SEQ ID NO: 3665906 - DNA, 25 bp, Homo sapien
accctcgtgcactgtggaagtgtat

SEQ ID NO: 3665907 - DNA, 25 bp, Homo sapien
tgacgaaaataccttccaccaagac

SEQ ID NO: 3665908 - DNA, 25 bp, Homo sapien
tatgggcgttgatgaaaggacagca

SEQ ID NO: 3665909 - DNA, 25 bp, Homo sapien
cactagctatatcaggagctgtaac

SEQ ID NO: 3665910 - DNA, 25 bp, Homo sapien
tactcaggtcttgtgagggttgctt

SEQ ID NO: 3665911 - DNA, 25 bp, Homo sapien
tacctgacaaacaggcaaccaaagc

SEQ ID NO: 3665912 - DNA, 25 bp, Homo sapien
caaactatccatctgtattaggcca

SEQ ID NO: 3665913 - DNA, 25 bp, Homo sapien
gtcaggaagcttccaaccattgtgg

SEQ ID NO: 3665914 - DNA, 25 bp, Homo sapien
catctgatcagcttgtagggaggcg

SEQ ID NO: 3665915 - DNA, 25 bp, Homo sapien
tgtgcaatatccagaaaactttaac

SEQ ID NO: 3665916 - DNA, 25 bp, Homo sapien
ggacaaactgtgcaatatccagaaa

SEQ ID NO: 3665917 - DNA, 25 bp, Homo sapien
gctcagcaagttaatggacaaactg

SEQ ID NO: 3665918 - DNA, 25 bp, Homo sapien
caaaaggaatcaaactggagggatc

SEQ ID NO: 3665919 - DNA, 25 bp, Homo sapien
cacttctggctatagggaagaacct

SEQ ID NO: 3665920 - DNA, 25 bp, Homo sapien
gaaatttccagatatctcatgctgc

SEQ ID NO: 3665921 - DNA, 25 bp, Homo sapien
gaaagcacatgcacagaatgcagct

SEQ ID NO: 3665922 - DNA, 25 bp, Homo sapien
tatagtagtcggcagcagaatggac

SEQ ID NO: 3665923 - DNA, 25 bp, Homo sapien
cactgctgccccgtaatatagacaa

SEQ ID NO: 3665924 - DNA, 25 bp, Homo sapien
tatagacaatctacctctaacgctg

SEQ ID NO: 3665925 - DNA, 25 bp, Homo sapien
ggacatgctcacttccatgacatga

SEQ ID NO: 3665926 - DNA, 25 bp, Homo sapien
tgacatgaagacattccaagagctg

SEQ ID NO: 3665927 - DNA, 25 bp, Homo sapien
ttttttgcagtcttatgtgtggtca

SEQ ID NO: 3665928 - DNA, 25 bp, Homo sapien
tgtgtggtcactgaattctctctct

SEQ ID NO: 3665929 - DNA, 25 bp, Homo sapien
ctttagcttgtgtttaggtagtgtt

SEQ ID NO: 3665930 - DNA, 25 bp, Homo sapien
tagcttgtgtttaggtagtgtttta

SEQ ID NO: 3665931 - DNA, 25 bp, Homo sapien
tagtaagaccaataacaaaggtgtc

SEQ ID NO: 3665932 - DNA, 25 bp, Homo sapien
tcaattccctggtttatgcaggagc

SEQ ID NO: 3665933 - DNA, 25 bp, Homo sapien
tgtgagcgtgcatattgccctggcc

SEQ ID NO: 3665934 - DNA, 25 bp, Homo sapien
ggtcaaccagactgaaagcttaggt

SEQ ID NO: 3665935 - DNA, 25 bp, Homo sapien
ttgctgtgtcctcgcaggtcgcagc

SEQ ID NO: 3665936 - DNA, 25 bp, Homo sapien
gcttgctgtgtcctcgcaggtcgca

SEQ ID NO: 3665937 - DNA, 25 bp, Homo sapien
gtgtcctcgcaggtcgcagcttcat

SEQ ID NO: 3665938 - DNA, 25 bp, Homo sapien
gctgtgtcctcgcaggtcgcagctt

SEQ ID NO: 3665939 - DNA, 25 bp, Homo sapien
gcagaggcgagcgaggtggcgggaa

SEQ ID NO: 3665940 - DNA, 25 bp, Homo sapien
ttgtcactgcgacgcagaggcgagc

SEQ ID NO: 3665941 - DNA, 25 bp, Homo sapien
ctgtggtcggcatccccgcgttgtc

SEQ ID NO: 3665942 - DNA, 25 bp, Homo sapien
cccgcgttgtcactgcgacgcagag

SEQ ID NO: 3665943 - DNA, 25 bp, Homo sapien
gtgtgcactttttggccccggtcgc

SEQ ID NO: 3665944 - DNA, 25 bp, Homo sapien
tttgggctttctgcgcatgtgcgcg

SEQ ID NO: 3665945 - DNA, 25 bp, Homo sapien
tgtttttctccggtacagcctggta

SEQ ID NO: 3665946 - DNA, 25 bp, Homo sapien
tcgcgggagccgctttgggctttct

SEQ ID NO: 3665947 - DNA, 25 bp, Homo sapien
tcactttctcagggagcggcgcgag

SEQ ID NO: 3665948 - DNA, 25 bp, Homo sapien
tgaaaagggtcaatttgcttctccc

SEQ ID NO: 3665949 - DNA, 25 bp, Homo sapien
aactgcatcggccaggacaatgtgg

SEQ ID NO: 3665950 - DNA, 25 bp, Homo sapien
tcggccaggacaatgtgggccaaca

SEQ ID NO: 3665951 - DNA, 25 bp, Homo sapien
ctctcaactgcatcggccaggacaa

SEQ ID NO: 3665952 - DNA, 25 bp, Homo sapien
catctgcaacctaggataaggagga

SEQ ID NO: 3665953 - DNA, 25 bp, Homo sapien
tgcatctgcaacctaggataaggag

SEQ ID NO: 3665954 - DNA, 25 bp, Homo sapien
ttgcatctgcaacctaggataagga

SEQ ID NO: 3665955 - DNA, 25 bp, Homo sapien
acttgcatctgcaacctaggataag

SEQ ID NO: 3665956 - DNA, 25 bp, Homo sapien
acaaaaactcggctgtaggttgaag

SEQ ID NO: 3665957 - DNA, 25 bp, Homo sapien
ccacaaaaactcggctgtaggttga

SEQ ID NO: 3665958 - DNA, 25 bp, Homo sapien
caaaaactcggctgtaggttgaagt

SEQ ID NO: 3665959 - DNA, 25 bp, Homo sapien
tccacaaaaactcggctgtaggttg

SEQ ID NO: 3665960 - DNA, 25 bp, Homo sapien
gcacaaggcagaagatattttccct

SEQ ID NO: 3665961 - DNA, 25 bp, Homo sapien
gaagtacagcatgaatgattccaac

SEQ ID NO: 3665962 - DNA, 25 bp, Homo sapien
ggcacagacatgcttggtccaagct

SEQ ID NO: 3665963 - DNA, 25 bp, Homo sapien
aactgcttttggtggcgataacaca

SEQ ID NO: 3665964 - DNA, 25 bp, Homo sapien
ctgttggcaaagacccggatggcat

SEQ ID NO: 3665965 - DNA, 25 bp, Homo sapien
tggcatcctggtagcgacacatcat

SEQ ID NO: 3665966 - DNA, 25 bp, Homo sapien
tatgtggtgatctggcactctggca

SEQ ID NO: 3665967 - DNA, 25 bp, Homo sapien
ggcactctggcacacgggaatacat

SEQ ID NO: 3665968 - DNA, 25 bp, Homo sapien
catgcgcagcatcttgtccctgtgt

SEQ ID NO: 3665969 - DNA, 25 bp, Homo sapien
ctacaggcgacaggaacttggggca

SEQ ID NO: 3665970 - DNA, 25 bp, Homo sapien
caggattgagatgccgctggtccac

SEQ ID NO: 3665971 - DNA, 25 bp, Homo sapien
ccaggattgagatgccgctggtcca

SEQ ID NO: 3665972 - DNA, 25 bp, Homo sapien
aggattgagatgccgctggtccaca

SEQ ID NO: 3665973 - DNA, 25 bp, Homo sapien
tccaatttttggatccgacggatga

SEQ ID NO: 3665974 - DNA, 25 bp, Homo sapien
ccaatttttggatccgacggatgaa

SEQ ID NO: 3665975 - DNA, 25 bp, Homo sapien
ctcctccaatttttggatccgacgg

SEQ ID NO: 3665976 - DNA, 25 bp, Homo sapien
cctccaatttttggatccgacggat

SEQ ID NO: 3665977 - DNA, 25 bp, Homo sapien
ctgtcccatcttcttcagggttcga

SEQ ID NO: 3665978 - DNA, 25 bp, Homo sapien
tcagggtctctgtcccatcttcttc

SEQ ID NO: 3665979 - DNA, 25 bp, Homo sapien
ccatcttcttcagggttcgattaag

SEQ ID NO: 3665980 - DNA, 25 bp, Homo sapien
gtcccatcttcttcagggttcgatt

SEQ ID NO: 3665981 - DNA, 25 bp, Homo sapien
caggctgatggctgatctaggtaaa

SEQ ID NO: 3665982 - DNA, 25 bp, Homo sapien
gctgatggctgatctaggtaaaggt

SEQ ID NO: 3665983 - DNA, 25 bp, Homo sapien
gacaggctgatggctgatctaggta

SEQ ID NO: 3665984 - DNA, 25 bp, Homo sapien
tgatggctgatctaggtaaaggttt

SEQ ID NO: 3665985 - DNA, 25 bp, Homo sapien
gagacacaaacttgctgacttcttg

SEQ ID NO: 3665986 - DNA, 25 bp, Homo sapien
agacacaaacttgctgacttcttgt

SEQ ID NO: 3665987 - DNA, 25 bp, Homo sapien
cgagacacaaacttgctgacttctt

SEQ ID NO: 3665988 - DNA, 25 bp, Homo sapien
agtgagccagggatcaggatgccga

SEQ ID NO: 3665989 - DNA, 25 bp, Homo sapien
gggacagttgcatcatgagtgagcc

SEQ ID NO: 3665990 - DNA, 25 bp, Homo sapien
gacagttgcatcatgagtgagccag

SEQ ID NO: 3665991 - DNA, 25 bp, Homo sapien
cagggatcaggatgccgaggaccat

SEQ ID NO: 3665992 - DNA, 25 bp, Homo sapien
tggttaaggagtggtcagcctcaga

SEQ ID NO: 3665993 - DNA, 25 bp, Homo sapien
ggttaaggagtggtcagcctcagac

SEQ ID NO: 3665994 - DNA, 25 bp, Homo sapien
ttaaggagtggtcagcctcagacct

SEQ ID NO: 3665995 - DNA, 25 bp, Homo sapien
aaggagtggtcagcctcagacctgg

SEQ ID NO: 3665996 - DNA, 25 bp, Homo sapien
tagactccagactgccgatttcttt

SEQ ID NO: 3665997 - DNA, 25 bp, Homo sapien
gacttgagttcaaaacaattctttg

SEQ ID NO: 3665998 - DNA, 25 bp, Homo sapien
tgctctctggttggtatgccagggt

SEQ ID NO: 3665999 - DNA, 25 bp, Homo sapien
agttctgcttaaacaatgcttgaag

SEQ ID NO: 3666000 - DNA, 25 bp, Homo sapien
tgaggcttctcgtgtccttggagct

SEQ ID NO: 3666001 - DNA, 25 bp, Homo sapien
ggctgaggcttctcgtgtccttgga

SEQ ID NO: 3666002 - DNA, 25 bp, Homo sapien
gctgaggcttctcgtgtccttggag

SEQ ID NO: 3666003 - DNA, 25 bp, Homo sapien
gggctgaggcttctcgtgtccttgg

SEQ ID NO: 3666004 - DNA, 25 bp, Homo sapien
agttccagggaatcggttcctctga

SEQ ID NO: 3666005 - DNA, 25 bp, Homo sapien
atggcagttccagggaatcggttcc

SEQ ID NO: 3666006 - DNA, 25 bp, Homo sapien
ccagggaatcggttcctctgaaaag

SEQ ID NO: 3666007 - DNA, 25 bp, Homo sapien
gcagttccagggaatcggttcctct

SEQ ID NO: 3666008 - DNA, 25 bp, Homo sapien
gcagctgagcagtagggtgagttct

SEQ ID NO: 3666009 - DNA, 25 bp, Homo sapien
caatgcacaggttgctgtgctgcag

SEQ ID NO: 3666010 - DNA, 25 bp, Homo sapien
gcagagctgcttgcgcaatgcacag

SEQ ID NO: 3666011 - DNA, 25 bp, Homo sapien
ctggtacagatgaccaatggctgct

SEQ ID NO: 3666012 - DNA, 25 bp, Homo sapien
gggttgtagaatgtagtcctcaggt

SEQ ID NO: 3666013 - DNA, 25 bp, Homo sapien
catggcaaggaacaccactgctttt

SEQ ID NO: 3666014 - DNA, 25 bp, Homo sapien
taagcaattatagcagggttgtaga

SEQ ID NO: 3666015 - DNA, 25 bp, Homo sapien
taaatgctttcctactaagatcagg

SEQ ID NO: 3666016 - DNA, 25 bp, Homo sapien
tataggaagccaaaagtacccagca

SEQ ID NO: 3666017 - DNA, 25 bp, Homo sapien
tggtgaggagtaatgtgccccaaac

SEQ ID NO: 3666018 - DNA, 25 bp, Homo sapien
gagcactgctccagatttgcctaag

SEQ ID NO: 3666019 - DNA, 25 bp, Homo sapien
gccagccagcgtggaaaaactcata

SEQ ID NO: 3666020 - DNA, 25 bp, Homo sapien
tctgtctttcttgtgtagctactgt

SEQ ID NO: 3666021 - DNA, 25 bp, Homo sapien
ctgtctttcttgtgtagctactgtg

SEQ ID NO: 3666022 - DNA, 25 bp, Homo sapien
ctctgtctttcttgtgtagctactg

SEQ ID NO: 3666023 - DNA, 25 bp, Homo sapien
gggagctatgtgattcatgaagtct

SEQ ID NO: 3666024 - DNA, 25 bp, Homo sapien
ctacttacacaagcgagaacaaagg

SEQ ID NO: 3666025 - DNA, 25 bp, Homo sapien
gctgtgctagggaggtgcgcaggaa

SEQ ID NO: 3666026 - DNA, 25 bp, Homo sapien
aacatatgcatatcaaccttgtaac

SEQ ID NO: 3666027 - DNA, 25 bp, Homo sapien
aaaagacaaggcagtattagacatc

SEQ ID NO: 3666028 - DNA, 25 bp, Homo sapien
cactattgcttccatagtagactgg

SEQ ID NO: 3666029 - DNA, 25 bp, Homo sapien
tctctaacttggactacgggacagg

SEQ ID NO: 3666030 - DNA, 25 bp, Homo sapien
agtagactggatgcttctgttgagg

SEQ ID NO: 3666031 - DNA, 25 bp, Homo sapien
caggatgactgtgttatatgtccac

SEQ ID NO: 3666032 - DNA, 25 bp, Homo sapien
agagcatgatatgatgaggtccacc

SEQ ID NO: 3666033 - DNA, 25 bp, Homo sapien
tcagctgattcgtaccagtggaaca

SEQ ID NO: 3666034 - DNA, 25 bp, Homo sapien
acccagcacccaaagtagctcacta

SEQ ID NO: 3666035 - DNA, 25 bp, Homo sapien
tggtgacgtacagaagagtttttcg

SEQ ID NO: 3666036 - DNA, 25 bp, Homo sapien
cgttgcgggtgaggtgctgcgttct

SEQ ID NO: 3666037 - DNA, 25 bp, Homo sapien
gcttttggtgtttgacgatggtgac

SEQ ID NO: 3666038 - DNA, 25 bp, Homo sapien
gggtgaggtgctgcgttcttttgga

SEQ ID NO: 3666039 - DNA, 25 bp, Homo sapien
tccagttccaaagtgtatagcagct

SEQ ID NO: 3666040 - DNA, 25 bp, Homo sapien
cacaacatattgtaagcatgatggc

SEQ ID NO: 3666041 - DNA, 25 bp, Homo sapien
tctcctttatattgggagctcagtt

SEQ ID NO: 3666042 - DNA, 25 bp, Homo sapien
tagcagcttttaatctgtcaccaca

SEQ ID NO: 3666043 - DNA, 25 bp, Homo sapien
tccgtcctgcaacagtgagcatgtg

SEQ ID NO: 3666044 - DNA, 25 bp, Homo sapien
gatctacaagtggagaatcaccgcc

SEQ ID NO: 3666045 - DNA, 25 bp, Homo sapien
ccctgtggcctgagatgttatattc

SEQ ID NO: 3666046 - DNA, 25 bp, Homo sapien
tgagcatgtgatagtaagtgttccc

SEQ ID NO: 3666047 - DNA, 25 bp, Homo sapien
caacggtagtgggaaggcaacctgt

SEQ ID NO: 3666048 - DNA, 25 bp, Homo sapien
tcctggcagtagcataaggcagata

SEQ ID NO: 3666049 - DNA, 25 bp, Homo sapien
gatatccttcccctaactggttgca

SEQ ID NO: 3666050 - DNA, 25 bp, Homo sapien
gaaagagggtcatgcatgtctcctg

SEQ ID NO: 3666051 - DNA, 25 bp, Homo sapien
gcatgtacttattcagcctctgaag

SEQ ID NO: 3666052 - DNA, 25 bp, Homo sapien
gattaatgggctttgggcagtacca

SEQ ID NO: 3666053 - DNA, 25 bp, Homo sapien
acctcaattctaccattaacaatgg

SEQ ID NO: 3666054 - DNA, 25 bp, Homo sapien
cagagcccaggtgtcatatagccta

SEQ ID NO: 3666055 - DNA, 25 bp, Homo sapien
caacacaaggttctaggcaggtcag

SEQ ID NO: 3666056 - DNA, 25 bp, Homo sapien
aagactttgtggagacctgggacta

SEQ ID NO: 3666057 - DNA, 25 bp, Homo sapien
tcctctggctgtgaaaaagactttg

SEQ ID NO: 3666058 - DNA, 25 bp, Homo sapien
gagagcttagaaatagggcctcaca

SEQ ID NO: 3666059 - DNA, 25 bp, Homo sapien
atgcttatcgaagtgctggatattt

SEQ ID NO: 3666060 - DNA, 25 bp, Homo sapien
gatatttattcgtgcttctgtgatg

SEQ ID NO: 3666061 - DNA, 25 bp, Homo sapien
tatcgaagtgctggatatttattcg

SEQ ID NO: 3666062 - DNA, 25 bp, Homo sapien
agtgctggatatttattcgtgcttc

SEQ ID NO: 3666063 - DNA, 25 bp, Homo sapien
ggacctcaagaaaaaggattctgga

SEQ ID NO: 3666064 - DNA, 25 bp, Homo sapien
gaaaaaggattctggaacaggtaca

SEQ ID NO: 3666065 - DNA, 25 bp, Homo sapien
cctcaagaaaaaggattctggaaca

SEQ ID NO: 3666066 - DNA, 25 bp, Homo sapien
aggattctggaacaggtacattttg

SEQ ID NO: 3666067 - DNA, 25 bp, Homo sapien
tgatggcactgacagaccggcttgg

SEQ ID NO: 3666068 - DNA, 25 bp, Homo sapien
tttgagcaaaagcatcttgtggccc

SEQ ID NO: 3666069 - DNA, 25 bp, Homo sapien
actgagccttaacggcaggatgctg

SEQ ID NO: 3666070 - DNA, 25 bp, Homo sapien
agaccggcttgggtgcagctgatct

SEQ ID NO: 3666071 - DNA, 25 bp, Homo sapien
ggaaacataaatgctgagtgtgaat

SEQ ID NO: 3666072 - DNA, 25 bp, Homo sapien
tgagtgtgaatctgggaatggaact

SEQ ID NO: 3666073 - DNA, 25 bp, Homo sapien
aacataaatgctgagtgtgaatctg

SEQ ID NO: 3666074 - DNA, 25 bp, Homo sapien
gagtgtgaatctgggaatggaactc

SEQ ID NO: 3666075 - DNA, 25 bp, Homo sapien
gcagcttctcgatctggttatttaa

SEQ ID NO: 3666076 - DNA, 25 bp, Homo sapien
gaagcctgctgatctgtgttggcag

SEQ ID NO: 3666077 - DNA, 25 bp, Homo sapien
ttttgaagcctgctgatctgtgttg

SEQ ID NO: 3666078 - DNA, 25 bp, Homo sapien
tgttggcagcttctcgatctggtta

SEQ ID NO: 3666079 - DNA, 25 bp, Homo sapien
ggagccaaagccttgtggcgaaatg

SEQ ID NO: 3666080 - DNA, 25 bp, Homo sapien
ccaaagccttgtggcgaaatgttca

SEQ ID NO: 3666081 - DNA, 25 bp, Homo sapien
tgtggcgaaatgttcagcctgttca

SEQ ID NO: 3666082 - DNA, 25 bp, Homo sapien
aagccttgtggcgaaatgttcagcc

SEQ ID NO: 3666083 - DNA, 25 bp, Homo sapien
caaaatcgttgtcacttagatagag

SEQ ID NO: 3666084 - DNA, 25 bp, Homo sapien
tcacttagatagagtgcacacaggg

SEQ ID NO: 3666085 - DNA, 25 bp, Homo sapien
tctggcggcaggatttcaaaatcgt

SEQ ID NO: 3666086 - DNA, 25 bp, Homo sapien
tgtgagcttcccaatatctggcggc

SEQ ID NO: 3666087 - DNA, 25 bp, Homo sapien
taagctgggtaagcaccctgatttc

SEQ ID NO: 3666088 - DNA, 25 bp, Homo sapien
caccctgatttccttaggcagtgag

SEQ ID NO: 3666089 - DNA, 25 bp, Homo sapien
aacagtgaggcggttcccctgaatg

SEQ ID NO: 3666090 - DNA, 25 bp, Homo sapien
ctaattctgggggtagaacagtgag

SEQ ID NO: 3666091 - DNA, 25 bp, Homo sapien
cagcagtttctaagacacgggagac

SEQ ID NO: 3666092 - DNA, 25 bp, Homo sapien
cagtttctaagacacgggagactac

SEQ ID NO: 3666093 - DNA, 25 bp, Homo sapien
gtttctaagacacgggagactacag

SEQ ID NO: 3666094 - DNA, 25 bp, Homo sapien
atcagcagtttctaagacacgggag

SEQ ID NO: 3666095 - DNA, 25 bp, Homo sapien
ttttccagatgggagaactgacgct

SEQ ID NO: 3666096 - DNA, 25 bp, Homo sapien
gaagctcccatagagatgaatgccc

SEQ ID NO: 3666097 - DNA, 25 bp, Homo sapien
gccagaacagggatcttattccagt

SEQ ID NO: 3666098 - DNA, 25 bp, Homo sapien
taacataaacatcaagtctggaggc

SEQ ID NO: 3666099 - DNA, 25 bp, Homo sapien
tttgcaggtcgtgtcagaatttgat

SEQ ID NO: 3666100 - DNA, 25 bp, Homo sapien
ccatcagcctgattgagagggtcat

SEQ ID NO: 3666101 - DNA, 25 bp, Homo sapien
agcccagggcccgagaggatttgca

SEQ ID NO: 3666102 - DNA, 25 bp, Homo sapien
gattgaagttccttccacttggcat

SEQ ID NO: 3666103 - DNA, 25 bp, Homo sapien
ggcttcagagatatactaggcggct

SEQ ID NO: 3666104 - DNA, 25 bp, Homo sapien
aatgccaggctgttgtagaagctcc

SEQ ID NO: 3666105 - DNA, 25 bp, Homo sapien
tggactttaagatcagacgcttcgg

SEQ ID NO: 3666106 - DNA, 25 bp, Homo sapien
tgggacaagccgtgaagtctccgca

SEQ ID NO: 3666107 - DNA, 25 bp, Homo sapien
acctggactgcgtgggctcgggcgc

SEQ ID NO: 3666108 - DNA, 25 bp, Homo sapien
gcgtcggcggaggtgaccccagcgc

SEQ ID NO: 3666109 - DNA, 25 bp, Homo sapien
ccggatggggaaacctggactgcgt

SEQ ID NO: 3666110 - DNA, 25 bp, Homo sapien
gccctcgcccgtgcaggggaaacag

SEQ ID NO: 3666111 - DNA, 25 bp, Homo sapien
cggttgggagcgggttctggagctc

SEQ ID NO: 3666112 - DNA, 25 bp, Homo sapien
ggcggttgggagcgggttctggagc

SEQ ID NO: 3666113 - DNA, 25 bp, Homo sapien
ggttgggagcgggttctggagctca

SEQ ID NO: 3666114 - DNA, 25 bp, Homo sapien
gttgggagcgggttctggagctcac

SEQ ID NO: 3666115 - DNA, 25 bp, Homo sapien
ttattgtcaggcgagagccaggctc

SEQ ID NO: 3666116 - DNA, 25 bp, Homo sapien
tattgtcaggcgagagccaggctcc

SEQ ID NO: 3666117 - DNA, 25 bp, Homo sapien
ctttattgtcaggcgagagccaggc

SEQ ID NO: 3666118 - DNA, 25 bp, Homo sapien
ttgtcaggcgagagccaggctcccc

SEQ ID NO: 3666119 - DNA, 25 bp, Homo sapien
cctggggcatgcttgctatgctccg

SEQ ID NO: 3666120 - DNA, 25 bp, Homo sapien
catgcttgctatgctccggatgcag

SEQ ID NO: 3666121 - DNA, 25 bp, Homo sapien
tgcttgctatgctccggatgcaggg

SEQ ID NO: 3666122 - DNA, 25 bp, Homo sapien
gggcatgcttgctatgctccggatg

SEQ ID NO: 3666123 - DNA, 25 bp, Homo sapien
taaaaattgtgcctgcggagcccag

SEQ ID NO: 3666124 - DNA, 25 bp, Homo sapien
gaggagcgttctgcgctcctccggt

SEQ ID NO: 3666125 - DNA, 25 bp, Homo sapien
gcgggactcggatttcgcctctggt

SEQ ID NO: 3666126 - DNA, 25 bp, Homo sapien
ggtcgcggtctccgcactaaaccga

SEQ ID NO: 3666127 - DNA, 25 bp, Homo sapien
tgccgcggccaaaagacacccgaga

SEQ ID NO: 3666128 - DNA, 25 bp, Homo sapien
agctccgttcctgccgcggccaaaa

SEQ ID NO: 3666129 - DNA, 25 bp, Homo sapien
gcacagaaacgaccccggcgccgtc

SEQ ID NO: 3666130 - DNA, 25 bp, Homo sapien
aaaagacacccgagagcgccggcgg

SEQ ID NO: 3666131 - DNA, 25 bp, Homo sapien
ggagatgctcgcgctggtccttgcc

SEQ ID NO: 3666132 - DNA, 25 bp, Homo sapien
agcgcctgagcggtggccgatccca

SEQ ID NO: 3666133 - DNA, 25 bp, Homo sapien
tgccatacttggctgctgccgggct

SEQ ID NO: 3666134 - DNA, 25 bp, Homo sapien
gcgttcgcctgggacagcgcctgag

SEQ ID NO: 3666135 - DNA, 25 bp, Homo sapien
agacacgcgtttggcataaaccggg

SEQ ID NO: 3666136 - DNA, 25 bp, Homo sapien
gagaagacacgcgtttggcataaac

SEQ ID NO: 3666137 - DNA, 25 bp, Homo sapien
ttggagaagacacgcgtttggcata

SEQ ID NO: 3666138 - DNA, 25 bp, Homo sapien
aggttggagaagacacgcgtttggc

SEQ ID NO: 3666139 - DNA, 25 bp, Homo sapien
gctctggactcagccaagtggcaca

SEQ ID NO: 3666140 - DNA, 25 bp, Homo sapien
caggctgacttttcctgctacagat

SEQ ID NO: 3666141 - DNA, 25 bp, Homo sapien
cagctgatttgtatcccaagagtaa

SEQ ID NO: 3666142 - DNA, 25 bp, Homo sapien
taagatgggaagctgtagtcctgac

SEQ ID NO: 3666143 - DNA, 25 bp, Homo sapien
gctgggcgcagaccagtcggcaggt

SEQ ID NO: 3666144 - DNA, 25 bp, Homo sapien
tgggcgcagaccagtcggcaggtcc

SEQ ID NO: 3666145 - DNA, 25 bp, Homo sapien
tgcagctgggcgcagaccagtcggc

SEQ ID NO: 3666146 - DNA, 25 bp, Homo sapien
ggcgcagaccagtcggcaggtcctc

SEQ ID NO: 3666147 - DNA, 25 bp, Homo sapien
caggacgctgcaggttaaaggccaa

SEQ ID NO: 3666148 - DNA, 25 bp, Homo sapien
tctcgaatgaggaatagctagctgg

SEQ ID NO: 3666149 - DNA, 25 bp, Homo sapien
gctggattccagtccacaatgggca

SEQ ID NO: 3666150 - DNA, 25 bp, Homo sapien
gtcctcacgactggctgggccaaag

SEQ ID NO: 3666151 - DNA, 25 bp, Homo sapien
gaaggacaggagtgtctccatatcc

SEQ ID NO: 3666152 - DNA, 25 bp, Homo sapien
cagcaggaaaagaactgacgaggag

SEQ ID NO: 3666153 - DNA, 25 bp, Homo sapien
tcaggacaagcctcttggaaacagt

SEQ ID NO: 3666154 - DNA, 25 bp, Homo sapien
ggcatctagatgctctgcatgaagg

SEQ ID NO: 3666155 - DNA, 25 bp, Homo sapien
tgaggagtgaggcagctttgaggag

SEQ ID NO: 3666156 - DNA, 25 bp, Homo sapien
ctaaatttcaggtgtgcacacaagg

SEQ ID NO: 3666157 - DNA, 25 bp, Homo sapien
tgttaaacttcacgagtggttctcg

SEQ ID NO: 3666158 - DNA, 25 bp, Homo sapien
tggttctcggaaccagaccaggcac

SEQ ID NO: 3666159 - DNA, 25 bp, Homo sapien
atgaacaactgctaggtccacccaa

SEQ ID NO: 3666160 - DNA, 25 bp, Homo sapien
ctatttcctataccaggacctgcac

SEQ ID NO: 3666161 - DNA, 25 bp, Homo sapien
tactggactcttctcatcgtcacat

SEQ ID NO: 3666162 - DNA, 25 bp, Homo sapien
aacatgcagctatttctctcatctt

SEQ ID NO: 3666163 - DNA, 25 bp, Homo sapien
gtcagcatggacaccgccggaaacg

SEQ ID NO: 3666164 - DNA, 25 bp, Homo sapien
ggctgaacagctgagtgcggacgca

SEQ ID NO: 3666165 - DNA, 25 bp, Homo sapien
ttcacagtcgcgctgactcgccgga

SEQ ID NO: 3666166 - DNA, 25 bp, Homo sapien
ctcaggtcagcatggacaccgccgg

SEQ ID NO: 3666167 - DNA, 25 bp, Homo sapien
gacacctccgccagatgagaaatat

SEQ ID NO: 3666168 - DNA, 25 bp, Homo sapien
caggacacctccgccagatgagaaa

SEQ ID NO: 3666169 - DNA, 25 bp, Homo sapien
ggacacctccgccagatgagaaata

SEQ ID NO: 3666170 - DNA, 25 bp, Homo sapien
aggacacctccgccagatgagaaat

SEQ ID NO: 3666171 - DNA, 25 bp, Homo sapien
gatccagctcaggtctaagtctcct

SEQ ID NO: 3666172 - DNA, 25 bp, Homo sapien
cacaccagcggaaacaaagtcttta

SEQ ID NO: 3666173 - DNA, 25 bp, Homo sapien
taagggcgacattggaaggctgcac

SEQ ID NO: 3666174 - DNA, 25 bp, Homo sapien
tcttccgcgccacgcaataagggcg

SEQ ID NO: 3666175 - DNA, 25 bp, Homo sapien
ctatttaccaataacaagtaactct

SEQ ID NO: 3666176 - DNA, 25 bp, Homo sapien
tatttaccaataacaagtaactcta

SEQ ID NO: 3666177 - DNA, 25 bp, Homo sapien
ctttgggatttctcttccgggcatc

SEQ ID NO: 3666178 - DNA, 25 bp, Homo sapien
ggatttctcttccgggcatcttctt

SEQ ID NO: 3666179 - DNA, 25 bp, Homo sapien
ttctcttccgggcatcttcttcgtc

SEQ ID NO: 3666180 - DNA, 25 bp, Homo sapien
cgggcatcttcttcgtctcctagct

SEQ ID NO: 3666181 - DNA, 25 bp, Homo sapien
caacttttggaggtcccatcaccac

SEQ ID NO: 3666182 - DNA, 25 bp, Homo sapien
ttccaacttttggaggtcccatcac

SEQ ID NO: 3666183 - DNA, 25 bp, Homo sapien
cagtcaacttctgccgggtaaagtt

SEQ ID NO: 3666184 - DNA, 25 bp, Homo sapien
gatctcagtcaacttctgccgggta

SEQ ID NO: 3666185 - DNA, 25 bp, Homo sapien
tcatcatgttaatgtcacacccaca

SEQ ID NO: 3666186 - DNA, 25 bp, Homo sapien
gatcaatcatcatgttaatgtcaca

SEQ ID NO: 3666187 - DNA, 25 bp, Homo sapien
catgttaatgtcacacccacattca

SEQ ID NO: 3666188 - DNA, 25 bp, Homo sapien
gccagatcaatcatcatgttaatgt

SEQ ID NO: 3666189 - DNA, 25 bp, Homo sapien
caaagctggcatctataagcatcag

SEQ ID NO: 3666190 - DNA, 25 bp, Homo sapien
agctggcatctataagcatcagtac

SEQ ID NO: 3666191 - DNA, 25 bp, Homo sapien
caaacccaaagctggcatctataag

SEQ ID NO: 3666192 - DNA, 25 bp, Homo sapien
cccaaagctggcatctataagcatc

SEQ ID NO: 3666193 - DNA, 25 bp, Homo sapien
gaggcctaaacttcataactgtaat

SEQ ID NO: 3666194 - DNA, 25 bp, Homo sapien
gagaggcctaaacttcataactgta

SEQ ID NO: 3666195 - DNA, 25 bp, Homo sapien
tgagaggcctaaacttcataactgt

SEQ ID NO: 3666196 - DNA, 25 bp, Homo sapien
agaggcctaaacttcataactgtaa

SEQ ID NO: 3666197 - DNA, 25 bp, Homo sapien
tccattaagcacgtcatttagaaaa

SEQ ID NO: 3666198 - DNA, 25 bp, Homo sapien
cttgtccattaagcacgtcatttag

SEQ ID NO: 3666199 - DNA, 25 bp, Homo sapien
cactcttgtccattaagcacgtcat

SEQ ID NO: 3666200 - DNA, 25 bp, Homo sapien
tgtccattaagcacgtcatttagaa

SEQ ID NO: 3666201 - DNA, 25 bp, Homo sapien
aagtgacaccttccggtcacatttg

SEQ ID NO: 3666202 - DNA, 25 bp, Homo sapien
gatgtttgttcggatatcctctggg

SEQ ID NO: 3666203 - DNA, 25 bp, Homo sapien
tgacaccttccggtcacatttgatg

SEQ ID NO: 3666204 - DNA, 25 bp, Homo sapien
caccttccggtcacatttgatgttt

SEQ ID NO: 3666205 - DNA, 25 bp, Homo sapien
cagcgtctttgtcatacagcacacc

SEQ ID NO: 3666206 - DNA, 25 bp, Homo sapien
agcgtctttgtcatacagcacaccc

SEQ ID NO: 3666207 - DNA, 25 bp, Homo sapien
tgacccaagtggcttggaatcagaa

SEQ ID NO: 3666208 - DNA, 25 bp, Homo sapien
tctgacccaagtggcttggaatcag

SEQ ID NO: 3666209 - DNA, 25 bp, Homo sapien
ctctgacccaagtggcttggaatca

SEQ ID NO: 3666210 - DNA, 25 bp, Homo sapien
gacccaagtggcttggaatcagaaa

SEQ ID NO: 3666211 - DNA, 25 bp, Homo sapien
tagagccgttttccaacccgtcatc

SEQ ID NO: 3666212 - DNA, 25 bp, Homo sapien
tcatcttcatctccgaaaatggctt

SEQ ID NO: 3666213 - DNA, 25 bp, Homo sapien
tcctctcaaggtcatcgtcactgtc

SEQ ID NO: 3666214 - DNA, 25 bp, Homo sapien
tccgtcgtttgatgcccttaacagc

SEQ ID NO: 3666215 - DNA, 25 bp, Homo sapien
cagattcacacggtcactctggcaa

SEQ ID NO: 3666216 - DNA, 25 bp, Homo sapien
cactctggcaattagctggtgacag

SEQ ID NO: 3666217 - DNA, 25 bp, Homo sapien
tctccagattcacacggtcactctg

SEQ ID NO: 3666218 - DNA, 25 bp, Homo sapien
cacggtcactctggcaattagctgg

SEQ ID NO: 3666219 - DNA, 25 bp, Homo sapien
tcatcaatgaagttctgtggcccca

SEQ ID NO: 3666220 - DNA, 25 bp, Homo sapien
tgtggccccagtttctgaccactgc

SEQ ID NO: 3666221 - DNA, 25 bp, Homo sapien
tgtgcaatgcccagaatcgaaagtg

SEQ ID NO: 3666222 - DNA, 25 bp, Homo sapien
tcagatgcaaacacctcttcagctg

SEQ ID NO: 3666223 - DNA, 25 bp, Homo sapien
agctttcggaggtttggagctgctt

SEQ ID NO: 3666224 - DNA, 25 bp, Homo sapien
taagctttcggaggtttggagctgc

SEQ ID NO: 3666225 - DNA, 25 bp, Homo sapien
aataagctttcggaggtttggagct

SEQ ID NO: 3666226 - DNA, 25 bp, Homo sapien
tttcggaggtttggagctgcttgct

SEQ ID NO: 3666227 - DNA, 25 bp, Homo sapien
gggcctccacaagaaatctggagca

SEQ ID NO: 3666228 - DNA, 25 bp, Homo sapien
cttgtgcttacactctctgtcaggc

SEQ ID NO: 3666229 - DNA, 25 bp, Homo sapien
tccaagctcttctagagtatcatca

SEQ ID NO: 3666230 - DNA, 25 bp, Homo sapien
ttgacacgaaacaaccctccaagct

SEQ ID NO: 3666231 - DNA, 25 bp, Homo sapien
ttcccactttccagtcacgaagcaa

SEQ ID NO: 3666232 - DNA, 25 bp, Homo sapien
cccactttccagtcacgaagcaatc

SEQ ID NO: 3666233 - DNA, 25 bp, Homo sapien
agcaatctctgatactgttcataac

SEQ ID NO: 3666234 - DNA, 25 bp, Homo sapien
tcccactttccagtcacgaagcaat

SEQ ID NO: 3666235 - DNA, 25 bp, Homo sapien
aaaactcaatgtggttaagatggca

SEQ ID NO: 3666236 - DNA, 25 bp, Homo sapien
gagttgtataagacctgtatcctga

SEQ ID NO: 3666237 - DNA, 25 bp, Homo sapien
cccaaattgtttacaagttccatga

SEQ ID NO: 3666238 - DNA, 25 bp, Homo sapien
atcccaatcaaaattgcagtgggct

SEQ ID NO: 3666239 - DNA, 25 bp, Homo sapien
ctgggaaaagaacacccaaaggctg

SEQ ID NO: 3666240 - DNA, 25 bp, Homo sapien
tgggaaaagaacacccaaaggctgc

SEQ ID NO: 3666241 - DNA, 25 bp, Homo sapien
tgcacgtcccctgtttccaagtctt

SEQ ID NO: 3666242 - DNA, 25 bp, Homo sapien
tgattttcccttgtgcacgtcccct

SEQ ID NO: 3666243 - DNA, 25 bp, Homo sapien
tgagtattggggcctgattttccct

SEQ ID NO: 3666244 - DNA, 25 bp, Homo sapien
caagtcttcaaagtcaccgtagagc

SEQ ID NO: 3666245 - DNA, 25 bp, Homo sapien
ccttcatcatattctgcatcaaaca

SEQ ID NO: 3666246 - DNA, 25 bp, Homo sapien
tctcttcttatccaaatgctttttc

SEQ ID NO: 3666247 - DNA, 25 bp, Homo sapien
tgcatcaaacatctccttcaatttt

SEQ ID NO: 3666248 - DNA, 25 bp, Homo sapien
gtttctgcatttctcctttaagatc

SEQ ID NO: 3666249 - DNA, 25 bp, Homo sapien
tcccaggtcgaaaaccctcatactg

SEQ ID NO: 3666250 - DNA, 25 bp, Homo sapien
gtcgaaaaccctcatactgaactct

SEQ ID NO: 3666251 - DNA, 25 bp, Homo sapien
aggtcgaaaaccctcatactgaact

SEQ ID NO: 3666252 - DNA, 25 bp, Homo sapien
ccaggtcgaaaaccctcatactgaa

SEQ ID NO: 3666253 - DNA, 25 bp, Homo sapien
tatgattggatctcgggacttgagg

SEQ ID NO: 3666254 - DNA, 25 bp, Homo sapien
aggattttcttataccagcgatgtt

SEQ ID NO: 3666255 - DNA, 25 bp, Homo sapien
taccagcgatgtttcttcagacgca

SEQ ID NO: 3666256 - DNA, 25 bp, Homo sapien
aaatatgattggatctcgggacttg

SEQ ID NO: 3666257 - DNA, 25 bp, Homo sapien
tcgatataatacagtgggatggtct

SEQ ID NO: 3666258 - DNA, 25 bp, Homo sapien
ataatacagtgggatggtctgaaac

SEQ ID NO: 3666259 - DNA, 25 bp, Homo sapien
tgctccgcaatgcatgtgctgtggg

SEQ ID NO: 3666260 - DNA, 25 bp, Homo sapien
gtcttcgatataatacagtgggatg

SEQ ID NO: 3666261 - DNA, 25 bp, Homo sapien
actgtattgccaagaaaccagttcc

SEQ ID NO: 3666262 - DNA, 25 bp, Homo sapien
gccactgacagactgtattgccaag

SEQ ID NO: 3666263 - DNA, 25 bp, Homo sapien
gacagactgtattgccaagaaacca

SEQ ID NO: 3666264 - DNA, 25 bp, Homo sapien
ttatgccactgacagactgtattgc

SEQ ID NO: 3666265 - DNA, 25 bp, Homo sapien
aaggcgccttgagtactttcctgag

SEQ ID NO: 3666266 - DNA, 25 bp, Homo sapien
aatgggaccaataaaccctgccctg

SEQ ID NO: 3666267 - DNA, 25 bp, Homo sapien
aatgaaaatggactccctgcacggc

SEQ ID NO: 3666268 - DNA, 25 bp, Homo sapien
tgcacggctgcagggagtctctgat

SEQ ID NO: 3666269 - DNA, 25 bp, Homo sapien
ttttatggatttatccagatcaagg

SEQ ID NO: 3666270 - DNA, 25 bp, Homo sapien
tatggatttatccagatcaaggaca

SEQ ID NO: 3666271 - DNA, 25 bp, Homo sapien
ttatggatttatccagatcaaggac

SEQ ID NO: 3666272 - DNA, 25 bp, Homo sapien
tttatggatttatccagatcaagga

SEQ ID NO: 3666273 - DNA, 25 bp, Homo sapien
catggaagttatgaataacagcctc

SEQ ID NO: 3666274 - DNA, 25 bp, Homo sapien
gagttcaatatgtggcagtctcaca

SEQ ID NO: 3666275 - DNA, 25 bp, Homo sapien
ggaagttatgaataacagcctcaat

SEQ ID NO: 3666276 - DNA, 25 bp, Homo sapien
tcaatatgagttcaatatgagttca

SEQ ID NO: 3666277 - DNA, 25 bp, Homo sapien
tacaggtatagcaagataaaaacac

SEQ ID NO: 3666278 - DNA, 25 bp, Homo sapien
ttatgctttacttcttacttcaaac

SEQ ID NO: 3666279 - DNA, 25 bp, Homo sapien
cacaaaatcatatactttatgcttt

SEQ ID NO: 3666280 - DNA, 25 bp, Homo sapien
ctacaggtatagcaagataaaaaca

SEQ ID NO: 3666281 - DNA, 25 bp, Homo sapien
cactgactgttcgaatcacagcacc

SEQ ID NO: 3666282 - DNA, 25 bp, Homo sapien
agctggccctgaaagctccttctgg

SEQ ID NO: 3666283 - DNA, 25 bp, Homo sapien
caaagctggccctgaaagctccttc

SEQ ID NO: 3666284 - DNA, 25 bp, Homo sapien
cccttatcccactgactgttcgaat

SEQ ID NO: 3666285 - DNA, 25 bp, Homo sapien
ggaaacaggataccaagttcgcatg

SEQ ID NO: 3666286 - DNA, 25 bp, Homo sapien
taccaagttcgcatgaagacaatat

SEQ ID NO: 3666287 - DNA, 25 bp, Homo sapien
aacaggataccaagttcgcatgaag

SEQ ID NO: 3666288 - DNA, 25 bp, Homo sapien
ggataccaagttcgcatgaagacaa

SEQ ID NO: 3666289 - DNA, 25 bp, Homo sapien
ccttgttcgcctttagtctgacgcc

SEQ ID NO: 3666290 - DNA, 25 bp, Homo sapien
cttgttcgcctttagtctgacgcca

SEQ ID NO: 3666291 - DNA, 25 bp, Homo sapien
ttcgcctttagtctgacgccatggg

SEQ ID NO: 3666292 - DNA, 25 bp, Homo sapien
tgttcgcctttagtctgacgccatg

SEQ ID NO: 3666293 - DNA, 25 bp, Homo sapien
tctccaataaattaagcactgatgc

SEQ ID NO: 3666294 - DNA, 25 bp, Homo sapien
gcgcctggcctcgtagagactgaga

SEQ ID NO: 3666295 - DNA, 25 bp, Homo sapien
ccaaacacattttaccaggccagta

SEQ ID NO: 3666296 - DNA, 25 bp, Homo sapien
ccactgtagggtccagagtcactat

SEQ ID NO: 3666297 - DNA, 25 bp, Homo sapien
tgtgctcccagaacacgacacagaa

SEQ ID NO: 3666298 - DNA, 25 bp, Homo sapien
ggatcctccagcagaagtgtgtgtg

SEQ ID NO: 3666299 - DNA, 25 bp, Homo sapien
tgcaagtcccatatccagaccttag

SEQ ID NO: 3666300 - DNA, 25 bp, Homo sapien
cgtggaacagcaggaactctttaag

SEQ ID NO: 3666301 - DNA, 25 bp, Homo sapien
gaacagacagcttacacttacaact

SEQ ID NO: 3666302 - DNA, 25 bp, Homo sapien
catttctatggtatggaactatggg

SEQ ID NO: 3666303 - DNA, 25 bp, Homo sapien
caaatatgaactgcctcagtggaca

SEQ ID NO: 3666304 - DNA, 25 bp, Homo sapien
tctcagtaaacagaggaacagacag

SEQ ID NO: 3666305 - DNA, 25 bp, Homo sapien
tcatgaggctcgcgtatgacggccg

SEQ ID NO: 3666306 - DNA, 25 bp, Homo sapien
gctcgcgtatgacggccggtctccg

SEQ ID NO: 3666307 - DNA, 25 bp, Homo sapien
aggctcgcgtatgacggccggtctc

SEQ ID NO: 3666308 - DNA, 25 bp, Homo sapien
atgaggctcgcgtatgacggccggt

SEQ ID NO: 3666309 - DNA, 25 bp, Homo sapien
ctgacaaggacaaaagccggtgagt

SEQ ID NO: 3666310 - DNA, 25 bp, Homo sapien
gccggtgagtatcagaatgctctca

SEQ ID NO: 3666311 - DNA, 25 bp, Homo sapien
gtatcagaatgctctcagacaccac

SEQ ID NO: 3666312 - DNA, 25 bp, Homo sapien
cacactcgcatcctaagcactaaga

SEQ ID NO: 3666313 - DNA, 25 bp, Homo sapien
ctgaagtgctctttattgtgcaggt

SEQ ID NO: 3666314 - DNA, 25 bp, Homo sapien
ggctctgaagtgctctttattgtgc

SEQ ID NO: 3666315 - DNA, 25 bp, Homo sapien
gctctgaagtgctctttattgtgca

SEQ ID NO: 3666316 - DNA, 25 bp, Homo sapien
tctgaagtgctctttattgtgcagg

SEQ ID NO: 3666317 - DNA, 25 bp, Homo sapien
gcaattggccctcagcccccttcaa

SEQ ID NO: 3666318 - DNA, 25 bp, Homo sapien
tgcaattggccctcagcccccttca

SEQ ID NO: 3666319 - DNA, 25 bp, Homo sapien
caattggccctcagcccccttcaaa

SEQ ID NO: 3666320 - DNA, 25 bp, Homo sapien
actttaaatctcgacagccccaagt

SEQ ID NO: 3666321 - DNA, 25 bp, Homo sapien
cactttaaatctcgacagccccaag

SEQ ID NO: 3666322 - DNA, 25 bp, Homo sapien
tcactttaaatctcgacagccccaa

SEQ ID NO: 3666323 - DNA, 25 bp, Homo sapien
catcactttaaatctcgacagcccc

SEQ ID NO: 3666324 - DNA, 25 bp, Homo sapien
cataatagctcttgaggaacagagg

SEQ ID NO: 3666325 - DNA, 25 bp, Homo sapien
gacacttgctgatcaccttgtaagc

SEQ ID NO: 3666326 - DNA, 25 bp, Homo sapien
taaaggattccactcttctggctaa

SEQ ID NO: 3666327 - DNA, 25 bp, Homo sapien
catggtatgacttgagtgccttgta

SEQ ID NO: 3666328 - DNA, 25 bp, Homo sapien
tatgcagcacgaagctcagtggctc

SEQ ID NO: 3666329 - DNA, 25 bp, Homo sapien
tactagaagtcggtaccaagggcaa

SEQ ID NO: 3666330 - DNA, 25 bp, Homo sapien
gattttcgataaggtaccatcccca

SEQ ID NO: 3666331 - DNA, 25 bp, Homo sapien
gaaatggcgggcatgtcaccaaatg

SEQ ID NO: 3666332 - DNA, 25 bp, Homo sapien
ctcagaaggagcagcgaggaggtgg

SEQ ID NO: 3666333 - DNA, 25 bp, Homo sapien
gtctcagggccagcctcagaaggag

SEQ ID NO: 3666334 - DNA, 25 bp, Homo sapien
accagtggtctcagggccagcctca

SEQ ID NO: 3666335 - DNA, 25 bp, Homo sapien
cctcagaaggagcagcgaggaggtg

SEQ ID NO: 3666336 - DNA, 25 bp, Homo sapien
agtaacctggcctgcgttttctgca

SEQ ID NO: 3666337 - DNA, 25 bp, Homo sapien
gttcatcacttaagcgcccgcatgt

SEQ ID NO: 3666338 - DNA, 25 bp, Homo sapien
ccgcatgttccagtccagtaacctg

SEQ ID NO: 3666339 - DNA, 25 bp, Homo sapien
accaagttcatcacttaagcgcccg

SEQ ID NO: 3666340 - DNA, 25 bp, Homo sapien
cttcccggcacacaggcgcggtgga

SEQ ID NO: 3666341 - DNA, 25 bp, Homo sapien
cagcgacggcgcgcccagtgcctga

SEQ ID NO: 3666342 - DNA, 25 bp, Homo sapien
agccaggcttcccggcacacaggcg

SEQ ID NO: 3666343 - DNA, 25 bp, Homo sapien
ctgcagcgacggcgcgcccagtgcc

SEQ ID NO: 3666344 - DNA, 25 bp, Homo sapien
agcaggcgtgactggcgattgttcc

SEQ ID NO: 3666345 - DNA, 25 bp, Homo sapien
tactgcgtggaactcctcgtggtgc

SEQ ID NO: 3666346 - DNA, 25 bp, Homo sapien
cggtgtccaaacctgtccaacgact

SEQ ID NO: 3666347 - DNA, 25 bp, Homo sapien
gtgtgtgcatcctcgggtaccctga

SEQ ID NO: 3666348 - DNA, 25 bp, Homo sapien
cctgctgctggagacaccgggtggg

SEQ ID NO: 3666349 - DNA, 25 bp, Homo sapien
ctgctggagacaccgggtgggtgaa

SEQ ID NO: 3666350 - DNA, 25 bp, Homo sapien
agagcagcaataggctgtgccccgg

SEQ ID NO: 3666351 - DNA, 25 bp, Homo sapien
gcagcaataggctgtgccccggacc

SEQ ID NO: 3666352 - DNA, 25 bp, Homo sapien
cagctggcgtcactgggcatctcct

SEQ ID NO: 3666353 - DNA, 25 bp, Homo sapien
tgttcaaggaccctcagcctagagc

SEQ ID NO: 3666354 - DNA, 25 bp, Homo sapien
ggacagctggcgtcactgggcatct

SEQ ID NO: 3666355 - DNA, 25 bp, Homo sapien
ggagatgacgtctgttcaaggaccc

SEQ ID NO: 3666356 - DNA, 25 bp, Homo sapien
tcatgccttgttctccagcagctgc

SEQ ID NO: 3666357 - DNA, 25 bp, Homo sapien
catgccttgttctccagcagctgct

SEQ ID NO: 3666358 - DNA, 25 bp, Homo sapien
tgccttgttctccagcagctgctct

SEQ ID NO: 3666359 - DNA, 25 bp, Homo sapien
atgccttgttctccagcagctgctc

SEQ ID NO: 3666360 - DNA, 25 bp, Homo sapien
acatccttggtagtgggccctgtca

SEQ ID NO: 3666361 - DNA, 25 bp, Homo sapien
tttcgtcccgtgatgagccttagca

SEQ ID NO: 3666362 - DNA, 25 bp, Homo sapien
tgtacagaaaccaagcgggctcatg

SEQ ID NO: 3666363 - DNA, 25 bp, Homo sapien
aaaacttggcactgagcttcctgga

SEQ ID NO: 3666364 - DNA, 25 bp, Homo sapien
caaagaagcccctgatggaccccat

SEQ ID NO: 3666365 - DNA, 25 bp, Homo sapien
ttcagggtgtgtactccccggaagc

SEQ ID NO: 3666366 - DNA, 25 bp, Homo sapien
tcagggtgtgtactccccggaagcc

SEQ ID NO: 3666367 - DNA, 25 bp, Homo sapien
ctgtgcctgcatcaaagaagcccct

SEQ ID NO: 3666368 - DNA, 25 bp, Homo sapien
ctcagaggttgcgtgccccttgggc

SEQ ID NO: 3666369 - DNA, 25 bp, Homo sapien
actgccagctcagaggttgcgtgcc

SEQ ID NO: 3666370 - DNA, 25 bp, Homo sapien
tcagaggttgcgtgccccttgggct

SEQ ID NO: 3666371 - DNA, 25 bp, Homo sapien
ccagctcagaggttgcgtgcccctt

SEQ ID NO: 3666372 - DNA, 25 bp, Homo sapien
ctgtccttggctttgagtttctcaa

SEQ ID NO: 3666373 - DNA, 25 bp, Homo sapien
ccttggctttgagtttctcaaaagc

SEQ ID NO: 3666374 - DNA, 25 bp, Homo sapien
ctttgagtttctcaaaagcagaggc

SEQ ID NO: 3666375 - DNA, 25 bp, Homo sapien
ggctttgagtttctcaaaagcagag

SEQ ID NO: 3666376 - DNA, 25 bp, Homo sapien
cagtcctggtgcccccagcacatcc

SEQ ID NO: 3666377 - DNA, 25 bp, Homo sapien
tcctggtgcccccagcacatccagt

SEQ ID NO: 3666378 - DNA, 25 bp, Homo sapien
tggtgcccccagcacatccagtgac

SEQ ID NO: 3666379 - DNA, 25 bp, Homo sapien
ctggtgcccccagcacatccagtga

SEQ ID NO: 3666380 - DNA, 25 bp, Homo sapien
ctgcccaggtactcattgcagcagg

SEQ ID NO: 3666381 - DNA, 25 bp, Homo sapien
gcagcaggctaagactttagcagca

SEQ ID NO: 3666382 - DNA, 25 bp, Homo sapien
gctaagactttagcagcactttgga

SEQ ID NO: 3666383 - DNA, 25 bp, Homo sapien
ggtactcattgcagcaggctaagac

SEQ ID NO: 3666384 - DNA, 25 bp, Homo sapien
gaagacccttgcgatgaaaggtgaa

SEQ ID NO: 3666385 - DNA, 25 bp, Homo sapien
agacccttgcgatgaaaggtgaaaa

SEQ ID NO: 3666386 - DNA, 25 bp, Homo sapien
gacggctgtggggacggccacgttc

SEQ ID NO: 3666387 - DNA, 25 bp, Homo sapien
ccgcgaagacccttgcgatgaaagg

SEQ ID NO: 3666388 - DNA, 25 bp, Homo sapien
gaggctcggccccatctctctggac

SEQ ID NO: 3666389 - DNA, 25 bp, Homo sapien
gtcccacggttctgctccgcaggga

SEQ ID NO: 3666390 - DNA, 25 bp, Homo sapien
ctctctggacgcagcggtcggccgt

SEQ ID NO: 3666391 - DNA, 25 bp, Homo sapien
tcccacggttctgctccgcagggag

SEQ ID NO: 3666392 - DNA, 25 bp, Homo sapien
ctgcgcaggtatccccacacaggct

SEQ ID NO: 3666393 - DNA, 25 bp, Homo sapien
aggtgtctccgaattctgccccgaa

SEQ ID NO: 3666394 - DNA, 25 bp, Homo sapien
tacagtttagaactagccgtggctc

SEQ ID NO: 3666395 - DNA, 25 bp, Homo sapien
cccgaagaccctgcgatgaaacgtg

SEQ ID NO: 3666396 - DNA, 25 bp, Homo sapien
tttcaacgctgctaccttggagagg

SEQ ID NO: 3666397 - DNA, 25 bp, Homo sapien
agcttctcctttttcgttggcctgg

SEQ ID NO: 3666398 - DNA, 25 bp, Homo sapien
gagcttctcctttttcgttggcctg

SEQ ID NO: 3666399 - DNA, 25 bp, Homo sapien
tgagctgcgcgtcttggatctctag

SEQ ID NO: 3666400 - DNA, 25 bp, Homo sapien
tctaggacaccaacccggatgtcta

SEQ ID NO: 3666401 - DNA, 25 bp, Homo sapien
ttggatctctaggacaccaacccgg

SEQ ID NO: 3666402 - DNA, 25 bp, Homo sapien
agcatggtgagctgcgcgtcttgga

SEQ ID NO: 3666403 - DNA, 25 bp, Homo sapien
tccaccccaatgaccacctttcctc

SEQ ID NO: 3666404 - DNA, 25 bp, Homo sapien
ctgggttccaccccaatgaccacct

SEQ ID NO: 3666405 - DNA, 25 bp, Homo sapien
cagcatgtgggcacggatggtaact

SEQ ID NO: 3666406 - DNA, 25 bp, Homo sapien
cccatatgcaaacggtggtggcagg

SEQ ID NO: 3666407 - DNA, 25 bp, Homo sapien
gggcgagcgcaggcagggcgtgctg

SEQ ID NO: 3666408 - DNA, 25 bp, Homo sapien
taactgtgcaggacgcatggtgacc

SEQ ID NO: 3666409 - DNA, 25 bp, Homo sapien
ggccgagtgtgaggcagccttcggg

SEQ ID NO: 3666410 - DNA, 25 bp, Homo sapien
aaggccgagtgtgaggcagccttcg

SEQ ID NO: 3666411 - DNA, 25 bp, Homo sapien
ccaaggccgagtgtgaggcagcctt

SEQ ID NO: 3666412 - DNA, 25 bp, Homo sapien
aggcagccttcggggaagggtgcat

SEQ ID NO: 3666413 - DNA, 25 bp, Homo sapien
gctgctttgggaagcggcctcaggg

SEQ ID NO: 3666414 - DNA, 25 bp, Homo sapien
agagtgaaggatgcgtggcagcctt

SEQ ID NO: 3666415 - DNA, 25 bp, Homo sapien
ctgctttgggaagcggcctcagggc

SEQ ID NO: 3666416 - DNA, 25 bp, Homo sapien
tggcagccttgaggtggatgagagg

SEQ ID NO: 3666417 - DNA, 25 bp, Homo sapien
catgggcggagatgagtgtcagtgc

SEQ ID NO: 3666418 - DNA, 25 bp, Homo sapien
gccaccgtccatgaggccagaggag

SEQ ID NO: 3666419 - DNA, 25 bp, Homo sapien
tttccactttgccaccgtccatgag

SEQ ID NO: 3666420 - DNA, 25 bp, Homo sapien
actttgccaccgtccatgaggccag

SEQ ID NO: 3666421 - DNA, 25 bp, Homo sapien
gctgccttcgacaggctgctcttct

SEQ ID NO: 3666422 - DNA, 25 bp, Homo sapien
cattcataagggctgccttcgacag

SEQ ID NO: 3666423 - DNA, 25 bp, Homo sapien
cctggcctgtccttgagctgccaaa

SEQ ID NO: 3666424 - DNA, 25 bp, Homo sapien
cagatgagatcccattcataagggc

SEQ ID NO: 3666425 - DNA, 25 bp, Homo sapien
gcctccatacgaattccagttacag

SEQ ID NO: 3666426 - DNA, 25 bp, Homo sapien
ctgtggcccagattcgtctgctggg

SEQ ID NO: 3666427 - DNA, 25 bp, Homo sapien
cctgtaagcggagcctccatacgaa

SEQ ID NO: 3666428 - DNA, 25 bp, Homo sapien
gggaagttcctgtaagcggagcctc

SEQ ID NO: 3666429 - DNA, 25 bp, Homo sapien
gtgctcccgagtgtttgcgcccatg

SEQ ID NO: 3666430 - DNA, 25 bp, Homo sapien
tccacgtgtgctcccgagtgtttgc

SEQ ID NO: 3666431 - DNA, 25 bp, Homo sapien
acgtgtgctcccgagtgtttgcgcc

SEQ ID NO: 3666432 - DNA, 25 bp, Homo sapien
tcccgagtgtttgcgcccatgaggc

SEQ ID NO: 3666433 - DNA, 25 bp, Homo sapien
ctgagaaaccagagcggtgacaagg

SEQ ID NO: 3666434 - DNA, 25 bp, Homo sapien
agcggtgacaaggacgaggcggccc

SEQ ID NO: 3666435 - DNA, 25 bp, Homo sapien
aaaccagagcggtgacaaggacgag

SEQ ID NO: 3666436 - DNA, 25 bp, Homo sapien
cggtgacaaggacgaggcggcccag

SEQ ID NO: 3666437 - DNA, 25 bp, Homo sapien
cactcgctgacgcagcggtcctcgc

SEQ ID NO: 3666438 - DNA, 25 bp, Homo sapien
agcggtcctcgcagcctgacccaaa

SEQ ID NO: 3666439 - DNA, 25 bp, Homo sapien
ctcgctgacgcagcggtcctcgcag

SEQ ID NO: 3666440 - DNA, 25 bp, Homo sapien
gcccactcgctgacgcagcggtcct

SEQ ID NO: 3666441 - DNA, 25 bp, Homo sapien
ctggcagtgctcaacagacggcagt

SEQ ID NO: 3666442 - DNA, 25 bp, Homo sapien
ttcctcgcgactgagcttcgggctg

SEQ ID NO: 3666443 - DNA, 25 bp, Homo sapien
aacagacggcagttcctcgcgactg

SEQ ID NO: 3666444 - DNA, 25 bp, Homo sapien
gttcccgctgggaggcgcatcccta

SEQ ID NO: 3666445 - DNA, 25 bp, Homo sapien
acaggacatgtagccagtcagccaa

SEQ ID NO: 3666446 - DNA, 25 bp, Homo sapien
ccaccagccacaggacatgtagcca

SEQ ID NO: 3666447 - DNA, 25 bp, Homo sapien
ccagagcagggtggttgcttctgtg

SEQ ID NO: 3666448 - DNA, 25 bp, Homo sapien
agccacaggacatgtagccagtcag

SEQ ID NO: 3666449 - DNA, 25 bp, Homo sapien
tttaaagtgttcatccagtttggac

SEQ ID NO: 3666450 - DNA, 25 bp, Homo sapien
tcttgcgcttgtggttggctatgct

SEQ ID NO: 3666451 - DNA, 25 bp, Homo sapien
ggctatgcttgcactagagtttaaa

SEQ ID NO: 3666452 - DNA, 25 bp, Homo sapien
tggacactcttcaaccactatttct

SEQ ID NO: 3666453 - DNA, 25 bp, Homo sapien
cagacacccaaaaggcaagccaaat

SEQ ID NO: 3666454 - DNA, 25 bp, Homo sapien
ccagcaacgggaagttgaacttcca

SEQ ID NO: 3666455 - DNA, 25 bp, Homo sapien
ctgagggaatttgccagcaacggga

SEQ ID NO: 3666456 - DNA, 25 bp, Homo sapien
cccaaaaggcaagccaaattcctga

SEQ ID NO: 3666457 - DNA, 25 bp, Homo sapien
gcaggtccagatgtccgccagagac

SEQ ID NO: 3666458 - DNA, 25 bp, Homo sapien
gagacttcactacttggccacagtc

SEQ ID NO: 3666459 - DNA, 25 bp, Homo sapien
tggatggcttgcaggtccagatgtc

SEQ ID NO: 3666460 - DNA, 25 bp, Homo sapien
acttcactacttggccacagtctct

SEQ ID NO: 3666461 - DNA, 25 bp, Homo sapien
caggctgtatcaccaagggcccctg

SEQ ID NO: 3666462 - DNA, 25 bp, Homo sapien
ccaatggcaagtgccagccaaggcc

SEQ ID NO: 3666463 - DNA, 25 bp, Homo sapien
cacttccgtgccgggatgggttttg

SEQ ID NO: 3666464 - DNA, 25 bp, Homo sapien
gtgtctgcccgacaccaatggcaag

SEQ ID NO: 3666465 - DNA, 25 bp, Homo sapien
ctctcccagctggtcggcagctgga

SEQ ID NO: 3666466 - DNA, 25 bp, Homo sapien
tctcccagctggtcggcagctggat

SEQ ID NO: 3666467 - DNA, 25 bp, Homo sapien
aaggctttgtgtgagtgtgaggaca

SEQ ID NO: 3666468 - DNA, 25 bp, Homo sapien
caaggctttgtgtgagtgtgaggac

SEQ ID NO: 3666469 - DNA, 25 bp, Homo sapien
tctccttcttcctcttggacttgtg

SEQ ID NO: 3666470 - DNA, 25 bp, Homo sapien
aggaatggggtctccttcttcctct

SEQ ID NO: 3666471 - DNA, 25 bp, Homo sapien
ctccttcttcctcttggacttgtga

SEQ ID NO: 3666472 - DNA, 25 bp, Homo sapien
gaccaggaatggggtctccttcttc

SEQ ID NO: 3666473 - DNA, 25 bp, Homo sapien
cttctgcttgtagatgctccaccat

SEQ ID NO: 3666474 - DNA, 25 bp, Homo sapien
ctgggctggctacggtaaggggtga

SEQ ID NO: 3666475 - DNA, 25 bp, Homo sapien
gatgctccaccatgcaccaggtctg

SEQ ID NO: 3666476 - DNA, 25 bp, Homo sapien
accaggtctgggctggctacggtaa

SEQ ID NO: 3666477 - DNA, 25 bp, Homo sapien
tttgtctcatccagaaccagccagg

SEQ ID NO: 3666478 - DNA, 25 bp, Homo sapien
caagagcagcacaagctctcacgct

SEQ ID NO: 3666479 - DNA, 25 bp, Homo sapien
gcagcctttgtctcatccagaacca

SEQ ID NO: 3666480 - DNA, 25 bp, Homo sapien
gtctcatccagaaccagccaggtgg

SEQ ID NO: 3666481 - DNA, 25 bp, Homo sapien
agcaaccacggcttgtaaaccatat

SEQ ID NO: 3666482 - DNA, 25 bp, Homo sapien
taaaccatattccacgtgcttgggt

SEQ ID NO: 3666483 - DNA, 25 bp, Homo sapien
cttgtcctcagcaaccacggcttgt

SEQ ID NO: 3666484 - DNA, 25 bp, Homo sapien
ttgtaaaccatattccacgtgcttg

SEQ ID NO: 3666485 - DNA, 25 bp, Homo sapien
tgtggacaaggatcatggagtgggc

SEQ ID NO: 3666486 - DNA, 25 bp, Homo sapien
tgagacatgctgatgacacgacggg

SEQ ID NO: 3666487 - DNA, 25 bp, Homo sapien
ggatccggggacacttctgacgcta

SEQ ID NO: 3666488 - DNA, 25 bp, Homo sapien
ctgacagtgcaaggcagccataggc

SEQ ID NO: 3666489 - DNA, 25 bp, Homo sapien
atcaaagtcagaatcccagtctccc

SEQ ID NO: 3666490 - DNA, 25 bp, Homo sapien
agtcagaatcccagtctccccagag

SEQ ID NO: 3666491 - DNA, 25 bp, Homo sapien
tcagtcaaagatcaaagtcagaatc

SEQ ID NO: 3666492 - DNA, 25 bp, Homo sapien
aaagatcaaagtcagaatcccagtc

SEQ ID NO: 3666493 - DNA, 25 bp, Homo sapien
agctgtcccagagcgggctgcaaac

SEQ ID NO: 3666494 - DNA, 25 bp, Homo sapien
gggctgcaaacgctggtggatgttc

SEQ ID NO: 3666495 - DNA, 25 bp, Homo sapien
gctgcaaacgctggtggatgttcta

SEQ ID NO: 3666496 - DNA, 25 bp, Homo sapien
cccagagcgggctgcaaacgctggt

SEQ ID NO: 3666497 - DNA, 25 bp, Homo sapien
cctggcccaaggttgaaggaccctg

SEQ ID NO: 3666498 - DNA, 25 bp, Homo sapien
ggaatggtcccatggcctggcccaa

SEQ ID NO: 3666499 - DNA, 25 bp, Homo sapien
ccaggactgtggtcttggatagcca

SEQ ID NO: 3666500 - DNA, 25 bp, Homo sapien
tagccacgcagagccagaaaactgg

SEQ ID NO: 3666501 - DNA, 25 bp, Homo sapien
tctgagagctgaactgatggcacag

SEQ ID NO: 3666502 - DNA, 25 bp, Homo sapien
ttatcgtcagggttgtcagcggcag

SEQ ID NO: 3666503 - DNA, 25 bp, Homo sapien
catgcgactgatgcccagtgcagct

SEQ ID NO: 3666504 - DNA, 25 bp, Homo sapien
gaatggagcccatcaggtcgtggca

SEQ ID NO: 3666505 - DNA, 25 bp, Homo sapien
agcatttgtaacttggtctcagagc

SEQ ID NO: 3666506 - DNA, 25 bp, Homo sapien
tggaggccacggtaagaatgttctt

SEQ ID NO: 3666507 - DNA, 25 bp, Homo sapien
tactgctctgctcgtagggcatgga

SEQ ID NO: 3666508 - DNA, 25 bp, Homo sapien
tcagagcatccaccatatcctgggt

SEQ ID NO: 3666509 - DNA, 25 bp, Homo sapien
ggtttgctaagtcctggagctccca

SEQ ID NO: 3666510 - DNA, 25 bp, Homo sapien
aaagcctggagctagcaaactggca

SEQ ID NO: 3666511 - DNA, 25 bp, Homo sapien
ctggggttggaagccctgcatcctg

SEQ ID NO: 3666512 - DNA, 25 bp, Homo sapien
tggccatttcggcagggaggtggct

SEQ ID NO: 3666513 - DNA, 25 bp, Homo sapien
ttttgtacctgagaaggtgatggtg

SEQ ID NO: 3666514 - DNA, 25 bp, Homo sapien
aggttttgggtagacctggaggctg

SEQ ID NO: 3666515 - DNA, 25 bp, Homo sapien
gtacagcccggaaggtgtatccatc

SEQ ID NO: 3666516 - DNA, 25 bp, Homo sapien
tatttccaaggtagaccacaggttg

SEQ ID NO: 3666517 - DNA, 25 bp, Homo sapien
ggatttgtcatcctggtgcattgta

SEQ ID NO: 3666518 - DNA, 25 bp, Homo sapien
ggtgcattgtatacatctcatccaa

SEQ ID NO: 3666519 - DNA, 25 bp, Homo sapien
caagccgtaattctgtgagtaatgg

SEQ ID NO: 3666520 - DNA, 25 bp, Homo sapien
catccaacttccagacaagccgtaa

SEQ ID NO: 3666521 - DNA, 25 bp, Homo sapien
ttgcccagtttaggcctggatacca

SEQ ID NO: 3666522 - DNA, 25 bp, Homo sapien
cctggataccaagcagccgctggtg

SEQ ID NO: 3666523 - DNA, 25 bp, Homo sapien
tgcagccgccctttgcccagtttag

SEQ ID NO: 3666524 - DNA, 25 bp, Homo sapien
gcctggataccaagcagccgctggt

SEQ ID NO: 3666525 - DNA, 25 bp, Homo sapien
ctggctctgagcggatggaagccat

SEQ ID NO: 3666526 - DNA, 25 bp, Homo sapien
cctggctctgagcggatggaagcca

SEQ ID NO: 3666527 - DNA, 25 bp, Homo sapien
ggtctgctgggagcatctgtccgct

SEQ ID NO: 3666528 - DNA, 25 bp, Homo sapien
ccaggagtgtgctcagccagcaggt

SEQ ID NO: 3666529 - DNA, 25 bp, Homo sapien
tctgcagccccttgatgcacgctca

SEQ ID NO: 3666530 - DNA, 25 bp, Homo sapien
ctgtccgctgccccactctctgcag

SEQ ID NO: 3666531 - DNA, 25 bp, Homo sapien
tgaggaaggccttgcaatgtctgtg

SEQ ID NO: 3666532 - DNA, 25 bp, Homo sapien
tggcactggcgctgcatggagccta

SEQ ID NO: 3666533 - DNA, 25 bp, Homo sapien
tcaggtgcgttgactgctgaactcc

SEQ ID NO: 3666534 - DNA, 25 bp, Homo sapien
ggtgaggattcctagctgctgttca

SEQ ID NO: 3666535 - DNA, 25 bp, Homo sapien
gagaagcagccggttgaattgttcc

SEQ ID NO: 3666536 - DNA, 25 bp, Homo sapien
cagagaagcagccggttgaattgtt

SEQ ID NO: 3666537 - DNA, 25 bp, Homo sapien
agaagcagccggttgaattgttcca

SEQ ID NO: 3666538 - DNA, 25 bp, Homo sapien
agcagagaagcagccggttgaattg

SEQ ID NO: 3666539 - DNA, 25 bp, Homo sapien
caaggtgtgtatctgccagggccct

SEQ ID NO: 3666540 - DNA, 25 bp, Homo sapien
ccagtgactgaatgccccagtggtg

SEQ ID NO: 3666541 - DNA, 25 bp, Homo sapien
gcccaggaggtcttttggagccaaa

SEQ ID NO: 3666542 - DNA, 25 bp, Homo sapien
tggcccaggaggtcttttggagcca

SEQ ID NO: 3666543 - DNA, 25 bp, Homo sapien
tcagcacgagctgccgctgtcatca

SEQ ID NO: 3666544 - DNA, 25 bp, Homo sapien
tcagctgtaggagctgaggccatga

SEQ ID NO: 3666545 - DNA, 25 bp, Homo sapien
cagcctctgtcctgtcagctgtagg

SEQ ID NO: 3666546 - DNA, 25 bp, Homo sapien
ggccatgaggcccaagcagtcactg

SEQ ID NO: 3666547 - DNA, 25 bp, Homo sapien
gcagggatgctacgcgggatgcagg

SEQ ID NO: 3666548 - DNA, 25 bp, Homo sapien
cttttgccctttccgctgcacagag

SEQ ID NO: 3666549 - DNA, 25 bp, Homo sapien
gcagagccgctcttcctacccggtg

SEQ ID NO: 3666550 - DNA, 25 bp, Homo sapien
ggatgcaggtctggccgactggctc

SEQ ID NO: 3666551 - DNA, 25 bp, Homo sapien
ccctgcttcggtcgcgggactgaag

SEQ ID NO: 3666552 - DNA, 25 bp, Homo sapien
tgtaggagctcagtgcgggacgcgc

SEQ ID NO: 3666553 - DNA, 25 bp, Homo sapien
gactgaagcgaggtaagcgccggct

SEQ ID NO: 3666554 - DNA, 25 bp, Homo sapien
gcgggtgcggcgctcagtctggccg

SEQ ID NO: 3666555 - DNA, 25 bp, Homo sapien
agcaacagcagacgcagccccgcgg

SEQ ID NO: 3666556 - DNA, 25 bp, Homo sapien
agcagcaacagcagacgcagccccg

SEQ ID NO: 3666557 - DNA, 25 bp, Homo sapien
gcagcaacagcagacgcagccccgc

SEQ ID NO: 3666558 - DNA, 25 bp, Homo sapien
aacagcagacgcagccccgcggcac

SEQ ID NO: 3666559 - DNA, 25 bp, Homo sapien
ccctgactggctagggagcgcgcca

SEQ ID NO: 3666560 - DNA, 25 bp, Homo sapien
cacgagagcgccctgactggctagg

SEQ ID NO: 3666561 - DNA, 25 bp, Homo sapien
cctgactggctagggagcgcgccat

SEQ ID NO: 3666562 - DNA, 25 bp, Homo sapien
agcatccaggcacgagagcgccctg

SEQ ID NO: 3666563 - DNA, 25 bp, Homo sapien
ggtgtgcagcatgctgatcagcagc

SEQ ID NO: 3666564 - DNA, 25 bp, Homo sapien
aggccctgggctgttaatcctgtct

SEQ ID NO: 3666565 - DNA, 25 bp, Homo sapien
tgtgcagcatgctgatcagcagcct

SEQ ID NO: 3666566 - DNA, 25 bp, Homo sapien
tcctgtctctatgctggtgtgcagc

SEQ ID NO: 3666567 - DNA, 25 bp, Homo sapien
accacccggcagctctgatggggca

SEQ ID NO: 3666568 - DNA, 25 bp, Homo sapien
cccggcagctctgatggggcactgt

SEQ ID NO: 3666569 - DNA, 25 bp, Homo sapien
cgaccacccggcagctctgatgggg

SEQ ID NO: 3666570 - DNA, 25 bp, Homo sapien
tgccgaccacccggcagctctgatg

SEQ ID NO: 3666571 - DNA, 25 bp, Homo sapien
cctgcagcagcagttgagaacgccc

SEQ ID NO: 3666572 - DNA, 25 bp, Homo sapien
agcagttgagaacgcccccagggcc

SEQ ID NO: 3666573 - DNA, 25 bp, Homo sapien
ccagacggttgctgcttgaggtcgc

SEQ ID NO: 3666574 - DNA, 25 bp, Homo sapien
gcttgaggtcgctgaggggtctgga

SEQ ID NO: 3666575 - DNA, 25 bp, Homo sapien
tcccagtaagcatccctcgagaagt

SEQ ID NO: 3666576 - DNA, 25 bp, Homo sapien
tacgtgccgtagagatgctggccca

SEQ ID NO: 3666577 - DNA, 25 bp, Homo sapien
tcatgcagccgtgtgcggtacgtgc

SEQ ID NO: 3666578 - DNA, 25 bp, Homo sapien
tatggtccaggctccggttaaggta

SEQ ID NO: 3666579 - DNA, 25 bp, Homo sapien
actgcacaggcagcaggcggaactg

SEQ ID NO: 3666580 - DNA, 25 bp, Homo sapien
ccctcacgaagggatgtgggtgaca

SEQ ID NO: 3666581 - DNA, 25 bp, Homo sapien
aaggagaagtatacgcgggcacagc

SEQ ID NO: 3666582 - DNA, 25 bp, Homo sapien
gtcggttctcccgaatgcggaagga

SEQ ID NO: 3666583 - DNA, 25 bp, Homo sapien
gatgactgtgcttacgagtttgcag

SEQ ID NO: 3666584 - DNA, 25 bp, Homo sapien
gactgtgcttacgtcctgctgcagc

SEQ ID NO: 3666585 - DNA, 25 bp, Homo sapien
cgctcggagcacgagtttgcagttt

SEQ ID NO: 3666586 - DNA, 25 bp, Homo sapien
gcagcgatgactgtgcttacgtcct

SEQ ID NO: 3666587 - DNA, 25 bp, Homo sapien
gctctgcggtcagagcggggcgcac

SEQ ID NO: 3666588 - DNA, 25 bp, Homo sapien
ggaagggggctctgcggtcagagcg

SEQ ID NO: 3666589 - DNA, 25 bp, Homo sapien
cagccgggaccgggccagccgcttt

SEQ ID NO: 3666590 - DNA, 25 bp, Homo sapien
gggctctgcggtcagagcggggcgc

SEQ ID NO: 3666591 - DNA, 25 bp, Homo sapien
gcgcaccaagcagacaggggccccg

SEQ ID NO: 3666592 - DNA, 25 bp, Homo sapien
cgcaccaagcagacaggggccccgc

SEQ ID NO: 3666593 - DNA, 25 bp, Homo sapien
tgcgcaccaagcagacaggggcccc

SEQ ID NO: 3666594 - DNA, 25 bp, Homo sapien
ctgcgcaccaagcagacaggggccc

SEQ ID NO: 3666595 - DNA, 25 bp, Homo sapien
agggcccagcgcgtgctcacctcca

SEQ ID NO: 3666596 - DNA, 25 bp, Homo sapien
ggcccagcgcgtgctcacctccagg

SEQ ID NO: 3666597 - DNA, 25 bp, Homo sapien
gcgcagcggaagggcagaccctcac

SEQ ID NO: 3666598 - DNA, 25 bp, Homo sapien
cccagcgcgtgctcacctccaggct

SEQ ID NO: 3666599 - DNA, 25 bp, Homo sapien
gcgcgcgccggcgtgcacggtgcac

SEQ ID NO: 3666600 - DNA, 25 bp, Homo sapien
cggcgtgcacggtgcacacggccac

SEQ ID NO: 3666601 - DNA, 25 bp, Homo sapien
gcgccggcgtgcacggtgcacacgg

SEQ ID NO: 3666602 - DNA, 25 bp, Homo sapien
ctcgcgcgcgccggcgtgcacggtg

SEQ ID NO: 3666603 - DNA, 25 bp, Homo sapien
acggtcaccgggaagggcaccatca

SEQ ID NO: 3666604 - DNA, 25 bp, Homo sapien
tccaccacggcgctggcggtgtcga

SEQ ID NO: 3666605 - DNA, 25 bp, Homo sapien
tccttccgcttgaactccaccacgg

SEQ ID NO: 3666606 - DNA, 25 bp, Homo sapien
tgggcgccgagtcgtcctcgtcgta

SEQ ID NO: 3666607 - DNA, 25 bp, Homo sapien
gccagtgttccacccggaaggtctg

SEQ ID NO: 3666608 - DNA, 25 bp, Homo sapien
tatagtcatgtacggtcgcccgcac

SEQ ID NO: 3666609 - DNA, 25 bp, Homo sapien
accgaggtctcgttgggccagtgtt

SEQ ID NO: 3666610 - DNA, 25 bp, Homo sapien
tgcatcgaagacacgcagcgtggcc

SEQ ID NO: 3666611 - DNA, 25 bp, Homo sapien
tccgtaagcacttgggacgccttag

SEQ ID NO: 3666612 - DNA, 25 bp, Homo sapien
gtgtgtttgcagtcggtggtgagcc

SEQ ID NO: 3666613 - DNA, 25 bp, Homo sapien
ccttaggggcaacgatggagtgcca

SEQ ID NO: 3666614 - DNA, 25 bp, Homo sapien
gagcaataatccgtaagcacttggg

SEQ ID NO: 3666615 - DNA, 25 bp, Homo sapien
tctccgagatggagaggttccggtt

SEQ ID NO: 3666616 - DNA, 25 bp, Homo sapien
gtggagcaagaggacgcccgctcct

SEQ ID NO: 3666617 - DNA, 25 bp, Homo sapien
caccgacacgttgaagtggagcaag

SEQ ID NO: 3666618 - DNA, 25 bp, Homo sapien
ccctcctgctcacggagagggagta

SEQ ID NO: 3666619 - DNA, 25 bp, Homo sapien
agttttccacacagactttcccgat

SEQ ID NO: 3666620 - DNA, 25 bp, Homo sapien
cctgcctagaggtctgctggtcggt

SEQ ID NO: 3666621 - DNA, 25 bp, Homo sapien
cctccactgttacaagcagctgggc

SEQ ID NO: 3666622 - DNA, 25 bp, Homo sapien
cagcttgtactggacgttgatgcca

SEQ ID NO: 3666623 - DNA, 25 bp, Homo sapien
caccatgtagtgaagttcggcacac

SEQ ID NO: 3666624 - DNA, 25 bp, Homo sapien
aggacagggggcagcccgcctcctc

SEQ ID NO: 3666625 - DNA, 25 bp, Homo sapien
actccagccgtctcttgctgactgc

SEQ ID NO: 3666626 - DNA, 25 bp, Homo sapien
ctccagccgtctcttgctgactgca

SEQ ID NO: 3666627 - DNA, 25 bp, Homo sapien
acagggggcagcccgcctcctcggc

SEQ ID NO: 3666628 - DNA, 25 bp, Homo sapien
agtcctgagggcaaatgttgatgtc

SEQ ID NO: 3666629 - DNA, 25 bp, Homo sapien
gggtctccacaacatcgcagtggcc

SEQ ID NO: 3666630 - DNA, 25 bp, Homo sapien
aggcagtcctgagggcaaatgttga

SEQ ID NO: 3666631 - DNA, 25 bp, Homo sapien
tccacaacatcgcagtggccgtcgg

SEQ ID NO: 3666632 - DNA, 25 bp, Homo sapien
cctggatgtcttcgggctcgcagaa

SEQ ID NO: 3666633 - DNA, 25 bp, Homo sapien
cttcgggctcgcagaagcacttctc

SEQ ID NO: 3666634 - DNA, 25 bp, Homo sapien
ggtgccatagccagctttaatcccc

SEQ ID NO: 3666635 - DNA, 25 bp, Homo sapien
gaagcagttgcaggtgccatagcca

SEQ ID NO: 3666636 - DNA, 25 bp, Homo sapien
caaacttgtggtagcagtggatgca

SEQ ID NO: 3666637 - DNA, 25 bp, Homo sapien
gcgggcctccggaaggtcatctcag

SEQ ID NO: 3666638 - DNA, 25 bp, Homo sapien
agaggacagcggctgcgatcaccgt

SEQ ID NO: 3666639 - DNA, 25 bp, Homo sapien
cggcacagctcgtcgcacagtggat

SEQ ID NO: 3666640 - DNA, 25 bp, Homo sapien
ggccgttgccttgaccacttttcca

SEQ ID NO: 3666641 - DNA, 25 bp, Homo sapien
ggccaccgtggtgtaccctgctctg

SEQ ID NO: 3666642 - DNA, 25 bp, Homo sapien
ctttcagatggaaggccgttgcctt

SEQ ID NO: 3666643 - DNA, 25 bp, Homo sapien
tccaaattcgccttctcctagagtt

SEQ ID NO: 3666644 - DNA, 25 bp, Homo sapien
gaggcctgcaaagacgatgctgctt

SEQ ID NO: 3666645 - DNA, 25 bp, Homo sapien
ccagcctttgggatcagtggacagg

SEQ ID NO: 3666646 - DNA, 25 bp, Homo sapien
cccaagttcagacagagaggcctgc

SEQ ID NO: 3666647 - DNA, 25 bp, Homo sapien
cttctcccagcctttgggatcagtg

SEQ ID NO: 3666648 - DNA, 25 bp, Homo sapien
gacgttgaactctgacagcaggtct

SEQ ID NO: 3666649 - DNA, 25 bp, Homo sapien
caggtctcgcagctcactcggggag

SEQ ID NO: 3666650 - DNA, 25 bp, Homo sapien
gctgcaggccccatacaatttgatg

SEQ ID NO: 3666651 - DNA, 25 bp, Homo sapien
tacaatttgatgacatgtgggtggt

SEQ ID NO: 3666652 - DNA, 25 bp, Homo sapien
ttggcgtactccacgatgaggagga

SEQ ID NO: 3666653 - DNA, 25 bp, Homo sapien
agggcccgctcatccgggtggtcca

SEQ ID NO: 3666654 - DNA, 25 bp, Homo sapien
aaatgagatgaggtcgcccatggtg

SEQ ID NO: 3666655 - DNA, 25 bp, Homo sapien
ccgcagggagccgtatttggcgtac

SEQ ID NO: 3666656 - DNA, 25 bp, Homo sapien
cggccagatactgcatcccctgtga

SEQ ID NO: 3666657 - DNA, 25 bp, Homo sapien
tactgcatcccctgtgagatctgcc

SEQ ID NO: 3666658 - DNA, 25 bp, Homo sapien
ttcatctcggccagatactgcatcc

SEQ ID NO: 3666659 - DNA, 25 bp, Homo sapien
gcatcccctgtgagatctgccaggc

SEQ ID NO: 3666660 - DNA, 25 bp, Homo sapien
taccaggatgtttctggctgccaag

SEQ ID NO: 3666661 - DNA, 25 bp, Homo sapien
ggatgtttctggctgccaagtcccg

SEQ ID NO: 3666662 - DNA, 25 bp, Homo sapien
tggctgccaagtcccgatgaacgag

SEQ ID NO: 3666663 - DNA, 25 bp, Homo sapien
tcagctaccaggatgtttctggctg

SEQ ID NO: 3666664 - DNA, 25 bp, Homo sapien
ctggctcctcttcacgtaggaatcc

SEQ ID NO: 3666665 - DNA, 25 bp, Homo sapien
tcacgtaggaatcctcttcataaac

SEQ ID NO: 3666666 - DNA, 25 bp, Homo sapien
acatctcgggacaagccgaaatccg

SEQ ID NO: 3666667 - DNA, 25 bp, Homo sapien
gccgaaatccgaaatcttcatcttc

SEQ ID NO: 3666668 - DNA, 25 bp, Homo sapien
acatcactttgcgtggtgtagatat

SEQ ID NO: 3666669 - DNA, 25 bp, Homo sapien
ctttgcgtggtgtagatatgatcaa

SEQ ID NO: 3666670 - DNA, 25 bp, Homo sapien
caaaaagggattcaattgccatcca

SEQ ID NO: 3666671 - DNA, 25 bp, Homo sapien
ttcaattgccatccatttaactgga

SEQ ID NO: 3666672 - DNA, 25 bp, Homo sapien
ttgtctggcctctccatccggtggc

SEQ ID NO: 3666673 - DNA, 25 bp, Homo sapien
agggtcacgatctcccacagcagga

SEQ ID NO: 3666674 - DNA, 25 bp, Homo sapien
atccggtggccggtcttcagaaggt

SEQ ID NO: 3666675 - DNA, 25 bp, Homo sapien
aagagccgctcaggaggaatcccag

SEQ ID NO: 3666676 - DNA, 25 bp, Homo sapien
tctttgctgatgtccgcaaacaccg

SEQ ID NO: 3666677 - DNA, 25 bp, Homo sapien
ccagcattgcagcatcaggcggtac

SEQ ID NO: 3666678 - DNA, 25 bp, Homo sapien
ttccagcattgcagcatcaggcggt

SEQ ID NO: 3666679 - DNA, 25 bp, Homo sapien
acaccggccttttgtccggctcctg

SEQ ID NO: 3666680 - DNA, 25 bp, Homo sapien
cgtcgtcataaatcagggagtcaga

SEQ ID NO: 3666681 - DNA, 25 bp, Homo sapien
tggacgccgcaaggtccaagtagtc

SEQ ID NO: 3666682 - DNA, 25 bp, Homo sapien
ggagtcagatggagtggacgccgca

SEQ ID NO: 3666683 - DNA, 25 bp, Homo sapien
tctgagaggccgtcgtcataaatca

SEQ ID NO: 3666684 - DNA, 25 bp, Homo sapien
gggaggggggcattattacagtcca

SEQ ID NO: 3666685 - DNA, 25 bp, Homo sapien
catgtggaagggagggctcgaggga

SEQ ID NO: 3666686 - DNA, 25 bp, Homo sapien
agggctcgagggaggggggcattat

SEQ ID NO: 3666687 - DNA, 25 bp, Homo sapien
ccatgtggaagggagggctcgaggg

SEQ ID NO: 3666688 - DNA, 25 bp, Homo sapien
tagaatctagtaaatgcatgggaaa

SEQ ID NO: 3666689 - DNA, 25 bp, Homo sapien
ctagaatctagtaaatgcatgggaa

SEQ ID NO: 3666690 - DNA, 25 bp, Homo sapien
aatctagtaaatgcatgggaaattc

SEQ ID NO: 3666691 - DNA, 25 bp, Homo sapien
ctagtaaatgcatgggaaattctac

SEQ ID NO: 3666692 - DNA, 25 bp, Homo sapien
tacccctgatggaggacatgtggct

SEQ ID NO: 3666693 - DNA, 25 bp, Homo sapien
taccatcctaagttgctgggcaatg

SEQ ID NO: 3666694 - DNA, 25 bp, Homo sapien
catcacagagaggaaggatagtgca

SEQ ID NO: 3666695 - DNA, 25 bp, Homo sapien
gctggtggctcctttctcaactgaa

SEQ ID NO: 3666696 - DNA, 25 bp, Homo sapien
actgacttcataagtgacaaccgtc

SEQ ID NO: 3666697 - DNA, 25 bp, Homo sapien
gcactgacttcataagtgacaaccg

SEQ ID NO: 3666698 - DNA, 25 bp, Homo sapien
gtccattgtaagaccacagcaccac

SEQ ID NO: 3666699 - DNA, 25 bp, Homo sapien
tgtccattgtaagaccacagcacca

SEQ ID NO: 3666700 - DNA, 25 bp, Homo sapien
agtatttaatcaaagacaaaagaag

SEQ ID NO: 3666701 - DNA, 25 bp, Homo sapien
tctagtatttaatcaaagacaaaag

SEQ ID NO: 3666702 - DNA, 25 bp, Homo sapien
aatttctagtatttaatcaaagaca

SEQ ID NO: 3666703 - DNA, 25 bp, Homo sapien
aagaaggagttttggcaagaaccat

SEQ ID NO: 3666704 - DNA, 25 bp, Homo sapien
caatcaatgatgaagttaggaaaca

SEQ ID NO: 3666705 - DNA, 25 bp, Homo sapien
catgcaaaaggaaccgtctcagctt

SEQ ID NO: 3666706 - DNA, 25 bp, Homo sapien
gatttcaaacaatcaatgatgaagt

SEQ ID NO: 3666707 - DNA, 25 bp, Homo sapien
caaaaggaaccgtctcagcttgaaa

SEQ ID NO: 3666708 - DNA, 25 bp, Homo sapien
gcatcgtcagcacaaatggagtgtg

SEQ ID NO: 3666709 - DNA, 25 bp, Homo sapien
ctacaacggagaagaggaccttcca

SEQ ID NO: 3666710 - DNA, 25 bp, Homo sapien
acacgggccagcctcatagcatcgt

SEQ ID NO: 3666711 - DNA, 25 bp, Homo sapien
agaggaccttccaaatcgagggtgc

SEQ ID NO: 3666712 - DNA, 25 bp, Homo sapien
tggcttactgcagcggaaacgttct

SEQ ID NO: 3666713 - DNA, 25 bp, Homo sapien
cacactgctgcactcaatggcttac

SEQ ID NO: 3666714 - DNA, 25 bp, Homo sapien
aaggaggcactcgtctgttgtctga

SEQ ID NO: 3666715 - DNA, 25 bp, Homo sapien
ggaaatatcatgtgctctcttggta

SEQ ID NO: 3666716 - DNA, 25 bp, Homo sapien
tccaggccagttcgggtctgacatg

SEQ ID NO: 3666717 - DNA, 25 bp, Homo sapien
gaaacccagtgttagtgccatcagc

SEQ ID NO: 3666718 - DNA, 25 bp, Homo sapien
ccgctgagggtgaaagcatccagtt

SEQ ID NO: 3666719 - DNA, 25 bp, Homo sapien
catcagctctcgtgagtggtacagg

SEQ ID NO: 3666720 - DNA, 25 bp, Homo sapien
tcaagatctcgaatgctgagcccag

SEQ ID NO: 3666721 - DNA, 25 bp, Homo sapien
tctgctaggagggaaaatcaccggc

SEQ ID NO: 3666722 - DNA, 25 bp, Homo sapien
tggctgctcagtaccgaacacgtga

SEQ ID NO: 3666723 - DNA, 25 bp, Homo sapien
taaagtgagtacaagccctacctgc

SEQ ID NO: 3666724 - DNA, 25 bp, Homo sapien
gctgctgagacttcccaaaagctgc

SEQ ID NO: 3666725 - DNA, 25 bp, Homo sapien
tctgcgaagttacagtgctgacaac

SEQ ID NO: 3666726 - DNA, 25 bp, Homo sapien
tgctgacaacacagccagaagagct

SEQ ID NO: 3666727 - DNA, 25 bp, Homo sapien
ggtaatccgactcttttctgcgaag

SEQ ID NO: 3666728 - DNA, 25 bp, Homo sapien
taaaagaacttatcacagtgtatct

SEQ ID NO: 3666729 - DNA, 25 bp, Homo sapien
caaattagagccaggttacgtgtcc

SEQ ID NO: 3666730 - DNA, 25 bp, Homo sapien
tattacacacgcatccaagccttgg

SEQ ID NO: 3666731 - DNA, 25 bp, Homo sapien
tgcgcacacaccacaaggctctatt

SEQ ID NO: 3666732 - DNA, 25 bp, Homo sapien
tttagtaagactatcattaagcata

SEQ ID NO: 3666733 - DNA, 25 bp, Homo sapien
tgcatttagtaagactatcattaag

SEQ ID NO: 3666734 - DNA, 25 bp, Homo sapien
catttagtaagactatcattaagca

SEQ ID NO: 3666735 - DNA, 25 bp, Homo sapien
ttagtaagactatcattaagcatat

SEQ ID NO: 3666736 - DNA, 25 bp, Homo sapien
gcatttacgtgtatgaaaattccag

SEQ ID NO: 3666737 - DNA, 25 bp, Homo sapien
tggtcaaggataaattggtcaagga

SEQ ID NO: 3666738 - DNA, 25 bp, Homo sapien
cagctgtttagacctggagttctta

SEQ ID NO: 3666739 - DNA, 25 bp, Homo sapien
tcctgagaacaaacctgttgcagca

SEQ ID NO: 3666740 - DNA, 25 bp, Homo sapien
aagtagtgagtatgtcaggcttcat

SEQ ID NO: 3666741 - DNA, 25 bp, Homo sapien
tgagaagctcagagaattcctcggg

SEQ ID NO: 3666742 - DNA, 25 bp, Homo sapien
cacgcccggcatgagaagctcagag

SEQ ID NO: 3666743 - DNA, 25 bp, Homo sapien
aagacataaacagaagtagtgagta

SEQ ID NO: 3666744 - DNA, 25 bp, Homo sapien
tgggcgaggcgtgccaaggcctgca

SEQ ID NO: 3666745 - DNA, 25 bp, Homo sapien
ctgggcgaggcgtgccaaggcctgc

SEQ ID NO: 3666746 - DNA, 25 bp, Homo sapien
gggcgaggcgtgccaaggcctgcat

SEQ ID NO: 3666747 - DNA, 25 bp, Homo sapien
gttcacttccagcccgtggtccagg

SEQ ID NO: 3666748 - DNA, 25 bp, Homo sapien
caaatagtcctaatgtagagtctac

SEQ ID NO: 3666749 - DNA, 25 bp, Homo sapien
tggcgtagatttctactttcagagg

SEQ ID NO: 3666750 - DNA, 25 bp, Homo sapien
agcattaacttttcttggcgtagat

SEQ ID NO: 3666751 - DNA, 25 bp, Homo sapien
ttcagaggtaaaggctacagcaaac

SEQ ID NO: 3666752 - DNA, 25 bp, Homo sapien
acactgctgcatgcaccctgaagac

SEQ ID NO: 3666753 - DNA, 25 bp, Homo sapien
catcttcatgtggaagacgtgtggg

SEQ ID NO: 3666754 - DNA, 25 bp, Homo sapien
ctttctgctttttcagggccacaga

SEQ ID NO: 3666755 - DNA, 25 bp, Homo sapien
cacagaggttaggattccctaggac

SEQ ID NO: 3666756 - DNA, 25 bp, Homo sapien
gcgggcgctgcctgaacccccgaat

SEQ ID NO: 3666757 - DNA, 25 bp, Homo sapien
cctgtggccgcacgtctggcagatg

SEQ ID NO: 3666758 - DNA, 25 bp, Homo sapien
tggccgcacgtctggcagatgcgcg

SEQ ID NO: 3666759 - DNA, 25 bp, Homo sapien
ccgcacgtctggcagatgcgcggcg

SEQ ID NO: 3666760 - DNA, 25 bp, Homo sapien
cctggatccttcttactgctcctac

SEQ ID NO: 3666761 - DNA, 25 bp, Homo sapien
ccctggatccttcttactgctccta

SEQ ID NO: 3666762 - DNA, 25 bp, Homo sapien
tccctggatccttcttactgctcct

SEQ ID NO: 3666763 - DNA, 25 bp, Homo sapien
tttgttctcctagccctacaaacgc

SEQ ID NO: 3666764 - DNA, 25 bp, Homo sapien
gttctcctagccctacaaacgctgg

SEQ ID NO: 3666765 - DNA, 25 bp, Homo sapien
ctcctagccctacaaacgctgggtt

SEQ ID NO: 3666766 - DNA, 25 bp, Homo sapien
ttctttgttctcctagccctacaaa

SEQ ID NO: 3666767 - DNA, 25 bp, Homo sapien
cgccgccgcgcctgagaggccactt

SEQ ID NO: 3666768 - DNA, 25 bp, Homo sapien
cccgggcggcgcctcacgccttggg

SEQ ID NO: 3666769 - DNA, 25 bp, Homo sapien
gcgcctcacgccttgggcccgccgc

SEQ ID NO: 3666770 - DNA, 25 bp, Homo sapien
ggcggcgcctcacgccttgggcccg

SEQ ID NO: 3666771 - DNA, 25 bp, Homo sapien
tgcgccgcggggacacccgggcggc

SEQ ID NO: 3666772 - DNA, 25 bp, Homo sapien
gggcagaactattttaacgcgatga

SEQ ID NO: 3666773 - DNA, 25 bp, Homo sapien
gagggcagaactattttaacgcgat

SEQ ID NO: 3666774 - DNA, 25 bp, Homo sapien
tgagggcagaactattttaacgcga

SEQ ID NO: 3666775 - DNA, 25 bp, Homo sapien
ctgagggcagaactattttaacgcg

SEQ ID NO: 3666776 - DNA, 25 bp, Homo sapien
ttaaggtgcattctccgacaacgcc

SEQ ID NO: 3666777 - DNA, 25 bp, Homo sapien
gcttcctgcgttgctcaagggtaga

SEQ ID NO: 3666778 - DNA, 25 bp, Homo sapien
gacagagcatctttaccggcgctcg

SEQ ID NO: 3666779 - DNA, 25 bp, Homo sapien
aagtatcactgtcgtgcttcctgcg

SEQ ID NO: 3666780 - DNA, 25 bp, Homo sapien
aatatgggcaaagcatgcgtcttat

SEQ ID NO: 3666781 - DNA, 25 bp, Homo sapien
tcaaaccataataagacaccactac

SEQ ID NO: 3666782 - DNA, 25 bp, Homo sapien
cctgaacccttcaaataaacacttg

SEQ ID NO: 3666783 - DNA, 25 bp, Homo sapien
cacttgaaaaagatgctcggccggg

SEQ ID NO: 3666784 - DNA, 25 bp, Homo sapien
tctacattagcaacaagcaatctga

SEQ ID NO: 3666785 - DNA, 25 bp, Homo sapien
gacaccacactcatgattggaaggc

SEQ ID NO: 3666786 - DNA, 25 bp, Homo sapien
agagccccaggtaattaagacaatg

SEQ ID NO: 3666787 - DNA, 25 bp, Homo sapien
cctcttcaagaatcccagtggactt

SEQ ID NO: 3666788 - DNA, 25 bp, Homo sapien
cggggtttcatcgtggtctcatctc

SEQ ID NO: 3666789 - DNA, 25 bp, Homo sapien
catgatatccagaataaagcaatct

SEQ ID NO: 3666790 - DNA, 25 bp, Homo sapien
catgactacttgcagaaatgggaaa

SEQ ID NO: 3666791 - DNA, 25 bp, Homo sapien
tgtgtgttcatacctttagtaaaaa

SEQ ID NO: 3666792 - DNA, 25 bp, Homo sapien
cataaaataattctgccgtagcttt

SEQ ID NO: 3666793 - DNA, 25 bp, Homo sapien
aaagcaaggcccaacagcaaccagt

SEQ ID NO: 3666794 - DNA, 25 bp, Homo sapien
tgaagaatcagtcctcttctaggca

SEQ ID NO: 3666795 - DNA, 25 bp, Homo sapien
gtccgggtgtgaagaatcagtcctc

SEQ ID NO: 3666796 - DNA, 25 bp, Homo sapien
aacagcaaccagtgggtccgggtgt

SEQ ID NO: 3666797 - DNA, 25 bp, Homo sapien
ctggggggcacattccaggaggtac

SEQ ID NO: 3666798 - DNA, 25 bp, Homo sapien
gggcacattccaggaggtacataaa

SEQ ID NO: 3666799 - DNA, 25 bp, Homo sapien
gcacattccaggaggtacataaata

SEQ ID NO: 3666800 - DNA, 25 bp, Homo sapien
acattccaggaggtacataaataat

SEQ ID NO: 3666801 - DNA, 25 bp, Homo sapien
gaatgaccccatactcactgggtag

SEQ ID NO: 3666802 - DNA, 25 bp, Homo sapien
tctaaaagatcactaggtgcttgct

SEQ ID NO: 3666803 - DNA, 25 bp, Homo sapien
tctgatagcctatgccattagcccc

SEQ ID NO: 3666804 - DNA, 25 bp, Homo sapien
ggttgccctggtctgataatgttct

SEQ ID NO: 3666805 - DNA, 25 bp, Homo sapien
acagtgcagcaagtgatggccatga

SEQ ID NO: 3666806 - DNA, 25 bp, Homo sapien
gagcctggcaagcattaccgtctga

SEQ ID NO: 3666807 - DNA, 25 bp, Homo sapien
aaagtctacatgtgctatacgaggg

SEQ ID NO: 3666808 - DNA, 25 bp, Homo sapien
tttgttgggaactaggcggcacagc

SEQ ID NO: 3666809 - DNA, 25 bp, Homo sapien
tcatgagaggtccaaaagggcggaa

SEQ ID NO: 3666810 - DNA, 25 bp, Homo sapien
agagttcatactgtgtgcccttatc

SEQ ID NO: 3666811 - DNA, 25 bp, Homo sapien
gttctttcagcaagtggcacaatga

SEQ ID NO: 3666812 - DNA, 25 bp, Homo sapien
catgtctatattccgtaaggtctgc

SEQ ID NO: 3666813 - DNA, 25 bp, Homo sapien
ttatggaaggcacaaggtctatgcc

SEQ ID NO: 3666814 - DNA, 25 bp, Homo sapien
cattaagaaagcaaccacatgaagc

SEQ ID NO: 3666815 - DNA, 25 bp, Homo sapien
ggccatggaagcagtctgacattgc

SEQ ID NO: 3666816 - DNA, 25 bp, Homo sapien
gcctgaatgagtgcaccccttggag

SEQ ID NO: 3666817 - DNA, 25 bp, Homo sapien
ctggtgacagattctaggatagact

SEQ ID NO: 3666818 - DNA, 25 bp, Homo sapien
ctaggatagacttgactttagacag

SEQ ID NO: 3666819 - DNA, 25 bp, Homo sapien
tagacttgactttagacagtccttc

SEQ ID NO: 3666820 - DNA, 25 bp, Homo sapien
tgacagattctaggatagacttgac

SEQ ID NO: 3666821 - DNA, 25 bp, Homo sapien
ctgagaagatgtgagcccagagccg

SEQ ID NO: 3666822 - DNA, 25 bp, Homo sapien
gattttctcaactggagctgggaga

SEQ ID NO: 3666823 - DNA, 25 bp, Homo sapien
tgggattttctcaactggagctggg

SEQ ID NO: 3666824 - DNA, 25 bp, Homo sapien
ctgggattttctcaactggagctgg

SEQ ID NO: 3666825 - DNA, 25 bp, Homo sapien
taatactacttgagaagcagctgcc

SEQ ID NO: 3666826 - DNA, 25 bp, Homo sapien
gactccaagtgctctgaatgcctag

SEQ ID NO: 3666827 - DNA, 25 bp, Homo sapien
cacacatgtcgccttatcagaggga

SEQ ID NO: 3666828 - DNA, 25 bp, Homo sapien
tgcagtgtcccctgatagagtagga

SEQ ID NO: 3666829 - DNA, 25 bp, Homo sapien
ttcattcaatgagaccaaggtgtaa

SEQ ID NO: 3666830 - DNA, 25 bp, Homo sapien
taaccggcagctgttaaggaattcg

SEQ ID NO: 3666831 - DNA, 25 bp, Homo sapien
tcgggcacccacatttagtcctcgt

SEQ ID NO: 3666832 - DNA, 25 bp, Homo sapien
gaattcggctgagaaatagatatca

SEQ ID NO: 3666833 - DNA, 25 bp, Homo sapien
tagtcactggaagttggacccaaga

SEQ ID NO: 3666834 - DNA, 25 bp, Homo sapien
tgtggacgctatatgcccaaagctg

SEQ ID NO: 3666835 - DNA, 25 bp, Homo sapien
tcatcccaaaatgcacagtctggag

SEQ ID NO: 3666836 - DNA, 25 bp, Homo sapien
tggagaccaagcactatctgcatct

SEQ ID NO: 3666837 - DNA, 25 bp, Homo sapien
caacttactcatcctgttgagattc

SEQ ID NO: 3666838 - DNA, 25 bp, Homo sapien
gatttcctcaacttactcatcctgt

SEQ ID NO: 3666839 - DNA, 25 bp, Homo sapien
tatagtcaccatgtttgtataacag

SEQ ID NO: 3666840 - DNA, 25 bp, Homo sapien
gctactactggcttagcaatttgta

SEQ ID NO: 3666841 - DNA, 25 bp, Homo sapien
tgctacattcatacactacgaaatg

SEQ ID NO: 3666842 - DNA, 25 bp, Homo sapien
tgttttgctacattcatacactacg

SEQ ID NO: 3666843 - DNA, 25 bp, Homo sapien
aaaatggtgtacaacattatgtttt

SEQ ID NO: 3666844 - DNA, 25 bp, Homo sapien
catacactacgaaatgactaaatca

SEQ ID NO: 3666845 - DNA, 25 bp, Homo sapien
tggcataaacaatggcaggattgta

SEQ ID NO: 3666846 - DNA, 25 bp, Homo sapien
tcataactgaaaatgtgaaagtctc

SEQ ID NO: 3666847 - DNA, 25 bp, Homo sapien
cataactgaaaatgtgaaagtctca

SEQ ID NO: 3666848 - DNA, 25 bp, Homo sapien
ataactgaaaatgtgaaagtctcac

SEQ ID NO: 3666849 - DNA, 25 bp, Homo sapien
tgttgacctctagtgcacgatgcag

SEQ ID NO: 3666850 - DNA, 25 bp, Homo sapien
tgtacttggacaggcactcgactgc

SEQ ID NO: 3666851 - DNA, 25 bp, Homo sapien
gctgaacaagctctacatgccctgg

SEQ ID NO: 3666852 - DNA, 25 bp, Homo sapien
tgaatccccaacagaagcgacggag

SEQ ID NO: 3666853 - DNA, 25 bp, Homo sapien
tcaaagcctgtacaaggtgcaagct

SEQ ID NO: 3666854 - DNA, 25 bp, Homo sapien
tagactttatctggtgcctacccag

SEQ ID NO: 3666855 - DNA, 25 bp, Homo sapien
tatcattgtggtgcctgacttcaag

SEQ ID NO: 3666856 - DNA, 25 bp, Homo sapien
caccagtagattcggagtgggccat

SEQ ID NO: 3666857 - DNA, 25 bp, Homo sapien
cgatactgacaagtcattccaaagc

SEQ ID NO: 3666858 - DNA, 25 bp, Homo sapien
tatgctgtagaaaggtagctagccc

SEQ ID NO: 3666859 - DNA, 25 bp, Homo sapien
tagctagccctaaatgaatcagaag

SEQ ID NO: 3666860 - DNA, 25 bp, Homo sapien
cagagcatgcaggatagttagaaca

SEQ ID NO: 3666861 - DNA, 25 bp, Homo sapien
gcaatataatgaagctccgcctcta

SEQ ID NO: 3666862 - DNA, 25 bp, Homo sapien
gactggatgcacatgcggtactgct

SEQ ID NO: 3666863 - DNA, 25 bp, Homo sapien
agactggatgcacatgcggtactgc

SEQ ID NO: 3666864 - DNA, 25 bp, Homo sapien
tagactggatgcacatgcggtactg

SEQ ID NO: 3666865 - DNA, 25 bp, Homo sapien
actggatgcacatgcggtactgctc

SEQ ID NO: 3666866 - DNA, 25 bp, Homo sapien
atgcctgtttatgaagatgcgtctc

SEQ ID NO: 3666867 - DNA, 25 bp, Homo sapien
cctgtatgcctgtttatgaagatgc

SEQ ID NO: 3666868 - DNA, 25 bp, Homo sapien
tgtcctgtatgcctgtttatgaaga

SEQ ID NO: 3666869 - DNA, 25 bp, Homo sapien
tttgtcctgtatgcctgtttatgaa

SEQ ID NO: 3666870 - DNA, 25 bp, Homo sapien
actaatgttcccagacagagctagg

SEQ ID NO: 3666871 - DNA, 25 bp, Homo sapien
tctgaaccaccatgggaagaccctg

SEQ ID NO: 3666872 - DNA, 25 bp, Homo sapien
caagctatcaagtcaaggaggctga

SEQ ID NO: 3666873 - DNA, 25 bp, Homo sapien
tgggcaccaggtagaactaactcaa

SEQ ID NO: 3666874 - DNA, 25 bp, Homo sapien
tatgtgaagaatccctgtgaactgg

SEQ ID NO: 3666875 - DNA, 25 bp, Homo sapien
gaaagacactctctatactggaaga

SEQ ID NO: 3666876 - DNA, 25 bp, Homo sapien
tacaggagatgttcacgacaacacg

SEQ ID NO: 3666877 - DNA, 25 bp, Homo sapien
taaggctcccgcaaaatacagtcac

SEQ ID NO: 3666878 - DNA, 25 bp, Homo sapien
cttgctatggactggccctggtgct

SEQ ID NO: 3666879 - DNA, 25 bp, Homo sapien
gcacttctgcaaaaggccacagcac

SEQ ID NO: 3666880 - DNA, 25 bp, Homo sapien
tggggtcctggtcaatacgaagcat

SEQ ID NO: 3666881 - DNA, 25 bp, Homo sapien
ctggtgctgcggacgccaagcagca

SEQ ID NO: 3666882 - DNA, 25 bp, Homo sapien
agcacagtcagtgctcgctgtagac

SEQ ID NO: 3666883 - DNA, 25 bp, Homo sapien
agtcagtgctcgctgtagactggcc

SEQ ID NO: 3666884 - DNA, 25 bp, Homo sapien
gtgctcgctgtagactggccttggt

SEQ ID NO: 3666885 - DNA, 25 bp, Homo sapien
tcagtgctcgctgtagactggcctt

SEQ ID NO: 3666886 - DNA, 25 bp, Homo sapien
gatgggccaggtcccaattcccaaa

SEQ ID NO: 3666887 - DNA, 25 bp, Homo sapien
ggaactccgcatccttgtccctctg

SEQ ID NO: 3666888 - DNA, 25 bp, Homo sapien
ttccgcaggagccttgatcaatggg

SEQ ID NO: 3666889 - DNA, 25 bp, Homo sapien
tcaatccacgtggaccgtctccctc

SEQ ID NO: 3666890 - DNA, 25 bp, Homo sapien
aggcagcgccctaattggaattgga

SEQ ID NO: 3666891 - DNA, 25 bp, Homo sapien
gaaaattcgccaggccatactgctg

SEQ ID NO: 3666892 - DNA, 25 bp, Homo sapien
aaatacatggccgactccagggtgg

SEQ ID NO: 3666893 - DNA, 25 bp, Homo sapien
tccagggtggtgacatttagagcta

SEQ ID NO: 3666894 - DNA, 25 bp, Homo sapien
gaaatgttggctgtgctcgctttat

SEQ ID NO: 3666895 - DNA, 25 bp, Homo sapien
gagcccatcttaaacctgagatcag

SEQ ID NO: 3666896 - DNA, 25 bp, Homo sapien
gagatgccgggatgtgttccaacaa

SEQ ID NO: 3666897 - DNA, 25 bp, Homo sapien
ggatgtgttccaacaacagctggca

SEQ ID NO: 3666898 - DNA, 25 bp, Homo sapien
ctggaccctcagtctagccacttcc

SEQ ID NO: 3666899 - DNA, 25 bp, Homo sapien
cctggaccctcagtctagccacttc

SEQ ID NO: 3666900 - DNA, 25 bp, Homo sapien
tggaccctcagtctagccacttcca

SEQ ID NO: 3666901 - DNA, 25 bp, Homo sapien
ggaccctcagtctagccacttccat

SEQ ID NO: 3666902 - DNA, 25 bp, Homo sapien
ccgaggagcgcatccagcttttgca

SEQ ID NO: 3666903 - DNA, 25 bp, Homo sapien
gatcttttatgaggccacggtggtg

SEQ ID NO: 3666904 - DNA, 25 bp, Homo sapien
ccagctcaggaaaggtgtacacact

SEQ ID NO: 3666905 - DNA, 25 bp, Homo sapien
gcttttgcacacatgaggccagagg

SEQ ID NO: 3666906 - DNA, 25 bp, Homo sapien
tgggactcatgcatgatgggccctg

SEQ ID NO: 3666907 - DNA, 25 bp, Homo sapien
tttgtcccagttttccaggaagctg

SEQ ID NO: 3666908 - DNA, 25 bp, Homo sapien
ccctgagggctgtttttgtcccagt

SEQ ID NO: 3666909 - DNA, 25 bp, Homo sapien
ttaatttgaagtccacagatgagct

SEQ ID NO: 3666910 - DNA, 25 bp, Homo sapien
ccaccaggatcatggcacagggctg

SEQ ID NO: 3666911 - DNA, 25 bp, Homo sapien
caccaggatcatggcacagggctgc

SEQ ID NO: 3666912 - DNA, 25 bp, Homo sapien
agcacaggtaggtgcgcaggtctct

SEQ ID NO: 3666913 - DNA, 25 bp, Homo sapien
cccagcacaggtaggtgcgcaggtc

SEQ ID NO: 3666914 - DNA, 25 bp, Homo sapien
aggtaggtgcgcaggtctctcccct

SEQ ID NO: 3666915 - DNA, 25 bp, Homo sapien
ggtaggtgcgcaggtctctcccctc

SEQ ID NO: 3666916 - DNA, 25 bp, Homo sapien
ccagtgccggtaatttcagagaact

SEQ ID NO: 3666917 - DNA, 25 bp, Homo sapien
ttatcccttgaagggcgaagagccc

SEQ ID NO: 3666918 - DNA, 25 bp, Homo sapien
gagcccattctgtcgggtccgtggc

SEQ ID NO: 3666919 - DNA, 25 bp, Homo sapien
gagaactggccggttatcccttgaa

SEQ ID NO: 3666920 - DNA, 25 bp, Homo sapien
gcgctgaggcgggtcgtccagcgcc

SEQ ID NO: 3666921 - DNA, 25 bp, Homo sapien
gaggcgggtcgtccagcgcctggga

SEQ ID NO: 3666922 - DNA, 25 bp, Homo sapien
gaggcgctgaggcgggtcgtccagc

SEQ ID NO: 3666923 - DNA, 25 bp, Homo sapien
gctgaggcgggtcgtccagcgcctg

SEQ ID NO: 3666924 - DNA, 25 bp, Homo sapien
tggcttatgtgaaacagcgtggccc

SEQ ID NO: 3666925 - DNA, 25 bp, Homo sapien
gtaaatccggcccttcttcgcagta

SEQ ID NO: 3666926 - DNA, 25 bp, Homo sapien
agtacttgaagtttggcttatgtga

SEQ ID NO: 3666927 - DNA, 25 bp, Homo sapien
ggcccttcttcgcagtacttgaagt

SEQ ID NO: 3666928 - DNA, 25 bp, Homo sapien
tcttgagtctcaagaatggaatggt

SEQ ID NO: 3666929 - DNA, 25 bp, Homo sapien
atgatgttctatgccctgagcaggc

SEQ ID NO: 3666930 - DNA, 25 bp, Homo sapien
agtctcaagaatggaatggttcttg

SEQ ID NO: 3666931 - DNA, 25 bp, Homo sapien
gtggacaatgatgttctatgccctg

SEQ ID NO: 3666932 - DNA, 25 bp, Homo sapien
ctggacgccggaccgggcaggacgg

SEQ ID NO: 3666933 - DNA, 25 bp, Homo sapien
ggaggggtgcgacggtcccctgcat

SEQ ID NO: 3666934 - DNA, 25 bp, Homo sapien
agggttcttgcgctgtcgggctcgg

SEQ ID NO: 3666935 - DNA, 25 bp, Homo sapien
tgggtgcttgcttggctcgcgggca

SEQ ID NO: 3666936 - DNA, 25 bp, Homo sapien
gagggcgctcttcggctccgcgcat

SEQ ID NO: 3666937 - DNA, 25 bp, Homo sapien
ctccgcgcatctttcccgtccgcat

SEQ ID NO: 3666938 - DNA, 25 bp, Homo sapien
tcaggtgctgggtgctccaatccag

SEQ ID NO: 3666939 - DNA, 25 bp, Homo sapien
aggtgctgggtgctccaatccagac

SEQ ID NO: 3666940 - DNA, 25 bp, Homo sapien
ccagatgttctgcagggctacggta

SEQ ID NO: 3666941 - DNA, 25 bp, Homo sapien
gcagggctacggtacagggctgagg

SEQ ID NO: 3666942 - DNA, 25 bp, Homo sapien
caggtgcctcgaaggcttccccagg

SEQ ID NO: 3666943 - DNA, 25 bp, Homo sapien
gcaggggcaggtgcctcgaaggctt

SEQ ID NO: 3666944 - DNA, 25 bp, Homo sapien
cgcccacaggtacaatggctgggtc

SEQ ID NO: 3666945 - DNA, 25 bp, Homo sapien
tggccgccttggcctgtgtggccca

SEQ ID NO: 3666946 - DNA, 25 bp, Homo sapien
atccccgcccacaggtacaatggct

SEQ ID NO: 3666947 - DNA, 25 bp, Homo sapien
tgtgtggcccactcccctgatgggc

SEQ ID NO: 3666948 - DNA, 25 bp, Homo sapien
taatcctcctgaaggcgggtctcag

SEQ ID NO: 3666949 - DNA, 25 bp, Homo sapien
ctaatcctcctgaaggcgggtctca

SEQ ID NO: 3666950 - DNA, 25 bp, Homo sapien
gcctgggtccattgagccttgttcc

SEQ ID NO: 3666951 - DNA, 25 bp, Homo sapien
ttcagcagggttgcgggtcagtgcc

SEQ ID NO: 3666952 - DNA, 25 bp, Homo sapien
ggcttcagcagggttgcgggtcagt

SEQ ID NO: 3666953 - DNA, 25 bp, Homo sapien
agtgcctgggtccattgagccttgt

SEQ ID NO: 3666954 - DNA, 25 bp, Homo sapien
gggttgcagaagagtgccatcaggg

SEQ ID NO: 3666955 - DNA, 25 bp, Homo sapien
gttgcagaagagtgccatcagggcc

SEQ ID NO: 3666956 - DNA, 25 bp, Homo sapien
ttcagctgtgaggctcgctgctgga

SEQ ID NO: 3666957 - DNA, 25 bp, Homo sapien
tgcagaagagtgccatcagggccca

SEQ ID NO: 3666958 - DNA, 25 bp, Homo sapien
gccgaacccacagggtgcttttcat

SEQ ID NO: 3666959 - DNA, 25 bp, Homo sapien
ggctgatcagtgctgcatgctggga

SEQ ID NO: 3666960 - DNA, 25 bp, Homo sapien
ggcggctgccgctggctgatcagtg

SEQ ID NO: 3666961 - DNA, 25 bp, Homo sapien
tggtgccgaacccacagggtgcttt

SEQ ID NO: 3666962 - DNA, 25 bp, Homo sapien
agggtgccgctaccatccagcaggg

SEQ ID NO: 3666963 - DNA, 25 bp, Homo sapien
ctgacaacagcaaggagagaactgg

SEQ ID NO: 3666964 - DNA, 25 bp, Homo sapien
gggagctcgacaccaccctgtgtgt

SEQ ID NO: 3666965 - DNA, 25 bp, Homo sapien
agagaactggtacttgtgagggtca

SEQ ID NO: 3666966 - DNA, 25 bp, Homo sapien
ctttccctggctagtggggacagcc

SEQ ID NO: 3666967 - DNA, 25 bp, Homo sapien
ggctagtggggacagccatgcagcc

SEQ ID NO: 3666968 - DNA, 25 bp, Homo sapien
ttccctggctagtggggacagccat

SEQ ID NO: 3666969 - DNA, 25 bp, Homo sapien
ctggctagtggggacagccatgcag

SEQ ID NO: 3666970 - DNA, 25 bp, Homo sapien
gacttaatgtgcctctttttgatgc

SEQ ID NO: 3666971 - DNA, 25 bp, Homo sapien
gcatcattacactgattttgccagt

SEQ ID NO: 3666972 - DNA, 25 bp, Homo sapien
ttcactgacatgtgacttaatgtgc

SEQ ID NO: 3666973 - DNA, 25 bp, Homo sapien
cctctttttgatgccagcatcatta

SEQ ID NO: 3666974 - DNA, 25 bp, Homo sapien
tggagtgagttagacctgctgtgag

SEQ ID NO: 3666975 - DNA, 25 bp, Homo sapien
agctggagtgagttagacctgctgt

SEQ ID NO: 3666976 - DNA, 25 bp, Homo sapien
ctggagtgagttagacctgctgtga

SEQ ID NO: 3666977 - DNA, 25 bp, Homo sapien
caagctggagtgagttagacctgct

SEQ ID NO: 3666978 - DNA, 25 bp, Homo sapien
cagacgcagactccaaggtccagat

SEQ ID NO: 3666979 - DNA, 25 bp, Homo sapien
cactttgtccctgtacagacgcaga

SEQ ID NO: 3666980 - DNA, 25 bp, Homo sapien
ccttgagtgcatccgggtgtgtcct

SEQ ID NO: 3666981 - DNA, 25 bp, Homo sapien
tggatgaaggtaatgtgcagccccg

SEQ ID NO: 3666982 - DNA, 25 bp, Homo sapien
gcaggatcggctgtccaagcccaga

SEQ ID NO: 3666983 - DNA, 25 bp, Homo sapien
ctatcctggttgctggacagaccca

SEQ ID NO: 3666984 - DNA, 25 bp, Homo sapien
ccaggatcaagaaggaggtgcctat

SEQ ID NO: 3666985 - DNA, 25 bp, Homo sapien
gctcacaggtgttccctggatccag

SEQ ID NO: 3666986 - DNA, 25 bp, Homo sapien
ctcgccttttaggtccctcctcaga

SEQ ID NO: 3666987 - DNA, 25 bp, Homo sapien
catggctggctgtccactcgccttt

SEQ ID NO: 3666988 - DNA, 25 bp, Homo sapien
caggcaagcagcaactcagggttgc

SEQ ID NO: 3666989 - DNA, 25 bp, Homo sapien
caagcagcaactcagggttgctgca

SEQ ID NO: 3666990 - DNA, 25 bp, Homo sapien
tccggatgtatggattaacaccttc

SEQ ID NO: 3666991 - DNA, 25 bp, Homo sapien
gggtctccggatgtatggattaaca

SEQ ID NO: 3666992 - DNA, 25 bp, Homo sapien
ctgggtctccggatgtatggattaa

SEQ ID NO: 3666993 - DNA, 25 bp, Homo sapien
tctccggatgtatggattaacacct

SEQ ID NO: 3666994 - DNA, 25 bp, Homo sapien
ttcctctccagaatcagatctgaag

SEQ ID NO: 3666995 - DNA, 25 bp, Homo sapien
ggagcagatgtctcatggtctttcc

SEQ ID NO: 3666996 - DNA, 25 bp, Homo sapien
gaatcagatctgaagagtatgacga

SEQ ID NO: 3666997 - DNA, 25 bp, Homo sapien
aagagtatgacgatctccaggtgca

SEQ ID NO: 3666998 - DNA, 25 bp, Homo sapien
tctgtccaccatgggcattttaaac

SEQ ID NO: 3666999 - DNA, 25 bp, Homo sapien
catgggcattttaaacacgcagatg

SEQ ID NO: 3667000 - DNA, 25 bp, Homo sapien
tccattgtcaactctgtccaccatg

SEQ ID NO: 3667001 - DNA, 25 bp, Homo sapien
ataagagggaatgtaagagttaagc

SEQ ID NO: 3667002 - DNA, 25 bp, Homo sapien
gcgtgtgatttaccctcaaagtggc

SEQ ID NO: 3667003 - DNA, 25 bp, Homo sapien
tcaaggctccgtgaggggcactgct

SEQ ID NO: 3667004 - DNA, 25 bp, Homo sapien
ggctggtcctgcgtgtgatttaccc

SEQ ID NO: 3667005 - DNA, 25 bp, Homo sapien
cctgggatagccaagacagcgtggt

SEQ ID NO: 3667006 - DNA, 25 bp, Homo sapien
cagcgagtgagttgatgccagatgt

SEQ ID NO: 3667007 - DNA, 25 bp, Homo sapien
gcgagtgagttgatgccagatgttt

SEQ ID NO: 3667008 - DNA, 25 bp, Homo sapien
gagtgagttgatgccagatgtttgt

SEQ ID NO: 3667009 - DNA, 25 bp, Homo sapien
gggcagcgagtgagttgatgccaga

SEQ ID NO: 3667010 - DNA, 25 bp, Homo sapien
gcaggtgacattggcggagggagca

SEQ ID NO: 3667011 - DNA, 25 bp, Homo sapien
ccacgtgctgcatgaacagcaggtg

SEQ ID NO: 3667012 - DNA, 25 bp, Homo sapien
gctgcatgaacagcaggtgacattg

SEQ ID NO: 3667013 - DNA, 25 bp, Homo sapien
catgaacagcaggtgacattggcgg

SEQ ID NO: 3667014 - DNA, 25 bp, Homo sapien
ggaaccagcaaaggatcatcctgaa

SEQ ID NO: 3667015 - DNA, 25 bp, Homo sapien
tggagataacttagggacaaggaac

SEQ ID NO: 3667016 - DNA, 25 bp, Homo sapien
ctttggagataacttagggacaagg

SEQ ID NO: 3667017 - DNA, 25 bp, Homo sapien
gaaccagcaaaggatcatcctgaag

SEQ ID NO: 3667018 - DNA, 25 bp, Homo sapien
aagatggtttgggtgtaaagccatg

SEQ ID NO: 3667019 - DNA, 25 bp, Homo sapien
ggtttgggtgtaaagccatgccgcc

SEQ ID NO: 3667020 - DNA, 25 bp, Homo sapien
tgggtgtaaagccatgccgccagtc

SEQ ID NO: 3667021 - DNA, 25 bp, Homo sapien
gtgtaaagccatgccgccagtcttg

SEQ ID NO: 3667022 - DNA, 25 bp, Homo sapien
ttctccttggcgatgatgatcaggc

SEQ ID NO: 3667023 - DNA, 25 bp, Homo sapien
tttctccttggcgatgatgatcagg

SEQ ID NO: 3667024 - DNA, 25 bp, Homo sapien
ggtttctccttggcgatgatgatca

SEQ ID NO: 3667025 - DNA, 25 bp, Homo sapien
aggtttctccttggcgatgatgatc

SEQ ID NO: 3667026 - DNA, 25 bp, Homo sapien
tcctaatgcgccacaaaggcactgg

SEQ ID NO: 3667027 - DNA, 25 bp, Homo sapien
taaaccggcttggtctgagtagcca

SEQ ID NO: 3667028 - DNA, 25 bp, Homo sapien
ccacggttgcgagaaaagaggccct

SEQ ID NO: 3667029 - DNA, 25 bp, Homo sapien
cattgcccggaaacagtgcgtttga

SEQ ID NO: 3667030 - DNA, 25 bp, Homo sapien
gacacatccagaagtactgttttgc

SEQ ID NO: 3667031 - DNA, 25 bp, Homo sapien
cacagacacatccagaagtactgtt

SEQ ID NO: 3667032 - DNA, 25 bp, Homo sapien
ttgccagttttgtaggtatttctta

SEQ ID NO: 3667033 - DNA, 25 bp, Homo sapien
catcagtctccttgaaacaccctca

SEQ ID NO: 3667034 - DNA, 25 bp, Homo sapien
cagcattggccaagggtcaatacct

SEQ ID NO: 3667035 - DNA, 25 bp, Homo sapien
ttgagaagtcgcacaacaggctgtc

SEQ ID NO: 3667036 - DNA, 25 bp, Homo sapien
tacaagctggcaactctgagatgct

SEQ ID NO: 3667037 - DNA, 25 bp, Homo sapien
catgtgtgcattggtcagggttcta

SEQ ID NO: 3667038 - DNA, 25 bp, Homo sapien
ctatgtcactacattgagatgacat

SEQ ID NO: 3667039 - DNA, 25 bp, Homo sapien
ctgggtgttacataaacactgagca

SEQ ID NO: 3667040 - DNA, 25 bp, Homo sapien
ggtgttacataaacactgagcagtt

SEQ ID NO: 3667041 - DNA, 25 bp, Homo sapien
tacttttggctatgtcactacattg

SEQ ID NO: 3667042 - DNA, 25 bp, Homo sapien
aaaaatgagggttagacgccagaag

SEQ ID NO: 3667043 - DNA, 25 bp, Homo sapien
agtaggtgggagcaccttaaccctg

SEQ ID NO: 3667044 - DNA, 25 bp, Homo sapien
ggagcaccttaaccctgtgtgtgtt

SEQ ID NO: 3667045 - DNA, 25 bp, Homo sapien
acgccagaagtaggtgggagcacct

SEQ ID NO: 3667046 - DNA, 25 bp, Homo sapien
gcgcgacaccactccatgggccaag

SEQ ID NO: 3667047 - DNA, 25 bp, Homo sapien
tgcacccccttaaccctgggcgcga

SEQ ID NO: 3667048 - DNA, 25 bp, Homo sapien
tgggcgcgacaccactccatgggcc

SEQ ID NO: 3667049 - DNA, 25 bp, Homo sapien
aaccctgggcgcgacaccactccat

SEQ ID NO: 3667050 - DNA, 25 bp, Homo sapien
ctctggtggaaactagggagatgga

SEQ ID NO: 3667051 - DNA, 25 bp, Homo sapien
accgtctccatggtgacgataaaca

SEQ ID NO: 3667052 - DNA, 25 bp, Homo sapien
tgacgataaacaggcctcctccttc

SEQ ID NO: 3667053 - DNA, 25 bp, Homo sapien
ccatggtgacgataaacaggcctcc

SEQ ID NO: 3667054 - DNA, 25 bp, Homo sapien
tggcggttctgcaggtcggagccgg

SEQ ID NO: 3667055 - DNA, 25 bp, Homo sapien
gaccgcactctatcccctggcggtt

SEQ ID NO: 3667056 - DNA, 25 bp, Homo sapien
gctcctcctgaagcgggctcacggg

SEQ ID NO: 3667057 - DNA, 25 bp, Homo sapien
gtcggagccgggtatgcgctcctcc

SEQ ID NO: 3667058 - DNA, 25 bp, Homo sapien
tgctgattcggactcttagcgaccc

SEQ ID NO: 3667059 - DNA, 25 bp, Homo sapien
tactggtattattaccagtgcccac

SEQ ID NO: 3667060 - DNA, 25 bp, Homo sapien
ctgtgttggttcttattactggtat

SEQ ID NO: 3667061 - DNA, 25 bp, Homo sapien
cagtgcccacctgctgattcggact

SEQ ID NO: 3667062 - DNA, 25 bp, Homo sapien
aagttaggcccacttaggccgccag

SEQ ID NO: 3667063 - DNA, 25 bp, Homo sapien
aaatggggcggagatctccccggca

SEQ ID NO: 3667064 - DNA, 25 bp, Homo sapien
cagcgacgaccctcgggactctaaa

SEQ ID NO: 3667065 - DNA, 25 bp, Homo sapien
ctgaggacaaggcggcacggaaatg

SEQ ID NO: 3667066 - DNA, 25 bp, Homo sapien
taccgcacccagcttagactgtctg

SEQ ID NO: 3667067 - DNA, 25 bp, Homo sapien
tgactcccgcgtgtagggcagagat

SEQ ID NO: 3667068 - DNA, 25 bp, Homo sapien
ccagctgtctccacgaggactactg

SEQ ID NO: 3667069 - DNA, 25 bp, Homo sapien
tgtcctagggctccgccttaggctg

SEQ ID NO: 3667070 - DNA, 25 bp, Homo sapien
tgggcacgtgggtcggctctttaaa

SEQ ID NO: 3667071 - DNA, 25 bp, Homo sapien
gtcggctctttaaaccctgcagcca

SEQ ID NO: 3667072 - DNA, 25 bp, Homo sapien
tggcagcgcagagaacggatctgag

SEQ ID NO: 3667073 - DNA, 25 bp, Homo sapien
aggctgctgggcacgtgggtcggct

SEQ ID NO: 3667074 - DNA, 25 bp, Homo sapien
cgaggtcaccttggcgagggctcac

SEQ ID NO: 3667075 - DNA, 25 bp, Homo sapien
caactgtgtgactctgcaggttcct

SEQ ID NO: 3667076 - DNA, 25 bp, Homo sapien
tctgcaggttcctcactgctccttc

SEQ ID NO: 3667077 - DNA, 25 bp, Homo sapien
caggttcctcactgctccttcacca

SEQ ID NO: 3667078 - DNA, 25 bp, Homo sapien
aactgtgtgactctgcaggttcctc

SEQ ID NO: 3667079 - DNA, 25 bp, Homo sapien
cccctcaggttggaagtagccagga

SEQ ID NO: 3667080 - DNA, 25 bp, Homo sapien
gatgagatcacagatccagggccag

SEQ ID NO: 3667081 - DNA, 25 bp, Homo sapien
tacttgtccttagggaggctgagtc

SEQ ID NO: 3667082 - DNA, 25 bp, Homo sapien
aggctgagtctttgagcgcaggccc

SEQ ID NO: 3667083 - DNA, 25 bp, Homo sapien
ggtgtaatcagatgcccagggtcag

SEQ ID NO: 3667084 - DNA, 25 bp, Homo sapien
caggccccaggctattgttcccaaa

SEQ ID NO: 3667085 - DNA, 25 bp, Homo sapien
gagagcctccacaaaagcaagggtg

SEQ ID NO: 3667086 - DNA, 25 bp, Homo sapien
caaagggcattgttatcaggcccca

SEQ ID NO: 3667087 - DNA, 25 bp, Homo sapien
gagtaagcacaagctaagagctcaa

SEQ ID NO: 3667088 - DNA, 25 bp, Homo sapien
aagagctcaaaactgtgcctgcaca

SEQ ID NO: 3667089 - DNA, 25 bp, Homo sapien
gagttgtgtggattgagtaagcaca

SEQ ID NO: 3667090 - DNA, 25 bp, Homo sapien
gctgtagaaggcgttgttaaaatcc

SEQ ID NO: 3667091 - DNA, 25 bp, Homo sapien
ccccaaggatacacttgcttgtggg

SEQ ID NO: 3667092 - DNA, 25 bp, Homo sapien
cagagccccatggtgaaagtaggtg

SEQ ID NO: 3667093 - DNA, 25 bp, Homo sapien
taggtgtacaaaccccaaggataca

SEQ ID NO: 3667094 - DNA, 25 bp, Homo sapien
catggtgaaagtaggtgtacaaacc

SEQ ID NO: 3667095 - DNA, 25 bp, Homo sapien
ccaggctcacagctcaattggtcag

SEQ ID NO: 3667096 - DNA, 25 bp, Homo sapien
tgcagcccacggatctgctccaggc

SEQ ID NO: 3667097 - DNA, 25 bp, Homo sapien
ctgccagtaggagaagggccagggt

SEQ ID NO: 3667098 - DNA, 25 bp, Homo sapien
agtaggagaagggccagggtcactc

SEQ ID NO: 3667099 - DNA, 25 bp, Homo sapien
gccagtaggagaagggccagggtca

SEQ ID NO: 3667100 - DNA, 25 bp, Homo sapien
taggagaagggccagggtcactctc

SEQ ID NO: 3667101 - DNA, 25 bp, Homo sapien
atgggtcattggcttccaaggcagt

SEQ ID NO: 3667102 - DNA, 25 bp, Homo sapien
gggtcattggcttccaaggcagtca

SEQ ID NO: 3667103 - DNA, 25 bp, Homo sapien
caaatgggtcattggcttccaaggc

SEQ ID NO: 3667104 - DNA, 25 bp, Homo sapien
aaatgggtcattggcttccaaggca

SEQ ID NO: 3667105 - DNA, 25 bp, Homo sapien
atagtagaagggatcgtctttattg

SEQ ID NO: 3667106 - DNA, 25 bp, Homo sapien
catagtagaagggatcgtctttatt

SEQ ID NO: 3667107 - DNA, 25 bp, Homo sapien
tagtagaagggatcgtctttattgg

SEQ ID NO: 3667108 - DNA, 25 bp, Homo sapien
gccctccgcagatcagtccgctcag

SEQ ID NO: 3667109 - DNA, 25 bp, Homo sapien
atggccaggagccctccgcagatca

SEQ ID NO: 3667110 - DNA, 25 bp, Homo sapien
ctgccgcgatcccagcaatggccag

SEQ ID NO: 3667111 - DNA, 25 bp, Homo sapien
aactgccgcgatcccagcaatggcc

SEQ ID NO: 3667112 - DNA, 25 bp, Homo sapien
tgcttctggctgctcttgcatttgc

SEQ ID NO: 3667113 - DNA, 25 bp, Homo sapien
tctggctgctcttgcatttgcattt

SEQ ID NO: 3667114 - DNA, 25 bp, Homo sapien
ggctgctcttgcatttgcatttgcc

SEQ ID NO: 3667115 - DNA, 25 bp, Homo sapien
ctgctcttgcatttgcatttgccac

SEQ ID NO: 3667116 - DNA, 25 bp, Homo sapien
tgggatggccttctcaggtacagga

SEQ ID NO: 3667117 - DNA, 25 bp, Homo sapien
gccagtgttaggcttcaggccatcc

SEQ ID NO: 3667118 - DNA, 25 bp, Homo sapien
tccttgaggataaggcctcccaggg

SEQ ID NO: 3667119 - DNA, 25 bp, Homo sapien
tgcccttggagagaagtccttcctt

SEQ ID NO: 3667120 - DNA, 25 bp, Homo sapien
tcataaagaagcctcctgatcagaa

SEQ ID NO: 3667121 - DNA, 25 bp, Homo sapien
agtgcagtgactttgagagagtctc

SEQ ID NO: 3667122 - DNA, 25 bp, Homo sapien
accgcgcacagcctcagcatggaag

SEQ ID NO: 3667123 - DNA, 25 bp, Homo sapien
ttgctgcagatacccaatcgacata

SEQ ID NO: 3667124 - DNA, 25 bp, Homo sapien
gaggtcatagcgaggccgaacttgc

SEQ ID NO: 3667125 - DNA, 25 bp, Homo sapien
aggtttatttgatttggccaaggtg

SEQ ID NO: 3667126 - DNA, 25 bp, Homo sapien
gtagctgatgccaaacaccaagaca

SEQ ID NO: 3667127 - DNA, 25 bp, Homo sapien
gatttggccaaggtgagaaatctgc

SEQ ID NO: 3667128 - DNA, 25 bp, Homo sapien
acaaaggtgcttggagataaaggtt

SEQ ID NO: 3667129 - DNA, 25 bp, Homo sapien
gcccttcgttccagtgttctgcatg

SEQ ID NO: 3667130 - DNA, 25 bp, Homo sapien
tctgcatgcttggatggcctgatgt

SEQ ID NO: 3667131 - DNA, 25 bp, Homo sapien
aatggcagggtacagggacgcagaa

SEQ ID NO: 3667132 - DNA, 25 bp, Homo sapien
ttaggtacagcccttcgttccagtg

SEQ ID NO: 3667133 - DNA, 25 bp, Homo sapien
tcacatctgttgatagctggagaac

SEQ ID NO: 3667134 - DNA, 25 bp, Homo sapien
gaattttcctgctaggcccttgatg

SEQ ID NO: 3667135 - DNA, 25 bp, Homo sapien
caaagacagggccaatatgcagcac

SEQ ID NO: 3667136 - DNA, 25 bp, Homo sapien
tcagcaaaagatagcaaaacgggtg

SEQ ID NO: 3667137 - DNA, 25 bp, Homo sapien
gaaacacaaggagaggatagggcac

SEQ ID NO: 3667138 - DNA, 25 bp, Homo sapien
cagatacggcgacagtgagttcaca

SEQ ID NO: 3667139 - DNA, 25 bp, Homo sapien
cattggcatcgtgaagcaggcaggc

SEQ ID NO: 3667140 - DNA, 25 bp, Homo sapien
gatcacattgcctgtggaccccgaa

SEQ ID NO: 3667141 - DNA, 25 bp, Homo sapien
aaatgggtgtacgtgggtctggttg

SEQ ID NO: 3667142 - DNA, 25 bp, Homo sapien
agcggctggtccattggggtaaatg

SEQ ID NO: 3667143 - DNA, 25 bp, Homo sapien
aatgggtgtacgtgggtctggttgc

SEQ ID NO: 3667144 - DNA, 25 bp, Homo sapien
gcggctggtccattggggtaaatgg

SEQ ID NO: 3667145 - DNA, 25 bp, Homo sapien
agactcttcctctgcgtgcgttggc

SEQ ID NO: 3667146 - DNA, 25 bp, Homo sapien
ctgcggacggggagaccagactctt

SEQ ID NO: 3667147 - DNA, 25 bp, Homo sapien
cagtggccgtggtctacaggcttac

SEQ ID NO: 3667148 - DNA, 25 bp, Homo sapien
tgcgttggcggtgcgcagtggccgt

SEQ ID NO: 3667149 - DNA, 25 bp, Homo sapien
cgtgcaagctcgatctgaaaacctc

SEQ ID NO: 3667150 - DNA, 25 bp, Homo sapien
ccccgtgcaagctcgatctgaaaac

SEQ ID NO: 3667151 - DNA, 25 bp, Homo sapien
tgcaagctcgatctgaaaacctccg

SEQ ID NO: 3667152 - DNA, 25 bp, Homo sapien
ggtggcccccgtgcaagctcgatct

SEQ ID NO: 3667153 - DNA, 25 bp, Homo sapien
gtctagagcatgaaagtccgcgggc

SEQ ID NO: 3667154 - DNA, 25 bp, Homo sapien
agtcctgctcgcctccgtggtaagt

SEQ ID NO: 3667155 - DNA, 25 bp, Homo sapien
ccggagccctctgcgtggttgagct

SEQ ID NO: 3667156 - DNA, 25 bp, Homo sapien
gcttgcctggtagcaacagaaacca

SEQ ID NO: 3667157 - DNA, 25 bp, Homo sapien
ccattggtgacatcttggcgggccc

SEQ ID NO: 3667158 - DNA, 25 bp, Homo sapien
gtcttggatcacgaggcctccgctt

SEQ ID NO: 3667159 - DNA, 25 bp, Homo sapien
ccacgtccggctgccggtcttggat

SEQ ID NO: 3667160 - DNA, 25 bp, Homo sapien
gcgtttcccattggtgacatcttgg

SEQ ID NO: 3667161 - DNA, 25 bp, Homo sapien
tgtacaaaccaaggtacgtccgcta

SEQ ID NO: 3667162 - DNA, 25 bp, Homo sapien
gctcccttcgggagaactcggagaa

SEQ ID NO: 3667163 - DNA, 25 bp, Homo sapien
tagttccattttagaggcggcctcc

SEQ ID NO: 3667164 - DNA, 25 bp, Homo sapien
gattcagaggtccacaaaattgcgt

SEQ ID NO: 3667165 - DNA, 25 bp, Homo sapien
ggatccaaagtcacaccttatattt

SEQ ID NO: 3667166 - DNA, 25 bp, Homo sapien
agtggtaaaaggaaacatgattcat

SEQ ID NO: 3667167 - DNA, 25 bp, Homo sapien
tctccatgatcttgactaaaataat

SEQ ID NO: 3667168 - DNA, 25 bp, Homo sapien
taacctaatatatatccactactat

SEQ ID NO: 3667169 - DNA, 25 bp, Homo sapien
tcttaagaatacctacctatctgat

SEQ ID NO: 3667170 - DNA, 25 bp, Homo sapien
tgctgaatacctatctgatttttgc

SEQ ID NO: 3667171 - DNA, 25 bp, Homo sapien
tcctatgatgctgaatacctatctg

SEQ ID NO: 3667172 - DNA, 25 bp, Homo sapien
ctatctgattttcgcccctttccta

SEQ ID NO: 3667173 - DNA, 25 bp, Homo sapien
ctccctcagtctcccgaaagctagg

SEQ ID NO: 3667174 - DNA, 25 bp, Homo sapien
ttcttctccctcagtctcccgaaag

SEQ ID NO: 3667175 - DNA, 25 bp, Homo sapien
ttctccctcagtctcccgaaagcta

SEQ ID NO: 3667176 - DNA, 25 bp, Homo sapien
tcttctccctcagtctcccgaaagc

SEQ ID NO: 3667177 - DNA, 25 bp, Homo sapien
ggcagccgctctccgcagagcctgg

SEQ ID NO: 3667178 - DNA, 25 bp, Homo sapien
tggcagccgctctccgcagagcctg

SEQ ID NO: 3667179 - DNA, 25 bp, Homo sapien
gccgctctccgcagagcctgggagt

SEQ ID NO: 3667180 - DNA, 25 bp, Homo sapien
cagccgctctccgcagagcctggga

SEQ ID NO: 3667181 - DNA, 25 bp, Homo sapien
ccggagttcggcagcagcctagcca

SEQ ID NO: 3667182 - DNA, 25 bp, Homo sapien
agccaaaagaggctctcggccgggc

SEQ ID NO: 3667183 - DNA, 25 bp, Homo sapien
gcacctctgacctcggcagcgagga

SEQ ID NO: 3667184 - DNA, 25 bp, Homo sapien
ggtctcatgttctccgcacctctga

SEQ ID NO: 3667185 - DNA, 25 bp, Homo sapien
actggaattaatattggtaagaagc

SEQ ID NO: 3667186 - DNA, 25 bp, Homo sapien
caagcccagctaactcatagtcttt

SEQ ID NO: 3667187 - DNA, 25 bp, Homo sapien
cgcttatgccgccaaggttggtctt

SEQ ID NO: 3667188 - DNA, 25 bp, Homo sapien
ttcaggagagtgtagaaacagcttc

SEQ ID NO: 3667189 - DNA, 25 bp, Homo sapien
gagtgcagtgaagcaatcttgattc

SEQ ID NO: 3667190 - DNA, 25 bp, Homo sapien
tgcagtgaagcaatcttgattcact

SEQ ID NO: 3667191 - DNA, 25 bp, Homo sapien
aactattctcattcctcagcctccg

SEQ ID NO: 3667192 - DNA, 25 bp, Homo sapien
gtgaagcaatcttgattcactgcca

SEQ ID NO: 3667193 - DNA, 25 bp, Homo sapien
aggtcgctgggaccgcggctgggcg

SEQ ID NO: 3667194 - DNA, 25 bp, Homo sapien
cacgaaagcgaaggtcgctgggacc

SEQ ID NO: 3667195 - DNA, 25 bp, Homo sapien
gccttcttcaggaagacacggcgca

SEQ ID NO: 3667196 - DNA, 25 bp, Homo sapien
gcagtccggcttccccacgaaagcg

SEQ ID NO: 3667197 - DNA, 25 bp, Homo sapien
tggaaactgccgcagcgctccctgg

SEQ ID NO: 3667198 - DNA, 25 bp, Homo sapien
gggctcggccctatgccacgggcat

SEQ ID NO: 3667199 - DNA, 25 bp, Homo sapien
ttgctgctcccgcgtgcctagcggg

SEQ ID NO: 3667200 - DNA, 25 bp, Homo sapien
accctgctaccagctgccctcttgt

SEQ ID NO: 3667201 - DNA, 25 bp, Homo sapien
tcggcggtctctcggaggagggagg

SEQ ID NO: 3667202 - DNA, 25 bp, Homo sapien
cccgaggtacctggtagtcgtagct

SEQ ID NO: 3667203 - DNA, 25 bp, Homo sapien
tacctggtagtcgtagctgaggaac

SEQ ID NO: 3667204 - DNA, 25 bp, Homo sapien
gtcgtagctgaggaacttacaggct

SEQ ID NO: 3667205 - DNA, 25 bp, Homo sapien
gaagtttacaacgtggctccaaatg

SEQ ID NO: 3667206 - DNA, 25 bp, Homo sapien
caaatgtattactagtaggatcacc

SEQ ID NO: 3667207 - DNA, 25 bp, Homo sapien
tcaccatagtgcaagtgttatcacc

SEQ ID NO: 3667208 - DNA, 25 bp, Homo sapien
tgttatcacctttagagacgaggaa

SEQ ID NO: 3667209 - DNA, 25 bp, Homo sapien
ataataataataggccatccatggt

SEQ ID NO: 3667210 - DNA, 25 bp, Homo sapien
taataataataggccatccatggtg

SEQ ID NO: 3667211 - DNA, 25 bp, Homo sapien
taactttgaccattgccagcaggca

SEQ ID NO: 3667212 - DNA, 25 bp, Homo sapien
gaagcacctgggcttttgaatcagc

SEQ ID NO: 3667213 - DNA, 25 bp, Homo sapien
tatctgaccataggctcctgaccgc

SEQ ID NO: 3667214 - DNA, 25 bp, Homo sapien
gcaggctttgcaagtgctcccataa

SEQ ID NO: 3667215 - DNA, 25 bp, Homo sapien
cactgcatttttaggagactgacaa

SEQ ID NO: 3667216 - DNA, 25 bp, Homo sapien
tccagtatgttttacagcacaagca

SEQ ID NO: 3667217 - DNA, 25 bp, Homo sapien
tttgaaaatctgtgagtcgagggcc

SEQ ID NO: 3667218 - DNA, 25 bp, Homo sapien
gcacaaatcagcagatcattcacaa

SEQ ID NO: 3667219 - DNA, 25 bp, Homo sapien
tgcaatggcgcgatcgcagctcgcc

SEQ ID NO: 3667220 - DNA, 25 bp, Homo sapien
gcaatggcgcgatcgcagctcgcca

SEQ ID NO: 3667221 - DNA, 25 bp, Homo sapien
atggcgcgatcgcagctcgccacaa

SEQ ID NO: 3667222 - DNA, 25 bp, Homo sapien
agagtttcactcttggtgcccaggc

SEQ ID NO: 3667223 - DNA, 25 bp, Homo sapien
ttgatgactgctagtggtggtttgc

SEQ ID NO: 3667224 - DNA, 25 bp, Homo sapien
atgactgctagtggtggtttgctga

SEQ ID NO: 3667225 - DNA, 25 bp, Homo sapien
tgatgactgctagtggtggtttgct

SEQ ID NO: 3667226 - DNA, 25 bp, Homo sapien
tgttgatgactgctagtggtggttt

SEQ ID NO: 3667227 - DNA, 25 bp, Homo sapien
agccacatcactgaaggacactgat

SEQ ID NO: 3667228 - DNA, 25 bp, Homo sapien
gcccacagccacatcactgaaggac

SEQ ID NO: 3667229 - DNA, 25 bp, Homo sapien
ctctgtacggggtcctctgagcaga

SEQ ID NO: 3667230 - DNA, 25 bp, Homo sapien
gtctctgtacggggtcctctgagca

SEQ ID NO: 3667231 - DNA, 25 bp, Homo sapien
ccactgagaggaggaggctgtagtt

SEQ ID NO: 3667232 - DNA, 25 bp, Homo sapien
ctgagaggaggaggctgtagttctc

SEQ ID NO: 3667233 - DNA, 25 bp, Homo sapien
gagaggaggaggctgtagttctcca

SEQ ID NO: 3667234 - DNA, 25 bp, Homo sapien
cactgagaggaggaggctgtagttc

SEQ ID NO: 3667235 - DNA, 25 bp, Homo sapien
aatgaaaatgacacaggacgtgggc

SEQ ID NO: 3667236 - DNA, 25 bp, Homo sapien
atgaaaatgacacaggacgtgggcc

SEQ ID NO: 3667237 - DNA, 25 bp, Homo sapien
aacttgcaaaccacctctggtttgg

SEQ ID NO: 3667238 - DNA, 25 bp, Homo sapien
atgctccaacttgcaaaccacctct

SEQ ID NO: 3667239 - DNA, 25 bp, Homo sapien
caacttgcaaaccacctctggtttg

SEQ ID NO: 3667240 - DNA, 25 bp, Homo sapien
gtccatgctccaacttgcaaaccac

SEQ ID NO: 3667241 - DNA, 25 bp, Homo sapien
agttgccacgtatttttcttgatag

SEQ ID NO: 3667242 - DNA, 25 bp, Homo sapien
tagaatggggtttgtgtcaagagaa

SEQ ID NO: 3667243 - DNA, 25 bp, Homo sapien
aaattcattccagatgagtcacagt

SEQ ID NO: 3667244 - DNA, 25 bp, Homo sapien
taatacaccatttctgtccatagtc

SEQ ID NO: 3667245 - DNA, 25 bp, Homo sapien
tcatacagaggagaaatttcccacg

SEQ ID NO: 3667246 - DNA, 25 bp, Homo sapien
ggcataaggattctcacgcttcata

SEQ ID NO: 3667247 - DNA, 25 bp, Homo sapien
gatgcctaaataagtcctcattctg

SEQ ID NO: 3667248 - DNA, 25 bp, Homo sapien
tcctcattctgagagacggctttcc

SEQ ID NO: 3667249 - DNA, 25 bp, Homo sapien
caggctgcctcttcatgaaaagcct

SEQ ID NO: 3667250 - DNA, 25 bp, Homo sapien
tgcaggctgcctcttcatgaaaagc

SEQ ID NO: 3667251 - DNA, 25 bp, Homo sapien
gcctcttcatgaaaagccttcccac

SEQ ID NO: 3667252 - DNA, 25 bp, Homo sapien
ctcttcatgaaaagccttcccacac

SEQ ID NO: 3667253 - DNA, 25 bp, Homo sapien
tcccatgagcacactctcttatggg

SEQ ID NO: 3667254 - DNA, 25 bp, Homo sapien
ggtctcccatgagcacactctctta

SEQ ID NO: 3667255 - DNA, 25 bp, Homo sapien
catgagcacactctcttatgggtac

SEQ ID NO: 3667256 - DNA, 25 bp, Homo sapien
agggtctcccatgagcacactctct

SEQ ID NO: 3667257 - DNA, 25 bp, Homo sapien
tgaatattggtctatcggaaaaggc

SEQ ID NO: 3667258 - DNA, 25 bp, Homo sapien
caatgaatattggtctatcggaaaa

SEQ ID NO: 3667259 - DNA, 25 bp, Homo sapien
atattggtctatcggaaaaggctct

SEQ ID NO: 3667260 - DNA, 25 bp, Homo sapien
tgaacaatgaatattggtctatcgg

SEQ ID NO: 3667261 - DNA, 25 bp, Homo sapien
ctgattaattttataggcattcttt

SEQ ID NO: 3667262 - DNA, 25 bp, Homo sapien
tgattaattttataggcattctttc

SEQ ID NO: 3667263 - DNA, 25 bp, Homo sapien
atacagaatgctttggcttacagca

SEQ ID NO: 3667264 - DNA, 25 bp, Homo sapien
ctgatatacagaatgctttggctta

SEQ ID NO: 3667265 - DNA, 25 bp, Homo sapien
gatatacagaatgctttggcttaca

SEQ ID NO: 3667266 - DNA, 25 bp, Homo sapien
gaatgctttggcttacagcaaaatg

SEQ ID NO: 3667267 - DNA, 25 bp, Homo sapien
taaaagaggatttatggctgaaggt

SEQ ID NO: 3667268 - DNA, 25 bp, Homo sapien
aaaagaggatttatggctgaaggtt

SEQ ID NO: 3667269 - DNA, 25 bp, Homo sapien
gataaaagaggatttatggctgaag

SEQ ID NO: 3667270 - DNA, 25 bp, Homo sapien
taggataaaagaggatttatggctg

SEQ ID NO: 3667271 - DNA, 25 bp, Homo sapien
gtgcattcatagggtttctctcctc

SEQ ID NO: 3667272 - DNA, 25 bp, Homo sapien
ctatatccaaaagttttcccacatt

SEQ ID NO: 3667273 - DNA, 25 bp, Homo sapien
tagggtttctctcctctgtgtatcc

SEQ ID NO: 3667274 - DNA, 25 bp, Homo sapien
atatccaaaagttttcccacattca

SEQ ID NO: 3667275 - DNA, 25 bp, Homo sapien
acattcataggttttgtcccgtgtg

SEQ ID NO: 3667276 - DNA, 25 bp, Homo sapien
ctgatgtacttttagagctgaccta

SEQ ID NO: 3667277 - DNA, 25 bp, Homo sapien
gagctgacctatcaccaaaggcttt

SEQ ID NO: 3667278 - DNA, 25 bp, Homo sapien
gttttgtcccgtgtgtgttctttga

SEQ ID NO: 3667279 - DNA, 25 bp, Homo sapien
tgatgattaatgaagtttggcttct

SEQ ID NO: 3667280 - DNA, 25 bp, Homo sapien
taatgaagtttggcttctgggagaa

SEQ ID NO: 3667281 - DNA, 25 bp, Homo sapien
gatgattaatgaagtttggcttctg

SEQ ID NO: 3667282 - DNA, 25 bp, Homo sapien
attcattgcattcaaagggtctctc

SEQ ID NO: 3667283 - DNA, 25 bp, Homo sapien
ttcacagagaaggatttttgacatt

SEQ ID NO: 3667284 - DNA, 25 bp, Homo sapien
ctaagttttgacttcacagagaagg

SEQ ID NO: 3667285 - DNA, 25 bp, Homo sapien
ttcattgcattcaaagggtctctct

SEQ ID NO: 3667286 - DNA, 25 bp, Homo sapien
tgacttgtggtagaacattttctca

SEQ ID NO: 3667287 - DNA, 25 bp, Homo sapien
atttagtgaagttgggattctggta

SEQ ID NO: 3667288 - DNA, 25 bp, Homo sapien
tgtgttgtgagggatgacttctggt

SEQ ID NO: 3667289 - DNA, 25 bp, Homo sapien
gggttgctcccttgtgtgtgttctc

SEQ ID NO: 3667290 - DNA, 25 bp, Homo sapien
gttgggattctggtaaaagctttca

SEQ ID NO: 3667291 - DNA, 25 bp, Homo sapien
tatggaacgagtccaagaaggtgaa

SEQ ID NO: 3667292 - DNA, 25 bp, Homo sapien
aagggtttcctctatgttgtctctc

SEQ ID NO: 3667293 - DNA, 25 bp, Homo sapien
tgtttctgctatggaacgagtccaa

SEQ ID NO: 3667294 - DNA, 25 bp, Homo sapien
ggtttctgagccttcaggatgttga

SEQ ID NO: 3667295 - DNA, 25 bp, Homo sapien
tctcatctttattgggtgttctcac

SEQ ID NO: 3667296 - DNA, 25 bp, Homo sapien
ttctcatctttattgggtgttctca

SEQ ID NO: 3667297 - DNA, 25 bp, Homo sapien
catctcaaaaaggataataaataaa

SEQ ID NO: 3667298 - DNA, 25 bp, Homo sapien
actccatctcaaaaaggataataaa

SEQ ID NO: 3667299 - DNA, 25 bp, Homo sapien
gagactccatctcaaaaaggataat

SEQ ID NO: 3667300 - DNA, 25 bp, Homo sapien
ctccatctcaaaaaggataataaat

SEQ ID NO: 3667301 - DNA, 25 bp, Homo sapien
tggagacatctctatgaccagattg

SEQ ID NO: 3667302 - DNA, 25 bp, Homo sapien
taaagttaggagaaatctggcccgc

SEQ ID NO: 3667303 - DNA, 25 bp, Homo sapien
cctaaaatgctacacagaagagacc

SEQ ID NO: 3667304 - DNA, 25 bp, Homo sapien
gaccagattgtgttgagcttagaca

SEQ ID NO: 3667305 - DNA, 25 bp, Homo sapien
cgttggtataatcctcgatgtagtc

SEQ ID NO: 3667306 - DNA, 25 bp, Homo sapien
aatgccagctttagatttaatcact

SEQ ID NO: 3667307 - DNA, 25 bp, Homo sapien
tgtagtctccctatattttttgtga

SEQ ID NO: 3667308 - DNA, 25 bp, Homo sapien
tattaggtgtactttctcaaagctg

SEQ ID NO: 3667309 - DNA, 25 bp, Homo sapien
caggtgattcttccgagtagccagg

SEQ ID NO: 3667310 - DNA, 25 bp, Homo sapien
gatgtagtatctccaagaagttggg

SEQ ID NO: 3667311 - DNA, 25 bp, Homo sapien
cagcctagtgactttcatataattc

SEQ ID NO: 3667312 - DNA, 25 bp, Homo sapien
tgatcactgttcaccacaccattga

SEQ ID NO: 3667313 - DNA, 25 bp, Homo sapien
tttgcaaagactgggaagtgcaaag

SEQ ID NO: 3667314 - DNA, 25 bp, Homo sapien
gaatcagatggctcccaaggaaagg

SEQ ID NO: 3667315 - DNA, 25 bp, Homo sapien
ttgtgctcgaagtgtctgtggaacg

SEQ ID NO: 3667316 - DNA, 25 bp, Homo sapien
gaagcccgtaatgaagctgaggact

SEQ ID NO: 3667317 - DNA, 25 bp, Homo sapien
gcctggcctgaacacctttagagtt

SEQ ID NO: 3667318 - DNA, 25 bp, Homo sapien
taaattagcagctcatggcgggatg

SEQ ID NO: 3667319 - DNA, 25 bp, Homo sapien
gagccatcacgccaggttgttagcc

SEQ ID NO: 3667320 - DNA, 25 bp, Homo sapien
aaaaactggcggtagcctgggcaat

SEQ ID NO: 3667321 - DNA, 25 bp, Homo sapien
tctgtcctttatttggcattatatc

SEQ ID NO: 3667322 - DNA, 25 bp, Homo sapien
cacagtcacgtccttgagcgacact

SEQ ID NO: 3667323 - DNA, 25 bp, Homo sapien
ccacagtcacgtccttgagcgacac

SEQ ID NO: 3667324 - DNA, 25 bp, Homo sapien
acagtcacgtccttgagcgacactg

SEQ ID NO: 3667325 - DNA, 25 bp, Homo sapien
gaagaccacctttggcttgctaatg

SEQ ID NO: 3667326 - DNA, 25 bp, Homo sapien
cttgctgcaacttgaagaccacctt

SEQ ID NO: 3667327 - DNA, 25 bp, Homo sapien
tgcaacttgaagaccacctttggct

SEQ ID NO: 3667328 - DNA, 25 bp, Homo sapien
acctttggcttgctaatgcaatacc

SEQ ID NO: 3667329 - DNA, 25 bp, Homo sapien
caaagtggctttggcttgaggactc

SEQ ID NO: 3667330 - DNA, 25 bp, Homo sapien
tggctttggcttgaggactcttcct

SEQ ID NO: 3667331 - DNA, 25 bp, Homo sapien
aagtggctttggcttgaggactctt

SEQ ID NO: 3667332 - DNA, 25 bp, Homo sapien
gtggctttggcttgaggactcttcc

SEQ ID NO: 3667333 - DNA, 25 bp, Homo sapien
tcaatatctccagggttaggatcca

SEQ ID NO: 3667334 - DNA, 25 bp, Homo sapien
caatcaatatctccagggttaggat

SEQ ID NO: 3667335 - DNA, 25 bp, Homo sapien
tccagggttaggatccacatccagg

SEQ ID NO: 3667336 - DNA, 25 bp, Homo sapien
tatctccagggttaggatccacatc

SEQ ID NO: 3667337 - DNA, 25 bp, Homo sapien
tcactgtcccatcaccatgtggacc

SEQ ID NO: 3667338 - DNA, 25 bp, Homo sapien
cactgtcccatcaccatgtggacct

SEQ ID NO: 3667339 - DNA, 25 bp, Homo sapien
actgtcccatcaccatgtggacctt

SEQ ID NO: 3667340 - DNA, 25 bp, Homo sapien
catccctgagcctagtgtcccaaag

SEQ ID NO: 3667341 - DNA, 25 bp, Homo sapien
atccctgagcctagtgtcccaaagg

SEQ ID NO: 3667342 - DNA, 25 bp, Homo sapien
acatccctgagcctagtgtcccaaa

SEQ ID NO: 3667343 - DNA, 25 bp, Homo sapien
ctttcctcaaatgctggtcttggtt

SEQ ID NO: 3667344 - DNA, 25 bp, Homo sapien
ttgttgttgacaaaaccagctttcc

SEQ ID NO: 3667345 - DNA, 25 bp, Homo sapien
tatacataagtcatatttatcaggt

SEQ ID NO: 3667346 - DNA, 25 bp, Homo sapien
cattggaacaaggtttgaatttata

SEQ ID NO: 3667347 - DNA, 25 bp, Homo sapien
ttgcttcagagtttgaatatcctga

SEQ ID NO: 3667348 - DNA, 25 bp, Homo sapien
ctttcccacactcaaggtattcaaa

SEQ ID NO: 3667349 - DNA, 25 bp, Homo sapien
atttgcttcagagtttgaatatcct

SEQ ID NO: 3667350 - DNA, 25 bp, Homo sapien
caaggtattcaaaaatttgcttcag

SEQ ID NO: 3667351 - DNA, 25 bp, Homo sapien
tcagaaaaggctcttagttgttcat

SEQ ID NO: 3667352 - DNA, 25 bp, Homo sapien
tttggattgtcagaaaaggctctta

SEQ ID NO: 3667353 - DNA, 25 bp, Homo sapien
ggctcttagttgttcattatattca

SEQ ID NO: 3667354 - DNA, 25 bp, Homo sapien
ctgatgaacaaggaggtttggattg

SEQ ID NO: 3667355 - DNA, 25 bp, Homo sapien
cagcaattaaactcgtagtgatttt

SEQ ID NO: 3667356 - DNA, 25 bp, Homo sapien
agcaattaaactcgtagtgattttc

SEQ ID NO: 3667357 - DNA, 25 bp, Homo sapien
gcaattaaactcgtagtgattttcc

SEQ ID NO: 3667358 - DNA, 25 bp, Homo sapien
aaaattattctcacactcatagtat

SEQ ID NO: 3667359 - DNA, 25 bp, Homo sapien
aattattctcacactcatagtattt

SEQ ID NO: 3667360 - DNA, 25 bp, Homo sapien
tgagttctttcagtgtcaataaaga

SEQ ID NO: 3667361 - DNA, 25 bp, Homo sapien
ttcagtgtcaataaagagtgacttt

SEQ ID NO: 3667362 - DNA, 25 bp, Homo sapien
tgtactatgatagatgaactgtggc

SEQ ID NO: 3667363 - DNA, 25 bp, Homo sapien
gggagaactgacatatgccaaaaag

SEQ ID NO: 3667364 - DNA, 25 bp, Homo sapien
tgccaaaaagaactcccataatgac

SEQ ID NO: 3667365 - DNA, 25 bp, Homo sapien
tcatagaactttcctcctacgtgtg

SEQ ID NO: 3667366 - DNA, 25 bp, Homo sapien
gtgtgttctctgatgtactgatgta

SEQ ID NO: 3667367 - DNA, 25 bp, Homo sapien
gtgtgtgttctctgatgtactgatg

SEQ ID NO: 3667368 - DNA, 25 bp, Homo sapien
tgtgtgtgttctctgatgtactgat

SEQ ID NO: 3667369 - DNA, 25 bp, Homo sapien
ctgtgtgtgttctctgatgtactga

SEQ ID NO: 3667370 - DNA, 25 bp, Homo sapien
cttggagatatgacttctcacagaa

SEQ ID NO: 3667371 - DNA, 25 bp, Homo sapien
cctttgatgtactatgaggaatgaa

SEQ ID NO: 3667372 - DNA, 25 bp, Homo sapien
tctgatgtacttggagatatgactt

SEQ ID NO: 3667373 - DNA, 25 bp, Homo sapien
tatcctttgatgtactatgaggaat

SEQ ID NO: 3667374 - DNA, 25 bp, Homo sapien
cattcgttacattaatagggtctta

SEQ ID NO: 3667375 - DNA, 25 bp, Homo sapien
cttttgtgagaatgttttcccacat

SEQ ID NO: 3667376 - DNA, 25 bp, Homo sapien
cccacattcgttacattaatagggt

SEQ ID NO: 3667377 - DNA, 25 bp, Homo sapien
cacattcgttacattaatagggtct

SEQ ID NO: 3667378 - DNA, 25 bp, Homo sapien
aataagttttgacttcactgagaaa

SEQ ID NO: 3667379 - DNA, 25 bp, Homo sapien
tgatgcacaataagttttgacttca

SEQ ID NO: 3667380 - DNA, 25 bp, Homo sapien
gacttcactgagaaagacttcccac

SEQ ID NO: 3667381 - DNA, 25 bp, Homo sapien
gttttgacttcactgagaaagactt

SEQ ID NO: 3667382 - DNA, 25 bp, Homo sapien
tgtactgtaagagatgacttctggg

SEQ ID NO: 3667383 - DNA, 25 bp, Homo sapien
tgatgtactgtaagagatgacttct

SEQ ID NO: 3667384 - DNA, 25 bp, Homo sapien
gtactgtaagagatgacttctggga

SEQ ID NO: 3667385 - DNA, 25 bp, Homo sapien
tgggaaaaacttttcccacatgcat

SEQ ID NO: 3667386 - DNA, 25 bp, Homo sapien
ttgatgtttagtaagtgctgatttc

SEQ ID NO: 3667387 - DNA, 25 bp, Homo sapien
tgatgtttagtaagtgctgatttct

SEQ ID NO: 3667388 - DNA, 25 bp, Homo sapien
tgagggatgacttgtggtaaaaagt

SEQ ID NO: 3667389 - DNA, 25 bp, Homo sapien
aaaagttttgctgcattcattatat

SEQ ID NO: 3667390 - DNA, 25 bp, Homo sapien
ctgtgagggatgacttgtggtaaaa

SEQ ID NO: 3667391 - DNA, 25 bp, Homo sapien
tttgctgcattcattatatttatga

SEQ ID NO: 3667392 - DNA, 25 bp, Homo sapien
gatgctaacagggacttctctctgt

SEQ ID NO: 3667393 - DNA, 25 bp, Homo sapien
cttacaaagtttctccccttcactg

SEQ ID NO: 3667394 - DNA, 25 bp, Homo sapien
tggactttcagaagatgctaacagg

SEQ ID NO: 3667395 - DNA, 25 bp, Homo sapien
tctgatgtgctataagtgatgactt

SEQ ID NO: 3667396 - DNA, 25 bp, Homo sapien
tctctcatgtataaccaaaactgaa

SEQ ID NO: 3667397 - DNA, 25 bp, Homo sapien
aactgacatttccagtgagctaaaa

SEQ ID NO: 3667398 - DNA, 25 bp, Homo sapien
ttttagtctcaattaccaaactgac

SEQ ID NO: 3667399 - DNA, 25 bp, Homo sapien
tcgacctaattgtgctttttgaagt

SEQ ID NO: 3667400 - DNA, 25 bp, Homo sapien
caaaataaagggatggaggagatct

SEQ ID NO: 3667401 - DNA, 25 bp, Homo sapien
aaataaagggatggaggagatctac

SEQ ID NO: 3667402 - DNA, 25 bp, Homo sapien
tcaaaataaagggatggaggagatc

SEQ ID NO: 3667403 - DNA, 25 bp, Homo sapien
ctcaaaataaagggatggaggagat

SEQ ID NO: 3667404 - DNA, 25 bp, Homo sapien
tgtggtatgagcttcagtcagcgct

SEQ ID NO: 3667405 - DNA, 25 bp, Homo sapien
gagagaagccctatcactgtggcaa

SEQ ID NO: 3667406 - DNA, 25 bp, Homo sapien
caagaaagatcctcgctaactgaca

SEQ ID NO: 3667407 - DNA, 25 bp, Homo sapien
ccaccagcgggttcacaagaaagat

SEQ ID NO: 3667408 - DNA, 25 bp, Homo sapien
ttgaaagtcattccaagctattcca

SEQ ID NO: 3667409 - DNA, 25 bp, Homo sapien
attgaaagtcattccaagctattcc

SEQ ID NO: 3667410 - DNA, 25 bp, Homo sapien
ttaggacagagatcgggaaagtcag

SEQ ID NO: 3667411 - DNA, 25 bp, Homo sapien
gcacggcttcgagctgccggcggct

SEQ ID NO: 3667412 - DNA, 25 bp, Homo sapien
gaaatgggcacggcttcgagctgcc

SEQ ID NO: 3667413 - DNA, 25 bp, Homo sapien
ctttaggacagagatcgggaaagtc

SEQ ID NO: 3667414 - DNA, 25 bp, Homo sapien
gagaagcttctcctcttaactagaa

SEQ ID NO: 3667415 - DNA, 25 bp, Homo sapien
gaaatccatcccgagaagcttctcc

SEQ ID NO: 3667416 - DNA, 25 bp, Homo sapien
aggcgtcttgggcaaccgaaatcca

SEQ ID NO: 3667417 - DNA, 25 bp, Homo sapien
ggcaaccgaaatccatcccgagaag

SEQ ID NO: 3667418 - DNA, 25 bp, Homo sapien
gtccgcagcactgccttcgctgaaa

SEQ ID NO: 3667419 - DNA, 25 bp, Homo sapien
tgtccgcagcactgccttcgctgaa

SEQ ID NO: 3667420 - DNA, 25 bp, Homo sapien
gactgaggtttctgtccgcagcact

SEQ ID NO: 3667421 - DNA, 25 bp, Homo sapien
tgaggtttctgtccgcagcactgcc

SEQ ID NO: 3667422 - DNA, 25 bp, Homo sapien
ctgtgacgggcgttattgcaggggg

SEQ ID NO: 3667423 - DNA, 25 bp, Homo sapien
tgtgacgggcgttattgcagggggg

SEQ ID NO: 3667424 - DNA, 25 bp, Homo sapien
tcaggaaatgggtgtgccgcgggta

SEQ ID NO: 3667425 - DNA, 25 bp, Homo sapien
gcttcgtggttggccacgccggcct

SEQ ID NO: 3667426 - DNA, 25 bp, Homo sapien
gtgtgtcccggcgccgcatttccga

SEQ ID NO: 3667427 - DNA, 25 bp, Homo sapien
gatggtagggcacgcgaccagcgga

SEQ ID NO: 3667428 - DNA, 25 bp, Homo sapien
tggtgcagcgctcgcaccacgcgga

SEQ ID NO: 3667429 - DNA, 25 bp, Homo sapien
caccacgcggagacaggctggaccg

SEQ ID NO: 3667430 - DNA, 25 bp, Homo sapien
ttcggacagtaaccaccagccaggg

SEQ ID NO: 3667431 - DNA, 25 bp, Homo sapien
ccacaccacgccgttcggacagtaa

SEQ ID NO: 3667432 - DNA, 25 bp, Homo sapien
agggctgcggagctgcacgcccaga

SEQ ID NO: 3667433 - DNA, 25 bp, Homo sapien
gctgcggagctgcacgcccagagag

SEQ ID NO: 3667434 - DNA, 25 bp, Homo sapien
cgaaccgagccggcagggctgcgga

SEQ ID NO: 3667435 - DNA, 25 bp, Homo sapien
gaaccgagccggcagggctgcggag

SEQ ID NO: 3667436 - DNA, 25 bp, Homo sapien
gggctgagaatcctgcgtaagtcaa

SEQ ID NO: 3667437 - DNA, 25 bp, Homo sapien
caagggctgagaatcctgcgtaagt

SEQ ID NO: 3667438 - DNA, 25 bp, Homo sapien
ggcaagggctgagaatcctgcgtaa

SEQ ID NO: 3667439 - DNA, 25 bp, Homo sapien
aggcaagggctgagaatcctgcgta

SEQ ID NO: 3667440 - DNA, 25 bp, Homo sapien
gcgggacccatccaggattggttcg

SEQ ID NO: 3667441 - DNA, 25 bp, Homo sapien
gaatgactacgtaatgggtagacag

SEQ ID NO: 3667442 - DNA, 25 bp, Homo sapien
ttggttcgggtagctttgtccacac

SEQ ID NO: 3667443 - DNA, 25 bp, Homo sapien
acaggacggaaatcgcgggacccat

SEQ ID NO: 3667444 - DNA, 25 bp, Homo sapien
gttcatggtcccgccataatgactt

SEQ ID NO: 3667445 - DNA, 25 bp, Homo sapien
ttcatggtcccgccataatgacttc

SEQ ID NO: 3667446 - DNA, 25 bp, Homo sapien
tagctttatccgagaatttacaggg

SEQ ID NO: 3667447 - DNA, 25 bp, Homo sapien
tacagggagtatgatctgactctgg

SEQ ID NO: 3667448 - DNA, 25 bp, Homo sapien
tgtgcgactcctcccttgagcaggt

SEQ ID NO: 3667449 - DNA, 25 bp, Homo sapien
tggaaaccaacaagtaaaagctgag

SEQ ID NO: 3667450 - DNA, 25 bp, Homo sapien
gtctccactcaatccgggtaaaggc

SEQ ID NO: 3667451 - DNA, 25 bp, Homo sapien
tctccactcaatccgggtaaaggcc

SEQ ID NO: 3667452 - DNA, 25 bp, Homo sapien
gtacagggcccgctgagcagcatcc

SEQ ID NO: 3667453 - DNA, 25 bp, Homo sapien
cagacaccagattcccatagttctc

SEQ ID NO: 3667454 - DNA, 25 bp, Homo sapien
aaagttgcccagcagaccaatcctg

SEQ ID NO: 3667455 - DNA, 25 bp, Homo sapien
gttgcccagcagaccaatcctgagt

SEQ ID NO: 3667456 - DNA, 25 bp, Homo sapien
ccaatcctgagtcaaggagaaagcc

SEQ ID NO: 3667457 - DNA, 25 bp, Homo sapien
cagcagaccaatcctgagtcaagga

SEQ ID NO: 3667458 - DNA, 25 bp, Homo sapien
ctgccccttgctccaactgagtaat

SEQ ID NO: 3667459 - DNA, 25 bp, Homo sapien
gtgcctgatggagcctctcgcacct

SEQ ID NO: 3667460 - DNA, 25 bp, Homo sapien
cccttgctccaactgagtaattagt

SEQ ID NO: 3667461 - DNA, 25 bp, Homo sapien
tgatggagcctctcgcacctcagtc

SEQ ID NO: 3667462 - DNA, 25 bp, Homo sapien
ctttgtttcaaaccagtaatcctcg

SEQ ID NO: 3667463 - DNA, 25 bp, Homo sapien
tttgtttcaaaccagtaatcctcga

SEQ ID NO: 3667464 - DNA, 25 bp, Homo sapien
tttcgttcgctctcccagaacagat

SEQ ID NO: 3667465 - DNA, 25 bp, Homo sapien
ttttcgttcgctctcccagaacaga

SEQ ID NO: 3667466 - DNA, 25 bp, Homo sapien
cctcccagtccaggcctttttccat

SEQ ID NO: 3667467 - DNA, 25 bp, Homo sapien
cccagtccaggcctttttccatcat

SEQ ID NO: 3667468 - DNA, 25 bp, Homo sapien
ctgccctcccagtccaggccttttt

SEQ ID NO: 3667469 - DNA, 25 bp, Homo sapien
tgccctcccagtccaggcctttttc

SEQ ID NO: 3667470 - DNA, 25 bp, Homo sapien
gttcataaaggcgatcccacattct

SEQ ID NO: 3667471 - DNA, 25 bp, Homo sapien
acattccttgcacttatagttcttc

SEQ ID NO: 3667472 - DNA, 25 bp, Homo sapien
gcacttatagttcttctctgtggag

SEQ ID NO: 3667473 - DNA, 25 bp, Homo sapien
tctggtggctaataaaggacgaatt

SEQ ID NO: 3667474 - DNA, 25 bp, Homo sapien
ctctgatggttgataaacgttgagt

SEQ ID NO: 3667475 - DNA, 25 bp, Homo sapien
tggttgataaacgttgagtgcttct

SEQ ID NO: 3667476 - DNA, 25 bp, Homo sapien
gataaacgttgagtgcttcttcagg

SEQ ID NO: 3667477 - DNA, 25 bp, Homo sapien
taaacgttgagtgcttcttcaggaa

SEQ ID NO: 3667478 - DNA, 25 bp, Homo sapien
ctttggtgactaataagagttgagc

SEQ ID NO: 3667479 - DNA, 25 bp, Homo sapien
gacactgatacggtttatttccact

SEQ ID NO: 3667480 - DNA, 25 bp, Homo sapien
ttctgatgaccagcaaaggatgagc

SEQ ID NO: 3667481 - DNA, 25 bp, Homo sapien
gagtaagagctgcattctgagcgaa

SEQ ID NO: 3667482 - DNA, 25 bp, Homo sapien
caaagataactgctgttagctgagt

SEQ ID NO: 3667483 - DNA, 25 bp, Homo sapien
cccatcacataaggtctggtgtaga

SEQ ID NO: 3667484 - DNA, 25 bp, Homo sapien
caatgaatatcctcacaagtgatgt

SEQ ID NO: 3667485 - DNA, 25 bp, Homo sapien
taatgtctcctctatgatggtcaga

SEQ ID NO: 3667486 - DNA, 25 bp, Homo sapien
catcatggagttacaaagctgttcc

SEQ ID NO: 3667487 - DNA, 25 bp, Homo sapien
tatgcaactgccctagctgaggtcc

SEQ ID NO: 3667488 - DNA, 25 bp, Homo sapien
caaagtcttcgaaatctgatgcaca

SEQ ID NO: 3667489 - DNA, 25 bp, Homo sapien
tagtgtggccgcttcaaatgacccc

SEQ ID NO: 3667490 - DNA, 25 bp, Homo sapien
gtatcactaacacagcaccagctaa

SEQ ID NO: 3667491 - DNA, 25 bp, Homo sapien
aaaacagaaatgagtatcactaaca

SEQ ID NO: 3667492 - DNA, 25 bp, Homo sapien
taatcaattctgtaagagacctctc

SEQ ID NO: 3667493 - DNA, 25 bp, Homo sapien
cactttgcatctggtattcagctaa

SEQ ID NO: 3667494 - DNA, 25 bp, Homo sapien
cttctactagcttgccaagagcttg

SEQ ID NO: 3667495 - DNA, 25 bp, Homo sapien
caagagcttgtatcatgaatggata

SEQ ID NO: 3667496 - DNA, 25 bp, Homo sapien
gattgccagtcctatgttaaataag

SEQ ID NO: 3667497 - DNA, 25 bp, Homo sapien
cagccgtaaccccatttgatcatga

SEQ ID NO: 3667498 - DNA, 25 bp, Homo sapien
caagtcaaccatgccaaaaaggccc

SEQ ID NO: 3667499 - DNA, 25 bp, Homo sapien
gtcacaggaaggagtacagacaagt

SEQ ID NO: 3667500 - DNA, 25 bp, Homo sapien
tgcaaactcaaaggaacatcttcat

SEQ ID NO: 3667501 - DNA, 25 bp, Homo sapien
catgcaaactcaaaggaacatcttc

SEQ ID NO: 3667502 - DNA, 25 bp, Homo sapien
tactgaccccgaaactgcggagatt

SEQ ID NO: 3667503 - DNA, 25 bp, Homo sapien
ttagctgaagtttgccctgaggtcc

SEQ ID NO: 3667504 - DNA, 25 bp, Homo sapien
ccgatggctgtagtactaagggtcc

SEQ ID NO: 3667505 - DNA, 25 bp, Homo sapien
gcctgaaatcaggttgccagccaag

SEQ ID NO: 3667506 - DNA, 25 bp, Homo sapien
ttactggaagacggtggttctggcc

SEQ ID NO: 3667507 - DNA, 25 bp, Homo sapien
tactggaagacggtggttctggcca

SEQ ID NO: 3667508 - DNA, 25 bp, Homo sapien
cgacggcctgctgcgtaacactgta

SEQ ID NO: 3667509 - DNA, 25 bp, Homo sapien
tacaacaatgccgacggcctgctgc

SEQ ID NO: 3667510 - DNA, 25 bp, Homo sapien
gaagctagctcagctctcagagcgc

SEQ ID NO: 3667511 - DNA, 25 bp, Homo sapien
gcccactcctttaatgtctacaata

SEQ ID NO: 3667512 - DNA, 25 bp, Homo sapien
gagagacaccctatctgtgcggcca

SEQ ID NO: 3667513 - DNA, 25 bp, Homo sapien
caaagggtctatgagtgccaggagt

SEQ ID NO: 3667514 - DNA, 25 bp, Homo sapien
catcaacggatacacacgggagaga

SEQ ID NO: 3667515 - DNA, 25 bp, Homo sapien
tcacctggagtgagacaaagggtct

SEQ ID NO: 3667516 - DNA, 25 bp, Homo sapien
tgttctcagcactggtcggcagtct

SEQ ID NO: 3667517 - DNA, 25 bp, Homo sapien
gactgtcatggaagatatgcccaga

SEQ ID NO: 3667518 - DNA, 25 bp, Homo sapien
tcagttgatggctggatgcgctcag

SEQ ID NO: 3667519 - DNA, 25 bp, Homo sapien
gagaccttgctttggtagagcttgc

SEQ ID NO: 3667520 - DNA, 25 bp, Homo sapien
caagctgtaattgagtcactgtact

SEQ ID NO: 3667521 - DNA, 25 bp, Homo sapien
gttcaaagtcacagcaagctgtaat

SEQ ID NO: 3667522 - DNA, 25 bp, Homo sapien
agtcacagcaagctgtaattgagtc

SEQ ID NO: 3667523 - DNA, 25 bp, Homo sapien
cacagcaagctgtaattgagtcact

SEQ ID NO: 3667524 - DNA, 25 bp, Homo sapien
ggaaactgcttcctcagacctgtga

SEQ ID NO: 3667525 - DNA, 25 bp, Homo sapien
tcctggtcatcacagcatgtagcag

SEQ ID NO: 3667526 - DNA, 25 bp, Homo sapien
gagttgtaacttgaagacctcacag

SEQ ID NO: 3667527 - DNA, 25 bp, Homo sapien
ctggcatgctggtagggaattcctt

SEQ ID NO: 3667528 - DNA, 25 bp, Homo sapien
tctgcacacagttttgatgaagctg

SEQ ID NO: 3667529 - DNA, 25 bp, Homo sapien
cacacagttttgatgaagctggaaa

SEQ ID NO: 3667530 - DNA, 25 bp, Homo sapien
tctctccttgcacctctttctcaga

SEQ ID NO: 3667531 - DNA, 25 bp, Homo sapien
ttctcagactttcttcagggatttt

SEQ ID NO: 3667532 - DNA, 25 bp, Homo sapien
tcttgaacgtggtgcagaagagctg

SEQ ID NO: 3667533 - DNA, 25 bp, Homo sapien
ccatctgcttccgaaggaggcgtga

SEQ ID NO: 3667534 - DNA, 25 bp, Homo sapien
caaacaggttagagtaaccttgtgc

SEQ ID NO: 3667535 - DNA, 25 bp, Homo sapien
ctctgtaacaggcaggatgatgtct

SEQ ID NO: 3667536 - DNA, 25 bp, Homo sapien
ccagtggacacccggactccccgcg

SEQ ID NO: 3667537 - DNA, 25 bp, Homo sapien
taagctttcccaggtatgcgtgacc

SEQ ID NO: 3667538 - DNA, 25 bp, Homo sapien
gtggtccacacagcgcagggttcta

SEQ ID NO: 3667539 - DNA, 25 bp, Homo sapien
taaacgtgcctcagtcagatgctgg

SEQ ID NO: 3667540 - DNA, 25 bp, Homo sapien
tgcctcatagagacagtgtgaccgt

SEQ ID NO: 3667541 - DNA, 25 bp, Homo sapien
gacttggagcccctaggtcatgcaa

SEQ ID NO: 3667542 - DNA, 25 bp, Homo sapien
tagtgactccagtaagtccagtgtg

SEQ ID NO: 3667543 - DNA, 25 bp, Homo sapien
aattacatacagattgcgccgaccg

SEQ ID NO: 3667544 - DNA, 25 bp, Homo sapien
aatgtgagccctgaactaaaccgcg

SEQ ID NO: 3667545 - DNA, 25 bp, Homo sapien
cgccgggtcttcccattaggtctcg

SEQ ID NO: 3667546 - DNA, 25 bp, Homo sapien
tgatgaagtcccaaaggagcaatcc

SEQ ID NO: 3667547 - DNA, 25 bp, Homo sapien
ttaggtctcggccctcgcttgctct

SEQ ID NO: 3667548 - DNA, 25 bp, Homo sapien
agctgatgaagtcccaaaggagcaa

SEQ ID NO: 3667549 - DNA, 25 bp, Homo sapien
tctgcagaccgccagaaagggtttc

SEQ ID NO: 3667550 - DNA, 25 bp, Homo sapien
aagaagccgactcacggatcctggc

SEQ ID NO: 3667551 - DNA, 25 bp, Homo sapien
tgacactttagcaagatgggagact

SEQ ID NO: 3667552 - DNA, 25 bp, Homo sapien
tagtgggccctctttgcactgatag

SEQ ID NO: 3667553 - DNA, 25 bp, Homo sapien
catctagtgacttggaagacatggg

SEQ ID NO: 3667554 - DNA, 25 bp, Homo sapien
tccatcagagctctatacaacagac

SEQ ID NO: 3667555 - DNA, 25 bp, Homo sapien
gctgacctcactgacacatctagtg

SEQ ID NO: 3667556 - DNA, 25 bp, Homo sapien
agatcacttggtggtattcagctgg

SEQ ID NO: 3667557 - DNA, 25 bp, Homo sapien
acgcagcctcagagggtcacttttc

SEQ ID NO: 3667558 - DNA, 25 bp, Homo sapien
actcgtacccttcaacggtgtcctg

SEQ ID NO: 3667559 - DNA, 25 bp, Homo sapien
tacccttcaacggtgtcctgtggcc

SEQ ID NO: 3667560 - DNA, 25 bp, Homo sapien
cagagggtcacttttccactcgtac

SEQ ID NO: 3667561 - DNA, 25 bp, Homo sapien
ccctccaggcgggcgccgccccgca

SEQ ID NO: 3667562 - DNA, 25 bp, Homo sapien
caccctccaggcgggcgccgccccg

SEQ ID NO: 3667563 - DNA, 25 bp, Homo sapien
cctccaggcgggcgccgccccgcat

SEQ ID NO: 3667564 - DNA, 25 bp, Homo sapien
atctcgcgtgcacacgcggggcgca

SEQ ID NO: 3667565 - DNA, 25 bp, Homo sapien
catctcgcgtgcacacgcggggcgc

SEQ ID NO: 3667566 - DNA, 25 bp, Homo sapien
acacgcggggcgcagaacgaggcag

SEQ ID NO: 3667567 - DNA, 25 bp, Homo sapien
cggggcgcagaacgaggcaggtgca

SEQ ID NO: 3667568 - DNA, 25 bp, Homo sapien
tcaggcgactgctatagcccaggtt

SEQ ID NO: 3667569 - DNA, 25 bp, Homo sapien
tagttcacccgtgaggacgtgcttc

SEQ ID NO: 3667570 - DNA, 25 bp, Homo sapien
gatgggctgatcgtggtcttcaacc

SEQ ID NO: 3667571 - DNA, 25 bp, Homo sapien
tgaggcattggctgctcaggcgact

SEQ ID NO: 3667572 - DNA, 25 bp, Homo sapien
catgaagagtctctggaacgccacc

SEQ ID NO: 3667573 - DNA, 25 bp, Homo sapien
agggatcctcgagagcaagggccat

SEQ ID NO: 3667574 - DNA, 25 bp, Homo sapien
ggccagcagcctttgcggcagtgtt

SEQ ID NO: 3667575 - DNA, 25 bp, Homo sapien
cggttagaagcgctccgggagaaat

SEQ ID NO: 3667576 - DNA, 25 bp, Homo sapien
tatacttgttacaccccctgaagct

SEQ ID NO: 3667577 - DNA, 25 bp, Homo sapien
gctaggtgcatctctgtttaggaat

SEQ ID NO: 3667578 - DNA, 25 bp, Homo sapien
catttatacttgttacaccccctga

SEQ ID NO: 3667579 - DNA, 25 bp, Homo sapien
tacagcaagttgctaggtgcatctc

SEQ ID NO: 3667580 - DNA, 25 bp, Homo sapien
agcccagtgtcacctaccaccagca

SEQ ID NO: 3667581 - DNA, 25 bp, Homo sapien
accagcacactgacgacttccagac

SEQ ID NO: 3667582 - DNA, 25 bp, Homo sapien
caccagcacactgacgacttccaga

SEQ ID NO: 3667583 - DNA, 25 bp, Homo sapien
gactgtggtctttgagtaacccata

SEQ ID NO: 3667584 - DNA, 25 bp, Homo sapien
tcagcttcagtgagtaggtctcgag

SEQ ID NO: 3667585 - DNA, 25 bp, Homo sapien
ccatatgtcttttcgtagactgtgg

SEQ ID NO: 3667586 - DNA, 25 bp, Homo sapien
tcataatcccagcatcatgatcaca

SEQ ID NO: 3667587 - DNA, 25 bp, Homo sapien
gctgctatcggaattgaagacttgg

SEQ ID NO: 3667588 - DNA, 25 bp, Homo sapien
tccagcgggagaccagatttagatc

SEQ ID NO: 3667589 - DNA, 25 bp, Homo sapien
gatttagatcaaacgcacaggatcc

SEQ ID NO: 3667590 - DNA, 25 bp, Homo sapien
taaagccttcccaaacggtgctgct

SEQ ID NO: 3667591 - DNA, 25 bp, Homo sapien
ggccggttgagcgactgtgttatca

SEQ ID NO: 3667592 - DNA, 25 bp, Homo sapien
gcgactgtgttatcagtggagccgc

SEQ ID NO: 3667593 - DNA, 25 bp, Homo sapien
cgctctctttattgtacagaaacag

SEQ ID NO: 3667594 - DNA, 25 bp, Homo sapien
agtggagccgctctctttattgtac

SEQ ID NO: 3667595 - DNA, 25 bp, Homo sapien
agcaccacagggtgtagtcaggcaa

SEQ ID NO: 3667596 - DNA, 25 bp, Homo sapien
ccacagggtgtagtcaggcaaatcc

SEQ ID NO: 3667597 - DNA, 25 bp, Homo sapien
tctgtatcgaaccttggcgtctcat

SEQ ID NO: 3667598 - DNA, 25 bp, Homo sapien
ctgtgggaggacttctatgctgtgc

SEQ ID NO: 3667599 - DNA, 25 bp, Homo sapien
tccctgggagtatctgcacttctct

SEQ ID NO: 3667600 - DNA, 25 bp, Homo sapien
ctcatcttcgtgtacatcctctgtg

SEQ ID NO: 3667601 - DNA, 25 bp, Homo sapien
aaactctcgaacattgtgcaggacc

SEQ ID NO: 3667602 - DNA, 25 bp, Homo sapien
ttccatttgagaaactctcgaacat

SEQ ID NO: 3667603 - DNA, 25 bp, Homo sapien
ggacccacgtctgcggttctgtagc

SEQ ID NO: 3667604 - DNA, 25 bp, Homo sapien
ttgtgcaggacccacgtctgcggtt

SEQ ID NO: 3667605 - DNA, 25 bp, Homo sapien
tgctgattatgtgacgggatgcctg

SEQ ID NO: 3667606 - DNA, 25 bp, Homo sapien
caagggagcccaacacaatgagtgg

SEQ ID NO: 3667607 - DNA, 25 bp, Homo sapien
gaagtatttcggtccctgccaccta

SEQ ID NO: 3667608 - DNA, 25 bp, Homo sapien
tcagtgctgagctcgcaagggagcc

SEQ ID NO: 3667609 - DNA, 25 bp, Homo sapien
gggtgctcttgtaccactagccttg

SEQ ID NO: 3667610 - DNA, 25 bp, Homo sapien
cactagccttgagctgtgcccatga

SEQ ID NO: 3667611 - DNA, 25 bp, Homo sapien
tcttgtaccactagccttgagctgt

SEQ ID NO: 3667612 - DNA, 25 bp, Homo sapien
taccactagccttgagctgtgccca

SEQ ID NO: 3667613 - DNA, 25 bp, Homo sapien
gcaaagagggactttctaccaaggc

SEQ ID NO: 3667614 - DNA, 25 bp, Homo sapien
catcttctacaagagtcatgcggtg

SEQ ID NO: 3667615 - DNA, 25 bp, Homo sapien
taccaaggcacctacaaacatcaca

SEQ ID NO: 3667616 - DNA, 25 bp, Homo sapien
gaagcattataaaaggatgcctaaa

SEQ ID NO: 3667617 - DNA, 25 bp, Homo sapien
aacatctggatctcaacctcagtgt

SEQ ID NO: 3667618 - DNA, 25 bp, Homo sapien
ctcaaggagatggaaatgtcgggac

SEQ ID NO: 3667619 - DNA, 25 bp, Homo sapien
gcaatagcagatgggtgccggccac

SEQ ID NO: 3667620 - DNA, 25 bp, Homo sapien
agaaccatactcacctcctctaggg

SEQ ID NO: 3667621 - DNA, 25 bp, Homo sapien
tcggaggcccgccgttcacagagaa

SEQ ID NO: 3667622 - DNA, 25 bp, Homo sapien
gaaacgctcggaggcccgccgttca

SEQ ID NO: 3667623 - DNA, 25 bp, Homo sapien
gctccacaggaaacgctcggaggcc

SEQ ID NO: 3667624 - DNA, 25 bp, Homo sapien
gaggcccgccgttcacagagaaggc

SEQ ID NO: 3667625 - DNA, 25 bp, Homo sapien
gatggccatggttcagatgtatgac

SEQ ID NO: 3667626 - DNA, 25 bp, Homo sapien
cagatgtatgaccacttggcccagt

SEQ ID NO: 3667627 - DNA, 25 bp, Homo sapien
tggcatgggctgtgcatgggcagag

SEQ ID NO: 3667628 - DNA, 25 bp, Homo sapien
ttaaggctaggatgatgagcagacc

SEQ ID NO: 3667629 - DNA, 25 bp, Homo sapien
agctctaagcgccctacagcttcca

SEQ ID NO: 3667630 - DNA, 25 bp, Homo sapien
gctctaagcgccctacagcttccat

SEQ ID NO: 3667631 - DNA, 25 bp, Homo sapien
gggtctgtgagtcgcgcgctgggtc

SEQ ID NO: 3667632 - DNA, 25 bp, Homo sapien
gagtcgcgcgctgggtccgggtcac

SEQ ID NO: 3667633 - DNA, 25 bp, Homo sapien
gagccggggtctgtgagtcgcgcgc

SEQ ID NO: 3667634 - DNA, 25 bp, Homo sapien
gtgagtcgcgcgctgggtccgggtc

SEQ ID NO: 3667635 - DNA, 25 bp, Homo sapien
ctgggggagcgtgcaggctggtgct

SEQ ID NO: 3667636 - DNA, 25 bp, Homo sapien
tacccagagagtacatgcttatgtc

SEQ ID NO: 3667637 - DNA, 25 bp, Homo sapien
ttacccagagagtacatgcttatgt

SEQ ID NO: 3667638 - DNA, 25 bp, Homo sapien
gtccgggggtggaatgctttggcca

SEQ ID NO: 3667639 - DNA, 25 bp, Homo sapien
tgggggcgggatgattcctttggac

SEQ ID NO: 3667640 - DNA, 25 bp, Homo sapien
gggtggaatgctttggccagaggag

SEQ ID NO: 3667641 - DNA, 25 bp, Homo sapien
tggctccacgcttgtctgctggggg

SEQ ID NO: 3667642 - DNA, 25 bp, Homo sapien
ggagccaagggtcagaatccaccat

SEQ ID NO: 3667643 - DNA, 25 bp, Homo sapien
gccaagggtcagaatccaccatacc

SEQ ID NO: 3667644 - DNA, 25 bp, Homo sapien
caagggtcagaatccaccataccca

SEQ ID NO: 3667645 - DNA, 25 bp, Homo sapien
gggtcagaatccaccatacccacat

SEQ ID NO: 3667646 - DNA, 25 bp, Homo sapien
ccctccgctgacaaccggaaattct

SEQ ID NO: 3667647 - DNA, 25 bp, Homo sapien
tgacaaccggaaattcttcacttcc

SEQ ID NO: 3667648 - DNA, 25 bp, Homo sapien
ccgctgacaaccggaaattcttcac

SEQ ID NO: 3667649 - DNA, 25 bp, Homo sapien
ctccgctgacaaccggaaattcttc

SEQ ID NO: 3667650 - DNA, 25 bp, Homo sapien
ttggtgtgcttgccacagacttggt

SEQ ID NO: 3667651 - DNA, 25 bp, Homo sapien
cttggtgtgcttgccacagacttgg

SEQ ID NO: 3667652 - DNA, 25 bp, Homo sapien
tggtgtgcttgccacagacttggtg

SEQ ID NO: 3667653 - DNA, 25 bp, Homo sapien
cttcaccatttgccatgcaggtgag

SEQ ID NO: 3667654 - DNA, 25 bp, Homo sapien
accatttgccatgcaggtgagcctt

SEQ ID NO: 3667655 - DNA, 25 bp, Homo sapien
ccatttgccatgcaggtgagccttg

SEQ ID NO: 3667656 - DNA, 25 bp, Homo sapien
tcaccatttgccatgcaggtgagcc

SEQ ID NO: 3667657 - DNA, 25 bp, Homo sapien
gaatagaccagaggaactccatggg

SEQ ID NO: 3667658 - DNA, 25 bp, Homo sapien
tcaggccggtgcatctggttctcag

SEQ ID NO: 3667659 - DNA, 25 bp, Homo sapien
taaataattacgagagaaccacact

SEQ ID NO: 3667660 - DNA, 25 bp, Homo sapien
tgcttctgacgaaagctcaggccgg

SEQ ID NO: 3667661 - DNA, 25 bp, Homo sapien
tgttttcagctccaggtagtaaaaa

SEQ ID NO: 3667662 - DNA, 25 bp, Homo sapien
tcttctcccttgaggcgatagaggc

SEQ ID NO: 3667663 - DNA, 25 bp, Homo sapien
tagaggctcgtcacatgtcgatctg

SEQ ID NO: 3667664 - DNA, 25 bp, Homo sapien
aacgggacagattgcgttcctgcca

SEQ ID NO: 3667665 - DNA, 25 bp, Homo sapien
ttctggtgacacgtttgaaaggaca

SEQ ID NO: 3667666 - DNA, 25 bp, Homo sapien
tggccagcatcgggtcatgacagat

SEQ ID NO: 3667667 - DNA, 25 bp, Homo sapien
gccagcatcgggtcatgacagatgg

SEQ ID NO: 3667668 - DNA, 25 bp, Homo sapien
tggagcactcatcccatggggcttg

SEQ ID NO: 3667669 - DNA, 25 bp, Homo sapien
ggatggagcactcatcccatggggc

SEQ ID NO: 3667670 - DNA, 25 bp, Homo sapien
catgtctgtgttatctaccaggcca

SEQ ID NO: 3667671 - DNA, 25 bp, Homo sapien
tgcatgtctgtgttatctaccaggc

SEQ ID NO: 3667672 - DNA, 25 bp, Homo sapien
tgtctgtgttatctaccaggccaga

SEQ ID NO: 3667673 - DNA, 25 bp, Homo sapien
cttgcatgtctgtgttatctaccag

SEQ ID NO: 3667674 - DNA, 25 bp, Homo sapien
tacaggattgacctcatgggctaac

SEQ ID NO: 3667675 - DNA, 25 bp, Homo sapien
ggagaagcagatccatggcaccgaa

SEQ ID NO: 3667676 - DNA, 25 bp, Homo sapien
tccaagtcataaaggtagagccagt

SEQ ID NO: 3667677 - DNA, 25 bp, Homo sapien
gaaccctggtgctggcctactttta

SEQ ID NO: 3667678 - DNA, 25 bp, Homo sapien
ccacaatgcgtggaccttgtctgca

SEQ ID NO: 3667679 - DNA, 25 bp, Homo sapien
aaccacaatgcgtggaccttgtctg

SEQ ID NO: 3667680 - DNA, 25 bp, Homo sapien
ccaaccacaatgcgtggaccttgtc

SEQ ID NO: 3667681 - DNA, 25 bp, Homo sapien
caaccacaatgcgtggaccttgtct

SEQ ID NO: 3667682 - DNA, 25 bp, Homo sapien
caaagtctcagctgcagtaaacagc

SEQ ID NO: 3667683 - DNA, 25 bp, Homo sapien
ggacaaagtctcagctgcagtaaac

SEQ ID NO: 3667684 - DNA, 25 bp, Homo sapien
gggacaaagtctcagctgcagtaaa

SEQ ID NO: 3667685 - DNA, 25 bp, Homo sapien
gacaaagtctcagctgcagtaaaca

SEQ ID NO: 3667686 - DNA, 25 bp, Homo sapien
ctcagaggacatgtgcggaatgcac

SEQ ID NO: 3667687 - DNA, 25 bp, Homo sapien
tccactcagaggacatgtgcggaat

SEQ ID NO: 3667688 - DNA, 25 bp, Homo sapien
caggacacagggcaagtcggtgtgg

SEQ ID NO: 3667689 - DNA, 25 bp, Homo sapien
agagtccactcagaggacatgtgcg

SEQ ID NO: 3667690 - DNA, 25 bp, Homo sapien
actgaggtctggaggataagcgcat

SEQ ID NO: 3667691 - DNA, 25 bp, Homo sapien
acactatgcagacgcctagagcagg

SEQ ID NO: 3667692 - DNA, 25 bp, Homo sapien
gctcagcctcatgagaggttgcagc

SEQ ID NO: 3667693 - DNA, 25 bp, Homo sapien
tgtggaccaggtaaagatctagtca

SEQ ID NO: 3667694 - DNA, 25 bp, Homo sapien
ctgacgcctccccccacagctccat

SEQ ID NO: 3667695 - DNA, 25 bp, Homo sapien
tctgacgcctccccccacagctcca

SEQ ID NO: 3667696 - DNA, 25 bp, Homo sapien
ctctgacgcctccccccacagctcc

SEQ ID NO: 3667697 - DNA, 25 bp, Homo sapien
tctctgcctcctgcgcagttctcca

SEQ ID NO: 3667698 - DNA, 25 bp, Homo sapien
atgccagggagccagtactctcctt

SEQ ID NO: 3667699 - DNA, 25 bp, Homo sapien
cagggagccagtactctccttcaag

SEQ ID NO: 3667700 - DNA, 25 bp, Homo sapien
ggagccagtactctccttcaaggcc

SEQ ID NO: 3667701 - DNA, 25 bp, Homo sapien
catgccatccggttctcaactgaaa

SEQ ID NO: 3667702 - DNA, 25 bp, Homo sapien
ggcactctttccctcggttcactgt

SEQ ID NO: 3667703 - DNA, 25 bp, Homo sapien
gcactgtggctctctaacactggca

SEQ ID NO: 3667704 - DNA, 25 bp, Homo sapien
tgtttcccaccacgcactgtcaatt

SEQ ID NO: 3667705 - DNA, 25 bp, Homo sapien
aaccagagaagtctcaggcttcctt

SEQ ID NO: 3667706 - DNA, 25 bp, Homo sapien
taagcctggagttaagtattctgaa

SEQ ID NO: 3667707 - DNA, 25 bp, Homo sapien
catctatattcttgttgagaataca

SEQ ID NO: 3667708 - DNA, 25 bp, Homo sapien
gccccagcgtctacatagttttgga

SEQ ID NO: 3667709 - DNA, 25 bp, Homo sapien
cgaaggggtgacagcaggaggtggc

SEQ ID NO: 3667710 - DNA, 25 bp, Homo sapien
accgaaggggtgacagcaggaggtg

SEQ ID NO: 3667711 - DNA, 25 bp, Homo sapien
ctggaaccgaaggggtgacagcagg

SEQ ID NO: 3667712 - DNA, 25 bp, Homo sapien
ggaaccgaaggggtgacagcaggag

SEQ ID NO: 3667713 - DNA, 25 bp, Homo sapien
aatctccaagccagggcacttcagc

SEQ ID NO: 3667714 - DNA, 25 bp, Homo sapien
acaaatctccaagccagggcacttc

SEQ ID NO: 3667715 - DNA, 25 bp, Homo sapien
ccacaaatctccaagccagggcact

SEQ ID NO: 3667716 - DNA, 25 bp, Homo sapien
aaatctccaagccagggcacttcag

SEQ ID NO: 3667717 - DNA, 25 bp, Homo sapien
ctggcctctcgtctctccgttcctg

SEQ ID NO: 3667718 - DNA, 25 bp, Homo sapien
cctggcctctcgtctctccgttcct

SEQ ID NO: 3667719 - DNA, 25 bp, Homo sapien
tgcaccaggcgatggatgatatttt

SEQ ID NO: 3667720 - DNA, 25 bp, Homo sapien
tggcctctcgtctctccgttcctgc

SEQ ID NO: 3667721 - DNA, 25 bp, Homo sapien
tcagcgttctgaagccagtaccagt

SEQ ID NO: 3667722 - DNA, 25 bp, Homo sapien
aatcccactcagtggtgatcccact

SEQ ID NO: 3667723 - DNA, 25 bp, Homo sapien
cagtaccagtggtggaccaatccca

SEQ ID NO: 3667724 - DNA, 25 bp, Homo sapien
ttcctgaaggaaagctgcagtgtgt

SEQ ID NO: 3667725 - DNA, 25 bp, Homo sapien
ccatccttgcctttcgtgttttcct

SEQ ID NO: 3667726 - DNA, 25 bp, Homo sapien
ttctgagaatgcctgcaactctgtc

SEQ ID NO: 3667727 - DNA, 25 bp, Homo sapien
tctccgtggagactggctttccttc

SEQ ID NO: 3667728 - DNA, 25 bp, Homo sapien
caactctgtctcccacaggaaatgt

SEQ ID NO: 3667729 - DNA, 25 bp, Homo sapien
ttgggctccaggatccctgcatgat

SEQ ID NO: 3667730 - DNA, 25 bp, Homo sapien
aggctgaggagcagctcttgcctct

SEQ ID NO: 3667731 - DNA, 25 bp, Homo sapien
ctctttccagggctcttgggctcca

SEQ ID NO: 3667732 - DNA, 25 bp, Homo sapien
ctgaggagcagctcttgcctctttc

SEQ ID NO: 3667733 - DNA, 25 bp, Homo sapien
ggttttaggtatgccaggacacagg

SEQ ID NO: 3667734 - DNA, 25 bp, Homo sapien
agggatgagatgcttccatgactgc

SEQ ID NO: 3667735 - DNA, 25 bp, Homo sapien
gacacaggatgaagacccatatata

SEQ ID NO: 3667736 - DNA, 25 bp, Homo sapien
gttgatggacttaaccttctgcccg

SEQ ID NO: 3667737 - DNA, 25 bp, Homo sapien
cctgagctctgttagtggcaaccat

SEQ ID NO: 3667738 - DNA, 25 bp, Homo sapien
tggatgggagcatgcccctgtttgc

SEQ ID NO: 3667739 - DNA, 25 bp, Homo sapien
tggccctgagctctgttagtggcaa

SEQ ID NO: 3667740 - DNA, 25 bp, Homo sapien
gtttgccctgttcacttcattttca

SEQ ID NO: 3667741 - DNA, 25 bp, Homo sapien
ccattcagggtgagtttggttacag

SEQ ID NO: 3667742 - DNA, 25 bp, Homo sapien
catggagcttaggaagtgcttggtc

SEQ ID NO: 3667743 - DNA, 25 bp, Homo sapien
ttacagcttgagtaggtatagctcc

SEQ ID NO: 3667744 - DNA, 25 bp, Homo sapien
agtgagcaggccacgcgtgcagtac

SEQ ID NO: 3667745 - DNA, 25 bp, Homo sapien
agaggtctgctccaagggccttgac

SEQ ID NO: 3667746 - DNA, 25 bp, Homo sapien
tctcctcagaggtctgctccaaggg

SEQ ID NO: 3667747 - DNA, 25 bp, Homo sapien
aagggccttgacctggcggcccgct

SEQ ID NO: 3667748 - DNA, 25 bp, Homo sapien
agggccttgacctggcggcccgctt

SEQ ID NO: 3667749 - DNA, 25 bp, Homo sapien
gaaaggcttggatttccagcataca

SEQ ID NO: 3667750 - DNA, 25 bp, Homo sapien
catttgctcccagaaagccggtgca

SEQ ID NO: 3667751 - DNA, 25 bp, Homo sapien
cataagtcacgcttgttcggtgtcc

SEQ ID NO: 3667752 - DNA, 25 bp, Homo sapien
tccagggataccactgtatttccag

SEQ ID NO: 3667753 - DNA, 25 bp, Homo sapien
tcgaaagcgaccctggcctggatcc

SEQ ID NO: 3667754 - DNA, 25 bp, Homo sapien
tggcctccttctgaagtcccaacat

SEQ ID NO: 3667755 - DNA, 25 bp, Homo sapien
ccaacatgatgtcctgccaagtcac

SEQ ID NO: 3667756 - DNA, 25 bp, Homo sapien
cttcgaaagcgaccctggcctggat

SEQ ID NO: 3667757 - DNA, 25 bp, Homo sapien
ggtactggaaactgctaccattgcc

SEQ ID NO: 3667758 - DNA, 25 bp, Homo sapien
tactggaaactgctaccattgccca

SEQ ID NO: 3667759 - DNA, 25 bp, Homo sapien
ctaccattgcccagactagcagaat

SEQ ID NO: 3667760 - DNA, 25 bp, Homo sapien
cccagactagcagaatagatttcac

SEQ ID NO: 3667761 - DNA, 25 bp, Homo sapien
ctgagtaaaggtgtctgggtatcgg

SEQ ID NO: 3667762 - DNA, 25 bp, Homo sapien
ggtgtctgggtatcggatgggactg

SEQ ID NO: 3667763 - DNA, 25 bp, Homo sapien
gtaaaggtgtctgggtatcggatgg

SEQ ID NO: 3667764 - DNA, 25 bp, Homo sapien
tgggtatcggatgggactggtgggc

SEQ ID NO: 3667765 - DNA, 25 bp, Homo sapien
gtttctccacaaactctctcctctt

SEQ ID NO: 3667766 - DNA, 25 bp, Homo sapien
ctttccagattgagcaggatggtgg

SEQ ID NO: 3667767 - DNA, 25 bp, Homo sapien
tctgctctccctttccagattgagc

SEQ ID NO: 3667768 - DNA, 25 bp, Homo sapien
tgggggggcatttctgggtcctgtc

SEQ ID NO: 3667769 - DNA, 25 bp, Homo sapien
cagaaagtgggaagcagcctgaact

SEQ ID NO: 3667770 - DNA, 25 bp, Homo sapien
tcagaaagtgggaagcagcctgaac

SEQ ID NO: 3667771 - DNA, 25 bp, Homo sapien
aaagtgggaagcagcctgaactggg

SEQ ID NO: 3667772 - DNA, 25 bp, Homo sapien
agaaagtgggaagcagcctgaactg

SEQ ID NO: 3667773 - DNA, 25 bp, Homo sapien
acttcaggggccttatggctgagga

SEQ ID NO: 3667774 - DNA, 25 bp, Homo sapien
gagtatgtgaactggactccattct

SEQ ID NO: 3667775 - DNA, 25 bp, Homo sapien
tatggctgaggagctgttcaacatc

SEQ ID NO: 3667776 - DNA, 25 bp, Homo sapien
tctgtgacaagcagggtgacccagg

SEQ ID NO: 3667777 - DNA, 25 bp, Homo sapien
gttggttcccagtaagacttctctc

SEQ ID NO: 3667778 - DNA, 25 bp, Homo sapien
tcatcccacagagtacagcttatgg

SEQ ID NO: 3667779 - DNA, 25 bp, Homo sapien
gttatggattgccagggtcatccca

SEQ ID NO: 3667780 - DNA, 25 bp, Homo sapien
ccagtatgtgccagttccattggtg

SEQ ID NO: 3667781 - DNA, 25 bp, Homo sapien
gaggacaggctttggcatgcaacac

SEQ ID NO: 3667782 - DNA, 25 bp, Homo sapien
gataacgatggtcagggctcaagct

SEQ ID NO: 3667783 - DNA, 25 bp, Homo sapien
tccatgtgaggactagcagggtgct

SEQ ID NO: 3667784 - DNA, 25 bp, Homo sapien
ccataaatcagtgcccgaagggaca

SEQ ID NO: 3667785 - DNA, 25 bp, Homo sapien
cagtgggagagaaacccagctcagg

SEQ ID NO: 3667786 - DNA, 25 bp, Homo sapien
ccagcccagtgggagagaaacccag

SEQ ID NO: 3667787 - DNA, 25 bp, Homo sapien
cccagtgggagagaaacccagctca

SEQ ID NO: 3667788 - DNA, 25 bp, Homo sapien
tcaggaggagggtggtctgatacag

SEQ ID NO: 3667789 - DNA, 25 bp, Homo sapien
ggtcactgacgctaagggcctcttt

SEQ ID NO: 3667790 - DNA, 25 bp, Homo sapien
tgtgcaatgaatgagccccaagtca

SEQ ID NO: 3667791 - DNA, 25 bp, Homo sapien
tcaagggtcctgtctccgagaatgc

SEQ ID NO: 3667792 - DNA, 25 bp, Homo sapien
tcaatagaggacactggagggatgc

SEQ ID NO: 3667793 - DNA, 25 bp, Homo sapien
ccacatctgagaacaagctagggaa

SEQ ID NO: 3667794 - DNA, 25 bp, Homo sapien
ggaaggaaaccctgaacagactgat

SEQ ID NO: 3667795 - DNA, 25 bp, Homo sapien
tgcatttcatgtgcaagtagaagct

SEQ ID NO: 3667796 - DNA, 25 bp, Homo sapien
ctatgcatttcatgtgcaagtagaa

SEQ ID NO: 3667797 - DNA, 25 bp, Homo sapien
atgtcacttgtgttgatggttcttt

SEQ ID NO: 3667798 - DNA, 25 bp, Homo sapien
tcctgctatgacatgtcacttgtgt

SEQ ID NO: 3667799 - DNA, 25 bp, Homo sapien
agctcctgctatgacatgtcacttg

SEQ ID NO: 3667800 - DNA, 25 bp, Homo sapien
catgtcacttgtgttgatggttctt

SEQ ID NO: 3667801 - DNA, 25 bp, Homo sapien
cgaatgcgtctcatgacagagaggc

SEQ ID NO: 3667802 - DNA, 25 bp, Homo sapien
ccaaggcctggacgtcttcctggac

SEQ ID NO: 3667803 - DNA, 25 bp, Homo sapien
caggatggaacaagcggccgatgct

SEQ ID NO: 3667804 - DNA, 25 bp, Homo sapien
tgggcccaggactcttcgaatgcgt

SEQ ID NO: 3667805 - DNA, 25 bp, Homo sapien
atgatgagcaccattcctgtggagg

SEQ ID NO: 3667806 - DNA, 25 bp, Homo sapien
cttgtcatggctaatgatgagcacc

SEQ ID NO: 3667807 - DNA, 25 bp, Homo sapien
ggcattttgaacattgaagcttgtc

SEQ ID NO: 3667808 - DNA, 25 bp, Homo sapien
tggaggaggccaccattctccgtct

SEQ ID NO: 3667809 - DNA, 25 bp, Homo sapien
ttctgatgaaaggagcgattgggct

SEQ ID NO: 3667810 - DNA, 25 bp, Homo sapien
tagtggtcagtgtaagcacaactgt

SEQ ID NO: 3667811 - DNA, 25 bp, Homo sapien
ccaaatggctgtctgatcctttaat

SEQ ID NO: 3667812 - DNA, 25 bp, Homo sapien
aattgtagggtaaagtaatttgctg

SEQ ID NO: 3667813 - DNA, 25 bp, Homo sapien
agtctgaccccatcagtgagaggac

SEQ ID NO: 3667814 - DNA, 25 bp, Homo sapien
gaccccatcagtgagaggacacagc

SEQ ID NO: 3667815 - DNA, 25 bp, Homo sapien
ttcaggatgggaggtccaaggcagc

SEQ ID NO: 3667816 - DNA, 25 bp, Homo sapien
ttcacggccccggtatagtctgacc

SEQ ID NO: 3667817 - DNA, 25 bp, Homo sapien
catggagcctcgtgtagaataagca

SEQ ID NO: 3667818 - DNA, 25 bp, Homo sapien
catgtgtagcgtgtgagctgtgcac

SEQ ID NO: 3667819 - DNA, 25 bp, Homo sapien
agcactagtgtgcacctgttgctga

SEQ ID NO: 3667820 - DNA, 25 bp, Homo sapien
gctgaaagcctatttcaattgagtt

SEQ ID NO: 3667821 - DNA, 25 bp, Homo sapien
tcagataccaatgtcttcatgcacc

SEQ ID NO: 3667822 - DNA, 25 bp, Homo sapien
cacctgaaatgacttgaagagaatg

SEQ ID NO: 3667823 - DNA, 25 bp, Homo sapien
catgcacctgaaatgacttgaagag

SEQ ID NO: 3667824 - DNA, 25 bp, Homo sapien
taccaatgtcttcatgcacctgaaa

SEQ ID NO: 3667825 - DNA, 25 bp, Homo sapien
gaagcaccacactgcacagggacac

SEQ ID NO: 3667826 - DNA, 25 bp, Homo sapien
aactgcatcatagagacttcatcgt

SEQ ID NO: 3667827 - DNA, 25 bp, Homo sapien
tatctgtgtccaagggatccaaggg

SEQ ID NO: 3667828 - DNA, 25 bp, Homo sapien
ttcatcgttagggtccacaaaccag

SEQ ID NO: 3667829 - DNA, 25 bp, Homo sapien
tagctcagaaaggatccacgtaggg

SEQ ID NO: 3667830 - DNA, 25 bp, Homo sapien
tgatgacatttggacatcattctta

SEQ ID NO: 3667831 - DNA, 25 bp, Homo sapien
gagccaagcaatggatactgatgac

SEQ ID NO: 3667832 - DNA, 25 bp, Homo sapien
ccatagtcagcagggaaattcacca

SEQ ID NO: 3667833 - DNA, 25 bp, Homo sapien
ggctgggaacatcgggaagaatcac

SEQ ID NO: 3667834 - DNA, 25 bp, Homo sapien
ctcatgcaagatggggccgcacagc

SEQ ID NO: 3667835 - DNA, 25 bp, Homo sapien
tgagtggaggcagctcatgcaagat

SEQ ID NO: 3667836 - DNA, 25 bp, Homo sapien
cacagcagcggcatccaaaatgtga

SEQ ID NO: 3667837 - DNA, 25 bp, Homo sapien
gggataagctgtagcccaaggcctg

SEQ ID NO: 3667838 - DNA, 25 bp, Homo sapien
gagcccactgaaaaaggaccactgg

SEQ ID NO: 3667839 - DNA, 25 bp, Homo sapien
cctgggataagctgtagcccaaggc

SEQ ID NO: 3667840 - DNA, 25 bp, Homo sapien
aactaggaacagagccatgaagagt

SEQ ID NO: 3667841 - DNA, 25 bp, Homo sapien
ccttgcattgtaccaatgcttggaa

SEQ ID NO: 3667842 - DNA, 25 bp, Homo sapien
tgtggtcttgagactcaagaccttg

SEQ ID NO: 3667843 - DNA, 25 bp, Homo sapien
tgcttggaacaatggtaatatttct

SEQ ID NO: 3667844 - DNA, 25 bp, Homo sapien
tgagactcaagaccttgcattgtac

SEQ ID NO: 3667845 - DNA, 25 bp, Homo sapien
tgcaatctctcctaagaatttcaga

SEQ ID NO: 3667846 - DNA, 25 bp, Homo sapien
cagatagcagaaggcactgtaattc

SEQ ID NO: 3667847 - DNA, 25 bp, Homo sapien
gaaataaatcaccaatccccctatg

SEQ ID NO: 3667848 - DNA, 25 bp, Homo sapien
ccaatccccctatgaaatgacaatt

SEQ ID NO: 3667849 - DNA, 25 bp, Homo sapien
cttggggaatcaggcgttttgccat

SEQ ID NO: 3667850 - DNA, 25 bp, Homo sapien
gcttggggaatcaggcgttttgcca

SEQ ID NO: 3667851 - DNA, 25 bp, Homo sapien
cctgcgcagtgtggaggtgtctgct

SEQ ID NO: 3667852 - DNA, 25 bp, Homo sapien
ctgcaaatggggctcactcggtggc

SEQ ID NO: 3667853 - DNA, 25 bp, Homo sapien
cactcggtggcgtggttgctctgcc

SEQ ID NO: 3667854 - DNA, 25 bp, Homo sapien
gttgctctgccctgcgcagtgtgga

SEQ ID NO: 3667855 - DNA, 25 bp, Homo sapien
gtgcttggtgtacgagagaaactca

SEQ ID NO: 3667856 - DNA, 25 bp, Homo sapien
caataaatgatccaacgtgcacaat

SEQ ID NO: 3667857 - DNA, 25 bp, Homo sapien
catgggatccaaccagtgcttggtg

SEQ ID NO: 3667858 - DNA, 25 bp, Homo sapien
tctgtcaccaacaagcatgggatcc

SEQ ID NO: 3667859 - DNA, 25 bp, Homo sapien
gaccttcggaaagtgactgtggctc

SEQ ID NO: 3667860 - DNA, 25 bp, Homo sapien
cgtcctttggtgcttgtctgaaaca

SEQ ID NO: 3667861 - DNA, 25 bp, Homo sapien
gtcaagcagaactatgggacgtcct

SEQ ID NO: 3667862 - DNA, 25 bp, Homo sapien
ttgtgcagcagtaaccgacctgccc

SEQ ID NO: 3667863 - DNA, 25 bp, Homo sapien
catagctggattctatcttgcgtca

SEQ ID NO: 3667864 - DNA, 25 bp, Homo sapien
ggcactttgataatcaatgtctcag

SEQ ID NO: 3667865 - DNA, 25 bp, Homo sapien
taagtggtgattaagcatagctgga

SEQ ID NO: 3667866 - DNA, 25 bp, Homo sapien
tgcaaattcactcaaagaaggtaga

SEQ ID NO: 3667867 - DNA, 25 bp, Homo sapien
ctggctggcaggtacggattccaaa

SEQ ID NO: 3667868 - DNA, 25 bp, Homo sapien
tccccagcagagaagtatgaacacc

SEQ ID NO: 3667869 - DNA, 25 bp, Homo sapien
tcctaagctgtgagtacgagaaggc

SEQ ID NO: 3667870 - DNA, 25 bp, Homo sapien
gaacccctgtcaagaaggagccaag

SEQ ID NO: 3667871 - DNA, 25 bp, Homo sapien
cacaagccagtcagtattgcacacc

SEQ ID NO: 3667872 - DNA, 25 bp, Homo sapien
tgcactagggagtcacgggcacata

SEQ ID NO: 3667873 - DNA, 25 bp, Homo sapien
taaaggagcccttgtctaggcgagg

SEQ ID NO: 3667874 - DNA, 25 bp, Homo sapien
catttaacatcaaagggcaaaacag

SEQ ID NO: 3667875 - DNA, 25 bp, Homo sapien
accctcaccaagctttagcagggct

SEQ ID NO: 3667876 - DNA, 25 bp, Homo sapien
tcatgcctctcctcgctctgattag

SEQ ID NO: 3667877 - DNA, 25 bp, Homo sapien
ctgattagcatccttccacactgac

SEQ ID NO: 3667878 - DNA, 25 bp, Homo sapien
agggcttcctggccgccatgtcctc

SEQ ID NO: 3667879 - DNA, 25 bp, Homo sapien
tgctaatggtgtaatgccggcgaac

SEQ ID NO: 3667880 - DNA, 25 bp, Homo sapien
gacttcttgataaacgtggctctgc

SEQ ID NO: 3667881 - DNA, 25 bp, Homo sapien
cagggcaccatgctgatgtgtgtca

SEQ ID NO: 3667882 - DNA, 25 bp, Homo sapien
caggttctccggagctgtggaatcg

SEQ ID NO: 3667883 - DNA, 25 bp, Homo sapien
acctcacagcatggaatgcacatga

SEQ ID NO: 3667884 - DNA, 25 bp, Homo sapien
tcacagcatggaatgcacatgatgt

SEQ ID NO: 3667885 - DNA, 25 bp, Homo sapien
caggaggacctctacaggggaattc

SEQ ID NO: 3667886 - DNA, 25 bp, Homo sapien
cccaggaggacctctacaggggaat

SEQ ID NO: 3667887 - DNA, 25 bp, Homo sapien
tgggggaaatggctcctccttcatg

SEQ ID NO: 3667888 - DNA, 25 bp, Homo sapien
tcatgagatcagcatggctcctcat

SEQ ID NO: 3667889 - DNA, 25 bp, Homo sapien
tcctccttcatgagatcagcatggc

SEQ ID NO: 3667890 - DNA, 25 bp, Homo sapien
aatggctcctccttcatgagatcag

SEQ ID NO: 3667891 - DNA, 25 bp, Homo sapien
aggtctgagccctcagggagctgac

SEQ ID NO: 3667892 - DNA, 25 bp, Homo sapien
ttcaggtctgagccctcagggagct

SEQ ID NO: 3667893 - DNA, 25 bp, Homo sapien
tggtttcaggtctgagccctcaggg

SEQ ID NO: 3667894 - DNA, 25 bp, Homo sapien
ctggtttcaggtctgagccctcagg

SEQ ID NO: 3667895 - DNA, 25 bp, Homo sapien
catgccttgctctgagctagaaatg

SEQ ID NO: 3667896 - DNA, 25 bp, Homo sapien
attaattatatcgagcatgccttgc

SEQ ID NO: 3667897 - DNA, 25 bp, Homo sapien
tgagctagaaatgtcataacaaaga

SEQ ID NO: 3667898 - DNA, 25 bp, Homo sapien
cttcaagagatggatcagggggcct

SEQ ID NO: 3667899 - DNA, 25 bp, Homo sapien
cagccggatgctgacgcaggcggag

SEQ ID NO: 3667900 - DNA, 25 bp, Homo sapien
agagagaccacattctgagtggaga

SEQ ID NO: 3667901 - DNA, 25 bp, Homo sapien
gatgctgacgcaggcggagataaag

SEQ ID NO: 3667902 - DNA, 25 bp, Homo sapien
gagaccacattctgagtggagagcc

SEQ ID NO: 3667903 - DNA, 25 bp, Homo sapien
tgagggtggccagagcgcagagccc

SEQ ID NO: 3667904 - DNA, 25 bp, Homo sapien
gacagtcactgtgagggtggccaga

SEQ ID NO: 3667905 - DNA, 25 bp, Homo sapien
gtgagggtggccagagcgcagagcc

SEQ ID NO: 3667906 - DNA, 25 bp, Homo sapien
ctggacagtcactgtgagggtggcc

SEQ ID NO: 3667907 - DNA, 25 bp, Homo sapien
tggtaccacgtcgatgcccagggaa

SEQ ID NO: 3667908 - DNA, 25 bp, Homo sapien
gtaccacgtcgatgcccagggaaag

SEQ ID NO: 3667909 - DNA, 25 bp, Homo sapien
ccctggtaccacgtcgatgcccagg

SEQ ID NO: 3667910 - DNA, 25 bp, Homo sapien
ctggtaccacgtcgatgcccaggga

SEQ ID NO: 3667911 - DNA, 25 bp, Homo sapien
tcccagggcaatgttagaactctcg

SEQ ID NO: 3667912 - DNA, 25 bp, Homo sapien
tgctccctttcgaaattcctgggaa

SEQ ID NO: 3667913 - DNA, 25 bp, Homo sapien
accaagtcaagggtgtgctcccttt

SEQ ID NO: 3667914 - DNA, 25 bp, Homo sapien
accctggcctgacaccaagtcaagg

SEQ ID NO: 3667915 - DNA, 25 bp, Homo sapien
tctctctgacgcatcacctgctatg

SEQ ID NO: 3667916 - DNA, 25 bp, Homo sapien
tggctgttctctctgacgcatcacc

SEQ ID NO: 3667917 - DNA, 25 bp, Homo sapien
tgttctctctgacgcatcacctgct

SEQ ID NO: 3667918 - DNA, 25 bp, Homo sapien
tctctgacgcatcacctgctatgtt

SEQ ID NO: 3667919 - DNA, 25 bp, Homo sapien
tcgacaaggaaatccatggctgatc

SEQ ID NO: 3667920 - DNA, 25 bp, Homo sapien
ccatggctgatcaaagttttgctga

SEQ ID NO: 3667921 - DNA, 25 bp, Homo sapien
tggctgatcaaagttttgctgacag

SEQ ID NO: 3667922 - DNA, 25 bp, Homo sapien
tttggaatttcgacaaggaaatcca

SEQ ID NO: 3667923 - DNA, 25 bp, Homo sapien
acaggagcaatgcagccagaagtgt

SEQ ID NO: 3667924 - DNA, 25 bp, Homo sapien
ctgtgcatttggaagtgggggcaca

SEQ ID NO: 3667925 - DNA, 25 bp, Homo sapien
gagcaatgcagccagaagtgtccat

SEQ ID NO: 3667926 - DNA, 25 bp, Homo sapien
gggcacaggagcaatgcagccagaa

SEQ ID NO: 3667927 - DNA, 25 bp, Homo sapien
ggaggttgggatgcagatttggatc

SEQ ID NO: 3667928 - DNA, 25 bp, Homo sapien
ggatgcagatttggatccaagccat

SEQ ID NO: 3667929 - DNA, 25 bp, Homo sapien
tgcattggggaggttgggatgcaga

SEQ ID NO: 3667930 - DNA, 25 bp, Homo sapien
gttgggatgcagatttggatccaag

SEQ ID NO: 3667931 - DNA, 25 bp, Homo sapien
ggtacagttgcaaacatccagcgag

SEQ ID NO: 3667932 - DNA, 25 bp, Homo sapien
ttctatggacaaaacaataggcagc

SEQ ID NO: 3667933 - DNA, 25 bp, Homo sapien
ttaggtagcttcagtggccacggta

SEQ ID NO: 3667934 - DNA, 25 bp, Homo sapien
catccagcgagtactttctatggac

SEQ ID NO: 3667935 - DNA, 25 bp, Homo sapien
gtgaaatccagaagattgtagcaag

SEQ ID NO: 3667936 - DNA, 25 bp, Homo sapien
tgtagcaagagcatgggacaaaatt

SEQ ID NO: 3667937 - DNA, 25 bp, Homo sapien
aagcaccagcaggcatagtccagcc

SEQ ID NO: 3667938 - DNA, 25 bp, Homo sapien
caccagcaggcatagtccagcccga

SEQ ID NO: 3667939 - DNA, 25 bp, Homo sapien
tgaacaaaataaccagctgatatca

SEQ ID NO: 3667940 - DNA, 25 bp, Homo sapien
ctaatgaacaaaataaccagctgat

SEQ ID NO: 3667941 - DNA, 25 bp, Homo sapien
cacaagccagaagaaagcgggggcc

SEQ ID NO: 3667942 - DNA, 25 bp, Homo sapien
taatgaacaaaataaccagctgata

SEQ ID NO: 3667943 - DNA, 25 bp, Homo sapien
aggcatttgcagtttgcagtatgtt

SEQ ID NO: 3667944 - DNA, 25 bp, Homo sapien
caccaaggagggaatcaccaaaaca

SEQ ID NO: 3667945 - DNA, 25 bp, Homo sapien
gccagtggccaagaccatatttcca

SEQ ID NO: 3667946 - DNA, 25 bp, Homo sapien
gagggaatcaccaaaacaggcagtt

SEQ ID NO: 3667947 - DNA, 25 bp, Homo sapien
caggaagcagtgatcctcactgtct

SEQ ID NO: 3667948 - DNA, 25 bp, Homo sapien
cttaatgagctcatcatttccctct

SEQ ID NO: 3667949 - DNA, 25 bp, Homo sapien
catcatttccctcttgtaataatcc

SEQ ID NO: 3667950 - DNA, 25 bp, Homo sapien
catttccctcttgtaataatcccat

SEQ ID NO: 3667951 - DNA, 25 bp, Homo sapien
tcttaatgagctcatcatttccctc

SEQ ID NO: 3667952 - DNA, 25 bp, Homo sapien
tcagtaggcttttccatcaggtggc

SEQ ID NO: 3667953 - DNA, 25 bp, Homo sapien
tagcaatcccagtaagcttgaagcg

SEQ ID NO: 3667954 - DNA, 25 bp, Homo sapien
cagcaggattaatttgtaggccacc

SEQ ID NO: 3667955 - DNA, 25 bp, Homo sapien
tctttagagtgacgagaggcttaca

SEQ ID NO: 3667956 - DNA, 25 bp, Homo sapien
gagagcaactggcagcatttgttaa

SEQ ID NO: 3667957 - DNA, 25 bp, Homo sapien
tggcagcatttgttaattattcttg

SEQ ID NO: 3667958 - DNA, 25 bp, Homo sapien
ctgcagagagcaactggcagcattt

SEQ ID NO: 3667959 - DNA, 25 bp, Homo sapien
gcaactggcagcatttgttaattat

SEQ ID NO: 3667960 - DNA, 25 bp, Homo sapien
gaaatatacagagttgctttgacgt

SEQ ID NO: 3667961 - DNA, 25 bp, Homo sapien
gacattgaaatatacagagttgctt

SEQ ID NO: 3667962 - DNA, 25 bp, Homo sapien
gctttgacgttgtatagatgggctt

SEQ ID NO: 3667963 - DNA, 25 bp, Homo sapien
tggctcctgtagtttatgtcgaggt

SEQ ID NO: 3667964 - DNA, 25 bp, Homo sapien
aatggtgaccatggattcaaggaca

SEQ ID NO: 3667965 - DNA, 25 bp, Homo sapien
aaaggtagtgaccataggttcagga

SEQ ID NO: 3667966 - DNA, 25 bp, Homo sapien
gttcaaaggtagtgaccataggttc

SEQ ID NO: 3667967 - DNA, 25 bp, Homo sapien
ggaatggtgaccatggattcaagga

SEQ ID NO: 3667968 - DNA, 25 bp, Homo sapien
tcaagcagcatcctggccaatcttc

SEQ ID NO: 3667969 - DNA, 25 bp, Homo sapien
caagcagcatcctggccaatcttct

SEQ ID NO: 3667970 - DNA, 25 bp, Homo sapien
aagcagcatcctggccaatcttctg

SEQ ID NO: 3667971 - DNA, 25 bp, Homo sapien
gcagcatcctggccaatcttctgac

SEQ ID NO: 3667972 - DNA, 25 bp, Homo sapien
gacatgttcagaatcctcaaatcta

SEQ ID NO: 3667973 - DNA, 25 bp, Homo sapien
cagaatcctcaaatctaaaaagatg

SEQ ID NO: 3667974 - DNA, 25 bp, Homo sapien
ggatgatggagcatggcaatagaca

SEQ ID NO: 3667975 - DNA, 25 bp, Homo sapien
agataagtggctgcttaaagtaggg

SEQ ID NO: 3667976 - DNA, 25 bp, Homo sapien
cagttgtgggctattggtaaggtcc

SEQ ID NO: 3667977 - DNA, 25 bp, Homo sapien
ggactcacaaagacaaagtgcttag

SEQ ID NO: 3667978 - DNA, 25 bp, Homo sapien
caaagatgatagtgcaatgagccaa

SEQ ID NO: 3667979 - DNA, 25 bp, Homo sapien
gaccctgaggcgcatcaactgagtg

SEQ ID NO: 3667980 - DNA, 25 bp, Homo sapien
ccattgttgtactaatttgcccaag

SEQ ID NO: 3667981 - DNA, 25 bp, Homo sapien
gtcagttcatctaaatcccattgtt

SEQ ID NO: 3667982 - DNA, 25 bp, Homo sapien
gggagctcacgaggaagtagtgtca

SEQ ID NO: 3667983 - DNA, 25 bp, Homo sapien
cccaaggaccagaatacatgttttt

SEQ ID NO: 3667984 - DNA, 25 bp, Homo sapien
tcacaatcctgagtaaaggaacttg

SEQ ID NO: 3667985 - DNA, 25 bp, Homo sapien
gtccaagcagcctcgccactcacaa

SEQ ID NO: 3667986 - DNA, 25 bp, Homo sapien
aaaggaacttgttcacatgctttcc

SEQ ID NO: 3667987 - DNA, 25 bp, Homo sapien
tgttcacatgctttcccaagtgcct

SEQ ID NO: 3667988 - DNA, 25 bp, Homo sapien
catggttcctgttgtaagaaactca

SEQ ID NO: 3667989 - DNA, 25 bp, Homo sapien
ttctctcaggaagaagatcccactt

SEQ ID NO: 3667990 - DNA, 25 bp, Homo sapien
gaaactcataggtgacatacacagc

SEQ ID NO: 3667991 - DNA, 25 bp, Homo sapien
gatcccacttgtctccaacaacagg

SEQ ID NO: 3667992 - DNA, 25 bp, Homo sapien
ggaaaaatcagtaccagccactgca

SEQ ID NO: 3667993 - DNA, 25 bp, Homo sapien
gccaagttgtaaagaccatcgatgc

SEQ ID NO: 3667994 - DNA, 25 bp, Homo sapien
atgccaagttgtaaagaccatcgat

SEQ ID NO: 3667995 - DNA, 25 bp, Homo sapien
catggaaaggaaaaatcagtaccag

SEQ ID NO: 3667996 - DNA, 25 bp, Homo sapien
agctcagtgccgctggatatccgtg

SEQ ID NO: 3667997 - DNA, 25 bp, Homo sapien
gatatccgtgcaccaaactgggtca

SEQ ID NO: 3667998 - DNA, 25 bp, Homo sapien
tgggtcataaagcatcggcactgcc

SEQ ID NO: 3667999 - DNA, 25 bp, Homo sapien
gctatgcagatagcgccaagaccac

SEQ ID NO: 3668000 - DNA, 25 bp, Homo sapien
aagtcactcagctctgctaagattt

SEQ ID NO: 3668001 - DNA, 25 bp, Homo sapien
gatttctcttctgaatatgagaagt

SEQ ID NO: 3668002 - DNA, 25 bp, Homo sapien
gaagtcactcagctctgctaagatt

SEQ ID NO: 3668003 - DNA, 25 bp, Homo sapien
agtcactcagctctgctaagatttt

SEQ ID NO: 3668004 - DNA, 25 bp, Homo sapien
agcagggacgcgtggttctgctcca

SEQ ID NO: 3668005 - DNA, 25 bp, Homo sapien
gggcacctccactgcaagcaatcag

SEQ ID NO: 3668006 - DNA, 25 bp, Homo sapien
ccagctgcagattccttgggctcat

SEQ ID NO: 3668007 - DNA, 25 bp, Homo sapien
ttactgccgaccctacgcccagggc

SEQ ID NO: 3668008 - DNA, 25 bp, Homo sapien
agggcagtcagagagaaaggccagg

SEQ ID NO: 3668009 - DNA, 25 bp, Homo sapien
aagggcagtcagagagaaaggccag

SEQ ID NO: 3668010 - DNA, 25 bp, Homo sapien
caatggatctaagagcagcctgggt

SEQ ID NO: 3668011 - DNA, 25 bp, Homo sapien
tctacgtaaatcacccagcacatgg

SEQ ID NO: 3668012 - DNA, 25 bp, Homo sapien
tgagcttgccagataaacagaaccc

SEQ ID NO: 3668013 - DNA, 25 bp, Homo sapien
tcagacatgacaaatcagggcccca

SEQ ID NO: 3668014 - DNA, 25 bp, Homo sapien
ggcaggtgcacgctatccaaggaga

SEQ ID NO: 3668015 - DNA, 25 bp, Homo sapien
gcaggtgcacgctatccaaggagag

SEQ ID NO: 3668016 - DNA, 25 bp, Homo sapien
gtgctctctttgttggttgatgtcg

SEQ ID NO: 3668017 - DNA, 25 bp, Homo sapien
tctctttgttggttgatgtcgaggg

SEQ ID NO: 3668018 - DNA, 25 bp, Homo sapien
tgtcgaggggcagggtgactctttg

SEQ ID NO: 3668019 - DNA, 25 bp, Homo sapien
gcagggtgactctttggtccccttc

SEQ ID NO: 3668020 - DNA, 25 bp, Homo sapien
ccaggaaggaggttccatggccacc

SEQ ID NO: 3668021 - DNA, 25 bp, Homo sapien
catgtgtcaatctcccaggtctgtg

SEQ ID NO: 3668022 - DNA, 25 bp, Homo sapien
cgctgagggagtcctgaatccagga

SEQ ID NO: 3668023 - DNA, 25 bp, Homo sapien
gagaaggctgtgcatcaccctcatg

SEQ ID NO: 3668024 - DNA, 25 bp, Homo sapien
gacagtgatgccaccttttggcaca

SEQ ID NO: 3668025 - DNA, 25 bp, Homo sapien
cagtgatgccaccttttggcacaac

SEQ ID NO: 3668026 - DNA, 25 bp, Homo sapien
gtgaagtaacctcctccgagtcctg

SEQ ID NO: 3668027 - DNA, 25 bp, Homo sapien
tgatgccaccttttggcacaactcc

SEQ ID NO: 3668028 - DNA, 25 bp, Homo sapien
gagtgtgatctcttatccccggcat

SEQ ID NO: 3668029 - DNA, 25 bp, Homo sapien
cattggatggcaccatcactatggg

SEQ ID NO: 3668030 - DNA, 25 bp, Homo sapien
tgtcctctgagaagcatggtgagtc

SEQ ID NO: 3668031 - DNA, 25 bp, Homo sapien
atcactatgggactgattgatgtcc

SEQ ID NO: 3668032 - DNA, 25 bp, Homo sapien
tgttctggttcagaggcagataagg

SEQ ID NO: 3668033 - DNA, 25 bp, Homo sapien
gcagataaggggacaatgggaaagg

SEQ ID NO: 3668034 - DNA, 25 bp, Homo sapien
ttcagaggcagataaggggacaatg

SEQ ID NO: 3668035 - DNA, 25 bp, Homo sapien
gttgttctggttcagaggcagataa

SEQ ID NO: 3668036 - DNA, 25 bp, Homo sapien
cttgaggacgcactgcccactggat

SEQ ID NO: 3668037 - DNA, 25 bp, Homo sapien
caagctatccctgattgtaacactt

SEQ ID NO: 3668038 - DNA, 25 bp, Homo sapien
cataacaagctatccctgattgtaa

SEQ ID NO: 3668039 - DNA, 25 bp, Homo sapien
catcataacaagctatccctgattg

SEQ ID NO: 3668040 - DNA, 25 bp, Homo sapien
ggcttccatcataacaagctatccc

SEQ ID NO: 3668041 - DNA, 25 bp, Homo sapien
gccattccacttcccaatggcagag

SEQ ID NO: 3668042 - DNA, 25 bp, Homo sapien
tatgctttgccattccacttcccaa

SEQ ID NO: 3668043 - DNA, 25 bp, Homo sapien
atggcagagccatgtaaactggagc

SEQ ID NO: 3668044 - DNA, 25 bp, Homo sapien
gcagcacggccgcatatgctttgcc

SEQ ID NO: 3668045 - DNA, 25 bp, Homo sapien
gctagacagcttccgctgacaagcc

SEQ ID NO: 3668046 - DNA, 25 bp, Homo sapien
catctgcggactgcacatcacaggg

SEQ ID NO: 3668047 - DNA, 25 bp, Homo sapien
gagtgttccgcaccaggcagggtga

SEQ ID NO: 3668048 - DNA, 25 bp, Homo sapien
gggccaccctgcttcggaagcgtgt

SEQ ID NO: 3668049 - DNA, 25 bp, Homo sapien
tggggctttcccttgcacctttctg

SEQ ID NO: 3668050 - DNA, 25 bp, Homo sapien
tttcccttgcacctttctggcgggc

SEQ ID NO: 3668051 - DNA, 25 bp, Homo sapien
gggctttcccttgcacctttctggc

SEQ ID NO: 3668052 - DNA, 25 bp, Homo sapien
gctttcccttgcacctttctggcgg

SEQ ID NO: 3668053 - DNA, 25 bp, Homo sapien
gcagaccccgcaggtagccgcggcg

SEQ ID NO: 3668054 - DNA, 25 bp, Homo sapien
cgcaggccgcgcaagggcagagacg

SEQ ID NO: 3668055 - DNA, 25 bp, Homo sapien
ggccgcgcaagggcagagacgtcct

SEQ ID NO: 3668056 - DNA, 25 bp, Homo sapien
gcaggccgcgcaagggcagagacgt

SEQ ID NO: 3668057 - DNA, 25 bp, Homo sapien
caggccgcgcaagggcagagacgtc

SEQ ID NO: 3668058 - DNA, 25 bp, Homo sapien
cacatcacacacatattcaggcaca

SEQ ID NO: 3668059 - DNA, 25 bp, Homo sapien
tacacatcacacacatattcaggca

SEQ ID NO: 3668060 - DNA, 25 bp, Homo sapien
catcacacacatattcaggcacagc

SEQ ID NO: 3668061 - DNA, 25 bp, Homo sapien
catacacatcacacacatattcagg

SEQ ID NO: 3668062 - DNA, 25 bp, Homo sapien
ttctaattgttggatggcaagtaac

SEQ ID NO: 3668063 - DNA, 25 bp, Homo sapien
aagtaactcggcagccacttctgaa

SEQ ID NO: 3668064 - DNA, 25 bp, Homo sapien
gtcagccccagactgctataaaatt

SEQ ID NO: 3668065 - DNA, 25 bp, Homo sapien
tgaagtgtggagctgtaatgaagca

SEQ ID NO: 3668066 - DNA, 25 bp, Homo sapien
gatggtggagtagatacaggagccc

SEQ ID NO: 3668067 - DNA, 25 bp, Homo sapien
tggtggagtagatacaggagcccca

SEQ ID NO: 3668068 - DNA, 25 bp, Homo sapien
ggtggagtagatacaggagccccat

SEQ ID NO: 3668069 - DNA, 25 bp, Homo sapien
atggtggagtagatacaggagcccc

SEQ ID NO: 3668070 - DNA, 25 bp, Homo sapien
ctacagcaccaacggagggcaacat

SEQ ID NO: 3668071 - DNA, 25 bp, Homo sapien
taggtacgtgcagaccaggatgtcc

SEQ ID NO: 3668072 - DNA, 25 bp, Homo sapien
gagagccccttctcggctaggtacg

SEQ ID NO: 3668073 - DNA, 25 bp, Homo sapien
gaagagatccgagggtctgaccagt

SEQ ID NO: 3668074 - DNA, 25 bp, Homo sapien
tcagcatggccactagacatgaaga

SEQ ID NO: 3668075 - DNA, 25 bp, Homo sapien
aaaagccactagagcccagcagtgc

SEQ ID NO: 3668076 - DNA, 25 bp, Homo sapien
tctgtcaaaagccactagagcccag

SEQ ID NO: 3668077 - DNA, 25 bp, Homo sapien
tgtcaaaagccactagagcccagca

SEQ ID NO: 3668078 - DNA, 25 bp, Homo sapien
tcaaaagccactagagcccagcagt

SEQ ID NO: 3668079 - DNA, 25 bp, Homo sapien
gaatccaaacctctcgggatcttgg

SEQ ID NO: 3668080 - DNA, 25 bp, Homo sapien
caacaataagattgagaaggagcac

SEQ ID NO: 3668081 - DNA, 25 bp, Homo sapien
taagattgagaaggagcacaggctt

SEQ ID NO: 3668082 - DNA, 25 bp, Homo sapien
cctctcgggatcttgggaccagctt

SEQ ID NO: 3668083 - DNA, 25 bp, Homo sapien
tcagcctgagaacgtgaccgccaaa

SEQ ID NO: 3668084 - DNA, 25 bp, Homo sapien
acgtgaccgccaaagactgccctgg

SEQ ID NO: 3668085 - DNA, 25 bp, Homo sapien
ctctctgcctgaatagtccctttgg

SEQ ID NO: 3668086 - DNA, 25 bp, Homo sapien
tccctcggtagcatcccggaaggtc

SEQ ID NO: 3668087 - DNA, 25 bp, Homo sapien
tagatgttctaagtctttccattgg

SEQ ID NO: 3668088 - DNA, 25 bp, Homo sapien
ttagatgttctaagtctttccattg

SEQ ID NO: 3668089 - DNA, 25 bp, Homo sapien
agatgttctaagtctttccattgga

SEQ ID NO: 3668090 - DNA, 25 bp, Homo sapien
ccttagatgttctaagtctttccat

SEQ ID NO: 3668091 - DNA, 25 bp, Homo sapien
cactgagataccagcgaggaggctc

SEQ ID NO: 3668092 - DNA, 25 bp, Homo sapien
gaactgctagtcaagtgcgtccacg

SEQ ID NO: 3668093 - DNA, 25 bp, Homo sapien
cacgagctgtttactagggatccct

SEQ ID NO: 3668094 - DNA, 25 bp, Homo sapien
tggttgaggaaacaaacatgaccct

SEQ ID NO: 3668095 - DNA, 25 bp, Homo sapien
gcccaagggaattcggtgtgcacca

SEQ ID NO: 3668096 - DNA, 25 bp, Homo sapien
agtcctgatcagagccgtggtcctt

SEQ ID NO: 3668097 - DNA, 25 bp, Homo sapien
tccttgggccctttgagtgcagtcc

SEQ ID NO: 3668098 - DNA, 25 bp, Homo sapien
gaccaatgtcttgatgcatgcactg

SEQ ID NO: 3668099 - DNA, 25 bp, Homo sapien
tgtgacagtcacgagccagttgctc

SEQ ID NO: 3668100 - DNA, 25 bp, Homo sapien
caggagtgttcacaggcgtctagaa

SEQ ID NO: 3668101 - DNA, 25 bp, Homo sapien
taacttccccatgtaatccccagag

SEQ ID NO: 3668102 - DNA, 25 bp, Homo sapien
gaacaatcgcattcattcccaggag

SEQ ID NO: 3668103 - DNA, 25 bp, Homo sapien
cactattactgggactgtgctcaga

SEQ ID NO: 3668104 - DNA, 25 bp, Homo sapien
gaagcctatgtatgccatggaggca

SEQ ID NO: 3668105 - DNA, 25 bp, Homo sapien
catggaggcactaacaaactctgag

SEQ ID NO: 3668106 - DNA, 25 bp, Homo sapien
tctgtggcactcagataccgactgg

SEQ ID NO: 3668107 - DNA, 25 bp, Homo sapien
gggcctgcagacagactggttccca

SEQ ID NO: 3668108 - DNA, 25 bp, Homo sapien
cctgggtaaagagaccaacttatct

SEQ ID NO: 3668109 - DNA, 25 bp, Homo sapien
ctgggtaaagagaccaacttatctt

SEQ ID NO: 3668110 - DNA, 25 bp, Homo sapien
gctggcccctgggtaaagagaccaa

SEQ ID NO: 3668111 - DNA, 25 bp, Homo sapien
aagaggagggcctcatttctatggc

SEQ ID NO: 3668112 - DNA, 25 bp, Homo sapien
gaagaggagggcctcatttctatgg

SEQ ID NO: 3668113 - DNA, 25 bp, Homo sapien
gaagggaagaggagggcctcatttc

SEQ ID NO: 3668114 - DNA, 25 bp, Homo sapien
gggaagaggagggcctcatttctat

SEQ ID NO: 3668115 - DNA, 25 bp, Homo sapien
tcctctggggcaggcaccagcacac

SEQ ID NO: 3668116 - DNA, 25 bp, Homo sapien
tgtcctctggggcaggcaccagcac

SEQ ID NO: 3668117 - DNA, 25 bp, Homo sapien
ctctggggcaggcaccagcacacac

SEQ ID NO: 3668118 - DNA, 25 bp, Homo sapien
ctcctggccccagatgtcctctggg

SEQ ID NO: 3668119 - DNA, 25 bp, Homo sapien
gggcacgaggcctcgctcaccctct

SEQ ID NO: 3668120 - DNA, 25 bp, Homo sapien
tcgctcaccctctgagcttcaagtt

SEQ ID NO: 3668121 - DNA, 25 bp, Homo sapien
gagccttgtttgcaaaactgcctgc

SEQ ID NO: 3668122 - DNA, 25 bp, Homo sapien
tgagcttcaagttcagagccttgtt

SEQ ID NO: 3668123 - DNA, 25 bp, Homo sapien
tgtgctttgcatccctggacgttgg

SEQ ID NO: 3668124 - DNA, 25 bp, Homo sapien
tccaggtgtggcctctaagggtcct

SEQ ID NO: 3668125 - DNA, 25 bp, Homo sapien
ttggggcaccaacatggagcaagca

SEQ ID NO: 3668126 - DNA, 25 bp, Homo sapien
catccctcggtccattgaatgagca

SEQ ID NO: 3668127 - DNA, 25 bp, Homo sapien
ttgaagtgcgtctgggctctgcctt

SEQ ID NO: 3668128 - DNA, 25 bp, Homo sapien
tgaagtgcgtctgggctctgccttc

SEQ ID NO: 3668129 - DNA, 25 bp, Homo sapien
cttgaagtgcgtctgggctctgcct

SEQ ID NO: 3668130 - DNA, 25 bp, Homo sapien
gaatggcgcaggatcactggctcac

SEQ ID NO: 3668131 - DNA, 25 bp, Homo sapien
ggcgcaggatcactggctcaccagg

SEQ ID NO: 3668132 - DNA, 25 bp, Homo sapien
gagaatggcgcaggatcactggctc

SEQ ID NO: 3668133 - DNA, 25 bp, Homo sapien
gggagaatggcgcaggatcactggc

SEQ ID NO: 3668134 - DNA, 25 bp, Homo sapien
gacagtgcaggtggccaccaggggt

SEQ ID NO: 3668135 - DNA, 25 bp, Homo sapien
tcacactcggggacaggagttcagg

SEQ ID NO: 3668136 - DNA, 25 bp, Homo sapien
actcggggacaggagttcagggaca

SEQ ID NO: 3668137 - DNA, 25 bp, Homo sapien
gacaggagttcagggacagtgcagg

SEQ ID NO: 3668138 - DNA, 25 bp, Homo sapien
ctcccaggggtgtaatgcagaatga

SEQ ID NO: 3668139 - DNA, 25 bp, Homo sapien
tcccaggggtgtaatgcagaatgag

SEQ ID NO: 3668140 - DNA, 25 bp, Homo sapien
gctcccaggggtgtaatgcagaatg

SEQ ID NO: 3668141 - DNA, 25 bp, Homo sapien
ctgctcccaggggtgtaatgcagaa

SEQ ID NO: 3668142 - DNA, 25 bp, Homo sapien
tgccccttccgctggtggctcctca

SEQ ID NO: 3668143 - DNA, 25 bp, Homo sapien
ctgccccttccgctggtggctcctc

SEQ ID NO: 3668144 - DNA, 25 bp, Homo sapien
tgtgcccttaactgtctgctcaggt

SEQ ID NO: 3668145 - DNA, 25 bp, Homo sapien
tgacaggccagagaccagaaggcac

SEQ ID NO: 3668146 - DNA, 25 bp, Homo sapien
ggcactcgtgggaaagggccaaata

SEQ ID NO: 3668147 - DNA, 25 bp, Homo sapien
tgctcaggtattcccgtgtccacag

SEQ ID NO: 3668148 - DNA, 25 bp, Homo sapien
caagctccaagtggcacaccttgaa

SEQ ID NO: 3668149 - DNA, 25 bp, Homo sapien
accttgaacgtgaggcctgcatgga

SEQ ID NO: 3668150 - DNA, 25 bp, Homo sapien
tgcatggagaaaggcttcctgcatc

SEQ ID NO: 3668151 - DNA, 25 bp, Homo sapien
tcttggcttaaacagcagctcccag

SEQ ID NO: 3668152 - DNA, 25 bp, Homo sapien
tgggcctcctcacctcgcacagtct

SEQ ID NO: 3668153 - DNA, 25 bp, Homo sapien
cttccctggaacaggcctgtgaggg

SEQ ID NO: 3668154 - DNA, 25 bp, Homo sapien
aggcttgaccaccaaccgcttcagg

SEQ ID NO: 3668155 - DNA, 25 bp, Homo sapien
tcacctcgcacagtcttgcagggag

SEQ ID NO: 3668156 - DNA, 25 bp, Homo sapien
tgagggtgcagctgcaaagccagct

SEQ ID NO: 3668157 - DNA, 25 bp, Homo sapien
ctgttggcattgagggagaccagga

SEQ ID NO: 3668158 - DNA, 25 bp, Homo sapien
gaggctgttggcattgagggagacc

SEQ ID NO: 3668159 - DNA, 25 bp, Homo sapien
ttaaggaaaagtcaggaggctgttg

SEQ ID NO: 3668160 - DNA, 25 bp, Homo sapien
gataactcctaggagggcctgcttg

SEQ ID NO: 3668161 - DNA, 25 bp, Homo sapien
agcagcggtcaaagggtgggtggct

SEQ ID NO: 3668162 - DNA, 25 bp, Homo sapien
tggctggtgtgattatgacctgcat

SEQ ID NO: 3668163 - DNA, 25 bp, Homo sapien
ggcctgcttggacacatcacttgga

SEQ ID NO: 3668164 - DNA, 25 bp, Homo sapien
cagacattgcctgttgaaaacacaa

SEQ ID NO: 3668165 - DNA, 25 bp, Homo sapien
gctggttcaacgtactttggggtgc

SEQ ID NO: 3668166 - DNA, 25 bp, Homo sapien
gcttgcttgtgcttcatagtaggga

SEQ ID NO: 3668167 - DNA, 25 bp, Homo sapien
gggtgccctcaacaagaggcaatgc

SEQ ID NO: 3668168 - DNA, 25 bp, Homo sapien
accaggacacggcctttccctgaca

SEQ ID NO: 3668169 - DNA, 25 bp, Homo sapien
attgtgctgtgttctgcaaatatac

SEQ ID NO: 3668170 - DNA, 25 bp, Homo sapien
tgctcatcgtcctttactgtctcct

SEQ ID NO: 3668171 - DNA, 25 bp, Homo sapien
ttttaattgtgctgtgttctgcaaa

SEQ ID NO: 3668172 - DNA, 25 bp, Homo sapien
ttgctcatcgtcctttactgtctcc

SEQ ID NO: 3668173 - DNA, 25 bp, Homo sapien
ccaggaggtaattccagagcctctc

SEQ ID NO: 3668174 - DNA, 25 bp, Homo sapien
agagcctctcgtgggatccccagag

SEQ ID NO: 3668175 - DNA, 25 bp, Homo sapien
gcagagttccaaaggcgtacccgtc

SEQ ID NO: 3668176 - DNA, 25 bp, Homo sapien
aggcgtacccgtcagtaagtggttg

SEQ ID NO: 3668177 - DNA, 25 bp, Homo sapien
agcacggctggagcccctgatccat

SEQ ID NO: 3668178 - DNA, 25 bp, Homo sapien
tcgggctctccttggtactcctgca

SEQ ID NO: 3668179 - DNA, 25 bp, Homo sapien
accaatgagctccattcttcgggct

SEQ ID NO: 3668180 - DNA, 25 bp, Homo sapien
ggatcctgggttctgcgttcaccac

SEQ ID NO: 3668181 - DNA, 25 bp, Homo sapien
ggacagtaagaatggagacttgttt

SEQ ID NO: 3668182 - DNA, 25 bp, Homo sapien
aggacagtaagaatggagacttgtt

SEQ ID NO: 3668183 - DNA, 25 bp, Homo sapien
cctgggactggagccgatgtcagat

SEQ ID NO: 3668184 - DNA, 25 bp, Homo sapien
gggctgccattaggaaatactgggt

SEQ ID NO: 3668185 - DNA, 25 bp, Homo sapien
accacatgagtcaatgcgtgatggc

SEQ ID NO: 3668186 - DNA, 25 bp, Homo sapien
ggtgcagactgaacaaccacatgag

SEQ ID NO: 3668187 - DNA, 25 bp, Homo sapien
tctgctcctgtgctctctcatagtg

SEQ ID NO: 3668188 - DNA, 25 bp, Homo sapien
tagtggacagtccattgccacatgg

SEQ ID NO: 3668189 - DNA, 25 bp, Homo sapien
tgtgggagtatctctgtacacactc

SEQ ID NO: 3668190 - DNA, 25 bp, Homo sapien
tgccacatggcagctcctggttgac

SEQ ID NO: 3668191 - DNA, 25 bp, Homo sapien
agagtgacacaaatgtttagggaca

SEQ ID NO: 3668192 - DNA, 25 bp, Homo sapien
ccacagtgcaggcaaatgatgtaaa

SEQ ID NO: 3668193 - DNA, 25 bp, Homo sapien
cacagtgcaggcaaatgatgtaaat

SEQ ID NO: 3668194 - DNA, 25 bp, Homo sapien
ccactgggtcgctcccatgtagtac

SEQ ID NO: 3668195 - DNA, 25 bp, Homo sapien
aatttgtccactgggtcgctcccat

SEQ ID NO: 3668196 - DNA, 25 bp, Homo sapien
cagagatgagatgctacggattttc

SEQ ID NO: 3668197 - DNA, 25 bp, Homo sapien
tgccaggtgtccgaaggacagagat

SEQ ID NO: 3668198 - DNA, 25 bp, Homo sapien
agatgctacggattttcctacccca

SEQ ID NO: 3668199 - DNA, 25 bp, Homo sapien
ccgaaggacagagatgagatgctac

SEQ ID NO: 3668200 - DNA, 25 bp, Homo sapien
gacagctgatggactgttgctatat

SEQ ID NO: 3668201 - DNA, 25 bp, Homo sapien
ggtgcccagatgtatttgagaacct

SEQ ID NO: 3668202 - DNA, 25 bp, Homo sapien
tatttgagaacctgattgacagctg

SEQ ID NO: 3668203 - DNA, 25 bp, Homo sapien
tatatgctgcccactcttggtgccc

SEQ ID NO: 3668204 - DNA, 25 bp, Homo sapien
tcagagcctatgagccgtccatccg

SEQ ID NO: 3668205 - DNA, 25 bp, Homo sapien
ggcatcagagcctatgagccgtcca

SEQ ID NO: 3668206 - DNA, 25 bp, Homo sapien
aatggcatcagagcctatgagccgt

SEQ ID NO: 3668207 - DNA, 25 bp, Homo sapien
caaatggcatcagagcctatgagcc

SEQ ID NO: 3668208 - DNA, 25 bp, Homo sapien
cttgaaaaatgacgtctggagaaca

SEQ ID NO: 3668209 - DNA, 25 bp, Homo sapien
ttcttcctatacttgaaaaatgacg

SEQ ID NO: 3668210 - DNA, 25 bp, Homo sapien
gaaaaatgacgtctggagaacaatc

SEQ ID NO: 3668211 - DNA, 25 bp, Homo sapien
tatacttgaaaaatgacgtctggag

SEQ ID NO: 3668212 - DNA, 25 bp, Homo sapien
ccaaaatggtgttgcgtaggctcca

SEQ ID NO: 3668213 - DNA, 25 bp, Homo sapien
tactgagtgccaaaatggtgttgcg

SEQ ID NO: 3668214 - DNA, 25 bp, Homo sapien
cagggaggacgggatactgagtgcc

SEQ ID NO: 3668215 - DNA, 25 bp, Homo sapien
tgcgtaggctccatttcaacatttg

SEQ ID NO: 3668216 - DNA, 25 bp, Homo sapien
ggcgaagcccacatgatgaaattag

SEQ ID NO: 3668217 - DNA, 25 bp, Homo sapien
tttgacagcatattcccttggtggg

SEQ ID NO: 3668218 - DNA, 25 bp, Homo sapien
gaaacctggactaaaatgacatgag

SEQ ID NO: 3668219 - DNA, 25 bp, Homo sapien
ggtggccatctacatgccagaaaga

SEQ ID NO: 3668220 - DNA, 25 bp, Homo sapien
ttacatgtcgggtgctctgtttaca

SEQ ID NO: 3668221 - DNA, 25 bp, Homo sapien
gacttctaggggagccatttcgggc

SEQ ID NO: 3668222 - DNA, 25 bp, Homo sapien
tttcgggctctagggcctctttgca

SEQ ID NO: 3668223 - DNA, 25 bp, Homo sapien
ggtggccctttacatgtcgggtgct

SEQ ID NO: 3668224 - DNA, 25 bp, Homo sapien
tcacagcaggaagcataggccgggt

SEQ ID NO: 3668225 - DNA, 25 bp, Homo sapien
cgtactctagtgacaagctgcttgg

SEQ ID NO: 3668226 - DNA, 25 bp, Homo sapien
cttgatgtctccatgagcggttggc

SEQ ID NO: 3668227 - DNA, 25 bp, Homo sapien
gacgtcctttgaaccgcgtgttgtc

SEQ ID NO: 3668228 - DNA, 25 bp, Homo sapien
cacgtgcaagatcgttgcttacaac

SEQ ID NO: 3668229 - DNA, 25 bp, Homo sapien
gaaaacccagtctccaattcactct

SEQ ID NO: 3668230 - DNA, 25 bp, Homo sapien
tgcacaggacgctcggagacacgtg

SEQ ID NO: 3668231 - DNA, 25 bp, Homo sapien
ccagaaaagtaactgcacaggacgc

SEQ ID NO: 3668232 - DNA, 25 bp, Homo sapien
ctgcacttgccaatgagctgtggcc

SEQ ID NO: 3668233 - DNA, 25 bp, Homo sapien
cccagctgggcataattattccttc

SEQ ID NO: 3668234 - DNA, 25 bp, Homo sapien
tgtttagggtctgccggccaggaca

SEQ ID NO: 3668235 - DNA, 25 bp, Homo sapien
acagagacagccctgcacttgccaa

SEQ ID NO: 3668236 - DNA, 25 bp, Homo sapien
tgccactagtgcttccgtggagcag

SEQ ID NO: 3668237 - DNA, 25 bp, Homo sapien
agccagggccgtctctgctaagcaa

SEQ ID NO: 3668238 - DNA, 25 bp, Homo sapien
ccgaagctgctcaggaagtccagca

SEQ ID NO: 3668239 - DNA, 25 bp, Homo sapien
aaatgtctgtccagggatttgcaga

SEQ ID NO: 3668240 - DNA, 25 bp, Homo sapien
taaaatatgtgtgggagaatcagac

SEQ ID NO: 3668241 - DNA, 25 bp, Homo sapien
gacttggtgtcctcgagtcggaaag

SEQ ID NO: 3668242 - DNA, 25 bp, Homo sapien
cagctgaaccttgactttcagtcaa

SEQ ID NO: 3668243 - DNA, 25 bp, Homo sapien
gaaggcagcgatggtcacaacccgt

SEQ ID NO: 3668244 - DNA, 25 bp, Homo sapien
gaggtccacagtagaccccgtttgc

SEQ ID NO: 3668245 - DNA, 25 bp, Homo sapien
cttctacaggtcagctacagtttgc

SEQ ID NO: 3668246 - DNA, 25 bp, Homo sapien
aggcccctcttctacaggtcagcta

SEQ ID NO: 3668247 - DNA, 25 bp, Homo sapien
agcaaagattgctccttgccccttc

SEQ ID NO: 3668248 - DNA, 25 bp, Homo sapien
gaggacgctcggtctcccttgtcca

SEQ ID NO: 3668249 - DNA, 25 bp, Homo sapien
aggacgctcggtctcccttgtccag

SEQ ID NO: 3668250 - DNA, 25 bp, Homo sapien
gccttcttatggctttctcagggct

SEQ ID NO: 3668251 - DNA, 25 bp, Homo sapien
tccatttctcgtggttctccagggt

SEQ ID NO: 3668252 - DNA, 25 bp, Homo sapien
cttccatttctcgtggttctccagg

SEQ ID NO: 3668253 - DNA, 25 bp, Homo sapien
tttcttccatttctcgtggttctcc

SEQ ID NO: 3668254 - DNA, 25 bp, Homo sapien
tattatctgctgcattctcaccaac

SEQ ID NO: 3668255 - DNA, 25 bp, Homo sapien
tatctgctgcattctcaccaacttt

SEQ ID NO: 3668256 - DNA, 25 bp, Homo sapien
catattatctgctgcattctcacca

SEQ ID NO: 3668257 - DNA, 25 bp, Homo sapien
ttatctgctgcattctcaccaactt

SEQ ID NO: 3668258 - DNA, 25 bp, Homo sapien
aaagagtcataaagatcagtatcta

SEQ ID NO: 3668259 - DNA, 25 bp, Homo sapien
gaaaggaaatgtgagatcccctggg

SEQ ID NO: 3668260 - DNA, 25 bp, Homo sapien
ccattttccacgaaaggaaatgtga

SEQ ID NO: 3668261 - DNA, 25 bp, Homo sapien
gagtcataaagatcagtatctacaa

SEQ ID NO: 3668262 - DNA, 25 bp, Homo sapien
ctgggatgatacatggtcaccttgg

SEQ ID NO: 3668263 - DNA, 25 bp, Homo sapien
gaaggcagttctaacatgttacagt

SEQ ID NO: 3668264 - DNA, 25 bp, Homo sapien
tctagcagaaggcagttctaacatg

SEQ ID NO: 3668265 - DNA, 25 bp, Homo sapien
gcaagtctagcagaaggcagttcta

SEQ ID NO: 3668266 - DNA, 25 bp, Homo sapien
catttgctgatgtgctactgtgtgc

SEQ ID NO: 3668267 - DNA, 25 bp, Homo sapien
tgttgatttgttgattcagcagaca

SEQ ID NO: 3668268 - DNA, 25 bp, Homo sapien
tagtcacggaatctaagcagtagcc

SEQ ID NO: 3668269 - DNA, 25 bp, Homo sapien
gtctcctttactccagtagtcacgg

SEQ ID NO: 3668270 - DNA, 25 bp, Homo sapien
cactcagagcccttgcaagttgagg

SEQ ID NO: 3668271 - DNA, 25 bp, Homo sapien
gcctctgatagaggcgccagggagc

SEQ ID NO: 3668272 - DNA, 25 bp, Homo sapien
gctggcccacgggcctctgatagag

SEQ ID NO: 3668273 - DNA, 25 bp, Homo sapien
cttgcaagttgaggctggcccacgg

SEQ ID NO: 3668274 - DNA, 25 bp, Homo sapien
ccaaaagggcatatatttggcagat

SEQ ID NO: 3668275 - DNA, 25 bp, Homo sapien
tcccactgcccaaaagggcatatat

SEQ ID NO: 3668276 - DNA, 25 bp, Homo sapien
aagaatgaggtgtcatgaggacttt

SEQ ID NO: 3668277 - DNA, 25 bp, Homo sapien
tggcagatttcggttgataccagat

SEQ ID NO: 3668278 - DNA, 25 bp, Homo sapien
aacacatatccctttatcatcgaaa

SEQ ID NO: 3668279 - DNA, 25 bp, Homo sapien
tttcgatgataaagggatatgtgtt

SEQ ID NO: 3668280 - DNA, 25 bp, Homo sapien
tagatggaaatgtcctctctctccc

SEQ ID NO: 3668281 - DNA, 25 bp, Homo sapien
ggtcatctttatggcctcagggcct

SEQ ID NO: 3668282 - DNA, 25 bp, Homo sapien
ctgccatagatggaaatgtcctctc

SEQ ID NO: 3668283 - DNA, 25 bp, Homo sapien
agggtcatctttatggcctcagggc

SEQ ID NO: 3668284 - DNA, 25 bp, Homo sapien
tcaactcatcagtgtttcaatgtac

SEQ ID NO: 3668285 - DNA, 25 bp, Homo sapien
tggctgaagcatactgaaacctgaa

SEQ ID NO: 3668286 - DNA, 25 bp, Homo sapien
gatttgggcaatgaagatccaacag

SEQ ID NO: 3668287 - DNA, 25 bp, Homo sapien
tttgggcaatgaagatccaacagct

SEQ ID NO: 3668288 - DNA, 25 bp, Homo sapien
tgggcaatgaagatccaacagcttc

SEQ ID NO: 3668289 - DNA, 25 bp, Homo sapien
tatttcaggctctctatggactcac

SEQ ID NO: 3668290 - DNA, 25 bp, Homo sapien
ctatttcaggctctctatggactca

SEQ ID NO: 3668291 - DNA, 25 bp, Homo sapien
gtggcacctactgccagaggtgctg

SEQ ID NO: 3668292 - DNA, 25 bp, Homo sapien
agaggtgctgcaaccccaaacaggg

SEQ ID NO: 3668293 - DNA, 25 bp, Homo sapien
aactggccagggtggcacctactgc

SEQ ID NO: 3668294 - DNA, 25 bp, Homo sapien
gccagaggtgctgcaaccccaaaca

SEQ ID NO: 3668295 - DNA, 25 bp, Homo sapien
accgaataggctgccttagagcacc

SEQ ID NO: 3668296 - DNA, 25 bp, Homo sapien
ttagagcaccagttccaaggtcaaa

SEQ ID NO: 3668297 - DNA, 25 bp, Homo sapien
ccacaaggaccgaataggctgcctt

SEQ ID NO: 3668298 - DNA, 25 bp, Homo sapien
tagcataaaactcagtagaaccaga

SEQ ID NO: 3668299 - DNA, 25 bp, Homo sapien
tgttaatggtttatcatttcctggt

SEQ ID NO: 3668300 - DNA, 25 bp, Homo sapien
gttgggatttcttattctggggtga

SEQ ID NO: 3668301 - DNA, 25 bp, Homo sapien
ctcttcatacagcttagaattggtg

SEQ ID NO: 3668302 - DNA, 25 bp, Homo sapien
tcctttgatttttcagggctgcttt

SEQ ID NO: 3668303 - DNA, 25 bp, Homo sapien
taaaacctggaatacataatcccca

SEQ ID NO: 3668304 - DNA, 25 bp, Homo sapien
gacccgaagtttactaatcataagc

SEQ ID NO: 3668305 - DNA, 25 bp, Homo sapien
ttcttcccttcagtcacgatcttgc

SEQ ID NO: 3668306 - DNA, 25 bp, Homo sapien
aagccctattatcagaaatttctgg

SEQ ID NO: 3668307 - DNA, 25 bp, Homo sapien
tgagggaggtgcagttgttttcaca

SEQ ID NO: 3668308 - DNA, 25 bp, Homo sapien
gacgcactcgcgggaggacacagct

SEQ ID NO: 3668309 - DNA, 25 bp, Homo sapien
aggtgcagactctagagggacccca

SEQ ID NO: 3668310 - DNA, 25 bp, Homo sapien
gcttctgccccgacgcactcgcggg

SEQ ID NO: 3668311 - DNA, 25 bp, Homo sapien
gaggaagaggctttagcagctaaat

SEQ ID NO: 3668312 - DNA, 25 bp, Homo sapien
gaagaggctttagcagctaaatgca

SEQ ID NO: 3668313 - DNA, 25 bp, Homo sapien
gaggctttagcagctaaatgcagcc

SEQ ID NO: 3668314 - DNA, 25 bp, Homo sapien
agaggaagaggctttagcagctaaa

SEQ ID NO: 3668315 - DNA, 25 bp, Homo sapien
gttcggcgaaatcttgaggctctcc

SEQ ID NO: 3668316 - DNA, 25 bp, Homo sapien
gcttagcacatagtgaatggagata

SEQ ID NO: 3668317 - DNA, 25 bp, Homo sapien
tcacatttgcaaatgctaaacgctc

SEQ ID NO: 3668318 - DNA, 25 bp, Homo sapien
cttctctgatgctttccaagttcgg

SEQ ID NO: 3668319 - DNA, 25 bp, Homo sapien
caagcagcctggaggtctgaagtgt

SEQ ID NO: 3668320 - DNA, 25 bp, Homo sapien
cagcctggaggtctgaagtgtcaac

SEQ ID NO: 3668321 - DNA, 25 bp, Homo sapien
tcaagcagcctggaggtctgaagtg

SEQ ID NO: 3668322 - DNA, 25 bp, Homo sapien
agcagcctggaggtctgaagtgtca

SEQ ID NO: 3668323 - DNA, 25 bp, Homo sapien
aatttgggaggtggttgatagaaca

SEQ ID NO: 3668324 - DNA, 25 bp, Homo sapien
gggataatttgggaggtggttgata

SEQ ID NO: 3668325 - DNA, 25 bp, Homo sapien
cagagaattggaggtgggataattt

SEQ ID NO: 3668326 - DNA, 25 bp, Homo sapien
tggcagagaattggaggtgggataa

SEQ ID NO: 3668327 - DNA, 25 bp, Homo sapien
ctgagcacgtttttactgactgatt

SEQ ID NO: 3668328 - DNA, 25 bp, Homo sapien
gagcacgtttttactgactgattgg

SEQ ID NO: 3668329 - DNA, 25 bp, Homo sapien
tgagcacgtttttactgactgattg

SEQ ID NO: 3668330 - DNA, 25 bp, Homo sapien
agcacgtttttactgactgattgga

SEQ ID NO: 3668331 - DNA, 25 bp, Homo sapien
tgggtgctggaaaggtggtgggatc

SEQ ID NO: 3668332 - DNA, 25 bp, Homo sapien
tgggatcagatctggggatcgtctt

SEQ ID NO: 3668333 - DNA, 25 bp, Homo sapien
gtgggtgctggaaaggtggtgggat

SEQ ID NO: 3668334 - DNA, 25 bp, Homo sapien
tctggggatcgtcttttcaggggaa

SEQ ID NO: 3668335 - DNA, 25 bp, Homo sapien
tggaaagacggttgctctctgtccc

SEQ ID NO: 3668336 - DNA, 25 bp, Homo sapien
tggctgcccagatgtactgagccag

SEQ ID NO: 3668337 - DNA, 25 bp, Homo sapien
gcccagatgtactgagccagtgcaa

SEQ ID NO: 3668338 - DNA, 25 bp, Homo sapien
cagtgcaaagcttgacataatggaa

SEQ ID NO: 3668339 - DNA, 25 bp, Homo sapien
ttcagcaaaggatgcgacaggcagc

SEQ ID NO: 3668340 - DNA, 25 bp, Homo sapien
ctgagaacaaccaggcatttgatgc

SEQ ID NO: 3668341 - DNA, 25 bp, Homo sapien
aagagtataggagcaagcatggagt

SEQ ID NO: 3668342 - DNA, 25 bp, Homo sapien
gtcccttctttcatggcgcctacag

SEQ ID NO: 3668343 - DNA, 25 bp, Homo sapien
tcgtgaactacagtaaaccattcgc

SEQ ID NO: 3668344 - DNA, 25 bp, Homo sapien
cagtaaaccattcgctaagcctttc

SEQ ID NO: 3668345 - DNA, 25 bp, Homo sapien
tactcttgtagaaatttcgtgaact

SEQ ID NO: 3668346 - DNA, 25 bp, Homo sapien
tagaaatttcgtgaactacagtaaa

SEQ ID NO: 3668347 - DNA, 25 bp, Homo sapien
tggccaggaggacaaggccgccttt

SEQ ID NO: 3668348 - DNA, 25 bp, Homo sapien
gagtgaccagaactggccacacagt

SEQ ID NO: 3668349 - DNA, 25 bp, Homo sapien
cactggttcccctgtcaggtcaggc

SEQ ID NO: 3668350 - DNA, 25 bp, Homo sapien
cagtgggcatcttctaggcactgtc

SEQ ID NO: 3668351 - DNA, 25 bp, Homo sapien
agttctgcccgttgattctcttcct

SEQ ID NO: 3668352 - DNA, 25 bp, Homo sapien
caatgtgtggggttagttctgcccg

SEQ ID NO: 3668353 - DNA, 25 bp, Homo sapien
cacaattcatgcatggtctgcccaa

SEQ ID NO: 3668354 - DNA, 25 bp, Homo sapien
catgcatggtctgcccaatgtgtgg

SEQ ID NO: 3668355 - DNA, 25 bp, Homo sapien
aagcggactgtgcactgttgtggac

SEQ ID NO: 3668356 - DNA, 25 bp, Homo sapien
ctgagaagcggactgtgcactgttg

SEQ ID NO: 3668357 - DNA, 25 bp, Homo sapien
ttgtggactgagctgataggtaccg

SEQ ID NO: 3668358 - DNA, 25 bp, Homo sapien
taggtaccgagcttttggacactgt

SEQ ID NO: 3668359 - DNA, 25 bp, Homo sapien
agcctggagaccggagacaggggca

SEQ ID NO: 3668360 - DNA, 25 bp, Homo sapien
gggcagcaccccgatggtcgtatac

SEQ ID NO: 3668361 - DNA, 25 bp, Homo sapien
ctggagcctggagaccggagacagg

SEQ ID NO: 3668362 - DNA, 25 bp, Homo sapien
ggagcctggagaccggagacagggg

SEQ ID NO: 3668363 - DNA, 25 bp, Homo sapien
ggagcaggtgatgctctgttttgca

SEQ ID NO: 3668364 - DNA, 25 bp, Homo sapien
tgaaggagcaggtgatgctctgttt

SEQ ID NO: 3668365 - DNA, 25 bp, Homo sapien
tgcagactcccctggtcacacttgg

SEQ ID NO: 3668366 - DNA, 25 bp, Homo sapien
tgatgctctgttttgcatgttctgt

SEQ ID NO: 3668367 - DNA, 25 bp, Homo sapien
ttcaatctggccttctgtgcacctg

SEQ ID NO: 3668368 - DNA, 25 bp, Homo sapien
cctgggtccgtgaagtgagctctct

SEQ ID NO: 3668369 - DNA, 25 bp, Homo sapien
cactactattctgggctgatggcgt

SEQ ID NO: 3668370 - DNA, 25 bp, Homo sapien
ggagctctgaaaaggtgtgaacacc

SEQ ID NO: 3668371 - DNA, 25 bp, Homo sapien
tggtaaacatcctacacgcaatggg

SEQ ID NO: 3668372 - DNA, 25 bp, Homo sapien
cccattgcctggactttttagcatt

SEQ ID NO: 3668373 - DNA, 25 bp, Homo sapien
aagaggtggcttttacctgcttttg

SEQ ID NO: 3668374 - DNA, 25 bp, Homo sapien
tggccatgccagtctagaagctggt

SEQ ID NO: 3668375 - DNA, 25 bp, Homo sapien
gatctgcagagctgatgatggattt

SEQ ID NO: 3668376 - DNA, 25 bp, Homo sapien
tgttcctagatctgcagagctgatg

SEQ ID NO: 3668377 - DNA, 25 bp, Homo sapien
tagatctgcagagctgatgatggat

SEQ ID NO: 3668378 - DNA, 25 bp, Homo sapien
tggatttggggaaggctcccatcat

SEQ ID NO: 3668379 - DNA, 25 bp, Homo sapien
cccagcagttgctaatggacccaga

SEQ ID NO: 3668380 - DNA, 25 bp, Homo sapien
catttcctggagaaatcagcgaacg

SEQ ID NO: 3668381 - DNA, 25 bp, Homo sapien
gacatccatgtctgacccagcagtt

SEQ ID NO: 3668382 - DNA, 25 bp, Homo sapien
gtggtgaagccccagacatccatgt

SEQ ID NO: 3668383 - DNA, 25 bp, Homo sapien
gatcggcgattagggctgggctgga

SEQ ID NO: 3668384 - DNA, 25 bp, Homo sapien
gtctggagctggcaattaaccgttt

SEQ ID NO: 3668385 - DNA, 25 bp, Homo sapien
agcccagccgcctgagatcggcgat

SEQ ID NO: 3668386 - DNA, 25 bp, Homo sapien
ggagctggcaattaaccgtttctgg

SEQ ID NO: 3668387 - DNA, 25 bp, Homo sapien
ttgccaggcactcagcttaatcatt

SEQ ID NO: 3668388 - DNA, 25 bp, Homo sapien
ccttgccaggcactcagcttaatca

SEQ ID NO: 3668389 - DNA, 25 bp, Homo sapien
tctgtgctctcagcccgtgcccttg

SEQ ID NO: 3668390 - DNA, 25 bp, Homo sapien
tgctctcagcccgtgcccttgccag

SEQ ID NO: 3668391 - DNA, 25 bp, Homo sapien
ccgaacacccttgtgtaggtaggag

SEQ ID NO: 3668392 - DNA, 25 bp, Homo sapien
cacccttgtgtaggtaggaggctgc

SEQ ID NO: 3668393 - DNA, 25 bp, Homo sapien
tgctcccgaacacccttgtgtaggt

SEQ ID NO: 3668394 - DNA, 25 bp, Homo sapien
tgagatgctcccgaacacccttgtg

SEQ ID NO: 3668395 - DNA, 25 bp, Homo sapien
ggagccggcaggtgtattccagccc

SEQ ID NO: 3668396 - DNA, 25 bp, Homo sapien
agccggcaggtgtattccagcccag

SEQ ID NO: 3668397 - DNA, 25 bp, Homo sapien
catagggccttgacatgctggcaga

SEQ ID NO: 3668398 - DNA, 25 bp, Homo sapien
cagtcatagggccttgacatgctgg

SEQ ID NO: 3668399 - DNA, 25 bp, Homo sapien
cagtgcttttgacagccctgatcct

SEQ ID NO: 3668400 - DNA, 25 bp, Homo sapien
caccaggtgccgtcagtgcttttga

SEQ ID NO: 3668401 - DNA, 25 bp, Homo sapien
ctgtttggcatgtggagagctattt

SEQ ID NO: 3668402 - DNA, 25 bp, Homo sapien
acctgtttggcatgtggagagctat

SEQ ID NO: 3668403 - DNA, 25 bp, Homo sapien
ttggcatgtggagagctattttgat

SEQ ID NO: 3668404 - DNA, 25 bp, Homo sapien
gtttggcatgtggagagctattttg

SEQ ID NO: 3668405 - DNA, 25 bp, Homo sapien
tgccaccagtcccttggttcacagg

SEQ ID NO: 3668406 - DNA, 25 bp, Homo sapien
agtcccttggttcacaggaggcgga

SEQ ID NO: 3668407 - DNA, 25 bp, Homo sapien
aggaggcggacaccgagtctcccac

SEQ ID NO: 3668408 - DNA, 25 bp, Homo sapien
ggcgactgcccacattaacgtgcca

SEQ ID NO: 3668409 - DNA, 25 bp, Homo sapien
gtctcagtgcccacgccgatcaaca

SEQ ID NO: 3668410 - DNA, 25 bp, Homo sapien
ggcttttgaactggccctggaggaa

SEQ ID NO: 3668411 - DNA, 25 bp, Homo sapien
gccctggaggaaggtctcagtgccc

SEQ ID NO: 3668412 - DNA, 25 bp, Homo sapien
aagccaggcttttgaactggccctg

SEQ ID NO: 3668413 - DNA, 25 bp, Homo sapien
ccagacaacattcaccacgggctgt

SEQ ID NO: 3668414 - DNA, 25 bp, Homo sapien
tctccaggacatggcgtgttccgga

SEQ ID NO: 3668415 - DNA, 25 bp, Homo sapien
acatggcgtgttccggactgggcca

SEQ ID NO: 3668416 - DNA, 25 bp, Homo sapien
cacgggctgtctccaggacatggcg

SEQ ID NO: 3668417 - DNA, 25 bp, Homo sapien
taggccccttcacatatggagacag

SEQ ID NO: 3668418 - DNA, 25 bp, Homo sapien
caaagtaggccccttcacatatgga

SEQ ID NO: 3668419 - DNA, 25 bp, Homo sapien
cccttcacatatggagacagcggct

SEQ ID NO: 3668420 - DNA, 25 bp, Homo sapien
aagtaggccccttcacatatggaga

SEQ ID NO: 3668421 - DNA, 25 bp, Homo sapien
gggatggtcacgtgccagaccagga

SEQ ID NO: 3668422 - DNA, 25 bp, Homo sapien
ggatggtcacgtgccagaccaggac

SEQ ID NO: 3668423 - DNA, 25 bp, Homo sapien
ctgggatggtcacgtgccagaccag

SEQ ID NO: 3668424 - DNA, 25 bp, Homo sapien
tgggatggtcacgtgccagaccagg

SEQ ID NO: 3668425 - DNA, 25 bp, Homo sapien
cggtggtgctcacagcgctgctaga

SEQ ID NO: 3668426 - DNA, 25 bp, Homo sapien
catcatccagaccttcggcgaggga

SEQ ID NO: 3668427 - DNA, 25 bp, Homo sapien
cctcttcttccgcttgctcagaagg

SEQ ID NO: 3668428 - DNA, 25 bp, Homo sapien
gggactatgcggaccaagttgtctt

SEQ ID NO: 3668429 - DNA, 25 bp, Homo sapien
gagggggaatgatgggtgtcgtgtc

SEQ ID NO: 3668430 - DNA, 25 bp, Homo sapien
ggaatgatgggtgtcgtgtcagagg

SEQ ID NO: 3668431 - DNA, 25 bp, Homo sapien
gaatgatgggtgtcgtgtcagaggt

SEQ ID NO: 3668432 - DNA, 25 bp, Homo sapien
ggggaatgatgggtgtcgtgtcaga

SEQ ID NO: 3668433 - DNA, 25 bp, Homo sapien
gaacaggccggtggctgtaagagat

SEQ ID NO: 3668434 - DNA, 25 bp, Homo sapien
tcagaacaggccggtggctgtaaga

SEQ ID NO: 3668435 - DNA, 25 bp, Homo sapien
caggccggtggctgtaagagatgac

SEQ ID NO: 3668436 - DNA, 25 bp, Homo sapien
cagaacaggccggtggctgtaagag

SEQ ID NO: 3668437 - DNA, 25 bp, Homo sapien
agcgtcctccaggctggagcaagcg

SEQ ID NO: 3668438 - DNA, 25 bp, Homo sapien
gcgtcctccaggctggagcaagcgc

SEQ ID NO: 3668439 - DNA, 25 bp, Homo sapien
tgagcgtcctccaggctggagcaag

SEQ ID NO: 3668440 - DNA, 25 bp, Homo sapien
gagcgtcctccaggctggagcaagc

SEQ ID NO: 3668441 - DNA, 25 bp, Homo sapien
tcactgagtgttgtgccctgggttg

SEQ ID NO: 3668442 - DNA, 25 bp, Homo sapien
tggaccataggttcctcactgagtg

SEQ ID NO: 3668443 - DNA, 25 bp, Homo sapien
cagcctcgtgcgcagtggcagtgat

SEQ ID NO: 3668444 - DNA, 25 bp, Homo sapien
ggccattgagctaggtagacccctc

SEQ ID NO: 3668445 - DNA, 25 bp, Homo sapien
gagcggcattgttttcctgagcagc

SEQ ID NO: 3668446 - DNA, 25 bp, Homo sapien
gaacattgaaacgtgtgcaagcaca

SEQ ID NO: 3668447 - DNA, 25 bp, Homo sapien
cagagctttgcgttagcctccacag

SEQ ID NO: 3668448 - DNA, 25 bp, Homo sapien
gttaactgtcacttccgtggcccca

SEQ ID NO: 3668449 - DNA, 25 bp, Homo sapien
tattttcatacctttgtaaaatatc

SEQ ID NO: 3668450 - DNA, 25 bp, Homo sapien
tttaggccccaaactgatactagct

SEQ ID NO: 3668451 - DNA, 25 bp, Homo sapien
tctgcagctctcaccatcaagggct

SEQ ID NO: 3668452 - DNA, 25 bp, Homo sapien
gactgtagacagtcaggtcctgagg

SEQ ID NO: 3668453 - DNA, 25 bp, Homo sapien
tgtcatttggtgagacctgggctac

SEQ ID NO: 3668454 - DNA, 25 bp, Homo sapien
gaggctggccatgtctgtgccatga

SEQ ID NO: 3668455 - DNA, 25 bp, Homo sapien
gggcacgatccttgtctaccaccta

SEQ ID NO: 3668456 - DNA, 25 bp, Homo sapien
acttaggctctttctgtgcacaggg

SEQ ID NO: 3668457 - DNA, 25 bp, Homo sapien
ctgatgcagaggaacgtcagaggct

SEQ ID NO: 3668458 - DNA, 25 bp, Homo sapien
tttattaaacgggatctgacatctc

SEQ ID NO: 3668459 - DNA, 25 bp, Homo sapien
tgcttcttgcgatctggtcatccag

SEQ ID NO: 3668460 - DNA, 25 bp, Homo sapien
gactggggcttcgaggacagaacta

SEQ ID NO: 3668461 - DNA, 25 bp, Homo sapien
acactttctggtttgcttcttgcga

SEQ ID NO: 3668462 - DNA, 25 bp, Homo sapien
ctgctgtgatttgcacttaataggg

SEQ ID NO: 3668463 - DNA, 25 bp, Homo sapien
ccatgtcttgttgagttactgctgt

SEQ ID NO: 3668464 - DNA, 25 bp, Homo sapien
gggcttgaacaaggtcagacgtgta

SEQ ID NO: 3668465 - DNA, 25 bp, Homo sapien
tattagtggaggtcgaatggtgctc

SEQ ID NO: 3668466 - DNA, 25 bp, Homo sapien
tatgacctcacgtaataaaaatccc

SEQ ID NO: 3668467 - DNA, 25 bp, Homo sapien
tctccccgccaaacatggtgaaggg

SEQ ID NO: 3668468 - DNA, 25 bp, Homo sapien
cagcaatgggtagctccagacttgg

SEQ ID NO: 3668469 - DNA, 25 bp, Homo sapien
tgaagggcgtggataagtgacactc

SEQ ID NO: 3668470 - DNA, 25 bp, Homo sapien
gataaaggctactgggcccatctgt

SEQ ID NO: 3668471 - DNA, 25 bp, Homo sapien
tttatgtttaattcgcaagtaggga

SEQ ID NO: 3668472 - DNA, 25 bp, Homo sapien
ggtacaatcacatgttgttgagatg

SEQ ID NO: 3668473 - DNA, 25 bp, Homo sapien
gctcataagagcctaagagcttgat

SEQ ID NO: 3668474 - DNA, 25 bp, Homo sapien
tcgcgcagtccagaagccactgcat

SEQ ID NO: 3668475 - DNA, 25 bp, Homo sapien
cgtgtcctcgcttgcaccggagctg

SEQ ID NO: 3668476 - DNA, 25 bp, Homo sapien
gccactgcatgtgtcgtgtcctcgc

SEQ ID NO: 3668477 - DNA, 25 bp, Homo sapien
gtccagtcatcgcgcagtccagaag

SEQ ID NO: 3668478 - DNA, 25 bp, Homo sapien
cttgtctgcagacctagaagttact

SEQ ID NO: 3668479 - DNA, 25 bp, Homo sapien
ttcctcttgtctgcagacctagaag

SEQ ID NO: 3668480 - DNA, 25 bp, Homo sapien
tgtctgcagacctagaagttacttg

SEQ ID NO: 3668481 - DNA, 25 bp, Homo sapien
cctcttgtctgcagacctagaagtt

SEQ ID NO: 3668482 - DNA, 25 bp, Homo sapien
tgagaactcggcagacagtcttcct

SEQ ID NO: 3668483 - DNA, 25 bp, Homo sapien
aatggacttgctgtcactgatgggc

SEQ ID NO: 3668484 - DNA, 25 bp, Homo sapien
cactgatgggcacgtgagaactcgg

SEQ ID NO: 3668485 - DNA, 25 bp, Homo sapien
ttctgaatggacttgctgtcactga

SEQ ID NO: 3668486 - DNA, 25 bp, Homo sapien
ccctgtgagtaaggccctgaagtct

SEQ ID NO: 3668487 - DNA, 25 bp, Homo sapien
tataaagtgcctgccatctggagcc

SEQ ID NO: 3668488 - DNA, 25 bp, Homo sapien
cacagccctggctaatgttggagga

SEQ ID NO: 3668489 - DNA, 25 bp, Homo sapien
cagcagacgtgggatgtgagccaca

SEQ ID NO: 3668490 - DNA, 25 bp, Homo sapien
cttgccctcatggtagcagttgtag

SEQ ID NO: 3668491 - DNA, 25 bp, Homo sapien
tcttgccctcatggtagcagttgta

SEQ ID NO: 3668492 - DNA, 25 bp, Homo sapien
cctgcagatatgtggcgggaccagc

SEQ ID NO: 3668493 - DNA, 25 bp, Homo sapien
agagggactgactcctcttgtccgc

SEQ ID NO: 3668494 - DNA, 25 bp, Homo sapien
tcttgtccgctgaatggtgtgatgg

SEQ ID NO: 3668495 - DNA, 25 bp, Homo sapien
tgaggacggacctgttctcggcagc

SEQ ID NO: 3668496 - DNA, 25 bp, Homo sapien
gaagtcaagatgtcctaaggcccag

SEQ ID NO: 3668497 - DNA, 25 bp, Homo sapien
gaaggaccctagttcctagaggcat

SEQ ID NO: 3668498 - DNA, 25 bp, Homo sapien
caactcatacgtcctgtggtggcat

SEQ ID NO: 3668499 - DNA, 25 bp, Homo sapien
tgatgagggccaagatagaatctgt

SEQ ID NO: 3668500 - DNA, 25 bp, Homo sapien
tatagggataattactggcacctgc

SEQ ID NO: 3668501 - DNA, 25 bp, Homo sapien
gatgttaccaatcccgttcgctctg

SEQ ID NO: 3668502 - DNA, 25 bp, Homo sapien
ttgggcagttcacagtgagaccgac

SEQ ID NO: 3668503 - DNA, 25 bp, Homo sapien
gctggctgatcaccttgagcaactt

SEQ ID NO: 3668504 - DNA, 25 bp, Homo sapien
ctcccggtgatccatgaactctgac

SEQ ID NO: 3668505 - DNA, 25 bp, Homo sapien
cctccccagtaaaggcttctgtaga

SEQ ID NO: 3668506 - DNA, 25 bp, Homo sapien
tctgtagagagcatgctgggtctgc

SEQ ID NO: 3668507 - DNA, 25 bp, Homo sapien
tctcgtctcctccatggtggtcact

SEQ ID NO: 3668508 - DNA, 25 bp, Homo sapien
gtgtcctcagaacactctactcgca

SEQ ID NO: 3668509 - DNA, 25 bp, Homo sapien
gaggctctgtgaagccaggatgcct

SEQ ID NO: 3668510 - DNA, 25 bp, Homo sapien
caagaccaccgcaggatgggcagca

SEQ ID NO: 3668511 - DNA, 25 bp, Homo sapien
taagaagctggacttttgggcagtc

SEQ ID NO: 3668512 - DNA, 25 bp, Homo sapien
ggtgctctacaagcacagatgtgtc

SEQ ID NO: 3668513 - DNA, 25 bp, Homo sapien
tgctctacaagcacagatgtgtcac

SEQ ID NO: 3668514 - DNA, 25 bp, Homo sapien
tggtgctctacaagcacagatgtgt

SEQ ID NO: 3668515 - DNA, 25 bp, Homo sapien
gctctacaagcacagatgtgtcact

SEQ ID NO: 3668516 - DNA, 25 bp, Homo sapien
gaacagggacgccatggaaacttct

SEQ ID NO: 3668517 - DNA, 25 bp, Homo sapien
cacaccgcggtgaagaagtggttcc

SEQ ID NO: 3668518 - DNA, 25 bp, Homo sapien
gggccctaatcaacagagtcctctg

SEQ ID NO: 3668519 - DNA, 25 bp, Homo sapien
tcgttggcactaaaagccctgtgag

SEQ ID NO: 3668520 - DNA, 25 bp, Homo sapien
gatgggatgctctgaacactcaggc

SEQ ID NO: 3668521 - DNA, 25 bp, Homo sapien
tcaggccttgcacatccctcctcct

SEQ ID NO: 3668522 - DNA, 25 bp, Homo sapien
ggatgggatgctctgaacactcagg

SEQ ID NO: 3668523 - DNA, 25 bp, Homo sapien
gggatgctctgaacactcaggcctt

SEQ ID NO: 3668524 - DNA, 25 bp, Homo sapien
ttgaggagcccctcgatgatcagag

SEQ ID NO: 3668525 - DNA, 25 bp, Homo sapien
ctcagcccccaggcaatgttgagga

SEQ ID NO: 3668526 - DNA, 25 bp, Homo sapien
gagcccctcgatgatcagagtccct

SEQ ID NO: 3668527 - DNA, 25 bp, Homo sapien
ggcaatgttgaggagcccctcgatg

SEQ ID NO: 3668528 - DNA, 25 bp, Homo sapien
caagagatggcgagacatgttcggc

SEQ ID NO: 3668529 - DNA, 25 bp, Homo sapien
ccctggctgtagtcgtcccttcttg

SEQ ID NO: 3668530 - DNA, 25 bp, Homo sapien
catgttcggcttgcataggtgttgg

SEQ ID NO: 3668531 - DNA, 25 bp, Homo sapien
tagtaagaggctaaattcgtgtgaa

SEQ ID NO: 3668532 - DNA, 25 bp, Homo sapien
taactgcgtcttttgggagtgggcc

SEQ ID NO: 3668533 - DNA, 25 bp, Homo sapien
tgtgagtgctttacctcgaagaggg

SEQ ID NO: 3668534 - DNA, 25 bp, Homo sapien
gaatgtgtgccctctacaggagtta

SEQ ID NO: 3668535 - DNA, 25 bp, Homo sapien
ggcaaggcccagctactaactgcgt

SEQ ID NO: 3668536 - DNA, 25 bp, Homo sapien
ggacacatgaacatagtcagggcct

SEQ ID NO: 3668537 - DNA, 25 bp, Homo sapien
cggacacatgaacatagtcagggcc

SEQ ID NO: 3668538 - DNA, 25 bp, Homo sapien
agcatctgctggacggagagtgagc

SEQ ID NO: 3668539 - DNA, 25 bp, Homo sapien
tctgctggacggagagtgagcctgg

SEQ ID NO: 3668540 - DNA, 25 bp, Homo sapien
ctggacggagagtgagcctggccct

SEQ ID NO: 3668541 - DNA, 25 bp, Homo sapien
catctgctggacggagagtgagcct

SEQ ID NO: 3668542 - DNA, 25 bp, Homo sapien
gaggtgaggcctggatttcaaacca

SEQ ID NO: 3668543 - DNA, 25 bp, Homo sapien
aggtgaggcctggatttcaaaccaa

SEQ ID NO: 3668544 - DNA, 25 bp, Homo sapien
tgccggcagagaaagggagctcagg

SEQ ID NO: 3668545 - DNA, 25 bp, Homo sapien
ctgccggcagagaaagggagctcag

SEQ ID NO: 3668546 - DNA, 25 bp, Homo sapien
aagggagctcaggccaaggagaaga

SEQ ID NO: 3668547 - DNA, 25 bp, Homo sapien
gccggcagagaaagggagctcaggc

SEQ ID NO: 3668548 - DNA, 25 bp, Homo sapien
gaaaacagacaactgcagggctgag

SEQ ID NO: 3668549 - DNA, 25 bp, Homo sapien
aaacagacaactgcagggctgagat

SEQ ID NO: 3668550 - DNA, 25 bp, Homo sapien
ctgaaaacagacaactgcagggctg

SEQ ID NO: 3668551 - DNA, 25 bp, Homo sapien
acagacaactgcagggctgagatgg

SEQ ID NO: 3668552 - DNA, 25 bp, Homo sapien
tgttcccgttctggggcgatggctc

SEQ ID NO: 3668553 - DNA, 25 bp, Homo sapien
ggctgtgatgttcccgttctggggc

SEQ ID NO: 3668554 - DNA, 25 bp, Homo sapien
gtctgtggaactctcagccttgtgc

SEQ ID NO: 3668555 - DNA, 25 bp, Homo sapien
gctgtctgtggaactctcagccttg

SEQ ID NO: 3668556 - DNA, 25 bp, Homo sapien
ataaaaaggagcgagaatgagggca

SEQ ID NO: 3668557 - DNA, 25 bp, Homo sapien
gtccagcaggtgaagcccctcgttg

SEQ ID NO: 3668558 - DNA, 25 bp, Homo sapien
gccaggagagcgcagtgccttctgt

SEQ ID NO: 3668559 - DNA, 25 bp, Homo sapien
ttgtggttgtgagccaagcccctct

SEQ ID NO: 3668560 - DNA, 25 bp, Homo sapien
tctgtcttagggtgcccatggaggt

SEQ ID NO: 3668561 - DNA, 25 bp, Homo sapien
gtcttagggtgcccatggaggtctt

SEQ ID NO: 3668562 - DNA, 25 bp, Homo sapien
gtctctgtcttagggtgcccatgga

SEQ ID NO: 3668563 - DNA, 25 bp, Homo sapien
cttagggtgcccatggaggtctttg

SEQ ID NO: 3668564 - DNA, 25 bp, Homo sapien
gtgagacccagacagggtaacctgg

SEQ ID NO: 3668565 - DNA, 25 bp, Homo sapien
tcccagcttgcagataggaaggtga

SEQ ID NO: 3668566 - DNA, 25 bp, Homo sapien
gcctgctgtcgggagatctggcacc

SEQ ID NO: 3668567 - DNA, 25 bp, Homo sapien
agagccctgtggtcacgtgcactgg

SEQ ID NO: 3668568 - DNA, 25 bp, Homo sapien
tctggctcatgcaactggcgtcgct

SEQ ID NO: 3668569 - DNA, 25 bp, Homo sapien
gtcgctcttggtccgcatcagctgg

SEQ ID NO: 3668570 - DNA, 25 bp, Homo sapien
tggcgtcgctcttggtccgcatcag

SEQ ID NO: 3668571 - DNA, 25 bp, Homo sapien
tgcaactggcgtcgctcttggtccg

SEQ ID NO: 3668572 - DNA, 25 bp, Homo sapien
atgattgtagaagtggccgttgata

SEQ ID NO: 3668573 - DNA, 25 bp, Homo sapien
tggccgttgatagagaaccggtgtc

SEQ ID NO: 3668574 - DNA, 25 bp, Homo sapien
tagaagtggccgttgatagagaacc

SEQ ID NO: 3668575 - DNA, 25 bp, Homo sapien
atagagaaccggtgtcgccggatgc

SEQ ID NO: 3668576 - DNA, 25 bp, Homo sapien
ttttcctcctgagggcacaggaatg

SEQ ID NO: 3668577 - DNA, 25 bp, Homo sapien
ccacacaggtcatggtgcttgctgt

SEQ ID NO: 3668578 - DNA, 25 bp, Homo sapien
ggcctggctccccatgcgcccaggg

SEQ ID NO: 3668579 - DNA, 25 bp, Homo sapien
ctcctgagggcacaggaatgccagc

SEQ ID NO: 3668580 - DNA, 25 bp, Homo sapien
gaaagatatggcctgtcacaagacg

SEQ ID NO: 3668581 - DNA, 25 bp, Homo sapien
catccttggacaaaaggctgtgtgc

SEQ ID NO: 3668582 - DNA, 25 bp, Homo sapien
gctgcttcaactggaaatctcggct

SEQ ID NO: 3668583 - DNA, 25 bp, Homo sapien
tgttcccagggatcaaccaatcgag

SEQ ID NO: 3668584 - DNA, 25 bp, Homo sapien
tgtagaacacaaggcgaagcgatct

SEQ ID NO: 3668585 - DNA, 25 bp, Homo sapien
cacgtatgacactatggttgcctaa

SEQ ID NO: 3668586 - DNA, 25 bp, Homo sapien
tcccaaggaggtagctaaggctcag

SEQ ID NO: 3668587 - DNA, 25 bp, Homo sapien
cactgtttgaaagcgcgggtctaaa

SEQ ID NO: 3668588 - DNA, 25 bp, Homo sapien
gtccattcacgctgatgcacacata

SEQ ID NO: 3668589 - DNA, 25 bp, Homo sapien
gctgtagtagtgcactccttccaga

SEQ ID NO: 3668590 - DNA, 25 bp, Homo sapien
cacataagctgttcccagacctggg

SEQ ID NO: 3668591 - DNA, 25 bp, Homo sapien
gagacactccgggaagctgtagtag

SEQ ID NO: 3668592 - DNA, 25 bp, Homo sapien
tcacattggtcacggatccataggc

SEQ ID NO: 3668593 - DNA, 25 bp, Homo sapien
cctgcagggttgtcatggtgctgtt

SEQ ID NO: 3668594 - DNA, 25 bp, Homo sapien
tggtgctgttgaccctcacattggt

SEQ ID NO: 3668595 - DNA, 25 bp, Homo sapien
cataggctggagtaaacacggaggt

SEQ ID NO: 3668596 - DNA, 25 bp, Homo sapien
caggaagtcagatcacggtgcttgg

SEQ ID NO: 3668597 - DNA, 25 bp, Homo sapien
tcacaggaagtcagatcacggtgct

SEQ ID NO: 3668598 - DNA, 25 bp, Homo sapien
gcagtcacaggaagtcagatcacgg

SEQ ID NO: 3668599 - DNA, 25 bp, Homo sapien
agtcagatcacggtgcttggagatg

SEQ ID NO: 3668600 - DNA, 25 bp, Homo sapien
cagactcgtgaacgatgtagagtgc

SEQ ID NO: 3668601 - DNA, 25 bp, Homo sapien
ccccagactcgtgaacgatgtagag

SEQ ID NO: 3668602 - DNA, 25 bp, Homo sapien
cgtgaacgatgtagagtgcgaactc

SEQ ID NO: 3668603 - DNA, 25 bp, Homo sapien
acgatgtagagtgcgaactcactgg

SEQ ID NO: 3668604 - DNA, 25 bp, Homo sapien
catccatttctctggaagaggcgga

SEQ ID NO: 3668605 - DNA, 25 bp, Homo sapien
agcttggtgggattctccttcagaa

SEQ ID NO: 3668606 - DNA, 25 bp, Homo sapien
gcttcctatagcttggtgggattct

SEQ ID NO: 3668607 - DNA, 25 bp, Homo sapien
agagggaggcttcctatagcttggt

SEQ ID NO: 3668608 - DNA, 25 bp, Homo sapien
ttaatctaaatacagggccccagcc

SEQ ID NO: 3668609 - DNA, 25 bp, Homo sapien
tgactcggcgccaaggagctaggta

SEQ ID NO: 3668610 - DNA, 25 bp, Homo sapien
gccagtgaacctaaatgggtagaaa

SEQ ID NO: 3668611 - DNA, 25 bp, Homo sapien
tgcatgatgcaagtgttaacaaact

SEQ ID NO: 3668612 - DNA, 25 bp, Homo sapien
gattcctgctcatgcagaagggagg

SEQ ID NO: 3668613 - DNA, 25 bp, Homo sapien
gttaatcaccagagacaacccgagc

SEQ ID NO: 3668614 - DNA, 25 bp, Homo sapien
gctaacagcgctgccctgagagatt

SEQ ID NO: 3668615 - DNA, 25 bp, Homo sapien
acataaatttgtcaaggtgtgcccc

SEQ ID NO: 3668616 - DNA, 25 bp, Homo sapien
ggagattaggatcacctctgtctgt

SEQ ID NO: 3668617 - DNA, 25 bp, Homo sapien
ttacaaaaatcacgggagattagga

SEQ ID NO: 3668618 - DNA, 25 bp, Homo sapien
ttaggatcacctctgtctgttccag

SEQ ID NO: 3668619 - DNA, 25 bp, Homo sapien
aatcacgggagattaggatcacctc

SEQ ID NO: 3668620 - DNA, 25 bp, Homo sapien
ctcgcagtcttttaattttgtccgc

SEQ ID NO: 3668621 - DNA, 25 bp, Homo sapien
ggaaatcagcgggtactcgcagtct

SEQ ID NO: 3668622 - DNA, 25 bp, Homo sapien
gatcctggcgatcttctcacatggc

SEQ ID NO: 3668623 - DNA, 25 bp, Homo sapien
acgcccaagtcagcttccatcagga

SEQ ID NO: 3668624 - DNA, 25 bp, Homo sapien
gctggcgcctccctgtgctaggctg

SEQ ID NO: 3668625 - DNA, 25 bp, Homo sapien
tcttctttcccctaagctgctggtg

SEQ ID NO: 3668626 - DNA, 25 bp, Homo sapien
catcaactgacagggctctggccag

SEQ ID NO: 3668627 - DNA, 25 bp, Homo sapien
catggttttataggacccaaattct

SEQ ID NO: 3668628 - DNA, 25 bp, Homo sapien
tttcaaacttaatgtactgagcgac

SEQ ID NO: 3668629 - DNA, 25 bp, Homo sapien
tcatggtcagtttgattatttctct

SEQ ID NO: 3668630 - DNA, 25 bp, Homo sapien
catggtcagtttgattatttctctt

SEQ ID NO: 3668631 - DNA, 25 bp, Homo sapien
ttcatggtcagtttgattatttctc

SEQ ID NO: 3668632 - DNA, 25 bp, Homo sapien
gtagagcagagatcgggaagcccat

SEQ ID NO: 3668633 - DNA, 25 bp, Homo sapien
tttccacgggtcattcaaccagagg

SEQ ID NO: 3668634 - DNA, 25 bp, Homo sapien
tatgcggcaaccttccttgtgctgg

SEQ ID NO: 3668635 - DNA, 25 bp, Homo sapien
ggaagcccatgtttcagcccagatt

SEQ ID NO: 3668636 - DNA, 25 bp, Homo sapien
gccaagaggactcactgaggccaga

SEQ ID NO: 3668637 - DNA, 25 bp, Homo sapien
aagaggactcactgaggccagacag

SEQ ID NO: 3668638 - DNA, 25 bp, Homo sapien
gggagacatcgccaagaggactcac

SEQ ID NO: 3668639 - DNA, 25 bp, Homo sapien
catcgccaagaggactcactgaggc

SEQ ID NO: 3668640 - DNA, 25 bp, Homo sapien
cgctgcagcatcgtcagacgcaggg

SEQ ID NO: 3668641 - DNA, 25 bp, Homo sapien
aggcgctgcagcatcgtcagacgca

SEQ ID NO: 3668642 - DNA, 25 bp, Homo sapien
ctccaggcgctgcagcatcgtcaga

SEQ ID NO: 3668643 - DNA, 25 bp, Homo sapien
agcatcgtcagacgcagggcttgga

SEQ ID NO: 3668644 - DNA, 25 bp, Homo sapien
gctagatctcatacctgctggcagg

SEQ ID NO: 3668645 - DNA, 25 bp, Homo sapien
ggcagagtcgacaaaacagtgggca

SEQ ID NO: 3668646 - DNA, 25 bp, Homo sapien
ttcagagaggtagacacacaggcac

SEQ ID NO: 3668647 - DNA, 25 bp, Homo sapien
gatgggcacccgtaaggagcttcta

SEQ ID NO: 3668648 - DNA, 25 bp, Homo sapien
tgtcggctcctagagcagcgagttg

SEQ ID NO: 3668649 - DNA, 25 bp, Homo sapien
agtgacgcctgcgtgttccatggca

SEQ ID NO: 3668650 - DNA, 25 bp, Homo sapien
gtgactctattgctcatcatccagg

SEQ ID NO: 3668651 - DNA, 25 bp, Homo sapien
gggccctcctgatgctaagattctg

SEQ ID NO: 3668652 - DNA, 25 bp, Homo sapien
tctcctgatgagaagacccctagac

SEQ ID NO: 3668653 - DNA, 25 bp, Homo sapien
gacagactggctccatctttgtgcc

SEQ ID NO: 3668654 - DNA, 25 bp, Homo sapien
gctgtcctccacctgagattgtaaa

SEQ ID NO: 3668655 - DNA, 25 bp, Homo sapien
ggcacaaggcagtcactcagttaca

SEQ ID NO: 3668656 - DNA, 25 bp, Homo sapien
tgtttggcaacatggatccccagcc

SEQ ID NO: 3668657 - DNA, 25 bp, Homo sapien
tgatcaccactgaggaactgagggc

SEQ ID NO: 3668658 - DNA, 25 bp, Homo sapien
ggagttcccattcctaggtctgaga

SEQ ID NO: 3668659 - DNA, 25 bp, Homo sapien
tcatgtgcggtaacaacagtggtcc

SEQ ID NO: 3668660 - DNA, 25 bp, Homo sapien
aagttgactaatgtacctcccacca

SEQ ID NO: 3668661 - DNA, 25 bp, Homo sapien
aaagtctccataaaagctcccaaag

SEQ ID NO: 3668662 - DNA, 25 bp, Homo sapien
aatacatagttgatcttctccccgt

SEQ ID NO: 3668663 - DNA, 25 bp, Homo sapien
cccaccaaccgtaagagataggaat

SEQ ID NO: 3668664 - DNA, 25 bp, Homo sapien
gaagaaatgtgctccgttcaccgtg

SEQ ID NO: 3668665 - DNA, 25 bp, Homo sapien
taaccgcccctgtgtgtggtcgagg

SEQ ID NO: 3668666 - DNA, 25 bp, Homo sapien
ctctaggaaagtggcggagcgaccc

SEQ ID NO: 3668667 - DNA, 25 bp, Homo sapien
tgagaccctggtacttttcacgaag

SEQ ID NO: 3668668 - DNA, 25 bp, Homo sapien
cccagtccaagcctcccgttcccag

SEQ ID NO: 3668669 - DNA, 25 bp, Homo sapien
caagcctcccgttcccagcactccg

SEQ ID NO: 3668670 - DNA, 25 bp, Homo sapien
cagtccaagcctcccgttcccagca

SEQ ID NO: 3668671 - DNA, 25 bp, Homo sapien
ccagtccaagcctcccgttcccagc

SEQ ID NO: 3668672 - DNA, 25 bp, Homo sapien
tcagactgtcaaatccacctacgga

SEQ ID NO: 3668673 - DNA, 25 bp, Homo sapien
ttaaggaaacgagggcacaatgcta

SEQ ID NO: 3668674 - DNA, 25 bp, Homo sapien
gcctgtactcttagtggcagccaca

SEQ ID NO: 3668675 - DNA, 25 bp, Homo sapien
cagaccctagcagtttgactccaga

SEQ ID NO: 3668676 - DNA, 25 bp, Homo sapien
atatctcttcaacccaccaaaattg

SEQ ID NO: 3668677 - DNA, 25 bp, Homo sapien
aattacagatatctgttaactattc

SEQ ID NO: 3668678 - DNA, 25 bp, Homo sapien
ctcttcaacccaccaaaattgcatt

SEQ ID NO: 3668679 - DNA, 25 bp, Homo sapien
tacagatatctgttaactattcaat

SEQ ID NO: 3668680 - DNA, 25 bp, Homo sapien
agtgtttcatttcctagaggtgtac

SEQ ID NO: 3668681 - DNA, 25 bp, Homo sapien
tgtaagagagtttacaggcttcttc

SEQ ID NO: 3668682 - DNA, 25 bp, Homo sapien
tttgtaagagagtttacaggcttct

SEQ ID NO: 3668683 - DNA, 25 bp, Homo sapien
cctagaggtgtacagctcagaattt

SEQ ID NO: 3668684 - DNA, 25 bp, Homo sapien
gagtcaaatcgaatagtcatgcccc

SEQ ID NO: 3668685 - DNA, 25 bp, Homo sapien
ggcttgagctccgagaaatacccgc

SEQ ID NO: 3668686 - DNA, 25 bp, Homo sapien
ccccgtatggatccgtcgatgctga

SEQ ID NO: 3668687 - DNA, 25 bp, Homo sapien
tctgagtctactgaagcttgagtca

SEQ ID NO: 3668688 - DNA, 25 bp, Homo sapien
gctttccaagagggtaagtgagtct

SEQ ID NO: 3668689 - DNA, 25 bp, Homo sapien
tccaagagggtaagtgagtcttcac

SEQ ID NO: 3668690 - DNA, 25 bp, Homo sapien
tttccaagagggtaagtgagtcttc

SEQ ID NO: 3668691 - DNA, 25 bp, Homo sapien
ttccaagagggtaagtgagtcttca

SEQ ID NO: 3668692 - DNA, 25 bp, Homo sapien
ttaacggagaccagccacagacttc

SEQ ID NO: 3668693 - DNA, 25 bp, Homo sapien
taacggagaccagccacagacttcc

SEQ ID NO: 3668694 - DNA, 25 bp, Homo sapien
agaccagccacagacttccttcctg

SEQ ID NO: 3668695 - DNA, 25 bp, Homo sapien
ccagccacagacttccttcctgtac

SEQ ID NO: 3668696 - DNA, 25 bp, Homo sapien
aaaactgagtagtcattggcatgcc

SEQ ID NO: 3668697 - DNA, 25 bp, Homo sapien
ggtcaaggatgtcatgctccctcaa

SEQ ID NO: 3668698 - DNA, 25 bp, Homo sapien
gtggaaaacaaacgacacagcagtt

SEQ ID NO: 3668699 - DNA, 25 bp, Homo sapien
tctcaaaaagctgtcaaaaagccct

SEQ ID NO: 3668700 - DNA, 25 bp, Homo sapien
cagggctatccaaagctcacagtct

SEQ ID NO: 3668701 - DNA, 25 bp, Homo sapien
agaaacatgtttgccggactcctta

SEQ ID NO: 3668702 - DNA, 25 bp, Homo sapien
tagagtctgacacttggcaccattc

SEQ ID NO: 3668703 - DNA, 25 bp, Homo sapien
tgacaaacatttaagcagggctatc

SEQ ID NO: 3668704 - DNA, 25 bp, Homo sapien
caaatatgccttgcacatcctttac

SEQ ID NO: 3668705 - DNA, 25 bp, Homo sapien
tatgccttgcacatcctttactttc

SEQ ID NO: 3668706 - DNA, 25 bp, Homo sapien
aatatgccttgcacatcctttactt

SEQ ID NO: 3668707 - DNA, 25 bp, Homo sapien
tgccttgcacatcctttactttcat

SEQ ID NO: 3668708 - DNA, 25 bp, Homo sapien
tctaaaatatctgcgttggtctctg

SEQ ID NO: 3668709 - DNA, 25 bp, Homo sapien
aaatatctgcgttggtctctgctgc

SEQ ID NO: 3668710 - DNA, 25 bp, Homo sapien
gtctaaaatatctgcgttggtctct

SEQ ID NO: 3668711 - DNA, 25 bp, Homo sapien
taaaatatctgcgttggtctctgct

SEQ ID NO: 3668712 - DNA, 25 bp, Homo sapien
atttggtgtgattgctcctgcgatt

SEQ ID NO: 3668713 - DNA, 25 bp, Homo sapien
tagatcttcaatttttggagccaaa

SEQ ID NO: 3668714 - DNA, 25 bp, Homo sapien
cctgcgatttgtggctaccatcttg

SEQ ID NO: 3668715 - DNA, 25 bp, Homo sapien
gattgctcctgcgatttgtggctac

SEQ ID NO: 3668716 - DNA, 25 bp, Homo sapien
tgtggcccgccaggtcctgcaagcc

SEQ ID NO: 3668717 - DNA, 25 bp, Homo sapien
gaccaagatgcaaactgaaacctca

SEQ ID NO: 3668718 - DNA, 25 bp, Homo sapien
tcagctaaggctccaagagtgtggc

SEQ ID NO: 3668719 - DNA, 25 bp, Homo sapien
aaaaggaccaagatgcaaactgaaa

SEQ ID NO: 3668720 - DNA, 25 bp, Homo sapien
ctacacgtgagctgcttctacagcg

SEQ ID NO: 3668721 - DNA, 25 bp, Homo sapien
agctgcttctacagcgcggcacctg

SEQ ID NO: 3668722 - DNA, 25 bp, Homo sapien
cacctgtacctcttgggtggtgctg

SEQ ID NO: 3668723 - DNA, 25 bp, Homo sapien
cggcacctgtacctcttgggtggtg

SEQ ID NO: 3668724 - DNA, 25 bp, Homo sapien
ttgctgcctacgataagaactggtt

SEQ ID NO: 3668725 - DNA, 25 bp, Homo sapien
agcttgctgcctacgataagaactg

SEQ ID NO: 3668726 - DNA, 25 bp, Homo sapien
atcaagccggccaagcacagagagc

SEQ ID NO: 3668727 - DNA, 25 bp, Homo sapien
gaatgggtggacaccatcaagccgg

SEQ ID NO: 3668728 - DNA, 25 bp, Homo sapien
ccattcctgtatgaagacatcctca

SEQ ID NO: 3668729 - DNA, 25 bp, Homo sapien
tgatcctatcaaagtagccaccaat

SEQ ID NO: 3668730 - DNA, 25 bp, Homo sapien
ctagtctacaattactggaatgttt

SEQ ID NO: 3668731 - DNA, 25 bp, Homo sapien
ccaagctccttggcctgaactgcat

SEQ ID NO: 3668732 - DNA, 25 bp, Homo sapien
ggttattgtttgcatccacaagaca

SEQ ID NO: 3668733 - DNA, 25 bp, Homo sapien
attgaatatgaggttattgtttgca

SEQ ID NO: 3668734 - DNA, 25 bp, Homo sapien
tatgaggttattgtttgcatccaca

SEQ ID NO: 3668735 - DNA, 25 bp, Homo sapien
gaatatgaggttattgtttgcatcc

SEQ ID NO: 3668736 - DNA, 25 bp, Homo sapien
ctctgccacagagaactgctagctg

SEQ ID NO: 3668737 - DNA, 25 bp, Homo sapien
ggcccagggatctctctgccacaga

SEQ ID NO: 3668738 - DNA, 25 bp, Homo sapien
cacagagaactgctagctgctgggc

SEQ ID NO: 3668739 - DNA, 25 bp, Homo sapien
actgctagctgctgggccaagtcat

SEQ ID NO: 3668740 - DNA, 25 bp, Homo sapien
caaggtgaagcggatgaatgtgtac

SEQ ID NO: 3668741 - DNA, 25 bp, Homo sapien
ttgaagcctgccctggttacactgg

SEQ ID NO: 3668742 - DNA, 25 bp, Homo sapien
cactggagtccaaggtgaagcggat

SEQ ID NO: 3668743 - DNA, 25 bp, Homo sapien
aaggatgcattgaagcctgccctgg

SEQ ID NO: 3668744 - DNA, 25 bp, Homo sapien
acgtaatgatcccgtgtctgcatgc

SEQ ID NO: 3668745 - DNA, 25 bp, Homo sapien
gggacgtaatgatcccgtgtctgca

SEQ ID NO: 3668746 - DNA, 25 bp, Homo sapien
gacgtaatgatcccgtgtctgcatg

SEQ ID NO: 3668747 - DNA, 25 bp, Homo sapien
ggacgtaatgatcccgtgtctgcat

SEQ ID NO: 3668748 - DNA, 25 bp, Homo sapien
agaagaatctcggaaaggctgttca

SEQ ID NO: 3668749 - DNA, 25 bp, Homo sapien
gaagaatctcggaaaggctgttcaa

SEQ ID NO: 3668750 - DNA, 25 bp, Homo sapien
caagaagaatctcggaaaggctgtt

SEQ ID NO: 3668751 - DNA, 25 bp, Homo sapien
tgcaagaagaatctcggaaaggctg

SEQ ID NO: 3668752 - DNA, 25 bp, Homo sapien
tcctccacagggtccgaagggtgga

SEQ ID NO: 3668753 - DNA, 25 bp, Homo sapien
ccgctaagatccaaatgcaatcagc

SEQ ID NO: 3668754 - DNA, 25 bp, Homo sapien
gctaagatccaaatgcaatcagcgt

SEQ ID NO: 3668755 - DNA, 25 bp, Homo sapien
taagatccaaatgcaatcagcgtgc

SEQ ID NO: 3668756 - DNA, 25 bp, Homo sapien
ctaagatccaaatgcaatcagcgtg

SEQ ID NO: 3668757 - DNA, 25 bp, Homo sapien
actgaatacgaggctgggcaaataa

SEQ ID NO: 3668758 - DNA, 25 bp, Homo sapien
acactgaatacgaggctgggcaaat

SEQ ID NO: 3668759 - DNA, 25 bp, Homo sapien
cactgaatacgaggctgggcaaata

SEQ ID NO: 3668760 - DNA, 25 bp, Homo sapien
tatggaagcgttagatggccaatgc

SEQ ID NO: 3668761 - DNA, 25 bp, Homo sapien
ggaagcgttagatggccaatgcttt

SEQ ID NO: 3668762 - DNA, 25 bp, Homo sapien
ctctatatggaagcgttagatggcc

SEQ ID NO: 3668763 - DNA, 25 bp, Homo sapien
aagttgtctctatatggaagcgtta

SEQ ID NO: 3668764 - DNA, 25 bp, Homo sapien
aggaatggtgtttgcacagtatctt

SEQ ID NO: 3668765 - DNA, 25 bp, Homo sapien
atgctgtcaggaatggtgtttgcac

SEQ ID NO: 3668766 - DNA, 25 bp, Homo sapien
ctagaagtgtctatgctgtcaggaa

SEQ ID NO: 3668767 - DNA, 25 bp, Homo sapien
gaatggtgtttgcacagtatcttcc

SEQ ID NO: 3668768 - DNA, 25 bp, Homo sapien
cttccatgctggattcaaattgcag

SEQ ID NO: 3668769 - DNA, 25 bp, Homo sapien
tcctgaggcagtcagagagccgtct

SEQ ID NO: 3668770 - DNA, 25 bp, Homo sapien
gacaaacctgaccacggcagtattg

SEQ ID NO: 3668771 - DNA, 25 bp, Homo sapien
aaattgcagtctgaatcctgaggca

SEQ ID NO: 3668772 - DNA, 25 bp, Homo sapien
ttgcaggacagatgcgtggccagcc

SEQ ID NO: 3668773 - DNA, 25 bp, Homo sapien
tccactcgtagatccggccatgagg

SEQ ID NO: 3668774 - DNA, 25 bp, Homo sapien
tgggagaagtagatgttccagcaga

SEQ ID NO: 3668775 - DNA, 25 bp, Homo sapien
ctaaacgttagggtgatctgccttc

SEQ ID NO: 3668776 - DNA, 25 bp, Homo sapien
ccatcttactgcatatttcctagga

SEQ ID NO: 3668777 - DNA, 25 bp, Homo sapien
catcttactgcatatttcctaggag

SEQ ID NO: 3668778 - DNA, 25 bp, Homo sapien
atcttactgcatatttcctaggagg

SEQ ID NO: 3668779 - DNA, 25 bp, Homo sapien
tgcttacattcacactactacacag

SEQ ID NO: 3668780 - DNA, 25 bp, Homo sapien
ctactacacagtttctctagctggg

SEQ ID NO: 3668781 - DNA, 25 bp, Homo sapien
actactacacagtttctctagctgg

SEQ ID NO: 3668782 - DNA, 25 bp, Homo sapien
cattcacactactacacagtttctc

SEQ ID NO: 3668783 - DNA, 25 bp, Homo sapien
actggaggtatgagaagcagtgaat

SEQ ID NO: 3668784 - DNA, 25 bp, Homo sapien
ggtatgagaagcagtgaatcctcca

SEQ ID NO: 3668785 - DNA, 25 bp, Homo sapien
gaatcctccatacggcctagatcca

SEQ ID NO: 3668786 - DNA, 25 bp, Homo sapien
agtgaatcctccatacggcctagat

SEQ ID NO: 3668787 - DNA, 25 bp, Homo sapien
aaatgaagtacatttacaacatccc

SEQ ID NO: 3668788 - DNA, 25 bp, Homo sapien
aaaatgaagtacatttacaacatcc

SEQ ID NO: 3668789 - DNA, 25 bp, Homo sapien
aactgtgctagaagctcatctaatg

SEQ ID NO: 3668790 - DNA, 25 bp, Homo sapien
caatcctcatggtaacatgactgaa

SEQ ID NO: 3668791 - DNA, 25 bp, Homo sapien
tatggaacaggtcacaccaatcctc

SEQ ID NO: 3668792 - DNA, 25 bp, Homo sapien
ttaaattcaccatagcagcttcttc

SEQ ID NO: 3668793 - DNA, 25 bp, Homo sapien
cttttaataaaggaacagatgcttc

SEQ ID NO: 3668794 - DNA, 25 bp, Homo sapien
cccttttaataaaggaacagatgct

SEQ ID NO: 3668795 - DNA, 25 bp, Homo sapien
ccttttaataaaggaacagatgctt

SEQ ID NO: 3668796 - DNA, 25 bp, Homo sapien
cattcacagtttaggtttctcgagt

SEQ ID NO: 3668797 - DNA, 25 bp, Homo sapien
cacagtttaggtttctcgagtaatt

SEQ ID NO: 3668798 - DNA, 25 bp, Homo sapien
ccattcacagtttaggtttctcgag

SEQ ID NO: 3668799 - DNA, 25 bp, Homo sapien
agtccattcacagtttaggtttctc

SEQ ID NO: 3668800 - DNA, 25 bp, Homo sapien
gaaattggagtcattcaaggagggc

SEQ ID NO: 3668801 - DNA, 25 bp, Homo sapien
ggtttccccatgacacatcacttgg

SEQ ID NO: 3668802 - DNA, 25 bp, Homo sapien
caatggcaagtggtccaaggtttcc

SEQ ID NO: 3668803 - DNA, 25 bp, Homo sapien
tcaaaagtcgaggagtgcaggctgc

SEQ ID NO: 3668804 - DNA, 25 bp, Homo sapien
tgcaggaggaccactcccagtgcct

SEQ ID NO: 3668805 - DNA, 25 bp, Homo sapien
ggaggtgaagcagatcatcccaatg

SEQ ID NO: 3668806 - DNA, 25 bp, Homo sapien
aatgctcaagaagtacccggtgcac

SEQ ID NO: 3668807 - DNA, 25 bp, Homo sapien
gcagatcatcccaatgctcaagaag

SEQ ID NO: 3668808 - DNA, 25 bp, Homo sapien
tctccttcgctgacttcgggtctgc

SEQ ID NO: 3668809 - DNA, 25 bp, Homo sapien
ttcgggtctgcacgggggcagctgc

SEQ ID NO: 3668810 - DNA, 25 bp, Homo sapien
gcctcttctccttcgctgacttcgg

SEQ ID NO: 3668811 - DNA, 25 bp, Homo sapien
tcttctccttcgctgacttcgggtc

SEQ ID NO: 3668812 - DNA, 25 bp, Homo sapien
ttacgtagataagtgatgcaaccat

SEQ ID NO: 3668813 - DNA, 25 bp, Homo sapien
tttacgtagataagtgatgcaacca

SEQ ID NO: 3668814 - DNA, 25 bp, Homo sapien
tacgtagataagtgatgcaaccatt

SEQ ID NO: 3668815 - DNA, 25 bp, Homo sapien
catctttactgccatagtagtgaag

SEQ ID NO: 3668816 - DNA, 25 bp, Homo sapien
atcccccgccagtctttatagtcat

SEQ ID NO: 3668817 - DNA, 25 bp, Homo sapien
gggcatcccagctcaggtacatttg

SEQ ID NO: 3668818 - DNA, 25 bp, Homo sapien
tagtgaagtatagctgccacttagc

SEQ ID NO: 3668819 - DNA, 25 bp, Homo sapien
caagggtgcagcctcatcaggtgtt

SEQ ID NO: 3668820 - DNA, 25 bp, Homo sapien
gcctcatcaggtgttccttcagatg

SEQ ID NO: 3668821 - DNA, 25 bp, Homo sapien
gttctttccgccaagggtgcagcct

SEQ ID NO: 3668822 - DNA, 25 bp, Homo sapien
tcaggtgttctttccgccaagggtg

SEQ ID NO: 3668823 - DNA, 25 bp, Homo sapien
caaactttccagatgttgctttccc

SEQ ID NO: 3668824 - DNA, 25 bp, Homo sapien
tcaaactttccagatgttgctttcc

SEQ ID NO: 3668825 - DNA, 25 bp, Homo sapien
tcttttgtaggacacgtgagcatct

SEQ ID NO: 3668826 - DNA, 25 bp, Homo sapien
cttttgtaggacacgtgagcatctt

SEQ ID NO: 3668827 - DNA, 25 bp, Homo sapien
ttcttttgtaggacacgtgagcatc

SEQ ID NO: 3668828 - DNA, 25 bp, Homo sapien
ctgaatatagactctacagaactca

SEQ ID NO: 3668829 - DNA, 25 bp, Homo sapien
atatagactctacagaactcacatc

SEQ ID NO: 3668830 - DNA, 25 bp, Homo sapien
atagactctacagaactcacatcca

SEQ ID NO: 3668831 - DNA, 25 bp, Homo sapien
gaatatagactctacagaactcaca

SEQ ID NO: 3668832 - DNA, 25 bp, Homo sapien
atctatgattgtcaagcaggatcca

SEQ ID NO: 3668833 - DNA, 25 bp, Homo sapien
tatgattgtcaagcaggatccagta

SEQ ID NO: 3668834 - DNA, 25 bp, Homo sapien
aactacaaaattcaagtcgacagga

SEQ ID NO: 3668835 - DNA, 25 bp, Homo sapien
tacaaaattcaagtcgacaggattc

SEQ ID NO: 3668836 - DNA, 25 bp, Homo sapien
gaatgtgaacttaccccttcgtgta

SEQ ID NO: 3668837 - DNA, 25 bp, Homo sapien
tcaggatacaaagactctaggtgca

SEQ ID NO: 3668838 - DNA, 25 bp, Homo sapien
caaggtgatgtcgtaaaactggaac

SEQ ID NO: 3668839 - DNA, 25 bp, Homo sapien
tgaaagtgaaatcgggccaggtgca

SEQ ID NO: 3668840 - DNA, 25 bp, Homo sapien
ttgttagatcttatggcgctcattc

SEQ ID NO: 3668841 - DNA, 25 bp, Homo sapien
tgttcagttgctgtctttgttgctt

SEQ ID NO: 3668842 - DNA, 25 bp, Homo sapien
tcttatggcgctcattcaataattc

SEQ ID NO: 3668843 - DNA, 25 bp, Homo sapien
tatggcgctcattcaataattccaa

SEQ ID NO: 3668844 - DNA, 25 bp, Homo sapien
ttgtcctgactctgatgtgggcatc

SEQ ID NO: 3668845 - DNA, 25 bp, Homo sapien
tcttctttttgtcctgactctgatg

SEQ ID NO: 3668846 - DNA, 25 bp, Homo sapien
agaaactgaaggtgatttcgtatct

SEQ ID NO: 3668847 - DNA, 25 bp, Homo sapien
aaactgaaggtgatttcgtatcttc

SEQ ID NO: 3668848 - DNA, 25 bp, Homo sapien
ttgctgttaccactatgcagctgct

SEQ ID NO: 3668849 - DNA, 25 bp, Homo sapien
tgcttctatcttaagtggtgaggcc

SEQ ID NO: 3668850 - DNA, 25 bp, Homo sapien
tatctcttccacatccatagctgtg

SEQ ID NO: 3668851 - DNA, 25 bp, Homo sapien
tcattgctgttaccactatgcagct

SEQ ID NO: 3668852 - DNA, 25 bp, Homo sapien
tcccttgctctttcatgagaaggaa

SEQ ID NO: 3668853 - DNA, 25 bp, Homo sapien
ctgcacccaagaatattgataggct

SEQ ID NO: 3668854 - DNA, 25 bp, Homo sapien
tttcatgagaaggaactgcacccaa

SEQ ID NO: 3668855 - DNA, 25 bp, Homo sapien
ccttttgattcacttactgcaattt

SEQ ID NO: 3668856 - DNA, 25 bp, Homo sapien
ccactatactgaggtgccctttttg

SEQ ID NO: 3668857 - DNA, 25 bp, Homo sapien
cttggtcttgtatagcagaagctag

SEQ ID NO: 3668858 - DNA, 25 bp, Homo sapien
cagaagctagtctagaatggtatga

SEQ ID NO: 3668859 - DNA, 25 bp, Homo sapien
cacactttatcttggtcttgtatag

SEQ ID NO: 3668860 - DNA, 25 bp, Homo sapien
aggtcgatggtcctcgtcttcacat

SEQ ID NO: 3668861 - DNA, 25 bp, Homo sapien
cctgcaagcttccaggcgtggcccc

SEQ ID NO: 3668862 - DNA, 25 bp, Homo sapien
tgcaagcttccaggcgtggccccgg

SEQ ID NO: 3668863 - DNA, 25 bp, Homo sapien
ttcaggtcgatggtcctcgtcttca

SEQ ID NO: 3668864 - DNA, 25 bp, Homo sapien
acaccccacgctgaaggggcgatcc

SEQ ID NO: 3668865 - DNA, 25 bp, Homo sapien
cacaccccacgctgaaggggcgatc

SEQ ID NO: 3668866 - DNA, 25 bp, Homo sapien
gccccgctgccgacccactcttcca

SEQ ID NO: 3668867 - DNA, 25 bp, Homo sapien
atttctgccccgctgccgacccact

SEQ ID NO: 3668868 - DNA, 25 bp, Homo sapien
cccaagatttctgccccgctgccga

SEQ ID NO: 3668869 - DNA, 25 bp, Homo sapien
gcccaagatttctgccccgctgccg

SEQ ID NO: 3668870 - DNA, 25 bp, Homo sapien
aaaagcttggctctctttgtactgc

SEQ ID NO: 3668871 - DNA, 25 bp, Homo sapien
tggaacgtaaccacttgtgagaagc

SEQ ID NO: 3668872 - DNA, 25 bp, Homo sapien
tgtgagaagctagtagtatttgctg

SEQ ID NO: 3668873 - DNA, 25 bp, Homo sapien
catggctttaggtggatcttggaac

SEQ ID NO: 3668874 - DNA, 25 bp, Homo sapien
agcatgtgtcagacgttttatatcc

SEQ ID NO: 3668875 - DNA, 25 bp, Homo sapien
tcagcatgtgtcagacgttttatat

SEQ ID NO: 3668876 - DNA, 25 bp, Homo sapien
ttatgtcatgtcgttaccatattca

SEQ ID NO: 3668877 - DNA, 25 bp, Homo sapien
catgtcgttaccatattcagcatgt

SEQ ID NO: 3668878 - DNA, 25 bp, Homo sapien
gtcttgtaccaacaaggtctcacta

SEQ ID NO: 3668879 - DNA, 25 bp, Homo sapien
catagtcttgtaccaacaaggtctc

SEQ ID NO: 3668880 - DNA, 25 bp, Homo sapien
agtcttgtaccaacaaggtctcact

SEQ ID NO: 3668881 - DNA, 25 bp, Homo sapien
tagtcttgtaccaacaaggtctcac

SEQ ID NO: 3668882 - DNA, 25 bp, Homo sapien
cattgagtagtctgatgaggaggca

SEQ ID NO: 3668883 - DNA, 25 bp, Homo sapien
acataaaggttttcattcttattgc

SEQ ID NO: 3668884 - DNA, 25 bp, Homo sapien
taagtggaagtgaattattatacat

SEQ ID NO: 3668885 - DNA, 25 bp, Homo sapien
gcagaggagagatttgtcttgctat

SEQ ID NO: 3668886 - DNA, 25 bp, Homo sapien
gcagggccgggaaagccaggagcac

SEQ ID NO: 3668887 - DNA, 25 bp, Homo sapien
gggcagggccgggaaagccaggagc

SEQ ID NO: 3668888 - DNA, 25 bp, Homo sapien
agggccgggaaagccaggagcacca

SEQ ID NO: 3668889 - DNA, 25 bp, Homo sapien
ctgggggcagggccgggaaagccag

SEQ ID NO: 3668890 - DNA, 25 bp, Homo sapien
cattgagcgcatagacgctgggata

SEQ ID NO: 3668891 - DNA, 25 bp, Homo sapien
gggctcaggtttatgttcacaacag

SEQ ID NO: 3668892 - DNA, 25 bp, Homo sapien
tacttccccagagaactacaattgt

SEQ ID NO: 3668893 - DNA, 25 bp, Homo sapien
gggcttgtgatcctatgagtttact

SEQ ID NO: 3668894 - DNA, 25 bp, Homo sapien
cccagctcctggatcgcgggtccag

SEQ ID NO: 3668895 - DNA, 25 bp, Homo sapien
ccagctcctggatcgcgggtccagg

SEQ ID NO: 3668896 - DNA, 25 bp, Homo sapien
agctcctggatcgcgggtccaggaa

SEQ ID NO: 3668897 - DNA, 25 bp, Homo sapien
cctggatcgcgggtccaggaagagc

SEQ ID NO: 3668898 - DNA, 25 bp, Homo sapien
cagggtgaaaggctcatgcactcga

SEQ ID NO: 3668899 - DNA, 25 bp, Homo sapien
agcagtgcggatccttggccagaag

SEQ ID NO: 3668900 - DNA, 25 bp, Homo sapien
tgctgcctgaacatggcacgcggca

SEQ ID NO: 3668901 - DNA, 25 bp, Homo sapien
ttggcaaaggtagagcagatcccag

SEQ ID NO: 3668902 - DNA, 25 bp, Homo sapien
tcatttctgacagtcatatacacat

SEQ ID NO: 3668903 - DNA, 25 bp, Homo sapien
atttctgacagtcatatacacatac

SEQ ID NO: 3668904 - DNA, 25 bp, Homo sapien
tttctgacagtcatatacacatacc

SEQ ID NO: 3668905 - DNA, 25 bp, Homo sapien
catttctgacagtcatatacacata

SEQ ID NO: 3668906 - DNA, 25 bp, Homo sapien
cgcagtcgcgccataaacttctctg

SEQ ID NO: 3668907 - DNA, 25 bp, Homo sapien
tctgggcttcgacccatcaactgaa

SEQ ID NO: 3668908 - DNA, 25 bp, Homo sapien
catcaactgaacacgcgccaaacat

SEQ ID NO: 3668909 - DNA, 25 bp, Homo sapien
ttaccctcccttgcgcagtcgcgcc

SEQ ID NO: 3668910 - DNA, 25 bp, Homo sapien
tgacagctacagtaagtttggggca

SEQ ID NO: 3668911 - DNA, 25 bp, Homo sapien
taagtttggggcatcgtcaacatcc

SEQ ID NO: 3668912 - DNA, 25 bp, Homo sapien
ctacagtaagtttggggcatcgtca

SEQ ID NO: 3668913 - DNA, 25 bp, Homo sapien
ggggcatcgtcaacatcctctaaag

SEQ ID NO: 3668914 - DNA, 25 bp, Homo sapien
cagagtcatggaaattcaagaattc

SEQ ID NO: 3668915 - DNA, 25 bp, Homo sapien
taaatctaacatgacttggcttcca

SEQ ID NO: 3668916 - DNA, 25 bp, Homo sapien
tcttctatgagtactgcaattgtca

SEQ ID NO: 3668917 - DNA, 25 bp, Homo sapien
aatgctttggctatgccggtgtttt

SEQ ID NO: 3668918 - DNA, 25 bp, Homo sapien
gcaggaaatccctccaggataaatt

SEQ ID NO: 3668919 - DNA, 25 bp, Homo sapien
gcatgtttgccatgatggaggccag

SEQ ID NO: 3668920 - DNA, 25 bp, Homo sapien
gagcatgtttgccatgatggaggcc

SEQ ID NO: 3668921 - DNA, 25 bp, Homo sapien
ttatgagcatgtttgccatgatgga

SEQ ID NO: 3668922 - DNA, 25 bp, Homo sapien
gaataactgtggtgataaaacagca

SEQ ID NO: 3668923 - DNA, 25 bp, Homo sapien
tgtggtgataaaacagcattcacag

SEQ ID NO: 3668924 - DNA, 25 bp, Homo sapien
taactgtggtgataaaacagcattc

SEQ ID NO: 3668925 - DNA, 25 bp, Homo sapien
ggaataactgtggtgataaaacagc

SEQ ID NO: 3668926 - DNA, 25 bp, Homo sapien
gagaccagtgatgagagtgaagccc

SEQ ID NO: 3668927 - DNA, 25 bp, Homo sapien
tgaagcccacgacaaagcaggcagt

SEQ ID NO: 3668928 - DNA, 25 bp, Homo sapien
gggaaaccttcaccatgagaccagt

SEQ ID NO: 3668929 - DNA, 25 bp, Homo sapien
caggtggaagctagtcctcaggctc

SEQ ID NO: 3668930 - DNA, 25 bp, Homo sapien
gacacagctgccatacaccagagag

SEQ ID NO: 3668931 - DNA, 25 bp, Homo sapien
cgcagagtgtaaatgatcgggttca

SEQ ID NO: 3668932 - DNA, 25 bp, Homo sapien
gcctggtggacctgcttgttccgca

SEQ ID NO: 3668933 - DNA, 25 bp, Homo sapien
tgtgttcacaagagcagcctttctg

SEQ ID NO: 3668934 - DNA, 25 bp, Homo sapien
gcgagcgccgggagcctcggcgcgg

SEQ ID NO: 3668935 - DNA, 25 bp, Homo sapien
aggtgtccgcatctagcgccgcagc

SEQ ID NO: 3668936 - DNA, 25 bp, Homo sapien
caggtgtccgcatctagcgccgcag

SEQ ID NO: 3668937 - DNA, 25 bp, Homo sapien
gcgggccgcgggagcagcgagcgcc

SEQ ID NO: 3668938 - DNA, 25 bp, Homo sapien
aagtcgttgtagaagggcttgtcca

SEQ ID NO: 3668939 - DNA, 25 bp, Homo sapien
cgcgccacgctcgaagtcgttgtag

SEQ ID NO: 3668940 - DNA, 25 bp, Homo sapien
ctgccagtggccacggtgaccgtgt

SEQ ID NO: 3668941 - DNA, 25 bp, Homo sapien
atgtagtcgtcagtgccggcgaacc

SEQ ID NO: 3668942 - DNA, 25 bp, Homo sapien
cgctccacccgtgccccgcccgcgc

SEQ ID NO: 3668943 - DNA, 25 bp, Homo sapien
gctccacccgtgccccgcccgcgct

SEQ ID NO: 3668944 - DNA, 25 bp, Homo sapien
tccacccgtgccccgcccgcgctca

SEQ ID NO: 3668945 - DNA, 25 bp, Homo sapien
gcgctccacccgtgccccgcccgcg

SEQ ID NO: 3668946 - DNA, 25 bp, Homo sapien
aggatgattgtctttacagatacca

SEQ ID NO: 3668947 - DNA, 25 bp, Homo sapien
agagaaagtgttgagtaactttgca

SEQ ID NO: 3668948 - DNA, 25 bp, Homo sapien
aaaggatgattgtctttacagatac

SEQ ID NO: 3668949 - DNA, 25 bp, Homo sapien
ctttgcatcaacaggaactttctca

SEQ ID NO: 3668950 - DNA, 25 bp, Homo sapien
ggacaacctcgacatcgccggtgat

SEQ ID NO: 3668951 - DNA, 25 bp, Homo sapien
tacttgcgcttctcgattctgacca

SEQ ID NO: 3668952 - DNA, 25 bp, Homo sapien
cgtcttcagcgtgatgtacttcagg

SEQ ID NO: 3668953 - DNA, 25 bp, Homo sapien
ggtaccagtcgtcattcagccagta

SEQ ID NO: 3668954 - DNA, 25 bp, Homo sapien
tgtgaatttggtcatctcgggccaa

SEQ ID NO: 3668955 - DNA, 25 bp, Homo sapien
tgccgtgtttccagttctttacgtc

SEQ ID NO: 3668956 - DNA, 25 bp, Homo sapien
tacgtcggtgttgcttgagaatgtg

SEQ ID NO: 3668957 - DNA, 25 bp, Homo sapien
atttggtcatctcgggccaactttg

SEQ ID NO: 3668958 - DNA, 25 bp, Homo sapien
gtgtgccctggactgcgtgcatgtc

SEQ ID NO: 3668959 - DNA, 25 bp, Homo sapien
cattgaacagtagaggcctgccttg

SEQ ID NO: 3668960 - DNA, 25 bp, Homo sapien
cccaacctggacatccaccattctg

SEQ ID NO: 3668961 - DNA, 25 bp, Homo sapien
tagaaggtattaaggctgcccagcc

SEQ ID NO: 3668962 - DNA, 25 bp, Homo sapien
gtggcatttggcatcgatgctcaag

SEQ ID NO: 3668963 - DNA, 25 bp, Homo sapien
cacggggtaaatccttgtggcattt

SEQ ID NO: 3668964 - DNA, 25 bp, Homo sapien
ggcatttggcatcgatgctcaaggg

SEQ ID NO: 3668965 - DNA, 25 bp, Homo sapien
tcaaactggatatcacggggtaaat

SEQ ID NO: 3668966 - DNA, 25 bp, Homo sapien
tggctgtctgtctgttattggtata

SEQ ID NO: 3668967 - DNA, 25 bp, Homo sapien
tttggctgtctgtctgttattggta

SEQ ID NO: 3668968 - DNA, 25 bp, Homo sapien
atgatttggctgtctgtctgttatt

SEQ ID NO: 3668969 - DNA, 25 bp, Homo sapien
gctgtctgtctgttattggtatata

SEQ ID NO: 3668970 - DNA, 25 bp, Homo sapien
ctgccatccatgtagctgggtcgtc

SEQ ID NO: 3668971 - DNA, 25 bp, Homo sapien
ccatgtagctgggtcgtctggagca

SEQ ID NO: 3668972 - DNA, 25 bp, Homo sapien
catgtagctgggtcgtctggagcac

SEQ ID NO: 3668973 - DNA, 25 bp, Homo sapien
ccatccatgtagctgggtcgtctgg

SEQ ID NO: 3668974 - DNA, 25 bp, Homo sapien
gtgatgggctgcatacagtaggtgc

SEQ ID NO: 3668975 - DNA, 25 bp, Homo sapien
catgtgtcaggatgaacaaggagcc

SEQ ID NO: 3668976 - DNA, 25 bp, Homo sapien
caccctggagctgtcgaataatacc

SEQ ID NO: 3668977 - DNA, 25 bp, Homo sapien
gaccgagagggtgtactgctggaag

SEQ ID NO: 3668978 - DNA, 25 bp, Homo sapien
caaagtcggcgaagtcattccaaga

SEQ ID NO: 3668979 - DNA, 25 bp, Homo sapien
gaagcggttgatgaacaggttctcc

SEQ ID NO: 3668980 - DNA, 25 bp, Homo sapien
gaacatgtgcatgaagcggttgatg

SEQ ID NO: 3668981 - DNA, 25 bp, Homo sapien
gattttctcaaagtcggcgaagtca

SEQ ID NO: 3668982 - DNA, 25 bp, Homo sapien
cgccggatcaacacagggttgcagc

SEQ ID NO: 3668983 - DNA, 25 bp, Homo sapien
tcctgccagtgattcatgacccgct

SEQ ID NO: 3668984 - DNA, 25 bp, Homo sapien
tgtgcagcgccggatcaacacaggg

SEQ ID NO: 3668985 - DNA, 25 bp, Homo sapien
ccattcaggaactggtagccaaaca

SEQ ID NO: 3668986 - DNA, 25 bp, Homo sapien
gccctggtcccaaatgagttagcat

SEQ ID NO: 3668987 - DNA, 25 bp, Homo sapien
tcatgatccggaaaataactgcaca

SEQ ID NO: 3668988 - DNA, 25 bp, Homo sapien
tagatcattaaggtgctgccagatg

SEQ ID NO: 3668989 - DNA, 25 bp, Homo sapien
tttttagtaggccacaagcttgctg

SEQ ID NO: 3668990 - DNA, 25 bp, Homo sapien
tacccagaaggaatggctgctaatc

SEQ ID NO: 3668991 - DNA, 25 bp, Homo sapien
gaagtgaccatcagactctacccag

SEQ ID NO: 3668992 - DNA, 25 bp, Homo sapien
taatccaatcttgagaccacccagg

SEQ ID NO: 3668993 - DNA, 25 bp, Homo sapien
cacagtgatgtcttgccttctagga

SEQ ID NO: 3668994 - DNA, 25 bp, Homo sapien
tcattcggcatttgtggtgtctgaa

SEQ ID NO: 3668995 - DNA, 25 bp, Homo sapien
cggggtaagatgaaggaatggcagc

SEQ ID NO: 3668996 - DNA, 25 bp, Homo sapien
tggcagcagctcattcggcatttgt

SEQ ID NO: 3668997 - DNA, 25 bp, Homo sapien
cagctcattcggcatttgtggtgtc

SEQ ID NO: 3668998 - DNA, 25 bp, Homo sapien
agacggaccaaaaatcaggcctggg

SEQ ID NO: 3668999 - DNA, 25 bp, Homo sapien
gagatgtgtccaaatcaggctcagc

SEQ ID NO: 3669000 - DNA, 25 bp, Homo sapien
tcagcagacggaccaaaaatcaggc

SEQ ID NO: 3669001 - DNA, 25 bp, Homo sapien
aaatcaggctcagcagacggaccaa

SEQ ID NO: 3669002 - DNA, 25 bp, Homo sapien
caatggggacaatcttgttggccag

SEQ ID NO: 3669003 - DNA, 25 bp, Homo sapien
caaagtccacgatgaaaatgttccc

SEQ ID NO: 3669004 - DNA, 25 bp, Homo sapien
ggtctgttttgttggcatcgatgcc

SEQ ID NO: 3669005 - DNA, 25 bp, Homo sapien
ggccaggttcttatacagcaagcag

SEQ ID NO: 3669006 - DNA, 25 bp, Homo sapien
aaggtggcataccaggactggcctg

SEQ ID NO: 3669007 - DNA, 25 bp, Homo sapien
cctcagtggtcttggtctccagctt

SEQ ID NO: 3669008 - DNA, 25 bp, Homo sapien
cagcaccttgactgggggcccttgg

SEQ ID NO: 3669009 - DNA, 25 bp, Homo sapien
ccagaacccatggtgcccctcagtg

SEQ ID NO: 3669010 - DNA, 25 bp, Homo sapien
atctccggtggacataagaactcac

SEQ ID NO: 3669011 - DNA, 25 bp, Homo sapien
catctccggtggacataagaactca

SEQ ID NO: 3669012 - DNA, 25 bp, Homo sapien
tcatctccggtggacataagaactc

SEQ ID NO: 3669013 - DNA, 25 bp, Homo sapien
gatcttggatttactatcctctggc

SEQ ID NO: 3669014 - DNA, 25 bp, Homo sapien
tgagccaagcttttgaaggcaccat

SEQ ID NO: 3669015 - DNA, 25 bp, Homo sapien
tcttatctgggtaaaatgatcaaca

SEQ ID NO: 3669016 - DNA, 25 bp, Homo sapien
ctggaatttaagctaggcccctgac

SEQ ID NO: 3669017 - DNA, 25 bp, Homo sapien
tggtgcctggctataattactcttt

SEQ ID NO: 3669018 - DNA, 25 bp, Homo sapien
ggtgcctggctataattactctttt

SEQ ID NO: 3669019 - DNA, 25 bp, Homo sapien
catggtgcctggctataattactct

SEQ ID NO: 3669020 - DNA, 25 bp, Homo sapien
tgcctggctataattactcttttta

SEQ ID NO: 3669021 - DNA, 25 bp, Homo sapien
gcacagtgtctgcttaacagtaacc

SEQ ID NO: 3669022 - DNA, 25 bp, Homo sapien
tcttctcatgcaaaggcagtgtgat

SEQ ID NO: 3669023 - DNA, 25 bp, Homo sapien
cctgtgtatcatagataggcatctc

SEQ ID NO: 3669024 - DNA, 25 bp, Homo sapien
cagtaaccttacaaatccagcaagg

SEQ ID NO: 3669025 - DNA, 25 bp, Homo sapien
cagttatcccgtgaacactgccagg

SEQ ID NO: 3669026 - DNA, 25 bp, Homo sapien
gaagctctgaccttgctccggtgct

SEQ ID NO: 3669027 - DNA, 25 bp, Homo sapien
gtgctggccgaagctctgaccttgc

SEQ ID NO: 3669028 - DNA, 25 bp, Homo sapien
gtgctggccgaagctctgaccttgg

SEQ ID NO: 3669029 - DNA, 25 bp, Homo sapien
aacatggatgcagcttaggattggc

SEQ ID NO: 3669030 - DNA, 25 bp, Homo sapien
tgtactccaaggaatactacatagc

SEQ ID NO: 3669031 - DNA, 25 bp, Homo sapien
tgtacacatgggcataaaagtggga

SEQ ID NO: 3669032 - DNA, 25 bp, Homo sapien
gcccatcaatagtggcaccagataa

SEQ ID NO: 3669033 - DNA, 25 bp, Homo sapien
tatgcagaagaatgacgctgggccc

SEQ ID NO: 3669034 - DNA, 25 bp, Homo sapien
caaagaatgtatccagccaaggagg

SEQ ID NO: 3669035 - DNA, 25 bp, Homo sapien
tcacacagtaggtaaagagctcagc

SEQ ID NO: 3669036 - DNA, 25 bp, Homo sapien
cagcaggttttggtttggacgagcc

SEQ ID NO: 3669037 - DNA, 25 bp, Homo sapien
tggacgtggaagtcactggaacgca

SEQ ID NO: 3669038 - DNA, 25 bp, Homo sapien
gcagctggcggtacattgcaatgcc

SEQ ID NO: 3669039 - DNA, 25 bp, Homo sapien
aaatagggttctcatctcccgggat

SEQ ID NO: 3669040 - DNA, 25 bp, Homo sapien
cagtcgtattttgcatccgaaggga

SEQ ID NO: 3669041 - DNA, 25 bp, Homo sapien
gtgaatctcacgtgtgccaccagca

SEQ ID NO: 3669042 - DNA, 25 bp, Homo sapien
tgattgcaatggtgaatctcacgtg

SEQ ID NO: 3669043 - DNA, 25 bp, Homo sapien
tcaaagaggccacactcgcagatga

SEQ ID NO: 3669044 - DNA, 25 bp, Homo sapien
cacgggccttggtgttgattgcaat

SEQ ID NO: 3669045 - DNA, 25 bp, Homo sapien
tgaaagggtgtctagatctcagata

SEQ ID NO: 3669046 - DNA, 25 bp, Homo sapien
cttccaggcaacaagtagggtagga

SEQ ID NO: 3669047 - DNA, 25 bp, Homo sapien
ttccaggcctcctgaaagggtgtct

SEQ ID NO: 3669048 - DNA, 25 bp, Homo sapien
tctcagatagggagtgaaggcggcc

SEQ ID NO: 3669049 - DNA, 25 bp, Homo sapien
tctcagtgaccctcagtttccagga

SEQ ID NO: 3669050 - DNA, 25 bp, Homo sapien
gcccaatccaatgcaagggactgaa

SEQ ID NO: 3669051 - DNA, 25 bp, Homo sapien
tagtgctgagcacacgaccctcagt

SEQ ID NO: 3669052 - DNA, 25 bp, Homo sapien
gtccagacccatccctgaggaaatg

SEQ ID NO: 3669053 - DNA, 25 bp, Homo sapien
caggagcccgtcgtcccggtagaag

SEQ ID NO: 3669054 - DNA, 25 bp, Homo sapien
gccttgatggcctcgggaaagcaca

SEQ ID NO: 3669055 - DNA, 25 bp, Homo sapien
gcacagggaggcataggtcaggtcc

SEQ ID NO: 3669056 - DNA, 25 bp, Homo sapien
tagtaggggatgtcttctttgctct

SEQ ID NO: 3669057 - DNA, 25 bp, Homo sapien
ccccattcagcgctagcggtggagg

SEQ ID NO: 3669058 - DNA, 25 bp, Homo sapien
caggcccgccccaggtagtcaggca

SEQ ID NO: 3669059 - DNA, 25 bp, Homo sapien
ggcaaccccctcacggacgctggga

SEQ ID NO: 3669060 - DNA, 25 bp, Homo sapien
aggtctgcggagcggtgcccggcgg

SEQ ID NO: 3669061 - DNA, 25 bp, Homo sapien
gcatgccgtacacgtagacatcgtt

SEQ ID NO: 3669062 - DNA, 25 bp, Homo sapien
agatgtctaccacctcggccgtgaa

SEQ ID NO: 3669063 - DNA, 25 bp, Homo sapien
agacatcgttcacgaagtcctgcag

SEQ ID NO: 3669064 - DNA, 25 bp, Homo sapien
cacctggtcgccctcgtagtagatg

SEQ ID NO: 3669065 - DNA, 25 bp, Homo sapien
atcaccacggtcaggtactccgaca

SEQ ID NO: 3669066 - DNA, 25 bp, Homo sapien
gctgctcccggctcttgaccgactt

SEQ ID NO: 3669067 - DNA, 25 bp, Homo sapien
gaggcggtgaagatcaccacggtca

SEQ ID NO: 3669068 - DNA, 25 bp, Homo sapien
cggtcaggtactccgacagctgctc

SEQ ID NO: 3669069 - DNA, 25 bp, Homo sapien
agcggccttgagaagggagccctgc

SEQ ID NO: 3669070 - DNA, 25 bp, Homo sapien
ctgagcgggcagaatccatcctgca

SEQ ID NO: 3669071 - DNA, 25 bp, Homo sapien
ggtgcagtacgcgtgcagaaccggg

SEQ ID NO: 3669072 - DNA, 25 bp, Homo sapien
ggctgtccgagggtgcagtacgcgt

SEQ ID NO: 3669073 - DNA, 25 bp, Homo sapien
ctgcggagacgaccgccagcaagcg

SEQ ID NO: 3669074 - DNA, 25 bp, Homo sapien
agcaagcgtgggcacccccgaagcc

SEQ ID NO: 3669075 - DNA, 25 bp, Homo sapien
ctgcagtccgtccatcctctttccc

SEQ ID NO: 3669076 - DNA, 25 bp, Homo sapien
cccaactccagcgggccctgcagtc

SEQ ID NO: 3669077 - DNA, 25 bp, Homo sapien
cacgatctgctcaatggtcaccacg

SEQ ID NO: 3669078 - DNA, 25 bp, Homo sapien
cggtcgggcagcgtgtccacgatct

SEQ ID NO: 3669079 - DNA, 25 bp, Homo sapien
gagcggccgcggtcgggcagcgtgt

SEQ ID NO: 3669080 - DNA, 25 bp, Homo sapien
tcaccacgcccttggcagtcggtgg

SEQ ID NO: 3669081 - DNA, 25 bp, Homo sapien
cagtgagggaccaacacattggccg

SEQ ID NO: 3669082 - DNA, 25 bp, Homo sapien
agtactgagctaccccaaagcgggt

SEQ ID NO: 3669083 - DNA, 25 bp, Homo sapien
attggccgggaacaactcagacacc

SEQ ID NO: 3669084 - DNA, 25 bp, Homo sapien
agatgcacgtgtccggaaggaaccc

SEQ ID NO: 3669085 - DNA, 25 bp, Homo sapien
ttcttgcggaatcgggccatggctt

SEQ ID NO: 3669086 - DNA, 25 bp, Homo sapien
gcaatcacgctgacaatggcctcga

SEQ ID NO: 3669087 - DNA, 25 bp, Homo sapien
gatggccacactgttcggaatccgg

SEQ ID NO: 3669088 - DNA, 25 bp, Homo sapien
cacaggcttctcgataaaatgctct

SEQ ID NO: 3669089 - DNA, 25 bp, Homo sapien
catcccatgtctccaacaagaatag

SEQ ID NO: 3669090 - DNA, 25 bp, Homo sapien
gatcaatctatgcagttccctgaag

SEQ ID NO: 3669091 - DNA, 25 bp, Homo sapien
aatgggtccctatggtgtttacact

SEQ ID NO: 3669092 - DNA, 25 bp, Homo sapien
gaatagacatctatcagtggtcgtg

SEQ ID NO: 3669093 - DNA, 25 bp, Homo sapien
ttcattcaatagtaattgaattggg

SEQ ID NO: 3669094 - DNA, 25 bp, Homo sapien
ttatggcaaccaattcttaattcat

SEQ ID NO: 3669095 - DNA, 25 bp, Homo sapien
tcaatagtaattgaattgggtacct

SEQ ID NO: 3669096 - DNA, 25 bp, Homo sapien
ttttatggcaaccaattcttaattc

SEQ ID NO: 3669097 - DNA, 25 bp, Homo sapien
tagaaacccagaatgaggtctcagg

SEQ ID NO: 3669098 - DNA, 25 bp, Homo sapien
taagtcacagtaccataagcaggct

SEQ ID NO: 3669099 - DNA, 25 bp, Homo sapien
tgtggtactcccatctggtgtggcc

SEQ ID NO: 3669100 - DNA, 25 bp, Homo sapien
tctagcagtgaagcatgaagcctgg

SEQ ID NO: 3669101 - DNA, 25 bp, Homo sapien
catgcaaggatggaatcgttacccc

SEQ ID NO: 3669102 - DNA, 25 bp, Homo sapien
ttgggtccgctgtcactgtcatgct

SEQ ID NO: 3669103 - DNA, 25 bp, Homo sapien
taaaactgagcagggcagaatctcc

SEQ ID NO: 3669104 - DNA, 25 bp, Homo sapien
cttgatgaggatcggacatacctgc

SEQ ID NO: 3669105 - DNA, 25 bp, Homo sapien
tagatccttgaggtgcatccttcga

SEQ ID NO: 3669106 - DNA, 25 bp, Homo sapien
tctggacttccctgttagcactact

SEQ ID NO: 3669107 - DNA, 25 bp, Homo sapien
ctaacctgtggcctatcctgaagaa

SEQ ID NO: 3669108 - DNA, 25 bp, Homo sapien
tagtccattgtcctaacgtgcagtt

SEQ ID NO: 3669109 - DNA, 25 bp, Homo sapien
ggcagcagacaagggagaaatgaga

SEQ ID NO: 3669110 - DNA, 25 bp, Homo sapien
gaaatgagaaccaagcgaaagaggt

SEQ ID NO: 3669111 - DNA, 25 bp, Homo sapien
acaagggagaaatgagaaccaagcg

SEQ ID NO: 3669112 - DNA, 25 bp, Homo sapien
aaaccatatcattccgccctcggcc

SEQ ID NO: 3669113 - DNA, 25 bp, Homo sapien
gtgggcccacgagccatcctggagg

SEQ ID NO: 3669114 - DNA, 25 bp, Homo sapien
tgggcccacgagccatcctggagga

SEQ ID NO: 3669115 - DNA, 25 bp, Homo sapien
gggcccacgagccatcctggaggat

SEQ ID NO: 3669116 - DNA, 25 bp, Homo sapien
ggcccacgagccatcctggaggatg

SEQ ID NO: 3669117 - DNA, 25 bp, Homo sapien
ggtagtaagtaatgtagcagtggtt

SEQ ID NO: 3669118 - DNA, 25 bp, Homo sapien
agatttccagatggtgtcaaaccag

SEQ ID NO: 3669119 - DNA, 25 bp, Homo sapien
tggcttctcttagtacttgtgaact

SEQ ID NO: 3669120 - DNA, 25 bp, Homo sapien
tccttgtgaggtagtaagtaatgta

SEQ ID NO: 3669121 - DNA, 25 bp, Homo sapien
gcctgttccccggcatcaagcacag

SEQ ID NO: 3669122 - DNA, 25 bp, Homo sapien
tgctgtgcaggcagcgcctgttccc

SEQ ID NO: 3669123 - DNA, 25 bp, Homo sapien
agctgcgacagccagccatgtgctg

SEQ ID NO: 3669124 - DNA, 25 bp, Homo sapien
gcgacagccagccatgtgctgctgc

SEQ ID NO: 3669125 - DNA, 25 bp, Homo sapien
cctcgttccttgaaaatcagctgga

SEQ ID NO: 3669126 - DNA, 25 bp, Homo sapien
tttgatggcaggagtggtatgctga

SEQ ID NO: 3669127 - DNA, 25 bp, Homo sapien
gaggaagtagtccagtttgatggca

SEQ ID NO: 3669128 - DNA, 25 bp, Homo sapien
tccttgaaaatcagctggaggaagt

SEQ ID NO: 3669129 - DNA, 25 bp, Homo sapien
cagaaagctgcttgaatgcggcatc

SEQ ID NO: 3669130 - DNA, 25 bp, Homo sapien
gaaagctgcttgaatgcggcatcag

SEQ ID NO: 3669131 - DNA, 25 bp, Homo sapien
atgaactgccctctccgcagcatgc

SEQ ID NO: 3669132 - DNA, 25 bp, Homo sapien
agctgcttgaatgcggcatcagctc

SEQ ID NO: 3669133 - DNA, 25 bp, Homo sapien
ggaaactgggagttagcagaacgca

SEQ ID NO: 3669134 - DNA, 25 bp, Homo sapien
aaactgggagttagcagaacgcagg

SEQ ID NO: 3669135 - DNA, 25 bp, Homo sapien
ggagttagcagaacgcagggcaaaa

SEQ ID NO: 3669136 - DNA, 25 bp, Homo sapien
gttagcagaacgcagggcaaaagag

SEQ ID NO: 3669137 - DNA, 25 bp, Homo sapien
ttacaatccagtgttcccatacata

SEQ ID NO: 3669138 - DNA, 25 bp, Homo sapien
aatttgcttttacaatccagtgttc

SEQ ID NO: 3669139 - DNA, 25 bp, Homo sapien
cactgttgccaccattgtgccaaac

SEQ ID NO: 3669140 - DNA, 25 bp, Homo sapien
aactgtctgtccttttaatttgctt

SEQ ID NO: 3669141 - DNA, 25 bp, Homo sapien
catcaagctgcaaactgcgttctgt

SEQ ID NO: 3669142 - DNA, 25 bp, Homo sapien
ttaagagttctgaggtcttggttgt

SEQ ID NO: 3669143 - DNA, 25 bp, Homo sapien
tgcgagaatacacatgtcatcaagc

SEQ ID NO: 3669144 - DNA, 25 bp, Homo sapien
tcttggttgtaatgtcagcagtgcg

SEQ ID NO: 3669145 - DNA, 25 bp, Homo sapien
acagttcagggtgtcgtggagccca

SEQ ID NO: 3669146 - DNA, 25 bp, Homo sapien
tctagggtctcaattgtggtatcag

SEQ ID NO: 3669147 - DNA, 25 bp, Homo sapien
agggccccgtgagagcttcagcagc

SEQ ID NO: 3669148 - DNA, 25 bp, Homo sapien
gagcagttgaaccaggaacttgcag

SEQ ID NO: 3669149 - DNA, 25 bp, Homo sapien
gcattgttggcacaccttgaatcca

SEQ ID NO: 3669150 - DNA, 25 bp, Homo sapien
gatagcatgcactgtctggagccga

SEQ ID NO: 3669151 - DNA, 25 bp, Homo sapien
gacaggacttcagcattaggctttg

SEQ ID NO: 3669152 - DNA, 25 bp, Homo sapien
gggattctaaattgcatacactgcc

SEQ ID NO: 3669153 - DNA, 25 bp, Homo sapien
ctgccccggtggttgtactgaggtc

SEQ ID NO: 3669154 - DNA, 25 bp, Homo sapien
tgccccggtggttgtactgaggtct

SEQ ID NO: 3669155 - DNA, 25 bp, Homo sapien
aattgcacctggtttacctaattca

SEQ ID NO: 3669156 - DNA, 25 bp, Homo sapien
gcacctggtttacctaattcacgta

SEQ ID NO: 3669157 - DNA, 25 bp, Homo sapien
cagacattagtccaggccctttttc

SEQ ID NO: 3669158 - DNA, 25 bp, Homo sapien
gacattagtccaggccctttttcca

SEQ ID NO: 3669159 - DNA, 25 bp, Homo sapien
tggttcctcacttccgtttagagtg

SEQ ID NO: 3669160 - DNA, 25 bp, Homo sapien
cctaagcagtggtaagcctttgtta

SEQ ID NO: 3669161 - DNA, 25 bp, Homo sapien
tggtaagcctttgttaaatgcagac

SEQ ID NO: 3669162 - DNA, 25 bp, Homo sapien
aatgcagacatggaatgagtccttc

SEQ ID NO: 3669163 - DNA, 25 bp, Homo sapien
caggatgttccttgttacccacgct

SEQ ID NO: 3669164 - DNA, 25 bp, Homo sapien
ttgttacccacgctgctgtcagtcc

SEQ ID NO: 3669165 - DNA, 25 bp, Homo sapien
ccacgctgctgtcagtcctgtggca

SEQ ID NO: 3669166 - DNA, 25 bp, Homo sapien
gtggccatcaggatgttccttgtta

SEQ ID NO: 3669167 - DNA, 25 bp, Homo sapien
tgcatctggtattatagtaaatgaa

SEQ ID NO: 3669168 - DNA, 25 bp, Homo sapien
taaatactgcagtatcatgatatat

SEQ ID NO: 3669169 - DNA, 25 bp, Homo sapien
tgtgttaatcacctatggtcatgtt

SEQ ID NO: 3669170 - DNA, 25 bp, Homo sapien
ggaacttcgtcaaatgctttcattg

SEQ ID NO: 3669171 - DNA, 25 bp, Homo sapien
atgagatggccttctgacccttcag

SEQ ID NO: 3669172 - DNA, 25 bp, Homo sapien
tctagggctgtaaagagtcttaagg

SEQ ID NO: 3669173 - DNA, 25 bp, Homo sapien
ttctgacccttcagggtctagggct

SEQ ID NO: 3669174 - DNA, 25 bp, Homo sapien
agatggccttctgacccttcagggt

SEQ ID NO: 3669175 - DNA, 25 bp, Homo sapien
tgcctacactctgtgcaaagatatg

SEQ ID NO: 3669176 - DNA, 25 bp, Homo sapien
gggacacgttcataccctagcaaca

SEQ ID NO: 3669177 - DNA, 25 bp, Homo sapien
tgatttcatattgattctaccagtg

SEQ ID NO: 3669178 - DNA, 25 bp, Homo sapien
acaccagggcgtgattaagtttcaa

SEQ ID NO: 3669179 - DNA, 25 bp, Homo sapien
taccgctcagctggtcctctgccat

SEQ ID NO: 3669180 - DNA, 25 bp, Homo sapien
ataccgctcagctggtcctctgcca

SEQ ID NO: 3669181 - DNA, 25 bp, Homo sapien
gaataccgctcagctggtcctctgc

SEQ ID NO: 3669182 - DNA, 25 bp, Homo sapien
aataccgctcagctggtcctctgcc

SEQ ID NO: 3669183 - DNA, 25 bp, Homo sapien
caggaatcgcagaaacggtcagcgc

SEQ ID NO: 3669184 - DNA, 25 bp, Homo sapien
tgtaaaatggaagctcggactagtg

SEQ ID NO: 3669185 - DNA, 25 bp, Homo sapien
tctgacgtgtgatctcgagagacct

SEQ ID NO: 3669186 - DNA, 25 bp, Homo sapien
cctgaccggctgtgagacgttggcc

SEQ ID NO: 3669187 - DNA, 25 bp, Homo sapien
tagggtgtaaacaggcgacgcgctg

SEQ ID NO: 3669188 - DNA, 25 bp, Homo sapien
ccacgtctcgggcatgctcgaggcg

SEQ ID NO: 3669189 - DNA, 25 bp, Homo sapien
ctgcggcctctaggatcggagtccc

SEQ ID NO: 3669190 - DNA, 25 bp, Homo sapien
acctgaggtaactcctgcggcctct

SEQ ID NO: 3669191 - DNA, 25 bp, Homo sapien
acaaatatgaatgcctagggcctac

SEQ ID NO: 3669192 - DNA, 25 bp, Homo sapien
gaaggcatgctttttaagaagggtg

SEQ ID NO: 3669193 - DNA, 25 bp, Homo sapien
actgccttacagagttagactgctg

SEQ ID NO: 3669194 - DNA, 25 bp, Homo sapien
gctgagaaatggaccatagcatatt

SEQ ID NO: 3669195 - DNA, 25 bp, Homo sapien
actagcacctaacccaggtagactc

SEQ ID NO: 3669196 - DNA, 25 bp, Homo sapien
agactgatgctgaaccctggtaaac

SEQ ID NO: 3669197 - DNA, 25 bp, Homo sapien
tatagaagctcagttcagactgatg

SEQ ID NO: 3669198 - DNA, 25 bp, Homo sapien
tagtggccacttgctgtatagaagc

SEQ ID NO: 3669199 - DNA, 25 bp, Homo sapien
gaagctcagctatactagattttca

SEQ ID NO: 3669200 - DNA, 25 bp, Homo sapien
tgtctgggttgcacaattatcagcc

SEQ ID NO: 3669201 - DNA, 25 bp, Homo sapien
cctcaggatgactaaaaatctgtac

SEQ ID NO: 3669202 - DNA, 25 bp, Homo sapien
gatatggcaggtgtcaaaacatctt

SEQ ID NO: 3669203 - DNA, 25 bp, Homo sapien
tttaaagggttgtagagcaccacga

SEQ ID NO: 3669204 - DNA, 25 bp, Homo sapien
tatggaaagtggagcattaacttac

SEQ ID NO: 3669205 - DNA, 25 bp, Homo sapien
gtgaaagttatgcagcttgggaaat

SEQ ID NO: 3669206 - DNA, 25 bp, Homo sapien
tgaatttaggctatggaagcatctt

SEQ ID NO: 3669207 - DNA, 25 bp, Homo sapien
catgggaccattttactacagactt

SEQ ID NO: 3669208 - DNA, 25 bp, Homo sapien
gataccatggagctcttcattgaaa

SEQ ID NO: 3669209 - DNA, 25 bp, Homo sapien
tcttcaatgatgataacatgggacc

SEQ ID NO: 3669210 - DNA, 25 bp, Homo sapien
gaactggaatacagttgcctgcgac

SEQ ID NO: 3669211 - DNA, 25 bp, Homo sapien
tacttcccaattccgcttgcagatg

SEQ ID NO: 3669212 - DNA, 25 bp, Homo sapien
aattccgcttgcagatgaactccgg

SEQ ID NO: 3669213 - DNA, 25 bp, Homo sapien
gatggcgcgaggagatgctggctct

SEQ ID NO: 3669214 - DNA, 25 bp, Homo sapien
gaaatacttcccaattccgcttgca

SEQ ID NO: 3669215 - DNA, 25 bp, Homo sapien
tcggtggcctcaagtgtgtaggtac

SEQ ID NO: 3669216 - DNA, 25 bp, Homo sapien
tgcgcaggtgactcggtggcctcaa

SEQ ID NO: 3669217 - DNA, 25 bp, Homo sapien
gcaacggctgcgcaggtgactcggt

SEQ ID NO: 3669218 - DNA, 25 bp, Homo sapien
ttggaggagcaacggctgcgcaggt

SEQ ID NO: 3669219 - DNA, 25 bp, Homo sapien
cgaaagcgccgtccagcgattggta

SEQ ID NO: 3669220 - DNA, 25 bp, Homo sapien
taaaagatcaacatccgggcctcgt

SEQ ID NO: 3669221 - DNA, 25 bp, Homo sapien
cagcttcaacgggtacgcggctttc

SEQ ID NO: 3669222 - DNA, 25 bp, Homo sapien
tgtcctccagattcaggccggtggg

SEQ ID NO: 3669223 - DNA, 25 bp, Homo sapien
cacaacaactgcctgaagagagaac

SEQ ID NO: 3669224 - DNA, 25 bp, Homo sapien
agtgctgagagacacaacaactgcc

SEQ ID NO: 3669225 - DNA, 25 bp, Homo sapien
aagagagaacagacggagctcctcc

SEQ ID NO: 3669226 - DNA, 25 bp, Homo sapien
tgaagagagaacagacggagctcct

SEQ ID NO: 3669227 - DNA, 25 bp, Homo sapien
tgtggaggtcctcaccaacttcaac

SEQ ID NO: 3669228 - DNA, 25 bp, Homo sapien
tctcagattcagagggacacaccga

SEQ ID NO: 3669229 - DNA, 25 bp, Homo sapien
gcatgtggaggtcctcaccaacttc

SEQ ID NO: 3669230 - DNA, 25 bp, Homo sapien
gccatgggcgctcctgccatcctgt

SEQ ID NO: 3669231 - DNA, 25 bp, Homo sapien
cttgcctctggattggcagaaaggt

SEQ ID NO: 3669232 - DNA, 25 bp, Homo sapien
gtgcttgcctctggattggcagaaa

SEQ ID NO: 3669233 - DNA, 25 bp, Homo sapien
tgcctctggattggcagaaaggtta

SEQ ID NO: 3669234 - DNA, 25 bp, Homo sapien
tgcttgcctctggattggcagaaag

SEQ ID NO: 3669235 - DNA, 25 bp, Homo sapien
aacagagctacagacactgttgtct

SEQ ID NO: 3669236 - DNA, 25 bp, Homo sapien
cagagctacagacactgttgtctca

SEQ ID NO: 3669237 - DNA, 25 bp, Homo sapien
agagctacagacactgttgtctcac

SEQ ID NO: 3669238 - DNA, 25 bp, Homo sapien
acagagctacagacactgttgtctc

SEQ ID NO: 3669239 - DNA, 25 bp, Homo sapien
gtgcttgcctctggattggcagaag

SEQ ID NO: 3669240 - DNA, 25 bp, Homo sapien
gagttcctctggaatattgtgcttg

SEQ ID NO: 3669241 - DNA, 25 bp, Homo sapien
tgcctctggattggcagaagggtta

SEQ ID NO: 3669242 - DNA, 25 bp, Homo sapien
tattgtgcttgcctctggattggca

SEQ ID NO: 3669243 - DNA, 25 bp, Homo sapien
ctttctcttggcggaaaaaacaatg

SEQ ID NO: 3669244 - DNA, 25 bp, Homo sapien
ttctcttggcggaaaaaacaatgtc

SEQ ID NO: 3669245 - DNA, 25 bp, Homo sapien
ctcttggcggaaaaaacaatgtcgt

SEQ ID NO: 3669246 - DNA, 25 bp, Homo sapien
tctcttggcggaaaaaacaatgtcg

SEQ ID NO: 3669247 - DNA, 25 bp, Homo sapien
tttgtacagttgcttcttcttattt

SEQ ID NO: 3669248 - DNA, 25 bp, Homo sapien
atggtttgtacagttgcttcttctt

SEQ ID NO: 3669249 - DNA, 25 bp, Homo sapien
cagttgcttcttcttatttctacaa

SEQ ID NO: 3669250 - DNA, 25 bp, Homo sapien
ggtttgtacagttgcttcttcttat

SEQ ID NO: 3669251 - DNA, 25 bp, Homo sapien
agtaaatccaaaacttcgacaagtg

SEQ ID NO: 3669252 - DNA, 25 bp, Homo sapien
ccaaaacttcgacaagtgtttgaca

SEQ ID NO: 3669253 - DNA, 25 bp, Homo sapien
ccagctgctgagcatagaattttga

SEQ ID NO: 3669254 - DNA, 25 bp, Homo sapien
tttgagtaaatccaaaacttcgaca

SEQ ID NO: 3669255 - DNA, 25 bp, Homo sapien
cattgtaagataatgctgatggctg

SEQ ID NO: 3669256 - DNA, 25 bp, Homo sapien
tgtcattgtaagataatgctgatgg

SEQ ID NO: 3669257 - DNA, 25 bp, Homo sapien
gaacacaagctgtattgttgactga

SEQ ID NO: 3669258 - DNA, 25 bp, Homo sapien
tattgttgactgaaacgcacagtag

SEQ ID NO: 3669259 - DNA, 25 bp, Homo sapien
ctttgtgtgatatgatgaggtatct

SEQ ID NO: 3669260 - DNA, 25 bp, Homo sapien
tatgatgaggtatctccaaggtcac

SEQ ID NO: 3669261 - DNA, 25 bp, Homo sapien
atatgatgaggtatctccaaggtca

SEQ ID NO: 3669262 - DNA, 25 bp, Homo sapien
tgtgtgatatgatgaggtatctcca

SEQ ID NO: 3669263 - DNA, 25 bp, Homo sapien
tgttcatcaggtatgctcaaagatc

SEQ ID NO: 3669264 - DNA, 25 bp, Homo sapien
caggtatgctcaaagatctatctgc

SEQ ID NO: 3669265 - DNA, 25 bp, Homo sapien
tgtaactgttcatcaggtatgctca

SEQ ID NO: 3669266 - DNA, 25 bp, Homo sapien
cgcaaatgagtgtaactgttcatca

SEQ ID NO: 3669267 - DNA, 25 bp, Homo sapien
tcgctttaagagcatgccctgttta

SEQ ID NO: 3669268 - DNA, 25 bp, Homo sapien
cttcgctttaagagcatgccctgtt

SEQ ID NO: 3669269 - DNA, 25 bp, Homo sapien
ttcgctttaagagcatgccctgttt

SEQ ID NO: 3669270 - DNA, 25 bp, Homo sapien
atgtggctagggatggccactttcc

SEQ ID NO: 3669271 - DNA, 25 bp, Homo sapien
gatgtggctagggatggccactttc

SEQ ID NO: 3669272 - DNA, 25 bp, Homo sapien
cctaagcttgaataataggtgagca

SEQ ID NO: 3669273 - DNA, 25 bp, Homo sapien
tcttcatataatcacctaagcttga

SEQ ID NO: 3669274 - DNA, 25 bp, Homo sapien
ttttactgctctcgcatgactgcag

SEQ ID NO: 3669275 - DNA, 25 bp, Homo sapien
gggacttgcttttactgctctcgca

SEQ ID NO: 3669276 - DNA, 25 bp, Homo sapien
ctgggacttgcttttactgctctcg

SEQ ID NO: 3669277 - DNA, 25 bp, Homo sapien
gcttttactgctctcgcatgactgc

SEQ ID NO: 3669278 - DNA, 25 bp, Homo sapien
ttcccacgcatgttttggatcgact

SEQ ID NO: 3669279 - DNA, 25 bp, Homo sapien
tcccacgcatgttttggatcgactg

SEQ ID NO: 3669280 - DNA, 25 bp, Homo sapien
cccacgcatgttttggatcgactgc

SEQ ID NO: 3669281 - DNA, 25 bp, Homo sapien
gttcccacgcatgttttggatcgac

SEQ ID NO: 3669282 - DNA, 25 bp, Homo sapien
ctggcccacttaggattctgggtct

SEQ ID NO: 3669283 - DNA, 25 bp, Homo sapien
ggcccacttaggattctgggtctca

SEQ ID NO: 3669284 - DNA, 25 bp, Homo sapien
tggcccacttaggattctgggtctc

SEQ ID NO: 3669285 - DNA, 25 bp, Homo sapien
gcccacttaggattctgggtctcac

SEQ ID NO: 3669286 - DNA, 25 bp, Homo sapien
ctccagagatcgcacacgggaaagg

SEQ ID NO: 3669287 - DNA, 25 bp, Homo sapien
tcagtgcagggtagtggggccagaa

SEQ ID NO: 3669288 - DNA, 25 bp, Homo sapien
cagtgcagggtagtggggccagaaa

SEQ ID NO: 3669289 - DNA, 25 bp, Homo sapien
ccagctccagagatcgcacacggga

SEQ ID NO: 3669290 - DNA, 25 bp, Homo sapien
acacgcactcgtcggggcagccgta

SEQ ID NO: 3669291 - DNA, 25 bp, Homo sapien
tacacgcactcgtcggggcagccgt

SEQ ID NO: 3669292 - DNA, 25 bp, Homo sapien
cacgcactcgtcggggcagccgtac

SEQ ID NO: 3669293 - DNA, 25 bp, Homo sapien
ctacacgcactcgtcggggcagccg

SEQ ID NO: 3669294 - DNA, 25 bp, Homo sapien
ctgtgttaccacgacaaaagtttgg

SEQ ID NO: 3669295 - DNA, 25 bp, Homo sapien
actgtgttaccacgacaaaagtttg

SEQ ID NO: 3669296 - DNA, 25 bp, Homo sapien
atttactgtgttaccacgacaaaag

SEQ ID NO: 3669297 - DNA, 25 bp, Homo sapien
gcatttactgtgttaccacgacaaa

SEQ ID NO: 3669298 - DNA, 25 bp, Homo sapien
cggttgcaagatagcagacagttca

SEQ ID NO: 3669299 - DNA, 25 bp, Homo sapien
caatcagtggcgtggacaatcctgc

SEQ ID NO: 3669300 - DNA, 25 bp, Homo sapien
caatcctgcggtaacaattacccgc

SEQ ID NO: 3669301 - DNA, 25 bp, Homo sapien
cagagacaatcggttgcaagatagc

SEQ ID NO: 3669302 - DNA, 25 bp, Homo sapien
ggctgccactgtgtagggcctgctt

SEQ ID NO: 3669303 - DNA, 25 bp, Homo sapien
ttaaagtcctttgcactctcagcat

SEQ ID NO: 3669304 - DNA, 25 bp, Homo sapien
tgccactgtgtagggcctgcttaaa

SEQ ID NO: 3669305 - DNA, 25 bp, Homo sapien
ctcagcattcccctcaagttcaagg

SEQ ID NO: 3669306 - DNA, 25 bp, Homo sapien
tgatgtcacgtgacagaacccgcac

SEQ ID NO: 3669307 - DNA, 25 bp, Homo sapien
tgacagaacccgcacgtgatccgac

SEQ ID NO: 3669308 - DNA, 25 bp, Homo sapien
tgtcacgtgacagaacccgcacgtg

SEQ ID NO: 3669309 - DNA, 25 bp, Homo sapien
cacgtgacagaacccgcacgtgatc

SEQ ID NO: 3669310 - DNA, 25 bp, Homo sapien
tgccagcacaggccgaggaccgcag

SEQ ID NO: 3669311 - DNA, 25 bp, Homo sapien
cccggaagcctagccccagccaagc

SEQ ID NO: 3669312 - DNA, 25 bp, Homo sapien
ccagccaagctgcccggggcgtgac

SEQ ID NO: 3669313 - DNA, 25 bp, Homo sapien
gcccggctcggtgggctccgaggct

SEQ ID NO: 3669314 - DNA, 25 bp, Homo sapien
gcgaaaaaaacgagaagagaggctg

SEQ ID NO: 3669315 - DNA, 25 bp, Homo sapien
cgaaaaaaacgagaagagaggctga

SEQ ID NO: 3669316 - DNA, 25 bp, Homo sapien
ctgcagcgaaaaaaacgagaagaga

SEQ ID NO: 3669317 - DNA, 25 bp, Homo sapien
cagcgaaaaaaacgagaagagaggc

SEQ ID NO: 3669318 - DNA, 25 bp, Homo sapien
ccagctcctggtcgggggtcgtccg

SEQ ID NO: 3669319 - DNA, 25 bp, Homo sapien
cacggccgctcccacacgggctccg

SEQ ID NO: 3669320 - DNA, 25 bp, Homo sapien
ccacggccgctcccacacgggctcc

SEQ ID NO: 3669321 - DNA, 25 bp, Homo sapien
aacgtcgcgtctgggccacggtcag

SEQ ID NO: 3669322 - DNA, 25 bp, Homo sapien
ccggggactgccagggtggcattct

SEQ ID NO: 3669323 - DNA, 25 bp, Homo sapien
cccatgaagggaacgtcgcgtctgg

SEQ ID NO: 3669324 - DNA, 25 bp, Homo sapien
cagggtggcattctcgggggctaaa

SEQ ID NO: 3669325 - DNA, 25 bp, Homo sapien
ctagtgcccgagcaatccctcagtg

SEQ ID NO: 3669326 - DNA, 25 bp, Homo sapien
cgagcaatccctcagtgtggcggaa

SEQ ID NO: 3669327 - DNA, 25 bp, Homo sapien
tcagtgtggcggaaacggatctccc

SEQ ID NO: 3669328 - DNA, 25 bp, Homo sapien
cggaaacggatctcccctccggatg

SEQ ID NO: 3669329 - DNA, 25 bp, Homo sapien
caagggttagctaatcaaccaccac

SEQ ID NO: 3669330 - DNA, 25 bp, Homo sapien
tattcatttgggactcgaacagttc

SEQ ID NO: 3669331 - DNA, 25 bp, Homo sapien
ggttgtcaatctacagagatcacag

SEQ ID NO: 3669332 - DNA, 25 bp, Homo sapien
agatcacagaccaagggttagctaa

SEQ ID NO: 3669333 - DNA, 25 bp, Homo sapien
tcattgaagacattatgcaggcgac

SEQ ID NO: 3669334 - DNA, 25 bp, Homo sapien
tcatgggtcctagagatagtttgct

SEQ ID NO: 3669335 - DNA, 25 bp, Homo sapien
tgcaggcgacaatctgtggctttgg

SEQ ID NO: 3669336 - DNA, 25 bp, Homo sapien
tagtttgctgtgagaattcctgtag

SEQ ID NO: 3669337 - DNA, 25 bp, Homo sapien
aacctttgccagcaatggctcctgt

SEQ ID NO: 3669338 - DNA, 25 bp, Homo sapien
acctttgccagcaatggctcctgtc

SEQ ID NO: 3669339 - DNA, 25 bp, Homo sapien
cctccacttcttcatcatatacacg

SEQ ID NO: 3669340 - DNA, 25 bp, Homo sapien
tcagccttgagtactggctcctcca

SEQ ID NO: 3669341 - DNA, 25 bp, Homo sapien
tgcctcagccttgagtactggctcc

SEQ ID NO: 3669342 - DNA, 25 bp, Homo sapien
cctcagccttgagtactggctcctc

SEQ ID NO: 3669343 - DNA, 25 bp, Homo sapien
tacaaaataaataccatgcagtatg

SEQ ID NO: 3669344 - DNA, 25 bp, Homo sapien
ctacaaaataaataccatgcagtat

SEQ ID NO: 3669345 - DNA, 25 bp, Homo sapien
ttagcatcatcttcctcggagtctg

SEQ ID NO: 3669346 - DNA, 25 bp, Homo sapien
gttccacccgcccattagcatcatc

SEQ ID NO: 3669347 - DNA, 25 bp, Homo sapien
gcccattagcatcatcttcctcgga

SEQ ID NO: 3669348 - DNA, 25 bp, Homo sapien
ggatcagttccacccgcccattagc

SEQ ID NO: 3669349 - DNA, 25 bp, Homo sapien
tgctcaggtaaagcgagtctttctg

SEQ ID NO: 3669350 - DNA, 25 bp, Homo sapien
ctttctggtggagtcaatgtgagac

SEQ ID NO: 3669351 - DNA, 25 bp, Homo sapien
cgtgtgcccaattaaagtagcccaa

SEQ ID NO: 3669352 - DNA, 25 bp, Homo sapien
caagtactccatcagtgctcaggta

SEQ ID NO: 3669353 - DNA, 25 bp, Homo sapien
gagattgcgccactccagcttgggc

SEQ ID NO: 3669354 - DNA, 25 bp, Homo sapien
ccgagattgcgccactccagcttgg

SEQ ID NO: 3669355 - DNA, 25 bp, Homo sapien
agccgagattgcgccactccagctt

SEQ ID NO: 3669356 - DNA, 25 bp, Homo sapien
cagcttgggcaacaagagtgaaact

SEQ ID NO: 3669357 - DNA, 25 bp, Homo sapien
catcttcttgttccatgaacagctt

SEQ ID NO: 3669358 - DNA, 25 bp, Homo sapien
ggtaaaggacgatcaatgtatagat

SEQ ID NO: 3669359 - DNA, 25 bp, Homo sapien
tttgacccaatgagatatggtaaag

SEQ ID NO: 3669360 - DNA, 25 bp, Homo sapien
caatgagatatggtaaaggacgatc

SEQ ID NO: 3669361 - DNA, 25 bp, Homo sapien
ctcagtgtccacaatactgccacga

SEQ ID NO: 3669362 - DNA, 25 bp, Homo sapien
actgccacgatcactgcctacagag

SEQ ID NO: 3669363 - DNA, 25 bp, Homo sapien
gtccacaatactgccacgatcactg

SEQ ID NO: 3669364 - DNA, 25 bp, Homo sapien
acaatactgccacgatcactgccta

SEQ ID NO: 3669365 - DNA, 25 bp, Homo sapien
gacctggtcataccaaacagccctt

SEQ ID NO: 3669366 - DNA, 25 bp, Homo sapien
acctggtcataccaaacagccctta

SEQ ID NO: 3669367 - DNA, 25 bp, Homo sapien
tgacctggtcataccaaacagccct

SEQ ID NO: 3669368 - DNA, 25 bp, Homo sapien
cgtgacctggtcataccaaacagcc

SEQ ID NO: 3669369 - DNA, 25 bp, Homo sapien
cctgctgtcaggtttttctttggag

SEQ ID NO: 3669370 - DNA, 25 bp, Homo sapien
ttcctgctgtcaggtttttctttgg

SEQ ID NO: 3669371 - DNA, 25 bp, Homo sapien
tcatttcctgctgtcaggtttttct

SEQ ID NO: 3669372 - DNA, 25 bp, Homo sapien
atttcctgctgtcaggtttttcttt

SEQ ID NO: 3669373 - DNA, 25 bp, Homo sapien
ttgtcactgtgatgggcaaaatctt

SEQ ID NO: 3669374 - DNA, 25 bp, Homo sapien
ttttgttcattgtcactgtgatggg

SEQ ID NO: 3669375 - DNA, 25 bp, Homo sapien
actgtgatgggcaaaatcttcatct

SEQ ID NO: 3669376 - DNA, 25 bp, Homo sapien
tggttttgttcattgtcactgtgat

SEQ ID NO: 3669377 - DNA, 25 bp, Homo sapien
tcctccttctcagagtcagcaaaaa

SEQ ID NO: 3669378 - DNA, 25 bp, Homo sapien
tccttctcagagtcagcaaaaaggt

SEQ ID NO: 3669379 - DNA, 25 bp, Homo sapien
ctccttctcagagtcagcaaaaagg

SEQ ID NO: 3669380 - DNA, 25 bp, Homo sapien
cttctcagagtcagcaaaaaggtca

SEQ ID NO: 3669381 - DNA, 25 bp, Homo sapien
catctgcaaacgatgtaggtctgct

SEQ ID NO: 3669382 - DNA, 25 bp, Homo sapien
gctcatctgcaaacgatgtaggtct

SEQ ID NO: 3669383 - DNA, 25 bp, Homo sapien
tcatctgcaaacgatgtaggtctgc

SEQ ID NO: 3669384 - DNA, 25 bp, Homo sapien
cagctcatctgcaaacgatgtaggt

SEQ ID NO: 3669385 - DNA, 25 bp, Homo sapien
ctttgagtgtcttccgaggttttgc

SEQ ID NO: 3669386 - DNA, 25 bp, Homo sapien
ttccgaggttttgcttctcctgagg

SEQ ID NO: 3669387 - DNA, 25 bp, Homo sapien
cgtctgaaggagttctcctttcctt

SEQ ID NO: 3669388 - DNA, 25 bp, Homo sapien
cttcttctctttgagtgtcttccga

SEQ ID NO: 3669389 - DNA, 25 bp, Homo sapien
tatttaacaaagtgtgaggcagtct

SEQ ID NO: 3669390 - DNA, 25 bp, Homo sapien
tgctgtgtctccaaactggcatgga

SEQ ID NO: 3669391 - DNA, 25 bp, Homo sapien
tgcagggagtattaaagatgggtcc

SEQ ID NO: 3669392 - DNA, 25 bp, Homo sapien
cagaactcaaattcccgggttggca

SEQ ID NO: 3669393 - DNA, 25 bp, Homo sapien
caaatggcgagaagtcctcgtcggt

SEQ ID NO: 3669394 - DNA, 25 bp, Homo sapien
gagccaaatggcgagaagtcctcgt

SEQ ID NO: 3669395 - DNA, 25 bp, Homo sapien
agaagtcctcgtcggtcagcttggg

SEQ ID NO: 3669396 - DNA, 25 bp, Homo sapien
cacctccagagccaaatggcgagaa

SEQ ID NO: 3669397 - DNA, 25 bp, Homo sapien
tccagcttgccgatcctgggaggct

SEQ ID NO: 3669398 - DNA, 25 bp, Homo sapien
aggctccagcttgccgatcctggga

SEQ ID NO: 3669399 - DNA, 25 bp, Homo sapien
cttgccgatcctgggaggcttccgt

SEQ ID NO: 3669400 - DNA, 25 bp, Homo sapien
gggaggcttccgtgaagaggtcact

SEQ ID NO: 3669401 - DNA, 25 bp, Homo sapien
cgggagactcggcacttagaatcac

SEQ ID NO: 3669402 - DNA, 25 bp, Homo sapien
tagcattttgccaggtctaggcggg

SEQ ID NO: 3669403 - DNA, 25 bp, Homo sapien
tccagttggatgagaatgaacgggt

SEQ ID NO: 3669404 - DNA, 25 bp, Homo sapien
caaaacatggacagcagaaagcaga

SEQ ID NO: 3669405 - DNA, 25 bp, Homo sapien
cgtcatcaagccacagcagtgggtc

SEQ ID NO: 3669406 - DNA, 25 bp, Homo sapien
ctgagctgtgactcaaatggaagag

SEQ ID NO: 3669407 - DNA, 25 bp, Homo sapien
tgagctgtgactcaaatggaagagc

SEQ ID NO: 3669408 - DNA, 25 bp, Homo sapien
tctgagctgtgactcaaatggaaga

SEQ ID NO: 3669409 - DNA, 25 bp, Homo sapien
ttctttccaggtttggatgatgaag

SEQ ID NO: 3669410 - DNA, 25 bp, Homo sapien
aaaaatacagaaacagctcctgctg

SEQ ID NO: 3669411 - DNA, 25 bp, Homo sapien
aaatacagaaacagctcctgctggg

SEQ ID NO: 3669412 - DNA, 25 bp, Homo sapien
attttctttccaggtttggatgatg

SEQ ID NO: 3669413 - DNA, 25 bp, Homo sapien
gaacggaggcagcaccaaacacatc

SEQ ID NO: 3669414 - DNA, 25 bp, Homo sapien
gaggcagcaccaaacacatccgtgt

SEQ ID NO: 3669415 - DNA, 25 bp, Homo sapien
ggcagcaccaaacacatccgtgtct

SEQ ID NO: 3669416 - DNA, 25 bp, Homo sapien
acggaggcagcaccaaacacatccg

SEQ ID NO: 3669417 - DNA, 25 bp, Homo sapien
gaaggtttgctgtggggtgccgaga

SEQ ID NO: 3669418 - DNA, 25 bp, Homo sapien
tttagaaggtttgctgtggggtgcc

SEQ ID NO: 3669419 - DNA, 25 bp, Homo sapien
ttttagaaggtttgctgtggggtgc

SEQ ID NO: 3669420 - DNA, 25 bp, Homo sapien
gcatccgtttgcactctttctagat

SEQ ID NO: 3669421 - DNA, 25 bp, Homo sapien
tccgtttgcactctttctagattaa

SEQ ID NO: 3669422 - DNA, 25 bp, Homo sapien
attctgcatccgtttgcactctttc

SEQ ID NO: 3669423 - DNA, 25 bp, Homo sapien
cactctttctagattaactaggcta

SEQ ID NO: 3669424 - DNA, 25 bp, Homo sapien
tttcatctgtctgactcacagtggc

SEQ ID NO: 3669425 - DNA, 25 bp, Homo sapien
atctgtctgactcacagtggcttct

SEQ ID NO: 3669426 - DNA, 25 bp, Homo sapien
tattttcatctgtctgactcacagt

SEQ ID NO: 3669427 - DNA, 25 bp, Homo sapien
tcatctgtctgactcacagtggctt

SEQ ID NO: 3669428 - DNA, 25 bp, Homo sapien
gagggcttgagatttttgctgtaag

SEQ ID NO: 3669429 - DNA, 25 bp, Homo sapien
ctgaaaataagcctttttgagtctt

SEQ ID NO: 3669430 - DNA, 25 bp, Homo sapien
tctgatgagggcttgagatttttgc

SEQ ID NO: 3669431 - DNA, 25 bp, Homo sapien
gatttttgctgtaagataaggtaac

SEQ ID NO: 3669432 - DNA, 25 bp, Homo sapien
taagttactcgcactttgagaagaa

SEQ ID NO: 3669433 - DNA, 25 bp, Homo sapien
aggcagcagagatgcaccttttaag

SEQ ID NO: 3669434 - DNA, 25 bp, Homo sapien
catcaaacagggaaaccgacgtggg

SEQ ID NO: 3669435 - DNA, 25 bp, Homo sapien
tcatcatcaaacagggaaaccgacg

SEQ ID NO: 3669436 - DNA, 25 bp, Homo sapien
gcagatgctttctttttggagagct

SEQ ID NO: 3669437 - DNA, 25 bp, Homo sapien
tgctgaacaacagggcagatgcttt

SEQ ID NO: 3669438 - DNA, 25 bp, Homo sapien
aacagggcagatgctttctttttgg

SEQ ID NO: 3669439 - DNA, 25 bp, Homo sapien
acagggcagatgctttctttttgga

SEQ ID NO: 3669440 - DNA, 25 bp, Homo sapien
cctccaacacctgccacgatgtctc

SEQ ID NO: 3669441 - DNA, 25 bp, Homo sapien
caacacctgccacgatgtctcttcc

SEQ ID NO: 3669442 - DNA, 25 bp, Homo sapien
tccaacacctgccacgatgtctctt

SEQ ID NO: 3669443 - DNA, 25 bp, Homo sapien
ccaacacctgccacgatgtctcttc

SEQ ID NO: 3669444 - DNA, 25 bp, Homo sapien
ttcctcaaagagactggtctttttc

SEQ ID NO: 3669445 - DNA, 25 bp, Homo sapien
cttcctcaaagagactggtcttttt

SEQ ID NO: 3669446 - DNA, 25 bp, Homo sapien
tcctcaaagagactggtctttttca

SEQ ID NO: 3669447 - DNA, 25 bp, Homo sapien
cagcccctggagtgatactgcacag

SEQ ID NO: 3669448 - DNA, 25 bp, Homo sapien
ggcagcatgttataccaaccacagc

SEQ ID NO: 3669449 - DNA, 25 bp, Homo sapien
ttggctatgggttatcagcccctgg

SEQ ID NO: 3669450 - DNA, 25 bp, Homo sapien
tgaacccataagctaatctggcagc

SEQ ID NO: 3669451 - DNA, 25 bp, Homo sapien
gaggagtgacactctctgggtcttc

SEQ ID NO: 3669452 - DNA, 25 bp, Homo sapien
tcaaagaggagtgacactctctggg

SEQ ID NO: 3669453 - DNA, 25 bp, Homo sapien
ggagtgacactctctgggtcttctt

SEQ ID NO: 3669454 - DNA, 25 bp, Homo sapien
gtcttcaaagaggagtgacactctc

SEQ ID NO: 3669455 - DNA, 25 bp, Homo sapien
aattttaatgactccttggcactct

SEQ ID NO: 3669456 - DNA, 25 bp, Homo sapien
gccacatcagttctcccaaatttta

SEQ ID NO: 3669457 - DNA, 25 bp, Homo sapien
acttcactccaagttgtgcctcctt

SEQ ID NO: 3669458 - DNA, 25 bp, Homo sapien
ttcactccaagttgtgcctccttct

SEQ ID NO: 3669459 - DNA, 25 bp, Homo sapien
gcttggttcctttgtcccatgggga

SEQ ID NO: 3669460 - DNA, 25 bp, Homo sapien
aggcttggttcctttgtcccatggg

SEQ ID NO: 3669461 - DNA, 25 bp, Homo sapien
cttggttcctttgtcccatggggat

SEQ ID NO: 3669462 - DNA, 25 bp, Homo sapien
tggttcctttgtcccatggggatga

SEQ ID NO: 3669463 - DNA, 25 bp, Homo sapien
tggggtgggcatcaggatcgcagcc

SEQ ID NO: 3669464 - DNA, 25 bp, Homo sapien
ttggggtgggcatcaggatcgcagc

SEQ ID NO: 3669465 - DNA, 25 bp, Homo sapien
cttggggtgggcatcaggatcgcag

SEQ ID NO: 3669466 - DNA, 25 bp, Homo sapien
tcttcatcctggaagacacctgtgc

SEQ ID NO: 3669467 - DNA, 25 bp, Homo sapien
cttcatcctggaagacacctgtgct

SEQ ID NO: 3669468 - DNA, 25 bp, Homo sapien
ttttttggtgccagcaaaaaggtca

SEQ ID NO: 3669469 - DNA, 25 bp, Homo sapien
tttttggtgccagcaaaaaggtcaa

SEQ ID NO: 3669470 - DNA, 25 bp, Homo sapien
ttttggtgccagcaaaaaggtcaac

SEQ ID NO: 3669471 - DNA, 25 bp, Homo sapien
ggcagagctgaaaagatcatcatct

SEQ ID NO: 3669472 - DNA, 25 bp, Homo sapien
atcatccccaaacaggctcccaaca

SEQ ID NO: 3669473 - DNA, 25 bp, Homo sapien
cttggcagagctgaaaagatcatca

SEQ ID NO: 3669474 - DNA, 25 bp, Homo sapien
gacttggcagagctgaaaagatcat

SEQ ID NO: 3669475 - DNA, 25 bp, Homo sapien
tttgaaagagttaacagagtggtct

SEQ ID NO: 3669476 - DNA, 25 bp, Homo sapien
atatgcctttttctttactaccttg

SEQ ID NO: 3669477 - DNA, 25 bp, Homo sapien
ggtgtttccggcttccatatgcctt

SEQ ID NO: 3669478 - DNA, 25 bp, Homo sapien
tactaccttgaatggattcaggatg

SEQ ID NO: 3669479 - DNA, 25 bp, Homo sapien
gattcatgaaactctggcgtgtgga

SEQ ID NO: 3669480 - DNA, 25 bp, Homo sapien
taaaagcaaaagatctgagccccag

SEQ ID NO: 3669481 - DNA, 25 bp, Homo sapien
caagagtcacagtttatcagagcac

SEQ ID NO: 3669482 - DNA, 25 bp, Homo sapien
tacggctcaggacactaaggcttca

SEQ ID NO: 3669483 - DNA, 25 bp, Homo sapien
atccgagtggatggttctttggttt

SEQ ID NO: 3669484 - DNA, 25 bp, Homo sapien
taaatggagcgagacctgatgagtc

SEQ ID NO: 3669485 - DNA, 25 bp, Homo sapien
ttgtatcttcccgatccgagtggat

SEQ ID NO: 3669486 - DNA, 25 bp, Homo sapien
ttggttttaaatggagcgagacctg

SEQ ID NO: 3669487 - DNA, 25 bp, Homo sapien
gacacatgacaagattcggtacaca

SEQ ID NO: 3669488 - DNA, 25 bp, Homo sapien
tgttaaagacgcagcacacaggaga

SEQ ID NO: 3669489 - DNA, 25 bp, Homo sapien
tagagaaacgtaggaaaatcgccca

SEQ ID NO: 3669490 - DNA, 25 bp, Homo sapien
gcagctgacaagagtaggaaaccca

SEQ ID NO: 3669491 - DNA, 25 bp, Homo sapien
caggcacactttccagaccgtggct

SEQ ID NO: 3669492 - DNA, 25 bp, Homo sapien
caaggccgctgggttgatcgctaaa

SEQ ID NO: 3669493 - DNA, 25 bp, Homo sapien
gtgtctgcctgagctggaagatcaa

SEQ ID NO: 3669494 - DNA, 25 bp, Homo sapien
caaaacaggctttacttcagagatc

SEQ ID NO: 3669495 - DNA, 25 bp, Homo sapien
gggtctgcggtctacgcttccctct

SEQ ID NO: 3669496 - DNA, 25 bp, Homo sapien
cctgagcagccagccgcctagctgc

SEQ ID NO: 3669497 - DNA, 25 bp, Homo sapien
gcttccctctcatcttgacacggct

SEQ ID NO: 3669498 - DNA, 25 bp, Homo sapien
agccgcctagctgcacgggtctgcg

SEQ ID NO: 3669499 - DNA, 25 bp, Homo sapien
tgatctgtaaagaggtcatcctcat

SEQ ID NO: 3669500 - DNA, 25 bp, Homo sapien
accacccactggtgggttggcagga

SEQ ID NO: 3669501 - DNA, 25 bp, Homo sapien
ccatcagcccactgtgcaatgggtc

SEQ ID NO: 3669502 - DNA, 25 bp, Homo sapien
tgttgttaatatgacatcctgctga

SEQ ID NO: 3669503 - DNA, 25 bp, Homo sapien
gcaaagatatcaatgttatcatcaa

SEQ ID NO: 3669504 - DNA, 25 bp, Homo sapien
ttgcttccgtagcaaatatatcatc

SEQ ID NO: 3669505 - DNA, 25 bp, Homo sapien
gagggtttaattgcttccgtagcaa

SEQ ID NO: 3669506 - DNA, 25 bp, Homo sapien
ggtttaattgcttccgtagcaaata

SEQ ID NO: 3669507 - DNA, 25 bp, Homo sapien
tcaaatcttggttcaggtgcggcct

SEQ ID NO: 3669508 - DNA, 25 bp, Homo sapien
gtgcggcctgtgcagatcggctttt

SEQ ID NO: 3669509 - DNA, 25 bp, Homo sapien
gtttggttgtcttagcctggatacc

SEQ ID NO: 3669510 - DNA, 25 bp, Homo sapien
caaagatgttggacaccttgtgttc

SEQ ID NO: 3669511 - DNA, 25 bp, Homo sapien
atactaagtacattgggtaaaagat

SEQ ID NO: 3669512 - DNA, 25 bp, Homo sapien
actaagtacattgggtaaaagatga

SEQ ID NO: 3669513 - DNA, 25 bp, Homo sapien
tactaagtacattgggtaaaagatg

SEQ ID NO: 3669514 - DNA, 25 bp, Homo sapien
gaagcatattatggccccagcaagg

SEQ ID NO: 3669515 - DNA, 25 bp, Homo sapien
ttccctgcccatgaaagccacaaag

SEQ ID NO: 3669516 - DNA, 25 bp, Homo sapien
caaggctaactaaatcaaactgtgg

SEQ ID NO: 3669517 - DNA, 25 bp, Homo sapien
tgctcccatattgctaagactcatg

SEQ ID NO: 3669518 - DNA, 25 bp, Homo sapien
acaaaatatgacagtgggggggcca

SEQ ID NO: 3669519 - DNA, 25 bp, Homo sapien
caaaatatgacagtgggggggccac

SEQ ID NO: 3669520 - DNA, 25 bp, Homo sapien
agcagtctgcctgacaacagcgact

SEQ ID NO: 3669521 - DNA, 25 bp, Homo sapien
acaacagcgactcggagatctcaac

SEQ ID NO: 3669522 - DNA, 25 bp, Homo sapien
cttgctcctccaagaccaaccaggg

SEQ ID NO: 3669523 - DNA, 25 bp, Homo sapien
tgcctgacaacagcgactcggagat

SEQ ID NO: 3669524 - DNA, 25 bp, Homo sapien
ccaggtacctatacacttgaggcca

SEQ ID NO: 3669525 - DNA, 25 bp, Homo sapien
tacctatacacttgaggccaccaag

SEQ ID NO: 3669526 - DNA, 25 bp, Homo sapien
ggtacctatacacttgaggccacca

SEQ ID NO: 3669527 - DNA, 25 bp, Homo sapien
catccaggtacctatacacttgagg

SEQ ID NO: 3669528 - DNA, 25 bp, Homo sapien
tgcttctcctcaggagtagaaatca

SEQ ID NO: 3669529 - DNA, 25 bp, Homo sapien
caatatcccaaaagaaccaaggttg

SEQ ID NO: 3669530 - DNA, 25 bp, Homo sapien
aaccccgttcagcattaattgtgct

SEQ ID NO: 3669531 - DNA, 25 bp, Homo sapien
gctggaacttccaccgtaagtctgg

SEQ ID NO: 3669532 - DNA, 25 bp, Homo sapien
tgatgcctctgaatggtcccgaggg

SEQ ID NO: 3669533 - DNA, 25 bp, Homo sapien
ccgaggggttgtggtggccgggcag

SEQ ID NO: 3669534 - DNA, 25 bp, Homo sapien
ccagccgggaggacgcttactacag

SEQ ID NO: 3669535 - DNA, 25 bp, Homo sapien
caggatgagcgggtggatcccagga

SEQ ID NO: 3669536 - DNA, 25 bp, Homo sapien
ggttaacaaatattgcatacacagg

SEQ ID NO: 3669537 - DNA, 25 bp, Homo sapien
cccaggaagcgctgtgaaacgggct

SEQ ID NO: 3669538 - DNA, 25 bp, Homo sapien
taaggactaatcatttaagggacaa

SEQ ID NO: 3669539 - DNA, 25 bp, Homo sapien
gtaaggactaatcatttaagggaca

SEQ ID NO: 3669540 - DNA, 25 bp, Homo sapien
tgagacccagaatcctaagtgggcc

SEQ ID NO: 3669541 - DNA, 25 bp, Homo sapien
taagtgggccagtttgaacttggga

SEQ ID NO: 3669542 - DNA, 25 bp, Homo sapien
tgcagtcgatccaaaacatgcgtgg

SEQ ID NO: 3669543 - DNA, 25 bp, Homo sapien
tggccagcctgcagtcatgcgagag

SEQ ID NO: 3669544 - DNA, 25 bp, Homo sapien
caaatatgtagttggtagaaggtgt

SEQ ID NO: 3669545 - DNA, 25 bp, Homo sapien
aattagttacggtggcattttacat

SEQ ID NO: 3669546 - DNA, 25 bp, Homo sapien
gcctttaagtattgaaaagctgcca

SEQ ID NO: 3669547 - DNA, 25 bp, Homo sapien
gatgacctaacctcatgcaaatatg

SEQ ID NO: 3669548 - DNA, 25 bp, Homo sapien
gcttgtgttcgacaatattccttga

SEQ ID NO: 3669549 - DNA, 25 bp, Homo sapien
aatattccttgatgacagcacagcc

SEQ ID NO: 3669550 - DNA, 25 bp, Homo sapien
caacaatacagcttgtgttcgacaa

SEQ ID NO: 3669551 - DNA, 25 bp, Homo sapien
tgtgcgtttcagtcaacaatacagc

SEQ ID NO: 3669552 - DNA, 25 bp, Homo sapien
caccacgttcgtgaccgggagatgc

SEQ ID NO: 3669553 - DNA, 25 bp, Homo sapien
ggaacatactgacctgtcgtgtgca

SEQ ID NO: 3669554 - DNA, 25 bp, Homo sapien
tagcgtcagcctcgagtttgaccag

SEQ ID NO: 3669555 - DNA, 25 bp, Homo sapien
gataggtgccatctaccctcggttt

SEQ ID NO: 3669556 - DNA, 25 bp, Homo sapien
gcgggcctgaccaacgtgcagaaac

SEQ ID NO: 3669557 - DNA, 25 bp, Homo sapien
aggcgggcctgaccaacgtgcagaa

SEQ ID NO: 3669558 - DNA, 25 bp, Homo sapien
ttaaaaatatacgaatctggctggg

SEQ ID NO: 3669559 - DNA, 25 bp, Homo sapien
gctgaggcgggcctgaccaacgtgc

SEQ ID NO: 3669560 - DNA, 25 bp, Homo sapien
actcctctggaggtaccttggtctc

SEQ ID NO: 3669561 - DNA, 25 bp, Homo sapien
tggaggtaccttggtctcccgatcc

SEQ ID NO: 3669562 - DNA, 25 bp, Homo sapien
gaggtaccttggtctcccgatccat

SEQ ID NO: 3669563 - DNA, 25 bp, Homo sapien
ctctggaggtaccttggtctcccga

SEQ ID NO: 3669564 - DNA, 25 bp, Homo sapien
tctctgcccaagaggagcttctgac

SEQ ID NO: 3669565 - DNA, 25 bp, Homo sapien
gatctctgcccaagaggagcttctg

SEQ ID NO: 3669566 - DNA, 25 bp, Homo sapien
gctgtgatctctgcccaagaggagc

SEQ ID NO: 3669567 - DNA, 25 bp, Homo sapien
gtgatctctgcccaagaggagcttc

SEQ ID NO: 3669568 - DNA, 25 bp, Homo sapien
tgctgcctgggatcatgagagacct

SEQ ID NO: 3669569 - DNA, 25 bp, Homo sapien
acgtgataacaactactgctgcctg

SEQ ID NO: 3669570 - DNA, 25 bp, Homo sapien
tcagccccaggtcgtagctattgtc

SEQ ID NO: 3669571 - DNA, 25 bp, Homo sapien
tattgtctgccctgctgatatgtga

SEQ ID NO: 3669572 - DNA, 25 bp, Homo sapien
tggaccaggatcagacagtgctgtc

SEQ ID NO: 3669573 - DNA, 25 bp, Homo sapien
gaccaggatcagacagtgctgtcct

SEQ ID NO: 3669574 - DNA, 25 bp, Homo sapien
ggctggaccaggatcagacagtgct

SEQ ID NO: 3669575 - DNA, 25 bp, Homo sapien
ggtgatggcggtttgggctggacca

SEQ ID NO: 3669576 - DNA, 25 bp, Homo sapien
acagaggttctggtgaagtggcctg

SEQ ID NO: 3669577 - DNA, 25 bp, Homo sapien
actgtctgaaggttccccctcatca

SEQ ID NO: 3669578 - DNA, 25 bp, Homo sapien
cacagaggttctggtgaagtggcct

SEQ ID NO: 3669579 - DNA, 25 bp, Homo sapien
gtctgaaggttccccctcatcattt

SEQ ID NO: 3669580 - DNA, 25 bp, Homo sapien
taaagatctctccacgtcttagatt

SEQ ID NO: 3669581 - DNA, 25 bp, Homo sapien
ctggcctgaaggtcatttttataaa

SEQ ID NO: 3669582 - DNA, 25 bp, Homo sapien
tctctccacgtcttagatttgattc

SEQ ID NO: 3669583 - DNA, 25 bp, Homo sapien
catttttataaagatctctccacgt

SEQ ID NO: 3669584 - DNA, 25 bp, Homo sapien
caagttaaattacctccacatgctc

SEQ ID NO: 3669585 - DNA, 25 bp, Homo sapien
tctgtcatgttctagtgcatcaaac

SEQ ID NO: 3669586 - DNA, 25 bp, Homo sapien
gctgtgttaactccgctaaaaattg

SEQ ID NO: 3669587 - DNA, 25 bp, Homo sapien
tctgaaggtagtagactggtactcc

SEQ ID NO: 3669588 - DNA, 25 bp, Homo sapien
tgtaaccaattaccagaatttacat

SEQ ID NO: 3669589 - DNA, 25 bp, Homo sapien
taaccaattaccagaatttacattc

SEQ ID NO: 3669590 - DNA, 25 bp, Homo sapien
ttcttatggaagaaatagaatccac

SEQ ID NO: 3669591 - DNA, 25 bp, Homo sapien
cagagttctgtagggagcaaagacc

SEQ ID NO: 3669592 - DNA, 25 bp, Homo sapien
ggcagaggtcaagatgtcttgggaa

SEQ ID NO: 3669593 - DNA, 25 bp, Homo sapien
aagacccatcgctgctggatggctg

SEQ ID NO: 3669594 - DNA, 25 bp, Homo sapien
gtcattgtgtctacttcaccctatt

SEQ ID NO: 3669595 - DNA, 25 bp, Homo sapien
tccaaaaaagctagtgtggatagct

SEQ ID NO: 3669596 - DNA, 25 bp, Homo sapien
aaagctagtgtggatagcttctttc

SEQ ID NO: 3669597 - DNA, 25 bp, Homo sapien
gacacattgtcattgtgtctacttc

SEQ ID NO: 3669598 - DNA, 25 bp, Homo sapien
tctctttgaatgatgctttgggggc

SEQ ID NO: 3669599 - DNA, 25 bp, Homo sapien
tcactggggccactcgtagtgccac

SEQ ID NO: 3669600 - DNA, 25 bp, Homo sapien
ccacaaagtggctgatgtcatacag

SEQ ID NO: 3669601 - DNA, 25 bp, Homo sapien
gctgatgaaggcccaatccactgtg

SEQ ID NO: 3669602 - DNA, 25 bp, Homo sapien
tgtgattctggaagatgactttgtc

SEQ ID NO: 3669603 - DNA, 25 bp, Homo sapien
tcaaaccaggacaaagatagcaggc

SEQ ID NO: 3669604 - DNA, 25 bp, Homo sapien
caagtaggattgcttcggcagaagc

SEQ ID NO: 3669605 - DNA, 25 bp, Homo sapien
cctgtgcaggatagactgaaggtag

SEQ ID NO: 3669606 - DNA, 25 bp, Homo sapien
tcctgggtggcccagtaggatgggt

SEQ ID NO: 3669607 - DNA, 25 bp, Homo sapien
ccagtaggatgggtgaggaaggttc

SEQ ID NO: 3669608 - DNA, 25 bp, Homo sapien
ggagataccggtagcagacaagtgc

SEQ ID NO: 3669609 - DNA, 25 bp, Homo sapien
gggagtggagataccggtagcagac

SEQ ID NO: 3669610 - DNA, 25 bp, Homo sapien
acagaactgagtccaatgtgggagc

SEQ ID NO: 3669611 - DNA, 25 bp, Homo sapien
actgggccaagtccaaggcacaatc

SEQ ID NO: 3669612 - DNA, 25 bp, Homo sapien
ggccaagtccaaggcacaatctggg

SEQ ID NO: 3669613 - DNA, 25 bp, Homo sapien
caaggcacaatctggggcaagttgg

SEQ ID NO: 3669614 - DNA, 25 bp, Homo sapien
caggctcctggtgatttcccccaga

SEQ ID NO: 3669615 - DNA, 25 bp, Homo sapien
gctccagtgcattgggcggggcctc

SEQ ID NO: 3669616 - DNA, 25 bp, Homo sapien
ctcctggtgatttcccccagagttg

SEQ ID NO: 3669617 - DNA, 25 bp, Homo sapien
cagtgcttcccatgggggaggcatt

SEQ ID NO: 3669618 - DNA, 25 bp, Homo sapien
gctcccggctgacaggatggccagt

SEQ ID NO: 3669619 - DNA, 25 bp, Homo sapien
tagggcaggcagacgctccttgctt

SEQ ID NO: 3669620 - DNA, 25 bp, Homo sapien
ccttagggcaggcagacgctccttg

SEQ ID NO: 3669621 - DNA, 25 bp, Homo sapien
tggccagtgccatagtcactctctc

SEQ ID NO: 3669622 - DNA, 25 bp, Homo sapien
ccctctgtggaaatcccctccttgc

SEQ ID NO: 3669623 - DNA, 25 bp, Homo sapien
cccctctgtggaaatcccctccttg

SEQ ID NO: 3669624 - DNA, 25 bp, Homo sapien
gccatggaagggctgacggtctcca

SEQ ID NO: 3669625 - DNA, 25 bp, Homo sapien
tggagcccacactacgtctgtgatg

SEQ ID NO: 3669626 - DNA, 25 bp, Homo sapien
tgctgtcgggaccagagcgttcttc

SEQ ID NO: 3669627 - DNA, 25 bp, Homo sapien
gggtgccacacgcaggttccttgaa

SEQ ID NO: 3669628 - DNA, 25 bp, Homo sapien
tctggtgctggcatggtcaagctgc

SEQ ID NO: 3669629 - DNA, 25 bp, Homo sapien
catgaatctgacctgggccatgtga

SEQ ID NO: 3669630 - DNA, 25 bp, Homo sapien
tgcctgcctccacgcatgggattgg

SEQ ID NO: 3669631 - DNA, 25 bp, Homo sapien
aggtgtgttgctccgcaagcccaaa

SEQ ID NO: 3669632 - DNA, 25 bp, Homo sapien
cagctgctgctgatatgtctgttca

SEQ ID NO: 3669633 - DNA, 25 bp, Homo sapien
ccagccacgcctcgtggaatgatgc

SEQ ID NO: 3669634 - DNA, 25 bp, Homo sapien
cacgcctcgtggaatgatgctgcag

SEQ ID NO: 3669635 - DNA, 25 bp, Homo sapien
gctgctgatatgtctgttcacagca

SEQ ID NO: 3669636 - DNA, 25 bp, Homo sapien
ggcaagcactctcatcaggacctaa

SEQ ID NO: 3669637 - DNA, 25 bp, Homo sapien
tgggcaaggctactgcagcactgct

SEQ ID NO: 3669638 - DNA, 25 bp, Homo sapien
caccctctgtgcaggaatcatggca

SEQ ID NO: 3669639 - DNA, 25 bp, Homo sapien
gaccctagtggtcgtacatttgccg

SEQ ID NO: 3669640 - DNA, 25 bp, Homo sapien
gcagcagctaggtcctgaatcctgc

SEQ ID NO: 3669641 - DNA, 25 bp, Homo sapien
gactgccctgctccgtgtctgtagc

SEQ ID NO: 3669642 - DNA, 25 bp, Homo sapien
cctgaatcctgcaggactcatccat

SEQ ID NO: 3669643 - DNA, 25 bp, Homo sapien
ttcaggtaacaagtaggtgggtgca

SEQ ID NO: 3669644 - DNA, 25 bp, Homo sapien
gttcaagaggctgacttgggaaaat

SEQ ID NO: 3669645 - DNA, 25 bp, Homo sapien
tttgaaggtgtttcccaggaaggca

SEQ ID NO: 3669646 - DNA, 25 bp, Homo sapien
ctgcagatttgaaggtgtttcccag

SEQ ID NO: 3669647 - DNA, 25 bp, Homo sapien
ggcaggtagttcaagaggctgactt

SEQ ID NO: 3669648 - DNA, 25 bp, Homo sapien
cagattgggaagtctgaccttcccc

SEQ ID NO: 3669649 - DNA, 25 bp, Homo sapien
gccatgaacagcaaaatcagggtcc

SEQ ID NO: 3669650 - DNA, 25 bp, Homo sapien
attgggaagtctgaccttccccctg

SEQ ID NO: 3669651 - DNA, 25 bp, Homo sapien
ttgggaagtctgaccttccccctga

SEQ ID NO: 3669652 - DNA, 25 bp, Homo sapien
tggaagagccacttaccttctgagg

SEQ ID NO: 3669653 - DNA, 25 bp, Homo sapien
tgcagggtcacctttactaccaggg

SEQ ID NO: 3669654 - DNA, 25 bp, Homo sapien
gcggatgcctgcagaatgctcttct

SEQ ID NO: 3669655 - DNA, 25 bp, Homo sapien
tctctcatgggtgaaagactgcctc

SEQ ID NO: 3669656 - DNA, 25 bp, Homo sapien
cagcagcctggtggcagtatgggag

SEQ ID NO: 3669657 - DNA, 25 bp, Homo sapien
tagtcccaacaaggaacagcacagt

SEQ ID NO: 3669658 - DNA, 25 bp, Homo sapien
gaagcctgctggtgcggctgtctta

SEQ ID NO: 3669659 - DNA, 25 bp, Homo sapien
cagtgagagcgttacagatgctgcc

SEQ ID NO: 3669660 - DNA, 25 bp, Homo sapien
agcctcgcccagtccttggagaagc

SEQ ID NO: 3669661 - DNA, 25 bp, Homo sapien
gccagggcgtggcagaggggtgcac

SEQ ID NO: 3669662 - DNA, 25 bp, Homo sapien
cccagccagggcgtggcagaggggt

SEQ ID NO: 3669663 - DNA, 25 bp, Homo sapien
cagggcgtggcagaggggtgcacgg

SEQ ID NO: 3669664 - DNA, 25 bp, Homo sapien
cagccagggcgtggcagaggggtgc

SEQ ID NO: 3669665 - DNA, 25 bp, Homo sapien
tcttggagttcccagcgggactctg

SEQ ID NO: 3669666 - DNA, 25 bp, Homo sapien
ctgagtgcacaaccaggcctcacag

SEQ ID NO: 3669667 - DNA, 25 bp, Homo sapien
ttcccagcgggactctgccggaagc

SEQ ID NO: 3669668 - DNA, 25 bp, Homo sapien
actctgccggaagccaggagcccgg

SEQ ID NO: 3669669 - DNA, 25 bp, Homo sapien
tgtgagctccagtcacccttagctt

SEQ ID NO: 3669670 - DNA, 25 bp, Homo sapien
ctggataggatcaagtgcccacagg

SEQ ID NO: 3669671 - DNA, 25 bp, Homo sapien
tctgggatgactcccagaagcctgg

SEQ ID NO: 3669672 - DNA, 25 bp, Homo sapien
gggatgacaactgctacagctggat

SEQ ID NO: 3669673 - DNA, 25 bp, Homo sapien
tgcgcggcaatcaggaccctgccag

SEQ ID NO: 3669674 - DNA, 25 bp, Homo sapien
tctgggtcagaagttcatggctaac

SEQ ID NO: 3669675 - DNA, 25 bp, Homo sapien
ctgactccccaactcacacgctcag

SEQ ID NO: 3669676 - DNA, 25 bp, Homo sapien
gcaatcaggaccctgccagaggcag

SEQ ID NO: 3669677 - DNA, 25 bp, Homo sapien
ttgtactttcccagagcagggggct

SEQ ID NO: 3669678 - DNA, 25 bp, Homo sapien
tagagcttcgaaggtggaggggtct

SEQ ID NO: 3669679 - DNA, 25 bp, Homo sapien
tcagaggtgaggtctttgtactttc

SEQ ID NO: 3669680 - DNA, 25 bp, Homo sapien
ttagagcttcgaaggtggaggggtc

SEQ ID NO: 3669681 - DNA, 25 bp, Homo sapien
tgcttaggaagcgcacactgatagg

SEQ ID NO: 3669682 - DNA, 25 bp, Homo sapien
gcttaggaagcgcacactgatagga

SEQ ID NO: 3669683 - DNA, 25 bp, Homo sapien
cattgttcattctaagagtgtctac

SEQ ID NO: 3669684 - DNA, 25 bp, Homo sapien
ggcagcattgttcattctaagagtg

SEQ ID NO: 3669685 - DNA, 25 bp, Homo sapien
agtgagcagaatccctaccaggtcc

SEQ ID NO: 3669686 - DNA, 25 bp, Homo sapien
gcagaatccctaccaggtccccgtc

SEQ ID NO: 3669687 - DNA, 25 bp, Homo sapien
tcagtgagcagaatccctaccaggt

SEQ ID NO: 3669688 - DNA, 25 bp, Homo sapien
atggtctccatcaattcctcccctc

SEQ ID NO: 3669689 - DNA, 25 bp, Homo sapien
ctggcccaggtaggtataatgcact

SEQ ID NO: 3669690 - DNA, 25 bp, Homo sapien
ggcccaggtaggtataatgcacttc

SEQ ID NO: 3669691 - DNA, 25 bp, Homo sapien
tggcccaggtaggtataatgcactt

SEQ ID NO: 3669692 - DNA, 25 bp, Homo sapien
tgactttcactgtgtgatctcctag

SEQ ID NO: 3669693 - DNA, 25 bp, Homo sapien
gcatttgggtgaagtaggccaccat

SEQ ID NO: 3669694 - DNA, 25 bp, Homo sapien
gatctcctagcatttgggtgaagta

SEQ ID NO: 3669695 - DNA, 25 bp, Homo sapien
actgtgtgatctcctagcatttggg

SEQ ID NO: 3669696 - DNA, 25 bp, Homo sapien
gggggcaactcggattctgctctgt

SEQ ID NO: 3669697 - DNA, 25 bp, Homo sapien
ggcttccttgattgttcttttcgtc

SEQ ID NO: 3669698 - DNA, 25 bp, Homo sapien
cagctggtgttgaatcagggcaggg

SEQ ID NO: 3669699 - DNA, 25 bp, Homo sapien
cctcagtttccagcagtacatagtt

SEQ ID NO: 3669700 - DNA, 25 bp, Homo sapien
gaaggcatttcacagtccaaactga

SEQ ID NO: 3669701 - DNA, 25 bp, Homo sapien
caaaactaaatggtgcctgggtcct

SEQ ID NO: 3669702 - DNA, 25 bp, Homo sapien
taaagcgagtagcaacaaaggactg

SEQ ID NO: 3669703 - DNA, 25 bp, Homo sapien
caagactctacggttgctgaagggc

SEQ ID NO: 3669704 - DNA, 25 bp, Homo sapien
cctgagctgtgaagtagtgtcgctg

SEQ ID NO: 3669705 - DNA, 25 bp, Homo sapien
tcccaatgactcaagggcgggtgga

SEQ ID NO: 3669706 - DNA, 25 bp, Homo sapien
gaagccatcatcaggcgctgagaca

SEQ ID NO: 3669707 - DNA, 25 bp, Homo sapien
caggacgtgattctggccgtgtgat

SEQ ID NO: 3669708 - DNA, 25 bp, Homo sapien
tctgggtatccggatcaaggccaag

SEQ ID NO: 3669709 - DNA, 25 bp, Homo sapien
tcaaggtccatctcagagggcgtct

SEQ ID NO: 3669710 - DNA, 25 bp, Homo sapien
ccttcgggaggtgaaaggaccatga

SEQ ID NO: 3669711 - DNA, 25 bp, Homo sapien
gagccttcccagtgtgatgatttga

SEQ ID NO: 3669712 - DNA, 25 bp, Homo sapien
gcttgtgttcgacaatattccttga

SEQ ID NO: 3669713 - DNA, 25 bp, Homo sapien
tgtgcgtttcagtcaacaatacagc

SEQ ID NO: 3669714 - DNA, 25 bp, Homo sapien
aatattccttgatgacagcacagcc

SEQ ID NO: 3669715 - DNA, 25 bp, Homo sapien
caacaatacagcttgtgttcgacaa

SEQ ID NO: 3669716 - DNA, 25 bp, Homo sapien
caccacgttcgtgaccgggagatgc

SEQ ID NO: 3669717 - DNA, 25 bp, Homo sapien
gataggtgccatctaccctcggttt

SEQ ID NO: 3669718 - DNA, 25 bp, Homo sapien
ggaacatactgacctgtcgtgtgca

SEQ ID NO: 3669719 - DNA, 25 bp, Homo sapien
tagcgtcagcctcgagtttgaccag

SEQ ID NO: 3669720 - DNA, 25 bp, Homo sapien
gttgcggacaaaaatgaccactcgt

SEQ ID NO: 3669721 - DNA, 25 bp, Homo sapien
tattgagagtagagctagggcccca

SEQ ID NO: 3669722 - DNA, 25 bp, Homo sapien
tatagaactcatagaggaagctggc

SEQ ID NO: 3669723 - DNA, 25 bp, Homo sapien
tcaacttggttgctaatgggaccca

SEQ ID NO: 3669724 - DNA, 25 bp, Homo sapien
catggcttgtgaatgcggaagtgcc

SEQ ID NO: 3669725 - DNA, 25 bp, Homo sapien
ggcctgaagttcacgtttataaaga

SEQ ID NO: 3669726 - DNA, 25 bp, Homo sapien
gcctgtgtgcatagttgtgctcaag

SEQ ID NO: 3669727 - DNA, 25 bp, Homo sapien
acatttgaaagcacctgaccttata

SEQ ID NO: 3669728 - DNA, 25 bp, Homo sapien
cttcagcaaggactccgcgagcgag

SEQ ID NO: 3669729 - DNA, 25 bp, Homo sapien
caagcggacctaaggagtcgcagtt

SEQ ID NO: 3669730 - DNA, 25 bp, Homo sapien
ctccgcgagcgaggtgcaagctgct

SEQ ID NO: 3669731 - DNA, 25 bp, Homo sapien
gcactcggccgttgacgagtctttc

SEQ ID NO: 3669732 - DNA, 25 bp, Homo sapien
cagccatagtccattcgccccgggc

SEQ ID NO: 3669733 - DNA, 25 bp, Homo sapien
ctggcttttgcacggcatcaagtaa

SEQ ID NO: 3669734 - DNA, 25 bp, Homo sapien
tcctggcttttgcacggcatcaagt

SEQ ID NO: 3669735 - DNA, 25 bp, Homo sapien
tcccaatccagccatagtccattcg

SEQ ID NO: 3669736 - DNA, 25 bp, Homo sapien
tccgattaggaaagagaagccacac

SEQ ID NO: 3669737 - DNA, 25 bp, Homo sapien
tctctgcagatacaaaccgggtgtc

SEQ ID NO: 3669738 - DNA, 25 bp, Homo sapien
tgatagcgtattggtcagagtccga

SEQ ID NO: 3669739 - DNA, 25 bp, Homo sapien
gggttttccacactaagcagttctc

SEQ ID NO: 3669740 - DNA, 25 bp, Homo sapien
ccaagagttctaccacaagcacaga

SEQ ID NO: 3669741 - DNA, 25 bp, Homo sapien
gcttaagttgctatagtgatgaaga

SEQ ID NO: 3669742 - DNA, 25 bp, Homo sapien
aagaaaacaaaccagctcattactt

SEQ ID NO: 3669743 - DNA, 25 bp, Homo sapien
gattcagtgaaaaccacaattgact

SEQ ID NO: 3669744 - DNA, 25 bp, Homo sapien
taaagtcaaataataggtaaataca

SEQ ID NO: 3669745 - DNA, 25 bp, Homo sapien
gaaggtgaacaggaccaacagagat

SEQ ID NO: 3669746 - DNA, 25 bp, Homo sapien
tcttatgtggtctgaatattgtcac

SEQ ID NO: 3669747 - DNA, 25 bp, Homo sapien
gaagttattcaataaagtcaaataa

SEQ ID NO: 3669748 - DNA, 25 bp, Homo sapien
ttttagagcctgtggaagtcatcac

SEQ ID NO: 3669749 - DNA, 25 bp, Homo sapien
ggaaaatagtcaggcgctgtgccca

SEQ ID NO: 3669750 - DNA, 25 bp, Homo sapien
tgggcgtcacaactgcgaggaacat

SEQ ID NO: 3669751 - DNA, 25 bp, Homo sapien
gcacggtgccctgcaagtggtcaaa

SEQ ID NO: 3669752 - DNA, 25 bp, Homo sapien
tctctataatccattgcttctcaat

SEQ ID NO: 3669753 - DNA, 25 bp, Homo sapien
tataatccattgcttctcaatccca

SEQ ID NO: 3669754 - DNA, 25 bp, Homo sapien
aatccattgcttctcaatcccaagg

SEQ ID NO: 3669755 - DNA, 25 bp, Homo sapien
ccattgcttctcaatcccaaggagg

SEQ ID NO: 3669756 - DNA, 25 bp, Homo sapien
ttttacttcatctacactcacatca

SEQ ID NO: 3669757 - DNA, 25 bp, Homo sapien
tggggagccggtccccggccatgat

SEQ ID NO: 3669758 - DNA, 25 bp, Homo sapien
ctggggagccggtccccggccatga

SEQ ID NO: 3669759 - DNA, 25 bp, Homo sapien
agcagatgttgacggagctgagcac

SEQ ID NO: 3669760 - DNA, 25 bp, Homo sapien
gcagcagatgttgacggagctgagc

SEQ ID NO: 3669761 - DNA, 25 bp, Homo sapien
cagcagatgttgacggagctgagca

SEQ ID NO: 3669762 - DNA, 25 bp, Homo sapien
ccggctggatgaactccacaatggt

SEQ ID NO: 3669763 - DNA, 25 bp, Homo sapien
ctggctgcgtgcagccggctggatg

SEQ ID NO: 3669764 - DNA, 25 bp, Homo sapien
gcgtgcagccggctggatgaactcc

SEQ ID NO: 3669765 - DNA, 25 bp, Homo sapien
cagccggctggatgaactccacaat

SEQ ID NO: 3669766 - DNA, 25 bp, Homo sapien
accaccacgtcctgtggctcagtgg

SEQ ID NO: 3669767 - DNA, 25 bp, Homo sapien
ctggtcatagaccaccacgtcctgt

SEQ ID NO: 3669768 - DNA, 25 bp, Homo sapien
accacgtcctgtggctcagtggcct

SEQ ID NO: 3669769 - DNA, 25 bp, Homo sapien
gaccaccacgtcctgtggctcagtg

SEQ ID NO: 3669770 - DNA, 25 bp, Homo sapien
cagccggccacgctgtggaagcagc

SEQ ID NO: 3669771 - DNA, 25 bp, Homo sapien
aagccccccgtgatgatggccatgc

SEQ ID NO: 3669772 - DNA, 25 bp, Homo sapien
ccatgctgtggaagcagccggccac

SEQ ID NO: 3669773 - DNA, 25 bp, Homo sapien
gagaggaagctgtctgcggccgcgt

SEQ ID NO: 3669774 - DNA, 25 bp, Homo sapien
tcacagtagttgtcgttgatgggga

SEQ ID NO: 3669775 - DNA, 25 bp, Homo sapien
acagtagttgtcgttgatggggacc

SEQ ID NO: 3669776 - DNA, 25 bp, Homo sapien
cacagtagttgtcgttgatggggac

SEQ ID NO: 3669777 - DNA, 25 bp, Homo sapien
ttcacagtagttgtcgttgatgggg

SEQ ID NO: 3669778 - DNA, 25 bp, Homo sapien
gatggcgatagtggcacagcaggag

SEQ ID NO: 3669779 - DNA, 25 bp, Homo sapien
gcgatagtggcacagcaggagatgc

SEQ ID NO: 3669780 - DNA, 25 bp, Homo sapien
cgatggcgatagtggcacagcagga

SEQ ID NO: 3669781 - DNA, 25 bp, Homo sapien
aggcgatggcgatagtggcacagca

SEQ ID NO: 3669782 - DNA, 25 bp, Homo sapien
cagcttcgggctgctctggtactcc

SEQ ID NO: 3669783 - DNA, 25 bp, Homo sapien
agcttcgggctgctctggtactcca

SEQ ID NO: 3669784 - DNA, 25 bp, Homo sapien
actggctgtccagctttcagagagc

SEQ ID NO: 3669785 - DNA, 25 bp, Homo sapien
ttcagagagcttcggggcctcgccg

SEQ ID NO: 3669786 - DNA, 25 bp, Homo sapien
agcatggccccgactggctgtccag

SEQ ID NO: 3669787 - DNA, 25 bp, Homo sapien
gcagggcgagggcaggcccagcatg

SEQ ID NO: 3669788 - DNA, 25 bp, Homo sapien
cgagcggtggcgtccaggctccggg

SEQ ID NO: 3669789 - DNA, 25 bp, Homo sapien
gcccggcagccgcgtagccgaagtt

SEQ ID NO: 3669790 - DNA, 25 bp, Homo sapien
cggcagccgcgtagccgaagttcag

SEQ ID NO: 3669791 - DNA, 25 bp, Homo sapien
gggagtcgagcggtggcgtccaggc

SEQ ID NO: 3669792 - DNA, 25 bp, Homo sapien
ggcgcccgcccggccgaagggcgca

SEQ ID NO: 3669793 - DNA, 25 bp, Homo sapien
gcgcccgcccggccgaagggcgcaa

SEQ ID NO: 3669794 - DNA, 25 bp, Homo sapien
ccgcccggccgaagggcgcaaacag

SEQ ID NO: 3669795 - DNA, 25 bp, Homo sapien
gcccggccgaagggcgcaaacagca

SEQ ID NO: 3669796 - DNA, 25 bp, Homo sapien
tgaagtgcgaatccggggccagctc

SEQ ID NO: 3669797 - DNA, 25 bp, Homo sapien
ctgcagcacttgaagtgcgaatccg

SEQ ID NO: 3669798 - DNA, 25 bp, Homo sapien
cacttgaagtgcgaatccggggcca

SEQ ID NO: 3669799 - DNA, 25 bp, Homo sapien
gcagcacttgaagtgcgaatccggg

SEQ ID NO: 3669800 - DNA, 25 bp, Homo sapien
gccctcctcgaactccatctggcag

SEQ ID NO: 3669801 - DNA, 25 bp, Homo sapien
atgccctcctcgaactccatctggc

SEQ ID NO: 3669802 - DNA, 25 bp, Homo sapien
tgccctcctcgaactccatctggca

SEQ ID NO: 3669803 - DNA, 25 bp, Homo sapien
catgccctcctcgaactccatctgg

SEQ ID NO: 3669804 - DNA, 25 bp, Homo sapien
gacctccacgctgcccgagaagctc

SEQ ID NO: 3669805 - DNA, 25 bp, Homo sapien
agtagtgccgccctgccagtcaggt

SEQ ID NO: 3669806 - DNA, 25 bp, Homo sapien
tgcagtagtgccgccctgccagtca

SEQ ID NO: 3669807 - DNA, 25 bp, Homo sapien
gtgccgccctgccagtcaggtagct

SEQ ID NO: 3669808 - DNA, 25 bp, Homo sapien
tagtgccgccctgccagtcaggtag

SEQ ID NO: 3669809 - DNA, 25 bp, Homo sapien
tgaaaggagggttgacaggaacaca

SEQ ID NO: 3669810 - DNA, 25 bp, Homo sapien
caggacttttgctgaaaggagggtt

SEQ ID NO: 3669811 - DNA, 25 bp, Homo sapien
acgggaacaggacttttgctgaaag

SEQ ID NO: 3669812 - DNA, 25 bp, Homo sapien
ctgaaaggagggttgacaggaacac

SEQ ID NO: 3669813 - DNA, 25 bp, Homo sapien
tcttgggatagatcttaacaccagc

SEQ ID NO: 3669814 - DNA, 25 bp, Homo sapien
tatggtatagttcttgggatagatc

SEQ ID NO: 3669815 - DNA, 25 bp, Homo sapien
gggatagatcttaacaccagcttta

SEQ ID NO: 3669816 - DNA, 25 bp, Homo sapien
gatagatcttaacaccagctttagc

SEQ ID NO: 3669817 - DNA, 25 bp, Homo sapien
gtgaacctccttgtgatcttttcca

SEQ ID NO: 3669818 - DNA, 25 bp, Homo sapien
ggctagaattgtctggatacaaaga

SEQ ID NO: 3669819 - DNA, 25 bp, Homo sapien
catgaggctagaattgtctggatac

SEQ ID NO: 3669820 - DNA, 25 bp, Homo sapien
actcctcaactcattccatgaggct

SEQ ID NO: 3669821 - DNA, 25 bp, Homo sapien
tccatgaggctagaattgtctggat

SEQ ID NO: 3669822 - DNA, 25 bp, Homo sapien
tgcaatcgggtgtgacctcggctta

SEQ ID NO: 3669823 - DNA, 25 bp, Homo sapien
gcaatcgggtgtgacctcggcttac

SEQ ID NO: 3669824 - DNA, 25 bp, Homo sapien
gagtgcaatcgggtgtgacctcggc

SEQ ID NO: 3669825 - DNA, 25 bp, Homo sapien
gctggagtgcaatcgggtgtgacct

SEQ ID NO: 3669826 - DNA, 25 bp, Homo sapien
tcattttggtgggtccctccaatac

SEQ ID NO: 3669827 - DNA, 25 bp, Homo sapien
ttggtgggtccctccaatacctcca

SEQ ID NO: 3669828 - DNA, 25 bp, Homo sapien
cctccaatacctccacttgccctgt

SEQ ID NO: 3669829 - DNA, 25 bp, Homo sapien
tgggtccctccaatacctccacttg

SEQ ID NO: 3669830 - DNA, 25 bp, Homo sapien
cccggttgttgccttaagcttctcg

SEQ ID NO: 3669831 - DNA, 25 bp, Homo sapien
ttaagcttctcgcccatcaggtacc

SEQ ID NO: 3669832 - DNA, 25 bp, Homo sapien
tcccggttgttgccttaagcttctc

SEQ ID NO: 3669833 - DNA, 25 bp, Homo sapien
ttgccttaagcttctcgcccatcag

SEQ ID NO: 3669834 - DNA, 25 bp, Homo sapien
tgtgatgtgacttcccaattattgg

SEQ ID NO: 3669835 - DNA, 25 bp, Homo sapien
gccaagaacaaggtgtgatgtgact

SEQ ID NO: 3669836 - DNA, 25 bp, Homo sapien
tctgttgtgtattagccaagaacaa

SEQ ID NO: 3669837 - DNA, 25 bp, Homo sapien
ttcttgaggttttgcctggatgacc

SEQ ID NO: 3669838 - DNA, 25 bp, Homo sapien
ctgggaagacattcaataactgttt

SEQ ID NO: 3669839 - DNA, 25 bp, Homo sapien
gaagacattcaataactgtttcatt

SEQ ID NO: 3669840 - DNA, 25 bp, Homo sapien
gggaagacattcaataactgtttca

SEQ ID NO: 3669841 - DNA, 25 bp, Homo sapien
agacattcaataactgtttcattac

SEQ ID NO: 3669842 - DNA, 25 bp, Homo sapien
acggcggtagatgggtgctctcctt

SEQ ID NO: 3669843 - DNA, 25 bp, Homo sapien
tgggtgctctccttcccagtttgtc

SEQ ID NO: 3669844 - DNA, 25 bp, Homo sapien
gcaggactgcgggaacggcggtaga

SEQ ID NO: 3669845 - DNA, 25 bp, Homo sapien
cgggaacggcggtagatgggtgctc

SEQ ID NO: 3669846 - DNA, 25 bp, Homo sapien
tggagtgttggcaggactggcccac

SEQ ID NO: 3669847 - DNA, 25 bp, Homo sapien
tgaggggagctggagtgttggcagg

SEQ ID NO: 3669848 - DNA, 25 bp, Homo sapien
ctgtgaggggagctggagtgttggc

SEQ ID NO: 3669849 - DNA, 25 bp, Homo sapien
gctggagtgttggcaggactggccc

SEQ ID NO: 3669850 - DNA, 25 bp, Homo sapien
ctctggcttccggtggttcggccac

SEQ ID NO: 3669851 - DNA, 25 bp, Homo sapien
tggcttccggtggttcggccacctg

SEQ ID NO: 3669852 - DNA, 25 bp, Homo sapien
gactctggcttccggtggttcggcc

SEQ ID NO: 3669853 - DNA, 25 bp, Homo sapien
cttccggtggttcggccacctgatt

SEQ ID NO: 3669854 - DNA, 25 bp, Homo sapien
cgacccttctcttcgtagcccccag

SEQ ID NO: 3669855 - DNA, 25 bp, Homo sapien
aaggggactgagctgctccacatgc

SEQ ID NO: 3669856 - DNA, 25 bp, Homo sapien
cgcccagcggctggcgcagccaatc

SEQ ID NO: 3669857 - DNA, 25 bp, Homo sapien
ctggcgcagccaatcgcagagcggg

SEQ ID NO: 3669858 - DNA, 25 bp, Homo sapien
ttgagccgttgtccctgcctcaggc

SEQ ID NO: 3669859 - DNA, 25 bp, Homo sapien
aggtttgagccgttgtccctgcctc

SEQ ID NO: 3669860 - DNA, 25 bp, Homo sapien
ctcccaggtttgagccgttgtccct

SEQ ID NO: 3669861 - DNA, 25 bp, Homo sapien
tttgagccgttgtccctgcctcagg

SEQ ID NO: 3669862 - DNA, 25 bp, Homo sapien
acttgtgtggcaaactggactcgga

SEQ ID NO: 3669863 - DNA, 25 bp, Homo sapien
ttgtgtggcaaactggactcggagc

SEQ ID NO: 3669864 - DNA, 25 bp, Homo sapien
cttgtgtggcaaactggactcggag

SEQ ID NO: 3669865 - DNA, 25 bp, Homo sapien
gtgtggcaaactggactcggagcca

SEQ ID NO: 3669866 - DNA, 25 bp, Homo sapien
tgatctagaggattcaggcctctgc

SEQ ID NO: 3669867 - DNA, 25 bp, Homo sapien
tttcagaatactggcaaaggcctcc

SEQ ID NO: 3669868 - DNA, 25 bp, Homo sapien
actgagctttaaaggagatggtcac

SEQ ID NO: 3669869 - DNA, 25 bp, Homo sapien
agatggtcacaacacttttcagaat

SEQ ID NO: 3669870 - DNA, 25 bp, Homo sapien
tagaaagcccattgtgtccttcagc

SEQ ID NO: 3669871 - DNA, 25 bp, Homo sapien
tctccctgggcagagagagtatgat

SEQ ID NO: 3669872 - DNA, 25 bp, Homo sapien
ctcataaggccaaagggagctggaa

SEQ ID NO: 3669873 - DNA, 25 bp, Homo sapien
tacagtcgcagaacaagcctgattc

SEQ ID NO: 3669874 - DNA, 25 bp, Homo sapien
gagaggccaagtatgggccccattg

SEQ ID NO: 3669875 - DNA, 25 bp, Homo sapien
agttgccgtgatgctccttgagtca

SEQ ID NO: 3669876 - DNA, 25 bp, Homo sapien
ttccaggtgcagctcagttgccgtg

SEQ ID NO: 3669877 - DNA, 25 bp, Homo sapien
gccttggctgtggatcacaccctgg

SEQ ID NO: 3669878 - DNA, 25 bp, Homo sapien
gcccacataagggagttctggtcct

SEQ ID NO: 3669879 - DNA, 25 bp, Homo sapien
taactcaagggccttagtcctgctg

SEQ ID NO: 3669880 - DNA, 25 bp, Homo sapien
taacgaaagggataagatgagacat

SEQ ID NO: 3669881 - DNA, 25 bp, Homo sapien
gacatgatggtgtgatgagtattcc

SEQ ID NO: 3669882 - DNA, 25 bp, Homo sapien
aaagaacctgtgtgatcagttccat

SEQ ID NO: 3669883 - DNA, 25 bp, Homo sapien
agcaatcctgccttctaagggtggt

SEQ ID NO: 3669884 - DNA, 25 bp, Homo sapien
aatcctgccttctaagggtggttgc

SEQ ID NO: 3669885 - DNA, 25 bp, Homo sapien
tcctgccttctaagggtggttgccc

SEQ ID NO: 3669886 - DNA, 25 bp, Homo sapien
gccttctaagggtggttgccctata

SEQ ID NO: 3669887 - DNA, 25 bp, Homo sapien
tgaaatgaattagagcagtttcact

SEQ ID NO: 3669888 - DNA, 25 bp, Homo sapien
gaaatgaattagagcagtttcactc

SEQ ID NO: 3669889 - DNA, 25 bp, Homo sapien
aatgaattagagcagtttcactcac

SEQ ID NO: 3669890 - DNA, 25 bp, Homo sapien
aaatgaattagagcagtttcactca

SEQ ID NO: 3669891 - DNA, 25 bp, Homo sapien
ttctggagggcagcttccttacatt

SEQ ID NO: 3669892 - DNA, 25 bp, Homo sapien
gtgccctcgtgcagccctgctcctc

SEQ ID NO: 3669893 - DNA, 25 bp, Homo sapien
cagccttctggagggcagcttcctt

SEQ ID NO: 3669894 - DNA, 25 bp, Homo sapien
cagccagccttctggagggcagctt

SEQ ID NO: 3669895 - DNA, 25 bp, Homo sapien
ttgctctccagtcgcacaccttgct

SEQ ID NO: 3669896 - DNA, 25 bp, Homo sapien
ccagtcgcacaccttgctttctgaa

SEQ ID NO: 3669897 - DNA, 25 bp, Homo sapien
ggtcagagtttggtttgctagattc

SEQ ID NO: 3669898 - DNA, 25 bp, Homo sapien
acggtcagagtttggtttgctagat

SEQ ID NO: 3669899 - DNA, 25 bp, Homo sapien
cattttcagtgaagcaactggagca

SEQ ID NO: 3669900 - DNA, 25 bp, Homo sapien
ggagatagcaccatgactaaacaat

SEQ ID NO: 3669901 - DNA, 25 bp, Homo sapien
catggagatagcaccatgactaaac

SEQ ID NO: 3669902 - DNA, 25 bp, Homo sapien
atggagatagcaccatgactaaaca

SEQ ID NO: 3669903 - DNA, 25 bp, Homo sapien
tggagatagcaccatgactaaacaa

SEQ ID NO: 3669904 - DNA, 25 bp, Homo sapien
caagaaacactgtaaatgcccaaaa

SEQ ID NO: 3669905 - DNA, 25 bp, Homo sapien
tagtttctgattgatcacttactgt

SEQ ID NO: 3669906 - DNA, 25 bp, Homo sapien
actgtaaatgcccaaaatgctgcag

SEQ ID NO: 3669907 - DNA, 25 bp, Homo sapien
cacttactgtaactgttgctaaagg

SEQ ID NO: 3669908 - DNA, 25 bp, Homo sapien
gacccactccacctgactagggaag

SEQ ID NO: 3669909 - DNA, 25 bp, Homo sapien
cagagctgagaaggatagaacagag

SEQ ID NO: 3669910 - DNA, 25 bp, Homo sapien
tggaaaggagagcaatgcagatgca

SEQ ID NO: 3669911 - DNA, 25 bp, Homo sapien
taaagggatcaattatgctgagctc

SEQ ID NO: 3669912 - DNA, 25 bp, Homo sapien
taaatgttgattgtagtactgtctc

SEQ ID NO: 3669913 - DNA, 25 bp, Homo sapien
ttcaggctgaatagatgaataactc

SEQ ID NO: 3669914 - DNA, 25 bp, Homo sapien
gactgctaaatgttgattgtagtac

SEQ ID NO: 3669915 - DNA, 25 bp, Homo sapien
tgaatagatgaataactcccaagat

SEQ ID NO: 3669916 - DNA, 25 bp, Homo sapien
ccaggatcgcgatcttccgggactt

SEQ ID NO: 3669917 - DNA, 25 bp, Homo sapien
caaattggccttcaacaaattgaat

SEQ ID NO: 3669918 - DNA, 25 bp, Homo sapien
aattgaatcgtcaatgaggatttcc

SEQ ID NO: 3669919 - DNA, 25 bp, Homo sapien
gatcgtaggagtccacaaattggcc

SEQ ID NO: 3669920 - DNA, 25 bp, Homo sapien
aaagatgatattcttgtccatttac

SEQ ID NO: 3669921 - DNA, 25 bp, Homo sapien
ttgcccggctgtgtctacaagttaa

SEQ ID NO: 3669922 - DNA, 25 bp, Homo sapien
tgtctacaagttaaagatgatattc

SEQ ID NO: 3669923 - DNA, 25 bp, Homo sapien
gatagaatattcatcttgcccggct

SEQ ID NO: 3669924 - DNA, 25 bp, Homo sapien
tatagccattaatatctatggagta

SEQ ID NO: 3669925 - DNA, 25 bp, Homo sapien
aatatagccattaatatctatggag

SEQ ID NO: 3669926 - DNA, 25 bp, Homo sapien
gaatatagccattaatatctatgga

SEQ ID NO: 3669927 - DNA, 25 bp, Homo sapien
aagaatatagccattaatatctatg

SEQ ID NO: 3669928 - DNA, 25 bp, Homo sapien
acagactcagagttaacataatctg

SEQ ID NO: 3669929 - DNA, 25 bp, Homo sapien
ttggacagactcagagttaacataa

SEQ ID NO: 3669930 - DNA, 25 bp, Homo sapien
ggggagctctgacccaaatgatatc

SEQ ID NO: 3669931 - DNA, 25 bp, Homo sapien
ggagctctgacccaaatgatatctt

SEQ ID NO: 3669932 - DNA, 25 bp, Homo sapien
ccagctgcaaggctgtcttcttgtc

SEQ ID NO: 3669933 - DNA, 25 bp, Homo sapien
ttccagctgcaaggctgtcttcttg

SEQ ID NO: 3669934 - DNA, 25 bp, Homo sapien
caatttccagctgcaaggctgtctt

SEQ ID NO: 3669935 - DNA, 25 bp, Homo sapien
aatttccagctgcaaggctgtcttc

SEQ ID NO: 3669936 - DNA, 25 bp, Homo sapien
aaagtctatactgttcaccctctga

SEQ ID NO: 3669937 - DNA, 25 bp, Homo sapien
aagtctatactgttcaccctctgag

SEQ ID NO: 3669938 - DNA, 25 bp, Homo sapien
aatgttgatcttgggcctgttccac

SEQ ID NO: 3669939 - DNA, 25 bp, Homo sapien
taatgttgatcttgggcctgttcca

SEQ ID NO: 3669940 - DNA, 25 bp, Homo sapien
agttgagggtaccaggctgctccag

SEQ ID NO: 3669941 - DNA, 25 bp, Homo sapien
ataatgttgatcttgggcctgttcc

SEQ ID NO: 3669942 - DNA, 25 bp, Homo sapien
cacaaaggagggtgcacttttttga

SEQ ID NO: 3669943 - DNA, 25 bp, Homo sapien
atgaccaaggcgttgtatgcaattc

SEQ ID NO: 3669944 - DNA, 25 bp, Homo sapien
gcgttgtatgcaattctaggttttc

SEQ ID NO: 3669945 - DNA, 25 bp, Homo sapien
tctgatatcttcacaaaggagggtg

SEQ ID NO: 3669946 - DNA, 25 bp, Homo sapien
acaattcctggctgcgtcctcaaac

SEQ ID NO: 3669947 - DNA, 25 bp, Homo sapien
tcctcaaacaagtggggctatagcc

SEQ ID NO: 3669948 - DNA, 25 bp, Homo sapien
ccaagaacatgcacaattcctggct

SEQ ID NO: 3669949 - DNA, 25 bp, Homo sapien
gctatagcctgagaatctttcatca

SEQ ID NO: 3669950 - DNA, 25 bp, Homo sapien
tgtaagaggaaatgccagctctgaa

SEQ ID NO: 3669951 - DNA, 25 bp, Homo sapien
gctctgaaatctgggctttaattag

SEQ ID NO: 3669952 - DNA, 25 bp, Homo sapien
atctgggctttaattagaaccactc

SEQ ID NO: 3669953 - DNA, 25 bp, Homo sapien
tgaaatctgggctttaattagaacc

SEQ ID NO: 3669954 - DNA, 25 bp, Homo sapien
tttcttcatagtaaatggcaagcag

SEQ ID NO: 3669955 - DNA, 25 bp, Homo sapien
cttcatagtaaatggcaagcagcta

SEQ ID NO: 3669956 - DNA, 25 bp, Homo sapien
taaatggcaagcagctaaaacattg

SEQ ID NO: 3669957 - DNA, 25 bp, Homo sapien
catagtaaatggcaagcagctaaaa

SEQ ID NO: 3669958 - DNA, 25 bp, Homo sapien
taaacattatgtcttccatcaacgg

SEQ ID NO: 3669959 - DNA, 25 bp, Homo sapien
atcaacggcagtcattaacgctggc

SEQ ID NO: 3669960 - DNA, 25 bp, Homo sapien
gattctacacggatgtaaacattat

SEQ ID NO: 3669961 - DNA, 25 bp, Homo sapien
tcagttttgattctacacggatgta

SEQ ID NO: 3669962 - DNA, 25 bp, Homo sapien
ttcttgatggcacactgatatattg

SEQ ID NO: 3669963 - DNA, 25 bp, Homo sapien
tcttgatggcacactgatatattgc

SEQ ID NO: 3669964 - DNA, 25 bp, Homo sapien
atacacaaggttctgcgctgactgc

SEQ ID NO: 3669965 - DNA, 25 bp, Homo sapien
tacacaaggttctgcgctgactgcc

SEQ ID NO: 3669966 - DNA, 25 bp, Homo sapien
ggagaaatcttgttgtaatggatag

SEQ ID NO: 3669967 - DNA, 25 bp, Homo sapien
agaaatcttgttgtaatggatagct

SEQ ID NO: 3669968 - DNA, 25 bp, Homo sapien
gagaaatcttgttgtaatggatagc

SEQ ID NO: 3669969 - DNA, 25 bp, Homo sapien
gaaatcttgttgtaatggatagctg

SEQ ID NO: 3669970 - DNA, 25 bp, Homo sapien
cagagacgggcattggctccatgct

SEQ ID NO: 3669971 - DNA, 25 bp, Homo sapien
agagacgggcattggctccatgctt

SEQ ID NO: 3669972 - DNA, 25 bp, Homo sapien
gagacgggcattggctccatgcttt

SEQ ID NO: 3669973 - DNA, 25 bp, Homo sapien
tcagagacgggcattggctccatgc

SEQ ID NO: 3669974 - DNA, 25 bp, Homo sapien
tcaaaagacaaatcatttcagtact

SEQ ID NO: 3669975 - DNA, 25 bp, Homo sapien
ttcaaaagacaaatcatttcagtac

SEQ ID NO: 3669976 - DNA, 25 bp, Homo sapien
ggatctgctacatattgccttgact

SEQ ID NO: 3669977 - DNA, 25 bp, Homo sapien
cagggatctgctacatattgccttg

SEQ ID NO: 3669978 - DNA, 25 bp, Homo sapien
ttgttgaaagctatggatccttctc

SEQ ID NO: 3669979 - DNA, 25 bp, Homo sapien
tttgttgaaagctatggatccttct

SEQ ID NO: 3669980 - DNA, 25 bp, Homo sapien
tgagcacgagtgaagtgaatcagag

SEQ ID NO: 3669981 - DNA, 25 bp, Homo sapien
gcctgtctgagcacgagtgaagtga

SEQ ID NO: 3669982 - DNA, 25 bp, Homo sapien
gaaaggaggtacagttggagagagt

SEQ ID NO: 3669983 - DNA, 25 bp, Homo sapien
cagagagagattgcaagatggagaa

SEQ ID NO: 3669984 - DNA, 25 bp, Homo sapien
caaactgtgctatatacagtatgca

SEQ ID NO: 3669985 - DNA, 25 bp, Homo sapien
gattcttccagacagtatgattagg

SEQ ID NO: 3669986 - DNA, 25 bp, Homo sapien
caccacaccagaactgatctttcta

SEQ ID NO: 3669987 - DNA, 25 bp, Homo sapien
taaaatcaagccctaattccccatg

SEQ ID NO: 3669988 - DNA, 25 bp, Homo sapien
ggctttttgagaatcggctggcatc

SEQ ID NO: 3669989 - DNA, 25 bp, Homo sapien
ggtgctgactgacaaacttcccggg

SEQ ID NO: 3669990 - DNA, 25 bp, Homo sapien
cattgctgcagtaccgtctggcaaa

SEQ ID NO: 3669991 - DNA, 25 bp, Homo sapien
gcatcagggtgctgactgacaaact

SEQ ID NO: 3669992 - DNA, 25 bp, Homo sapien
gagatggtaccgtgtgctaacccca

SEQ ID NO: 3669993 - DNA, 25 bp, Homo sapien
ggaaccatagggaagatgtctgcag

SEQ ID NO: 3669994 - DNA, 25 bp, Homo sapien
gacaaacctgggtcacaggaaccat

SEQ ID NO: 3669995 - DNA, 25 bp, Homo sapien
tttggcagaatcaacctggaatcct

SEQ ID NO: 3669996 - DNA, 25 bp, Homo sapien
tatgtttatgacataagtataaaca

SEQ ID NO: 3669997 - DNA, 25 bp, Homo sapien
caggtgaatcgctcttctcaagaca

SEQ ID NO: 3669998 - DNA, 25 bp, Homo sapien
gtgtgactgcggaggccagggccat

SEQ ID NO: 3669999 - DNA, 25 bp, Homo sapien
caagctagccaagaggtgaggttca

SEQ ID NO: 3670000 - DNA, 25 bp, Homo sapien
tggtcccgggccgtctttctgaggc

SEQ ID NO: 3670001 - DNA, 25 bp, Homo sapien
caaaagacaggcctcagcgtgaatg

SEQ ID NO: 3670002 - DNA, 25 bp, Homo sapien
ggaattatcccaaaggcctgaagca

SEQ ID NO: 3670003 - DNA, 25 bp, Homo sapien
taaggcctataggagctgatccctg

SEQ ID NO: 3670004 - DNA, 25 bp, Homo sapien
tctggcaagtttatctaaggaaggc

SEQ ID NO: 3670005 - DNA, 25 bp, Homo sapien
caccctctgtcataggagatgcatg

SEQ ID NO: 3670006 - DNA, 25 bp, Homo sapien
ctcccaccctctgtcataggagatg

SEQ ID NO: 3670007 - DNA, 25 bp, Homo sapien
cctctgtcataggagatgcatgtat

SEQ ID NO: 3670008 - DNA, 25 bp, Homo sapien
agccctcccaccctctgtcatagga

SEQ ID NO: 3670009 - DNA, 25 bp, Homo sapien
cagggagcccctggcgcccctggcg

SEQ ID NO: 3670010 - DNA, 25 bp, Homo sapien
gctggagccctgcggtttccgggag

SEQ ID NO: 3670011 - DNA, 25 bp, Homo sapien
tgcggtttccgggagctcacggtcg

SEQ ID NO: 3670012 - DNA, 25 bp, Homo sapien
gagccctgcggtttccgggagctca

SEQ ID NO: 3670013 - DNA, 25 bp, Homo sapien
gagccggggtcggagctgcggctgg

SEQ ID NO: 3670014 - DNA, 25 bp, Homo sapien
ccccgagccggggtcggagctgcgg

SEQ ID NO: 3670015 - DNA, 25 bp, Homo sapien
ccggggtcggagctgcggctggagg

SEQ ID NO: 3670016 - DNA, 25 bp, Homo sapien
tggaggggcctcggcttgaggagga

SEQ ID NO: 3670017 - DNA, 25 bp, Homo sapien
gcaaggcgcgttcgccagcctggac

SEQ ID NO: 3670018 - DNA, 25 bp, Homo sapien
gccgaggtgtgaccagagaggacac

SEQ ID NO: 3670019 - DNA, 25 bp, Homo sapien
tcagacgcctcgaggcctcggcggg

SEQ ID NO: 3670020 - DNA, 25 bp, Homo sapien
gagaggacacgcagcgaccttactc

SEQ ID NO: 3670021 - DNA, 25 bp, Homo sapien
tcaaccggacacaaatgtgggggct

SEQ ID NO: 3670022 - DNA, 25 bp, Homo sapien
gagttgatgtgaaatgacctggagt

SEQ ID NO: 3670023 - DNA, 25 bp, Homo sapien
tggagtgggagaggttagaaaaggc

SEQ ID NO: 3670024 - DNA, 25 bp, Homo sapien
aaaggaaagggccactagctagcag

SEQ ID NO: 3670025 - DNA, 25 bp, Homo sapien
tctttaaactcttggacttcctgca

SEQ ID NO: 3670026 - DNA, 25 bp, Homo sapien
tgcaggcatttgcaggtctttaaac

SEQ ID NO: 3670027 - DNA, 25 bp, Homo sapien
gccctccttggaagtgcttttgcca

SEQ ID NO: 3670028 - DNA, 25 bp, Homo sapien
tggaaataaaacttccgcttggcca

SEQ ID NO: 3670029 - DNA, 25 bp, Homo sapien
catccaggctgagttagaagtctca

SEQ ID NO: 3670030 - DNA, 25 bp, Homo sapien
actgtgtccccgcatctgggtgcta

SEQ ID NO: 3670031 - DNA, 25 bp, Homo sapien
gctggcttcatgctctcaggcgggt

SEQ ID NO: 3670032 - DNA, 25 bp, Homo sapien
ctgggtgctacggaccaggtctgaa

SEQ ID NO: 3670033 - DNA, 25 bp, Homo sapien
ccccaggtctagtggtggcactgac

SEQ ID NO: 3670034 - DNA, 25 bp, Homo sapien
tgggcagttgtgtcccccaggtcta

SEQ ID NO: 3670035 - DNA, 25 bp, Homo sapien
tctagtggtggcactgacaactgac

SEQ ID NO: 3670036 - DNA, 25 bp, Homo sapien
caggtctagtggtggcactgacaac

SEQ ID NO: 3670037 - DNA, 25 bp, Homo sapien
caggctctgggactaacccagcggg

SEQ ID NO: 3670038 - DNA, 25 bp, Homo sapien
gctcactgacgccactagtttggga

SEQ ID NO: 3670039 - DNA, 25 bp, Homo sapien
cagacaacctacagtggatcttcac

SEQ ID NO: 3670040 - DNA, 25 bp, Homo sapien
caagtcattggctgaggtcatggtc

SEQ ID NO: 3670041 - DNA, 25 bp, Homo sapien
atgtgcccagctgccggtgggtcca

SEQ ID NO: 3670042 - DNA, 25 bp, Homo sapien
agagatgtggcccttggaaatcaag

SEQ ID NO: 3670043 - DNA, 25 bp, Homo sapien
taggactaagtcagtgggcccaggc

SEQ ID NO: 3670044 - DNA, 25 bp, Homo sapien
cacagtgctaaagccctgtctcaaa

SEQ ID NO: 3670045 - DNA, 25 bp, Homo sapien
taggccctacgactccagcagaaac

SEQ ID NO: 3670046 - DNA, 25 bp, Homo sapien
aaaataggccctacgactccagcag

SEQ ID NO: 3670047 - DNA, 25 bp, Homo sapien
caaaataggccctacgactccagca

SEQ ID NO: 3670048 - DNA, 25 bp, Homo sapien
aataggccctacgactccagcagaa

SEQ ID NO: 3670049 - DNA, 25 bp, Homo sapien
ctgtcatctcttctttctggaccat

SEQ ID NO: 3670050 - DNA, 25 bp, Homo sapien
tctcagattctctagtcattattaa

SEQ ID NO: 3670051 - DNA, 25 bp, Homo sapien
ctctcagattctctagtcattatta

SEQ ID NO: 3670052 - DNA, 25 bp, Homo sapien
caaacagacaaacaatactcaggga

SEQ ID NO: 3670053 - DNA, 25 bp, Homo sapien
ggcaaacagacaaacaatactcagg

SEQ ID NO: 3670054 - DNA, 25 bp, Homo sapien
cagacaaacaatactcagggatcat

SEQ ID NO: 3670055 - DNA, 25 bp, Homo sapien
aacagacaaacaatactcagggatc

SEQ ID NO: 3670056 - DNA, 25 bp, Homo sapien
tcttgaactaagtgatacacttgag

SEQ ID NO: 3670057 - DNA, 25 bp, Homo sapien
aactaagtgatacacttgagggatg

SEQ ID NO: 3670058 - DNA, 25 bp, Homo sapien
ttccaggactcttgaactaagtgat

SEQ ID NO: 3670059 - DNA, 25 bp, Homo sapien
tgaaaagattccaggactcttgaac

SEQ ID NO: 3670060 - DNA, 25 bp, Homo sapien
aatgttcagagaagttgtatggggt

SEQ ID NO: 3670061 - DNA, 25 bp, Homo sapien
tcagagaagttgtatggggtgccca

SEQ ID NO: 3670062 - DNA, 25 bp, Homo sapien
ttcagagaagttgtatggggtgccc

SEQ ID NO: 3670063 - DNA, 25 bp, Homo sapien
tgttcagagaagttgtatggggtgc

SEQ ID NO: 3670064 - DNA, 25 bp, Homo sapien
tgaaggccgacatcttgcagagggt

SEQ ID NO: 3670065 - DNA, 25 bp, Homo sapien
gcagagggtctctccaaagatccag

SEQ ID NO: 3670066 - DNA, 25 bp, Homo sapien
cacaggcaatgacccagatgagcac

SEQ ID NO: 3670067 - DNA, 25 bp, Homo sapien
taggtgcccttgtgaaacacgcgcc

SEQ ID NO: 3670068 - DNA, 25 bp, Homo sapien
tctggcatctttcagctcaagctgc

SEQ ID NO: 3670069 - DNA, 25 bp, Homo sapien
tgccagcctatctggaccccagaaa

SEQ ID NO: 3670070 - DNA, 25 bp, Homo sapien
cagtcttcacgatgcaaatggatgc

SEQ ID NO: 3670071 - DNA, 25 bp, Homo sapien
cagctgaagtatcaaaatgccagtc

SEQ ID NO: 3670072 - DNA, 25 bp, Homo sapien
gagctccattcaactcttcctgggc

SEQ ID NO: 3670073 - DNA, 25 bp, Homo sapien
tgagtctgagctccattcaactctt

SEQ ID NO: 3670074 - DNA, 25 bp, Homo sapien
tccagtgtgagtctgagctccattc

SEQ ID NO: 3670075 - DNA, 25 bp, Homo sapien
tcctggacttctgttccagtgtgag

SEQ ID NO: 3670076 - DNA, 25 bp, Homo sapien
tctgcaggagacgaactttgtgagg

SEQ ID NO: 3670077 - DNA, 25 bp, Homo sapien
gagctctgcaggagacgaactttgt

SEQ ID NO: 3670078 - DNA, 25 bp, Homo sapien
tgcaggagacgaactttgtgaggcc

SEQ ID NO: 3670079 - DNA, 25 bp, Homo sapien
gctctgcaggagacgaactttgtga

SEQ ID NO: 3670080 - DNA, 25 bp, Homo sapien
tagacggagactggagaaggtgtga

SEQ ID NO: 3670081 - DNA, 25 bp, Homo sapien
gacggagactggagaaggtgtgagt

SEQ ID NO: 3670082 - DNA, 25 bp, Homo sapien
gcaggtagacggagactggagaagg

SEQ ID NO: 3670083 - DNA, 25 bp, Homo sapien
ctgcaggtagacggagactggagaa

SEQ ID NO: 3670084 - DNA, 25 bp, Homo sapien
tggaaaatccagctggaatctgaga

SEQ ID NO: 3670085 - DNA, 25 bp, Homo sapien
ggaatctgagaaggaccatattttg

SEQ ID NO: 3670086 - DNA, 25 bp, Homo sapien
tctgagaaggaccatattttgcttt

SEQ ID NO: 3670087 - DNA, 25 bp, Homo sapien
tgatggaaaatccagctggaatctg

SEQ ID NO: 3670088 - DNA, 25 bp, Homo sapien
gccacatggactcaacatcagacca

SEQ ID NO: 3670089 - DNA, 25 bp, Homo sapien
cacatggactcaacatcagaccaca

SEQ ID NO: 3670090 - DNA, 25 bp, Homo sapien
gggccacatggactcaacatcagac

SEQ ID NO: 3670091 - DNA, 25 bp, Homo sapien
acatggactcaacatcagaccacag

SEQ ID NO: 3670092 - DNA, 25 bp, Homo sapien
caggtgttcaggaaacacgggcttt

SEQ ID NO: 3670093 - DNA, 25 bp, Homo sapien
gccaaataggtgcctggtgcaaaca

SEQ ID NO: 3670094 - DNA, 25 bp, Homo sapien
ccaaataggtgcctggtgcaaacag

SEQ ID NO: 3670095 - DNA, 25 bp, Homo sapien
cagtgtcagactcctcctcggtggg

SEQ ID NO: 3670096 - DNA, 25 bp, Homo sapien
tcctcctcggtgggatagcggcagt

SEQ ID NO: 3670097 - DNA, 25 bp, Homo sapien
ctcggtgggatagcggcagtgcctg

SEQ ID NO: 3670098 - DNA, 25 bp, Homo sapien
cacagtgtcagactcctcctcggtg

SEQ ID NO: 3670099 - DNA, 25 bp, Homo sapien
cagctagagtctcccactggctaat

SEQ ID NO: 3670100 - DNA, 25 bp, Homo sapien
cagtagtccttacagaagtgtggcc

SEQ ID NO: 3670101 - DNA, 25 bp, Homo sapien
gaatagtgttgccacagccagtaag

SEQ ID NO: 3670102 - DNA, 25 bp, Homo sapien
gaagcacgaaaacaaacaactctag

SEQ ID NO: 3670103 - DNA, 25 bp, Homo sapien
tcccacatcccatcgtctttcgctc

SEQ ID NO: 3670104 - DNA, 25 bp, Homo sapien
acttggctaaggacccagcaggaca

SEQ ID NO: 3670105 - DNA, 25 bp, Homo sapien
cttccaacttggctaaggacccagc

SEQ ID NO: 3670106 - DNA, 25 bp, Homo sapien
gcaggacagggagcctcttcctctt

SEQ ID NO: 3670107 - DNA, 25 bp, Homo sapien
atatggctcatctgcgtccagtgta

SEQ ID NO: 3670108 - DNA, 25 bp, Homo sapien
caggacactggacatgtcccacttg

SEQ ID NO: 3670109 - DNA, 25 bp, Homo sapien
tccagtgtatgtttggccaggacac

SEQ ID NO: 3670110 - DNA, 25 bp, Homo sapien
tggacatgtcccacttggctcctgc

SEQ ID NO: 3670111 - DNA, 25 bp, Homo sapien
cagaaacctttggtgtagttgaact

SEQ ID NO: 3670112 - DNA, 25 bp, Homo sapien
aaacctttggtgtagttgaactgat

SEQ ID NO: 3670113 - DNA, 25 bp, Homo sapien
cctttggtgtagttgaactgatagt

SEQ ID NO: 3670114 - DNA, 25 bp, Homo sapien
tcagaaacctttggtgtagttgaac

SEQ ID NO: 3670115 - DNA, 25 bp, Homo sapien
tgtgggaagtgtaaagcattccagc

SEQ ID NO: 3670116 - DNA, 25 bp, Homo sapien
gaagtgtaaagcattccagctaagg

SEQ ID NO: 3670117 - DNA, 25 bp, Homo sapien
gtgtaaagcattccagctaagggtt

SEQ ID NO: 3670118 - DNA, 25 bp, Homo sapien
cattccagctaagggttttaatata

SEQ ID NO: 3670119 - DNA, 25 bp, Homo sapien
ataccatactgtgaatgaccacaac

SEQ ID NO: 3670120 - DNA, 25 bp, Homo sapien
cgagtcagtggctagaaaaggggct

SEQ ID NO: 3670121 - DNA, 25 bp, Homo sapien
aacttttgatgaccatgactccgtc

SEQ ID NO: 3670122 - DNA, 25 bp, Homo sapien
cgataagattgtcattcagaaatac

SEQ ID NO: 3670123 - DNA, 25 bp, Homo sapien
ctccaatgcccgtcacgtagaagct

SEQ ID NO: 3670124 - DNA, 25 bp, Homo sapien
caatgcccgtcacgtagaagctcaa

SEQ ID NO: 3670125 - DNA, 25 bp, Homo sapien
tgcccgtcacgtagaagctcaacac

SEQ ID NO: 3670126 - DNA, 25 bp, Homo sapien
ccgtcacgtagaagctcaacaccat

SEQ ID NO: 3670127 - DNA, 25 bp, Homo sapien
aataataaaaatcaccaggcgtagt

SEQ ID NO: 3670128 - DNA, 25 bp, Homo sapien
agaactatcaatgccataactctga

SEQ ID NO: 3670129 - DNA, 25 bp, Homo sapien
caagtatttctcctaagatctttcc

SEQ ID NO: 3670130 - DNA, 25 bp, Homo sapien
tttcatagtctccaagtatttctcc

SEQ ID NO: 3670131 - DNA, 25 bp, Homo sapien
aagatagtatctttacaatggagaa

SEQ ID NO: 3670132 - DNA, 25 bp, Homo sapien
attacccttcccctatgctatagaa

SEQ ID NO: 3670133 - DNA, 25 bp, Homo sapien
atacacatccctgctgaagcccgca

SEQ ID NO: 3670134 - DNA, 25 bp, Homo sapien
tgccttctgttcataaacgcctatt

SEQ ID NO: 3670135 - DNA, 25 bp, Homo sapien
tatgctatagaagccctgggtcggg

SEQ ID NO: 3670136 - DNA, 25 bp, Homo sapien
caagcttcacttaatgccgtgcaaa

SEQ ID NO: 3670137 - DNA, 25 bp, Homo sapien
cattgggataatacatgtcgagtac

SEQ ID NO: 3670138 - DNA, 25 bp, Homo sapien
caaaatttgactctgcattgggata

SEQ ID NO: 3670139 - DNA, 25 bp, Homo sapien
tgtcgagtacctattgaacaggcac

SEQ ID NO: 3670140 - DNA, 25 bp, Homo sapien
aagtgtggtgttagggaaccatgcc

SEQ ID NO: 3670141 - DNA, 25 bp, Homo sapien
ttggagatgattctgtgcgaacgtc

SEQ ID NO: 3670142 - DNA, 25 bp, Homo sapien
cttgaaaactggtcgaatgcgtcag

SEQ ID NO: 3670143 - DNA, 25 bp, Homo sapien
ccttggtgatataggctgttgatgc

SEQ ID NO: 3670144 - DNA, 25 bp, Homo sapien
tgtcattccttctaagtttgttacc

SEQ ID NO: 3670145 - DNA, 25 bp, Homo sapien
caaaatggatgttattcctctgtca

SEQ ID NO: 3670146 - DNA, 25 bp, Homo sapien
taacttatccatcccttatggtatg

SEQ ID NO: 3670147 - DNA, 25 bp, Homo sapien
gttatggcactggtgactcaaaatg

SEQ ID NO: 3670148 - DNA, 25 bp, Homo sapien
tagagccgccaccaataccggtagt

SEQ ID NO: 3670149 - DNA, 25 bp, Homo sapien
cagacacagacttggcgtggctgtt

SEQ ID NO: 3670150 - DNA, 25 bp, Homo sapien
tcagaggccctgtgacgatcgtgtc

SEQ ID NO: 3670151 - DNA, 25 bp, Homo sapien
tggcagaagttcaccgagatcagag

SEQ ID NO: 3670152 - DNA, 25 bp, Homo sapien
caagcggacctaaggagtcgcagtt

SEQ ID NO: 3670153 - DNA, 25 bp, Homo sapien
gcactcggccgttgacgagtctttc

SEQ ID NO: 3670154 - DNA, 25 bp, Homo sapien
ccaagcggacctaaggagtcgcagt

SEQ ID NO: 3670155 - DNA, 25 bp, Homo sapien
gcgccggcgccagcactcggccgtt

SEQ ID NO: 3670156 - DNA, 25 bp, Homo sapien
tcagcaaggactccgcgagcgaggt

SEQ ID NO: 3670157 - DNA, 25 bp, Homo sapien
gactccgcgagcgaggtgcaagctg

SEQ ID NO: 3670158 - DNA, 25 bp, Homo sapien
ctccgcgagcgaggtgcaagctgct

SEQ ID NO: 3670159 - DNA, 25 bp, Homo sapien
caaggactccgcgagcgaggtgcaa

SEQ ID NO: 3670160 - DNA, 25 bp, Homo sapien
ctggccaaaagagggctatagggca

SEQ ID NO: 3670161 - DNA, 25 bp, Homo sapien
ttttacttcatctacactcacatca

SEQ ID NO: 3670162 - DNA, 25 bp, Homo sapien
tggggagccggtccccggccatgat

SEQ ID NO: 3670163 - DNA, 25 bp, Homo sapien
ctggggagccggtccccggccatga

SEQ ID NO: 3670164 - DNA, 25 bp, Homo sapien
ggcccgccccgcagcaggctggcca

SEQ ID NO: 3670165 - DNA, 25 bp, Homo sapien
gctggccagcttcttggcgtccatc

SEQ ID NO: 3670166 - DNA, 25 bp, Homo sapien
cagcttcttggcgtccatcaccttc

SEQ ID NO: 3670167 - DNA, 25 bp, Homo sapien
ctgtcgatgaccaggcccccccagg

SEQ ID NO: 3670168 - DNA, 25 bp, Homo sapien
agcagatgttgacggagctgagcac

SEQ ID NO: 3670169 - DNA, 25 bp, Homo sapien
gcagcagatgttgacggagctgagc

SEQ ID NO: 3670170 - DNA, 25 bp, Homo sapien
cagcagatgttgacggagctgagca

SEQ ID NO: 3670171 - DNA, 25 bp, Homo sapien
tgcggccggctggatgaactccaca

SEQ ID NO: 3670172 - DNA, 25 bp, Homo sapien
cggccggctggatgaactccacaat

SEQ ID NO: 3670173 - DNA, 25 bp, Homo sapien
cgtgcggccggctggatgaactcca

SEQ ID NO: 3670174 - DNA, 25 bp, Homo sapien
ggccggctggatgaactccacaatg

SEQ ID NO: 3670175 - DNA, 25 bp, Homo sapien
cagccggccacgctgtggaagcagc

SEQ ID NO: 3670176 - DNA, 25 bp, Homo sapien
aagccccccgtgatgatggccatgc

SEQ ID NO: 3670177 - DNA, 25 bp, Homo sapien
ccatgctgtggaagcagccggccac

SEQ ID NO: 3670178 - DNA, 25 bp, Homo sapien
gagaggaagctgtctgcggccgcgt

SEQ ID NO: 3670179 - DNA, 25 bp, Homo sapien
tcacagtagttgtcgttgatgggga

SEQ ID NO: 3670180 - DNA, 25 bp, Homo sapien
cacagtagttgtcgttgatggggac

SEQ ID NO: 3670181 - DNA, 25 bp, Homo sapien
ttcacagtagttgtcgttgatgggg

SEQ ID NO: 3670182 - DNA, 25 bp, Homo sapien
acagtagttgtcgttgatggggacc

SEQ ID NO: 3670183 - DNA, 25 bp, Homo sapien
gcgatagtggcacagcaggagatgc

SEQ ID NO: 3670184 - DNA, 25 bp, Homo sapien
cgatggcgatagtggcacagcagga

SEQ ID NO: 3670185 - DNA, 25 bp, Homo sapien
aggcgatggcgatagtggcacagca

SEQ ID NO: 3670186 - DNA, 25 bp, Homo sapien
gatggcgatagtggcacagcaggag

SEQ ID NO: 3670187 - DNA, 25 bp, Homo sapien
ccctggcagccgcactcctggtggc

SEQ ID NO: 3670188 - DNA, 25 bp, Homo sapien
cctggcagccgcactcctggtggca

SEQ ID NO: 3670189 - DNA, 25 bp, Homo sapien
ggacgggcgctggtccttcacaaac

SEQ ID NO: 3670190 - DNA, 25 bp, Homo sapien
tggacgggcgctggtccttcacaaa

SEQ ID NO: 3670191 - DNA, 25 bp, Homo sapien
cgccgggccgcctgctgggggcgta

SEQ ID NO: 3670192 - DNA, 25 bp, Homo sapien
cttcggggcctcgccggggtcgctg

SEQ ID NO: 3670193 - DNA, 25 bp, Homo sapien
cgggccgcctgctgggggcgtaggc

SEQ ID NO: 3670194 - DNA, 25 bp, Homo sapien
ccgcctgctgggggcgtaggccgac

SEQ ID NO: 3670195 - DNA, 25 bp, Homo sapien
atggccccgactggctgtccagctt

SEQ ID NO: 3670196 - DNA, 25 bp, Homo sapien
gcagggcgagggcaggcccaacatg

SEQ ID NO: 3670197 - DNA, 25 bp, Homo sapien
gagggcaggcccaacatggccccga

SEQ ID NO: 3670198 - DNA, 25 bp, Homo sapien
gactggctgtccagctttcagagag

SEQ ID NO: 3670199 - DNA, 25 bp, Homo sapien
cgagcggtggcgtccaggctccggg

SEQ ID NO: 3670200 - DNA, 25 bp, Homo sapien
cggcagccgcgtagccgaagttcag

SEQ ID NO: 3670201 - DNA, 25 bp, Homo sapien
gcccggcagccgcgtagccgaagtt

SEQ ID NO: 3670202 - DNA, 25 bp, Homo sapien
gggagtcgagcggtggcgtccaggc

SEQ ID NO: 3670203 - DNA, 25 bp, Homo sapien
tgcagccgttgggttccggggcgcc

SEQ ID NO: 3670204 - DNA, 25 bp, Homo sapien
gctgcagccgttgggttccggggcg

SEQ ID NO: 3670205 - DNA, 25 bp, Homo sapien
ggcccttgcacgccctcggggctga

SEQ ID NO: 3670206 - DNA, 25 bp, Homo sapien
ctgcagccgttgggttccggggcgc

SEQ ID NO: 3670207 - DNA, 25 bp, Homo sapien
tgaagtgcgaatccggggccagctc

SEQ ID NO: 3670208 - DNA, 25 bp, Homo sapien
aagtgcgaatccggggccagctcgt

SEQ ID NO: 3670209 - DNA, 25 bp, Homo sapien
cttgaagtgcgaatccggggccagc

SEQ ID NO: 3670210 - DNA, 25 bp, Homo sapien
gtgcgaatccggggccagctcgtct

SEQ ID NO: 3670211 - DNA, 25 bp, Homo sapien
gacctccacgctgcccgagaagctc

SEQ ID NO: 3670212 - DNA, 25 bp, Homo sapien
tatagttcttgggatagatcttaac

SEQ ID NO: 3670213 - DNA, 25 bp, Homo sapien
tcttgggatagatcttaacaccagc

SEQ ID NO: 3670214 - DNA, 25 bp, Homo sapien
gggatagatcttaacaccagcttta

SEQ ID NO: 3670215 - DNA, 25 bp, Homo sapien
gatagatcttaacaccagctttagc

SEQ ID NO: 3670216 - DNA, 25 bp, Homo sapien
gtgaacctccttgtgatcttttcca

SEQ ID NO: 3670217 - DNA, 25 bp, Homo sapien
ggatgaatcacttatctcttgctgc

SEQ ID NO: 3670218 - DNA, 25 bp, Homo sapien
tactccgtgatttctgataagcaac

SEQ ID NO: 3670219 - DNA, 25 bp, Homo sapien
tactgaagatcccttgtacaggatg

SEQ ID NO: 3670220 - DNA, 25 bp, Homo sapien
aagcaactgttagtcttactgaaga

SEQ ID NO: 3670221 - DNA, 25 bp, Homo sapien
gagtgcaatcgggtgtgacctcggc

SEQ ID NO: 3670222 - DNA, 25 bp, Homo sapien
gctggagtgcaatcgggtgtgacct

SEQ ID NO: 3670223 - DNA, 25 bp, Homo sapien
tgcaatcgggtgtgacctcggctta

SEQ ID NO: 3670224 - DNA, 25 bp, Homo sapien
gcaatcgggtgtgacctcggcttac

SEQ ID NO: 3670225 - DNA, 25 bp, Homo sapien
tgtgatgtgacttcccaattattgg

SEQ ID NO: 3670226 - DNA, 25 bp, Homo sapien
tagccaagaacaaggtgtgatgtga

SEQ ID NO: 3670227 - DNA, 25 bp, Homo sapien
gccttaagcttctcgcccatcaggt

SEQ ID NO: 3670228 - DNA, 25 bp, Homo sapien
ttcttgaggttttgcctggatgacc

SEQ ID NO: 3670229 - DNA, 25 bp, Homo sapien
tgtggaggtgatcacgcaggtacat

SEQ ID NO: 3670230 - DNA, 25 bp, Homo sapien
cagcagcgtgctgcagacgaaggca

SEQ ID NO: 3670231 - DNA, 25 bp, Homo sapien
tcaaggtgtggaggtgatcacgcag

SEQ ID NO: 3670232 - DNA, 25 bp, Homo sapien
cagacgaaggcagtcaaggtgtgga

SEQ ID NO: 3670233 - DNA, 25 bp, Homo sapien
ctttcacttcccgccatgtccaccc

SEQ ID NO: 3670234 - DNA, 25 bp, Homo sapien
tcactttcacttcccgccatgtcca

SEQ ID NO: 3670235 - DNA, 25 bp, Homo sapien
ctcactttcacttcccgccatgtcc

SEQ ID NO: 3670236 - DNA, 25 bp, Homo sapien
cactttcacttcccgccatgtccac

SEQ ID NO: 3670237 - DNA, 25 bp, Homo sapien
atggttctggggcagtgaccccctg

SEQ ID NO: 3670238 - DNA, 25 bp, Homo sapien
tcatggttctggggcagtgaccccc

SEQ ID NO: 3670239 - DNA, 25 bp, Homo sapien
tctggggcagtgaccccctgctcat

SEQ ID NO: 3670240 - DNA, 25 bp, Homo sapien
ggttctggggcagtgaccccctgct

SEQ ID NO: 3670241 - DNA, 25 bp, Homo sapien
gggaccttggaatctcgtcatttcc

SEQ ID NO: 3670242 - DNA, 25 bp, Homo sapien
catttgatgccatgctgggacagga

SEQ ID NO: 3670243 - DNA, 25 bp, Homo sapien
tggaatctcgtcatttcctctgatg

SEQ ID NO: 3670244 - DNA, 25 bp, Homo sapien
tcaggccagcttgcaataccggagg

SEQ ID NO: 3670245 - DNA, 25 bp, Homo sapien
ggactgccgaccagggggcttctgg

SEQ ID NO: 3670246 - DNA, 25 bp, Homo sapien
gctggacactgggtgataggggaag

SEQ ID NO: 3670247 - DNA, 25 bp, Homo sapien
ggaagccaagaggactgccgaccag

SEQ ID NO: 3670248 - DNA, 25 bp, Homo sapien
aagaggactgccgaccagggggctt

SEQ ID NO: 3670249 - DNA, 25 bp, Homo sapien
caggtgaaggggactgggccttggt

SEQ ID NO: 3670250 - DNA, 25 bp, Homo sapien
acaggtgaaggggactgggccttgg

SEQ ID NO: 3670251 - DNA, 25 bp, Homo sapien
cttatgatggagacaggtgaagggg

SEQ ID NO: 3670252 - DNA, 25 bp, Homo sapien
gagacaggtgaaggggactgggcct

SEQ ID NO: 3670253 - DNA, 25 bp, Homo sapien
ttcagggccttgcatccccaggcgg

SEQ ID NO: 3670254 - DNA, 25 bp, Homo sapien
gcagtttgtcagacaggctggtgac

SEQ ID NO: 3670255 - DNA, 25 bp, Homo sapien
actgtggttgccctctagtggcttg

SEQ ID NO: 3670256 - DNA, 25 bp, Homo sapien
tctcattctctacaatgttcagggc

SEQ ID NO: 3670257 - DNA, 25 bp, Homo sapien
cagtgactgctcgatgcaccatggg

SEQ ID NO: 3670258 - DNA, 25 bp, Homo sapien
tccagaataatgttgagagcccatc

SEQ ID NO: 3670259 - DNA, 25 bp, Homo sapien
catgggtactctgcgttcttttgcc

SEQ ID NO: 3670260 - DNA, 25 bp, Homo sapien
aatggcagccaacacatggtccagg

SEQ ID NO: 3670261 - DNA, 25 bp, Homo sapien
gttgaactcactcttggtgagggag

SEQ ID NO: 3670262 - DNA, 25 bp, Homo sapien
tgttgaactcactcttggtgaggga

SEQ ID NO: 3670263 - DNA, 25 bp, Homo sapien
ttggtgatgatgacgtgggccccga

SEQ ID NO: 3670264 - DNA, 25 bp, Homo sapien
cttggtgatgatgacgtgggccccg

SEQ ID NO: 3670265 - DNA, 25 bp, Homo sapien
tggtgatgatgacgtgggccccgaa

SEQ ID NO: 3670266 - DNA, 25 bp, Homo sapien
gtgatgatgacgtgggccccgaaac

SEQ ID NO: 3670267 - DNA, 25 bp, Homo sapien
aaggatgatgttgacacaggctgtg

SEQ ID NO: 3670268 - DNA, 25 bp, Homo sapien
gacaggcttcatccatggtggtcac

SEQ ID NO: 3670269 - DNA, 25 bp, Homo sapien
ctcaaagtgtccagtgttacataca

SEQ ID NO: 3670270 - DNA, 25 bp, Homo sapien
tctgttcaaagtgccggccaaggat

SEQ ID NO: 3670271 - DNA, 25 bp, Homo sapien
cggccacctggggcttgatggccac

SEQ ID NO: 3670272 - DNA, 25 bp, Homo sapien
ccggccacctggggcttgatggcca

SEQ ID NO: 3670273 - DNA, 25 bp, Homo sapien
tgggtaggacatgaacctcaatggg

SEQ ID NO: 3670274 - DNA, 25 bp, Homo sapien
cttcttgggtaggacatgaacctca

SEQ ID NO: 3670275 - DNA, 25 bp, Homo sapien
gcttcttgggtaggacatgaacctc

SEQ ID NO: 3670276 - DNA, 25 bp, Homo sapien
tcttgggtaggacatgaacctcaat

SEQ ID NO: 3670277 - DNA, 25 bp, Homo sapien
ccaaaaactgagtgaacggccctgg

SEQ ID NO: 3670278 - DNA, 25 bp, Homo sapien
aagttggtgccattcgctcttaaga

SEQ ID NO: 3670279 - DNA, 25 bp, Homo sapien
ccattcgctcttaagaaggagaggc

SEQ ID NO: 3670280 - DNA, 25 bp, Homo sapien
gccaaaaactgagtgaacggccctg

SEQ ID NO: 3670281 - DNA, 25 bp, Homo sapien
caggtggctgcgcactgagaaggcc

SEQ ID NO: 3670282 - DNA, 25 bp, Homo sapien
aggtggctgcgcactgagaaggcct

SEQ ID NO: 3670283 - DNA, 25 bp, Homo sapien
ggtggctgcgcactgagaaggcctt

SEQ ID NO: 3670284 - DNA, 25 bp, Homo sapien
tgccttccccttgtgtgccccagca

SEQ ID NO: 3670285 - DNA, 25 bp, Homo sapien
gtgtgccccagcagcaaggctcctt

SEQ ID NO: 3670286 - DNA, 25 bp, Homo sapien
ttgtgtgccccagcagcaaggctcc

SEQ ID NO: 3670287 - DNA, 25 bp, Homo sapien
cagcagcaaggctccttctccctgc

SEQ ID NO: 3670288 - DNA, 25 bp, Homo sapien
ggctgcccgccgtgggtcctgggct

SEQ ID NO: 3670289 - DNA, 25 bp, Homo sapien
tctcttccctggtgtcaggtaccta

SEQ ID NO: 3670290 - DNA, 25 bp, Homo sapien
ctgccttgcaacacacggccctcat

SEQ ID NO: 3670291 - DNA, 25 bp, Homo sapien
tgccagcggcctgcactgccttgca

SEQ ID NO: 3670292 - DNA, 25 bp, Homo sapien
ttgagccccggagccaacacaacag

SEQ ID NO: 3670293 - DNA, 25 bp, Homo sapien
ccttcatgggcgggtccagggccca

SEQ ID NO: 3670294 - DNA, 25 bp, Homo sapien
cttcatgggcgggtccagggcccat

SEQ ID NO: 3670295 - DNA, 25 bp, Homo sapien
cctgtgcaggagcttgagccccgga

SEQ ID NO: 3670296 - DNA, 25 bp, Homo sapien
ggtggaggcctgaaagcgccctcac

SEQ ID NO: 3670297 - DNA, 25 bp, Homo sapien
cactgagtgggcttgtcgcctgctg

SEQ ID NO: 3670298 - DNA, 25 bp, Homo sapien
ctgtcactgagtgggcttgtcgcct

SEQ ID NO: 3670299 - DNA, 25 bp, Homo sapien
cacgaacactgcaaggatgccaggg

SEQ ID NO: 3670300 - DNA, 25 bp, Homo sapien
caccacgaacactgcaaggatgcca

SEQ ID NO: 3670301 - DNA, 25 bp, Homo sapien
ccccactgttgtgccttgaggtggg

SEQ ID NO: 3670302 - DNA, 25 bp, Homo sapien
ccccggccccactgttgtgccttga

SEQ ID NO: 3670303 - DNA, 25 bp, Homo sapien
ccggccccactgttgtgccttgagg

SEQ ID NO: 3670304 - DNA, 25 bp, Homo sapien
ggccccactgttgtgccttgaggtg

SEQ ID NO: 3670305 - DNA, 25 bp, Homo sapien
ctgtccctgcatatccacgcatgga

SEQ ID NO: 3670306 - DNA, 25 bp, Homo sapien
gacgcaccagtgttgacagtcctcc

SEQ ID NO: 3670307 - DNA, 25 bp, Homo sapien
ttagcaggctgaacgcacacattcc

SEQ ID NO: 3670308 - DNA, 25 bp, Homo sapien
agtcttatttgtgaggacgcaccag

SEQ ID NO: 3670309 - DNA, 25 bp, Homo sapien
tcagctccgagaggcccctgagaat

SEQ ID NO: 3670310 - DNA, 25 bp, Homo sapien
tgggcactgggacccgggctcagct

SEQ ID NO: 3670311 - DNA, 25 bp, Homo sapien
cccagggccgcatagggaggaggat

SEQ ID NO: 3670312 - DNA, 25 bp, Homo sapien
ttttcagagctccacatctttgggc

SEQ ID NO: 3670313 - DNA, 25 bp, Homo sapien
tccttgctcgggcccctgagatgtc

SEQ ID NO: 3670314 - DNA, 25 bp, Homo sapien
cctggttgtaacctgctgtcattgc

SEQ ID NO: 3670315 - DNA, 25 bp, Homo sapien
taacctgctgtcattgcccagatgc

SEQ ID NO: 3670316 - DNA, 25 bp, Homo sapien
tgagcctgcctggttgtaacctgct

SEQ ID NO: 3670317 - DNA, 25 bp, Homo sapien
ccttctccacgtggacctcccaggc

SEQ ID NO: 3670318 - DNA, 25 bp, Homo sapien
catcagggtgcgtgtgccactgaac

SEQ ID NO: 3670319 - DNA, 25 bp, Homo sapien
actgccatcagggtgcgtgtgccac

SEQ ID NO: 3670320 - DNA, 25 bp, Homo sapien
gtgcgtgtgccactgaactggtgcc

SEQ ID NO: 3670321 - DNA, 25 bp, Homo sapien
tccagagtccctgcactagaaggag

SEQ ID NO: 3670322 - DNA, 25 bp, Homo sapien
tgaagtcagcttgaacaacggcaaa

SEQ ID NO: 3670323 - DNA, 25 bp, Homo sapien
tcaagagcaatgtcagcatcaccag

SEQ ID NO: 3670324 - DNA, 25 bp, Homo sapien
caaacacgtatgaggactgtccaga

SEQ ID NO: 3670325 - DNA, 25 bp, Homo sapien
aatggcatgagaccccatgcagggc

SEQ ID NO: 3670326 - DNA, 25 bp, Homo sapien
cactggtcagacaagtgcatcgaca

SEQ ID NO: 3670327 - DNA, 25 bp, Homo sapien
caagacttccaaaacttgccctgga

SEQ ID NO: 3670328 - DNA, 25 bp, Homo sapien
cctggtcatttaggacacggtcaca

SEQ ID NO: 3670329 - DNA, 25 bp, Homo sapien
ccagaccggaggtgcaggtcaggga

SEQ ID NO: 3670330 - DNA, 25 bp, Homo sapien
atggcagcgtgccttccctggtggc

SEQ ID NO: 3670331 - DNA, 25 bp, Homo sapien
ctagatggcagcgtgccttccctgg

SEQ ID NO: 3670332 - DNA, 25 bp, Homo sapien
cagaccggaggtgcaggtcagggag

SEQ ID NO: 3670333 - DNA, 25 bp, Homo sapien
cagggccatatggtaatcccaggat

SEQ ID NO: 3670334 - DNA, 25 bp, Homo sapien
ggcatcaggagacctctgtgatggt

SEQ ID NO: 3670335 - DNA, 25 bp, Homo sapien
cctctgtgatggtggaatggcctga

SEQ ID NO: 3670336 - DNA, 25 bp, Homo sapien
aatggcctgaggaagcgcatagtcc

SEQ ID NO: 3670337 - DNA, 25 bp, Homo sapien
aggttgccgtttctctggcccgcga

SEQ ID NO: 3670338 - DNA, 25 bp, Homo sapien
ttcttgagtcctgcctttgacggcg

SEQ ID NO: 3670339 - DNA, 25 bp, Homo sapien
tcaggtcggccaagaccgagaacaa

SEQ ID NO: 3670340 - DNA, 25 bp, Homo sapien
ggagcccatctcacttgcacgaaag

SEQ ID NO: 3670341 - DNA, 25 bp, Homo sapien
tttgaagtgcctatttaatgccggc

SEQ ID NO: 3670342 - DNA, 25 bp, Homo sapien
aattactaatgggaactggtcacct

SEQ ID NO: 3670343 - DNA, 25 bp, Homo sapien
tggtcacctactcacttgattttgg

SEQ ID NO: 3670344 - DNA, 25 bp, Homo sapien
gattttggtcgttcatggttcctct

SEQ ID NO: 3670345 - DNA, 25 bp, Homo sapien
actggaattatctggaggctgctcc

SEQ ID NO: 3670346 - DNA, 25 bp, Homo sapien
taacttgaaggattgggcactggaa

SEQ ID NO: 3670347 - DNA, 25 bp, Homo sapien
gagttaggagggctcctcatgtctg

SEQ ID NO: 3670348 - DNA, 25 bp, Homo sapien
cactcagggcggagttaggagggct

SEQ ID NO: 3670349 - DNA, 25 bp, Homo sapien
ctgcctggcccttcccccaccctgg

SEQ ID NO: 3670350 - DNA, 25 bp, Homo sapien
catggctccccattatctggctgtc

SEQ ID NO: 3670351 - DNA, 25 bp, Homo sapien
ccagatcgcagggactagggtcagc

SEQ ID NO: 3670352 - DNA, 25 bp, Homo sapien
tcactcttgggtgcctgtgccaggg

SEQ ID NO: 3670353 - DNA, 25 bp, Homo sapien
tttcaccagtgcacactatggccct

SEQ ID NO: 3670354 - DNA, 25 bp, Homo sapien
tccagtcaggtccatggtaccgaag

SEQ ID NO: 3670355 - DNA, 25 bp, Homo sapien
atctgtgacctgcttgcccctggcg

SEQ ID NO: 3670356 - DNA, 25 bp, Homo sapien
aaatattctccagtcaggtccatgg

SEQ ID NO: 3670357 - DNA, 25 bp, Homo sapien
gtccatggtaccgaaggcttcctgc

SEQ ID NO: 3670358 - DNA, 25 bp, Homo sapien
ggtgcctaatacgtagcccagcttc

SEQ ID NO: 3670359 - DNA, 25 bp, Homo sapien
gtgagccagaaggtgcctaatacgt

SEQ ID NO: 3670360 - DNA, 25 bp, Homo sapien
caatctctccaaagctgaacatttg

SEQ ID NO: 3670361 - DNA, 25 bp, Homo sapien
agcaggaaagggaaccaaggcaatc

SEQ ID NO: 3670362 - DNA, 25 bp, Homo sapien
aaggtcaatccagttattgttcacg

SEQ ID NO: 3670363 - DNA, 25 bp, Homo sapien
cctccacccacatataaaggtcaat

SEQ ID NO: 3670364 - DNA, 25 bp, Homo sapien
ttggaacctcgccactgtttcctcc

SEQ ID NO: 3670365 - DNA, 25 bp, Homo sapien
ccagttattgttcacgctgccagac

SEQ ID NO: 3670366 - DNA, 25 bp, Homo sapien
gcaagacagtctggccgtctgtgga

SEQ ID NO: 3670367 - DNA, 25 bp, Homo sapien
gtaggtgatgaagcacatccgaata

SEQ ID NO: 3670368 - DNA, 25 bp, Homo sapien
gatgaagcacatccgaatatttggg

SEQ ID NO: 3670369 - DNA, 25 bp, Homo sapien
gagtggcaagacagtctggccgtct

SEQ ID NO: 3670370 - DNA, 25 bp, Homo sapien
gcaaatctgcttagagtgtctggcc

SEQ ID NO: 3670371 - DNA, 25 bp, Homo sapien
tagcaaatctgcttagagtgtctgg

SEQ ID NO: 3670372 - DNA, 25 bp, Homo sapien
aatctgcttagagtgtctggcctcc

SEQ ID NO: 3670373 - DNA, 25 bp, Homo sapien
aaatctgcttagagtgtctggcctc

SEQ ID NO: 3670374 - DNA, 25 bp, Homo sapien
tctaaatcctgcctgcatgaatgtg

SEQ ID NO: 3670375 - DNA, 25 bp, Homo sapien
gaccgtcaggcacaattttctgaag

SEQ ID NO: 3670376 - DNA, 25 bp, Homo sapien
gcatgaatgtgtgaccgtcaggcac

SEQ ID NO: 3670377 - DNA, 25 bp, Homo sapien
tcctgcctgcatgaatgtgtgaccg

SEQ ID NO: 3670378 - DNA, 25 bp, Homo sapien
ccggagttgaaactttcgatctgtt

SEQ ID NO: 3670379 - DNA, 25 bp, Homo sapien
tgaaactttcgatctgttgaattgc

SEQ ID NO: 3670380 - DNA, 25 bp, Homo sapien
gagttgaaactttcgatctgttgaa

SEQ ID NO: 3670381 - DNA, 25 bp, Homo sapien
ttccggagttgaaactttcgatctg

SEQ ID NO: 3670382 - DNA, 25 bp, Homo sapien
ctgaaatgcatgtgccaccagttct

SEQ ID NO: 3670383 - DNA, 25 bp, Homo sapien
ctctgagagtgtcctgaaatgcatg

SEQ ID NO: 3670384 - DNA, 25 bp, Homo sapien
gcaataatcatgctgggaaccttgt

SEQ ID NO: 3670385 - DNA, 25 bp, Homo sapien
cagttctccatcagtcatagcaata

SEQ ID NO: 3670386 - DNA, 25 bp, Homo sapien
attataatcagccacacccagggtg

SEQ ID NO: 3670387 - DNA, 25 bp, Homo sapien
gattataatcagccacacccagggt

SEQ ID NO: 3670388 - DNA, 25 bp, Homo sapien
agattataatcagccacacccaggg

SEQ ID NO: 3670389 - DNA, 25 bp, Homo sapien
cagattataatcagccacacccagg

SEQ ID NO: 3670390 - DNA, 25 bp, Homo sapien
ccattctccactgcaaacacgtggc

SEQ ID NO: 3670391 - DNA, 25 bp, Homo sapien
ccactgcaaacacgtggccagggct

SEQ ID NO: 3670392 - DNA, 25 bp, Homo sapien
ccagggctgtctgcaattgctgtta

SEQ ID NO: 3670393 - DNA, 25 bp, Homo sapien
ggcatcaatggtgcttctcagggcc

SEQ ID NO: 3670394 - DNA, 25 bp, Homo sapien
gctccaccgatgtcacatcaagaca

SEQ ID NO: 3670395 - DNA, 25 bp, Homo sapien
ccaccgatgtcacatcaagacagac

SEQ ID NO: 3670396 - DNA, 25 bp, Homo sapien
tccaccgatgtcacatcaagacaga

SEQ ID NO: 3670397 - DNA, 25 bp, Homo sapien
ctcctacacactcagaggaaggctc

SEQ ID NO: 3670398 - DNA, 25 bp, Homo sapien
agccatttccatgaataaccacatg

SEQ ID NO: 3670399 - DNA, 25 bp, Homo sapien
aagccatttccatgaataaccacat

SEQ ID NO: 3670400 - DNA, 25 bp, Homo sapien
cccagggcaattcatggaattattg

SEQ ID NO: 3670401 - DNA, 25 bp, Homo sapien
gaattattgtcgatactggttggct

SEQ ID NO: 3670402 - DNA, 25 bp, Homo sapien
tattgtcgatactggttggcttttc

SEQ ID NO: 3670403 - DNA, 25 bp, Homo sapien
caattcatggaattattgtcgatac

SEQ ID NO: 3670404 - DNA, 25 bp, Homo sapien
tgttcaagctgacttcaatagagta

SEQ ID NO: 3670405 - DNA, 25 bp, Homo sapien
caagctgacttcaatagagtactcc

SEQ ID NO: 3670406 - DNA, 25 bp, Homo sapien
gctgacattgctcttgaagaatgtt

SEQ ID NO: 3670407 - DNA, 25 bp, Homo sapien
cctttgttcaagctgacttcaatag

SEQ ID NO: 3670408 - DNA, 25 bp, Homo sapien
tccagaagccgggttggagcagcct

SEQ ID NO: 3670409 - DNA, 25 bp, Homo sapien
tgtgctccttctagtgcagaggctc

SEQ ID NO: 3670410 - DNA, 25 bp, Homo sapien
gactgcctgggaacggtctgccttt

SEQ ID NO: 3670411 - DNA, 25 bp, Homo sapien
gctgcacacgctactttctgggact

SEQ ID NO: 3670412 - DNA, 25 bp, Homo sapien
gggtccgagtgcctgagagcctccc

SEQ ID NO: 3670413 - DNA, 25 bp, Homo sapien
ctcttggagctgagctcgggtccga

SEQ ID NO: 3670414 - DNA, 25 bp, Homo sapien
caggaggggacatactacagggctt

SEQ ID NO: 3670415 - DNA, 25 bp, Homo sapien
tactacagggcttggcgagggagca

SEQ ID NO: 3670416 - DNA, 25 bp, Homo sapien
taaaggaatcttgggcggcatccgt

SEQ ID NO: 3670417 - DNA, 25 bp, Homo sapien
taagcaacgggaacagttctctggg

SEQ ID NO: 3670418 - DNA, 25 bp, Homo sapien
tgtgcaaagggaatgagccgccctc

SEQ ID NO: 3670419 - DNA, 25 bp, Homo sapien
cacttgtgaggtttagagagctcca

SEQ ID NO: 3670420 - DNA, 25 bp, Homo sapien
tgcttgcggcacagccgccagacac

SEQ ID NO: 3670421 - DNA, 25 bp, Homo sapien
acaagcagcaggagtggcacaaaat

SEQ ID NO: 3670422 - DNA, 25 bp, Homo sapien
gtggcacaaaatagagccagttgcg

SEQ ID NO: 3670423 - DNA, 25 bp, Homo sapien
aatagagccagttgcggaaaatgcc

SEQ ID NO: 3670424 - DNA, 25 bp, Homo sapien
acatgttagagtccctcagagggtg

SEQ ID NO: 3670425 - DNA, 25 bp, Homo sapien
atgttagagtccctcagagggtggg

SEQ ID NO: 3670426 - DNA, 25 bp, Homo sapien
catgttagagtccctcagagggtgg

SEQ ID NO: 3670427 - DNA, 25 bp, Homo sapien
cttttctggcttctgcacaggtggt

SEQ ID NO: 3670428 - DNA, 25 bp, Homo sapien
ttctggcttctgcacaggtggtggc

SEQ ID NO: 3670429 - DNA, 25 bp, Homo sapien
tgcacaggtggtggctccttgacag

SEQ ID NO: 3670430 - DNA, 25 bp, Homo sapien
gcacaggtggtggctccttgacagt

SEQ ID NO: 3670431 - DNA, 25 bp, Homo sapien
ttctcatcccgcccactccttggca

SEQ ID NO: 3670432 - DNA, 25 bp, Homo sapien
agtggggcaggtgtttacaggagct

SEQ ID NO: 3670433 - DNA, 25 bp, Homo sapien
tggggcaggtgtttacaggagctgg

SEQ ID NO: 3670434 - DNA, 25 bp, Homo sapien
atcccgcccactccttggcatccac

SEQ ID NO: 3670435 - DNA, 25 bp, Homo sapien
gcttgcgtgagagaggtcacaaaag

SEQ ID NO: 3670436 - DNA, 25 bp, Homo sapien
cctggtggcagcttgcgtgagagag

SEQ ID NO: 3670437 - DNA, 25 bp, Homo sapien
cagcttgcgtgagagaggtcacaaa

SEQ ID NO: 3670438 - DNA, 25 bp, Homo sapien
cacctggtggcagcttgcgtgagag

SEQ ID NO: 3670439 - DNA, 25 bp, Homo sapien
gaagagctttgatgccatgtccaga

SEQ ID NO: 3670440 - DNA, 25 bp, Homo sapien
acaactctgttagccatcctagcca

SEQ ID NO: 3670441 - DNA, 25 bp, Homo sapien
tgaaccaaggaaggaatccttattc

SEQ ID NO: 3670442 - DNA, 25 bp, Homo sapien
tcctccctatggtcccaaggcaatg

SEQ ID NO: 3670443 - DNA, 25 bp, Homo sapien
ggactagtgccatgtgaccggaact

SEQ ID NO: 3670444 - DNA, 25 bp, Homo sapien
ctgttcagtgcataaggctggacta

SEQ ID NO: 3670445 - DNA, 25 bp, Homo sapien
gctgtagcaacgtggagaggcctta

SEQ ID NO: 3670446 - DNA, 25 bp, Homo sapien
acctcggatggaaagtgggcttctg

SEQ ID NO: 3670447 - DNA, 25 bp, Homo sapien
cacggatgttttctccacgtttcct

SEQ ID NO: 3670448 - DNA, 25 bp, Homo sapien
acacaaagctcaaggccgtacccag

SEQ ID NO: 3670449 - DNA, 25 bp, Homo sapien
caagagcgaccagagagtctatggg

SEQ ID NO: 3670450 - DNA, 25 bp, Homo sapien
ccacctggaggaacacggatgtttt

SEQ ID NO: 3670451 - DNA, 25 bp, Homo sapien
gacccgtaggaagagcaaactctgt

SEQ ID NO: 3670452 - DNA, 25 bp, Homo sapien
cagacccgtaggaagagcaaactct

SEQ ID NO: 3670453 - DNA, 25 bp, Homo sapien
acccgtaggaagagcaaactctgtt

SEQ ID NO: 3670454 - DNA, 25 bp, Homo sapien
ccagacccgtaggaagagcaaactc

SEQ ID NO: 3670455 - DNA, 25 bp, Homo sapien
cagggagcctgtgcatattgggact

SEQ ID NO: 3670456 - DNA, 25 bp, Homo sapien
catattgggactgtgcaagggctaa

SEQ ID NO: 3670457 - DNA, 25 bp, Homo sapien
ctgcagcgagcctgtttgagggcga

SEQ ID NO: 3670458 - DNA, 25 bp, Homo sapien
agggcgaggcactcccggctgtgtc

SEQ ID NO: 3670459 - DNA, 25 bp, Homo sapien
tctttgggttgcacagagtctgtgc

SEQ ID NO: 3670460 - DNA, 25 bp, Homo sapien
gggttctgccgtgtgcctgagcagt

SEQ ID NO: 3670461 - DNA, 25 bp, Homo sapien
agggaggcctcaagcacctagctgg

SEQ ID NO: 3670462 - DNA, 25 bp, Homo sapien
tcctttgaccgcaagaaaagactca

SEQ ID NO: 3670463 - DNA, 25 bp, Homo sapien
gcattgtgtgcctggaagagcctct

SEQ ID NO: 3670464 - DNA, 25 bp, Homo sapien
ttctctggatgccttgtgcaaggca

SEQ ID NO: 3670465 - DNA, 25 bp, Homo sapien
ttcctcaacattgacctggctcatt

SEQ ID NO: 3670466 - DNA, 25 bp, Homo sapien
cagggaatgagcctccaaatgggga

SEQ ID NO: 3670467 - DNA, 25 bp, Homo sapien
ggccccaaaaggcacaggtgcgtgc

SEQ ID NO: 3670468 - DNA, 25 bp, Homo sapien
cgtgcaatccggatcagggacagat

SEQ ID NO: 3670469 - DNA, 25 bp, Homo sapien
caatccggatcagggacagattagc

SEQ ID NO: 3670470 - DNA, 25 bp, Homo sapien
cacaggtgcgtgcaatccggatcag

SEQ ID NO: 3670471 - DNA, 25 bp, Homo sapien
gtgattctcattcaagtgcctaagc

SEQ ID NO: 3670472 - DNA, 25 bp, Homo sapien
ttctcattcaagtgcctaagcctcc

SEQ ID NO: 3670473 - DNA, 25 bp, Homo sapien
gattctcattcaagtgcctaagcct

SEQ ID NO: 3670474 - DNA, 25 bp, Homo sapien
tgattctcattcaagtgcctaagcc

SEQ ID NO: 3670475 - DNA, 25 bp, Homo sapien
ctagggtgcacacgacaggtcagta

SEQ ID NO: 3670476 - DNA, 25 bp, Homo sapien
tagggtgcacacgacaggtcagtat

SEQ ID NO: 3670477 - DNA, 25 bp, Homo sapien
tgcacacgacaggtcagtatgttcc

SEQ ID NO: 3670478 - DNA, 25 bp, Homo sapien
acacgacaggtcagtatgttcccca

SEQ ID NO: 3670479 - DNA, 25 bp, Homo sapien
tctcagattcagagggacacaccga

SEQ ID NO: 3670480 - DNA, 25 bp, Homo sapien
ctcagattcagagggacacaccgac

SEQ ID NO: 3670481 - DNA, 25 bp, Homo sapien
catgtggaggtcctcaccaacttca

SEQ ID NO: 3670482 - DNA, 25 bp, Homo sapien
gcatgtggaggtcctcaccaacttc

SEQ ID NO: 3670483 - DNA, 25 bp, Homo sapien
atgtggaggtcctcaccaacttcaa

SEQ ID NO: 3670484 - DNA, 25 bp, Homo sapien
tgtggaggtcctcaccaacttcaac

SEQ ID NO: 3670485 - DNA, 25 bp, Homo sapien
gagagttcctctgtaatattgtgct

SEQ ID NO: 3670486 - DNA, 25 bp, Homo sapien
taatattgtgcttgcctctggattg

SEQ ID NO: 3670487 - DNA, 25 bp, Homo sapien
gtttgagagttcctctgtaatattg

SEQ ID NO: 3670488 - DNA, 25 bp, Homo sapien
catctgtttgagagttcctctgtaa

SEQ ID NO: 3670489 - DNA, 25 bp, Homo sapien
gagttcctctggaatattgtgcttg

SEQ ID NO: 3670490 - DNA, 25 bp, Homo sapien
tgcctctggattggcagaagggtta

SEQ ID NO: 3670491 - DNA, 25 bp, Homo sapien
tattgtgcttgcctctggattggca

SEQ ID NO: 3670492 - DNA, 25 bp, Homo sapien
tgcttgcctctggattggcagaagg

SEQ ID NO: 3670493 - DNA, 25 bp, Homo sapien
tttgtacagttgcttcttcttattt

SEQ ID NO: 3670494 - DNA, 25 bp, Homo sapien
atggtttgtacagttgcttcttctt

SEQ ID NO: 3670495 - DNA, 25 bp, Homo sapien
tggtttgtacagttgcttcttctta

SEQ ID NO: 3670496 - DNA, 25 bp, Homo sapien
ggtttgtacagttgcttcttcttat

SEQ ID NO: 3670497 - DNA, 25 bp, Homo sapien
gaagtgtaagtcaaacttatcaaag

SEQ ID NO: 3670498 - DNA, 25 bp, Homo sapien
ggaagtgtaagtcaaacttatcaaa

SEQ ID NO: 3670499 - DNA, 25 bp, Homo sapien
tattgttgactgaaacgctcagtag

SEQ ID NO: 3670500 - DNA, 25 bp, Homo sapien
tcatcaaggaatattgtcgaacacg

SEQ ID NO: 3670501 - DNA, 25 bp, Homo sapien
tcgaacacgagctgtattgttgact

SEQ ID NO: 3670502 - DNA, 25 bp, Homo sapien
attgtcattgtaagataatgctggc

SEQ ID NO: 3670503 - DNA, 25 bp, Homo sapien
taaaaaggctagtgcatttgaaaca

SEQ ID NO: 3670504 - DNA, 25 bp, Homo sapien
cattattatgagtgtaaacttgcca

SEQ ID NO: 3670505 - DNA, 25 bp, Homo sapien
ttactcaataggtcccaaagctcag

SEQ ID NO: 3670506 - DNA, 25 bp, Homo sapien
gacaattgaattagctaaaaaggct

SEQ ID NO: 3670507 - DNA, 25 bp, Homo sapien
ctttgtgtgatatgatgaggtatct

SEQ ID NO: 3670508 - DNA, 25 bp, Homo sapien
atatgatgaggtatctccaaggtca

SEQ ID NO: 3670509 - DNA, 25 bp, Homo sapien
tatgatgaggtatctccaaggtcac

SEQ ID NO: 3670510 - DNA, 25 bp, Homo sapien
tgtgtgatatgatgaggtatctcca

SEQ ID NO: 3670511 - DNA, 25 bp, Homo sapien
gttaactgttcatcaggtatgctca

SEQ ID NO: 3670512 - DNA, 25 bp, Homo sapien
cgcaaatgagttaactgttcatcag

SEQ ID NO: 3670513 - DNA, 25 bp, Homo sapien
tgagttaactgttcatcaggtatgc

SEQ ID NO: 3670514 - DNA, 25 bp, Homo sapien
caggtatgctcaaagatctatctgc

SEQ ID NO: 3670515 - DNA, 25 bp, Homo sapien
ctgtgtggaacagaaggaggaatgg

SEQ ID NO: 3670516 - DNA, 25 bp, Homo sapien
tgttcttcgtaatgtgcacggtgga

SEQ ID NO: 3670517 - DNA, 25 bp, Homo sapien
tccatttctgttcttcgtaatgtgc

SEQ ID NO: 3670518 - DNA, 25 bp, Homo sapien
tttctgttcttcgtaatgtgcacgg

SEQ ID NO: 3670519 - DNA, 25 bp, Homo sapien
tcttcgtaatgtgcacggtggaaac

SEQ ID NO: 3670520 - DNA, 25 bp, Homo sapien
tcgctttaagagcatgccctgttta

SEQ ID NO: 3670521 - DNA, 25 bp, Homo sapien
cttcgctttaagagcatgccctgtt

SEQ ID NO: 3670522 - DNA, 25 bp, Homo sapien
ttcgctttaagagcatgccctgttt

SEQ ID NO: 3670523 - DNA, 25 bp, Homo sapien
tcttcatataatcacctaagcttga

SEQ ID NO: 3670524 - DNA, 25 bp, Homo sapien
cctaagcttgaataataggtgagca

SEQ ID NO: 3670525 - DNA, 25 bp, Homo sapien
atgtggctagggatggccactttcc

SEQ ID NO: 3670526 - DNA, 25 bp, Homo sapien
gatgtggctagggatggccactttc

SEQ ID NO: 3670527 - DNA, 25 bp, Homo sapien
tctcgcatgactgcaggctggccac

SEQ ID NO: 3670528 - DNA, 25 bp, Homo sapien
ctgggacttgcttttactgctctcg

SEQ ID NO: 3670529 - DNA, 25 bp, Homo sapien
gggacttgcttttactgctctcgca

SEQ ID NO: 3670530 - DNA, 25 bp, Homo sapien
ggctggccacgatctggctctggat

SEQ ID NO: 3670531 - DNA, 25 bp, Homo sapien
ttcccacgcatgttttggatcgact

SEQ ID NO: 3670532 - DNA, 25 bp, Homo sapien
cccacgcatgttttggatcgactgc

SEQ ID NO: 3670533 - DNA, 25 bp, Homo sapien
tcccacgcatgttttggatcgactg

SEQ ID NO: 3670534 - DNA, 25 bp, Homo sapien
ggcccacttaggattctgggtctca

SEQ ID NO: 3670535 - DNA, 25 bp, Homo sapien
ctggcccacttaggattctgggtct

SEQ ID NO: 3670536 - DNA, 25 bp, Homo sapien
gcccacttaggattctgggtctcac

SEQ ID NO: 3670537 - DNA, 25 bp, Homo sapien
tggcccacttaggattctgggtctc

SEQ ID NO: 3670538 - DNA, 25 bp, Homo sapien
ccagctccagagatcgcacacggga

SEQ ID NO: 3670539 - DNA, 25 bp, Homo sapien
ctccagagatcgcacacgggaaagg

SEQ ID NO: 3670540 - DNA, 25 bp, Homo sapien
cagctccagagatcgcacacgggaa

SEQ ID NO: 3670541 - DNA, 25 bp, Homo sapien
agctccagagatcgcacacgggaaa

SEQ ID NO: 3670542 - DNA, 25 bp, Homo sapien
ggactttactgagggttttgtctgc

SEQ ID NO: 3670543 - DNA, 25 bp, Homo sapien
ttgtctgcccctggctgctcccttc

SEQ ID NO: 3670544 - DNA, 25 bp, Homo sapien
ttttgtctgcccctggctgctccct

SEQ ID NO: 3670545 - DNA, 25 bp, Homo sapien
cttccctcgtggactttactgaggg

SEQ ID NO: 3670546 - DNA, 25 bp, Homo sapien
tcagtgcagggtagtggggccagaa

SEQ ID NO: 3670547 - DNA, 25 bp, Homo sapien
cagtgcagggtagtggggccagaaa

SEQ ID NO: 3670548 - DNA, 25 bp, Homo sapien
cttcttatctcaactagctgacatt

SEQ ID NO: 3670549 - DNA, 25 bp, Homo sapien
aactagctgacattattacttcaca

SEQ ID NO: 3670550 - DNA, 25 bp, Homo sapien
tctcaactagctgacattattactt

SEQ ID NO: 3670551 - DNA, 25 bp, Homo sapien
aactgtaaccttcttatctcaacta

SEQ ID NO: 3670552 - DNA, 25 bp, Homo sapien
taccaccatcttattctgagatgct

SEQ ID NO: 3670553 - DNA, 25 bp, Homo sapien
tgtaccaccatcttattctgagatg

SEQ ID NO: 3670554 - DNA, 25 bp, Homo sapien
ccaccatcttattctgagatgctcc

SEQ ID NO: 3670555 - DNA, 25 bp, Homo sapien
caccatcttattctgagatgctcct

SEQ ID NO: 3670556 - DNA, 25 bp, Homo sapien
tatctctctacatctggaaccatcg

SEQ ID NO: 3670557 - DNA, 25 bp, Homo sapien
tctacatctggaaccatcggcagct

SEQ ID NO: 3670558 - DNA, 25 bp, Homo sapien
tctctacatctggaaccatcggcag

SEQ ID NO: 3670559 - DNA, 25 bp, Homo sapien
tctctctacatctggaaccatcggc

SEQ ID NO: 3670560 - DNA, 25 bp, Homo sapien
ggatgtgtatggccagacacggtgg

SEQ ID NO: 3670561 - DNA, 25 bp, Homo sapien
tctatagcataggggaagggtaatg

SEQ ID NO: 3670562 - DNA, 25 bp, Homo sapien
gggatgtgtatggccagacacggtg

SEQ ID NO: 3670563 - DNA, 25 bp, Homo sapien
cataggggaagggtaatgcgggctt

SEQ ID NO: 3670564 - DNA, 25 bp, Homo sapien
gcccaccacggcctctggggacaac

SEQ ID NO: 3670565 - DNA, 25 bp, Homo sapien
gacccagacagcctgttgtcagagc

SEQ ID NO: 3670566 - DNA, 25 bp, Homo sapien
acggcctctggggacaactgccctt

SEQ ID NO: 3670567 - DNA, 25 bp, Homo sapien
ttgtcagagctcatccacacagcag

SEQ ID NO: 3670568 - DNA, 25 bp, Homo sapien
cctagggtactctccaccagtccgc

SEQ ID NO: 3670569 - DNA, 25 bp, Homo sapien
accagtccgcgctttcaggagctca

SEQ ID NO: 3670570 - DNA, 25 bp, Homo sapien
agggtactctccaccagtccgcgct

SEQ ID NO: 3670571 - DNA, 25 bp, Homo sapien
ggtactctccaccagtccgcgcttt

SEQ ID NO: 3670572 - DNA, 25 bp, Homo sapien
ctcaggcgggtccagatgaccctgt

SEQ ID NO: 3670573 - DNA, 25 bp, Homo sapien
tcaggcgggtccagatgaccctgtc

SEQ ID NO: 3670574 - DNA, 25 bp, Homo sapien
aagtcgggggcctggagctcaggcg

SEQ ID NO: 3670575 - DNA, 25 bp, Homo sapien
ggctgtgaaagtcgggggcctggag

SEQ ID NO: 3670576 - DNA, 25 bp, Homo sapien
tcacgggggcggcaagtccagcgga

SEQ ID NO: 3670577 - DNA, 25 bp, Homo sapien
ctttagaatgggaatctgttgggat

SEQ ID NO: 3670578 - DNA, 25 bp, Homo sapien
ccaacaccaggtcacgggggcggca

SEQ ID NO: 3670579 - DNA, 25 bp, Homo sapien
catctttagaatgggaatctgttgg

SEQ ID NO: 3670580 - DNA, 25 bp, Homo sapien
ctccagtctccttggcatgtcccac

SEQ ID NO: 3670581 - DNA, 25 bp, Homo sapien
ttcaccacttcctccacggcatgaa

SEQ ID NO: 3670582 - DNA, 25 bp, Homo sapien
cagtctccttggcatgtcccaccac

SEQ ID NO: 3670583 - DNA, 25 bp, Homo sapien
gtctccttggcatgtcccaccacct

SEQ ID NO: 3670584 - DNA, 25 bp, Homo sapien
cacctgctgaacttgtgtccccttg

SEQ ID NO: 3670585 - DNA, 25 bp, Homo sapien
ctgaacttgtgtccccttgagtggc

SEQ ID NO: 3670586 - DNA, 25 bp, Homo sapien
aggaagaatgtcctagtgatccacc

SEQ ID NO: 3670587 - DNA, 25 bp, Homo sapien
ggaagaatgtcctagtgatccacct

SEQ ID NO: 3670588 - DNA, 25 bp, Homo sapien
atggcatttgtgactgtgttggtca

SEQ ID NO: 3670589 - DNA, 25 bp, Homo sapien
gatggcatttgtgactgtgttggtc

SEQ ID NO: 3670590 - DNA, 25 bp, Homo sapien
tgatggcatttgtgactgtgttggt

SEQ ID NO: 3670591 - DNA, 25 bp, Homo sapien
gtgatggcatttgtgactgtgttgg

SEQ ID NO: 3670592 - DNA, 25 bp, Homo sapien
agactggggaagggccgtggtagca

SEQ ID NO: 3670593 - DNA, 25 bp, Homo sapien
attgagactggggaagggccgtggt

SEQ ID NO: 3670594 - DNA, 25 bp, Homo sapien
tgtacacatgtcatggctttttatt

SEQ ID NO: 3670595 - DNA, 25 bp, Homo sapien
tgagactggggaagggccgtggtag

SEQ ID NO: 3670596 - DNA, 25 bp, Homo sapien
tttggtggaaggcattccaccttct

SEQ ID NO: 3670597 - DNA, 25 bp, Homo sapien
ctttggtggaaggcattccaccttc

SEQ ID NO: 3670598 - DNA, 25 bp, Homo sapien
tgtggttagtggagcagctggtcat

SEQ ID NO: 3670599 - DNA, 25 bp, Homo sapien
gagcagctggtcatggggaggtctc

SEQ ID NO: 3670600 - DNA, 25 bp, Homo sapien
tggaggatgtgtggttagtggagca

SEQ ID NO: 3670601 - DNA, 25 bp, Homo sapien
gatgtgtggttagtggagcagctgg

SEQ ID NO: 3670602 - DNA, 25 bp, Homo sapien
tgtcagaccggtgatggcctcagct

SEQ ID NO: 3670603 - DNA, 25 bp, Homo sapien
tacagcatgccatactggtccactg

SEQ ID NO: 3670604 - DNA, 25 bp, Homo sapien
acagcccctcgggaccattcagagg

SEQ ID NO: 3670605 - DNA, 25 bp, Homo sapien
tccactgtcagaccggtgatggcct

SEQ ID NO: 3670606 - DNA, 25 bp, Homo sapien
gatgggaggccagttggtgagaagg

SEQ ID NO: 3670607 - DNA, 25 bp, Homo sapien
tgagaaggtggcaggcggcacagcc

SEQ ID NO: 3670608 - DNA, 25 bp, Homo sapien
gagaaggtggcaggcggcacagcca

SEQ ID NO: 3670609 - DNA, 25 bp, Homo sapien
cacagatgggaggccagttggtgag

SEQ ID NO: 3670610 - DNA, 25 bp, Homo sapien
tgtgggggtgcaagcccgcccaggg

SEQ ID NO: 3670611 - DNA, 25 bp, Homo sapien
agcaggccgctcacttgggtgtggg

SEQ ID NO: 3670612 - DNA, 25 bp, Homo sapien
gtgggggtgcaagcccgcccagggc

SEQ ID NO: 3670613 - DNA, 25 bp, Homo sapien
ttcacttcgggggcacctttctcac

SEQ ID NO: 3670614 - DNA, 25 bp, Homo sapien
tgggactccacacgtctggctcctg

SEQ ID NO: 3670615 - DNA, 25 bp, Homo sapien
cacttcgggggcacctttctcacgg

SEQ ID NO: 3670616 - DNA, 25 bp, Homo sapien
ttcgggggcacctttctcacggaga

SEQ ID NO: 3670617 - DNA, 25 bp, Homo sapien
catgcaggaacccaaatctcctgcc

SEQ ID NO: 3670618 - DNA, 25 bp, Homo sapien
aggaacccaaatctcctgccagctc

SEQ ID NO: 3670619 - DNA, 25 bp, Homo sapien
caggaacccaaatctcctgccagct

SEQ ID NO: 3670620 - DNA, 25 bp, Homo sapien
ccatgcaggaacccaaatctcctgc

SEQ ID NO: 3670621 - DNA, 25 bp, Homo sapien
atcagggtctgggttgaagtgggag

SEQ ID NO: 3670622 - DNA, 25 bp, Homo sapien
tggctgagcagttgggacccgacac

SEQ ID NO: 3670623 - DNA, 25 bp, Homo sapien
gcagggttacagcacaagtgaccct

SEQ ID NO: 3670624 - DNA, 25 bp, Homo sapien
gtggctgagcagttgggacccgaca

SEQ ID NO: 3670625 - DNA, 25 bp, Homo sapien
tgccgctgcgtgttgcttctcttgg

SEQ ID NO: 3670626 - DNA, 25 bp, Homo sapien
tcgatgatagcctgctcgttggtcc

SEQ ID NO: 3670627 - DNA, 25 bp, Homo sapien
tggtgagcacatcgatgatagcctg

SEQ ID NO: 3670628 - DNA, 25 bp, Homo sapien
ttctcttggtgagcacatcgatgat

SEQ ID NO: 3670629 - DNA, 25 bp, Homo sapien
cttgccgaactgagccttgaaggac

SEQ ID NO: 3670630 - DNA, 25 bp, Homo sapien
gtggggcctgttgggtgcatgagaa

SEQ ID NO: 3670631 - DNA, 25 bp, Homo sapien
ggcctgttgggtgcatgagaaggaa

SEQ ID NO: 3670632 - DNA, 25 bp, Homo sapien
ggggcctgttgggtgcatgagaagg

SEQ ID NO: 3670633 - DNA, 25 bp, Homo sapien
cctgttgggtgcatgagaaggaatg

SEQ ID NO: 3670634 - DNA, 25 bp, Homo sapien
gcttgggctggattctgcgtgggcc

SEQ ID NO: 3670635 - DNA, 25 bp, Homo sapien
ttagcttctcttagcatcagtatct

SEQ ID NO: 3670636 - DNA, 25 bp, Homo sapien
tcagtatctttaccggttacacgga

SEQ ID NO: 3670637 - DNA, 25 bp, Homo sapien
ttgccacgtgctggctgggtttctt

SEQ ID NO: 3670638 - DNA, 25 bp, Homo sapien
caatgagcctctcaaacttgccact

SEQ ID NO: 3670639 - DNA, 25 bp, Homo sapien
cataagggccacaatgagcctctca

SEQ ID NO: 3670640 - DNA, 25 bp, Homo sapien
ctgtatggcgggtacataagggcca

SEQ ID NO: 3670641 - DNA, 25 bp, Homo sapien
tctcaaacttgccactgagctcaga

SEQ ID NO: 3670642 - DNA, 25 bp, Homo sapien
tcatggcgtcatgcagctccttggc

SEQ ID NO: 3670643 - DNA, 25 bp, Homo sapien
cacatgcttgtcttcagtgatgaac

SEQ ID NO: 3670644 - DNA, 25 bp, Homo sapien
aacattgagggcaagtgctgtgacg

SEQ ID NO: 3670645 - DNA, 25 bp, Homo sapien
gcatcccgatccataaacaggaata

SEQ ID NO: 3670646 - DNA, 25 bp, Homo sapien
acaggaataagaagcctcccctgcg

SEQ ID NO: 3670647 - DNA, 25 bp, Homo sapien
ttcctcatacgccttcattatctcc

SEQ ID NO: 3670648 - DNA, 25 bp, Homo sapien
cagctggttcttggtccgagaggcc

SEQ ID NO: 3670649 - DNA, 25 bp, Homo sapien
ctcccgcagctggttcttggtccga

SEQ ID NO: 3670650 - DNA, 25 bp, Homo sapien
ttcttggtccgagaggccaggatct

SEQ ID NO: 3670651 - DNA, 25 bp, Homo sapien
ggtagccacttgtgtctgcttggat

SEQ ID NO: 3670652 - DNA, 25 bp, Homo sapien
ggatcctctccaggtagccacttgt

SEQ ID NO: 3670653 - DNA, 25 bp, Homo sapien
tcctctccaggtagccacttgtgtc

SEQ ID NO: 3670654 - DNA, 25 bp, Homo sapien
tctccaggtagccacttgtgtctgc

SEQ ID NO: 3670655 - DNA, 25 bp, Homo sapien
ggcactcccaagagcctaggctgtg

SEQ ID NO: 3670656 - DNA, 25 bp, Homo sapien
caaggcactcccaagagcctaggct

SEQ ID NO: 3670657 - DNA, 25 bp, Homo sapien
cactcccaagagcctaggctgtgac

SEQ ID NO: 3670658 - DNA, 25 bp, Homo sapien
aaggcactcccaagagcctaggctg

SEQ ID NO: 3670659 - DNA, 25 bp, Homo sapien
gtggcgctattcaagggctgctccc

SEQ ID NO: 3670660 - DNA, 25 bp, Homo sapien
cctgactcttgtggcgctattcaag

SEQ ID NO: 3670661 - DNA, 25 bp, Homo sapien
tcttgtggcgctattcaagggctgc

SEQ ID NO: 3670662 - DNA, 25 bp, Homo sapien
actcttgtggcgctattcaagggct

SEQ ID NO: 3670663 - DNA, 25 bp, Homo sapien
ctgtgcgtcttggagggccagtgcc

SEQ ID NO: 3670664 - DNA, 25 bp, Homo sapien
tcttggagggccagtgccgggtcca

SEQ ID NO: 3670665 - DNA, 25 bp, Homo sapien
gtgcgtcttggagggccagtgccgg

SEQ ID NO: 3670666 - DNA, 25 bp, Homo sapien
gccagtgccgggtccacaaagctgc

SEQ ID NO: 3670667 - DNA, 25 bp, Homo sapien
acagagacccggacacctgtgtcca

SEQ ID NO: 3670668 - DNA, 25 bp, Homo sapien
ttgggacacccacaataagccagtg

SEQ ID NO: 3670669 - DNA, 25 bp, Homo sapien
tagcgcccccgggttcatgggctgt

SEQ ID NO: 3670670 - DNA, 25 bp, Homo sapien
gcagctctggcttagaatattttct

SEQ ID NO: 3670671 - DNA, 25 bp, Homo sapien
tgcacaggatggtgatgaatttcat

SEQ ID NO: 3670672 - DNA, 25 bp, Homo sapien
gtgagtggcactgcgcgtgcacagg

SEQ ID NO: 3670673 - DNA, 25 bp, Homo sapien
tggcactgcgcgtgcacaggatggt

SEQ ID NO: 3670674 - DNA, 25 bp, Homo sapien
aggtgagtggcactgcgcgtgcaca

SEQ ID NO: 3670675 - DNA, 25 bp, Homo sapien
ctgtcctcaatgctcttgttggcaa

SEQ ID NO: 3670676 - DNA, 25 bp, Homo sapien
cctcaatgctcttgttggcaatttt

SEQ ID NO: 3670677 - DNA, 25 bp, Homo sapien
caatgctcttgttggcaattttctc

SEQ ID NO: 3670678 - DNA, 25 bp, Homo sapien
gctcttgttggcaattttctcatac

SEQ ID NO: 3670679 - DNA, 25 bp, Homo sapien
gcgtatgcatttgtgtgcgcacaca

SEQ ID NO: 3670680 - DNA, 25 bp, Homo sapien
aaagatgactttgtgctggccaggg

SEQ ID NO: 3670681 - DNA, 25 bp, Homo sapien
tggctgccatgagtacacacagggt

SEQ ID NO: 3670682 - DNA, 25 bp, Homo sapien
caggcccctggttcatgtccagaaa

SEQ ID NO: 3670683 - DNA, 25 bp, Homo sapien
tctctgcaaagtagctgtggaggtt

SEQ ID NO: 3670684 - DNA, 25 bp, Homo sapien
ctgtggaggttttgggtgcatttca

SEQ ID NO: 3670685 - DNA, 25 bp, Homo sapien
cttcatggcatagtagagtctctct

SEQ ID NO: 3670686 - DNA, 25 bp, Homo sapien
gagtctctctgcaaagtagctgtgg

SEQ ID NO: 3670687 - DNA, 25 bp, Homo sapien
taactcccccgtgtggaggatcgtg

SEQ ID NO: 3670688 - DNA, 25 bp, Homo sapien
tggagatgcagcgtccctttcccag

SEQ ID NO: 3670689 - DNA, 25 bp, Homo sapien
gactcaatttcacctccgagaacta

SEQ ID NO: 3670690 - DNA, 25 bp, Homo sapien
ctttctgatccacgacaggtttggg

SEQ ID NO: 3670691 - DNA, 25 bp, Homo sapien
tggtttgccacatcagattctagac

SEQ ID NO: 3670692 - DNA, 25 bp, Homo sapien
tatgatgccaagtgctccaaactgc

SEQ ID NO: 3670693 - DNA, 25 bp, Homo sapien
cttcagccagggaagcattaggagg

SEQ ID NO: 3670694 - DNA, 25 bp, Homo sapien
aagctttggtggcttagggtgtcca

SEQ ID NO: 3670695 - DNA, 25 bp, Homo sapien
tgtccatctctgagtgatggacgga

SEQ ID NO: 3670696 - DNA, 25 bp, Homo sapien
catctctgagtgatggacggatctg

SEQ ID NO: 3670697 - DNA, 25 bp, Homo sapien
ctctgagtgatggacggatctgtgt

SEQ ID NO: 3670698 - DNA, 25 bp, Homo sapien
tcctgtccatctctgagtgatggac

SEQ ID NO: 3670699 - DNA, 25 bp, Homo sapien
gcagccatcaacaatcctgcctcac

SEQ ID NO: 3670700 - DNA, 25 bp, Homo sapien
tcttatcagggtcccatcacgcgtc

SEQ ID NO: 3670701 - DNA, 25 bp, Homo sapien
tctcgctccttgaaacgatgtttct

SEQ ID NO: 3670702 - DNA, 25 bp, Homo sapien
tgaaacgatgtttcttatcagggtc

SEQ ID NO: 3670703 - DNA, 25 bp, Homo sapien
aagtcaatctcgctccttgaaacga

SEQ ID NO: 3670704 - DNA, 25 bp, Homo sapien
tgtggtccgatgactgaggagccct

SEQ ID NO: 3670705 - DNA, 25 bp, Homo sapien
gaaatgggccaggtcagatcaccca

SEQ ID NO: 3670706 - DNA, 25 bp, Homo sapien
tctggctcacatcgggtccacagtg

SEQ ID NO: 3670707 - DNA, 25 bp, Homo sapien
tggaccatcgcaccctgacggtgtg

SEQ ID NO: 3670708 - DNA, 25 bp, Homo sapien
cagcttgggaatcaaggctgagagt

SEQ ID NO: 3670709 - DNA, 25 bp, Homo sapien
aggctgagagtgaggcatcagcaca

SEQ ID NO: 3670710 - DNA, 25 bp, Homo sapien
gctgtggcagcttgggaatcaaggc

SEQ ID NO: 3670711 - DNA, 25 bp, Homo sapien
ctgagagtgaggcatcagcacacac

SEQ ID NO: 3670712 - DNA, 25 bp, Homo sapien
gcaggaggcgcataagcgtgagaag

SEQ ID NO: 3670713 - DNA, 25 bp, Homo sapien
gggcaggaggcgcataagcgtgaga

SEQ ID NO: 3670714 - DNA, 25 bp, Homo sapien
gtgggcaggaggcgcataagcgtga

SEQ ID NO: 3670715 - DNA, 25 bp, Homo sapien
ctgtgggcaggaggcgcataagcgt

SEQ ID NO: 3670716 - DNA, 25 bp, Homo sapien
ggctcagcagggcgttcttgtagtc

SEQ ID NO: 3670717 - DNA, 25 bp, Homo sapien
aggctcagcagggcgttcttgtagt

SEQ ID NO: 3670718 - DNA, 25 bp, Homo sapien
caggctcagcagggcgttcttgtag

SEQ ID NO: 3670719 - DNA, 25 bp, Homo sapien
tccatggccgaggttgagtgaggag

SEQ ID NO: 3670720 - DNA, 25 bp, Homo sapien
cgtccatggccgaggttgagtgagg

SEQ ID NO: 3670721 - DNA, 25 bp, Homo sapien
ctgcgtccatggccgaggttgagtg

SEQ ID NO: 3670722 - DNA, 25 bp, Homo sapien
gcgtccatggccgaggttgagtgag

SEQ ID NO: 3670723 - DNA, 25 bp, Homo sapien
ctctgggtcagaaacccggctggaa

SEQ ID NO: 3670724 - DNA, 25 bp, Homo sapien
ccctctgggtcagaaacccggctgg

SEQ ID NO: 3670725 - DNA, 25 bp, Homo sapien
ctgggtcagaaacccggctggaaag

SEQ ID NO: 3670726 - DNA, 25 bp, Homo sapien
tcagaaacccggctggaaagcactg

SEQ ID NO: 3670727 - DNA, 25 bp, Homo sapien
gaaacactaaggttggcattgtgct

SEQ ID NO: 3670728 - DNA, 25 bp, Homo sapien
ttggcattgtgctcacactgggaaa

SEQ ID NO: 3670729 - DNA, 25 bp, Homo sapien
taaggttggcattgtgctcacactg

SEQ ID NO: 3670730 - DNA, 25 bp, Homo sapien
cactaaggttggcattgtgctcaca

SEQ ID NO: 3670731 - DNA, 25 bp, Homo sapien
aaggaatgatccacaagtccccaag

SEQ ID NO: 3670732 - DNA, 25 bp, Homo sapien
ccaggagactctgtgaccagcttgg

SEQ ID NO: 3670733 - DNA, 25 bp, Homo sapien
aggaatgatccacaagtccccaagc

SEQ ID NO: 3670734 - DNA, 25 bp, Homo sapien
ggagactctgtgaccagcttgggaa

SEQ ID NO: 3670735 - DNA, 25 bp, Homo sapien
gaagtgttttgtaagacgcttgtta

SEQ ID NO: 3670736 - DNA, 25 bp, Homo sapien
accctgtttcagtagatgggaatgg

SEQ ID NO: 3670737 - DNA, 25 bp, Homo sapien
agaagtgttttgtaagacgcttgtt

SEQ ID NO: 3670738 - DNA, 25 bp, Homo sapien
gaccctgtttcagtagatgggaatg

SEQ ID NO: 3670739 - DNA, 25 bp, Homo sapien
ggagcccacgcctcttataacacag

SEQ ID NO: 3670740 - DNA, 25 bp, Homo sapien
ggtacccagtctcagttgccgttca

SEQ ID NO: 3670741 - DNA, 25 bp, Homo sapien
tgctgagggcatggtcacacccttc

SEQ ID NO: 3670742 - DNA, 25 bp, Homo sapien
gaatttttcgtccatttagagccta

SEQ ID NO: 3670743 - DNA, 25 bp, Homo sapien
aagccagaggcttacgaaagccggg

SEQ ID NO: 3670744 - DNA, 25 bp, Homo sapien
agccagaggcttacgaaagccgggt

SEQ ID NO: 3670745 - DNA, 25 bp, Homo sapien
tgcctgtccctgtaaagcttcccca

SEQ ID NO: 3670746 - DNA, 25 bp, Homo sapien
cccagaattccgtggaagatgccca

SEQ ID NO: 3670747 - DNA, 25 bp, Homo sapien
cttggccaaataccacgagggaact

SEQ ID NO: 3670748 - DNA, 25 bp, Homo sapien
ttcagtcaaggctgagcgccaggca

SEQ ID NO: 3670749 - DNA, 25 bp, Homo sapien
atgggccaggaacacgggtagtcac

SEQ ID NO: 3670750 - DNA, 25 bp, Homo sapien
taaaaacctaaggatggactcgctg

SEQ ID NO: 3670751 - DNA, 25 bp, Homo sapien
tttgtggatgtgtatgcgcttctca

SEQ ID NO: 3670752 - DNA, 25 bp, Homo sapien
gcgcttctcatgtgtgtactggcat

SEQ ID NO: 3670753 - DNA, 25 bp, Homo sapien
ggactcgctggataatataataggg

SEQ ID NO: 3670754 - DNA, 25 bp, Homo sapien
aagatttacaacactctagcacccc

SEQ ID NO: 3670755 - DNA, 25 bp, Homo sapien
cactgtaagatttacaacactctag

SEQ ID NO: 3670756 - DNA, 25 bp, Homo sapien
tttgtcaaatgcctgcactcctgtc

SEQ ID NO: 3670757 - DNA, 25 bp, Homo sapien
tcatgcccccttcagctaacctcta

SEQ ID NO: 3670758 - DNA, 25 bp, Homo sapien
gctgggcattctggcctggatgtcc

SEQ ID NO: 3670759 - DNA, 25 bp, Homo sapien
ccacagggatcatgagcagggggtc

SEQ ID NO: 3670760 - DNA, 25 bp, Homo sapien
gggcattctggcctggatgtccctg

SEQ ID NO: 3670761 - DNA, 25 bp, Homo sapien
cagggatcatgagcagggggtcact

SEQ ID NO: 3670762 - DNA, 25 bp, Homo sapien
gtgctgctccgtggtatttgttcca

SEQ ID NO: 3670763 - DNA, 25 bp, Homo sapien
catgcagctagagggtccagtgagc

SEQ ID NO: 3670764 - DNA, 25 bp, Homo sapien
gagtcccctagagtcccgtaagcag

SEQ ID NO: 3670765 - DNA, 25 bp, Homo sapien
tcctgagtagtttgaggagagtccc

SEQ ID NO: 3670766 - DNA, 25 bp, Homo sapien
tagagtcccgtaagcagcaacttct

SEQ ID NO: 3670767 - DNA, 25 bp, Homo sapien
gggccccttgctagatatagggagg

SEQ ID NO: 3670768 - DNA, 25 bp, Homo sapien
ggggccccttgctagatatagggag

SEQ ID NO: 3670769 - DNA, 25 bp, Homo sapien
gccccttgctagatatagggaggtg

SEQ ID NO: 3670770 - DNA, 25 bp, Homo sapien
ggccccttgctagatatagggaggt

SEQ ID NO: 3670771 - DNA, 25 bp, Homo sapien
cagccgtgttctcgggctggagagg

SEQ ID NO: 3670772 - DNA, 25 bp, Homo sapien
aaggacagccgtgttctcgggctgg

SEQ ID NO: 3670773 - DNA, 25 bp, Homo sapien
gtgtgagctgcaggacgatgctgtc

SEQ ID NO: 3670774 - DNA, 25 bp, Homo sapien
gcagcactcccctgcctagtgtgag

SEQ ID NO: 3670775 - DNA, 25 bp, Homo sapien
cacagcccgccttgaaggtgtgaca

SEQ ID NO: 3670776 - DNA, 25 bp, Homo sapien
acccacagcccgccttgaaggtgtg

SEQ ID NO: 3670777 - DNA, 25 bp, Homo sapien
cccacagcccgccttgaaggtgtga

SEQ ID NO: 3670778 - DNA, 25 bp, Homo sapien
tcacccacagcccgccttgaaggtg

SEQ ID NO: 3670779 - DNA, 25 bp, Homo sapien
cctccacttcttcatcatatacacg

SEQ ID NO: 3670780 - DNA, 25 bp, Homo sapien
cctcagccttgagtactggctcctc

SEQ ID NO: 3670781 - DNA, 25 bp, Homo sapien
tcagccttgagtactggctcctcca

SEQ ID NO: 3670782 - DNA, 25 bp, Homo sapien
tgcctcagccttgagtactggctcc

SEQ ID NO: 3670783 - DNA, 25 bp, Homo sapien
ttagcatcatcttcctcggagtctg

SEQ ID NO: 3670784 - DNA, 25 bp, Homo sapien
gcccattagcatcatcttcctcgga

SEQ ID NO: 3670785 - DNA, 25 bp, Homo sapien
ggatcagttccacccgcccattagc

SEQ ID NO: 3670786 - DNA, 25 bp, Homo sapien
gttccacccgcccattagcatcatc

SEQ ID NO: 3670787 - DNA, 25 bp, Homo sapien
tttgacccaatgagatatggtaaag

SEQ ID NO: 3670788 - DNA, 25 bp, Homo sapien
caatgagatatggtaaaggacgatc

SEQ ID NO: 3670789 - DNA, 25 bp, Homo sapien
catcttcttgttccatgaacagctt

SEQ ID NO: 3670790 - DNA, 25 bp, Homo sapien
ggtaaaggacgatcaatgtatagat

SEQ ID NO: 3670791 - DNA, 25 bp, Homo sapien
ctcagtgtccacaatactgccacga

SEQ ID NO: 3670792 - DNA, 25 bp, Homo sapien
gtccacaatactgccacgatcactg

SEQ ID NO: 3670793 - DNA, 25 bp, Homo sapien
actgccacgatcactgcctacagag

SEQ ID NO: 3670794 - DNA, 25 bp, Homo sapien
acaatactgccacgatcactgccta

SEQ ID NO: 3670795 - DNA, 25 bp, Homo sapien
gacctggtcataccaaacagccctt

SEQ ID NO: 3670796 - DNA, 25 bp, Homo sapien
cgtgacctggtcataccaaacagcc

SEQ ID NO: 3670797 - DNA, 25 bp, Homo sapien
acctggtcataccaaacagccctta

SEQ ID NO: 3670798 - DNA, 25 bp, Homo sapien
tgacctggtcataccaaacagccct

SEQ ID NO: 3670799 - DNA, 25 bp, Homo sapien
cctgctgtcaggtttttctttggag

SEQ ID NO: 3670800 - DNA, 25 bp, Homo sapien
ttcctgctgtcaggtttttctttgg

SEQ ID NO: 3670801 - DNA, 25 bp, Homo sapien
tcatttcctgctgtcaggtttttct

SEQ ID NO: 3670802 - DNA, 25 bp, Homo sapien
atttcctgctgtcaggtttttcttt

SEQ ID NO: 3670803 - DNA, 25 bp, Homo sapien
actatgatgggcaaaatcttcatct

SEQ ID NO: 3670804 - DNA, 25 bp, Homo sapien
attgtcactatgatgggcaaaatct

SEQ ID NO: 3670805 - DNA, 25 bp, Homo sapien
ccggttttgttcattgtcactatga

SEQ ID NO: 3670806 - DNA, 25 bp, Homo sapien
ttgttcattgtcactatgatgggca

SEQ ID NO: 3670807 - DNA, 25 bp, Homo sapien
agtcagcgaaaaggtcacagccatc

SEQ ID NO: 3670808 - DNA, 25 bp, Homo sapien
tccttctcagagtcagcgaaaaggt

SEQ ID NO: 3670809 - DNA, 25 bp, Homo sapien
cttctcagagtcagcgaaaaggtca

SEQ ID NO: 3670810 - DNA, 25 bp, Homo sapien
tcctccttctcagagtcagcgaaaa

SEQ ID NO: 3670811 - DNA, 25 bp, Homo sapien
catctgcaaacgatgtaggtctgct

SEQ ID NO: 3670812 - DNA, 25 bp, Homo sapien
cagctcatctgcaaacgatgtaggt

SEQ ID NO: 3670813 - DNA, 25 bp, Homo sapien
gctcatctgcaaacgatgtaggtct

SEQ ID NO: 3670814 - DNA, 25 bp, Homo sapien
tcatctgcaaacgatgtaggtctgc

SEQ ID NO: 3670815 - DNA, 25 bp, Homo sapien
ctttgagtgtcttccgaggttttgc

SEQ ID NO: 3670816 - DNA, 25 bp, Homo sapien
tctctttgagtgtcttccgaggttt

SEQ ID NO: 3670817 - DNA, 25 bp, Homo sapien
cgtctgaaggagttctcctttcctt

SEQ ID NO: 3670818 - DNA, 25 bp, Homo sapien
agtgtcttccgaggttttgcttctc

SEQ ID NO: 3670819 - DNA, 25 bp, Homo sapien
caaatggcgagaagtcctcgtcggt

SEQ ID NO: 3670820 - DNA, 25 bp, Homo sapien
gagccaaatggcgagaagtcctcgt

SEQ ID NO: 3670821 - DNA, 25 bp, Homo sapien
agaagtcctcgtcggtcagcttggg

SEQ ID NO: 3670822 - DNA, 25 bp, Homo sapien
cacctccagagccaaatggcgagaa

SEQ ID NO: 3670823 - DNA, 25 bp, Homo sapien
tccagcttgccgatcctggggggct

SEQ ID NO: 3670824 - DNA, 25 bp, Homo sapien
aacagaggctccagcttgccgatcc

SEQ ID NO: 3670825 - DNA, 25 bp, Homo sapien
cttgccgatcctggggggcttccgt

SEQ ID NO: 3670826 - DNA, 25 bp, Homo sapien
gaggctccagcttgccgatcctggg

SEQ ID NO: 3670827 - DNA, 25 bp, Homo sapien
aaaaatacagaaacagctcctgctg

SEQ ID NO: 3670828 - DNA, 25 bp, Homo sapien
ttctttccaggtttggatgatgaag

SEQ ID NO: 3670829 - DNA, 25 bp, Homo sapien
aaatacagaaacagctcctgctggg

SEQ ID NO: 3670830 - DNA, 25 bp, Homo sapien
attttctttccaggtttggatgatg

SEQ ID NO: 3670831 - DNA, 25 bp, Homo sapien
gaggcagcaccaaacacatccgtgt

SEQ ID NO: 3670832 - DNA, 25 bp, Homo sapien
ggcagcaccaaacacatccgtgtct

SEQ ID NO: 3670833 - DNA, 25 bp, Homo sapien
acggaggcagcaccaaacacatccg

SEQ ID NO: 3670834 - DNA, 25 bp, Homo sapien
gaacggaggcagcaccaaacacatc

SEQ ID NO: 3670835 - DNA, 25 bp, Homo sapien
gaaggtttgctgtggggtgccgaga

SEQ ID NO: 3670836 - DNA, 25 bp, Homo sapien
ttttagaaggtttgctgtggggtgc

SEQ ID NO: 3670837 - DNA, 25 bp, Homo sapien
tttagaaggtttgctgtggggtgcc

SEQ ID NO: 3670838 - DNA, 25 bp, Homo sapien
gcatccgtttgcactctttctagat

SEQ ID NO: 3670839 - DNA, 25 bp, Homo sapien
tccgtttgcactctttctagattaa

SEQ ID NO: 3670840 - DNA, 25 bp, Homo sapien
cactctttctagattaactaggcta

SEQ ID NO: 3670841 - DNA, 25 bp, Homo sapien
attctgcatccgtttgcactctttc

SEQ ID NO: 3670842 - DNA, 25 bp, Homo sapien
aaaataccaaggcataaaatgacac

SEQ ID NO: 3670843 - DNA, 25 bp, Homo sapien
aaaaataccaaggcataaaatgaca

SEQ ID NO: 3670844 - DNA, 25 bp, Homo sapien
taaaatgacactaacgtcaaacatc

SEQ ID NO: 3670845 - DNA, 25 bp, Homo sapien
ataaaatgacactaacgtcaaacat

SEQ ID NO: 3670846 - DNA, 25 bp, Homo sapien
tttcatctgtctgactcacagtggc

SEQ ID NO: 3670847 - DNA, 25 bp, Homo sapien
tcatctgtctgactcacagtggctt

SEQ ID NO: 3670848 - DNA, 25 bp, Homo sapien
tattttcatctgtctgactcacagt

SEQ ID NO: 3670849 - DNA, 25 bp, Homo sapien
atctgtctgactcacagtggcttct

SEQ ID NO: 3670850 - DNA, 25 bp, Homo sapien
tctgaatgctgggccttaggtggtc

SEQ ID NO: 3670851 - DNA, 25 bp, Homo sapien
cacagccaggacacgacacaaagag

SEQ ID NO: 3670852 - DNA, 25 bp, Homo sapien
ccaggacacgacacaaagagacaaa

SEQ ID NO: 3670853 - DNA, 25 bp, Homo sapien
ttaggtggtcggcaggagaaagtca

SEQ ID NO: 3670854 - DNA, 25 bp, Homo sapien
cctcatctgaaaataagcctttttg

SEQ ID NO: 3670855 - DNA, 25 bp, Homo sapien
ctgaaaataagcctttttgagtctt

SEQ ID NO: 3670856 - DNA, 25 bp, Homo sapien
tctgatgagggcttgagatttttgc

SEQ ID NO: 3670857 - DNA, 25 bp, Homo sapien
gatttttgctggaagataaggtaac

SEQ ID NO: 3670858 - DNA, 25 bp, Homo sapien
tcgccttcagtgatagcctcaaagg

SEQ ID NO: 3670859 - DNA, 25 bp, Homo sapien
tgtgagtgcaaagcccaaccatgac

SEQ ID NO: 3670860 - DNA, 25 bp, Homo sapien
cactctacttccaaagggttccatg

SEQ ID NO: 3670861 - DNA, 25 bp, Homo sapien
ggtattctttacatcaagggcaatc

SEQ ID NO: 3670862 - DNA, 25 bp, Homo sapien
acttactcgcactttgagaagaaaa

SEQ ID NO: 3670863 - DNA, 25 bp, Homo sapien
gagatgcaccttttaacttactcgc

SEQ ID NO: 3670864 - DNA, 25 bp, Homo sapien
catcaaacagggaaaccgacgtggg

SEQ ID NO: 3670865 - DNA, 25 bp, Homo sapien
aggcagcagagatgcaccttttaac

SEQ ID NO: 3670866 - DNA, 25 bp, Homo sapien
gcagatgctttctttttggagagct

SEQ ID NO: 3670867 - DNA, 25 bp, Homo sapien
tgctgaacaacagggcagatgcttt

SEQ ID NO: 3670868 - DNA, 25 bp, Homo sapien
aacagggcagatgctttctttttgg

SEQ ID NO: 3670869 - DNA, 25 bp, Homo sapien
acagggcagatgctttctttttgga

SEQ ID NO: 3670870 - DNA, 25 bp, Homo sapien
cctccaacacctgccacgatgtctc

SEQ ID NO: 3670871 - DNA, 25 bp, Homo sapien
ccaacacctgccacgatgtctcttc

SEQ ID NO: 3670872 - DNA, 25 bp, Homo sapien
tccaacacctgccacgatgtctctt

SEQ ID NO: 3670873 - DNA, 25 bp, Homo sapien
caacacctgccacgatgtctcttcc

SEQ ID NO: 3670874 - DNA, 25 bp, Homo sapien
tgtgaagcaggaatattccactggt

SEQ ID NO: 3670875 - DNA, 25 bp, Homo sapien
gtgaagcaggaatattccactggtc

SEQ ID NO: 3670876 - DNA, 25 bp, Homo sapien
ctgtgaagcaggaatattccactgg

SEQ ID NO: 3670877 - DNA, 25 bp, Homo sapien
cttcctcaaagagactggtcttttt

SEQ ID NO: 3670878 - DNA, 25 bp, Homo sapien
ttcctcaaagagactggtctttttc

SEQ ID NO: 3670879 - DNA, 25 bp, Homo sapien
tcctcaaagagactggtctttttca

SEQ ID NO: 3670880 - DNA, 25 bp, Homo sapien
cagcccctggagtgatactgcacag

SEQ ID NO: 3670881 - DNA, 25 bp, Homo sapien
tgaacccataagctaatctggcagc

SEQ ID NO: 3670882 - DNA, 25 bp, Homo sapien
ttggctatgggttatcagcccctgg

SEQ ID NO: 3670883 - DNA, 25 bp, Homo sapien
ggcagcatgttataccaaccacagc

SEQ ID NO: 3670884 - DNA, 25 bp, Homo sapien
ggagtgacactctctgggtcttctt

SEQ ID NO: 3670885 - DNA, 25 bp, Homo sapien
gaggagtgacactctctgggtcttc

SEQ ID NO: 3670886 - DNA, 25 bp, Homo sapien
tcaaagaggagtgacactctctggg

SEQ ID NO: 3670887 - DNA, 25 bp, Homo sapien
gtcttcaaagaggagtgacactctc

SEQ ID NO: 3670888 - DNA, 25 bp, Homo sapien
aattttaatgactccttggcactct

SEQ ID NO: 3670889 - DNA, 25 bp, Homo sapien
gccacatcagttctcccaaatttta

SEQ ID NO: 3670890 - DNA, 25 bp, Homo sapien
acttcactccaagttgtgcctcctt

SEQ ID NO: 3670891 - DNA, 25 bp, Homo sapien
ttcactccaagttgtgcctccttct

SEQ ID NO: 3670892 - DNA, 25 bp, Homo sapien
gcttggttcctttgtcccatgggga

SEQ ID NO: 3670893 - DNA, 25 bp, Homo sapien
aggcttggttcctttgtcccatggg

SEQ ID NO: 3670894 - DNA, 25 bp, Homo sapien
cttggttcctttgtcccatggggat

SEQ ID NO: 3670895 - DNA, 25 bp, Homo sapien
tggttcctttgtcccatggggatga

SEQ ID NO: 3670896 - DNA, 25 bp, Homo sapien
cttggggtgggcatcaggatcgcgg

SEQ ID NO: 3670897 - DNA, 25 bp, Homo sapien
tggggtgggcatcaggatcgcggcc

SEQ ID NO: 3670898 - DNA, 25 bp, Homo sapien
ttggggtgggcatcaggatcgcggc

SEQ ID NO: 3670899 - DNA, 25 bp, Homo sapien
cttcatcctggaagacacctgtgct

SEQ ID NO: 3670900 - DNA, 25 bp, Homo sapien
tcttcatcctggaagacacctgtgc

SEQ ID NO: 3670901 - DNA, 25 bp, Homo sapien
ttttttggtgccagcaaaaaggtca

SEQ ID NO: 3670902 - DNA, 25 bp, Homo sapien
ttttggtgccagcaaaaaggtcaac

SEQ ID NO: 3670903 - DNA, 25 bp, Homo sapien
tttttggtgccagcaaaaaggtcaa

SEQ ID NO: 3670904 - DNA, 25 bp, Homo sapien
cttggcagagctgaaaagatcatca

SEQ ID NO: 3670905 - DNA, 25 bp, Homo sapien
ggcagagctgaaaagatcatcatct

SEQ ID NO: 3670906 - DNA, 25 bp, Homo sapien
atcatccccaaacaggctcccaaca

SEQ ID NO: 3670907 - DNA, 25 bp, Homo sapien
gacttggcagagctgaaaagatcat

SEQ ID NO: 3670908 - DNA, 25 bp, Homo sapien
ttgaaagagtcaacagagtggtctt

SEQ ID NO: 3670909 - DNA, 25 bp, Homo sapien
tgaggtgtttctggcttccatatgc

SEQ ID NO: 3670910 - DNA, 25 bp, Homo sapien
ccttgaatggattcaggatgtttct

SEQ ID NO: 3670911 - DNA, 25 bp, Homo sapien
tccatatgcctttttctttactacc

SEQ ID NO: 3670912 - DNA, 25 bp, Homo sapien
cagagtacggcccaacagcaatgac

SEQ ID NO: 3670913 - DNA, 25 bp, Homo sapien
agactgctgcagagtacggcccaac

SEQ ID NO: 3670914 - DNA, 25 bp, Homo sapien
ctgctgcagagtacggcccaacagc

SEQ ID NO: 3670915 - DNA, 25 bp, Homo sapien
tgcagagtacggcccaacagcaatg

SEQ ID NO: 3670916 - DNA, 25 bp, Homo sapien
ttggttttaaatggagcgagacctg

SEQ ID NO: 3670917 - DNA, 25 bp, Homo sapien
ttgtatcttcccgatccgagtggat

SEQ ID NO: 3670918 - DNA, 25 bp, Homo sapien
taaatggagcgagacctgatgagtc

SEQ ID NO: 3670919 - DNA, 25 bp, Homo sapien
atccgagtggatggttctttggttt

SEQ ID NO: 3670920 - DNA, 25 bp, Homo sapien
caggcacactttccagaccgtggct

SEQ ID NO: 3670921 - DNA, 25 bp, Homo sapien
caaggccgctgggttgatcgctaaa

SEQ ID NO: 3670922 - DNA, 25 bp, Homo sapien
gtgtctgcctgagctggaagatcaa

SEQ ID NO: 3670923 - DNA, 25 bp, Homo sapien
caaaacaggctttacttcagagatc

SEQ ID NO: 3670924 - DNA, 25 bp, Homo sapien
catgggctggcaccgattgcaaagg

SEQ ID NO: 3670925 - DNA, 25 bp, Homo sapien
gaaacagtgtcgctgctgtgggaac

SEQ ID NO: 3670926 - DNA, 25 bp, Homo sapien
caaagctaccatggcaaagaatcag

SEQ ID NO: 3670927 - DNA, 25 bp, Homo sapien
cacagtccattgaggagatcccatg

SEQ ID NO: 3670928 - DNA, 25 bp, Homo sapien
ccatcagcccactgtgcaatgggtc

SEQ ID NO: 3670929 - DNA, 25 bp, Homo sapien
atttggggaaatggcgccatcagcc

SEQ ID NO: 3670930 - DNA, 25 bp, Homo sapien
gggtctgcggtctacgcttccctct

SEQ ID NO: 3670931 - DNA, 25 bp, Homo sapien
agccgcctagctgcacgggtctgcg

SEQ ID NO: 3670932 - DNA, 25 bp, Homo sapien
tgttaatatgacatcctgctgacta

SEQ ID NO: 3670933 - DNA, 25 bp, Homo sapien
tgatctgtaaagaggtcatcctcat

SEQ ID NO: 3670934 - DNA, 25 bp, Homo sapien
accacccactggtgggttggcagga

SEQ ID NO: 3670935 - DNA, 25 bp, Homo sapien
ttggtttagcagactgaaagagatc

SEQ ID NO: 3670936 - DNA, 25 bp, Homo sapien
gcaaagatatcaatgttatcatcaa

SEQ ID NO: 3670937 - DNA, 25 bp, Homo sapien
ttgcttccgtagcaaatatatcatc

SEQ ID NO: 3670938 - DNA, 25 bp, Homo sapien
gagggtttaattgcttccgtagcaa

SEQ ID NO: 3670939 - DNA, 25 bp, Homo sapien
ggtttaattgcttccgtagcaaata

SEQ ID NO: 3670940 - DNA, 25 bp, Homo sapien
ttgccatcaacaggctaatggctaa

SEQ ID NO: 3670941 - DNA, 25 bp, Homo sapien
aacagaaacaactgagattgccatc

SEQ ID NO: 3670942 - DNA, 25 bp, Homo sapien
aacaactgagattgccatcaacagg

SEQ ID NO: 3670943 - DNA, 25 bp, Homo sapien
ccatcaacaggctaatggctaaata

SEQ ID NO: 3670944 - DNA, 25 bp, Homo sapien
gtacttttaagacacatgcaagcaa

SEQ ID NO: 3670945 - DNA, 25 bp, Homo sapien
tacttttaagacacatgcaagcaaa

SEQ ID NO: 3670946 - DNA, 25 bp, Homo sapien
caaagatgttggacaccttgtgttc

SEQ ID NO: 3670947 - DNA, 25 bp, Homo sapien
tcaaatcttggttcaggtgcggcct

SEQ ID NO: 3670948 - DNA, 25 bp, Homo sapien
gtgcggcctgtgcagatcggctttt

SEQ ID NO: 3670949 - DNA, 25 bp, Homo sapien
gtttggttgtcttagcctggatacc

SEQ ID NO: 3670950 - DNA, 25 bp, Homo sapien
ccaagtacattgggtgaacgatgag

SEQ ID NO: 3670951 - DNA, 25 bp, Homo sapien
caagtacattgggtgaacgatgagc

SEQ ID NO: 3670952 - DNA, 25 bp, Homo sapien
accaagtacattgggtgaacgatga

SEQ ID NO: 3670953 - DNA, 25 bp, Homo sapien
ttccctgcccatgaaagccacaaag

SEQ ID NO: 3670954 - DNA, 25 bp, Homo sapien
gaagcatattatggccccagcaagg

SEQ ID NO: 3670955 - DNA, 25 bp, Homo sapien
caaggctaactaaatcaaactgtgg

SEQ ID NO: 3670956 - DNA, 25 bp, Homo sapien
tgctcccatattgctaagactcatg

SEQ ID NO: 3670957 - DNA, 25 bp, Homo sapien
caaaatatgacagtgggggggccac

SEQ ID NO: 3670958 - DNA, 25 bp, Homo sapien
acaaaatatgacagtgggggggcca

SEQ ID NO: 3670959 - DNA, 25 bp, Homo sapien
agcagtctgcctgacaacagcgact

SEQ ID NO: 3670960 - DNA, 25 bp, Homo sapien
gacaacagcgactcggagatctcaa

SEQ ID NO: 3670961 - DNA, 25 bp, Homo sapien
tgctcctccaagaccaagcagggct

SEQ ID NO: 3670962 - DNA, 25 bp, Homo sapien
ttgctcctccaagaccaagcagggc

SEQ ID NO: 3670963 - DNA, 25 bp, Homo sapien
ccaggtacctatacacttgaggcca

SEQ ID NO: 3670964 - DNA, 25 bp, Homo sapien
tacctatacacttgaggccaccaag

SEQ ID NO: 3670965 - DNA, 25 bp, Homo sapien
ggtacctatacacttgaggccacca

SEQ ID NO: 3670966 - DNA, 25 bp, Homo sapien
catccaggtacctatacacttgagg

SEQ ID NO: 3670967 - DNA, 25 bp, Homo sapien
tgcttctcctcaggagtagaaatca

SEQ ID NO: 3670968 - DNA, 25 bp, Homo sapien
caatatcccaaaagaaccaaggttg

SEQ ID NO: 3670969 - DNA, 25 bp, Homo sapien
aaccccgttcagcattaattgtgct

SEQ ID NO: 3670970 - DNA, 25 bp, Homo sapien
gctggaacttccaccgtaagtctgg

SEQ ID NO: 3670971 - DNA, 25 bp, Homo sapien
cagtttctcagatgtagaatgcatc

SEQ ID NO: 3670972 - DNA, 25 bp, Homo sapien
tcgtggaagggtggctgcaagtggc

SEQ ID NO: 3670973 - DNA, 25 bp, Homo sapien
cagatgtagaatgcatcgtggaagg

SEQ ID NO: 3670974 - DNA, 25 bp, Homo sapien
caagtggctttgcttagcatggcca

SEQ ID NO: 3670975 - DNA, 25 bp, Homo sapien
gactgctccgagatgttgactttca

SEQ ID NO: 3670976 - DNA, 25 bp, Homo sapien
agttcatggtcgagatgcccaggga

SEQ ID NO: 3670977 - DNA, 25 bp, Homo sapien
gatgagcaagttcatggtcgagatg

SEQ ID NO: 3670978 - DNA, 25 bp, Homo sapien
agcaagttcatggtcgagatgccca

SEQ ID NO: 3670979 - DNA, 25 bp, Homo sapien
ggccagtgcaggaggatgaaggcca

SEQ ID NO: 3670980 - DNA, 25 bp, Homo sapien
ccagtgcaggaggatgaaggccatg

SEQ ID NO: 3670981 - DNA, 25 bp, Homo sapien
aaggtgaaggccagtgcaggaggat

SEQ ID NO: 3670982 - DNA, 25 bp, Homo sapien
atgaaggtgaaggccagtgcaggag

SEQ ID NO: 3670983 - DNA, 25 bp, Homo sapien
atcatccaatagcagtacaggagtc

SEQ ID NO: 3670984 - DNA, 25 bp, Homo sapien
tcatccaatagcagtacaggagtca

SEQ ID NO: 3670985 - DNA, 25 bp, Homo sapien
ccaatagcagtacaggagtcaggac

SEQ ID NO: 3670986 - DNA, 25 bp, Homo sapien
tagcagtacaggagtcaggactgga

SEQ ID NO: 3670987 - DNA, 25 bp, Homo sapien
cttgaccttgtttctgtccggaagc

SEQ ID NO: 3670988 - DNA, 25 bp, Homo sapien
ttgaccttgtttctgtccggaagca

SEQ ID NO: 3670989 - DNA, 25 bp, Homo sapien
gttctggttgatcccgagcttgctc

SEQ ID NO: 3670990 - DNA, 25 bp, Homo sapien
ttcctcatggacctgtcgaagattt

SEQ ID NO: 3670991 - DNA, 25 bp, Homo sapien
gacctgtcgaagatttcctgctcct

SEQ ID NO: 3670992 - DNA, 25 bp, Homo sapien
ccgagcttgctcaacttgaaggact

SEQ ID NO: 3670993 - DNA, 25 bp, Homo sapien
cgtcaggcagcggaaagtgccagga

SEQ ID NO: 3670994 - DNA, 25 bp, Homo sapien
ggaatgagtccaccgacttgtagct

SEQ ID NO: 3670995 - DNA, 25 bp, Homo sapien
ccgacttgtagctgagctgcaaggg

SEQ ID NO: 3670996 - DNA, 25 bp, Homo sapien
ctgcaagggcgtcaggcagcggaaa

SEQ ID NO: 3670997 - DNA, 25 bp, Homo sapien
tgacagtgaggcagcaccaaacttt

SEQ ID NO: 3670998 - DNA, 25 bp, Homo sapien
tgtactgggcaaatagactattcca

SEQ ID NO: 3670999 - DNA, 25 bp, Homo sapien
ttagagagggcacctaatatggtct

SEQ ID NO: 3671000 - DNA, 25 bp, Homo sapien
ggtaattactgtacagagtgaccca

SEQ ID NO: 3671001 - DNA, 25 bp, Homo sapien
gttgaagctacagtaagcagtgtct

SEQ ID NO: 3671002 - DNA, 25 bp, Homo sapien
taagcagtgtctgtgccactacgct

SEQ ID NO: 3671003 - DNA, 25 bp, Homo sapien
agtaagcagtgtctgtgccactacg

SEQ ID NO: 3671004 - DNA, 25 bp, Homo sapien
agctacagtaagcagtgtctgtgcc

SEQ ID NO: 3671005 - DNA, 25 bp, Homo sapien
agtggaaatcgtacccagcccctcg

SEQ ID NO: 3671006 - DNA, 25 bp, Homo sapien
ggaaatcgtacccagcccctcgaga

SEQ ID NO: 3671007 - DNA, 25 bp, Homo sapien
ccagtggaaatcgtacccagcccct

SEQ ID NO: 3671008 - DNA, 25 bp, Homo sapien
aaatcgtacccagcccctcgagagg

SEQ ID NO: 3671009 - DNA, 25 bp, Homo sapien
tcagatggtcattacttacgggtgg

SEQ ID NO: 3671010 - DNA, 25 bp, Homo sapien
tgagtaagtggcaagagtgttaacg

SEQ ID NO: 3671011 - DNA, 25 bp, Homo sapien
tgaaaagtgagagagtacagctgga

SEQ ID NO: 3671012 - DNA, 25 bp, Homo sapien
tccccatgctgaatgtctgaatttt

SEQ ID NO: 3671013 - DNA, 25 bp, Homo sapien
cgctcctcgggagcaaagatgaccc

SEQ ID NO: 3671014 - DNA, 25 bp, Homo sapien
cacacacgagcggaaacagaaagtc

SEQ ID NO: 3671015 - DNA, 25 bp, Homo sapien
tcttccgtgccatgcaataagggct

SEQ ID NO: 3671016 - DNA, 25 bp, Homo sapien
gattcggctcaggtctaagtcgcct

SEQ ID NO: 3671017 - DNA, 25 bp, Homo sapien
tcaaggaacactggccgggagttag

SEQ ID NO: 3671018 - DNA, 25 bp, Homo sapien
tgcagctttgggtccaccgtttttc

SEQ ID NO: 3671019 - DNA, 25 bp, Homo sapien
ctttgcagctttgggtccaccgttt

SEQ ID NO: 3671020 - DNA, 25 bp, Homo sapien
ttcttagtctcctagctggagatcc

SEQ ID NO: 3671021 - DNA, 25 bp, Homo sapien
tttctttgcagctttgggtccaccg

SEQ ID NO: 3671022 - DNA, 25 bp, Homo sapien
ctgtgaaaggatcgagacatccaca

SEQ ID NO: 3671023 - DNA, 25 bp, Homo sapien
aaaagcattggcatttctcttctgg

SEQ ID NO: 3671024 - DNA, 25 bp, Homo sapien
aaggatcgagacatccacacagcag

SEQ ID NO: 3671025 - DNA, 25 bp, Homo sapien
gactgaactgcaaaagcattggcat

SEQ ID NO: 3671026 - DNA, 25 bp, Homo sapien
ttagtaaaagccacacagcatgcat

SEQ ID NO: 3671027 - DNA, 25 bp, Homo sapien
aaaagccacacagcatgcatctcca

SEQ ID NO: 3671028 - DNA, 25 bp, Homo sapien
gtaaaagccacacagcatgcatctc

SEQ ID NO: 3671029 - DNA, 25 bp, Homo sapien
tagtaaaagccacacagcatgcatc

SEQ ID NO: 3671030 - DNA, 25 bp, Homo sapien
ccaggtgaagttccgaatgaggcat

SEQ ID NO: 3671031 - DNA, 25 bp, Homo sapien
cgtcaccactaccggtattggtggc

SEQ ID NO: 3671032 - DNA, 25 bp, Homo sapien
tcaccactaccggtattggtggcgg

SEQ ID NO: 3671033 - DNA, 25 bp, Homo sapien
ccactaccggtattggtggcggctc

SEQ ID NO: 3671034 - DNA, 25 bp, Homo sapien
cagggcctctgatctcggtgaactt

SEQ ID NO: 3671035 - DNA, 25 bp, Homo sapien
cacgatcgtcacagggcctctgatc

SEQ ID NO: 3671036 - DNA, 25 bp, Homo sapien
ctgacacgatcgtcacagggcctct

SEQ ID NO: 3671037 - DNA, 25 bp, Homo sapien
tcgtcacagggcctctgatctcggt

SEQ ID NO: 3671038 - DNA, 25 bp, Homo sapien
cactatcgctaaaaacatcctcaaa

SEQ ID NO: 3671039 - DNA, 25 bp, Homo sapien
tgtattcccactatcgctaaaaaca

SEQ ID NO: 3671040 - DNA, 25 bp, Homo sapien
ttcctgtattcccactatcgctaaa

SEQ ID NO: 3671041 - DNA, 25 bp, Homo sapien
ttcccactatcgctaaaaacatcct

SEQ ID NO: 3671042 - DNA, 25 bp, Homo sapien
gtttacaggagtgtaccagaagttc

SEQ ID NO: 3671043 - DNA, 25 bp, Homo sapien
tacaggagtgtaccagaagttcatt

SEQ ID NO: 3671044 - DNA, 25 bp, Homo sapien
caggagtgtaccagaagttcatttt

SEQ ID NO: 3671045 - DNA, 25 bp, Homo sapien
agttcatttttataggcaaaaactg

SEQ ID NO: 3671046 - DNA, 25 bp, Homo sapien
tcatcatgttaatgtcacacccaca

SEQ ID NO: 3671047 - DNA, 25 bp, Homo sapien
gatcaatcatcatgttaatgtcaca

SEQ ID NO: 3671048 - DNA, 25 bp, Homo sapien
gccagatcaatcatcatgttaatgt

SEQ ID NO: 3671049 - DNA, 25 bp, Homo sapien
catgttaatgtcacacccacattca

SEQ ID NO: 3671050 - DNA, 25 bp, Homo sapien
tgtaaaagatcatagaatatcagag

SEQ ID NO: 3671051 - DNA, 25 bp, Homo sapien
aatgtaaaagatcatagaatatcag

SEQ ID NO: 3671052 - DNA, 25 bp, Homo sapien
aaagatcatagaatatcagagatag

SEQ ID NO: 3671053 - DNA, 25 bp, Homo sapien
gatcatagaatatcagagatagtga

SEQ ID NO: 3671054 - DNA, 25 bp, Homo sapien
tatataaaggtctgcagggacctga

SEQ ID NO: 3671055 - DNA, 25 bp, Homo sapien
gaagtgacggatctctgaattaccc

SEQ ID NO: 3671056 - DNA, 25 bp, Homo sapien
gaaaatgcgcattgtgtgtaccgtg

SEQ ID NO: 3671057 - DNA, 25 bp, Homo sapien
tctcaatgatggttaagaggctggg

SEQ ID NO: 3671058 - DNA, 25 bp, Homo sapien
taatttgtataactcaattgctcag

SEQ ID NO: 3671059 - DNA, 25 bp, Homo sapien
ttttttgctgggaagtatacaatgg

SEQ ID NO: 3671060 - DNA, 25 bp, Homo sapien
gggaagtatacaatggaaacctcta

SEQ ID NO: 3671061 - DNA, 25 bp, Homo sapien
tgtataactcaattgctcagaaata

SEQ ID NO: 3671062 - DNA, 25 bp, Homo sapien
cccaaagctggcatctataagcatc

SEQ ID NO: 3671063 - DNA, 25 bp, Homo sapien
caaagctggcatctataagcatcag

SEQ ID NO: 3671064 - DNA, 25 bp, Homo sapien
agctggcatctataagcatcagtac

SEQ ID NO: 3671065 - DNA, 25 bp, Homo sapien
caaacccaaagctggcatctataag

SEQ ID NO: 3671066 - DNA, 25 bp, Homo sapien
taaaatggcccagattgtggatttc

SEQ ID NO: 3671067 - DNA, 25 bp, Homo sapien
ccattccagaaaggtagaacagttt

SEQ ID NO: 3671068 - DNA, 25 bp, Homo sapien
cagaaaggtagaacagtttggcaac

SEQ ID NO: 3671069 - DNA, 25 bp, Homo sapien
tccatgcaccattccagaaaggtag

SEQ ID NO: 3671070 - DNA, 25 bp, Homo sapien
ggatataagggtgaaaagtttgcca

SEQ ID NO: 3671071 - DNA, 25 bp, Homo sapien
taagggtgaaaagtttgccatgaga

SEQ ID NO: 3671072 - DNA, 25 bp, Homo sapien
tgccaggatataagggtgaaaagtt

SEQ ID NO: 3671073 - DNA, 25 bp, Homo sapien
ggtgaaaagtttgccatgagaggcc

SEQ ID NO: 3671074 - DNA, 25 bp, Homo sapien
ggaagcaccgttcaccatccagcag

SEQ ID NO: 3671075 - DNA, 25 bp, Homo sapien
gtccactaagcacatcacttaggaa

SEQ ID NO: 3671076 - DNA, 25 bp, Homo sapien
ttgtccactaagcacatcacttagg

SEQ ID NO: 3671077 - DNA, 25 bp, Homo sapien
actcttgtccactaagcacatcact

SEQ ID NO: 3671078 - DNA, 25 bp, Homo sapien
tcttgtccactaagcacatcactta

SEQ ID NO: 3671079 - DNA, 25 bp, Homo sapien
gcagaaacgaatgccaaagttccta

SEQ ID NO: 3671080 - DNA, 25 bp, Homo sapien
aactcaatcatacagcagaaacgaa

SEQ ID NO: 3671081 - DNA, 25 bp, Homo sapien
gaaacgaatgccaaagttcctatac

SEQ ID NO: 3671082 - DNA, 25 bp, Homo sapien
atcatacagcagaaacgaatgccaa

SEQ ID NO: 3671083 - DNA, 25 bp, Homo sapien
tgatgtttgtttggatatcctccgg

SEQ ID NO: 3671084 - DNA, 25 bp, Homo sapien
cttttatctttgaagtgtgctcctc

SEQ ID NO: 3671085 - DNA, 25 bp, Homo sapien
cacctgccggtcacatttgatgttt

SEQ ID NO: 3671086 - DNA, 25 bp, Homo sapien
cataaagtgacacctgccggtcaca

SEQ ID NO: 3671087 - DNA, 25 bp, Homo sapien
ggaacagtggccctctagctacaag

SEQ ID NO: 3671088 - DNA, 25 bp, Homo sapien
tcagagaagagggattcggtaacac

SEQ ID NO: 3671089 - DNA, 25 bp, Homo sapien
gaacagtggccctctagctacaaga

SEQ ID NO: 3671090 - DNA, 25 bp, Homo sapien
gggattcggtaacacctttgcaggc

SEQ ID NO: 3671091 - DNA, 25 bp, Homo sapien
gctgctccttcttatttaaacagca

SEQ ID NO: 3671092 - DNA, 25 bp, Homo sapien
gctccttcttatttaaacagcactt

SEQ ID NO: 3671093 - DNA, 25 bp, Homo sapien
agaaacaggcacataaaccagctgc

SEQ ID NO: 3671094 - DNA, 25 bp, Homo sapien
aaacaggcacataaaccagctgctc

SEQ ID NO: 3671095 - DNA, 25 bp, Homo sapien
cagcgtctttgtcatacagcacacc

SEQ ID NO: 3671096 - DNA, 25 bp, Homo sapien
agcgtctttgtcatacagcacaccc

SEQ ID NO: 3671097 - DNA, 25 bp, Homo sapien
ctctgacccaagtggtttggaattg

SEQ ID NO: 3671098 - DNA, 25 bp, Homo sapien
ctgacccaagtggtttggaattgga

SEQ ID NO: 3671099 - DNA, 25 bp, Homo sapien
tctgacccaagtggtttggaattgg

SEQ ID NO: 3671100 - DNA, 25 bp, Homo sapien
gactctgctctagtgtttcggccat

SEQ ID NO: 3671101 - DNA, 25 bp, Homo sapien
aagatggcgtggtatttgaggaata

SEQ ID NO: 3671102 - DNA, 25 bp, Homo sapien
aaagcaacctatggaagatggcgtg

SEQ ID NO: 3671103 - DNA, 25 bp, Homo sapien
gaaacctacccatgggagataatac

SEQ ID NO: 3671104 - DNA, 25 bp, Homo sapien
aacactggtaacaataaaatcatga

SEQ ID NO: 3671105 - DNA, 25 bp, Homo sapien
catgattacataaagactgtataga

SEQ ID NO: 3671106 - DNA, 25 bp, Homo sapien
gaactcgtccctagaacagaacaaa

SEQ ID NO: 3671107 - DNA, 25 bp, Homo sapien
tagaatacaggaataacaggccagg

SEQ ID NO: 3671108 - DNA, 25 bp, Homo sapien
gcattcgaccagttttcaagtctat

SEQ ID NO: 3671109 - DNA, 25 bp, Homo sapien
tttttcctcctttggcatcaacagc

SEQ ID NO: 3671110 - DNA, 25 bp, Homo sapien
cattcgaccagttttcaagtctatt

SEQ ID NO: 3671111 - DNA, 25 bp, Homo sapien
ctatttgtttttcctcctttggcat

SEQ ID NO: 3671112 - DNA, 25 bp, Homo sapien
agaaaggagagaagacgttcgcaca

SEQ ID NO: 3671113 - DNA, 25 bp, Homo sapien
aagacgttcgcacagaatcatctcc

SEQ ID NO: 3671114 - DNA, 25 bp, Homo sapien
aaaggagagaagacgttcgcacaga

SEQ ID NO: 3671115 - DNA, 25 bp, Homo sapien
gagagaagacgttcgcacagaatca

SEQ ID NO: 3671116 - DNA, 25 bp, Homo sapien
gacatactgagagtactgctcagct

SEQ ID NO: 3671117 - DNA, 25 bp, Homo sapien
tatgccatgctctacttcacaagtt

SEQ ID NO: 3671118 - DNA, 25 bp, Homo sapien
tgcctaggcctgattctgatgatcc

SEQ ID NO: 3671119 - DNA, 25 bp, Homo sapien
tgatgatccctgacaatgagcactg

SEQ ID NO: 3671120 - DNA, 25 bp, Homo sapien
atattatcaagaaatgaacaagaga

SEQ ID NO: 3671121 - DNA, 25 bp, Homo sapien
aatctgccaggctttcattctgaca

SEQ ID NO: 3671122 - DNA, 25 bp, Homo sapien
ttaatctgccaggctttcattctga

SEQ ID NO: 3671123 - DNA, 25 bp, Homo sapien
tattatcaagaaatgaacaagagat

SEQ ID NO: 3671124 - DNA, 25 bp, Homo sapien
gtgcacacactgatgcccctagatt

SEQ ID NO: 3671125 - DNA, 25 bp, Homo sapien
acacaggcacttccgcattcacaag

SEQ ID NO: 3671126 - DNA, 25 bp, Homo sapien
ccagccaccggattctttattaaga

SEQ ID NO: 3671127 - DNA, 25 bp, Homo sapien
cattcttgagcacaactatgcacac

SEQ ID NO: 3671128 - DNA, 25 bp, Homo sapien
atctaatccccataacagaaaattt

SEQ ID NO: 3671129 - DNA, 25 bp, Homo sapien
gatatctaatccccataacagaaaa

SEQ ID NO: 3671130 - DNA, 25 bp, Homo sapien
acatggatactggatatctaatccc

SEQ ID NO: 3671131 - DNA, 25 bp, Homo sapien
catggatactggatatctaatcccc

SEQ ID NO: 3671132 - DNA, 25 bp, Homo sapien
ggaacctctcaaactgaaccatgga

SEQ ID NO: 3671133 - DNA, 25 bp, Homo sapien
tattaacgaaaatcgactggccatg

SEQ ID NO: 3671134 - DNA, 25 bp, Homo sapien
cgagaaaaaagatcccctagagcct

SEQ ID NO: 3671135 - DNA, 25 bp, Homo sapien
cctctagagatgaaggtagcctttc

SEQ ID NO: 3671136 - DNA, 25 bp, Homo sapien
ccaagaggcagaacgtggggatgac

SEQ ID NO: 3671137 - DNA, 25 bp, Homo sapien
tgctaagaagctgtgggctatgatg

SEQ ID NO: 3671138 - DNA, 25 bp, Homo sapien
ctaagaagctgtgggctatgatgcc

SEQ ID NO: 3671139 - DNA, 25 bp, Homo sapien
gctgtgggctatgatgccttgggac

SEQ ID NO: 3671140 - DNA, 25 bp, Homo sapien
tgatgagtcatcaaatgggagaaat

SEQ ID NO: 3671141 - DNA, 25 bp, Homo sapien
agctgatgagtcatcaaatgggaga

SEQ ID NO: 3671142 - DNA, 25 bp, Homo sapien
gctagaaagccatgtgggggcagct

SEQ ID NO: 3671143 - DNA, 25 bp, Homo sapien
ctgtgagctagaaagccatgtgggg

SEQ ID NO: 3671144 - DNA, 25 bp, Homo sapien
gacagcactgtctgatcctggtcca

SEQ ID NO: 3671145 - DNA, 25 bp, Homo sapien
ggccacttcaccagaacctctgtgt

SEQ ID NO: 3671146 - DNA, 25 bp, Homo sapien
aagccctctgggttaactgagtgct

SEQ ID NO: 3671147 - DNA, 25 bp, Homo sapien
tctggagccccttatcagatggcca

SEQ ID NO: 3671148 - DNA, 25 bp, Homo sapien
cctgagcccgctgaaactgcagtta

SEQ ID NO: 3671149 - DNA, 25 bp, Homo sapien
aataagctagttctgacccaactgg

SEQ ID NO: 3671150 - DNA, 25 bp, Homo sapien
tggttggagccagttcgattaaagc

SEQ ID NO: 3671151 - DNA, 25 bp, Homo sapien
acccaactggcaagaagcggcagga

SEQ ID NO: 3671152 - DNA, 25 bp, Homo sapien
tcatgtcagaaaaagtaccccacct

SEQ ID NO: 3671153 - DNA, 25 bp, Homo sapien
atatatcccattaggcaagagccca

SEQ ID NO: 3671154 - DNA, 25 bp, Homo sapien
gagtctaagagttcaaaagaagcct

SEQ ID NO: 3671155 - DNA, 25 bp, Homo sapien
caaaaagtggtcagagatatcatca

SEQ ID NO: 3671156 - DNA, 25 bp, Homo sapien
ttttcacaaggtttgagtctgaact

SEQ ID NO: 3671157 - DNA, 25 bp, Homo sapien
tttttcacaaggtttgagtctgaac

SEQ ID NO: 3671158 - DNA, 25 bp, Homo sapien
tttcacaaggtttgagtctgaactg

SEQ ID NO: 3671159 - DNA, 25 bp, Homo sapien
gtccttggagagacactgactgaag

SEQ ID NO: 3671160 - DNA, 25 bp, Homo sapien
tccttggagagacactgactgaagc

SEQ ID NO: 3671161 - DNA, 25 bp, Homo sapien
tagtccttggagagacactgactga

SEQ ID NO: 3671162 - DNA, 25 bp, Homo sapien
gtttagtccttggagagacactgac

SEQ ID NO: 3671163 - DNA, 25 bp, Homo sapien
gtttcagcttaaagcaagaataatc

SEQ ID NO: 3671164 - DNA, 25 bp, Homo sapien
ggctacaatctgcattaatagtgtc

SEQ ID NO: 3671165 - DNA, 25 bp, Homo sapien
aatcttcaggacctagaggctacaa

SEQ ID NO: 3671166 - DNA, 25 bp, Homo sapien
gataattcttgtagacttgagatga

SEQ ID NO: 3671167 - DNA, 25 bp, Homo sapien
gatttgcacggcattaagtgaagct

SEQ ID NO: 3671168 - DNA, 25 bp, Homo sapien
tccggatcagggacagattagcttt

SEQ ID NO: 3671169 - DNA, 25 bp, Homo sapien
cactagagctatttctggtaaagga

SEQ ID NO: 3671170 - DNA, 25 bp, Homo sapien
gagaaaggaccatgtgacactagag

SEQ ID NO: 3671171 - DNA, 25 bp, Homo sapien
taaatcaagccattaagcgtaactg

SEQ ID NO: 3671172 - DNA, 25 bp, Homo sapien
tataaatctctgtaggctaagtcca

SEQ ID NO: 3671173 - DNA, 25 bp, Homo sapien
gactgccttgagaagttgtgtatag

SEQ ID NO: 3671174 - DNA, 25 bp, Homo sapien
gagcaactttgaatctatggttaca

SEQ ID NO: 3671175 - DNA, 25 bp, Homo sapien
gaaatagtcccaactctcaatgagt

SEQ ID NO: 3671176 - DNA, 25 bp, Homo sapien
caggcactgtatgtgtgaaatagtc

SEQ ID NO: 3671177 - DNA, 25 bp, Homo sapien
tatgaacctgggatacaaacccacc

SEQ ID NO: 3671178 - DNA, 25 bp, Homo sapien
tttctgagaccatactgctggacag

SEQ ID NO: 3671179 - DNA, 25 bp, Homo sapien
cactgtgctatgctcatttaaccct

SEQ ID NO: 3671180 - DNA, 25 bp, Homo sapien
tgaattccccaattgcttaagcatg

SEQ ID NO: 3671181 - DNA, 25 bp, Homo sapien
gaatactcgacatctggcaagtagt

SEQ ID NO: 3671182 - DNA, 25 bp, Homo sapien
ccataaagtggcttaccacagtcct

SEQ ID NO: 3671183 - DNA, 25 bp, Homo sapien
ctagggtgcacacgacaggtcagta

SEQ ID NO: 3671184 - DNA, 25 bp, Homo sapien
tagggtgcacacgacaggtcagtat

SEQ ID NO: 3671185 - DNA, 25 bp, Homo sapien
tgcacacgacaggtcagtatgttcc

SEQ ID NO: 3671186 - DNA, 25 bp, Homo sapien
acacgacaggtcagtatgttcccca

SEQ ID NO: 3671187 - DNA, 25 bp, Homo sapien
tctcagattcagagggacacaccga

SEQ ID NO: 3671188 - DNA, 25 bp, Homo sapien
tgtggaggtcctcaccaacttcaac

SEQ ID NO: 3671189 - DNA, 25 bp, Homo sapien
gcatgtggaggtcctcaccaacttc

SEQ ID NO: 3671190 - DNA, 25 bp, Homo sapien
gccatgggcgctcctgccatcctgt

SEQ ID NO: 3671191 - DNA, 25 bp, Homo sapien
tattgtgcttgcctctggattggca

SEQ ID NO: 3671192 - DNA, 25 bp, Homo sapien
gagttcctctggaatattgtgcttg

SEQ ID NO: 3671193 - DNA, 25 bp, Homo sapien
cttgcctctggattggcagaaaggt

SEQ ID NO: 3671194 - DNA, 25 bp, Homo sapien
ggattggcagaaaggttaaactcca

SEQ ID NO: 3671195 - DNA, 25 bp, Homo sapien
cctctggattggcagaagagttaaa

SEQ ID NO: 3671196 - DNA, 25 bp, Homo sapien
tgcttgcctctggattggcagaaga

SEQ ID NO: 3671197 - DNA, 25 bp, Homo sapien
ctggattggcagaagagttaaactc

SEQ ID NO: 3671198 - DNA, 25 bp, Homo sapien
ttggcagaagagttaaactccaaag

SEQ ID NO: 3671199 - DNA, 25 bp, Homo sapien
tgtacagttgcttcttcttatttct

SEQ ID NO: 3671200 - DNA, 25 bp, Homo sapien
tttgtacagttgcttcttcttattt

SEQ ID NO: 3671201 - DNA, 25 bp, Homo sapien
atggtttgtacagttgcttcttctt

SEQ ID NO: 3671202 - DNA, 25 bp, Homo sapien
ggtttgtacagttgcttcttcttat

SEQ ID NO: 3671203 - DNA, 25 bp, Homo sapien
tattgttgactgaaacgctcagtag

SEQ ID NO: 3671204 - DNA, 25 bp, Homo sapien
tcatcaaggaatattgtcgaacacg

SEQ ID NO: 3671205 - DNA, 25 bp, Homo sapien
ttgtaagataatgctggatggctgt

SEQ ID NO: 3671206 - DNA, 25 bp, Homo sapien
tcgaacacgagctgtattgttgact

SEQ ID NO: 3671207 - DNA, 25 bp, Homo sapien
cattattatgagtgtaaacttgcca

SEQ ID NO: 3671208 - DNA, 25 bp, Homo sapien
taaaaaggctagtgcatttgaaaca

SEQ ID NO: 3671209 - DNA, 25 bp, Homo sapien
ttactcaataggtcccaaagctcag

SEQ ID NO: 3671210 - DNA, 25 bp, Homo sapien
gacaattgaattagctaaaaaggct

SEQ ID NO: 3671211 - DNA, 25 bp, Homo sapien
aaataggagcagtttctcgtcctaa

SEQ ID NO: 3671212 - DNA, 25 bp, Homo sapien
caaggtcccaccaaataggagcagt

SEQ ID NO: 3671213 - DNA, 25 bp, Homo sapien
cccaaggtcccaccaaataggagca

SEQ ID NO: 3671214 - DNA, 25 bp, Homo sapien
ttctcgtcctaaactcaaattaagc

SEQ ID NO: 3671215 - DNA, 25 bp, Homo sapien
ctttgtgtgatatgatgaggtatct

SEQ ID NO: 3671216 - DNA, 25 bp, Homo sapien
atatgatgaggtatctccaaggtca

SEQ ID NO: 3671217 - DNA, 25 bp, Homo sapien
tatgatgaggtatctccaaggtcac

SEQ ID NO: 3671218 - DNA, 25 bp, Homo sapien
tgtgtgatatgatgaggtatctcca

SEQ ID NO: 3671219 - DNA, 25 bp, Homo sapien
tatctagcccataatatcaacagtg

SEQ ID NO: 3671220 - DNA, 25 bp, Homo sapien
tcaacagtggtaaggctgtgaaatc

SEQ ID NO: 3671221 - DNA, 25 bp, Homo sapien
tactgctaaactctctgcaatgcac

SEQ ID NO: 3671222 - DNA, 25 bp, Homo sapien
tggtagaggccatgaatactgctaa

SEQ ID NO: 3671223 - DNA, 25 bp, Homo sapien
tttaaaagtacaactgggccagcgc

SEQ ID NO: 3671224 - DNA, 25 bp, Homo sapien
gaaaccgtgtctctatcaaacatat

SEQ ID NO: 3671225 - DNA, 25 bp, Homo sapien
ccttctactgtaggcttggcagctt

SEQ ID NO: 3671226 - DNA, 25 bp, Homo sapien
ttaagctttcctgtggactttgaaa

SEQ ID NO: 3671227 - DNA, 25 bp, Homo sapien
ccaggttcaagtgattctcctaccc

SEQ ID NO: 3671228 - DNA, 25 bp, Homo sapien
taacctcaggcgatccacttgcctc

SEQ ID NO: 3671229 - DNA, 25 bp, Homo sapien
tgattctcctaccccagcctcccaa

SEQ ID NO: 3671230 - DNA, 25 bp, Homo sapien
atctcggctcatggcaaccttcgcc

SEQ ID NO: 3671231 - DNA, 25 bp, Homo sapien
caggtatgctcaaagatctatctgc

SEQ ID NO: 3671232 - DNA, 25 bp, Homo sapien
tgtaactgttcatcaggtatgctca

SEQ ID NO: 3671233 - DNA, 25 bp, Homo sapien
tgttcatcaggtatgctcaaagatc

SEQ ID NO: 3671234 - DNA, 25 bp, Homo sapien
cgcaaatgagtgtaactgttcatca

SEQ ID NO: 3671235 - DNA, 25 bp, Homo sapien
ctgtgtggaacaggaggaggaatgg

SEQ ID NO: 3671236 - DNA, 25 bp, Homo sapien
ttttcttcataatgtgcacggtgga

SEQ ID NO: 3671237 - DNA, 25 bp, Homo sapien
ttcttcataatgtgcacggtggaaa

SEQ ID NO: 3671238 - DNA, 25 bp, Homo sapien
tcttttcttcataatgtgcacggtg

SEQ ID NO: 3671239 - DNA, 25 bp, Homo sapien
tcttcataatgtgcacggtggaaac

SEQ ID NO: 3671240 - DNA, 25 bp, Homo sapien
tgtaaacaggttggaccagcgcatg

SEQ ID NO: 3671241 - DNA, 25 bp, Homo sapien
ggctggtgctgggagtcggtggaat

SEQ ID NO: 3671242 - DNA, 25 bp, Homo sapien
ccagcgcatggaccgcttgcaaacg

SEQ ID NO: 3671243 - DNA, 25 bp, Homo sapien
gaacactgaactgagggtcctcctg

SEQ ID NO: 3671244 - DNA, 25 bp, Homo sapien
tcgctttaagagcatgccctgttta

SEQ ID NO: 3671245 - DNA, 25 bp, Homo sapien
cttcgctttaagagcatgccctgtt

SEQ ID NO: 3671246 - DNA, 25 bp, Homo sapien
ttcgctttaagagcatgccctgttt

SEQ ID NO: 3671247 - DNA, 25 bp, Homo sapien
tcttcatataatcacctaagcttga

SEQ ID NO: 3671248 - DNA, 25 bp, Homo sapien
cctaagcttgaataataggtgagca

SEQ ID NO: 3671249 - DNA, 25 bp, Homo sapien
atgtggctagggatggccactttcc

SEQ ID NO: 3671250 - DNA, 25 bp, Homo sapien
gatgtggctagggatggccactttc

SEQ ID NO: 3671251 - DNA, 25 bp, Homo sapien
gggacttgcttttactgctcttgca

SEQ ID NO: 3671252 - DNA, 25 bp, Homo sapien
cttgcttttactgctcttgcatgac

SEQ ID NO: 3671253 - DNA, 25 bp, Homo sapien
ctgggacttgcttttactgctcttg

SEQ ID NO: 3671254 - DNA, 25 bp, Homo sapien
gacttgcttttactgctcttgcatg

SEQ ID NO: 3671255 - DNA, 25 bp, Homo sapien
ttcccacgcatgttttggatcgact

SEQ ID NO: 3671256 - DNA, 25 bp, Homo sapien
tcccacgcatgttttggatcgactg

SEQ ID NO: 3671257 - DNA, 25 bp, Homo sapien
cccacgcatgttttggatcgactgc

SEQ ID NO: 3671258 - DNA, 25 bp, Homo sapien
tggcccacttaggattctgggtctc

SEQ ID NO: 3671259 - DNA, 25 bp, Homo sapien
ggcccacttaggattctgggtctca

SEQ ID NO: 3671260 - DNA, 25 bp, Homo sapien
ctggcccacttaggattctgggtct

SEQ ID NO: 3671261 - DNA, 25 bp, Homo sapien
gcccacttaggattctgggtctcac

SEQ ID NO: 3671262 - DNA, 25 bp, Homo sapien
ctccagagatcgcacacgggaaagg

SEQ ID NO: 3671263 - DNA, 25 bp, Homo sapien
tcagtgcagggtagtggggccagaa

SEQ ID NO: 3671264 - DNA, 25 bp, Homo sapien
ccagctccagagatcgcacacggga

SEQ ID NO: 3671265 - DNA, 25 bp, Homo sapien
cagtgcagggtagtggggccagaaa

SEQ ID NO: 3671266 - DNA, 25 bp, Homo sapien
cgtaggtcagcgctgtgttcccgtg

SEQ ID NO: 3671267 - DNA, 25 bp, Homo sapien
gctggaggcctgccgggcgtaggtc

SEQ ID NO: 3671268 - DNA, 25 bp, Homo sapien
tgttcccgtgggcatctcgggccat

SEQ ID NO: 3671269 - DNA, 25 bp, Homo sapien
ggcctgccgggcgtaggtcagcgct

SEQ ID NO: 3671270 - DNA, 25 bp, Homo sapien
tgcagaagcacgttgatgcactcct

SEQ ID NO: 3671271 - DNA, 25 bp, Homo sapien
gcagaagcacgttgatgcactcctg

SEQ ID NO: 3671272 - DNA, 25 bp, Homo sapien
acacgcactcgtcggggcagccgta

SEQ ID NO: 3671273 - DNA, 25 bp, Homo sapien
tacacgcactcgtcggggcagccgt

SEQ ID NO: 3671274 - DNA, 25 bp, Homo sapien
cacgcactcgtcggggcagccgtac

SEQ ID NO: 3671275 - DNA, 25 bp, Homo sapien
ctacacgcactcgtcggggcagccg

SEQ ID NO: 3671276 - DNA, 25 bp, Homo sapien
aaaagaggtgccatgtgtacaaaaa

SEQ ID NO: 3671277 - DNA, 25 bp, Homo sapien
agagcaaaacatcgtccaaaaaaat

SEQ ID NO: 3671278 - DNA, 25 bp, Homo sapien
aaagaggtgccatgtgtacaaaaat

SEQ ID NO: 3671279 - DNA, 25 bp, Homo sapien
gagcaaaacatcgtccaaaaaaata

SEQ ID NO: 3671280 - DNA, 25 bp, Homo sapien
taagagaggtgccatgggcctggta

SEQ ID NO: 3671281 - DNA, 25 bp, Homo sapien
agagaggtgccatgggcctggtacg

SEQ ID NO: 3671282 - DNA, 25 bp, Homo sapien
gagaggtgccatgggcctggtacgg

SEQ ID NO: 3671283 - DNA, 25 bp, Homo sapien
aagagaggtgccatgggcctggtac

SEQ ID NO: 3671284 - DNA, 25 bp, Homo sapien
cctgacctggtgatcagtccgccta

SEQ ID NO: 3671285 - DNA, 25 bp, Homo sapien
acctggtgatcagtccgcctaggcc

SEQ ID NO: 3671286 - DNA, 25 bp, Homo sapien
tgacctggtgatcagtccgcctagg

SEQ ID NO: 3671287 - DNA, 25 bp, Homo sapien
ccacgcctggccattcccagctaat

SEQ ID NO: 3671288 - DNA, 25 bp, Homo sapien
tggaagtggttactgctgggaatat

SEQ ID NO: 3671289 - DNA, 25 bp, Homo sapien
catgtgcaatgatctgtaaccctct

SEQ ID NO: 3671290 - DNA, 25 bp, Homo sapien
ttccatgtgcaatgatctgtaaccc

SEQ ID NO: 3671291 - DNA, 25 bp, Homo sapien
gatcacattaatggaagtggttact

SEQ ID NO: 3671292 - DNA, 25 bp, Homo sapien
tgactagaggctgccggctctgctc

SEQ ID NO: 3671293 - DNA, 25 bp, Homo sapien
atgactagaggctgccggctctgct

SEQ ID NO: 3671294 - DNA, 25 bp, Homo sapien
tagaggctgccggctctgctctttc

SEQ ID NO: 3671295 - DNA, 25 bp, Homo sapien
aggctgccggctctgctctttcaaa

SEQ ID NO: 3671296 - DNA, 25 bp, Homo sapien
tcctagaacataagctcataaaagc

SEQ ID NO: 3671297 - DNA, 25 bp, Homo sapien
ccagtgagtgttcatgaatcaagtc

SEQ ID NO: 3671298 - DNA, 25 bp, Homo sapien
taaaagcaagaactgtgctccacct

SEQ ID NO: 3671299 - DNA, 25 bp, Homo sapien
gggcttgtcccttaaatgattagtc

SEQ ID NO: 3671300 - DNA, 25 bp, Homo sapien
tcaaatagctctctagacaggctct

SEQ ID NO: 3671301 - DNA, 25 bp, Homo sapien
tctgttgtcccttcagtcaggtcac

SEQ ID NO: 3671302 - DNA, 25 bp, Homo sapien
gctttattctcattcaaggtttccc

SEQ ID NO: 3671303 - DNA, 25 bp, Homo sapien
aaatgcgtttctgtcttggcagtca

SEQ ID NO: 3671304 - DNA, 25 bp, Homo sapien
ggatgtgtatggccagacacggtgg

SEQ ID NO: 3671305 - DNA, 25 bp, Homo sapien
tctatagcataggggaagggtaatg

SEQ ID NO: 3671306 - DNA, 25 bp, Homo sapien
gggatgtgtatggccagacacggtg

SEQ ID NO: 3671307 - DNA, 25 bp, Homo sapien
cataggggaagggtaatgcgggctt

SEQ ID NO: 3671308 - DNA, 25 bp, Homo sapien
tccatcagagttatggcattgatag

SEQ ID NO: 3671309 - DNA, 25 bp, Homo sapien
gttacgaacttttggcaattacagc

SEQ ID NO: 3671310 - DNA, 25 bp, Homo sapien
gacatcttgaaccagtactgatcag

SEQ ID NO: 3671311 - DNA, 25 bp, Homo sapien
ttatgaaatgttcctcgatttggga

SEQ ID NO: 3671312 - DNA, 25 bp, Homo sapien
agcctgttgtcagagctcatccaca

SEQ ID NO: 3671313 - DNA, 25 bp, Homo sapien
gacccagacagcctgttgtcagagc

SEQ ID NO: 3671314 - DNA, 25 bp, Homo sapien
ccagacagcctgttgtcagagctca

SEQ ID NO: 3671315 - DNA, 25 bp, Homo sapien
ttgtcagagctcatccacacagcag

SEQ ID NO: 3671316 - DNA, 25 bp, Homo sapien
ctagggtactctccaccagtccccg

SEQ ID NO: 3671317 - DNA, 25 bp, Homo sapien
tctccaccagtccccgctttcagga

SEQ ID NO: 3671318 - DNA, 25 bp, Homo sapien
tccaccagtccccgctttcaggagc

SEQ ID NO: 3671319 - DNA, 25 bp, Homo sapien
accagtccccgctttcaggagctca

SEQ ID NO: 3671320 - DNA, 25 bp, Homo sapien
ctcaggcgggtccagatgaccctgt

SEQ ID NO: 3671321 - DNA, 25 bp, Homo sapien
aagtcgggggcctggagctcaggcg

SEQ ID NO: 3671322 - DNA, 25 bp, Homo sapien
ggctgtgaaagtcgggggcctggag

SEQ ID NO: 3671323 - DNA, 25 bp, Homo sapien
tcaggcgggtccagatgaccctgtc

SEQ ID NO: 3671324 - DNA, 25 bp, Homo sapien
gtggccttctcggtgcggtgggcca

SEQ ID NO: 3671325 - DNA, 25 bp, Homo sapien
cggtggccttctcggtgcggtgggc

SEQ ID NO: 3671326 - DNA, 25 bp, Homo sapien
ctcggtggccttctcggtgcggtgg

SEQ ID NO: 3671327 - DNA, 25 bp, Homo sapien
ggccttctcggtgcggtgggccagg

SEQ ID NO: 3671328 - DNA, 25 bp, Homo sapien
cagggtgagggctcagagcaggccg

SEQ ID NO: 3671329 - DNA, 25 bp, Homo sapien
gctgcccccgagtccagggtgaggg

SEQ ID NO: 3671330 - DNA, 25 bp, Homo sapien
agggttcagagcagagccgctgccc

SEQ ID NO: 3671331 - DNA, 25 bp, Homo sapien
gggtgagggttcagagcagagccgc

SEQ ID NO: 3671332 - DNA, 25 bp, Homo sapien
ttcaccacttcctccacggcatgaa

SEQ ID NO: 3671333 - DNA, 25 bp, Homo sapien
gtctccttggcatgtcccaccacct

SEQ ID NO: 3671334 - DNA, 25 bp, Homo sapien
cagtctccttggcatgtcccaccac

SEQ ID NO: 3671335 - DNA, 25 bp, Homo sapien
ctccagtctccttggcatgtcccac

SEQ ID NO: 3671336 - DNA, 25 bp, Homo sapien
ctgaacttgtgtccccttgagtggc

SEQ ID NO: 3671337 - DNA, 25 bp, Homo sapien
aggaagaatgtcctagtgatccacc

SEQ ID NO: 3671338 - DNA, 25 bp, Homo sapien
cacctgctgaacttgtgtccccttg

SEQ ID NO: 3671339 - DNA, 25 bp, Homo sapien
ggaagaatgtcctagtgatccacct

SEQ ID NO: 3671340 - DNA, 25 bp, Homo sapien
atggcatttgtgactgtgttggtca

SEQ ID NO: 3671341 - DNA, 25 bp, Homo sapien
gatggcatttgtgactgtgttggtc

SEQ ID NO: 3671342 - DNA, 25 bp, Homo sapien
tgatggcatttgtgactgtgttggt

SEQ ID NO: 3671343 - DNA, 25 bp, Homo sapien
gtgatggcatttgtgactgtgttgg

SEQ ID NO: 3671344 - DNA, 25 bp, Homo sapien
gctttgtggtgttcctggagcctgg

SEQ ID NO: 3671345 - DNA, 25 bp, Homo sapien
attgctttgtggtgttcctggagcc

SEQ ID NO: 3671346 - DNA, 25 bp, Homo sapien
ggagcctggaaggagttggcttgct

SEQ ID NO: 3671347 - DNA, 25 bp, Homo sapien
agcctggaaggagttggcttgctcc

SEQ ID NO: 3671348 - DNA, 25 bp, Homo sapien
gtctcgtttctttggtggaaggcat

SEQ ID NO: 3671349 - DNA, 25 bp, Homo sapien
ctcgtttctttggtggaaggcattc

SEQ ID NO: 3671350 - DNA, 25 bp, Homo sapien
ggtctcgtttctttggtggaaggca

SEQ ID NO: 3671351 - DNA, 25 bp, Homo sapien
tcgtttctttggtggaaggcattcc

SEQ ID NO: 3671352 - DNA, 25 bp, Homo sapien
ccctcgggaccattcagaggcatca

SEQ ID NO: 3671353 - DNA, 25 bp, Homo sapien
tgtcagaccggtgatggcctcagct

SEQ ID NO: 3671354 - DNA, 25 bp, Homo sapien
catgccatactggtccactgtcaga

SEQ ID NO: 3671355 - DNA, 25 bp, Homo sapien
cttatacagcatgccatactggtcc

SEQ ID NO: 3671356 - DNA, 25 bp, Homo sapien
gatgggaggccagttggtgagaagg

SEQ ID NO: 3671357 - DNA, 25 bp, Homo sapien
cacagatgggaggccagttggtgag

SEQ ID NO: 3671358 - DNA, 25 bp, Homo sapien
tgagaaggtggcaggcggcacagcc

SEQ ID NO: 3671359 - DNA, 25 bp, Homo sapien
gagaaggtggcaggcggcacagcca

SEQ ID NO: 3671360 - DNA, 25 bp, Homo sapien
tgtgggggtgcaagcccgcccaggg

SEQ ID NO: 3671361 - DNA, 25 bp, Homo sapien
agcaggccgctcacttgggtgtggg

SEQ ID NO: 3671362 - DNA, 25 bp, Homo sapien
gtgggggtgcaagcccgcccagggc

SEQ ID NO: 3671363 - DNA, 25 bp, Homo sapien
ggactccacacgtctggctcctgca

SEQ ID NO: 3671364 - DNA, 25 bp, Homo sapien
ttcccagggagatgaagagacacag

SEQ ID NO: 3671365 - DNA, 25 bp, Homo sapien
ctctgctgggactccacacgtctgg

SEQ ID NO: 3671366 - DNA, 25 bp, Homo sapien
aagagacacaggttggcctctgctg

SEQ ID NO: 3671367 - DNA, 25 bp, Homo sapien
atcagggtctgggttgaagtgggag

SEQ ID NO: 3671368 - DNA, 25 bp, Homo sapien
tggctgagcagttgggacccgacac

SEQ ID NO: 3671369 - DNA, 25 bp, Homo sapien
gcagggttacagcacaagtgaccct

SEQ ID NO: 3671370 - DNA, 25 bp, Homo sapien
gtggctgagcagttgggacccgaca

SEQ ID NO: 3671371 - DNA, 25 bp, Homo sapien
tcgatgatagcctgctcgttggtcc

SEQ ID NO: 3671372 - DNA, 25 bp, Homo sapien
tgccgctgcgtgttgcttctcttgg

SEQ ID NO: 3671373 - DNA, 25 bp, Homo sapien
tggtgagcacatcgatgatagcctg

SEQ ID NO: 3671374 - DNA, 25 bp, Homo sapien
ttctcttggtgagcacatcgatgat

SEQ ID NO: 3671375 - DNA, 25 bp, Homo sapien
cttgccgaactgagccttgaaggac

SEQ ID NO: 3671376 - DNA, 25 bp, Homo sapien
gtggggcctgttgggtgcatgagaa

SEQ ID NO: 3671377 - DNA, 25 bp, Homo sapien
ggcctgttgggtgcatgagaaggaa

SEQ ID NO: 3671378 - DNA, 25 bp, Homo sapien
ggggcctgttgggtgcatgagaagg

SEQ ID NO: 3671379 - DNA, 25 bp, Homo sapien
cctgttgggtgcatgagaaggaatg

SEQ ID NO: 3671380 - DNA, 25 bp, Homo sapien
tcatggcgtcatgcagctccttggc

SEQ ID NO: 3671381 - DNA, 25 bp, Homo sapien
tctgtatggcgggtacataagggcc

SEQ ID NO: 3671382 - DNA, 25 bp, Homo sapien
tctcaaacttgccactgagctcaga

SEQ ID NO: 3671383 - DNA, 25 bp, Homo sapien
cataagggccacaatgagcctctca

SEQ ID NO: 3671384 - DNA, 25 bp, Homo sapien
ttcctcatacgccttcattatctcc

SEQ ID NO: 3671385 - DNA, 25 bp, Homo sapien
ttcttggtccgagaggccaggatct

SEQ ID NO: 3671386 - DNA, 25 bp, Homo sapien
ctcccgcagctggttcttggtccga

SEQ ID NO: 3671387 - DNA, 25 bp, Homo sapien
cagctggttcttggtccgagaggcc

SEQ ID NO: 3671388 - DNA, 25 bp, Homo sapien
ggtagccacttgtgtctgcttggat

SEQ ID NO: 3671389 - DNA, 25 bp, Homo sapien
ggatcctctccaggtagccacttgt

SEQ ID NO: 3671390 - DNA, 25 bp, Homo sapien
tcctctccaggtagccacttgtgtc

SEQ ID NO: 3671391 - DNA, 25 bp, Homo sapien
tctccaggtagccacttgtgtctgc

SEQ ID NO: 3671392 - DNA, 25 bp, Homo sapien
gtggcgctattcaagggctgctccc

SEQ ID NO: 3671393 - DNA, 25 bp, Homo sapien
cctgactcttgtggcgctattcaag

SEQ ID NO: 3671394 - DNA, 25 bp, Homo sapien
actcccaagagcctaggctgtgaca

SEQ ID NO: 3671395 - DNA, 25 bp, Homo sapien
cccaaaccaaggcactcccaagagc

SEQ ID NO: 3671396 - DNA, 25 bp, Homo sapien
ctgtgcgtcttggagggccagtcct

SEQ ID NO: 3671397 - DNA, 25 bp, Homo sapien
gccagtcctgggtccacaaagctgc

SEQ ID NO: 3671398 - DNA, 25 bp, Homo sapien
cttggagggccagtcctgggtccac

SEQ ID NO: 3671399 - DNA, 25 bp, Homo sapien
aaagctgctcacatcatccctgctg

SEQ ID NO: 3671400 - DNA, 25 bp, Homo sapien
cagtgtcagagaaagcccccgtggg

SEQ ID NO: 3671401 - DNA, 25 bp, Homo sapien
caaaggcctatagggagctgagctg

SEQ ID NO: 3671402 - DNA, 25 bp, Homo sapien
gtgtcagagaaagcccccgtgggca

SEQ ID NO: 3671403 - DNA, 25 bp, Homo sapien
acaggacaaaggcctatagggagct

SEQ ID NO: 3671404 - DNA, 25 bp, Homo sapien
tgcacaggatggtgatgaatttcat

SEQ ID NO: 3671405 - DNA, 25 bp, Homo sapien
gtgagtggcactgcgcgtgcacagg

SEQ ID NO: 3671406 - DNA, 25 bp, Homo sapien
tggcactgcgcgtgcacaggatggt

SEQ ID NO: 3671407 - DNA, 25 bp, Homo sapien
aggtgagtggcactgcgcgtgcaca

SEQ ID NO: 3671408 - DNA, 25 bp, Homo sapien
cctcaatgctcttgttggcaatttt

SEQ ID NO: 3671409 - DNA, 25 bp, Homo sapien
ctgtcctcaatgctcttgttggcaa

SEQ ID NO: 3671410 - DNA, 25 bp, Homo sapien
caatgctcttgttggcaattttctc

SEQ ID NO: 3671411 - DNA, 25 bp, Homo sapien
gctcttgttggcaattttctcatac

SEQ ID NO: 3671412 - DNA, 25 bp, Homo sapien
gcgtatgcatttgtgtgcgcacaca

SEQ ID NO: 3671413 - DNA, 25 bp, Homo sapien
aaagatgactttgtgctggccaggg

SEQ ID NO: 3671414 - DNA, 25 bp, Homo sapien
tggctgccatgagtacacacagggt

SEQ ID NO: 3671415 - DNA, 25 bp, Homo sapien
caggcccctggttcatgtccagaaa

SEQ ID NO: 3671416 - DNA, 25 bp, Homo sapien
tctctgcaaagtagctgtggaggtt

SEQ ID NO: 3671417 - DNA, 25 bp, Homo sapien
ctgtggaggttttgggtgcatttca

SEQ ID NO: 3671418 - DNA, 25 bp, Homo sapien
cttcatggcatagtagagtctctct

SEQ ID NO: 3671419 - DNA, 25 bp, Homo sapien
gagtctctctgcaaagtagctgtgg

SEQ ID NO: 3671420 - DNA, 25 bp, Homo sapien
taactcccccgtgtggaggatcgtg

SEQ ID NO: 3671421 - DNA, 25 bp, Homo sapien
tggagatgcagcgtccctttcccag

SEQ ID NO: 3671422 - DNA, 25 bp, Homo sapien
gactcaatttcacctccgagaacta

SEQ ID NO: 3671423 - DNA, 25 bp, Homo sapien
ctttctgatccacgacaggtttggg

SEQ ID NO: 3671424 - DNA, 25 bp, Homo sapien
tggtttgccacatcagattctagac

SEQ ID NO: 3671425 - DNA, 25 bp, Homo sapien
tatgatgccaagtgctccaaactgc

SEQ ID NO: 3671426 - DNA, 25 bp, Homo sapien
cttcagccagggaagcattaggagg

SEQ ID NO: 3671427 - DNA, 25 bp, Homo sapien
aagctttggtggcttagggtgtcca

SEQ ID NO: 3671428 - DNA, 25 bp, Homo sapien
tgtccatctctgagtgatggacgga

SEQ ID NO: 3671429 - DNA, 25 bp, Homo sapien
catctctgagtgatggacggatctg

SEQ ID NO: 3671430 - DNA, 25 bp, Homo sapien
ctctgagtgatggacggatctgtgt

SEQ ID NO: 3671431 - DNA, 25 bp, Homo sapien
tcctgtccatctctgagtgatggac

SEQ ID NO: 3671432 - DNA, 25 bp, Homo sapien
gcagccatcaacaatcctgcctcac

SEQ ID NO: 3671433 - DNA, 25 bp, Homo sapien
tctcgctccttgaaacgatgtttct

SEQ ID NO: 3671434 - DNA, 25 bp, Homo sapien
tgaaacgatgtttcttatcagggtc

SEQ ID NO: 3671435 - DNA, 25 bp, Homo sapien
tcttatcagggtcccatcacgcgtc

SEQ ID NO: 3671436 - DNA, 25 bp, Homo sapien
aagtcaatctcgctccttgaaacga

SEQ ID NO: 3671437 - DNA, 25 bp, Homo sapien
tgtggtccgatgactgaggagccct

SEQ ID NO: 3671438 - DNA, 25 bp, Homo sapien
gaaatgggccaggtcagatcaccca

SEQ ID NO: 3671439 - DNA, 25 bp, Homo sapien
tctggctcacatcgggtccacagtg

SEQ ID NO: 3671440 - DNA, 25 bp, Homo sapien
tggaccatcgcaccctgacggtgtg

SEQ ID NO: 3671441 - DNA, 25 bp, Homo sapien
cagcttgggaatcaaggctgagagt

SEQ ID NO: 3671442 - DNA, 25 bp, Homo sapien
aggctgagagtgaggcatcagcaca

SEQ ID NO: 3671443 - DNA, 25 bp, Homo sapien
gctgtggcagcttgggaatcaaggc

SEQ ID NO: 3671444 - DNA, 25 bp, Homo sapien
ctgagagtgaggcatcagcacacac

SEQ ID NO: 3671445 - DNA, 25 bp, Homo sapien
gcaggaggcgcataagcgtgagaag

SEQ ID NO: 3671446 - DNA, 25 bp, Homo sapien
gggcaggaggcgcataagcgtgaga

SEQ ID NO: 3671447 - DNA, 25 bp, Homo sapien
gtgggcaggaggcgcataagcgtga

SEQ ID NO: 3671448 - DNA, 25 bp, Homo sapien
ctgtgggcaggaggcgcataagcgt

SEQ ID NO: 3671449 - DNA, 25 bp, Homo sapien
aggctcagcagggcgttcttgtagt

SEQ ID NO: 3671450 - DNA, 25 bp, Homo sapien
caggctcagcagggcgttcttgtag

SEQ ID NO: 3671451 - DNA, 25 bp, Homo sapien
ggctcagcagggcgttcttgtagtc

SEQ ID NO: 3671452 - DNA, 25 bp, Homo sapien
tccatggccgaggttgagtgaggag

SEQ ID NO: 3671453 - DNA, 25 bp, Homo sapien
gcgtccatggccgaggttgagtgag

SEQ ID NO: 3671454 - DNA, 25 bp, Homo sapien
cgtccatggccgaggttgagtgagg

SEQ ID NO: 3671455 - DNA, 25 bp, Homo sapien
ctgcgtccatggccgaggttgagtg

SEQ ID NO: 3671456 - DNA, 25 bp, Homo sapien
ctctgggtcagaaacccggctggaa

SEQ ID NO: 3671457 - DNA, 25 bp, Homo sapien
ccctctgggtcagaaacccggctgg

SEQ ID NO: 3671458 - DNA, 25 bp, Homo sapien
tcagaaacccggctggaaagcactg

SEQ ID NO: 3671459 - DNA, 25 bp, Homo sapien
ctgggtcagaaacccggctggaaag

SEQ ID NO: 3671460 - DNA, 25 bp, Homo sapien
ttggcattgtgctcacactgggaaa

SEQ ID NO: 3671461 - DNA, 25 bp, Homo sapien
gaaacactaaggttggcattgtgct

SEQ ID NO: 3671462 - DNA, 25 bp, Homo sapien
taaggttggcattgtgctcacactg

SEQ ID NO: 3671463 - DNA, 25 bp, Homo sapien
cactaaggttggcattgtgctcaca

SEQ ID NO: 3671464 - DNA, 25 bp, Homo sapien
ggagactctgtgaccagcttgggaa

SEQ ID NO: 3671465 - DNA, 25 bp, Homo sapien
aaggaatgatccacaagtccccaag

SEQ ID NO: 3671466 - DNA, 25 bp, Homo sapien
ccaggagactctgtgaccagcttgg

SEQ ID NO: 3671467 - DNA, 25 bp, Homo sapien
aggaatgatccacaagtccccaagc

SEQ ID NO: 3671468 - DNA, 25 bp, Homo sapien
gaccctgtttcagtagatgggaatg

SEQ ID NO: 3671469 - DNA, 25 bp, Homo sapien
gaagtgttttgtaagacgcttgtta

SEQ ID NO: 3671470 - DNA, 25 bp, Homo sapien
accctgtttcagtagatgggaatgg

SEQ ID NO: 3671471 - DNA, 25 bp, Homo sapien
agaagtgttttgtaagacgcttgtt

SEQ ID NO: 3671472 - DNA, 25 bp, Homo sapien
gaatttttcgtccatttagagccta

SEQ ID NO: 3671473 - DNA, 25 bp, Homo sapien
ggtacccagtctcagttgccgttca

SEQ ID NO: 3671474 - DNA, 25 bp, Homo sapien
tgctgagggcatggtcacacccttc

SEQ ID NO: 3671475 - DNA, 25 bp, Homo sapien
ggagcccacgcctcttataacacag

SEQ ID NO: 3671476 - DNA, 25 bp, Homo sapien
ttcagtcaaggctgagcgccaggca

SEQ ID NO: 3671477 - DNA, 25 bp, Homo sapien
cccagaattccgtggaagatgccca

SEQ ID NO: 3671478 - DNA, 25 bp, Homo sapien
cttggccaaataccacgagggaact

SEQ ID NO: 3671479 - DNA, 25 bp, Homo sapien
atgggccaggaacacgggtagtcac

SEQ ID NO: 3671480 - DNA, 25 bp, Homo sapien
cagcagcaaggcattccggagtggg

SEQ ID NO: 3671481 - DNA, 25 bp, Homo sapien
cctgtttcacaagtgaagacctggt

SEQ ID NO: 3671482 - DNA, 25 bp, Homo sapien
caaggcattccggagtgggagaatt

SEQ ID NO: 3671483 - DNA, 25 bp, Homo sapien
gtggccgactcctgtttcacaagtg

SEQ ID NO: 3671484 - DNA, 25 bp, Homo sapien
gaaagcggatttccaggcacgcctg

SEQ ID NO: 3671485 - DNA, 25 bp, Homo sapien
tcctgactgccggttggaggctaca

SEQ ID NO: 3671486 - DNA, 25 bp, Homo sapien
catggagagcggcagcaactgcgtt

SEQ ID NO: 3671487 - DNA, 25 bp, Homo sapien
gcttttaggagtttgctggtcacga

SEQ ID NO: 3671488 - DNA, 25 bp, Homo sapien
taaaaacctaaggatggactcgctg

SEQ ID NO: 3671489 - DNA, 25 bp, Homo sapien
gcgcttctcatgtgtgtactggcat

SEQ ID NO: 3671490 - DNA, 25 bp, Homo sapien
tttgtggatgtgtatgcgcttctca

SEQ ID NO: 3671491 - DNA, 25 bp, Homo sapien
ggactcgctggataatataataggg

SEQ ID NO: 3671492 - DNA, 25 bp, Homo sapien
aagatttacaacactctagcacccc

SEQ ID NO: 3671493 - DNA, 25 bp, Homo sapien
cactgtaagatttacaacactctag

SEQ ID NO: 3671494 - DNA, 25 bp, Homo sapien
tttgtcaaatgcctgcactcctgtc

SEQ ID NO: 3671495 - DNA, 25 bp, Homo sapien
tcatgcccccttcagctaacctcta

SEQ ID NO: 3671496 - DNA, 25 bp, Homo sapien
cagggatcatgagcagggggtcact

SEQ ID NO: 3671497 - DNA, 25 bp, Homo sapien
gctgggcattctggcctggatgtcc

SEQ ID NO: 3671498 - DNA, 25 bp, Homo sapien
ccacagggatcatgagcagggggtc

SEQ ID NO: 3671499 - DNA, 25 bp, Homo sapien
gggcattctggcctggatgtccctg

SEQ ID NO: 3671500 - DNA, 25 bp, Homo sapien
gtgctgctccgtggtatttgttcca

SEQ ID NO: 3671501 - DNA, 25 bp, Homo sapien
catgcagctagagggtccagtgagc

SEQ ID NO: 3671502 - DNA, 25 bp, Homo sapien
gagtcccctagagtcccgtaagcag

SEQ ID NO: 3671503 - DNA, 25 bp, Homo sapien
tcctgagtagtttgaggagagtccc

SEQ ID NO: 3671504 - DNA, 25 bp, Homo sapien
tagagtcccgtaagcagcaacttct

SEQ ID NO: 3671505 - DNA, 25 bp, Homo sapien
ggggccccttgctagatatagggag

SEQ ID NO: 3671506 - DNA, 25 bp, Homo sapien
gccccttgctagatatagggaggtg

SEQ ID NO: 3671507 - DNA, 25 bp, Homo sapien
gggccccttgctagatatagggagg

SEQ ID NO: 3671508 - DNA, 25 bp, Homo sapien
ggccccttgctagatatagggaggt

SEQ ID NO: 3671509 - DNA, 25 bp, Homo sapien
aaggacagccgtgttctcgggctgg

SEQ ID NO: 3671510 - DNA, 25 bp, Homo sapien
cagccgtgttctcgggctggagagg

SEQ ID NO: 3671511 - DNA, 25 bp, Homo sapien
gtgtgagctgcaggacgatgctgtc

SEQ ID NO: 3671512 - DNA, 25 bp, Homo sapien
gcagcactcccctgcctagtgtgag

SEQ ID NO: 3671513 - DNA, 25 bp, Homo sapien
cacaggccacccatttgccacagag

SEQ ID NO: 3671514 - DNA, 25 bp, Homo sapien
acacaggccacccatttgccacaga

SEQ ID NO: 3671515 - DNA, 25 bp, Homo sapien
tcaacacaggccacccatttgccac

SEQ ID NO: 3671516 - DNA, 25 bp, Homo sapien
acaggccagccattcaacacaggcc

SEQ ID NO: 3671517 - DNA, 25 bp, Homo sapien
aggctggccagccatcataggccaa

SEQ ID NO: 3671518 - DNA, 25 bp, Homo sapien
agagcaaccatccaccacagaacac

SEQ ID NO: 3671519 - DNA, 25 bp, Homo sapien
tcataggccaatcattcatcacagg

SEQ ID NO: 3671520 - DNA, 25 bp, Homo sapien
tctgtcactggccaaccatccatca

SEQ ID NO: 3671521 - DNA, 25 bp, Homo sapien
cctgtgctgcaagcgaggtgttcag

SEQ ID NO: 3671522 - DNA, 25 bp, Homo sapien
tgtggtcctcacagaagccctgtgc

SEQ ID NO: 3671523 - DNA, 25 bp, Homo sapien
tacctgtagattttgtggtcctcac

SEQ ID NO: 3671524 - DNA, 25 bp, Homo sapien
aggctaggttcatgagaccaggaag

SEQ ID NO: 3671525 - DNA, 25 bp, Homo sapien
tgggcctgcttgatcctgttccagc

SEQ ID NO: 3671526 - DNA, 25 bp, Homo sapien
agctgctgatatgatcctaaaccca

SEQ ID NO: 3671527 - DNA, 25 bp, Homo sapien
atgcgtgtgccgctgaaccggtgcc

SEQ ID NO: 3671528 - DNA, 25 bp, Homo sapien
aggattccacgcactaccttcagga

SEQ ID NO: 3671529 - DNA, 25 bp, Homo sapien
gccctgcactggaatgagatacacc

SEQ ID NO: 3671530 - DNA, 25 bp, Homo sapien
gaggccctgcactggaatgagatac

SEQ ID NO: 3671531 - DNA, 25 bp, Homo sapien
tccagaggccctgcactggaatgag

SEQ ID NO: 3671532 - DNA, 25 bp, Homo sapien
ggctgtccagaggccctgcactgga

SEQ ID NO: 3671533 - DNA, 25 bp, Homo sapien
gacatcactatgaagagcaccacct

SEQ ID NO: 3671534 - DNA, 25 bp, Homo sapien
cactatgaagagcaccacctgtgtg

SEQ ID NO: 3671535 - DNA, 25 bp, Homo sapien
ttctaatgacatcactatgaagagc

SEQ ID NO: 3671536 - DNA, 25 bp, Homo sapien
ctatgaagagcaccacctgtgtgag

SEQ ID NO: 3671537 - DNA, 25 bp, Homo sapien
cctttcagagttaagccaatggact

SEQ ID NO: 3671538 - DNA, 25 bp, Homo sapien
tggtaccgttgctccaggtcgcctt

SEQ ID NO: 3671539 - DNA, 25 bp, Homo sapien
atggtaccgttgctccaggtcgcct

SEQ ID NO: 3671540 - DNA, 25 bp, Homo sapien
aatggtaccgttgctccaggtcgcc

SEQ ID NO: 3671541 - DNA, 25 bp, Homo sapien
gcagtgtcctagggatctgcagtgt

SEQ ID NO: 3671542 - DNA, 25 bp, Homo sapien
tctgcagtgtcctagggatctgcag

SEQ ID NO: 3671543 - DNA, 25 bp, Homo sapien
gatctgcagtgtcctagggatctgc

SEQ ID NO: 3671544 - DNA, 25 bp, Homo sapien
tgcagtgtcctagggatctgcagtg

SEQ ID NO: 3671545 - DNA, 25 bp, Homo sapien
cacagggtccgctctgcgtgatgag

SEQ ID NO: 3671546 - DNA, 25 bp, Homo sapien
tggaacatcacacgaatgcttctgg

SEQ ID NO: 3671547 - DNA, 25 bp, Homo sapien
cagtggacgaacatgtgcatcgaca

SEQ ID NO: 3671548 - DNA, 25 bp, Homo sapien
tctggtcgcctgtgacgaagcggct

SEQ ID NO: 3671549 - DNA, 25 bp, Homo sapien
tgtgttcaggtcaacaaattgttcc

SEQ ID NO: 3671550 - DNA, 25 bp, Homo sapien
tcattttgtccatagtaaccctgac

SEQ ID NO: 3671551 - DNA, 25 bp, Homo sapien
catggctaatctgaccattgtgttc

SEQ ID NO: 3671552 - DNA, 25 bp, Homo sapien
tgaccattgtgttcaggtcaacaaa

SEQ ID NO: 3671553 - DNA, 25 bp, Homo sapien
aggagtgactttgtcattaattaca

SEQ ID NO: 3671554 - DNA, 25 bp, Homo sapien
ctgcctgttgcagggagctcggatg

SEQ ID NO: 3671555 - DNA, 25 bp, Homo sapien
gctcggatgtactgaggagtgactt

SEQ ID NO: 3671556 - DNA, 25 bp, Homo sapien
cctggttggtgcctttgcagaagtg

SEQ ID NO: 3671557 - DNA, 25 bp, Homo sapien
aagcccatgccacagtcctgggtac

SEQ ID NO: 3671558 - DNA, 25 bp, Homo sapien
ggaaagcccatgccacagtcctggg

SEQ ID NO: 3671559 - DNA, 25 bp, Homo sapien
tcacataggaaagcccatgccacag

SEQ ID NO: 3671560 - DNA, 25 bp, Homo sapien
ataggaaagcccatgccacagtcct

SEQ ID NO: 3671561 - DNA, 25 bp, Homo sapien
ctcagctgtgaccacgcaacgctct

SEQ ID NO: 3671562 - DNA, 25 bp, Homo sapien
aggcggactccgcgactcgggccat

SEQ ID NO: 3671563 - DNA, 25 bp, Homo sapien
ctctgccaggaaggcggactccgcg

SEQ ID NO: 3671564 - DNA, 25 bp, Homo sapien
tcagctgtgaccacgcaacgctctg

SEQ ID NO: 3671565 - DNA, 25 bp, Homo sapien
ctggcggccgctcgatcggcacctc

SEQ ID NO: 3671566 - DNA, 25 bp, Homo sapien
tgcggctccagtctgcgccgaggac

SEQ ID NO: 3671567 - DNA, 25 bp, Homo sapien
cggtgcctgcggctccagtctgcgc

SEQ ID NO: 3671568 - DNA, 25 bp, Homo sapien
ggcctcggcgatgcgggcgagggct

SEQ ID NO: 3671569 - DNA, 25 bp, Homo sapien
gccaagagcactgcgcgtggctctg

SEQ ID NO: 3671570 - DNA, 25 bp, Homo sapien
tggctctgaacttggcgccggagcc

SEQ ID NO: 3671571 - DNA, 25 bp, Homo sapien
tcccggccaagagcactgcgcgtgg

SEQ ID NO: 3671572 - DNA, 25 bp, Homo sapien
agagcactgcgcgtggctctgaact

SEQ ID NO: 3671573 - DNA, 25 bp, Homo sapien
cactgggctggacacactcggccac

SEQ ID NO: 3671574 - DNA, 25 bp, Homo sapien
actgggctggacacactcggccaca

SEQ ID NO: 3671575 - DNA, 25 bp, Homo sapien
cccagcaaggagccatgagatatgg

SEQ ID NO: 3671576 - DNA, 25 bp, Homo sapien
gagatatggaagctccccatgacac

SEQ ID NO: 3671577 - DNA, 25 bp, Homo sapien
gataagcaaggtggccactctggca

SEQ ID NO: 3671578 - DNA, 25 bp, Homo sapien
catctgttttcagccgatgggctca

SEQ ID NO: 3671579 - DNA, 25 bp, Homo sapien
ccagctcaggttcgctaagtcgcca

SEQ ID NO: 3671580 - DNA, 25 bp, Homo sapien
tcttctcgagcagcactggcttgca

SEQ ID NO: 3671581 - DNA, 25 bp, Homo sapien
ggctaccaacagtgccagctccgca

SEQ ID NO: 3671582 - DNA, 25 bp, Homo sapien
gggggcagcggcttgccaggtcggg

SEQ ID NO: 3671583 - DNA, 25 bp, Homo sapien
tccgcactgcccacatcccggcccg

SEQ ID NO: 3671584 - DNA, 25 bp, Homo sapien
tcggggcttgcctggggctaccaac

SEQ ID NO: 3671585 - DNA, 25 bp, Homo sapien
atccacctgccggtccttcatcctc

SEQ ID NO: 3671586 - DNA, 25 bp, Homo sapien
gccggtccttcatcctcggcagctc

SEQ ID NO: 3671587 - DNA, 25 bp, Homo sapien
ctgagcatccacctgccggtccttc

SEQ ID NO: 3671588 - DNA, 25 bp, Homo sapien
tggggatgttctgggtcagctgtgg

SEQ ID NO: 3671589 - DNA, 25 bp, Homo sapien
tgcagattcccctgcagggaagact

SEQ ID NO: 3671590 - DNA, 25 bp, Homo sapien
ccaaaagcttgggagttgaaagtcg

SEQ ID NO: 3671591 - DNA, 25 bp, Homo sapien
ccccaacaagcgaggtctgtagtgt

SEQ ID NO: 3671592 - DNA, 25 bp, Homo sapien
gtgttgaggagtccagacagctccc

SEQ ID NO: 3671593 - DNA, 25 bp, Homo sapien
ctagctgtgagaagtcatgtgccgg

SEQ ID NO: 3671594 - DNA, 25 bp, Homo sapien
tgaaagaccaggtcggacgttaggc

SEQ ID NO: 3671595 - DNA, 25 bp, Homo sapien
tggtgggatcgcatgtgaaagacca

SEQ ID NO: 3671596 - DNA, 25 bp, Homo sapien
cgttaggcgaaaggacaggttgcac

SEQ ID NO: 3671597 - DNA, 25 bp, Homo sapien
caaagcccatgatgtgtgccaggag

SEQ ID NO: 3671598 - DNA, 25 bp, Homo sapien
tgaatgccaacctaagacacagtgt

SEQ ID NO: 3671599 - DNA, 25 bp, Homo sapien
gaaagagcccagattcgaatccagg

SEQ ID NO: 3671600 - DNA, 25 bp, Homo sapien
cacagactcacgacttaggcagatg

SEQ ID NO: 3671601 - DNA, 25 bp, Homo sapien
acaaagggctttcacgcagactgac

SEQ ID NO: 3671602 - DNA, 25 bp, Homo sapien
gaacaagggctgatgcgggtaccta

SEQ ID NO: 3671603 - DNA, 25 bp, Homo sapien
tcttggcatgaccacgagagaagcg

SEQ ID NO: 3671604 - DNA, 25 bp, Homo sapien
tgcttgttagactcaccctcctgtg

SEQ ID NO: 3671605 - DNA, 25 bp, Homo sapien
gctgacctgcgagaagaagccctgt

SEQ ID NO: 3671606 - DNA, 25 bp, Homo sapien
ttgagaaacggcaccagagctgtgg

SEQ ID NO: 3671607 - DNA, 25 bp, Homo sapien
caagctcggcccatgaaggtagcag

SEQ ID NO: 3671608 - DNA, 25 bp, Homo sapien
cacctgtgggcctcataagggcaag

SEQ ID NO: 3671609 - DNA, 25 bp, Homo sapien
tccaaagctgggagcataacagagt

SEQ ID NO: 3671610 - DNA, 25 bp, Homo sapien
tgtgcagtcttcacccaggcattga

SEQ ID NO: 3671611 - DNA, 25 bp, Homo sapien
cctagagatgcaggaattggcaaga

SEQ ID NO: 3671612 - DNA, 25 bp, Homo sapien
gacatttgagcttaggatccctggc

SEQ ID NO: 3671613 - DNA, 25 bp, Homo sapien
agcaacaagccatgcctctgccagg

SEQ ID NO: 3671614 - DNA, 25 bp, Homo sapien
tcagcaacaagccatgcctctgcca

SEQ ID NO: 3671615 - DNA, 25 bp, Homo sapien
cagcaacaagccatgcctctgccag

SEQ ID NO: 3671616 - DNA, 25 bp, Homo sapien
caacaagccatgcctctgccaggct

SEQ ID NO: 3671617 - DNA, 25 bp, Homo sapien
tcctctgcgtagcaaagaacaggct

SEQ ID NO: 3671618 - DNA, 25 bp, Homo sapien
gatgtttaatctggagcaagtggcc

SEQ ID NO: 3671619 - DNA, 25 bp, Homo sapien
tcttaaatagggaaagggctggtgc

SEQ ID NO: 3671620 - DNA, 25 bp, Homo sapien
aaagctgaacactctggaagcccca

SEQ ID NO: 3671621 - DNA, 25 bp, Homo sapien
aatcctcgtgattgggcatgcattc

SEQ ID NO: 3671622 - DNA, 25 bp, Homo sapien
tttctcaggagagtcaagcctttcc

SEQ ID NO: 3671623 - DNA, 25 bp, Homo sapien
gcttgcttaacatggctactaggga

SEQ ID NO: 3671624 - DNA, 25 bp, Homo sapien
cctcgttgggagttgtcaagcactg

SEQ ID NO: 3671625 - DNA, 25 bp, Homo sapien
cgacaaggatgtggtggtcctcacc

SEQ ID NO: 3671626 - DNA, 25 bp, Homo sapien
tgaaggactactacacgctggtgga

SEQ ID NO: 3671627 - DNA, 25 bp, Homo sapien
tccttaagcagatgcgcagggccat

SEQ ID NO: 3671628 - DNA, 25 bp, Homo sapien
atctggtcaccaagctcaatgccgg

SEQ ID NO: 3671629 - DNA, 25 bp, Homo sapien
gcacagaaaaggtgtcgcgcaggga

SEQ ID NO: 3671630 - DNA, 25 bp, Homo sapien
cagaaaaggtgtcgcgcagggaagg

SEQ ID NO: 3671631 - DNA, 25 bp, Homo sapien
tgcacagaaaaggtgtcgcgcaggg

SEQ ID NO: 3671632 - DNA, 25 bp, Homo sapien
tacggtctggacacggtttgctgat

SEQ ID NO: 3671633 - DNA, 25 bp, Homo sapien
caaaagattccatcatacggtctgg

SEQ ID NO: 3671634 - DNA, 25 bp, Homo sapien
tgggagaaaacttcagaaggcttcc

SEQ ID NO: 3671635 - DNA, 25 bp, Homo sapien
gctgggccgcatctctgaatttaca

SEQ ID NO: 3671636 - DNA, 25 bp, Homo sapien
cctaggtagcatccgaagagtggca

SEQ ID NO: 3671637 - DNA, 25 bp, Homo sapien
ggagaatgattagccagaactggta

SEQ ID NO: 3671638 - DNA, 25 bp, Homo sapien
ccctgggacacatgcgtgagcagct

SEQ ID NO: 3671639 - DNA, 25 bp, Homo sapien
tcctggaggcgaagccattgaaact

SEQ ID NO: 3671640 - DNA, 25 bp, Homo sapien
cactgcagagcttttatccatatgg

SEQ ID NO: 3671641 - DNA, 25 bp, Homo sapien
tcataactgagcaagaagactatgc

SEQ ID NO: 3671642 - DNA, 25 bp, Homo sapien
ggtatgcacatgtagccaatattgg

SEQ ID NO: 3671643 - DNA, 25 bp, Homo sapien
tatgcaaatcttagggcgctcgctc

SEQ ID NO: 3671644 - DNA, 25 bp, Homo sapien
tgcagggtgctcatatacagccccg

SEQ ID NO: 3671645 - DNA, 25 bp, Homo sapien
tgcctcctttcaagcccatgatctg

SEQ ID NO: 3671646 - DNA, 25 bp, Homo sapien
ggtgctcatatacagccccgggaga

SEQ ID NO: 3671647 - DNA, 25 bp, Homo sapien
gcccatgatctggattgctgagtcc

SEQ ID NO: 3671648 - DNA, 25 bp, Homo sapien
tgcatccctccatctgcggaagaat

SEQ ID NO: 3671649 - DNA, 25 bp, Homo sapien
cagggcaagcacagggaaggacttc

SEQ ID NO: 3671650 - DNA, 25 bp, Homo sapien
tttctgcaggcaactctgcatccct

SEQ ID NO: 3671651 - DNA, 25 bp, Homo sapien
tccatctgcggaagaatccagggca

SEQ ID NO: 3671652 - DNA, 25 bp, Homo sapien
tccaaatgatggttaacacgaccct

SEQ ID NO: 3671653 - DNA, 25 bp, Homo sapien
tattttgagtatccaagagtctccc

SEQ ID NO: 3671654 - DNA, 25 bp, Homo sapien
gttgtataacctcctgcgcttgctg

SEQ ID NO: 3671655 - DNA, 25 bp, Homo sapien
tctcccttgcacagtcgttgtataa

SEQ ID NO: 3671656 - DNA, 25 bp, Homo sapien
tttaccgtgacctcggtgggccaga

SEQ ID NO: 3671657 - DNA, 25 bp, Homo sapien
accgtgacctcggtgggccagagat

SEQ ID NO: 3671658 - DNA, 25 bp, Homo sapien
tctttaccgtgacctcggtgggcca

SEQ ID NO: 3671659 - DNA, 25 bp, Homo sapien
ttaccgtgacctcggtgggccagag

SEQ ID NO: 3671660 - DNA, 25 bp, Homo sapien
ggatacctggtttgaactgctgacc

SEQ ID NO: 3671661 - DNA, 25 bp, Homo sapien
cgtattgcagggatacctggtttga

SEQ ID NO: 3671662 - DNA, 25 bp, Homo sapien
cacgtttgtacgtattgcagggata

SEQ ID NO: 3671663 - DNA, 25 bp, Homo sapien
tcctccacgtttgtacgtattgcag

SEQ ID NO: 3671664 - DNA, 25 bp, Homo sapien
tgcccacactagatgctgcatccat

SEQ ID NO: 3671665 - DNA, 25 bp, Homo sapien
ttgcccacactagatgctgcatcca

SEQ ID NO: 3671666 - DNA, 25 bp, Homo sapien
tttgctagaacccttgcccacacta

SEQ ID NO: 3671667 - DNA, 25 bp, Homo sapien
ggtggtttgctagaacccttgccca

SEQ ID NO: 3671668 - DNA, 25 bp, Homo sapien
ctgagatagggttgcacagggccac

SEQ ID NO: 3671669 - DNA, 25 bp, Homo sapien
ccctgtgtctgggttactttgcctg

SEQ ID NO: 3671670 - DNA, 25 bp, Homo sapien
cagggacacgacctggggcccagaa

SEQ ID NO: 3671671 - DNA, 25 bp, Homo sapien
gggccacatcgaggtgccccaggga

SEQ ID NO: 3671672 - DNA, 25 bp, Homo sapien
caaactgccgggacttcacaattgg

SEQ ID NO: 3671673 - DNA, 25 bp, Homo sapien
gagatctggagcacactgccgtgat

SEQ ID NO: 3671674 - DNA, 25 bp, Homo sapien
tacggctggctgtatgtggcaaaca

SEQ ID NO: 3671675 - DNA, 25 bp, Homo sapien
agttgcaagagtcagcaccggtccc

SEQ ID NO: 3671676 - DNA, 25 bp, Homo sapien
catgtgatccacagtttgatttcga

SEQ ID NO: 3671677 - DNA, 25 bp, Homo sapien
aggcagatgagttcttcaacaccag

SEQ ID NO: 3671678 - DNA, 25 bp, Homo sapien
ctgcaggcagatgagttcttcaaca

SEQ ID NO: 3671679 - DNA, 25 bp, Homo sapien
gatttcgagtggctcatgagctgct

SEQ ID NO: 3671680 - DNA, 25 bp, Homo sapien
ccccatatccttgtgattgaaccaa

SEQ ID NO: 3671681 - DNA, 25 bp, Homo sapien
tgtgattgaaccaaaggctctgtgg

SEQ ID NO: 3671682 - DNA, 25 bp, Homo sapien
gatcaataaatatccatgctgcagc

SEQ ID NO: 3671683 - DNA, 25 bp, Homo sapien
gcttttcttggatcgtgtgaatcaa

SEQ ID NO: 3671684 - DNA, 25 bp, Homo sapien
atgagccaagcaggtgcaggagcga

SEQ ID NO: 3671685 - DNA, 25 bp, Homo sapien
ccaagcaggtgcaggagcgagagcc

SEQ ID NO: 3671686 - DNA, 25 bp, Homo sapien
agccaagcaggtgcaggagcgagag

SEQ ID NO: 3671687 - DNA, 25 bp, Homo sapien
agcaggtgcaggagcgagagcccac

SEQ ID NO: 3671688 - DNA, 25 bp, Homo sapien
agtttctaaatgatgtgcatactca

SEQ ID NO: 3671689 - DNA, 25 bp, Homo sapien
atagtttctaaatgatgtgcatact

SEQ ID NO: 3671690 - DNA, 25 bp, Homo sapien
gtgcatactcatttgcaaggtccat

SEQ ID NO: 3671691 - DNA, 25 bp, Homo sapien
tttctaaatgatgtgcatactcatt

SEQ ID NO: 3671692 - DNA, 25 bp, Homo sapien
cctcgcaggcatctccattgttggg

SEQ ID NO: 3671693 - DNA, 25 bp, Homo sapien
gtcggcgagtgcctcgcaggcatct

SEQ ID NO: 3671694 - DNA, 25 bp, Homo sapien
tgggtagttccactgctgggagggt

SEQ ID NO: 3671695 - DNA, 25 bp, Homo sapien
tgctgggagggtcggcgagtgcctc

SEQ ID NO: 3671696 - DNA, 25 bp, Homo sapien
tgttgttttgtagtacatcctcaag

SEQ ID NO: 3671697 - DNA, 25 bp, Homo sapien
tgctgagcaccgtttgcatcttcat

SEQ ID NO: 3671698 - DNA, 25 bp, Homo sapien
tcccagtgctgagcaccgtttgcat

SEQ ID NO: 3671699 - DNA, 25 bp, Homo sapien
tgtagtacatcctcaagtcattttt

SEQ ID NO: 3671700 - DNA, 25 bp, Homo sapien
tgagtggaggaagtgttgattgcct

SEQ ID NO: 3671701 - DNA, 25 bp, Homo sapien
caacaaattgaaggctgtcctctcc

SEQ ID NO: 3671702 - DNA, 25 bp, Homo sapien
gctgattaaatgcagatccataagc

SEQ ID NO: 3671703 - DNA, 25 bp, Homo sapien
tccataagctttggcaagaagttga

SEQ ID NO: 3671704 - DNA, 25 bp, Homo sapien
tctggtactagtcccatcatgttct

SEQ ID NO: 3671705 - DNA, 25 bp, Homo sapien
tgaaatctggtactagtcccatcat

SEQ ID NO: 3671706 - DNA, 25 bp, Homo sapien
caacactgagatctcggtcttgctg

SEQ ID NO: 3671707 - DNA, 25 bp, Homo sapien
tctgcaacactgagatctcggtctt

SEQ ID NO: 3671708 - DNA, 25 bp, Homo sapien
ccaggtgcgtggacaattgcaggac

SEQ ID NO: 3671709 - DNA, 25 bp, Homo sapien
gaaattgaatcctgagaacccatgg

SEQ ID NO: 3671710 - DNA, 25 bp, Homo sapien
caggacaagtctctgaacaggtagg

SEQ ID NO: 3671711 - DNA, 25 bp, Homo sapien
gaacccatgggagttgctcaggtaa

SEQ ID NO: 3671712 - DNA, 25 bp, Homo sapien
ccacatccccttcccattcggcagc

SEQ ID NO: 3671713 - DNA, 25 bp, Homo sapien
catccccttcccattcggcagccat

SEQ ID NO: 3671714 - DNA, 25 bp, Homo sapien
ccatcccgtcttgggcccacatccc

SEQ ID NO: 3671715 - DNA, 25 bp, Homo sapien
aatccatcccgtcttgggcccacat

SEQ ID NO: 3671716 - DNA, 25 bp, Homo sapien
ttgctcaagcgcgatgggccagctg

SEQ ID NO: 3671717 - DNA, 25 bp, Homo sapien
ggccttgtctcttgctcaagcgcga

SEQ ID NO: 3671718 - DNA, 25 bp, Homo sapien
ctcaagcgcgatgggccagctgatg

SEQ ID NO: 3671719 - DNA, 25 bp, Homo sapien
tctcttgctcaagcgcgatgggcca

SEQ ID NO: 3671720 - DNA, 25 bp, Homo sapien
tgataaccatcttctatctgccttc

SEQ ID NO: 3671721 - DNA, 25 bp, Homo sapien
tcataaatgctcccatctttcatat

SEQ ID NO: 3671722 - DNA, 25 bp, Homo sapien
tgccactgctacaatagtcaggagg

SEQ ID NO: 3671723 - DNA, 25 bp, Homo sapien
tctgccactgctacaatagtcagga

SEQ ID NO: 3671724 - DNA, 25 bp, Homo sapien
gtgccagctcgggatctgcaggaac

SEQ ID NO: 3671725 - DNA, 25 bp, Homo sapien
caccacccgcctaggaatggcatag

SEQ ID NO: 3671726 - DNA, 25 bp, Homo sapien
ggcataggtgggctggtgccagctc

SEQ ID NO: 3671727 - DNA, 25 bp, Homo sapien
tgccagctcgggatctgcaggaacc

SEQ ID NO: 3671728 - DNA, 25 bp, Homo sapien
aaattgtcacccttataagagtctc

SEQ ID NO: 3671729 - DNA, 25 bp, Homo sapien
acagcactgctttctgaacgcttct

SEQ ID NO: 3671730 - DNA, 25 bp, Homo sapien
cctaaaattgtcacccttataagag

SEQ ID NO: 3671731 - DNA, 25 bp, Homo sapien
ttctaactggtttgttgagggagct

SEQ ID NO: 3671732 - DNA, 25 bp, Homo sapien
ttgaagttctattgaacttcaggag

SEQ ID NO: 3671733 - DNA, 25 bp, Homo sapien
ctcctctcgagtggctgaatacaac

SEQ ID NO: 3671734 - DNA, 25 bp, Homo sapien
tcctctcgagtggctgaatacaaca

SEQ ID NO: 3671735 - DNA, 25 bp, Homo sapien
cttgaagttctattgaacttcagga

SEQ ID NO: 3671736 - DNA, 25 bp, Homo sapien
ggggtgggcttggctagatttccag

SEQ ID NO: 3671737 - DNA, 25 bp, Homo sapien
ggtgggcttggctagatttccagga

SEQ ID NO: 3671738 - DNA, 25 bp, Homo sapien
gggggtgggcttggctagatttcca

SEQ ID NO: 3671739 - DNA, 25 bp, Homo sapien
gggtgggcttggctagatttccagg

SEQ ID NO: 3671740 - DNA, 25 bp, Homo sapien
catgtggtctgaactgccaggagtc

SEQ ID NO: 3671741 - DNA, 25 bp, Homo sapien
gccttccctcatcatgtggtctgaa

SEQ ID NO: 3671742 - DNA, 25 bp, Homo sapien
ccaggagtctgctgaacaggacgct

SEQ ID NO: 3671743 - DNA, 25 bp, Homo sapien
agtctgctgaacaggacgctgatcc

SEQ ID NO: 3671744 - DNA, 25 bp, Homo sapien
tgtgattctggaagatgactttgtc

SEQ ID NO: 3671745 - DNA, 25 bp, Homo sapien
tcaaaccaggacaaagatagcaggc

SEQ ID NO: 3671746 - DNA, 25 bp, Homo sapien
caagtaggattgcttcggcagaagc

SEQ ID NO: 3671747 - DNA, 25 bp, Homo sapien
cctgtgcaggatagactgaaggtag

SEQ ID NO: 3671748 - DNA, 25 bp, Homo sapien
cagctgctgctgatatgtctgttca

SEQ ID NO: 3671749 - DNA, 25 bp, Homo sapien
ccagccacgcctcgtggaatgatgc

SEQ ID NO: 3671750 - DNA, 25 bp, Homo sapien
cacgcctcgtggaatgatgctgcag

SEQ ID NO: 3671751 - DNA, 25 bp, Homo sapien
gctgctgatatgtctgttcacagca

SEQ ID NO: 3671752 - DNA, 25 bp, Homo sapien
ggcaagcactctcatcaggacctaa

SEQ ID NO: 3671753 - DNA, 25 bp, Homo sapien
tgggcaaggctactgcagcactgct

SEQ ID NO: 3671754 - DNA, 25 bp, Homo sapien
caccctctgtgcaggaatcatggca

SEQ ID NO: 3671755 - DNA, 25 bp, Homo sapien
gaccctagtggtcgtacatttgccg

SEQ ID NO: 3671756 - DNA, 25 bp, Homo sapien
gactgccctgctccgtgtctgtagc

SEQ ID NO: 3671757 - DNA, 25 bp, Homo sapien
gcagcagctaggtcctgaatcctgc

SEQ ID NO: 3671758 - DNA, 25 bp, Homo sapien
cctgaatcctgcaggactcatccat

SEQ ID NO: 3671759 - DNA, 25 bp, Homo sapien
ttcaggtaacaagtaggtgggtgca

SEQ ID NO: 3671760 - DNA, 25 bp, Homo sapien
gttcaagaggctgacttgggaaaat

SEQ ID NO: 3671761 - DNA, 25 bp, Homo sapien
tttgaaggtgtttcccaggaaggca

SEQ ID NO: 3671762 - DNA, 25 bp, Homo sapien
ctgcagatttgaaggtgtttcccag

SEQ ID NO: 3671763 - DNA, 25 bp, Homo sapien
ggcaggtagttcaagaggctgactt

SEQ ID NO: 3671764 - DNA, 25 bp, Homo sapien
cagattgggaagtctgaccttcccc

SEQ ID NO: 3671765 - DNA, 25 bp, Homo sapien
gccatgaacagcaaaatcagggtcc

SEQ ID NO: 3671766 - DNA, 25 bp, Homo sapien
tgaggggacacacacctggtgaaca

SEQ ID NO: 3671767 - DNA, 25 bp, Homo sapien
ggggacacacacctggtgaacacag

SEQ ID NO: 3671768 - DNA, 25 bp, Homo sapien
cattcagccataatgggagacaggt

SEQ ID NO: 3671769 - DNA, 25 bp, Homo sapien
cacacgcagttgcagcagggcggat

SEQ ID NO: 3671770 - DNA, 25 bp, Homo sapien
tcccactggaagagccacttacctt

SEQ ID NO: 3671771 - DNA, 25 bp, Homo sapien
gcggatgcctgcagaatgctcttct

SEQ ID NO: 3671772 - DNA, 25 bp, Homo sapien
tctctcatgggtgaaagactgcctc

SEQ ID NO: 3671773 - DNA, 25 bp, Homo sapien
cccctgattcctggggtcggcgaga

SEQ ID NO: 3671774 - DNA, 25 bp, Homo sapien
catgggtgaaagactgcctcaggga

SEQ ID NO: 3671775 - DNA, 25 bp, Homo sapien
gggtcggcgagagctgggttggagg

SEQ ID NO: 3671776 - DNA, 25 bp, Homo sapien
tgagagctcagatgcttgctggcat

SEQ ID NO: 3671777 - DNA, 25 bp, Homo sapien
cccgcccacgagaagggacatgctg

SEQ ID NO: 3671778 - DNA, 25 bp, Homo sapien
ccgcccacgagaagggacatgctgt

SEQ ID NO: 3671779 - DNA, 25 bp, Homo sapien
gtgcatttgagagctcagatgcttg

SEQ ID NO: 3671780 - DNA, 25 bp, Homo sapien
cagcagcctggtggcagtatgggag

SEQ ID NO: 3671781 - DNA, 25 bp, Homo sapien
tagtcccaacaaggaacagcacagt

SEQ ID NO: 3671782 - DNA, 25 bp, Homo sapien
gaagcctgctggtgcggctgtctta

SEQ ID NO: 3671783 - DNA, 25 bp, Homo sapien
cagtgagagcgttacagatgctgcc

SEQ ID NO: 3671784 - DNA, 25 bp, Homo sapien
agcctcgcccagtccttggagaagc

SEQ ID NO: 3671785 - DNA, 25 bp, Homo sapien
gccagggcgtggcagaggggtgcac

SEQ ID NO: 3671786 - DNA, 25 bp, Homo sapien
cccagccagggcgtggcagaggggt

SEQ ID NO: 3671787 - DNA, 25 bp, Homo sapien
cagggcgtggcagaggggtgcacgg

SEQ ID NO: 3671788 - DNA, 25 bp, Homo sapien
cagccagggcgtggcagaggggtgc

SEQ ID NO: 3671789 - DNA, 25 bp, Homo sapien
aaggcagggcatcagctttccatcg

SEQ ID NO: 3671790 - DNA, 25 bp, Homo sapien
ccaaaggcagggcatcagctttcca

SEQ ID NO: 3671791 - DNA, 25 bp, Homo sapien
ggcagggcatcagctttccatcggg

SEQ ID NO: 3671792 - DNA, 25 bp, Homo sapien
tttccatcggggctgtcagccctgg

SEQ ID NO: 3671793 - DNA, 25 bp, Homo sapien
ttagagcttcgaaggtggaggggtc

SEQ ID NO: 3671794 - DNA, 25 bp, Homo sapien
ttgtactttcccagagcagggggct

SEQ ID NO: 3671795 - DNA, 25 bp, Homo sapien
tagagcttcgaaggtggaggggtct

SEQ ID NO: 3671796 - DNA, 25 bp, Homo sapien
tcagaggtgaggtctttgtactttc

SEQ ID NO: 3671797 - DNA, 25 bp, Homo sapien
tacatgggtagcactggctcactca

SEQ ID NO: 3671798 - DNA, 25 bp, Homo sapien
gtgcacgtgtacatgggtagcactg

SEQ ID NO: 3671799 - DNA, 25 bp, Homo sapien
ggctcactcaggcagtcattcttac

SEQ ID NO: 3671800 - DNA, 25 bp, Homo sapien
cgtgtacatgggtagcactggctca

SEQ ID NO: 3671801 - DNA, 25 bp, Homo sapien
ctggcccaggtaggtataatgcact

SEQ ID NO: 3671802 - DNA, 25 bp, Homo sapien
ggcccaggtaggtataatgcacttc

SEQ ID NO: 3671803 - DNA, 25 bp, Homo sapien
tggcccaggtaggtataatgcactt

SEQ ID NO: 3671804 - DNA, 25 bp, Homo sapien
ctcagtttccagcagtacatagttt

SEQ ID NO: 3671805 - DNA, 25 bp, Homo sapien
taggggcaggggatgtctctgctcc

SEQ ID NO: 3671806 - DNA, 25 bp, Homo sapien
ctcctcagtttccagcagtacatag

SEQ ID NO: 3671807 - DNA, 25 bp, Homo sapien
gtaggggcaggggatgtctctgctc

SEQ ID NO: 3671808 - DNA, 25 bp, Homo sapien
atggcttccttgattgttcttttcg

SEQ ID NO: 3671809 - DNA, 25 bp, Homo sapien
gggggcaactcggattctgctctgt

SEQ ID NO: 3671810 - DNA, 25 bp, Homo sapien
tccttgattgttcttttcgtctttg

SEQ ID NO: 3671811 - DNA, 25 bp, Homo sapien
cagctggtgttgaatcagggcaggg

SEQ ID NO: 3671812 - DNA, 25 bp, Homo sapien
ggttcttagagtgtgcccaatccaa

SEQ ID NO: 3671813 - DNA, 25 bp, Homo sapien
gacatcagggatccaaaggcacaga

SEQ ID NO: 3671814 - DNA, 25 bp, Homo sapien
ggtaccaggctcttgcagaacgaat

SEQ ID NO: 3671815 - DNA, 25 bp, Homo sapien
catagttctgcagaccggaaggttc

SEQ ID NO: 3671816 - DNA, 25 bp, Homo sapien
cttctgggtgagattaatgctatta

SEQ ID NO: 3671817 - DNA, 25 bp, Homo sapien
agcaagaagactcacaccagatgct

SEQ ID NO: 3671818 - DNA, 25 bp, Homo sapien
gagccttcccagtgtgatgatttga

SEQ ID NO: 3671819 - DNA, 25 bp, Homo sapien
ccttcgggaggtgaaaggaccatga

SEQ ID NO: 3671820 - DNA, 25 bp, Homo sapien
ctcaaggtccatctcagagggcgtc

SEQ ID NO: 3671821 - DNA, 25 bp, Homo sapien
tctgggtatccggatcaaggccaag

SEQ ID NO: 3671822 - DNA, 25 bp, Homo sapien
cagagggcgtctgggtatccggatc

SEQ ID NO: 3671823 - DNA, 25 bp, Homo sapien
agagagcagacattggcacggccct

SEQ ID NO: 3671824 - DNA, 25 bp, Homo sapien
ggagggtatgtttggcagtaagttc

SEQ ID NO: 3671825 - DNA, 25 bp, Homo sapien
ttggcagtaagttcttatacttgta

SEQ ID NO: 3671826 - DNA, 25 bp, Homo sapien
ccatggcttggaggagggtatgttt

SEQ ID NO: 3671827 - DNA, 25 bp, Homo sapien
cagtaagttcttatacttgtaagga

SEQ ID NO: 3671828 - DNA, 25 bp, Homo sapien
tatggactgtagcatgggctgtgct

SEQ ID NO: 3671829 - DNA, 25 bp, Homo sapien
ggtgagtcctgttagaatcactgat

SEQ ID NO: 3671830 - DNA, 25 bp, Homo sapien
tcagggtgagtcctgttagaatcac

SEQ ID NO: 3671831 - DNA, 25 bp, Homo sapien
ctgtgctcagggtgagtcctgttag

SEQ ID NO: 3671832 - DNA, 25 bp, Homo sapien
agagaagagtcttggtgtcctgtca

SEQ ID NO: 3671833 - DNA, 25 bp, Homo sapien
catagggcccatcttgttggactgc

SEQ ID NO: 3671834 - DNA, 25 bp, Homo sapien
ggaaagtctcactgttaatgcaagg

SEQ ID NO: 3671835 - DNA, 25 bp, Homo sapien
tgttaatgcaaggagccaccagaag

SEQ ID NO: 3671836 - DNA, 25 bp, Homo sapien
aacactggctgagtctcacgggcct

SEQ ID NO: 3671837 - DNA, 25 bp, Homo sapien
cacgggcctgtgtcgtgcagagtat

SEQ ID NO: 3671838 - DNA, 25 bp, Homo sapien
gcagcctctggcatgagctgtttga

SEQ ID NO: 3671839 - DNA, 25 bp, Homo sapien
agccagggttggtgccttataagtt

SEQ ID NO: 3671840 - DNA, 25 bp, Homo sapien
tgatgaggacctgcagacagccatc

SEQ ID NO: 3671841 - DNA, 25 bp, Homo sapien
aatgacctagccaacagcatctggg

SEQ ID NO: 3671842 - DNA, 25 bp, Homo sapien
gtcatctattggcaatgacctagcc

SEQ ID NO: 3671843 - DNA, 25 bp, Homo sapien
gcctttcccgtgtgcgatctctgga

SEQ ID NO: 3671844 - DNA, 25 bp, Homo sapien
ccgtgtgcgatctctggagctggat

SEQ ID NO: 3671845 - DNA, 25 bp, Homo sapien
tatagaactcatagaggaagctggc

SEQ ID NO: 3671846 - DNA, 25 bp, Homo sapien
gttgcggacaaaaatgaccactcgt

SEQ ID NO: 3671847 - DNA, 25 bp, Homo sapien
tattgagagtagagctagggcccca

SEQ ID NO: 3671848 - DNA, 25 bp, Homo sapien
tcaacttggttgctaatgggaccca

SEQ ID NO: 3671849 - DNA, 25 bp, Homo sapien
gtgggaagttgtctgcaccctaaat

SEQ ID NO: 3671850 - DNA, 25 bp, Homo sapien
tgcattgaatgcatttctattgaca

SEQ ID NO: 3671851 - DNA, 25 bp, Homo sapien
aagttgtctgcaccctaaattttct

SEQ ID NO: 3671852 - DNA, 25 bp, Homo sapien
gcattgaatgcatttctattgacat

SEQ ID NO: 3671853 - DNA, 25 bp, Homo sapien
ggttaagcccttggactgtggatcg

SEQ ID NO: 3671854 - DNA, 25 bp, Homo sapien
tagctagagggccactgttccagtg

SEQ ID NO: 3671855 - DNA, 25 bp, Homo sapien
cctgcaaaggtgttaccgaatccct

SEQ ID NO: 3671856 - DNA, 25 bp, Homo sapien
taagccagctatgtgtaggcctgca

SEQ ID NO: 3671857 - DNA, 25 bp, Homo sapien
tcagagacctgttatttggcttaaa

SEQ ID NO: 3671858 - DNA, 25 bp, Homo sapien
gatgtcagagacctgttatttggct

SEQ ID NO: 3671859 - DNA, 25 bp, Homo sapien
gagttacttctcatgcattagaatt

SEQ ID NO: 3671860 - DNA, 25 bp, Homo sapien
tgagttacttctcatgcattagaat

SEQ ID NO: 3671861 - DNA, 25 bp, Homo sapien
caagcggacctaaggagtcgcagtt

SEQ ID NO: 3671862 - DNA, 25 bp, Homo sapien
gcactcggccgttgacgagtctttc

SEQ ID NO: 3671863 - DNA, 25 bp, Homo sapien
ccaagcggacctaaggagtcgcagt

SEQ ID NO: 3671864 - DNA, 25 bp, Homo sapien
gcgccggcgccagcactcggccgtt

SEQ ID NO: 3671865 - DNA, 25 bp, Homo sapien
ccttcagcaaggactccgcgagcga

SEQ ID NO: 3671866 - DNA, 25 bp, Homo sapien
tcagcaaggactccgcgagcgaggt

SEQ ID NO: 3671867 - DNA, 25 bp, Homo sapien
ctccgcgagcgaggtgcaagctgct

SEQ ID NO: 3671868 - DNA, 25 bp, Homo sapien
caaggactccgcgagcgaggtgcaa

SEQ ID NO: 3671869 - DNA, 25 bp, Homo sapien
aggaggaagtggactcccaatccag

SEQ ID NO: 3671870 - DNA, 25 bp, Homo sapien
tcctggcttttgcacggcatcaagt

SEQ ID NO: 3671871 - DNA, 25 bp, Homo sapien
aggaagtggactcccaatccagcca

SEQ ID NO: 3671872 - DNA, 25 bp, Homo sapien
aatccagccatagtccattcgcccc

SEQ ID NO: 3671873 - DNA, 25 bp, Homo sapien
caagtagctgggctggggattagat

SEQ ID NO: 3671874 - DNA, 25 bp, Homo sapien
cgccacgacgctggctttattttta

SEQ ID NO: 3671875 - DNA, 25 bp, Homo sapien
gggctggggattagatgggctccaa

SEQ ID NO: 3671876 - DNA, 25 bp, Homo sapien
agccttgcatgcaccggtgggatca

SEQ ID NO: 3671877 - DNA, 25 bp, Homo sapien
actttaattgctttagcagcatcaa

SEQ ID NO: 3671878 - DNA, 25 bp, Homo sapien
gcatataggagctaagaaaaagtac

SEQ ID NO: 3671879 - DNA, 25 bp, Homo sapien
cacccgtaagtaatgaccatctgaa

SEQ ID NO: 3671880 - DNA, 25 bp, Homo sapien
actgttctgtataaagtaggcaaat

SEQ ID NO: 3671881 - DNA, 25 bp, Homo sapien
aagaaaacaaaccagctcattactt

SEQ ID NO: 3671882 - DNA, 25 bp, Homo sapien
gcttaagttgctatagtgatgaaga

SEQ ID NO: 3671883 - DNA, 25 bp, Homo sapien
ccaagagttctaccacaagcacaga

SEQ ID NO: 3671884 - DNA, 25 bp, Homo sapien
gattcagtgaaaaccacaattgact

SEQ ID NO: 3671885 - DNA, 25 bp, Homo sapien
gaaggtgaacaggaccaacagagat

SEQ ID NO: 3671886 - DNA, 25 bp, Homo sapien
tcttatgtggtctgaatattgtcac

SEQ ID NO: 3671887 - DNA, 25 bp, Homo sapien
gaagttattcaataaagtcaaataa

SEQ ID NO: 3671888 - DNA, 25 bp, Homo sapien
taaagtcaaataataggtaaataca

SEQ ID NO: 3671889 - DNA, 25 bp, Homo sapien
ccacgagggcagactttgttatgtt

SEQ ID NO: 3671890 - DNA, 25 bp, Homo sapien
tatgttcactgctttaattcctggt

SEQ ID NO: 3671891 - DNA, 25 bp, Homo sapien
gttatgttcactgctttaattcctg

SEQ ID NO: 3671892 - DNA, 25 bp, Homo sapien
ctggcaagttagcaccacgagggca

SEQ ID NO: 3671893 - DNA, 25 bp, Homo sapien
tctctataatccattgcttctcaat

SEQ ID NO: 3671894 - DNA, 25 bp, Homo sapien
tataatccattgcttctcaatccca

SEQ ID NO: 3671895 - DNA, 25 bp, Homo sapien
aatccattgcttctcaatcccaagg

SEQ ID NO: 3671896 - DNA, 25 bp, Homo sapien
ccattgcttctcaatcccaaggagg

SEQ ID NO: 3671897 - DNA, 25 bp, Homo sapien
ttttacttcatctacactcacatca

SEQ ID NO: 3671898 - DNA, 25 bp, Homo sapien
tcaaggcgcccgctcggctgtgcag

SEQ ID NO: 3671899 - DNA, 25 bp, Homo sapien
cctagcacatgatgccggaccttgc

SEQ ID NO: 3671900 - DNA, 25 bp, Homo sapien
agtgtggcctcgcactgggaataac

SEQ ID NO: 3671901 - DNA, 25 bp, Homo sapien
ggctgtgcagtccatgggccaggcg

SEQ ID NO: 3671902 - DNA, 25 bp, Homo sapien
aggcccgccccgcagcaggctggcc

SEQ ID NO: 3671903 - DNA, 25 bp, Homo sapien
agcaggctggccagcttcttggcgt

SEQ ID NO: 3671904 - DNA, 25 bp, Homo sapien
ggcccgccccgcagcaggctggcca

SEQ ID NO: 3671905 - DNA, 25 bp, Homo sapien
ggctggccagcttcttggcgtccat

SEQ ID NO: 3671906 - DNA, 25 bp, Homo sapien
agcagatgttgacggagctgagcac

SEQ ID NO: 3671907 - DNA, 25 bp, Homo sapien
gcagcagatgttgacggagctgagc

SEQ ID NO: 3671908 - DNA, 25 bp, Homo sapien
cagcagatgttgacggagctgagca

SEQ ID NO: 3671909 - DNA, 25 bp, Homo sapien
ctggctgcgtgcagccggctggatg

SEQ ID NO: 3671910 - DNA, 25 bp, Homo sapien
tggctgcgtgcagccggctggatga

SEQ ID NO: 3671911 - DNA, 25 bp, Homo sapien
tagaccaccacgtcctgtggctcag

SEQ ID NO: 3671912 - DNA, 25 bp, Homo sapien
accaccacgtcctgtggctcagtgg

SEQ ID NO: 3671913 - DNA, 25 bp, Homo sapien
gaccaccacgtcctgtggctcagtg

SEQ ID NO: 3671914 - DNA, 25 bp, Homo sapien
accacgtcctgtggctcagtggcct

SEQ ID NO: 3671915 - DNA, 25 bp, Homo sapien
cagccggccacgctgtggaagcagc

SEQ ID NO: 3671916 - DNA, 25 bp, Homo sapien
aagccccccgtgatgatggccatgc

SEQ ID NO: 3671917 - DNA, 25 bp, Homo sapien
ccatgctgtggaagcagccggccac

SEQ ID NO: 3671918 - DNA, 25 bp, Homo sapien
gagaggaagctgtctgcggccgcgt

SEQ ID NO: 3671919 - DNA, 25 bp, Homo sapien
tgggcacgagcaggcaggactggga

SEQ ID NO: 3671920 - DNA, 25 bp, Homo sapien
gatccttgttcaggacgtcttcctg

SEQ ID NO: 3671921 - DNA, 25 bp, Homo sapien
tcgttgatggggacctgcaagaagt

SEQ ID NO: 3671922 - DNA, 25 bp, Homo sapien
caagaagtggctctggtagatgaag

SEQ ID NO: 3671923 - DNA, 25 bp, Homo sapien
gcgatagtggcacagcaggagatgc

SEQ ID NO: 3671924 - DNA, 25 bp, Homo sapien
tgccggccagatggtggacgatgac

SEQ ID NO: 3671925 - DNA, 25 bp, Homo sapien
acagcaggagatgccggccagatgg

SEQ ID NO: 3671926 - DNA, 25 bp, Homo sapien
aggcgatggcgatagtggcacagca

SEQ ID NO: 3671927 - DNA, 25 bp, Homo sapien
cctggcagccgcactcctggtggca

SEQ ID NO: 3671928 - DNA, 25 bp, Homo sapien
ggacgggcgctggtccttcacaaac

SEQ ID NO: 3671929 - DNA, 25 bp, Homo sapien
agcttcgggctgctctggtactcca

SEQ ID NO: 3671930 - DNA, 25 bp, Homo sapien
tggacgggcgctggtccttcacaaa

SEQ ID NO: 3671931 - DNA, 25 bp, Homo sapien
gaagttcaggccgcgcgcgggatag

SEQ ID NO: 3671932 - DNA, 25 bp, Homo sapien
tcgagcggtggcgtccaggctccgg

SEQ ID NO: 3671933 - DNA, 25 bp, Homo sapien
cggcagccgcgtagccgaagttcag

SEQ ID NO: 3671934 - DNA, 25 bp, Homo sapien
gggagtcgagcggtggcgtccaggc

SEQ ID NO: 3671935 - DNA, 25 bp, Homo sapien
tgcagccgttgggttccggggcgcc

SEQ ID NO: 3671936 - DNA, 25 bp, Homo sapien
gctgcagccgttgggttccggggcg

SEQ ID NO: 3671937 - DNA, 25 bp, Homo sapien
ggcccttgcacgccctcggggctga

SEQ ID NO: 3671938 - DNA, 25 bp, Homo sapien
ctgcagccgttgggttccggggcgc

SEQ ID NO: 3671939 - DNA, 25 bp, Homo sapien
cttgaagtgcgaatccggggccagc

SEQ ID NO: 3671940 - DNA, 25 bp, Homo sapien
tgaagtgcgaatccggggccagctc

SEQ ID NO: 3671941 - DNA, 25 bp, Homo sapien
aagtgcgaatccggggccagctcgt

SEQ ID NO: 3671942 - DNA, 25 bp, Homo sapien
gtgcgaatccggggccagctcgtct

SEQ ID NO: 3671943 - DNA, 25 bp, Homo sapien
gacctccacgctgcccgagaagctc

SEQ ID NO: 3671944 - DNA, 25 bp, Homo sapien
tatagttcttgggatagatcttaac

SEQ ID NO: 3671945 - DNA, 25 bp, Homo sapien
tcttgggatagatcttaacaccagc

SEQ ID NO: 3671946 - DNA, 25 bp, Homo sapien
gggatagatcttaacaccagcttta

SEQ ID NO: 3671947 - DNA, 25 bp, Homo sapien
gatagatcttaacaccagctttagc

SEQ ID NO: 3671948 - DNA, 25 bp, Homo sapien
gtgaacctccttgtgatcttttcca

SEQ ID NO: 3671949 - DNA, 25 bp, Homo sapien
ggctagaattgtctggatacaaaga

SEQ ID NO: 3671950 - DNA, 25 bp, Homo sapien
catgaggctagaattgtctggatac

SEQ ID NO: 3671951 - DNA, 25 bp, Homo sapien
actcctcaactcattccatgaggct

SEQ ID NO: 3671952 - DNA, 25 bp, Homo sapien
tccatgaggctagaattgtctggat

SEQ ID NO: 3671953 - DNA, 25 bp, Homo sapien
gctggagtgcaatcgggtgtgacct

SEQ ID NO: 3671954 - DNA, 25 bp, Homo sapien
tgcaatcgggtgtgacctcggctta

SEQ ID NO: 3671955 - DNA, 25 bp, Homo sapien
gagtgcaatcgggtgtgacctcggc

SEQ ID NO: 3671956 - DNA, 25 bp, Homo sapien
gcaatcgggtgtgacctcggcttac

SEQ ID NO: 3671957 - DNA, 25 bp, Homo sapien
gcctgaaggactcacttcagctttt

SEQ ID NO: 3671958 - DNA, 25 bp, Homo sapien
cctgaaggactcacttcagcttttt

SEQ ID NO: 3671959 - DNA, 25 bp, Homo sapien
tggagagagaaaggctacgtgactc

SEQ ID NO: 3671960 - DNA, 25 bp, Homo sapien
ctggagagagaaaggctacgtgact

SEQ ID NO: 3671961 - DNA, 25 bp, Homo sapien
caggtgatgaatggttttcaatacc

SEQ ID NO: 3671962 - DNA, 25 bp, Homo sapien
aggtgatgaatggttttcaatacca

SEQ ID NO: 3671963 - DNA, 25 bp, Homo sapien
gcaggtgatgaatggttttcaatac

SEQ ID NO: 3671964 - DNA, 25 bp, Homo sapien
tatttttattctaccatggtggccc

SEQ ID NO: 3671965 - DNA, 25 bp, Homo sapien
atggctttttaggatcggtctaatc

SEQ ID NO: 3671966 - DNA, 25 bp, Homo sapien
tgaaacatgaatccttcactcctcc

SEQ ID NO: 3671967 - DNA, 25 bp, Homo sapien
tcggtctaatcagatcctcatttct

SEQ ID NO: 3671968 - DNA, 25 bp, Homo sapien
tagccaagaacaaggtgtgatgtga

SEQ ID NO: 3671969 - DNA, 25 bp, Homo sapien
gccttaagcttctcgcccatcaggt

SEQ ID NO: 3671970 - DNA, 25 bp, Homo sapien
ttcttgaggttttgcctggatgacc

SEQ ID NO: 3671971 - DNA, 25 bp, Homo sapien
tgtgatgtgacttcccaattattgg

SEQ ID NO: 3671972 - DNA, 25 bp, Homo sapien
tgagggtgcgttttcctaccagttg

SEQ ID NO: 3671973 - DNA, 25 bp, Homo sapien
tatgaaacgcccatggtctctggat

SEQ ID NO: 3671974 - DNA, 25 bp, Homo sapien
ggtctcgaccatctcatcatgtgtt

SEQ ID NO: 3671975 - DNA, 25 bp, Homo sapien
gtttcgccagggtgcccacgctgtt

SEQ ID NO: 3671976 - DNA, 25 bp, Homo sapien
aggtttgagccgttgtccctgcctc

SEQ ID NO: 3671977 - DNA, 25 bp, Homo sapien
ttgagccgttgtccctgcctcaggc

SEQ ID NO: 3671978 - DNA, 25 bp, Homo sapien
ctcccaggtttgagccgttgtccct

SEQ ID NO: 3671979 - DNA, 25 bp, Homo sapien
tttgagccgttgtccctgcctcagg

SEQ ID NO: 3671980 - DNA, 25 bp, Homo sapien
cacaggccaaggttatctgacatca

SEQ ID NO: 3671981 - DNA, 25 bp, Homo sapien
gagattctcgctgagcacaggccaa

SEQ ID NO: 3671982 - DNA, 25 bp, Homo sapien
gaaatgactatgagggaacatgaag

SEQ ID NO: 3671983 - DNA, 25 bp, Homo sapien
gaccctgatcagtatatggcggacg

SEQ ID NO: 3671984 - DNA, 25 bp, Homo sapien
catgtcaggcaagtagggcttagaa

SEQ ID NO: 3671985 - DNA, 25 bp, Homo sapien
gaaggtgctactgttcagtgacccc

SEQ ID NO: 3671986 - DNA, 25 bp, Homo sapien
taaatgcatgtcaggcaagtagggc

SEQ ID NO: 3671987 - DNA, 25 bp, Homo sapien
ctaacaaggtcccaagagatgaagg

SEQ ID NO: 3671988 - DNA, 25 bp, Homo sapien
tctgctggattgtaaggtctcttct

SEQ ID NO: 3671989 - DNA, 25 bp, Homo sapien
ggatttctggtgtatgcatgtcaac

SEQ ID NO: 3671990 - DNA, 25 bp, Homo sapien
catagacctctaatctctgctggat

SEQ ID NO: 3671991 - DNA, 25 bp, Homo sapien
tcccttaccgattgcttgactcaga

SEQ ID NO: 3671992 - DNA, 25 bp, Homo sapien
gaattcatctagtcccaggcttcta

SEQ ID NO: 3671993 - DNA, 25 bp, Homo sapien
cagtaggattggcatgagctcccct

SEQ ID NO: 3671994 - DNA, 25 bp, Homo sapien
tttgaacaacccttacatcccagga

SEQ ID NO: 3671995 - DNA, 25 bp, Homo sapien
gaatcttttgaatctccgtgggact

SEQ ID NO: 3671996 - DNA, 25 bp, Homo sapien
tgtggaggtgatcacgcaggtacat

SEQ ID NO: 3671997 - DNA, 25 bp, Homo sapien
cagacgaaggcagtcaaggtgtgga

SEQ ID NO: 3671998 - DNA, 25 bp, Homo sapien
cagcagcgtgctgcagacgaaggca

SEQ ID NO: 3671999 - DNA, 25 bp, Homo sapien
tcaaggtgtggaggtgatcacgcag

SEQ ID NO: 3672000 - DNA, 25 bp, Homo sapien
gaatatgcttggttttgtccacttt

SEQ ID NO: 3672001 - DNA, 25 bp, Homo sapien
tagttgggaacacagtattcctgag

SEQ ID NO: 3672002 - DNA, 25 bp, Homo sapien
agatagagcttcagactggcccact

SEQ ID NO: 3672003 - DNA, 25 bp, Homo sapien
gtattcctgagctacacaactcaat

SEQ ID NO: 3672004 - DNA, 25 bp, Homo sapien
ggagatagcaccatgactaaacaat

SEQ ID NO: 3672005 - DNA, 25 bp, Homo sapien
atggagatagcaccatgactaaaca

SEQ ID NO: 3672006 - DNA, 25 bp, Homo sapien
catggagatagcaccatgactaaac

SEQ ID NO: 3672007 - DNA, 25 bp, Homo sapien
tggagatagcaccatgactaaacaa

SEQ ID NO: 3672008 - DNA, 25 bp, Homo sapien
caagaaacactgtaaatgcccaaaa

SEQ ID NO: 3672009 - DNA, 25 bp, Homo sapien
actgtaaatgcccaaaatgctgcag

SEQ ID NO: 3672010 - DNA, 25 bp, Homo sapien
cacttactgtaactgttgctaaagg

SEQ ID NO: 3672011 - DNA, 25 bp, Homo sapien
tagtttctgattgatcacttactgt

SEQ ID NO: 3672012 - DNA, 25 bp, Homo sapien
cagagctgagaaggatagaacagag

SEQ ID NO: 3672013 - DNA, 25 bp, Homo sapien
tggaaaggagagcaatgcagatgca

SEQ ID NO: 3672014 - DNA, 25 bp, Homo sapien
gacccactccacctgactagggaag

SEQ ID NO: 3672015 - DNA, 25 bp, Homo sapien
taaagggatcaattatgctgagctc

SEQ ID NO: 3672016 - DNA, 25 bp, Homo sapien
taaatgttgattgtagtactgtctc

SEQ ID NO: 3672017 - DNA, 25 bp, Homo sapien
ttcaggctgaatagatgaataactc

SEQ ID NO: 3672018 - DNA, 25 bp, Homo sapien
gactgctaaatgttgattgtagtac

SEQ ID NO: 3672019 - DNA, 25 bp, Homo sapien
tgaatagatgaataactcccaagat

SEQ ID NO: 3672020 - DNA, 25 bp, Homo sapien
taacaggacaaagtggagtctctcc

SEQ ID NO: 3672021 - DNA, 25 bp, Homo sapien
gcgagcctgagccaatccttgatgg

SEQ ID NO: 3672022 - DNA, 25 bp, Homo sapien
gaacaggagagcctagtagccagcg

SEQ ID NO: 3672023 - DNA, 25 bp, Homo sapien
cattcagggcctagtagatagcagg

SEQ ID NO: 3672024 - DNA, 25 bp, Homo sapien
acagcctggccactcgctggtgcac

SEQ ID NO: 3672025 - DNA, 25 bp, Homo sapien
agggatgcggttacacagcctggcc

SEQ ID NO: 3672026 - DNA, 25 bp, Homo sapien
tggccactcgctggtgcaccacagc

SEQ ID NO: 3672027 - DNA, 25 bp, Homo sapien
atgctcctcagggatgcggttacac

SEQ ID NO: 3672028 - DNA, 25 bp, Homo sapien
tgctagcgaagacccagtgtcctct

SEQ ID NO: 3672029 - DNA, 25 bp, Homo sapien
aacagctgagctgctagcgaagacc

SEQ ID NO: 3672030 - DNA, 25 bp, Homo sapien
tgagctgctagcgaagacccagtgt

SEQ ID NO: 3672031 - DNA, 25 bp, Homo sapien
gctgagctgctagcgaagacccagt

SEQ ID NO: 3672032 - DNA, 25 bp, Homo sapien
ggatcatagatgtcgcaacccaagc

SEQ ID NO: 3672033 - DNA, 25 bp, Homo sapien
agggagtctctggatcatagatgtc

SEQ ID NO: 3672034 - DNA, 25 bp, Homo sapien
tcgcaacccaagcaagtgtcctcag

SEQ ID NO: 3672035 - DNA, 25 bp, Homo sapien
gatgtcgcaacccaagcaagtgtcc

SEQ ID NO: 3672036 - DNA, 25 bp, Homo sapien
aaaggagggtgtcattgtgttactc

SEQ ID NO: 3672037 - DNA, 25 bp, Homo sapien
atcttatgtctatacattcatttca

SEQ ID NO: 3672038 - DNA, 25 bp, Homo sapien
tttcaatggataagaatcaaagtag

SEQ ID NO: 3672039 - DNA, 25 bp, Homo sapien
atcaaagtagagatagtgaaatagc

SEQ ID NO: 3672040 - DNA, 25 bp, Homo sapien
ttggagatgattctgtgcgaacgtc

SEQ ID NO: 3672041 - DNA, 25 bp, Homo sapien
aagtgtggtgttagggaaccatgcc

SEQ ID NO: 3672042 - DNA, 25 bp, Homo sapien
cttgaaaactggtcgaatgcgtcag

SEQ ID NO: 3672043 - DNA, 25 bp, Homo sapien
ccttggtgatataggctgttgatgc

SEQ ID NO: 3672044 - DNA, 25 bp, Homo sapien
ggttcttagagtgtgcccaatccaa

SEQ ID NO: 3672045 - DNA, 25 bp, Homo sapien
ggtaccaggctcttgcagaacgaat

SEQ ID NO: 3672046 - DNA, 25 bp, Homo sapien
catagttctgcagaccggaaggttc

SEQ ID NO: 3672047 - DNA, 25 bp, Homo sapien
gacatcagggatccaaaggcacaga

SEQ ID NO: 3672048 - DNA, 25 bp, Homo sapien
taggcagcagggttaggcaagctcc

SEQ ID NO: 3672049 - DNA, 25 bp, Homo sapien
tgcagttggcaagcccgcatatcct

SEQ ID NO: 3672050 - DNA, 25 bp, Homo sapien
gaagtcagggatagccagtagcaag

SEQ ID NO: 3672051 - DNA, 25 bp, Homo sapien
gagatatagtcagggatggcgtccc

SEQ ID NO: 3672052 - DNA, 25 bp, Homo sapien
cttctgggtgagattaatgctatta

SEQ ID NO: 3672053 - DNA, 25 bp, Homo sapien
agcaagaagactcacaccagatgct

SEQ ID NO: 3672054 - DNA, 25 bp, Homo sapien
gagccttcccagtgtgatgatttga

SEQ ID NO: 3672055 - DNA, 25 bp, Homo sapien
ccttcgggaggtgaaaggaccatga

SEQ ID NO: 3672056 - DNA, 25 bp, Homo sapien
ctcaaggtccatctcagagggcgtc

SEQ ID NO: 3672057 - DNA, 25 bp, Homo sapien
tctgggtatccggatcaaggccaag

SEQ ID NO: 3672058 - DNA, 25 bp, Homo sapien
cagagggcgtctgggtatccggatc

SEQ ID NO: 3672059 - DNA, 25 bp, Homo sapien
agagagcagacattggcacggccct

SEQ ID NO: 3672060 - DNA, 25 bp, Homo sapien
ggagggtatgtttggcagtaagttc

SEQ ID NO: 3672061 - DNA, 25 bp, Homo sapien
ttggcagtaagttcttatacttgta

SEQ ID NO: 3672062 - DNA, 25 bp, Homo sapien
ccatggcttggaggagggtatgttt

SEQ ID NO: 3672063 - DNA, 25 bp, Homo sapien
cagtaagttcttatacttgtaagga

SEQ ID NO: 3672064 - DNA, 25 bp, Homo sapien
cactgggcatgggtttgtactcaga

SEQ ID NO: 3672065 - DNA, 25 bp, Homo sapien
gaaaggagaaattgatggtgcccat

SEQ ID NO: 3672066 - DNA, 25 bp, Homo sapien
gccgaggaatggtcttgtaagtagc

SEQ ID NO: 3672067 - DNA, 25 bp, Homo sapien
tacataaacagattggtagccctgg

SEQ ID NO: 3672068 - DNA, 25 bp, Homo sapien
tcagggtgagtcctgttagaatcac

SEQ ID NO: 3672069 - DNA, 25 bp, Homo sapien
ggtgagtcctgttagaatcactgat

SEQ ID NO: 3672070 - DNA, 25 bp, Homo sapien
ctgtgctcagggtgagtcctgttag

SEQ ID NO: 3672071 - DNA, 25 bp, Homo sapien
tatggactgtagcatgggctgtgct

SEQ ID NO: 3672072 - DNA, 25 bp, Homo sapien
agagaagagtcttggtgtcctgtca

SEQ ID NO: 3672073 - DNA, 25 bp, Homo sapien
catagggcccatcttgttggactgc

SEQ ID NO: 3672074 - DNA, 25 bp, Homo sapien
ggaaagtctcactgttaatgcaagg

SEQ ID NO: 3672075 - DNA, 25 bp, Homo sapien
tgttaatgcaaggagccaccagaag

SEQ ID NO: 3672076 - DNA, 25 bp, Homo sapien
aacactggctgagtctcacgggcct

SEQ ID NO: 3672077 - DNA, 25 bp, Homo sapien
cacgggcctgtgtcgtgcagagtat

SEQ ID NO: 3672078 - DNA, 25 bp, Homo sapien
gcagcctctggcatgagctgtttga

SEQ ID NO: 3672079 - DNA, 25 bp, Homo sapien
agccagggttggtgccttataagtt

SEQ ID NO: 3672080 - DNA, 25 bp, Homo sapien
taaacaaagacagcggcaacagtgc

SEQ ID NO: 3672081 - DNA, 25 bp, Homo sapien
gggagctccgcggacagacttgcaa

SEQ ID NO: 3672082 - DNA, 25 bp, Homo sapien
gctccttgttggaaagttgtcccat

SEQ ID NO: 3672083 - DNA, 25 bp, Homo sapien
tccgcggacagacttgcaagagacc

SEQ ID NO: 3672084 - DNA, 25 bp, Homo sapien
ggcagtgcctgctaacaggccagag

SEQ ID NO: 3672085 - DNA, 25 bp, Homo sapien
gcagtgcctgctaacaggccagaga

SEQ ID NO: 3672086 - DNA, 25 bp, Homo sapien
gtggcagtgcctgctaacaggccag

SEQ ID NO: 3672087 - DNA, 25 bp, Homo sapien
tggcagtgcctgctaacaggccaga

SEQ ID NO: 3672088 - DNA, 25 bp, Homo sapien
ttcctctccgcctggtcaccatctc

SEQ ID NO: 3672089 - DNA, 25 bp, Homo sapien
ctctccgcctggtcaccatctccgt

SEQ ID NO: 3672090 - DNA, 25 bp, Homo sapien
gcctggtcaccatctccgtcctccc

SEQ ID NO: 3672091 - DNA, 25 bp, Homo sapien
ccactgttcctctccgcctggtcac

SEQ ID NO: 3672092 - DNA, 25 bp, Homo sapien
ggtggagttccagtggtgaccacga

SEQ ID NO: 3672093 - DNA, 25 bp, Homo sapien
tggtcaccagaagatgcagcggcgt

SEQ ID NO: 3672094 - DNA, 25 bp, Homo sapien
tgtccctgttctcggaaggcctttc

SEQ ID NO: 3672095 - DNA, 25 bp, Homo sapien
cgtcatgtctgcattgtgggatagg

SEQ ID NO: 3672096 - DNA, 25 bp, Homo sapien
tgaggccccacaaagcgtgtaaatg

SEQ ID NO: 3672097 - DNA, 25 bp, Homo sapien
cgggtcccagaaacctacagagaga

SEQ ID NO: 3672098 - DNA, 25 bp, Homo sapien
tggaaaggcgtttgaactacctaca

SEQ ID NO: 3672099 - DNA, 25 bp, Homo sapien
cattctgaggacacctgtccgggtc

SEQ ID NO: 3672100 - DNA, 25 bp, Homo sapien
tgcgcagcgaacaggcacccccttc

SEQ ID NO: 3672101 - DNA, 25 bp, Homo sapien
ctgcgcagcgaacaggcaccccctt

SEQ ID NO: 3672102 - DNA, 25 bp, Homo sapien
caggcacccccttccggtacacaca

SEQ ID NO: 3672103 - DNA, 25 bp, Homo sapien
ctgagtaacagagacgcgggccgtc

SEQ ID NO: 3672104 - DNA, 25 bp, Homo sapien
agacgcgggccgtcaccgcgcacgc

SEQ ID NO: 3672105 - DNA, 25 bp, Homo sapien
cgtcaccgcgcacgcccgcgcacgt

SEQ ID NO: 3672106 - DNA, 25 bp, Homo sapien
gagtaacagagacgcgggccgtcac

SEQ ID NO: 3672107 - DNA, 25 bp, Homo sapien
ggccgttacccagcgctgctcgcgg

SEQ ID NO: 3672108 - DNA, 25 bp, Homo sapien
aatccaagccgcgtcgtccggcctc

SEQ ID NO: 3672109 - DNA, 25 bp, Homo sapien
gctgctcgcggctccgcaatccaag

SEQ ID NO: 3672110 - DNA, 25 bp, Homo sapien
gcagcgcagcgaacggcgacaggga

SEQ ID NO: 3672111 - DNA, 25 bp, Homo sapien
ggacccacgcgaagaggacgcgaga

SEQ ID NO: 3672112 - DNA, 25 bp, Homo sapien
aagaggacgcgagaggacaggcggg

SEQ ID NO: 3672113 - DNA, 25 bp, Homo sapien
aggacccacgcgaagaggacgcgag

SEQ ID NO: 3672114 - DNA, 25 bp, Homo sapien
aggacgcgagaggacaggcgggcgg

SEQ ID NO: 3672115 - DNA, 25 bp, Homo sapien
gttcgcccagaacgttagcacaaag

SEQ ID NO: 3672116 - DNA, 25 bp, Homo sapien
tgctgcctgcgttcgcccagaacgt

SEQ ID NO: 3672117 - DNA, 25 bp, Homo sapien
agaaagcatcgagaagcaaaatacg

SEQ ID NO: 3672118 - DNA, 25 bp, Homo sapien
gaacgttagcacaaagaaagcatcg

SEQ ID NO: 3672119 - DNA, 25 bp, Homo sapien
aagctcgggccaagctggatggaca

SEQ ID NO: 3672120 - DNA, 25 bp, Homo sapien
gagaaatgcgcgctgaccaccgaag

SEQ ID NO: 3672121 - DNA, 25 bp, Homo sapien
accaccgaagctcgggccaagctgg

SEQ ID NO: 3672122 - DNA, 25 bp, Homo sapien
atgcgcgctgaccaccgaagctcgg

SEQ ID NO: 3672123 - DNA, 25 bp, Homo sapien
tgtcaggcacagcactaaacatgtt

SEQ ID NO: 3672124 - DNA, 25 bp, Homo sapien
ttacaaatgactgtaaggctgcaag

SEQ ID NO: 3672125 - DNA, 25 bp, Homo sapien
tatattccaggctaggtggtggaga

SEQ ID NO: 3672126 - DNA, 25 bp, Homo sapien
ttagagcatctgacctcctaggttt

SEQ ID NO: 3672127 - DNA, 25 bp, Homo sapien
tgtttaatcatgaggctacaacctc

SEQ ID NO: 3672128 - DNA, 25 bp, Homo sapien
acatctggaccaaggattttgaaca

SEQ ID NO: 3672129 - DNA, 25 bp, Homo sapien
ttggataacacggtagatgtgctac

SEQ ID NO: 3672130 - DNA, 25 bp, Homo sapien
aactaggtggctacacagagtagaa

SEQ ID NO: 3672131 - DNA, 25 bp, Homo sapien
tattacctgagagggaacatactcc

SEQ ID NO: 3672132 - DNA, 25 bp, Homo sapien
gaattcccatagctgttctatgccc

SEQ ID NO: 3672133 - DNA, 25 bp, Homo sapien
caccgtgggaacctaagaatagaca

SEQ ID NO: 3672134 - DNA, 25 bp, Homo sapien
actaagttgccacaagcgagtgaac

SEQ ID NO: 3672135 - DNA, 25 bp, Homo sapien
tgtgatgaaatgatgctttacctct

SEQ ID NO: 3672136 - DNA, 25 bp, Homo sapien
gaaatgatgctttacctctgtgatt

SEQ ID NO: 3672137 - DNA, 25 bp, Homo sapien
tgaaatgatgctttacctctgtgat

SEQ ID NO: 3672138 - DNA, 25 bp, Homo sapien
gatgaaatgatgctttacctctgtg

SEQ ID NO: 3672139 - DNA, 25 bp, Homo sapien
gacttattctaaaagagcagcctta

SEQ ID NO: 3672140 - DNA, 25 bp, Homo sapien
tgcaaggctggttctaaaatctact

SEQ ID NO: 3672141 - DNA, 25 bp, Homo sapien
caccataaccaggagagatttatcc

SEQ ID NO: 3672142 - DNA, 25 bp, Homo sapien
aagctacagaccagtatctttcatg

SEQ ID NO: 3672143 - DNA, 25 bp, Homo sapien
caagataacgttgtctcatggccag

SEQ ID NO: 3672144 - DNA, 25 bp, Homo sapien
cactcgtgtatgaccctgcgcaagt

SEQ ID NO: 3672145 - DNA, 25 bp, Homo sapien
taattaactggtgctcgcaatgcca

SEQ ID NO: 3672146 - DNA, 25 bp, Homo sapien
caaagggccaactaactcaaagcaa

SEQ ID NO: 3672147 - DNA, 25 bp, Homo sapien
cacacagctcatgcacctagaaagt

SEQ ID NO: 3672148 - DNA, 25 bp, Homo sapien
tactggcagtcaacctgcagatgtg

SEQ ID NO: 3672149 - DNA, 25 bp, Homo sapien
taatgaaacttaggcaacgtctggg

SEQ ID NO: 3672150 - DNA, 25 bp, Homo sapien
aaagagtgccattgtgtgagaaaac

SEQ ID NO: 3672151 - DNA, 25 bp, Homo sapien
tcaacgttataactcgttattggtc

SEQ ID NO: 3672152 - DNA, 25 bp, Homo sapien
gggaggatatctctccaccttgatt

SEQ ID NO: 3672153 - DNA, 25 bp, Homo sapien
tctggctatgaatccttttggttca

SEQ ID NO: 3672154 - DNA, 25 bp, Homo sapien
taccaacatctagtaaaatctggct

SEQ ID NO: 3672155 - DNA, 25 bp, Homo sapien
gcaccagaaattggcatagggatcc

SEQ ID NO: 3672156 - DNA, 25 bp, Homo sapien
taggtaagtcctataactgtcctgc

SEQ ID NO: 3672157 - DNA, 25 bp, Homo sapien
tcagacactagcaacagacagaagg

SEQ ID NO: 3672158 - DNA, 25 bp, Homo sapien
tctttgcgtccatgtgtacccactg

SEQ ID NO: 3672159 - DNA, 25 bp, Homo sapien
gactgatgtgaaactccccaaaagg

SEQ ID NO: 3672160 - DNA, 25 bp, Homo sapien
taacacaagaggacagacgattcag

SEQ ID NO: 3672161 - DNA, 25 bp, Homo sapien
tattgggtcaagcaatgaaaccgga

SEQ ID NO: 3672162 - DNA, 25 bp, Homo sapien
gatcctggtaagaaaacagtctgcc

SEQ ID NO: 3672163 - DNA, 25 bp, Homo sapien
ggaaaactttcaactctgggatgga

SEQ ID NO: 3672164 - DNA, 25 bp, Homo sapien
tatgtatcgctttatcacaggtgca

SEQ ID NO: 3672165 - DNA, 25 bp, Homo sapien
tgcaaattatacaagggtcagctgg

SEQ ID NO: 3672166 - DNA, 25 bp, Homo sapien
ggttcccgaccagcaaaatcactat

SEQ ID NO: 3672167 - DNA, 25 bp, Homo sapien
ttattgtaacaaggctaagtgagga

SEQ ID NO: 3672168 - DNA, 25 bp, Homo sapien
tagtgttgttcacaagatgcagaaa

SEQ ID NO: 3672169 - DNA, 25 bp, Homo sapien
cttattcacggtaaatctgtcttcc

SEQ ID NO: 3672170 - DNA, 25 bp, Homo sapien
tcttctgggtgtgaccttattcacg

SEQ ID NO: 3672171 - DNA, 25 bp, Homo sapien
tacagaactgaagcaaatagccccg

SEQ ID NO: 3672172 - DNA, 25 bp, Homo sapien
aaaactcctgaggtaccaccatgtg

SEQ ID NO: 3672173 - DNA, 25 bp, Homo sapien
gataccaatgtgtgctttcagggaa

SEQ ID NO: 3672174 - DNA, 25 bp, Homo sapien
gaaacgaattaacgcagtgagctcc

SEQ ID NO: 3672175 - DNA, 25 bp, Homo sapien
ttgatcctaggcaacttctgattcc

SEQ ID NO: 3672176 - DNA, 25 bp, Homo sapien
tctttgatcctaggcaacttctgat

SEQ ID NO: 3672177 - DNA, 25 bp, Homo sapien
gatcctaggcaacttctgattcctt

SEQ ID NO: 3672178 - DNA, 25 bp, Homo sapien
tttctttgatcctaggcaacttctg

SEQ ID NO: 3672179 - DNA, 25 bp, Homo sapien
agtacattccgcaaactatggcatg

SEQ ID NO: 3672180 - DNA, 25 bp, Homo sapien
tgtcatgccatgactgtaacacatg

SEQ ID NO: 3672181 - DNA, 25 bp, Homo sapien
ggcatactgcatcaccaaagttatt

SEQ ID NO: 3672182 - DNA, 25 bp, Homo sapien
tggcatgtaacatgctacccagtaa

SEQ ID NO: 3672183 - DNA, 25 bp, Homo sapien
ttcccagagcgtggcatagctggag

SEQ ID NO: 3672184 - DNA, 25 bp, Homo sapien
cattaacacatgcaggttcccagag

SEQ ID NO: 3672185 - DNA, 25 bp, Homo sapien
ggagaaggcatgaaaactccatgcc

SEQ ID NO: 3672186 - DNA, 25 bp, Homo sapien
tgagtcgataaaccaatggccaatg

SEQ ID NO: 3672187 - DNA, 25 bp, Homo sapien
tctctctaatctggtcttcttactt

SEQ ID NO: 3672188 - DNA, 25 bp, Homo sapien
ctctctaatctggtcttcttacttt

SEQ ID NO: 3672189 - DNA, 25 bp, Homo sapien
aatggaggcatttagtctgtttacc

SEQ ID NO: 3672190 - DNA, 25 bp, Homo sapien
gtttctgccaaagagattcactgtt

SEQ ID NO: 3672191 - DNA, 25 bp, Homo sapien
ccaaagagattcactgttagtctga

SEQ ID NO: 3672192 - DNA, 25 bp, Homo sapien
caaccttgatgaattggcaattatg

SEQ ID NO: 3672193 - DNA, 25 bp, Homo sapien
taatagtccagagttaagtgggaga

SEQ ID NO: 3672194 - DNA, 25 bp, Homo sapien
catgtggtgggcaataacgtatctc

SEQ ID NO: 3672195 - DNA, 25 bp, Homo sapien
tgctctgtcacctcctagggagtta

SEQ ID NO: 3672196 - DNA, 25 bp, Homo sapien
taagcaacttttgtagtcactccct

SEQ ID NO: 3672197 - DNA, 25 bp, Homo sapien
tggctacaaccagtctgtaaagaag

SEQ ID NO: 3672198 - DNA, 25 bp, Homo sapien
tgtctaccacttggactaaatcctg

SEQ ID NO: 3672199 - DNA, 25 bp, Homo sapien
tgttggctccctaatgaataggttc

SEQ ID NO: 3672200 - DNA, 25 bp, Homo sapien
cctgttattagattctagcctgacc

SEQ ID NO: 3672201 - DNA, 25 bp, Homo sapien
tacaggtttcagataactatggaga

SEQ ID NO: 3672202 - DNA, 25 bp, Homo sapien
tgttaatgaagattgctaagccaac

SEQ ID NO: 3672203 - DNA, 25 bp, Homo sapien
tggagatgataccattggactaggt

SEQ ID NO: 3672204 - DNA, 25 bp, Homo sapien
catgggactgaactgatagaggact

SEQ ID NO: 3672205 - DNA, 25 bp, Homo sapien
gcactgtcagacaagaaatagtgtt

SEQ ID NO: 3672206 - DNA, 25 bp, Homo sapien
tatgccttggtatatgcagtaaact

SEQ ID NO: 3672207 - DNA, 25 bp, Homo sapien
cagttgtattgatatgtgttccaaa

SEQ ID NO: 3672208 - DNA, 25 bp, Homo sapien
caagtagctcacattcaggtgcatg

SEQ ID NO: 3672209 - DNA, 25 bp, Homo sapien
gagattttcttgagctcatgctgcc

SEQ ID NO: 3672210 - DNA, 25 bp, Homo sapien
caggtagtgttaacaggagatagta

SEQ ID NO: 3672211 - DNA, 25 bp, Homo sapien
gctgactgggatcagatggatctgt

SEQ ID NO: 3672212 - DNA, 25 bp, Homo sapien
aaagtactagatacatgggaaacac

SEQ ID NO: 3672213 - DNA, 25 bp, Homo sapien
ctctgtgcttgaaatataaatttgc

SEQ ID NO: 3672214 - DNA, 25 bp, Homo sapien
tactcttttggattctgttaacatg

SEQ ID NO: 3672215 - DNA, 25 bp, Homo sapien
agttttacttgtctcatggctagaa

SEQ ID NO: 3672216 - DNA, 25 bp, Homo sapien
gggcttcaggcatatacaataaact

SEQ ID NO: 3672217 - DNA, 25 bp, Homo sapien
gcaggattcacagtaagccaccctt

SEQ ID NO: 3672218 - DNA, 25 bp, Homo sapien
tacataagtctttggtgaaggtgct

SEQ ID NO: 3672219 - DNA, 25 bp, Homo sapien
tatcagagctatccatgctgagtcc

SEQ ID NO: 3672220 - DNA, 25 bp, Homo sapien
gagtcactagaaacttaccattggc

SEQ ID NO: 3672221 - DNA, 25 bp, Homo sapien
agcaattaatttaatggcttcatcc

SEQ ID NO: 3672222 - DNA, 25 bp, Homo sapien
tggcttcatccaaaaattcaccaag

SEQ ID NO: 3672223 - DNA, 25 bp, Homo sapien
gatggcaagcaattaatttaatggc

SEQ ID NO: 3672224 - DNA, 25 bp, Homo sapien
aatttaatggcttcatccaaaaatt

SEQ ID NO: 3672225 - DNA, 25 bp, Homo sapien
tctgatatcgtttcaggactgtgaa

SEQ ID NO: 3672226 - DNA, 25 bp, Homo sapien
gagctcctgagcctataggttttaa

SEQ ID NO: 3672227 - DNA, 25 bp, Homo sapien
aaattgttgtcacgcttgcttctgc

SEQ ID NO: 3672228 - DNA, 25 bp, Homo sapien
taaattctgatatcgtttcaggact

SEQ ID NO: 3672229 - DNA, 25 bp, Homo sapien
tgtaggcccgcttggcatgagtctg

SEQ ID NO: 3672230 - DNA, 25 bp, Homo sapien
taagaactagctctctgtaggcccg

SEQ ID NO: 3672231 - DNA, 25 bp, Homo sapien
tgagtctgattctgaaatggtcggc

SEQ ID NO: 3672232 - DNA, 25 bp, Homo sapien
ggtcggcttagcttcttgattgcaa

SEQ ID NO: 3672233 - DNA, 25 bp, Homo sapien
tgatgagcaacacatcaagttcccg

SEQ ID NO: 3672234 - DNA, 25 bp, Homo sapien
gggcacgagcagctctatccatgga

SEQ ID NO: 3672235 - DNA, 25 bp, Homo sapien
gcagctctatccatggacaggatgc

SEQ ID NO: 3672236 - DNA, 25 bp, Homo sapien
ggccacaaggggcacgagcagctct

SEQ ID NO: 3672237 - DNA, 25 bp, Homo sapien
tcttctagggatttctgtggtgtga

SEQ ID NO: 3672238 - DNA, 25 bp, Homo sapien
atcacttggcaaagatttgcatcca

SEQ ID NO: 3672239 - DNA, 25 bp, Homo sapien
aaggtgcttgattccacacagcatc

SEQ ID NO: 3672240 - DNA, 25 bp, Homo sapien
catctgaatcacttggcaaagattt

SEQ ID NO: 3672241 - DNA, 25 bp, Homo sapien
cacagcatctgatagagaaggtagg

SEQ ID NO: 3672242 - DNA, 25 bp, Homo sapien
tagaatttaatatgggtggtagttg

SEQ ID NO: 3672243 - DNA, 25 bp, Homo sapien
tatgggtggtagttgtacagcactg

SEQ ID NO: 3672244 - DNA, 25 bp, Homo sapien
tatgacgatagtttcttctactaac

SEQ ID NO: 3672245 - DNA, 25 bp, Homo sapien
aaagagtatgacgatagtttcttct

SEQ ID NO: 3672246 - DNA, 25 bp, Homo sapien
tcaagaatcttcaaagtgcaatcag

SEQ ID NO: 3672247 - DNA, 25 bp, Homo sapien
gtgcaatcagattttactactatat

SEQ ID NO: 3672248 - DNA, 25 bp, Homo sapien
ctactatattactgggctttaagtc

SEQ ID NO: 3672249 - DNA, 25 bp, Homo sapien
cctggccagaccgaagtcaagaatc

SEQ ID NO: 3672250 - DNA, 25 bp, Homo sapien
atgacctcgggtgctctgtagtagc

SEQ ID NO: 3672251 - DNA, 25 bp, Homo sapien
tgacctcgggtgctctgtagtagcg

SEQ ID NO: 3672252 - DNA, 25 bp, Homo sapien
tagatacagtaagtcagttcccacg

SEQ ID NO: 3672253 - DNA, 25 bp, Homo sapien
cccaaaaggaacaagtgcacagaga

SEQ ID NO: 3672254 - DNA, 25 bp, Homo sapien
gacttactgatgacccttgccaact

SEQ ID NO: 3672255 - DNA, 25 bp, Homo sapien
gggaaactgacaacacatcgtggca

SEQ ID NO: 3672256 - DNA, 25 bp, Homo sapien
gattttgtggcaaaccatttctccc

SEQ ID NO: 3672257 - DNA, 25 bp, Homo sapien
ctggaaagaggattttgtggcaaac

SEQ ID NO: 3672258 - DNA, 25 bp, Homo sapien
taatgcaccccacagaccataaatc

SEQ ID NO: 3672259 - DNA, 25 bp, Homo sapien
ttctcccataatgcaccccacagac

SEQ ID NO: 3672260 - DNA, 25 bp, Homo sapien
caaaacaccacctttgatcatttct

SEQ ID NO: 3672261 - DNA, 25 bp, Homo sapien
tgtaaccttgtgaatatgccttttc

SEQ ID NO: 3672262 - DNA, 25 bp, Homo sapien
accttgtgaatatgccttttcccat

SEQ ID NO: 3672263 - DNA, 25 bp, Homo sapien
aaccttgtgaatatgccttttccca

SEQ ID NO: 3672264 - DNA, 25 bp, Homo sapien
ttattgtaaccttgtgaatatgcct

SEQ ID NO: 3672265 - DNA, 25 bp, Homo sapien
tatccatagtggctctaactgcaaa

SEQ ID NO: 3672266 - DNA, 25 bp, Homo sapien
caaaaggcaatgattgtaggtggac

SEQ ID NO: 3672267 - DNA, 25 bp, Homo sapien
taaaggcttcgataaaagtggcatt

SEQ ID NO: 3672268 - DNA, 25 bp, Homo sapien
tagtctttacactccaggaccctga

SEQ ID NO: 3672269 - DNA, 25 bp, Homo sapien
ttcctaagaaaggatgtggcagtta

SEQ ID NO: 3672270 - DNA, 25 bp, Homo sapien
attcctaagaaaggatgtggcagtt

SEQ ID NO: 3672271 - DNA, 25 bp, Homo sapien
aaaaatactccataactaatgttca

SEQ ID NO: 3672272 - DNA, 25 bp, Homo sapien
aaaatactccataactaatgttcaa

SEQ ID NO: 3672273 - DNA, 25 bp, Homo sapien
ctgttttcaacgtaagtccttactg

SEQ ID NO: 3672274 - DNA, 25 bp, Homo sapien
caacgtaagtccttactgttggttg

SEQ ID NO: 3672275 - DNA, 25 bp, Homo sapien
agagtttctcaaagctatatccagc

SEQ ID NO: 3672276 - DNA, 25 bp, Homo sapien
caggacatggtgttccaagctgttc

SEQ ID NO: 3672277 - DNA, 25 bp, Homo sapien
tacacaccccaaatgggattaaatg

SEQ ID NO: 3672278 - DNA, 25 bp, Homo sapien
caccccaaatgggattaaatgtaca

SEQ ID NO: 3672279 - DNA, 25 bp, Homo sapien
cacaccccaaatgggattaaatgta

SEQ ID NO: 3672280 - DNA, 25 bp, Homo sapien
taaatgtacatatttgtaaaaagta

SEQ ID NO: 3672281 - DNA, 25 bp, Homo sapien
taaagattctcaaattattaataac

SEQ ID NO: 3672282 - DNA, 25 bp, Homo sapien
atccagagaaaaccttgggttcatg

SEQ ID NO: 3672283 - DNA, 25 bp, Homo sapien
cataatggtgttaatgtacatatat

SEQ ID NO: 3672284 - DNA, 25 bp, Homo sapien
catgtcccataagaatatgaataca

SEQ ID NO: 3672285 - DNA, 25 bp, Homo sapien
ttggataacaaatcccttgcctgac

SEQ ID NO: 3672286 - DNA, 25 bp, Homo sapien
tttggataacaaatcccttgcctga

SEQ ID NO: 3672287 - DNA, 25 bp, Homo sapien
gataacaaatcccttgcctgactgg

SEQ ID NO: 3672288 - DNA, 25 bp, Homo sapien
tggataacaaatcccttgcctgact

SEQ ID NO: 3672289 - DNA, 25 bp, Homo sapien
gatccttttagatgcatctattacc

SEQ ID NO: 3672290 - DNA, 25 bp, Homo sapien
gagcttcatctacagagatcctttt

SEQ ID NO: 3672291 - DNA, 25 bp, Homo sapien
taccagacattgatgtacgggtgtt

SEQ ID NO: 3672292 - DNA, 25 bp, Homo sapien
atgtacgggtgttggagagcttcat

SEQ ID NO: 3672293 - DNA, 25 bp, Homo sapien
ttctaactctaagaatgcaatatgt

SEQ ID NO: 3672294 - DNA, 25 bp, Homo sapien
cctccaaacctaactgtcattctaa

SEQ ID NO: 3672295 - DNA, 25 bp, Homo sapien
aggtctcctccaaacctaactgtca

SEQ ID NO: 3672296 - DNA, 25 bp, Homo sapien
gcaatatgttctgtaaacattaaga

SEQ ID NO: 3672297 - DNA, 25 bp, Homo sapien
gcattcaacatcctagttctctggt

SEQ ID NO: 3672298 - DNA, 25 bp, Homo sapien
taaccaagtcagtatgctgggagta

SEQ ID NO: 3672299 - DNA, 25 bp, Homo sapien
gcaagattgcaaaaaacagtgggag

SEQ ID NO: 3672300 - DNA, 25 bp, Homo sapien
ttctctggttaggtatccaggcaag

SEQ ID NO: 3672301 - DNA, 25 bp, Homo sapien
actcttctattgtgtgttccctttc

SEQ ID NO: 3672302 - DNA, 25 bp, Homo sapien
ttccactcttctattgtgtgttccc

SEQ ID NO: 3672303 - DNA, 25 bp, Homo sapien
aactgcttgtcagggatctttggtg

SEQ ID NO: 3672304 - DNA, 25 bp, Homo sapien
tttcatctaactgcttgtcagggat

SEQ ID NO: 3672305 - DNA, 25 bp, Homo sapien
gagacagagcactaatgtgtctgtg

SEQ ID NO: 3672306 - DNA, 25 bp, Homo sapien
tctctaacatgataataaatcacca

SEQ ID NO: 3672307 - DNA, 25 bp, Homo sapien
ccacatttcggttatgcatattaaa

SEQ ID NO: 3672308 - DNA, 25 bp, Homo sapien
aaaatatgagacagagcactaatgt

SEQ ID NO: 3672309 - DNA, 25 bp, Homo sapien
caaaatacttcatcgtctactgtaa

SEQ ID NO: 3672310 - DNA, 25 bp, Homo sapien
tcaaatgcagcagactctatccaat

SEQ ID NO: 3672311 - DNA, 25 bp, Homo sapien
cccaaagttcagagaaaaccaatct

SEQ ID NO: 3672312 - DNA, 25 bp, Homo sapien
tcacgggctctgctaaccatgggtt

SEQ ID NO: 3672313 - DNA, 25 bp, Homo sapien
taaatgtcggcctaagattcaagga

SEQ ID NO: 3672314 - DNA, 25 bp, Homo sapien
tgtactaccatctgtctcagggagg

SEQ ID NO: 3672315 - DNA, 25 bp, Homo sapien
ggtgcactgtgggtactcaactaga

SEQ ID NO: 3672316 - DNA, 25 bp, Homo sapien
aagaagaaccttcggccatgtgtgg

SEQ ID NO: 3672317 - DNA, 25 bp, Homo sapien
agtccataacttccttatatatcaa

SEQ ID NO: 3672318 - DNA, 25 bp, Homo sapien
agggctgcccccgtataactccatt

SEQ ID NO: 3672319 - DNA, 25 bp, Homo sapien
cgtataactccattcttggttctct

SEQ ID NO: 3672320 - DNA, 25 bp, Homo sapien
tcctccaagtccataacttccttat

SEQ ID NO: 3672321 - DNA, 25 bp, Homo sapien
cacatcattgacagacgacgatgat

SEQ ID NO: 3672322 - DNA, 25 bp, Homo sapien
gacattgaagacacatcattgacag

SEQ ID NO: 3672323 - DNA, 25 bp, Homo sapien
ggccaaagtcggatctgttgacatt

SEQ ID NO: 3672324 - DNA, 25 bp, Homo sapien
tgctgcttctagactgctgtctgta

SEQ ID NO: 3672325 - DNA, 25 bp, Homo sapien
ttgataagcacataaccctgaagga

SEQ ID NO: 3672326 - DNA, 25 bp, Homo sapien
taggcaagtcaccacataatagttg

SEQ ID NO: 3672327 - DNA, 25 bp, Homo sapien
tattcctgaatataactggctacaa

SEQ ID NO: 3672328 - DNA, 25 bp, Homo sapien
tatcaatgactaaccgactccccat

SEQ ID NO: 3672329 - DNA, 25 bp, Homo sapien
gacataaggtggtggtagacgccca

SEQ ID NO: 3672330 - DNA, 25 bp, Homo sapien
caagtagcaaatattggaggtctcc

SEQ ID NO: 3672331 - DNA, 25 bp, Homo sapien
taggattgcctaccaattcttgtaa

SEQ ID NO: 3672332 - DNA, 25 bp, Homo sapien
ctttgagcatgccacaaatttgtag

SEQ ID NO: 3672333 - DNA, 25 bp, Homo sapien
gacattgcatgttgagccgcacctg

SEQ ID NO: 3672334 - DNA, 25 bp, Homo sapien
tctaacagggcaacagcttacttgg

SEQ ID NO: 3672335 - DNA, 25 bp, Homo sapien
taaatggaccgatatcacgagcagg

SEQ ID NO: 3672336 - DNA, 25 bp, Homo sapien
gaacaactggtgctcaactgacaga

SEQ ID NO: 3672337 - DNA, 25 bp, Homo sapien
tctaccaagaactaggttaagggca

SEQ ID NO: 3672338 - DNA, 25 bp, Homo sapien
gaccagatcaaccagataatcagcg

SEQ ID NO: 3672339 - DNA, 25 bp, Homo sapien
taatcagcgtgatcatttaggctct

SEQ ID NO: 3672340 - DNA, 25 bp, Homo sapien
caaatctaagaaaccggccctagca

SEQ ID NO: 3672341 - DNA, 25 bp, Homo sapien
gatcagatgctgctccaaccatgca

SEQ ID NO: 3672342 - DNA, 25 bp, Homo sapien
tagcgcttagcccttacccaggaaa

SEQ ID NO: 3672343 - DNA, 25 bp, Homo sapien
gggacggtaccaagagtagcgctta

SEQ ID NO: 3672344 - DNA, 25 bp, Homo sapien
ccagccttgtatggagttagaagcg

SEQ ID NO: 3672345 - DNA, 25 bp, Homo sapien
accgaagaggaaagcgctacccagg

SEQ ID NO: 3672346 - DNA, 25 bp, Homo sapien
cactcacaggcccatgaaggcagac

SEQ ID NO: 3672347 - DNA, 25 bp, Homo sapien
tccaagggctagtgggaaatttgcc

SEQ ID NO: 3672348 - DNA, 25 bp, Homo sapien
gattcatgccactcaagcagtgggc

SEQ ID NO: 3672349 - DNA, 25 bp, Homo sapien
cattgttttgcgtgtccttggactc

SEQ ID NO: 3672350 - DNA, 25 bp, Homo sapien
tctagatggatgaggttgacagatg

SEQ ID NO: 3672351 - DNA, 25 bp, Homo sapien
gataaaccaggtgttactgtgatgc

SEQ ID NO: 3672352 - DNA, 25 bp, Homo sapien
gatgggtgatttctagataaaccag

SEQ ID NO: 3672353 - DNA, 25 bp, Homo sapien
tctgagtcctggcatttcctgtttc

SEQ ID NO: 3672354 - DNA, 25 bp, Homo sapien
tgtttcttctcttgctgtcagccat

SEQ ID NO: 3672355 - DNA, 25 bp, Homo sapien
ctgagtcctggcatttcctgtttct

SEQ ID NO: 3672356 - DNA, 25 bp, Homo sapien
ctttctgagtcctggcatttcctgt

SEQ ID NO: 3672357 - DNA, 25 bp, Homo sapien
agcacccagtctgcatcaacaactt

SEQ ID NO: 3672358 - DNA, 25 bp, Homo sapien
gggccactttgttatgatgagtcct

SEQ ID NO: 3672359 - DNA, 25 bp, Homo sapien
agcagcacccagtctgcatcaacaa

SEQ ID NO: 3672360 - DNA, 25 bp, Homo sapien
tgggccctatggagccattgttgag

SEQ ID NO: 3672361 - DNA, 25 bp, Homo sapien
tggtgcattcatgcctggcccagca

SEQ ID NO: 3672362 - DNA, 25 bp, Homo sapien
tatctggtgcattcatgcctggccc

SEQ ID NO: 3672363 - DNA, 25 bp, Homo sapien
gcattcatgcctggcccagcatgga

SEQ ID NO: 3672364 - DNA, 25 bp, Homo sapien
tcaagtatctggtgcattcatgcct

SEQ ID NO: 3672365 - DNA, 25 bp, Homo sapien
ggtcaacgctgctggcctccagggt

SEQ ID NO: 3672366 - DNA, 25 bp, Homo sapien
gggtgggggctcgacagcacatagc

SEQ ID NO: 3672367 - DNA, 25 bp, Homo sapien
tcctgtggcctttcagctggagggt

SEQ ID NO: 3672368 - DNA, 25 bp, Homo sapien
tccagggttagggggttggctctca

SEQ ID NO: 3672369 - DNA, 25 bp, Homo sapien
cttgaggcttctggctccactcgat

SEQ ID NO: 3672370 - DNA, 25 bp, Homo sapien
gacttcttctccactcggtgtcctg

SEQ ID NO: 3672371 - DNA, 25 bp, Homo sapien
gaagggccgctctttgtgacttctt

SEQ ID NO: 3672372 - DNA, 25 bp, Homo sapien
ccactcgatttctgagaagggccgc

SEQ ID NO: 3672373 - DNA, 25 bp, Homo sapien
tggcccccctgtcaggctctgcctt

SEQ ID NO: 3672374 - DNA, 25 bp, Homo sapien
cccctgtcaggctctgccttgaagg

SEQ ID NO: 3672375 - DNA, 25 bp, Homo sapien
tctgccttgaaggagatcatctgca

SEQ ID NO: 3672376 - DNA, 25 bp, Homo sapien
gcccccctgtcaggctctgccttga

SEQ ID NO: 3672377 - DNA, 25 bp, Homo sapien
tatgctccataagccctgcccattg

SEQ ID NO: 3672378 - DNA, 25 bp, Homo sapien
gactggtaggcccttagatcctgac

SEQ ID NO: 3672379 - DNA, 25 bp, Homo sapien
gcccataaacctgcctgagttgctc

SEQ ID NO: 3672380 - DNA, 25 bp, Homo sapien
gatcctgacacgtgctcattctctg

SEQ ID NO: 3672381 - DNA, 25 bp, Homo sapien
tgaaaggtcagtgagcaggatctga

SEQ ID NO: 3672382 - DNA, 25 bp, Homo sapien
ctctaaaagcagagggctcatgtac

SEQ ID NO: 3672383 - DNA, 25 bp, Homo sapien
caggatctgatttgtagaggataag

SEQ ID NO: 3672384 - DNA, 25 bp, Homo sapien
atcctgggttccaggtgctcccaaa

SEQ ID NO: 3672385 - DNA, 25 bp, Homo sapien
taaattgaatctcatggcatctgct

SEQ ID NO: 3672386 - DNA, 25 bp, Homo sapien
tgtcctgtggttaactgagataacc

SEQ ID NO: 3672387 - DNA, 25 bp, Homo sapien
gcttcatgcggttgtcctgtggtta

SEQ ID NO: 3672388 - DNA, 25 bp, Homo sapien
tactacctcattggtcttgggcaag

SEQ ID NO: 3672389 - DNA, 25 bp, Homo sapien
caaatatgaagactgttaggaccta

SEQ ID NO: 3672390 - DNA, 25 bp, Homo sapien
taggacctacatatttgccaaagcc

SEQ ID NO: 3672391 - DNA, 25 bp, Homo sapien
ggcctctattgagaagacttagaat

SEQ ID NO: 3672392 - DNA, 25 bp, Homo sapien
tagtgataccacaatagttcaaaat

SEQ ID NO: 3672393 - DNA, 25 bp, Homo sapien
gaggaccacagataggcttggtcca

SEQ ID NO: 3672394 - DNA, 25 bp, Homo sapien
ataggcttggtccaggcttccacca

SEQ ID NO: 3672395 - DNA, 25 bp, Homo sapien
ccatgggaggaccacagataggctt

SEQ ID NO: 3672396 - DNA, 25 bp, Homo sapien
accacagataggcttggtccaggct

SEQ ID NO: 3672397 - DNA, 25 bp, Homo sapien
cacatcagacccatgtctctgatgg

SEQ ID NO: 3672398 - DNA, 25 bp, Homo sapien
ggtctcttccaaggagccacgagag

SEQ ID NO: 3672399 - DNA, 25 bp, Homo sapien
gcgaaaactgtctacaccctgtaaa

SEQ ID NO: 3672400 - DNA, 25 bp, Homo sapien
tctctgatggctaaggctgtagcga

SEQ ID NO: 3672401 - DNA, 25 bp, Homo sapien
tcttcgttcccgctgctttgcagac

SEQ ID NO: 3672402 - DNA, 25 bp, Homo sapien
cagtatttcctcaagcaggccaggg

SEQ ID NO: 3672403 - DNA, 25 bp, Homo sapien
gagacagctgggtgcaagcgagggt

SEQ ID NO: 3672404 - DNA, 25 bp, Homo sapien
tgcaagcgagggtcttcgttcccgc

SEQ ID NO: 3672405 - DNA, 25 bp, Homo sapien
ctcctctggcacccgccttgcccat

SEQ ID NO: 3672406 - DNA, 25 bp, Homo sapien
gccctcctctggcacccgccttgcc

SEQ ID NO: 3672407 - DNA, 25 bp, Homo sapien
tgccctcctctggcacccgccttgc

SEQ ID NO: 3672408 - DNA, 25 bp, Homo sapien
cctcctctggcacccgccttgccca

SEQ ID NO: 3672409 - DNA, 25 bp, Homo sapien
cactgctggcagagatgtaagggga

SEQ ID NO: 3672410 - DNA, 25 bp, Homo sapien
ctgctggcagagatgtaaggggatt

SEQ ID NO: 3672411 - DNA, 25 bp, Homo sapien
agatgtaaggggattgtgagaaccc

SEQ ID NO: 3672412 - DNA, 25 bp, Homo sapien
taaggggattgtgagaacccaggta

SEQ ID NO: 3672413 - DNA, 25 bp, Homo sapien
agtgatgatttggatgggttgtaca

SEQ ID NO: 3672414 - DNA, 25 bp, Homo sapien
attcggcttgttgtgcaggtgctga

SEQ ID NO: 3672415 - DNA, 25 bp, Homo sapien
tgtgcaggtgctgactgggtgagct

SEQ ID NO: 3672416 - DNA, 25 bp, Homo sapien
gactatgcaggtgatgattgggtgg

SEQ ID NO: 3672417 - DNA, 25 bp, Homo sapien
tcattccaagacgagcgtccagtcc

SEQ ID NO: 3672418 - DNA, 25 bp, Homo sapien
aagacgagcgtccagtccgcgctct

SEQ ID NO: 3672419 - DNA, 25 bp, Homo sapien
cagctgtgcccgcttagctggtgta

SEQ ID NO: 3672420 - DNA, 25 bp, Homo sapien
gctggtgtatgacctgcctttgaac

SEQ ID NO: 3672421 - DNA, 25 bp, Homo sapien
gtttctcggtcatctctgcacccag

SEQ ID NO: 3672422 - DNA, 25 bp, Homo sapien
gtttattccggccacagcctctgga

SEQ ID NO: 3672423 - DNA, 25 bp, Homo sapien
gcagcatggtgctctggtttaccaa

SEQ ID NO: 3672424 - DNA, 25 bp, Homo sapien
tcataggtcagctctcttattccag

SEQ ID NO: 3672425 - DNA, 25 bp, Homo sapien
gagtaaaaaccgcaagtgcccagga

SEQ ID NO: 3672426 - DNA, 25 bp, Homo sapien
gcccaggagccttaatgtcccgatt

SEQ ID NO: 3672427 - DNA, 25 bp, Homo sapien
ggacagcgctgacccggagtaaaaa

SEQ ID NO: 3672428 - DNA, 25 bp, Homo sapien
ggtatgaatattcgttccacctcat

SEQ ID NO: 3672429 - DNA, 25 bp, Homo sapien
caccggatttgaaagagttggtata

SEQ ID NO: 3672430 - DNA, 25 bp, Homo sapien
aaatatgcaccggatttgaaagagt

SEQ ID NO: 3672431 - DNA, 25 bp, Homo sapien
ttgcagcagaaatttagtatccaaa

SEQ ID NO: 3672432 - DNA, 25 bp, Homo sapien
aatgtaaaatatgcaccggatttga

SEQ ID NO: 3672433 - DNA, 25 bp, Homo sapien
aggacccggccccacatcgtcagtc

SEQ ID NO: 3672434 - DNA, 25 bp, Homo sapien
gcccctcaggctcgggggaagagga

SEQ ID NO: 3672435 - DNA, 25 bp, Homo sapien
cggccccacatcgtcagtcctcagc

SEQ ID NO: 3672436 - DNA, 25 bp, Homo sapien
gaagaggacccggccccacatcgtc

SEQ ID NO: 3672437 - DNA, 25 bp, Homo sapien
tctgaggcccgttggaaatggccct

SEQ ID NO: 3672438 - DNA, 25 bp, Homo sapien
ccagggttcccttcatagcaggacc

SEQ ID NO: 3672439 - DNA, 25 bp, Homo sapien
ctaccgtcagaggtcgaggagtgct

SEQ ID NO: 3672440 - DNA, 25 bp, Homo sapien
agcaggaccccgagaaaggacttga

SEQ ID NO: 3672441 - DNA, 25 bp, Homo sapien
caaaggatcggtttagtgttctaga

SEQ ID NO: 3672442 - DNA, 25 bp, Homo sapien
ccccacactttagatgagttgggac

SEQ ID NO: 3672443 - DNA, 25 bp, Homo sapien
agtccttactgagcaggtggccctg

SEQ ID NO: 3672444 - DNA, 25 bp, Homo sapien
aaatgcaggcgtttcaatggtttgc

SEQ ID NO: 3672445 - DNA, 25 bp, Homo sapien
gtcactcggatagggtaaaggtgtc

SEQ ID NO: 3672446 - DNA, 25 bp, Homo sapien
taggggcactgtcccgcccttctgt

SEQ ID NO: 3672447 - DNA, 25 bp, Homo sapien
ctgttcctgtcactcggatagggta

SEQ ID NO: 3672448 - DNA, 25 bp, Homo sapien
tcctgtcactcggatagggtaaagg

SEQ ID NO: 3672449 - DNA, 25 bp, Homo sapien
ctgcctgtcactggtaattctgcca

SEQ ID NO: 3672450 - DNA, 25 bp, Homo sapien
ggtcctgggaatcactgtggggctc

SEQ ID NO: 3672451 - DNA, 25 bp, Homo sapien
ggagcggtcctgggaatcactgtgg

SEQ ID NO: 3672452 - DNA, 25 bp, Homo sapien
gctgcctgtcactggtaattctgcc

SEQ ID NO: 3672453 - DNA, 25 bp, Homo sapien
ggacacaatgtggagacacgagcag

SEQ ID NO: 3672454 - DNA, 25 bp, Homo sapien
gatgtcaggacagggccgtagagat

SEQ ID NO: 3672455 - DNA, 25 bp, Homo sapien
agctggtttgttggatgtcaggaca

SEQ ID NO: 3672456 - DNA, 25 bp, Homo sapien
gagtctgtccaatctcgggtctcct

SEQ ID NO: 3672457 - DNA, 25 bp, Homo sapien
ctgagtggcgccatgtgtaagtgtt

SEQ ID NO: 3672458 - DNA, 25 bp, Homo sapien
catgtgtaagtgttggctacaaggt

SEQ ID NO: 3672459 - DNA, 25 bp, Homo sapien
tgtgacttacttctgagtggcgcca

SEQ ID NO: 3672460 - DNA, 25 bp, Homo sapien
cattgtgacttacttctgagtggcg

SEQ ID NO: 3672461 - DNA, 25 bp, Homo sapien
gcaaaaaccaggtgagcgtggctgt

SEQ ID NO: 3672462 - DNA, 25 bp, Homo sapien
ggggcaaaaaccaggtgagcgtggc

SEQ ID NO: 3672463 - DNA, 25 bp, Homo sapien
ccctggggcaaaaaccaggtgagcg

SEQ ID NO: 3672464 - DNA, 25 bp, Homo sapien
cctggggcaaaaaccaggtgagcgt

SEQ ID NO: 3672465 - DNA, 25 bp, Homo sapien
gtcttcagcctttgaaagatcttct

SEQ ID NO: 3672466 - DNA, 25 bp, Homo sapien
tgtcttcagcctttgaaagatcttc

SEQ ID NO: 3672467 - DNA, 25 bp, Homo sapien
ccagcatgtcccagagagctgtggg

SEQ ID NO: 3672468 - DNA, 25 bp, Homo sapien
ttccagcatgtcccagagagctgtg

SEQ ID NO: 3672469 - DNA, 25 bp, Homo sapien
caatggggctcttgtgagtcaactg

SEQ ID NO: 3672470 - DNA, 25 bp, Homo sapien
gctcaatggggctcttgtgagtcaa

SEQ ID NO: 3672471 - DNA, 25 bp, Homo sapien
gaatagggggagaagactcaacagg

SEQ ID NO: 3672472 - DNA, 25 bp, Homo sapien
agaagactcaacaggctcttctgac

SEQ ID NO: 3672473 - DNA, 25 bp, Homo sapien
atagggggagaagactcaacaggct

SEQ ID NO: 3672474 - DNA, 25 bp, Homo sapien
gggagaagactcaacaggctcttct

SEQ ID NO: 3672475 - DNA, 25 bp, Homo sapien
ttgttgagatcccattaggctcttc

SEQ ID NO: 3672476 - DNA, 25 bp, Homo sapien
gttgagatcccattaggctcttcct

SEQ ID NO: 3672477 - DNA, 25 bp, Homo sapien
tgttgagatcccattaggctcttcc

SEQ ID NO: 3672478 - DNA, 25 bp, Homo sapien
gctgtgcacattccgggcatccgtg

SEQ ID NO: 3672479 - DNA, 25 bp, Homo sapien
tttcgcttaagctcctgctcaaaga

SEQ ID NO: 3672480 - DNA, 25 bp, Homo sapien
ggaaggcagttttgctgccccgctt

SEQ ID NO: 3672481 - DNA, 25 bp, Homo sapien
tgctcaaagacctgaatgagttctt

SEQ ID NO: 3672482 - DNA, 25 bp, Homo sapien
gggcaagctggtcagacacgtcttc

SEQ ID NO: 3672483 - DNA, 25 bp, Homo sapien
cagatgatccccacggagtgttccc

SEQ ID NO: 3672484 - DNA, 25 bp, Homo sapien
ctgggcaagctggtcagacacgtct

SEQ ID NO: 3672485 - DNA, 25 bp, Homo sapien
agactgggaaagcagatgatcccca

SEQ ID NO: 3672486 - DNA, 25 bp, Homo sapien
gcaagtagccatcctgatccacgtc

SEQ ID NO: 3672487 - DNA, 25 bp, Homo sapien
cgagtctgtccccgtgagcacgtac

SEQ ID NO: 3672488 - DNA, 25 bp, Homo sapien
cgtgagcacgtacactgacttcagg

SEQ ID NO: 3672489 - DNA, 25 bp, Homo sapien
ctgacttcaggagcaagtagccatc

SEQ ID NO: 3672490 - DNA, 25 bp, Homo sapien
ggtaaaggcactgtaggagcagggc

SEQ ID NO: 3672491 - DNA, 25 bp, Homo sapien
ttgaacttgaagatcactctcaaga

SEQ ID NO: 3672492 - DNA, 25 bp, Homo sapien
ttgaagatcactctcaagaagctca

SEQ ID NO: 3672493 - DNA, 25 bp, Homo sapien
gaagatcactctcaagaagctcatc

SEQ ID NO: 3672494 - DNA, 25 bp, Homo sapien
gcctcagtttgtatggacccaggat

SEQ ID NO: 3672495 - DNA, 25 bp, Homo sapien
tatggacccaggatgacaacactat

SEQ ID NO: 3672496 - DNA, 25 bp, Homo sapien
ggacccaggatgacaacactattta

SEQ ID NO: 3672497 - DNA, 25 bp, Homo sapien
cagtttgtatggacccaggatgaca

SEQ ID NO: 3672498 - DNA, 25 bp, Homo sapien
gacctcgaagacagaccctgcacta

SEQ ID NO: 3672499 - DNA, 25 bp, Homo sapien
acctcgaagacagaccctgcactac

SEQ ID NO: 3672500 - DNA, 25 bp, Homo sapien
ccctgcactacttcccttcagggca

SEQ ID NO: 3672501 - DNA, 25 bp, Homo sapien
agctgtgctcccgaaggcaggtcgt

SEQ ID NO: 3672502 - DNA, 25 bp, Homo sapien
tggagattgcccttagcacgcagaa

SEQ ID NO: 3672503 - DNA, 25 bp, Homo sapien
gagagtcactgcaaatattgagcaa

SEQ ID NO: 3672504 - DNA, 25 bp, Homo sapien
caggtcgtggcaatcagcagagact

SEQ ID NO: 3672505 - DNA, 25 bp, Homo sapien
tcacgaatcccaagatcaggcttac

SEQ ID NO: 3672506 - DNA, 25 bp, Homo sapien
ggcttacagcctcgctcacttcagg

SEQ ID NO: 3672507 - DNA, 25 bp, Homo sapien
cagggagagtgtccgtgagcctgga

SEQ ID NO: 3672508 - DNA, 25 bp, Homo sapien
ctttgagcagcagaggatagccctc

SEQ ID NO: 3672509 - DNA, 25 bp, Homo sapien
ctgagggtaagtgatgctgtcaaac

SEQ ID NO: 3672510 - DNA, 25 bp, Homo sapien
agctcctccagatgcgggtccactt

SEQ ID NO: 3672511 - DNA, 25 bp, Homo sapien
gatgcctcatgatggaacttgaagc

SEQ ID NO: 3672512 - DNA, 25 bp, Homo sapien
cagatgcgggtccacttcgctctgg

SEQ ID NO: 3672513 - DNA, 25 bp, Homo sapien
tgtacctttcgcaggatctcatgag

SEQ ID NO: 3672514 - DNA, 25 bp, Homo sapien
gaagaagtttcgagcattccaggcc

SEQ ID NO: 3672515 - DNA, 25 bp, Homo sapien
acgtagtgcagctcgaacaccaggg

SEQ ID NO: 3672516 - DNA, 25 bp, Homo sapien
ttccgaagctgtgccagtagcaggc

SEQ ID NO: 3672517 - DNA, 25 bp, Homo sapien
agattggcccaaaggtcaggcctgg

SEQ ID NO: 3672518 - DNA, 25 bp, Homo sapien
ccagattggcccaaaggtcaggcct

SEQ ID NO: 3672519 - DNA, 25 bp, Homo sapien
tctgttgcatttgatgggcagccag

SEQ ID NO: 3672520 - DNA, 25 bp, Homo sapien
gcatttgatgggcagccagattggc

SEQ ID NO: 3672521 - DNA, 25 bp, Homo sapien
acaccaggagtggacactttgtttc

SEQ ID NO: 3672522 - DNA, 25 bp, Homo sapien
ctgaacaccaggagtggacactttg

SEQ ID NO: 3672523 - DNA, 25 bp, Homo sapien
gaacaccaggagtggacactttgtt

SEQ ID NO: 3672524 - DNA, 25 bp, Homo sapien
tgaacaccaggagtggacactttgt

SEQ ID NO: 3672525 - DNA, 25 bp, Homo sapien
cgagcctttcagaagtgtgactaca

SEQ ID NO: 3672526 - DNA, 25 bp, Homo sapien
gcattcctcaccgagcctttcagaa

SEQ ID NO: 3672527 - DNA, 25 bp, Homo sapien
gcatcacacaggtgagttctctttc

SEQ ID NO: 3672528 - DNA, 25 bp, Homo sapien
agaagtgtgactacaatcctcagca

SEQ ID NO: 3672529 - DNA, 25 bp, Homo sapien
tcctcggcgttgatggctgagagct

SEQ ID NO: 3672530 - DNA, 25 bp, Homo sapien
aatgatgctcatgtactcctcggcg

SEQ ID NO: 3672531 - DNA, 25 bp, Homo sapien
ggtagcactcgtcatccaggaagat

SEQ ID NO: 3672532 - DNA, 25 bp, Homo sapien
tgatgaagggcaccatgccgtggtc

SEQ ID NO: 3672533 - DNA, 25 bp, Homo sapien
aaatgtggatcgcttggtgcatatc

SEQ ID NO: 3672534 - DNA, 25 bp, Homo sapien
gatcgcttggtgcatatccacaggg

SEQ ID NO: 3672535 - DNA, 25 bp, Homo sapien
agccaatctcaaaggaggacttgaa

SEQ ID NO: 3672536 - DNA, 25 bp, Homo sapien
cctgagcaaatgtggatcgcttggt

SEQ ID NO: 3672537 - DNA, 25 bp, Homo sapien
ctgccacatacagtggctaactgaa

SEQ ID NO: 3672538 - DNA, 25 bp, Homo sapien
tactgaggatatgggatttatttgt

SEQ ID NO: 3672539 - DNA, 25 bp, Homo sapien
tatttgttacagcacctgacgctac

SEQ ID NO: 3672540 - DNA, 25 bp, Homo sapien
cacctgacgctacctaatacagggt

SEQ ID NO: 3672541 - DNA, 25 bp, Homo sapien
agtagccattgacagggtcccagtg

SEQ ID NO: 3672542 - DNA, 25 bp, Homo sapien
ggaaaaggcagtgcccagcaaatct

SEQ ID NO: 3672543 - DNA, 25 bp, Homo sapien
gcacagagagtgtacaaaaccagct

SEQ ID NO: 3672544 - DNA, 25 bp, Homo sapien
cgttgaacccgctggagactctgaa

SEQ ID NO: 3672545 - DNA, 25 bp, Homo sapien
tccagaaagccaaggatctggaggc

SEQ ID NO: 3672546 - DNA, 25 bp, Homo sapien
tcccttctgaacatccacaaccggc

SEQ ID NO: 3672547 - DNA, 25 bp, Homo sapien
cacaaccggcccctgcttggtcctc

SEQ ID NO: 3672548 - DNA, 25 bp, Homo sapien
ccttcaggtccccacgcaagtggag

SEQ ID NO: 3672549 - DNA, 25 bp, Homo sapien
gttcccagacggcttgtatctcgca

SEQ ID NO: 3672550 - DNA, 25 bp, Homo sapien
gtgttcccagacggcttgtatctcg

SEQ ID NO: 3672551 - DNA, 25 bp, Homo sapien
agacggcttgtatctcgcaagggac

SEQ ID NO: 3672552 - DNA, 25 bp, Homo sapien
ccagacggcttgtatctcgcaaggg

SEQ ID NO: 3672553 - DNA, 25 bp, Homo sapien
tgatgcacacgaccccgggatgcat

SEQ ID NO: 3672554 - DNA, 25 bp, Homo sapien
atgatgcacacgaccccgggatgca

SEQ ID NO: 3672555 - DNA, 25 bp, Homo sapien
catgatgcacacgaccccgggatgc

SEQ ID NO: 3672556 - DNA, 25 bp, Homo sapien
ctgtgggtgatcttcatggtacaac

SEQ ID NO: 3672557 - DNA, 25 bp, Homo sapien
gtgatcttcatggtacaaccgaggc

SEQ ID NO: 3672558 - DNA, 25 bp, Homo sapien
gggtgatcttcatggtacaaccgag

SEQ ID NO: 3672559 - DNA, 25 bp, Homo sapien
atcttcatggtacaaccgaggcagc

SEQ ID NO: 3672560 - DNA, 25 bp, Homo sapien
catacacactctgccttgacagata

SEQ ID NO: 3672561 - DNA, 25 bp, Homo sapien
tacacactctgccttgacagataca

SEQ ID NO: 3672562 - DNA, 25 bp, Homo sapien
acactctgccttgacagatacaggc

SEQ ID NO: 3672563 - DNA, 25 bp, Homo sapien
caaacatacacactctgccttgaca

SEQ ID NO: 3672564 - DNA, 25 bp, Homo sapien
agggactggatatgactggccaggg

SEQ ID NO: 3672565 - DNA, 25 bp, Homo sapien
ggactggatatgactggccagggag

SEQ ID NO: 3672566 - DNA, 25 bp, Homo sapien
tcttctccgacttcaccagggactg

SEQ ID NO: 3672567 - DNA, 25 bp, Homo sapien
cggttcttctccgacttcaccaggg

SEQ ID NO: 3672568 - DNA, 25 bp, Homo sapien
caagcaagcctgcttcgcacatgac

SEQ ID NO: 3672569 - DNA, 25 bp, Homo sapien
tgggaagcgagcttctcaaagatcc

SEQ ID NO: 3672570 - DNA, 25 bp, Homo sapien
tagcacatccggttcaatggcctgg

SEQ ID NO: 3672571 - DNA, 25 bp, Homo sapien
aggccatgagggtcccaagcaagcc

SEQ ID NO: 3672572 - DNA, 25 bp, Homo sapien
ctcccagccccactggaacaccctt

SEQ ID NO: 3672573 - DNA, 25 bp, Homo sapien
tgtgagatgaatcaaggatttttgt

SEQ ID NO: 3672574 - DNA, 25 bp, Homo sapien
gatttttgttgtggccgacagagat

SEQ ID NO: 3672575 - DNA, 25 bp, Homo sapien
tgttgtggccgacagagatgaggga

SEQ ID NO: 3672576 - DNA, 25 bp, Homo sapien
agggaattccaagacctagaaactg

SEQ ID NO: 3672577 - DNA, 25 bp, Homo sapien
ttttctctaagctggttccctggcc

SEQ ID NO: 3672578 - DNA, 25 bp, Homo sapien
gatgtccacgagtttcttttctcta

SEQ ID NO: 3672579 - DNA, 25 bp, Homo sapien
catcttgggcctccaaggctctgac

SEQ ID NO: 3672580 - DNA, 25 bp, Homo sapien
ccaggtactaggcctgacacagggg

SEQ ID NO: 3672581 - DNA, 25 bp, Homo sapien
gaagagcagtagttgaatcctggga

SEQ ID NO: 3672582 - DNA, 25 bp, Homo sapien
ctgaagagcagtagttgaatcctgg

SEQ ID NO: 3672583 - DNA, 25 bp, Homo sapien
gcagtagttgaatcctgggattccc

SEQ ID NO: 3672584 - DNA, 25 bp, Homo sapien
gagcagtagttgaatcctgggattc

SEQ ID NO: 3672585 - DNA, 25 bp, Homo sapien
tcatggagatgaggctcagcgccgt

SEQ ID NO: 3672586 - DNA, 25 bp, Homo sapien
gggctgccctctgaggctgcaggtt

SEQ ID NO: 3672587 - DNA, 25 bp, Homo sapien
tctgaggctgcaggttgcgtgggga

SEQ ID NO: 3672588 - DNA, 25 bp, Homo sapien
cctctgaggctgcaggttgcgtggg

SEQ ID NO: 3672589 - DNA, 25 bp, Homo sapien
tgccctctgaggctgcaggttgcgt

SEQ ID NO: 3672590 - DNA, 25 bp, Homo sapien
ttccacggacatgtcaaattccaca

SEQ ID NO: 3672591 - DNA, 25 bp, Homo sapien
cttccacggacatgtcaaattccac

SEQ ID NO: 3672592 - DNA, 25 bp, Homo sapien
tggacagggttggaataaacaaaca

SEQ ID NO: 3672593 - DNA, 25 bp, Homo sapien
gacagagtactcagtgctggttccc

SEQ ID NO: 3672594 - DNA, 25 bp, Homo sapien
agtgctggttcccataactgtggac

SEQ ID NO: 3672595 - DNA, 25 bp, Homo sapien
cctccagagacagagtactcagtgc

SEQ ID NO: 3672596 - DNA, 25 bp, Homo sapien
ggaggagggaacggtctggtggcac

SEQ ID NO: 3672597 - DNA, 25 bp, Homo sapien
ctccaggaggagggaacggtctggt

SEQ ID NO: 3672598 - DNA, 25 bp, Homo sapien
caggaggagggaacggtctggtggc

SEQ ID NO: 3672599 - DNA, 25 bp, Homo sapien
tccaggaggagggaacggtctggtg

SEQ ID NO: 3672600 - DNA, 25 bp, Homo sapien
caaagggttgctcagtcctggccag

SEQ ID NO: 3672601 - DNA, 25 bp, Homo sapien
catgccggctgatcaggaaccagca

SEQ ID NO: 3672602 - DNA, 25 bp, Homo sapien
ctgacggagaagcaaacaaagggtt

SEQ ID NO: 3672603 - DNA, 25 bp, Homo sapien
gaaacaaccaaggagaggtcgtctg

SEQ ID NO: 3672604 - DNA, 25 bp, Homo sapien
tgtgctgtgtacaagggtgtcagcc

SEQ ID NO: 3672605 - DNA, 25 bp, Homo sapien
ttgtaggccgagtcccagagagttg

SEQ ID NO: 3672606 - DNA, 25 bp, Homo sapien
tcagccgcttccactgtttcatagg

SEQ ID NO: 3672607 - DNA, 25 bp, Homo sapien
cagagactccattgtaggccgagtc

SEQ ID NO: 3672608 - DNA, 25 bp, Homo sapien
aacactgagtctcacgtgtggtgct

SEQ ID NO: 3672609 - DNA, 25 bp, Homo sapien
tggaagacagcatgaacactgagtc

SEQ ID NO: 3672610 - DNA, 25 bp, Homo sapien
ctggaagacagcatgaacactgagt

SEQ ID NO: 3672611 - DNA, 25 bp, Homo sapien
gcagaaggctcggagtcatcctcag

SEQ ID NO: 3672612 - DNA, 25 bp, Homo sapien
tgcagaaggctcggagtcatcctca

SEQ ID NO: 3672613 - DNA, 25 bp, Homo sapien
aaccacagccaagtgatgccactga

SEQ ID NO: 3672614 - DNA, 25 bp, Homo sapien
gacaggtggaaactgtacaatgcct

SEQ ID NO: 3672615 - DNA, 25 bp, Homo sapien
catttccttagtgacaaccacagcc

SEQ ID NO: 3672616 - DNA, 25 bp, Homo sapien
ttggcagagccaatgacctgtccat

SEQ ID NO: 3672617 - DNA, 25 bp, Homo sapien
gactcgaggagtagcaatatatcca

SEQ ID NO: 3672618 - DNA, 25 bp, Homo sapien
ccaagacgccagattaatgaagact

SEQ ID NO: 3672619 - DNA, 25 bp, Homo sapien
gacatgcacagcttggaagttacca

SEQ ID NO: 3672620 - DNA, 25 bp, Homo sapien
ccctggtagagcctggatgtataac

SEQ ID NO: 3672621 - DNA, 25 bp, Homo sapien
aagggcgtggcttcactgtccaggt

SEQ ID NO: 3672622 - DNA, 25 bp, Homo sapien
ggagctggctatgtgaagtccaaaa

SEQ ID NO: 3672623 - DNA, 25 bp, Homo sapien
tacactggtgatagaggagctggct

SEQ ID NO: 3672624 - DNA, 25 bp, Homo sapien
cattgtaagcatttctgatgtccgc

SEQ ID NO: 3672625 - DNA, 25 bp, Homo sapien
tcaggcggctgtccacctcattgta

SEQ ID NO: 3672626 - DNA, 25 bp, Homo sapien
ttcctcagcaagaacacgggcatgg

SEQ ID NO: 3672627 - DNA, 25 bp, Homo sapien
agctccaatggtccgcagagaccct

SEQ ID NO: 3672628 - DNA, 25 bp, Homo sapien
cattgtcacgggatgaaatgttcat

SEQ ID NO: 3672629 - DNA, 25 bp, Homo sapien
acagcaacagctccaatggtccgca

SEQ ID NO: 3672630 - DNA, 25 bp, Homo sapien
cacagccgcatacatggtatggtca

SEQ ID NO: 3672631 - DNA, 25 bp, Homo sapien
cacacatggcattactggtcaggac

SEQ ID NO: 3672632 - DNA, 25 bp, Homo sapien
tggtcaggaccgagtgcagaacttt

SEQ ID NO: 3672633 - DNA, 25 bp, Homo sapien
cacagatgtgttgcatcaggaagtc

SEQ ID NO: 3672634 - DNA, 25 bp, Homo sapien
tgatagcagatgacctgaagcccag

SEQ ID NO: 3672635 - DNA, 25 bp, Homo sapien
gagaggatcagctgaaaaattcgat

SEQ ID NO: 3672636 - DNA, 25 bp, Homo sapien
gtgatagcagatgacctgaagccca

SEQ ID NO: 3672637 - DNA, 25 bp, Homo sapien
aaaattcgatggttcaggagagagg

SEQ ID NO: 3672638 - DNA, 25 bp, Homo sapien
atttgcgcaggcaacacattcttca

SEQ ID NO: 3672639 - DNA, 25 bp, Homo sapien
aatttgcgcaggcaacacattcttc

SEQ ID NO: 3672640 - DNA, 25 bp, Homo sapien
tttgcgcaggcaacacattcttcag

SEQ ID NO: 3672641 - DNA, 25 bp, Homo sapien
ccaatttgcgcaggcaacacattct

SEQ ID NO: 3672642 - DNA, 25 bp, Homo sapien
ggctgagctccagattgtctgcagt

SEQ ID NO: 3672643 - DNA, 25 bp, Homo sapien
tgattgaaggatttccaaaagatgg

SEQ ID NO: 3672644 - DNA, 25 bp, Homo sapien
agatgggaaaagaggctgagctcca

SEQ ID NO: 3672645 - DNA, 25 bp, Homo sapien
ccagattgtctgcagtattcatcca

SEQ ID NO: 3672646 - DNA, 25 bp, Homo sapien
gatgaggctcggctcattgaatagg

SEQ ID NO: 3672647 - DNA, 25 bp, Homo sapien
caggatgccaatgatggtggagatc

SEQ ID NO: 3672648 - DNA, 25 bp, Homo sapien
gctcggctcattgaataggaagatg

SEQ ID NO: 3672649 - DNA, 25 bp, Homo sapien
tgagcttgggtataagctgtgcctg

SEQ ID NO: 3672650 - DNA, 25 bp, Homo sapien
gaaggcttgagggtgtacacaacaa

SEQ ID NO: 3672651 - DNA, 25 bp, Homo sapien
ggtgtacacaacaaacagcccaatc

SEQ ID NO: 3672652 - DNA, 25 bp, Homo sapien
tgcctctcattcaccgacgaaggct

SEQ ID NO: 3672653 - DNA, 25 bp, Homo sapien
cagggctccgtccatgcagatctgc

SEQ ID NO: 3672654 - DNA, 25 bp, Homo sapien
gccttcgaactggcaaaggtcttct

SEQ ID NO: 3672655 - DNA, 25 bp, Homo sapien
tgccttcgaactggcaaaggtcttc

SEQ ID NO: 3672656 - DNA, 25 bp, Homo sapien
cttcgaactggcaaaggtcttctca

SEQ ID NO: 3672657 - DNA, 25 bp, Homo sapien
ccttcgaactggcaaaggtcttctc

SEQ ID NO: 3672658 - DNA, 25 bp, Homo sapien
ggaagatattacactgagcagcatc

SEQ ID NO: 3672659 - DNA, 25 bp, Homo sapien
tttctgagccagattgtctttccag

SEQ ID NO: 3672660 - DNA, 25 bp, Homo sapien
actggtttctgagccagattgtctt

SEQ ID NO: 3672661 - DNA, 25 bp, Homo sapien
agctggggggaagatattacactga

SEQ ID NO: 3672662 - DNA, 25 bp, Homo sapien
caaggtctggttcattgggtagaga

SEQ ID NO: 3672663 - DNA, 25 bp, Homo sapien
tgaggtaacctcctgccaaattgct

SEQ ID NO: 3672664 - DNA, 25 bp, Homo sapien
catcagaatatcttagggcaaggtc

SEQ ID NO: 3672665 - DNA, 25 bp, Homo sapien
gtttaatgccacaccctgtatgagg

SEQ ID NO: 3672666 - DNA, 25 bp, Homo sapien
tcagtaattgtcacaactgccaaaa

SEQ ID NO: 3672667 - DNA, 25 bp, Homo sapien
caagtacaagacatcaaaatcagta

SEQ ID NO: 3672668 - DNA, 25 bp, Homo sapien
tattgtctgccaagtacaagacatc

SEQ ID NO: 3672669 - DNA, 25 bp, Homo sapien
tctgccaagtacaagacatcaaaat

SEQ ID NO: 3672670 - DNA, 25 bp, Homo sapien
gccagagcccagctgttaggcactg

SEQ ID NO: 3672671 - DNA, 25 bp, Homo sapien
tggaaaagaaagtggctggactatc

SEQ ID NO: 3672672 - DNA, 25 bp, Homo sapien
ccggaaggtatagatgccagagccc

SEQ ID NO: 3672673 - DNA, 25 bp, Homo sapien
gggcttaagtagcctcctctgggtc

SEQ ID NO: 3672674 - DNA, 25 bp, Homo sapien
agcaggaaccagtcaggccccagtt

SEQ ID NO: 3672675 - DNA, 25 bp, Homo sapien
gcagcaggaaccagtcaggccccag

SEQ ID NO: 3672676 - DNA, 25 bp, Homo sapien
gagcagcaggaaccagtcaggcccc

SEQ ID NO: 3672677 - DNA, 25 bp, Homo sapien
aggagcagcaggaaccagtcaggcc

SEQ ID NO: 3672678 - DNA, 25 bp, Homo sapien
cattacaatatccacgccctcagtg

SEQ ID NO: 3672679 - DNA, 25 bp, Homo sapien
catctctaaaccgtgtgcggaggga

SEQ ID NO: 3672680 - DNA, 25 bp, Homo sapien
gtgctgcgttccacccaggatcctg

SEQ ID NO: 3672681 - DNA, 25 bp, Homo sapien
acacaggccatctctaaaccgtgtg

SEQ ID NO: 3672682 - DNA, 25 bp, Homo sapien
tgggctttgctcaggcagtggtgac

SEQ ID NO: 3672683 - DNA, 25 bp, Homo sapien
aagtcattcaagacacggaacccag

SEQ ID NO: 3672684 - DNA, 25 bp, Homo sapien
tggaatgtggacgtggtgggccaga

SEQ ID NO: 3672685 - DNA, 25 bp, Homo sapien
ttcaagacacggaacccaggaagca

SEQ ID NO: 3672686 - DNA, 25 bp, Homo sapien
gaaggtggagacgatgaggtagacc

SEQ ID NO: 3672687 - DNA, 25 bp, Homo sapien
aagaaggtggagacgatgaggtaga

SEQ ID NO: 3672688 - DNA, 25 bp, Homo sapien
aaggtggagacgatgaggtagacct

SEQ ID NO: 3672689 - DNA, 25 bp, Homo sapien
cccgtccatcagctctgtgagtggt

SEQ ID NO: 3672690 - DNA, 25 bp, Homo sapien
gatgatttaggagactcacagctga

SEQ ID NO: 3672691 - DNA, 25 bp, Homo sapien
ggaaagatacatcaggcagccagag

SEQ ID NO: 3672692 - DNA, 25 bp, Homo sapien
tattggtgccatccatatagggtaa

SEQ ID NO: 3672693 - DNA, 25 bp, Homo sapien
tatagggtaaactacactgaggcac

SEQ ID NO: 3672694 - DNA, 25 bp, Homo sapien
gagcaaggcaccttctgtgcacagc

SEQ ID NO: 3672695 - DNA, 25 bp, Homo sapien
ggagcaaggcaccttctgtgcacag

SEQ ID NO: 3672696 - DNA, 25 bp, Homo sapien
actgaagcatggcatcaaggctgtc

SEQ ID NO: 3672697 - DNA, 25 bp, Homo sapien
gagccactgaagcatggcatcaagg

SEQ ID NO: 3672698 - DNA, 25 bp, Homo sapien
agtgcagggcagcatgatgggcgct

SEQ ID NO: 3672699 - DNA, 25 bp, Homo sapien
cacacttggtgagaggtagtgcagg

SEQ ID NO: 3672700 - DNA, 25 bp, Homo sapien
ctgaggcacacttggtgagaggtag

SEQ ID NO: 3672701 - DNA, 25 bp, Homo sapien
cagggcagcatgatgggcgctgcct

SEQ ID NO: 3672702 - DNA, 25 bp, Homo sapien
tgtgcccaggcaccatcctcagaac

SEQ ID NO: 3672703 - DNA, 25 bp, Homo sapien
ctgtgcccaggcaccatcctcagaa

SEQ ID NO: 3672704 - DNA, 25 bp, Homo sapien
ggaaggcggctatggccaaggtctg

SEQ ID NO: 3672705 - DNA, 25 bp, Homo sapien
cggtggacgaggctgaggaactgca

SEQ ID NO: 3672706 - DNA, 25 bp, Homo sapien
tccggggctcgccacgctgggtcct

SEQ ID NO: 3672707 - DNA, 25 bp, Homo sapien
gggtaggtgcggtggacgaggctga

SEQ ID NO: 3672708 - DNA, 25 bp, Homo sapien
tccactgtgctgtcgccttcagctg

SEQ ID NO: 3672709 - DNA, 25 bp, Homo sapien
ggatgtgccttggtgggagcctgga

SEQ ID NO: 3672710 - DNA, 25 bp, Homo sapien
tgctggtgttccgggtggactcagc

SEQ ID NO: 3672711 - DNA, 25 bp, Homo sapien
tggtgttccgggtggactcagcccc

SEQ ID NO: 3672712 - DNA, 25 bp, Homo sapien
tccctcaagaggagctgcgtgaact

SEQ ID NO: 3672713 - DNA, 25 bp, Homo sapien
tcaagaggagctgcgtgaactccct

SEQ ID NO: 3672714 - DNA, 25 bp, Homo sapien
gaggagctgcgtgaactccctcagc

SEQ ID NO: 3672715 - DNA, 25 bp, Homo sapien
gctccctcaagaggagctgcgtgaa

SEQ ID NO: 3672716 - DNA, 25 bp, Homo sapien
tgttggctggtggcgtggtctggag

SEQ ID NO: 3672717 - DNA, 25 bp, Homo sapien
ttctgttggctggtggcgtggtctg

SEQ ID NO: 3672718 - DNA, 25 bp, Homo sapien
ctgttggctggtggcgtggtctgga

SEQ ID NO: 3672719 - DNA, 25 bp, Homo sapien
tctgttggctggtggcgtggtctgg

SEQ ID NO: 3672720 - DNA, 25 bp, Homo sapien
ctctgaacatcgctgcatcacctcc

SEQ ID NO: 3672721 - DNA, 25 bp, Homo sapien
atcacctccacttgtcatgtggaat

SEQ ID NO: 3672722 - DNA, 25 bp, Homo sapien
tggaatagttccatagcagaaagca

SEQ ID NO: 3672723 - DNA, 25 bp, Homo sapien
cacttgtcatgtggaatagttccat

SEQ ID NO: 3672724 - DNA, 25 bp, Homo sapien
ggaggatatgcctggggtctgccga

SEQ ID NO: 3672725 - DNA, 25 bp, Homo sapien
ctggggtctgccgagaacatcccac

SEQ ID NO: 3672726 - DNA, 25 bp, Homo sapien
gggtctgccgagaacatcccactgt

SEQ ID NO: 3672727 - DNA, 25 bp, Homo sapien
tgccgagaacatcccactgtacagc

SEQ ID NO: 3672728 - DNA, 25 bp, Homo sapien
gagggcataaccaggactgctggca

SEQ ID NO: 3672729 - DNA, 25 bp, Homo sapien
gaggtagatcccagcttgataacag

SEQ ID NO: 3672730 - DNA, 25 bp, Homo sapien
ccatcacagggagggtttgagcaaa

SEQ ID NO: 3672731 - DNA, 25 bp, Homo sapien
aagggtgctgggagccaatttcact

SEQ ID NO: 3672732 - DNA, 25 bp, Homo sapien
gacctgctcatcagacaagtgaaga

SEQ ID NO: 3672733 - DNA, 25 bp, Homo sapien
cctctcttggagttgttcctgaaga

SEQ ID NO: 3672734 - DNA, 25 bp, Homo sapien
tgaattcaagtctttccaggtttgc

SEQ ID NO: 3672735 - DNA, 25 bp, Homo sapien
gctgacaagggctatttctcctctc

SEQ ID NO: 3672736 - DNA, 25 bp, Homo sapien
tgggatattagctgggagtccatgc

SEQ ID NO: 3672737 - DNA, 25 bp, Homo sapien
aatgaatttgttataggctactccc

SEQ ID NO: 3672738 - DNA, 25 bp, Homo sapien
aagtagaagaccctgatttgtagcc

SEQ ID NO: 3672739 - DNA, 25 bp, Homo sapien
ggctactcccttagaatttcacagg

SEQ ID NO: 3672740 - DNA, 25 bp, Homo sapien
atgactttatttaaactgctgtata

SEQ ID NO: 3672741 - DNA, 25 bp, Homo sapien
tgactttatttaaactgctgtataa

SEQ ID NO: 3672742 - DNA, 25 bp, Homo sapien
aactgctgtataaagtgctgaggac

SEQ ID NO: 3672743 - DNA, 25 bp, Homo sapien
aaactgctgtataaagtgctgagga

SEQ ID NO: 3672744 - DNA, 25 bp, Homo sapien
ccgaggcattcggagagggactgct

SEQ ID NO: 3672745 - DNA, 25 bp, Homo sapien
gtggcaaagacaacatcccagtgct

SEQ ID NO: 3672746 - DNA, 25 bp, Homo sapien
gctgagaaggccgaggcattcggag

SEQ ID NO: 3672747 - DNA, 25 bp, Homo sapien
tctcattgagtagcaaaaggcaatg

SEQ ID NO: 3672748 - DNA, 25 bp, Homo sapien
tgctggagaatgtggttcatgcaca

SEQ ID NO: 3672749 - DNA, 25 bp, Homo sapien
tgagatgctggagaatgtggttcat

SEQ ID NO: 3672750 - DNA, 25 bp, Homo sapien
gatgctggagaatgtggttcatgca

SEQ ID NO: 3672751 - DNA, 25 bp, Homo sapien
agatgctggagaatgtggttcatgc

SEQ ID NO: 3672752 - DNA, 25 bp, Homo sapien
ataagtagacattctaggcttgggc

SEQ ID NO: 3672753 - DNA, 25 bp, Homo sapien
ggaagacttgatgataagtagacat

SEQ ID NO: 3672754 - DNA, 25 bp, Homo sapien
taagtagacattctaggcttgggct

SEQ ID NO: 3672755 - DNA, 25 bp, Homo sapien
gataagtagacattctaggcttggg

SEQ ID NO: 3672756 - DNA, 25 bp, Homo sapien
tgccaggccttgagcatcgtctcct

SEQ ID NO: 3672757 - DNA, 25 bp, Homo sapien
cagagagatcgatcttgaaggcatc

SEQ ID NO: 3672758 - DNA, 25 bp, Homo sapien
tccaggtttcacagagagatcgatc

SEQ ID NO: 3672759 - DNA, 25 bp, Homo sapien
tcccagagcggtgtgacctcttcaa

SEQ ID NO: 3672760 - DNA, 25 bp, Homo sapien
ccattccctggagccgagtggatag

SEQ ID NO: 3672761 - DNA, 25 bp, Homo sapien
ctaggcactgagttgaaccttgcgg

SEQ ID NO: 3672762 - DNA, 25 bp, Homo sapien
tccctggagccgagtggatagagac

SEQ ID NO: 3672763 - DNA, 25 bp, Homo sapien
tgaaccttgcgggagtctggctctg

SEQ ID NO: 3672764 - DNA, 25 bp, Homo sapien
cgacttgccagtgacttcttctcag

SEQ ID NO: 3672765 - DNA, 25 bp, Homo sapien
aaagtgactttgctgtggtgtgcaa

SEQ ID NO: 3672766 - DNA, 25 bp, Homo sapien
cttcatggctgaggacaggcttcca

SEQ ID NO: 3672767 - DNA, 25 bp, Homo sapien
gctgtggtgtgcaacatttgaacga

SEQ ID NO: 3672768 - DNA, 25 bp, Homo sapien
taggctccacctcatttcccgaagt

SEQ ID NO: 3672769 - DNA, 25 bp, Homo sapien
attctgagctggtgggatttaggct

SEQ ID NO: 3672770 - DNA, 25 bp, Homo sapien
tttcccgaagttcatgggccaagag

SEQ ID NO: 3672771 - DNA, 25 bp, Homo sapien
tgagctggtgggatttaggctccac

SEQ ID NO: 3672772 - DNA, 25 bp, Homo sapien
cagctgagctgtatcaatgagagtg

SEQ ID NO: 3672773 - DNA, 25 bp, Homo sapien
agctgagctgtatcaatgagagtga

SEQ ID NO: 3672774 - DNA, 25 bp, Homo sapien
ctcactggagggactaatgatgtgg

SEQ ID NO: 3672775 - DNA, 25 bp, Homo sapien
cacttgtgcctgaataatgtctccg

SEQ ID NO: 3672776 - DNA, 25 bp, Homo sapien
agatggcgaccttctcactggaggg

SEQ ID NO: 3672777 - DNA, 25 bp, Homo sapien
tgtctccgtgctgctttttccagat

SEQ ID NO: 3672778 - DNA, 25 bp, Homo sapien
agccagagctgcccttaacagagct

SEQ ID NO: 3672779 - DNA, 25 bp, Homo sapien
agctgtcactgagttactggcctca

SEQ ID NO: 3672780 - DNA, 25 bp, Homo sapien
gagctgcccttaacagagctgtcac

SEQ ID NO: 3672781 - DNA, 25 bp, Homo sapien
cactgagttactggcctcagtcagc

SEQ ID NO: 3672782 - DNA, 25 bp, Homo sapien
gatgtctcacaaatgatgcactcag

SEQ ID NO: 3672783 - DNA, 25 bp, Homo sapien
ctctgttggtggatgcttaatgaac

SEQ ID NO: 3672784 - DNA, 25 bp, Homo sapien
tgcactcagtaaagaaacatcatta

SEQ ID NO: 3672785 - DNA, 25 bp, Homo sapien
tagaacataatgtcaacttcacggt

SEQ ID NO: 3672786 - DNA, 25 bp, Homo sapien
tggatccagtaccaattattcctgg

SEQ ID NO: 3672787 - DNA, 25 bp, Homo sapien
gcttgatgctcaagtggtccggcat

SEQ ID NO: 3672788 - DNA, 25 bp, Homo sapien
ggtccggcatcttcatgtacaaaga

SEQ ID NO: 3672789 - DNA, 25 bp, Homo sapien
catcaggtgacatcagcttgatgct

SEQ ID NO: 3672790 - DNA, 25 bp, Homo sapien
gtttcacatctaccaccagctgctg

SEQ ID NO: 3672791 - DNA, 25 bp, Homo sapien
tctgcttgggccctcaggatagctt

SEQ ID NO: 3672792 - DNA, 25 bp, Homo sapien
ccagttctattcagagtcaggccct

SEQ ID NO: 3672793 - DNA, 25 bp, Homo sapien
tgctgtctctggcacaggcgaccat

SEQ ID NO: 3672794 - DNA, 25 bp, Homo sapien
caaaatggtttctcataatagatgg

SEQ ID NO: 3672795 - DNA, 25 bp, Homo sapien
taatagatgggtcccagggcgagaa

SEQ ID NO: 3672796 - DNA, 25 bp, Homo sapien
cctgttctgagactttgaaagactt

SEQ ID NO: 3672797 - DNA, 25 bp, Homo sapien
cccatcaacaacaacgaagagaaga

SEQ ID NO: 3672798 - DNA, 25 bp, Homo sapien
ctgagggtcataggtaaactggtca

SEQ ID NO: 3672799 - DNA, 25 bp, Homo sapien
gctgggtccccatagatgcagccat

SEQ ID NO: 3672800 - DNA, 25 bp, Homo sapien
gtaaactggtcaataccaacatttc

SEQ ID NO: 3672801 - DNA, 25 bp, Homo sapien
ggctgggtccccatagatgcagcca

SEQ ID NO: 3672802 - DNA, 25 bp, Homo sapien
tccgggactgcgagacaataaatgt

SEQ ID NO: 3672803 - DNA, 25 bp, Homo sapien
gatgggccctaatcctacgtgactg

SEQ ID NO: 3672804 - DNA, 25 bp, Homo sapien
tatgtattgagacgtgaggcactga

SEQ ID NO: 3672805 - DNA, 25 bp, Homo sapien
tgtctgtagtttatgccaccctggc

SEQ ID NO: 3672806 - DNA, 25 bp, Homo sapien
ttgcacatggtctttgtataaagat

SEQ ID NO: 3672807 - DNA, 25 bp, Homo sapien
agttctctatacatgacacaaaatc

SEQ ID NO: 3672808 - DNA, 25 bp, Homo sapien
ctgtagttctctatacatgacacaa

SEQ ID NO: 3672809 - DNA, 25 bp, Homo sapien
taaagatgcatatagctcttgtcct

SEQ ID NO: 3672810 - DNA, 25 bp, Homo sapien
ttttcgaatcacagcaacccttggg

SEQ ID NO: 3672811 - DNA, 25 bp, Homo sapien
tctcgcaatgatgcccagtctggcc

SEQ ID NO: 3672812 - DNA, 25 bp, Homo sapien
tttcagtccctgctacttcagtggg

SEQ ID NO: 3672813 - DNA, 25 bp, Homo sapien
gagtacctagaactaaaggtgccac

SEQ ID NO: 3672814 - DNA, 25 bp, Homo sapien
ttctctccagtcgagttcccatggg

SEQ ID NO: 3672815 - DNA, 25 bp, Homo sapien
ggcgttggctgccttgatgttgcca

SEQ ID NO: 3672816 - DNA, 25 bp, Homo sapien
acaagcccagctccccaaaaagctg

SEQ ID NO: 3672817 - DNA, 25 bp, Homo sapien
tgcgtttcctcattcgagctggtcc

SEQ ID NO: 3672818 - DNA, 25 bp, Homo sapien
tcctgagctcagggcctccaaagga

SEQ ID NO: 3672819 - DNA, 25 bp, Homo sapien
ttgtgccttcctgagctcagggcct

SEQ ID NO: 3672820 - DNA, 25 bp, Homo sapien
cttgtgccttcctgagctcagggcc

SEQ ID NO: 3672821 - DNA, 25 bp, Homo sapien
tgagctcagggcctccaaaggagac

SEQ ID NO: 3672822 - DNA, 25 bp, Homo sapien
cagcactgtcccactgcgcctgact

SEQ ID NO: 3672823 - DNA, 25 bp, Homo sapien
cactgtcccactgcgcctgactcct

SEQ ID NO: 3672824 - DNA, 25 bp, Homo sapien
agcactgtcccactgcgcctgactc

SEQ ID NO: 3672825 - DNA, 25 bp, Homo sapien
actgtcccactgcgcctgactccta

SEQ ID NO: 3672826 - DNA, 25 bp, Homo sapien
tggaaggccgcctttgaggatattt

SEQ ID NO: 3672827 - DNA, 25 bp, Homo sapien
tggatcactggctcaaaattgcaga

SEQ ID NO: 3672828 - DNA, 25 bp, Homo sapien
aaaataagagtttgcgacacagttc

SEQ ID NO: 3672829 - DNA, 25 bp, Homo sapien
gcttcattagagcaaactcccaggg

SEQ ID NO: 3672830 - DNA, 25 bp, Homo sapien
gagaaatatgatcatttttgtcttg

SEQ ID NO: 3672831 - DNA, 25 bp, Homo sapien
gaaatatgatcatttttgtcttggc

SEQ ID NO: 3672832 - DNA, 25 bp, Homo sapien
cttggttttcagcatttgtttgaga

SEQ ID NO: 3672833 - DNA, 25 bp, Homo sapien
aatatgatcatttttgtcttggctt

SEQ ID NO: 3672834 - DNA, 25 bp, Homo sapien
taacttgtctttcccgacacagttc

SEQ ID NO: 3672835 - DNA, 25 bp, Homo sapien
ttgtctttcccgacacagttccaag

SEQ ID NO: 3672836 - DNA, 25 bp, Homo sapien
aaataacttgtctttcccgacacag

SEQ ID NO: 3672837 - DNA, 25 bp, Homo sapien
tttcccgacacagttccaagaagtc

SEQ ID NO: 3672838 - DNA, 25 bp, Homo sapien
gcccagctctgaagtagtccctgta

SEQ ID NO: 3672839 - DNA, 25 bp, Homo sapien
tagtccctgtacttccattggccca

SEQ ID NO: 3672840 - DNA, 25 bp, Homo sapien
cattggcccatttaagcctgagcag

SEQ ID NO: 3672841 - DNA, 25 bp, Homo sapien
gatgagcacctctcttatgcccagc

SEQ ID NO: 3672842 - DNA, 25 bp, Homo sapien
aaacctgcatgaggaggcatgatgg

SEQ ID NO: 3672843 - DNA, 25 bp, Homo sapien
catgatggctaggtgtgttggagca

SEQ ID NO: 3672844 - DNA, 25 bp, Homo sapien
gaagctttggttatgcaggtataag

SEQ ID NO: 3672845 - DNA, 25 bp, Homo sapien
ggacagcattgttacaggactacat

SEQ ID NO: 3672846 - DNA, 25 bp, Homo sapien
atttctgacagcttcccgctgagcc

SEQ ID NO: 3672847 - DNA, 25 bp, Homo sapien
cccaacctcaggttcacatgatgag

SEQ ID NO: 3672848 - DNA, 25 bp, Homo sapien
tatgtcaggctgcttaaactttttc

SEQ ID NO: 3672849 - DNA, 25 bp, Homo sapien
tcaggaagattatgtcaggctgctt

SEQ ID NO: 3672850 - DNA, 25 bp, Homo sapien
actcccaccaggactatcaggaaga

SEQ ID NO: 3672851 - DNA, 25 bp, Homo sapien
cagtggtgccctgaagaccagtttt

SEQ ID NO: 3672852 - DNA, 25 bp, Homo sapien
gccacagtggtgccctgaagaccag

SEQ ID NO: 3672853 - DNA, 25 bp, Homo sapien
acagtggtgccctgaagaccagttt

SEQ ID NO: 3672854 - DNA, 25 bp, Homo sapien
cacagtggtgccctgaagaccagtt

SEQ ID NO: 3672855 - DNA, 25 bp, Homo sapien
gtacagtagacatcacccgtgggag

SEQ ID NO: 3672856 - DNA, 25 bp, Homo sapien
gagacagtgtgaagttctcgcagat

SEQ ID NO: 3672857 - DNA, 25 bp, Homo sapien
tggataagcagtgacgggtacagta

SEQ ID NO: 3672858 - DNA, 25 bp, Homo sapien
tggccaaaaagcaggaccccttctg

SEQ ID NO: 3672859 - DNA, 25 bp, Homo sapien
tctctgcacgaagaactcttcatcc

SEQ ID NO: 3672860 - DNA, 25 bp, Homo sapien
ctctgcacgaagaactcttcatcca

SEQ ID NO: 3672861 - DNA, 25 bp, Homo sapien
atctctgcacgaagaactcttcatc

SEQ ID NO: 3672862 - DNA, 25 bp, Homo sapien
tatctctgcacgaagaactcttcat

SEQ ID NO: 3672863 - DNA, 25 bp, Homo sapien
cctgcagaccctacaaggcgcaggt

SEQ ID NO: 3672864 - DNA, 25 bp, Homo sapien
tgcagaccctacaaggcgcaggtct

SEQ ID NO: 3672865 - DNA, 25 bp, Homo sapien
cagaccctacaaggcgcaggtcttt

SEQ ID NO: 3672866 - DNA, 25 bp, Homo sapien
cctacaaggcgcaggtctttgccca

SEQ ID NO: 3672867 - DNA, 25 bp, Homo sapien
gcaggcatcaggcagtcccgagatg

SEQ ID NO: 3672868 - DNA, 25 bp, Homo sapien
tcaggcagtcccgagatgaggcccc

SEQ ID NO: 3672869 - DNA, 25 bp, Homo sapien
gcatcaggcagtcccgagatgaggc

SEQ ID NO: 3672870 - DNA, 25 bp, Homo sapien
ggcagtcccgagatgaggccccttg

SEQ ID NO: 3672871 - DNA, 25 bp, Homo sapien
aatatgacggcgcagtttccaggat

SEQ ID NO: 3672872 - DNA, 25 bp, Homo sapien
gacggcgcagtttccaggatgatgc

SEQ ID NO: 3672873 - DNA, 25 bp, Homo sapien
tgatgctgacaaagggtatgagggt

SEQ ID NO: 3672874 - DNA, 25 bp, Homo sapien
ggacagcaatatgacggcgcagttt

SEQ ID NO: 3672875 - DNA, 25 bp, Homo sapien
tgtcagcgtagctgtggcactggca

SEQ ID NO: 3672876 - DNA, 25 bp, Homo sapien
ggttgaaaatgaacggatcgctgat

SEQ ID NO: 3672877 - DNA, 25 bp, Homo sapien
aggaagcgagcctgccgtagctccc

SEQ ID NO: 3672878 - DNA, 25 bp, Homo sapien
cacgagtaatggtcagtggacctgt

SEQ ID NO: 3672879 - DNA, 25 bp, Homo sapien
cccagggaacttgcgggtgtctcct

SEQ ID NO: 3672880 - DNA, 25 bp, Homo sapien
cttgcgggtgtctccttaagggcac

SEQ ID NO: 3672881 - DNA, 25 bp, Homo sapien
acttgcgggtgtctccttaagggca

SEQ ID NO: 3672882 - DNA, 25 bp, Homo sapien
cacaagcccagggaacttgcgggtg

SEQ ID NO: 3672883 - DNA, 25 bp, Homo sapien
gcttcagtttcagagaatgatagtg

SEQ ID NO: 3672884 - DNA, 25 bp, Homo sapien
tgagcttcagtttcagagaatgata

SEQ ID NO: 3672885 - DNA, 25 bp, Homo sapien
gagaatgatagtgagccctcttgca

SEQ ID NO: 3672886 - DNA, 25 bp, Homo sapien
gaatgatagtgagccctcttgcagg

SEQ ID NO: 3672887 - DNA, 25 bp, Homo sapien
cagggcagggctgctacttccactc

SEQ ID NO: 3672888 - DNA, 25 bp, Homo sapien
agggcagggctgctacttccactct

SEQ ID NO: 3672889 - DNA, 25 bp, Homo sapien
gggggcctgaccacagcttggagtt

SEQ ID NO: 3672890 - DNA, 25 bp, Homo sapien
ggagggcagggggcctgaccacagc

SEQ ID NO: 3672891 - DNA, 25 bp, Homo sapien
ggcagggggcctgaccacagcttgg

SEQ ID NO: 3672892 - DNA, 25 bp, Homo sapien
ctgcagaatgtgtgggagggcaggg

SEQ ID NO: 3672893 - DNA, 25 bp, Homo sapien
gaaatgggtcattgcgggtctccgt

SEQ ID NO: 3672894 - DNA, 25 bp, Homo sapien
gatattttgtggactagagacgccc

SEQ ID NO: 3672895 - DNA, 25 bp, Homo sapien
cccatggtaggaagaccttggtgac

SEQ ID NO: 3672896 - DNA, 25 bp, Homo sapien
gtcgtccttttgagttcccatggta

SEQ ID NO: 3672897 - DNA, 25 bp, Homo sapien
tactccgatcattgttgtagaagac

SEQ ID NO: 3672898 - DNA, 25 bp, Homo sapien
gccttactccgatcattgttgtaga

SEQ ID NO: 3672899 - DNA, 25 bp, Homo sapien
tttaaaggccttactccgatcattg

SEQ ID NO: 3672900 - DNA, 25 bp, Homo sapien
tcattgttgtagaagacaagaaact

SEQ ID NO: 3672901 - DNA, 25 bp, Homo sapien
gtgcgttgctgtgaggacaaatgcc

SEQ ID NO: 3672902 - DNA, 25 bp, Homo sapien
tgtacattccagtgcgttgctgtga

SEQ ID NO: 3672903 - DNA, 25 bp, Homo sapien
gtctgcattaggccaccttcacatc

SEQ ID NO: 3672904 - DNA, 25 bp, Homo sapien
tcaacaatcctgctgtacattccag

SEQ ID NO: 3672905 - DNA, 25 bp, Homo sapien
ctccgaggtggctttccccttcagg

SEQ ID NO: 3672906 - DNA, 25 bp, Homo sapien
cttagactgagggtgtcctccgagg

SEQ ID NO: 3672907 - DNA, 25 bp, Homo sapien
tcctccgaggtggctttccccttca

SEQ ID NO: 3672908 - DNA, 25 bp, Homo sapien
gagggtgtcctccgaggtggctttc

SEQ ID NO: 3672909 - DNA, 25 bp, Homo sapien
ttacagaataggttcatcaaagggt

SEQ ID NO: 3672910 - DNA, 25 bp, Homo sapien
tacagaataggttcatcaaagggtg

SEQ ID NO: 3672911 - DNA, 25 bp, Homo sapien
acagaataggttcatcaaagggtga

SEQ ID NO: 3672912 - DNA, 25 bp, Homo sapien
cagaataggttcatcaaagggtgag

SEQ ID NO: 3672913 - DNA, 25 bp, Homo sapien
tcaactgtaccacagaagcaaggtg

SEQ ID NO: 3672914 - DNA, 25 bp, Homo sapien
gtggtacacaggttggcattgcagg

SEQ ID NO: 3672915 - DNA, 25 bp, Homo sapien
ggtacacaggttggcattgcaggtc

SEQ ID NO: 3672916 - DNA, 25 bp, Homo sapien
gtacacaggttggcattgcaggtca

SEQ ID NO: 3672917 - DNA, 25 bp, Homo sapien
tttgatgggaaaaagcgccttgact

SEQ ID NO: 3672918 - DNA, 25 bp, Homo sapien
tgcgccttagtgacatggacgagct

SEQ ID NO: 3672919 - DNA, 25 bp, Homo sapien
tcaaggtggccaggaattgcatcaa

SEQ ID NO: 3672920 - DNA, 25 bp, Homo sapien
caactacatagacaagctgcctgag

SEQ ID NO: 3672921 - DNA, 25 bp, Homo sapien
tctgcagttgctaggtagagtgctt

SEQ ID NO: 3672922 - DNA, 25 bp, Homo sapien
tcgttaaggcttgtttcatgaccca

SEQ ID NO: 3672923 - DNA, 25 bp, Homo sapien
tgtcagattcagttggtcagtggta

SEQ ID NO: 3672924 - DNA, 25 bp, Homo sapien
gattgttacaactagtgggcagcta

SEQ ID NO: 3672925 - DNA, 25 bp, Homo sapien
tctttgtgtgattttagcatcaggg

SEQ ID NO: 3672926 - DNA, 25 bp, Homo sapien
gattcccaagtattgagtaagtttg

SEQ ID NO: 3672927 - DNA, 25 bp, Homo sapien
tcagaaaatacgttgagaatcactc

SEQ ID NO: 3672928 - DNA, 25 bp, Homo sapien
catgaagaatattggtctgaagatc

SEQ ID NO: 3672929 - DNA, 25 bp, Homo sapien
ctctatgtggacagtcatgacatct

SEQ ID NO: 3672930 - DNA, 25 bp, Homo sapien
tattgcactggttagaatttccaaa

SEQ ID NO: 3672931 - DNA, 25 bp, Homo sapien
tgtgctaaccttgtatcctatggcc

SEQ ID NO: 3672932 - DNA, 25 bp, Homo sapien
ctcacttattagttccaagaatctt

SEQ ID NO: 3672933 - DNA, 25 bp, Homo sapien
agagaggctccttaacggaggagtt

SEQ ID NO: 3672934 - DNA, 25 bp, Homo sapien
ccttaacggaggagttctctgtagc

SEQ ID NO: 3672935 - DNA, 25 bp, Homo sapien
cggaggagttctctgtagccagctc

SEQ ID NO: 3672936 - DNA, 25 bp, Homo sapien
cttgaggtgattaatgggcaggctt

SEQ ID NO: 3672937 - DNA, 25 bp, Homo sapien
gagggatattcctaccacaaaggag

SEQ ID NO: 3672938 - DNA, 25 bp, Homo sapien
gaagacacgggcatgatgtacctct

SEQ ID NO: 3672939 - DNA, 25 bp, Homo sapien
ggaagaacgcatcccacagaagtgc

SEQ ID NO: 3672940 - DNA, 25 bp, Homo sapien
gagaggtcactttatgaagacacgg

SEQ ID NO: 3672941 - DNA, 25 bp, Homo sapien
cttgtggggttcaggagaccatcca

SEQ ID NO: 3672942 - DNA, 25 bp, Homo sapien
acttttacatcctctttacaggagt

SEQ ID NO: 3672943 - DNA, 25 bp, Homo sapien
aagcttgtggggttcaggagaccat

SEQ ID NO: 3672944 - DNA, 25 bp, Homo sapien
catcctctttacaggagttcaggct

SEQ ID NO: 3672945 - DNA, 25 bp, Homo sapien
ggtgtgaagtgcagaaagaattcca

SEQ ID NO: 3672946 - DNA, 25 bp, Homo sapien
ctagagggtgtgaagtgcagaaaga

SEQ ID NO: 3672947 - DNA, 25 bp, Homo sapien
gagggtgtgaagtgcagaaagaatt

SEQ ID NO: 3672948 - DNA, 25 bp, Homo sapien
gggtgtgaagtgcagaaagaattcc

SEQ ID NO: 3672949 - DNA, 25 bp, Homo sapien
actctgggctgtcgccagtgggccc

SEQ ID NO: 3672950 - DNA, 25 bp, Homo sapien
tcccaggtgataggcggtcagcaaa

SEQ ID NO: 3672951 - DNA, 25 bp, Homo sapien
tgccacagggctgcgagctgtcctg

SEQ ID NO: 3672952 - DNA, 25 bp, Homo sapien
cagatggggtgctccagtggactct

SEQ ID NO: 3672953 - DNA, 25 bp, Homo sapien
cttcccagagtaccagccgtttcct

SEQ ID NO: 3672954 - DNA, 25 bp, Homo sapien
cagagtaccagccgtttccttgctt

SEQ ID NO: 3672955 - DNA, 25 bp, Homo sapien
tcccagagtaccagccgtttccttg

SEQ ID NO: 3672956 - DNA, 25 bp, Homo sapien
agtaccagccgtttccttgcttcat

SEQ ID NO: 3672957 - DNA, 25 bp, Homo sapien
acagcaggaaagggacagccggcat

SEQ ID NO: 3672958 - DNA, 25 bp, Homo sapien
cggccttttcaggcacagcaggaaa

SEQ ID NO: 3672959 - DNA, 25 bp, Homo sapien
cacagcaggaaagggacagccggca

SEQ ID NO: 3672960 - DNA, 25 bp, Homo sapien
ccttttcaggcacagcaggaaaggg

SEQ ID NO: 3672961 - DNA, 25 bp, Homo sapien
ttttctgcaatcactagtaatgtta

SEQ ID NO: 3672962 - DNA, 25 bp, Homo sapien
tcagcaaagattgttctccaactcc

SEQ ID NO: 3672963 - DNA, 25 bp, Homo sapien
cagtgcttgaaaggttgcaaagact

SEQ ID NO: 3672964 - DNA, 25 bp, Homo sapien
ccatctgagattcctgaccagtggg

SEQ ID NO: 3672965 - DNA, 25 bp, Homo sapien
tgaggagactgaactgtagccagct

SEQ ID NO: 3672966 - DNA, 25 bp, Homo sapien
gatgactgaatgaggagactgaact

SEQ ID NO: 3672967 - DNA, 25 bp, Homo sapien
actccagtaggaactgttggacaga

SEQ ID NO: 3672968 - DNA, 25 bp, Homo sapien
tgacccatagtacaactccagtagg

SEQ ID NO: 3672969 - DNA, 25 bp, Homo sapien
catggtagcttcacgagaaacacaa

SEQ ID NO: 3672970 - DNA, 25 bp, Homo sapien
tctcttgacatggtagcttcacgag

SEQ ID NO: 3672971 - DNA, 25 bp, Homo sapien
gagaaacacaaaggtatagccttgc

SEQ ID NO: 3672972 - DNA, 25 bp, Homo sapien
caaaggtatagccttgctcactgca

SEQ ID NO: 3672973 - DNA, 25 bp, Homo sapien
ttattcatgataatgccaggctgga

SEQ ID NO: 3672974 - DNA, 25 bp, Homo sapien
gaccatagatgcacaaatagataat

SEQ ID NO: 3672975 - DNA, 25 bp, Homo sapien
aagcaaagcacaaggcttactgctg

SEQ ID NO: 3672976 - DNA, 25 bp, Homo sapien
tgttcattcaggatgcagatttcag

SEQ ID NO: 3672977 - DNA, 25 bp, Homo sapien
ctgccacagttctattcaggtacct

SEQ ID NO: 3672978 - DNA, 25 bp, Homo sapien
caagccaaatcatatccgttctctc

SEQ ID NO: 3672979 - DNA, 25 bp, Homo sapien
aaatcatatccgttctctccatcca

SEQ ID NO: 3672980 - DNA, 25 bp, Homo sapien
tattcaggtacctacagacccagtc

SEQ ID NO: 3672981 - DNA, 25 bp, Homo sapien
gtgtccctccgctgtgatgccagaa

SEQ ID NO: 3672982 - DNA, 25 bp, Homo sapien
tgctgcctcaagaattccaggggac

SEQ ID NO: 3672983 - DNA, 25 bp, Homo sapien
ggttcttgcagtcagtgtccctccg

SEQ ID NO: 3672984 - DNA, 25 bp, Homo sapien
cctggcctgctgaaggttaggttct

SEQ ID NO: 3672985 - DNA, 25 bp, Homo sapien
ccagccgcggtgttgaggtacatga

SEQ ID NO: 3672986 - DNA, 25 bp, Homo sapien
tctgaggtgtagtctgcgaggaccc

SEQ ID NO: 3672987 - DNA, 25 bp, Homo sapien
gaacactgggtactgcatgtagtca

SEQ ID NO: 3672988 - DNA, 25 bp, Homo sapien
attgcaggttctcccagccgcggtg

SEQ ID NO: 3672989 - DNA, 25 bp, Homo sapien
ccggaaaatcttcggatttgccaag

SEQ ID NO: 3672990 - DNA, 25 bp, Homo sapien
tgaaagatcccggaaaatcttcgga

SEQ ID NO: 3672991 - DNA, 25 bp, Homo sapien
ccccatgggctttgaaagatcccgg

SEQ ID NO: 3672992 - DNA, 25 bp, Homo sapien
atcttcggatttgccaagttcaatg

SEQ ID NO: 3672993 - DNA, 25 bp, Homo sapien
tgatggccgaggagtagtgggtgta

SEQ ID NO: 3672994 - DNA, 25 bp, Homo sapien
ggtggcatccggaccaggtaggagg

SEQ ID NO: 3672995 - DNA, 25 bp, Homo sapien
gggtgtagtagtggcactggacagt

SEQ ID NO: 3672996 - DNA, 25 bp, Homo sapien
tgaagggtggcatccggaccaggta

SEQ ID NO: 3672997 - DNA, 25 bp, Homo sapien
tgagccagaatcctggagccaatgt

SEQ ID NO: 3672998 - DNA, 25 bp, Homo sapien
caggtcttagtcttgtgatacaggc

SEQ ID NO: 3672999 - DNA, 25 bp, Homo sapien
gagccaatgtcaactgggaatcact

SEQ ID NO: 3673000 - DNA, 25 bp, Homo sapien
taatgactgagtttttagcagaggc

SEQ ID NO: 3673001 - DNA, 25 bp, Homo sapien
acactgtggaacattctgtctgcca

SEQ ID NO: 3673002 - DNA, 25 bp, Homo sapien
gttaagaactcaggcaggtagaaga

SEQ ID NO: 3673003 - DNA, 25 bp, Homo sapien
tggaggccgactcccacgtgctctt

SEQ ID NO: 3673004 - DNA, 25 bp, Homo sapien
tctaccccgttgcagttggttaaga

SEQ ID NO: 3673005 - DNA, 25 bp, Homo sapien
tagcacagtcccgtcctgcatgcag

SEQ ID NO: 3673006 - DNA, 25 bp, Homo sapien
gcaggctgatgaatttccgagggtc

SEQ ID NO: 3673007 - DNA, 25 bp, Homo sapien
gatgaatttccgagggtccccatca

SEQ ID NO: 3673008 - DNA, 25 bp, Homo sapien
gagctgcacgtctcctagcacagtc

SEQ ID NO: 3673009 - DNA, 25 bp, Homo sapien
tgtccctatagtttgcctctaaatg

SEQ ID NO: 3673010 - DNA, 25 bp, Homo sapien
cacatgatatgtagccctgagttat

SEQ ID NO: 3673011 - DNA, 25 bp, Homo sapien
catagaacgtttccctcggctcaaa

SEQ ID NO: 3673012 - DNA, 25 bp, Homo sapien
tgtggtcactctcctacttcagatc

SEQ ID NO: 3673013 - DNA, 25 bp, Homo sapien
aaaaataaggtctatccaatggtgg

SEQ ID NO: 3673014 - DNA, 25 bp, Homo sapien
gggtggaagatattaacagcatcca

SEQ ID NO: 3673015 - DNA, 25 bp, Homo sapien
tattaacagcatccactgcggctgg

SEQ ID NO: 3673016 - DNA, 25 bp, Homo sapien
aataaggtctatccaatggtggagg

SEQ ID NO: 3673017 - DNA, 25 bp, Homo sapien
aggcaaatgacaaggcatgctgtac

SEQ ID NO: 3673018 - DNA, 25 bp, Homo sapien
gcaaggcaaatgacaaggcatgctg

SEQ ID NO: 3673019 - DNA, 25 bp, Homo sapien
aaggcaaatgacaaggcatgctgta

SEQ ID NO: 3673020 - DNA, 25 bp, Homo sapien
caaggcaaatgacaaggcatgctgt

SEQ ID NO: 3673021 - DNA, 25 bp, Homo sapien
tccttcactttcaccccaggagaga

SEQ ID NO: 3673022 - DNA, 25 bp, Homo sapien
tttcaccccaggagagaatgtcctc

SEQ ID NO: 3673023 - DNA, 25 bp, Homo sapien
actttcaccccaggagagaatgtcc

SEQ ID NO: 3673024 - DNA, 25 bp, Homo sapien
tcaccccaggagagaatgtcctcac

SEQ ID NO: 3673025 - DNA, 25 bp, Homo sapien
gagttggggctccagttcgatgggc

SEQ ID NO: 3673026 - DNA, 25 bp, Homo sapien
cagagttggggctccagttcgatgg

SEQ ID NO: 3673027 - DNA, 25 bp, Homo sapien
ggcagagttggggctccagttcgat

SEQ ID NO: 3673028 - DNA, 25 bp, Homo sapien
agagttggggctccagttcgatggg

SEQ ID NO: 3673029 - DNA, 25 bp, Homo sapien
ctgcaagtcatccaccaggcgtacg

SEQ ID NO: 3673030 - DNA, 25 bp, Homo sapien
ttcctgcaagtcatccaccaggcgt

SEQ ID NO: 3673031 - DNA, 25 bp, Homo sapien
aagtcatccaccaggcgtacgctgg

SEQ ID NO: 3673032 - DNA, 25 bp, Homo sapien
catccaccaggcgtacgctggaggg

SEQ ID NO: 3673033 - DNA, 25 bp, Homo sapien
tttttcaaggtcataaaggcagccc

SEQ ID NO: 3673034 - DNA, 25 bp, Homo sapien
ggcttgttcctgacagagctgaaca

SEQ ID NO: 3673035 - DNA, 25 bp, Homo sapien
agctgaacatgaacagaacctctgg

SEQ ID NO: 3673036 - DNA, 25 bp, Homo sapien
cagagggacagctactttttcaagg

SEQ ID NO: 3673037 - DNA, 25 bp, Homo sapien
cacgggggtggagacatcctttcca

SEQ ID NO: 3673038 - DNA, 25 bp, Homo sapien
ggggtggagacatcctttccaggca

SEQ ID NO: 3673039 - DNA, 25 bp, Homo sapien
gggtggagacatcctttccaggcag

SEQ ID NO: 3673040 - DNA, 25 bp, Homo sapien
gctcacgggggtggagacatccttt

SEQ ID NO: 3673041 - DNA, 25 bp, Homo sapien
ggcctcagcgactgcaggctgtaga

SEQ ID NO: 3673042 - DNA, 25 bp, Homo sapien
tcagcgactgcaggctgtagaaaaa

SEQ ID NO: 3673043 - DNA, 25 bp, Homo sapien
cctcagcgactgcaggctgtagaaa

SEQ ID NO: 3673044 - DNA, 25 bp, Homo sapien
agcgactgcaggctgtagaaaaagg

SEQ ID NO: 3673045 - DNA, 25 bp, Homo sapien
tgggatttccccaaggcagtgcatg

SEQ ID NO: 3673046 - DNA, 25 bp, Homo sapien
gaggagctcctagacacttcccaga

SEQ ID NO: 3673047 - DNA, 25 bp, Homo sapien
tggaatatggctcacagcacgggat

SEQ ID NO: 3673048 - DNA, 25 bp, Homo sapien
gacccgtggctggtaagatctgcat

SEQ ID NO: 3673049 - DNA, 25 bp, Homo sapien
tgtcggagccgtagctccccaagca

SEQ ID NO: 3673050 - DNA, 25 bp, Homo sapien
caatgtggccaatggcccctttggg

SEQ ID NO: 3673051 - DNA, 25 bp, Homo sapien
gtcggagccgtagctccccaagcag

SEQ ID NO: 3673052 - DNA, 25 bp, Homo sapien
aatggtcttctcagtagagacaatg

SEQ ID NO: 3673053 - DNA, 25 bp, Homo sapien
ctgtaggagataagggggatgagcg

SEQ ID NO: 3673054 - DNA, 25 bp, Homo sapien
tgtaggagataagggggatgagcgc

SEQ ID NO: 3673055 - DNA, 25 bp, Homo sapien
gtaggagataagggggatgagcgct

SEQ ID NO: 3673056 - DNA, 25 bp, Homo sapien
taggagataagggggatgagcgctg

SEQ ID NO: 3673057 - DNA, 25 bp, Homo sapien
tggtcccagaggtgacaatcgttgt

SEQ ID NO: 3673058 - DNA, 25 bp, Homo sapien
agtgctggtcccagaggtgacaatc

SEQ ID NO: 3673059 - DNA, 25 bp, Homo sapien
atgggcacacggcgcacagacagcg

SEQ ID NO: 3673060 - DNA, 25 bp, Homo sapien
tcccagaggtgacaatcgttgttgg

SEQ ID NO: 3673061 - DNA, 25 bp, Homo sapien
agcccctcgggcggcctttggtcat

SEQ ID NO: 3673062 - DNA, 25 bp, Homo sapien
gccggaggcgcaagcccctcgggcg

SEQ ID NO: 3673063 - DNA, 25 bp, Homo sapien
ccctcgggcggcctttggtcatgct

SEQ ID NO: 3673064 - DNA, 25 bp, Homo sapien
ctgccggaggcgcaagcccctcggg

SEQ ID NO: 3673065 - DNA, 25 bp, Homo sapien
gccctgcatggcaccaggagacaag

SEQ ID NO: 3673066 - DNA, 25 bp, Homo sapien
ctcacatttgctgagtgcccacgca

SEQ ID NO: 3673067 - DNA, 25 bp, Homo sapien
tgcatggcaccaggagacaaggaca

SEQ ID NO: 3673068 - DNA, 25 bp, Homo sapien
ttgctgagtgcccacgcagcaccct

SEQ ID NO: 3673069 - DNA, 25 bp, Homo sapien
tgggagccgctcaccaggaggctga

SEQ ID NO: 3673070 - DNA, 25 bp, Homo sapien
gatggctgagatgccttcccgatgg

SEQ ID NO: 3673071 - DNA, 25 bp, Homo sapien
cgggtcacgtgggtgaggtggtcca

SEQ ID NO: 3673072 - DNA, 25 bp, Homo sapien
gctgccaggcacgtgacagcctgtg

SEQ ID NO: 3673073 - DNA, 25 bp, Homo sapien
tgatgatgatctggcttgtgtccca

SEQ ID NO: 3673074 - DNA, 25 bp, Homo sapien
gaccatgccgtcttgactcccggtg

SEQ ID NO: 3673075 - DNA, 25 bp, Homo sapien
gcagcagcaggttatggctccttct

SEQ ID NO: 3673076 - DNA, 25 bp, Homo sapien
ggctgtccattgacattccacaggg

SEQ ID NO: 3673077 - DNA, 25 bp, Homo sapien
catcttcacatcctcagtcttccaa

SEQ ID NO: 3673078 - DNA, 25 bp, Homo sapien
gacatcttcacatcctcagtcttcc

SEQ ID NO: 3673079 - DNA, 25 bp, Homo sapien
cagacatcttcacatcctcagtctt

SEQ ID NO: 3673080 - DNA, 25 bp, Homo sapien
gaacagacatcttcacatcctcagt

SEQ ID NO: 3673081 - DNA, 25 bp, Homo sapien
ctcttgggcttggaggctgagccgg

SEQ ID NO: 3673082 - DNA, 25 bp, Homo sapien
tcttgggcttggaggctgagccggg

SEQ ID NO: 3673083 - DNA, 25 bp, Homo sapien
tgagccgggggctcctctcctgctg

SEQ ID NO: 3673084 - DNA, 25 bp, Homo sapien
gaggctgagccgggggctcctctcc

SEQ ID NO: 3673085 - DNA, 25 bp, Homo sapien
tgtcaaagcaatgctaacgtccagc

SEQ ID NO: 3673086 - DNA, 25 bp, Homo sapien
aatgctaacgtccagctctcgactc

SEQ ID NO: 3673087 - DNA, 25 bp, Homo sapien
aagcaatgctaacgtccagctctcg

SEQ ID NO: 3673088 - DNA, 25 bp, Homo sapien
taacgtccagctctcgactcaaggc

SEQ ID NO: 3673089 - DNA, 25 bp, Homo sapien
caccaaccaggagtttggtgtggtt

SEQ ID NO: 3673090 - DNA, 25 bp, Homo sapien
ccccctctcatcaccaaccaggagt

SEQ ID NO: 3673091 - DNA, 25 bp, Homo sapien
aatattctccccctctcatcaccaa

SEQ ID NO: 3673092 - DNA, 25 bp, Homo sapien
cctctcatcaccaaccaggagtttg

SEQ ID NO: 3673093 - DNA, 25 bp, Homo sapien
gtttcttctgtaggcagagctcagg

SEQ ID NO: 3673094 - DNA, 25 bp, Homo sapien
ggtttcttctgtaggcagagctcag

SEQ ID NO: 3673095 - DNA, 25 bp, Homo sapien
tcatagaagtcccatcggccatgga

SEQ ID NO: 3673096 - DNA, 25 bp, Homo sapien
gccctccgagtgtgtgtgctcatcc

SEQ ID NO: 3673097 - DNA, 25 bp, Homo sapien
ctccgagtgtgtgtgctcatccttt

SEQ ID NO: 3673098 - DNA, 25 bp, Homo sapien
cagccctccgagtgtgtgtgctcat

SEQ ID NO: 3673099 - DNA, 25 bp, Homo sapien
tcagccctccgagtgtgtgtgctca

SEQ ID NO: 3673100 - DNA, 25 bp, Homo sapien
ttcagtgcaatagcccttaataagg

SEQ ID NO: 3673101 - DNA, 25 bp, Homo sapien
tacaataatttccagtaagcgaccc

SEQ ID NO: 3673102 - DNA, 25 bp, Homo sapien
catgtgtaatttcgtgtgcagctgg

SEQ ID NO: 3673103 - DNA, 25 bp, Homo sapien
gctgggcatcaccaagtcacagttt

SEQ ID NO: 3673104 - DNA, 25 bp, Homo sapien
gaaggtggtcatctgcaaagcaaga

SEQ ID NO: 3673105 - DNA, 25 bp, Homo sapien
ccctggagtggttctatgttgacat

SEQ ID NO: 3673106 - DNA, 25 bp, Homo sapien
ccagccggactcaccctgtaccttg

SEQ ID NO: 3673107 - DNA, 25 bp, Homo sapien
accttggccgatgcagcccagtctt

SEQ ID NO: 3673108 - DNA, 25 bp, Homo sapien
tcatgaggtcgccatggagggacac

SEQ ID NO: 3673109 - DNA, 25 bp, Homo sapien
tgaagagcctattcctccccgtatg

SEQ ID NO: 3673110 - DNA, 25 bp, Homo sapien
gaaagccctggaaacttggtcagtg

SEQ ID NO: 3673111 - DNA, 25 bp, Homo sapien
cactgagtacttatgggttctgcca

SEQ ID NO: 3673112 - DNA, 25 bp, Homo sapien
cttttgcactggacatgctgcttga

SEQ ID NO: 3673113 - DNA, 25 bp, Homo sapien
tttgcactggacatgctgcttgagc

SEQ ID NO: 3673114 - DNA, 25 bp, Homo sapien
gcactggacatgctgcttgagcccc

SEQ ID NO: 3673115 - DNA, 25 bp, Homo sapien
cacttttgcactggacatgctgctt

SEQ ID NO: 3673116 - DNA, 25 bp, Homo sapien
tggtgtggccggcagcattttctgc

SEQ ID NO: 3673117 - DNA, 25 bp, Homo sapien
ctggtgtggccggcagcattttctg

SEQ ID NO: 3673118 - DNA, 25 bp, Homo sapien
gcagcattttctgctcccgcttccc

SEQ ID NO: 3673119 - DNA, 25 bp, Homo sapien
tctgcctggagtcggccaggagaat

SEQ ID NO: 3673120 - DNA, 25 bp, Homo sapien
ccccggcagagagtgctgctgctct

SEQ ID NO: 3673121 - DNA, 25 bp, Homo sapien
ctgcctggagtcggccaggagaatt

SEQ ID NO: 3673122 - DNA, 25 bp, Homo sapien
tgcctggagtcggccaggagaattt

SEQ ID NO: 3673123 - DNA, 25 bp, Homo sapien
gaccagtccacagccggtgtgggct

SEQ ID NO: 3673124 - DNA, 25 bp, Homo sapien
gcagggaccagtccacagccggtgt

SEQ ID NO: 3673125 - DNA, 25 bp, Homo sapien
gggaccagtccacagccggtgtggg

SEQ ID NO: 3673126 - DNA, 25 bp, Homo sapien
tgcgcagggaccagtccacagccgg

SEQ ID NO: 3673127 - DNA, 25 bp, Homo sapien
tgaggatgaggcagaactgcacagt

SEQ ID NO: 3673128 - DNA, 25 bp, Homo sapien
tgaggcagaactgcacagtaagccc

SEQ ID NO: 3673129 - DNA, 25 bp, Homo sapien
gatgaggcagaactgcacagtaagc

SEQ ID NO: 3673130 - DNA, 25 bp, Homo sapien
aggatgaggcagaactgcacagtaa

SEQ ID NO: 3673131 - DNA, 25 bp, Homo sapien
aatgatggcatccttgaagactttt

SEQ ID NO: 3673132 - DNA, 25 bp, Homo sapien
gacaatgatggcatccttgaagact

SEQ ID NO: 3673133 - DNA, 25 bp, Homo sapien
cacaatgctctgacaatgatggcat

SEQ ID NO: 3673134 - DNA, 25 bp, Homo sapien
ccacaatgctctgacaatgatggca

SEQ ID NO: 3673135 - DNA, 25 bp, Homo sapien
tcctcgcctttcaggagcacgaagt

SEQ ID NO: 3673136 - DNA, 25 bp, Homo sapien
cattcctcgcctttcaggagcacga

SEQ ID NO: 3673137 - DNA, 25 bp, Homo sapien
ttcctcgcctttcaggagcacgaag

SEQ ID NO: 3673138 - DNA, 25 bp, Homo sapien
cctcgcctttcaggagcacgaagtc

SEQ ID NO: 3673139 - DNA, 25 bp, Homo sapien
tcccaaccccaatcaccactgacat

SEQ ID NO: 3673140 - DNA, 25 bp, Homo sapien
aaccccaatcaccactgacatggct

SEQ ID NO: 3673141 - DNA, 25 bp, Homo sapien
ctctcccaaccccaatcaccactga

SEQ ID NO: 3673142 - DNA, 25 bp, Homo sapien
ccaaccccaatcaccactgacatgg

SEQ ID NO: 3673143 - DNA, 25 bp, Homo sapien
cacggttgcaagagcaggcctgtgc

SEQ ID NO: 3673144 - DNA, 25 bp, Homo sapien
gccatgatcagagcccgtggtgcgc

SEQ ID NO: 3673145 - DNA, 25 bp, Homo sapien
cctgtgctgggcatgagcgtgtccc

SEQ ID NO: 3673146 - DNA, 25 bp, Homo sapien
agcccagcgtggtgtggagcttcac

SEQ ID NO: 3673147 - DNA, 25 bp, Homo sapien
aggaagaagggatctgcagtgtgaa

SEQ ID NO: 3673148 - DNA, 25 bp, Homo sapien
gaagaagggatctgcagtgtgaact

SEQ ID NO: 3673149 - DNA, 25 bp, Homo sapien
aaaggaagaagggatctgcagtgtg

SEQ ID NO: 3673150 - DNA, 25 bp, Homo sapien
tcaaaggaagaagggatctgcagtg

SEQ ID NO: 3673151 - DNA, 25 bp, Homo sapien
ggaaagggggtgtcctcagggcata

SEQ ID NO: 3673152 - DNA, 25 bp, Homo sapien
aaagggggtgtcctcagggcatagg

SEQ ID NO: 3673153 - DNA, 25 bp, Homo sapien
agggggtgtcctcagggcataggtc

SEQ ID NO: 3673154 - DNA, 25 bp, Homo sapien
ggggtgtcctcagggcataggtcac

SEQ ID NO: 3673155 - DNA, 25 bp, Homo sapien
acactggagcgcatgggcctcttca

SEQ ID NO: 3673156 - DNA, 25 bp, Homo sapien
cactggagcgcatgggcctcttcac

SEQ ID NO: 3673157 - DNA, 25 bp, Homo sapien
aagacacactggagcgcatgggcct

SEQ ID NO: 3673158 - DNA, 25 bp, Homo sapien
acacactggagcgcatgggcctctt

SEQ ID NO: 3673159 - DNA, 25 bp, Homo sapien
cttttctatgatgcggaaggaaaac

SEQ ID NO: 3673160 - DNA, 25 bp, Homo sapien
gattcagaggccaagtagcggaact

SEQ ID NO: 3673161 - DNA, 25 bp, Homo sapien
aaaggaaaaacagccgcaggacaca

SEQ ID NO: 3673162 - DNA, 25 bp, Homo sapien
gccaagtagcggaacttttctatga

SEQ ID NO: 3673163 - DNA, 25 bp, Homo sapien
gtcctgcttccgattcaaggactcg

SEQ ID NO: 3673164 - DNA, 25 bp, Homo sapien
gttgtagagaatactgccttgtcct

SEQ ID NO: 3673165 - DNA, 25 bp, Homo sapien
tccgattcaaggactcggagagcat

SEQ ID NO: 3673166 - DNA, 25 bp, Homo sapien
ctcggagagcattttctgtggtaat

SEQ ID NO: 3673167 - DNA, 25 bp, Homo sapien
tgatcagttgtagggtcagattaat

SEQ ID NO: 3673168 - DNA, 25 bp, Homo sapien
cagattaatcagttctttcaggggc

SEQ ID NO: 3673169 - DNA, 25 bp, Homo sapien
gctttactgtgatcagttgtagggt

SEQ ID NO: 3673170 - DNA, 25 bp, Homo sapien
tactgtgatcagttgtagggtcaga

SEQ ID NO: 3673171 - DNA, 25 bp, Homo sapien
ccctgggtcttaagctgtgatcaag

SEQ ID NO: 3673172 - DNA, 25 bp, Homo sapien
ttctctggcttctgaccatttcttc

SEQ ID NO: 3673173 - DNA, 25 bp, Homo sapien
taagctgtgatcaagaagaatgccc

SEQ ID NO: 3673174 - DNA, 25 bp, Homo sapien
tgctgccatgggcaaatggggccct

SEQ ID NO: 3673175 - DNA, 25 bp, Homo sapien
cagtactatgggaatttcagccgca

SEQ ID NO: 3673176 - DNA, 25 bp, Homo sapien
tctcccagaaaaggcggaaggacag

SEQ ID NO: 3673177 - DNA, 25 bp, Homo sapien
tcaagggcattacgtctgcagagtc

SEQ ID NO: 3673178 - DNA, 25 bp, Homo sapien
caagctccgggtggtgcagtactat

SEQ ID NO: 3673179 - DNA, 25 bp, Homo sapien
catctgtttggttcctagtccctcc

SEQ ID NO: 3673180 - DNA, 25 bp, Homo sapien
tatacatcagtggtcagttctaaga

SEQ ID NO: 3673181 - DNA, 25 bp, Homo sapien
cagatacttcagtgtggatcgccta

SEQ ID NO: 3673182 - DNA, 25 bp, Homo sapien
tttgccagtcataccaataatgtcc

SEQ ID NO: 3673183 - DNA, 25 bp, Homo sapien
gaataacatgtaatgctttgacctg

SEQ ID NO: 3673184 - DNA, 25 bp, Homo sapien
gggacggaaacaagatggcatcaac

SEQ ID NO: 3673185 - DNA, 25 bp, Homo sapien
tcaacaggaccatacaagaagaagt

SEQ ID NO: 3673186 - DNA, 25 bp, Homo sapien
agatgaagttcaataaggcagatag

SEQ ID NO: 3673187 - DNA, 25 bp, Homo sapien
cactttataatagatgatggcccag

SEQ ID NO: 3673188 - DNA, 25 bp, Homo sapien
gggacctcctcagttcacacttgta

SEQ ID NO: 3673189 - DNA, 25 bp, Homo sapien
taccaagggtgaaagctatgagagg

SEQ ID NO: 3673190 - DNA, 25 bp, Homo sapien
tgcaagccatattgtaagaacccca

SEQ ID NO: 3673191 - DNA, 25 bp, Homo sapien
ccagcgtgttgcagagcagagagat

SEQ ID NO: 3673192 - DNA, 25 bp, Homo sapien
gaaatgagtgaagtgccagcgtgtt

SEQ ID NO: 3673193 - DNA, 25 bp, Homo sapien
gaaggaagaggcaactcccagagtc

SEQ ID NO: 3673194 - DNA, 25 bp, Homo sapien
agagttgatgagactgaccaagggt

SEQ ID NO: 3673195 - DNA, 25 bp, Homo sapien
ttgggattattttcaatccatcacc

SEQ ID NO: 3673196 - DNA, 25 bp, Homo sapien
gacgtagtcttctgtttaggtcagg

SEQ ID NO: 3673197 - DNA, 25 bp, Homo sapien
ttcatggctcagtagagcaccgtgg

SEQ ID NO: 3673198 - DNA, 25 bp, Homo sapien
taggtcaggcgtgactttcatggct

SEQ ID NO: 3673199 - DNA, 25 bp, Homo sapien
cacatatggtggttgattgagacct

SEQ ID NO: 3673200 - DNA, 25 bp, Homo sapien
gaaggttccttcactcacacatatg

SEQ ID NO: 3673201 - DNA, 25 bp, Homo sapien
agttttcttatgctcacggtgggtg

SEQ ID NO: 3673202 - DNA, 25 bp, Homo sapien
ggagggcttgtctctgccttgtgat

SEQ ID NO: 3673203 - DNA, 25 bp, Homo sapien
gataagagccatttacaccgctttc

SEQ ID NO: 3673204 - DNA, 25 bp, Homo sapien
tgaaatttccgaagaagccaacttg

SEQ ID NO: 3673205 - DNA, 25 bp, Homo sapien
cgtgttactgctcctggtcgcatca

SEQ ID NO: 3673206 - DNA, 25 bp, Homo sapien
attcattgtggttcagataagagcc

SEQ ID NO: 3673207 - DNA, 25 bp, Homo sapien
gatggagcacccttcctaaattgcg

SEQ ID NO: 3673208 - DNA, 25 bp, Homo sapien
ggagcacccttcctaaattgcgact

SEQ ID NO: 3673209 - DNA, 25 bp, Homo sapien
aaatgatgatggagcacccttccta

SEQ ID NO: 3673210 - DNA, 25 bp, Homo sapien
cccttcctaaattgcgacttgtaat

SEQ ID NO: 3673211 - DNA, 25 bp, Homo sapien
gccccctcatctgtttgaggctcag

SEQ ID NO: 3673212 - DNA, 25 bp, Homo sapien
ccctcatctgtttgaggctcagctt

SEQ ID NO: 3673213 - DNA, 25 bp, Homo sapien
aagccccctcatctgtttgaggctc

SEQ ID NO: 3673214 - DNA, 25 bp, Homo sapien
cccctcatctgtttgaggctcagct

SEQ ID NO: 3673215 - DNA, 25 bp, Homo sapien
tgtcaagacagatggtaccataggt

SEQ ID NO: 3673216 - DNA, 25 bp, Homo sapien
tctggacctcacgttgatttaattc

SEQ ID NO: 3673217 - DNA, 25 bp, Homo sapien
taaagtttttgctacctattgccag

SEQ ID NO: 3673218 - DNA, 25 bp, Homo sapien
ttttctagtgagaagtgcccaccac

SEQ ID NO: 3673219 - DNA, 25 bp, Homo sapien
tcaatcaggatacaaatctccagga

SEQ ID NO: 3673220 - DNA, 25 bp, Homo sapien
cagaaactcttagctcatcatggtg

SEQ ID NO: 3673221 - DNA, 25 bp, Homo sapien
gccttcaatcaggatacaaatctcc

SEQ ID NO: 3673222 - DNA, 25 bp, Homo sapien
gtggccgtggatctacagctcagcc

SEQ ID NO: 3673223 - DNA, 25 bp, Homo sapien
cagactaatgatttgtgcccaggac

SEQ ID NO: 3673224 - DNA, 25 bp, Homo sapien
tgccagactaatgatttgtgcccag

SEQ ID NO: 3673225 - DNA, 25 bp, Homo sapien
agactaatgatttgtgcccaggact

SEQ ID NO: 3673226 - DNA, 25 bp, Homo sapien
acttgccagactaatgatttgtgcc

SEQ ID NO: 3673227 - DNA, 25 bp, Homo sapien
tccttctgtccggatggaagtggca

SEQ ID NO: 3673228 - DNA, 25 bp, Homo sapien
gaggtctgctctcattgacggctcc

SEQ ID NO: 3673229 - DNA, 25 bp, Homo sapien
cctgagtttaattcaagagatggca

SEQ ID NO: 3673230 - DNA, 25 bp, Homo sapien
caagcacaactgctgactggcagaa

SEQ ID NO: 3673231 - DNA, 25 bp, Homo sapien
tttaggtagcaacacagtccgggag

SEQ ID NO: 3673232 - DNA, 25 bp, Homo sapien
tctggttagcatcatgcaattgcca

SEQ ID NO: 3673233 - DNA, 25 bp, Homo sapien
ttcctcatcaagagaacaccagcca

SEQ ID NO: 3673234 - DNA, 25 bp, Homo sapien
ccataaggaagcttttacaatgtgg

SEQ ID NO: 3673235 - DNA, 25 bp, Homo sapien
catagaagacatgactggtggaggc

SEQ ID NO: 3673236 - DNA, 25 bp, Homo sapien
tacaattgccatcaggctaaggccc

SEQ ID NO: 3673237 - DNA, 25 bp, Homo sapien
gtatttctgggatcacatcacggaa

SEQ ID NO: 3673238 - DNA, 25 bp, Homo sapien
caggaaatctctcggactgggctac

SEQ ID NO: 3673239 - DNA, 25 bp, Homo sapien
cttgtctttaacgttggttctactg

SEQ ID NO: 3673240 - DNA, 25 bp, Homo sapien
catcaagctctatatccctgaccat

SEQ ID NO: 3673241 - DNA, 25 bp, Homo sapien
ttaacgttggttctactgccatcaa

SEQ ID NO: 3673242 - DNA, 25 bp, Homo sapien
gtctttaacgttggttctactgcca

SEQ ID NO: 3673243 - DNA, 25 bp, Homo sapien
gaagggtgagaaggattgacttcct

SEQ ID NO: 3673244 - DNA, 25 bp, Homo sapien
ggacatgaggaggccatggatggag

SEQ ID NO: 3673245 - DNA, 25 bp, Homo sapien
agcgccagcatgaacttgggggtca

SEQ ID NO: 3673246 - DNA, 25 bp, Homo sapien
tggctcattgtgcctgcgctgccag

SEQ ID NO: 3673247 - DNA, 25 bp, Homo sapien
cttgggtcacatggctcattgtgcc

SEQ ID NO: 3673248 - DNA, 25 bp, Homo sapien
gccagcatgaacttgggggtcagca

SEQ ID NO: 3673249 - DNA, 25 bp, Homo sapien
cttcagccctgtcttcagagaggct

SEQ ID NO: 3673250 - DNA, 25 bp, Homo sapien
ctgagaggaactgaacagcctcctg

SEQ ID NO: 3673251 - DNA, 25 bp, Homo sapien
cagcttctggtggagtccagaatga

SEQ ID NO: 3673252 - DNA, 25 bp, Homo sapien
cagtggtttccttccccatcagtca

SEQ ID NO: 3673253 - DNA, 25 bp, Homo sapien
ccatacatcccaatcagtcctgagt

SEQ ID NO: 3673254 - DNA, 25 bp, Homo sapien
gcacggtgctggagacatagagcat

SEQ ID NO: 3673255 - DNA, 25 bp, Homo sapien
tgcagagaagatgcctaagtagagg

SEQ ID NO: 3673256 - DNA, 25 bp, Homo sapien
gatctcctgtacaggttgcctgagc

SEQ ID NO: 3673257 - DNA, 25 bp, Homo sapien
cagggctgaacgcagggatggttct

SEQ ID NO: 3673258 - DNA, 25 bp, Homo sapien
ttaggtttccgtgggcagaagtcac

SEQ ID NO: 3673259 - DNA, 25 bp, Homo sapien
catttccaccgaggttggatttagg

SEQ ID NO: 3673260 - DNA, 25 bp, Homo sapien
tggatttaggtttccgtgggcagaa

SEQ ID NO: 3673261 - DNA, 25 bp, Homo sapien
ggaggactcagaaggacggaactac

SEQ ID NO: 3673262 - DNA, 25 bp, Homo sapien
agatgaggtctgcttccgatgcacc

SEQ ID NO: 3673263 - DNA, 25 bp, Homo sapien
ggtctgcttccgatgcacccaggaa

SEQ ID NO: 3673264 - DNA, 25 bp, Homo sapien
gacggaactacagatgaggtctgct

SEQ ID NO: 3673265 - DNA, 25 bp, Homo sapien
tgtaggggtataggagatgagagct

SEQ ID NO: 3673266 - DNA, 25 bp, Homo sapien
agatgagagctaggccggacagctc

SEQ ID NO: 3673267 - DNA, 25 bp, Homo sapien
ggccaccacagatctagaaccattc

SEQ ID NO: 3673268 - DNA, 25 bp, Homo sapien
gaaggccaccacagatctagaacca

SEQ ID NO: 3673269 - DNA, 25 bp, Homo sapien
gctttgcagctgcatgggccaggac

SEQ ID NO: 3673270 - DNA, 25 bp, Homo sapien
ggctttgcagctgcatgggccagga

SEQ ID NO: 3673271 - DNA, 25 bp, Homo sapien
tggctttgcagctgcatgggccagg

SEQ ID NO: 3673272 - DNA, 25 bp, Homo sapien
ctggctttgcagctgcatgggccag

SEQ ID NO: 3673273 - DNA, 25 bp, Homo sapien
ataaagttcaggatggtgaatagag

SEQ ID NO: 3673274 - DNA, 25 bp, Homo sapien
ccatgtagcccagcagcaagctagt

SEQ ID NO: 3673275 - DNA, 25 bp, Homo sapien
gcagcaagctagtgacatctactgt

SEQ ID NO: 3673276 - DNA, 25 bp, Homo sapien
gaggacttgtatcacactttctgcc

SEQ ID NO: 3673277 - DNA, 25 bp, Homo sapien
tccctctgggatggtaattaggaaa

SEQ ID NO: 3673278 - DNA, 25 bp, Homo sapien
ccaaatggctttgctacggtagcgg

SEQ ID NO: 3673279 - DNA, 25 bp, Homo sapien
tagcggaaggagcttctcgccctca

SEQ ID NO: 3673280 - DNA, 25 bp, Homo sapien
gaaatgagcattgttgcttttatga

SEQ ID NO: 3673281 - DNA, 25 bp, Homo sapien
actggtttactcgtttgtctctgcc

SEQ ID NO: 3673282 - DNA, 25 bp, Homo sapien
tactcgtttgtctctgccttagctc

SEQ ID NO: 3673283 - DNA, 25 bp, Homo sapien
tgtctctgccttagctctgcactgt

SEQ ID NO: 3673284 - DNA, 25 bp, Homo sapien
ctttacgatccactggtttactcgt

SEQ ID NO: 3673285 - DNA, 25 bp, Homo sapien
cttgatttcctggtacttgagtcca

SEQ ID NO: 3673286 - DNA, 25 bp, Homo sapien
tacttgagtccagccccttccagta

SEQ ID NO: 3673287 - DNA, 25 bp, Homo sapien
tattccatgagtgggttatagacgt

SEQ ID NO: 3673288 - DNA, 25 bp, Homo sapien
acgtgccacgtatggttctcctcgg

SEQ ID NO: 3673289 - DNA, 25 bp, Homo sapien
tacccagcccatcatttggtggaat

SEQ ID NO: 3673290 - DNA, 25 bp, Homo sapien
cagcccatcatttggtggaatattg

SEQ ID NO: 3673291 - DNA, 25 bp, Homo sapien
gaatacccagcccatcatttggtgg

SEQ ID NO: 3673292 - DNA, 25 bp, Homo sapien
cctgaatacccagcccatcatttgg

SEQ ID NO: 3673293 - DNA, 25 bp, Homo sapien
agcactcagtggcagggtgagccat

SEQ ID NO: 3673294 - DNA, 25 bp, Homo sapien
ctcagtggcagggtgagccatgcac

SEQ ID NO: 3673295 - DNA, 25 bp, Homo sapien
cagcactcagtggcagggtgagcca

SEQ ID NO: 3673296 - DNA, 25 bp, Homo sapien
cactcagtggcagggtgagccatgc

SEQ ID NO: 3673297 - DNA, 25 bp, Homo sapien
attggctgtggtggctactctgatc

SEQ ID NO: 3673298 - DNA, 25 bp, Homo sapien
cattggctgtggtggctactctgat

SEQ ID NO: 3673299 - DNA, 25 bp, Homo sapien
ggctgtggtggctactctgatcagc

SEQ ID NO: 3673300 - DNA, 25 bp, Homo sapien
tggctgtggtggctactctgatcag

SEQ ID NO: 3673301 - DNA, 25 bp, Homo sapien
agggagggcttgtgggatcagctga

SEQ ID NO: 3673302 - DNA, 25 bp, Homo sapien
ggagcagggagggcttgtgggatca

SEQ ID NO: 3673303 - DNA, 25 bp, Homo sapien
agcagggagggcttgtgggatcagc

SEQ ID NO: 3673304 - DNA, 25 bp, Homo sapien
ctaaggagcagggagggcttgtggg

SEQ ID NO: 3673305 - DNA, 25 bp, Homo sapien
tcaaaagctggtaataagggcagtg

SEQ ID NO: 3673306 - DNA, 25 bp, Homo sapien
agctggtaataagggcagtgcagaa

SEQ ID NO: 3673307 - DNA, 25 bp, Homo sapien
ccaatttctggttctgggtatttga

SEQ ID NO: 3673308 - DNA, 25 bp, Homo sapien
tggttctgggtatttgaagctcata

SEQ ID NO: 3673309 - DNA, 25 bp, Homo sapien
tggggaagaggcaaacagtccgcac

SEQ ID NO: 3673310 - DNA, 25 bp, Homo sapien
gaggcaaacagtccgcactgcaaca

SEQ ID NO: 3673311 - DNA, 25 bp, Homo sapien
gggaagaggcaaacagtccgcactg

SEQ ID NO: 3673312 - DNA, 25 bp, Homo sapien
gaagaggcaaacagtccgcactgca

SEQ ID NO: 3673313 - DNA, 25 bp, Homo sapien
ggattcaggacccaagcctcctcta

SEQ ID NO: 3673314 - DNA, 25 bp, Homo sapien
caaaggtgataggagagtggattca

SEQ ID NO: 3673315 - DNA, 25 bp, Homo sapien
aggctgcccaaaggtgataggagag

SEQ ID NO: 3673316 - DNA, 25 bp, Homo sapien
aagcctcctctagctcacaaaccta

SEQ ID NO: 3673317 - DNA, 25 bp, Homo sapien
tctttgcgcagtttctgaccgcttc

SEQ ID NO: 3673318 - DNA, 25 bp, Homo sapien
gcagcacctctttgcgcagtttctg

SEQ ID NO: 3673319 - DNA, 25 bp, Homo sapien
tttgcgcagtttctgaccgcttctg

SEQ ID NO: 3673320 - DNA, 25 bp, Homo sapien
cacctctttgcgcagtttctgaccg

SEQ ID NO: 3673321 - DNA, 25 bp, Homo sapien
gaagaaaccagcttgcctgggcttg

SEQ ID NO: 3673322 - DNA, 25 bp, Homo sapien
tacaaccacattacatgtgcaggag

SEQ ID NO: 3673323 - DNA, 25 bp, Homo sapien
aaccagcttgcctgggcttgtcaaa

SEQ ID NO: 3673324 - DNA, 25 bp, Homo sapien
caggagcctctaaatcttgtagcag

SEQ ID NO: 3673325 - DNA, 25 bp, Homo sapien
cccagaaggctctaacaaattggaa

SEQ ID NO: 3673326 - DNA, 25 bp, Homo sapien
gccggtagtgtggtttttgagccca

SEQ ID NO: 3673327 - DNA, 25 bp, Homo sapien
catgtgtgacgagcagttcagtgga

SEQ ID NO: 3673328 - DNA, 25 bp, Homo sapien
gagccatcgactcaggcatgtgtga

SEQ ID NO: 3673329 - DNA, 25 bp, Homo sapien
ccatagctcagctctgttgtcactt

SEQ ID NO: 3673330 - DNA, 25 bp, Homo sapien
catagctcagctctgttgtcacttc

SEQ ID NO: 3673331 - DNA, 25 bp, Homo sapien
tccatagctcagctctgttgtcact

SEQ ID NO: 3673332 - DNA, 25 bp, Homo sapien
ttccatagctcagctctgttgtcac

SEQ ID NO: 3673333 - DNA, 25 bp, Homo sapien
tgcctgccgtgctgggtttcaggat

SEQ ID NO: 3673334 - DNA, 25 bp, Homo sapien
cgtgctgggtttcaggatctgtagt

SEQ ID NO: 3673335 - DNA, 25 bp, Homo sapien
ctgccgtgctgggtttcaggatctg

SEQ ID NO: 3673336 - DNA, 25 bp, Homo sapien
aggtgcctgccgtgctgggtttcag

SEQ ID NO: 3673337 - DNA, 25 bp, Homo sapien
ctgtccttgtcagccggcaggtgtc

SEQ ID NO: 3673338 - DNA, 25 bp, Homo sapien
ttccccaaaactagagcctctcatt

SEQ ID NO: 3673339 - DNA, 25 bp, Homo sapien
gcctctcattgaccagatgcaattg

SEQ ID NO: 3673340 - DNA, 25 bp, Homo sapien
ccaagaaagctgtccttgtcagccg

SEQ ID NO: 3673341 - DNA, 25 bp, Homo sapien
tgcatcatccaacacgctgccgatg

SEQ ID NO: 3673342 - DNA, 25 bp, Homo sapien
gctgaacgcgtctgtgcacttctta

SEQ ID NO: 3673343 - DNA, 25 bp, Homo sapien
aacacgctgccgatgctggaggagt

SEQ ID NO: 3673344 - DNA, 25 bp, Homo sapien
aggagtcgctgaacgcgtctgtgca

SEQ ID NO: 3673345 - DNA, 25 bp, Homo sapien
aatgcccggtctgttaggctgctca

SEQ ID NO: 3673346 - DNA, 25 bp, Homo sapien
agatgcacaaactccggaatgcccg

SEQ ID NO: 3673347 - DNA, 25 bp, Homo sapien
ctcggagatgcacaaactccggaat

SEQ ID NO: 3673348 - DNA, 25 bp, Homo sapien
caaactccggaatgcccggtctgtt

SEQ ID NO: 3673349 - DNA, 25 bp, Homo sapien
gacacagccagataggagtcatgga

SEQ ID NO: 3673350 - DNA, 25 bp, Homo sapien
gcttattgctgctccttaggccgga

SEQ ID NO: 3673351 - DNA, 25 bp, Homo sapien
tctggtgaaaagtcccaaacacctg

SEQ ID NO: 3673352 - DNA, 25 bp, Homo sapien
ccctgtgacggtaactggctccaaa

SEQ ID NO: 3673353 - DNA, 25 bp, Homo sapien
gagctttgctttctgggacggttcc

SEQ ID NO: 3673354 - DNA, 25 bp, Homo sapien
gaggatttttcagagccggaggctt

SEQ ID NO: 3673355 - DNA, 25 bp, Homo sapien
tctcgagactgacattcactgggct

SEQ ID NO: 3673356 - DNA, 25 bp, Homo sapien
agtgggcctgctctcacaacgttgg

SEQ ID NO: 3673357 - DNA, 25 bp, Homo sapien
ggtcatcagcgggtctctccttaga

SEQ ID NO: 3673358 - DNA, 25 bp, Homo sapien
ggacaccagctggatccggcaggac

SEQ ID NO: 3673359 - DNA, 25 bp, Homo sapien
gaggatgacaccgttgctcacaggt

SEQ ID NO: 3673360 - DNA, 25 bp, Homo sapien
ctttggcgatagtcggagctgtgct

SEQ ID NO: 3673361 - DNA, 25 bp, Homo sapien
cattttctctgtagcccctccaggc

SEQ ID NO: 3673362 - DNA, 25 bp, Homo sapien
gagcccattctctagctggtgggtc

SEQ ID NO: 3673363 - DNA, 25 bp, Homo sapien
tcaggatccctattgcaaagcctca

SEQ ID NO: 3673364 - DNA, 25 bp, Homo sapien
gggacacagatctggagagcccatt

SEQ ID NO: 3673365 - DNA, 25 bp, Homo sapien
taaaatcggattggctgtcactgta

SEQ ID NO: 3673366 - DNA, 25 bp, Homo sapien
agtaaaccacatcttctgctgatca

SEQ ID NO: 3673367 - DNA, 25 bp, Homo sapien
gaggcaaaggattgatctgaagagc

SEQ ID NO: 3673368 - DNA, 25 bp, Homo sapien
ccttacctttgaggcttggcataaa

SEQ ID NO: 3673369 - DNA, 25 bp, Homo sapien
tccaggcatgcgtgcccattgctta

SEQ ID NO: 3673370 - DNA, 25 bp, Homo sapien
tggttcttcctccagacacactttc

SEQ ID NO: 3673371 - DNA, 25 bp, Homo sapien
gcttaaggcacagtactgcagctca

SEQ ID NO: 3673372 - DNA, 25 bp, Homo sapien
gcagctcatccttccgcatcacatt

SEQ ID NO: 3673373 - DNA, 25 bp, Homo sapien
tgagggagtaaggtctttggcctgt

SEQ ID NO: 3673374 - DNA, 25 bp, Homo sapien
tttaatcgtaaacagcatgtgcctg

SEQ ID NO: 3673375 - DNA, 25 bp, Homo sapien
gcctgtgaaaaggttgtgcccttat

SEQ ID NO: 3673376 - DNA, 25 bp, Homo sapien
ggtgttgtctttaatcgtaaacagc

SEQ ID NO: 3673377 - DNA, 25 bp, Homo sapien
tccaaggacatggtcctcaggagag

SEQ ID NO: 3673378 - DNA, 25 bp, Homo sapien
ggagtcctccaaggacatggtcctc

SEQ ID NO: 3673379 - DNA, 25 bp, Homo sapien
tcctccaaggacatggtcctcagga

SEQ ID NO: 3673380 - DNA, 25 bp, Homo sapien
agtcctccaaggacatggtcctcag

SEQ ID NO: 3673381 - DNA, 25 bp, Homo sapien
gctcttcccaacagttttcgggctg

SEQ ID NO: 3673382 - DNA, 25 bp, Homo sapien
tagtgggtgtcgatgtaccaagaat

SEQ ID NO: 3673383 - DNA, 25 bp, Homo sapien
gcaattgcttgccacgaggccaggt

SEQ ID NO: 3673384 - DNA, 25 bp, Homo sapien
tcaccctcgggtaaagcaatggtgg

SEQ ID NO: 3673385 - DNA, 25 bp, Homo sapien
gcaggaagctcaagtctcccagagg

SEQ ID NO: 3673386 - DNA, 25 bp, Homo sapien
tcttctgccgacagctcaagtaggg

SEQ ID NO: 3673387 - DNA, 25 bp, Homo sapien
gaagactcctcccaaatgttgctgg

SEQ ID NO: 3673388 - DNA, 25 bp, Homo sapien
tgctctgggtgtggacaaaaagtga

SEQ ID NO: 3673389 - DNA, 25 bp, Homo sapien
cggactgcggatcctggaggacctt

SEQ ID NO: 3673390 - DNA, 25 bp, Homo sapien
ggacgggatggagaccttgacatac

SEQ ID NO: 3673391 - DNA, 25 bp, Homo sapien
cgaagacaaagtactccccggactg

SEQ ID NO: 3673392 - DNA, 25 bp, Homo sapien
cacctggagtggcaagtcgaagaca

SEQ ID NO: 3673393 - DNA, 25 bp, Homo sapien
tcaagaaatgccttctgtggcaaag

SEQ ID NO: 3673394 - DNA, 25 bp, Homo sapien
caaagtcctctaggtcatcagtgga

SEQ ID NO: 3673395 - DNA, 25 bp, Homo sapien
agaaatgccttctgtggcaaagtcc

SEQ ID NO: 3673396 - DNA, 25 bp, Homo sapien
aggcctggagcttctacaccctcct

SEQ ID NO: 3673397 - DNA, 25 bp, Homo sapien
ggaagtaagctcctctgggttcatc

SEQ ID NO: 3673398 - DNA, 25 bp, Homo sapien
ctctgggttcatctgggggtggggg

SEQ ID NO: 3673399 - DNA, 25 bp, Homo sapien
ggggaagtaagctcctctgggttca

SEQ ID NO: 3673400 - DNA, 25 bp, Homo sapien
tctgggttcatctgggggtggggga

SEQ ID NO: 3673401 - DNA, 25 bp, Homo sapien
tgcctgagttgacctgaatgcctgc

SEQ ID NO: 3673402 - DNA, 25 bp, Homo sapien
ccacctaatttgcagggcgagggaa

SEQ ID NO: 3673403 - DNA, 25 bp, Homo sapien
tggtccttagccagtctgcctgagt

SEQ ID NO: 3673404 - DNA, 25 bp, Homo sapien
aagcagtgcccctccatcagaggag

SEQ ID NO: 3673405 - DNA, 25 bp, Homo sapien
atggagaggacattcttctgcaaaa

SEQ ID NO: 3673406 - DNA, 25 bp, Homo sapien
gatggagaggacattcttctgcaaa

SEQ ID NO: 3673407 - DNA, 25 bp, Homo sapien
ctttcccagtgcaccaattccctgt

SEQ ID NO: 3673408 - DNA, 25 bp, Homo sapien
caggtctccagtgcctacagcaact

SEQ ID NO: 3673409 - DNA, 25 bp, Homo sapien
aggtctccagtgcctacagcaactt

SEQ ID NO: 3673410 - DNA, 25 bp, Homo sapien
tatgtattaccacgaagcactgatt

SEQ ID NO: 3673411 - DNA, 25 bp, Homo sapien
tcatgatgcgacactctagtgactg

SEQ ID NO: 3673412 - DNA, 25 bp, Homo sapien
ctagtgactgtgcaaaactggatca

SEQ ID NO: 3673413 - DNA, 25 bp, Homo sapien
tggatcatatcgaaaagtctgcctg

SEQ ID NO: 3673414 - DNA, 25 bp, Homo sapien
caaaaagcggcaaagttgcttccgt

SEQ ID NO: 3673415 - DNA, 25 bp, Homo sapien
gcttgttgagtataaagatgaaacg

SEQ ID NO: 3673416 - DNA, 25 bp, Homo sapien
gatttgccaaaaagcggcaaagttg

SEQ ID NO: 3673417 - DNA, 25 bp, Homo sapien
aagatgaaacgatttgccaaaaagc

SEQ ID NO: 3673418 - DNA, 25 bp, Homo sapien
tcaggctgaatttaaggaccagagg

SEQ ID NO: 3673419 - DNA, 25 bp, Homo sapien
tgaatttaaggaccagagggctctt

SEQ ID NO: 3673420 - DNA, 25 bp, Homo sapien
gagggctcttacaaagacttttgtg

SEQ ID NO: 3673421 - DNA, 25 bp, Homo sapien
ggaccagagggctcttacaaagact

SEQ ID NO: 3673422 - DNA, 25 bp, Homo sapien
tcccaaagcgcacaggcagggaact

SEQ ID NO: 3673423 - DNA, 25 bp, Homo sapien
tcttggcatgacgtaggaaaggccc

SEQ ID NO: 3673424 - DNA, 25 bp, Homo sapien
tttcggcagacctaggcggcaagag

SEQ ID NO: 3673425 - DNA, 25 bp, Homo sapien
cagactctgctctggagcgactgag

SEQ ID NO: 3673426 - DNA, 25 bp, Homo sapien
gccggatgagcctgtctcgtcccgg

SEQ ID NO: 3673427 - DNA, 25 bp, Homo sapien
aacttgcctcggtcgatgtcaggga

SEQ ID NO: 3673428 - DNA, 25 bp, Homo sapien
gagcctgtctcatccgcgccggatg

SEQ ID NO: 3673429 - DNA, 25 bp, Homo sapien
tcatctctgggccttaataggaact

SEQ ID NO: 3673430 - DNA, 25 bp, Homo sapien
tgtccagggttctgacctgccgggt

SEQ ID NO: 3673431 - DNA, 25 bp, Homo sapien
gggttgctcggcgagcgcgccgtcc

SEQ ID NO: 3673432 - DNA, 25 bp, Homo sapien
cggccgggcggatcccacccctgag

SEQ ID NO: 3673433 - DNA, 25 bp, Homo sapien
gtgcggaaaccggcgccgctgtcca

SEQ ID NO: 3673434 - DNA, 25 bp, Homo sapien
catgtccggagtaactttcgcaggt

SEQ ID NO: 3673435 - DNA, 25 bp, Homo sapien
ccgcgagatggtttccggctgcagc

SEQ ID NO: 3673436 - DNA, 25 bp, Homo sapien
taggagcggcgcgtggtactgcgga

SEQ ID NO: 3673437 - DNA, 25 bp, Homo sapien
gtactgcggagaagggagttttgtc

SEQ ID NO: 3673438 - DNA, 25 bp, Homo sapien
taaattatcagagtgtccaagcgag

SEQ ID NO: 3673439 - DNA, 25 bp, Homo sapien
tagtggaagcccctctaatgtctcc

SEQ ID NO: 3673440 - DNA, 25 bp, Homo sapien
tactcgctgttttgccaacgggaag

SEQ ID NO: 3673441 - DNA, 25 bp, Homo sapien
tctgctgaaatatgaccccgcggtt

SEQ ID NO: 3673442 - DNA, 25 bp, Homo sapien
cagatgctgtggctgcgggtatgag

SEQ ID NO: 3673443 - DNA, 25 bp, Homo sapien
gattctcgggaatgcagatgctgtg

SEQ ID NO: 3673444 - DNA, 25 bp, Homo sapien
ctgcgggtatgagatgcggagagaa

SEQ ID NO: 3673445 - DNA, 25 bp, Homo sapien
caggaaatgattctcgggaatgcag

SEQ ID NO: 3673446 - DNA, 25 bp, Homo sapien
ttttcagcactaagacatgcggctc

SEQ ID NO: 3673447 - DNA, 25 bp, Homo sapien
tgtaacaacatctgcacgccagtct

SEQ ID NO: 3673448 - DNA, 25 bp, Homo sapien
ggagccaagcctcgaattttcagca

SEQ ID NO: 3673449 - DNA, 25 bp, Homo sapien
tccctatgggacaggaggcaaagta

SEQ ID NO: 3673450 - DNA, 25 bp, Homo sapien
tgaccttgggcgaccttgggtgact

SEQ ID NO: 3673451 - DNA, 25 bp, Homo sapien
caggatccaccgtcatccctggata

SEQ ID NO: 3673452 - DNA, 25 bp, Homo sapien
tccaaagtcgtgctgtgccgaaggt

SEQ ID NO: 3673453 - DNA, 25 bp, Homo sapien
aggtagctgttgtgaggcgctccca

SEQ ID NO: 3673454 - DNA, 25 bp, Homo sapien
ccgaatccagcaacacatcaaaaat

SEQ ID NO: 3673455 - DNA, 25 bp, Homo sapien
atccagcatataaagagaaccaaac

SEQ ID NO: 3673456 - DNA, 25 bp, Homo sapien
cagcatataaagagaaccaaacaca

SEQ ID NO: 3673457 - DNA, 25 bp, Homo sapien
cttatccaccatggtcaagtgggct

SEQ ID NO: 3673458 - DNA, 25 bp, Homo sapien
cagcatccaatatagtagtgcccac

SEQ ID NO: 3673459 - DNA, 25 bp, Homo sapien
gcatccaatatagtagtgcccacca

SEQ ID NO: 3673460 - DNA, 25 bp, Homo sapien
tcagcatccaatatagtagtgccca

SEQ ID NO: 3673461 - DNA, 25 bp, Homo sapien
catccaatatagtagtgcccaccat

SEQ ID NO: 3673462 - DNA, 25 bp, Homo sapien
ccaggaaaaccctgtgcacagcggg

SEQ ID NO: 3673463 - DNA, 25 bp, Homo sapien
ctgcgggcggacagcgttgggccca

SEQ ID NO: 3673464 - DNA, 25 bp, Homo sapien
ctggctgcgaactctctgctcccgt

SEQ ID NO: 3673465 - DNA, 25 bp, Homo sapien
acccacagacaggaaatacagcacc

SEQ ID NO: 3673466 - DNA, 25 bp, Homo sapien
ctggggcaggggtagacaaaggtct

SEQ ID NO: 3673467 - DNA, 25 bp, Homo sapien
gcaaggcctctttgtcgaagtgtcc

SEQ ID NO: 3673468 - DNA, 25 bp, Homo sapien
ggcctctttgtcgaagtgtccacag

SEQ ID NO: 3673469 - DNA, 25 bp, Homo sapien
tggcaaggcctctttgtcgaagtgt

SEQ ID NO: 3673470 - DNA, 25 bp, Homo sapien
tttgtcgaagtgtccacagaaatgt

SEQ ID NO: 3673471 - DNA, 25 bp, Homo sapien
caggagcgagtctcagtagggtgaa

SEQ ID NO: 3673472 - DNA, 25 bp, Homo sapien
agtctcagtagggtgaaggctccca

SEQ ID NO: 3673473 - DNA, 25 bp, Homo sapien
cgagtctcagtagggtgaaggctcc

SEQ ID NO: 3673474 - DNA, 25 bp, Homo sapien
ctcagtagggtgaaggctcccattt

SEQ ID NO: 3673475 - DNA, 25 bp, Homo sapien
tttcctcctgatgtataaggccacc

SEQ ID NO: 3673476 - DNA, 25 bp, Homo sapien
tacggaaatgtttcttggctctgca

SEQ ID NO: 3673477 - DNA, 25 bp, Homo sapien
tatggatagctagtttccctagcac

SEQ ID NO: 3673478 - DNA, 25 bp, Homo sapien
caaatggtagaatgattgtcctcaa

SEQ ID NO: 3673479 - DNA, 25 bp, Homo sapien
catgatcttgggaaggtggtgtctc

SEQ ID NO: 3673480 - DNA, 25 bp, Homo sapien
ccttgccggactgcatgagaggaca

SEQ ID NO: 3673481 - DNA, 25 bp, Homo sapien
caaaagctataatgcagtaggagca

SEQ ID NO: 3673482 - DNA, 25 bp, Homo sapien
gacacattgttaccgtgcctcctgg

SEQ ID NO: 3673483 - DNA, 25 bp, Homo sapien
catagtgtggcagaagaagagaccc

SEQ ID NO: 3673484 - DNA, 25 bp, Homo sapien
tctaagcattgcagagacgccaagt

SEQ ID NO: 3673485 - DNA, 25 bp, Homo sapien
gcaaaagcctaagaactctaagcat

SEQ ID NO: 3673486 - DNA, 25 bp, Homo sapien
gaaggaactcgaattccacacctgg

SEQ ID NO: 3673487 - DNA, 25 bp, Homo sapien
gacaaatgcagtatctggaccagaa

SEQ ID NO: 3673488 - DNA, 25 bp, Homo sapien
gccatctggtgatgaaagcattgat

SEQ ID NO: 3673489 - DNA, 25 bp, Homo sapien
ggcaaaacttctatgccatctggtg

SEQ ID NO: 3673490 - DNA, 25 bp, Homo sapien
gaagagacaaatgcagtatctggac

SEQ ID NO: 3673491 - DNA, 25 bp, Homo sapien
gagtggagacattgcaaagcccagg

SEQ ID NO: 3673492 - DNA, 25 bp, Homo sapien
ggacgagttggatcctgtgagaaga

SEQ ID NO: 3673493 - DNA, 25 bp, Homo sapien
gagagtttgctgagccctatgatag

SEQ ID NO: 3673494 - DNA, 25 bp, Homo sapien
gagaataaatgacagggagggacag

SEQ ID NO: 3673495 - DNA, 25 bp, Homo sapien
gacaggaaccatcttcagcagttta

SEQ ID NO: 3673496 - DNA, 25 bp, Homo sapien
catggttagcgcttttgactgtcct

SEQ ID NO: 3673497 - DNA, 25 bp, Homo sapien
tgtctcctgttcttcaacgtgaaag

SEQ ID NO: 3673498 - DNA, 25 bp, Homo sapien
tgaaagaagacacccttcagagtca

SEQ ID NO: 3673499 - DNA, 25 bp, Homo sapien
gatcttccaagtccttgcctatctg

SEQ ID NO: 3673500 - DNA, 25 bp, Homo sapien
gactgctagtttggattgatgtaga

SEQ ID NO: 3673501 - DNA, 25 bp, Homo sapien
tgtctgatgcaggtagtctttttcc

SEQ ID NO: 3673502 - DNA, 25 bp, Homo sapien
ccttgcctatctgaagctggaattt

SEQ ID NO: 3673503 - DNA, 25 bp, Homo sapien
agcagtgccagcttgtacactgtcg

SEQ ID NO: 3673504 - DNA, 25 bp, Homo sapien
tgctttggtggtgtagaggagcagg

SEQ ID NO: 3673505 - DNA, 25 bp, Homo sapien
gtacactgtcggtgtgggcttccca

SEQ ID NO: 3673506 - DNA, 25 bp, Homo sapien
cggatgctcctccatggtgctttgg

SEQ ID NO: 3673507 - DNA, 25 bp, Homo sapien
agcaacagtctaggtctgctcctag

SEQ ID NO: 3673508 - DNA, 25 bp, Homo sapien
cagttgacgatgtgactgttaatgg

SEQ ID NO: 3673509 - DNA, 25 bp, Homo sapien
cctagatctcaactcagcgtgaaaa

SEQ ID NO: 3673510 - DNA, 25 bp, Homo sapien
gttaatggagttgattgtcctgctg

SEQ ID NO: 3673511 - DNA, 25 bp, Homo sapien
tctgcatctgactggaattgtaggt

SEQ ID NO: 3673512 - DNA, 25 bp, Homo sapien
gaaaccagggagtgttttctctgtc

SEQ ID NO: 3673513 - DNA, 25 bp, Homo sapien
cttctcttgtaattggctgccagtg

SEQ ID NO: 3673514 - DNA, 25 bp, Homo sapien
tgtgaggagctagaaacacagccag

SEQ ID NO: 3673515 - DNA, 25 bp, Homo sapien
taaccatttttatccagtggacaga

SEQ ID NO: 3673516 - DNA, 25 bp, Homo sapien
aaccatttttatccagtggacagag

SEQ ID NO: 3673517 - DNA, 25 bp, Homo sapien
ttaaccatttttatccagtggacag

SEQ ID NO: 3673518 - DNA, 25 bp, Homo sapien
gcagactacagtgagggcaacgagc

SEQ ID NO: 3673519 - DNA, 25 bp, Homo sapien
catgctaggtatttgccagccttga

SEQ ID NO: 3673520 - DNA, 25 bp, Homo sapien
ccttggaggttggtgtgatgccaca

SEQ ID NO: 3673521 - DNA, 25 bp, Homo sapien
gagcccctaacactggagacgctga

SEQ ID NO: 3673522 - DNA, 25 bp, Homo sapien
gccctgctctgttgttaactgacat

SEQ ID NO: 3673523 - DNA, 25 bp, Homo sapien
tgccctgctctgttgttaactgaca

SEQ ID NO: 3673524 - DNA, 25 bp, Homo sapien
ctgccctgctctgttgttaactgac

SEQ ID NO: 3673525 - DNA, 25 bp, Homo sapien
tttagatctatcaggaatcctcctt

SEQ ID NO: 3673526 - DNA, 25 bp, Homo sapien
ttagatctatcaggaatcctccttc

SEQ ID NO: 3673527 - DNA, 25 bp, Homo sapien
aaatttagatctatcaggaatcctc

SEQ ID NO: 3673528 - DNA, 25 bp, Homo sapien
tctgccagagtccgagaaagatgtg

SEQ ID NO: 3673529 - DNA, 25 bp, Homo sapien
ccagaagacttggttttctggccat

SEQ ID NO: 3673530 - DNA, 25 bp, Homo sapien
ttccagaagacttggttttctggcc

SEQ ID NO: 3673531 - DNA, 25 bp, Homo sapien
tccagaagacttggttttctggcca

SEQ ID NO: 3673532 - DNA, 25 bp, Homo sapien
agaccggaagtagcgccaaggagcg

SEQ ID NO: 3673533 - DNA, 25 bp, Homo sapien
tgaggcggcttgagtccctggccgg

SEQ ID NO: 3673534 - DNA, 25 bp, Homo sapien
aaggagcgctcacctgaggcggctt

SEQ ID NO: 3673535 - DNA, 25 bp, Homo sapien
tggccggccagcgacccagctactt

SEQ ID NO: 3673536 - DNA, 25 bp, Homo sapien
ccggccgaatgtcgggcagggggtg

SEQ ID NO: 3673537 - DNA, 25 bp, Homo sapien
ggccgaatgtcgggcagggggtgtc

SEQ ID NO: 3673538 - DNA, 25 bp, Homo sapien
cgaatgtcgggcagggggtgtcggg

SEQ ID NO: 3673539 - DNA, 25 bp, Homo sapien
gccgaatgtcgggcagggggtgtcg

SEQ ID NO: 3673540 - DNA, 25 bp, Homo sapien
ctgtttccttgtgggcgctcgcgcg

SEQ ID NO: 3673541 - DNA, 25 bp, Homo sapien
acggcccgtcgagctgggttccaag

SEQ ID NO: 3673542 - DNA, 25 bp, Homo sapien
ggcggtgtctatggttgagctgagg

SEQ ID NO: 3673543 - DNA, 25 bp, Homo sapien
gttccaaggcggctggcggcggtag

SEQ ID NO: 3673544 - DNA, 25 bp, Homo sapien
cttaaaaacaaacgctgagccaggc

SEQ ID NO: 3673545 - DNA, 25 bp, Homo sapien
tgagcccgtccctccaaaccacgtg

SEQ ID NO: 3673546 - DNA, 25 bp, Homo sapien
cacgcaagtagaaaggcgctgctga

SEQ ID NO: 3673547 - DNA, 25 bp, Homo sapien
ctgctcgcacgcaagtagaaaggcg

SEQ ID NO: 3673548 - DNA, 25 bp, Homo sapien
tgccttgccagcagggtatttttcg

SEQ ID NO: 3673549 - DNA, 25 bp, Homo sapien
ttcgctaggggcgaagcgtccttcg

SEQ ID NO: 3673550 - DNA, 25 bp, Homo sapien
cccctctacgtggaaatatgtctta

SEQ ID NO: 3673551 - DNA, 25 bp, Homo sapien
gggcgaagcgtccttcgcaagccac

SEQ ID NO: 3673552 - DNA, 25 bp, Homo sapien
cattgttctgaacctctgtgtggac

SEQ ID NO: 3673553 - DNA, 25 bp, Homo sapien
gagctgagaagctctgtctggtaca

SEQ ID NO: 3673554 - DNA, 25 bp, Homo sapien
tggtacagccatcctgcatcgtggg

SEQ ID NO: 3673555 - DNA, 25 bp, Homo sapien
cggtaaaattctcgcctgcctcgaa

SEQ ID NO: 3673556 - DNA, 25 bp, Homo sapien
tgcctgaggaatcatcttgtgcaca

SEQ ID NO: 3673557 - DNA, 25 bp, Homo sapien
gaggaatcatcttgtgcacactgaa

SEQ ID NO: 3673558 - DNA, 25 bp, Homo sapien
cctgaggaatcatcttgtgcacact

SEQ ID NO: 3673559 - DNA, 25 bp, Homo sapien
aaatgcctgaggaatcatcttgtgc

SEQ ID NO: 3673560 - DNA, 25 bp, Homo sapien
acatgtaactgatttgtgctgtgca

SEQ ID NO: 3673561 - DNA, 25 bp, Homo sapien
tacatgtaactgatttgtgctgtgc

SEQ ID NO: 3673562 - DNA, 25 bp, Homo sapien
catgtaactgatttgtgctgtgcac

SEQ ID NO: 3673563 - DNA, 25 bp, Homo sapien
cacagctttctaggtcacctcccat

SEQ ID NO: 3673564 - DNA, 25 bp, Homo sapien
gtcacagctttctaggtcacctccc

SEQ ID NO: 3673565 - DNA, 25 bp, Homo sapien
tcacagctttctaggtcacctccca

SEQ ID NO: 3673566 - DNA, 25 bp, Homo sapien
tccatggtgattgtgcagtgacccg

SEQ ID NO: 3673567 - DNA, 25 bp, Homo sapien
gcttttgtgcaaatggcaggtcctg

SEQ ID NO: 3673568 - DNA, 25 bp, Homo sapien
ccctcagagggagccagttttttgt

SEQ ID NO: 3673569 - DNA, 25 bp, Homo sapien
tcctccacgtctttggcaatgagca

SEQ ID NO: 3673570 - DNA, 25 bp, Homo sapien
acgggggccaggctgtacccacatg

SEQ ID NO: 3673571 - DNA, 25 bp, Homo sapien
catgagaacttccagacaggacctg

SEQ ID NO: 3673572 - DNA, 25 bp, Homo sapien
caggacctgttactcgtggcaggag

SEQ ID NO: 3673573 - DNA, 25 bp, Homo sapien
tcccctctcctatgtcagacaggcc

SEQ ID NO: 3673574 - DNA, 25 bp, Homo sapien
tggtttgtgctcaggaatggggctg

SEQ ID NO: 3673575 - DNA, 25 bp, Homo sapien
gtggtttgtgctcaggaatggggct

SEQ ID NO: 3673576 - DNA, 25 bp, Homo sapien
ctgtggtttgtgctcaggaatgggg

SEQ ID NO: 3673577 - DNA, 25 bp, Homo sapien
tgtggtttgtgctcaggaatggggc

SEQ ID NO: 3673578 - DNA, 25 bp, Homo sapien
tgtgtgcagggtcaatgtaggtgtc

SEQ ID NO: 3673579 - DNA, 25 bp, Homo sapien
tgcagggtcaatgtaggtgtcctcc

SEQ ID NO: 3673580 - DNA, 25 bp, Homo sapien
tgtgcagggtcaatgtaggtgtcct

SEQ ID NO: 3673581 - DNA, 25 bp, Homo sapien
ctgtgtgcagggtcaatgtaggtgt

SEQ ID NO: 3673582 - DNA, 25 bp, Homo sapien
cttcatccacttggctgtgtggctt

SEQ ID NO: 3673583 - DNA, 25 bp, Homo sapien
gctgtgtggctttggtgcttggagg

SEQ ID NO: 3673584 - DNA, 25 bp, Homo sapien
gtgtggctttggtgcttggaggtct

SEQ ID NO: 3673585 - DNA, 25 bp, Homo sapien
tgtgtggctttggtgcttggaggtc

SEQ ID NO: 3673586 - DNA, 25 bp, Homo sapien
gaattccgaagcttgtcatgattag

SEQ ID NO: 3673587 - DNA, 25 bp, Homo sapien
gcttgtcatgattagaaaggtcagc

SEQ ID NO: 3673588 - DNA, 25 bp, Homo sapien
agccatctctcctgaattccgaagc

SEQ ID NO: 3673589 - DNA, 25 bp, Homo sapien
tcagcactgatcagccaggtcactt

SEQ ID NO: 3673590 - DNA, 25 bp, Homo sapien
tgacgcgtccccagagcggcgttga

SEQ ID NO: 3673591 - DNA, 25 bp, Homo sapien
gcgctgggcctgacgcgtccccaga

SEQ ID NO: 3673592 - DNA, 25 bp, Homo sapien
cttgaggcgcccgtgctcagctgac

SEQ ID NO: 3673593 - DNA, 25 bp, Homo sapien
tgagagggccgcaccccttgaggcg

SEQ ID NO: 3673594 - DNA, 25 bp, Homo sapien
acccttcttgggtgccgcgcccact

SEQ ID NO: 3673595 - DNA, 25 bp, Homo sapien
gcttcgctgtcgtcaggggctccag

SEQ ID NO: 3673596 - DNA, 25 bp, Homo sapien
gcgcccactccccggagagcgccca

SEQ ID NO: 3673597 - DNA, 25 bp, Homo sapien
agcgcccagccgcttcgctgtcgtc

SEQ ID NO: 3673598 - DNA, 25 bp, Homo sapien
ctggacctcggcgcacagcgagcag

SEQ ID NO: 3673599 - DNA, 25 bp, Homo sapien
ttgcgatctccgcttcagcctggac

SEQ ID NO: 3673600 - DNA, 25 bp, Homo sapien
cggcagccggttcctcgaggcccct

SEQ ID NO: 3673601 - DNA, 25 bp, Homo sapien
ggagccagaggcttgcgatctccgc

SEQ ID NO: 3673602 - DNA, 25 bp, Homo sapien
gctcatgctaatgcgacgtcggcgg

SEQ ID NO: 3673603 - DNA, 25 bp, Homo sapien
tgtggaagtcttgaaccagcccctg

SEQ ID NO: 3673604 - DNA, 25 bp, Homo sapien
gaggcgttgcagctactcttagccg

SEQ ID NO: 3673605 - DNA, 25 bp, Homo sapien
gccgagggacatgctgttgccgccc

SEQ ID NO: 3673606 - DNA, 25 bp, Homo sapien
tagacgctgccatagactgagacat

SEQ ID NO: 3673607 - DNA, 25 bp, Homo sapien
tcaaagcccagcgagtgcacaatgt

SEQ ID NO: 3673608 - DNA, 25 bp, Homo sapien
cgaacaggactgtagaggcgaacat

SEQ ID NO: 3673609 - DNA, 25 bp, Homo sapien
gcttgccggcgaactcatagaggat

SEQ ID NO: 3673610 - DNA, 25 bp, Homo sapien
agacacaggacgctcacgcaggcgc

SEQ ID NO: 3673611 - DNA, 25 bp, Homo sapien
agtagttgtagtcgtcctcgcacgc

SEQ ID NO: 3673612 - DNA, 25 bp, Homo sapien
tgcgaggctcgccgtcctggccaga

SEQ ID NO: 3673613 - DNA, 25 bp, Homo sapien
tcgcacgcatcaaaagggccaggcg

SEQ ID NO: 3673614 - DNA, 25 bp, Homo sapien
caagccccattggacaagagagaaa

SEQ ID NO: 3673615 - DNA, 25 bp, Homo sapien
gacagacagatgcaggctctacaca

SEQ ID NO: 3673616 - DNA, 25 bp, Homo sapien
ttcacctccgcaaggagcgcgatgg

SEQ ID NO: 3673617 - DNA, 25 bp, Homo sapien
cacagtttattgatttgggcggagg

SEQ ID NO: 3673618 - DNA, 25 bp, Homo sapien
aagatgggccgtttttcttcctctg

SEQ ID NO: 3673619 - DNA, 25 bp, Homo sapien
tctgccggaatgctcggctcctact

SEQ ID NO: 3673620 - DNA, 25 bp, Homo sapien
gaggtcggactctaaaagatgggcc

SEQ ID NO: 3673621 - DNA, 25 bp, Homo sapien
atttccagaggtcggactctaaaag

SEQ ID NO: 3673622 - DNA, 25 bp, Homo sapien
cagactacggtcttcgggacatgga

SEQ ID NO: 3673623 - DNA, 25 bp, Homo sapien
gcagatcgaggacagacatgcgcac

SEQ ID NO: 3673624 - DNA, 25 bp, Homo sapien
tgggaaactttcctgacagtcctgg

SEQ ID NO: 3673625 - DNA, 25 bp, Homo sapien
gacctgaggatgcttaaggactgcg

SEQ ID NO: 3673626 - DNA, 25 bp, Homo sapien
gggcacagaacactgtcccgcccat

SEQ ID NO: 3673627 - DNA, 25 bp, Homo sapien
agaatctacccggagcgcttcccgg

SEQ ID NO: 3673628 - DNA, 25 bp, Homo sapien
agctccccgcccagggatctcagct

SEQ ID NO: 3673629 - DNA, 25 bp, Homo sapien
gaactcgggcaacaaatttaggctc

SEQ ID NO: 3673630 - DNA, 25 bp, Homo sapien
tggagaaagcaagctggccgcactt

SEQ ID NO: 3673631 - DNA, 25 bp, Homo sapien
agaaagcaagctggccgcacttctc

SEQ ID NO: 3673632 - DNA, 25 bp, Homo sapien
aaagcaagctggccgcacttctctc

SEQ ID NO: 3673633 - DNA, 25 bp, Homo sapien
gagaaagcaagctggccgcacttct

SEQ ID NO: 3673634 - DNA, 25 bp, Homo sapien
gggcgtgtcgcagcgcgggggtggg

SEQ ID NO: 3673635 - DNA, 25 bp, Homo sapien
gtggggggcgtgtcgcagcgcgggg

SEQ ID NO: 3673636 - DNA, 25 bp, Homo sapien
ggcgtgtcgcagcgcgggggtgggg

SEQ ID NO: 3673637 - DNA, 25 bp, Homo sapien
cggcagggcctccgacgtcgcccgg

SEQ ID NO: 3673638 - DNA, 25 bp, Homo sapien
gctgcaccgcaccactcaggagtgt

SEQ ID NO: 3673639 - DNA, 25 bp, Homo sapien
tgcaccgcaccactcaggagtgtgg

SEQ ID NO: 3673640 - DNA, 25 bp, Homo sapien
ctgcctcggccgacgctgcaccgca

SEQ ID NO: 3673641 - DNA, 25 bp, Homo sapien
accgcaccactcaggagtgtgggcg

SEQ ID NO: 3673642 - DNA, 25 bp, Homo sapien
acagtgcagggacactctccacagg

SEQ ID NO: 3673643 - DNA, 25 bp, Homo sapien
tccacaggcttgttcccacgcctcc

SEQ ID NO: 3673644 - DNA, 25 bp, Homo sapien
agaaagatggatgaaccaggcccaa

SEQ ID NO: 3673645 - DNA, 25 bp, Homo sapien
agatggatgaaccaggcccaaggat

SEQ ID NO: 3673646 - DNA, 25 bp, Homo sapien
gagtgcccagggaggtatgcaggga

SEQ ID NO: 3673647 - DNA, 25 bp, Homo sapien
tgcatctgggctaattgggagcctg

SEQ ID NO: 3673648 - DNA, 25 bp, Homo sapien
cctaggcagtctcgggtctgcaggc

SEQ ID NO: 3673649 - DNA, 25 bp, Homo sapien
tgctggaggcgttgtgacctaggca

SEQ ID NO: 3673650 - DNA, 25 bp, Homo sapien
ctctggtgtggagtagggtgaattc

SEQ ID NO: 3673651 - DNA, 25 bp, Homo sapien
tggtgtggagtagggtgaattccct

SEQ ID NO: 3673652 - DNA, 25 bp, Homo sapien
gtgtggagtagggtgaattccctca

SEQ ID NO: 3673653 - DNA, 25 bp, Homo sapien
tctggtgtggagtagggtgaattcc

SEQ ID NO: 3673654 - DNA, 25 bp, Homo sapien
ctactgtgctcagtgcttcatctct

SEQ ID NO: 3673655 - DNA, 25 bp, Homo sapien
tactgtgctcagtgcttcatctctg

SEQ ID NO: 3673656 - DNA, 25 bp, Homo sapien
actgtgctcagtgcttcatctctgc

SEQ ID NO: 3673657 - DNA, 25 bp, Homo sapien
ggatgggcgtcttggtgagtcctgg

SEQ ID NO: 3673658 - DNA, 25 bp, Homo sapien
ccaggatgggcgtcttggtgagtcc

SEQ ID NO: 3673659 - DNA, 25 bp, Homo sapien
gggcgtcttggtgagtcctggtgca

SEQ ID NO: 3673660 - DNA, 25 bp, Homo sapien
tccaggatgggcgtcttggtgagtc

SEQ ID NO: 3673661 - DNA, 25 bp, Homo sapien
ctcctcactgctgggagtttttgct

SEQ ID NO: 3673662 - DNA, 25 bp, Homo sapien
cctcactgctgggagtttttgctgc

SEQ ID NO: 3673663 - DNA, 25 bp, Homo sapien
agactcctcactgctgggagttttt

SEQ ID NO: 3673664 - DNA, 25 bp, Homo sapien
tcactgctgggagtttttgctgcca

SEQ ID NO: 3673665 - DNA, 25 bp, Homo sapien
actgctcctcagacaccaagtgtcg

SEQ ID NO: 3673666 - DNA, 25 bp, Homo sapien
tgcagggtctcgccgaggccaccag

SEQ ID NO: 3673667 - DNA, 25 bp, Homo sapien
ggggccccaaactgctgcacaatgg

SEQ ID NO: 3673668 - DNA, 25 bp, Homo sapien
tgtcgcatgcactgcaggtacgtgg

SEQ ID NO: 3673669 - DNA, 25 bp, Homo sapien
ccgagcaaagatcacggcagggctg

SEQ ID NO: 3673670 - DNA, 25 bp, Homo sapien
ggaagtgctgccgagcaaagatcac

SEQ ID NO: 3673671 - DNA, 25 bp, Homo sapien
cacggcagggctggagttgacaggc

SEQ ID NO: 3673672 - DNA, 25 bp, Homo sapien
tcagctggtcatcggtgccagggaa

SEQ ID NO: 3673673 - DNA, 25 bp, Homo sapien
actgtctcggggcatttgaccccag

SEQ ID NO: 3673674 - DNA, 25 bp, Homo sapien
ccccaggaagctcagccgaggctcc

SEQ ID NO: 3673675 - DNA, 25 bp, Homo sapien
tcggggcatttgaccccaggaagct

SEQ ID NO: 3673676 - DNA, 25 bp, Homo sapien
cctggacgtccactgtctcggggca

SEQ ID NO: 3673677 - DNA, 25 bp, Homo sapien
ttgtagctgagtacaccagagatga

SEQ ID NO: 3673678 - DNA, 25 bp, Homo sapien
cttgtagctgagtacaccagagatg

SEQ ID NO: 3673679 - DNA, 25 bp, Homo sapien
ccttgtagctgagtacaccagagat

SEQ ID NO: 3673680 - DNA, 25 bp, Homo sapien
ggctacgatgacgtgctcaggctcc

SEQ ID NO: 3673681 - DNA, 25 bp, Homo sapien
gctgctgttctgagccaccagcgtg

SEQ ID NO: 3673682 - DNA, 25 bp, Homo sapien
caggctccggcatgatgctgctgtt

SEQ ID NO: 3673683 - DNA, 25 bp, Homo sapien
ccatagtattgcttcatgcaaaggg

SEQ ID NO: 3673684 - DNA, 25 bp, Homo sapien
cagacgtcagcaggccaattggagg

SEQ ID NO: 3673685 - DNA, 25 bp, Homo sapien
ccctcactgagacggcggaaattaa

SEQ ID NO: 3673686 - DNA, 25 bp, Homo sapien
ttctcaactgagtgaacagatcccc

SEQ ID NO: 3673687 - DNA, 25 bp, Homo sapien
aaacgctcgtcctcgttggaagcca

SEQ ID NO: 3673688 - DNA, 25 bp, Homo sapien
cacgagggcacaaaaggtggcttcg

SEQ ID NO: 3673689 - DNA, 25 bp, Homo sapien
gcttcggtggcaaggcactgtggct

SEQ ID NO: 3673690 - DNA, 25 bp, Homo sapien
ccaagaaagccagatactgtcagat

SEQ ID NO: 3673691 - DNA, 25 bp, Homo sapien
gagctcccacactatggctgatggg

SEQ ID NO: 3673692 - DNA, 25 bp, Homo sapien
attgctgctttggtttagcctgtgt

SEQ ID NO: 3673693 - DNA, 25 bp, Homo sapien
tgctttggtttagcctgtgtatcct

SEQ ID NO: 3673694 - DNA, 25 bp, Homo sapien
ctgctttggtttagcctgtgtatcc

SEQ ID NO: 3673695 - DNA, 25 bp, Homo sapien
tgctgctttggtttagcctgtgtat

SEQ ID NO: 3673696 - DNA, 25 bp, Homo sapien
ccataggcagcttgaatgctgtaca

SEQ ID NO: 3673697 - DNA, 25 bp, Homo sapien
gacttgtcgtaccagcgattggccc

SEQ ID NO: 3673698 - DNA, 25 bp, Homo sapien
cgattggccccgttcttgctgtagc

SEQ ID NO: 3673699 - DNA, 25 bp, Homo sapien
gcgcgtccaggcatacaaggcagat

SEQ ID NO: 3673700 - DNA, 25 bp, Homo sapien
tcatgtccagcgagtcccggttggt

SEQ ID NO: 3673701 - DNA, 25 bp, Homo sapien
tctctggttcgcctgataatctgcc

SEQ ID NO: 3673702 - DNA, 25 bp, Homo sapien
cttgaattcaggtccatgaagccct

SEQ ID NO: 3673703 - DNA, 25 bp, Homo sapien
tggcttctctggttcgcctgataat

SEQ ID NO: 3673704 - DNA, 25 bp, Homo sapien
catcatcttgaattcaggtccatga

SEQ ID NO: 3673705 - DNA, 25 bp, Homo sapien
caggtgccgtctcggcccaccacaa

SEQ ID NO: 3673706 - DNA, 25 bp, Homo sapien
acgtgcttgagcagatgctcagtgc

SEQ ID NO: 3673707 - DNA, 25 bp, Homo sapien
cgatgccatcgaatggggagtgttc

SEQ ID NO: 3673708 - DNA, 25 bp, Homo sapien
gtgttcgcacaccacaccgcaggtg

SEQ ID NO: 3673709 - DNA, 25 bp, Homo sapien
gagtctgctcggatcagcttcctgc

SEQ ID NO: 3673710 - DNA, 25 bp, Homo sapien
gggagctcgctgacggagtctgctc

SEQ ID NO: 3673711 - DNA, 25 bp, Homo sapien
gctcgctgacggagtctgctcggat

SEQ ID NO: 3673712 - DNA, 25 bp, Homo sapien
gacggagtctgctcggatcagcttc

SEQ ID NO: 3673713 - DNA, 25 bp, Homo sapien
gtttttctgccgaggaggctaagtg

SEQ ID NO: 3673714 - DNA, 25 bp, Homo sapien
tggccttgaatttccggggagcatt

SEQ ID NO: 3673715 - DNA, 25 bp, Homo sapien
ccgaggaggctaagtggccttgaat

SEQ ID NO: 3673716 - DNA, 25 bp, Homo sapien
cgttgaagtttttctgccgaggagg

SEQ ID NO: 3673717 - DNA, 25 bp, Homo sapien
tttattgcatgcaaaacagtatgca

SEQ ID NO: 3673718 - DNA, 25 bp, Homo sapien
catgcaaaacagtatgcatgcatct

SEQ ID NO: 3673719 - DNA, 25 bp, Homo sapien
gcaaaacagtatgcatgcatctggg

SEQ ID NO: 3673720 - DNA, 25 bp, Homo sapien
ggtctgtgtcctagcgttctggaag

SEQ ID NO: 3673721 - DNA, 25 bp, Homo sapien
gaatgttttcccatagttgtcaaac

SEQ ID NO: 3673722 - DNA, 25 bp, Homo sapien
caatgaagtcaaggttctttactat

SEQ ID NO: 3673723 - DNA, 25 bp, Homo sapien
atagttgtcaaacttatagacaatg

SEQ ID NO: 3673724 - DNA, 25 bp, Homo sapien
aaacttatagacaatgaagtcaagg

SEQ ID NO: 3673725 - DNA, 25 bp, Homo sapien
aatcggcggatggacgcgctctcgt

SEQ ID NO: 3673726 - DNA, 25 bp, Homo sapien
taggtgggcaccagtcttcgatgga

SEQ ID NO: 3673727 - DNA, 25 bp, Homo sapien
cacagcagccttgtggtcagtcacg

SEQ ID NO: 3673728 - DNA, 25 bp, Homo sapien
ggccgatctgatgttgtccacgcgt

SEQ ID NO: 3673729 - DNA, 25 bp, Homo sapien
agtctgggcacggatggcatccttc

SEQ ID NO: 3673730 - DNA, 25 bp, Homo sapien
tctgggcacggatggcatccttcag

SEQ ID NO: 3673731 - DNA, 25 bp, Homo sapien
tatgcagtctgggcacggatggcat

SEQ ID NO: 3673732 - DNA, 25 bp, Homo sapien
tgcagtctgggcacggatggcatcc

SEQ ID NO: 3673733 - DNA, 25 bp, Homo sapien
agcacggattcctaccccacaaagg

SEQ ID NO: 3673734 - DNA, 25 bp, Homo sapien
aagcctaggtcattttgccagcacg

SEQ ID NO: 3673735 - DNA, 25 bp, Homo sapien
tgttatagacagtgaaatttcagct

SEQ ID NO: 3673736 - DNA, 25 bp, Homo sapien
caaacatatgcttaggttaccacta

SEQ ID NO: 3673737 - DNA, 25 bp, Homo sapien
ctagtggagaggacaaaccggttgc

SEQ ID NO: 3673738 - DNA, 25 bp, Homo sapien
caaaccggttgctcatcaggtaggt

SEQ ID NO: 3673739 - DNA, 25 bp, Homo sapien
ggtggttgtcaatggccatccctgt

SEQ ID NO: 3673740 - DNA, 25 bp, Homo sapien
tccatgaacatctcgggcagctcct

SEQ ID NO: 3673741 - DNA, 25 bp, Homo sapien
gaaggccataaagccattccaaagc

SEQ ID NO: 3673742 - DNA, 25 bp, Homo sapien
tttgccgtgcaatagccgaaggcca

SEQ ID NO: 3673743 - DNA, 25 bp, Homo sapien
aaagcactttttgcccatggatgat

SEQ ID NO: 3673744 - DNA, 25 bp, Homo sapien
gctaatagagtcaccacattgtcag

SEQ ID NO: 3673745 - DNA, 25 bp, Homo sapien
tcatgtcaatgaggctttcttccac

SEQ ID NO: 3673746 - DNA, 25 bp, Homo sapien
ggaccacaggaccatagcagcagaa

SEQ ID NO: 3673747 - DNA, 25 bp, Homo sapien
gtagcaggcaccatacccatttggg

SEQ ID NO: 3673748 - DNA, 25 bp, Homo sapien
gatgcagaaaaggatggtctctggc

SEQ ID NO: 3673749 - DNA, 25 bp, Homo sapien
ttgctctcagtaggcggcagcagac

SEQ ID NO: 3673750 - DNA, 25 bp, Homo sapien
tcctttgttgccaatggcttgctct

SEQ ID NO: 3673751 - DNA, 25 bp, Homo sapien
caatggcttgctctcagtaggcggc

SEQ ID NO: 3673752 - DNA, 25 bp, Homo sapien
ctgggcctcgtggctttttcctttg

SEQ ID NO: 3673753 - DNA, 25 bp, Homo sapien
gtaagggacgggagtggggatctgc

SEQ ID NO: 3673754 - DNA, 25 bp, Homo sapien
gggaggtgaaacctagtggcaggag

SEQ ID NO: 3673755 - DNA, 25 bp, Homo sapien
tgggaggtgaaacctagtggcagga

SEQ ID NO: 3673756 - DNA, 25 bp, Homo sapien
ttgggaggtgaaacctagtggcagg

SEQ ID NO: 3673757 - DNA, 25 bp, Homo sapien
gggaaggagacatgaacactaagct

SEQ ID NO: 3673758 - DNA, 25 bp, Homo sapien
tgatgattcccatgcatgaagaggg

SEQ ID NO: 3673759 - DNA, 25 bp, Homo sapien
aggagtccttagtgtggttccccag

SEQ ID NO: 3673760 - DNA, 25 bp, Homo sapien
gaagcatcacctggacatactaggt

SEQ ID NO: 3673761 - DNA, 25 bp, Homo sapien
ggtgcttgtaggactgtacggctca

SEQ ID NO: 3673762 - DNA, 25 bp, Homo sapien
tgcccctgggcacgaaagcagaaat

SEQ ID NO: 3673763 - DNA, 25 bp, Homo sapien
tctgagctcaacagaaggctgcccc

SEQ ID NO: 3673764 - DNA, 25 bp, Homo sapien
gaaatgtgtttgtgggcccaagtca

SEQ ID NO: 3673765 - DNA, 25 bp, Homo sapien
aggcaagggagaaacacacgctgct

SEQ ID NO: 3673766 - DNA, 25 bp, Homo sapien
cgccgccgcagaggcaagggagaaa

SEQ ID NO: 3673767 - DNA, 25 bp, Homo sapien
ccgccgcagaggcaagggagaaaca

SEQ ID NO: 3673768 - DNA, 25 bp, Homo sapien
ccgcagaggcaagggagaaacacac

SEQ ID NO: 3673769 - DNA, 25 bp, Homo sapien
ctgccgcgctgtagggcccatagcg

SEQ ID NO: 3673770 - DNA, 25 bp, Homo sapien
catagcgcaggatgaccactgcgtt

SEQ ID NO: 3673771 - DNA, 25 bp, Homo sapien
tgtggtgctccaccggtaggcctgc

SEQ ID NO: 3673772 - DNA, 25 bp, Homo sapien
caccggtaggcctgccgcgctgtag

SEQ ID NO: 3673773 - DNA, 25 bp, Homo sapien
ttctctaggatgacctcatgtccat

SEQ ID NO: 3673774 - DNA, 25 bp, Homo sapien
cttctatcttctctaggatgacctc

SEQ ID NO: 3673775 - DNA, 25 bp, Homo sapien
tcattcaccatgagttccaccacat

SEQ ID NO: 3673776 - DNA, 25 bp, Homo sapien
caagtccttaatgttgcagtggaag

SEQ ID NO: 3673777 - DNA, 25 bp, Homo sapien
tggatactctcctgtgtgtgccact

SEQ ID NO: 3673778 - DNA, 25 bp, Homo sapien
gggaaactcgtagcatcacacactt

SEQ ID NO: 3673779 - DNA, 25 bp, Homo sapien
ggctggaagcatcgccaaagggctt

SEQ ID NO: 3673780 - DNA, 25 bp, Homo sapien
tgcactgctggcatatcaactcagt

SEQ ID NO: 3673781 - DNA, 25 bp, Homo sapien
gcacggctatcctggccttttcaca

SEQ ID NO: 3673782 - DNA, 25 bp, Homo sapien
ttttcacacagtgggtctagtttac

SEQ ID NO: 3673783 - DNA, 25 bp, Homo sapien
tcagtaggcattcagcacggctatc

SEQ ID NO: 3673784 - DNA, 25 bp, Homo sapien
agtgggtctagtttaccatcgcctc

SEQ ID NO: 3673785 - DNA, 25 bp, Homo sapien
tgtgcagccaggtgacaatcctgag

SEQ ID NO: 3673786 - DNA, 25 bp, Homo sapien
gacttgagatgcctgttccatgagg

SEQ ID NO: 3673787 - DNA, 25 bp, Homo sapien
cagctgctgttgtgccgacttgaga

SEQ ID NO: 3673788 - DNA, 25 bp, Homo sapien
caatcctgaggctgcgtaagctgga

SEQ ID NO: 3673789 - DNA, 25 bp, Homo sapien
tccctatgggttgagattgagacat

SEQ ID NO: 3673790 - DNA, 25 bp, Homo sapien
ctcaatgtgtacctgatattggagg

SEQ ID NO: 3673791 - DNA, 25 bp, Homo sapien
ttggagggctctccctatgggttga

SEQ ID NO: 3673792 - DNA, 25 bp, Homo sapien
tgtacctgatattggagggctctcc

SEQ ID NO: 3673793 - DNA, 25 bp, Homo sapien
gtctctgagcgatcctgaaagccct

SEQ ID NO: 3673794 - DNA, 25 bp, Homo sapien
tccccgtaggtgtgaggccttctta

SEQ ID NO: 3673795 - DNA, 25 bp, Homo sapien
cgatggttaggactgctctcagagc

SEQ ID NO: 3673796 - DNA, 25 bp, Homo sapien
tgtgaaaaccagcaccagacactgg

SEQ ID NO: 3673797 - DNA, 25 bp, Homo sapien
ccagcaggttccagggtgagactct

SEQ ID NO: 3673798 - DNA, 25 bp, Homo sapien
aatgtgcttttactgtggacaggag

SEQ ID NO: 3673799 - DNA, 25 bp, Homo sapien
aaaagagtcctcctgtgtggtcaaa

SEQ ID NO: 3673800 - DNA, 25 bp, Homo sapien
cagtggtttccctcatagttctggg

SEQ ID NO: 3673801 - DNA, 25 bp, Homo sapien
tcagtgacagagggacagttagctg

SEQ ID NO: 3673802 - DNA, 25 bp, Homo sapien
cagagggacagttagctgcaggttc

SEQ ID NO: 3673803 - DNA, 25 bp, Homo sapien
cagtgacagagggacagttagctgc

SEQ ID NO: 3673804 - DNA, 25 bp, Homo sapien
gacagttagctgcaggttccctctc

SEQ ID NO: 3673805 - DNA, 25 bp, Homo sapien
ggctgagttcccctcttctctagtc

SEQ ID NO: 3673806 - DNA, 25 bp, Homo sapien
gccaatacagtacaagtcaggtcct

SEQ ID NO: 3673807 - DNA, 25 bp, Homo sapien
tcctacacgggctgctaagctggtg

SEQ ID NO: 3673808 - DNA, 25 bp, Homo sapien
tagtccagaaatgagcatgtgatcc

SEQ ID NO: 3673809 - DNA, 25 bp, Homo sapien
gagaatcacgttgggtttgccacag

SEQ ID NO: 3673810 - DNA, 25 bp, Homo sapien
gatgattttagcagccatgtggcga

SEQ ID NO: 3673811 - DNA, 25 bp, Homo sapien
caggttgcctgtgggacatctagct

SEQ ID NO: 3673812 - DNA, 25 bp, Homo sapien
caaagcagggcgaaagcactggcat

SEQ ID NO: 3673813 - DNA, 25 bp, Homo sapien
ccagaagctggatgtagctgccgct

SEQ ID NO: 3673814 - DNA, 25 bp, Homo sapien
gatgtcgtagctggcatgattgccc

SEQ ID NO: 3673815 - DNA, 25 bp, Homo sapien
cagaaacggcagcttaccccattaa

SEQ ID NO: 3673816 - DNA, 25 bp, Homo sapien
cttttgccacaagccctagagttga

SEQ ID NO: 3673817 - DNA, 25 bp, Homo sapien
tgaggctcagatcgtaaagggtctc

SEQ ID NO: 3673818 - DNA, 25 bp, Homo sapien
aaagggtctcttatgcctggctgaa

SEQ ID NO: 3673819 - DNA, 25 bp, Homo sapien
tgggcagcatttaccaggtggagaa

SEQ ID NO: 3673820 - DNA, 25 bp, Homo sapien
cacacacagatatagggtgccaggc

SEQ ID NO: 3673821 - DNA, 25 bp, Homo sapien
cgagcaactgttgggtgttgtgtcc

SEQ ID NO: 3673822 - DNA, 25 bp, Homo sapien
gttgagggctcactatgggacaagt

SEQ ID NO: 3673823 - DNA, 25 bp, Homo sapien
tctagggtaggaggcacaaagacgt

SEQ ID NO: 3673824 - DNA, 25 bp, Homo sapien
gctttgaggagctctatgaccctcc

SEQ ID NO: 3673825 - DNA, 25 bp, Homo sapien
gtccaccacagtggccaaaagagac

SEQ ID NO: 3673826 - DNA, 25 bp, Homo sapien
agggaggcagtgacaacagcagccc

SEQ ID NO: 3673827 - DNA, 25 bp, Homo sapien
cagggaggcagtgacaacagcagcc

SEQ ID NO: 3673828 - DNA, 25 bp, Homo sapien
cacagtggccaaaagagacagccat

SEQ ID NO: 3673829 - DNA, 25 bp, Homo sapien
gactgtttggacacgagtttcagct

SEQ ID NO: 3673830 - DNA, 25 bp, Homo sapien
gcaacaaggcaaggtgtggagtcca

SEQ ID NO: 3673831 - DNA, 25 bp, Homo sapien
tcagctgcaacaaggcaaggtgtgg

SEQ ID NO: 3673832 - DNA, 25 bp, Homo sapien
gcctgggcgatgtgctctgactgtt

SEQ ID NO: 3673833 - DNA, 25 bp, Homo sapien
aatcaaacacagggaggcattaact

SEQ ID NO: 3673834 - DNA, 25 bp, Homo sapien
tggaatcaaacacagggaggcatta

SEQ ID NO: 3673835 - DNA, 25 bp, Homo sapien
ctggaatcaaacacagggaggcatt

SEQ ID NO: 3673836 - DNA, 25 bp, Homo sapien
gaatcaaacacagggaggcattaac

SEQ ID NO: 3673837 - DNA, 25 bp, Homo sapien
ggccatgccatggtttcctcgctta

SEQ ID NO: 3673838 - DNA, 25 bp, Homo sapien
gccgagaactcatgaacatccatga

SEQ ID NO: 3673839 - DNA, 25 bp, Homo sapien
tcctcgcttacagcaggtaacaggg

SEQ ID NO: 3673840 - DNA, 25 bp, Homo sapien
ccatgacggccatgccatggtttcc

SEQ ID NO: 3673841 - DNA, 25 bp, Homo sapien
cttcctcttaactgctgaactggat

SEQ ID NO: 3673842 - DNA, 25 bp, Homo sapien
ctcttaactgctgaactggatttcc

SEQ ID NO: 3673843 - DNA, 25 bp, Homo sapien
tcttcctcttaactgctgaactgga

SEQ ID NO: 3673844 - DNA, 25 bp, Homo sapien
tcctcttaactgctgaactggattt

SEQ ID NO: 3673845 - DNA, 25 bp, Homo sapien
caagaacatgggctactatgactac

SEQ ID NO: 3673846 - DNA, 25 bp, Homo sapien
tatgactacatcagcccacgcttca

SEQ ID NO: 3673847 - DNA, 25 bp, Homo sapien
cttcgacctgatcaagcaggaggca

SEQ ID NO: 3673848 - DNA, 25 bp, Homo sapien
cagagaagtacccaggtgcggagct

SEQ ID NO: 3673849 - DNA, 25 bp, Homo sapien
gagaaagtggccatcacgcgcctgg

SEQ ID NO: 3673850 - DNA, 25 bp, Homo sapien
tgcagcggctcatcttctgcacggg

SEQ ID NO: 3673851 - DNA, 25 bp, Homo sapien
aaggtgtactatgacctggtgaagg

SEQ ID NO: 3673852 - DNA, 25 bp, Homo sapien
tgcacgggaaaggtgtactatgacc

SEQ ID NO: 3673853 - DNA, 25 bp, Homo sapien
cagtctcctgctgatagacagtggg

SEQ ID NO: 3673854 - DNA, 25 bp, Homo sapien
ttttaatggctctggagtgctccgc

SEQ ID NO: 3673855 - DNA, 25 bp, Homo sapien
tgcccgtgcatgttgtacttccaaa

SEQ ID NO: 3673856 - DNA, 25 bp, Homo sapien
tattactagtagcaccgcagtgaac

SEQ ID NO: 3673857 - DNA, 25 bp, Homo sapien
ctagtccagggtcctgcgcagagga

SEQ ID NO: 3673858 - DNA, 25 bp, Homo sapien
tctccagcccgaggacttcagactg

SEQ ID NO: 3673859 - DNA, 25 bp, Homo sapien
catcgcgcgcgtaccacccggctag

SEQ ID NO: 3673860 - DNA, 25 bp, Homo sapien
tgggtttctccagcccgaggacttc

SEQ ID NO: 3673861 - DNA, 25 bp, Homo sapien
tatagaagggcattttgagggatcc

SEQ ID NO: 3673862 - DNA, 25 bp, Homo sapien
gcatgaatctccgaagaactatact

SEQ ID NO: 3673863 - DNA, 25 bp, Homo sapien
taaaagcctacctaccctataatgc

SEQ ID NO: 3673864 - DNA, 25 bp, Homo sapien
gatggagaactgattaatggtttgg

SEQ ID NO: 3673865 - DNA, 25 bp, Homo sapien
ttgccctaggggctccatctttcag

SEQ ID NO: 3673866 - DNA, 25 bp, Homo sapien
ggaggaaaaccatgggtattctgga

SEQ ID NO: 3673867 - DNA, 25 bp, Homo sapien
tggaaaggccggctgcaatggagct

SEQ ID NO: 3673868 - DNA, 25 bp, Homo sapien
aggacaggagcagatggttgcccta

SEQ ID NO: 3673869 - DNA, 25 bp, Homo sapien
ctctccttgggggttcgctccgaga

SEQ ID NO: 3673870 - DNA, 25 bp, Homo sapien
ttcgctccgagaggtgggaggcctc

SEQ ID NO: 3673871 - DNA, 25 bp, Homo sapien
tcagcccgagggcaagcgatggcct

SEQ ID NO: 3673872 - DNA, 25 bp, Homo sapien
aaaatcttggctgtgctctccttgg

SEQ ID NO: 3673873 - DNA, 25 bp, Homo sapien
aatcacaatcaaagctaccgtccat

SEQ ID NO: 3673874 - DNA, 25 bp, Homo sapien
caatcacaatcaaagctaccgtcca

SEQ ID NO: 3673875 - DNA, 25 bp, Homo sapien
caggggtcaacctgtacttcttctt

SEQ ID NO: 3673876 - DNA, 25 bp, Homo sapien
tcaggggtcaacctgtacttcttct

SEQ ID NO: 3673877 - DNA, 25 bp, Homo sapien
tgatctgggtactgccagcaaggct

SEQ ID NO: 3673878 - DNA, 25 bp, Homo sapien
tcatgatgatctgggtactgccagc

SEQ ID NO: 3673879 - DNA, 25 bp, Homo sapien
ttggtatcaaaagcaggatcctcca

SEQ ID NO: 3673880 - DNA, 25 bp, Homo sapien
gatgacctcgttttgcagttacaag

SEQ ID NO: 3673881 - DNA, 25 bp, Homo sapien
tttccagccagttgctgtgatgctt

SEQ ID NO: 3673882 - DNA, 25 bp, Homo sapien
gctgtgatgcttcctttagtgctat

SEQ ID NO: 3673883 - DNA, 25 bp, Homo sapien
atcaaatccatgattcttttccctt

SEQ ID NO: 3673884 - DNA, 25 bp, Homo sapien
cagttgctgtgatgcttcctttagt

SEQ ID NO: 3673885 - DNA, 25 bp, Homo sapien
gattggtacaaggtttctaactgag

SEQ ID NO: 3673886 - DNA, 25 bp, Homo sapien
ggctcatgttgggaactaagttgaa

SEQ ID NO: 3673887 - DNA, 25 bp, Homo sapien
ttggtacaaggtttctaactgagcc

SEQ ID NO: 3673888 - DNA, 25 bp, Homo sapien
aagattggtacaaggtttctaactg

SEQ ID NO: 3673889 - DNA, 25 bp, Homo sapien
ctttctcaacttgttcatccttcct

SEQ ID NO: 3673890 - DNA, 25 bp, Homo sapien
tgtccaagtaacgagtgtaagtgtt

SEQ ID NO: 3673891 - DNA, 25 bp, Homo sapien
caagtaacgagtgtaagtgttttct

SEQ ID NO: 3673892 - DNA, 25 bp, Homo sapien
acttgtccaagtaacgagtgtaagt

SEQ ID NO: 3673893 - DNA, 25 bp, Homo sapien
gaagtttcagactgctactgtatgt

SEQ ID NO: 3673894 - DNA, 25 bp, Homo sapien
agtttcagactgctactgtatgttt

SEQ ID NO: 3673895 - DNA, 25 bp, Homo sapien
aagtttcagactgctactgtatgtt

SEQ ID NO: 3673896 - DNA, 25 bp, Homo sapien
tttattcatgcttgccttgggatgg

SEQ ID NO: 3673897 - DNA, 25 bp, Homo sapien
ttattcatgcttgccttgggatggg

SEQ ID NO: 3673898 - DNA, 25 bp, Homo sapien
tgggtgtggtttccacgtggtacga

SEQ ID NO: 3673899 - DNA, 25 bp, Homo sapien
cagagctgcccatccagaagttcct

SEQ ID NO: 3673900 - DNA, 25 bp, Homo sapien
tcagagctgcccatccagaagttcc

SEQ ID NO: 3673901 - DNA, 25 bp, Homo sapien
taattttacaactcacaataagcaa

SEQ ID NO: 3673902 - DNA, 25 bp, Homo sapien
gaaatatagatgcaaaactgcctaa

SEQ ID NO: 3673903 - DNA, 25 bp, Homo sapien
taaggagtgtgaatgctaggtcata

SEQ ID NO: 3673904 - DNA, 25 bp, Homo sapien
ccatgtctatacaatctttctcaga

SEQ ID NO: 3673905 - DNA, 25 bp, Homo sapien
ggtgcttgaggcatattcatataac

SEQ ID NO: 3673906 - DNA, 25 bp, Homo sapien
tcctgatgtggtgtaaagaaaacag

SEQ ID NO: 3673907 - DNA, 25 bp, Homo sapien
ttgagaactgggaacttcatgctga

SEQ ID NO: 3673908 - DNA, 25 bp, Homo sapien
tgaagtttctctggtattcaaaggt

SEQ ID NO: 3673909 - DNA, 25 bp, Homo sapien
cctgggagtcaaatcatgtatgtct

SEQ ID NO: 3673910 - DNA, 25 bp, Homo sapien
gaattattataacgaagtagtacag

SEQ ID NO: 3673911 - DNA, 25 bp, Homo sapien
ttttcagctggaaatgtatatgcca

SEQ ID NO: 3673912 - DNA, 25 bp, Homo sapien
tgactttttcactgtacatgttaat

SEQ ID NO: 3673913 - DNA, 25 bp, Homo sapien
ttcttatggaagaaatagaatccac

SEQ ID NO: 3673914 - DNA, 25 bp, Homo sapien
tccaaaaaagctagtgtggatagct

SEQ ID NO: 3673915 - DNA, 25 bp, Homo sapien
cattgtcattgtgtctacttcaccc

SEQ ID NO: 3673916 - DNA, 25 bp, Homo sapien
tagaatccacagagttctgtaggga

SEQ ID NO: 3673917 - DNA, 25 bp, Homo sapien
tgcttaagttgcagactattccagc

SEQ ID NO: 3673918 - DNA, 25 bp, Homo sapien
gcttaagttgcagactattccagcc

SEQ ID NO: 3673919 - DNA, 25 bp, Homo sapien
gcgcggcacaatgcctaactaattt

SEQ ID NO: 3673920 - DNA, 25 bp, Homo sapien
cgacgcgcggcacaatgcctaacta

SEQ ID NO: 3673921 - DNA, 25 bp, Homo sapien
gctgggactaccgacgcgcggcaca

SEQ ID NO: 3673922 - DNA, 25 bp, Homo sapien
tgggactaccgacgcgcggcacaat

SEQ ID NO: 3673923 - DNA, 25 bp, Homo sapien
tgttgttaatatgacatcctgctga

SEQ ID NO: 3673924 - DNA, 25 bp, Homo sapien
ctagctgcacgggtctgcggtctac

SEQ ID NO: 3673925 - DNA, 25 bp, Homo sapien
catcagcccactgtgcaatgggtcc

SEQ ID NO: 3673926 - DNA, 25 bp, Homo sapien
tgatctgtaaagaggtcatcctcat

SEQ ID NO: 3673927 - DNA, 25 bp, Homo sapien
gcaaagatatcaatgttatcatcaa

SEQ ID NO: 3673928 - DNA, 25 bp, Homo sapien
ttgcttccgtagcaaatatatcatc

SEQ ID NO: 3673929 - DNA, 25 bp, Homo sapien
gagggtttaattgcttccgtagcaa

SEQ ID NO: 3673930 - DNA, 25 bp, Homo sapien
ggtttaattgcttccgtagcaaata

SEQ ID NO: 3673931 - DNA, 25 bp, Homo sapien
tcaaatcttggttcaggtgcggcct

SEQ ID NO: 3673932 - DNA, 25 bp, Homo sapien
gtgcggcctgtgcagatcggctttt

SEQ ID NO: 3673933 - DNA, 25 bp, Homo sapien
gtttggttgtcttagcctggatacc

SEQ ID NO: 3673934 - DNA, 25 bp, Homo sapien
caaagatgttggacaccttgtgttc

SEQ ID NO: 3673935 - DNA, 25 bp, Homo sapien
atactaagtacattgggtaaaagat

SEQ ID NO: 3673936 - DNA, 25 bp, Homo sapien
actaagtacattgggtaaaagatga

SEQ ID NO: 3673937 - DNA, 25 bp, Homo sapien
tactaagtacattgggtaaaagatg

SEQ ID NO: 3673938 - DNA, 25 bp, Homo sapien
ttccctgcccatgaaagccacaaag

SEQ ID NO: 3673939 - DNA, 25 bp, Homo sapien
caaggctaactaaatcaaactgtgg

SEQ ID NO: 3673940 - DNA, 25 bp, Homo sapien
tgctcccatattgctaagactcatg

SEQ ID NO: 3673941 - DNA, 25 bp, Homo sapien
gaagcatattatggccccagcaagg

SEQ ID NO: 3673942 - DNA, 25 bp, Homo sapien
caaaatatgacagtgggggggccac

SEQ ID NO: 3673943 - DNA, 25 bp, Homo sapien
acaaaatatgacagtgggggggcca

SEQ ID NO: 3673944 - DNA, 25 bp, Homo sapien
agcagtctgcctgacaacagcgact

SEQ ID NO: 3673945 - DNA, 25 bp, Homo sapien
tgcctgacaacagcgactcggagat

SEQ ID NO: 3673946 - DNA, 25 bp, Homo sapien
cttgctcctccaagaccaaccaggg

SEQ ID NO: 3673947 - DNA, 25 bp, Homo sapien
acaacagcgactcggagatctcaac

SEQ ID NO: 3673948 - DNA, 25 bp, Homo sapien
ccaggtacctatacacttgaggcca

SEQ ID NO: 3673949 - DNA, 25 bp, Homo sapien
catccaggtacctatacacttgagg

SEQ ID NO: 3673950 - DNA, 25 bp, Homo sapien
tacctatacacttgaggccaccaag

SEQ ID NO: 3673951 - DNA, 25 bp, Homo sapien
ggtacctatacacttgaggccacca

SEQ ID NO: 3673952 - DNA, 25 bp, Homo sapien
tgcttctcctcaggagtagaaatca

SEQ ID NO: 3673953 - DNA, 25 bp, Homo sapien
caatatcccaaaagaaccaaggttg

SEQ ID NO: 3673954 - DNA, 25 bp, Homo sapien
aaccccgttcagcattaattgtgct

SEQ ID NO: 3673955 - DNA, 25 bp, Homo sapien
gctggaacttccaccgtaagtctgg

SEQ ID NO: 3673956 - DNA, 25 bp, Homo sapien
tcatgtaatagtacgtcactgctgt

SEQ ID NO: 3673957 - DNA, 25 bp, Homo sapien
cagtccattgtctgggtatagtaca

SEQ ID NO: 3673958 - DNA, 25 bp, Homo sapien
tcacttgggcaaattccgaggagca

SEQ ID NO: 3673959 - DNA, 25 bp, Homo sapien
gcttccgtacacatctgtatgcagg

SEQ ID NO: 3673960 - DNA, 25 bp, Homo sapien
tgctttaagcatactgaggaccctg

SEQ ID NO: 3673961 - DNA, 25 bp, Homo sapien
gaggaccctgtttgttgcttggact

SEQ ID NO: 3673962 - DNA, 25 bp, Homo sapien
tagaattcaagacactcccagaggg

SEQ ID NO: 3673963 - DNA, 25 bp, Homo sapien
tgaatatatgccatgggaccaagcc

SEQ ID NO: 3673964 - DNA, 25 bp, Homo sapien
tgatgcctctgaatggtcccgaggg

SEQ ID NO: 3673965 - DNA, 25 bp, Homo sapien
ccgaggggttgtggtggccgggcag

SEQ ID NO: 3673966 - DNA, 25 bp, Homo sapien
ccagccgggaggacgcttactacag

SEQ ID NO: 3673967 - DNA, 25 bp, Homo sapien
caggatgagcgggtggatcccagga

SEQ ID NO: 3673968 - DNA, 25 bp, Homo sapien
ggttaacaaatattgcatacacagg

SEQ ID NO: 3673969 - DNA, 25 bp, Homo sapien
cccaggaagcgctgtgaaacgggct

SEQ ID NO: 3673970 - DNA, 25 bp, Homo sapien
gactgccaagacagaaacgcatttc

SEQ ID NO: 3673971 - DNA, 25 bp, Homo sapien
aggaagagcctgtctagagagctat

SEQ ID NO: 3673972 - DNA, 25 bp, Homo sapien
agagctatttgaacagtgacctgac

SEQ ID NO: 3673973 - DNA, 25 bp, Homo sapien
ggatgctaatctgccatgttctgat

SEQ ID NO: 3673974 - DNA, 25 bp, Homo sapien
gtaaggactaatcatttaagggaca

SEQ ID NO: 3673975 - DNA, 25 bp, Homo sapien
taaggactaatcatttaagggacaa

SEQ ID NO: 3673976 - DNA, 25 bp, Homo sapien
gcttgtgttcgacaatattccttga

SEQ ID NO: 3673977 - DNA, 25 bp, Homo sapien
aatattccttgatgacagcacagcc

SEQ ID NO: 3673978 - DNA, 25 bp, Homo sapien
caacaatacagcttgtgttcgacaa

SEQ ID NO: 3673979 - DNA, 25 bp, Homo sapien
tgtgcgtttcagtcaacaatacagc

SEQ ID NO: 3673980 - DNA, 25 bp, Homo sapien
gataggtgccatctaccctcggttt

SEQ ID NO: 3673981 - DNA, 25 bp, Homo sapien
caccacgttcgtgaccgggagatgc

SEQ ID NO: 3673982 - DNA, 25 bp, Homo sapien
ggaacatactgacctgtcgtgtgca

SEQ ID NO: 3673983 - DNA, 25 bp, Homo sapien
tagcgtcagcctcgagtttgaccag

SEQ ID NO: 3673984 - DNA, 25 bp, Homo sapien
gcgggcctgaccaacgtgcagaaac

SEQ ID NO: 3673985 - DNA, 25 bp, Homo sapien
ttaaaaatatacgaatctggctggg

SEQ ID NO: 3673986 - DNA, 25 bp, Homo sapien
aggcgggcctgaccaacgtgcagaa

SEQ ID NO: 3673987 - DNA, 25 bp, Homo sapien
gctgaggcgggcctgaccaacgtgc

SEQ ID NO: 3673988 - DNA, 25 bp, Homo sapien
actcctctggaggtaccttggtctc

SEQ ID NO: 3673989 - DNA, 25 bp, Homo sapien
tggaggtaccttggtctcccgatcc

SEQ ID NO: 3673990 - DNA, 25 bp, Homo sapien
gaggtaccttggtctcccgatccat

SEQ ID NO: 3673991 - DNA, 25 bp, Homo sapien
ctctggaggtaccttggtctcccga

SEQ ID NO: 3673992 - DNA, 25 bp, Homo sapien
tctctgcccaagaggagcttctgac

SEQ ID NO: 3673993 - DNA, 25 bp, Homo sapien
gatctctgcccaagaggagcttctg

SEQ ID NO: 3673994 - DNA, 25 bp, Homo sapien
gctgtgatctctgcccaagaggagc

SEQ ID NO: 3673995 - DNA, 25 bp, Homo sapien
gtgatctctgcccaagaggagcttc

SEQ ID NO: 3673996 - DNA, 25 bp, Homo sapien
actttgtccatgagaactgtaaggt

SEQ ID NO: 3673997 - DNA, 25 bp, Homo sapien
ctttgtccatgagaactgtaaggtc

SEQ ID NO: 3673998 - DNA, 25 bp, Homo sapien
acgtgataacaactactgctgcctg

SEQ ID NO: 3673999 - DNA, 25 bp, Homo sapien
tgctgcctgggatcatgagagacct

SEQ ID NO: 3674000 - DNA, 25 bp, Homo sapien
tcagccccaggtcgtagctattgtc

SEQ ID NO: 3674001 - DNA, 25 bp, Homo sapien
tattgtctgccctgctgatatgtga

SEQ ID NO: 3674002 - DNA, 25 bp, Homo sapien
tggaccaggatcagacagtgctgtc

SEQ ID NO: 3674003 - DNA, 25 bp, Homo sapien
gaccaggatcagacagtgctgtcct

SEQ ID NO: 3674004 - DNA, 25 bp, Homo sapien
ggctggaccaggatcagacagtgct

SEQ ID NO: 3674005 - DNA, 25 bp, Homo sapien
ggtgatggcggtttgggctggacca

SEQ ID NO: 3674006 - DNA, 25 bp, Homo sapien
taaagatctctccacgtcttagatt

SEQ ID NO: 3674007 - DNA, 25 bp, Homo sapien
ctggcctgaaggtcatttttataaa

SEQ ID NO: 3674008 - DNA, 25 bp, Homo sapien
catttttataaagatctctccacgt

SEQ ID NO: 3674009 - DNA, 25 bp, Homo sapien
tctctccacgtcttagatttgattc

SEQ ID NO: 3674010 - DNA, 25 bp, Homo sapien
tccaaaaaagctagtgtggatagct

SEQ ID NO: 3674011 - DNA, 25 bp, Homo sapien
cattgtcattgtgtctacttcaccc

SEQ ID NO: 3674012 - DNA, 25 bp, Homo sapien
tagaatccacagagttctgtaggga

SEQ ID NO: 3674013 - DNA, 25 bp, Homo sapien
ttcttatggaagaaatagaatccac

SEQ ID NO: 3674014 - DNA, 25 bp, Homo sapien
atggattaattgttgaaaggaagcc

SEQ ID NO: 3674015 - DNA, 25 bp, Homo sapien
gcctttcgtttcatccttccattgg

SEQ ID NO: 3674016 - DNA, 25 bp, Homo sapien
tactcctcttttacaacacctgtgg

SEQ ID NO: 3674017 - DNA, 25 bp, Homo sapien
gatagaaatgtataagcctttcgtt

SEQ ID NO: 3674018 - DNA, 25 bp, Homo sapien
taaagcgttctttattttcgagatg

SEQ ID NO: 3674019 - DNA, 25 bp, Homo sapien
gtgcctggcctataaagcgttcttt

SEQ ID NO: 3674020 - DNA, 25 bp, Homo sapien
ctataaagcgttctttattttcgag

SEQ ID NO: 3674021 - DNA, 25 bp, Homo sapien
cctggcctataaagcgttctttatt

SEQ ID NO: 3674022 - DNA, 25 bp, Homo sapien
gccgttggttacaatacctctgtca

SEQ ID NO: 3674023 - DNA, 25 bp, Homo sapien
tctgtcaccttgctatgaagtagtc

SEQ ID NO: 3674024 - DNA, 25 bp, Homo sapien
gagaagagtccttgcgttttcgacc

SEQ ID NO: 3674025 - DNA, 25 bp, Homo sapien
gaagcatgcctgaaacgggtaacat

SEQ ID NO: 3674026 - DNA, 25 bp, Homo sapien
gaatatactcatcctttggctccgt

SEQ ID NO: 3674027 - DNA, 25 bp, Homo sapien
gacactgacgtctgtagcaagagaa

SEQ ID NO: 3674028 - DNA, 25 bp, Homo sapien
taaatttgtagctatgttggcccag

SEQ ID NO: 3674029 - DNA, 25 bp, Homo sapien
tatagggagcaacacatcttgtggc

SEQ ID NO: 3674030 - DNA, 25 bp, Homo sapien
atcttagcagtttagggtgggtcag

SEQ ID NO: 3674031 - DNA, 25 bp, Homo sapien
ggctattttgttagtcctacagtgg

SEQ ID NO: 3674032 - DNA, 25 bp, Homo sapien
ctacagtggcactctagtccccagg

SEQ ID NO: 3674033 - DNA, 25 bp, Homo sapien
aaataatgggaagctgaagctgtcc

SEQ ID NO: 3674034 - DNA, 25 bp, Homo sapien
atgatgtgtgcggtctttaggttct

SEQ ID NO: 3674035 - DNA, 25 bp, Homo sapien
tctttagacttatcacgggagtaca

SEQ ID NO: 3674036 - DNA, 25 bp, Homo sapien
tgtgcggtctttaggttctttagac

SEQ ID NO: 3674037 - DNA, 25 bp, Homo sapien
taggttctttagacttatcacggga

SEQ ID NO: 3674038 - DNA, 25 bp, Homo sapien
ctcttgcttttcctccttcatccct

SEQ ID NO: 3674039 - DNA, 25 bp, Homo sapien
tccccaggcttcaggaagcctgaaa

SEQ ID NO: 3674040 - DNA, 25 bp, Homo sapien
tcatcccttccccaggcttcaggaa

SEQ ID NO: 3674041 - DNA, 25 bp, Homo sapien
cttgcttttcctccttcatcccttc

SEQ ID NO: 3674042 - DNA, 25 bp, Homo sapien
tactgggtactgaataatgttgctg

SEQ ID NO: 3674043 - DNA, 25 bp, Homo sapien
cacattgtgatgacgcaggtttatc

SEQ ID NO: 3674044 - DNA, 25 bp, Homo sapien
gaatgttcctttgacatgcaggtga

SEQ ID NO: 3674045 - DNA, 25 bp, Homo sapien
gacttgctgattaaaatatactggg

SEQ ID NO: 3674046 - DNA, 25 bp, Homo sapien
accaaatgaatacttggggctgtat

SEQ ID NO: 3674047 - DNA, 25 bp, Homo sapien
tggggctgtatttcgcatgtttaaa

SEQ ID NO: 3674048 - DNA, 25 bp, Homo sapien
gctgtatttcgcatgtttaaatgtt

SEQ ID NO: 3674049 - DNA, 25 bp, Homo sapien
gaatacttggggctgtatttcgcat

SEQ ID NO: 3674050 - DNA, 25 bp, Homo sapien
caggtatatgttcaggtgtacttca

SEQ ID NO: 3674051 - DNA, 25 bp, Homo sapien
cagtcagtcctcactggttggatct

SEQ ID NO: 3674052 - DNA, 25 bp, Homo sapien
tatttgcatgtaaaggaggaggagt

SEQ ID NO: 3674053 - DNA, 25 bp, Homo sapien
tcagcttctgtgactggatagtttg

SEQ ID NO: 3674054 - DNA, 25 bp, Homo sapien
caaggacgctcacgtgcagttcagg

SEQ ID NO: 3674055 - DNA, 25 bp, Homo sapien
ggccggcggatcagcaattgcagaa

SEQ ID NO: 3674056 - DNA, 25 bp, Homo sapien
agaaagcaggcgagtgtttacggcc

SEQ ID NO: 3674057 - DNA, 25 bp, Homo sapien
tgaacgaatcccgaatcaaagcggc

SEQ ID NO: 3674058 - DNA, 25 bp, Homo sapien
tcaagcctgggtggtccgctgggcc

SEQ ID NO: 3674059 - DNA, 25 bp, Homo sapien
tactcctcaataacagcgggtaacc

SEQ ID NO: 3674060 - DNA, 25 bp, Homo sapien
ggtatcgcagcaaaccgagtggttc

SEQ ID NO: 3674061 - DNA, 25 bp, Homo sapien
agcaaaccgagtggttcccgccgct

SEQ ID NO: 3674062 - DNA, 25 bp, Homo sapien
gccaaatccgcgtgcgagtaacctg

SEQ ID NO: 3674063 - DNA, 25 bp, Homo sapien
atccgcgtgcgagtaacctgctccg

SEQ ID NO: 3674064 - DNA, 25 bp, Homo sapien
gggacgccagccaaatccgcgtgcg

SEQ ID NO: 3674065 - DNA, 25 bp, Homo sapien
gtgcgagtaacctgctccgccggct

SEQ ID NO: 3674066 - DNA, 25 bp, Homo sapien
accgcaccccaatatgggtgacaga

SEQ ID NO: 3674067 - DNA, 25 bp, Homo sapien
atgccaccgcaccccaatatgggtg

SEQ ID NO: 3674068 - DNA, 25 bp, Homo sapien
tgccaccgcaccccaatatgggtga

SEQ ID NO: 3674069 - DNA, 25 bp, Homo sapien
catgccaccgcaccccaatatgggt

SEQ ID NO: 3674070 - DNA, 25 bp, Homo sapien
gaggtatcgtggatccacatttaaa

SEQ ID NO: 3674071 - DNA, 25 bp, Homo sapien
ctgcacgaggtatcgtggatccaca

SEQ ID NO: 3674072 - DNA, 25 bp, Homo sapien
aggagacagagggttcataccagtt

SEQ ID NO: 3674073 - DNA, 25 bp, Homo sapien
ggagacagagggttcataccagtta

SEQ ID NO: 3674074 - DNA, 25 bp, Homo sapien
taaagaaggccagctcaaatctgcc

SEQ ID NO: 3674075 - DNA, 25 bp, Homo sapien
gcaacatcctccaatcgtaaagaag

SEQ ID NO: 3674076 - DNA, 25 bp, Homo sapien
caatcgtaaagaaggccagctcaaa

SEQ ID NO: 3674077 - DNA, 25 bp, Homo sapien
tgtcatgcaacatcctccaatcgta

SEQ ID NO: 3674078 - DNA, 25 bp, Homo sapien
ggtaaatcataacaattcacccaga

SEQ ID NO: 3674079 - DNA, 25 bp, Homo sapien
taacaattcacccagataaagacag

SEQ ID NO: 3674080 - DNA, 25 bp, Homo sapien
tcataacaattcacccagataaaga

SEQ ID NO: 3674081 - DNA, 25 bp, Homo sapien
ctggtaaatcataacaattcaccca

SEQ ID NO: 3674082 - DNA, 25 bp, Homo sapien
ccattcattgcaccaaacgcagccc

SEQ ID NO: 3674083 - DNA, 25 bp, Homo sapien
tggtttggaccaggccatgttctgg

SEQ ID NO: 3674084 - DNA, 25 bp, Homo sapien
atttcttggtttggaccaggccatg

SEQ ID NO: 3674085 - DNA, 25 bp, Homo sapien
aatcctagccgaagaccattcattg

SEQ ID NO: 3674086 - DNA, 25 bp, Homo sapien
cctagactagaaccaagcagccaag

SEQ ID NO: 3674087 - DNA, 25 bp, Homo sapien
accagaacagtgatggacgcaactg

SEQ ID NO: 3674088 - DNA, 25 bp, Homo sapien
cagtgtaacatgatcccaggaatgg

SEQ ID NO: 3674089 - DNA, 25 bp, Homo sapien
ccaggaatggttctgtccagacagc

SEQ ID NO: 3674090 - DNA, 25 bp, Homo sapien
ttgcctagtcaccatattcaaaatc

SEQ ID NO: 3674091 - DNA, 25 bp, Homo sapien
cagagaacctagagtattagcccaa

SEQ ID NO: 3674092 - DNA, 25 bp, Homo sapien
ccttgcctagtcaccatattcaaaa

SEQ ID NO: 3674093 - DNA, 25 bp, Homo sapien
gccccttgcctagtcaccatattca

SEQ ID NO: 3674094 - DNA, 25 bp, Homo sapien
cacatggtacacgactgactggcta

SEQ ID NO: 3674095 - DNA, 25 bp, Homo sapien
gaaagtaccgctaggaagtctcagg

SEQ ID NO: 3674096 - DNA, 25 bp, Homo sapien
taataagtaaatcagggacatgtgc

SEQ ID NO: 3674097 - DNA, 25 bp, Homo sapien
gcagagaaacgcctggaagaattca

SEQ ID NO: 3674098 - DNA, 25 bp, Homo sapien
tatacaacatgcctgtcatggttcc

SEQ ID NO: 3674099 - DNA, 25 bp, Homo sapien
tgtcatggttccagctgctactgtg

SEQ ID NO: 3674100 - DNA, 25 bp, Homo sapien
cacctcgtgttttctcaatgatgac

SEQ ID NO: 3674101 - DNA, 25 bp, Homo sapien
actgtgttaaggtcatcttctgcac

SEQ ID NO: 3674102 - DNA, 25 bp, Homo sapien
tttaaaaagcgcacttcaagtgtat

SEQ ID NO: 3674103 - DNA, 25 bp, Homo sapien
gcgcacttcaagtgtattaagagat

SEQ ID NO: 3674104 - DNA, 25 bp, Homo sapien
actgcaacagagtgtaatttccttg

SEQ ID NO: 3674105 - DNA, 25 bp, Homo sapien
atactgcaacagagtgtaatttcct

SEQ ID NO: 3674106 - DNA, 25 bp, Homo sapien
gaaagaaggaccttgaagagatatt

SEQ ID NO: 3674107 - DNA, 25 bp, Homo sapien
aaaaaaccaccataaaccatatgat

SEQ ID NO: 3674108 - DNA, 25 bp, Homo sapien
aagaaagaaggaccttgaagagata

SEQ ID NO: 3674109 - DNA, 25 bp, Homo sapien
aaaaccaccataaaccatatgatcc

SEQ ID NO: 3674110 - DNA, 25 bp, Homo sapien
gcttagtctgtccaagattaaaaaa

SEQ ID NO: 3674111 - DNA, 25 bp, Homo sapien
tgcttagtctgtccaagattaaaaa

SEQ ID NO: 3674112 - DNA, 25 bp, Homo sapien
tattgcttagtctgtccaagattaa

SEQ ID NO: 3674113 - DNA, 25 bp, Homo sapien
attgcttagtctgtccaagattaaa

SEQ ID NO: 3674114 - DNA, 25 bp, Homo sapien
tggtcctggacgtaggatgtgtttg

SEQ ID NO: 3674115 - DNA, 25 bp, Homo sapien
gctggtcctggacgtaggatgtgtt

SEQ ID NO: 3674116 - DNA, 25 bp, Homo sapien
ctggtcctggacgtaggatgtgttt

SEQ ID NO: 3674117 - DNA, 25 bp, Homo sapien
caccacgttcgtgaccgggagatgc

SEQ ID NO: 3674118 - DNA, 25 bp, Homo sapien
gataggtgccatctaccctcggttt

SEQ ID NO: 3674119 - DNA, 25 bp, Homo sapien
tagcgtcagcctcgagtttgaccag

SEQ ID NO: 3674120 - DNA, 25 bp, Homo sapien
ggaacatactgacctgtcgtgtgca

SEQ ID NO: 3674121 - DNA, 25 bp, Homo sapien
gacaacgaatatctctccagaaaca

SEQ ID NO: 3674122 - DNA, 25 bp, Homo sapien
gactatatgggcagagacaacgaat

SEQ ID NO: 3674123 - DNA, 25 bp, Homo sapien
gctaagacattagaaccacttgaag

SEQ ID NO: 3674124 - DNA, 25 bp, Homo sapien
gagacagaagacgacatagcagctg

SEQ ID NO: 3674125 - DNA, 25 bp, Homo sapien
gagtcaccacgaagaagatagaaga

SEQ ID NO: 3674126 - DNA, 25 bp, Homo sapien
cactgagtcaccacgaagaagatag

SEQ ID NO: 3674127 - DNA, 25 bp, Homo sapien
tgaccactgagtcaccacgaagaag

SEQ ID NO: 3674128 - DNA, 25 bp, Homo sapien
gctgaccactgagtcaccacgaaga

SEQ ID NO: 3674129 - DNA, 25 bp, Homo sapien
cggcccaagacgctgcaactcccga

SEQ ID NO: 3674130 - DNA, 25 bp, Homo sapien
caagacgctgcaactcccgaggcag

SEQ ID NO: 3674131 - DNA, 25 bp, Homo sapien
ggcggcccaagacgctgcaactccc

SEQ ID NO: 3674132 - DNA, 25 bp, Homo sapien
gcccaagacgctgcaactcccgagg

SEQ ID NO: 3674133 - DNA, 25 bp, Homo sapien
atgagcagatccctgttcggtggct

SEQ ID NO: 3674134 - DNA, 25 bp, Homo sapien
gaggtccccacactgatgagcagat

SEQ ID NO: 3674135 - DNA, 25 bp, Homo sapien
cctgttcggtggcttgtctttgctg

SEQ ID NO: 3674136 - DNA, 25 bp, Homo sapien
cagatccctgttcggtggcttgtct

SEQ ID NO: 3674137 - DNA, 25 bp, Homo sapien
caaggacagggacaattcccttctt

SEQ ID NO: 3674138 - DNA, 25 bp, Homo sapien
gggggcttgcctccagggtggccga

SEQ ID NO: 3674139 - DNA, 25 bp, Homo sapien
aggtcggtgaggaatgtgccaagga

SEQ ID NO: 3674140 - DNA, 25 bp, Homo sapien
tctgtgggggcttgcctccagggtg

SEQ ID NO: 3674141 - DNA, 25 bp, Homo sapien
cattcatcgcagtgtccagcatcac

SEQ ID NO: 3674142 - DNA, 25 bp, Homo sapien
ggcaggacaggctgtagctctcacc

SEQ ID NO: 3674143 - DNA, 25 bp, Homo sapien
cagctccgggaagcctgatctgctc

SEQ ID NO: 3674144 - DNA, 25 bp, Homo sapien
ttgattactggttgaccgggactgg

SEQ ID NO: 3674145 - DNA, 25 bp, Homo sapien
tccgggaagcctgatctgctcagcc

SEQ ID NO: 3674146 - DNA, 25 bp, Homo sapien
gatctgctcagccttgattactggt

SEQ ID NO: 3674147 - DNA, 25 bp, Homo sapien
ctttcatgcgggagatcccacagcc

SEQ ID NO: 3674148 - DNA, 25 bp, Homo sapien
gacaatgtgttcaggtctcccacag

SEQ ID NO: 3674149 - DNA, 25 bp, Homo sapien
gaagagatctaagcacctttgagcc

SEQ ID NO: 3674150 - DNA, 25 bp, Homo sapien
cagcctttggcaccaagaaattcca

SEQ ID NO: 3674151 - DNA, 25 bp, Homo sapien
tactgtgcgaggctctattccttct

SEQ ID NO: 3674152 - DNA, 25 bp, Homo sapien
gggaccctactgtgcgaggctctat

SEQ ID NO: 3674153 - DNA, 25 bp, Homo sapien
gcgaggctctattccttctgtttct

SEQ ID NO: 3674154 - DNA, 25 bp, Homo sapien
accctactgtgcgaggctctattcc

SEQ ID NO: 3674155 - DNA, 25 bp, Homo sapien
cagggtacaggcacaaacctcggct

SEQ ID NO: 3674156 - DNA, 25 bp, Homo sapien
gtccccaccccgatctgcatttgct

SEQ ID NO: 3674157 - DNA, 25 bp, Homo sapien
accccgatctgcatttgctgctgac

SEQ ID NO: 3674158 - DNA, 25 bp, Homo sapien
caccccgatctgcatttgctgctga

SEQ ID NO: 3674159 - DNA, 25 bp, Homo sapien
cccaccccgatctgcatttgctgct

SEQ ID NO: 3674160 - DNA, 25 bp, Homo sapien
gatgggtgtcagtgttcttcaaaat

SEQ ID NO: 3674161 - DNA, 25 bp, Homo sapien
tttccactgcacagccaagtttggg

SEQ ID NO: 3674162 - DNA, 25 bp, Homo sapien
tggaagatgggtgtcagtgttcttc

SEQ ID NO: 3674163 - DNA, 25 bp, Homo sapien
caattaaatcagagtgtcggggtgg

SEQ ID NO: 3674164 - DNA, 25 bp, Homo sapien
ttaggtatgaaatagcatgatgcat

SEQ ID NO: 3674165 - DNA, 25 bp, Homo sapien
gatcacaacgctgcccaggagaaca

SEQ ID NO: 3674166 - DNA, 25 bp, Homo sapien
cctggaactccctcattaggtatga

SEQ ID NO: 3674167 - DNA, 25 bp, Homo sapien
aaagtcacgaaggtggcaaagatca

SEQ ID NO: 3674168 - DNA, 25 bp, Homo sapien
tgtctcacagttgtcagtctgccac

SEQ ID NO: 3674169 - DNA, 25 bp, Homo sapien
tgccactccgagtttattgggtgtt

SEQ ID NO: 3674170 - DNA, 25 bp, Homo sapien
aaatttctgtttcgtagcaagtgca

SEQ ID NO: 3674171 - DNA, 25 bp, Homo sapien
tcgtagcaagtgcatgtctcacagt

SEQ ID NO: 3674172 - DNA, 25 bp, Homo sapien
ttcctcagagaacagctatgtcccc

SEQ ID NO: 3674173 - DNA, 25 bp, Homo sapien
ggaattttgcaagacggagtagctg

SEQ ID NO: 3674174 - DNA, 25 bp, Homo sapien
aataccacaacaccaagaggaagcc

SEQ ID NO: 3674175 - DNA, 25 bp, Homo sapien
cactgtggtggacgatgttgataac

SEQ ID NO: 3674176 - DNA, 25 bp, Homo sapien
tgctcgataaatgtggctggaactc

SEQ ID NO: 3674177 - DNA, 25 bp, Homo sapien
tggagccacaaaatcaaggttcagc

SEQ ID NO: 3674178 - DNA, 25 bp, Homo sapien
cattaggcacctagcatgaggcctg

SEQ ID NO: 3674179 - DNA, 25 bp, Homo sapien
agtgatctggccaatgcgatgccca

SEQ ID NO: 3674180 - DNA, 25 bp, Homo sapien
atcacactccaccagagtgacatca

SEQ ID NO: 3674181 - DNA, 25 bp, Homo sapien
ctggctgggatacaatcacactcca

SEQ ID NO: 3674182 - DNA, 25 bp, Homo sapien
catcaacacttgatataaagacaat

SEQ ID NO: 3674183 - DNA, 25 bp, Homo sapien
cacttgatataaagacaatgtcaaa

SEQ ID NO: 3674184 - DNA, 25 bp, Homo sapien
gatcacaggacacagaattggcaca

SEQ ID NO: 3674185 - DNA, 25 bp, Homo sapien
ccatagagggtgcagtgggtccaaa

SEQ ID NO: 3674186 - DNA, 25 bp, Homo sapien
ccgagcaccttgagatctgggcagc

SEQ ID NO: 3674187 - DNA, 25 bp, Homo sapien
gagaatcccagcctacagtggagaa

SEQ ID NO: 3674188 - DNA, 25 bp, Homo sapien
ggcaaaaggcatattactgcatgct

SEQ ID NO: 3674189 - DNA, 25 bp, Homo sapien
tgctgcctgtgtgcaaatacaagtt

SEQ ID NO: 3674190 - DNA, 25 bp, Homo sapien
gagggagaaactgtcaacatcgggt

SEQ ID NO: 3674191 - DNA, 25 bp, Homo sapien
gcaaaccagacttagctctatagag

SEQ ID NO: 3674192 - DNA, 25 bp, Homo sapien
gcttggcagctcctcaataagttaa

SEQ ID NO: 3674193 - DNA, 25 bp, Homo sapien
gacttgagattaccacaggtttggg

SEQ ID NO: 3674194 - DNA, 25 bp, Homo sapien
catgtttaaaggtgattgctggctg

SEQ ID NO: 3674195 - DNA, 25 bp, Homo sapien
cagggactcaaacattatatgccaa

SEQ ID NO: 3674196 - DNA, 25 bp, Homo sapien
ccctgttcaggaagtggccagcata

SEQ ID NO: 3674197 - DNA, 25 bp, Homo sapien
gggcaagtctggctactctagaaag

SEQ ID NO: 3674198 - DNA, 25 bp, Homo sapien
ccctgacttggaggcctgttggcaa

SEQ ID NO: 3674199 - DNA, 25 bp, Homo sapien
gctgatgaaagtcagagaccacctc

SEQ ID NO: 3674200 - DNA, 25 bp, Homo sapien
ccagtctgtaccatagagtcacaca

SEQ ID NO: 3674201 - DNA, 25 bp, Homo sapien
cccagagtgtgacctccaggaacct

SEQ ID NO: 3674202 - DNA, 25 bp, Homo sapien
tccaggaacctggaccagtctgtac

SEQ ID NO: 3674203 - DNA, 25 bp, Homo sapien
ggaccagtctgtaccatagagtcac

SEQ ID NO: 3674204 - DNA, 25 bp, Homo sapien
ttagaagagaaaggaccccgagcac

SEQ ID NO: 3674205 - DNA, 25 bp, Homo sapien
tgttagaagagaaaggaccccgagc

SEQ ID NO: 3674206 - DNA, 25 bp, Homo sapien
cagtgccagctctgttcaggaagtc

SEQ ID NO: 3674207 - DNA, 25 bp, Homo sapien
tcacccacactccaacttaagggca

SEQ ID NO: 3674208 - DNA, 25 bp, Homo sapien
ccacgatatacttgcagtcctcctt

SEQ ID NO: 3674209 - DNA, 25 bp, Homo sapien
tctccaccacgatatacttgcagtc

SEQ ID NO: 3674210 - DNA, 25 bp, Homo sapien
tgtcataacccacaggtgtagaaac

SEQ ID NO: 3674211 - DNA, 25 bp, Homo sapien
tttgtcataacccacaggtgtagaa

SEQ ID NO: 3674212 - DNA, 25 bp, Homo sapien
taggcatggctacacaatcattgac

SEQ ID NO: 3674213 - DNA, 25 bp, Homo sapien
tctttttactgataggcatggctac

SEQ ID NO: 3674214 - DNA, 25 bp, Homo sapien
tacacaatcattgactattagaggc

SEQ ID NO: 3674215 - DNA, 25 bp, Homo sapien
cattgactattagaggccagaggag

SEQ ID NO: 3674216 - DNA, 25 bp, Homo sapien
gttctcgcgacaacacaatcttcct

SEQ ID NO: 3674217 - DNA, 25 bp, Homo sapien
cagtctcgcgagatctccgctcggg

SEQ ID NO: 3674218 - DNA, 25 bp, Homo sapien
tctcgccatacgtctgacagtctcg

SEQ ID NO: 3674219 - DNA, 25 bp, Homo sapien
caaaggcagagttctcgcgacaaca

SEQ ID NO: 3674220 - DNA, 25 bp, Homo sapien
ttgggtggactgagacacggcccca

SEQ ID NO: 3674221 - DNA, 25 bp, Homo sapien
tccaggcgatccgaggagaccttgg

SEQ ID NO: 3674222 - DNA, 25 bp, Homo sapien
gagtgcctctccaggcgatccgagg

SEQ ID NO: 3674223 - DNA, 25 bp, Homo sapien
gcctctccaggcgatccgaggagac

SEQ ID NO: 3674224 - DNA, 25 bp, Homo sapien
agcgggccagcggtcatcgagcctc

SEQ ID NO: 3674225 - DNA, 25 bp, Homo sapien
agcggtcatcgagcctccacccggc

SEQ ID NO: 3674226 - DNA, 25 bp, Homo sapien
cccagcgggccagcggtcatcgagc

SEQ ID NO: 3674227 - DNA, 25 bp, Homo sapien
tccacccggcccacagcgttcttac

SEQ ID NO: 3674228 - DNA, 25 bp, Homo sapien
gcccggcaagcgacaggctgcttta

SEQ ID NO: 3674229 - DNA, 25 bp, Homo sapien
tgctttacccctgacccgagtgcga

SEQ ID NO: 3674230 - DNA, 25 bp, Homo sapien
gcccacgcgtcacacggcaactcca

SEQ ID NO: 3674231 - DNA, 25 bp, Homo sapien
cgagtgcgaaaggtccccgagcccg

SEQ ID NO: 3674232 - DNA, 25 bp, Homo sapien
ctcacaggccaggtcaccgactcac

SEQ ID NO: 3674233 - DNA, 25 bp, Homo sapien
tgagacttttttcacttcacacgtt

SEQ ID NO: 3674234 - DNA, 25 bp, Homo sapien
cttgagacttttttcacttcacacg

SEQ ID NO: 3674235 - DNA, 25 bp, Homo sapien
agacttttttcacttcacacgttct

SEQ ID NO: 3674236 - DNA, 25 bp, Homo sapien
ttttcacttcacacgttctttcttc

SEQ ID NO: 3674237 - DNA, 25 bp, Homo sapien
aaggagctatgcaaaggcttgccct

SEQ ID NO: 3674238 - DNA, 25 bp, Homo sapien
tcctcctccctgtggcgcagttaga

SEQ ID NO: 3674239 - DNA, 25 bp, Homo sapien
ttagagcactgtcagctttcagagc

SEQ ID NO: 3674240 - DNA, 25 bp, Homo sapien
tcagagcggaaatgaagagccccaa

SEQ ID NO: 3674241 - DNA, 25 bp, Homo sapien
tgcacttaggccagtcatgcaagac

SEQ ID NO: 3674242 - DNA, 25 bp, Homo sapien
gagcgtgatgggctgcttcactttg

SEQ ID NO: 3674243 - DNA, 25 bp, Homo sapien
aatgccggctccgatttggagagct

SEQ ID NO: 3674244 - DNA, 25 bp, Homo sapien
tgtatcacatgggtgaaatgccggc

SEQ ID NO: 3674245 - DNA, 25 bp, Homo sapien
ggtgcctaactgaaagctggctaga

SEQ ID NO: 3674246 - DNA, 25 bp, Homo sapien
caacagtggttactttgcagcctcc

SEQ ID NO: 3674247 - DNA, 25 bp, Homo sapien
taagactaagtttagggccaggtgc

SEQ ID NO: 3674248 - DNA, 25 bp, Homo sapien
aaagggctgccttaattggatttca

SEQ ID NO: 3674249 - DNA, 25 bp, Homo sapien
tactgcaagaacaatgacatgattt

SEQ ID NO: 3674250 - DNA, 25 bp, Homo sapien
tactagagctcagaataggttcact

SEQ ID NO: 3674251 - DNA, 25 bp, Homo sapien
tacagagttctctaagaagcttggg

SEQ ID NO: 3674252 - DNA, 25 bp, Homo sapien
catgagtgtcagtaaagccataacg

SEQ ID NO: 3674253 - DNA, 25 bp, Homo sapien
ccactctggtcttggaaggtattca

SEQ ID NO: 3674254 - DNA, 25 bp, Homo sapien
tactggagctgccactctggtcttg

SEQ ID NO: 3674255 - DNA, 25 bp, Homo sapien
gagctgccactctggtcttggaagg

SEQ ID NO: 3674256 - DNA, 25 bp, Homo sapien
ctggagctgccactctggtcttgga

SEQ ID NO: 3674257 - DNA, 25 bp, Homo sapien
cgtgcatcactacacctcaaaaggg

SEQ ID NO: 3674258 - DNA, 25 bp, Homo sapien
aatagcaagctccaagtccctccgt

SEQ ID NO: 3674259 - DNA, 25 bp, Homo sapien
tcagcccggagaactccaccaatag

SEQ ID NO: 3674260 - DNA, 25 bp, Homo sapien
ctttaatttgctgttcagcccggag

SEQ ID NO: 3674261 - DNA, 25 bp, Homo sapien
taagctgataaataaggtccacctg

SEQ ID NO: 3674262 - DNA, 25 bp, Homo sapien
gctgataaataaggtccacctgttc

SEQ ID NO: 3674263 - DNA, 25 bp, Homo sapien
tacctcacggcttctaagacattcc

SEQ ID NO: 3674264 - DNA, 25 bp, Homo sapien
tacagccatacctcacggcttctaa

SEQ ID NO: 3674265 - DNA, 25 bp, Homo sapien
cagaagccatgctcaaaccaattct

SEQ ID NO: 3674266 - DNA, 25 bp, Homo sapien
gccatgctcaaaccaattctagcca

SEQ ID NO: 3674267 - DNA, 25 bp, Homo sapien
ctatattaacactgcattacaagga

SEQ ID NO: 3674268 - DNA, 25 bp, Homo sapien
ctgcattacaaggaagatactctct

SEQ ID NO: 3674269 - DNA, 25 bp, Homo sapien
ttttgggtacactccagttgatgag

SEQ ID NO: 3674270 - DNA, 25 bp, Homo sapien
tccaggcacacagagacttgattgg

SEQ ID NO: 3674271 - DNA, 25 bp, Homo sapien
ctctccaggcacacagagacttgat

SEQ ID NO: 3674272 - DNA, 25 bp, Homo sapien
cactccagttgatgagtaagacaat

SEQ ID NO: 3674273 - DNA, 25 bp, Homo sapien
tgtggtgatggtctggcgcagagta

SEQ ID NO: 3674274 - DNA, 25 bp, Homo sapien
agagcaggacagttgaatcttcagg

SEQ ID NO: 3674275 - DNA, 25 bp, Homo sapien
tggcgcagagtaattgtgtcagctt

SEQ ID NO: 3674276 - DNA, 25 bp, Homo sapien
tcaggcttaagggtcaaactgccca

SEQ ID NO: 3674277 - DNA, 25 bp, Homo sapien
gcatggagatacagcctctcttctc

SEQ ID NO: 3674278 - DNA, 25 bp, Homo sapien
ggcatggagatacagcctctcttct

SEQ ID NO: 3674279 - DNA, 25 bp, Homo sapien
tttctgttaatcagccccgacaaga

SEQ ID NO: 3674280 - DNA, 25 bp, Homo sapien
cgctcacagagaaccagtatcagta

SEQ ID NO: 3674281 - DNA, 25 bp, Homo sapien
tctagggctcttctcaactaaaaca

SEQ ID NO: 3674282 - DNA, 25 bp, Homo sapien
gagaagagccactctctaatcttgg

SEQ ID NO: 3674283 - DNA, 25 bp, Homo sapien
gagccattcgctgaaagggacagct

SEQ ID NO: 3674284 - DNA, 25 bp, Homo sapien
aggagccattcgctgaaagggacag

SEQ ID NO: 3674285 - DNA, 25 bp, Homo sapien
ggagccattcgctgaaagggacagc

SEQ ID NO: 3674286 - DNA, 25 bp, Homo sapien
aatgacacatagtactactgattag

SEQ ID NO: 3674287 - DNA, 25 bp, Homo sapien
aattttctatgataaagagttcctt

SEQ ID NO: 3674288 - DNA, 25 bp, Homo sapien
taactccacctactgctgtgtctac

SEQ ID NO: 3674289 - DNA, 25 bp, Homo sapien
taaatatgtttccagactgcaacca

SEQ ID NO: 3674290 - DNA, 25 bp, Homo sapien
cttttgataacttgatttttcactc

SEQ ID NO: 3674291 - DNA, 25 bp, Homo sapien
acttgatttttcactcttgaggagc

SEQ ID NO: 3674292 - DNA, 25 bp, Homo sapien
ttgatttttcactcttgaggagcca

SEQ ID NO: 3674293 - DNA, 25 bp, Homo sapien
gataacttgatttttcactcttgag

SEQ ID NO: 3674294 - DNA, 25 bp, Homo sapien
tttcaatctccacacctttgggctg

SEQ ID NO: 3674295 - DNA, 25 bp, Homo sapien
tctagaaggagtcattgcctttggt

SEQ ID NO: 3674296 - DNA, 25 bp, Homo sapien
gagtcattgcctttggtgctttagt

SEQ ID NO: 3674297 - DNA, 25 bp, Homo sapien
ttcaatctccacacctttgggctgg

SEQ ID NO: 3674298 - DNA, 25 bp, Homo sapien
ctggcaggacccagtcagctgtgtt

SEQ ID NO: 3674299 - DNA, 25 bp, Homo sapien
cctggcaggacccagtcagctgtgt

SEQ ID NO: 3674300 - DNA, 25 bp, Homo sapien
caaaccagtgctattttgatgttta

SEQ ID NO: 3674301 - DNA, 25 bp, Homo sapien
tcaaaccagtgctattttgatgttt

SEQ ID NO: 3674302 - DNA, 25 bp, Homo sapien
gtgctattttgatgtttatgctcac

SEQ ID NO: 3674303 - DNA, 25 bp, Homo sapien
ccagtgctattttgatgtttatgct

SEQ ID NO: 3674304 - DNA, 25 bp, Homo sapien
agttatgttcctcctgtagaggtga

SEQ ID NO: 3674305 - DNA, 25 bp, Homo sapien
cctgtagaggtgaattaagtaatac

SEQ ID NO: 3674306 - DNA, 25 bp, Homo sapien
gggaagttatgttcctcctgtagag

SEQ ID NO: 3674307 - DNA, 25 bp, Homo sapien
ctggggggaagttatgttcctcctg

SEQ ID NO: 3674308 - DNA, 25 bp, Homo sapien
ctgtagaggagttcgatataaccac

SEQ ID NO: 3674309 - DNA, 25 bp, Homo sapien
ggagttcgatataaccacttctctt

SEQ ID NO: 3674310 - DNA, 25 bp, Homo sapien
tcaactttaagctgcatacaggcaa

SEQ ID NO: 3674311 - DNA, 25 bp, Homo sapien
tagaggagttcgatataaccacttc

SEQ ID NO: 3674312 - DNA, 25 bp, Homo sapien
aattttcatgctggtggcatgtacc

SEQ ID NO: 3674313 - DNA, 25 bp, Homo sapien
taattttcatgctggtggcatgtac

SEQ ID NO: 3674314 - DNA, 25 bp, Homo sapien
attttcatgctggtggcatgtaccc

SEQ ID NO: 3674315 - DNA, 25 bp, Homo sapien
caacaaagcttggatgacagcgcac

SEQ ID NO: 3674316 - DNA, 25 bp, Homo sapien
atactacacccattgacagtgcact

SEQ ID NO: 3674317 - DNA, 25 bp, Homo sapien
tggccactggtggctaagttgaagc

SEQ ID NO: 3674318 - DNA, 25 bp, Homo sapien
gcttcaatcctagagcccttgagaa

SEQ ID NO: 3674319 - DNA, 25 bp, Homo sapien
tctctataggagatcaaactagcca

SEQ ID NO: 3674320 - DNA, 25 bp, Homo sapien
gagagaggtcaggaaccagaagtca

SEQ ID NO: 3674321 - DNA, 25 bp, Homo sapien
taggccaaagcgtaaccccagagta

SEQ ID NO: 3674322 - DNA, 25 bp, Homo sapien
caagatcgtaaatgaagttggctac

SEQ ID NO: 3674323 - DNA, 25 bp, Homo sapien
tgtggggtgaattaaaatacttctg

SEQ ID NO: 3674324 - DNA, 25 bp, Homo sapien
tatacttcgataaacaagagtgttt

SEQ ID NO: 3674325 - DNA, 25 bp, Homo sapien
caaagatttggcaagctgcagtcac

SEQ ID NO: 3674326 - DNA, 25 bp, Homo sapien
gaataatgtagaactaacgtgggct

SEQ ID NO: 3674327 - DNA, 25 bp, Homo sapien
cctacttaaaagcaccaggtgtcaa

SEQ ID NO: 3674328 - DNA, 25 bp, Homo sapien
tacacaggatgcaccaattatccct

SEQ ID NO: 3674329 - DNA, 25 bp, Homo sapien
gagaggatgactttatccctactta

SEQ ID NO: 3674330 - DNA, 25 bp, Homo sapien
cggcctgttcactaaaacgtcactt

SEQ ID NO: 3674331 - DNA, 25 bp, Homo sapien
ctctagtgaagctgtatggcaatga

SEQ ID NO: 3674332 - DNA, 25 bp, Homo sapien
aactctagtgaagctgtatggcaat

SEQ ID NO: 3674333 - DNA, 25 bp, Homo sapien
agtgaagctgtatggcaatgacatt

SEQ ID NO: 3674334 - DNA, 25 bp, Homo sapien
gaactctagtgaagctgtatggcaa

SEQ ID NO: 3674335 - DNA, 25 bp, Homo sapien
tacagagctgcaactcaagataact

SEQ ID NO: 3674336 - DNA, 25 bp, Homo sapien
ctggaaaggctccttacattgtttt

SEQ ID NO: 3674337 - DNA, 25 bp, Homo sapien
tgtttttgcccaccacctttatata

SEQ ID NO: 3674338 - DNA, 25 bp, Homo sapien
cagagctgcaactcaagataactgg

SEQ ID NO: 3674339 - DNA, 25 bp, Homo sapien
ttaccacgttatgtggtaccacacc

SEQ ID NO: 3674340 - DNA, 25 bp, Homo sapien
tctcagctggattactaaccaaaag

SEQ ID NO: 3674341 - DNA, 25 bp, Homo sapien
ccacaccacactttgtgacaaatag

SEQ ID NO: 3674342 - DNA, 25 bp, Homo sapien
gttcaagctgtttctcagctggatt

SEQ ID NO: 3674343 - DNA, 25 bp, Homo sapien
aaaatggaggttaatatacctattg

SEQ ID NO: 3674344 - DNA, 25 bp, Homo sapien
aatggaggttaatatacctattgtt

SEQ ID NO: 3674345 - DNA, 25 bp, Homo sapien
aaatggaggttaatatacctattgt

SEQ ID NO: 3674346 - DNA, 25 bp, Homo sapien
cctggatggctgaccaagactggca

SEQ ID NO: 3674347 - DNA, 25 bp, Homo sapien
acttactcccagaattcaggtcgtg

SEQ ID NO: 3674348 - DNA, 25 bp, Homo sapien
gattttgccaactcatgaatggagg

SEQ ID NO: 3674349 - DNA, 25 bp, Homo sapien
cacgaggtggtctgacaggactaac

SEQ ID NO: 3674350 - DNA, 25 bp, Homo sapien
tgcctggccgtcactaatcttcaag

SEQ ID NO: 3674351 - DNA, 25 bp, Homo sapien
taagaagaacgtaagcaggtcagct

SEQ ID NO: 3674352 - DNA, 25 bp, Homo sapien
tgaagccatctggtaggacgctcgt

SEQ ID NO: 3674353 - DNA, 25 bp, Homo sapien
gggtggtcaccagcatctaactcaa

SEQ ID NO: 3674354 - DNA, 25 bp, Homo sapien
cattaagtgcttattgctgaaggta

SEQ ID NO: 3674355 - DNA, 25 bp, Homo sapien
aaatttggaaatattcgtcactagc

SEQ ID NO: 3674356 - DNA, 25 bp, Homo sapien
aaaggtccgcctaataccatgctca

SEQ ID NO: 3674357 - DNA, 25 bp, Homo sapien
agttgaatggtgtttagtgtgccca

SEQ ID NO: 3674358 - DNA, 25 bp, Homo sapien
cctaggctgctttaattcattattt

SEQ ID NO: 3674359 - DNA, 25 bp, Homo sapien
tgcctaggctgctttaattcattat

SEQ ID NO: 3674360 - DNA, 25 bp, Homo sapien
gcctaggctgctttaattcattatt

SEQ ID NO: 3674361 - DNA, 25 bp, Homo sapien
catgcctaggctgctttaattcatt

SEQ ID NO: 3674362 - DNA, 25 bp, Homo sapien
taaccatctgatgtagtgatacttg

SEQ ID NO: 3674363 - DNA, 25 bp, Homo sapien
cgtttggtgcaatgaatggtcttcg

SEQ ID NO: 3674364 - DNA, 25 bp, Homo sapien
aagaatcagaagtgtagttatgcag

SEQ ID NO: 3674365 - DNA, 25 bp, Homo sapien
aaagctgtctttatctgggtgaatt

SEQ ID NO: 3674366 - DNA, 25 bp, Homo sapien
cacagttgaatcactaacggcatct

SEQ ID NO: 3674367 - DNA, 25 bp, Homo sapien
tcccagatagctagggctgcagatg

SEQ ID NO: 3674368 - DNA, 25 bp, Homo sapien
taagcattatggttggaacctttta

SEQ ID NO: 3674369 - DNA, 25 bp, Homo sapien
gatgtgatctgacttggttgcccag

SEQ ID NO: 3674370 - DNA, 25 bp, Homo sapien
taatgatcgagttcagcaagttgca

SEQ ID NO: 3674371 - DNA, 25 bp, Homo sapien
tagattggaggacttgaacttgcca

SEQ ID NO: 3674372 - DNA, 25 bp, Homo sapien
tattcagcattgtctggccagggca

SEQ ID NO: 3674373 - DNA, 25 bp, Homo sapien
tagtcaagtacgttaaatggcattc

SEQ ID NO: 3674374 - DNA, 25 bp, Homo sapien
cgcacattgccgcaaagcggaagtg

SEQ ID NO: 3674375 - DNA, 25 bp, Homo sapien
aagctgccgtcaggcgcttccagct

SEQ ID NO: 3674376 - DNA, 25 bp, Homo sapien
gaaggtcagcgtgtgaagtaggcgc

SEQ ID NO: 3674377 - DNA, 25 bp, Homo sapien
tgtggcgcttaacgggaaccggcgc

SEQ ID NO: 3674378 - DNA, 25 bp, Homo sapien
ctcaatgcgccgctttgattcggga

SEQ ID NO: 3674379 - DNA, 25 bp, Homo sapien
gatggactgcgcgtccttctcagcg

SEQ ID NO: 3674380 - DNA, 25 bp, Homo sapien
caagtcaggccgtaaacactcgcct

SEQ ID NO: 3674381 - DNA, 25 bp, Homo sapien
cttctgcaattgctgatccgccggc

SEQ ID NO: 3674382 - DNA, 25 bp, Homo sapien
ctgggaccagcagcgcactgtcccc

SEQ ID NO: 3674383 - DNA, 25 bp, Homo sapien
agcagcgcactgtccccgggccggc

SEQ ID NO: 3674384 - DNA, 25 bp, Homo sapien
gggcggagagcctcatttcactaac

SEQ ID NO: 3674385 - DNA, 25 bp, Homo sapien
cgggcggagagcctcatttcactaa

SEQ ID NO: 3674386 - DNA, 25 bp, Homo sapien
tgaactgcacgtgagcgtccttggg

SEQ ID NO: 3674387 - DNA, 25 bp, Homo sapien
ccggcgaagttgtagcggcgcccca

SEQ ID NO: 3674388 - DNA, 25 bp, Homo sapien
aggctggcgaggacggtgggaccct

SEQ ID NO: 3674389 - DNA, 25 bp, Homo sapien
ggtcgcttggtgcagggttcacagc

SEQ ID NO: 3674390 - DNA, 25 bp, Homo sapien
caaacaggtggtggagtctcctgcc

SEQ ID NO: 3674391 - DNA, 25 bp, Homo sapien
gagtttctcacatcaatcgcactgg

SEQ ID NO: 3674392 - DNA, 25 bp, Homo sapien
ggtagctcagcaagtggacctcaga

SEQ ID NO: 3674393 - DNA, 25 bp, Homo sapien
tcgcactgggaaaaatgcggcccca

SEQ ID NO: 3674394 - DNA, 25 bp, Homo sapien
gcctccattgcactcctgaaacact

SEQ ID NO: 3674395 - DNA, 25 bp, Homo sapien
cggcctccattgcactcctgaaaca

SEQ ID NO: 3674396 - DNA, 25 bp, Homo sapien
ggcctccattgcactcctgaaacac

SEQ ID NO: 3674397 - DNA, 25 bp, Homo sapien
gcatccaggcctaagctacaattat

SEQ ID NO: 3674398 - DNA, 25 bp, Homo sapien
tgtttatgccatgaactccccaatc

SEQ ID NO: 3674399 - DNA, 25 bp, Homo sapien
gattaactccttaactgagtcttga

SEQ ID NO: 3674400 - DNA, 25 bp, Homo sapien
gagtcttgatgctccacttgagttc

SEQ ID NO: 3674401 - DNA, 25 bp, Homo sapien
taccccgcctacttgtcctaagata

SEQ ID NO: 3674402 - DNA, 25 bp, Homo sapien
ataaatatccatttcgctaccccgc

SEQ ID NO: 3674403 - DNA, 25 bp, Homo sapien
taaacatgcgaaatacagccccaag

SEQ ID NO: 3674404 - DNA, 25 bp, Homo sapien
tgcccagcaaaattagcgatttcag

SEQ ID NO: 3674405 - DNA, 25 bp, Homo sapien
gaaaatcctcaaattgggccgggca

SEQ ID NO: 3674406 - DNA, 25 bp, Homo sapien
tctgcagcagatcaggcttcagaga

SEQ ID NO: 3674407 - DNA, 25 bp, Homo sapien
gaacataaactagtccttgtgagag

SEQ ID NO: 3674408 - DNA, 25 bp, Homo sapien
ccatatggagcaaaacagatgcagg

SEQ ID NO: 3674409 - DNA, 25 bp, Homo sapien
tcagtgtccatccaactggtaatag

SEQ ID NO: 3674410 - DNA, 25 bp, Homo sapien
cgctgtcttgattccttcagtgtcc

SEQ ID NO: 3674411 - DNA, 25 bp, Homo sapien
ttccttcagtgtccatccaactggt

SEQ ID NO: 3674412 - DNA, 25 bp, Homo sapien
ttccgctgtcttgattccttcagtg

SEQ ID NO: 3674413 - DNA, 25 bp, Homo sapien
accaggcagtaattatgtgtttttg

SEQ ID NO: 3674414 - DNA, 25 bp, Homo sapien
tacctttactattgcatctatcaca

SEQ ID NO: 3674415 - DNA, 25 bp, Homo sapien
tgtggccactgctacactgtaagta

SEQ ID NO: 3674416 - DNA, 25 bp, Homo sapien
tgtgccttgctcatacctttactat

SEQ ID NO: 3674417 - DNA, 25 bp, Homo sapien
tattgtattgttgttttctttacta

SEQ ID NO: 3674418 - DNA, 25 bp, Homo sapien
ggattctattattgtattgttgttt

SEQ ID NO: 3674419 - DNA, 25 bp, Homo sapien
tctattattgtattgttgttttctt

SEQ ID NO: 3674420 - DNA, 25 bp, Homo sapien
gtattgttgttttctttactatcca

SEQ ID NO: 3674421 - DNA, 25 bp, Homo sapien
gatgctggttcaaatactgtgtact

SEQ ID NO: 3674422 - DNA, 25 bp, Homo sapien
tggcgtgttcatcttccgtagtctg

SEQ ID NO: 3674423 - DNA, 25 bp, Homo sapien
cacatccatcggtgattcgggttca

SEQ ID NO: 3674424 - DNA, 25 bp, Homo sapien
tactaaactgctctggtaccagggt

SEQ ID NO: 3674425 - DNA, 25 bp, Homo sapien
caatgtcagcgtctcttgcttggaa

SEQ ID NO: 3674426 - DNA, 25 bp, Homo sapien
tgcattctacattcaggctagaaat

SEQ ID NO: 3674427 - DNA, 25 bp, Homo sapien
tggaaatgtaatctaacttcaccgc

SEQ ID NO: 3674428 - DNA, 25 bp, Homo sapien
aatctaacttcaccgcccttagtag

SEQ ID NO: 3674429 - DNA, 25 bp, Homo sapien
gggcagtctcatgaaatgatctgtg

SEQ ID NO: 3674430 - DNA, 25 bp, Homo sapien
ttactgtgtgattggcagatggtct

SEQ ID NO: 3674431 - DNA, 25 bp, Homo sapien
tggtctcaagagaggcagccggatc

SEQ ID NO: 3674432 - DNA, 25 bp, Homo sapien
tctcctcaatgggagttccaagcca

SEQ ID NO: 3674433 - DNA, 25 bp, Homo sapien
cagccggatcccacactgaggcatt

SEQ ID NO: 3674434 - DNA, 25 bp, Homo sapien
ccacaaatctttataatgtgttgga

SEQ ID NO: 3674435 - DNA, 25 bp, Homo sapien
ttctgaacaaggcattttaacatgc

SEQ ID NO: 3674436 - DNA, 25 bp, Homo sapien
gaacttctcctgctcgcaaaagatc

SEQ ID NO: 3674437 - DNA, 25 bp, Homo sapien
atgcttgttatcccacaaatcttta

SEQ ID NO: 3674438 - DNA, 25 bp, Homo sapien
aatctcggttttgttcttccctcat

SEQ ID NO: 3674439 - DNA, 25 bp, Homo sapien
tctcggttttgttcttccctcatct

SEQ ID NO: 3674440 - DNA, 25 bp, Homo sapien
tcggttttgttcttccctcatcttc

SEQ ID NO: 3674441 - DNA, 25 bp, Homo sapien
gaatctcggttttgttcttccctca

SEQ ID NO: 3674442 - DNA, 25 bp, Homo sapien
tgcagtctgaatgagctcccaccgg

SEQ ID NO: 3674443 - DNA, 25 bp, Homo sapien
gtgcagtctgaatgagctcccaccg

SEQ ID NO: 3674444 - DNA, 25 bp, Homo sapien
ggctccccgcagttcgctcaccatt

SEQ ID NO: 3674445 - DNA, 25 bp, Homo sapien
agtctgaatgagctcccaccggctc

SEQ ID NO: 3674446 - DNA, 25 bp, Homo sapien
ccatttcttagaatatgccacagtg

SEQ ID NO: 3674447 - DNA, 25 bp, Homo sapien
ttatcccagaaatcgatcaaagctg

SEQ ID NO: 3674448 - DNA, 25 bp, Homo sapien
aaatcgatcaaagctgtaaagtccc

SEQ ID NO: 3674449 - DNA, 25 bp, Homo sapien
tttcttagaatatgccacagtgtat

SEQ ID NO: 3674450 - DNA, 25 bp, Homo sapien
ctgaatatcctgaactcagttcaag

SEQ ID NO: 3674451 - DNA, 25 bp, Homo sapien
gttcaagaaacattaactgtgcatt

SEQ ID NO: 3674452 - DNA, 25 bp, Homo sapien
tactctccctgaatatcctgaactc

SEQ ID NO: 3674453 - DNA, 25 bp, Homo sapien
tctccctgaatatcctgaactcagt

SEQ ID NO: 3674454 - DNA, 25 bp, Homo sapien
ctctcggtaagtgattgtggttcaa

SEQ ID NO: 3674455 - DNA, 25 bp, Homo sapien
taattcctaaatctctcggtaagtg

SEQ ID NO: 3674456 - DNA, 25 bp, Homo sapien
tggtcaactatcaccttacacaaaa

SEQ ID NO: 3674457 - DNA, 25 bp, Homo sapien
tctaccaatcaccagtcgcaaatgg

SEQ ID NO: 3674458 - DNA, 25 bp, Homo sapien
gctgacaagctttacaatattgctt

SEQ ID NO: 3674459 - DNA, 25 bp, Homo sapien
gcattattgcactgtacttcttcac

SEQ ID NO: 3674460 - DNA, 25 bp, Homo sapien
gcactgtacttcttcacaactgtca

SEQ ID NO: 3674461 - DNA, 25 bp, Homo sapien
tctgatgaagcattattgcactgta

SEQ ID NO: 3674462 - DNA, 25 bp, Homo sapien
ggcagacagagtgcaattttcacca

SEQ ID NO: 3674463 - DNA, 25 bp, Homo sapien
ccatatcaggcaagatggactgata

SEQ ID NO: 3674464 - DNA, 25 bp, Homo sapien
ttggcagacagagtgcaattttcac

SEQ ID NO: 3674465 - DNA, 25 bp, Homo sapien
ggcaagatggactgatataaatgtt

SEQ ID NO: 3674466 - DNA, 25 bp, Homo sapien
tctgttcctgcgacattgtgatgga

SEQ ID NO: 3674467 - DNA, 25 bp, Homo sapien
cattagctaaaagactggcaatctg

SEQ ID NO: 3674468 - DNA, 25 bp, Homo sapien
catcgtggaaatgtgcagaagaaag

SEQ ID NO: 3674469 - DNA, 25 bp, Homo sapien
tgtctgggtaactagaatactccga

SEQ ID NO: 3674470 - DNA, 25 bp, Homo sapien
caaaaatgcatgacctcattccaat

SEQ ID NO: 3674471 - DNA, 25 bp, Homo sapien
ccagtaataagaagtatcatgatcc

SEQ ID NO: 3674472 - DNA, 25 bp, Homo sapien
tggtattctcccaaaaatgcatgac

SEQ ID NO: 3674473 - DNA, 25 bp, Homo sapien
atcatgatcccactgatatggtgca

SEQ ID NO: 3674474 - DNA, 25 bp, Homo sapien
cagaagcatcgatgctaatcacatt

SEQ ID NO: 3674475 - DNA, 25 bp, Homo sapien
catctagtttccatgcaaactcaga

SEQ ID NO: 3674476 - DNA, 25 bp, Homo sapien
tgcaaactcagaagcatcgatgcta

SEQ ID NO: 3674477 - DNA, 25 bp, Homo sapien
tttccatgcaaactcagaagcatcg

SEQ ID NO: 3674478 - DNA, 25 bp, Homo sapien
agatatcagggctcaacaatccttg

SEQ ID NO: 3674479 - DNA, 25 bp, Homo sapien
tactacgtagtttgataagtaacaa

SEQ ID NO: 3674480 - DNA, 25 bp, Homo sapien
tcagtcagtcagtgcacagctactt

SEQ ID NO: 3674481 - DNA, 25 bp, Homo sapien
caacctatcttccaccacagagaag

SEQ ID NO: 3674482 - DNA, 25 bp, Homo sapien
tcttctaaagtagcagaagagcgtt

SEQ ID NO: 3674483 - DNA, 25 bp, Homo sapien
tagcagaagagcgttttaagtttct

SEQ ID NO: 3674484 - DNA, 25 bp, Homo sapien
cttctaaagtagcagaagagcgttt

SEQ ID NO: 3674485 - DNA, 25 bp, Homo sapien
gactcttctaaagtagcagaagagc

SEQ ID NO: 3674486 - DNA, 25 bp, Homo sapien
tcttgtaaatgtcaccaacccagta

SEQ ID NO: 3674487 - DNA, 25 bp, Homo sapien
cttgtaaatgtcaccaacccagtag

SEQ ID NO: 3674488 - DNA, 25 bp, Homo sapien
ttgtaaatgtcaccaacccagtagg

SEQ ID NO: 3674489 - DNA, 25 bp, Homo sapien
tgtaaatgtcaccaacccagtaggt

SEQ ID NO: 3674490 - DNA, 25 bp, Homo sapien
cagaaattctgaacaatggtatttt

SEQ ID NO: 3674491 - DNA, 25 bp, Homo sapien
ccacagaaattctgaacaatggtat

SEQ ID NO: 3674492 - DNA, 25 bp, Homo sapien
tgccacagaaattctgaacaatggt

SEQ ID NO: 3674493 - DNA, 25 bp, Homo sapien
ctgccacagaaattctgaacaatgg

SEQ ID NO: 3674494 - DNA, 25 bp, Homo sapien
ctgtagcatgcctcggccattttct

SEQ ID NO: 3674495 - DNA, 25 bp, Homo sapien
gcaatcgtgtcaagggtttttcaca

SEQ ID NO: 3674496 - DNA, 25 bp, Homo sapien
cttcgtaagtgacatgcaatcgtgt

SEQ ID NO: 3674497 - DNA, 25 bp, Homo sapien
cttctatggtaccttcgtaagtgac

SEQ ID NO: 3674498 - DNA, 25 bp, Homo sapien
actcaggattgattaaaaagcggat

SEQ ID NO: 3674499 - DNA, 25 bp, Homo sapien
tgaagagccgtgaaataatcaactc

SEQ ID NO: 3674500 - DNA, 25 bp, Homo sapien
ctgcactggttacaccacctccaac

SEQ ID NO: 3674501 - DNA, 25 bp, Homo sapien
gacattcattgtgatccagcacctc

SEQ ID NO: 3674502 - DNA, 25 bp, Homo sapien
cctttaagacttcatagtcaaagac

SEQ ID NO: 3674503 - DNA, 25 bp, Homo sapien
ggcctttaagacttcatagtcaaag

SEQ ID NO: 3674504 - DNA, 25 bp, Homo sapien
gcctttaagacttcatagtcaaaga

SEQ ID NO: 3674505 - DNA, 25 bp, Homo sapien
tactcgagggtgaaaagcaacctgg

SEQ ID NO: 3674506 - DNA, 25 bp, Homo sapien
gcactgcactgagattaggaaacgt

SEQ ID NO: 3674507 - DNA, 25 bp, Homo sapien
tcaaagtggatcttcactagctagg

SEQ ID NO: 3674508 - DNA, 25 bp, Homo sapien
tccgaaggcactacataactgacgc

SEQ ID NO: 3674509 - DNA, 25 bp, Homo sapien
tttcctggacagtatatagtgatgt

SEQ ID NO: 3674510 - DNA, 25 bp, Homo sapien
ttacaaccccagtgatttaaagcag

SEQ ID NO: 3674511 - DNA, 25 bp, Homo sapien
agcttttgtcaggatgctagtggca

SEQ ID NO: 3674512 - DNA, 25 bp, Homo sapien
tagtggcatgtccttagtattagag

SEQ ID NO: 3674513 - DNA, 25 bp, Homo sapien
gcttcttaccttagctttccatgcc

SEQ ID NO: 3674514 - DNA, 25 bp, Homo sapien
tcttcctcagagataattctaatac

SEQ ID NO: 3674515 - DNA, 25 bp, Homo sapien
ttcaactaatacttttcctggacca

SEQ ID NO: 3674516 - DNA, 25 bp, Homo sapien
caaaaacctttgatgacatgctgcc

SEQ ID NO: 3674517 - DNA, 25 bp, Homo sapien
cctgaagtgggagttaaaagacaat

SEQ ID NO: 3674518 - DNA, 25 bp, Homo sapien
tagaagggtcatttggcagtagtca

SEQ ID NO: 3674519 - DNA, 25 bp, Homo sapien
tctggagtcatcaaagtggcaaggg

SEQ ID NO: 3674520 - DNA, 25 bp, Homo sapien
caaattacagagaagatagagccac

SEQ ID NO: 3674521 - DNA, 25 bp, Homo sapien
tttcaagacggagacgcgctctatt

SEQ ID NO: 3674522 - DNA, 25 bp, Homo sapien
tcaagacggagacgcgctctattgc

SEQ ID NO: 3674523 - DNA, 25 bp, Homo sapien
cagaggcttgttctaacacccaggc

SEQ ID NO: 3674524 - DNA, 25 bp, Homo sapien
ggagtgcaccacacgcatttcatta

SEQ ID NO: 3674525 - DNA, 25 bp, Homo sapien
tcatttcattatttcatttcatcat

SEQ ID NO: 3674526 - DNA, 25 bp, Homo sapien
ttcattatttcatttcatcatttca

SEQ ID NO: 3674527 - DNA, 25 bp, Homo sapien
gcacctggcatttcattattcattt

SEQ ID NO: 3674528 - DNA, 25 bp, Homo sapien
cacctggcatttcattattcatttc

SEQ ID NO: 3674529 - DNA, 25 bp, Homo sapien
tttcatttcgatggagactcgctcc

SEQ ID NO: 3674530 - DNA, 25 bp, Homo sapien
tttcgatggagactcgctccattac

SEQ ID NO: 3674531 - DNA, 25 bp, Homo sapien
catttcgatggagactcgctccatt

SEQ ID NO: 3674532 - DNA, 25 bp, Homo sapien
tcgatggagactcgctccattaccc

SEQ ID NO: 3674533 - DNA, 25 bp, Homo sapien
gatcttgcctcatggcaaccaccat

SEQ ID NO: 3674534 - DNA, 25 bp, Homo sapien
gtggcgcgatcttgcctcatggcaa

SEQ ID NO: 3674535 - DNA, 25 bp, Homo sapien
gcgcgatcttgcctcatggcaacca

SEQ ID NO: 3674536 - DNA, 25 bp, Homo sapien
accatctcctgggttcaagcgattc

SEQ ID NO: 3674537 - DNA, 25 bp, Homo sapien
gaagggctcaacatagtaagtacag

SEQ ID NO: 3674538 - DNA, 25 bp, Homo sapien
aaaaggaagggctcaacatagtaag

SEQ ID NO: 3674539 - DNA, 25 bp, Homo sapien
tgtactctagtctgagaccctgtca

SEQ ID NO: 3674540 - DNA, 25 bp, Homo sapien
catagtaagtacagagctattttaa

SEQ ID NO: 3674541 - DNA, 25 bp, Homo sapien
taccttcagcaataagcacgtaatg

SEQ ID NO: 3674542 - DNA, 25 bp, Homo sapien
tagatgagcaaggtattaggcggac

SEQ ID NO: 3674543 - DNA, 25 bp, Homo sapien
ccttaagaactgaccaaaatggctt

SEQ ID NO: 3674544 - DNA, 25 bp, Homo sapien
gctgttatgaacacgggcacactaa

SEQ ID NO: 3674545 - DNA, 25 bp, Homo sapien
agaaggggcagctgctgggcggcgg

SEQ ID NO: 3674546 - DNA, 25 bp, Homo sapien
gacgggatggcagccgggaaaaggc

SEQ ID NO: 3674547 - DNA, 25 bp, Homo sapien
tagacgggatggcagccgggaaaag

SEQ ID NO: 3674548 - DNA, 25 bp, Homo sapien
tcagaaggggcagctgctgggcggc

SEQ ID NO: 3674549 - DNA, 25 bp, Homo sapien
gcagcactgtgaacccctgacagca

SEQ ID NO: 3674550 - DNA, 25 bp, Homo sapien
tggagataacccacaagcagcactg

SEQ ID NO: 3674551 - DNA, 25 bp, Homo sapien
ccctgacagcaagcctttccagata

SEQ ID NO: 3674552 - DNA, 25 bp, Homo sapien
cagcaagcctttccagataaatacc

SEQ ID NO: 3674553 - DNA, 25 bp, Homo sapien
gatttggatgatagagagctttgtg

SEQ ID NO: 3674554 - DNA, 25 bp, Homo sapien
ggatgatagagagctttgtgtacaa

SEQ ID NO: 3674555 - DNA, 25 bp, Homo sapien
tcagcaggatttggatgatagagag

SEQ ID NO: 3674556 - DNA, 25 bp, Homo sapien
caggatttggatgatagagagcttt

SEQ ID NO: 3674557 - DNA, 25 bp, Homo sapien
aacatattcacagctacattctcag

SEQ ID NO: 3674558 - DNA, 25 bp, Homo sapien
tctgcttttgatagtataattggtg

SEQ ID NO: 3674559 - DNA, 25 bp, Homo sapien
taaatgtgagagtacaaggtaagat

SEQ ID NO: 3674560 - DNA, 25 bp, Homo sapien
aagattccagagtcaagtaaaacat

SEQ ID NO: 3674561 - DNA, 25 bp, Homo sapien
cacagaacggggaatccaaagccat

SEQ ID NO: 3674562 - DNA, 25 bp, Homo sapien
cacacagaacggggaatccaaagcc

SEQ ID NO: 3674563 - DNA, 25 bp, Homo sapien
cagaacggggaatccaaagccatct

SEQ ID NO: 3674564 - DNA, 25 bp, Homo sapien
aggagccagacagcagcacacagaa

SEQ ID NO: 3674565 - DNA, 25 bp, Homo sapien
gataaataatagttcagaaattact

SEQ ID NO: 3674566 - DNA, 25 bp, Homo sapien
gagatggcaacttggtgtgtcaccc

SEQ ID NO: 3674567 - DNA, 25 bp, Homo sapien
ccttcattctgagaaggtataatca

SEQ ID NO: 3674568 - DNA, 25 bp, Homo sapien
tgacttttggttatggctttttcca

SEQ ID NO: 3674569 - DNA, 25 bp, Homo sapien
tgaatggcggtaccttagaacaagg

SEQ ID NO: 3674570 - DNA, 25 bp, Homo sapien
tgttttaacatcagtcgacactcgt

SEQ ID NO: 3674571 - DNA, 25 bp, Homo sapien
attacgggcgcgcaacacatgccca

SEQ ID NO: 3674572 - DNA, 25 bp, Homo sapien
gagttggttggcagtatgaagtaaa

SEQ ID NO: 3674573 - DNA, 25 bp, Homo sapien
ggtttctattccattgagtgaaatg

SEQ ID NO: 3674574 - DNA, 25 bp, Homo sapien
tgccccagtgtatggcagattagaa

SEQ ID NO: 3674575 - DNA, 25 bp, Homo sapien
tgggtttctattccattgagtgaaa

SEQ ID NO: 3674576 - DNA, 25 bp, Homo sapien
gggtttctattccattgagtgaaat

SEQ ID NO: 3674577 - DNA, 25 bp, Homo sapien
tctcatccttggatgagcccgactt

SEQ ID NO: 3674578 - DNA, 25 bp, Homo sapien
aatctcatccttggatgagcccgac

SEQ ID NO: 3674579 - DNA, 25 bp, Homo sapien
atctcatccttggatgagcccgact

SEQ ID NO: 3674580 - DNA, 25 bp, Homo sapien
aaatctcatccttggatgagcccga

SEQ ID NO: 3674581 - DNA, 25 bp, Homo sapien
tccagcctgggcgacagagtgagac

SEQ ID NO: 3674582 - DNA, 25 bp, Homo sapien
agcctgggcgacagagtgagactcc

SEQ ID NO: 3674583 - DNA, 25 bp, Homo sapien
ccaagactgtgccacagaactccag

SEQ ID NO: 3674584 - DNA, 25 bp, Homo sapien
gccaagactgtgccacagaactcca

SEQ ID NO: 3674585 - DNA, 25 bp, Homo sapien
tatgaagtcctgtccctttagaagc

SEQ ID NO: 3674586 - DNA, 25 bp, Homo sapien
cctatgaagtcctgtccctttagaa

SEQ ID NO: 3674587 - DNA, 25 bp, Homo sapien
atgaagtcctgtccctttagaagcg

SEQ ID NO: 3674588 - DNA, 25 bp, Homo sapien
gccctatgaagtcctgtccctttag

SEQ ID NO: 3674589 - DNA, 25 bp, Homo sapien
gatgtgttgaaatgcgggaaaccac

SEQ ID NO: 3674590 - DNA, 25 bp, Homo sapien
aataacagcaggtttagaggaagag

SEQ ID NO: 3674591 - DNA, 25 bp, Homo sapien
tataactacaaaacggaccagaaga

SEQ ID NO: 3674592 - DNA, 25 bp, Homo sapien
caaataatgtcttccctaaaagtgg

SEQ ID NO: 3674593 - DNA, 25 bp, Homo sapien
gcaatgagactcaagagacctgcat

SEQ ID NO: 3674594 - DNA, 25 bp, Homo sapien
aagtgagcaatgagactcaagagac

SEQ ID NO: 3674595 - DNA, 25 bp, Homo sapien
gagacctgcatatgaatcaggaatg

SEQ ID NO: 3674596 - DNA, 25 bp, Homo sapien
gagactcaagagacctgcatatgaa

SEQ ID NO: 3674597 - DNA, 25 bp, Homo sapien
tgagacggagaaggtaagtaacctc

SEQ ID NO: 3674598 - DNA, 25 bp, Homo sapien
ttgtgaaaccaacaagcgctgagag

SEQ ID NO: 3674599 - DNA, 25 bp, Homo sapien
tccttctgtagtcacctacagactg

SEQ ID NO: 3674600 - DNA, 25 bp, Homo sapien
tgtagtcacctacagactgaagccc

SEQ ID NO: 3674601 - DNA, 25 bp, Homo sapien
taataggttgtgaaaccaacaagcg

SEQ ID NO: 3674602 - DNA, 25 bp, Homo sapien
tctcagattcagagggacacaccga

SEQ ID NO: 3674603 - DNA, 25 bp, Homo sapien
tgtggaggtcctcaccaacttcaac

SEQ ID NO: 3674604 - DNA, 25 bp, Homo sapien
gcatgtggaggtcctcaccaacttc

SEQ ID NO: 3674605 - DNA, 25 bp, Homo sapien
gccatgggcgctcctgccatcctgt

SEQ ID NO: 3674606 - DNA, 25 bp, Homo sapien
agttcctctggaatattgtgcttga

SEQ ID NO: 3674607 - DNA, 25 bp, Homo sapien
tgactctggattggcagaaaggtta

SEQ ID NO: 3674608 - DNA, 25 bp, Homo sapien
cctctggaatattgtgcttgactct

SEQ ID NO: 3674609 - DNA, 25 bp, Homo sapien
ctggaatattgtgcttgactctgga

SEQ ID NO: 3674610 - DNA, 25 bp, Homo sapien
gagttcctctggaatattgtgcttg

SEQ ID NO: 3674611 - DNA, 25 bp, Homo sapien
ggattggcagaagggttaaactcca

SEQ ID NO: 3674612 - DNA, 25 bp, Homo sapien
tattgtgcttgcctctggattggca

SEQ ID NO: 3674613 - DNA, 25 bp, Homo sapien
ctggattggcagaagggttaaactc

SEQ ID NO: 3674614 - DNA, 25 bp, Homo sapien
catgctctctaggtgtgagaagccc

SEQ ID NO: 3674615 - DNA, 25 bp, Homo sapien
cactgaagagtgagggacatggaat

SEQ ID NO: 3674616 - DNA, 25 bp, Homo sapien
tggacatggtgtctgcagcacaaaa

SEQ ID NO: 3674617 - DNA, 25 bp, Homo sapien
ggcaaaagctcctaccactgaagag

SEQ ID NO: 3674618 - DNA, 25 bp, Homo sapien
tttgtacagttgcttcttcttattt

SEQ ID NO: 3674619 - DNA, 25 bp, Homo sapien
atggtttgtacagttgcttcttctt

SEQ ID NO: 3674620 - DNA, 25 bp, Homo sapien
cagttgcttcttcttatttctacaa

SEQ ID NO: 3674621 - DNA, 25 bp, Homo sapien
ggtttgtacagttgcttcttcttat

SEQ ID NO: 3674622 - DNA, 25 bp, Homo sapien
gatgcggatgcccacgcactgactt

SEQ ID NO: 3674623 - DNA, 25 bp, Homo sapien
ccattggatgcggatgcccacgcac

SEQ ID NO: 3674624 - DNA, 25 bp, Homo sapien
tgcggatgcccacgcactgacttct

SEQ ID NO: 3674625 - DNA, 25 bp, Homo sapien
ttggatgcggatgcccacgcactga

SEQ ID NO: 3674626 - DNA, 25 bp, Homo sapien
tgttgactgaaacgcacagcagata

SEQ ID NO: 3674627 - DNA, 25 bp, Homo sapien
gaacacaagctgtattgttgactga

SEQ ID NO: 3674628 - DNA, 25 bp, Homo sapien
tgtattgttgactgaaacgcacagc

SEQ ID NO: 3674629 - DNA, 25 bp, Homo sapien
ttgtaagataatgctggatggctgt

SEQ ID NO: 3674630 - DNA, 25 bp, Homo sapien
tagtgcttcaagtagttttcatctc

SEQ ID NO: 3674631 - DNA, 25 bp, Homo sapien
gctaattttgtagagtgagtctcaa

SEQ ID NO: 3674632 - DNA, 25 bp, Homo sapien
cctgtaatattagcatgtgagatgg

SEQ ID NO: 3674633 - DNA, 25 bp, Homo sapien
tgctggaaaggaccaatgaccttat

SEQ ID NO: 3674634 - DNA, 25 bp, Homo sapien
aaaaaattcataacaatagatgtta

SEQ ID NO: 3674635 - DNA, 25 bp, Homo sapien
ctttgtgtgatatgatgaggtatct

SEQ ID NO: 3674636 - DNA, 25 bp, Homo sapien
atatgatgaggtatctccaaggtca

SEQ ID NO: 3674637 - DNA, 25 bp, Homo sapien
tatgatgaggtatctccaaggtcac

SEQ ID NO: 3674638 - DNA, 25 bp, Homo sapien
tgtgtgatatgatgaggtatctcca

SEQ ID NO: 3674639 - DNA, 25 bp, Homo sapien
cacttgccatgattatataaaagca

SEQ ID NO: 3674640 - DNA, 25 bp, Homo sapien
gaaagtaatacaaagtcattgcctg

SEQ ID NO: 3674641 - DNA, 25 bp, Homo sapien
ctggtttctcagcataaatcaaggc

SEQ ID NO: 3674642 - DNA, 25 bp, Homo sapien
taaaagcaaaagtgggtacaatggc

SEQ ID NO: 3674643 - DNA, 25 bp, Homo sapien
tcaggtatgctcaaagttctatctg

SEQ ID NO: 3674644 - DNA, 25 bp, Homo sapien
aggtatgctcaaagttctatctgca

SEQ ID NO: 3674645 - DNA, 25 bp, Homo sapien
tcatcaggtatgctcaaagttctat

SEQ ID NO: 3674646 - DNA, 25 bp, Homo sapien
tgttcatcaggtatgctcaaagttc

SEQ ID NO: 3674647 - DNA, 25 bp, Homo sapien
aaaattgggtagtggcttgcagggt

SEQ ID NO: 3674648 - DNA, 25 bp, Homo sapien
aaattgggtagtggcttgcagggtc

SEQ ID NO: 3674649 - DNA, 25 bp, Homo sapien
ctgtgtggaacaggaggaggaatgg

SEQ ID NO: 3674650 - DNA, 25 bp, Homo sapien
gatggaatggaggaggaatagttat

SEQ ID NO: 3674651 - DNA, 25 bp, Homo sapien
tggaatggaggaggaatagttattt

SEQ ID NO: 3674652 - DNA, 25 bp, Homo sapien
gaatggaggaggaatagttatttaa

SEQ ID NO: 3674653 - DNA, 25 bp, Homo sapien
ctgggagtcgatggaatggaggagg

SEQ ID NO: 3674654 - DNA, 25 bp, Homo sapien
tcgctttaagagcatgccctgttta

SEQ ID NO: 3674655 - DNA, 25 bp, Homo sapien
ttcgctttaagagcatgccctgttt

SEQ ID NO: 3674656 - DNA, 25 bp, Homo sapien
cttcgctttaagagcatgccctgtt

SEQ ID NO: 3674657 - DNA, 25 bp, Homo sapien
cctaagcttgaataataggtgagca

SEQ ID NO: 3674658 - DNA, 25 bp, Homo sapien
tcttcatataatcacctaagcttga

SEQ ID NO: 3674659 - DNA, 25 bp, Homo sapien
gatgtggctagggatggccactttc

SEQ ID NO: 3674660 - DNA, 25 bp, Homo sapien
atgtggctagggatggccactttcc

SEQ ID NO: 3674661 - DNA, 25 bp, Homo sapien
ttttactgctctcgcatgactgcag

SEQ ID NO: 3674662 - DNA, 25 bp, Homo sapien
ctgggacttgcttttactgctctcg

SEQ ID NO: 3674663 - DNA, 25 bp, Homo sapien
gcttttactgctctcgcatgactgc

SEQ ID NO: 3674664 - DNA, 25 bp, Homo sapien
gggacttgcttttactgctctcgca

SEQ ID NO: 3674665 - DNA, 25 bp, Homo sapien
ttcccacgcatgttttggatcgact

SEQ ID NO: 3674666 - DNA, 25 bp, Homo sapien
tcccacgcatgttttggatcgactg

SEQ ID NO: 3674667 - DNA, 25 bp, Homo sapien
cccacgcatgttttggatcgactgc

SEQ ID NO: 3674668 - DNA, 25 bp, Homo sapien
gttcccacgcatgttttggatcgac

SEQ ID NO: 3674669 - DNA, 25 bp, Homo sapien
ctggcccacttaggattctgggtct

SEQ ID NO: 3674670 - DNA, 25 bp, Homo sapien
tggcccacttaggattctgggtctc

SEQ ID NO: 3674671 - DNA, 25 bp, Homo sapien
gcccacttaggattctgggtctcac

SEQ ID NO: 3674672 - DNA, 25 bp, Homo sapien
ggcccacttaggattctgggtctca

SEQ ID NO: 3674673 - DNA, 25 bp, Homo sapien
tcagtgcagggtagtggggccagaa

SEQ ID NO: 3674674 - DNA, 25 bp, Homo sapien
ccagctccagagatcgcacacggga

SEQ ID NO: 3674675 - DNA, 25 bp, Homo sapien
ctccagagatcgcacacgggaaagg

SEQ ID NO: 3674676 - DNA, 25 bp, Homo sapien
cagtgcagggtagtggggccagaaa

SEQ ID NO: 3674677 - DNA, 25 bp, Homo sapien
gagactaacaaatccaccttggcag

SEQ ID NO: 3674678 - DNA, 25 bp, Homo sapien
gcatatttatgaactttatttcaaa

SEQ ID NO: 3674679 - DNA, 25 bp, Homo sapien
caaatccaccttggcagaaggacat

SEQ ID NO: 3674680 - DNA, 25 bp, Homo sapien
tggcagaaggacataaaatacgtct

SEQ ID NO: 3674681 - DNA, 25 bp, Homo sapien
ccctttgtaatatactcatgtgttg

SEQ ID NO: 3674682 - DNA, 25 bp, Homo sapien
ggaaaacaaccctgtcttgccagag

SEQ ID NO: 3674683 - DNA, 25 bp, Homo sapien
catgtgcagtgatctgtaaccctct

SEQ ID NO: 3674684 - DNA, 25 bp, Homo sapien
aaagctgtatgcgatctaaatcaag

SEQ ID NO: 3674685 - DNA, 25 bp, Homo sapien
tggtggatccctgtgccattacccc

SEQ ID NO: 3674686 - DNA, 25 bp, Homo sapien
taggcgtttatgaacagaaggcaag

SEQ ID NO: 3674687 - DNA, 25 bp, Homo sapien
gcttcagcagggatgtgtatggcca

SEQ ID NO: 3674688 - DNA, 25 bp, Homo sapien
gaaggcaagtcagggatggcaccaa

SEQ ID NO: 3674689 - DNA, 25 bp, Homo sapien
gtactgatcactatttgtcaaatgt

SEQ ID NO: 3674690 - DNA, 25 bp, Homo sapien
ttgtcaaatgttcttcgatttggga

SEQ ID NO: 3674691 - DNA, 25 bp, Homo sapien
cagtactgatcactatttgtcaaat

SEQ ID NO: 3674692 - DNA, 25 bp, Homo sapien
aaacagtactgatcactatttgtca

SEQ ID NO: 3674693 - DNA, 25 bp, Homo sapien
cggtggccttctcggtgcggtgggc

SEQ ID NO: 3674694 - DNA, 25 bp, Homo sapien
gtggccttctcggtgcggtgggcca

SEQ ID NO: 3674695 - DNA, 25 bp, Homo sapien
ggccttctcggtgcggtgggccagg

SEQ ID NO: 3674696 - DNA, 25 bp, Homo sapien
ctcggtggccttctcggtgcggtgg

SEQ ID NO: 3674697 - DNA, 25 bp, Homo sapien
gagacgccgctgtgacactaggccg

SEQ ID NO: 3674698 - DNA, 25 bp, Homo sapien
gccggtgttccaaggcttgaagctg

SEQ ID NO: 3674699 - DNA, 25 bp, Homo sapien
cactaggccgggaaatgccggtgtt

SEQ ID NO: 3674700 - DNA, 25 bp, Homo sapien
aatgccggtgttccaaggcttgaag

SEQ ID NO: 3674701 - DNA, 25 bp, Homo sapien
gttcagaactcccaaagctctgcgc

SEQ ID NO: 3674702 - DNA, 25 bp, Homo sapien
taggggttcagaactcccaaagctc

SEQ ID NO: 3674703 - DNA, 25 bp, Homo sapien
gggttcagaactcccaaagctctgc

SEQ ID NO: 3674704 - DNA, 25 bp, Homo sapien
cagaactcccaaagctctgcgccta

SEQ ID NO: 3674705 - DNA, 25 bp, Homo sapien
ggagtccttcaagttgagcaagctc

SEQ ID NO: 3674706 - DNA, 25 bp, Homo sapien
cgcccagaagcggtaaaacagcagc

SEQ ID NO: 3674707 - DNA, 25 bp, Homo sapien
aagagcgcccagaagcggtaaaaca

SEQ ID NO: 3674708 - DNA, 25 bp, Homo sapien
cccagaagcggtaaaacagcagcat

SEQ ID NO: 3674709 - DNA, 25 bp, Homo sapien
gaaggagtacatgcatcgctacagc

SEQ ID NO: 3674710 - DNA, 25 bp, Homo sapien
gggaaggagtacatgcatcgctaca

SEQ ID NO: 3674711 - DNA, 25 bp, Homo sapien
gagtacatgcatcgctacagccaca

SEQ ID NO: 3674712 - DNA, 25 bp, Homo sapien
aggagtacatgcatcgctacagcca

SEQ ID NO: 3674713 - DNA, 25 bp, Homo sapien
gggagaacatcagtgccgtctgtct

SEQ ID NO: 3674714 - DNA, 25 bp, Homo sapien
cagtgccgtctgtctggacgttcag

SEQ ID NO: 3674715 - DNA, 25 bp, Homo sapien
tgccgtctgtctggacgttcagtcc

SEQ ID NO: 3674716 - DNA, 25 bp, Homo sapien
aacatcagtgccgtctgtctggacg

SEQ ID NO: 3674717 - DNA, 25 bp, Homo sapien
ggcccagaagtctccatatgggatc

SEQ ID NO: 3674718 - DNA, 25 bp, Homo sapien
tctccatatgggatcctcaatgtct

SEQ ID NO: 3674719 - DNA, 25 bp, Homo sapien
cagaagtctccatatgggatcctca

SEQ ID NO: 3674720 - DNA, 25 bp, Homo sapien
gaatgctggcccagaagtctccata

SEQ ID NO: 3674721 - DNA, 25 bp, Homo sapien
aaggtgaagaggagtgagcaccagg

SEQ ID NO: 3674722 - DNA, 25 bp, Homo sapien
ccaggagcccaagctccatgagaag

SEQ ID NO: 3674723 - DNA, 25 bp, Homo sapien
ctggtgcagtggctgaaggtgaaga

SEQ ID NO: 3674724 - DNA, 25 bp, Homo sapien
catcaagtccctggtgcagtggctg

SEQ ID NO: 3674725 - DNA, 25 bp, Homo sapien
catagaccaggtggtcatgtcctat

SEQ ID NO: 3674726 - DNA, 25 bp, Homo sapien
tcaaggagaagaacctgtttgtcag

SEQ ID NO: 3674727 - DNA, 25 bp, Homo sapien
acctgtttgtcagcaccaccgtcat

SEQ ID NO: 3674728 - DNA, 25 bp, Homo sapien
agatcatagaccaggtggtcatgtc

SEQ ID NO: 3674729 - DNA, 25 bp, Homo sapien
ccgtccataggacgtctgagaagct

SEQ ID NO: 3674730 - DNA, 25 bp, Homo sapien
ggacgtctgagaagctgttgctgtt

SEQ ID NO: 3674731 - DNA, 25 bp, Homo sapien
tccataggacgtctgagaagctgtt

SEQ ID NO: 3674732 - DNA, 25 bp, Homo sapien
gtccataggacgtctgagaagctgt

SEQ ID NO: 3674733 - DNA, 25 bp, Homo sapien
cacatagcgacttcatgttgacgtc

SEQ ID NO: 3674734 - DNA, 25 bp, Homo sapien
gttgacgtcccccatcatgcagatg

SEQ ID NO: 3674735 - DNA, 25 bp, Homo sapien
tggcatctctcttagcaggctcatg

SEQ ID NO: 3674736 - DNA, 25 bp, Homo sapien
catgcagatgccgactacttcatgc

SEQ ID NO: 3674737 - DNA, 25 bp, Homo sapien
tgtacacgatgtgagccagggctcc

SEQ ID NO: 3674738 - DNA, 25 bp, Homo sapien
gaccagtacctgattgcgatctgca

SEQ ID NO: 3674739 - DNA, 25 bp, Homo sapien
cccagcatggtgcatcagttgagca

SEQ ID NO: 3674740 - DNA, 25 bp, Homo sapien
caacatgcgtgtcccaggctggcat

SEQ ID NO: 3674741 - DNA, 25 bp, Homo sapien
taggttccccacagaccccttcatc

SEQ ID NO: 3674742 - DNA, 25 bp, Homo sapien
ctcttttcatagtctaggttcccca

SEQ ID NO: 3674743 - DNA, 25 bp, Homo sapien
ttttcatagtctaggttccccacag

SEQ ID NO: 3674744 - DNA, 25 bp, Homo sapien
ttcatagtctaggttccccacagac

SEQ ID NO: 3674745 - DNA, 25 bp, Homo sapien
gaaattaccccattgactggaccca

SEQ ID NO: 3674746 - DNA, 25 bp, Homo sapien
cactgtggtgaaggaaacaatccag

SEQ ID NO: 3674747 - DNA, 25 bp, Homo sapien
tagagccgcaactatgtaggtagga

SEQ ID NO: 3674748 - DNA, 25 bp, Homo sapien
ccagacttatggtggaagttccagc

SEQ ID NO: 3674749 - DNA, 25 bp, Homo sapien
catgagctaccgtggccagcttttt

SEQ ID NO: 3674750 - DNA, 25 bp, Homo sapien
tcaaccttcttacctcaagtgattc

SEQ ID NO: 3674751 - DNA, 25 bp, Homo sapien
agctaccgtggccagctttttttct

SEQ ID NO: 3674752 - DNA, 25 bp, Homo sapien
ctaccgtggccagctttttttctgt

SEQ ID NO: 3674753 - DNA, 25 bp, Homo sapien
aaatgttactccataggtttgtggc

SEQ ID NO: 3674754 - DNA, 25 bp, Homo sapien
ttactccataggtttgtggcagttc

SEQ ID NO: 3674755 - DNA, 25 bp, Homo sapien
actccataggtttgtggcagttctt

SEQ ID NO: 3674756 - DNA, 25 bp, Homo sapien
tgttactccataggtttgtggcagt

SEQ ID NO: 3674757 - DNA, 25 bp, Homo sapien
tgaggaggtgagtccatggcaccca

SEQ ID NO: 3674758 - DNA, 25 bp, Homo sapien
acttctcgccatttggctctggagg

SEQ ID NO: 3674759 - DNA, 25 bp, Homo sapien
caaggggctctttgatgatgaggat

SEQ ID NO: 3674760 - DNA, 25 bp, Homo sapien
cgacgaggacttctcgccatttggc

SEQ ID NO: 3674761 - DNA, 25 bp, Homo sapien
cctcaagttcaaggacaagcttctc

SEQ ID NO: 3674762 - DNA, 25 bp, Homo sapien
gccctcaagttcaaggacaagcttc

SEQ ID NO: 3674763 - DNA, 25 bp, Homo sapien
tgccctcaagttcaaggacaagctt

SEQ ID NO: 3674764 - DNA, 25 bp, Homo sapien
tcaagttcaaggacaagcttctcat

SEQ ID NO: 3674765 - DNA, 25 bp, Homo sapien
ggctgccactgtgtagggcctgctt

SEQ ID NO: 3674766 - DNA, 25 bp, Homo sapien
tgccactgtgtagggcctgcttaaa

SEQ ID NO: 3674767 - DNA, 25 bp, Homo sapien
ttaaagtcctttgcactctcagcat

SEQ ID NO: 3674768 - DNA, 25 bp, Homo sapien
tgcttaaagtcctttgcactctcag

SEQ ID NO: 3674769 - DNA, 25 bp, Homo sapien
cagcaaaatccgctgctgtgaagga

SEQ ID NO: 3674770 - DNA, 25 bp, Homo sapien
ggacgctctgtagatagagaatccc

SEQ ID NO: 3674771 - DNA, 25 bp, Homo sapien
ctgtgggcgaaggaaaaggcctggc

SEQ ID NO: 3674772 - DNA, 25 bp, Homo sapien
tgggagccttcgacgtaggcgctgt

SEQ ID NO: 3674773 - DNA, 25 bp, Homo sapien
tgatgtcacgtgacagaacccgcac

SEQ ID NO: 3674774 - DNA, 25 bp, Homo sapien
tgacagaacccgcacgtgatccgac

SEQ ID NO: 3674775 - DNA, 25 bp, Homo sapien
tgtcacgtgacagaacccgcacgtg

SEQ ID NO: 3674776 - DNA, 25 bp, Homo sapien
cacgtgacagaacccgcacgtgatc

SEQ ID NO: 3674777 - DNA, 25 bp, Homo sapien
gctcggtgggctccgaagctgccag

SEQ ID NO: 3674778 - DNA, 25 bp, Homo sapien
agctgccagcacacgccgaggactg

SEQ ID NO: 3674779 - DNA, 25 bp, Homo sapien
ggactgcagagccccggaagcctag

SEQ ID NO: 3674780 - DNA, 25 bp, Homo sapien
ctagccgcccggctcggtgggctcc

SEQ ID NO: 3674781 - DNA, 25 bp, Homo sapien
ccacggccgctcccacacgggctcc

SEQ ID NO: 3674782 - DNA, 25 bp, Homo sapien
cacggccgctcccacacgggctccg

SEQ ID NO: 3674783 - DNA, 25 bp, Homo sapien
ccagctcctggtcgggggtcgtccg

SEQ ID NO: 3674784 - DNA, 25 bp, Homo sapien
aacgtcgcgtctgggccacggtcag

SEQ ID NO: 3674785 - DNA, 25 bp, Homo sapien
cagggtggcattctcgggggctaaa

SEQ ID NO: 3674786 - DNA, 25 bp, Homo sapien
ccggggactgccagggtggcattct

SEQ ID NO: 3674787 - DNA, 25 bp, Homo sapien
cccatgaagggaacgtcgcgtctgg

SEQ ID NO: 3674788 - DNA, 25 bp, Homo sapien
ctagtgcccgagcaatccctcagtg

SEQ ID NO: 3674789 - DNA, 25 bp, Homo sapien
cggaaacggatctcccctccggatg

SEQ ID NO: 3674790 - DNA, 25 bp, Homo sapien
cgagcaatccctcagtgtggcggaa

SEQ ID NO: 3674791 - DNA, 25 bp, Homo sapien
tcagtgtggcggaaacggatctccc

SEQ ID NO: 3674792 - DNA, 25 bp, Homo sapien
tagtttgctgtgagaattcctgtag

SEQ ID NO: 3674793 - DNA, 25 bp, Homo sapien
tcattgaagacattatgcaggcgac

SEQ ID NO: 3674794 - DNA, 25 bp, Homo sapien
tcatgggtcctagagatagtttgct

SEQ ID NO: 3674795 - DNA, 25 bp, Homo sapien
tgcaggcgacaatctgtggctttgg

SEQ ID NO: 3674796 - DNA, 25 bp, Homo sapien
cgacaaaagatggaagcaccgaagt

SEQ ID NO: 3674797 - DNA, 25 bp, Homo sapien
gaatgaccccaatcaacaagtgaaa

SEQ ID NO: 3674798 - DNA, 25 bp, Homo sapien
cagatcacgccacaacaaaggcagt

SEQ ID NO: 3674799 - DNA, 25 bp, Homo sapien
tccagagggtctaaccaggtaaaca

SEQ ID NO: 3674800 - DNA, 25 bp, Homo sapien
aacctttgccagcaatggctcctgt

SEQ ID NO: 3674801 - DNA, 25 bp, Homo sapien
acctttgccagcaatggctcctgtc

SEQ ID NO: 3674802 - DNA, 25 bp, Homo sapien
gcctcagccttgagtactggctcct

SEQ ID NO: 3674803 - DNA, 25 bp, Homo sapien
cctcagccttgagtactggctcctc

SEQ ID NO: 3674804 - DNA, 25 bp, Homo sapien
tgcctcagccttgagtactggctcc

SEQ ID NO: 3674805 - DNA, 25 bp, Homo sapien
tcagccttgagtactggctcctcca

SEQ ID NO: 3674806 - DNA, 25 bp, Homo sapien
ttagcatcatcttcctcggagtctg

SEQ ID NO: 3674807 - DNA, 25 bp, Homo sapien
gttccacccgcccattagcatcatc

SEQ ID NO: 3674808 - DNA, 25 bp, Homo sapien
gcccattagcatcatcttcctcgga

SEQ ID NO: 3674809 - DNA, 25 bp, Homo sapien
ggatcagttccacccgcccattagc

SEQ ID NO: 3674810 - DNA, 25 bp, Homo sapien
tttgacccaatgagatatggtaaag

SEQ ID NO: 3674811 - DNA, 25 bp, Homo sapien
caatgagatatggtaaaggacgatc

SEQ ID NO: 3674812 - DNA, 25 bp, Homo sapien
catcttcttgttccatgaacagctt

SEQ ID NO: 3674813 - DNA, 25 bp, Homo sapien
ggtaaaggacgatcaatgtatagat

SEQ ID NO: 3674814 - DNA, 25 bp, Homo sapien
ctcagtgtccacaatactgccacga

SEQ ID NO: 3674815 - DNA, 25 bp, Homo sapien
actgccacgatcactgcctacagag

SEQ ID NO: 3674816 - DNA, 25 bp, Homo sapien
gtccacaatactgccacgatcactg

SEQ ID NO: 3674817 - DNA, 25 bp, Homo sapien
acaatactgccacgatcactgccta

SEQ ID NO: 3674818 - DNA, 25 bp, Homo sapien
gacctggtcataccaaacagccctt

SEQ ID NO: 3674819 - DNA, 25 bp, Homo sapien
acctggtcataccaaacagccctta

SEQ ID NO: 3674820 - DNA, 25 bp, Homo sapien
tgacctggtcataccaaacagccct

SEQ ID NO: 3674821 - DNA, 25 bp, Homo sapien
cgtgacctggtcataccaaacagcc

SEQ ID NO: 3674822 - DNA, 25 bp, Homo sapien
cctgctgtcaggtttttctttggag

SEQ ID NO: 3674823 - DNA, 25 bp, Homo sapien
ttcctgctgtcaggtttttctttgg

SEQ ID NO: 3674824 - DNA, 25 bp, Homo sapien
tcatttcctgctgtcaggtttttct

SEQ ID NO: 3674825 - DNA, 25 bp, Homo sapien
atttcctgctgtcaggtttttcttt

SEQ ID NO: 3674826 - DNA, 25 bp, Homo sapien
actatgatgggcaaaatcttcatct

SEQ ID NO: 3674827 - DNA, 25 bp, Homo sapien
attgtcactatgatgggcaaaatct

SEQ ID NO: 3674828 - DNA, 25 bp, Homo sapien
ttgttcattgtcactatgatgggca

SEQ ID NO: 3674829 - DNA, 25 bp, Homo sapien
ccggttttgttcattgtcactatga

SEQ ID NO: 3674830 - DNA, 25 bp, Homo sapien
tccttctcagagtcagcgaaaaggt

SEQ ID NO: 3674831 - DNA, 25 bp, Homo sapien
agtcagcgaaaaggtcacagccatc

SEQ ID NO: 3674832 - DNA, 25 bp, Homo sapien
cttctcagagtcagcgaaaaggtca

SEQ ID NO: 3674833 - DNA, 25 bp, Homo sapien
tcctccttctcagagtcagcgaaaa

SEQ ID NO: 3674834 - DNA, 25 bp, Homo sapien
catctgcaaacgatgtaggtctgct

SEQ ID NO: 3674835 - DNA, 25 bp, Homo sapien
cagctcatctgcaaacgatgtaggt

SEQ ID NO: 3674836 - DNA, 25 bp, Homo sapien
gctcatctgcaaacgatgtaggtct

SEQ ID NO: 3674837 - DNA, 25 bp, Homo sapien
tcatctgcaaacgatgtaggtctgc

SEQ ID NO: 3674838 - DNA, 25 bp, Homo sapien
cttcttctctttgagtgtcttccga

SEQ ID NO: 3674839 - DNA, 25 bp, Homo sapien
ctttgagtgtcttccgaggttttgc

SEQ ID NO: 3674840 - DNA, 25 bp, Homo sapien
ttccgaggttttgcttctcctgagg

SEQ ID NO: 3674841 - DNA, 25 bp, Homo sapien
cgtctgaaggagttctcctttcctt

SEQ ID NO: 3674842 - DNA, 25 bp, Homo sapien
caaatggcgagaagtcctcgtcggt

SEQ ID NO: 3674843 - DNA, 25 bp, Homo sapien
gagccaaatggcgagaagtcctcgt

SEQ ID NO: 3674844 - DNA, 25 bp, Homo sapien
agaagtcctcgtcggtcagcttggg

SEQ ID NO: 3674845 - DNA, 25 bp, Homo sapien
cacctccagagccaaatggcgagaa

SEQ ID NO: 3674846 - DNA, 25 bp, Homo sapien
cttgccgatcctggggggcttccgt

SEQ ID NO: 3674847 - DNA, 25 bp, Homo sapien
gaggctccagcttgccgatcctggg

SEQ ID NO: 3674848 - DNA, 25 bp, Homo sapien
tccagcttgccgatcctggggggct

SEQ ID NO: 3674849 - DNA, 25 bp, Homo sapien
aacagaggctccagcttgccgatcc

SEQ ID NO: 3674850 - DNA, 25 bp, Homo sapien
cgtcatcaagccacagcagtgggtc

SEQ ID NO: 3674851 - DNA, 25 bp, Homo sapien
aaaaatacagaaacagctcctgctg

SEQ ID NO: 3674852 - DNA, 25 bp, Homo sapien
ttctttccaggtttggatgatgaag

SEQ ID NO: 3674853 - DNA, 25 bp, Homo sapien
aaatacagaaacagctcctgctggg

SEQ ID NO: 3674854 - DNA, 25 bp, Homo sapien
attttctttccaggtttggatgatg

SEQ ID NO: 3674855 - DNA, 25 bp, Homo sapien
acggaggcagcaccaaacacatccg

SEQ ID NO: 3674856 - DNA, 25 bp, Homo sapien
ggcagcaccaaacacatccgtgtct

SEQ ID NO: 3674857 - DNA, 25 bp, Homo sapien
gaggcagcaccaaacacatccgtgt

SEQ ID NO: 3674858 - DNA, 25 bp, Homo sapien
gaacggaggcagcaccaaacacatc

SEQ ID NO: 3674859 - DNA, 25 bp, Homo sapien
gaaggtttgctgtggggtgccgaga

SEQ ID NO: 3674860 - DNA, 25 bp, Homo sapien
ttttagaaggtttgctgtggggtgc

SEQ ID NO: 3674861 - DNA, 25 bp, Homo sapien
tttagaaggtttgctgtggggtgcc

SEQ ID NO: 3674862 - DNA, 25 bp, Homo sapien
gcatccgtttgcactctttctagat

SEQ ID NO: 3674863 - DNA, 25 bp, Homo sapien
tccgtttgcactctttctagattaa

SEQ ID NO: 3674864 - DNA, 25 bp, Homo sapien
cactctttctagattaactaggcta

SEQ ID NO: 3674865 - DNA, 25 bp, Homo sapien
attctgcatccgtttgcactctttc

SEQ ID NO: 3674866 - DNA, 25 bp, Homo sapien
atctgtctgactcacagtggcttct

SEQ ID NO: 3674867 - DNA, 25 bp, Homo sapien
tcatctgtctgactcacagtggctt

SEQ ID NO: 3674868 - DNA, 25 bp, Homo sapien
tttcatctgtctgactcacagtggc

SEQ ID NO: 3674869 - DNA, 25 bp, Homo sapien
tattttcatctgtctgactcacagt

SEQ ID NO: 3674870 - DNA, 25 bp, Homo sapien
tctgaatgctgggccttaggtggtc

SEQ ID NO: 3674871 - DNA, 25 bp, Homo sapien
cacagccaggacacgacacaaagag

SEQ ID NO: 3674872 - DNA, 25 bp, Homo sapien
ttaggtggtcggcaggagaaagtca

SEQ ID NO: 3674873 - DNA, 25 bp, Homo sapien
ccaggacacgacacaaagagacaaa

SEQ ID NO: 3674874 - DNA, 25 bp, Homo sapien
cctcatctgaaaataagcctttttg

SEQ ID NO: 3674875 - DNA, 25 bp, Homo sapien
ctgaaaataagcctttttgagtctt

SEQ ID NO: 3674876 - DNA, 25 bp, Homo sapien
tctgatgagggcttgagatttttgc

SEQ ID NO: 3674877 - DNA, 25 bp, Homo sapien
gatttttgctggaagataaggtaac

SEQ ID NO: 3674878 - DNA, 25 bp, Homo sapien
agcagagacgcaccttttaacttac

SEQ ID NO: 3674879 - DNA, 25 bp, Homo sapien
tcatcaaacagggaaaccaacgtgg

SEQ ID NO: 3674880 - DNA, 25 bp, Homo sapien
accaacgtggggagcttgccaggca

SEQ ID NO: 3674881 - DNA, 25 bp, Homo sapien
acttactcgcactttgagaagaaaa

SEQ ID NO: 3674882 - DNA, 25 bp, Homo sapien
gcagatgctttctttttggagagct

SEQ ID NO: 3674883 - DNA, 25 bp, Homo sapien
tgctgaacaacagggcagatgcttt

SEQ ID NO: 3674884 - DNA, 25 bp, Homo sapien
aacagggcagatgctttctttttgg

SEQ ID NO: 3674885 - DNA, 25 bp, Homo sapien
acagggcagatgctttctttttgga

SEQ ID NO: 3674886 - DNA, 25 bp, Homo sapien
cctccaacacctgccacgatgtctc

SEQ ID NO: 3674887 - DNA, 25 bp, Homo sapien
caacacctgccacgatgtctcttcc

SEQ ID NO: 3674888 - DNA, 25 bp, Homo sapien
ccaacacctgccacgatgtctcttc

SEQ ID NO: 3674889 - DNA, 25 bp, Homo sapien
tccaacacctgccacgatgtctctt

SEQ ID NO: 3674890 - DNA, 25 bp, Homo sapien
tgtgaagcaggaatattccactggt

SEQ ID NO: 3674891 - DNA, 25 bp, Homo sapien
ctgtgaagcaggaatattccactgg

SEQ ID NO: 3674892 - DNA, 25 bp, Homo sapien
gtgaagcaggaatattccactggtc

SEQ ID NO: 3674893 - DNA, 25 bp, Homo sapien
ttcctcaaagagactggtctttttc

SEQ ID NO: 3674894 - DNA, 25 bp, Homo sapien
cttcctcaaagagactggtcttttt

SEQ ID NO: 3674895 - DNA, 25 bp, Homo sapien
tcctcaaagagactggtctttttca

SEQ ID NO: 3674896 - DNA, 25 bp, Homo sapien
ggtggagccatgaccgccctcgact

SEQ ID NO: 3674897 - DNA, 25 bp, Homo sapien
gtatgaaggtggagccatgaccgcc

SEQ ID NO: 3674898 - DNA, 25 bp, Homo sapien
agaaaatgctcagctgagggtgttg

SEQ ID NO: 3674899 - DNA, 25 bp, Homo sapien
gccctcgactccctacttcttctct

SEQ ID NO: 3674900 - DNA, 25 bp, Homo sapien
gaggagtgacactctctgggtcttc

SEQ ID NO: 3674901 - DNA, 25 bp, Homo sapien
ggagtgacactctctgggtcttctt

SEQ ID NO: 3674902 - DNA, 25 bp, Homo sapien
tcaaagaggagtgacactctctggg

SEQ ID NO: 3674903 - DNA, 25 bp, Homo sapien
gtcttcaaagaggagtgacactctc

SEQ ID NO: 3674904 - DNA, 25 bp, Homo sapien
taactgtactaggacctgtgtgacc

SEQ ID NO: 3674905 - DNA, 25 bp, Homo sapien
aaaccaggaccagtgttagtactcg

SEQ ID NO: 3674906 - DNA, 25 bp, Homo sapien
tctccactgatagagtataacggcc

SEQ ID NO: 3674907 - DNA, 25 bp, Homo sapien
aactggcctagtctaatgttagcag

SEQ ID NO: 3674908 - DNA, 25 bp, Homo sapien
gcatcttggccatatgggtaataga

SEQ ID NO: 3674909 - DNA, 25 bp, Homo sapien
gcaccgattacaacctgcctattgg

SEQ ID NO: 3674910 - DNA, 25 bp, Homo sapien
tattggatgaagcacaaaggcagca

SEQ ID NO: 3674911 - DNA, 25 bp, Homo sapien
aaaccgggcctatgaacgaaagctg

SEQ ID NO: 3674912 - DNA, 25 bp, Homo sapien
aattttaatgactccttggcactct

SEQ ID NO: 3674913 - DNA, 25 bp, Homo sapien
gccacatcagttctcccaaatttta

SEQ ID NO: 3674914 - DNA, 25 bp, Homo sapien
ttcactccaagttgtgcctccttct

SEQ ID NO: 3674915 - DNA, 25 bp, Homo sapien
acttcactccaagttgtgcctcctt

SEQ ID NO: 3674916 - DNA, 25 bp, Homo sapien
gcttggttcctttgtcccatgggga

SEQ ID NO: 3674917 - DNA, 25 bp, Homo sapien
aggcttggttcctttgtcccatggg

SEQ ID NO: 3674918 - DNA, 25 bp, Homo sapien
cttggttcctttgtcccatggggat

SEQ ID NO: 3674919 - DNA, 25 bp, Homo sapien
tggttcctttgtcccatggggatga

SEQ ID NO: 3674920 - DNA, 25 bp, Homo sapien
cttggggtgggcatcaggatcgcgg

SEQ ID NO: 3674921 - DNA, 25 bp, Homo sapien
tggggtgggcatcaggatcgcggcc

SEQ ID NO: 3674922 - DNA, 25 bp, Homo sapien
ttggggtgggcatcaggatcgcggc

SEQ ID NO: 3674923 - DNA, 25 bp, Homo sapien
tcttcatcctggaagacacctgtgc

SEQ ID NO: 3674924 - DNA, 25 bp, Homo sapien
cttcatcctggaagacacctgtgct

SEQ ID NO: 3674925 - DNA, 25 bp, Homo sapien
ttttttggtgccagcaaaaaggtca

SEQ ID NO: 3674926 - DNA, 25 bp, Homo sapien
tttttggtgccagcaaaaaggtcaa

SEQ ID NO: 3674927 - DNA, 25 bp, Homo sapien
ttttggtgccagcaaaaaggtcaac

SEQ ID NO: 3674928 - DNA, 25 bp, Homo sapien
cttggcagagctgaaaagatcatca

SEQ ID NO: 3674929 - DNA, 25 bp, Homo sapien
atcatccccaaacaggctcccaaca

SEQ ID NO: 3674930 - DNA, 25 bp, Homo sapien
ggcagagctgaaaagatcatcatct

SEQ ID NO: 3674931 - DNA, 25 bp, Homo sapien
gacttggcagagctgaaaagatcat

SEQ ID NO: 3674932 - DNA, 25 bp, Homo sapien
atatgcctttttctttactaccttg

SEQ ID NO: 3674933 - DNA, 25 bp, Homo sapien
ttgaaagagtcaacagagtggtctt

SEQ ID NO: 3674934 - DNA, 25 bp, Homo sapien
ggtgtttccggcttccatatgcctt

SEQ ID NO: 3674935 - DNA, 25 bp, Homo sapien
tactaccttgaatggattcaggatg

SEQ ID NO: 3674936 - DNA, 25 bp, Homo sapien
agactgctgcagagtacggcccaac

SEQ ID NO: 3674937 - DNA, 25 bp, Homo sapien
ctgctgcagagtacggcccaacagc

SEQ ID NO: 3674938 - DNA, 25 bp, Homo sapien
tgcagagtacggcccaacagcaatg

SEQ ID NO: 3674939 - DNA, 25 bp, Homo sapien
cagagtacggcccaacagcaatgac

SEQ ID NO: 3674940 - DNA, 25 bp, Homo sapien
atccgagtggatggttctttggttt

SEQ ID NO: 3674941 - DNA, 25 bp, Homo sapien
ttgtatcttcccgatccgagtggat

SEQ ID NO: 3674942 - DNA, 25 bp, Homo sapien
ttggttttaaatggagcgagacctg

SEQ ID NO: 3674943 - DNA, 25 bp, Homo sapien
taaatggagcgagacctgatgagtc

SEQ ID NO: 3674944 - DNA, 25 bp, Homo sapien
caaggccgctgggttgatcgctaaa

SEQ ID NO: 3674945 - DNA, 25 bp, Homo sapien
gtgtctgcctgagctggaagatcaa

SEQ ID NO: 3674946 - DNA, 25 bp, Homo sapien
caaaacaggctttacttcagagatc

SEQ ID NO: 3674947 - DNA, 25 bp, Homo sapien
caggcacactttccagaccgtggct

SEQ ID NO: 3674948 - DNA, 25 bp, Homo sapien
gggtctgcggtctacgcttccctct

SEQ ID NO: 3674949 - DNA, 25 bp, Homo sapien
ccatcagcccactgtgcaatgggtc

SEQ ID NO: 3674950 - DNA, 25 bp, Homo sapien
atttggggaaatggcgccatcagcc

SEQ ID NO: 3674951 - DNA, 25 bp, Homo sapien
agccgcctagctgcacgggtctgcg

SEQ ID NO: 3674952 - DNA, 25 bp, Homo sapien
ggtgggttggcaggattctctgcta

SEQ ID NO: 3674953 - DNA, 25 bp, Homo sapien
gttggcaggattctctgctatcttt

SEQ ID NO: 3674954 - DNA, 25 bp, Homo sapien
tgggttggcaggattctctgctatc

SEQ ID NO: 3674955 - DNA, 25 bp, Homo sapien
gggttggcaggattctctgctatct

SEQ ID NO: 3674956 - DNA, 25 bp, Homo sapien
cctagagcaggaaacatggggctct

SEQ ID NO: 3674957 - DNA, 25 bp, Homo sapien
tgatctgtaaagaggtcatcctcat

SEQ ID NO: 3674958 - DNA, 25 bp, Homo sapien
tgttaatatgacatcctgctgacta

SEQ ID NO: 3674959 - DNA, 25 bp, Homo sapien
ttggtttagcagactgaaagagatc

SEQ ID NO: 3674960 - DNA, 25 bp, Homo sapien
gcaaagatatcaatgttatcatcaa

SEQ ID NO: 3674961 - DNA, 25 bp, Homo sapien
ttgcttccgtagcaaatatatcatc

SEQ ID NO: 3674962 - DNA, 25 bp, Homo sapien
gagggtttaattgcttccgtagcaa

SEQ ID NO: 3674963 - DNA, 25 bp, Homo sapien
ggtttaattgcttccgtagcaaata

SEQ ID NO: 3674964 - DNA, 25 bp, Homo sapien
tacaaagaaatcgtgcacaccactg

SEQ ID NO: 3674965 - DNA, 25 bp, Homo sapien
cagagcacacggcttgctggaggca

SEQ ID NO: 3674966 - DNA, 25 bp, Homo sapien
gagttcccttctgcactccatgtgg

SEQ ID NO: 3674967 - DNA, 25 bp, Homo sapien
ggaaggagatctctatgtactgaca

SEQ ID NO: 3674968 - DNA, 25 bp, Homo sapien
taaaacactaacctagaactcaagc

SEQ ID NO: 3674969 - DNA, 25 bp, Homo sapien
cacacacaggtttctcttggagcac

SEQ ID NO: 3674970 - DNA, 25 bp, Homo sapien
tctggtaacagcatggagtacccta

SEQ ID NO: 3674971 - DNA, 25 bp, Homo sapien
taaattttatgatcacacacaggtt

SEQ ID NO: 3674972 - DNA, 25 bp, Homo sapien
tcaaatcttggttcaggtgcggcct

SEQ ID NO: 3674973 - DNA, 25 bp, Homo sapien
gtgcggcctgtgcagatcggctttt

SEQ ID NO: 3674974 - DNA, 25 bp, Homo sapien
gtttggttgtcttagcctggatacc

SEQ ID NO: 3674975 - DNA, 25 bp, Homo sapien
caaagatgttggacaccttgtgttc

SEQ ID NO: 3674976 - DNA, 25 bp, Homo sapien
caagtacattgggtgaacgatgagc

SEQ ID NO: 3674977 - DNA, 25 bp, Homo sapien
ccaagtacattgggtgaacgatgag

SEQ ID NO: 3674978 - DNA, 25 bp, Homo sapien
accaagtacattgggtgaacgatga

SEQ ID NO: 3674979 - DNA, 25 bp, Homo sapien
ttccctgcccatgaaagccacaaag

SEQ ID NO: 3674980 - DNA, 25 bp, Homo sapien
gaagcatattatggccccagcaagg

SEQ ID NO: 3674981 - DNA, 25 bp, Homo sapien
caaggctaactaaatcaaactgtgg

SEQ ID NO: 3674982 - DNA, 25 bp, Homo sapien
tgctcccatattgctaagactcatg

SEQ ID NO: 3674983 - DNA, 25 bp, Homo sapien
caaaatatgacagtgggggggccac

SEQ ID NO: 3674984 - DNA, 25 bp, Homo sapien
acaaaatatgacagtgggggggcca

SEQ ID NO: 3674985 - DNA, 25 bp, Homo sapien
agcagtctgcctgacaacagcgact

SEQ ID NO: 3674986 - DNA, 25 bp, Homo sapien
gacaacagcgactcggagatctcaa

SEQ ID NO: 3674987 - DNA, 25 bp, Homo sapien
tgctcctccaagaccaagcagggct

SEQ ID NO: 3674988 - DNA, 25 bp, Homo sapien
ttgctcctccaagaccaagcagggc

SEQ ID NO: 3674989 - DNA, 25 bp, Homo sapien
ccaggtacctatacacttgaggcca

SEQ ID NO: 3674990 - DNA, 25 bp, Homo sapien
catccaggtacctatacacttgagg

SEQ ID NO: 3674991 - DNA, 25 bp, Homo sapien
tacctatacacttgaggccaccaag

SEQ ID NO: 3674992 - DNA, 25 bp, Homo sapien
ggtacctatacacttgaggccacca

SEQ ID NO: 3674993 - DNA, 25 bp, Homo sapien
tgcttctcctcaggagtagaaatca

SEQ ID NO: 3674994 - DNA, 25 bp, Homo sapien
caatatcccaaaagaaccaaggttg

SEQ ID NO: 3674995 - DNA, 25 bp, Homo sapien
aaccccgttcagcattaattgtgct

SEQ ID NO: 3674996 - DNA, 25 bp, Homo sapien
gctggaacttccaccgtaagtctgg

SEQ ID NO: 3674997 - DNA, 25 bp, Homo sapien
tcatgtacactactgtgctcctcct

SEQ ID NO: 3674998 - DNA, 25 bp, Homo sapien
tcacatcatgtacactactgtgctc

SEQ ID NO: 3674999 - DNA, 25 bp, Homo sapien
cctgactcacatcatgtacactact

SEQ ID NO: 3675000 - DNA, 25 bp, Homo sapien
cccattcaaaggcggccacgtggga

SEQ ID NO: 3675001 - DNA, 25 bp, Homo sapien
tggccaggctgaccacaaggatgca

SEQ ID NO: 3675002 - DNA, 25 bp, Homo sapien
ggccaggctgaccacaaggatgcag

SEQ ID NO: 3675003 - DNA, 25 bp, Homo sapien
tctcagggaccacggtggtgacctt

SEQ ID NO: 3675004 - DNA, 25 bp, Homo sapien
ctctcagggaccacggtggtgacct

SEQ ID NO: 3675005 - DNA, 25 bp, Homo sapien
ctcagggaccacggtggtgaccttg

SEQ ID NO: 3675006 - DNA, 25 bp, Homo sapien
cctactaagggaaatgacatagagg

SEQ ID NO: 3675007 - DNA, 25 bp, Homo sapien
catgagcctactaagggaaatgaca

SEQ ID NO: 3675008 - DNA, 25 bp, Homo sapien
gaaatgacatagagggacagtatgg

SEQ ID NO: 3675009 - DNA, 25 bp, Homo sapien
atctagcatgatgggggaagtcagc

SEQ ID NO: 3675010 - DNA, 25 bp, Homo sapien
gactgctccgagatgttgactttca

SEQ ID NO: 3675011 - DNA, 25 bp, Homo sapien
gagcaggttcatggccgagatgccc

SEQ ID NO: 3675012 - DNA, 25 bp, Homo sapien
gatatgaagatggtattggtgccac

SEQ ID NO: 3675013 - DNA, 25 bp, Homo sapien
gactttcatgtacttatgacagcag

SEQ ID NO: 3675014 - DNA, 25 bp, Homo sapien
ctataggacatgaccacctggtcta

SEQ ID NO: 3675015 - DNA, 25 bp, Homo sapien
gacatgaccacctggtctatgatct

SEQ ID NO: 3675016 - DNA, 25 bp, Homo sapien
taggacatgaccacctggtctatga

SEQ ID NO: 3675017 - DNA, 25 bp, Homo sapien
tgaccacctggtctatgatctccag

SEQ ID NO: 3675018 - DNA, 25 bp, Homo sapien
cttgaccttgtttctgtccggaagc

SEQ ID NO: 3675019 - DNA, 25 bp, Homo sapien
ttgaccttgtttctgtccggaagca

SEQ ID NO: 3675020 - DNA, 25 bp, Homo sapien
ccaagaggatgtggttgaaagcatg

SEQ ID NO: 3675021 - DNA, 25 bp, Homo sapien
tatgccgggatatgtccttgatggc

SEQ ID NO: 3675022 - DNA, 25 bp, Homo sapien
gatagttgtgcctgatatgccggga

SEQ ID NO: 3675023 - DNA, 25 bp, Homo sapien
aacttcttgtcaaagtgggaccaca

SEQ ID NO: 3675024 - DNA, 25 bp, Homo sapien
ccgagcttgctcaacttgaaggact

SEQ ID NO: 3675025 - DNA, 25 bp, Homo sapien
ttcctcatggacctgtcgaagattt

SEQ ID NO: 3675026 - DNA, 25 bp, Homo sapien
gacctgtcgaagatttcctgctcct

SEQ ID NO: 3675027 - DNA, 25 bp, Homo sapien
gttctggttgatcccgagcttgctc

SEQ ID NO: 3675028 - DNA, 25 bp, Homo sapien
cgtcaggcagcggaaagtgccagga

SEQ ID NO: 3675029 - DNA, 25 bp, Homo sapien
ggaatgagtccaccgacttgtagct

SEQ ID NO: 3675030 - DNA, 25 bp, Homo sapien
ctgcaagggcgtcaggcagcggaaa

SEQ ID NO: 3675031 - DNA, 25 bp, Homo sapien
ccgacttgtagctgagctgcaaggg

SEQ ID NO: 3675032 - DNA, 25 bp, Homo sapien
tatcaccagtgggaccattgaaaac

SEQ ID NO: 3675033 - DNA, 25 bp, Homo sapien
ttcctccttgtaatgatgagtgcca

SEQ ID NO: 3675034 - DNA, 25 bp, Homo sapien
ccttgtaatgatgagtgccatcaca

SEQ ID NO: 3675035 - DNA, 25 bp, Homo sapien
tcttgtttatcaccagtgggaccat

SEQ ID NO: 3675036 - DNA, 25 bp, Homo sapien
gtgacctggggccaagaccgccaac

SEQ ID NO: 3675037 - DNA, 25 bp, Homo sapien
ccttatctgctttagcttagattcc

SEQ ID NO: 3675038 - DNA, 25 bp, Homo sapien
ctctttggacttgtgccttatctgc

SEQ ID NO: 3675039 - DNA, 25 bp, Homo sapien
aagaccgccaacctctttggacttg

SEQ ID NO: 3675040 - DNA, 25 bp, Homo sapien
tcttacgttccaactcagcctttaa

SEQ ID NO: 3675041 - DNA, 25 bp, Homo sapien
gctgcttcttacgttccaactcagc

SEQ ID NO: 3675042 - DNA, 25 bp, Homo sapien
tccaactcagcctttaattcacttt

SEQ ID NO: 3675043 - DNA, 25 bp, Homo sapien
gggaagagtcctcccgcctgcaact

SEQ ID NO: 3675044 - DNA, 25 bp, Homo sapien
cttcttgcacaggagcaacagcttc

SEQ ID NO: 3675045 - DNA, 25 bp, Homo sapien
tgggggattctggagttagccccat

SEQ ID NO: 3675046 - DNA, 25 bp, Homo sapien
caatgggggattctggagttagccc

SEQ ID NO: 3675047 - DNA, 25 bp, Homo sapien
gacaatgggggattctggagttagc

SEQ ID NO: 3675048 - DNA, 25 bp, Homo sapien
aggaggagggacaatgggggattct

SEQ ID NO: 3675049 - DNA, 25 bp, Homo sapien
tctcgaggaggaaagtcgacttgcg

SEQ ID NO: 3675050 - DNA, 25 bp, Homo sapien
cgacttgcgtgattttagccattcc

SEQ ID NO: 3675051 - DNA, 25 bp, Homo sapien
tgggttgagccataactggagtctg

SEQ ID NO: 3675052 - DNA, 25 bp, Homo sapien
cctttgtatacgtgacaatttctcg

SEQ ID NO: 3675053 - DNA, 25 bp, Homo sapien
tcaggttcaataggtagtttaggag

SEQ ID NO: 3675054 - DNA, 25 bp, Homo sapien
ggttcaataggtagtttaggagcca

SEQ ID NO: 3675055 - DNA, 25 bp, Homo sapien
tcttcaggttcaataggtagtttag

SEQ ID NO: 3675056 - DNA, 25 bp, Homo sapien
tcaataggtagtttaggagccacta

SEQ ID NO: 3675057 - DNA, 25 bp, Homo sapien
gttaatctgctcagaaagagctctt

SEQ ID NO: 3675058 - DNA, 25 bp, Homo sapien
acttaaaaattcctcagagtgcaag

SEQ ID NO: 3675059 - DNA, 25 bp, Homo sapien
caattcttgtagaatggtcaaagaa

SEQ ID NO: 3675060 - DNA, 25 bp, Homo sapien
aaaattcctcagagtgcaagatttg

SEQ ID NO: 3675061 - DNA, 25 bp, Homo sapien
ctctccttctttgtcttccaaatct

SEQ ID NO: 3675062 - DNA, 25 bp, Homo sapien
ttctttgtcttccaaatctctccca

SEQ ID NO: 3675063 - DNA, 25 bp, Homo sapien
ctgcttgaatctctccttctttgtc

SEQ ID NO: 3675064 - DNA, 25 bp, Homo sapien
tccttctttgtcttccaaatctctc

SEQ ID NO: 3675065 - DNA, 25 bp, Homo sapien
gtcaaaaaattgtcaatttaatgac

SEQ ID NO: 3675066 - DNA, 25 bp, Homo sapien
caacgttcgtcaaaaaattgtcaat

SEQ ID NO: 3675067 - DNA, 25 bp, Homo sapien
cgtcaaaaaattgtcaatttaatga

SEQ ID NO: 3675068 - DNA, 25 bp, Homo sapien
tcgtcaaaaaattgtcaatttaatg

SEQ ID NO: 3675069 - DNA, 25 bp, Homo sapien
catattccatacaagggccacacca

SEQ ID NO: 3675070 - DNA, 25 bp, Homo sapien
attgttgttataggaagccacgagt

SEQ ID NO: 3675071 - DNA, 25 bp, Homo sapien
ggccacaccatcaggctcatgaggg

SEQ ID NO: 3675072 - DNA, 25 bp, Homo sapien
taggaagccacgagtaactccggat

SEQ ID NO: 3675073 - DNA, 25 bp, Homo sapien
ttcttttattgctacggttatccca

SEQ ID NO: 3675074 - DNA, 25 bp, Homo sapien
ggcctgaatatgtaccaccaacaac

SEQ ID NO: 3675075 - DNA, 25 bp, Homo sapien
tattgctacggttatcccaaagcac

SEQ ID NO: 3675076 - DNA, 25 bp, Homo sapien
acaagatttggatgaaattttgcaa

SEQ ID NO: 3675077 - DNA, 25 bp, Homo sapien
ccatcagtagagatgctaatcagat

SEQ ID NO: 3675078 - DNA, 25 bp, Homo sapien
tgtgagcattttgtgttccaacaac

SEQ ID NO: 3675079 - DNA, 25 bp, Homo sapien
gatgctaatcagattgtgagcattt

SEQ ID NO: 3675080 - DNA, 25 bp, Homo sapien
gattgtgagcattttgtgttccaac

SEQ ID NO: 3675081 - DNA, 25 bp, Homo sapien
tgctgtgtacacagaaccttcttca

SEQ ID NO: 3675082 - DNA, 25 bp, Homo sapien
tgtccaaagctttactgtccagtca

SEQ ID NO: 3675083 - DNA, 25 bp, Homo sapien
gattaccctccacagaaatgctggc

SEQ ID NO: 3675084 - DNA, 25 bp, Homo sapien
gtgggtaggtgaccacataacatca

SEQ ID NO: 3675085 - DNA, 25 bp, Homo sapien
tgtatgcatactacggctaaggaga

SEQ ID NO: 3675086 - DNA, 25 bp, Homo sapien
gcatgcaaatagtctcaggatctac

SEQ ID NO: 3675087 - DNA, 25 bp, Homo sapien
tccttgctgcattaaacccatggtt

SEQ ID NO: 3675088 - DNA, 25 bp, Homo sapien
caggtattcgggtagctgcttcctc

SEQ ID NO: 3675089 - DNA, 25 bp, Homo sapien
gcgagagagggtgggattatagtcc

SEQ ID NO: 3675090 - DNA, 25 bp, Homo sapien
gtgggattatagtccgacagctggc

SEQ ID NO: 3675091 - DNA, 25 bp, Homo sapien
agggtgggattatagtccgacagct

SEQ ID NO: 3675092 - DNA, 25 bp, Homo sapien
attatagtccgacagctggcaattg

SEQ ID NO: 3675093 - DNA, 25 bp, Homo sapien
gctgactgtcttcagtccaagggtg

SEQ ID NO: 3675094 - DNA, 25 bp, Homo sapien
ctcttaaagagctgactgtcttcag

SEQ ID NO: 3675095 - DNA, 25 bp, Homo sapien
taaagagctgactgtcttcagtcca

SEQ ID NO: 3675096 - DNA, 25 bp, Homo sapien
ctgtcttcagtccaagggtgtccat

SEQ ID NO: 3675097 - DNA, 25 bp, Homo sapien
tggaaatcttgcctcattggttaaa

SEQ ID NO: 3675098 - DNA, 25 bp, Homo sapien
agttcttccagattggcacctttcc

SEQ ID NO: 3675099 - DNA, 25 bp, Homo sapien
cttccagattggcacctttccagag

SEQ ID NO: 3675100 - DNA, 25 bp, Homo sapien
cttgcctcattggttaaagcagcca

SEQ ID NO: 3675101 - DNA, 25 bp, Homo sapien
gaatgacatgcggttttgaacaagc

SEQ ID NO: 3675102 - DNA, 25 bp, Homo sapien
cactctggcttgcaggggaatgaca

SEQ ID NO: 3675103 - DNA, 25 bp, Homo sapien
gggcagaggataccaaagcgtccca

SEQ ID NO: 3675104 - DNA, 25 bp, Homo sapien
ataccaaagcgtcccagcactctgg

SEQ ID NO: 3675105 - DNA, 25 bp, Homo sapien
cctatgggcaagtggctgcctaaca

SEQ ID NO: 3675106 - DNA, 25 bp, Homo sapien
aacccctatgggcaagtggctgcct

SEQ ID NO: 3675107 - DNA, 25 bp, Homo sapien
gggcaagtggctgcctaacaaggtt

SEQ ID NO: 3675108 - DNA, 25 bp, Homo sapien
cactctgaacccctatgggcaagtg

SEQ ID NO: 3675109 - DNA, 25 bp, Homo sapien
caccagagggattgttcgacatggc

SEQ ID NO: 3675110 - DNA, 25 bp, Homo sapien
tgttcgacatggcttgctcttcctt

SEQ ID NO: 3675111 - DNA, 25 bp, Homo sapien
gagggattgttcgacatggcttgct

SEQ ID NO: 3675112 - DNA, 25 bp, Homo sapien
tgacaccagagggattgttcgacat

SEQ ID NO: 3675113 - DNA, 25 bp, Homo sapien
cctgtcattgtcaggcctatgggaa

SEQ ID NO: 3675114 - DNA, 25 bp, Homo sapien
ggcttttgacctctggctggcgttt

SEQ ID NO: 3675115 - DNA, 25 bp, Homo sapien
cattacccgccttattggccaaggg

SEQ ID NO: 3675116 - DNA, 25 bp, Homo sapien
gagtttggccgaagtcctgtcattg

SEQ ID NO: 3675117 - DNA, 25 bp, Homo sapien
tatggtgacctacgaggtcctccca

SEQ ID NO: 3675118 - DNA, 25 bp, Homo sapien
gattcagtcccagattgtgcctcac

SEQ ID NO: 3675119 - DNA, 25 bp, Homo sapien
gagtacttggcatcctcctggttcc

SEQ ID NO: 3675120 - DNA, 25 bp, Homo sapien
tcttttacagcatgcccagggattg

SEQ ID NO: 3675121 - DNA, 25 bp, Homo sapien
cataatctttgtactgattggcagt

SEQ ID NO: 3675122 - DNA, 25 bp, Homo sapien
ggcagttgcttttgtcagatgctaa

SEQ ID NO: 3675123 - DNA, 25 bp, Homo sapien
caaaggtagtttatgacccacagac

SEQ ID NO: 3675124 - DNA, 25 bp, Homo sapien
taagtgggtatcagccaacataaga

SEQ ID NO: 3675125 - DNA, 25 bp, Homo sapien
gcaatattcgagttcctttgttaga

SEQ ID NO: 3675126 - DNA, 25 bp, Homo sapien
tcctttgttagatatgtgcttgcca

SEQ ID NO: 3675127 - DNA, 25 bp, Homo sapien
tcgagttcctttgttagatatgtgc

SEQ ID NO: 3675128 - DNA, 25 bp, Homo sapien
ctttgcaatattcgagttcctttgt

SEQ ID NO: 3675129 - DNA, 25 bp, Homo sapien
gctgctatgcccctactaaattcca

SEQ ID NO: 3675130 - DNA, 25 bp, Homo sapien
aatcccctgctgctatgcccctact

SEQ ID NO: 3675131 - DNA, 25 bp, Homo sapien
ggatcagaactttttctcccataga

SEQ ID NO: 3675132 - DNA, 25 bp, Homo sapien
ctcccatagatgctttcaaaatccc

SEQ ID NO: 3675133 - DNA, 25 bp, Homo sapien
ccccatcgccagctcttgactgatc

SEQ ID NO: 3675134 - DNA, 25 bp, Homo sapien
catcgccagctcttgactgatcact

SEQ ID NO: 3675135 - DNA, 25 bp, Homo sapien
tcgccagctcttgactgatcactgt

SEQ ID NO: 3675136 - DNA, 25 bp, Homo sapien
cagctcttgactgatcactgttgga

SEQ ID NO: 3675137 - DNA, 25 bp, Homo sapien
cagggtgacctcgttcgtctgttct

SEQ ID NO: 3675138 - DNA, 25 bp, Homo sapien
gggtgacctcgttcgtctgttctga

SEQ ID NO: 3675139 - DNA, 25 bp, Homo sapien
gacctcgttcgtctgttctgacact

SEQ ID NO: 3675140 - DNA, 25 bp, Homo sapien
ggcagggtgacctcgttcgtctgtt

SEQ ID NO: 3675141 - DNA, 25 bp, Homo sapien
tgacgggtatgtgaacttgagagcc

SEQ ID NO: 3675142 - DNA, 25 bp, Homo sapien
cctgggttctgacgggtatgtgaac

SEQ ID NO: 3675143 - DNA, 25 bp, Homo sapien
gaatgacttcctcgggcagcctttt

SEQ ID NO: 3675144 - DNA, 25 bp, Homo sapien
tgagagcctgatggaatgacttcct

SEQ ID NO: 3675145 - DNA, 25 bp, Homo sapien
gaccacagccctagaatttcttgtt

SEQ ID NO: 3675146 - DNA, 25 bp, Homo sapien
accacagccctagaatttcttgttc

SEQ ID NO: 3675147 - DNA, 25 bp, Homo sapien
ttaatagtcttgaccacagccctag

SEQ ID NO: 3675148 - DNA, 25 bp, Homo sapien
tttaatagtcttgaccacagcccta

SEQ ID NO: 3675149 - DNA, 25 bp, Homo sapien
gggcaggtcccaagcaacatgggtt

SEQ ID NO: 3675150 - DNA, 25 bp, Homo sapien
aagcaacatgggttcccaaagaggg

SEQ ID NO: 3675151 - DNA, 25 bp, Homo sapien
aactgccgttgccaggaagtttggg

SEQ ID NO: 3675152 - DNA, 25 bp, Homo sapien
gccagaactgccgttgccaggaagt

SEQ ID NO: 3675153 - DNA, 25 bp, Homo sapien
accaccatgtctggctaatttttgt

SEQ ID NO: 3675154 - DNA, 25 bp, Homo sapien
cataccaccatgtctggctaatttt

SEQ ID NO: 3675155 - DNA, 25 bp, Homo sapien
gtggcactctcagttcactgtaacc

SEQ ID NO: 3675156 - DNA, 25 bp, Homo sapien
taacctctgcctcctgggctcaagc

SEQ ID NO: 3675157 - DNA, 25 bp, Homo sapien
tatttttccttccacaccacagtta

SEQ ID NO: 3675158 - DNA, 25 bp, Homo sapien
cattctttcttggaccgccctattt

SEQ ID NO: 3675159 - DNA, 25 bp, Homo sapien
gccctatttttccttccacaccaca

SEQ ID NO: 3675160 - DNA, 25 bp, Homo sapien
tcattctttcttggaccgccctatt

SEQ ID NO: 3675161 - DNA, 25 bp, Homo sapien
tattattaaaagattgatagtttga

SEQ ID NO: 3675162 - DNA, 25 bp, Homo sapien
gattgatagtttgaaaagatatgta

SEQ ID NO: 3675163 - DNA, 25 bp, Homo sapien
tgatagtttgaaaagatatgtagat

SEQ ID NO: 3675164 - DNA, 25 bp, Homo sapien
atattattaaaagattgatagtttg

SEQ ID NO: 3675165 - DNA, 25 bp, Homo sapien
tgtacaagcgatgcttatactgttt

SEQ ID NO: 3675166 - DNA, 25 bp, Homo sapien
gcttatactgtttaattcaaaagat

SEQ ID NO: 3675167 - DNA, 25 bp, Homo sapien
aaactttcctgtacaagcgatgctt

SEQ ID NO: 3675168 - DNA, 25 bp, Homo sapien
tactgtttaattcaaaagataagaa

SEQ ID NO: 3675169 - DNA, 25 bp, Homo sapien
tgtgcctattgaagaaaagcaatgg

SEQ ID NO: 3675170 - DNA, 25 bp, Homo sapien
tatgctttatagctacctcgtttta

SEQ ID NO: 3675171 - DNA, 25 bp, Homo sapien
ttactaaacatagccctagccctga

SEQ ID NO: 3675172 - DNA, 25 bp, Homo sapien
gggtctccagattataaaggtcatg

SEQ ID NO: 3675173 - DNA, 25 bp, Homo sapien
atgatcacatggcagaaactgggag

SEQ ID NO: 3675174 - DNA, 25 bp, Homo sapien
actgggagagtgagaactggaatcc

SEQ ID NO: 3675175 - DNA, 25 bp, Homo sapien
gagtggaacacaacattacttctgg

SEQ ID NO: 3675176 - DNA, 25 bp, Homo sapien
aactagcacccttcaactgtcaggg

SEQ ID NO: 3675177 - DNA, 25 bp, Homo sapien
gcgtaaggtaattaaatccacacaa

SEQ ID NO: 3675178 - DNA, 25 bp, Homo sapien
agggagaatattgccttttcgataa

SEQ ID NO: 3675179 - DNA, 25 bp, Homo sapien
tattgccttttcgataaagagggaa

SEQ ID NO: 3675180 - DNA, 25 bp, Homo sapien
caaacacatataaatcggatctttg

SEQ ID NO: 3675181 - DNA, 25 bp, Homo sapien
ttgttccattacctaggcaggagtg

SEQ ID NO: 3675182 - DNA, 25 bp, Homo sapien
ggtcttgttccattacctaggcagg

SEQ ID NO: 3675183 - DNA, 25 bp, Homo sapien
gttcaagcacttaattgcccaattt

SEQ ID NO: 3675184 - DNA, 25 bp, Homo sapien
taaagtatctagacatgaacattct

SEQ ID NO: 3675185 - DNA, 25 bp, Homo sapien
atacatgtgcacattctttatgata

SEQ ID NO: 3675186 - DNA, 25 bp, Homo sapien
acatgtgcacattctttatgataga

SEQ ID NO: 3675187 - DNA, 25 bp, Homo sapien
cctcccatagagagtgtaacgtggg

SEQ ID NO: 3675188 - DNA, 25 bp, Homo sapien
gctagtggataaagccctcccatag

SEQ ID NO: 3675189 - DNA, 25 bp, Homo sapien
tgctgtaaatagtggctcctctgct

SEQ ID NO: 3675190 - DNA, 25 bp, Homo sapien
gagtcattcttgtgcgtcagggttg

SEQ ID NO: 3675191 - DNA, 25 bp, Homo sapien
ctcattgcctttaatcagccctggg

SEQ ID NO: 3675192 - DNA, 25 bp, Homo sapien
aatggtgtgtcattgcctgacgtgc

SEQ ID NO: 3675193 - DNA, 25 bp, Homo sapien
taaagctttagcaggtatcttcccg

SEQ ID NO: 3675194 - DNA, 25 bp, Homo sapien
cagtgggtgacagatcagtgccttt

SEQ ID NO: 3675195 - DNA, 25 bp, Homo sapien
ttggttggggcttggacctttgcca

SEQ ID NO: 3675196 - DNA, 25 bp, Homo sapien
ctaggacttgcacgatcgaagaatc

SEQ ID NO: 3675197 - DNA, 25 bp, Homo sapien
tggggcttggacctttgccagctca

SEQ ID NO: 3675198 - DNA, 25 bp, Homo sapien
ttgcacgatcgaagaatccccttgg

SEQ ID NO: 3675199 - DNA, 25 bp, Homo sapien
gaacgcatctgtagtgtcaagggaa

SEQ ID NO: 3675200 - DNA, 25 bp, Homo sapien
tccaactgggactcttaaacaaggc

SEQ ID NO: 3675201 - DNA, 25 bp, Homo sapien
taggaaacacgacacaaacgctaag

SEQ ID NO: 3675202 - DNA, 25 bp, Homo sapien
tttccaactgggtgctccaactggg

SEQ ID NO: 3675203 - DNA, 25 bp, Homo sapien
tgttccctgccaaagcatacaagaa

SEQ ID NO: 3675204 - DNA, 25 bp, Homo sapien
gttggacctaacacatttcaagtgc

SEQ ID NO: 3675205 - DNA, 25 bp, Homo sapien
gatgtccaatacaataggcactagc

SEQ ID NO: 3675206 - DNA, 25 bp, Homo sapien
tcctcagattacagaggaccatatg

SEQ ID NO: 3675207 - DNA, 25 bp, Homo sapien
gatcagtacagtcttcaaccagttg

SEQ ID NO: 3675208 - DNA, 25 bp, Homo sapien
cacttagtggatactgccatggata

SEQ ID NO: 3675209 - DNA, 25 bp, Homo sapien
tgagagtcagatacacctttgctgg

SEQ ID NO: 3675210 - DNA, 25 bp, Homo sapien
tatggtcgagaaatcctggcttaca

SEQ ID NO: 3675211 - DNA, 25 bp, Homo sapien
gctaaaactagttatgtggaggtga

SEQ ID NO: 3675212 - DNA, 25 bp, Homo sapien
gcacctagattagcgttgaacctgt

SEQ ID NO: 3675213 - DNA, 25 bp, Homo sapien
gagagagtccatctgtgggcatatc

SEQ ID NO: 3675214 - DNA, 25 bp, Homo sapien
agtctcagcgtgtctgatcagagca

SEQ ID NO: 3675215 - DNA, 25 bp, Homo sapien
tgcgtgtcacaagtgctattcaggc

SEQ ID NO: 3675216 - DNA, 25 bp, Homo sapien
tagttgaatcccctgtttgtgagtg

SEQ ID NO: 3675217 - DNA, 25 bp, Homo sapien
catggccgccttagtgttgctgaac

SEQ ID NO: 3675218 - DNA, 25 bp, Homo sapien
taatgagctcgttaatgcacatggc

SEQ ID NO: 3675219 - DNA, 25 bp, Homo sapien
tgtcccagcgccaaattatcaaagt

SEQ ID NO: 3675220 - DNA, 25 bp, Homo sapien
caaatattaactgagaaagccctac

SEQ ID NO: 3675221 - DNA, 25 bp, Homo sapien
tcttggttcaaagcagatttttaag

SEQ ID NO: 3675222 - DNA, 25 bp, Homo sapien
tatgcatttactctagaaggctacg

SEQ ID NO: 3675223 - DNA, 25 bp, Homo sapien
gcatcctgctttaatgatcaaatag

SEQ ID NO: 3675224 - DNA, 25 bp, Homo sapien
tgcatcctgctttaatgatcaaata

SEQ ID NO: 3675225 - DNA, 25 bp, Homo sapien
catcctgctttaatgatcaaatagg

SEQ ID NO: 3675226 - DNA, 25 bp, Homo sapien
ccgattaaaataccgcaatcagtgc

SEQ ID NO: 3675227 - DNA, 25 bp, Homo sapien
ggtgtgaaccgattaaaataccgca

SEQ ID NO: 3675228 - DNA, 25 bp, Homo sapien
aataccgcaatcagtgccaattcta

SEQ ID NO: 3675229 - DNA, 25 bp, Homo sapien
ctaacagacggtgtgaaccgattaa

SEQ ID NO: 3675230 - DNA, 25 bp, Homo sapien
ccgggagaggatcggcgcatccggc

SEQ ID NO: 3675231 - DNA, 25 bp, Homo sapien
cgtaagtgttgctccggagatgctg

SEQ ID NO: 3675232 - DNA, 25 bp, Homo sapien
cgcgcgcaaacttggtgccccagga

SEQ ID NO: 3675233 - DNA, 25 bp, Homo sapien
tgtcctagcaccagggcccggcaag

SEQ ID NO: 3675234 - DNA, 25 bp, Homo sapien
cttagctggtaaccacccagcagct

SEQ ID NO: 3675235 - DNA, 25 bp, Homo sapien
aacatgggagccacctgcatgggtc

SEQ ID NO: 3675236 - DNA, 25 bp, Homo sapien
accaacatgggagccacctgcatgg

SEQ ID NO: 3675237 - DNA, 25 bp, Homo sapien
gagcaccaacatgggagccacctgc

SEQ ID NO: 3675238 - DNA, 25 bp, Homo sapien
tcttctagagaacttactgctcctc

SEQ ID NO: 3675239 - DNA, 25 bp, Homo sapien
ctggttgaggatggcttggaatttc

SEQ ID NO: 3675240 - DNA, 25 bp, Homo sapien
tcctctcaccaatccaaccaggtgg

SEQ ID NO: 3675241 - DNA, 25 bp, Homo sapien
tggaatttcttgataggtgatgatg

SEQ ID NO: 3675242 - DNA, 25 bp, Homo sapien
cattctagctggtaaaagtcgggta

SEQ ID NO: 3675243 - DNA, 25 bp, Homo sapien
gtacctcagtgcatgcatggagcca

SEQ ID NO: 3675244 - DNA, 25 bp, Homo sapien
tcttcttggagccacacgttcttca

SEQ ID NO: 3675245 - DNA, 25 bp, Homo sapien
tgaggtgacactgcctctcatggta

SEQ ID NO: 3675246 - DNA, 25 bp, Homo sapien
ccaaagcaagttgggactggaattt

SEQ ID NO: 3675247 - DNA, 25 bp, Homo sapien
ttccaaagcaagttgggactggaat

SEQ ID NO: 3675248 - DNA, 25 bp, Homo sapien
tccaaagcaagttgggactggaatt

SEQ ID NO: 3675249 - DNA, 25 bp, Homo sapien
cttccaaagcaagttgggactggaa

SEQ ID NO: 3675250 - DNA, 25 bp, Homo sapien
ttggtggatgtctggctttggatgc

SEQ ID NO: 3675251 - DNA, 25 bp, Homo sapien
tatcatcaagatcaggggcacccat

SEQ ID NO: 3675252 - DNA, 25 bp, Homo sapien
agatcaggggcacccattatttcat

SEQ ID NO: 3675253 - DNA, 25 bp, Homo sapien
tcctgtgacctttggtggatgtctg

SEQ ID NO: 3675254 - DNA, 25 bp, Homo sapien
gcaagagacttgcaaccttcagtca

SEQ ID NO: 3675255 - DNA, 25 bp, Homo sapien
agcaggatcctgtgtgagagagagt

SEQ ID NO: 3675256 - DNA, 25 bp, Homo sapien
accaaagctagagaccatgcctggg

SEQ ID NO: 3675257 - DNA, 25 bp, Homo sapien
tgactgcagcaagagacttgcaacc

SEQ ID NO: 3675258 - DNA, 25 bp, Homo sapien
tgcagcattaagcaaaggcacttgg

SEQ ID NO: 3675259 - DNA, 25 bp, Homo sapien
gcattaagcaaaggcacttggtcac

SEQ ID NO: 3675260 - DNA, 25 bp, Homo sapien
tttctgcagcattaagcaaaggcac

SEQ ID NO: 3675261 - DNA, 25 bp, Homo sapien
ttaagcaaaggcacttggtcactct

SEQ ID NO: 3675262 - DNA, 25 bp, Homo sapien
tcaccatgacatctaactggcaagt

SEQ ID NO: 3675263 - DNA, 25 bp, Homo sapien
gggaactggcttcagtccagtactt

SEQ ID NO: 3675264 - DNA, 25 bp, Homo sapien
ccatgatgattgtcctgagcttaag

SEQ ID NO: 3675265 - DNA, 25 bp, Homo sapien
tgtggcagacttggcccatgatgat

SEQ ID NO: 3675266 - DNA, 25 bp, Homo sapien
caaaagggttcaagatatagatctc

SEQ ID NO: 3675267 - DNA, 25 bp, Homo sapien
aaaagggttcaagatatagatctcc

SEQ ID NO: 3675268 - DNA, 25 bp, Homo sapien
tcaacaaaagggttcaagatataga

SEQ ID NO: 3675269 - DNA, 25 bp, Homo sapien
aacaaaagggttcaagatatagatc

SEQ ID NO: 3675270 - DNA, 25 bp, Homo sapien
ttcaaataggtaaacagatatgtcc

SEQ ID NO: 3675271 - DNA, 25 bp, Homo sapien
catgcatttcagttaggcacagtgt

SEQ ID NO: 3675272 - DNA, 25 bp, Homo sapien
tctggtctgacctgtcaactgaagg

SEQ ID NO: 3675273 - DNA, 25 bp, Homo sapien
aacttagggctcacattcaaatagg

SEQ ID NO: 3675274 - DNA, 25 bp, Homo sapien
ccctggagtgtgatatcagcatact

SEQ ID NO: 3675275 - DNA, 25 bp, Homo sapien
cagcatacttttactctgagagttt

SEQ ID NO: 3675276 - DNA, 25 bp, Homo sapien
aaattccctggagtgtgatatcagc

SEQ ID NO: 3675277 - DNA, 25 bp, Homo sapien
tagaaaccaaattccctggagtgtg

SEQ ID NO: 3675278 - DNA, 25 bp, Homo sapien
agacaggagctatgggcactgttta

SEQ ID NO: 3675279 - DNA, 25 bp, Homo sapien
gagcctgtcctggtttcaggtaccc

SEQ ID NO: 3675280 - DNA, 25 bp, Homo sapien
agctatgggcactgtttatgtaggc

SEQ ID NO: 3675281 - DNA, 25 bp, Homo sapien
cctgcatgatgaattccagatgtct

SEQ ID NO: 3675282 - DNA, 25 bp, Homo sapien
ggatagcatgaagccatctggggac

SEQ ID NO: 3675283 - DNA, 25 bp, Homo sapien
ctgaggatagcatgaagccatctgg

SEQ ID NO: 3675284 - DNA, 25 bp, Homo sapien
tagcatgaagccatctggggacttc

SEQ ID NO: 3675285 - DNA, 25 bp, Homo sapien
tgaggatagcatgaagccatctggg

SEQ ID NO: 3675286 - DNA, 25 bp, Homo sapien
tgaggcttactgtaaccagaggagc

SEQ ID NO: 3675287 - DNA, 25 bp, Homo sapien
tgcttgaggtggtcaaagactggct

SEQ ID NO: 3675288 - DNA, 25 bp, Homo sapien
cactggcttggaacccctggttgga

SEQ ID NO: 3675289 - DNA, 25 bp, Homo sapien
tagcagatcccatgaattgtccctc

SEQ ID NO: 3675290 - DNA, 25 bp, Homo sapien
agttttaaatagagcattgttgtca

SEQ ID NO: 3675291 - DNA, 25 bp, Homo sapien
ttttaaatagagcattgttgtcaca

SEQ ID NO: 3675292 - DNA, 25 bp, Homo sapien
tagttttaaatagagcattgttgtc

SEQ ID NO: 3675293 - DNA, 25 bp, Homo sapien
gttttaaatagagcattgttgtcac

SEQ ID NO: 3675294 - DNA, 25 bp, Homo sapien
tagtgaaatctgaacgtgggctgta

SEQ ID NO: 3675295 - DNA, 25 bp, Homo sapien
ggcctatgggtgtcctaaggtaaca

SEQ ID NO: 3675296 - DNA, 25 bp, Homo sapien
caatggctctggcacttggatgacc

SEQ ID NO: 3675297 - DNA, 25 bp, Homo sapien
taccagctggagcatagacaattgg

SEQ ID NO: 3675298 - DNA, 25 bp, Homo sapien
catcttgcggttgccagtttctgtt

SEQ ID NO: 3675299 - DNA, 25 bp, Homo sapien
cattgaaaaccatcttgcggttgcc

SEQ ID NO: 3675300 - DNA, 25 bp, Homo sapien
gaaaaccatcttgcggttgccagtt

SEQ ID NO: 3675301 - DNA, 25 bp, Homo sapien
tctgttttactttgtggttcactgt

SEQ ID NO: 3675302 - DNA, 25 bp, Homo sapien
gagggctgcaccagtgtctggtgac

SEQ ID NO: 3675303 - DNA, 25 bp, Homo sapien
cagagggctgcaccagtgtctggtg

SEQ ID NO: 3675304 - DNA, 25 bp, Homo sapien
gctacaactggtccttggggtggcc

SEQ ID NO: 3675305 - DNA, 25 bp, Homo sapien
ggcacttgtttgggagctacaactg

SEQ ID NO: 3675306 - DNA, 25 bp, Homo sapien
gtaactggccctttgaacttgtcag

SEQ ID NO: 3675307 - DNA, 25 bp, Homo sapien
tatggcacactgctcaggcaaaggg

SEQ ID NO: 3675308 - DNA, 25 bp, Homo sapien
cagtggagccatcaggctctatggc

SEQ ID NO: 3675309 - DNA, 25 bp, Homo sapien
tccagttctgttgtcctgggccggg

SEQ ID NO: 3675310 - DNA, 25 bp, Homo sapien
atattcatgagtgcttttgattcac

SEQ ID NO: 3675311 - DNA, 25 bp, Homo sapien
caatattcatgagtgcttttgattc

SEQ ID NO: 3675312 - DNA, 25 bp, Homo sapien
attcatgagtgcttttgattcactg

SEQ ID NO: 3675313 - DNA, 25 bp, Homo sapien
tcatgagtgcttttgattcactgtg

SEQ ID NO: 3675314 - DNA, 25 bp, Homo sapien
ttgtaagtcaagttgccagccttgc

SEQ ID NO: 3675315 - DNA, 25 bp, Homo sapien
gtaagtcaagttgccagccttgcca

SEQ ID NO: 3675316 - DNA, 25 bp, Homo sapien
tgtaagtcaagttgccagccttgcc

SEQ ID NO: 3675317 - DNA, 25 bp, Homo sapien
taagtcaagttgccagccttgccac

SEQ ID NO: 3675318 - DNA, 25 bp, Homo sapien
tgtggatgtgttaaagtgccctgcc

SEQ ID NO: 3675319 - DNA, 25 bp, Homo sapien
gctcttgggcctcctgtgtggatgt

SEQ ID NO: 3675320 - DNA, 25 bp, Homo sapien
tgaaataacttgattgagggccagc

SEQ ID NO: 3675321 - DNA, 25 bp, Homo sapien
tccaagtgattagaaaagcagccac

SEQ ID NO: 3675322 - DNA, 25 bp, Homo sapien
tgcccatgccggacattttggggat

SEQ ID NO: 3675323 - DNA, 25 bp, Homo sapien
gggctgtagcactacgttcttcgta

SEQ ID NO: 3675324 - DNA, 25 bp, Homo sapien
gaccaattttctgtcccctgagtga

SEQ ID NO: 3675325 - DNA, 25 bp, Homo sapien
tacgttcttcgtatggctcctgtag

SEQ ID NO: 3675326 - DNA, 25 bp, Homo sapien
ttaagaaataaatgtatcagaacct

SEQ ID NO: 3675327 - DNA, 25 bp, Homo sapien
aagaaataaatgtatcagaacctac

SEQ ID NO: 3675328 - DNA, 25 bp, Homo sapien
taagaaataaatgtatcagaaccta

SEQ ID NO: 3675329 - DNA, 25 bp, Homo sapien
gctgagaggccgcttcccacttgca

SEQ ID NO: 3675330 - DNA, 25 bp, Homo sapien
ttctcggtgcctgcattgggtggct

SEQ ID NO: 3675331 - DNA, 25 bp, Homo sapien
tgcactagcagggaacctttgtttt

SEQ ID NO: 3675332 - DNA, 25 bp, Homo sapien
tgccatactccctctagcagcagct

SEQ ID NO: 3675333 - DNA, 25 bp, Homo sapien
gtcgttgaacactgacagaatccag

SEQ ID NO: 3675334 - DNA, 25 bp, Homo sapien
ggaaagcatggacatttggttccag

SEQ ID NO: 3675335 - DNA, 25 bp, Homo sapien
tggaaagcatggacatttggttcca

SEQ ID NO: 3675336 - DNA, 25 bp, Homo sapien
gagatgtcattgcaacccctccttc

SEQ ID NO: 3675337 - DNA, 25 bp, Homo sapien
aagatatgctctctggtggctcgga

SEQ ID NO: 3675338 - DNA, 25 bp, Homo sapien
gttctgaacccagatgaagatatgc

SEQ ID NO: 3675339 - DNA, 25 bp, Homo sapien
tctggtggctcggagatgtcattgc

SEQ ID NO: 3675340 - DNA, 25 bp, Homo sapien
tgctaatgtggctgtcacaggaatg

SEQ ID NO: 3675341 - DNA, 25 bp, Homo sapien
catggttaaagtctgtgctaatgtg

SEQ ID NO: 3675342 - DNA, 25 bp, Homo sapien
tgtggctgtcacaggaatgtgttta

SEQ ID NO: 3675343 - DNA, 25 bp, Homo sapien
gtgctgacacatggtctctcgggtt

SEQ ID NO: 3675344 - DNA, 25 bp, Homo sapien
cgttgagatgcttgtcgtgtggctt

SEQ ID NO: 3675345 - DNA, 25 bp, Homo sapien
gatgtttgcataattgagccctcat

SEQ ID NO: 3675346 - DNA, 25 bp, Homo sapien
tagtacctttggtattgagagacca

SEQ ID NO: 3675347 - DNA, 25 bp, Homo sapien
gagccctcatcctttagtacctttg

SEQ ID NO: 3675348 - DNA, 25 bp, Homo sapien
aatgtggaaagaatatgactggtac

SEQ ID NO: 3675349 - DNA, 25 bp, Homo sapien
aaattagatcagtctctgtgctctg

SEQ ID NO: 3675350 - DNA, 25 bp, Homo sapien
aacctaaacttataggagaatgtgg

SEQ ID NO: 3675351 - DNA, 25 bp, Homo sapien
tgatgtgatcaaaggtcttagctga

SEQ ID NO: 3675352 - DNA, 25 bp, Homo sapien
gttgatagaaataaagtcagattaa

SEQ ID NO: 3675353 - DNA, 25 bp, Homo sapien
tgatagaaataaagtcagattaaaa

SEQ ID NO: 3675354 - DNA, 25 bp, Homo sapien
ctgttgatagaaataaagtcagatt

SEQ ID NO: 3675355 - DNA, 25 bp, Homo sapien
atcgcttgagcccacaaagtcgagg

SEQ ID NO: 3675356 - DNA, 25 bp, Homo sapien
tgtgagcaggtgttgcagccctcag

SEQ ID NO: 3675357 - DNA, 25 bp, Homo sapien
taggcttttgtacaccagtacttcg

SEQ ID NO: 3675358 - DNA, 25 bp, Homo sapien
ggatcccaacatccttgtgagcagg

SEQ ID NO: 3675359 - DNA, 25 bp, Homo sapien
catttttaatgaagctaaaaagtgg

SEQ ID NO: 3675360 - DNA, 25 bp, Homo sapien
tgggttgtgaggcagtgagtcgcac

SEQ ID NO: 3675361 - DNA, 25 bp, Homo sapien
ttggctcttggcataacttcttagt

SEQ ID NO: 3675362 - DNA, 25 bp, Homo sapien
taacttcttagtgagtattcctggg

SEQ ID NO: 3675363 - DNA, 25 bp, Homo sapien
tattcctgggggtctaagtgttctg

SEQ ID NO: 3675364 - DNA, 25 bp, Homo sapien
acaatctgagactcttgattttgaa

SEQ ID NO: 3675365 - DNA, 25 bp, Homo sapien
caatctgagactcttgattttgaag

SEQ ID NO: 3675366 - DNA, 25 bp, Homo sapien
gggccattgtgatattaaaatctgt

SEQ ID NO: 3675367 - DNA, 25 bp, Homo sapien
acatgaagggccattgtgatattaa

SEQ ID NO: 3675368 - DNA, 25 bp, Homo sapien
tctgcaaacttgaagtccgagggtg

SEQ ID NO: 3675369 - DNA, 25 bp, Homo sapien
tactgtatcctcacatccagagaga

SEQ ID NO: 3675370 - DNA, 25 bp, Homo sapien
tccgagggtgccagctagcatgatt

SEQ ID NO: 3675371 - DNA, 25 bp, Homo sapien
ggaacttcagagctatatgaccctc

SEQ ID NO: 3675372 - DNA, 25 bp, Homo sapien
gattatgtggttttgactcagcagt

SEQ ID NO: 3675373 - DNA, 25 bp, Homo sapien
cacatgtaaatttcaccgacggttc

SEQ ID NO: 3675374 - DNA, 25 bp, Homo sapien
tccttactgtctgagagctgtcatc

SEQ ID NO: 3675375 - DNA, 25 bp, Homo sapien
tcttctttagacaccgtccctggaa

SEQ ID NO: 3675376 - DNA, 25 bp, Homo sapien
atgaataagtttggctcaggccctg

SEQ ID NO: 3675377 - DNA, 25 bp, Homo sapien
aatggtgctgatgaataagtttggc

SEQ ID NO: 3675378 - DNA, 25 bp, Homo sapien
tcagtaaagctgcattgaatggtgc

SEQ ID NO: 3675379 - DNA, 25 bp, Homo sapien
taaagctgcattgaatggtgctgat

SEQ ID NO: 3675380 - DNA, 25 bp, Homo sapien
tttggtgccgcgaagtagaaatcgg

SEQ ID NO: 3675381 - DNA, 25 bp, Homo sapien
tacacgcttacgaaaccaagtgaag

SEQ ID NO: 3675382 - DNA, 25 bp, Homo sapien
aaatcgggataagggttgtcatggc

SEQ ID NO: 3675383 - DNA, 25 bp, Homo sapien
gaagagaatccaggcaggtgcttct

SEQ ID NO: 3675384 - DNA, 25 bp, Homo sapien
ggatagagtgccctagtccagctaa

SEQ ID NO: 3675385 - DNA, 25 bp, Homo sapien
gcgacgtgtcaagggcaaaacagca

SEQ ID NO: 3675386 - DNA, 25 bp, Homo sapien
cagctaacggattcagcctggagcg

SEQ ID NO: 3675387 - DNA, 25 bp, Homo sapien
ggacgccgcttttccgtgacagagg

SEQ ID NO: 3675388 - DNA, 25 bp, Homo sapien
tttcagagctactgcgtgcgggctg

SEQ ID NO: 3675389 - DNA, 25 bp, Homo sapien
ccacagcctaggtggcggtgtgaca

SEQ ID NO: 3675390 - DNA, 25 bp, Homo sapien
gggccgactccaatcacggctccac

SEQ ID NO: 3675391 - DNA, 25 bp, Homo sapien
ggagcctttgggcagtagcccgccc

SEQ ID NO: 3675392 - DNA, 25 bp, Homo sapien
ggaaggaggaggcgtcagtgggcac

SEQ ID NO: 3675393 - DNA, 25 bp, Homo sapien
aggaaggaggaggcgtcagtgggca

SEQ ID NO: 3675394 - DNA, 25 bp, Homo sapien
cggccttatgccggggagcagcggg

SEQ ID NO: 3675395 - DNA, 25 bp, Homo sapien
ggccgatcggacacctgtctcgcgg

SEQ ID NO: 3675396 - DNA, 25 bp, Homo sapien
gttgcgggggccgatcggacacctg

SEQ ID NO: 3675397 - DNA, 25 bp, Homo sapien
gggcccggccttatgccggggagca

SEQ ID NO: 3675398 - DNA, 25 bp, Homo sapien
aagtcgaaagcgttcgcaccagcgg

SEQ ID NO: 3675399 - DNA, 25 bp, Homo sapien
actgggcatgctcggcagcccggga

SEQ ID NO: 3675400 - DNA, 25 bp, Homo sapien
agcggagtcgcgtcgcgcgggaagc

SEQ ID NO: 3675401 - DNA, 25 bp, Homo sapien
gcccgggaggctcgcggtggcaagt

SEQ ID NO: 3675402 - DNA, 25 bp, Homo sapien
acggcctcgggctgcctgtaggcca

SEQ ID NO: 3675403 - DNA, 25 bp, Homo sapien
tgtaggccaccgaggtgcggcgcgg

SEQ ID NO: 3675404 - DNA, 25 bp, Homo sapien
gctgtccatcctaacttgggcgctg

SEQ ID NO: 3675405 - DNA, 25 bp, Homo sapien
taacttgggcgctggggcttcgctc

SEQ ID NO: 3675406 - DNA, 25 bp, Homo sapien
caagccaggggtcggtacaggactc

SEQ ID NO: 3675407 - DNA, 25 bp, Homo sapien
ctgggcaagccaggggtcggtacag

SEQ ID NO: 3675408 - DNA, 25 bp, Homo sapien
ggcaagccaggggtcggtacaggac

SEQ ID NO: 3675409 - DNA, 25 bp, Homo sapien
tgggcaagccaggggtcggtacagg

SEQ ID NO: 3675410 - DNA, 25 bp, Homo sapien
tctgcagggactaggttagaaccgg

SEQ ID NO: 3675411 - DNA, 25 bp, Homo sapien
gctggataacggaagaggactccct

SEQ ID NO: 3675412 - DNA, 25 bp, Homo sapien
cgatttcgccgcagtttgcttctgg

SEQ ID NO: 3675413 - DNA, 25 bp, Homo sapien
tccgccacctgagttctgttgtctc

SEQ ID NO: 3675414 - DNA, 25 bp, Homo sapien
gccgcggggtatgcgctgcagggaa

SEQ ID NO: 3675415 - DNA, 25 bp, Homo sapien
tctgtccaatgtccctgccggtaca

SEQ ID NO: 3675416 - DNA, 25 bp, Homo sapien
agcaccatcgaagcggcccaccagc

SEQ ID NO: 3675417 - DNA, 25 bp, Homo sapien
gaagagcacggcctctgtccaatgt

SEQ ID NO: 3675418 - DNA, 25 bp, Homo sapien
tacccggagggctttgttaatcata

SEQ ID NO: 3675419 - DNA, 25 bp, Homo sapien
tagaggcgtccatgacaactacccg

SEQ ID NO: 3675420 - DNA, 25 bp, Homo sapien
gttaatcatattgcaggactccacc

SEQ ID NO: 3675421 - DNA, 25 bp, Homo sapien
aattctagggtgatagtgacgcggc

SEQ ID NO: 3675422 - DNA, 25 bp, Homo sapien
tatgccagtaccttagacacacgat

SEQ ID NO: 3675423 - DNA, 25 bp, Homo sapien
tgataaacataaccagtagggctac

SEQ ID NO: 3675424 - DNA, 25 bp, Homo sapien
cttcctgagaagagcagtactgtgt

SEQ ID NO: 3675425 - DNA, 25 bp, Homo sapien
caaagaccagatgcttacttggacc

SEQ ID NO: 3675426 - DNA, 25 bp, Homo sapien
gaaattgagcagacaccctatgaag

SEQ ID NO: 3675427 - DNA, 25 bp, Homo sapien
ttcaaactggcgatgaaggcctacg

SEQ ID NO: 3675428 - DNA, 25 bp, Homo sapien
ttctggcaccaggaaaatccgggac

SEQ ID NO: 3675429 - DNA, 25 bp, Homo sapien
tattgctaagaaacccgtgtcactg

SEQ ID NO: 3675430 - DNA, 25 bp, Homo sapien
gaagaaggataacatagcaaggaca

SEQ ID NO: 3675431 - DNA, 25 bp, Homo sapien
tacacactgactatttgaaaagcca

SEQ ID NO: 3675432 - DNA, 25 bp, Homo sapien
aatggtgccatgtctgccagtcagg

SEQ ID NO: 3675433 - DNA, 25 bp, Homo sapien
aaccttgcctggagttacacactga

SEQ ID NO: 3675434 - DNA, 25 bp, Homo sapien
aatgtttgacaaccctgatcagggc

SEQ ID NO: 3675435 - DNA, 25 bp, Homo sapien
aatcaggcaatgaatcccatcaggc

SEQ ID NO: 3675436 - DNA, 25 bp, Homo sapien
gggtcccaaggatgtgcatttctag

SEQ ID NO: 3675437 - DNA, 25 bp, Homo sapien
gaaaacactggttgctaggacccac

SEQ ID NO: 3675438 - DNA, 25 bp, Homo sapien
gagaagcctttagcaaccatcctga

SEQ ID NO: 3675439 - DNA, 25 bp, Homo sapien
tgtagccccaggagttatcgagcca

SEQ ID NO: 3675440 - DNA, 25 bp, Homo sapien
catatacctagtttaatggccggcc

SEQ ID NO: 3675441 - DNA, 25 bp, Homo sapien
tctttgagagctaacccagtggcct

SEQ ID NO: 3675442 - DNA, 25 bp, Homo sapien
aagttggtattgttactcacatttt

SEQ ID NO: 3675443 - DNA, 25 bp, Homo sapien
agttggtattgttactcacatttta

SEQ ID NO: 3675444 - DNA, 25 bp, Homo sapien
tattgttactcacattttacaggca

SEQ ID NO: 3675445 - DNA, 25 bp, Homo sapien
cttgagacattgcaagttccggaat

SEQ ID NO: 3675446 - DNA, 25 bp, Homo sapien
caagttccggaatttgataagaatc

SEQ ID NO: 3675447 - DNA, 25 bp, Homo sapien
tccggaatttgataagaatctcagc

SEQ ID NO: 3675448 - DNA, 25 bp, Homo sapien
gacattgcaagttccggaatttgat

SEQ ID NO: 3675449 - DNA, 25 bp, Homo sapien
caaggtattcttgggcttattctgg

SEQ ID NO: 3675450 - DNA, 25 bp, Homo sapien
tgctcatggagccagagtggttcat

SEQ ID NO: 3675451 - DNA, 25 bp, Homo sapien
gccctaataatcacatttgcagaaa

SEQ ID NO: 3675452 - DNA, 25 bp, Homo sapien
gacacatgctcttactcatgcagaa

SEQ ID NO: 3675453 - DNA, 25 bp, Homo sapien
tatctatactgtgattgcttcccaa

SEQ ID NO: 3675454 - DNA, 25 bp, Homo sapien
cagaataaggacaggttgattgcta

SEQ ID NO: 3675455 - DNA, 25 bp, Homo sapien
caggcctcctataaaagctttggtg

SEQ ID NO: 3675456 - DNA, 25 bp, Homo sapien
tgtaggtgacaccatctaaagtgat

SEQ ID NO: 3675457 - DNA, 25 bp, Homo sapien
aatagttgctgcctctaaaagcccc

SEQ ID NO: 3675458 - DNA, 25 bp, Homo sapien
tcgtaatagttgctgcctctaaaag

SEQ ID NO: 3675459 - DNA, 25 bp, Homo sapien
ccttgtgaattcgtaatagttgctg

SEQ ID NO: 3675460 - DNA, 25 bp, Homo sapien
gaattcgtaatagttgctgcctcta

SEQ ID NO: 3675461 - DNA, 25 bp, Homo sapien
tgttatcaggttggtagtggcagct

SEQ ID NO: 3675462 - DNA, 25 bp, Homo sapien
aatgttatcaggttggtagtggcag

SEQ ID NO: 3675463 - DNA, 25 bp, Homo sapien
atgttatcaggttggtagtggcagc

SEQ ID NO: 3675464 - DNA, 25 bp, Homo sapien
ccagctagactttcagaagaaggaa

SEQ ID NO: 3675465 - DNA, 25 bp, Homo sapien
gcttccgaggctgcagtaacaatac

SEQ ID NO: 3675466 - DNA, 25 bp, Homo sapien
taacaatacagtccctcagtcacct

SEQ ID NO: 3675467 - DNA, 25 bp, Homo sapien
taggaaaatcagtgaggaggctctg

SEQ ID NO: 3675468 - DNA, 25 bp, Homo sapien
gggaacttgtaatgaatctaattgg

SEQ ID NO: 3675469 - DNA, 25 bp, Homo sapien
ttcttaagggaacttgtaatgaatc

SEQ ID NO: 3675470 - DNA, 25 bp, Homo sapien
taagggaacttgtaatgaatctaat

SEQ ID NO: 3675471 - DNA, 25 bp, Homo sapien
gaacttgtaatgaatctaattggaa

SEQ ID NO: 3675472 - DNA, 25 bp, Homo sapien
ccaggacacaagtgtctgcccactt

SEQ ID NO: 3675473 - DNA, 25 bp, Homo sapien
gaagaactgcttctatatcaggttt

SEQ ID NO: 3675474 - DNA, 25 bp, Homo sapien
gccaggacacaagtgtctgcccact

SEQ ID NO: 3675475 - DNA, 25 bp, Homo sapien
agaactgcttctatatcaggttttc

SEQ ID NO: 3675476 - DNA, 25 bp, Homo sapien
gggcacaagccccctctgcttttgc

SEQ ID NO: 3675477 - DNA, 25 bp, Homo sapien
tggggcacaagccccctctgctttt

SEQ ID NO: 3675478 - DNA, 25 bp, Homo sapien
ggggcacaagccccctctgcttttg

SEQ ID NO: 3675479 - DNA, 25 bp, Homo sapien
tacagaggctccattatagcaggtc

SEQ ID NO: 3675480 - DNA, 25 bp, Homo sapien
tacatttgccaggactgcagatgcc

SEQ ID NO: 3675481 - DNA, 25 bp, Homo sapien
ccttgatatgagtgcagggcctatc

SEQ ID NO: 3675482 - DNA, 25 bp, Homo sapien
cttacagtggtcttccccaagtgca

SEQ ID NO: 3675483 - DNA, 25 bp, Homo sapien
gttgaccacccattgaccaccttag

SEQ ID NO: 3675484 - DNA, 25 bp, Homo sapien
catggtcttaggctgccaggtaacc

SEQ ID NO: 3675485 - DNA, 25 bp, Homo sapien
tgatgttgggcaatacgcacagagt

SEQ ID NO: 3675486 - DNA, 25 bp, Homo sapien
ttgatattgcaaggcctaaagcccc

SEQ ID NO: 3675487 - DNA, 25 bp, Homo sapien
tccttgagggcagtaaagacgctgt

SEQ ID NO: 3675488 - DNA, 25 bp, Homo sapien
ttgctgaccagctgagtccttgagg

SEQ ID NO: 3675489 - DNA, 25 bp, Homo sapien
agtaaagacgctgtccagagggtgc

SEQ ID NO: 3675490 - DNA, 25 bp, Homo sapien
cattgctgaccagctgagtccttga

SEQ ID NO: 3675491 - DNA, 25 bp, Homo sapien
gcatggttgcggggctcctccttgc

SEQ ID NO: 3675492 - DNA, 25 bp, Homo sapien
acagaggcttcttgtagtaaggggt

SEQ ID NO: 3675493 - DNA, 25 bp, Homo sapien
agtaaggggtggtggcatggttgcg

SEQ ID NO: 3675494 - DNA, 25 bp, Homo sapien
tgtgcaagatgccatacagaggctt

SEQ ID NO: 3675495 - DNA, 25 bp, Homo sapien
caggaagtagatgttagggtcactg

SEQ ID NO: 3675496 - DNA, 25 bp, Homo sapien
ggaagtagatgttagggtcactgtt

SEQ ID NO: 3675497 - DNA, 25 bp, Homo sapien
aagtagatgttagggtcactgttgg

SEQ ID NO: 3675498 - DNA, 25 bp, Homo sapien
agatgttagggtcactgttggtggc

SEQ ID NO: 3675499 - DNA, 25 bp, Homo sapien
ggacctgttggacgtgagcgtgttg

SEQ ID NO: 3675500 - DNA, 25 bp, Homo sapien
cctgttggacgtgagcgtgttgagc

SEQ ID NO: 3675501 - DNA, 25 bp, Homo sapien
gcgtgttgagcatgtagaacatctc

SEQ ID NO: 3675502 - DNA, 25 bp, Homo sapien
gagagcaggtccactttgctgtgca

SEQ ID NO: 3675503 - DNA, 25 bp, Homo sapien
gcttgagctccatgcccgtgagctg

SEQ ID NO: 3675504 - DNA, 25 bp, Homo sapien
tggtccaagatctgcttgagctcca

SEQ ID NO: 3675505 - DNA, 25 bp, Homo sapien
caggctctggtccaagatctgcttg

SEQ ID NO: 3675506 - DNA, 25 bp, Homo sapien
tgcttgagctccatgcccgtgagct

SEQ ID NO: 3675507 - DNA, 25 bp, Homo sapien
ggtagtagacctccatgtagttgtg

SEQ ID NO: 3675508 - DNA, 25 bp, Homo sapien
cttaagcttggcctcaaagctgcag

SEQ ID NO: 3675509 - DNA, 25 bp, Homo sapien
gcactgcagccttgggagaagttga

SEQ ID NO: 3675510 - DNA, 25 bp, Homo sapien
agtgactccagcttaagcttggcct

SEQ ID NO: 3675511 - DNA, 25 bp, Homo sapien
actcaccgggtgaagaggcttcatc

SEQ ID NO: 3675512 - DNA, 25 bp, Homo sapien
aactcaccgggtgaagaggcttcat

SEQ ID NO: 3675513 - DNA, 25 bp, Homo sapien
caaactcaccgggtgaagaggcttc

SEQ ID NO: 3675514 - DNA, 25 bp, Homo sapien
gcaaactcaccgggtgaagaggctt

SEQ ID NO: 3675515 - DNA, 25 bp, Homo sapien
gcgtggggggcttgccttcgctgcc

SEQ ID NO: 3675516 - DNA, 25 bp, Homo sapien
gcttgccttcgctgcccgcgtccag

SEQ ID NO: 3675517 - DNA, 25 bp, Homo sapien
ctggaggagttgtagcagttgttgc

SEQ ID NO: 3675518 - DNA, 25 bp, Homo sapien
ccctggagcttgtcgttgatgcact

SEQ ID NO: 3675519 - DNA, 25 bp, Homo sapien
cgcgaggtgaagttgccgatggaca

SEQ ID NO: 3675520 - DNA, 25 bp, Homo sapien
ggcaccagcaggcgcgaggtgaagt

SEQ ID NO: 3675521 - DNA, 25 bp, Homo sapien
accagcaggcgcgaggtgaagttgc

SEQ ID NO: 3675522 - DNA, 25 bp, Homo sapien
gcaggcgcgaggtgaagttgccgat

SEQ ID NO: 3675523 - DNA, 25 bp, Homo sapien
gtccagacgcgattgtttttggtgc

SEQ ID NO: 3675524 - DNA, 25 bp, Homo sapien
tagagcaggtgcacttagtggcgaa

SEQ ID NO: 3675525 - DNA, 25 bp, Homo sapien
cagacgcgattgtttttggtgcaga

SEQ ID NO: 3675526 - DNA, 25 bp, Homo sapien
gttctcggcggtggaggagccccgc

SEQ ID NO: 3675527 - DNA, 25 bp, Homo sapien
atagccacttccctgtggtacaaat

SEQ ID NO: 3675528 - DNA, 25 bp, Homo sapien
ccaataaaatgtgccaacatcactt

SEQ ID NO: 3675529 - DNA, 25 bp, Homo sapien
gccaataaaatgtgccaacatcact

SEQ ID NO: 3675530 - DNA, 25 bp, Homo sapien
tagccacttccctgtggtacaaatg

SEQ ID NO: 3675531 - DNA, 25 bp, Homo sapien
ctggccctgcgggtatgggagaagc

SEQ ID NO: 3675532 - DNA, 25 bp, Homo sapien
ggaccccaagagagaatggattcag

SEQ ID NO: 3675533 - DNA, 25 bp, Homo sapien
tgttcatctggttctgggaccccat

SEQ ID NO: 3675534 - DNA, 25 bp, Homo sapien
agtttcccctgatgtgttcatctgg

SEQ ID NO: 3675535 - DNA, 25 bp, Homo sapien
catgatgttagatcctgttagggcg

SEQ ID NO: 3675536 - DNA, 25 bp, Homo sapien
tctggagcatgatgttagatcctgt

SEQ ID NO: 3675537 - DNA, 25 bp, Homo sapien
ttcagcaatctggagcatgatgtta

SEQ ID NO: 3675538 - DNA, 25 bp, Homo sapien
tgatgttagatcctgttagggcgac

SEQ ID NO: 3675539 - DNA, 25 bp, Homo sapien
caaggaatcttcaggcacaagggcc

SEQ ID NO: 3675540 - DNA, 25 bp, Homo sapien
tctcgtggaaagcattgggcagagc

SEQ ID NO: 3675541 - DNA, 25 bp, Homo sapien
ggcctgaatctgacttctcgtggaa

SEQ ID NO: 3675542 - DNA, 25 bp, Homo sapien
tagagctgggctgtaattcaaggga

SEQ ID NO: 3675543 - DNA, 25 bp, Homo sapien
gctgcgctcaaaggcgggatcgttc

SEQ ID NO: 3675544 - DNA, 25 bp, Homo sapien
tggctgcgctcaaaggcgggatcgt

SEQ ID NO: 3675545 - DNA, 25 bp, Homo sapien
tgtggctgcgctcaaaggcgggatc

SEQ ID NO: 3675546 - DNA, 25 bp, Homo sapien
ctgtggctgcgctcaaaggcgggat

SEQ ID NO: 3675547 - DNA, 25 bp, Homo sapien
tggactgcaggtttgtattaccgaa

SEQ ID NO: 3675548 - DNA, 25 bp, Homo sapien
tgcaggtttgtattaccgaaaatta

SEQ ID NO: 3675549 - DNA, 25 bp, Homo sapien
gactgcaggtttgtattaccgaaaa

SEQ ID NO: 3675550 - DNA, 25 bp, Homo sapien
catggactgcaggtttgtattaccg

SEQ ID NO: 3675551 - DNA, 25 bp, Homo sapien
ctccaaaggtaaacctttcagcaag

SEQ ID NO: 3675552 - DNA, 25 bp, Homo sapien
cacgtggagacagacgataggaatc

SEQ ID NO: 3675553 - DNA, 25 bp, Homo sapien
tcagtgttatcacgtggagacagac

SEQ ID NO: 3675554 - DNA, 25 bp, Homo sapien
gaaggctcttcagtgttatcacgtg

SEQ ID NO: 3675555 - DNA, 25 bp, Homo sapien
gtgaaggctcttcagtgttatcacg

SEQ ID NO: 3675556 - DNA, 25 bp, Homo sapien
ctgcagagggggaggggcagtgggc

SEQ ID NO: 3675557 - DNA, 25 bp, Homo sapien
tgcagagggggaggggcagtgggca

SEQ ID NO: 3675558 - DNA, 25 bp, Homo sapien
cagagggggaggggcagtgggcagc

SEQ ID NO: 3675559 - DNA, 25 bp, Homo sapien
gagggggaggggcagtgggcagctg

SEQ ID NO: 3675560 - DNA, 25 bp, Homo sapien
atgtaaacaggtttttggaacatag

SEQ ID NO: 3675561 - DNA, 25 bp, Homo sapien
tgaatgtaaacaggtttttggaaca

SEQ ID NO: 3675562 - DNA, 25 bp, Homo sapien
ctgagtccaactgaagcagttaaaa

SEQ ID NO: 3675563 - DNA, 25 bp, Homo sapien
agccatcccctcaggctgggcactg

SEQ ID NO: 3675564 - DNA, 25 bp, Homo sapien
ccatcccctcaggctgggcactgac

SEQ ID NO: 3675565 - DNA, 25 bp, Homo sapien
ccatttgaagccatcccctcaggct

SEQ ID NO: 3675566 - DNA, 25 bp, Homo sapien
ctccatttgaagccatcccctcagg

SEQ ID NO: 3675567 - DNA, 25 bp, Homo sapien
atcagccctatcaactgtccccggg

SEQ ID NO: 3675568 - DNA, 25 bp, Homo sapien
gggtgccatagccatccccaggtgt

SEQ ID NO: 3675569 - DNA, 25 bp, Homo sapien
aaacacagactcagggtgccatagc

SEQ ID NO: 3675570 - DNA, 25 bp, Homo sapien
gccatccccaggtgtgatgtccttg

SEQ ID NO: 3675571 - DNA, 25 bp, Homo sapien
caagtgctaaataggggtcagattc

SEQ ID NO: 3675572 - DNA, 25 bp, Homo sapien
atggtcccggctgccactcaggaag

SEQ ID NO: 3675573 - DNA, 25 bp, Homo sapien
caccctttccgcagtactcgatggt

SEQ ID NO: 3675574 - DNA, 25 bp, Homo sapien
cgatggtcccggctgccactcagga

SEQ ID NO: 3675575 - DNA, 25 bp, Homo sapien
cactgggtatgttgtggagacaaag

SEQ ID NO: 3675576 - DNA, 25 bp, Homo sapien
agcactgggtatgttgtggagacaa

SEQ ID NO: 3675577 - DNA, 25 bp, Homo sapien
aggaacccctgcagtcacaaggagc

SEQ ID NO: 3675578 - DNA, 25 bp, Homo sapien
ccagcactgggtatgttgtggagac

SEQ ID NO: 3675579 - DNA, 25 bp, Homo sapien
cacctgggcagccataacaggcacc

SEQ ID NO: 3675580 - DNA, 25 bp, Homo sapien
acctgggcagccataacaggcacca

SEQ ID NO: 3675581 - DNA, 25 bp, Homo sapien
cttgggacacaatggggggcaactg

SEQ ID NO: 3675582 - DNA, 25 bp, Homo sapien
cacaatggggggcaactgggcagcc

SEQ ID NO: 3675583 - DNA, 25 bp, Homo sapien
ttgggacacaatggggggcaactgg

SEQ ID NO: 3675584 - DNA, 25 bp, Homo sapien
aatggggggcaactgggcagccggt

SEQ ID NO: 3675585 - DNA, 25 bp, Homo sapien
tacaggagtcatctggtggggcctt

SEQ ID NO: 3675586 - DNA, 25 bp, Homo sapien
tggggttacaggagtcatctggtgg

SEQ ID NO: 3675587 - DNA, 25 bp, Homo sapien
gttacaggagtcatctggtggggcc

SEQ ID NO: 3675588 - DNA, 25 bp, Homo sapien
tccatgagccccttgtggccatggc

SEQ ID NO: 3675589 - DNA, 25 bp, Homo sapien
ccagagtcggaagttctcatagaca

SEQ ID NO: 3675590 - DNA, 25 bp, Homo sapien
gccaggggcttgtagtgctgccaga

SEQ ID NO: 3675591 - DNA, 25 bp, Homo sapien
tgctgccagagtcggaagttctcat

SEQ ID NO: 3675592 - DNA, 25 bp, Homo sapien
agtgctgccagagtcggaagttctc

SEQ ID NO: 3675593 - DNA, 25 bp, Homo sapien
caaggaggaatgcaaccagttccag

SEQ ID NO: 3675594 - DNA, 25 bp, Homo sapien
caaccagttccagggtgcgggaaca

SEQ ID NO: 3675595 - DNA, 25 bp, Homo sapien
tgcaccgggactccgctccaaggag

SEQ ID NO: 3675596 - DNA, 25 bp, Homo sapien
gcagctccaccccaagaatcagggt

SEQ ID NO: 3675597 - DNA, 25 bp, Homo sapien
ttctgccgggccagagatcggagaa

SEQ ID NO: 3675598 - DNA, 25 bp, Homo sapien
ggtgggcttctgccgggccagagat

SEQ ID NO: 3675599 - DNA, 25 bp, Homo sapien
ggcttctgccgggccagagatcgga

SEQ ID NO: 3675600 - DNA, 25 bp, Homo sapien
tgggcttctgccgggccagagatcg

SEQ ID NO: 3675601 - DNA, 25 bp, Homo sapien
gtcaaagttgctcgtgtgctgccat

SEQ ID NO: 3675602 - DNA, 25 bp, Homo sapien
caaagttgctcgtgtgctgccattc

SEQ ID NO: 3675603 - DNA, 25 bp, Homo sapien
tcaaagttgctcgtgtgctgccatt

SEQ ID NO: 3675604 - DNA, 25 bp, Homo sapien
aaagttgctcgtgtgctgccattcc

SEQ ID NO: 3675605 - DNA, 25 bp, Homo sapien
ctggctgcttgaccacctcaggggc

SEQ ID NO: 3675606 - DNA, 25 bp, Homo sapien
gtgtcaggcaggcagtcggggcctt

SEQ ID NO: 3675607 - DNA, 25 bp, Homo sapien
ctgggtggtgtcaggcaggcagtcg

SEQ ID NO: 3675608 - DNA, 25 bp, Homo sapien
caggcagtcggggccttggggccgg

SEQ ID NO: 3675609 - DNA, 25 bp, Homo sapien
ccttggggccggccttgctgggaag

SEQ ID NO: 3675610 - DNA, 25 bp, Homo sapien
ggcaggcgggccttggtctgtgctc

SEQ ID NO: 3675611 - DNA, 25 bp, Homo sapien
gccttggtctgtgctcgccggtggg

SEQ ID NO: 3675612 - DNA, 25 bp, Homo sapien
gcgggccttggtctgtgctcgccgg

SEQ ID NO: 3675613 - DNA, 25 bp, Homo sapien
ggtggtggccagcgggccttggtca

SEQ ID NO: 3675614 - DNA, 25 bp, Homo sapien
tcctccatgatgtccacatactcct

SEQ ID NO: 3675615 - DNA, 25 bp, Homo sapien
ctccatgatgtccacatactcctgc

SEQ ID NO: 3675616 - DNA, 25 bp, Homo sapien
cctccatgatgtccacatactcctg

SEQ ID NO: 3675617 - DNA, 25 bp, Homo sapien
cagtcctcttcctgtggctgcttca

SEQ ID NO: 3675618 - DNA, 25 bp, Homo sapien
ctgggggcatccagtcctcttcctg

SEQ ID NO: 3675619 - DNA, 25 bp, Homo sapien
tccagtcctcttcctgtggctgctt

SEQ ID NO: 3675620 - DNA, 25 bp, Homo sapien
gggcatccagtcctcttcctgtggc

SEQ ID NO: 3675621 - DNA, 25 bp, Homo sapien
ctgggaacacagcttgtcaatgtag

SEQ ID NO: 3675622 - DNA, 25 bp, Homo sapien
tggtgacgaagtctttctgggaaca

SEQ ID NO: 3675623 - DNA, 25 bp, Homo sapien
gacgaagtctttctgggaacacagc

SEQ ID NO: 3675624 - DNA, 25 bp, Homo sapien
tctgggaacacagcttgtcaatgta

SEQ ID NO: 3675625 - DNA, 25 bp, Homo sapien
gaaacagaaggaagaaggcatgagc

SEQ ID NO: 3675626 - DNA, 25 bp, Homo sapien
tggaaacagaaggaagaaggcatga

SEQ ID NO: 3675627 - DNA, 25 bp, Homo sapien
acagaaggaagaaggcatgagcttc

SEQ ID NO: 3675628 - DNA, 25 bp, Homo sapien
aaacagaaggaagaaggcatgagct

SEQ ID NO: 3675629 - DNA, 25 bp, Homo sapien
ccaagaaatccatctgtggatctgg

SEQ ID NO: 3675630 - DNA, 25 bp, Homo sapien
caagaaatccatctgtggatctggg

SEQ ID NO: 3675631 - DNA, 25 bp, Homo sapien
ctgggcaagggtgagtccttcctcc

SEQ ID NO: 3675632 - DNA, 25 bp, Homo sapien
tctgcctcgtccctgagagtcccgg

SEQ ID NO: 3675633 - DNA, 25 bp, Homo sapien
aagaacttgagtccaaccgggctgt

SEQ ID NO: 3675634 - DNA, 25 bp, Homo sapien
cttagaagaacttgagtccaaccgg

SEQ ID NO: 3675635 - DNA, 25 bp, Homo sapien
gggctgccctcgcatgctgtttctc

SEQ ID NO: 3675636 - DNA, 25 bp, Homo sapien
gcatccttggtacccatgccagggc

SEQ ID NO: 3675637 - DNA, 25 bp, Homo sapien
atcccaaaagcacaacagagtcttt

SEQ ID NO: 3675638 - DNA, 25 bp, Homo sapien
tccaaggcatccttggtacccatgc

SEQ ID NO: 3675639 - DNA, 25 bp, Homo sapien
atccttggtacccatgccagggcag

SEQ ID NO: 3675640 - DNA, 25 bp, Homo sapien
ctgtcagtccctggagcatctgaag

SEQ ID NO: 3675641 - DNA, 25 bp, Homo sapien
tcagcatctgtcagtccctggagca

SEQ ID NO: 3675642 - DNA, 25 bp, Homo sapien
atctgtcagtccctggagcatctga

SEQ ID NO: 3675643 - DNA, 25 bp, Homo sapien
gcatctgtcagtccctggagcatct

SEQ ID NO: 3675644 - DNA, 25 bp, Homo sapien
catgtccatgttgcaggcggctgcc

SEQ ID NO: 3675645 - DNA, 25 bp, Homo sapien
tcagctcccaccgagcagaacaaga

SEQ ID NO: 3675646 - DNA, 25 bp, Homo sapien
atgctgataatgatggggggcccca

SEQ ID NO: 3675647 - DNA, 25 bp, Homo sapien
ctgtgtggatggtcacctcaacgtc

SEQ ID NO: 3675648 - DNA, 25 bp, Homo sapien
tctgcactcaggcagtgctgggacc

SEQ ID NO: 3675649 - DNA, 25 bp, Homo sapien
tcaggcagtgctgggaccagtgccc

SEQ ID NO: 3675650 - DNA, 25 bp, Homo sapien
acaggggtcctgagccaataagcgc

SEQ ID NO: 3675651 - DNA, 25 bp, Homo sapien
accacagctctgcactcaggcagtg

SEQ ID NO: 3675652 - DNA, 25 bp, Homo sapien
tgcccacatcgagcagaagggacgg

SEQ ID NO: 3675653 - DNA, 25 bp, Homo sapien
gagcaagctgcatggcttccccaag

SEQ ID NO: 3675654 - DNA, 25 bp, Homo sapien
tgtgagcaagctgcatggcttcccc

SEQ ID NO: 3675655 - DNA, 25 bp, Homo sapien
ctgctgtgagcaagctgcatggctt

SEQ ID NO: 3675656 - DNA, 25 bp, Homo sapien
tgacatcatgggtatttacagattc

SEQ ID NO: 3675657 - DNA, 25 bp, Homo sapien
agagtgccctgtgtgatgctccctg

SEQ ID NO: 3675658 - DNA, 25 bp, Homo sapien
agagagatgcgagagagactgagga

SEQ ID NO: 3675659 - DNA, 25 bp, Homo sapien
tgccagagagatgcgagagagactg

SEQ ID NO: 3675660 - DNA, 25 bp, Homo sapien
ccacagggtaagtctggctccagca

SEQ ID NO: 3675661 - DNA, 25 bp, Homo sapien
tctggaataatagggccccacagca

SEQ ID NO: 3675662 - DNA, 25 bp, Homo sapien
tttccacagggtaagtctggctcca

SEQ ID NO: 3675663 - DNA, 25 bp, Homo sapien
tgcatttccacagggtaagtctggc

SEQ ID NO: 3675664 - DNA, 25 bp, Homo sapien
ggaacgcgggacagctggtgcctga

SEQ ID NO: 3675665 - DNA, 25 bp, Homo sapien
tggaagccaggaacgcgggacagct

SEQ ID NO: 3675666 - DNA, 25 bp, Homo sapien
gtggaagccaggaacgcgggacagc

SEQ ID NO: 3675667 - DNA, 25 bp, Homo sapien
ccaggaacgcgggacagctggtgcc

SEQ ID NO: 3675668 - DNA, 25 bp, Homo sapien
gaaagttgcaatctcggtcttcaca

SEQ ID NO: 3675669 - DNA, 25 bp, Homo sapien
tgcaatctcggtcttcacatggaga

SEQ ID NO: 3675670 - DNA, 25 bp, Homo sapien
cacatggagaccaaatgtgtcccaa

SEQ ID NO: 3675671 - DNA, 25 bp, Homo sapien
gggctccaagcgcagaaagttgcaa

SEQ ID NO: 3675672 - DNA, 25 bp, Homo sapien
ctgtaacattagtcttagccctttt

SEQ ID NO: 3675673 - DNA, 25 bp, Homo sapien
tctgtaacattagtcttagcccttt

SEQ ID NO: 3675674 - DNA, 25 bp, Homo sapien
cagctctgggtggagtatagctact

SEQ ID NO: 3675675 - DNA, 25 bp, Homo sapien
gctctgggtggagtatagctacttg

SEQ ID NO: 3675676 - DNA, 25 bp, Homo sapien
tgggtggagtatagctacttgatgc

SEQ ID NO: 3675677 - DNA, 25 bp, Homo sapien
gagtatagctacttgatgcaagagc

SEQ ID NO: 3675678 - DNA, 25 bp, Homo sapien
tgttagtagtggtagtcatgtccgt

SEQ ID NO: 3675679 - DNA, 25 bp, Homo sapien
gtgttagtagtggtagtcatgtccg

SEQ ID NO: 3675680 - DNA, 25 bp, Homo sapien
attcacaccgggaactgtgtggaca

SEQ ID NO: 3675681 - DNA, 25 bp, Homo sapien
cattcacaccgggaactgtgtggac

SEQ ID NO: 3675682 - DNA, 25 bp, Homo sapien
tcattcacaccgggaactgtgtgga

SEQ ID NO: 3675683 - DNA, 25 bp, Homo sapien
aagttgctgggtcatgggctccagg

SEQ ID NO: 3675684 - DNA, 25 bp, Homo sapien
ccaactcaacatctggaagttgctg

SEQ ID NO: 3675685 - DNA, 25 bp, Homo sapien
tgggctccaggtgttgtttggagcc

SEQ ID NO: 3675686 - DNA, 25 bp, Homo sapien
gttccctgtcccaactcaacatctg

SEQ ID NO: 3675687 - DNA, 25 bp, Homo sapien
tcctccccatgcctacgcacttctt

SEQ ID NO: 3675688 - DNA, 25 bp, Homo sapien
cccatgcctacgcacttcttccctc

SEQ ID NO: 3675689 - DNA, 25 bp, Homo sapien
ccctcctccccatgcctacgcactt

SEQ ID NO: 3675690 - DNA, 25 bp, Homo sapien
ctccccatgcctacgcacttcttcc

SEQ ID NO: 3675691 - DNA, 25 bp, Homo sapien
cctagaagtgtcaagccttccctgg

SEQ ID NO: 3675692 - DNA, 25 bp, Homo sapien
ctcctagaagtgtcaagccttccct

SEQ ID NO: 3675693 - DNA, 25 bp, Homo sapien
tcctagaagtgtcaagccttccctg

SEQ ID NO: 3675694 - DNA, 25 bp, Homo sapien
ttggtgggtccctccaatacctcca

SEQ ID NO: 3675695 - DNA, 25 bp, Homo sapien
tcattttggtgggtccctccaatac

SEQ ID NO: 3675696 - DNA, 25 bp, Homo sapien
tgggtccctccaatacctccacttg

SEQ ID NO: 3675697 - DNA, 25 bp, Homo sapien
cctccaatacctccacttgccctgt

SEQ ID NO: 3675698 - DNA, 25 bp, Homo sapien
gccttaagcttctcgcccatcaggt

SEQ ID NO: 3675699 - DNA, 25 bp, Homo sapien
cccggttgttgccttaagcttctcg

SEQ ID NO: 3675700 - DNA, 25 bp, Homo sapien
tcccggttgttgccttaagcttctc

SEQ ID NO: 3675701 - DNA, 25 bp, Homo sapien
ttgccttaagcttctcgcccatcag

SEQ ID NO: 3675702 - DNA, 25 bp, Homo sapien
tctgttgtgtattagccaagaacaa

SEQ ID NO: 3675703 - DNA, 25 bp, Homo sapien
gccaagaacaaggtgtgatgtgact

SEQ ID NO: 3675704 - DNA, 25 bp, Homo sapien
tgtgatgtgacttcccaattattgg

SEQ ID NO: 3675705 - DNA, 25 bp, Homo sapien
ttcttgaggttttgcctggatgacc

SEQ ID NO: 3675706 - DNA, 25 bp, Homo sapien
ctgggaagacattcaataactgttt

SEQ ID NO: 3675707 - DNA, 25 bp, Homo sapien
gaagacattcaataactgtttcatt

SEQ ID NO: 3675708 - DNA, 25 bp, Homo sapien
gggaagacattcaataactgtttca

SEQ ID NO: 3675709 - DNA, 25 bp, Homo sapien
agacattcaataactgtttcattac

SEQ ID NO: 3675710 - DNA, 25 bp, Homo sapien
acggcggtagatgggtgctctcctt

SEQ ID NO: 3675711 - DNA, 25 bp, Homo sapien
gcaggactgcgggaacggcggtaga

SEQ ID NO: 3675712 - DNA, 25 bp, Homo sapien
cgggaacggcggtagatgggtgctc

SEQ ID NO: 3675713 - DNA, 25 bp, Homo sapien
tgggtgctctccttcccagtttgtc

SEQ ID NO: 3675714 - DNA, 25 bp, Homo sapien
tggagtgttggcaggactggcccac

SEQ ID NO: 3675715 - DNA, 25 bp, Homo sapien
tgaggggagctggagtgttggcagg

SEQ ID NO: 3675716 - DNA, 25 bp, Homo sapien
gctggagtgttggcaggactggccc

SEQ ID NO: 3675717 - DNA, 25 bp, Homo sapien
ctgtgaggggagctggagtgttggc

SEQ ID NO: 3675718 - DNA, 25 bp, Homo sapien
gactctggcttccggtggttcggcc

SEQ ID NO: 3675719 - DNA, 25 bp, Homo sapien
tggcttccggtggttcggccacctg

SEQ ID NO: 3675720 - DNA, 25 bp, Homo sapien
cttccggtggttcggccacctgatt

SEQ ID NO: 3675721 - DNA, 25 bp, Homo sapien
ctctggcttccggtggttcggccac

SEQ ID NO: 3675722 - DNA, 25 bp, Homo sapien
cgacccttctcttcgtagcccccag

SEQ ID NO: 3675723 - DNA, 25 bp, Homo sapien
aaggggactgagctgctccacatgc

SEQ ID NO: 3675724 - DNA, 25 bp, Homo sapien
ctggcgcagccaatcgcagagcggg

SEQ ID NO: 3675725 - DNA, 25 bp, Homo sapien
cgcccagcggctggcgcagccaatc

SEQ ID NO: 3675726 - DNA, 25 bp, Homo sapien
taaatcgctgtggtttccgaggctc

SEQ ID NO: 3675727 - DNA, 25 bp, Homo sapien
cgaggctcttcatacctgggtattc

SEQ ID NO: 3675728 - DNA, 25 bp, Homo sapien
cgtcgcttccggagcagcatggaag

SEQ ID NO: 3675729 - DNA, 25 bp, Homo sapien
gccttgaggatttgccggagcgcta

SEQ ID NO: 3675730 - DNA, 25 bp, Homo sapien
tcataagtgattggagtattccggg

SEQ ID NO: 3675731 - DNA, 25 bp, Homo sapien
tttctaagtttcacggcatagctga

SEQ ID NO: 3675732 - DNA, 25 bp, Homo sapien
agtgttcttatgagcccaagagttg

SEQ ID NO: 3675733 - DNA, 25 bp, Homo sapien
tgaatttggtctaggctgggttgaa

SEQ ID NO: 3675734 - DNA, 25 bp, Homo sapien
tacttgagtcactatgaaagtggac

SEQ ID NO: 3675735 - DNA, 25 bp, Homo sapien
ttgaaccttggaataacgatagccc

SEQ ID NO: 3675736 - DNA, 25 bp, Homo sapien
ttccaagtctagatgacaaaagcct

SEQ ID NO: 3675737 - DNA, 25 bp, Homo sapien
taaaacagtgaagtaggcctcttgc

SEQ ID NO: 3675738 - DNA, 25 bp, Homo sapien
cctcgccttagtcctccgcgaaggc

SEQ ID NO: 3675739 - DNA, 25 bp, Homo sapien
tccggagcagcgtacaccgccctcg

SEQ ID NO: 3675740 - DNA, 25 bp, Homo sapien
ttagttggtgcggtgcaaaagccag

SEQ ID NO: 3675741 - DNA, 25 bp, Homo sapien
cagctgtgcggcctgccgcggatta

SEQ ID NO: 3675742 - DNA, 25 bp, Homo sapien
tcaggtccgcttccacaccgccgga

SEQ ID NO: 3675743 - DNA, 25 bp, Homo sapien
ggaagactagtcaacagctgtgtgc

SEQ ID NO: 3675744 - DNA, 25 bp, Homo sapien
agactagtcaacagctgtgtgcggg

SEQ ID NO: 3675745 - DNA, 25 bp, Homo sapien
caccgggtccgcatccctcccgatt

SEQ ID NO: 3675746 - DNA, 25 bp, Homo sapien
agggagagttgtatatggttctgca

SEQ ID NO: 3675747 - DNA, 25 bp, Homo sapien
cagggagagttgtatatggttctgc

SEQ ID NO: 3675748 - DNA, 25 bp, Homo sapien
gcagggagagttgtatatggttctg

SEQ ID NO: 3675749 - DNA, 25 bp, Homo sapien
cgtagcaatagccttagcaaggttt

SEQ ID NO: 3675750 - DNA, 25 bp, Homo sapien
tcgatgctgcctcatatcgctgagc

SEQ ID NO: 3675751 - DNA, 25 bp, Homo sapien
gtgcggtccataaattgtcgatgct

SEQ ID NO: 3675752 - DNA, 25 bp, Homo sapien
tccataaattgtcgatgctgcctca

SEQ ID NO: 3675753 - DNA, 25 bp, Homo sapien
aaagggaggttctggacctctgctc

SEQ ID NO: 3675754 - DNA, 25 bp, Homo sapien
agggaggttctggacctctgctcag

SEQ ID NO: 3675755 - DNA, 25 bp, Homo sapien
gaggttctggacctctgctcaggtt

SEQ ID NO: 3675756 - DNA, 25 bp, Homo sapien
taatggaactattaattgtttgaaa

SEQ ID NO: 3675757 - DNA, 25 bp, Homo sapien
catccccgaaagttctgccttttgg

SEQ ID NO: 3675758 - DNA, 25 bp, Homo sapien
tgccttttggtgctctatccacaat

SEQ ID NO: 3675759 - DNA, 25 bp, Homo sapien
cactctgtattcaggttttgctggc

SEQ ID NO: 3675760 - DNA, 25 bp, Homo sapien
ggctgcaggacatccccgaaagttc

SEQ ID NO: 3675761 - DNA, 25 bp, Homo sapien
tttgtactgaattcttcgggttagc

SEQ ID NO: 3675762 - DNA, 25 bp, Homo sapien
tacaaatataacttcagcaacttcc

SEQ ID NO: 3675763 - DNA, 25 bp, Homo sapien
caaatataacttcagcaacttcccc

SEQ ID NO: 3675764 - DNA, 25 bp, Homo sapien
ttcgggttagcacctacaaatataa

SEQ ID NO: 3675765 - DNA, 25 bp, Homo sapien
cgatgttgaagtagcctcatatttc

SEQ ID NO: 3675766 - DNA, 25 bp, Homo sapien
tacacactatctgccacgatgttga

SEQ ID NO: 3675767 - DNA, 25 bp, Homo sapien
tgaagtagcctcatatttctccaca

SEQ ID NO: 3675768 - DNA, 25 bp, Homo sapien
attacacactatctgccacgatgtt

SEQ ID NO: 3675769 - DNA, 25 bp, Homo sapien
aagtatgacagcaggcttcagaatg

SEQ ID NO: 3675770 - DNA, 25 bp, Homo sapien
aagccggggaagtgccttcaaatga

SEQ ID NO: 3675771 - DNA, 25 bp, Homo sapien
gtcctgcttccgattgtgtccaaaa

SEQ ID NO: 3675772 - DNA, 25 bp, Homo sapien
cattccactgttgcattactcagac

SEQ ID NO: 3675773 - DNA, 25 bp, Homo sapien
ctttaaatgatctatcaacttttca

SEQ ID NO: 3675774 - DNA, 25 bp, Homo sapien
tactttcagacaatcgatgtcagat

SEQ ID NO: 3675775 - DNA, 25 bp, Homo sapien
gcagtctgggaggttgtagttaact

SEQ ID NO: 3675776 - DNA, 25 bp, Homo sapien
taaatgcaattagtactttcagaca

SEQ ID NO: 3675777 - DNA, 25 bp, Homo sapien
caatcgatgtcagattgtcatatct

SEQ ID NO: 3675778 - DNA, 25 bp, Homo sapien
tgaacatagaactgcatgccctaga

SEQ ID NO: 3675779 - DNA, 25 bp, Homo sapien
tccagcagttaaggcccaaggaaac

SEQ ID NO: 3675780 - DNA, 25 bp, Homo sapien
cttttacactgaagactgtggcgtc

SEQ ID NO: 3675781 - DNA, 25 bp, Homo sapien
caagagtgctaggtgcagaaggatc

SEQ ID NO: 3675782 - DNA, 25 bp, Homo sapien
ttccaccaatttcaggagtttccgc

SEQ ID NO: 3675783 - DNA, 25 bp, Homo sapien
accaatttcaggagtttccgccaca

SEQ ID NO: 3675784 - DNA, 25 bp, Homo sapien
ccaatttcaggagtttccgccacat

SEQ ID NO: 3675785 - DNA, 25 bp, Homo sapien
ccaccaatttcaggagtttccgcca

SEQ ID NO: 3675786 - DNA, 25 bp, Homo sapien
taaataatccattgaatattgacaa

SEQ ID NO: 3675787 - DNA, 25 bp, Homo sapien
gagtaggcagggtacagcaaataaa

SEQ ID NO: 3675788 - DNA, 25 bp, Homo sapien
ccagagtaggcagggtacagcaaat

SEQ ID NO: 3675789 - DNA, 25 bp, Homo sapien
aaaaccagagtaggcagggtacagc

SEQ ID NO: 3675790 - DNA, 25 bp, Homo sapien
catagttagctacctgcctaggaaa

SEQ ID NO: 3675791 - DNA, 25 bp, Homo sapien
ggctaaagatagaatccatgcgcta

SEQ ID NO: 3675792 - DNA, 25 bp, Homo sapien
tatatgtagacttgaggtagcgatc

SEQ ID NO: 3675793 - DNA, 25 bp, Homo sapien
taagcttgcttacattggaggagaa

SEQ ID NO: 3675794 - DNA, 25 bp, Homo sapien
ttatttcaaagagcagttaatttgg

SEQ ID NO: 3675795 - DNA, 25 bp, Homo sapien
tctagagtaaaacgagttctaatta

SEQ ID NO: 3675796 - DNA, 25 bp, Homo sapien
tatgcagatattattgcttgcccac

SEQ ID NO: 3675797 - DNA, 25 bp, Homo sapien
aaaaatgcacagtaatgtggaagct

SEQ ID NO: 3675798 - DNA, 25 bp, Homo sapien
caaagcctgccatagcaaagtaaca

SEQ ID NO: 3675799 - DNA, 25 bp, Homo sapien
catgtcagcctcctagtttctggtg

SEQ ID NO: 3675800 - DNA, 25 bp, Homo sapien
tatctattgaccagtgtatttattt

SEQ ID NO: 3675801 - DNA, 25 bp, Homo sapien
cctcctagtttctggtgattgctgg

SEQ ID NO: 3675802 - DNA, 25 bp, Homo sapien
tttttataaggcaatcgggtatcaa

SEQ ID NO: 3675803 - DNA, 25 bp, Homo sapien
ttttttataaggcaatcgggtatca

SEQ ID NO: 3675804 - DNA, 25 bp, Homo sapien
ttttctgctcccctaccaataaggc

SEQ ID NO: 3675805 - DNA, 25 bp, Homo sapien
ttcttccacctgaaatttctcccca

SEQ ID NO: 3675806 - DNA, 25 bp, Homo sapien
tgctcccctaccaataaggcttttc

SEQ ID NO: 3675807 - DNA, 25 bp, Homo sapien
tctgctcccctaccaataaggcttt

SEQ ID NO: 3675808 - DNA, 25 bp, Homo sapien
aaatgactgaaaggaattcaaatat

SEQ ID NO: 3675809 - DNA, 25 bp, Homo sapien
ggtgtcatctcgcctttgtccactt

SEQ ID NO: 3675810 - DNA, 25 bp, Homo sapien
gtgtcatctcgcctttgtccacttc

SEQ ID NO: 3675811 - DNA, 25 bp, Homo sapien
aaggtgtcatctcgcctttgtccac

SEQ ID NO: 3675812 - DNA, 25 bp, Homo sapien
tgcaaggttttctagctgtggtttt

SEQ ID NO: 3675813 - DNA, 25 bp, Homo sapien
tcaaaagctttagggactggaagaa

SEQ ID NO: 3675814 - DNA, 25 bp, Homo sapien
aagtgtctggctaaacatcaaacag

SEQ ID NO: 3675815 - DNA, 25 bp, Homo sapien
gagatttcctgcaaggttttctagc

SEQ ID NO: 3675816 - DNA, 25 bp, Homo sapien
gtttctgactgcaatacagcccgat

SEQ ID NO: 3675817 - DNA, 25 bp, Homo sapien
tacaccattcacttgttgggaaaat

SEQ ID NO: 3675818 - DNA, 25 bp, Homo sapien
aatcacatgaaatgagagacaatgc

SEQ ID NO: 3675819 - DNA, 25 bp, Homo sapien
gaagttagttagctgaggtaccaaa

SEQ ID NO: 3675820 - DNA, 25 bp, Homo sapien
tgctccaacactaattcccttgcat

SEQ ID NO: 3675821 - DNA, 25 bp, Homo sapien
gctccaacactaattcccttgcatt

SEQ ID NO: 3675822 - DNA, 25 bp, Homo sapien
cttggtctgtagagatccacagggc

SEQ ID NO: 3675823 - DNA, 25 bp, Homo sapien
tctctgaggtgacaatacattctgg

SEQ ID NO: 3675824 - DNA, 25 bp, Homo sapien
tccacagggcactagtagggtatta

SEQ ID NO: 3675825 - DNA, 25 bp, Homo sapien
tgagcagggtcatagtaaacagaga

SEQ ID NO: 3675826 - DNA, 25 bp, Homo sapien
tggaattcttctgtacctacctccc

SEQ ID NO: 3675827 - DNA, 25 bp, Homo sapien
cacaaatgatactttgtctaaggga

SEQ ID NO: 3675828 - DNA, 25 bp, Homo sapien
ctaagggaataggagataccaagaa

SEQ ID NO: 3675829 - DNA, 25 bp, Homo sapien
caaatgatactttgtctaagggaat

SEQ ID NO: 3675830 - DNA, 25 bp, Homo sapien
tgctcaatattcacataaagtcatg

SEQ ID NO: 3675831 - DNA, 25 bp, Homo sapien
tccacatagacagggaggttcttag

SEQ ID NO: 3675832 - DNA, 25 bp, Homo sapien
tattgaacaactctaacactaagat

SEQ ID NO: 3675833 - DNA, 25 bp, Homo sapien
tataattctgtcttggacaactggg

SEQ ID NO: 3675834 - DNA, 25 bp, Homo sapien
ccatggctcactgtgtggggcatga

SEQ ID NO: 3675835 - DNA, 25 bp, Homo sapien
tgtcacagatcaggatcttcctgtc

SEQ ID NO: 3675836 - DNA, 25 bp, Homo sapien
gcctgaaaattccatccagtcgatt

SEQ ID NO: 3675837 - DNA, 25 bp, Homo sapien
ctgagctcatgaaagactgtccaag

SEQ ID NO: 3675838 - DNA, 25 bp, Homo sapien
ttctactgcacataaactaaatggg

SEQ ID NO: 3675839 - DNA, 25 bp, Homo sapien
aaaataatccaaccagcttcctgcc

SEQ ID NO: 3675840 - DNA, 25 bp, Homo sapien
tctctgaggcggagaaccagcatca

SEQ ID NO: 3675841 - DNA, 25 bp, Homo sapien
gacacaatgctaacatgaaagcgca

SEQ ID NO: 3675842 - DNA, 25 bp, Homo sapien
agtcttcatttcccagccaccaaag

SEQ ID NO: 3675843 - DNA, 25 bp, Homo sapien
aacagagccattatccgagcccctt

SEQ ID NO: 3675844 - DNA, 25 bp, Homo sapien
tcagcaacagagccattatccgagc

SEQ ID NO: 3675845 - DNA, 25 bp, Homo sapien
ccccccagacctatgcagcaattcc

SEQ ID NO: 3675846 - DNA, 25 bp, Homo sapien
gaaggagtcatgttattagggctca

SEQ ID NO: 3675847 - DNA, 25 bp, Homo sapien
tacaacaggtgctggatggttcccc

SEQ ID NO: 3675848 - DNA, 25 bp, Homo sapien
tggttatcttcatatcatctcgcgt

SEQ ID NO: 3675849 - DNA, 25 bp, Homo sapien
tatgcaacttaccaacaaaatggct

SEQ ID NO: 3675850 - DNA, 25 bp, Homo sapien
gggacaaattgaccaagaggctgaa

SEQ ID NO: 3675851 - DNA, 25 bp, Homo sapien
tatggaagtgcctataagcagagac

SEQ ID NO: 3675852 - DNA, 25 bp, Homo sapien
tcaggatgaccatgaagcacaagct

SEQ ID NO: 3675853 - DNA, 25 bp, Homo sapien
agggtaagggtgcacactcagctgc

SEQ ID NO: 3675854 - DNA, 25 bp, Homo sapien
aagtgaaacaggaaggtgactcata

SEQ ID NO: 3675855 - DNA, 25 bp, Homo sapien
gactttcaatggtcaatcttccaaa

SEQ ID NO: 3675856 - DNA, 25 bp, Homo sapien
tcatagttgtttccttagaagaacc

SEQ ID NO: 3675857 - DNA, 25 bp, Homo sapien
gaattcattaaatctcctggctaac

SEQ ID NO: 3675858 - DNA, 25 bp, Homo sapien
gaatagatttagtgccttgccaagt

SEQ ID NO: 3675859 - DNA, 25 bp, Homo sapien
tcaaacccggtgcattggatgggat

SEQ ID NO: 3675860 - DNA, 25 bp, Homo sapien
taacttaatcagatctagcggccat

SEQ ID NO: 3675861 - DNA, 25 bp, Homo sapien
aattccttacatgcctcaaacccgg

SEQ ID NO: 3675862 - DNA, 25 bp, Homo sapien
ctaataactagaacccagtgtggca

SEQ ID NO: 3675863 - DNA, 25 bp, Homo sapien
ctgggaacttgtggatgtgagcaac

SEQ ID NO: 3675864 - DNA, 25 bp, Homo sapien
ctacagcctagaaccttcaaaatgg

SEQ ID NO: 3675865 - DNA, 25 bp, Homo sapien
tcatgtactctactgaacatgtctg

SEQ ID NO: 3675866 - DNA, 25 bp, Homo sapien
ggtcaaataggcactgatgttgcaa

SEQ ID NO: 3675867 - DNA, 25 bp, Homo sapien
aactttgcccaatagtgaactatgg

SEQ ID NO: 3675868 - DNA, 25 bp, Homo sapien
gccaagtgacgaggtgagctattca

SEQ ID NO: 3675869 - DNA, 25 bp, Homo sapien
ggtcgggaactgcagctctaacttt

SEQ ID NO: 3675870 - DNA, 25 bp, Homo sapien
atcagatgcctaaaaatcctagctt

SEQ ID NO: 3675871 - DNA, 25 bp, Homo sapien
ttttggtgtttccatcagatgccta

SEQ ID NO: 3675872 - DNA, 25 bp, Homo sapien
ggtgtttccatcagatgcctaaaaa

SEQ ID NO: 3675873 - DNA, 25 bp, Homo sapien
agatgcctaaaaatcctagctttcc

SEQ ID NO: 3675874 - DNA, 25 bp, Homo sapien
atggacctggtatagcctatttttg

SEQ ID NO: 3675875 - DNA, 25 bp, Homo sapien
tatggacctggtatagcctattttt

SEQ ID NO: 3675876 - DNA, 25 bp, Homo sapien
taacctcatcaagtgcacctgccct

SEQ ID NO: 3675877 - DNA, 25 bp, Homo sapien
ttaacctcatcaagtgcacctgccc

SEQ ID NO: 3675878 - DNA, 25 bp, Homo sapien
acctcatcaagtgcacctgccctct

SEQ ID NO: 3675879 - DNA, 25 bp, Homo sapien
tcatcaagtgcacctgccctctagg

SEQ ID NO: 3675880 - DNA, 25 bp, Homo sapien
atcttcctcagtacgtccttcaccc

SEQ ID NO: 3675881 - DNA, 25 bp, Homo sapien
tcttcctcagtacgtccttcacccg

SEQ ID NO: 3675882 - DNA, 25 bp, Homo sapien
cttcctcagtacgtccttcacccgg

SEQ ID NO: 3675883 - DNA, 25 bp, Homo sapien
ctccatgaggcagccgtgagtatac

SEQ ID NO: 3675884 - DNA, 25 bp, Homo sapien
agccgtgagtatactggctgcccac

SEQ ID NO: 3675885 - DNA, 25 bp, Homo sapien
taattttggtcctggaaggtatcga

SEQ ID NO: 3675886 - DNA, 25 bp, Homo sapien
agggaaccaaatcggtcctccatga

SEQ ID NO: 3675887 - DNA, 25 bp, Homo sapien
gcagactagtgggatagcaaacacc

SEQ ID NO: 3675888 - DNA, 25 bp, Homo sapien
agactagtgggatagcaaacaccag

SEQ ID NO: 3675889 - DNA, 25 bp, Homo sapien
ggcagactagtgggatagcaaacac

SEQ ID NO: 3675890 - DNA, 25 bp, Homo sapien
tgtgtgtgtgtttgatatctgtggc

SEQ ID NO: 3675891 - DNA, 25 bp, Homo sapien
cgtgtgtgtgtgtttgatatctgtg

SEQ ID NO: 3675892 - DNA, 25 bp, Homo sapien
tgtgtgtgtttgatatctgtggcct

SEQ ID NO: 3675893 - DNA, 25 bp, Homo sapien
gcgtgtgtgtgtgtttgatatctgt

SEQ ID NO: 3675894 - DNA, 25 bp, Homo sapien
tctagtgttttactattgtcatgaa

SEQ ID NO: 3675895 - DNA, 25 bp, Homo sapien
gaattcaccttctagtgttttacta

SEQ ID NO: 3675896 - DNA, 25 bp, Homo sapien
actattgtcatgaatgtcaggaatg

SEQ ID NO: 3675897 - DNA, 25 bp, Homo sapien
tgtcatgaatgtcaggaatgggaaa

SEQ ID NO: 3675898 - DNA, 25 bp, Homo sapien
ctatcagggatgccctccatttgtg

SEQ ID NO: 3675899 - DNA, 25 bp, Homo sapien
tcagggatgccctccatttgtgggt

SEQ ID NO: 3675900 - DNA, 25 bp, Homo sapien
catttgtgggtctggcatccaacat

SEQ ID NO: 3675901 - DNA, 25 bp, Homo sapien
tccatttgtgggtctggcatccaac

SEQ ID NO: 3675902 - DNA, 25 bp, Homo sapien
tgggttgtctgctccccctgggcag

SEQ ID NO: 3675903 - DNA, 25 bp, Homo sapien
tgattgtaacacagctaccctctgc

SEQ ID NO: 3675904 - DNA, 25 bp, Homo sapien
aactcaacgtaactctagacactgg

SEQ ID NO: 3675905 - DNA, 25 bp, Homo sapien
gcagggactccttctttcgtactct

SEQ ID NO: 3675906 - DNA, 25 bp, Homo sapien
taatacgtgaggacataatcaaagt

SEQ ID NO: 3675907 - DNA, 25 bp, Homo sapien
aatcaaagtgaagctggtagagggc

SEQ ID NO: 3675908 - DNA, 25 bp, Homo sapien
aaagaatccacataatacgtgagga

SEQ ID NO: 3675909 - DNA, 25 bp, Homo sapien
taaagttcatgtgagaacaagaatg

SEQ ID NO: 3675910 - DNA, 25 bp, Homo sapien
aagcagcagtaagattcatcgcaga

SEQ ID NO: 3675911 - DNA, 25 bp, Homo sapien
tgcctgtgctgataagaattactgg

SEQ ID NO: 3675912 - DNA, 25 bp, Homo sapien
cagaccttagtggtgagtctcacag

SEQ ID NO: 3675913 - DNA, 25 bp, Homo sapien
taaaggcgggtgcagacccatacag

SEQ ID NO: 3675914 - DNA, 25 bp, Homo sapien
gagtgcgcccctaatgcggcgcggg

SEQ ID NO: 3675915 - DNA, 25 bp, Homo sapien
tgaatgggcgctaagtactcgagcg

SEQ ID NO: 3675916 - DNA, 25 bp, Homo sapien
ctgaatggactaaaagcaccgaggg

SEQ ID NO: 3675917 - DNA, 25 bp, Homo sapien
tcctgcttcgatccgcttctgctga

SEQ ID NO: 3675918 - DNA, 25 bp, Homo sapien
cactgagcccctccgcgaaactttt

SEQ ID NO: 3675919 - DNA, 25 bp, Homo sapien
tcactgagcccctccgcgaaacttt

SEQ ID NO: 3675920 - DNA, 25 bp, Homo sapien
gaaggacctgtacgtctgcggctcg

SEQ ID NO: 3675921 - DNA, 25 bp, Homo sapien
actgggagcaccgactggcatttgt

SEQ ID NO: 3675922 - DNA, 25 bp, Homo sapien
gacttggtgaacttccggaatgcct

SEQ ID NO: 3675923 - DNA, 25 bp, Homo sapien
tgagaatcttggcaaagtcttcctc

SEQ ID NO: 3675924 - DNA, 25 bp, Homo sapien
aggtcccacaattccttaagaggag

SEQ ID NO: 3675925 - DNA, 25 bp, Homo sapien
taataactctgaaccgctgctcagc

SEQ ID NO: 3675926 - DNA, 25 bp, Homo sapien
agtggcagacactaagcgccctgga

SEQ ID NO: 3675927 - DNA, 25 bp, Homo sapien
gactttcaaggcaagatgggcccaa

SEQ ID NO: 3675928 - DNA, 25 bp, Homo sapien
gttcagtaaatctagtccaatatca

SEQ ID NO: 3675929 - DNA, 25 bp, Homo sapien
aaatgtttgcaaagatatcgttcag

SEQ ID NO: 3675930 - DNA, 25 bp, Homo sapien
tacccttaatatgattgaattctga

SEQ ID NO: 3675931 - DNA, 25 bp, Homo sapien
caatcacacgattgaatacccttaa

SEQ ID NO: 3675932 - DNA, 25 bp, Homo sapien
catgtcactggaatatcagtctttc

SEQ ID NO: 3675933 - DNA, 25 bp, Homo sapien
tcaagaagtccaaaaccattcccag

SEQ ID NO: 3675934 - DNA, 25 bp, Homo sapien
ccctctagtaaagctaaaagtatgt

SEQ ID NO: 3675935 - DNA, 25 bp, Homo sapien
tatgtgtgtgcaccttagattgagg

SEQ ID NO: 3675936 - DNA, 25 bp, Homo sapien
ggattctttgaaccaccttgtatga

SEQ ID NO: 3675937 - DNA, 25 bp, Homo sapien
gttatgatgtgctaggatccactgg

SEQ ID NO: 3675938 - DNA, 25 bp, Homo sapien
gaatttacccaccatggaacaagag

SEQ ID NO: 3675939 - DNA, 25 bp, Homo sapien
caaaatatccatagttgcaaggcta

SEQ ID NO: 3675940 - DNA, 25 bp, Homo sapien
actggagaatcccacaatttgaata

SEQ ID NO: 3675941 - DNA, 25 bp, Homo sapien
ggaattcgttcaagagcctgggaga

SEQ ID NO: 3675942 - DNA, 25 bp, Homo sapien
tctatgcaacttaacacaatgtgcc

SEQ ID NO: 3675943 - DNA, 25 bp, Homo sapien
gaaaaaattaactgcgtctggacat

SEQ ID NO: 3675944 - DNA, 25 bp, Homo sapien
tgaggtctaagaattcctactagcc

SEQ ID NO: 3675945 - DNA, 25 bp, Homo sapien
ctcctgcctgagcctccagaatagc

SEQ ID NO: 3675946 - DNA, 25 bp, Homo sapien
ttgcctgccttggcctcccaaagtg

SEQ ID NO: 3675947 - DNA, 25 bp, Homo sapien
tgggattatagatgcccaccacctt

SEQ ID NO: 3675948 - DNA, 25 bp, Homo sapien
gggattatagatgcccaccaccttg

SEQ ID NO: 3675949 - DNA, 25 bp, Homo sapien
ggttgacgtcctgcaaacacatatg

SEQ ID NO: 3675950 - DNA, 25 bp, Homo sapien
aactgcgttctagaaggttgacgtc

SEQ ID NO: 3675951 - DNA, 25 bp, Homo sapien
taaaaagcaacagagggccactggt

SEQ ID NO: 3675952 - DNA, 25 bp, Homo sapien
gggacccagggtcaattatctctaa

SEQ ID NO: 3675953 - DNA, 25 bp, Homo sapien
tctagagatcaaagggatactgggt

SEQ ID NO: 3675954 - DNA, 25 bp, Homo sapien
tatctaccgtaaaagaggcagcatg

SEQ ID NO: 3675955 - DNA, 25 bp, Homo sapien
tgtgtcaagaaccaatgcaagccag

SEQ ID NO: 3675956 - DNA, 25 bp, Homo sapien
ttcaactggttaagagcagggcctc

SEQ ID NO: 3675957 - DNA, 25 bp, Homo sapien
caattgaggctatgggtagctcagt

SEQ ID NO: 3675958 - DNA, 25 bp, Homo sapien
ggtagctcagtgatgatcaacacag

SEQ ID NO: 3675959 - DNA, 25 bp, Homo sapien
ccccatgcaattgaggctatgggta

SEQ ID NO: 3675960 - DNA, 25 bp, Homo sapien
ggaactgctccaatgttctggtgat

SEQ ID NO: 3675961 - DNA, 25 bp, Homo sapien
cagtttaggctcatctacccacaca

SEQ ID NO: 3675962 - DNA, 25 bp, Homo sapien
tctacccacacagagtctagtgagg

SEQ ID NO: 3675963 - DNA, 25 bp, Homo sapien
tcacaagacccagtttaggctcatc

SEQ ID NO: 3675964 - DNA, 25 bp, Homo sapien
tggccttcacaagacccagtttagg

SEQ ID NO: 3675965 - DNA, 25 bp, Homo sapien
caggcaacaagctacgtgttttgca

SEQ ID NO: 3675966 - DNA, 25 bp, Homo sapien
gattcaatccctggtggaatctagc

SEQ ID NO: 3675967 - DNA, 25 bp, Homo sapien
gaaaactgacctaggctacccatct

SEQ ID NO: 3675968 - DNA, 25 bp, Homo sapien
ggatttcacatgatatgacaggcaa

SEQ ID NO: 3675969 - DNA, 25 bp, Homo sapien
gaagcttcacatggcagcacatcca

SEQ ID NO: 3675970 - DNA, 25 bp, Homo sapien
gacatgaaggactcaaggacgagca

SEQ ID NO: 3675971 - DNA, 25 bp, Homo sapien
gtctatttgaccctgcactgagaga

SEQ ID NO: 3675972 - DNA, 25 bp, Homo sapien
caatttgggccggaacaatagacat

SEQ ID NO: 3675973 - DNA, 25 bp, Homo sapien
actttccccaaagtcgccgctgcct

SEQ ID NO: 3675974 - DNA, 25 bp, Homo sapien
caaaccagcaggtccaacccgggat

SEQ ID NO: 3675975 - DNA, 25 bp, Homo sapien
tccagccacccagagtttcagtgca

SEQ ID NO: 3675976 - DNA, 25 bp, Homo sapien
attaaacctgagacgcggtgggcgc

SEQ ID NO: 3675977 - DNA, 25 bp, Homo sapien
gctcctccgggctgccgggggctcc

SEQ ID NO: 3675978 - DNA, 25 bp, Homo sapien
gggggctccttcctgccgctgctcc

SEQ ID NO: 3675979 - DNA, 25 bp, Homo sapien
ctcctccgggctgccgggggctcct

SEQ ID NO: 3675980 - DNA, 25 bp, Homo sapien
gctccttcctgccgctgctccgcgt

SEQ ID NO: 3675981 - DNA, 25 bp, Homo sapien
ggtcacatggctgagatcctggatg

SEQ ID NO: 3675982 - DNA, 25 bp, Homo sapien
gatcaccgagcggtacttgtccagc

SEQ ID NO: 3675983 - DNA, 25 bp, Homo sapien
tccagctcgtcgatgagagcatccc

SEQ ID NO: 3675984 - DNA, 25 bp, Homo sapien
ggagcgcgtactgtaaatcccgcaa

SEQ ID NO: 3675985 - DNA, 25 bp, Homo sapien
gcagcagcctggtgttcgaatatgg

SEQ ID NO: 3675986 - DNA, 25 bp, Homo sapien
gttcgaatatggttgctaggatacc

SEQ ID NO: 3675987 - DNA, 25 bp, Homo sapien
gctaggataccatggagaccctcca

SEQ ID NO: 3675988 - DNA, 25 bp, Homo sapien
cctggtgttcgaatatggttgctag

SEQ ID NO: 3675989 - DNA, 25 bp, Homo sapien
tcagaggatctggaatgctagcaac

SEQ ID NO: 3675990 - DNA, 25 bp, Homo sapien
tcaagtcagaggatctggaatgcta

SEQ ID NO: 3675991 - DNA, 25 bp, Homo sapien
tctggaatgctagcaacagacccag

SEQ ID NO: 3675992 - DNA, 25 bp, Homo sapien
gctagcaacagacccagtttcttgg

SEQ ID NO: 3675993 - DNA, 25 bp, Homo sapien
ccactgaacagagctgctgccactt

SEQ ID NO: 3675994 - DNA, 25 bp, Homo sapien
gctgctgccacttttgtgtgcccca

SEQ ID NO: 3675995 - DNA, 25 bp, Homo sapien
tgctgccacttttgtgtgccccagg

SEQ ID NO: 3675996 - DNA, 25 bp, Homo sapien
gagctgctgccacttttgtgtgccc

SEQ ID NO: 3675997 - DNA, 25 bp, Homo sapien
tcttttattgcaggtgtcgtctccg

SEQ ID NO: 3675998 - DNA, 25 bp, Homo sapien
tattgcaggtgtcgtctccgacctc

SEQ ID NO: 3675999 - DNA, 25 bp, Homo sapien
caagatcttttattgcaggtgtcgt

SEQ ID NO: 3676000 - DNA, 25 bp, Homo sapien
ggtgtcgtctccgacctctcaactg

SEQ ID NO: 3676001 - DNA, 25 bp, Homo sapien
ccctggaagtcttcatgagggacac

SEQ ID NO: 3676002 - DNA, 25 bp, Homo sapien
cccctggaagtcttcatgagggaca

SEQ ID NO: 3676003 - DNA, 25 bp, Homo sapien
aaagggtcactcgagaagagtatcc

SEQ ID NO: 3676004 - DNA, 25 bp, Homo sapien
tgcaccaaaagataagacgaacctc

SEQ ID NO: 3676005 - DNA, 25 bp, Homo sapien
gacgaacctcagatgagaaagggtc

SEQ ID NO: 3676006 - DNA, 25 bp, Homo sapien
gagtatcctcctctttgatgatcag

SEQ ID NO: 3676007 - DNA, 25 bp, Homo sapien
cccagttggctcataacccagaagc

SEQ ID NO: 3676008 - DNA, 25 bp, Homo sapien
ctgataggcatcagagcaaaggctt

SEQ ID NO: 3676009 - DNA, 25 bp, Homo sapien
ccagaagcctttgcaccaggcagga

SEQ ID NO: 3676010 - DNA, 25 bp, Homo sapien
acagatttggcagcatccccagttg

SEQ ID NO: 3676011 - DNA, 25 bp, Homo sapien
gagataaaaatctctcgggaagaag

SEQ ID NO: 3676012 - DNA, 25 bp, Homo sapien
gagggcgggcactgcaatccttgtt

SEQ ID NO: 3676013 - DNA, 25 bp, Homo sapien
tatgtctatcaggagggtaatctgc

SEQ ID NO: 3676014 - DNA, 25 bp, Homo sapien
cgggccatccagaaggttgagtgta

SEQ ID NO: 3676015 - DNA, 25 bp, Homo sapien
agaagagactcccttggtgaaaact

SEQ ID NO: 3676016 - DNA, 25 bp, Homo sapien
taaaaataagggctatgggctatgc

SEQ ID NO: 3676017 - DNA, 25 bp, Homo sapien
gaatctgtttaagcaatgcctcagc

SEQ ID NO: 3676018 - DNA, 25 bp, Homo sapien
cactttgcattcgtgacaagaggca

SEQ ID NO: 3676019 - DNA, 25 bp, Homo sapien
catttcagagaaggcgtgtaaagta

SEQ ID NO: 3676020 - DNA, 25 bp, Homo sapien
ttgtcacctcactcttgattcagct

SEQ ID NO: 3676021 - DNA, 25 bp, Homo sapien
gaaatgtcttcggtctatcatcaca

SEQ ID NO: 3676022 - DNA, 25 bp, Homo sapien
tattgggctcggaattctatgttgg

SEQ ID NO: 3676023 - DNA, 25 bp, Homo sapien
ccacacagctatgctcttgaaggtt

SEQ ID NO: 3676024 - DNA, 25 bp, Homo sapien
gggcagttgtcggtttctggactct

SEQ ID NO: 3676025 - DNA, 25 bp, Homo sapien
tgggattgccctaaaactatagatc

SEQ ID NO: 3676026 - DNA, 25 bp, Homo sapien
atttgcctgctcaaacccaagtgcg

SEQ ID NO: 3676027 - DNA, 25 bp, Homo sapien
cacctccatcctacctctcccaaat

SEQ ID NO: 3676028 - DNA, 25 bp, Homo sapien
tacattacaaattaccccctcacat

SEQ ID NO: 3676029 - DNA, 25 bp, Homo sapien
ctcacattcatttattagggtctag

SEQ ID NO: 3676030 - DNA, 25 bp, Homo sapien
tcatttattagggtctagcacctcc

SEQ ID NO: 3676031 - DNA, 25 bp, Homo sapien
gcctgcataacgtgagaaagtctct

SEQ ID NO: 3676032 - DNA, 25 bp, Homo sapien
caaaccttgtaagaagcctgcataa

SEQ ID NO: 3676033 - DNA, 25 bp, Homo sapien
tttatttcccgagctaagacagagg

SEQ ID NO: 3676034 - DNA, 25 bp, Homo sapien
gcaaatggatttcaaggtccaccaa

SEQ ID NO: 3676035 - DNA, 25 bp, Homo sapien
tggccacacagtctagtacaaggag

SEQ ID NO: 3676036 - DNA, 25 bp, Homo sapien
tcttggccacacagtctagtacaag

SEQ ID NO: 3676037 - DNA, 25 bp, Homo sapien
tgagtatacgatattttcattttag

SEQ ID NO: 3676038 - DNA, 25 bp, Homo sapien
ccacacagtctagtacaaggaggag

SEQ ID NO: 3676039 - DNA, 25 bp, Homo sapien
tatccatttgggaactcagacatcc

SEQ ID NO: 3676040 - DNA, 25 bp, Homo sapien
catccaagtcttcattgaggacatg

SEQ ID NO: 3676041 - DNA, 25 bp, Homo sapien
ttttcaaaggacaactccatccatc

SEQ ID NO: 3676042 - DNA, 25 bp, Homo sapien
ttcacacagacatactccttgcaga

SEQ ID NO: 3676043 - DNA, 25 bp, Homo sapien
caaccaacaaaatcatacaagtcca

SEQ ID NO: 3676044 - DNA, 25 bp, Homo sapien
caaccaaccaacaaaatcatacaag

SEQ ID NO: 3676045 - DNA, 25 bp, Homo sapien
aaccaacaaaatcatacaagtccat

SEQ ID NO: 3676046 - DNA, 25 bp, Homo sapien
accaaccaacaaaatcatacaagtc

SEQ ID NO: 3676047 - DNA, 25 bp, Homo sapien
gaagactggagaacaaagtatgtcc

SEQ ID NO: 3676048 - DNA, 25 bp, Homo sapien
gcgccatagagtgctctggcacacc

SEQ ID NO: 3676049 - DNA, 25 bp, Homo sapien
tgaggtttagcagcgccatagagtg

SEQ ID NO: 3676050 - DNA, 25 bp, Homo sapien
tgttaggaatccaataattttctgg

SEQ ID NO: 3676051 - DNA, 25 bp, Homo sapien
tggcacatctgacaagctctttcat

SEQ ID NO: 3676052 - DNA, 25 bp, Homo sapien
ctatggcaagagagggaagatttac

SEQ ID NO: 3676053 - DNA, 25 bp, Homo sapien
ccacgtctccttctttgatgatgca

SEQ ID NO: 3676054 - DNA, 25 bp, Homo sapien
ggtacatacaatccacaatctcctg

SEQ ID NO: 3676055 - DNA, 25 bp, Homo sapien
caatctcctggatctgcgacagctc

SEQ ID NO: 3676056 - DNA, 25 bp, Homo sapien
tgtccttgccatactccaccgggta

SEQ ID NO: 3676057 - DNA, 25 bp, Homo sapien
taagtggctttaaattgagggcatg

SEQ ID NO: 3676058 - DNA, 25 bp, Homo sapien
taccgtcattgagtgaaccatcaag

SEQ ID NO: 3676059 - DNA, 25 bp, Homo sapien
gcaatgttgctgaaggtattaaata

SEQ ID NO: 3676060 - DNA, 25 bp, Homo sapien
caaggatcgcataaatctgtatcag

SEQ ID NO: 3676061 - DNA, 25 bp, Homo sapien
gaattgtagtcaattgcattgttcc

SEQ ID NO: 3676062 - DNA, 25 bp, Homo sapien
tagcagacagacatttgagtgttgc

SEQ ID NO: 3676063 - DNA, 25 bp, Homo sapien
taatcactcaatatatctacgtaga

SEQ ID NO: 3676064 - DNA, 25 bp, Homo sapien
tccctcctgtcaactgtgaatgtgt

SEQ ID NO: 3676065 - DNA, 25 bp, Homo sapien
caaaatggcaaataaagctgatgat

SEQ ID NO: 3676066 - DNA, 25 bp, Homo sapien
tttcaaagtttaatagagtcccatc

SEQ ID NO: 3676067 - DNA, 25 bp, Homo sapien
caaaggtcatgtggtcttccctgtt

SEQ ID NO: 3676068 - DNA, 25 bp, Homo sapien
gagtcccatctcaacccattctatt

SEQ ID NO: 3676069 - DNA, 25 bp, Homo sapien
ggaagccctttggtagtccatacag

SEQ ID NO: 3676070 - DNA, 25 bp, Homo sapien
gcatacagatgcacaggtaccacta

SEQ ID NO: 3676071 - DNA, 25 bp, Homo sapien
tgggttggccctgtaatagcctgaa

SEQ ID NO: 3676072 - DNA, 25 bp, Homo sapien
catacaggccattgtgctggtaaca

SEQ ID NO: 3676073 - DNA, 25 bp, Homo sapien
aatgccagcattcttctactccctt

SEQ ID NO: 3676074 - DNA, 25 bp, Homo sapien
tgccagcattcttctactcccttcc

SEQ ID NO: 3676075 - DNA, 25 bp, Homo sapien
aacaaatgccagcattcttctactc

SEQ ID NO: 3676076 - DNA, 25 bp, Homo sapien
aaatgccagcattcttctactccct

SEQ ID NO: 3676077 - DNA, 25 bp, Homo sapien
catctccagatctcttcttttgtaa

SEQ ID NO: 3676078 - DNA, 25 bp, Homo sapien
cacaccaaacttattaggtaatgcg

SEQ ID NO: 3676079 - DNA, 25 bp, Homo sapien
tcgataatccaacaccctcacaatg

SEQ ID NO: 3676080 - DNA, 25 bp, Homo sapien
tgcgttcttaaaccatttagacacg

SEQ ID NO: 3676081 - DNA, 25 bp, Homo sapien
tgacaggaaaccttagatatccact

SEQ ID NO: 3676082 - DNA, 25 bp, Homo sapien
tcatattcataggatcaggacacgt

SEQ ID NO: 3676083 - DNA, 25 bp, Homo sapien
tctgcctatcacagaaatctaactc

SEQ ID NO: 3676084 - DNA, 25 bp, Homo sapien
taggatcaggacacgtggaatcttg

SEQ ID NO: 3676085 - DNA, 25 bp, Homo sapien
tgctgttgtaaaccaaggaaccatg

SEQ ID NO: 3676086 - DNA, 25 bp, Homo sapien
catgtaaaaagactggcctctaagc

SEQ ID NO: 3676087 - DNA, 25 bp, Homo sapien
taattcttggaacttatacaaagag

SEQ ID NO: 3676088 - DNA, 25 bp, Homo sapien
gatatcatagatctagatggctgac

SEQ ID NO: 3676089 - DNA, 25 bp, Homo sapien
tgggcaggaataccgtaattcctac

SEQ ID NO: 3676090 - DNA, 25 bp, Homo sapien
gtaacaaattacagtgatggatatg

SEQ ID NO: 3676091 - DNA, 25 bp, Homo sapien
agtaacaaattacagtgatggatat

SEQ ID NO: 3676092 - DNA, 25 bp, Homo sapien
gttgtgggcaggaataccgtaattc

SEQ ID NO: 3676093 - DNA, 25 bp, Homo sapien
ggcaatggcaggcttacacaaaacc

SEQ ID NO: 3676094 - DNA, 25 bp, Homo sapien
caaatctgtcacacttggcaggtct

SEQ ID NO: 3676095 - DNA, 25 bp, Homo sapien
ccttagtgattctaatgatgatgct

SEQ ID NO: 3676096 - DNA, 25 bp, Homo sapien
gatgctgatgatacctaaactgaca

SEQ ID NO: 3676097 - DNA, 25 bp, Homo sapien
gagcccagtgaactagctagcttct

SEQ ID NO: 3676098 - DNA, 25 bp, Homo sapien
tagtatttcgtaataacagcccaga

SEQ ID NO: 3676099 - DNA, 25 bp, Homo sapien
tacttcagtgacaagcaagctcgtt

SEQ ID NO: 3676100 - DNA, 25 bp, Homo sapien
tcaccagacactaaatacgccagcg

SEQ ID NO: 3676101 - DNA, 25 bp, Homo sapien
caaacttgtagagtgaggatctgaa

SEQ ID NO: 3676102 - DNA, 25 bp, Homo sapien
tctgaactgaagcttttagtcccat

SEQ ID NO: 3676103 - DNA, 25 bp, Homo sapien
tttgagatcgcctcaccctgtaacc

SEQ ID NO: 3676104 - DNA, 25 bp, Homo sapien
gagttttgccacgtttcccaggtca

SEQ ID NO: 3676105 - DNA, 25 bp, Homo sapien
aacaatgtcaaacgtggtctcagag

SEQ ID NO: 3676106 - DNA, 25 bp, Homo sapien
catgcatttatctgagtcctaagcc

SEQ ID NO: 3676107 - DNA, 25 bp, Homo sapien
taacaagacacctgagagtcacagg

SEQ ID NO: 3676108 - DNA, 25 bp, Homo sapien
cagagaaaccggagtgacaatgtca

SEQ ID NO: 3676109 - DNA, 25 bp, Homo sapien
tctttgtgaacaggttgagctctcc

SEQ ID NO: 3676110 - DNA, 25 bp, Homo sapien
gggcagaaaagactagctcatcaca

SEQ ID NO: 3676111 - DNA, 25 bp, Homo sapien
tctttcagtgcaatctgggcagaaa

SEQ ID NO: 3676112 - DNA, 25 bp, Homo sapien
tctccttacaacgaagcagcagctt

SEQ ID NO: 3676113 - DNA, 25 bp, Homo sapien
tgtccatgaccaggacatattctgg

SEQ ID NO: 3676114 - DNA, 25 bp, Homo sapien
ttgaatgtccatgaccaggacatat

SEQ ID NO: 3676115 - DNA, 25 bp, Homo sapien
ggtattgcggaaagtactggcttga

SEQ ID NO: 3676116 - DNA, 25 bp, Homo sapien
ttaggtattgcggaaagtactggct

SEQ ID NO: 3676117 - DNA, 25 bp, Homo sapien
gcagctgtccgaactccaatcttgt

SEQ ID NO: 3676118 - DNA, 25 bp, Homo sapien
agaagggtgtgaactgatatttagc

SEQ ID NO: 3676119 - DNA, 25 bp, Homo sapien
ctttttgcaaggttagagaagggtg

SEQ ID NO: 3676120 - DNA, 25 bp, Homo sapien
tgtgaagggcctatgttaaaactgt

SEQ ID NO: 3676121 - DNA, 25 bp, Homo sapien
aagcctaggcccattctggtccaga

SEQ ID NO: 3676122 - DNA, 25 bp, Homo sapien
gaacttgggctaaacatgagcctca

SEQ ID NO: 3676123 - DNA, 25 bp, Homo sapien
gggtagagccttaagaatatcagcc

SEQ ID NO: 3676124 - DNA, 25 bp, Homo sapien
gcctgtgccatgacgccgtgactat

SEQ ID NO: 3676125 - DNA, 25 bp, Homo sapien
gaccctctcaggtttaaggacagca

SEQ ID NO: 3676126 - DNA, 25 bp, Homo sapien
tatatataggacgacttcccttgcc

SEQ ID NO: 3676127 - DNA, 25 bp, Homo sapien
gaaattggctttggactactggatg

SEQ ID NO: 3676128 - DNA, 25 bp, Homo sapien
tacaggcttctgacacttgcgcttg

SEQ ID NO: 3676129 - DNA, 25 bp, Homo sapien
gggataattactgcacactctgagc

SEQ ID NO: 3676130 - DNA, 25 bp, Homo sapien
caaatgtaattgttccgtttccagc

SEQ ID NO: 3676131 - DNA, 25 bp, Homo sapien
caattaattagcatttccaggtgca

SEQ ID NO: 3676132 - DNA, 25 bp, Homo sapien
tataagaagtcaagtaatactctcc

SEQ ID NO: 3676133 - DNA, 25 bp, Homo sapien
aaaggctcaggaatgtagtcccagt

SEQ ID NO: 3676134 - DNA, 25 bp, Homo sapien
ttctagagaaggaaaggcagcagtc

SEQ ID NO: 3676135 - DNA, 25 bp, Homo sapien
gcattggcactttgctggctgctga

SEQ ID NO: 3676136 - DNA, 25 bp, Homo sapien
gaaaagcgaaggtctgtgaatcagg

SEQ ID NO: 3676137 - DNA, 25 bp, Homo sapien
acattttgggcttacctggccatac

SEQ ID NO: 3676138 - DNA, 25 bp, Homo sapien
gaaagtcagtccatcttgcggagca

SEQ ID NO: 3676139 - DNA, 25 bp, Homo sapien
caagtgcaaatctcaaggacagtgg

SEQ ID NO: 3676140 - DNA, 25 bp, Homo sapien
cctgtgggcatgtgggtttgcaacc

SEQ ID NO: 3676141 - DNA, 25 bp, Homo sapien
tcatcccttcattactcttgcacaa

SEQ ID NO: 3676142 - DNA, 25 bp, Homo sapien
ggtttgcatggcctgtcaaaggaga

SEQ ID NO: 3676143 - DNA, 25 bp, Homo sapien
actaggagctcaataccagttcttc

SEQ ID NO: 3676144 - DNA, 25 bp, Homo sapien
tcactgtaataatgtgagtaaaggg

SEQ ID NO: 3676145 - DNA, 25 bp, Homo sapien
taagatctacgttcctttgacacaa

SEQ ID NO: 3676146 - DNA, 25 bp, Homo sapien
cataatgatcatagtttgtgctgcc

SEQ ID NO: 3676147 - DNA, 25 bp, Homo sapien
taaagtctttccatcctgatgggca

SEQ ID NO: 3676148 - DNA, 25 bp, Homo sapien
tgtgctgccctttcaaaaaacatgg

SEQ ID NO: 3676149 - DNA, 25 bp, Homo sapien
cctcttcactgaactttcctgaagt

SEQ ID NO: 3676150 - DNA, 25 bp, Homo sapien
ccctcttcactgaactttcctgaag

SEQ ID NO: 3676151 - DNA, 25 bp, Homo sapien
ggccctcttcactgaactttcctga

SEQ ID NO: 3676152 - DNA, 25 bp, Homo sapien
gccctcttcactgaactttcctgaa

SEQ ID NO: 3676153 - DNA, 25 bp, Homo sapien
ttctctatgaagtagtctccaaaca

SEQ ID NO: 3676154 - DNA, 25 bp, Homo sapien
tatttgtctatgttctactcctcct

SEQ ID NO: 3676155 - DNA, 25 bp, Homo sapien
gcatcttcctggattggatctgtgt

SEQ ID NO: 3676156 - DNA, 25 bp, Homo sapien
cctggattggatctgtgtctttcta

SEQ ID NO: 3676157 - DNA, 25 bp, Homo sapien
tgatgctaccacagatatgaatggg

SEQ ID NO: 3676158 - DNA, 25 bp, Homo sapien
tgaatgggttaattagagcaatgtc

SEQ ID NO: 3676159 - DNA, 25 bp, Homo sapien
cttcccaaggagttttgcctgatgc

SEQ ID NO: 3676160 - DNA, 25 bp, Homo sapien
taattagagcaatgtctggaagctg

SEQ ID NO: 3676161 - DNA, 25 bp, Homo sapien
ataaaagcagttctataagtaatac

SEQ ID NO: 3676162 - DNA, 25 bp, Homo sapien
tacagtgtttccataataaaagcag

SEQ ID NO: 3676163 - DNA, 25 bp, Homo sapien
ataataaaagcagttctataagtaa

SEQ ID NO: 3676164 - DNA, 25 bp, Homo sapien
ttacagtgtttccataataaaagca

SEQ ID NO: 3676165 - DNA, 25 bp, Homo sapien
caatggttctggcaattggaacttt

SEQ ID NO: 3676166 - DNA, 25 bp, Homo sapien
tatgggtcatgtgtaagtaaaaaga

SEQ ID NO: 3676167 - DNA, 25 bp, Homo sapien
agagaaggtgcatctgtcctcataa

SEQ ID NO: 3676168 - DNA, 25 bp, Homo sapien
cagggcatgagaagctgtttataat

SEQ ID NO: 3676169 - DNA, 25 bp, Homo sapien
ggtccccacactggtgattcagctc

SEQ ID NO: 3676170 - DNA, 25 bp, Homo sapien
gggaaagtggtccccacactggtga

SEQ ID NO: 3676171 - DNA, 25 bp, Homo sapien
catgcccacagactgactgggccag

SEQ ID NO: 3676172 - DNA, 25 bp, Homo sapien
ggtgattcagctcacatgcccacag

SEQ ID NO: 3676173 - DNA, 25 bp, Homo sapien
cactgtctttatcctctcttgtagc

SEQ ID NO: 3676174 - DNA, 25 bp, Homo sapien
cattgtgagtgctggataggtgttt

SEQ ID NO: 3676175 - DNA, 25 bp, Homo sapien
ggaagacagcctgtccattgtgagt

SEQ ID NO: 3676176 - DNA, 25 bp, Homo sapien
tatgtacagcatatgctccataatc

SEQ ID NO: 3676177 - DNA, 25 bp, Homo sapien
catggctataaggaagacgctgaaa

SEQ ID NO: 3676178 - DNA, 25 bp, Homo sapien
tcctgagtgcatggaccactcaagg

SEQ ID NO: 3676179 - DNA, 25 bp, Homo sapien
ccactcaaggtatagaacattctgt

SEQ ID NO: 3676180 - DNA, 25 bp, Homo sapien
tgccctaaaggccaattgaaaggct

SEQ ID NO: 3676181 - DNA, 25 bp, Homo sapien
gaacgatgagactaagtctccttta

SEQ ID NO: 3676182 - DNA, 25 bp, Homo sapien
ggacggctgaattaatccagacatt

SEQ ID NO: 3676183 - DNA, 25 bp, Homo sapien
aacttctttcctggacggctgaatt

SEQ ID NO: 3676184 - DNA, 25 bp, Homo sapien
agtctcctttactagatgttgtcca

SEQ ID NO: 3676185 - DNA, 25 bp, Homo sapien
tacctcaaaagtatagcataaaact

SEQ ID NO: 3676186 - DNA, 25 bp, Homo sapien
tattaatctgctcttaatacacaga

SEQ ID NO: 3676187 - DNA, 25 bp, Homo sapien
tgaggctatattaatctgctcttaa

SEQ ID NO: 3676188 - DNA, 25 bp, Homo sapien
gtacctcaaaagtatagcataaaac

SEQ ID NO: 3676189 - DNA, 25 bp, Homo sapien
agtgctgtacacactcctcattccc

SEQ ID NO: 3676190 - DNA, 25 bp, Homo sapien
tgtgtgaaaagtgctgtacacactc

SEQ ID NO: 3676191 - DNA, 25 bp, Homo sapien
tgctgtacacactcctcattccctt

SEQ ID NO: 3676192 - DNA, 25 bp, Homo sapien
gaaaagtgctgtacacactcctcat

SEQ ID NO: 3676193 - DNA, 25 bp, Homo sapien
tatgggtcaccctgacagtgagttg

SEQ ID NO: 3676194 - DNA, 25 bp, Homo sapien
ataaaattgtgtaccccactacttg

SEQ ID NO: 3676195 - DNA, 25 bp, Homo sapien
tcatctcagagtgcacattaatcag

SEQ ID NO: 3676196 - DNA, 25 bp, Homo sapien
ggctgtttgtcatagcgcagttttc

SEQ ID NO: 3676197 - DNA, 25 bp, Homo sapien
tttcgttcaacaatcaaagtagtat

SEQ ID NO: 3676198 - DNA, 25 bp, Homo sapien
gtagtatctcatatattagctctga

SEQ ID NO: 3676199 - DNA, 25 bp, Homo sapien
taaagtaataaagccacacattctt

SEQ ID NO: 3676200 - DNA, 25 bp, Homo sapien
tgcgccccgtcccaactttgtctta

SEQ ID NO: 3676201 - DNA, 25 bp, Homo sapien
tgtagatgacctagtcaccctgtcc

SEQ ID NO: 3676202 - DNA, 25 bp, Homo sapien
gacctagtcaccctgtccacttcct

SEQ ID NO: 3676203 - DNA, 25 bp, Homo sapien
gatgacctagtcaccctgtccactt

SEQ ID NO: 3676204 - DNA, 25 bp, Homo sapien
tagatgacctagtcaccctgtccac

SEQ ID NO: 3676205 - DNA, 25 bp, Homo sapien
aggcaaagtatttagcccattcatg

SEQ ID NO: 3676206 - DNA, 25 bp, Homo sapien
tatttagcccattcatgcccaggtt

SEQ ID NO: 3676207 - DNA, 25 bp, Homo sapien
taaggaaaatgtgccattgacatac

SEQ ID NO: 3676208 - DNA, 25 bp, Homo sapien
gcccaggttcatgtgtttgagtttc

SEQ ID NO: 3676209 - DNA, 25 bp, Homo sapien
ataagagtgcacggaaggtagtaag

SEQ ID NO: 3676210 - DNA, 25 bp, Homo sapien
ccaggaagagaattctcattcaaat

SEQ ID NO: 3676211 - DNA, 25 bp, Homo sapien
aagagtgcacggaaggtagtaaggt

SEQ ID NO: 3676212 - DNA, 25 bp, Homo sapien
gagtgcacggaaggtagtaaggtag

SEQ ID NO: 3676213 - DNA, 25 bp, Homo sapien
ggattttaaaatcattgtcacttac

SEQ ID NO: 3676214 - DNA, 25 bp, Homo sapien
caggattttaaaatcattgtcactt

SEQ ID NO: 3676215 - DNA, 25 bp, Homo sapien
ctggttgcaggattttaaaatcatt

SEQ ID NO: 3676216 - DNA, 25 bp, Homo sapien
ggttgcaggattttaaaatcattgt

SEQ ID NO: 3676217 - DNA, 25 bp, Homo sapien
tccccagtttccctaggctgcaaga

SEQ ID NO: 3676218 - DNA, 25 bp, Homo sapien
ccctaggctgcaagatcaggttgtt

SEQ ID NO: 3676219 - DNA, 25 bp, Homo sapien
tatccctaaagctgggtatctgcaa

SEQ ID NO: 3676220 - DNA, 25 bp, Homo sapien
tgttgagttccttaagctgggtaaa

SEQ ID NO: 3676221 - DNA, 25 bp, Homo sapien
ttttggtggttctggatttgcctgc

SEQ ID NO: 3676222 - DNA, 25 bp, Homo sapien
tctgaccagttaaatataagtttcc

SEQ ID NO: 3676223 - DNA, 25 bp, Homo sapien
tgctgccatagaggtactcatatgt

SEQ ID NO: 3676224 - DNA, 25 bp, Homo sapien
caggacacatcaagctggaactggc

SEQ ID NO: 3676225 - DNA, 25 bp, Homo sapien
atttgttactgtctgtcaggtgttt

SEQ ID NO: 3676226 - DNA, 25 bp, Homo sapien
ttgttactgtctgtcaggtgtttcc

SEQ ID NO: 3676227 - DNA, 25 bp, Homo sapien
tttgttactgtctgtcaggtgtttc

SEQ ID NO: 3676228 - DNA, 25 bp, Homo sapien
tgttactgtctgtcaggtgtttcca

SEQ ID NO: 3676229 - DNA, 25 bp, Homo sapien
ctaaaaaggtggatctcatgttggt

SEQ ID NO: 3676230 - DNA, 25 bp, Homo sapien
ccggcccacaatggaaccttaatgg

SEQ ID NO: 3676231 - DNA, 25 bp, Homo sapien
aaatcttgtcgtttgcagcaatgta

SEQ ID NO: 3676232 - DNA, 25 bp, Homo sapien
acatgtttcctttcacacgtgggag

SEQ ID NO: 3676233 - DNA, 25 bp, Homo sapien
gaaacgttataggacattggcctgg

SEQ ID NO: 3676234 - DNA, 25 bp, Homo sapien
tgggtaagacctacaaagcacaagc

SEQ ID NO: 3676235 - DNA, 25 bp, Homo sapien
ggctcaggctggtgcatgtctccca

SEQ ID NO: 3676236 - DNA, 25 bp, Homo sapien
cacctagtgcaaaagtgggaaactc

SEQ ID NO: 3676237 - DNA, 25 bp, Homo sapien
aacctgacaattaaccactgatgtt

SEQ ID NO: 3676238 - DNA, 25 bp, Homo sapien
tgtaacacctcagggtagagatact

SEQ ID NO: 3676239 - DNA, 25 bp, Homo sapien
tgatgttactttttgggagctaggt

SEQ ID NO: 3676240 - DNA, 25 bp, Homo sapien
cacatatgcagtatacatgctgact

SEQ ID NO: 3676241 - DNA, 25 bp, Homo sapien
agggaagcatcccaggtcctcggca

SEQ ID NO: 3676242 - DNA, 25 bp, Homo sapien
tggcattcatctgtggccacgaaaa

SEQ ID NO: 3676243 - DNA, 25 bp, Homo sapien
gaaaataaccagactcaggatgctg

SEQ ID NO: 3676244 - DNA, 25 bp, Homo sapien
tcggcaacatcatcaagctactgat

SEQ ID NO: 3676245 - DNA, 25 bp, Homo sapien
tcatctgtattagtgagttgggatg

SEQ ID NO: 3676246 - DNA, 25 bp, Homo sapien
gagacctcctgtactctgggttcct

SEQ ID NO: 3676247 - DNA, 25 bp, Homo sapien
gtttgagctttcaatggccttgtca

SEQ ID NO: 3676248 - DNA, 25 bp, Homo sapien
ctcctgtactctgggttcctttatc

SEQ ID NO: 3676249 - DNA, 25 bp, Homo sapien
aagcataacatataaggcttgatgt

SEQ ID NO: 3676250 - DNA, 25 bp, Homo sapien
taacatcaatttcccatgcaaagca

SEQ ID NO: 3676251 - DNA, 25 bp, Homo sapien
taatgactatgggatatgaccacta

SEQ ID NO: 3676252 - DNA, 25 bp, Homo sapien
taaggcttgatgttttattctcgtc

SEQ ID NO: 3676253 - DNA, 25 bp, Homo sapien
gttcctttttacatccacatacttg

SEQ ID NO: 3676254 - DNA, 25 bp, Homo sapien
ttcctttttacatccacatacttgc

SEQ ID NO: 3676255 - DNA, 25 bp, Homo sapien
tcctttttacatccacatacttgca

SEQ ID NO: 3676256 - DNA, 25 bp, Homo sapien
cctttttacatccacatacttgcat

SEQ ID NO: 3676257 - DNA, 25 bp, Homo sapien
gaatggactcagaggcacagtgaaa

SEQ ID NO: 3676258 - DNA, 25 bp, Homo sapien
gacttctaatagcagtcttgcaaga

SEQ ID NO: 3676259 - DNA, 25 bp, Homo sapien
ccttttaggtgcatgagctgtgcca

SEQ ID NO: 3676260 - DNA, 25 bp, Homo sapien
gttacatccacaagctggctgccag

SEQ ID NO: 3676261 - DNA, 25 bp, Homo sapien
cattctacttgcctgatcttggaca

SEQ ID NO: 3676262 - DNA, 25 bp, Homo sapien
tctctatcctcacacaactgtggga

SEQ ID NO: 3676263 - DNA, 25 bp, Homo sapien
aagactttggtgttgttcagggatc

SEQ ID NO: 3676264 - DNA, 25 bp, Homo sapien
tgtctattgtctattcagcaccgac

SEQ ID NO: 3676265 - DNA, 25 bp, Homo sapien
tacaaccaggtattctagagcttcc

SEQ ID NO: 3676266 - DNA, 25 bp, Homo sapien
caagctgaataacatgtgaggtcca

SEQ ID NO: 3676267 - DNA, 25 bp, Homo sapien
ggtacttaaactccgtgtgcctctg

SEQ ID NO: 3676268 - DNA, 25 bp, Homo sapien
gaataggccagtagtttccctcatg

SEQ ID NO: 3676269 - DNA, 25 bp, Homo sapien
ggtttgattctctgaaccagggcag

SEQ ID NO: 3676270 - DNA, 25 bp, Homo sapien
cagggcaggcataagaactaaggac

SEQ ID NO: 3676271 - DNA, 25 bp, Homo sapien
tttgagcccttgattgataccccag

SEQ ID NO: 3676272 - DNA, 25 bp, Homo sapien
tatctcagtgagaagccatgtagcc

SEQ ID NO: 3676273 - DNA, 25 bp, Homo sapien
tacagctggttgagccaaatggctc

SEQ ID NO: 3676274 - DNA, 25 bp, Homo sapien
gaaggcacagaagccacatgctcac

SEQ ID NO: 3676275 - DNA, 25 bp, Homo sapien
tatatcaactgctgccaatagaagg

SEQ ID NO: 3676276 - DNA, 25 bp, Homo sapien
gacatctgattcatagcaagccctg

SEQ ID NO: 3676277 - DNA, 25 bp, Homo sapien
ccagttagctctcaaagcctgaagc

SEQ ID NO: 3676278 - DNA, 25 bp, Homo sapien
gaaaggggctgctgctagttcacca

SEQ ID NO: 3676279 - DNA, 25 bp, Homo sapien
agtcattgaagaaaggggctgctgc

SEQ ID NO: 3676280 - DNA, 25 bp, Homo sapien
agttcaccagttctcctaatacacg

SEQ ID NO: 3676281 - DNA, 25 bp, Homo sapien
ctgctgctagttcaccagttctcct

SEQ ID NO: 3676282 - DNA, 25 bp, Homo sapien
gtgaaaactatctatctccagtggg

SEQ ID NO: 3676283 - DNA, 25 bp, Homo sapien
tgggccaagattaatcagttctact

SEQ ID NO: 3676284 - DNA, 25 bp, Homo sapien
taatcagttctactctggcttcatc

SEQ ID NO: 3676285 - DNA, 25 bp, Homo sapien
tgggtcttcaagacaatcaaactgg

SEQ ID NO: 3676286 - DNA, 25 bp, Homo sapien
tctctcctttaatcagcttggtccc

SEQ ID NO: 3676287 - DNA, 25 bp, Homo sapien
gatactaatatcagataatgagaca

SEQ ID NO: 3676288 - DNA, 25 bp, Homo sapien
taagtttaacctggtagaatccatg

SEQ ID NO: 3676289 - DNA, 25 bp, Homo sapien
gaatccatgtatgggagtatttcat

SEQ ID NO: 3676290 - DNA, 25 bp, Homo sapien
ctggtaagacagagatgtgtgggtc

SEQ ID NO: 3676291 - DNA, 25 bp, Homo sapien
ggtaagacagagatgtgtgggtcat

SEQ ID NO: 3676292 - DNA, 25 bp, Homo sapien
tggtaagacagagatgtgtgggtca

SEQ ID NO: 3676293 - DNA, 25 bp, Homo sapien
cttcttcaaaaccactgccaaagaa

SEQ ID NO: 3676294 - DNA, 25 bp, Homo sapien
tcacatccgtgcacaaagctgttct

SEQ ID NO: 3676295 - DNA, 25 bp, Homo sapien
acatccgtgcacaaagctgttcttt

SEQ ID NO: 3676296 - DNA, 25 bp, Homo sapien
cacatccgtgcacaaagctgttctt

SEQ ID NO: 3676297 - DNA, 25 bp, Homo sapien
gagcctgaaaagttgccatgaagaa

SEQ ID NO: 3676298 - DNA, 25 bp, Homo sapien
aggaactggggaaagtgtctctcca

SEQ ID NO: 3676299 - DNA, 25 bp, Homo sapien
ccatgaagaaaaacgaggaactggg

SEQ ID NO: 3676300 - DNA, 25 bp, Homo sapien
cagggctctgagagcctgaaaagtt

SEQ ID NO: 3676301 - DNA, 25 bp, Homo sapien
tgtcctgtgatcagtaggtataagg

SEQ ID NO: 3676302 - DNA, 25 bp, Homo sapien
cagaaagccttttgaaccacgctgg

SEQ ID NO: 3676303 - DNA, 25 bp, Homo sapien
tcagtaggtataaggctggcatgtt

SEQ ID NO: 3676304 - DNA, 25 bp, Homo sapien
ctagccaaggcctgattctgatcat

SEQ ID NO: 3676305 - DNA, 25 bp, Homo sapien
tgtttatgatatatgtagctttgga

SEQ ID NO: 3676306 - DNA, 25 bp, Homo sapien
tatgtagctttggaggactttctgt

SEQ ID NO: 3676307 - DNA, 25 bp, Homo sapien
actctgagtttgttaagatacttga

SEQ ID NO: 3676308 - DNA, 25 bp, Homo sapien
tatgaagtttataactatttagttc

SEQ ID NO: 3676309 - DNA, 25 bp, Homo sapien
agctattagagttgatacattctgc

SEQ ID NO: 3676310 - DNA, 25 bp, Homo sapien
aagctattagagttgatacattctg

SEQ ID NO: 3676311 - DNA, 25 bp, Homo sapien
gaagctattagagttgatacattct

SEQ ID NO: 3676312 - DNA, 25 bp, Homo sapien
gttcagtggcatgatcaggattcac

SEQ ID NO: 3676313 - DNA, 25 bp, Homo sapien
gattctcccacctcagcctcctgag

SEQ ID NO: 3676314 - DNA, 25 bp, Homo sapien
tgctctattgcccagaatggagttc

SEQ ID NO: 3676315 - DNA, 25 bp, Homo sapien
cagcctcaacctcctggactcaagt

SEQ ID NO: 3676316 - DNA, 25 bp, Homo sapien
gagcagaaaatttgcaccctgacta

SEQ ID NO: 3676317 - DNA, 25 bp, Homo sapien
caccctgactatgcgataggaaaga

SEQ ID NO: 3676318 - DNA, 25 bp, Homo sapien
gcagaaaatttgcaccctgactatg

SEQ ID NO: 3676319 - DNA, 25 bp, Homo sapien
atttgcaccctgactatgcgatagg

SEQ ID NO: 3676320 - DNA, 25 bp, Homo sapien
caccatactcagttgtactgccact

SEQ ID NO: 3676321 - DNA, 25 bp, Homo sapien
accatactcagttgtactgccactt

SEQ ID NO: 3676322 - DNA, 25 bp, Homo sapien
agataagatattcgccccataggaa

SEQ ID NO: 3676323 - DNA, 25 bp, Homo sapien
aaagataagatattcgccccatagg

SEQ ID NO: 3676324 - DNA, 25 bp, Homo sapien
taaagataagatattcgccccatag

SEQ ID NO: 3676325 - DNA, 25 bp, Homo sapien
taagatattcgccccataggaaaga

SEQ ID NO: 3676326 - DNA, 25 bp, Homo sapien
tggacccatggtacacaacttcaca

SEQ ID NO: 3676327 - DNA, 25 bp, Homo sapien
tccgggtacagttgtaaagaatagc

SEQ ID NO: 3676328 - DNA, 25 bp, Homo sapien
tcttgacggtcgctgtccgggtaca

SEQ ID NO: 3676329 - DNA, 25 bp, Homo sapien
taaagaatagccaattccccaaaca

SEQ ID NO: 3676330 - DNA, 25 bp, Homo sapien
cacacacacatgcacggatgcattc

SEQ ID NO: 3676331 - DNA, 25 bp, Homo sapien
gaagaaacagttgcgcacagatatt

SEQ ID NO: 3676332 - DNA, 25 bp, Homo sapien
ttagaatcataacatatccagcctg

SEQ ID NO: 3676333 - DNA, 25 bp, Homo sapien
gcttgaggcctacagtcacaagtac

SEQ ID NO: 3676334 - DNA, 25 bp, Homo sapien
tctccctagatagcagaggtggcag

SEQ ID NO: 3676335 - DNA, 25 bp, Homo sapien
atttaggttttcgacagtcagcaga

SEQ ID NO: 3676336 - DNA, 25 bp, Homo sapien
ttttcgacagtcagcagatttttct

SEQ ID NO: 3676337 - DNA, 25 bp, Homo sapien
ggttttcgacagtcagcagattttt

SEQ ID NO: 3676338 - DNA, 25 bp, Homo sapien
ttaggttttcgacagtcagcagatt

SEQ ID NO: 3676339 - DNA, 25 bp, Homo sapien
gcaacaggactatgggacaacacag

SEQ ID NO: 3676340 - DNA, 25 bp, Homo sapien
aaaaattatggccatcaccagcagc

SEQ ID NO: 3676341 - DNA, 25 bp, Homo sapien
ggccagaagtagtttgaatcatcaa

SEQ ID NO: 3676342 - DNA, 25 bp, Homo sapien
tcatgaagtcctaagaaatctggcc

SEQ ID NO: 3676343 - DNA, 25 bp, Homo sapien
cctccacagtttgtatcccttctgt

SEQ ID NO: 3676344 - DNA, 25 bp, Homo sapien
cttaggtggttttgattctcctcct

SEQ ID NO: 3676345 - DNA, 25 bp, Homo sapien
tgttccttttcacctaccttgtgct

SEQ ID NO: 3676346 - DNA, 25 bp, Homo sapien
ctattcacttaggtggttttgattc

SEQ ID NO: 3676347 - DNA, 25 bp, Homo sapien
ggtgtccattcctatctgattcaaa

SEQ ID NO: 3676348 - DNA, 25 bp, Homo sapien
tagctacagtatgaactggtgtcca

SEQ ID NO: 3676349 - DNA, 25 bp, Homo sapien
taatcccagtgaactgagagagtgg

SEQ ID NO: 3676350 - DNA, 25 bp, Homo sapien
aagctatagagctgagtgctgtgcc

SEQ ID NO: 3676351 - DNA, 25 bp, Homo sapien
gttgtgaccttagcatctcatgcag

SEQ ID NO: 3676352 - DNA, 25 bp, Homo sapien
tatgtgggtctaaaactcagagctc

SEQ ID NO: 3676353 - DNA, 25 bp, Homo sapien
gacacatcactggttaacacttgcc

SEQ ID NO: 3676354 - DNA, 25 bp, Homo sapien
ccactagactacaagctgcagaagg

SEQ ID NO: 3676355 - DNA, 25 bp, Homo sapien
gatttctttatgttgcgtacgctga

SEQ ID NO: 3676356 - DNA, 25 bp, Homo sapien
gctcacagtgatgtgtactaccaaa

SEQ ID NO: 3676357 - DNA, 25 bp, Homo sapien
tgtggataagtgaatttggctccca

SEQ ID NO: 3676358 - DNA, 25 bp, Homo sapien
tgagtgcctctcatcaacatctttc

SEQ ID NO: 3676359 - DNA, 25 bp, Homo sapien
cagcagttttgctgtacagtaaaag

SEQ ID NO: 3676360 - DNA, 25 bp, Homo sapien
acagtaaaagaacatctgtgcccat

SEQ ID NO: 3676361 - DNA, 25 bp, Homo sapien
cgatcagcagttttgctgtacagta

SEQ ID NO: 3676362 - DNA, 25 bp, Homo sapien
cttcttatcacgatcagcagttttg

SEQ ID NO: 3676363 - DNA, 25 bp, Homo sapien
tcagggagaacatcttcgatggtgt

SEQ ID NO: 3676364 - DNA, 25 bp, Homo sapien
cgacatcagtttggctattccagtc

SEQ ID NO: 3676365 - DNA, 25 bp, Homo sapien
tccaaagtgctccatcgacatcagt

SEQ ID NO: 3676366 - DNA, 25 bp, Homo sapien
taattgaaagagctctagccttcct

SEQ ID NO: 3676367 - DNA, 25 bp, Homo sapien
caagtgcaggtacccaaaaagactg

SEQ ID NO: 3676368 - DNA, 25 bp, Homo sapien
gctagacattgaggagaggcaactt

SEQ ID NO: 3676369 - DNA, 25 bp, Homo sapien
caagaattcaggttgcaccaagtgc

SEQ ID NO: 3676370 - DNA, 25 bp, Homo sapien
aacttgacttcggagacagcagcta

SEQ ID NO: 3676371 - DNA, 25 bp, Homo sapien
tgtatacagtacagactgccctgcg

SEQ ID NO: 3676372 - DNA, 25 bp, Homo sapien
tgtgaatttctagataatctgggag

SEQ ID NO: 3676373 - DNA, 25 bp, Homo sapien
gactggcgtagtgattgtttctccc

SEQ ID NO: 3676374 - DNA, 25 bp, Homo sapien
caggcactctgctagacattgatga

SEQ ID NO: 3676375 - DNA, 25 bp, Homo sapien
agggaagataccttaacatttagag

SEQ ID NO: 3676376 - DNA, 25 bp, Homo sapien
ttttgaagtgcaagggaagatacct

SEQ ID NO: 3676377 - DNA, 25 bp, Homo sapien
gcatgcacgccatattattttgaag

SEQ ID NO: 3676378 - DNA, 25 bp, Homo sapien
caaataaacacgttcttgttctcta

SEQ ID NO: 3676379 - DNA, 25 bp, Homo sapien
gtcacaacccgagaaggagctaaat

SEQ ID NO: 3676380 - DNA, 25 bp, Homo sapien
cacgctgtgggtttcctaacaccaa

SEQ ID NO: 3676381 - DNA, 25 bp, Homo sapien
taatggtcagtatatcacaactggg

SEQ ID NO: 3676382 - DNA, 25 bp, Homo sapien
tacttaactagggagatatttgccg

SEQ ID NO: 3676383 - DNA, 25 bp, Homo sapien
tatgtttgcccacccgagagttgca

SEQ ID NO: 3676384 - DNA, 25 bp, Homo sapien
aattgcaaacatctgggaaacctga

SEQ ID NO: 3676385 - DNA, 25 bp, Homo sapien
caggataggtaggtgcttgagacaa

SEQ ID NO: 3676386 - DNA, 25 bp, Homo sapien
tgcattaaggcacatgggacccagg

SEQ ID NO: 3676387 - DNA, 25 bp, Homo sapien
ggcccatatctttcgtataagccat

SEQ ID NO: 3676388 - DNA, 25 bp, Homo sapien
atggcccatatctttcgtataagcc

SEQ ID NO: 3676389 - DNA, 25 bp, Homo sapien
tggcccatatctttcgtataagcca

SEQ ID NO: 3676390 - DNA, 25 bp, Homo sapien
ttactaaactttccgatacacttga

SEQ ID NO: 3676391 - DNA, 25 bp, Homo sapien
tctgtttactaaactttccgataca

SEQ ID NO: 3676392 - DNA, 25 bp, Homo sapien
ttccgatacacttgattttgtcctc

SEQ ID NO: 3676393 - DNA, 25 bp, Homo sapien
ttgattttgtcctcaacatctacct

SEQ ID NO: 3676394 - DNA, 25 bp, Homo sapien
cctagaatatgtccagggttacagt

SEQ ID NO: 3676395 - DNA, 25 bp, Homo sapien
taaggcttgagagagcctagaatat

SEQ ID NO: 3676396 - DNA, 25 bp, Homo sapien
tattatcagaaagcaactttacttc

SEQ ID NO: 3676397 - DNA, 25 bp, Homo sapien
tatatcctaggaatgataatctgtt

SEQ ID NO: 3676398 - DNA, 25 bp, Homo sapien
ccattgatgacatcccatgcatatt

SEQ ID NO: 3676399 - DNA, 25 bp, Homo sapien
accattgatgacatcccatgcatat

SEQ ID NO: 3676400 - DNA, 25 bp, Homo sapien
attcacaggtatagaacgaggaatt

SEQ ID NO: 3676401 - DNA, 25 bp, Homo sapien
tcacaggtatagaacgaggaattca

SEQ ID NO: 3676402 - DNA, 25 bp, Homo sapien
caaagtcaaagtacgtcactgttgc

SEQ ID NO: 3676403 - DNA, 25 bp, Homo sapien
tattgagacaatcacataaggcttg

SEQ ID NO: 3676404 - DNA, 25 bp, Homo sapien
caatgcttccgtagtgacaaagtca

SEQ ID NO: 3676405 - DNA, 25 bp, Homo sapien
caacaaccgatttaagaaggatcac

SEQ ID NO: 3676406 - DNA, 25 bp, Homo sapien
taacacaagacattgccggtaggga

SEQ ID NO: 3676407 - DNA, 25 bp, Homo sapien
ccagccctgttcaaaaccgtctaag

SEQ ID NO: 3676408 - DNA, 25 bp, Homo sapien
tatctggtcacctgtattgaatcac

SEQ ID NO: 3676409 - DNA, 25 bp, Homo sapien
taagcacacaatgtttcttgcagaa

SEQ ID NO: 3676410 - DNA, 25 bp, Homo sapien
tctcctgttacaaacatgaggtggt

SEQ ID NO: 3676411 - DNA, 25 bp, Homo sapien
gatagacctgccagtagcactattt

SEQ ID NO: 3676412 - DNA, 25 bp, Homo sapien
aggagattatttcccctggacatct

SEQ ID NO: 3676413 - DNA, 25 bp, Homo sapien
taaacactctattccattaatcagg

SEQ ID NO: 3676414 - DNA, 25 bp, Homo sapien
tatgatgctggttaggtgtggaggc

SEQ ID NO: 3676415 - DNA, 25 bp, Homo sapien
gaatctaaagtatgatgctggttag

SEQ ID NO: 3676416 - DNA, 25 bp, Homo sapien
tctaaagtatgatgctggttaggtg

SEQ ID NO: 3676417 - DNA, 25 bp, Homo sapien
aagaatgaatctaaagtatgatgct

SEQ ID NO: 3676418 - DNA, 25 bp, Homo sapien
tgagctggcaataggacaaatgacc

SEQ ID NO: 3676419 - DNA, 25 bp, Homo sapien
tatagctcacggcatgaacaggatg

SEQ ID NO: 3676420 - DNA, 25 bp, Homo sapien
ggcacttgggcactttcagtactga

SEQ ID NO: 3676421 - DNA, 25 bp, Homo sapien
cccaatttgagagggcagcagtaga

SEQ ID NO: 3676422 - DNA, 25 bp, Homo sapien
tttacattgggtagaggaacactaa

SEQ ID NO: 3676423 - DNA, 25 bp, Homo sapien
gctatttgaagttaacctttgacat

SEQ ID NO: 3676424 - DNA, 25 bp, Homo sapien
ttgacattcaatacttgctataaag

SEQ ID NO: 3676425 - DNA, 25 bp, Homo sapien
tagaattcttatactgctctggaag

SEQ ID NO: 3676426 - DNA, 25 bp, Homo sapien
ttaggtccacaccattacagtgagt

SEQ ID NO: 3676427 - DNA, 25 bp, Homo sapien
tacagtgagttaccctgaggttcaa

SEQ ID NO: 3676428 - DNA, 25 bp, Homo sapien
caactaagaataggtcaggcgggat

SEQ ID NO: 3676429 - DNA, 25 bp, Homo sapien
tcccatcgaaagatttgcaaagcct

SEQ ID NO: 3676430 - DNA, 25 bp, Homo sapien
aaattggtagactctgatgccttta

SEQ ID NO: 3676431 - DNA, 25 bp, Homo sapien
attggtagactctgatgcctttacc

SEQ ID NO: 3676432 - DNA, 25 bp, Homo sapien
aattggtagactctgatgcctttac

SEQ ID NO: 3676433 - DNA, 25 bp, Homo sapien
gagagacagagggaaacagttttga

SEQ ID NO: 3676434 - DNA, 25 bp, Homo sapien
aaatgagaagaaaggaacagatgtg

SEQ ID NO: 3676435 - DNA, 25 bp, Homo sapien
ctggagagacagagggaaacagttt

SEQ ID NO: 3676436 - DNA, 25 bp, Homo sapien
gagacagagggaaacagttttgaaa

SEQ ID NO: 3676437 - DNA, 25 bp, Homo sapien
gtttacagtaatgaaagatccttga

SEQ ID NO: 3676438 - DNA, 25 bp, Homo sapien
ccataggttgtctttatgtagttgc

SEQ ID NO: 3676439 - DNA, 25 bp, Homo sapien
tttgattaccaggtttacagtaatg

SEQ ID NO: 3676440 - DNA, 25 bp, Homo sapien
ggttgtctttatgtagttgctagtt

SEQ ID NO: 3676441 - DNA, 25 bp, Homo sapien
gcctctgatttaccccttttggtga

SEQ ID NO: 3676442 - DNA, 25 bp, Homo sapien
cactactgtgttggtcagaataaaa

SEQ ID NO: 3676443 - DNA, 25 bp, Homo sapien
tttctatagcaaaggaaaacaccta

SEQ ID NO: 3676444 - DNA, 25 bp, Homo sapien
ttttatccagatgactcccctagcc

SEQ ID NO: 3676445 - DNA, 25 bp, Homo sapien
ctagctagatcaaccaagaagagag

SEQ ID NO: 3676446 - DNA, 25 bp, Homo sapien
actagctagatcaaccaagaagaga

SEQ ID NO: 3676447 - DNA, 25 bp, Homo sapien
acattgcaactggtaccatagaaat

SEQ ID NO: 3676448 - DNA, 25 bp, Homo sapien
gacattgcaactggtaccatagaaa

SEQ ID NO: 3676449 - DNA, 25 bp, Homo sapien
caattggaaccacagtacgtttgct

SEQ ID NO: 3676450 - DNA, 25 bp, Homo sapien
taaaatctaaaactgccggctctga

SEQ ID NO: 3676451 - DNA, 25 bp, Homo sapien
aatgataaccatctgctggagctga

SEQ ID NO: 3676452 - DNA, 25 bp, Homo sapien
gagccaacatttataagccgggaca

SEQ ID NO: 3676453 - DNA, 25 bp, Homo sapien
gaagctttgctagtacctagggtag

SEQ ID NO: 3676454 - DNA, 25 bp, Homo sapien
tattactgtcacagagctttgtcca

SEQ ID NO: 3676455 - DNA, 25 bp, Homo sapien
gtccaaatctctattgaaacacaca

SEQ ID NO: 3676456 - DNA, 25 bp, Homo sapien
cacatttcattctgccttagttatc

SEQ ID NO: 3676457 - DNA, 25 bp, Homo sapien
tctgcatgccagtcaaattaccagg

SEQ ID NO: 3676458 - DNA, 25 bp, Homo sapien
cacctccctcaagtatgccctggtg

SEQ ID NO: 3676459 - DNA, 25 bp, Homo sapien
agaacccaaatgcaggacaggctat

SEQ ID NO: 3676460 - DNA, 25 bp, Homo sapien
ctaatagaggtgcaatattctctgc

SEQ ID NO: 3676461 - DNA, 25 bp, Homo sapien
tttcagtggcaacaaccgcaattac

SEQ ID NO: 3676462 - DNA, 25 bp, Homo sapien
tagactggtgcaaaagtcatcgcgg

SEQ ID NO: 3676463 - DNA, 25 bp, Homo sapien
gctgatcgagcatggcaagagactg

SEQ ID NO: 3676464 - DNA, 25 bp, Homo sapien
gacgatcacttggacgttgcctaag

SEQ ID NO: 3676465 - DNA, 25 bp, Homo sapien
cattgcctactacactaactgggtt

SEQ ID NO: 3676466 - DNA, 25 bp, Homo sapien
cacactatacatgatgggctctcaa

SEQ ID NO: 3676467 - DNA, 25 bp, Homo sapien
taggaggccattatagccaaggcga

SEQ ID NO: 3676468 - DNA, 25 bp, Homo sapien
gataaattagtcctacctagctctg

SEQ ID NO: 3676469 - DNA, 25 bp, Homo sapien
tattaagacaggtgctcagagattg

SEQ ID NO: 3676470 - DNA, 25 bp, Homo sapien
tgctgatggcactttactacaaaac

SEQ ID NO: 3676471 - DNA, 25 bp, Homo sapien
ttctgaatcactccacgatcctggg

SEQ ID NO: 3676472 - DNA, 25 bp, Homo sapien
ttgttacggcagaagcaattgagct

SEQ ID NO: 3676473 - DNA, 25 bp, Homo sapien
aaaaatgttccactccataaactgc

SEQ ID NO: 3676474 - DNA, 25 bp, Homo sapien
tccactccataaactgcttaacggt

SEQ ID NO: 3676475 - DNA, 25 bp, Homo sapien
tgctgagtgtttgaagaatgggcca

SEQ ID NO: 3676476 - DNA, 25 bp, Homo sapien
actgcttaacggtatgctgagtgtt

SEQ ID NO: 3676477 - DNA, 25 bp, Homo sapien
taccctggagtcctcaagcaatgag

SEQ ID NO: 3676478 - DNA, 25 bp, Homo sapien
ccctttgtcaatagatatggcgagt

SEQ ID NO: 3676479 - DNA, 25 bp, Homo sapien
caatataactggaaactcatggcta

SEQ ID NO: 3676480 - DNA, 25 bp, Homo sapien
ttcactgtactgcttgccaatggga

SEQ ID NO: 3676481 - DNA, 25 bp, Homo sapien
catttgagcgaactgtcatccctgt

SEQ ID NO: 3676482 - DNA, 25 bp, Homo sapien
gattaccctctgtagcacatttgag

SEQ ID NO: 3676483 - DNA, 25 bp, Homo sapien
tctgggcctacaaaaatcctacctg

SEQ ID NO: 3676484 - DNA, 25 bp, Homo sapien
tgcttgttctctactggacccctaa

SEQ ID NO: 3676485 - DNA, 25 bp, Homo sapien
gccctttagtctcatatttccaatg

SEQ ID NO: 3676486 - DNA, 25 bp, Homo sapien
tcttgatactgtgcacggagatagc

SEQ ID NO: 3676487 - DNA, 25 bp, Homo sapien
tttccaatggactgagtcaagcctt

SEQ ID NO: 3676488 - DNA, 25 bp, Homo sapien
ggagatagctatactcatactccta

SEQ ID NO: 3676489 - DNA, 25 bp, Homo sapien
taacaaagcttaggattcagggtct

SEQ ID NO: 3676490 - DNA, 25 bp, Homo sapien
ggtcagcactgctatagttggaagc

SEQ ID NO: 3676491 - DNA, 25 bp, Homo sapien
tgtgatgagctctagcaagtttgca

SEQ ID NO: 3676492 - DNA, 25 bp, Homo sapien
gcgacatatctcaaaagcgtatctc

SEQ ID NO: 3676493 - DNA, 25 bp, Homo sapien
tattgagtgccaattatgttccaga

SEQ ID NO: 3676494 - DNA, 25 bp, Homo sapien
catccttgtggtatttattgagtgc

SEQ ID NO: 3676495 - DNA, 25 bp, Homo sapien
tacaaagttgaatacctagtctcct

SEQ ID NO: 3676496 - DNA, 25 bp, Homo sapien
tatggactcactcagtttgctaaat

SEQ ID NO: 3676497 - DNA, 25 bp, Homo sapien
tagagcctactaagtctttcacaaa

SEQ ID NO: 3676498 - DNA, 25 bp, Homo sapien
ccaaggactagtacagtaactgaca

SEQ ID NO: 3676499 - DNA, 25 bp, Homo sapien
gactagagtcttgaaccacaattct

SEQ ID NO: 3676500 - DNA, 25 bp, Homo sapien
cctttgaacttgctaccctttgtga

SEQ ID NO: 3676501 - DNA, 25 bp, Homo sapien
ttgtccaagcggctcttaaactact

SEQ ID NO: 3676502 - DNA, 25 bp, Homo sapien
actactgacctgaagcaagactcct

SEQ ID NO: 3676503 - DNA, 25 bp, Homo sapien
gaagcaagactcctactttgaatct

SEQ ID NO: 3676504 - DNA, 25 bp, Homo sapien
tccaagcggctcttaaactactgac

SEQ ID NO: 3676505 - DNA, 25 bp, Homo sapien
taaaaatccgttgaggtcgatgaca

SEQ ID NO: 3676506 - DNA, 25 bp, Homo sapien
caatggcaacataactaagacggat

SEQ ID NO: 3676507 - DNA, 25 bp, Homo sapien
caagaaatagaaggagggatgagta

SEQ ID NO: 3676508 - DNA, 25 bp, Homo sapien
tcaagattcagataactaggcaaaa

SEQ ID NO: 3676509 - DNA, 25 bp, Homo sapien
cagacccataagatacagactataa

SEQ ID NO: 3676510 - DNA, 25 bp, Homo sapien
aaataccaaggacttcagacccata

SEQ ID NO: 3676511 - DNA, 25 bp, Homo sapien
attggtgttccaagaagagagcatt

SEQ ID NO: 3676512 - DNA, 25 bp, Homo sapien
tagcaagaacttaggagacatggaa

SEQ ID NO: 3676513 - DNA, 25 bp, Homo sapien
tgatgatgatcactagccacatggg

SEQ ID NO: 3676514 - DNA, 25 bp, Homo sapien
ctaggattactagcactgacagtgc

SEQ ID NO: 3676515 - DNA, 25 bp, Homo sapien
tggtgagcgtaactgaagacataca

SEQ ID NO: 3676516 - DNA, 25 bp, Homo sapien
ttcaaatgacccacatgtgtctggt

SEQ ID NO: 3676517 - DNA, 25 bp, Homo sapien
tatcaggtgatcttactatggagaa

SEQ ID NO: 3676518 - DNA, 25 bp, Homo sapien
taaaaattggttggaagatggagct

SEQ ID NO: 3676519 - DNA, 25 bp, Homo sapien
gcctgaatactcacttgacttactg

SEQ ID NO: 3676520 - DNA, 25 bp, Homo sapien
taatcaaggcccaggtaggtagaag

SEQ ID NO: 3676521 - DNA, 25 bp, Homo sapien
tcagagaccagcaaggttctgccag

SEQ ID NO: 3676522 - DNA, 25 bp, Homo sapien
taagccctaaatctgagtcagtaat

SEQ ID NO: 3676523 - DNA, 25 bp, Homo sapien
gatcaaccaggttacttaagtccgc

SEQ ID NO: 3676524 - DNA, 25 bp, Homo sapien
taagtccgctctgatgaaacccagt

SEQ ID NO: 3676525 - DNA, 25 bp, Homo sapien
taaatgtcgagtaaaacttcgtgaa

SEQ ID NO: 3676526 - DNA, 25 bp, Homo sapien
gaagcatctacagtatgttaactac

SEQ ID NO: 3676527 - DNA, 25 bp, Homo sapien
gagtaaaacttcgtgaaaactgctc

SEQ ID NO: 3676528 - DNA, 25 bp, Homo sapien
gattacaaagaataagcagcaatat

SEQ ID NO: 3676529 - DNA, 25 bp, Homo sapien
ttgcttagactgttgaatcaccttc

SEQ ID NO: 3676530 - DNA, 25 bp, Homo sapien
atttcaggacacattaatgccctcc

SEQ ID NO: 3676531 - DNA, 25 bp, Homo sapien
tggcatacggtaacactgtcctgtc

SEQ ID NO: 3676532 - DNA, 25 bp, Homo sapien
tttaacctgcctagaggacacccag

SEQ ID NO: 3676533 - DNA, 25 bp, Homo sapien
ccacagtacctggcccattacttct

SEQ ID NO: 3676534 - DNA, 25 bp, Homo sapien
tacttctccatttctaaagatgctt

SEQ ID NO: 3676535 - DNA, 25 bp, Homo sapien
ggcccattacttctccatttctaaa

SEQ ID NO: 3676536 - DNA, 25 bp, Homo sapien
gtacctggcccattacttctccatt

SEQ ID NO: 3676537 - DNA, 25 bp, Homo sapien
acctcagccttgtagttagccggga

SEQ ID NO: 3676538 - DNA, 25 bp, Homo sapien
tcataacccactaccaagagagtat

SEQ ID NO: 3676539 - DNA, 25 bp, Homo sapien
cgaggaacataccactcagagaggt

SEQ ID NO: 3676540 - DNA, 25 bp, Homo sapien
caccatttgtatccacgaggaacat

SEQ ID NO: 3676541 - DNA, 25 bp, Homo sapien
tgatgtgagacaaccagttccggca

SEQ ID NO: 3676542 - DNA, 25 bp, Homo sapien
caaccagttccggcaacttgagcat

SEQ ID NO: 3676543 - DNA, 25 bp, Homo sapien
gattcctcagcaaatgatgtgagac

SEQ ID NO: 3676544 - DNA, 25 bp, Homo sapien
gcagattcctcagcaaatgatgtga

SEQ ID NO: 3676545 - DNA, 25 bp, Homo sapien
ttctgctgctggtcagtagcactgg

SEQ ID NO: 3676546 - DNA, 25 bp, Homo sapien
agcacccaaagtaggaacacagctt

SEQ ID NO: 3676547 - DNA, 25 bp, Homo sapien
gctgccttagaagcacccaagggca

SEQ ID NO: 3676548 - DNA, 25 bp, Homo sapien
gtagcactggtagcaacagcaggcg

SEQ ID NO: 3676549 - DNA, 25 bp, Homo sapien
ctaggtggtccaggagttagggtct

SEQ ID NO: 3676550 - DNA, 25 bp, Homo sapien
caggagttagggtcttctcttcagc

SEQ ID NO: 3676551 - DNA, 25 bp, Homo sapien
gtggtccaggagttagggtcttctc

SEQ ID NO: 3676552 - DNA, 25 bp, Homo sapien
ctaaatgggctaggtggtccaggag

SEQ ID NO: 3676553 - DNA, 25 bp, Homo sapien
caaagctgtgtgaaccatccagagt

SEQ ID NO: 3676554 - DNA, 25 bp, Homo sapien
cagagttcatgtgatggcaggcatt

SEQ ID NO: 3676555 - DNA, 25 bp, Homo sapien
tgtttggagatagtcactagcacct

SEQ ID NO: 3676556 - DNA, 25 bp, Homo sapien
tgttgggcagttcttacatctccat

SEQ ID NO: 3676557 - DNA, 25 bp, Homo sapien
ggcacaattcaaattccataagcag

SEQ ID NO: 3676558 - DNA, 25 bp, Homo sapien
caaattccataagcaggcactggtg

SEQ ID NO: 3676559 - DNA, 25 bp, Homo sapien
caattcaaattccataagcaggcac

SEQ ID NO: 3676560 - DNA, 25 bp, Homo sapien
tttttaaggcacaattcaaattcca

SEQ ID NO: 3676561 - DNA, 25 bp, Homo sapien
gaaaacattgtcgatcaatggccca

SEQ ID NO: 3676562 - DNA, 25 bp, Homo sapien
aattccatatactcggtatgcttga

SEQ ID NO: 3676563 - DNA, 25 bp, Homo sapien
tgtttgaaaacattgtcgatcaatg

SEQ ID NO: 3676564 - DNA, 25 bp, Homo sapien
gtatgcttgatgagtcctgtcctca

SEQ ID NO: 3676565 - DNA, 25 bp, Homo sapien
gttgtcacatcttagatcactctgg

SEQ ID NO: 3676566 - DNA, 25 bp, Homo sapien
tggtaatgcatccattcaaagggag

SEQ ID NO: 3676567 - DNA, 25 bp, Homo sapien
gctgtggagcatctaaggagatgaa

SEQ ID NO: 3676568 - DNA, 25 bp, Homo sapien
caggcatacttgatgtgttgtcaca

SEQ ID NO: 3676569 - DNA, 25 bp, Homo sapien
tctaagctgtccgttaagagttcgc

SEQ ID NO: 3676570 - DNA, 25 bp, Homo sapien
caacagccagattctaagctgtccg

SEQ ID NO: 3676571 - DNA, 25 bp, Homo sapien
gctgtccgttaagagttcgccttgg

SEQ ID NO: 3676572 - DNA, 25 bp, Homo sapien
taagagttcgccttggtaaaatcat

SEQ ID NO: 3676573 - DNA, 25 bp, Homo sapien
tttggtaaagggagtgttcacaaca

SEQ ID NO: 3676574 - DNA, 25 bp, Homo sapien
tcaggattctcagattcatagacac

SEQ ID NO: 3676575 - DNA, 25 bp, Homo sapien
ttccctgcaccctagaaagagtcag

SEQ ID NO: 3676576 - DNA, 25 bp, Homo sapien
aagcccctagttgtgctgtgaagca

SEQ ID NO: 3676577 - DNA, 25 bp, Homo sapien
ctccctcactgccttgaaaacactc

SEQ ID NO: 3676578 - DNA, 25 bp, Homo sapien
tattctgttttgagttttggatttc

SEQ ID NO: 3676579 - DNA, 25 bp, Homo sapien
gagttttggatttcccttgctctcc

SEQ ID NO: 3676580 - DNA, 25 bp, Homo sapien
tccctcactgccttgaaaacactca

SEQ ID NO: 3676581 - DNA, 25 bp, Homo sapien
gccaaagccccataatcttctctcc

SEQ ID NO: 3676582 - DNA, 25 bp, Homo sapien
tcaagtaccacctgccagatcactt

SEQ ID NO: 3676583 - DNA, 25 bp, Homo sapien
agacttcggaagctattgtcccctc

SEQ ID NO: 3676584 - DNA, 25 bp, Homo sapien
cggaagctattgtcccctctctggg

SEQ ID NO: 3676585 - DNA, 25 bp, Homo sapien
taaagaacgacctccataggaaggc

SEQ ID NO: 3676586 - DNA, 25 bp, Homo sapien
tcctgttacttcacctaaagaacga

SEQ ID NO: 3676587 - DNA, 25 bp, Homo sapien
gtgagaagttatagtagatggttcc

SEQ ID NO: 3676588 - DNA, 25 bp, Homo sapien
cagccctcatgggactgggtcagtg

SEQ ID NO: 3676589 - DNA, 25 bp, Homo sapien
cacaggaaccacacataaggatcag

SEQ ID NO: 3676590 - DNA, 25 bp, Homo sapien
gaagtaacaggtaacacattgtcac

SEQ ID NO: 3676591 - DNA, 25 bp, Homo sapien
tgaataggagggtcttctttgccac

SEQ ID NO: 3676592 - DNA, 25 bp, Homo sapien
taaacatgtttgctgatactgacca

SEQ ID NO: 3676593 - DNA, 25 bp, Homo sapien
aggaggcatgtggtgtatccactgt

SEQ ID NO: 3676594 - DNA, 25 bp, Homo sapien
tgcttcctattgttatgttagggag

SEQ ID NO: 3676595 - DNA, 25 bp, Homo sapien
tccccggttatcacttgccaaagca

SEQ ID NO: 3676596 - DNA, 25 bp, Homo sapien
tctttgaaatctagcaggaggcatg

SEQ ID NO: 3676597 - DNA, 25 bp, Homo sapien
attctgaagtcctcgagcaggtgtc

SEQ ID NO: 3676598 - DNA, 25 bp, Homo sapien
tgaagtcctcgagcaggtgtctatg

SEQ ID NO: 3676599 - DNA, 25 bp, Homo sapien
ttctgaagtcctcgagcaggtgtct

SEQ ID NO: 3676600 - DNA, 25 bp, Homo sapien
tctgaagtcctcgagcaggtgtcta

SEQ ID NO: 3676601 - DNA, 25 bp, Homo sapien
ttcctggtggatggtctactttctc

SEQ ID NO: 3676602 - DNA, 25 bp, Homo sapien
attagcatgtgtggcccttcctggt

SEQ ID NO: 3676603 - DNA, 25 bp, Homo sapien
tcctggtggatggtctactttctcc

SEQ ID NO: 3676604 - DNA, 25 bp, Homo sapien
tcattagcatgtgtggcccttcctg

SEQ ID NO: 3676605 - DNA, 25 bp, Homo sapien
tccagttagccagtgttttactgca

SEQ ID NO: 3676606 - DNA, 25 bp, Homo sapien
atgtgaattccagttagccagtgtt

SEQ ID NO: 3676607 - DNA, 25 bp, Homo sapien
gaattccagttagccagtgttttac

SEQ ID NO: 3676608 - DNA, 25 bp, Homo sapien
ttagccagtgttttactgcatcttc

SEQ ID NO: 3676609 - DNA, 25 bp, Homo sapien
ttttgtcatcttcactactcatcca

SEQ ID NO: 3676610 - DNA, 25 bp, Homo sapien
tcactactcatccagttctgtcctg

SEQ ID NO: 3676611 - DNA, 25 bp, Homo sapien
agttcaaggacagggctctaaagag

SEQ ID NO: 3676612 - DNA, 25 bp, Homo sapien
tgcccttctctatgtaagccttaag

SEQ ID NO: 3676613 - DNA, 25 bp, Homo sapien
ctttctccaggccgactcctaacca

SEQ ID NO: 3676614 - DNA, 25 bp, Homo sapien
tcagcaagcttgctgaggatctctt

SEQ ID NO: 3676615 - DNA, 25 bp, Homo sapien
acatcagcaagcttgctgaggatct

SEQ ID NO: 3676616 - DNA, 25 bp, Homo sapien
gctgaggatctcttcaggaaggctc

SEQ ID NO: 3676617 - DNA, 25 bp, Homo sapien
aggatctcttcaggaaggctctgga

SEQ ID NO: 3676618 - DNA, 25 bp, Homo sapien
taacaagcaaaaagctcctgatttt

SEQ ID NO: 3676619 - DNA, 25 bp, Homo sapien
cctcctacttccacaggctttcctg

SEQ ID NO: 3676620 - DNA, 25 bp, Homo sapien
ttggattttaacaagcaaaaagctc

SEQ ID NO: 3676621 - DNA, 25 bp, Homo sapien
ttttaacaagcaaaaagctcctgat

SEQ ID NO: 3676622 - DNA, 25 bp, Homo sapien
tgaatccaggtaaacgaatgaggct

SEQ ID NO: 3676623 - DNA, 25 bp, Homo sapien
caaatgttctagtgtccaagagggc

SEQ ID NO: 3676624 - DNA, 25 bp, Homo sapien
cagaggttataggtcagcacattca

SEQ ID NO: 3676625 - DNA, 25 bp, Homo sapien
tagtcagtacctagagacaaaagca

SEQ ID NO: 3676626 - DNA, 25 bp, Homo sapien
caatctcaccagctatgtgtaaagg

SEQ ID NO: 3676627 - DNA, 25 bp, Homo sapien
tctgacaacgcggtaaccccatgtt

SEQ ID NO: 3676628 - DNA, 25 bp, Homo sapien
tgtagcatatatcaagtccttcacc

SEQ ID NO: 3676629 - DNA, 25 bp, Homo sapien
ggtatgcacctaggagcagaattgc

SEQ ID NO: 3676630 - DNA, 25 bp, Homo sapien
gatgagctcagtatgaaacagggtg

SEQ ID NO: 3676631 - DNA, 25 bp, Homo sapien
taaatgttccaggactcgaggaggc

SEQ ID NO: 3676632 - DNA, 25 bp, Homo sapien
caaatccagttagccccttgtcgaa

SEQ ID NO: 3676633 - DNA, 25 bp, Homo sapien
cagcccacactagattgaacagaag

SEQ ID NO: 3676634 - DNA, 25 bp, Homo sapien
ttgtctcttgtatgctacctcaacg

SEQ ID NO: 3676635 - DNA, 25 bp, Homo sapien
catgacactctttgataggtttcac

SEQ ID NO: 3676636 - DNA, 25 bp, Homo sapien
tttccaccttcagttgcgcagcagt

SEQ ID NO: 3676637 - DNA, 25 bp, Homo sapien
gcgcagcagtactcaatattattag

SEQ ID NO: 3676638 - DNA, 25 bp, Homo sapien
tttcagttggatcacagacaatctg

SEQ ID NO: 3676639 - DNA, 25 bp, Homo sapien
tctaaatgacaagcttgagcatctc

SEQ ID NO: 3676640 - DNA, 25 bp, Homo sapien
tctctgcataaaacacgtgattcat

SEQ ID NO: 3676641 - DNA, 25 bp, Homo sapien
gggaagtcggatatcatgcttttga

SEQ ID NO: 3676642 - DNA, 25 bp, Homo sapien
ttcttgggactcagttatgggcaca

SEQ ID NO: 3676643 - DNA, 25 bp, Homo sapien
caaataactttaccatcaacgctga

SEQ ID NO: 3676644 - DNA, 25 bp, Homo sapien
gatacacgacaacggaagctcaggt

SEQ ID NO: 3676645 - DNA, 25 bp, Homo sapien
gatagggtcacaagccaatgagtgc

SEQ ID NO: 3676646 - DNA, 25 bp, Homo sapien
gagtaagttggatccagagcacaga

SEQ ID NO: 3676647 - DNA, 25 bp, Homo sapien
cattttctacgtagttgggcaccaa

SEQ ID NO: 3676648 - DNA, 25 bp, Homo sapien
cacagaaggcactaaacgatggatc

SEQ ID NO: 3676649 - DNA, 25 bp, Homo sapien
tctaaagtacagatgacacatggga

SEQ ID NO: 3676650 - DNA, 25 bp, Homo sapien
ggtaaagaagcaagacccattggta

SEQ ID NO: 3676651 - DNA, 25 bp, Homo sapien
tcttacatacaacaacacccatagg

SEQ ID NO: 3676652 - DNA, 25 bp, Homo sapien
gcacttcgtatctggccaaattaag

SEQ ID NO: 3676653 - DNA, 25 bp, Homo sapien
ttaaaaggtataacatggcaggctg

SEQ ID NO: 3676654 - DNA, 25 bp, Homo sapien
caatgtagttttatctgaggtgtta

SEQ ID NO: 3676655 - DNA, 25 bp, Homo sapien
tctgtcagcaatatagggccacgag

SEQ ID NO: 3676656 - DNA, 25 bp, Homo sapien
gaccttgatcaatgtagttttatct

SEQ ID NO: 3676657 - DNA, 25 bp, Homo sapien
gtcagcaatatagggccacgaggag

SEQ ID NO: 3676658 - DNA, 25 bp, Homo sapien
cccggccagttatctctgtacccta

SEQ ID NO: 3676659 - DNA, 25 bp, Homo sapien
ctctgtaccctattgattgtttcct

SEQ ID NO: 3676660 - DNA, 25 bp, Homo sapien
tgcccggccagttatctctgtaccc

SEQ ID NO: 3676661 - DNA, 25 bp, Homo sapien
tctctgtaccctattgattgtttcc

SEQ ID NO: 3676662 - DNA, 25 bp, Homo sapien
gggtatagatataagacccagtctc

SEQ ID NO: 3676663 - DNA, 25 bp, Homo sapien
tactaaggtggcatttgggctcata

SEQ ID NO: 3676664 - DNA, 25 bp, Homo sapien
taaagacttccttccatactgctgc

SEQ ID NO: 3676665 - DNA, 25 bp, Homo sapien
tctccctgctaggataaagcccaca

SEQ ID NO: 3676666 - DNA, 25 bp, Homo sapien
taattaaaccaacattatttatgtg

SEQ ID NO: 3676667 - DNA, 25 bp, Homo sapien
attaattaaaccaacattatttatg

SEQ ID NO: 3676668 - DNA, 25 bp, Homo sapien
taaaccaacattatttatgtgtgcc

SEQ ID NO: 3676669 - DNA, 25 bp, Homo sapien
attaaaccaacattatttatgtgtg

SEQ ID NO: 3676670 - DNA, 25 bp, Homo sapien
atcctgctttaccaagtctgaactt

SEQ ID NO: 3676671 - DNA, 25 bp, Homo sapien
aaaatcctgctttaccaagtctgaa

SEQ ID NO: 3676672 - DNA, 25 bp, Homo sapien
aaatcctgctttaccaagtctgaac

SEQ ID NO: 3676673 - DNA, 25 bp, Homo sapien
aatcctgctttaccaagtctgaact

SEQ ID NO: 3676674 - DNA, 25 bp, Homo sapien
gctgatgataaagaaggtgtcccct

SEQ ID NO: 3676675 - DNA, 25 bp, Homo sapien
caccttgcctgataatatattctcc

SEQ ID NO: 3676676 - DNA, 25 bp, Homo sapien
taaagaaggtgtcccctcttgcacc

SEQ ID NO: 3676677 - DNA, 25 bp, Homo sapien
ctcttgcaccttgcctgataatata

SEQ ID NO: 3676678 - DNA, 25 bp, Homo sapien
gtgagtcttcacgagtgacatttac

SEQ ID NO: 3676679 - DNA, 25 bp, Homo sapien
gactgggtcttcactcggtgagtct

SEQ ID NO: 3676680 - DNA, 25 bp, Homo sapien
aaagactgggtcttcactcggtgag

SEQ ID NO: 3676681 - DNA, 25 bp, Homo sapien
tcttcactcggtgagtcttcacgag

SEQ ID NO: 3676682 - DNA, 25 bp, Homo sapien
gctaggagctcaaaatttcagacag

SEQ ID NO: 3676683 - DNA, 25 bp, Homo sapien
ccatatttgatattgagataagcac

SEQ ID NO: 3676684 - DNA, 25 bp, Homo sapien
aaaatgtatttatcatcaagggtcc

SEQ ID NO: 3676685 - DNA, 25 bp, Homo sapien
ataaaaagcctattgtgctaggagc

SEQ ID NO: 3676686 - DNA, 25 bp, Homo sapien
atttattccacaacgtattcaaaca

SEQ ID NO: 3676687 - DNA, 25 bp, Homo sapien
ttattccacaacgtattcaaacaga

SEQ ID NO: 3676688 - DNA, 25 bp, Homo sapien
gaatttattccacaacgtattcaaa

SEQ ID NO: 3676689 - DNA, 25 bp, Homo sapien
aggaatttattccacaacgtattca

SEQ ID NO: 3676690 - DNA, 25 bp, Homo sapien
taagagggcacttagagtagactaa

SEQ ID NO: 3676691 - DNA, 25 bp, Homo sapien
catgaggtaactagcaaatctctgg

SEQ ID NO: 3676692 - DNA, 25 bp, Homo sapien
gaggagcttaccaaggtttatgaaa

SEQ ID NO: 3676693 - DNA, 25 bp, Homo sapien
gccagacaccgggttcaaataagaa

SEQ ID NO: 3676694 - DNA, 25 bp, Homo sapien
tgattgctcttaaacacacctttag

SEQ ID NO: 3676695 - DNA, 25 bp, Homo sapien
gaactaaacgtgaagtgattgctct

SEQ ID NO: 3676696 - DNA, 25 bp, Homo sapien
caatggtaagtcaaagtatagatgg

SEQ ID NO: 3676697 - DNA, 25 bp, Homo sapien
gcccggcctcaagtagggatcttga

SEQ ID NO: 3676698 - DNA, 25 bp, Homo sapien
tgtaagatccatgaagaaacatgtt

SEQ ID NO: 3676699 - DNA, 25 bp, Homo sapien
ttgcttctccatcagtatttcccaa

SEQ ID NO: 3676700 - DNA, 25 bp, Homo sapien
gaatgtaagatccatgaagaaacat

SEQ ID NO: 3676701 - DNA, 25 bp, Homo sapien
ctcagaatgtaagatccatgaagaa

SEQ ID NO: 3676702 - DNA, 25 bp, Homo sapien
tacaggtagccacaagtgaaagcca

SEQ ID NO: 3676703 - DNA, 25 bp, Homo sapien
gactcatcgtaactctctttcagga

SEQ ID NO: 3676704 - DNA, 25 bp, Homo sapien
tattctgtgtaactgcgggattcca

SEQ ID NO: 3676705 - DNA, 25 bp, Homo sapien
cactcacttttcagggattgggaat

SEQ ID NO: 3676706 - DNA, 25 bp, Homo sapien
tcattcatcactgtgaggccaggtg

SEQ ID NO: 3676707 - DNA, 25 bp, Homo sapien
gtttcattgtacagactgtgcactg

SEQ ID NO: 3676708 - DNA, 25 bp, Homo sapien
gcatgtaacaaattaacatcattca

SEQ ID NO: 3676709 - DNA, 25 bp, Homo sapien
gcttctaactccacgtagtccatta

SEQ ID NO: 3676710 - DNA, 25 bp, Homo sapien
gaagagataccagtttagcaggtag

SEQ ID NO: 3676711 - DNA, 25 bp, Homo sapien
ccagtttagcaggtagatcaagtaa

SEQ ID NO: 3676712 - DNA, 25 bp, Homo sapien
catgtttaacacagtatcctccagt

SEQ ID NO: 3676713 - DNA, 25 bp, Homo sapien
gtttctttggcaacaatcataggaa

SEQ ID NO: 3676714 - DNA, 25 bp, Homo sapien
gatcatcatcactttaggaccctct

SEQ ID NO: 3676715 - DNA, 25 bp, Homo sapien
gcttgcacagagtaatcaaccaata

SEQ ID NO: 3676716 - DNA, 25 bp, Homo sapien
tataccttctaatcatgcttgcaca

SEQ ID NO: 3676717 - DNA, 25 bp, Homo sapien
ttgacatttcatccctagcccatag

SEQ ID NO: 3676718 - DNA, 25 bp, Homo sapien
gggaatttacatcggctcttctggt

SEQ ID NO: 3676719 - DNA, 25 bp, Homo sapien
cacagaatgtatgaggccaaagcag

SEQ ID NO: 3676720 - DNA, 25 bp, Homo sapien
tgaaaattggatcccttggcagata

SEQ ID NO: 3676721 - DNA, 25 bp, Homo sapien
gcagcagtttaatgtccccagttaa

SEQ ID NO: 3676722 - DNA, 25 bp, Homo sapien
cgtcactggaatcttcatcatcgct

SEQ ID NO: 3676723 - DNA, 25 bp, Homo sapien
gatattctttgaacttcgtcactgg

SEQ ID NO: 3676724 - DNA, 25 bp, Homo sapien
cactgtcagtatctgaataatccat

SEQ ID NO: 3676725 - DNA, 25 bp, Homo sapien
tgtatcccaaagtggcgtcactgtc

SEQ ID NO: 3676726 - DNA, 25 bp, Homo sapien
cagtccacatccaacatgcaaattg

SEQ ID NO: 3676727 - DNA, 25 bp, Homo sapien
aaagctatgcagtttagtagtggcc

SEQ ID NO: 3676728 - DNA, 25 bp, Homo sapien
tgaacattcagcacactagacttgc

SEQ ID NO: 3676729 - DNA, 25 bp, Homo sapien
tatttgcaaatataggtttccgtgc

SEQ ID NO: 3676730 - DNA, 25 bp, Homo sapien
ccatgacggtgtcattttatttcta

SEQ ID NO: 3676731 - DNA, 25 bp, Homo sapien
cattcaatggcaaactcatgttgcc

SEQ ID NO: 3676732 - DNA, 25 bp, Homo sapien
tctattattaaggtgcttgtagctc

SEQ ID NO: 3676733 - DNA, 25 bp, Homo sapien
cttgtagctctctaagagggtgtct

SEQ ID NO: 3676734 - DNA, 25 bp, Homo sapien
acaaggcaggttacagcttctgcag

SEQ ID NO: 3676735 - DNA, 25 bp, Homo sapien
tacgtttgctgttctcacatcttcc

SEQ ID NO: 3676736 - DNA, 25 bp, Homo sapien
cagcttctgcagcaattacgtttgc

SEQ ID NO: 3676737 - DNA, 25 bp, Homo sapien
aatcacaaggcaggttacagcttct

SEQ ID NO: 3676738 - DNA, 25 bp, Homo sapien
tcagtaagacgtgaaaccttctggt

SEQ ID NO: 3676739 - DNA, 25 bp, Homo sapien
aattttctcagtgaaccagtgccag

SEQ ID NO: 3676740 - DNA, 25 bp, Homo sapien
aaatggtctgaactgcccttatccc

SEQ ID NO: 3676741 - DNA, 25 bp, Homo sapien
gaacttgttacagcacctccaccaa

SEQ ID NO: 3676742 - DNA, 25 bp, Homo sapien
gagctatctgaggttcagggtcctg

SEQ ID NO: 3676743 - DNA, 25 bp, Homo sapien
gttgcagtcatgcaatagacgctca

SEQ ID NO: 3676744 - DNA, 25 bp, Homo sapien
cccagtggtctctttccaggtccca

SEQ ID NO: 3676745 - DNA, 25 bp, Homo sapien
tcccatcctcggtgagctatctgag

SEQ ID NO: 3676746 - DNA, 25 bp, Homo sapien
ctgtcagacgaaaaaagcacagtga

SEQ ID NO: 3676747 - DNA, 25 bp, Homo sapien
ttagaaacatcatccagccctccaa

SEQ ID NO: 3676748 - DNA, 25 bp, Homo sapien
tagaaacatcatccagccctccaat

SEQ ID NO: 3676749 - DNA, 25 bp, Homo sapien
agaaacatcatccagccctccaatc

SEQ ID NO: 3676750 - DNA, 25 bp, Homo sapien
tattagaaacatcatccagccctcc

SEQ ID NO: 3676751 - DNA, 25 bp, Homo sapien
taaaccaactcgtctcatttgccag

SEQ ID NO: 3676752 - DNA, 25 bp, Homo sapien
tattctccctgctttcaatgtacac

SEQ ID NO: 3676753 - DNA, 25 bp, Homo sapien
tgttctaggtctcaggcatattgct

SEQ ID NO: 3676754 - DNA, 25 bp, Homo sapien
ttcaatcacagagacaagagtgccc

SEQ ID NO: 3676755 - DNA, 25 bp, Homo sapien
ggcatttgatgagcgcattttcaaa

SEQ ID NO: 3676756 - DNA, 25 bp, Homo sapien
tgaaagccgccgaagagcaacctct

SEQ ID NO: 3676757 - DNA, 25 bp, Homo sapien
tgctttgagaggcatttgatgagcg

SEQ ID NO: 3676758 - DNA, 25 bp, Homo sapien
tgaacaacagcagccgttctgtctg

SEQ ID NO: 3676759 - DNA, 25 bp, Homo sapien
tgcagacctaggtcctgatttacat

SEQ ID NO: 3676760 - DNA, 25 bp, Homo sapien
gaagatgttactaaacaatgcagac

SEQ ID NO: 3676761 - DNA, 25 bp, Homo sapien
agatgttactaaacaatgcagacct

SEQ ID NO: 3676762 - DNA, 25 bp, Homo sapien
gcagacctaggtcctgatttacata

SEQ ID NO: 3676763 - DNA, 25 bp, Homo sapien
tcccttcctgcattgtcataaccgt

SEQ ID NO: 3676764 - DNA, 25 bp, Homo sapien
cctgcattgtcataaccgtcatgtt

SEQ ID NO: 3676765 - DNA, 25 bp, Homo sapien
ccttcctgcattgtcataaccgtca

SEQ ID NO: 3676766 - DNA, 25 bp, Homo sapien
ttcctgcattgtcataaccgtcatg

SEQ ID NO: 3676767 - DNA, 25 bp, Homo sapien
taagtatttagttctgtgatcattt

SEQ ID NO: 3676768 - DNA, 25 bp, Homo sapien
ctaagtatttagttctgtgatcatt

SEQ ID NO: 3676769 - DNA, 25 bp, Homo sapien
gccacattaaaaagttagaaggtca

SEQ ID NO: 3676770 - DNA, 25 bp, Homo sapien
tacattagtctcatctgcatatggc

SEQ ID NO: 3676771 - DNA, 25 bp, Homo sapien
gaaattatatccaccacactctcag

SEQ ID NO: 3676772 - DNA, 25 bp, Homo sapien
caaaacatcagaatctacattagtc

SEQ ID NO: 3676773 - DNA, 25 bp, Homo sapien
gaagccggatggctctactaagcta

SEQ ID NO: 3676774 - DNA, 25 bp, Homo sapien
tctgtagtgactatcccattcctgg

SEQ ID NO: 3676775 - DNA, 25 bp, Homo sapien
taggcttattccacatcgtaaatgc

SEQ ID NO: 3676776 - DNA, 25 bp, Homo sapien
tcaaaagacagctacctaaaggatt

SEQ ID NO: 3676777 - DNA, 25 bp, Homo sapien
aggcctcctgattggttacctgctc

SEQ ID NO: 3676778 - DNA, 25 bp, Homo sapien
caaattataaaaccggcctactgct

SEQ ID NO: 3676779 - DNA, 25 bp, Homo sapien
gcacatagtcatgttagctgggctt

SEQ ID NO: 3676780 - DNA, 25 bp, Homo sapien
aactgttccctcagtgaaaggcctc

SEQ ID NO: 3676781 - DNA, 25 bp, Homo sapien
ttataagtagagagtaacggaggaa

SEQ ID NO: 3676782 - DNA, 25 bp, Homo sapien
tgcaaattataagtagagagtaacg

SEQ ID NO: 3676783 - DNA, 25 bp, Homo sapien
gctcccagctgtaagctatttttct

SEQ ID NO: 3676784 - DNA, 25 bp, Homo sapien
cagctgtaagctatttttctaaacc

SEQ ID NO: 3676785 - DNA, 25 bp, Homo sapien
tacatatgcatggtttagaaacaag

SEQ ID NO: 3676786 - DNA, 25 bp, Homo sapien
ccacaactggcctataggggactct

SEQ ID NO: 3676787 - DNA, 25 bp, Homo sapien
caccaaaggaggctctaaaaacaat

SEQ ID NO: 3676788 - DNA, 25 bp, Homo sapien
actaaggagtaacaaagttgatttg

SEQ ID NO: 3676789 - DNA, 25 bp, Homo sapien
tggagcgaaatcacagccaggtttt

SEQ ID NO: 3676790 - DNA, 25 bp, Homo sapien
tgtgtacccactgacttgtagccaa

SEQ ID NO: 3676791 - DNA, 25 bp, Homo sapien
tctacgcgtcttcttgtgaacacgg

SEQ ID NO: 3676792 - DNA, 25 bp, Homo sapien
tattaaaagcggcaagatcacggag

SEQ ID NO: 3676793 - DNA, 25 bp, Homo sapien
tcttagaggtgcaaacacgagtacc

SEQ ID NO: 3676794 - DNA, 25 bp, Homo sapien
tacatctgtaccagaatgacatgac

SEQ ID NO: 3676795 - DNA, 25 bp, Homo sapien
ctgtggaacagggtttacctgctta

SEQ ID NO: 3676796 - DNA, 25 bp, Homo sapien
cagggtttacctgcttacattccat

SEQ ID NO: 3676797 - DNA, 25 bp, Homo sapien
tgttgaaatcagacagcttcaggtt

SEQ ID NO: 3676798 - DNA, 25 bp, Homo sapien
ttggcgaagaaagccgcttcagctt

SEQ ID NO: 3676799 - DNA, 25 bp, Homo sapien
ccaactccaagggtatcaatgatgt

SEQ ID NO: 3676800 - DNA, 25 bp, Homo sapien
caagggtatcaatgatgttgaaatc

SEQ ID NO: 3676801 - DNA, 25 bp, Homo sapien
gcaccgactacatattattggcata

SEQ ID NO: 3676802 - DNA, 25 bp, Homo sapien
caagtttgccgctctggtataggag

SEQ ID NO: 3676803 - DNA, 25 bp, Homo sapien
gatatgtggattgctaaataaacag

SEQ ID NO: 3676804 - DNA, 25 bp, Homo sapien
tgttcctgtgctttatccaagtttg

SEQ ID NO: 3676805 - DNA, 25 bp, Homo sapien
acttgctttggtgtcctgtgacaac

SEQ ID NO: 3676806 - DNA, 25 bp, Homo sapien
cacagtaattcactctagtctggtc

SEQ ID NO: 3676807 - DNA, 25 bp, Homo sapien
tcagttctgtatatcttcccaggcc

SEQ ID NO: 3676808 - DNA, 25 bp, Homo sapien
tcaaatgacctctctcctgatgaaa

SEQ ID NO: 3676809 - DNA, 25 bp, Homo sapien
taagaacaaactacctggcccacaa

SEQ ID NO: 3676810 - DNA, 25 bp, Homo sapien
tgacctcatagctcaatgttcaagc

SEQ ID NO: 3676811 - DNA, 25 bp, Homo sapien
gatgatctccccactctcagtgtga

SEQ ID NO: 3676812 - DNA, 25 bp, Homo sapien
tgggctggagctagagactaagaac

SEQ ID NO: 3676813 - DNA, 25 bp, Homo sapien
tcattcaaaaggctacctactttga

SEQ ID NO: 3676814 - DNA, 25 bp, Homo sapien
caaaaggctacctactttgagtgtc

SEQ ID NO: 3676815 - DNA, 25 bp, Homo sapien
ttcaaaaggctacctactttgagtg

SEQ ID NO: 3676816 - DNA, 25 bp, Homo sapien
aaggctacctactttgagtgtcttc

SEQ ID NO: 3676817 - DNA, 25 bp, Homo sapien
ctaacgtaagttgtcaataataggg

SEQ ID NO: 3676818 - DNA, 25 bp, Homo sapien
gggttcagcgtatataggaattttc

SEQ ID NO: 3676819 - DNA, 25 bp, Homo sapien
ataataggggtaattgggttcagcg

SEQ ID NO: 3676820 - DNA, 25 bp, Homo sapien
tactaacgtaagttgtcaataatag

SEQ ID NO: 3676821 - DNA, 25 bp, Homo sapien
tctgcttctctgagcggatgtgctc

SEQ ID NO: 3676822 - DNA, 25 bp, Homo sapien
tcactatgaaatcggaatgagcccc

SEQ ID NO: 3676823 - DNA, 25 bp, Homo sapien
cacaatgtgacgtttcttgagaatc

SEQ ID NO: 3676824 - DNA, 25 bp, Homo sapien
gaatcttcattgcaaacgttttgga

SEQ ID NO: 3676825 - DNA, 25 bp, Homo sapien
gctgtccttaaatgttctgtacagt

SEQ ID NO: 3676826 - DNA, 25 bp, Homo sapien
ccacctagacaagcttccatcaaca

SEQ ID NO: 3676827 - DNA, 25 bp, Homo sapien
gtccagagctctccacctagacaag

SEQ ID NO: 3676828 - DNA, 25 bp, Homo sapien
tggtccagagctctccacctagaca

SEQ ID NO: 3676829 - DNA, 25 bp, Homo sapien
cagtttggcataacctcggtgatct

SEQ ID NO: 3676830 - DNA, 25 bp, Homo sapien
gatctaggatgagattttctggctt

SEQ ID NO: 3676831 - DNA, 25 bp, Homo sapien
catgctgtgtaaaatctggttgtag

SEQ ID NO: 3676832 - DNA, 25 bp, Homo sapien
aaaagcttctaccacacatgctgtg

SEQ ID NO: 3676833 - DNA, 25 bp, Homo sapien
ggcctttgttcaggatgatctctgg

SEQ ID NO: 3676834 - DNA, 25 bp, Homo sapien
tctggggctacatactctggagtcc

SEQ ID NO: 3676835 - DNA, 25 bp, Homo sapien
taggattcccagtgaccagtagtcg

SEQ ID NO: 3676836 - DNA, 25 bp, Homo sapien
cagtagtcggctgaaatgtcatggc

SEQ ID NO: 3676837 - DNA, 25 bp, Homo sapien
taactgatccatccttgaagtgtgg

SEQ ID NO: 3676838 - DNA, 25 bp, Homo sapien
cagcttcagtgagtacaaagatgac

SEQ ID NO: 3676839 - DNA, 25 bp, Homo sapien
cttttttatcaagcaggctaatgag

SEQ ID NO: 3676840 - DNA, 25 bp, Homo sapien
gggagatgatgatacaccttgacga

SEQ ID NO: 3676841 - DNA, 25 bp, Homo sapien
tataggttttcataggatctgggcc

SEQ ID NO: 3676842 - DNA, 25 bp, Homo sapien
tccccctcaatatgatgttataggt

SEQ ID NO: 3676843 - DNA, 25 bp, Homo sapien
gcatttttggcaatcttctttggaa

SEQ ID NO: 3676844 - DNA, 25 bp, Homo sapien
tggaaattctatcatgtcaatcccc

SEQ ID NO: 3676845 - DNA, 25 bp, Homo sapien
aaattccctaatctttctgatggat

SEQ ID NO: 3676846 - DNA, 25 bp, Homo sapien
cttttgaatgtcttttactccattt

SEQ ID NO: 3676847 - DNA, 25 bp, Homo sapien
ttcaaattccctaatctttctgatg

SEQ ID NO: 3676848 - DNA, 25 bp, Homo sapien
caaattccctaatctttctgatgga

SEQ ID NO: 3676849 - DNA, 25 bp, Homo sapien
taagccttcccagttaaagccctca

SEQ ID NO: 3676850 - DNA, 25 bp, Homo sapien
cttggtattataggaggtgtcaagg

SEQ ID NO: 3676851 - DNA, 25 bp, Homo sapien
tggtattataggaggtgtcaaggta

SEQ ID NO: 3676852 - DNA, 25 bp, Homo sapien
acttggtattataggaggtgtcaag

SEQ ID NO: 3676853 - DNA, 25 bp, Homo sapien
ggtattataggaggtgtcaaggtac

SEQ ID NO: 3676854 - DNA, 25 bp, Homo sapien
tagaagtctatatcccatcctgagt

SEQ ID NO: 3676855 - DNA, 25 bp, Homo sapien
tcgttgtcctcagggaaactgtcaa

SEQ ID NO: 3676856 - DNA, 25 bp, Homo sapien
caggtggtggttcatcgttgtcctc

SEQ ID NO: 3676857 - DNA, 25 bp, Homo sapien
tgagttgtcatcaggtggtggttca

SEQ ID NO: 3676858 - DNA, 25 bp, Homo sapien
taataatagtcaactggcatgccag

SEQ ID NO: 3676859 - DNA, 25 bp, Homo sapien
tatggtatatacaccggcctgcagt

SEQ ID NO: 3676860 - DNA, 25 bp, Homo sapien
taagcggtaagtcctaatgccactg

SEQ ID NO: 3676861 - DNA, 25 bp, Homo sapien
tactggagcagcatcgatcaaaggc

SEQ ID NO: 3676862 - DNA, 25 bp, Homo sapien
acaggcactcagcaattacagctgc

SEQ ID NO: 3676863 - DNA, 25 bp, Homo sapien
ctataaagtatacaacaggcactca

SEQ ID NO: 3676864 - DNA, 25 bp, Homo sapien
tataaagtatacaacaggcactcag

SEQ ID NO: 3676865 - DNA, 25 bp, Homo sapien
cagcaattacagctgcaggaaaaat

SEQ ID NO: 3676866 - DNA, 25 bp, Homo sapien
cctgcacggcgcagcacggcgaatc

SEQ ID NO: 3676867 - DNA, 25 bp, Homo sapien
tggctggccaacctaggggctccca

SEQ ID NO: 3676868 - DNA, 25 bp, Homo sapien
agtgcgggcgcgtttcccagcgcgc

SEQ ID NO: 3676869 - DNA, 25 bp, Homo sapien
aagcctgagtccttccgcaacggcc

SEQ ID NO: 3676870 - DNA, 25 bp, Homo sapien
tgtcaggaatcaatgcgttaagcac

SEQ ID NO: 3676871 - DNA, 25 bp, Homo sapien
caattcttgaatggtaccctagtta

SEQ ID NO: 3676872 - DNA, 25 bp, Homo sapien
tcagtgtactaggaaatctgcaagc

SEQ ID NO: 3676873 - DNA, 25 bp, Homo sapien
aacgtagagaaaaatccgcctgcca

SEQ ID NO: 3676874 - DNA, 25 bp, Homo sapien
ttgcacgggaccacgcaataccctt

SEQ ID NO: 3676875 - DNA, 25 bp, Homo sapien
tgcacgggaccacgcaatacccttt

SEQ ID NO: 3676876 - DNA, 25 bp, Homo sapien
cttgcacgggaccacgcaataccct

SEQ ID NO: 3676877 - DNA, 25 bp, Homo sapien
aaagcggacagggtccaacgtgcca

SEQ ID NO: 3676878 - DNA, 25 bp, Homo sapien
tttgaatcagggcaatcgcggcggt

SEQ ID NO: 3676879 - DNA, 25 bp, Homo sapien
cagacgcgtgagatcaaagtggccg

SEQ ID NO: 3676880 - DNA, 25 bp, Homo sapien
gatgaacttgattaggcagacgcgt

SEQ ID NO: 3676881 - DNA, 25 bp, Homo sapien
ccacgaaaccgtgccggttcggctg

SEQ ID NO: 3676882 - DNA, 25 bp, Homo sapien
cagagtcagggtccgggagccccct

SEQ ID NO: 3676883 - DNA, 25 bp, Homo sapien
accgtgccggttcggctgcagagtc

SEQ ID NO: 3676884 - DNA, 25 bp, Homo sapien
aaaatgaccgtcactttgcaagcct

SEQ ID NO: 3676885 - DNA, 25 bp, Homo sapien
ggcaggttcttgatagcgttggaat

SEQ ID NO: 3676886 - DNA, 25 bp, Homo sapien
ctaccatcgcgacaaagacccgggt

SEQ ID NO: 3676887 - DNA, 25 bp, Homo sapien
caatggtctggtacttattcccgcc

SEQ ID NO: 3676888 - DNA, 25 bp, Homo sapien
cgagttcaaggtggcgctcactccc

SEQ ID NO: 3676889 - DNA, 25 bp, Homo sapien
gaaccgcacacattcagcacgttct

SEQ ID NO: 3676890 - DNA, 25 bp, Homo sapien
agagggtgaggcacccagacgtcca

SEQ ID NO: 3676891 - DNA, 25 bp, Homo sapien
gaccctttcaaggtcagagcatcct

SEQ ID NO: 3676892 - DNA, 25 bp, Homo sapien
caaatgcagggttaccaaatgctcc

SEQ ID NO: 3676893 - DNA, 25 bp, Homo sapien
cgggtgggactagcgcagtactcat

SEQ ID NO: 3676894 - DNA, 25 bp, Homo sapien
gggcagcacatagcgtgacgcatgc

SEQ ID NO: 3676895 - DNA, 25 bp, Homo sapien
gagacagatttgcacgcctgcgtcc

SEQ ID NO: 3676896 - DNA, 25 bp, Homo sapien
catgcagcgttttcggcgcttcctg

SEQ ID NO: 3676897 - DNA, 25 bp, Homo sapien
cagagacctcccaacttctctcttc

SEQ ID NO: 3676898 - DNA, 25 bp, Homo sapien
tcccaacttctctcttcttcccgat

SEQ ID NO: 3676899 - DNA, 25 bp, Homo sapien
cctcccaacttctctcttcttcccg

SEQ ID NO: 3676900 - DNA, 25 bp, Homo sapien
ctcagagacctcccaacttctctct

SEQ ID NO: 3676901 - DNA, 25 bp, Homo sapien
cagggttgtaatgcattactgctaa

SEQ ID NO: 3676902 - DNA, 25 bp, Homo sapien
catcaacttgagatacttcattgca

SEQ ID NO: 3676903 - DNA, 25 bp, Homo sapien
tggcagtctgttatgccagcatcaa

SEQ ID NO: 3676904 - DNA, 25 bp, Homo sapien
caggaaatagtgattaacttcaggg

SEQ ID NO: 3676905 - DNA, 25 bp, Homo sapien
caaggtgctatgatcattaccaaag

SEQ ID NO: 3676906 - DNA, 25 bp, Homo sapien
ctcctcggaaatgattttgatcaga

SEQ ID NO: 3676907 - DNA, 25 bp, Homo sapien
atacccatccaaggtgctatgatca

SEQ ID NO: 3676908 - DNA, 25 bp, Homo sapien
tgctatgatcattaccaaagctttc

SEQ ID NO: 3676909 - DNA, 25 bp, Homo sapien
caaaagacacttctgatgtgctaag

SEQ ID NO: 3676910 - DNA, 25 bp, Homo sapien
tgatgtgctaagaatgagtcttaac

SEQ ID NO: 3676911 - DNA, 25 bp, Homo sapien
tgctaagaatgagtcttaacatcct

SEQ ID NO: 3676912 - DNA, 25 bp, Homo sapien
attcaaaagacacttctgatgtgct

SEQ ID NO: 3676913 - DNA, 25 bp, Homo sapien
gagaagacagtaggaaaaaagtaca

SEQ ID NO: 3676914 - DNA, 25 bp, Homo sapien
ctacgaaggagaagacagtaggaaa

SEQ ID NO: 3676915 - DNA, 25 bp, Homo sapien
tacgaaggagaagacagtaggaaaa

SEQ ID NO: 3676916 - DNA, 25 bp, Homo sapien
tcctgaggcacagtctgatgaccgg

SEQ ID NO: 3676917 - DNA, 25 bp, Homo sapien
caggacaggtttacagatcttggac

SEQ ID NO: 3676918 - DNA, 25 bp, Homo sapien
gaccagaagtgtctagcacaacaca

SEQ ID NO: 3676919 - DNA, 25 bp, Homo sapien
gaatatttctagtccatgagagcct

SEQ ID NO: 3676920 - DNA, 25 bp, Homo sapien
cctagaagaattactggcttgatgg

SEQ ID NO: 3676921 - DNA, 25 bp, Homo sapien
gtctctgacaagtgtgaagcctaga

SEQ ID NO: 3676922 - DNA, 25 bp, Homo sapien
gatctttctgtatccggcaagacag

SEQ ID NO: 3676923 - DNA, 25 bp, Homo sapien
tgatggtgatctttctgtatccggc

SEQ ID NO: 3676924 - DNA, 25 bp, Homo sapien
tattggaatgcttaactgaaaccac

SEQ ID NO: 3676925 - DNA, 25 bp, Homo sapien
caagaggaaaaataggcagtgcagc

SEQ ID NO: 3676926 - DNA, 25 bp, Homo sapien
tcattgcatttacaggtaagtgcca

SEQ ID NO: 3676927 - DNA, 25 bp, Homo sapien
tttgtcattccaagagatccttgcg

SEQ ID NO: 3676928 - DNA, 25 bp, Homo sapien
tgagtttatcaatgcagaacacgtc

SEQ ID NO: 3676929 - DNA, 25 bp, Homo sapien
cctctaagatcacaatcccaaaatg

SEQ ID NO: 3676930 - DNA, 25 bp, Homo sapien
gttcttgtagaacacacacatacgt

SEQ ID NO: 3676931 - DNA, 25 bp, Homo sapien
taaacatatcacacttccgttcttg

SEQ ID NO: 3676932 - DNA, 25 bp, Homo sapien
tccaatcaatagatttcaggttaaa

SEQ ID NO: 3676933 - DNA, 25 bp, Homo sapien
ctttaaaatactgtatccgtatcct

SEQ ID NO: 3676934 - DNA, 25 bp, Homo sapien
tactgtatccgtatcctcattccaa

SEQ ID NO: 3676935 - DNA, 25 bp, Homo sapien
tcaatagatttcaggttaaacaaaa

SEQ ID NO: 3676936 - DNA, 25 bp, Homo sapien
ctggagatgagaagcaagaaaggct

SEQ ID NO: 3676937 - DNA, 25 bp, Homo sapien
gctgtcactagggtcaatgtactga

SEQ ID NO: 3676938 - DNA, 25 bp, Homo sapien
cactagggtcaatgtactgaggtcc

SEQ ID NO: 3676939 - DNA, 25 bp, Homo sapien
agggtcaatgtactgaggtccgttc

SEQ ID NO: 3676940 - DNA, 25 bp, Homo sapien
aatttctcagctggataggaagaag

SEQ ID NO: 3676941 - DNA, 25 bp, Homo sapien
ctggataggaagaagaggcatccct

SEQ ID NO: 3676942 - DNA, 25 bp, Homo sapien
tctcagctggataggaagaagaggc

SEQ ID NO: 3676943 - DNA, 25 bp, Homo sapien
aggcatccctctggttggttttgta

SEQ ID NO: 3676944 - DNA, 25 bp, Homo sapien
tggtcggtgataagcaagcatcttg

SEQ ID NO: 3676945 - DNA, 25 bp, Homo sapien
gaatgccagagattactgttcactg

SEQ ID NO: 3676946 - DNA, 25 bp, Homo sapien
gagcttaatcatcacttggtcggtg

SEQ ID NO: 3676947 - DNA, 25 bp, Homo sapien
tgcaggacagcgtgtagagtatact

SEQ ID NO: 3676948 - DNA, 25 bp, Homo sapien
aatgatcagtggttataatcactat

SEQ ID NO: 3676949 - DNA, 25 bp, Homo sapien
ataggaaacccataatgatcagtgg

SEQ ID NO: 3676950 - DNA, 25 bp, Homo sapien
cagtggttataatcactatcagcat

SEQ ID NO: 3676951 - DNA, 25 bp, Homo sapien
taggaaacccataatgatcagtggt

SEQ ID NO: 3676952 - DNA, 25 bp, Homo sapien
catgttccaatctctgtccactgat

SEQ ID NO: 3676953 - DNA, 25 bp, Homo sapien
ttcacatgttccaatctctgtccac

SEQ ID NO: 3676954 - DNA, 25 bp, Homo sapien
atgttccaatctctgtccactgatt

SEQ ID NO: 3676955 - DNA, 25 bp, Homo sapien
cacatgttccaatctctgtccactg

SEQ ID NO: 3676956 - DNA, 25 bp, Homo sapien
tcccagtgatcttcaattgttctcc

SEQ ID NO: 3676957 - DNA, 25 bp, Homo sapien
ttgccgaggtctcacgcaattccca

SEQ ID NO: 3676958 - DNA, 25 bp, Homo sapien
tctccttttgccgaggtctcacgca

SEQ ID NO: 3676959 - DNA, 25 bp, Homo sapien
ggtctcacgcaattcccagtgatct

SEQ ID NO: 3676960 - DNA, 25 bp, Homo sapien
tttggactgaacagtgtaatttact

SEQ ID NO: 3676961 - DNA, 25 bp, Homo sapien
cgtataggtggttttagaaagcact

SEQ ID NO: 3676962 - DNA, 25 bp, Homo sapien
cttggcacgtataggtggttttaga

SEQ ID NO: 3676963 - DNA, 25 bp, Homo sapien
aaagcactttttggactgaacagtg

SEQ ID NO: 3676964 - DNA, 25 bp, Homo sapien
tatttttagcatctgaagcagtctg

SEQ ID NO: 3676965 - DNA, 25 bp, Homo sapien
gcagcccgcatcaaattgaagtctc

SEQ ID NO: 3676966 - DNA, 25 bp, Homo sapien
aattgttgagcagcccgcatcaaat

SEQ ID NO: 3676967 - DNA, 25 bp, Homo sapien
ttgagcagcccgcatcaaattgaag

SEQ ID NO: 3676968 - DNA, 25 bp, Homo sapien
gacaggaaacatattactggctata

SEQ ID NO: 3676969 - DNA, 25 bp, Homo sapien
ggaaacatattactggctatagtcc

SEQ ID NO: 3676970 - DNA, 25 bp, Homo sapien
tgacaggaaacatattactggctat

SEQ ID NO: 3676971 - DNA, 25 bp, Homo sapien
caggaaacatattactggctatagt

SEQ ID NO: 3676972 - DNA, 25 bp, Homo sapien
tgtccaaagactgcatcatcggaga

SEQ ID NO: 3676973 - DNA, 25 bp, Homo sapien
gatgtaatgtccaaagactgcatca

SEQ ID NO: 3676974 - DNA, 25 bp, Homo sapien
taatgtccaaagactgcatcatcgg

SEQ ID NO: 3676975 - DNA, 25 bp, Homo sapien
caaagactgcatcatcggagatagt

SEQ ID NO: 3676976 - DNA, 25 bp, Homo sapien
tcgtccacccccaccatctgccaat

SEQ ID NO: 3676977 - DNA, 25 bp, Homo sapien
tccacccccaccatctgccaatttt

SEQ ID NO: 3676978 - DNA, 25 bp, Homo sapien
gtccacccccaccatctgccaattt

SEQ ID NO: 3676979 - DNA, 25 bp, Homo sapien
tttcgtccacccccaccatctgcca

SEQ ID NO: 3676980 - DNA, 25 bp, Homo sapien
ggctataatattgcaaacaatagga

SEQ ID NO: 3676981 - DNA, 25 bp, Homo sapien
ggattatgacctctttcagcaggtt

SEQ ID NO: 3676982 - DNA, 25 bp, Homo sapien
gcaaacaataggattatgacctctt

SEQ ID NO: 3676983 - DNA, 25 bp, Homo sapien
tgtcataggctataatattgcaaac

SEQ ID NO: 3676984 - DNA, 25 bp, Homo sapien
gcagaattgttcccgcaaagaaggg

SEQ ID NO: 3676985 - DNA, 25 bp, Homo sapien
ctttatagttgagcataaaatctca

SEQ ID NO: 3676986 - DNA, 25 bp, Homo sapien
cacatcccaaccactgtatctctca

SEQ ID NO: 3676987 - DNA, 25 bp, Homo sapien
ctcacatcccaaccactgtatctct

SEQ ID NO: 3676988 - DNA, 25 bp, Homo sapien
tatagttgagcataaaatctcacat

SEQ ID NO: 3676989 - DNA, 25 bp, Homo sapien
gggcaggatctccttctaagatcat

SEQ ID NO: 3676990 - DNA, 25 bp, Homo sapien
aatatgaggctcttcatcatggcag

SEQ ID NO: 3676991 - DNA, 25 bp, Homo sapien
gttgtcgataagattcacttccttg

SEQ ID NO: 3676992 - DNA, 25 bp, Homo sapien
aacagaggccaccttcagtttcttg

SEQ ID NO: 3676993 - DNA, 25 bp, Homo sapien
gctcttccgcgtgcagttaagggca

SEQ ID NO: 3676994 - DNA, 25 bp, Homo sapien
cttccgcgtgcagttaagggcagcg

SEQ ID NO: 3676995 - DNA, 25 bp, Homo sapien
ctgcgtgctcttccgcgtgcagtta

SEQ ID NO: 3676996 - DNA, 25 bp, Homo sapien
gtgctcttccgcgtgcagttaaggg

SEQ ID NO: 3676997 - DNA, 25 bp, Homo sapien
aaatgtgtggcacataattgataat

SEQ ID NO: 3676998 - DNA, 25 bp, Homo sapien
gatcatagaggtctcaaaatgtgtg

SEQ ID NO: 3676999 - DNA, 25 bp, Homo sapien
aatctgctctcctacaattgtccac

SEQ ID NO: 3677000 - DNA, 25 bp, Homo sapien
aatgtttatttagctgatcaggtgt

SEQ ID NO: 3677001 - DNA, 25 bp, Homo sapien
tatctggagtaaagagatcttctgg

SEQ ID NO: 3677002 - DNA, 25 bp, Homo sapien
atatccatccagaggtatgttttgc

SEQ ID NO: 3677003 - DNA, 25 bp, Homo sapien
tttcatcagcctcatatccatccag

SEQ ID NO: 3677004 - DNA, 25 bp, Homo sapien
cagcctcatatccatccagaggtat

SEQ ID NO: 3677005 - DNA, 25 bp, Homo sapien
agatctctagcacctgtttttgctg

SEQ ID NO: 3677006 - DNA, 25 bp, Homo sapien
ctgtgtttttgaacaaaacaacgtg

SEQ ID NO: 3677007 - DNA, 25 bp, Homo sapien
tagcacctgtttttgctgtgttttt

SEQ ID NO: 3677008 - DNA, 25 bp, Homo sapien
tctagcacctgtttttgctgtgttt

SEQ ID NO: 3677009 - DNA, 25 bp, Homo sapien
cattgtcagtgataatggaaaagaa

SEQ ID NO: 3677010 - DNA, 25 bp, Homo sapien
tggaaaagaagtgtgagtctctcac

SEQ ID NO: 3677011 - DNA, 25 bp, Homo sapien
ggaaaagaagtgtgagtctctcact

SEQ ID NO: 3677012 - DNA, 25 bp, Homo sapien
ctacattgtcagtgataatggaaaa

SEQ ID NO: 3677013 - DNA, 25 bp, Homo sapien
gaagagtagagcatgtaaatagctt

SEQ ID NO: 3677014 - DNA, 25 bp, Homo sapien
tggcagatttccttcagttctttac

SEQ ID NO: 3677015 - DNA, 25 bp, Homo sapien
ggcagatttccttcagttctttacc

SEQ ID NO: 3677016 - DNA, 25 bp, Homo sapien
aatggcagatttccttcagttcttt

SEQ ID NO: 3677017 - DNA, 25 bp, Homo sapien
atggcagatttccttcagttcttta

SEQ ID NO: 3677018 - DNA, 25 bp, Homo sapien
gacatcagatttgaccctggagatt

SEQ ID NO: 3677019 - DNA, 25 bp, Homo sapien
agacatcagatttgaccctggagat

SEQ ID NO: 3677020 - DNA, 25 bp, Homo sapien
atcacttcgttgagtgaatgcagta

SEQ ID NO: 3677021 - DNA, 25 bp, Homo sapien
tgcagtactgcagtcaagctaccgg

SEQ ID NO: 3677022 - DNA, 25 bp, Homo sapien
aatgcagtactgcagtcaagctacc

SEQ ID NO: 3677023 - DNA, 25 bp, Homo sapien
tattttccatcacttcgttgagtga

SEQ ID NO: 3677024 - DNA, 25 bp, Homo sapien
tttaagttcctgaataatgtgctcc

SEQ ID NO: 3677025 - DNA, 25 bp, Homo sapien
ctttaagttcctgaataatgtgctc

SEQ ID NO: 3677026 - DNA, 25 bp, Homo sapien
tctttaagttcctgaataatgtgct

SEQ ID NO: 3677027 - DNA, 25 bp, Homo sapien
atgtcagcatgatgttcctcctagg

SEQ ID NO: 3677028 - DNA, 25 bp, Homo sapien
ctacaacatgtcagcatgatgttcc

SEQ ID NO: 3677029 - DNA, 25 bp, Homo sapien
gcatgatgttcctcctaggtattaa

SEQ ID NO: 3677030 - DNA, 25 bp, Homo sapien
tgttcctcctaggtattaaatttga

SEQ ID NO: 3677031 - DNA, 25 bp, Homo sapien
agagcatgttgggattaggtaagcc

SEQ ID NO: 3677032 - DNA, 25 bp, Homo sapien
gagagcatgttgggattaggtaagc

SEQ ID NO: 3677033 - DNA, 25 bp, Homo sapien
cacaggaccttcagcaaatgcatac

SEQ ID NO: 3677034 - DNA, 25 bp, Homo sapien
caggaccttcagcaaatgcatacac

SEQ ID NO: 3677035 - DNA, 25 bp, Homo sapien
aagaatacacaggaccttcagcaaa

SEQ ID NO: 3677036 - DNA, 25 bp, Homo sapien
tacacaggaccttcagcaaatgcat

SEQ ID NO: 3677037 - DNA, 25 bp, Homo sapien
ctctgcacagagtataaggagtcat

SEQ ID NO: 3677038 - DNA, 25 bp, Homo sapien
gctagaaagtgggaatcaccagaat

SEQ ID NO: 3677039 - DNA, 25 bp, Homo sapien
tccatttatcagaactgaagtagct

SEQ ID NO: 3677040 - DNA, 25 bp, Homo sapien
atgagtcctccacttatacgatggt

SEQ ID NO: 3677041 - DNA, 25 bp, Homo sapien
tctaggtctaactggtgccgtaata

SEQ ID NO: 3677042 - DNA, 25 bp, Homo sapien
ggtctaactggtgccgtaatacaat

SEQ ID NO: 3677043 - DNA, 25 bp, Homo sapien
ctggtgccgtaatacaatcacatga

SEQ ID NO: 3677044 - DNA, 25 bp, Homo sapien
taactggtgccgtaatacaatcaca

SEQ ID NO: 3677045 - DNA, 25 bp, Homo sapien
tgggaatggagtctgctgcctaagg

SEQ ID NO: 3677046 - DNA, 25 bp, Homo sapien
ggaatggagtctgctgcctaaggcc

SEQ ID NO: 3677047 - DNA, 25 bp, Homo sapien
gaatggagtctgctgcctaaggccc

SEQ ID NO: 3677048 - DNA, 25 bp, Homo sapien
gggaatggagtctgctgcctaaggc

SEQ ID NO: 3677049 - DNA, 25 bp, Homo sapien
gtagctattagtgggaagcaggata

SEQ ID NO: 3677050 - DNA, 25 bp, Homo sapien
tggttccttatgaagtagacactga

SEQ ID NO: 3677051 - DNA, 25 bp, Homo sapien
tttctcatggttccttatgaagtag

SEQ ID NO: 3677052 - DNA, 25 bp, Homo sapien
ctgagtgattggtagctattagtgg

SEQ ID NO: 3677053 - DNA, 25 bp, Homo sapien
tacacaagcgcctgaacacagagct

SEQ ID NO: 3677054 - DNA, 25 bp, Homo sapien
tatgagtccagtgcttacacaagcg

SEQ ID NO: 3677055 - DNA, 25 bp, Homo sapien
caggctgggtgcatgtgtcaaactc

SEQ ID NO: 3677056 - DNA, 25 bp, Homo sapien
gagtggttccatgctcaagttccaa

SEQ ID NO: 3677057 - DNA, 25 bp, Homo sapien
gatgtagatgggtgattaactggac

SEQ ID NO: 3677058 - DNA, 25 bp, Homo sapien
tacttccccttcttgacgaacatgg

SEQ ID NO: 3677059 - DNA, 25 bp, Homo sapien
cattggttgtaaggtgacacaggag

SEQ ID NO: 3677060 - DNA, 25 bp, Homo sapien
agtgtatgagaatcaacattcccca

SEQ ID NO: 3677061 - DNA, 25 bp, Homo sapien
attgatgatcaaggcagccttccct

SEQ ID NO: 3677062 - DNA, 25 bp, Homo sapien
cattgatgatcaaggcagccttccc

SEQ ID NO: 3677063 - DNA, 25 bp, Homo sapien
tcattgatgatcaaggcagccttcc

SEQ ID NO: 3677064 - DNA, 25 bp, Homo sapien
ttgatgatcaaggcagccttccctc

SEQ ID NO: 3677065 - DNA, 25 bp, Homo sapien
cgtgactctacttcagtgccttgca

SEQ ID NO: 3677066 - DNA, 25 bp, Homo sapien
ccgtgactctacttcagtgccttgc

SEQ ID NO: 3677067 - DNA, 25 bp, Homo sapien
cacttgtactgtggtgaaactttcc

SEQ ID NO: 3677068 - DNA, 25 bp, Homo sapien
ttcaaagaaatagattccagcaggc

SEQ ID NO: 3677069 - DNA, 25 bp, Homo sapien
tagattccagcaggcgtaaagctac

SEQ ID NO: 3677070 - DNA, 25 bp, Homo sapien
aaatagattccagcaggcgtaaagc

SEQ ID NO: 3677071 - DNA, 25 bp, Homo sapien
gctctaagttcttcttgagtaccaa

SEQ ID NO: 3677072 - DNA, 25 bp, Homo sapien
ttcttttggtttgctaggtcctgca

SEQ ID NO: 3677073 - DNA, 25 bp, Homo sapien
cacagtctatttgtgatagctctaa

SEQ ID NO: 3677074 - DNA, 25 bp, Homo sapien
gagtaccaaagctttgaccacagtg

SEQ ID NO: 3677075 - DNA, 25 bp, Homo sapien
gactgaacatctgcaaatatggcga

SEQ ID NO: 3677076 - DNA, 25 bp, Homo sapien
tatggcgacagtgtggcgcatacga

SEQ ID NO: 3677077 - DNA, 25 bp, Homo sapien
catacgatgcgccagtgactgagct

SEQ ID NO: 3677078 - DNA, 25 bp, Homo sapien
tcagacaaaatggatcctgctgggc

SEQ ID NO: 3677079 - DNA, 25 bp, Homo sapien
cagttgacattcgtaaagcaaaccc

SEQ ID NO: 3677080 - DNA, 25 bp, Homo sapien
caagcattcagcaactttagctaga

SEQ ID NO: 3677081 - DNA, 25 bp, Homo sapien
ggaccccacaaagagttaccatctg

SEQ ID NO: 3677082 - DNA, 25 bp, Homo sapien
gagagagagatttcctggaccccac

SEQ ID NO: 3677083 - DNA, 25 bp, Homo sapien
gctccgatgttatgtctcttgtcac

SEQ ID NO: 3677084 - DNA, 25 bp, Homo sapien
tggaatgcagtgtcccgattgaagc

SEQ ID NO: 3677085 - DNA, 25 bp, Homo sapien
caacacaacttgtatcaatagttgc

SEQ ID NO: 3677086 - DNA, 25 bp, Homo sapien
ttgaagctgtaataactacaagtca

SEQ ID NO: 3677087 - DNA, 25 bp, Homo sapien
tctttgtatcagtaagacttgtagc

SEQ ID NO: 3677088 - DNA, 25 bp, Homo sapien
tttgtatcagtaagacttgtagcaa

SEQ ID NO: 3677089 - DNA, 25 bp, Homo sapien
tgtatcagtaagacttgtagcaatg

SEQ ID NO: 3677090 - DNA, 25 bp, Homo sapien
gtatcagtaagacttgtagcaatgt

SEQ ID NO: 3677091 - DNA, 25 bp, Homo sapien
ctttgctgtgtagatgaaatgttct

SEQ ID NO: 3677092 - DNA, 25 bp, Homo sapien
caatatcgaagattccaggcggctc

SEQ ID NO: 3677093 - DNA, 25 bp, Homo sapien
caggcggctctgacatgagctggaa

SEQ ID NO: 3677094 - DNA, 25 bp, Homo sapien
tagcgaatcaggtatgcagaaggaa

SEQ ID NO: 3677095 - DNA, 25 bp, Homo sapien
gacaataattcctcagtgtaaatac

SEQ ID NO: 3677096 - DNA, 25 bp, Homo sapien
taccctggcaatcaaaattggaagc

SEQ ID NO: 3677097 - DNA, 25 bp, Homo sapien
aaattggaagcacatgtgacttgtc

SEQ ID NO: 3677098 - DNA, 25 bp, Homo sapien
catgtgacttgtcttcagtgtgaat

SEQ ID NO: 3677099 - DNA, 25 bp, Homo sapien
gggcatcctgatttcatgcagatat

SEQ ID NO: 3677100 - DNA, 25 bp, Homo sapien
atgtttgatttctaggccacacatg

SEQ ID NO: 3677101 - DNA, 25 bp, Homo sapien
gccacacatgaaggatgtttcttct

SEQ ID NO: 3677102 - DNA, 25 bp, Homo sapien
ttcttctgggcatcctgatttcatg

SEQ ID NO: 3677103 - DNA, 25 bp, Homo sapien
gcccaattcaaaaacttacattcca

SEQ ID NO: 3677104 - DNA, 25 bp, Homo sapien
caattcaaaaacttacattccattt

SEQ ID NO: 3677105 - DNA, 25 bp, Homo sapien
ccaattcaaaaacttacattccatt

SEQ ID NO: 3677106 - DNA, 25 bp, Homo sapien
cccaattcaaaaacttacattccat

SEQ ID NO: 3677107 - DNA, 25 bp, Homo sapien
ctggttttgtacctcattgtcttct

SEQ ID NO: 3677108 - DNA, 25 bp, Homo sapien
ttcctcttttccagtaattagccat

SEQ ID NO: 3677109 - DNA, 25 bp, Homo sapien
tctctacatttggaagattctttcc

SEQ ID NO: 3677110 - DNA, 25 bp, Homo sapien
tcattgtcttctctacatttggaag

SEQ ID NO: 3677111 - DNA, 25 bp, Homo sapien
tctctttaagcacaatggcagccag

SEQ ID NO: 3677112 - DNA, 25 bp, Homo sapien
gccagttgttcctgcggcactgtgg

SEQ ID NO: 3677113 - DNA, 25 bp, Homo sapien
tatgcgggagtcaggattggttttc

SEQ ID NO: 3677114 - DNA, 25 bp, Homo sapien
cgtctctcagtttgtatgcgggagt

SEQ ID NO: 3677115 - DNA, 25 bp, Homo sapien
atctaaacacgtttctttctcctga

SEQ ID NO: 3677116 - DNA, 25 bp, Homo sapien
tatctaaacacgtttctttctcctg

SEQ ID NO: 3677117 - DNA, 25 bp, Homo sapien
tctaaacacgtttctttctcctgac

SEQ ID NO: 3677118 - DNA, 25 bp, Homo sapien
tcagatattattaacctgaggagaa

SEQ ID NO: 3677119 - DNA, 25 bp, Homo sapien
tattattaacctgaggagaaacaca

SEQ ID NO: 3677120 - DNA, 25 bp, Homo sapien
tggtattcagaccccttgcttttaa

SEQ ID NO: 3677121 - DNA, 25 bp, Homo sapien
taacctgaggagaaacacaaatcct

SEQ ID NO: 3677122 - DNA, 25 bp, Homo sapien
tctgaaggttcccagtcacaatgga

SEQ ID NO: 3677123 - DNA, 25 bp, Homo sapien
ttccataagctgagccatgatgaag

SEQ ID NO: 3677124 - DNA, 25 bp, Homo sapien
gaaggttcccagtcacaatggaaat

SEQ ID NO: 3677125 - DNA, 25 bp, Homo sapien
ctacaccagataggtttttccataa

SEQ ID NO: 3677126 - DNA, 25 bp, Homo sapien
tacgccatgttctagggcctctgga

SEQ ID NO: 3677127 - DNA, 25 bp, Homo sapien
gcagatgctctacgccatgttctag

SEQ ID NO: 3677128 - DNA, 25 bp, Homo sapien
aaacatgcagatgctctacgccatg

SEQ ID NO: 3677129 - DNA, 25 bp, Homo sapien
ctctggaaatacactggggctaaat

SEQ ID NO: 3677130 - DNA, 25 bp, Homo sapien
tccctcatcctcacccttttgaatt

SEQ ID NO: 3677131 - DNA, 25 bp, Homo sapien
tccctagcagaacgaagcttctcca

SEQ ID NO: 3677132 - DNA, 25 bp, Homo sapien
tgccatgaaatcctccagtgtctca

SEQ ID NO: 3677133 - DNA, 25 bp, Homo sapien
tggactgtcaaaatacactcttccc

SEQ ID NO: 3677134 - DNA, 25 bp, Homo sapien
ggttggacaagagtacacatcccta

SEQ ID NO: 3677135 - DNA, 25 bp, Homo sapien
ggctttttggtgtagagactggatc

SEQ ID NO: 3677136 - DNA, 25 bp, Homo sapien
tcttgcacatatggctcaatggctt

SEQ ID NO: 3677137 - DNA, 25 bp, Homo sapien
gaagacataaacgtggctctggtga

SEQ ID NO: 3677138 - DNA, 25 bp, Homo sapien
cataggcttgaacccatccaagtca

SEQ ID NO: 3677139 - DNA, 25 bp, Homo sapien
ggaaaacaggcaaaccatgactagg

SEQ ID NO: 3677140 - DNA, 25 bp, Homo sapien
gaaacacaggatagaccaccttcag

SEQ ID NO: 3677141 - DNA, 25 bp, Homo sapien
tattggcctgcatctgtcaaaggat

SEQ ID NO: 3677142 - DNA, 25 bp, Homo sapien
tcagaaatgagaggagacacgacaa

SEQ ID NO: 3677143 - DNA, 25 bp, Homo sapien
atacttttatatgagttcaatcttt

SEQ ID NO: 3677144 - DNA, 25 bp, Homo sapien
tacttttatatgagttcaatctttt

SEQ ID NO: 3677145 - DNA, 25 bp, Homo sapien
cattgtgacttcttcgactcatggt

SEQ ID NO: 3677146 - DNA, 25 bp, Homo sapien
gatcttctgtgggtttaattggcca

SEQ ID NO: 3677147 - DNA, 25 bp, Homo sapien
ggtttggatatgtatcttttcccac

SEQ ID NO: 3677148 - DNA, 25 bp, Homo sapien
cagctgcataccacaggtttggata

SEQ ID NO: 3677149 - DNA, 25 bp, Homo sapien
ctgtcttttgttcggtttcagtgag

SEQ ID NO: 3677150 - DNA, 25 bp, Homo sapien
atgttagataaattcaccagtgaag

SEQ ID NO: 3677151 - DNA, 25 bp, Homo sapien
tttcaatataagtaggatctatagc

SEQ ID NO: 3677152 - DNA, 25 bp, Homo sapien
tcatgatctaaacctattcatgttt

SEQ ID NO: 3677153 - DNA, 25 bp, Homo sapien
gaagtgctccagtcaggcctatcta

SEQ ID NO: 3677154 - DNA, 25 bp, Homo sapien
gagaccaccagatcaggtatagact

SEQ ID NO: 3677155 - DNA, 25 bp, Homo sapien
taattgctacatgatctagagccag

SEQ ID NO: 3677156 - DNA, 25 bp, Homo sapien
gttagcaaccccaatacagagacca

SEQ ID NO: 3677157 - DNA, 25 bp, Homo sapien
gatctgacaggaaatagactgacct

SEQ ID NO: 3677158 - DNA, 25 bp, Homo sapien
caggcccacagtatgcttgaaaaga

SEQ ID NO: 3677159 - DNA, 25 bp, Homo sapien
aaatggccagtggaatgacgtcccc

SEQ ID NO: 3677160 - DNA, 25 bp, Homo sapien
gactgacctacacaaactggaacga

SEQ ID NO: 3677161 - DNA, 25 bp, Homo sapien
ttggtgtttggaggcctccatagta

SEQ ID NO: 3677162 - DNA, 25 bp, Homo sapien
tcttttggtgtttggaggcctccat

SEQ ID NO: 3677163 - DNA, 25 bp, Homo sapien
tgtttggaggcctccatagtacccc

SEQ ID NO: 3677164 - DNA, 25 bp, Homo sapien
cttttggtgtttggaggcctccata

SEQ ID NO: 3677165 - DNA, 25 bp, Homo sapien
ggagcaggagcagggggaagctctg

SEQ ID NO: 3677166 - DNA, 25 bp, Homo sapien
caggagcagggggaagctctggctg

SEQ ID NO: 3677167 - DNA, 25 bp, Homo sapien
agcaggagcagggggaagctctggc

SEQ ID NO: 3677168 - DNA, 25 bp, Homo sapien
cttctgccactggagcaggagcagg

SEQ ID NO: 3677169 - DNA, 25 bp, Homo sapien
ggaagagttgtctccttggagtcca

SEQ ID NO: 3677170 - DNA, 25 bp, Homo sapien
gaaagggcaacagctttccaggtga

SEQ ID NO: 3677171 - DNA, 25 bp, Homo sapien
agaaagggcaacagctttccaggtg

SEQ ID NO: 3677172 - DNA, 25 bp, Homo sapien
aggtgcagggaagagttgtctcctt

SEQ ID NO: 3677173 - DNA, 25 bp, Homo sapien
taatttggagtcttgtgatcgtgat

SEQ ID NO: 3677174 - DNA, 25 bp, Homo sapien
actcggtaatttggagtcttgtgat

SEQ ID NO: 3677175 - DNA, 25 bp, Homo sapien
ggtaatttggagtcttgtgatcgtg

SEQ ID NO: 3677176 - DNA, 25 bp, Homo sapien
tcggtaatttggagtcttgtgatcg

SEQ ID NO: 3677177 - DNA, 25 bp, Homo sapien
ccagaaaatccaccaattggaaggg

SEQ ID NO: 3677178 - DNA, 25 bp, Homo sapien
cacacataagatacgagaagcactg

SEQ ID NO: 3677179 - DNA, 25 bp, Homo sapien
agtaaggacactggaaactttctgg

SEQ ID NO: 3677180 - DNA, 25 bp, Homo sapien
acaggacatgttccttacagtccca

SEQ ID NO: 3677181 - DNA, 25 bp, Homo sapien
ccttccctatatggtatgtgtgtcc

SEQ ID NO: 3677182 - DNA, 25 bp, Homo sapien
tctctgctactttgcttaggaaatt

SEQ ID NO: 3677183 - DNA, 25 bp, Homo sapien
taggaaattccccaggtctggaata

SEQ ID NO: 3677184 - DNA, 25 bp, Homo sapien
ggtctggaataaccttccctatatg

SEQ ID NO: 3677185 - DNA, 25 bp, Homo sapien
gggatgaaaagagcatccaaaatcc

SEQ ID NO: 3677186 - DNA, 25 bp, Homo sapien
tgtagttttccaatattcatgaggg

SEQ ID NO: 3677187 - DNA, 25 bp, Homo sapien
gctctatgagccaattgtctcttta

SEQ ID NO: 3677188 - DNA, 25 bp, Homo sapien
aaagagcatccaaaatcctagctcc

SEQ ID NO: 3677189 - DNA, 25 bp, Homo sapien
aatagcttgcaaaacaccagcatgg

SEQ ID NO: 3677190 - DNA, 25 bp, Homo sapien
tagaaagatcacatcatcctggatg

SEQ ID NO: 3677191 - DNA, 25 bp, Homo sapien
tagctcttggctgataatagcttgc

SEQ ID NO: 3677192 - DNA, 25 bp, Homo sapien
tttacatagaaagatcacatcatcc

SEQ ID NO: 3677193 - DNA, 25 bp, Homo sapien
catgatttagcagcccagaatatct

SEQ ID NO: 3677194 - DNA, 25 bp, Homo sapien
ttggggcaactaggtacatggaaga

SEQ ID NO: 3677195 - DNA, 25 bp, Homo sapien
cctcatgatttagcagcccagaata

SEQ ID NO: 3677196 - DNA, 25 bp, Homo sapien
tcatgatttagcagcccagaatatc

SEQ ID NO: 3677197 - DNA, 25 bp, Homo sapien
ccacggttgtcctatcttgagctag

SEQ ID NO: 3677198 - DNA, 25 bp, Homo sapien
ggacctatgactttctgagccacgc

SEQ ID NO: 3677199 - DNA, 25 bp, Homo sapien
tggagaagaggaccctcctacagtc

SEQ ID NO: 3677200 - DNA, 25 bp, Homo sapien
tgagccacgctcaggataacctgga

SEQ ID NO: 3677201 - DNA, 25 bp, Homo sapien
gctagatagtgcctgcattgccagt

SEQ ID NO: 3677202 - DNA, 25 bp, Homo sapien
cttgctagatagtgcctgcattgcc

SEQ ID NO: 3677203 - DNA, 25 bp, Homo sapien
atcttgctatttagtgccttttcac

SEQ ID NO: 3677204 - DNA, 25 bp, Homo sapien
cattgccagtcagtgcctatcttgc

SEQ ID NO: 3677205 - DNA, 25 bp, Homo sapien
gacaaatttagcagtgaaagggctg

SEQ ID NO: 3677206 - DNA, 25 bp, Homo sapien
taacccattaccaatgaaccagcct

SEQ ID NO: 3677207 - DNA, 25 bp, Homo sapien
agccagacaaatttagcagtgaaag

SEQ ID NO: 3677208 - DNA, 25 bp, Homo sapien
cagacaaatttagcagtgaaagggc

SEQ ID NO: 3677209 - DNA, 25 bp, Homo sapien
ggtggactatgaagacccgcagact

SEQ ID NO: 3677210 - DNA, 25 bp, Homo sapien
tcatctatggccatgctcacagggg

SEQ ID NO: 3677211 - DNA, 25 bp, Homo sapien
gactatctgttcttcctaattcagg

SEQ ID NO: 3677212 - DNA, 25 bp, Homo sapien
tcaggtgcatagtctcccctgctct

SEQ ID NO: 3677213 - DNA, 25 bp, Homo sapien
agcaatgttgcttctcctgtggaga

SEQ ID NO: 3677214 - DNA, 25 bp, Homo sapien
ccctgtgagactttggatgcactgt

SEQ ID NO: 3677215 - DNA, 25 bp, Homo sapien
tgaactttgagaagggcagtggcac

SEQ ID NO: 3677216 - DNA, 25 bp, Homo sapien
acacagaagtcagcgttcacacttt

SEQ ID NO: 3677217 - DNA, 25 bp, Homo sapien
cgggacccctgtccgaggtggcgct

SEQ ID NO: 3677218 - DNA, 25 bp, Homo sapien
tgctgcttgggagacagcgctcaag

SEQ ID NO: 3677219 - DNA, 25 bp, Homo sapien
gctcatgcgtgtctgcatcactgcc

SEQ ID NO: 3677220 - DNA, 25 bp, Homo sapien
atctccctggctcatgcgtgtctgc

SEQ ID NO: 3677221 - DNA, 25 bp, Homo sapien
acacagaagtcagcgttcacacttc

SEQ ID NO: 3677222 - DNA, 25 bp, Homo sapien
tgtgtggtctgggtagaaggtacca

SEQ ID NO: 3677223 - DNA, 25 bp, Homo sapien
acacttcgcgtctccactacggtgt

SEQ ID NO: 3677224 - DNA, 25 bp, Homo sapien
aagtcagcgttcacacttcgcgtct

SEQ ID NO: 3677225 - DNA, 25 bp, Homo sapien
taaccactactaatatgaccttaga

SEQ ID NO: 3677226 - DNA, 25 bp, Homo sapien
tatgaccttagagttgtcagctctc

SEQ ID NO: 3677227 - DNA, 25 bp, Homo sapien
gagttgtcagctctcattaaagcca

SEQ ID NO: 3677228 - DNA, 25 bp, Homo sapien
tctcattaaagccaagccgagtggg

SEQ ID NO: 3677229 - DNA, 25 bp, Homo sapien
caatcttggctccatttgaaggcag

SEQ ID NO: 3677230 - DNA, 25 bp, Homo sapien
ccccgagtggggttgagacacagat

SEQ ID NO: 3677231 - DNA, 25 bp, Homo sapien
ctttccctttgataccgattcgtcg

SEQ ID NO: 3677232 - DNA, 25 bp, Homo sapien
gattcgtcgctgtggttcatttggc

SEQ ID NO: 3677233 - DNA, 25 bp, Homo sapien
tgggttcccgagataggatttcctc

SEQ ID NO: 3677234 - DNA, 25 bp, Homo sapien
gttcccgagataggatttcctctac

SEQ ID NO: 3677235 - DNA, 25 bp, Homo sapien
ctgggttcccgagataggatttcct

SEQ ID NO: 3677236 - DNA, 25 bp, Homo sapien
ggttcccgagataggatttcctcta

SEQ ID NO: 3677237 - DNA, 25 bp, Homo sapien
tacggagggctttgcgctgctttag

SEQ ID NO: 3677238 - DNA, 25 bp, Homo sapien
cgggttccgaggcagttcctgcagc

SEQ ID NO: 3677239 - DNA, 25 bp, Homo sapien
gtatacggagggctttgcgctgctt

SEQ ID NO: 3677240 - DNA, 25 bp, Homo sapien
tcacgccagcgcgtgggtatacgga

SEQ ID NO: 3677241 - DNA, 25 bp, Homo sapien
ctggtctctgagttctaagatcccc

SEQ ID NO: 3677242 - DNA, 25 bp, Homo sapien
taaattgtattatctggtctctgag

SEQ ID NO: 3677243 - DNA, 25 bp, Homo sapien
gagttctaagatccccttgtgggca

SEQ ID NO: 3677244 - DNA, 25 bp, Homo sapien
caactaaattgtattatctggtctc

SEQ ID NO: 3677245 - DNA, 25 bp, Homo sapien
tcaggtcccttttgatggattttct

SEQ ID NO: 3677246 - DNA, 25 bp, Homo sapien
tcacatgacagcaccttggcattca

SEQ ID NO: 3677247 - DNA, 25 bp, Homo sapien
ccttggcattcaggtcccttttgat

SEQ ID NO: 3677248 - DNA, 25 bp, Homo sapien
tctgtggatctccattagagcgttg

SEQ ID NO: 3677249 - DNA, 25 bp, Homo sapien
tctagcaccttgagaattttgccat

SEQ ID NO: 3677250 - DNA, 25 bp, Homo sapien
cacgttttcgaagctacaattagca

SEQ ID NO: 3677251 - DNA, 25 bp, Homo sapien
tgcgcgcgcgcacgttttcgaagct

SEQ ID NO: 3677252 - DNA, 25 bp, Homo sapien
acagcagacgtgcttttctgagaga

SEQ ID NO: 3677253 - DNA, 25 bp, Homo sapien
caaatcgaggattctcctccttaga

SEQ ID NO: 3677254 - DNA, 25 bp, Homo sapien
ccaaatcgaggattctcctccttag

SEQ ID NO: 3677255 - DNA, 25 bp, Homo sapien
gcccttccaaatcgaggattctcct

SEQ ID NO: 3677256 - DNA, 25 bp, Homo sapien
ctgggcccttccaaatcgaggattc

SEQ ID NO: 3677257 - DNA, 25 bp, Homo sapien
taagcatcaaaatggcccagagcca

SEQ ID NO: 3677258 - DNA, 25 bp, Homo sapien
gagccaactggtgagacaacaatct

SEQ ID NO: 3677259 - DNA, 25 bp, Homo sapien
ttttccagattcagctcatcagcat

SEQ ID NO: 3677260 - DNA, 25 bp, Homo sapien
gccaactggtgagacaacaatcttt

SEQ ID NO: 3677261 - DNA, 25 bp, Homo sapien
catgtaggcatatgagcattcctca

SEQ ID NO: 3677262 - DNA, 25 bp, Homo sapien
catgcttcacgaacaaatctatttt

SEQ ID NO: 3677263 - DNA, 25 bp, Homo sapien
cccacacagcttcggttctgtaatg

SEQ ID NO: 3677264 - DNA, 25 bp, Homo sapien
catcttcttgttagtgaaatgagga

SEQ ID NO: 3677265 - DNA, 25 bp, Homo sapien
cagatacttgtgaaacattagtgct

SEQ ID NO: 3677266 - DNA, 25 bp, Homo sapien
agatacttgtgaaacattagtgctg

SEQ ID NO: 3677267 - DNA, 25 bp, Homo sapien
ccagatacttgtgaaacattagtgc

SEQ ID NO: 3677268 - DNA, 25 bp, Homo sapien
aatggccatcatcaactataaggaa

SEQ ID NO: 3677269 - DNA, 25 bp, Homo sapien
ggtcagccaatactctcctatttct

SEQ ID NO: 3677270 - DNA, 25 bp, Homo sapien
cctatttctattagtaaggaaagag

SEQ ID NO: 3677271 - DNA, 25 bp, Homo sapien
catcaactataaggaaggtcagcca

SEQ ID NO: 3677272 - DNA, 25 bp, Homo sapien
tcctcattacaattggctactaatg

SEQ ID NO: 3677273 - DNA, 25 bp, Homo sapien
gctactaatgcctgggtttcgggca

SEQ ID NO: 3677274 - DNA, 25 bp, Homo sapien
agaatgcttcatggtgagttcctca

SEQ ID NO: 3677275 - DNA, 25 bp, Homo sapien
tgcttcatggtgagttcctcattac

SEQ ID NO: 3677276 - DNA, 25 bp, Homo sapien
tgaatgcacgtgttccaagaaatgt

SEQ ID NO: 3677277 - DNA, 25 bp, Homo sapien
cctgccatatttgggttatagctat

SEQ ID NO: 3677278 - DNA, 25 bp, Homo sapien
aagaaatgtgcctgccatatttggg

SEQ ID NO: 3677279 - DNA, 25 bp, Homo sapien
cactaactgtgcttatgaatgcacg

SEQ ID NO: 3677280 - DNA, 25 bp, Homo sapien
taccctgttgacttggaccactgac

SEQ ID NO: 3677281 - DNA, 25 bp, Homo sapien
gactcccaatggttgcttgacttat

SEQ ID NO: 3677282 - DNA, 25 bp, Homo sapien
cagtaatggatggtgaatagcagga

SEQ ID NO: 3677283 - DNA, 25 bp, Homo sapien
catgcatgtgtgtctattctccagc

SEQ ID NO: 3677284 - DNA, 25 bp, Homo sapien
ctcttccttggattttcatgaaatt

SEQ ID NO: 3677285 - DNA, 25 bp, Homo sapien
tcttccttggattttcatgaaattc

SEQ ID NO: 3677286 - DNA, 25 bp, Homo sapien
tccttggattttcatgaaattctgg

SEQ ID NO: 3677287 - DNA, 25 bp, Homo sapien
catgaaattctggtttttgctccat

SEQ ID NO: 3677288 - DNA, 25 bp, Homo sapien
gggtacccaccatggcacttgccat

SEQ ID NO: 3677289 - DNA, 25 bp, Homo sapien
aggtctagggtacccaccatggcac

SEQ ID NO: 3677290 - DNA, 25 bp, Homo sapien
tgggatctagaatgtgtctggagga

SEQ ID NO: 3677291 - DNA, 25 bp, Homo sapien
agaatgagcaggtctagggtaccca

SEQ ID NO: 3677292 - DNA, 25 bp, Homo sapien
cttctccataggcttgtttcatttc

SEQ ID NO: 3677293 - DNA, 25 bp, Homo sapien
cacttctccataggcttgtttcatt

SEQ ID NO: 3677294 - DNA, 25 bp, Homo sapien
ccacttctccataggcttgtttcat

SEQ ID NO: 3677295 - DNA, 25 bp, Homo sapien
ttctccataggcttgtttcatttcc

SEQ ID NO: 3677296 - DNA, 25 bp, Homo sapien
tcgactacacgatgcaatgagaaaa

SEQ ID NO: 3677297 - DNA, 25 bp, Homo sapien
atgtcaggaaggcttcgactacacg

SEQ ID NO: 3677298 - DNA, 25 bp, Homo sapien
cagaaacactggtggtaccagcctt

SEQ ID NO: 3677299 - DNA, 25 bp, Homo sapien
ttcagaaacactggtggtaccagcc

SEQ ID NO: 3677300 - DNA, 25 bp, Homo sapien
ttctcttgctctttatgttgggtac

SEQ ID NO: 3677301 - DNA, 25 bp, Homo sapien
aaatttccgatcatagcctttctga

SEQ ID NO: 3677302 - DNA, 25 bp, Homo sapien
tctctttaagaagcaaattctcttg

SEQ ID NO: 3677303 - DNA, 25 bp, Homo sapien
gatgcagtagcatctgagatcatac

SEQ ID NO: 3677304 - DNA, 25 bp, Homo sapien
gaattgcgggagtctctgtggcact

SEQ ID NO: 3677305 - DNA, 25 bp, Homo sapien
tctcatgggactctttgaaccttgg

SEQ ID NO: 3677306 - DNA, 25 bp, Homo sapien
cattcgttctcatgggactctttga

SEQ ID NO: 3677307 - DNA, 25 bp, Homo sapien
cactgtcatcatttcattcgttctc

SEQ ID NO: 3677308 - DNA, 25 bp, Homo sapien
tctggaaaggcaacggatatccaaa

SEQ ID NO: 3677309 - DNA, 25 bp, Homo sapien
caagtaaaggcatcatggaatctca

SEQ ID NO: 3677310 - DNA, 25 bp, Homo sapien
taaacctccataaaactctcagtag

SEQ ID NO: 3677311 - DNA, 25 bp, Homo sapien
caaatcccgaagtacatcaaatgag

SEQ ID NO: 3677312 - DNA, 25 bp, Homo sapien
tcttagatttctcatatcctgattc

SEQ ID NO: 3677313 - DNA, 25 bp, Homo sapien
gatttctcatatcctgattctctca

SEQ ID NO: 3677314 - DNA, 25 bp, Homo sapien
ctttcttagatttctcatatcctga

SEQ ID NO: 3677315 - DNA, 25 bp, Homo sapien
tagatttctcatatcctgattctct

SEQ ID NO: 3677316 - DNA, 25 bp, Homo sapien
taactccagttagtactccacactc

SEQ ID NO: 3677317 - DNA, 25 bp, Homo sapien
ttatagcagcatgtcaacaatatcg

SEQ ID NO: 3677318 - DNA, 25 bp, Homo sapien
caatatcgcatatgctaactccagt

SEQ ID NO: 3677319 - DNA, 25 bp, Homo sapien
catgtcaacaatatcgcatatgcta

SEQ ID NO: 3677320 - DNA, 25 bp, Homo sapien
ctccctcatggatacagcacaaaga

SEQ ID NO: 3677321 - DNA, 25 bp, Homo sapien
tccctcatggatacagcacaaagat

SEQ ID NO: 3677322 - DNA, 25 bp, Homo sapien
ccatccacagtcactctgatgcaca

SEQ ID NO: 3677323 - DNA, 25 bp, Homo sapien
tctccatccacagtcactctgatgc

SEQ ID NO: 3677324 - DNA, 25 bp, Homo sapien
tatctccatccacagtcactctgat

SEQ ID NO: 3677325 - DNA, 25 bp, Homo sapien
tccatccacagtcactctgatgcac

SEQ ID NO: 3677326 - DNA, 25 bp, Homo sapien
tatgtattggataaatgcagttggt

SEQ ID NO: 3677327 - DNA, 25 bp, Homo sapien
tgctatgtattggataaatgcagtt

SEQ ID NO: 3677328 - DNA, 25 bp, Homo sapien
aatgcagttggtagttctgtaagca

SEQ ID NO: 3677329 - DNA, 25 bp, Homo sapien
atgcagttggtagttctgtaagcat

SEQ ID NO: 3677330 - DNA, 25 bp, Homo sapien
ttctaatgcttcttcgggtaaaaga

SEQ ID NO: 3677331 - DNA, 25 bp, Homo sapien
gaaagtctgtcacaaatgcgatact

SEQ ID NO: 3677332 - DNA, 25 bp, Homo sapien
ccagtttttgaatcgatttgctcca

SEQ ID NO: 3677333 - DNA, 25 bp, Homo sapien
tgggtcaacgtctgatccagttttt

SEQ ID NO: 3677334 - DNA, 25 bp, Homo sapien
atgcattcaggatagcatgcctgtg

SEQ ID NO: 3677335 - DNA, 25 bp, Homo sapien
gatccgtgagattacatgcattcag

SEQ ID NO: 3677336 - DNA, 25 bp, Homo sapien
cttccaagatccgtgagattacatg

SEQ ID NO: 3677337 - DNA, 25 bp, Homo sapien
cattcaggatagcatgcctgtgggc

SEQ ID NO: 3677338 - DNA, 25 bp, Homo sapien
aaagatcagtaaagaccacattgcc

SEQ ID NO: 3677339 - DNA, 25 bp, Homo sapien
cattaaacttaagttgccagtcata

SEQ ID NO: 3677340 - DNA, 25 bp, Homo sapien
ccagtcatagtctagaaagatcagt

SEQ ID NO: 3677341 - DNA, 25 bp, Homo sapien
agatcagtaaagaccacattgccat

SEQ ID NO: 3677342 - DNA, 25 bp, Homo sapien
caccagcaacgggattctggtgtcc

SEQ ID NO: 3677343 - DNA, 25 bp, Homo sapien
tgagtcttactgacaagcggctcat

SEQ ID NO: 3677344 - DNA, 25 bp, Homo sapien
cagcaacgggattctggtgtcctgg

SEQ ID NO: 3677345 - DNA, 25 bp, Homo sapien
tctgagtcttactgacaagcggctc

SEQ ID NO: 3677346 - DNA, 25 bp, Homo sapien
tctctttactctccagtccttccag

SEQ ID NO: 3677347 - DNA, 25 bp, Homo sapien
ctttactctccagtccttccagaga

SEQ ID NO: 3677348 - DNA, 25 bp, Homo sapien
tcgggtcactttggagttctcttta

SEQ ID NO: 3677349 - DNA, 25 bp, Homo sapien
gttctctttactctccagtccttcc

SEQ ID NO: 3677350 - DNA, 25 bp, Homo sapien
catcaaaccctagatctttaagatg

SEQ ID NO: 3677351 - DNA, 25 bp, Homo sapien
tccatcaaaccctagatctttaaga

SEQ ID NO: 3677352 - DNA, 25 bp, Homo sapien
tcaaaccctagatctttaagatgtc

SEQ ID NO: 3677353 - DNA, 25 bp, Homo sapien
ttccatcaaaccctagatctttaag

SEQ ID NO: 3677354 - DNA, 25 bp, Homo sapien
gagcgagtgtatcccttgcgaggta

SEQ ID NO: 3677355 - DNA, 25 bp, Homo sapien
tcagaaactcatttgagtcagagcg

SEQ ID NO: 3677356 - DNA, 25 bp, Homo sapien
cccttgcgaggtataggagatttgt

SEQ ID NO: 3677357 - DNA, 25 bp, Homo sapien
taggagatttgtgaagaacaaaaat

SEQ ID NO: 3677358 - DNA, 25 bp, Homo sapien
tccataggctccagatccttgccat

SEQ ID NO: 3677359 - DNA, 25 bp, Homo sapien
tttctccataggctccagatccttg

SEQ ID NO: 3677360 - DNA, 25 bp, Homo sapien
taggctccagatccttgccatattg

SEQ ID NO: 3677361 - DNA, 25 bp, Homo sapien
gctccagatccttgccatattgcat

SEQ ID NO: 3677362 - DNA, 25 bp, Homo sapien
tttctagctggaacatacgccttgc

SEQ ID NO: 3677363 - DNA, 25 bp, Homo sapien
ttttccctgcaatatttcactgcca

SEQ ID NO: 3677364 - DNA, 25 bp, Homo sapien
catacgccttgcatttttccttgtg

SEQ ID NO: 3677365 - DNA, 25 bp, Homo sapien
gaatagattctactacatcaaaaag

SEQ ID NO: 3677366 - DNA, 25 bp, Homo sapien
cttactgttaagagtctgttctcca

SEQ ID NO: 3677367 - DNA, 25 bp, Homo sapien
gtagtctcttactgttaagagtctg

SEQ ID NO: 3677368 - DNA, 25 bp, Homo sapien
taaaatgtagtctcttactgttaag

SEQ ID NO: 3677369 - DNA, 25 bp, Homo sapien
tctcttactgttaagagtctgttct

SEQ ID NO: 3677370 - DNA, 25 bp, Homo sapien
gtttttcctttcttctgtggatcat

SEQ ID NO: 3677371 - DNA, 25 bp, Homo sapien
ctgtttgttcctctgcttgtttttc

SEQ ID NO: 3677372 - DNA, 25 bp, Homo sapien
tgttcctctgcttgtttttcctttc

SEQ ID NO: 3677373 - DNA, 25 bp, Homo sapien
ttgtttttcctttcttctgtggatc

SEQ ID NO: 3677374 - DNA, 25 bp, Homo sapien
cgctgtcttgtagtccactctgaga

SEQ ID NO: 3677375 - DNA, 25 bp, Homo sapien
tgtcctctgcaattgtctgtatgta

SEQ ID NO: 3677376 - DNA, 25 bp, Homo sapien
tatgtagatatatcccgctgtcttg

SEQ ID NO: 3677377 - DNA, 25 bp, Homo sapien
ccagtgttgatgtgagtttccattc

SEQ ID NO: 3677378 - DNA, 25 bp, Homo sapien
actcaaatcagaacctaatgtcatc

SEQ ID NO: 3677379 - DNA, 25 bp, Homo sapien
ctcaaatcagaacctaatgtcatca

SEQ ID NO: 3677380 - DNA, 25 bp, Homo sapien
gaaaaacgggatcagcaataaatac

SEQ ID NO: 3677381 - DNA, 25 bp, Homo sapien
gagtatagcagtcaaccctcttctg

SEQ ID NO: 3677382 - DNA, 25 bp, Homo sapien
tcaattgagcacctggattcaacct

SEQ ID NO: 3677383 - DNA, 25 bp, Homo sapien
tcccctcagtccaactggagtatag

SEQ ID NO: 3677384 - DNA, 25 bp, Homo sapien
ccactggcagtgtaatgataggaga

SEQ ID NO: 3677385 - DNA, 25 bp, Homo sapien
gaacacaccatagaaagggctcaag

SEQ ID NO: 3677386 - DNA, 25 bp, Homo sapien
taggagattccctgtcgaggcaatg

SEQ ID NO: 3677387 - DNA, 25 bp, Homo sapien
ggttattcgttcctcccatcaggag

SEQ ID NO: 3677388 - DNA, 25 bp, Homo sapien
tactacatgaaagcggatacatgcc

SEQ ID NO: 3677389 - DNA, 25 bp, Homo sapien
tactgtgtgattccagctatacaac

SEQ ID NO: 3677390 - DNA, 25 bp, Homo sapien
tatgcaccctcatgtaaatgatgga

SEQ ID NO: 3677391 - DNA, 25 bp, Homo sapien
actgtgggtacattcagaccgcgaa

SEQ ID NO: 3677392 - DNA, 25 bp, Homo sapien
agatgatcaagttccaactagttag

SEQ ID NO: 3677393 - DNA, 25 bp, Homo sapien
gatcaagttccaactagttagaact

SEQ ID NO: 3677394 - DNA, 25 bp, Homo sapien
tgcccagcctacacgttatttttaa

SEQ ID NO: 3677395 - DNA, 25 bp, Homo sapien
aaagatgatcaagttccaactagtt

SEQ ID NO: 3677396 - DNA, 25 bp, Homo sapien
tgctttgggttctgacctcccattc

SEQ ID NO: 3677397 - DNA, 25 bp, Homo sapien
tcctctcttgggtttgatgacccca

SEQ ID NO: 3677398 - DNA, 25 bp, Homo sapien
ccagacatcttgaatgacctccttt

SEQ ID NO: 3677399 - DNA, 25 bp, Homo sapien
tgggttctgacctcccattccagac

SEQ ID NO: 3677400 - DNA, 25 bp, Homo sapien
ccatccctgatactgtgagcttttt

SEQ ID NO: 3677401 - DNA, 25 bp, Homo sapien
ccccatccctgatactgtgagcttt

SEQ ID NO: 3677402 - DNA, 25 bp, Homo sapien
tccctgatactgtgagctttttcat

SEQ ID NO: 3677403 - DNA, 25 bp, Homo sapien
catccctgatactgtgagctttttc

SEQ ID NO: 3677404 - DNA, 25 bp, Homo sapien
cttggtcgttctggctctgatggca

SEQ ID NO: 3677405 - DNA, 25 bp, Homo sapien
aacgttgatatttagaaagatatat

SEQ ID NO: 3677406 - DNA, 25 bp, Homo sapien
ttttgaagaccttggtcgttctggc

SEQ ID NO: 3677407 - DNA, 25 bp, Homo sapien
gttgtggagaagagttttgaagacc

SEQ ID NO: 3677408 - DNA, 25 bp, Homo sapien
gatttctcaatattctcgatgtaca

SEQ ID NO: 3677409 - DNA, 25 bp, Homo sapien
atttctcaatattctcgatgtacat

SEQ ID NO: 3677410 - DNA, 25 bp, Homo sapien
ccacatagtgtgaaagaagtacatc

SEQ ID NO: 3677411 - DNA, 25 bp, Homo sapien
ccccaccagtgtgattactttaaca

SEQ ID NO: 3677412 - DNA, 25 bp, Homo sapien
taacagatgcttctgatgcgagtgt

SEQ ID NO: 3677413 - DNA, 25 bp, Homo sapien
cttctgatgcgagtgtgatggtacc

SEQ ID NO: 3677414 - DNA, 25 bp, Homo sapien
cacattgttgagctactccaggcat

SEQ ID NO: 3677415 - DNA, 25 bp, Homo sapien
ggccatacctttcgttgtctggtct

SEQ ID NO: 3677416 - DNA, 25 bp, Homo sapien
aaaaaagctacgaccatcaggccat

SEQ ID NO: 3677417 - DNA, 25 bp, Homo sapien
tgtgccaggatactccctggaaaaa

SEQ ID NO: 3677418 - DNA, 25 bp, Homo sapien
gataacttgcaattatcacactgta

SEQ ID NO: 3677419 - DNA, 25 bp, Homo sapien
tgtcatcaagcttatggagaaatgc

SEQ ID NO: 3677420 - DNA, 25 bp, Homo sapien
tgtaatattgctttcctcccaaatc

SEQ ID NO: 3677421 - DNA, 25 bp, Homo sapien
ggagaaatgcaagaagtctgatgac

SEQ ID NO: 3677422 - DNA, 25 bp, Homo sapien
ttgctgttcccgcggatgtggctgc

SEQ ID NO: 3677423 - DNA, 25 bp, Homo sapien
tgctgttcccgcggatgtggctgca

SEQ ID NO: 3677424 - DNA, 25 bp, Homo sapien
ctgttcccgcggatgtggctgcaca

SEQ ID NO: 3677425 - DNA, 25 bp, Homo sapien
gctgttcccgcggatgtggctgcac

SEQ ID NO: 3677426 - DNA, 25 bp, Homo sapien
taaatactgattttcatctcctcca

SEQ ID NO: 3677427 - DNA, 25 bp, Homo sapien
tgattttcatctcctccaggtttga

SEQ ID NO: 3677428 - DNA, 25 bp, Homo sapien
aatactgattttcatctcctccagg

SEQ ID NO: 3677429 - DNA, 25 bp, Homo sapien
attttcatctcctccaggtttgacc

SEQ ID NO: 3677430 - DNA, 25 bp, Homo sapien
taatcttcggatatttgacgggtat

SEQ ID NO: 3677431 - DNA, 25 bp, Homo sapien
tcggatatttgacgggtatttggtg

SEQ ID NO: 3677432 - DNA, 25 bp, Homo sapien
gaatataatcttcggatatttgacg

SEQ ID NO: 3677433 - DNA, 25 bp, Homo sapien
gacgggtatttggtgtttcttgatc

SEQ ID NO: 3677434 - DNA, 25 bp, Homo sapien
tgaataactcccttttcataatgca

SEQ ID NO: 3677435 - DNA, 25 bp, Homo sapien
ttacttgaataactcccttttcata

SEQ ID NO: 3677436 - DNA, 25 bp, Homo sapien
ttatggtagcggcaggtgcttttta

SEQ ID NO: 3677437 - DNA, 25 bp, Homo sapien
ctgttatggtagcggcaggtgcttt

SEQ ID NO: 3677438 - DNA, 25 bp, Homo sapien
ctgcaaatagcttatttgcataagc

SEQ ID NO: 3677439 - DNA, 25 bp, Homo sapien
aaaagccacctgcaaatagcttatt

SEQ ID NO: 3677440 - DNA, 25 bp, Homo sapien
caaaagccacctgcaaatagcttat

SEQ ID NO: 3677441 - DNA, 25 bp, Homo sapien
cctgcaaatagcttatttgcataag

SEQ ID NO: 3677442 - DNA, 25 bp, Homo sapien
cattttccggctcttaatgactcct

SEQ ID NO: 3677443 - DNA, 25 bp, Homo sapien
attttccggctcttaatgactcctg

SEQ ID NO: 3677444 - DNA, 25 bp, Homo sapien
gaaagaccctgcaaatatgacccct

SEQ ID NO: 3677445 - DNA, 25 bp, Homo sapien
aatatgacccctctaatgttgctgt

SEQ ID NO: 3677446 - DNA, 25 bp, Homo sapien
ccagaaagaccctgcaaatatgacc

SEQ ID NO: 3677447 - DNA, 25 bp, Homo sapien
catgttgtaattccaaattcacttg

SEQ ID NO: 3677448 - DNA, 25 bp, Homo sapien
gcttctgattacctctctgggcaat

SEQ ID NO: 3677449 - DNA, 25 bp, Homo sapien
gagcatagtgcttctgattacctct

SEQ ID NO: 3677450 - DNA, 25 bp, Homo sapien
tctgattacctctctgggcaatgct

SEQ ID NO: 3677451 - DNA, 25 bp, Homo sapien
cctgttaaggaaagtcttgggagca

SEQ ID NO: 3677452 - DNA, 25 bp, Homo sapien
cagagctggctctaggaatcaactt

SEQ ID NO: 3677453 - DNA, 25 bp, Homo sapien
ccagagctggctctaggaatcaact

SEQ ID NO: 3677454 - DNA, 25 bp, Homo sapien
tccagagctggctctaggaatcaac

SEQ ID NO: 3677455 - DNA, 25 bp, Homo sapien
tatgttttgaagaagtaccacctcc

SEQ ID NO: 3677456 - DNA, 25 bp, Homo sapien
tatttctcgtactgctatgttttga

SEQ ID NO: 3677457 - DNA, 25 bp, Homo sapien
cagtattatgaaatctccaggtgat

SEQ ID NO: 3677458 - DNA, 25 bp, Homo sapien
tcctgacaggccaatattatttctc

SEQ ID NO: 3677459 - DNA, 25 bp, Homo sapien
gggaagagaagtatatgtgctcttt

SEQ ID NO: 3677460 - DNA, 25 bp, Homo sapien
tcctctcagtatagcaggtttcact

SEQ ID NO: 3677461 - DNA, 25 bp, Homo sapien
ctgtattcctttatggaaagggtgg

SEQ ID NO: 3677462 - DNA, 25 bp, Homo sapien
aagtatatgtgctctttgtcctctc

SEQ ID NO: 3677463 - DNA, 25 bp, Homo sapien
tgactatatagttcctgaagacatg

SEQ ID NO: 3677464 - DNA, 25 bp, Homo sapien
tcctgaagacatgttgtagtgactt

SEQ ID NO: 3677465 - DNA, 25 bp, Homo sapien
aaattggccattggccagggcgatg

SEQ ID NO: 3677466 - DNA, 25 bp, Homo sapien
gccagggcgatgaattgactatata

SEQ ID NO: 3677467 - DNA, 25 bp, Homo sapien
taaggaatctaacctgtttcctgac

SEQ ID NO: 3677468 - DNA, 25 bp, Homo sapien
ctagtgcctccaggagatggtttta

SEQ ID NO: 3677469 - DNA, 25 bp, Homo sapien
taaagggactattagtgggcacact

SEQ ID NO: 3677470 - DNA, 25 bp, Homo sapien
tcttctgagggaggactagtgcctc

SEQ ID NO: 3677471 - DNA, 25 bp, Homo sapien
gcttggtctaacttatcaccctcat

SEQ ID NO: 3677472 - DNA, 25 bp, Homo sapien
gtctaacttatcaccctcatctttt

SEQ ID NO: 3677473 - DNA, 25 bp, Homo sapien
tcagcttggtctaacttatcaccct

SEQ ID NO: 3677474 - DNA, 25 bp, Homo sapien
cttcagcttggtctaacttatcacc

SEQ ID NO: 3677475 - DNA, 25 bp, Homo sapien
aactcctccttagtggccacttcct

SEQ ID NO: 3677476 - DNA, 25 bp, Homo sapien
actcctccttagtggccacttcctc

SEQ ID NO: 3677477 - DNA, 25 bp, Homo sapien
ccaatttggtaatggtgactgcctc

SEQ ID NO: 3677478 - DNA, 25 bp, Homo sapien
taccaatttggtaatggtgactgcc

SEQ ID NO: 3677479 - DNA, 25 bp, Homo sapien
ctttaccaatttggtaatggtgact

SEQ ID NO: 3677480 - DNA, 25 bp, Homo sapien
aatttggtaatggtgactgcctcct

SEQ ID NO: 3677481 - DNA, 25 bp, Homo sapien
gacagctatgtctttcttcctggat

SEQ ID NO: 3677482 - DNA, 25 bp, Homo sapien
tcctctttctcctgttgctgtggct

SEQ ID NO: 3677483 - DNA, 25 bp, Homo sapien
gattccttggaatctttatcactcc

SEQ ID NO: 3677484 - DNA, 25 bp, Homo sapien
tcctgttgctgtggcttccctcttc

SEQ ID NO: 3677485 - DNA, 25 bp, Homo sapien
ccactgccttttgccttggtctcct

SEQ ID NO: 3677486 - DNA, 25 bp, Homo sapien
ttccctcccactgccttttgccttg

SEQ ID NO: 3677487 - DNA, 25 bp, Homo sapien
tcttccctcccactgccttttgcct

SEQ ID NO: 3677488 - DNA, 25 bp, Homo sapien
gccttttgccttggtctcctgctct

SEQ ID NO: 3677489 - DNA, 25 bp, Homo sapien
gggtgacttcctttattacggcatg

SEQ ID NO: 3677490 - DNA, 25 bp, Homo sapien
cctttattacggcatgtgaagtgac

SEQ ID NO: 3677491 - DNA, 25 bp, Homo sapien
gtgacttcctttattacggcatgtg

SEQ ID NO: 3677492 - DNA, 25 bp, Homo sapien
gacttcctttattacggcatgtgaa

SEQ ID NO: 3677493 - DNA, 25 bp, Homo sapien
catcctttcctagagtaaccaaaga

SEQ ID NO: 3677494 - DNA, 25 bp, Homo sapien
ctttcctagagtaaccaaagagaga

SEQ ID NO: 3677495 - DNA, 25 bp, Homo sapien
aagaggaaacattacaacagatgtc

SEQ ID NO: 3677496 - DNA, 25 bp, Homo sapien
cacatcctttcctagagtaaccaaa

SEQ ID NO: 3677497 - DNA, 25 bp, Homo sapien
gagatcagcatccattaggcccatg

SEQ ID NO: 3677498 - DNA, 25 bp, Homo sapien
tttctagcctgcatccgaactggca

SEQ ID NO: 3677499 - DNA, 25 bp, Homo sapien
tagaatcatcactactgtggccagc

SEQ ID NO: 3677500 - DNA, 25 bp, Homo sapien
cccatggaggctacagagatcaaag

SEQ ID NO: 3677501 - DNA, 25 bp, Homo sapien
cttggccttaagtttgggccatcct

SEQ ID NO: 3677502 - DNA, 25 bp, Homo sapien
aaacaattaatctgtgttctctgcc

SEQ ID NO: 3677503 - DNA, 25 bp, Homo sapien
ctgatgggtttgatgtgacttggcc

SEQ ID NO: 3677504 - DNA, 25 bp, Homo sapien
gttaggaattctgccacacttttgg

SEQ ID NO: 3677505 - DNA, 25 bp, Homo sapien
tgttttatgactctagggaattctt

SEQ ID NO: 3677506 - DNA, 25 bp, Homo sapien
agctttagaatagtcagaatgtgaa

SEQ ID NO: 3677507 - DNA, 25 bp, Homo sapien
ctttagaatagtcagaatgtgaaac

SEQ ID NO: 3677508 - DNA, 25 bp, Homo sapien
aagctttagaatagtcagaatgtga

SEQ ID NO: 3677509 - DNA, 25 bp, Homo sapien
taaggcataagagctaatagatagt

SEQ ID NO: 3677510 - DNA, 25 bp, Homo sapien
tccaagagtatgagctcaacagcta

SEQ ID NO: 3677511 - DNA, 25 bp, Homo sapien
tccaagccagtagttttgtaaggca

SEQ ID NO: 3677512 - DNA, 25 bp, Homo sapien
tatttgaaaaaatcgagatctgcac

SEQ ID NO: 3677513 - DNA, 25 bp, Homo sapien
taaccagaaggttcaaagacacata

SEQ ID NO: 3677514 - DNA, 25 bp, Homo sapien
tagaaataaccagaaggttcaaaga

SEQ ID NO: 3677515 - DNA, 25 bp, Homo sapien
ccagaaggttcaaagacacatatac

SEQ ID NO: 3677516 - DNA, 25 bp, Homo sapien
aataaccagaaggttcaaagacaca

SEQ ID NO: 3677517 - DNA, 25 bp, Homo sapien
tattagtatcctcactagtttctcc

SEQ ID NO: 3677518 - DNA, 25 bp, Homo sapien
tttgaggaggtagagtctatattag

SEQ ID NO: 3677519 - DNA, 25 bp, Homo sapien
ctctattaacagatgttatcccagt

SEQ ID NO: 3677520 - DNA, 25 bp, Homo sapien
taacagatgttatcccagtctgcca

SEQ ID NO: 3677521 - DNA, 25 bp, Homo sapien
agcgcaatggtggaaactagtctac

SEQ ID NO: 3677522 - DNA, 25 bp, Homo sapien
ctttgatgagtaaggctgtaagtag

SEQ ID NO: 3677523 - DNA, 25 bp, Homo sapien
tgtaagtagtgatttcagggcaaga

SEQ ID NO: 3677524 - DNA, 25 bp, Homo sapien
aattgatgtcgtttgctttgatgag

SEQ ID NO: 3677525 - DNA, 25 bp, Homo sapien
gaatcttcttcacatcaaacctttt

SEQ ID NO: 3677526 - DNA, 25 bp, Homo sapien
actgttaggtactctgggctttcac

SEQ ID NO: 3677527 - DNA, 25 bp, Homo sapien
ccagaaattctccactgttaggtac

SEQ ID NO: 3677528 - DNA, 25 bp, Homo sapien
ttctccactgttaggtactctgggc

SEQ ID NO: 3677529 - DNA, 25 bp, Homo sapien
gaatcaaggttgctcctaatacaag

SEQ ID NO: 3677530 - DNA, 25 bp, Homo sapien
cagagtttaattcagtcatttggct

SEQ ID NO: 3677531 - DNA, 25 bp, Homo sapien
gtaagaatcaaggttgctcctaata

SEQ ID NO: 3677532 - DNA, 25 bp, Homo sapien
tcaaggttgctcctaatacaagttt

SEQ ID NO: 3677533 - DNA, 25 bp, Homo sapien
taagaaaattgcagagcctgcctca

SEQ ID NO: 3677534 - DNA, 25 bp, Homo sapien
tccattcctttagcgtcttgtaaga

SEQ ID NO: 3677535 - DNA, 25 bp, Homo sapien
tagcgtcttgtaagaaaattgcaga

SEQ ID NO: 3677536 - DNA, 25 bp, Homo sapien
ctttccattcctttagcgtcttgta

SEQ ID NO: 3677537 - DNA, 25 bp, Homo sapien
cttttctgagtgtcttcctatcaga

SEQ ID NO: 3677538 - DNA, 25 bp, Homo sapien
tctggtgaacatagtactttttact

SEQ ID NO: 3677539 - DNA, 25 bp, Homo sapien
ttctggtgaacatagtactttttac

SEQ ID NO: 3677540 - DNA, 25 bp, Homo sapien
tcttcctatcagacttctccatctt

SEQ ID NO: 3677541 - DNA, 25 bp, Homo sapien
gccaccgctcctggcctagatgttc

SEQ ID NO: 3677542 - DNA, 25 bp, Homo sapien
ccgctcctggcctagatgttcttat

SEQ ID NO: 3677543 - DNA, 25 bp, Homo sapien
cgctcctggcctagatgttcttatt

SEQ ID NO: 3677544 - DNA, 25 bp, Homo sapien
caccgctcctggcctagatgttctt

SEQ ID NO: 3677545 - DNA, 25 bp, Homo sapien
taatagactctgttaaagccatgtg

SEQ ID NO: 3677546 - DNA, 25 bp, Homo sapien
taccatatatgccatttagaaaggg

SEQ ID NO: 3677547 - DNA, 25 bp, Homo sapien
tgaaggtgagtaatcttgtggatcc

SEQ ID NO: 3677548 - DNA, 25 bp, Homo sapien
taagttctgaccttatgccttgaag

SEQ ID NO: 3677549 - DNA, 25 bp, Homo sapien
gatggtaaggttgcttttagcttga

SEQ ID NO: 3677550 - DNA, 25 bp, Homo sapien
gcttgggccagtatgatgatggtaa

SEQ ID NO: 3677551 - DNA, 25 bp, Homo sapien
tgatgatggtaaggttgcttttagc

SEQ ID NO: 3677552 - DNA, 25 bp, Homo sapien
gaaatctgcttgggccagtatgatg

SEQ ID NO: 3677553 - DNA, 25 bp, Homo sapien
cattattaaaactgcaacttcaaaa

SEQ ID NO: 3677554 - DNA, 25 bp, Homo sapien
tcattattaaaactgcaacttcaaa

SEQ ID NO: 3677555 - DNA, 25 bp, Homo sapien
gaagagtaatttcctagctcctgct

SEQ ID NO: 3677556 - DNA, 25 bp, Homo sapien
gctgtactcagaagagtaatttcct

SEQ ID NO: 3677557 - DNA, 25 bp, Homo sapien
tactcagaagagtaatttcctagct

SEQ ID NO: 3677558 - DNA, 25 bp, Homo sapien
cagaagagtaatttcctagctcctg

SEQ ID NO: 3677559 - DNA, 25 bp, Homo sapien
ttaatctcattgtttacccacattg

SEQ ID NO: 3677560 - DNA, 25 bp, Homo sapien
gatgtgttgtatctttgttattcat

SEQ ID NO: 3677561 - DNA, 25 bp, Homo sapien
tagagattctgatgtgttgtatctt

SEQ ID NO: 3677562 - DNA, 25 bp, Homo sapien
cattcagttcagatctgactctggt

SEQ ID NO: 3677563 - DNA, 25 bp, Homo sapien
cctgtcttggtcagggatgtcttgg

SEQ ID NO: 3677564 - DNA, 25 bp, Homo sapien
gatctgatatttgggtcatatcggg

SEQ ID NO: 3677565 - DNA, 25 bp, Homo sapien
tcatatcgggtagatgaactctgtg

SEQ ID NO: 3677566 - DNA, 25 bp, Homo sapien
cgttctgaaatgcaggcacacttcc

SEQ ID NO: 3677567 - DNA, 25 bp, Homo sapien
cgtggtttagcgcactcagctgtct

SEQ ID NO: 3677568 - DNA, 25 bp, Homo sapien
gcgcactcagctgtctcctgtatgt

SEQ ID NO: 3677569 - DNA, 25 bp, Homo sapien
cagtcagtgcgtggtttagcgcact

SEQ ID NO: 3677570 - DNA, 25 bp, Homo sapien
tgtgctgcgagaagcaagatagcta

SEQ ID NO: 3677571 - DNA, 25 bp, Homo sapien
taaagaaaagtttctcatctatcaa

SEQ ID NO: 3677572 - DNA, 25 bp, Homo sapien
ttctcatctatcaaagtcctcacaa

SEQ ID NO: 3677573 - DNA, 25 bp, Homo sapien
aagtcctcacaaaaatcttgatcat

SEQ ID NO: 3677574 - DNA, 25 bp, Homo sapien
ctatcaaagtcctcacaaaaatctt

SEQ ID NO: 3677575 - DNA, 25 bp, Homo sapien
gatgaagcacctagagttttaactt

SEQ ID NO: 3677576 - DNA, 25 bp, Homo sapien
ctgatgaagcacctagagttttaac

SEQ ID NO: 3677577 - DNA, 25 bp, Homo sapien
gatctgatgaagcacctagagtttt

SEQ ID NO: 3677578 - DNA, 25 bp, Homo sapien
gtgatctgatgaagcacctagagtt

SEQ ID NO: 3677579 - DNA, 25 bp, Homo sapien
gtaaccaatgttgttctgcctgagt

SEQ ID NO: 3677580 - DNA, 25 bp, Homo sapien
gactcttgtaaccaatgttgttctg

SEQ ID NO: 3677581 - DNA, 25 bp, Homo sapien
tctctttgaagagactcttgtaacc

SEQ ID NO: 3677582 - DNA, 25 bp, Homo sapien
gaagagactcttgtaaccaatgttg

SEQ ID NO: 3677583 - DNA, 25 bp, Homo sapien
ttcctataactgtcccaggaactgg

SEQ ID NO: 3677584 - DNA, 25 bp, Homo sapien
ctcacatcatctgaactattacaaa

SEQ ID NO: 3677585 - DNA, 25 bp, Homo sapien
tcctataactgtcccaggaactggc

SEQ ID NO: 3677586 - DNA, 25 bp, Homo sapien
gcaatttctcagaatgcctatcaag

SEQ ID NO: 3677587 - DNA, 25 bp, Homo sapien
catcagggaatcgacagtgtcctgc

SEQ ID NO: 3677588 - DNA, 25 bp, Homo sapien
cttgattgtgtttgtatccgtagtt

SEQ ID NO: 3677589 - DNA, 25 bp, Homo sapien
gtatccgtagttaatgacatcaggg

SEQ ID NO: 3677590 - DNA, 25 bp, Homo sapien
tgcaaaattgccaggaatgtaagca

SEQ ID NO: 3677591 - DNA, 25 bp, Homo sapien
gcaaaattgccaggaatgtaagcat

SEQ ID NO: 3677592 - DNA, 25 bp, Homo sapien
ttgcaaaattgccaggaatgtaagc

SEQ ID NO: 3677593 - DNA, 25 bp, Homo sapien
gaattttgcaaaattgccaggaatg

SEQ ID NO: 3677594 - DNA, 25 bp, Homo sapien
gacttgtttggctggactataatga

SEQ ID NO: 3677595 - DNA, 25 bp, Homo sapien
ttgtttggctggactataatgatca

SEQ ID NO: 3677596 - DNA, 25 bp, Homo sapien
cttgtttggctggactataatgatc

SEQ ID NO: 3677597 - DNA, 25 bp, Homo sapien
tgtttggctggactataatgatcat

SEQ ID NO: 3677598 - DNA, 25 bp, Homo sapien
aatcttgggcaatgaatcttcgtgg

SEQ ID NO: 3677599 - DNA, 25 bp, Homo sapien
tgaatcttgggcaatgaatcttcgt

SEQ ID NO: 3677600 - DNA, 25 bp, Homo sapien
tgggcaatgaatcttcgtggcatac

SEQ ID NO: 3677601 - DNA, 25 bp, Homo sapien
tcttgggcaatgaatcttcgtggca

SEQ ID NO: 3677602 - DNA, 25 bp, Homo sapien
tccctgaaacagccctatggccttt

SEQ ID NO: 3677603 - DNA, 25 bp, Homo sapien
ctatatgagagtgttcctcaacttc

SEQ ID NO: 3677604 - DNA, 25 bp, Homo sapien
gagctccctgtcttggttaagataa

SEQ ID NO: 3677605 - DNA, 25 bp, Homo sapien
tccagaaggttataatcttcacttg

SEQ ID NO: 3677606 - DNA, 25 bp, Homo sapien
tttacccctctttgattgatctata

SEQ ID NO: 3677607 - DNA, 25 bp, Homo sapien
ttcctttacccctctttgattgatc

SEQ ID NO: 3677608 - DNA, 25 bp, Homo sapien
cctttacccctctttgattgatcta

SEQ ID NO: 3677609 - DNA, 25 bp, Homo sapien
tgattgatctatattcaattcagta

SEQ ID NO: 3677610 - DNA, 25 bp, Homo sapien
cagcccgtgtcaaggtgagcaactt

SEQ ID NO: 3677611 - DNA, 25 bp, Homo sapien
cactgagggtcttggctttaacaat

SEQ ID NO: 3677612 - DNA, 25 bp, Homo sapien
gcagaaccacttgggagaggcagcc

SEQ ID NO: 3677613 - DNA, 25 bp, Homo sapien
tgggcaggacacaacctgggcagct

SEQ ID NO: 3677614 - DNA, 25 bp, Homo sapien
tgtgtaatacgaaacagagactgag

SEQ ID NO: 3677615 - DNA, 25 bp, Homo sapien
agtaggctctactgcatcgtgtggc

SEQ ID NO: 3677616 - DNA, 25 bp, Homo sapien
tcaaacttgggtctgactccgcagc

SEQ ID NO: 3677617 - DNA, 25 bp, Homo sapien
tgtggcctcaccgttgacaacagga

SEQ ID NO: 3677618 - DNA, 25 bp, Homo sapien
tgttgcaggtttttcactcccgtag

SEQ ID NO: 3677619 - DNA, 25 bp, Homo sapien
tgctactgttgcaggtttttcactc

SEQ ID NO: 3677620 - DNA, 25 bp, Homo sapien
gggagtgtcacccagttgccacttc

SEQ ID NO: 3677621 - DNA, 25 bp, Homo sapien
gagtgtcacccagttgccacttctc

SEQ ID NO: 3677622 - DNA, 25 bp, Homo sapien
gcatagccagaagcactaccattac

SEQ ID NO: 3677623 - DNA, 25 bp, Homo sapien
gagcatagccagaagcactaccatt

SEQ ID NO: 3677624 - DNA, 25 bp, Homo sapien
catagccagaagcactaccattaca

SEQ ID NO: 3677625 - DNA, 25 bp, Homo sapien
ctgagcatagccagaagcactacca

SEQ ID NO: 3677626 - DNA, 25 bp, Homo sapien
cacatagaaaatcaactgaaggagt

SEQ ID NO: 3677627 - DNA, 25 bp, Homo sapien
aaatcaactgaaggagttgagtctc

SEQ ID NO: 3677628 - DNA, 25 bp, Homo sapien
caactgaaggagttgagtctctttt

SEQ ID NO: 3677629 - DNA, 25 bp, Homo sapien
aaccacatagaaaatcaactgaagg

SEQ ID NO: 3677630 - DNA, 25 bp, Homo sapien
ccctcactcaaaagagacatccatt

SEQ ID NO: 3677631 - DNA, 25 bp, Homo sapien
gcctcttccaaaaccctcactcaaa

SEQ ID NO: 3677632 - DNA, 25 bp, Homo sapien
agcctcttccaaaaccctcactcaa

SEQ ID NO: 3677633 - DNA, 25 bp, Homo sapien
aaaccctcactcaaaagagacatcc

SEQ ID NO: 3677634 - DNA, 25 bp, Homo sapien
tttccaggtagagcctttgggtcaa

SEQ ID NO: 3677635 - DNA, 25 bp, Homo sapien
gaaactttggtgtctctgaaccata

SEQ ID NO: 3677636 - DNA, 25 bp, Homo sapien
tgctcttattaccaatgtttccagg

SEQ ID NO: 3677637 - DNA, 25 bp, Homo sapien
ggtcaaaggttctagatgctgctgt

SEQ ID NO: 3677638 - DNA, 25 bp, Homo sapien
tctgtcctcctcacagtgcatgcga

SEQ ID NO: 3677639 - DNA, 25 bp, Homo sapien
tcctcacagtgcatgcgatggtagt

SEQ ID NO: 3677640 - DNA, 25 bp, Homo sapien
caggctgtagggttccaaccccatg

SEQ ID NO: 3677641 - DNA, 25 bp, Homo sapien
gatggtagtgcagcttgcatctgtg

SEQ ID NO: 3677642 - DNA, 25 bp, Homo sapien
ctaattctatattattgtaactgtc

SEQ ID NO: 3677643 - DNA, 25 bp, Homo sapien
ttctatattattgtaactgtcacta

SEQ ID NO: 3677644 - DNA, 25 bp, Homo sapien
attctatattattgtaactgtcact

SEQ ID NO: 3677645 - DNA, 25 bp, Homo sapien
aattctatattattgtaactgtcac

SEQ ID NO: 3677646 - DNA, 25 bp, Homo sapien
ggtatacgagtggaaagtgtttctg

SEQ ID NO: 3677647 - DNA, 25 bp, Homo sapien
tctccaatccagaaggtatacgagt

SEQ ID NO: 3677648 - DNA, 25 bp, Homo sapien
catgctcttcgtggaccatctttcc

SEQ ID NO: 3677649 - DNA, 25 bp, Homo sapien
cagacaccatgctcttcgtggacca

SEQ ID NO: 3677650 - DNA, 25 bp, Homo sapien
gcagaatagaggtaaatatacagcc

SEQ ID NO: 3677651 - DNA, 25 bp, Homo sapien
tatacagccgcagtttctttctgga

SEQ ID NO: 3677652 - DNA, 25 bp, Homo sapien
ccatttgtgagtagcagaatagagg

SEQ ID NO: 3677653 - DNA, 25 bp, Homo sapien
gccactctttcagaccatttgtgag

SEQ ID NO: 3677654 - DNA, 25 bp, Homo sapien
ttaactttccatagttagactgtat

SEQ ID NO: 3677655 - DNA, 25 bp, Homo sapien
ctttccatagttagactgtatccat

SEQ ID NO: 3677656 - DNA, 25 bp, Homo sapien
ttgaatactggtcactggttctaaa

SEQ ID NO: 3677657 - DNA, 25 bp, Homo sapien
aaaaaagtgattgttgtcaacataa

SEQ ID NO: 3677658 - DNA, 25 bp, Homo sapien
taagttccgataaccaggagaatgt

SEQ ID NO: 3677659 - DNA, 25 bp, Homo sapien
agttccgataaccaggagaatgtag

SEQ ID NO: 3677660 - DNA, 25 bp, Homo sapien
ttccgataaccaggagaatgtaggt

SEQ ID NO: 3677661 - DNA, 25 bp, Homo sapien
ttaagttccgataaccaggagaatg

SEQ ID NO: 3677662 - DNA, 25 bp, Homo sapien
gccttacagctgtattgtctgccat

SEQ ID NO: 3677663 - DNA, 25 bp, Homo sapien
tgccttacagctgtattgtctgcca

SEQ ID NO: 3677664 - DNA, 25 bp, Homo sapien
catgccttacagctgtattgtctgc

SEQ ID NO: 3677665 - DNA, 25 bp, Homo sapien
acatgccttacagctgtattgtctg

SEQ ID NO: 3677666 - DNA, 25 bp, Homo sapien
tatgggtcaaggtaacgtgcaggcc

SEQ ID NO: 3677667 - DNA, 25 bp, Homo sapien
caaaccttcctaggtgaattcagga

SEQ ID NO: 3677668 - DNA, 25 bp, Homo sapien
cagagacaacttaacacaatggcat

SEQ ID NO: 3677669 - DNA, 25 bp, Homo sapien
ttggcctgtatctgccctctagggt

SEQ ID NO: 3677670 - DNA, 25 bp, Homo sapien
cagtcacttgtggaaagggccctat

SEQ ID NO: 3677671 - DNA, 25 bp, Homo sapien
caggtgctatgtcagatccgctgca

SEQ ID NO: 3677672 - DNA, 25 bp, Homo sapien
cctggtggatgcactacctaaggta

SEQ ID NO: 3677673 - DNA, 25 bp, Homo sapien
cctatagtcagggtcagtatccagc

SEQ ID NO: 3677674 - DNA, 25 bp, Homo sapien
ttatgctccaattctctttaagttg

SEQ ID NO: 3677675 - DNA, 25 bp, Homo sapien
tatgctccaattctctttaagttgt

SEQ ID NO: 3677676 - DNA, 25 bp, Homo sapien
catattttcgtattggctggctccc

SEQ ID NO: 3677677 - DNA, 25 bp, Homo sapien
cagtgacgctgatatcgtaaaagca

SEQ ID NO: 3677678 - DNA, 25 bp, Homo sapien
tcatccatgtttgtagttcaccgaa

SEQ ID NO: 3677679 - DNA, 25 bp, Homo sapien
ccattaatgatgagctccagagggc

SEQ ID NO: 3677680 - DNA, 25 bp, Homo sapien
tatgttctgctaatgtactaacggc

SEQ ID NO: 3677681 - DNA, 25 bp, Homo sapien
tcctctgcctgtaatgaaaatctcc

SEQ ID NO: 3677682 - DNA, 25 bp, Homo sapien
aattccttaaggcactacactgtag

SEQ ID NO: 3677683 - DNA, 25 bp, Homo sapien
tgagcctcacgtctaagaacatctt

SEQ ID NO: 3677684 - DNA, 25 bp, Homo sapien
tgattgcccttgagtaggtgcagct

SEQ ID NO: 3677685 - DNA, 25 bp, Homo sapien
gttgaatgggattgcaggagaccta

SEQ ID NO: 3677686 - DNA, 25 bp, Homo sapien
caatcagtttgtggtcagaagtagg

SEQ ID NO: 3677687 - DNA, 25 bp, Homo sapien
taaaacttcacggaccagtgaggct

SEQ ID NO: 3677688 - DNA, 25 bp, Homo sapien
tgtaatggattctatataacctgtc

SEQ ID NO: 3677689 - DNA, 25 bp, Homo sapien
cctctttgatttcgcaatatgtaca

SEQ ID NO: 3677690 - DNA, 25 bp, Homo sapien
taatagctctcagaagttactacag

SEQ ID NO: 3677691 - DNA, 25 bp, Homo sapien
aagccttcacatagaatgcatgtaa

SEQ ID NO: 3677692 - DNA, 25 bp, Homo sapien
gtgccaacggtgtaacaagtttcga

SEQ ID NO: 3677693 - DNA, 25 bp, Homo sapien
gcacaacttgcacctgtgtgtgaac

SEQ ID NO: 3677694 - DNA, 25 bp, Homo sapien
cgagggtggcacaacttgcacctgt

SEQ ID NO: 3677695 - DNA, 25 bp, Homo sapien
tgccaacggtgtaacaagtttcgag

SEQ ID NO: 3677696 - DNA, 25 bp, Homo sapien
ggggttttgcggacccatctaggca

SEQ ID NO: 3677697 - DNA, 25 bp, Homo sapien
gggttttgcggacccatctaggcat

SEQ ID NO: 3677698 - DNA, 25 bp, Homo sapien
tggggttttgcggacccatctaggc

SEQ ID NO: 3677699 - DNA, 25 bp, Homo sapien
ttccgggtgtaagccgagtgctttg

SEQ ID NO: 3677700 - DNA, 25 bp, Homo sapien
tcaaagcgatcaggttgtaatgaaa

SEQ ID NO: 3677701 - DNA, 25 bp, Homo sapien
aaagcgatcaggttgtaatgaaatc

SEQ ID NO: 3677702 - DNA, 25 bp, Homo sapien
agcgatcaggttgtaatgaaatctt

SEQ ID NO: 3677703 - DNA, 25 bp, Homo sapien
tgtgaagtttattctagttaattca

SEQ ID NO: 3677704 - DNA, 25 bp, Homo sapien
agtgtactcttctagctgttctgga

SEQ ID NO: 3677705 - DNA, 25 bp, Homo sapien
attcaaaagatgcaaggatttgtct

SEQ ID NO: 3677706 - DNA, 25 bp, Homo sapien
aatgagtgtactcttctagctgttc

SEQ ID NO: 3677707 - DNA, 25 bp, Homo sapien
cagattttgagaatgtccaacttga

SEQ ID NO: 3677708 - DNA, 25 bp, Homo sapien
aatgtgagcttctcggggaagttga

SEQ ID NO: 3677709 - DNA, 25 bp, Homo sapien
gaagttgataccttgcagattttga

SEQ ID NO: 3677710 - DNA, 25 bp, Homo sapien
cttctcggggaagttgataccttgc

SEQ ID NO: 3677711 - DNA, 25 bp, Homo sapien
ctgggtaaggcgcagaagaggagcc

SEQ ID NO: 3677712 - DNA, 25 bp, Homo sapien
ggctcgctgggtgaccctttgccag

SEQ ID NO: 3677713 - DNA, 25 bp, Homo sapien
tgcggtgagtggatagcgggcgcgc

SEQ ID NO: 3677714 - DNA, 25 bp, Homo sapien
cagtggcggcgaagattggcgctat

SEQ ID NO: 3677715 - DNA, 25 bp, Homo sapien
tcactcttcccagcgttgcgtttgc

SEQ ID NO: 3677716 - DNA, 25 bp, Homo sapien
tgtctttgcctcgagttccccgcag

SEQ ID NO: 3677717 - DNA, 25 bp, Homo sapien
tctgcttttgcaggcggcagctcgg

SEQ ID NO: 3677718 - DNA, 25 bp, Homo sapien
gaagggcgacgcgtctctgcttttg

SEQ ID NO: 3677719 - DNA, 25 bp, Homo sapien
acccagcgagctcgactggtgctga

SEQ ID NO: 3677720 - DNA, 25 bp, Homo sapien
cgactggtgctgacgtccattcagg

SEQ ID NO: 3677721 - DNA, 25 bp, Homo sapien
tggtgctgacgtccattcaggcctt

SEQ ID NO: 3677722 - DNA, 25 bp, Homo sapien
gctcacccagcgagctcgactggtg

SEQ ID NO: 3677723 - DNA, 25 bp, Homo sapien
tggtcagactctcccagttcaggac

SEQ ID NO: 3677724 - DNA, 25 bp, Homo sapien
cagaggatgctctagaagtggcgcc

SEQ ID NO: 3677725 - DNA, 25 bp, Homo sapien
tattcttcgcagagcaaaaatgccg

SEQ ID NO: 3677726 - DNA, 25 bp, Homo sapien
cgcctgagagcctaccggtgaatgg

SEQ ID NO: 3677727 - DNA, 25 bp, Homo sapien
tcaatgtttttctccccatccccac

SEQ ID NO: 3677728 - DNA, 25 bp, Homo sapien
tttgttcccggagactggatgtgtg

SEQ ID NO: 3677729 - DNA, 25 bp, Homo sapien
cctcctttgggaaagcgcgtcaacg

SEQ ID NO: 3677730 - DNA, 25 bp, Homo sapien
ggtcagtgtagatccagacagagtt

SEQ ID NO: 3677731 - DNA, 25 bp, Homo sapien
tctgcttttgttggtgtcgttcctc

SEQ ID NO: 3677732 - DNA, 25 bp, Homo sapien
catgactgagcggaaaacacttgtt

SEQ ID NO: 3677733 - DNA, 25 bp, Homo sapien
gtttccggacgccaagacttgcgcg

SEQ ID NO: 3677734 - DNA, 25 bp, Homo sapien
gtctggtggaagtcgcagggtcgcc

SEQ ID NO: 3677735 - DNA, 25 bp, Homo sapien
tgttcgactggcgaagccgccatga

SEQ ID NO: 3677736 - DNA, 25 bp, Homo sapien
aaagcaggttataagtggaaattca

SEQ ID NO: 3677737 - DNA, 25 bp, Homo sapien
tccatcaattagtattaaaatgtac

SEQ ID NO: 3677738 - DNA, 25 bp, Homo sapien
aattcaatactatgtactgtcctgt

SEQ ID NO: 3677739 - DNA, 25 bp, Homo sapien
caggttataagtggaaattcaatac

SEQ ID NO: 3677740 - DNA, 25 bp, Homo sapien
tactacatttttgcctgaatgcctc

SEQ ID NO: 3677741 - DNA, 25 bp, Homo sapien
cattgtctgcagatatcaattgtct

SEQ ID NO: 3677742 - DNA, 25 bp, Homo sapien
gtttttctaattcaccactgtgcaa

SEQ ID NO: 3677743 - DNA, 25 bp, Homo sapien
gactagatattaatctgtgtctccc

SEQ ID NO: 3677744 - DNA, 25 bp, Homo sapien
ggccttaggaatggaacattgactt

SEQ ID NO: 3677745 - DNA, 25 bp, Homo sapien
gccttaggaatggaacattgacttt

SEQ ID NO: 3677746 - DNA, 25 bp, Homo sapien
tagccctgacagtgagatatcgact

SEQ ID NO: 3677747 - DNA, 25 bp, Homo sapien
agtctcaggcacagtttccatcatg

SEQ ID NO: 3677748 - DNA, 25 bp, Homo sapien
gctctctggttacacatagccctga

SEQ ID NO: 3677749 - DNA, 25 bp, Homo sapien
gatatcgacttcgtctctcctgtaa

SEQ ID NO: 3677750 - DNA, 25 bp, Homo sapien
aaatgtgttgtggagtccgccagtg

SEQ ID NO: 3677751 - DNA, 25 bp, Homo sapien
ggctgagaatggaaagctcgtcttc

SEQ ID NO: 3677752 - DNA, 25 bp, Homo sapien
aaggccagagccaacggattggact

SEQ ID NO: 3677753 - DNA, 25 bp, Homo sapien
gattggactatattgggcacccggt

SEQ ID NO: 3677754 - DNA, 25 bp, Homo sapien
tctcttcatgtgtgaagtactcctt

SEQ ID NO: 3677755 - DNA, 25 bp, Homo sapien
ctctgccacaagtgttcactactgt

SEQ ID NO: 3677756 - DNA, 25 bp, Homo sapien
ttctcttcatgtgtgaagtactcct

SEQ ID NO: 3677757 - DNA, 25 bp, Homo sapien
gctgcagtgtgccactcaggcttct

SEQ ID NO: 3677758 - DNA, 25 bp, Homo sapien
ttggggcccatctagaacctccact

SEQ ID NO: 3677759 - DNA, 25 bp, Homo sapien
tggggcccatctagaacctccactg

SEQ ID NO: 3677760 - DNA, 25 bp, Homo sapien
tttggggcccatctagaacctccac

SEQ ID NO: 3677761 - DNA, 25 bp, Homo sapien
aaggctattaggtttgagaggtcca

SEQ ID NO: 3677762 - DNA, 25 bp, Homo sapien
atttgggaaggctcatgtcccctac

SEQ ID NO: 3677763 - DNA, 25 bp, Homo sapien
tcccctacacagaaaggttacagag

SEQ ID NO: 3677764 - DNA, 25 bp, Homo sapien
agaggtccagagcaagcaaagcttc

SEQ ID NO: 3677765 - DNA, 25 bp, Homo sapien
aatgtgctatcattgtacttcctgg

SEQ ID NO: 3677766 - DNA, 25 bp, Homo sapien
atgtgctatcattgtacttcctggc

SEQ ID NO: 3677767 - DNA, 25 bp, Homo sapien
agaaatgtgctatcattgtacttcc

SEQ ID NO: 3677768 - DNA, 25 bp, Homo sapien
acttcctggctgtcacatgtggcat

SEQ ID NO: 3677769 - DNA, 25 bp, Homo sapien
gtggtgtgtcggcttgtctctttct

SEQ ID NO: 3677770 - DNA, 25 bp, Homo sapien
tccactactcttctcggagtcttgt

SEQ ID NO: 3677771 - DNA, 25 bp, Homo sapien
cacataaatgttgtggtgtgtcggc

SEQ ID NO: 3677772 - DNA, 25 bp, Homo sapien
cggagtcttgttcacatccttccca

SEQ ID NO: 3677773 - DNA, 25 bp, Homo sapien
tttggcaaggttgagtgtggcaaca

SEQ ID NO: 3677774 - DNA, 25 bp, Homo sapien
gcaacagggtccttgaggaaagaaa

SEQ ID NO: 3677775 - DNA, 25 bp, Homo sapien
aaacaaaatccacaccaactctgtt

SEQ ID NO: 3677776 - DNA, 25 bp, Homo sapien
tcatggcctagtaattgcaggcttg

SEQ ID NO: 3677777 - DNA, 25 bp, Homo sapien
gagattctgtatcgtaatatactca

SEQ ID NO: 3677778 - DNA, 25 bp, Homo sapien
atagggagattctgtatcgtaatat

SEQ ID NO: 3677779 - DNA, 25 bp, Homo sapien
gcatttggttaatagggagattctg

SEQ ID NO: 3677780 - DNA, 25 bp, Homo sapien
gggagattctgtatcgtaatatact

SEQ ID NO: 3677781 - DNA, 25 bp, Homo sapien
tcaccctcctcattagttatatgca

SEQ ID NO: 3677782 - DNA, 25 bp, Homo sapien
accctcctcattagttatatgcacc

SEQ ID NO: 3677783 - DNA, 25 bp, Homo sapien
aatttcaccctcctcattagttata

SEQ ID NO: 3677784 - DNA, 25 bp, Homo sapien
tttcaccctcctcattagttatatg

SEQ ID NO: 3677785 - DNA, 25 bp, Homo sapien
taatgtgttgtatagaagtgtcaga

SEQ ID NO: 3677786 - DNA, 25 bp, Homo sapien
ttcgattaatacatgcaagactgat

SEQ ID NO: 3677787 - DNA, 25 bp, Homo sapien
taaaatttatcttgggctgtacttc

SEQ ID NO: 3677788 - DNA, 25 bp, Homo sapien
gggctgtacttcataccataagctt

SEQ ID NO: 3677789 - DNA, 25 bp, Homo sapien
tgctgccttgatccgccaaggtctt

SEQ ID NO: 3677790 - DNA, 25 bp, Homo sapien
gatcatgatgttgtactcctcaata

SEQ ID NO: 3677791 - DNA, 25 bp, Homo sapien
cttgatccgccaaggtctttttgaa

SEQ ID NO: 3677792 - DNA, 25 bp, Homo sapien
aattctctccagactttattatctt

SEQ ID NO: 3677793 - DNA, 25 bp, Homo sapien
tgatgctacgaatcatcctatcatg

SEQ ID NO: 3677794 - DNA, 25 bp, Homo sapien
tcttttatcccaatctatatcccaa

SEQ ID NO: 3677795 - DNA, 25 bp, Homo sapien
ttgtaccatatcaatagtgaaactg

SEQ ID NO: 3677796 - DNA, 25 bp, Homo sapien
tatatcccaatacccaatagcccag

SEQ ID NO: 3677797 - DNA, 25 bp, Homo sapien
aagtctcctataaaaggacatttgc

SEQ ID NO: 3677798 - DNA, 25 bp, Homo sapien
gaatctgaagaacagatgttaagtg

SEQ ID NO: 3677799 - DNA, 25 bp, Homo sapien
agactcattccccagcttgctattg

SEQ ID NO: 3677800 - DNA, 25 bp, Homo sapien
tgaatactgtagatatctgctggct

SEQ ID NO: 3677801 - DNA, 25 bp, Homo sapien
gttaagtgtgaagtgtctccctcca

SEQ ID NO: 3677802 - DNA, 25 bp, Homo sapien
tcttcaaactcaagaggtaactgag

SEQ ID NO: 3677803 - DNA, 25 bp, Homo sapien
ctcatcagtttgttcttcaaactca

SEQ ID NO: 3677804 - DNA, 25 bp, Homo sapien
aggtaactgagtcctttactgactg

SEQ ID NO: 3677805 - DNA, 25 bp, Homo sapien
taactgagtcctttactgactgcct

SEQ ID NO: 3677806 - DNA, 25 bp, Homo sapien
gaataaaggatagcagtggccacaa

SEQ ID NO: 3677807 - DNA, 25 bp, Homo sapien
tgccaatgccccacatttagtgagc

SEQ ID NO: 3677808 - DNA, 25 bp, Homo sapien
tgagccatggactttcacattcgct

SEQ ID NO: 3677809 - DNA, 25 bp, Homo sapien
tggccacaaggctagcaggtgcagc

SEQ ID NO: 3677810 - DNA, 25 bp, Homo sapien
attgttgtttggattggagtggggt

SEQ ID NO: 3677811 - DNA, 25 bp, Homo sapien
tttattgttgtttggattggagtgg

SEQ ID NO: 3677812 - DNA, 25 bp, Homo sapien
ttttattgttgtttggattggagtg

SEQ ID NO: 3677813 - DNA, 25 bp, Homo sapien
ttattgttgtttggattggagtggg

SEQ ID NO: 3677814 - DNA, 25 bp, Homo sapien
caagtgctagaagattagtctcata

SEQ ID NO: 3677815 - DNA, 25 bp, Homo sapien
tgtatcaagtgctagaagattagtc

SEQ ID NO: 3677816 - DNA, 25 bp, Homo sapien
tcaaagttaatgaccaagccagttt

SEQ ID NO: 3677817 - DNA, 25 bp, Homo sapien
agtttctcttaaagaatatgccaag

SEQ ID NO: 3677818 - DNA, 25 bp, Homo sapien
gttgtctggactaactaaattgacc

SEQ ID NO: 3677819 - DNA, 25 bp, Homo sapien
tgaagctgagactgtcctaggataa

SEQ ID NO: 3677820 - DNA, 25 bp, Homo sapien
taagagggagatatgggcctcgcat

SEQ ID NO: 3677821 - DNA, 25 bp, Homo sapien
gaggcaccagattggcatatccagt

SEQ ID NO: 3677822 - DNA, 25 bp, Homo sapien
tgtgcccactctgtgttgcgcagta

SEQ ID NO: 3677823 - DNA, 25 bp, Homo sapien
agccgatacttcctcctttcacagt

SEQ ID NO: 3677824 - DNA, 25 bp, Homo sapien
gcccactctgtgttgcgcagtacag

SEQ ID NO: 3677825 - DNA, 25 bp, Homo sapien
ctgtgttgcgcagtacagagatatt

SEQ ID NO: 3677826 - DNA, 25 bp, Homo sapien
tgctttcttccggtaaaatgtgagt

SEQ ID NO: 3677827 - DNA, 25 bp, Homo sapien
tgtgtggccaaaagctttgctttct

SEQ ID NO: 3677828 - DNA, 25 bp, Homo sapien
attatgttgtgtggccaaaagcttt

SEQ ID NO: 3677829 - DNA, 25 bp, Homo sapien
ccggtaaaatgtgagtataacagga

SEQ ID NO: 3677830 - DNA, 25 bp, Homo sapien
ctgaaagggaaaattaatttgaatg

SEQ ID NO: 3677831 - DNA, 25 bp, Homo sapien
gagtccagtgagtccaatttcacaa

SEQ ID NO: 3677832 - DNA, 25 bp, Homo sapien
cacaagcattaacaatctgaaaggg

SEQ ID NO: 3677833 - DNA, 25 bp, Homo sapien
tccagtgagtccaatttcacaagca

SEQ ID NO: 3677834 - DNA, 25 bp, Homo sapien
gctggcagttcgtggcatgatcatt

SEQ ID NO: 3677835 - DNA, 25 bp, Homo sapien
taatgtcgtgctggcagttcgtggc

SEQ ID NO: 3677836 - DNA, 25 bp, Homo sapien
tcagacagtgtcgttaataatgtcg

SEQ ID NO: 3677837 - DNA, 25 bp, Homo sapien
tgatcattagtagcaatggacttca

SEQ ID NO: 3677838 - DNA, 25 bp, Homo sapien
taatttcccacgcatctgtaggttt

SEQ ID NO: 3677839 - DNA, 25 bp, Homo sapien
gttaatttcccacgcatctgtaggt

SEQ ID NO: 3677840 - DNA, 25 bp, Homo sapien
atttcccacgcatctgtaggtttta

SEQ ID NO: 3677841 - DNA, 25 bp, Homo sapien
ctgttaatttcccacgcatctgtag

SEQ ID NO: 3677842 - DNA, 25 bp, Homo sapien
ctctccacctacatgcatttgctgt

SEQ ID NO: 3677843 - DNA, 25 bp, Homo sapien
cctctccacctacatgcatttgctg

SEQ ID NO: 3677844 - DNA, 25 bp, Homo sapien
ccctctccacctacatgcatttgct

SEQ ID NO: 3677845 - DNA, 25 bp, Homo sapien
tctccacctacatgcatttgctgtt

SEQ ID NO: 3677846 - DNA, 25 bp, Homo sapien
agagtaatcataagagctgtggagt

SEQ ID NO: 3677847 - DNA, 25 bp, Homo sapien
gaaagagtaatcataagagctgtgg

SEQ ID NO: 3677848 - DNA, 25 bp, Homo sapien
agaaagagtaatcataagagctgtg

SEQ ID NO: 3677849 - DNA, 25 bp, Homo sapien
aagagtaatcataagagctgtggag

SEQ ID NO: 3677850 - DNA, 25 bp, Homo sapien
tgtggtattcttatcttgcatttaa

SEQ ID NO: 3677851 - DNA, 25 bp, Homo sapien
ctttcccttacggatatcatttgtg

SEQ ID NO: 3677852 - DNA, 25 bp, Homo sapien
cttttctttcccttacggatatcat

SEQ ID NO: 3677853 - DNA, 25 bp, Homo sapien
tctgtggtattcttatcttgcattt

SEQ ID NO: 3677854 - DNA, 25 bp, Homo sapien
gctggcagactcgtaagtacacaaa

SEQ ID NO: 3677855 - DNA, 25 bp, Homo sapien
ggtcatcactagtgcctaccaaagg

SEQ ID NO: 3677856 - DNA, 25 bp, Homo sapien
tgagatcacctcagattgggcaata

SEQ ID NO: 3677857 - DNA, 25 bp, Homo sapien
gacttggttactagaattcttcagg

SEQ ID NO: 3677858 - DNA, 25 bp, Homo sapien
gcgctagagatactgttaaagctaa

SEQ ID NO: 3677859 - DNA, 25 bp, Homo sapien
agatactgttaaagctaatgcaggc

SEQ ID NO: 3677860 - DNA, 25 bp, Homo sapien
ctgaaatcctgtaagcgctagagat

SEQ ID NO: 3677861 - DNA, 25 bp, Homo sapien
tcctgtaagcgctagagatactgtt

SEQ ID NO: 3677862 - DNA, 25 bp, Homo sapien
tcttttcagctcctttgtatagcta

SEQ ID NO: 3677863 - DNA, 25 bp, Homo sapien
tagctatactttactggttctttac

SEQ ID NO: 3677864 - DNA, 25 bp, Homo sapien
ttactttcaacactttctactctgg

SEQ ID NO: 3677865 - DNA, 25 bp, Homo sapien
tttactttcaacactttctactctg

SEQ ID NO: 3677866 - DNA, 25 bp, Homo sapien
caccttgaagaacctatgagaaggt

SEQ ID NO: 3677867 - DNA, 25 bp, Homo sapien
gaagaacctatgagaaggtgagtga

SEQ ID NO: 3677868 - DNA, 25 bp, Homo sapien
ccttgaagaacctatgagaaggtga

SEQ ID NO: 3677869 - DNA, 25 bp, Homo sapien
agaacctatgagaaggtgagtgaac

SEQ ID NO: 3677870 - DNA, 25 bp, Homo sapien
ttggcttttgtcatccactattgta

SEQ ID NO: 3677871 - DNA, 25 bp, Homo sapien
tgtcatccactattgtatgttttgt

SEQ ID NO: 3677872 - DNA, 25 bp, Homo sapien
ttcggattggagaagatgtaccttt

SEQ ID NO: 3677873 - DNA, 25 bp, Homo sapien
cggattggagaagatgtaccttttt

SEQ ID NO: 3677874 - DNA, 25 bp, Homo sapien
agtgagctcatctgactgttttagg

SEQ ID NO: 3677875 - DNA, 25 bp, Homo sapien
tacagcctagtgttaacattcttgg

SEQ ID NO: 3677876 - DNA, 25 bp, Homo sapien
tattcatggatccaaatgtttgttg

SEQ ID NO: 3677877 - DNA, 25 bp, Homo sapien
gcggtgaaccagaattataacagtg

SEQ ID NO: 3677878 - DNA, 25 bp, Homo sapien
gccaggaccacatttcactcctttg

SEQ ID NO: 3677879 - DNA, 25 bp, Homo sapien
cagatttgaagctaatgccattttc

SEQ ID NO: 3677880 - DNA, 25 bp, Homo sapien
gcaatggcatgaccaactcatcaca

SEQ ID NO: 3677881 - DNA, 25 bp, Homo sapien
tcatgtgggatcttatgctgaaaat

SEQ ID NO: 3677882 - DNA, 25 bp, Homo sapien
gggagaatccaagacaataggctga

SEQ ID NO: 3677883 - DNA, 25 bp, Homo sapien
tatggttttgattatgtgaagggag

SEQ ID NO: 3677884 - DNA, 25 bp, Homo sapien
caagacaataggctgagttccatgc

SEQ ID NO: 3677885 - DNA, 25 bp, Homo sapien
tgactggcaaatggtttggtatggt

SEQ ID NO: 3677886 - DNA, 25 bp, Homo sapien
tagcaacaaagccaactcataaagg

SEQ ID NO: 3677887 - DNA, 25 bp, Homo sapien
gaaaagtattcttgactaagcacca

SEQ ID NO: 3677888 - DNA, 25 bp, Homo sapien
caagtagtttcgacctgagagagac

SEQ ID NO: 3677889 - DNA, 25 bp, Homo sapien
aacttgtagccttgttggtagcaac

SEQ ID NO: 3677890 - DNA, 25 bp, Homo sapien
taactctcgatccatttgtcagccg

SEQ ID NO: 3677891 - DNA, 25 bp, Homo sapien
tgtgctgcacaaaattctccgattc

SEQ ID NO: 3677892 - DNA, 25 bp, Homo sapien
cctggtataggaagctaactctcga

SEQ ID NO: 3677893 - DNA, 25 bp, Homo sapien
caattatcatcctggtataggaagc

SEQ ID NO: 3677894 - DNA, 25 bp, Homo sapien
ctgttgtgaaagataggctagtcga

SEQ ID NO: 3677895 - DNA, 25 bp, Homo sapien
ttccacttaatttcctgggaatagc

SEQ ID NO: 3677896 - DNA, 25 bp, Homo sapien
ttaatcaacatgtgcctgttgtgaa

SEQ ID NO: 3677897 - DNA, 25 bp, Homo sapien
gctagtcgaatgaagacggttccac

SEQ ID NO: 3677898 - DNA, 25 bp, Homo sapien
gaagcttcggctctttgcccttgag

SEQ ID NO: 3677899 - DNA, 25 bp, Homo sapien
gcccttgagtgatctctctgttcta

SEQ ID NO: 3677900 - DNA, 25 bp, Homo sapien
ttagcatacagagatcatgacagtc

SEQ ID NO: 3677901 - DNA, 25 bp, Homo sapien
gattgccttcctgctgatctcaaac

SEQ ID NO: 3677902 - DNA, 25 bp, Homo sapien
atataagggttttagtacagtatct

SEQ ID NO: 3677903 - DNA, 25 bp, Homo sapien
cagaacacaaatataagggttttag

SEQ ID NO: 3677904 - DNA, 25 bp, Homo sapien
tcatacttcagaacacaaatataag

SEQ ID NO: 3677905 - DNA, 25 bp, Homo sapien
taaaattgatttccaaagaagagtc

SEQ ID NO: 3677906 - DNA, 25 bp, Homo sapien
gctaaaaatcagaatactccgtagc

SEQ ID NO: 3677907 - DNA, 25 bp, Homo sapien
ccgtagccgtacatagtctgaattt

SEQ ID NO: 3677908 - DNA, 25 bp, Homo sapien
tactccgtagccgtacatagtctga

SEQ ID NO: 3677909 - DNA, 25 bp, Homo sapien
aaatcagaatactccgtagccgtac

SEQ ID NO: 3677910 - DNA, 25 bp, Homo sapien
ttccttcagcaagatcagtaaatag

SEQ ID NO: 3677911 - DNA, 25 bp, Homo sapien
tagtatccttacaatcttttccttc

SEQ ID NO: 3677912 - DNA, 25 bp, Homo sapien
cttggcagtagtatccttacaatct

SEQ ID NO: 3677913 - DNA, 25 bp, Homo sapien
cttcagcaagatcagtaaatagcat

SEQ ID NO: 3677914 - DNA, 25 bp, Homo sapien
ggtcataggttacaagtctaaaata

SEQ ID NO: 3677915 - DNA, 25 bp, Homo sapien
cataggttacaagtctaaaatatac

SEQ ID NO: 3677916 - DNA, 25 bp, Homo sapien
tgccaacatttcactataccaaaca

SEQ ID NO: 3677917 - DNA, 25 bp, Homo sapien
ctgccaacatttcactataccaaac

SEQ ID NO: 3677918 - DNA, 25 bp, Homo sapien
ccaacatttcactataccaaacatt

SEQ ID NO: 3677919 - DNA, 25 bp, Homo sapien
gccaacatttcactataccaaacat

SEQ ID NO: 3677920 - DNA, 25 bp, Homo sapien
gatgctctgatcagtcctctgattt

SEQ ID NO: 3677921 - DNA, 25 bp, Homo sapien
tatctctacaagatgctctgatcag

SEQ ID NO: 3677922 - DNA, 25 bp, Homo sapien
ctttgtatctctacaagatgctctg

SEQ ID NO: 3677923 - DNA, 25 bp, Homo sapien
cagtcctctgatttggattatctgc

SEQ ID NO: 3677924 - DNA, 25 bp, Homo sapien
catcttatactcaaattcatactgg

SEQ ID NO: 3677925 - DNA, 25 bp, Homo sapien
tcttatactcaaattcatactggac

SEQ ID NO: 3677926 - DNA, 25 bp, Homo sapien
atcttatactcaaattcatactgga

SEQ ID NO: 3677927 - DNA, 25 bp, Homo sapien
aatgaattgctgacaatccatctta

SEQ ID NO: 3677928 - DNA, 25 bp, Homo sapien
tgacaatccatcttaataactgaag

SEQ ID NO: 3677929 - DNA, 25 bp, Homo sapien
gccatccagattggaacctaataaa

SEQ ID NO: 3677930 - DNA, 25 bp, Homo sapien
atgcactagtagcagagccatccag

SEQ ID NO: 3677931 - DNA, 25 bp, Homo sapien
catccaattctacatttgctgttcc

SEQ ID NO: 3677932 - DNA, 25 bp, Homo sapien
cagtccactttgagggttttcttat

SEQ ID NO: 3677933 - DNA, 25 bp, Homo sapien
tcaaactccattcctacagagaagt

SEQ ID NO: 3677934 - DNA, 25 bp, Homo sapien
ctgtaagttcactggtaattgtctt

SEQ ID NO: 3677935 - DNA, 25 bp, Homo sapien
tcttttggttgaggatatttaatca

SEQ ID NO: 3677936 - DNA, 25 bp, Homo sapien
ttcttttggttgaggatatttaatc

SEQ ID NO: 3677937 - DNA, 25 bp, Homo sapien
cttttggttgaggatatttaatcat

SEQ ID NO: 3677938 - DNA, 25 bp, Homo sapien
cttcttttggttgaggatatttaat

SEQ ID NO: 3677939 - DNA, 25 bp, Homo sapien
gacctggaaaaacattgctttaatc

SEQ ID NO: 3677940 - DNA, 25 bp, Homo sapien
tggagacctggaaaaacattgcttt

SEQ ID NO: 3677941 - DNA, 25 bp, Homo sapien
cctggaaaaacattgctttaatcat

SEQ ID NO: 3677942 - DNA, 25 bp, Homo sapien
gagacctggaaaaacattgctttaa

SEQ ID NO: 3677943 - DNA, 25 bp, Homo sapien
gaatatttgtaagttagcatgctgg

SEQ ID NO: 3677944 - DNA, 25 bp, Homo sapien
cacattaagataaactggctgtgtt

SEQ ID NO: 3677945 - DNA, 25 bp, Homo sapien
tgtctgcttcgattggaacacagct

SEQ ID NO: 3677946 - DNA, 25 bp, Homo sapien
tgtaagttagcatgctggcttggct

SEQ ID NO: 3677947 - DNA, 25 bp, Homo sapien
tgagagataatccaccgagtcctgt

SEQ ID NO: 3677948 - DNA, 25 bp, Homo sapien
tgagttctatatacactaaaaggga

SEQ ID NO: 3677949 - DNA, 25 bp, Homo sapien
tattggcactatgaagcagaaaaga

SEQ ID NO: 3677950 - DNA, 25 bp, Homo sapien
ctttaagggaatcattctgagttct

SEQ ID NO: 3677951 - DNA, 25 bp, Homo sapien
tcttggttgtcaggtccttttgatc

SEQ ID NO: 3677952 - DNA, 25 bp, Homo sapien
ctgtcatgggaggtactagatggat

SEQ ID NO: 3677953 - DNA, 25 bp, Homo sapien
ctagatggattttggtactcttggt

SEQ ID NO: 3677954 - DNA, 25 bp, Homo sapien
ggtccttttgatcaattgttggcaa

SEQ ID NO: 3677955 - DNA, 25 bp, Homo sapien
gaatgtagtccacatgggcagtcat

SEQ ID NO: 3677956 - DNA, 25 bp, Homo sapien
ttagttttgcaatgcacatgtgaca

SEQ ID NO: 3677957 - DNA, 25 bp, Homo sapien
aacagtagtaaagaatgtagtccac

SEQ ID NO: 3677958 - DNA, 25 bp, Homo sapien
ttttgcaatgcacatgtgacactta

SEQ ID NO: 3677959 - DNA, 25 bp, Homo sapien
caaaattcagcatttactaaagtga

SEQ ID NO: 3677960 - DNA, 25 bp, Homo sapien
atcgtcatcatcacaaaattcagca

SEQ ID NO: 3677961 - DNA, 25 bp, Homo sapien
tctgcttttacttcatcgtcatcat

SEQ ID NO: 3677962 - DNA, 25 bp, Homo sapien
ctgcttctgcttttacttcatcgtc

SEQ ID NO: 3677963 - DNA, 25 bp, Homo sapien
tctgcaaagagatcccgagctaatg

SEQ ID NO: 3677964 - DNA, 25 bp, Homo sapien
taatgctttcatagagtggataatc

SEQ ID NO: 3677965 - DNA, 25 bp, Homo sapien
tatatttgaagtgcactaggggagt

SEQ ID NO: 3677966 - DNA, 25 bp, Homo sapien
cactaggggagtgagctctgcaaag

SEQ ID NO: 3677967 - DNA, 25 bp, Homo sapien
ctgaagatttttgaatgcgaatgct

SEQ ID NO: 3677968 - DNA, 25 bp, Homo sapien
ggtgggccctatcttcccctgacag

SEQ ID NO: 3677969 - DNA, 25 bp, Homo sapien
ttaatatatgtcaagtgtaaggtgg

SEQ ID NO: 3677970 - DNA, 25 bp, Homo sapien
caagtgtaaggtgggccctatcttc

SEQ ID NO: 3677971 - DNA, 25 bp, Homo sapien
tttgagtgttatttttgcaataatg

SEQ ID NO: 3677972 - DNA, 25 bp, Homo sapien
tttccagtgttcccccattcaaaca

SEQ ID NO: 3677973 - DNA, 25 bp, Homo sapien
ccattcaaacagagcctcaactaac

SEQ ID NO: 3677974 - DNA, 25 bp, Homo sapien
cagagcctcaactaacacatttttg

SEQ ID NO: 3677975 - DNA, 25 bp, Homo sapien
caaagcctagtccagagctatcgtt

SEQ ID NO: 3677976 - DNA, 25 bp, Homo sapien
gaggtataggaaccaccacagtaga

SEQ ID NO: 3677977 - DNA, 25 bp, Homo sapien
gttgacattgacaaagaggtatagg

SEQ ID NO: 3677978 - DNA, 25 bp, Homo sapien
gatttaacaggttctgcaaagccta

SEQ ID NO: 3677979 - DNA, 25 bp, Homo sapien
tttgactgaaatggatgtggtttgc

SEQ ID NO: 3677980 - DNA, 25 bp, Homo sapien
ctactagtgaagaagatttgactga

SEQ ID NO: 3677981 - DNA, 25 bp, Homo sapien
tgcttaataacagcctttcttgact

SEQ ID NO: 3677982 - DNA, 25 bp, Homo sapien
tacaagggatattggagtacgactc

SEQ ID NO: 3677983 - DNA, 25 bp, Homo sapien
tattaatagatacatcatcctgaag

SEQ ID NO: 3677984 - DNA, 25 bp, Homo sapien
attaatagatacatcatcctgaaga

SEQ ID NO: 3677985 - DNA, 25 bp, Homo sapien
caggcatcacctttgctgaaacact

SEQ ID NO: 3677986 - DNA, 25 bp, Homo sapien
ggcatcacctttgctgaaacacttg

SEQ ID NO: 3677987 - DNA, 25 bp, Homo sapien
tgctgaaacacttgaatgttttctc

SEQ ID NO: 3677988 - DNA, 25 bp, Homo sapien
cctttgctgaaacacttgaatgttt

SEQ ID NO: 3677989 - DNA, 25 bp, Homo sapien
aattgtactgaatgattatgaagtg

SEQ ID NO: 3677990 - DNA, 25 bp, Homo sapien
ttgtactgaatgattatgaagtgtt

SEQ ID NO: 3677991 - DNA, 25 bp, Homo sapien
caattgtactgaatgattatgaagt

SEQ ID NO: 3677992 - DNA, 25 bp, Homo sapien
gacaattgtactgaatgattatgaa

SEQ ID NO: 3677993 - DNA, 25 bp, Homo sapien
ctgtgagatgtagaccttgtctgga

SEQ ID NO: 3677994 - DNA, 25 bp, Homo sapien
tgtgagatgtagaccttgtctggat

SEQ ID NO: 3677995 - DNA, 25 bp, Homo sapien
caaagtaaggagagtagagtgcatg

SEQ ID NO: 3677996 - DNA, 25 bp, Homo sapien
tcagcaaagtaaggagagtagagtg

SEQ ID NO: 3677997 - DNA, 25 bp, Homo sapien
gatgagtaggaatcagcaaagtaag

SEQ ID NO: 3677998 - DNA, 25 bp, Homo sapien
aggatgagtaggaatcagcaaagta

SEQ ID NO: 3677999 - DNA, 25 bp, Homo sapien
gaattccgagtgaaagtagcatcta

SEQ ID NO: 3678000 - DNA, 25 bp, Homo sapien
cagggaagaattccgagtgaaagta

SEQ ID NO: 3678001 - DNA, 25 bp, Homo sapien
ctatatggatttggtgaaaggtgcc

SEQ ID NO: 3678002 - DNA, 25 bp, Homo sapien
aaggtgccatagcttcataagggag

SEQ ID NO: 3678003 - DNA, 25 bp, Homo sapien
aatctttttgcgcacgctcaccctg

SEQ ID NO: 3678004 - DNA, 25 bp, Homo sapien
tattaatctttttgcgcacgctcac

SEQ ID NO: 3678005 - DNA, 25 bp, Homo sapien
ttttgcgcacgctcaccctggacat

SEQ ID NO: 3678006 - DNA, 25 bp, Homo sapien
atgatattaatctttttgcgcacgc

SEQ ID NO: 3678007 - DNA, 25 bp, Homo sapien
tgattttgccgtaatttatccttag

SEQ ID NO: 3678008 - DNA, 25 bp, Homo sapien
cagagttacctttctctttacataa

SEQ ID NO: 3678009 - DNA, 25 bp, Homo sapien
acttccacgaaaatgttgattttgc

SEQ ID NO: 3678010 - DNA, 25 bp, Homo sapien
cacgaaaatgttgattttgccgtaa

SEQ ID NO: 3678011 - DNA, 25 bp, Homo sapien
tctagctctctatttacattccagt

SEQ ID NO: 3678012 - DNA, 25 bp, Homo sapien
aggtgttagactcagaatcatggta

SEQ ID NO: 3678013 - DNA, 25 bp, Homo sapien
ttctagctctctatttacattccag

SEQ ID NO: 3678014 - DNA, 25 bp, Homo sapien
tcaggtgttagactcagaatcatgg

SEQ ID NO: 3678015 - DNA, 25 bp, Homo sapien
agaactgttcatcctactaagcaca

SEQ ID NO: 3678016 - DNA, 25 bp, Homo sapien
taaagttctgatgagcatgtgagga

SEQ ID NO: 3678017 - DNA, 25 bp, Homo sapien
gattgatgtgatgcttatacacctt

SEQ ID NO: 3678018 - DNA, 25 bp, Homo sapien
tagatggaaaaacgaatgatggtat

SEQ ID NO: 3678019 - DNA, 25 bp, Homo sapien
attggtcctttctcctgtttcacta

SEQ ID NO: 3678020 - DNA, 25 bp, Homo sapien
gtcctttctcctgtttcactaccat

SEQ ID NO: 3678021 - DNA, 25 bp, Homo sapien
ccagaattggtcctttctcctgttt

SEQ ID NO: 3678022 - DNA, 25 bp, Homo sapien
ggtcctttctcctgtttcactacca

SEQ ID NO: 3678023 - DNA, 25 bp, Homo sapien
ttgtcctctgacatttgtcctggtc

SEQ ID NO: 3678024 - DNA, 25 bp, Homo sapien
tctgacatttgtcctggtctgccat

SEQ ID NO: 3678025 - DNA, 25 bp, Homo sapien
tcctctgacatttgtcctggtctgc

SEQ ID NO: 3678026 - DNA, 25 bp, Homo sapien
ctctgacatttgtcctggtctgcca

SEQ ID NO: 3678027 - DNA, 25 bp, Homo sapien
gaatcataattgtgtttcactcctt

SEQ ID NO: 3678028 - DNA, 25 bp, Homo sapien
cactccttcaggtacttcttccttg

SEQ ID NO: 3678029 - DNA, 25 bp, Homo sapien
aattgtgtttcactccttcaggtac

SEQ ID NO: 3678030 - DNA, 25 bp, Homo sapien
ttcttgaatcataattgtgtttcac

SEQ ID NO: 3678031 - DNA, 25 bp, Homo sapien
tcacatgaagatacatctaaaccca

SEQ ID NO: 3678032 - DNA, 25 bp, Homo sapien
aatcacatgaagatacatctaaacc

SEQ ID NO: 3678033 - DNA, 25 bp, Homo sapien
tgaagatacatctaaacccattaaa

SEQ ID NO: 3678034 - DNA, 25 bp, Homo sapien
taaacccattaaaatctcagtttca

SEQ ID NO: 3678035 - DNA, 25 bp, Homo sapien
gaagaactgagtagatgagaatttc

SEQ ID NO: 3678036 - DNA, 25 bp, Homo sapien
cctgagctggagagcgccaatctct

SEQ ID NO: 3678037 - DNA, 25 bp, Homo sapien
ttctggtaaaacttctgcctgagct

SEQ ID NO: 3678038 - DNA, 25 bp, Homo sapien
tcaatttggtgttggaattttctcc

SEQ ID NO: 3678039 - DNA, 25 bp, Homo sapien
agcgttttctgctcataagctggtt

SEQ ID NO: 3678040 - DNA, 25 bp, Homo sapien
gtttgttgagtttcgatttctctcc

SEQ ID NO: 3678041 - DNA, 25 bp, Homo sapien
tctgctcataagctggtttgttgag

SEQ ID NO: 3678042 - DNA, 25 bp, Homo sapien
ctcataagctggtttgttgagtttc

SEQ ID NO: 3678043 - DNA, 25 bp, Homo sapien
gctgccaggattctcattttccact

SEQ ID NO: 3678044 - DNA, 25 bp, Homo sapien
ctgccaggattctcattttccactc

SEQ ID NO: 3678045 - DNA, 25 bp, Homo sapien
tgctgccaggattctcattttccac

SEQ ID NO: 3678046 - DNA, 25 bp, Homo sapien
taagaattgctctcaacatcaacac

SEQ ID NO: 3678047 - DNA, 25 bp, Homo sapien
ttaagaattgctctcaacatcaaca

SEQ ID NO: 3678048 - DNA, 25 bp, Homo sapien
tgactcatgaaacggtcacctttct

SEQ ID NO: 3678049 - DNA, 25 bp, Homo sapien
ctttccacggattcctgccagataa

SEQ ID NO: 3678050 - DNA, 25 bp, Homo sapien
tctgactcatgaaacggtcaccttt

SEQ ID NO: 3678051 - DNA, 25 bp, Homo sapien
catctctaagtcagagacctcatgc

SEQ ID NO: 3678052 - DNA, 25 bp, Homo sapien
cttgacaacagtaagtatactacat

SEQ ID NO: 3678053 - DNA, 25 bp, Homo sapien
tattcatcaatgtcgccatctctct

SEQ ID NO: 3678054 - DNA, 25 bp, Homo sapien
aatgggaagtacgtgtcttgacaac

SEQ ID NO: 3678055 - DNA, 25 bp, Homo sapien
ccaagggatctcttaagatataaat

SEQ ID NO: 3678056 - DNA, 25 bp, Homo sapien
atggaatactcagaacttaggccac

SEQ ID NO: 3678057 - DNA, 25 bp, Homo sapien
aatactcagaacttaggccactggg

SEQ ID NO: 3678058 - DNA, 25 bp, Homo sapien
ggaatactcagaacttaggccactg

SEQ ID NO: 3678059 - DNA, 25 bp, Homo sapien
cagaacttaggccactggggaattt

SEQ ID NO: 3678060 - DNA, 25 bp, Homo sapien
taaaagcacatgaagctctgctcat

SEQ ID NO: 3678061 - DNA, 25 bp, Homo sapien
ctaaaagcacatgaagctctgctca

SEQ ID NO: 3678062 - DNA, 25 bp, Homo sapien
ctgacattctggaccttgggggacg

SEQ ID NO: 3678063 - DNA, 25 bp, Homo sapien
tggcggccgttgtggtgtttgtggt

SEQ ID NO: 3678064 - DNA, 25 bp, Homo sapien
ccttctgacttgtgaggcgagctga

SEQ ID NO: 3678065 - DNA, 25 bp, Homo sapien
acattctggaccttgggggacggca

SEQ ID NO: 3678066 - DNA, 25 bp, Homo sapien
ctagtttcgccttactcttccatct

SEQ ID NO: 3678067 - DNA, 25 bp, Homo sapien
ttctatacccgtagaaagtgatata

SEQ ID NO: 3678068 - DNA, 25 bp, Homo sapien
tctacttctatacccgtagaaagtg

SEQ ID NO: 3678069 - DNA, 25 bp, Homo sapien
cttctatacccgtagaaagtgatat

SEQ ID NO: 3678070 - DNA, 25 bp, Homo sapien
tacttctatacccgtagaaagtgat

SEQ ID NO: 3678071 - DNA, 25 bp, Homo sapien
cttgttccgataatctttcaggcat

SEQ ID NO: 3678072 - DNA, 25 bp, Homo sapien
ctctcagtgactgttgtgaatacct

SEQ ID NO: 3678073 - DNA, 25 bp, Homo sapien
tagggtgtggaaaactctcagtgac

SEQ ID NO: 3678074 - DNA, 25 bp, Homo sapien
ggacttgaaactgttgaagcctcga

SEQ ID NO: 3678075 - DNA, 25 bp, Homo sapien
tgaatacctgtagggacttgaaact

SEQ ID NO: 3678076 - DNA, 25 bp, Homo sapien
tcggaggcagccgttacgttcttgg

SEQ ID NO: 3678077 - DNA, 25 bp, Homo sapien
ggcagccgttacgttcttggagtca

SEQ ID NO: 3678078 - DNA, 25 bp, Homo sapien
cagccgttacgttcttggagtcaaa

SEQ ID NO: 3678079 - DNA, 25 bp, Homo sapien
gaggcagccgttacgttcttggagt

SEQ ID NO: 3678080 - DNA, 25 bp, Homo sapien
gacgaaggctgaacagtttatggac

SEQ ID NO: 3678081 - DNA, 25 bp, Homo sapien
ttacttgctagaaattgatctacaa

SEQ ID NO: 3678082 - DNA, 25 bp, Homo sapien
ctgaacagtttatggacacagccat

SEQ ID NO: 3678083 - DNA, 25 bp, Homo sapien
gatctacaaagacgaaggctgaaca

SEQ ID NO: 3678084 - DNA, 25 bp, Homo sapien
ctccagtgggcagctgttccgttca

SEQ ID NO: 3678085 - DNA, 25 bp, Homo sapien
tccagtgggcagctgttccgttcat

SEQ ID NO: 3678086 - DNA, 25 bp, Homo sapien
gaagctggacataggtggatagtaa

SEQ ID NO: 3678087 - DNA, 25 bp, Homo sapien
gaaatgtgtgttccaagatcatgta

SEQ ID NO: 3678088 - DNA, 25 bp, Homo sapien
gaccacctcgaatacttgaaatgtg

SEQ ID NO: 3678089 - DNA, 25 bp, Homo sapien
gatggagaggttcaatgtgctctgc

SEQ ID NO: 3678090 - DNA, 25 bp, Homo sapien
atattgatcttctagaataccactt

SEQ ID NO: 3678091 - DNA, 25 bp, Homo sapien
tattgatcttctagaataccacttt

SEQ ID NO: 3678092 - DNA, 25 bp, Homo sapien
ctctagacacctctccttcaccaga

SEQ ID NO: 3678093 - DNA, 25 bp, Homo sapien
acacctctccttcaccagagttcat

SEQ ID NO: 3678094 - DNA, 25 bp, Homo sapien
tctagacacctctccttcaccagag

SEQ ID NO: 3678095 - DNA, 25 bp, Homo sapien
tagacacctctccttcaccagagtt

SEQ ID NO: 3678096 - DNA, 25 bp, Homo sapien
ccggatgaaatgtgcatacagataa

SEQ ID NO: 3678097 - DNA, 25 bp, Homo sapien
tgtggtgaacaagtgacgatatctg

SEQ ID NO: 3678098 - DNA, 25 bp, Homo sapien
tgagaaccggatgaaatgtgcatac

SEQ ID NO: 3678099 - DNA, 25 bp, Homo sapien
gacgatatctgagaaccggatgaaa

SEQ ID NO: 3678100 - DNA, 25 bp, Homo sapien
tgacttgggcatgagttcatgtggg

SEQ ID NO: 3678101 - DNA, 25 bp, Homo sapien
tgcacatatgggtgtgactggagag

SEQ ID NO: 3678102 - DNA, 25 bp, Homo sapien
tatagccacatataagaccaccagg

SEQ ID NO: 3678103 - DNA, 25 bp, Homo sapien
caggccagacaataggcacttttcc

SEQ ID NO: 3678104 - DNA, 25 bp, Homo sapien
ctggcgtgcctggtgaattccctga

SEQ ID NO: 3678105 - DNA, 25 bp, Homo sapien
tgcctggtgaattccctgaaaagca

SEQ ID NO: 3678106 - DNA, 25 bp, Homo sapien
gcagggaagggatgtgctcaaggct

SEQ ID NO: 3678107 - DNA, 25 bp, Homo sapien
atgtgctcaaggcttgtgccgtcat

SEQ ID NO: 3678108 - DNA, 25 bp, Homo sapien
agggaatgactgctcgcatctcttc

SEQ ID NO: 3678109 - DNA, 25 bp, Homo sapien
ctagggctaataagttcctgtttct

SEQ ID NO: 3678110 - DNA, 25 bp, Homo sapien
cagttctttaggtttgaatgactag

SEQ ID NO: 3678111 - DNA, 25 bp, Homo sapien
cagcaagatattcttgcctctcatc

SEQ ID NO: 3678112 - DNA, 25 bp, Homo sapien
gaaatcaggttgtttagcatcaaac

SEQ ID NO: 3678113 - DNA, 25 bp, Homo sapien
ttgtttagcatcaaacttaatcagc

SEQ ID NO: 3678114 - DNA, 25 bp, Homo sapien
tgatgatgaaatcaggttgtttagc

SEQ ID NO: 3678115 - DNA, 25 bp, Homo sapien
caggttgtttagcatcaaacttaat

SEQ ID NO: 3678116 - DNA, 25 bp, Homo sapien
agtgtcaggccagtgtgcacccttg

SEQ ID NO: 3678117 - DNA, 25 bp, Homo sapien
tcaggccagtgtgcacccttgctga

SEQ ID NO: 3678118 - DNA, 25 bp, Homo sapien
gcagtgtcaggccagtgtgcaccct

SEQ ID NO: 3678119 - DNA, 25 bp, Homo sapien
ggccagtgtgcacccttgctgagtg

SEQ ID NO: 3678120 - DNA, 25 bp, Homo sapien
caggagagatgaatggcggccttgc

SEQ ID NO: 3678121 - DNA, 25 bp, Homo sapien
ggcaggagagatgaatggcggcctt

SEQ ID NO: 3678122 - DNA, 25 bp, Homo sapien
gagatgaatggcggccttgcaaaca

SEQ ID NO: 3678123 - DNA, 25 bp, Homo sapien
gaatggcggccttgcaaacacctgt

SEQ ID NO: 3678124 - DNA, 25 bp, Homo sapien
atttccccaggccgtgccaaggcag

SEQ ID NO: 3678125 - DNA, 25 bp, Homo sapien
cccgcagggagagcgatgagatgca

SEQ ID NO: 3678126 - DNA, 25 bp, Homo sapien
aacccctcctggtgacctgatggtg

SEQ ID NO: 3678127 - DNA, 25 bp, Homo sapien
cagccggaattccaggcagcggcaa

SEQ ID NO: 3678128 - DNA, 25 bp, Homo sapien
tcttactgacttcaatcaacttcag

SEQ ID NO: 3678129 - DNA, 25 bp, Homo sapien
actcttactgacttcaatcaacttc

SEQ ID NO: 3678130 - DNA, 25 bp, Homo sapien
ttactgacttcaatcaacttcagcc

SEQ ID NO: 3678131 - DNA, 25 bp, Homo sapien
caactcttactgacttcaatcaact

SEQ ID NO: 3678132 - DNA, 25 bp, Homo sapien
tcatcaccgagattggttgaagaca

SEQ ID NO: 3678133 - DNA, 25 bp, Homo sapien
gaaactggcagattatttaaccctg

SEQ ID NO: 3678134 - DNA, 25 bp, Homo sapien
gagcgtgcatgtgttcggaatccaa

SEQ ID NO: 3678135 - DNA, 25 bp, Homo sapien
caaggaacatcagtgttcagtgcct

SEQ ID NO: 3678136 - DNA, 25 bp, Homo sapien
gaaaagttaaataaactcacatcca

SEQ ID NO: 3678137 - DNA, 25 bp, Homo sapien
tttcaaaacacactgaaggtataga

SEQ ID NO: 3678138 - DNA, 25 bp, Homo sapien
aataaactcacatccaaccaattgg

SEQ ID NO: 3678139 - DNA, 25 bp, Homo sapien
aactcacatccaaccaattggccat

SEQ ID NO: 3678140 - DNA, 25 bp, Homo sapien
tgagggctgcttttcgcatgggcta

SEQ ID NO: 3678141 - DNA, 25 bp, Homo sapien
cgtagcttcaactcgtccacatcct

SEQ ID NO: 3678142 - DNA, 25 bp, Homo sapien
tgggctactgcagtctgtcatgctt

SEQ ID NO: 3678143 - DNA, 25 bp, Homo sapien
ggaagttttattctccgtagcttca

SEQ ID NO: 3678144 - DNA, 25 bp, Homo sapien
tgttaagcatgtgcaaagagttgtg

SEQ ID NO: 3678145 - DNA, 25 bp, Homo sapien
taagcatgtgcaaagagttgtgaca

SEQ ID NO: 3678146 - DNA, 25 bp, Homo sapien
aagagtgttaagcatgtgcaaagag

SEQ ID NO: 3678147 - DNA, 25 bp, Homo sapien
gagtgttaagcatgtgcaaagagtt

SEQ ID NO: 3678148 - DNA, 25 bp, Homo sapien
gattggtactcttggttcatgccag

SEQ ID NO: 3678149 - DNA, 25 bp, Homo sapien
tcatgccaggatcatatgggcttct

SEQ ID NO: 3678150 - DNA, 25 bp, Homo sapien
tatgggcttctgagttgttcaaaag

SEQ ID NO: 3678151 - DNA, 25 bp, Homo sapien
ttgttctacttggatagattggtac

SEQ ID NO: 3678152 - DNA, 25 bp, Homo sapien
aagagttctcaagctagtccttggg

SEQ ID NO: 3678153 - DNA, 25 bp, Homo sapien
gatatggaactcatggatgcatagg

SEQ ID NO: 3678154 - DNA, 25 bp, Homo sapien
gatgcatagggctaactatacttaa

SEQ ID NO: 3678155 - DNA, 25 bp, Homo sapien
acttaagagatatgtaaccttgggc

SEQ ID NO: 3678156 - DNA, 25 bp, Homo sapien
tcatttttcaaacaggcgaacactg

SEQ ID NO: 3678157 - DNA, 25 bp, Homo sapien
atttttcaaacaggcgaacactgta

SEQ ID NO: 3678158 - DNA, 25 bp, Homo sapien
tttcaaacaggcgaacactgtaagt

SEQ ID NO: 3678159 - DNA, 25 bp, Homo sapien
caaacaggcgaacactgtaagtgat

SEQ ID NO: 3678160 - DNA, 25 bp, Homo sapien
taattgtctgcctcaacttctcctt

SEQ ID NO: 3678161 - DNA, 25 bp, Homo sapien
tgcttccgtaattgtctgcctcaac

SEQ ID NO: 3678162 - DNA, 25 bp, Homo sapien
tccgtaattgtctgcctcaacttct

SEQ ID NO: 3678163 - DNA, 25 bp, Homo sapien
gcttccgtaattgtctgcctcaact

SEQ ID NO: 3678164 - DNA, 25 bp, Homo sapien
caatacatttccacgtaaatgcttc

SEQ ID NO: 3678165 - DNA, 25 bp, Homo sapien
catttccacgtaaatgcttcagcat

SEQ ID NO: 3678166 - DNA, 25 bp, Homo sapien
tacatttccacgtaaatgcttcagc

SEQ ID NO: 3678167 - DNA, 25 bp, Homo sapien
gaaatcaatacatttccacgtaaat

SEQ ID NO: 3678168 - DNA, 25 bp, Homo sapien
tgcttttcacataacctccttggat

SEQ ID NO: 3678169 - DNA, 25 bp, Homo sapien
tcaggactctgcagtacgttctctt

SEQ ID NO: 3678170 - DNA, 25 bp, Homo sapien
aaaaactcctaactcatcttcctgc

SEQ ID NO: 3678171 - DNA, 25 bp, Homo sapien
tgtatgcgtactttactaaaaactc

SEQ ID NO: 3678172 - DNA, 25 bp, Homo sapien
tatcctggaggtcctcagaagcatc

SEQ ID NO: 3678173 - DNA, 25 bp, Homo sapien
gacggtaacactacaatgaatttct

SEQ ID NO: 3678174 - DNA, 25 bp, Homo sapien
acaaaggattgtcccggttgctcat

SEQ ID NO: 3678175 - DNA, 25 bp, Homo sapien
ttaatatgacggtaacactacaatg

SEQ ID NO: 3678176 - DNA, 25 bp, Homo sapien
tatcctattcccataagatctgatg

SEQ ID NO: 3678177 - DNA, 25 bp, Homo sapien
ccttagggagggctacagctagaaa

SEQ ID NO: 3678178 - DNA, 25 bp, Homo sapien
taagcataataggaagaaaagtgag

SEQ ID NO: 3678179 - DNA, 25 bp, Homo sapien
gggtatggccctcattcctggcttg

SEQ ID NO: 3678180 - DNA, 25 bp, Homo sapien
tgttcctccagtgcattgttgggct

SEQ ID NO: 3678181 - DNA, 25 bp, Homo sapien
cctccagtgcattgttgggctttgg

SEQ ID NO: 3678182 - DNA, 25 bp, Homo sapien
cggctattaccaggtttgttgtgca

SEQ ID NO: 3678183 - DNA, 25 bp, Homo sapien
ctgcggctattaccaggtttgttgt

SEQ ID NO: 3678184 - DNA, 25 bp, Homo sapien
tgctggcaagcagtggttggcctct

SEQ ID NO: 3678185 - DNA, 25 bp, Homo sapien
tctttgaatagcacaggaggtccca

SEQ ID NO: 3678186 - DNA, 25 bp, Homo sapien
ggaggtcccaagttcccagtatcta

SEQ ID NO: 3678187 - DNA, 25 bp, Homo sapien
tgagtatctgggtgaactcagtgac

SEQ ID NO: 3678188 - DNA, 25 bp, Homo sapien
ggagggttcccatcacactaactga

SEQ ID NO: 3678189 - DNA, 25 bp, Homo sapien
ggaaatttcagtacatgctaagcag

SEQ ID NO: 3678190 - DNA, 25 bp, Homo sapien
tgggtacttggatgaccagctgcaa

SEQ ID NO: 3678191 - DNA, 25 bp, Homo sapien
ttgggcaccaagtctctgatgagct

SEQ ID NO: 3678192 - DNA, 25 bp, Homo sapien
ctgtcctaaagtgatgcgtgttgtt

SEQ ID NO: 3678193 - DNA, 25 bp, Homo sapien
aattcaatgctcttggtcctaatgc

SEQ ID NO: 3678194 - DNA, 25 bp, Homo sapien
tgttgttggctctgataccctgctg

SEQ ID NO: 3678195 - DNA, 25 bp, Homo sapien
aatgctgataatcctgcatctctgc

SEQ ID NO: 3678196 - DNA, 25 bp, Homo sapien
tcttggtcacatttgacggtactga

SEQ ID NO: 3678197 - DNA, 25 bp, Homo sapien
ttgcctttgtaaaagggctcctgta

SEQ ID NO: 3678198 - DNA, 25 bp, Homo sapien
cagtgtgctatggttgctgaggaaa

SEQ ID NO: 3678199 - DNA, 25 bp, Homo sapien
gctgattttgttgggcttgcctttg

SEQ ID NO: 3678200 - DNA, 25 bp, Homo sapien
gaagagtgtcctggataagtatctg

SEQ ID NO: 3678201 - DNA, 25 bp, Homo sapien
aagccattaaccacgagcccgctaa

SEQ ID NO: 3678202 - DNA, 25 bp, Homo sapien
gaagtgggacttttaattggcctga

SEQ ID NO: 3678203 - DNA, 25 bp, Homo sapien
tctggagtaccaaggagttgtgaag

SEQ ID NO: 3678204 - DNA, 25 bp, Homo sapien
cacacagccagaccaactgcaaagt

SEQ ID NO: 3678205 - DNA, 25 bp, Homo sapien
ccagaccaactgcaaagtggtgtgc

SEQ ID NO: 3678206 - DNA, 25 bp, Homo sapien
tgtgcaagtgtggacttcagtctgt

SEQ ID NO: 3678207 - DNA, 25 bp, Homo sapien
caaagtggtgtgcaagtgtggactt

SEQ ID NO: 3678208 - DNA, 25 bp, Homo sapien
cttccagtggcgttcaggatgctca

SEQ ID NO: 3678209 - DNA, 25 bp, Homo sapien
ttgcgcaacttgctgggccacatcg

SEQ ID NO: 3678210 - DNA, 25 bp, Homo sapien
ggccacatcgcggatcacattcatg

SEQ ID NO: 3678211 - DNA, 25 bp, Homo sapien
tattgcgcacatagtcagctccctg

SEQ ID NO: 3678212 - DNA, 25 bp, Homo sapien
taaagccatccaagtagttgaggac

SEQ ID NO: 3678213 - DNA, 25 bp, Homo sapien
cacttgagagcgattagtcactgca

SEQ ID NO: 3678214 - DNA, 25 bp, Homo sapien
gtctcttgaaaaatcggtaaagcca

SEQ ID NO: 3678215 - DNA, 25 bp, Homo sapien
catcttacagttttccagacagggc

SEQ ID NO: 3678216 - DNA, 25 bp, Homo sapien
tatgatggtataattcttccctggg

SEQ ID NO: 3678217 - DNA, 25 bp, Homo sapien
aagtgcacagtactctttgtgaagg

SEQ ID NO: 3678218 - DNA, 25 bp, Homo sapien
tcaaagccatgttgcaaactccgag

SEQ ID NO: 3678219 - DNA, 25 bp, Homo sapien
cgatggagataataaggtcaagtcc

SEQ ID NO: 3678220 - DNA, 25 bp, Homo sapien
tcttggtgccatgattcttagactg

SEQ ID NO: 3678221 - DNA, 25 bp, Homo sapien
tggtgccatgattcttagactgggc

SEQ ID NO: 3678222 - DNA, 25 bp, Homo sapien
ttggtgccatgattcttagactggg

SEQ ID NO: 3678223 - DNA, 25 bp, Homo sapien
tgttcttggtgccatgattcttaga

SEQ ID NO: 3678224 - DNA, 25 bp, Homo sapien
gcacatatggctttgttattgtctt

SEQ ID NO: 3678225 - DNA, 25 bp, Homo sapien
aagttgaatctggtattagcacata

SEQ ID NO: 3678226 - DNA, 25 bp, Homo sapien
ctttgtttccttggcggtgtgcacc

SEQ ID NO: 3678227 - DNA, 25 bp, Homo sapien
tcatgttgcagattaagtaagttga

SEQ ID NO: 3678228 - DNA, 25 bp, Homo sapien
cactggttgccaagagattgctgaa

SEQ ID NO: 3678229 - DNA, 25 bp, Homo sapien
gttccctagcaacacaatagatgag

SEQ ID NO: 3678230 - DNA, 25 bp, Homo sapien
gatagattttgctcatgtgttccct

SEQ ID NO: 3678231 - DNA, 25 bp, Homo sapien
tatgcgcgtcacaggaaaatatata

SEQ ID NO: 3678232 - DNA, 25 bp, Homo sapien
gttcattccgatagctatgagacag

SEQ ID NO: 3678233 - DNA, 25 bp, Homo sapien
gtttatcatgttcattccgatagct

SEQ ID NO: 3678234 - DNA, 25 bp, Homo sapien
catgttcattccgatagctatgaga

SEQ ID NO: 3678235 - DNA, 25 bp, Homo sapien
tatcatgttcattccgatagctatg

SEQ ID NO: 3678236 - DNA, 25 bp, Homo sapien
caccaaagcaagactacatctaaaa

SEQ ID NO: 3678237 - DNA, 25 bp, Homo sapien
taagaataattggtcttcctaaaga

SEQ ID NO: 3678238 - DNA, 25 bp, Homo sapien
gggcaccaaagcaagactacatcta

SEQ ID NO: 3678239 - DNA, 25 bp, Homo sapien
ctaagaataattggtcttcctaaag

SEQ ID NO: 3678240 - DNA, 25 bp, Homo sapien
ggaagacctgccttcgaacacatac

SEQ ID NO: 3678241 - DNA, 25 bp, Homo sapien
agcgcaagcccagggaagtaatccc

SEQ ID NO: 3678242 - DNA, 25 bp, Homo sapien
ctgagaatccagatcacagttggag

SEQ ID NO: 3678243 - DNA, 25 bp, Homo sapien
gaacagcctcgtaggtactcccagt

SEQ ID NO: 3678244 - DNA, 25 bp, Homo sapien
ggtcagcaagtacccattaatggaa

SEQ ID NO: 3678245 - DNA, 25 bp, Homo sapien
tacctaaaactggaagatgtgaccc

SEQ ID NO: 3678246 - DNA, 25 bp, Homo sapien
tcatctgagaagattcagcaacagg

SEQ ID NO: 3678247 - DNA, 25 bp, Homo sapien
tgacccataaatttaataagccctg

SEQ ID NO: 3678248 - DNA, 25 bp, Homo sapien
tcttctagagctacgaaaatatttg

SEQ ID NO: 3678249 - DNA, 25 bp, Homo sapien
ggtgttcttctagagctacgaaaat

SEQ ID NO: 3678250 - DNA, 25 bp, Homo sapien
ctagagctacgaaaatatttgccaa

SEQ ID NO: 3678251 - DNA, 25 bp, Homo sapien
tgatggtgttcttctagagctacga

SEQ ID NO: 3678252 - DNA, 25 bp, Homo sapien
gcaacatccagatggcacagttttg

SEQ ID NO: 3678253 - DNA, 25 bp, Homo sapien
tgcaacatccagatggcacagtttt

SEQ ID NO: 3678254 - DNA, 25 bp, Homo sapien
cggcgggcggcagactccgcttcct

SEQ ID NO: 3678255 - DNA, 25 bp, Homo sapien
gctgcgtgcccctctcgcatcaggt

SEQ ID NO: 3678256 - DNA, 25 bp, Homo sapien
gactccgcttcctcaacggctgcgt

SEQ ID NO: 3678257 - DNA, 25 bp, Homo sapien
ttcctcaacggctgcgtgcccctct

SEQ ID NO: 3678258 - DNA, 25 bp, Homo sapien
gagagttgggcagaggagcgcccgc

SEQ ID NO: 3678259 - DNA, 25 bp, Homo sapien
tccgccgagagttgggcagaggagc

SEQ ID NO: 3678260 - DNA, 25 bp, Homo sapien
ccgagagttgggcagaggagcgccc

SEQ ID NO: 3678261 - DNA, 25 bp, Homo sapien
agttgggcagaggagcgcccgcgcc

SEQ ID NO: 3678262 - DNA, 25 bp, Homo sapien
gataccgagctcaaacgggttcgcg

SEQ ID NO: 3678263 - DNA, 25 bp, Homo sapien
caaggcgtgtgcactaggataccga

SEQ ID NO: 3678264 - DNA, 25 bp, Homo sapien
tcgtaggcacgtgtgtgagctcgac

SEQ ID NO: 3678265 - DNA, 25 bp, Homo sapien
gagtaaaggtgccagcggcgtacta

SEQ ID NO: 3678266 - DNA, 25 bp, Homo sapien
tacgctggaactggaagtcagactc

SEQ ID NO: 3678267 - DNA, 25 bp, Homo sapien
ctcgtacgctggaactggaagtcag

SEQ ID NO: 3678268 - DNA, 25 bp, Homo sapien
cgtacgctggaactggaagtcagac

SEQ ID NO: 3678269 - DNA, 25 bp, Homo sapien
cgctggaactggaagtcagactcat

SEQ ID NO: 3678270 - DNA, 25 bp, Homo sapien
aacaagaaaagctagcggcgcggtc

SEQ ID NO: 3678271 - DNA, 25 bp, Homo sapien
gggccgagcgcttgcccttctgcat

SEQ ID NO: 3678272 - DNA, 25 bp, Homo sapien
tttccaggctatgtgacttaaggac

SEQ ID NO: 3678273 - DNA, 25 bp, Homo sapien
ggtaaacgtggactctggtccggca

SEQ ID NO: 3678274 - DNA, 25 bp, Homo sapien
tgaaacatgagaagggcaaacaggt

SEQ ID NO: 3678275 - DNA, 25 bp, Homo sapien
gaagggcaaacaggtttgctgttgt

SEQ ID NO: 3678276 - DNA, 25 bp, Homo sapien
tgagaagggcaaacaggtttgctgt

SEQ ID NO: 3678277 - DNA, 25 bp, Homo sapien
acatgagaagggcaaacaggtttgc

SEQ ID NO: 3678278 - DNA, 25 bp, Homo sapien
gattgcaggaaatcgacgttgtggc

SEQ ID NO: 3678279 - DNA, 25 bp, Homo sapien
ttgcaggaaatcgacgttgtggccc

SEQ ID NO: 3678280 - DNA, 25 bp, Homo sapien
aggattgcaggaaatcgacgttgtg

SEQ ID NO: 3678281 - DNA, 25 bp, Homo sapien
tcaggattgcaggaaatcgacgttg

SEQ ID NO: 3678282 - DNA, 25 bp, Homo sapien
gcctacctactactatattgaggag

SEQ ID NO: 3678283 - DNA, 25 bp, Homo sapien
tatatagtgcttaccactgtcacat

SEQ ID NO: 3678284 - DNA, 25 bp, Homo sapien
ttgagaagagaaccaaacttgtgtg

SEQ ID NO: 3678285 - DNA, 25 bp, Homo sapien
aagttaaatcccctcgacattctct

SEQ ID NO: 3678286 - DNA, 25 bp, Homo sapien
catggagagagaacagcctaagagt

SEQ ID NO: 3678287 - DNA, 25 bp, Homo sapien
catactggtatcaagagctatctca

SEQ ID NO: 3678288 - DNA, 25 bp, Homo sapien
tcataagagactggacgagtaggca

SEQ ID NO: 3678289 - DNA, 25 bp, Homo sapien
tacgaacaacagatatcactgaggc

SEQ ID NO: 3678290 - DNA, 25 bp, Homo sapien
tattcaataatgttggttgagtcaa

SEQ ID NO: 3678291 - DNA, 25 bp, Homo sapien
ccctcccttagatctcccataggct

SEQ ID NO: 3678292 - DNA, 25 bp, Homo sapien
gctggcaggccgtgcctggtaattt

SEQ ID NO: 3678293 - DNA, 25 bp, Homo sapien
tcaaggcctggcatataagtgatat

SEQ ID NO: 3678294 - DNA, 25 bp, Homo sapien
gccatagaatcataatgtttctcct

SEQ ID NO: 3678295 - DNA, 25 bp, Homo sapien
aactgccatagaatcataatgtttc

SEQ ID NO: 3678296 - DNA, 25 bp, Homo sapien
atcaactgccatagaatcataatgt

SEQ ID NO: 3678297 - DNA, 25 bp, Homo sapien
tgccatagaatcataatgtttctcc

SEQ ID NO: 3678298 - DNA, 25 bp, Homo sapien
ttagccccttttctgctctaaactg

SEQ ID NO: 3678299 - DNA, 25 bp, Homo sapien
tctgctctaaactgccctctccagc

SEQ ID NO: 3678300 - DNA, 25 bp, Homo sapien
cttagccccttttctgctctaaact

SEQ ID NO: 3678301 - DNA, 25 bp, Homo sapien
ttttctgctctaaactgccctctcc

SEQ ID NO: 3678302 - DNA, 25 bp, Homo sapien
taacttagaaatctctctcggcttc

SEQ ID NO: 3678303 - DNA, 25 bp, Homo sapien
tttaacttagaaatctctctcggct

SEQ ID NO: 3678304 - DNA, 25 bp, Homo sapien
ttaacttagaaatctctctcggctt

SEQ ID NO: 3678305 - DNA, 25 bp, Homo sapien
aacttagaaatctctctcggcttct

SEQ ID NO: 3678306 - DNA, 25 bp, Homo sapien
agatacccaagactagctgccccat

SEQ ID NO: 3678307 - DNA, 25 bp, Homo sapien
actgactccagatacccaagactag

SEQ ID NO: 3678308 - DNA, 25 bp, Homo sapien
gaaactgactccagatacccaagac

SEQ ID NO: 3678309 - DNA, 25 bp, Homo sapien
actccagatacccaagactagctgc

SEQ ID NO: 3678310 - DNA, 25 bp, Homo sapien
tgacatggaaaaggggtaacaccaa

SEQ ID NO: 3678311 - DNA, 25 bp, Homo sapien
ctgacatggaaaaggggtaacacca

SEQ ID NO: 3678312 - DNA, 25 bp, Homo sapien
tggattttgtgatggtgggagacag

SEQ ID NO: 3678313 - DNA, 25 bp, Homo sapien
ttgtgatggtgggagacaggacaga

SEQ ID NO: 3678314 - DNA, 25 bp, Homo sapien
ctcccttggattttgtgatggtggg

SEQ ID NO: 3678315 - DNA, 25 bp, Homo sapien
attttgtgatggtgggagacaggac

SEQ ID NO: 3678316 - DNA, 25 bp, Homo sapien
gggtcaggataaacacactggactc

SEQ ID NO: 3678317 - DNA, 25 bp, Homo sapien
tgaacaggggtcaggataaacacac

SEQ ID NO: 3678318 - DNA, 25 bp, Homo sapien
aagaagttgaacaggggtcaggata

SEQ ID NO: 3678319 - DNA, 25 bp, Homo sapien
gataaacacactggactccttccca

SEQ ID NO: 3678320 - DNA, 25 bp, Homo sapien
taatctggttagcctcagcctcaga

SEQ ID NO: 3678321 - DNA, 25 bp, Homo sapien
cagctccaggcaatgttggagagaa

SEQ ID NO: 3678322 - DNA, 25 bp, Homo sapien
gaaagctgtaagagaaatgataccc

SEQ ID NO: 3678323 - DNA, 25 bp, Homo sapien
aaactgactaacaagccatctagtt

SEQ ID NO: 3678324 - DNA, 25 bp, Homo sapien
gaatatatgtagcaggattccaggt

SEQ ID NO: 3678325 - DNA, 25 bp, Homo sapien
aaatcagaatgtactaacttcatat

SEQ ID NO: 3678326 - DNA, 25 bp, Homo sapien
gacctccaacaacggcagtacacag

SEQ ID NO: 3678327 - DNA, 25 bp, Homo sapien
tttggacctccaacaacggcagtac

SEQ ID NO: 3678328 - DNA, 25 bp, Homo sapien
cccagcagcaatggtaactgctgcg

SEQ ID NO: 3678329 - DNA, 25 bp, Homo sapien
caatggtaactgctgcgatccattc

SEQ ID NO: 3678330 - DNA, 25 bp, Homo sapien
tcattctgtcgctggaacgcagtgt

SEQ ID NO: 3678331 - DNA, 25 bp, Homo sapien
ccacgccctgctgaaatccatttta

SEQ ID NO: 3678332 - DNA, 25 bp, Homo sapien
gcaatcacagcgtgatgcaatcaca

SEQ ID NO: 3678333 - DNA, 25 bp, Homo sapien
tgaatgctaagagtgatagtacagt

SEQ ID NO: 3678334 - DNA, 25 bp, Homo sapien
cagggaaaggaacctagcaatacta

SEQ ID NO: 3678335 - DNA, 25 bp, Homo sapien
ggaaaggaacctagcaatactacat

SEQ ID NO: 3678336 - DNA, 25 bp, Homo sapien
tgcagggaaaggaacctagcaatac

SEQ ID NO: 3678337 - DNA, 25 bp, Homo sapien
gggaaaggaacctagcaatactaca

SEQ ID NO: 3678338 - DNA, 25 bp, Homo sapien
gtttgaactgcctcctaggtggccg

SEQ ID NO: 3678339 - DNA, 25 bp, Homo sapien
gatgttaactggtaagactttcctc

SEQ ID NO: 3678340 - DNA, 25 bp, Homo sapien
taggtggccgtcatacaactcagca

SEQ ID NO: 3678341 - DNA, 25 bp, Homo sapien
caactcagcaagtgatgtaaccaac

SEQ ID NO: 3678342 - DNA, 25 bp, Homo sapien
gactgtctttatgtggattggccaa

SEQ ID NO: 3678343 - DNA, 25 bp, Homo sapien
tgctttggttgagaacgaaaacgaa

SEQ ID NO: 3678344 - DNA, 25 bp, Homo sapien
ttctaagccattaacaggatggagg

SEQ ID NO: 3678345 - DNA, 25 bp, Homo sapien
ggatcaagcctactaccaacgacaa

SEQ ID NO: 3678346 - DNA, 25 bp, Homo sapien
ttcaaatacaatgtaggaagtacag

SEQ ID NO: 3678347 - DNA, 25 bp, Homo sapien
ggctgttacattctcaaagtgttgg

SEQ ID NO: 3678348 - DNA, 25 bp, Homo sapien
tattctaagatgtcagcgtttgttt

SEQ ID NO: 3678349 - DNA, 25 bp, Homo sapien
aattcagttcgtgtagtattgatac

SEQ ID NO: 3678350 - DNA, 25 bp, Homo sapien
tctcatcacccaattctgcctaaaa

SEQ ID NO: 3678351 - DNA, 25 bp, Homo sapien
taaattaaatccatgcaggcaacat

SEQ ID NO: 3678352 - DNA, 25 bp, Homo sapien
tattagaaactaacattttctcaaa

SEQ ID NO: 3678353 - DNA, 25 bp, Homo sapien
gattttacagtgagcataaaagttt

SEQ ID NO: 3678354 - DNA, 25 bp, Homo sapien
tgttgcttcagcattactggaggct

SEQ ID NO: 3678355 - DNA, 25 bp, Homo sapien
ttgcaaacgctgttctaagatcctg

SEQ ID NO: 3678356 - DNA, 25 bp, Homo sapien
cgttgatcggcctactacgctggga

SEQ ID NO: 3678357 - DNA, 25 bp, Homo sapien
catagtgttttgcagagtgtggtcc

SEQ ID NO: 3678358 - DNA, 25 bp, Homo sapien
agaatgaatgtgaaacatctaatct

SEQ ID NO: 3678359 - DNA, 25 bp, Homo sapien
ggaagagaaagaatgaatgtgaaac

SEQ ID NO: 3678360 - DNA, 25 bp, Homo sapien
gagaaagaatgaatgtgaaacatct

SEQ ID NO: 3678361 - DNA, 25 bp, Homo sapien
gaaagaatgaatgtgaaacatctaa

SEQ ID NO: 3678362 - DNA, 25 bp, Homo sapien
tctcttcgttatgttttgtgtgagc

SEQ ID NO: 3678363 - DNA, 25 bp, Homo sapien
cttcgttatgttttgtgtgagcccc

SEQ ID NO: 3678364 - DNA, 25 bp, Homo sapien
tgtgagccccatcacagaatgggaa

SEQ ID NO: 3678365 - DNA, 25 bp, Homo sapien
attgtctccagtctcttcgttatgt

SEQ ID NO: 3678366 - DNA, 25 bp, Homo sapien
agtttcttttttcttgatgatcaga

SEQ ID NO: 3678367 - DNA, 25 bp, Homo sapien
ttttttcttgatgatcagagggccc

SEQ ID NO: 3678368 - DNA, 25 bp, Homo sapien
tttcttttttcttgatgatcagagg

SEQ ID NO: 3678369 - DNA, 25 bp, Homo sapien
tcttttttcttgatgatcagagggc

SEQ ID NO: 3678370 - DNA, 25 bp, Homo sapien
cagcgaaggtgaatcagacagaggt

SEQ ID NO: 3678371 - DNA, 25 bp, Homo sapien
taacttcacgacaagctgatttgca

SEQ ID NO: 3678372 - DNA, 25 bp, Homo sapien
caatcaggtaacttcacgacaagct

SEQ ID NO: 3678373 - DNA, 25 bp, Homo sapien
cacatttagaatccagcgaaggtga

SEQ ID NO: 3678374 - DNA, 25 bp, Homo sapien
tgtgcaccacgatgtttcaacaaga

SEQ ID NO: 3678375 - DNA, 25 bp, Homo sapien
taaggtacaactctatatgtcagta

SEQ ID NO: 3678376 - DNA, 25 bp, Homo sapien
gacaaatgccataaatgtgaaagct

SEQ ID NO: 3678377 - DNA, 25 bp, Homo sapien
taaagaaatggatccttacaagacc

SEQ ID NO: 3678378 - DNA, 25 bp, Homo sapien
gaaaatcaaggctacaacaggtctt

SEQ ID NO: 3678379 - DNA, 25 bp, Homo sapien
tctcagtgtcattaccaatgtcaag

SEQ ID NO: 3678380 - DNA, 25 bp, Homo sapien
tgtagctgaatcacatcctatttag

SEQ ID NO: 3678381 - DNA, 25 bp, Homo sapien
gataaatatgaggaagttaccaccc

SEQ ID NO: 3678382 - DNA, 25 bp, Homo sapien
taactaaattttcactattggctcc

SEQ ID NO: 3678383 - DNA, 25 bp, Homo sapien
taatggatccatcttcattaaatat

SEQ ID NO: 3678384 - DNA, 25 bp, Homo sapien
taaatctaatatcacctttaactaa

SEQ ID NO: 3678385 - DNA, 25 bp, Homo sapien
ccagaattctggaacattagatttt

SEQ ID NO: 3678386 - DNA, 25 bp, Homo sapien
gaatgcaatgtttctgctcggagtc

SEQ ID NO: 3678387 - DNA, 25 bp, Homo sapien
caaaatcctcagttcaagtgcttac

SEQ ID NO: 3678388 - DNA, 25 bp, Homo sapien
aagccatgtgcttgattagctagag

SEQ ID NO: 3678389 - DNA, 25 bp, Homo sapien
ggcttagtgatcaaaagacttgaca

SEQ ID NO: 3678390 - DNA, 25 bp, Homo sapien
gaaatttgtgattgactactactga

SEQ ID NO: 3678391 - DNA, 25 bp, Homo sapien
tgtccaagttagttacatgggcttc

SEQ ID NO: 3678392 - DNA, 25 bp, Homo sapien
tgtgacttaaagacatgtccaagtt

SEQ ID NO: 3678393 - DNA, 25 bp, Homo sapien
ttacataggatatgctgctgtcagg

SEQ ID NO: 3678394 - DNA, 25 bp, Homo sapien
tgtcttgcctcaacgaaatgaaaag

SEQ ID NO: 3678395 - DNA, 25 bp, Homo sapien
gcttagctagaacagtaattgcaca

SEQ ID NO: 3678396 - DNA, 25 bp, Homo sapien
tctgttaagttagaaggatgtccct

SEQ ID NO: 3678397 - DNA, 25 bp, Homo sapien
tattaacctaaccacactcactttg

SEQ ID NO: 3678398 - DNA, 25 bp, Homo sapien
gttcagggatgtaagagctaacacc

SEQ ID NO: 3678399 - DNA, 25 bp, Homo sapien
tactgttggcctagaatatgggaac

SEQ ID NO: 3678400 - DNA, 25 bp, Homo sapien
gatgttggcttagtggttcccagac

SEQ ID NO: 3678401 - DNA, 25 bp, Homo sapien
tagggatcaacattgggctgccacc

SEQ ID NO: 3678402 - DNA, 25 bp, Homo sapien
ggtagactgcattggaaagatgaag

SEQ ID NO: 3678403 - DNA, 25 bp, Homo sapien
tcaaggaaaacacatagcattattg

SEQ ID NO: 3678404 - DNA, 25 bp, Homo sapien
tatagaaggttcatgtgaaggctac

SEQ ID NO: 3678405 - DNA, 25 bp, Homo sapien
ttaaaagagaaagcggtgaggttgc

SEQ ID NO: 3678406 - DNA, 25 bp, Homo sapien
caatcatactagcttctgtgctaga

SEQ ID NO: 3678407 - DNA, 25 bp, Homo sapien
ctgtgctagatgcagcttccctgtg

SEQ ID NO: 3678408 - DNA, 25 bp, Homo sapien
aagcagtaactagcaatggaaagcc

SEQ ID NO: 3678409 - DNA, 25 bp, Homo sapien
gggtcaggctgaaagcagtaactag

SEQ ID NO: 3678410 - DNA, 25 bp, Homo sapien
ccagatgccaaaagcgtaagggagt

SEQ ID NO: 3678411 - DNA, 25 bp, Homo sapien
taaactgctgcaagtgaccgaactt

SEQ ID NO: 3678412 - DNA, 25 bp, Homo sapien
cccatgttagggacggtaatctgct

SEQ ID NO: 3678413 - DNA, 25 bp, Homo sapien
gaattccatgattgttgtccccaca

SEQ ID NO: 3678414 - DNA, 25 bp, Homo sapien
tgggacaaacacaacttgcctatga

SEQ ID NO: 3678415 - DNA, 25 bp, Homo sapien
tgagactacagtcccatgttaccag

SEQ ID NO: 3678416 - DNA, 25 bp, Homo sapien
tgagcatgagtccaacagctttcag

SEQ ID NO: 3678417 - DNA, 25 bp, Homo sapien
cacacaaagggaatccgtctccttg

SEQ ID NO: 3678418 - DNA, 25 bp, Homo sapien
gatcacccaccgcgttccagcctgg

SEQ ID NO: 3678419 - DNA, 25 bp, Homo sapien
atcacccaccgcgttccagcctggc

SEQ ID NO: 3678420 - DNA, 25 bp, Homo sapien
cacccaccgcgttccagcctggctg

SEQ ID NO: 3678421 - DNA, 25 bp, Homo sapien
tcacccaccgcgttccagcctggct

SEQ ID NO: 3678422 - DNA, 25 bp, Homo sapien
aaggtcaaatttgatgaggtcattg

SEQ ID NO: 3678423 - DNA, 25 bp, Homo sapien
tgggcttttatttgtccaagggctc

SEQ ID NO: 3678424 - DNA, 25 bp, Homo sapien
tccaagggctccatccattggtgtc

SEQ ID NO: 3678425 - DNA, 25 bp, Homo sapien
ttatttgtccaagggctccatccat

SEQ ID NO: 3678426 - DNA, 25 bp, Homo sapien
tgagcctgtccatgttgtgtgtctg

SEQ ID NO: 3678427 - DNA, 25 bp, Homo sapien
tggcagctaggctggctccgcgcgg

SEQ ID NO: 3678428 - DNA, 25 bp, Homo sapien
ttagccgctccctggctcgctccgg

SEQ ID NO: 3678429 - DNA, 25 bp, Homo sapien
gagtgtgcgcgagtgtgcgggcggg

SEQ ID NO: 3678430 - DNA, 25 bp, Homo sapien
tcgtcgcgggttgggctcgctggca

SEQ ID NO: 3678431 - DNA, 25 bp, Homo sapien
ttgctctccccgcatgtctctcggg

SEQ ID NO: 3678432 - DNA, 25 bp, Homo sapien
ctcgggaccactggccgagtcagcg

SEQ ID NO: 3678433 - DNA, 25 bp, Homo sapien
catgtctctcgggaccactggccga

SEQ ID NO: 3678434 - DNA, 25 bp, Homo sapien
accactggccgagtcagcgtgggca

SEQ ID NO: 3678435 - DNA, 25 bp, Homo sapien
tcctgacttcttggccgcaaatggg

SEQ ID NO: 3678436 - DNA, 25 bp, Homo sapien
gaggccgggtaagcaagaacataaa

SEQ ID NO: 3678437 - DNA, 25 bp, Homo sapien
gacagctccgcggagaaaggctgca

SEQ ID NO: 3678438 - DNA, 25 bp, Homo sapien
cgtgaccgtgaagcacagatttcgg

SEQ ID NO: 3678439 - DNA, 25 bp, Homo sapien
atagctccatagcacagtgccaaag

SEQ ID NO: 3678440 - DNA, 25 bp, Homo sapien
taatatagctccatagcacagtgcc

SEQ ID NO: 3678441 - DNA, 25 bp, Homo sapien
aatatagctccatagcacagtgcca

SEQ ID NO: 3678442 - DNA, 25 bp, Homo sapien
tatagctccatagcacagtgccaaa

SEQ ID NO: 3678443 - DNA, 25 bp, Homo sapien
cattaaacagtccatgcaagcggct

SEQ ID NO: 3678444 - DNA, 25 bp, Homo sapien
ccccactggttgtgtgtaaaggaca

SEQ ID NO: 3678445 - DNA, 25 bp, Homo sapien
tagatataatacataccccactggt

SEQ ID NO: 3678446 - DNA, 25 bp, Homo sapien
atttcatgggcttacagttcaggcc

SEQ ID NO: 3678447 - DNA, 25 bp, Homo sapien
tatttcggtttcatttccagtgact

SEQ ID NO: 3678448 - DNA, 25 bp, Homo sapien
aataagcttagaacaagtcaaccct

SEQ ID NO: 3678449 - DNA, 25 bp, Homo sapien
ttcattatagaagcacactgtgtga

SEQ ID NO: 3678450 - DNA, 25 bp, Homo sapien
gactagtaataaatctgtatatgaa

SEQ ID NO: 3678451 - DNA, 25 bp, Homo sapien
caattaaatccagtgtgggatccca

SEQ ID NO: 3678452 - DNA, 25 bp, Homo sapien
catagaaattactgccctggtagct

SEQ ID NO: 3678453 - DNA, 25 bp, Homo sapien
tctctgggagatactactgggttgc

SEQ ID NO: 3678454 - DNA, 25 bp, Homo sapien
cacagattggaggatagctactaag

SEQ ID NO: 3678455 - DNA, 25 bp, Homo sapien
gatgacagacaaaatcaaggatcac

SEQ ID NO: 3678456 - DNA, 25 bp, Homo sapien
gcaataacggaccaagcaggctgat

SEQ ID NO: 3678457 - DNA, 25 bp, Homo sapien
agtaaactatgattgggcctctgca

SEQ ID NO: 3678458 - DNA, 25 bp, Homo sapien
aatacgtaactgaaactaggatgcg

SEQ ID NO: 3678459 - DNA, 25 bp, Homo sapien
aaaaggccgagttcttaagctgtca

SEQ ID NO: 3678460 - DNA, 25 bp, Homo sapien
tgcatgcttgagtaactactatagg

SEQ ID NO: 3678461 - DNA, 25 bp, Homo sapien
gacatacttcactgcatgcttgagt

SEQ ID NO: 3678462 - DNA, 25 bp, Homo sapien
tcactgcatgcttgagtaactacta

SEQ ID NO: 3678463 - DNA, 25 bp, Homo sapien
taactactatagggcggaactggga

SEQ ID NO: 3678464 - DNA, 25 bp, Homo sapien
cacttctttagccacagtttgggag

SEQ ID NO: 3678465 - DNA, 25 bp, Homo sapien
taatagatctcactctttggccttg

SEQ ID NO: 3678466 - DNA, 25 bp, Homo sapien
ggcaggaaacagacaaccatacaga

SEQ ID NO: 3678467 - DNA, 25 bp, Homo sapien
tctgaagggcctatctatcacagga

SEQ ID NO: 3678468 - DNA, 25 bp, Homo sapien
ggacacagctttagagttcaccccg

SEQ ID NO: 3678469 - DNA, 25 bp, Homo sapien
gacacagctttagagttcaccccgc

SEQ ID NO: 3678470 - DNA, 25 bp, Homo sapien
agctttagagttcaccccgcccctg

SEQ ID NO: 3678471 - DNA, 25 bp, Homo sapien
cacagctttagagttcaccccgccc

SEQ ID NO: 3678472 - DNA, 25 bp, Homo sapien
taaacgagcagcagtcaggccatgt

SEQ ID NO: 3678473 - DNA, 25 bp, Homo sapien
cagtcaggccatgttttgaaactta

SEQ ID NO: 3678474 - DNA, 25 bp, Homo sapien
acccagctcatttaaggacaacttg

SEQ ID NO: 3678475 - DNA, 25 bp, Homo sapien
ttgaaatgggaaataaacgagcagc

SEQ ID NO: 3678476 - DNA, 25 bp, Homo sapien
cagtgagcaggtggatcgcgctgta

SEQ ID NO: 3678477 - DNA, 25 bp, Homo sapien
gaacagtgagcaggtggatcgcgct

SEQ ID NO: 3678478 - DNA, 25 bp, Homo sapien
aggtggatcgcgctgtagatcactc

SEQ ID NO: 3678479 - DNA, 25 bp, Homo sapien
gatcgcgctgtagatcactcaattc

SEQ ID NO: 3678480 - DNA, 25 bp, Homo sapien
ataatagtggcttgccagtggaaca

SEQ ID NO: 3678481 - DNA, 25 bp, Homo sapien
aggccccataatagtggcttgccag

SEQ ID NO: 3678482 - DNA, 25 bp, Homo sapien
gccccataatagtggcttgccagtg

SEQ ID NO: 3678483 - DNA, 25 bp, Homo sapien
ccataatagtggcttgccagtggaa

SEQ ID NO: 3678484 - DNA, 25 bp, Homo sapien
gaagactccaccttgatatgcgcta

SEQ ID NO: 3678485 - DNA, 25 bp, Homo sapien
taaaaggataatctgtcggaaaatg

SEQ ID NO: 3678486 - DNA, 25 bp, Homo sapien
ctccaccttgatatgcgctatcagg

SEQ ID NO: 3678487 - DNA, 25 bp, Homo sapien
cggaaaatgtacagtgagaaagaag

SEQ ID NO: 3678488 - DNA, 25 bp, Homo sapien
tagccggtatgactggttgagcagc

SEQ ID NO: 3678489 - DNA, 25 bp, Homo sapien
tgctctagggtaaaatatcctcaac

SEQ ID NO: 3678490 - DNA, 25 bp, Homo sapien
aaaacagaaccaatttgctctaggg

SEQ ID NO: 3678491 - DNA, 25 bp, Homo sapien
taaataagtctctagtagccggtat

SEQ ID NO: 3678492 - DNA, 25 bp, Homo sapien
agacaaatacttccattactgttta

SEQ ID NO: 3678493 - DNA, 25 bp, Homo sapien
gagacaaatacttccattactgttt

SEQ ID NO: 3678494 - DNA, 25 bp, Homo sapien
acttccattactgtttatgtttgga

SEQ ID NO: 3678495 - DNA, 25 bp, Homo sapien
atacttccattactgtttatgtttg

SEQ ID NO: 3678496 - DNA, 25 bp, Homo sapien
cttttgatacagtcagagctggtga

SEQ ID NO: 3678497 - DNA, 25 bp, Homo sapien
tttgatacagtcagagctggtgacc

SEQ ID NO: 3678498 - DNA, 25 bp, Homo sapien
tgatacagtcagagctggtgaccat

SEQ ID NO: 3678499 - DNA, 25 bp, Homo sapien
ttgatacagtcagagctggtgacca

SEQ ID NO: 3678500 - DNA, 25 bp, Homo sapien
tactgtgctcatacactcttttgct

SEQ ID NO: 3678501 - DNA, 25 bp, Homo sapien
cagttaacagtccaaaccattttgg

SEQ ID NO: 3678502 - DNA, 25 bp, Homo sapien
taaacttgagagttctctacagaac

SEQ ID NO: 3678503 - DNA, 25 bp, Homo sapien
tagagctatagtctgtctacaaaga

SEQ ID NO: 3678504 - DNA, 25 bp, Homo sapien
acaaagtagagaacatatggacaat

SEQ ID NO: 3678505 - DNA, 25 bp, Homo sapien
taggatcacaaagtagagaacatat

SEQ ID NO: 3678506 - DNA, 25 bp, Homo sapien
cacaaagtagagaacatatggacaa

SEQ ID NO: 3678507 - DNA, 25 bp, Homo sapien
tgtctgatttatagatttgtgcaat

SEQ ID NO: 3678508 - DNA, 25 bp, Homo sapien
gatttatagatttgtgcaatatctg

SEQ ID NO: 3678509 - DNA, 25 bp, Homo sapien
tatagatttgtgcaatatctggtac

SEQ ID NO: 3678510 - DNA, 25 bp, Homo sapien
tttgtgcaatatctggtactaaggg

SEQ ID NO: 3678511 - DNA, 25 bp, Homo sapien
ccattctcttgcatgtctgttgtat

SEQ ID NO: 3678512 - DNA, 25 bp, Homo sapien
ttctgagtccattctcttgcatgtc

SEQ ID NO: 3678513 - DNA, 25 bp, Homo sapien
tatttctgagtccattctcttgcat

SEQ ID NO: 3678514 - DNA, 25 bp, Homo sapien
tgagtccattctcttgcatgtctgt

SEQ ID NO: 3678515 - DNA, 25 bp, Homo sapien
gacatcttagacaacacatacagta

SEQ ID NO: 3678516 - DNA, 25 bp, Homo sapien
tctcatcacagtcttaagggtattt

SEQ ID NO: 3678517 - DNA, 25 bp, Homo sapien
cttgtaagctgaagatgcagatgtc

SEQ ID NO: 3678518 - DNA, 25 bp, Homo sapien
gacaagggagacacagttaattcac

SEQ ID NO: 3678519 - DNA, 25 bp, Homo sapien
ctaatggtgactaatggcaaacaaa

SEQ ID NO: 3678520 - DNA, 25 bp, Homo sapien
taatcagaagggctacaactgttct

SEQ ID NO: 3678521 - DNA, 25 bp, Homo sapien
gaattaatctagtgactgtgcaggt

SEQ ID NO: 3678522 - DNA, 25 bp, Homo sapien
cactcaaggttgacaagcatgctaa

SEQ ID NO: 3678523 - DNA, 25 bp, Homo sapien
cggtgtccgcccgtgacggtcacaa

SEQ ID NO: 3678524 - DNA, 25 bp, Homo sapien
cccgtgacggtcacaagggctgtac

SEQ ID NO: 3678525 - DNA, 25 bp, Homo sapien
cggtcacaagggctgtacgtaacag

SEQ ID NO: 3678526 - DNA, 25 bp, Homo sapien
ggctgtacgtaacagacagtcctgc

SEQ ID NO: 3678527 - DNA, 25 bp, Homo sapien
gatgaagggaaaccgcaatcctcta

SEQ ID NO: 3678528 - DNA, 25 bp, Homo sapien
gaccctccggcgtgtgttatcatgc

SEQ ID NO: 3678529 - DNA, 25 bp, Homo sapien
gaaatctgctaacatccggtcggta

SEQ ID NO: 3678530 - DNA, 25 bp, Homo sapien
cactagcgaggcactatgggaaatc

SEQ ID NO: 3678531 - DNA, 25 bp, Homo sapien
gtgacccgaccccaatctcggagag

SEQ ID NO: 3678532 - DNA, 25 bp, Homo sapien
cgctccggtggatgaggcagtgacc

SEQ ID NO: 3678533 - DNA, 25 bp, Homo sapien
atgaggcagtgacccgaccccaatc

SEQ ID NO: 3678534 - DNA, 25 bp, Homo sapien
tctcggagagcctcctggcaataca

SEQ ID NO: 3678535 - DNA, 25 bp, Homo sapien
agggcactcagcacgccccacatgc

SEQ ID NO: 3678536 - DNA, 25 bp, Homo sapien
ggagcgcagtcgacttccacagccg

SEQ ID NO: 3678537 - DNA, 25 bp, Homo sapien
acgccccacatgcttcggagaaacg

SEQ ID NO: 3678538 - DNA, 25 bp, Homo sapien
gcgcagtcgacttccacagccggtg

SEQ ID NO: 3678539 - DNA, 25 bp, Homo sapien
gatgaaaaccacctcggtaaataca

SEQ ID NO: 3678540 - DNA, 25 bp, Homo sapien
tgaaaaccacctcggtaaatacaca

SEQ ID NO: 3678541 - DNA, 25 bp, Homo sapien
gttctgagctttaaatatgggtagt

SEQ ID NO: 3678542 - DNA, 25 bp, Homo sapien
gagctttaaatatgggtagttgttc

SEQ ID NO: 3678543 - DNA, 25 bp, Homo sapien
tctgagctttaaatatgggtagttg

SEQ ID NO: 3678544 - DNA, 25 bp, Homo sapien
ctgggttctgagctttaaatatggg

SEQ ID NO: 3678545 - DNA, 25 bp, Homo sapien
tgagaaaagggtatatgccccaaaa

SEQ ID NO: 3678546 - DNA, 25 bp, Homo sapien
ggtatttaactgcttaatggcattt

SEQ ID NO: 3678547 - DNA, 25 bp, Homo sapien
gcatttttattacatgagaaaaggg

SEQ ID NO: 3678548 - DNA, 25 bp, Homo sapien
tttagcactgcaattcaacattggt

SEQ ID NO: 3678549 - DNA, 25 bp, Homo sapien
tgcttccacagaagttgcaacttta

SEQ ID NO: 3678550 - DNA, 25 bp, Homo sapien
atgcttccacagaagttgcaacttt

SEQ ID NO: 3678551 - DNA, 25 bp, Homo sapien
gatgcttccacagaagttgcaactt

SEQ ID NO: 3678552 - DNA, 25 bp, Homo sapien
gcttccacagaagttgcaactttat

SEQ ID NO: 3678553 - DNA, 25 bp, Homo sapien
tcccttccatatttcaagcaaaaca

SEQ ID NO: 3678554 - DNA, 25 bp, Homo sapien
aagctggatgatcaattgcttcaag

SEQ ID NO: 3678555 - DNA, 25 bp, Homo sapien
gctgattactagtttaagaagctgg

SEQ ID NO: 3678556 - DNA, 25 bp, Homo sapien
cacaccaggctgattactagtttaa

SEQ ID NO: 3678557 - DNA, 25 bp, Homo sapien
tttgaatcaggaagttccctccaac

SEQ ID NO: 3678558 - DNA, 25 bp, Homo sapien
ctttgaatcaggaagttccctccaa

SEQ ID NO: 3678559 - DNA, 25 bp, Homo sapien
ttctttatatacctgccactccgcc

SEQ ID NO: 3678560 - DNA, 25 bp, Homo sapien
atatacctgccactccgccctataa

SEQ ID NO: 3678561 - DNA, 25 bp, Homo sapien
gccactccgccctataagcatcttg

SEQ ID NO: 3678562 - DNA, 25 bp, Homo sapien
ctccgccctataagcatcttgatat

SEQ ID NO: 3678563 - DNA, 25 bp, Homo sapien
ttgtcatagctttcctttttaaatg

SEQ ID NO: 3678564 - DNA, 25 bp, Homo sapien
catagctttcctttttaaatgtttg

SEQ ID NO: 3678565 - DNA, 25 bp, Homo sapien
tgtcatagctttcctttttaaatgt

SEQ ID NO: 3678566 - DNA, 25 bp, Homo sapien
cggtgaatcacccttagcttcttgg

SEQ ID NO: 3678567 - DNA, 25 bp, Homo sapien
tataagctgaacgaggtctttttgg

SEQ ID NO: 3678568 - DNA, 25 bp, Homo sapien
gctacataaacgttataagctgaac

SEQ ID NO: 3678569 - DNA, 25 bp, Homo sapien
gcttcttggaatctttcagctacat

SEQ ID NO: 3678570 - DNA, 25 bp, Homo sapien
ttccttttcagagtcagacagattt

SEQ ID NO: 3678571 - DNA, 25 bp, Homo sapien
tttcctttacagtcttcagcttttc

SEQ ID NO: 3678572 - DNA, 25 bp, Homo sapien
tccagttttcctttacagtcttcag

SEQ ID NO: 3678573 - DNA, 25 bp, Homo sapien
ttttcagagtcagacagatttttcc

SEQ ID NO: 3678574 - DNA, 25 bp, Homo sapien
cagatatcctaagtagacacttgag

SEQ ID NO: 3678575 - DNA, 25 bp, Homo sapien
ggttgtcttcacatgaatcaagcct

SEQ ID NO: 3678576 - DNA, 25 bp, Homo sapien
caaggttgtcttcacatgaatcaag

SEQ ID NO: 3678577 - DNA, 25 bp, Homo sapien
cacttgagactaacaaccgtaatac

SEQ ID NO: 3678578 - DNA, 25 bp, Homo sapien
gataacgagtttcgtcctctttagc

SEQ ID NO: 3678579 - DNA, 25 bp, Homo sapien
ttcgtcctctttagcatgctgaata

SEQ ID NO: 3678580 - DNA, 25 bp, Homo sapien
tttcattatgataacgagtttcgtc

SEQ ID NO: 3678581 - DNA, 25 bp, Homo sapien
gagtttcgtcctctttagcatgctg

SEQ ID NO: 3678582 - DNA, 25 bp, Homo sapien
tttcgttgtttctttattgtgcgac

SEQ ID NO: 3678583 - DNA, 25 bp, Homo sapien
ttttcgttgtttctttattgtgcga

SEQ ID NO: 3678584 - DNA, 25 bp, Homo sapien
ttcctgtgcctatccattgtgaaca

SEQ ID NO: 3678585 - DNA, 25 bp, Homo sapien
gcctatccattgtgaacacatctca

SEQ ID NO: 3678586 - DNA, 25 bp, Homo sapien
ggtttcctgtgcctatccattgtga

SEQ ID NO: 3678587 - DNA, 25 bp, Homo sapien
tgtgcctatccattgtgaacacatc

SEQ ID NO: 3678588 - DNA, 25 bp, Homo sapien
caccgtggcttctacaatttgtaac

SEQ ID NO: 3678589 - DNA, 25 bp, Homo sapien
acttatatcacagaacaccgtggct

SEQ ID NO: 3678590 - DNA, 25 bp, Homo sapien
aatttacctagatgagttctgcctg

SEQ ID NO: 3678591 - DNA, 25 bp, Homo sapien
tacgatagcttcaggtattgagacc

SEQ ID NO: 3678592 - DNA, 25 bp, Homo sapien
aacaggcttttatacgttatgcaaa

SEQ ID NO: 3678593 - DNA, 25 bp, Homo sapien
tctggatcaatatactcacgagaga

SEQ ID NO: 3678594 - DNA, 25 bp, Homo sapien
gatttgatccacaggccatagttgg

SEQ ID NO: 3678595 - DNA, 25 bp, Homo sapien
tagttggctgtctcttaaacaggct

SEQ ID NO: 3678596 - DNA, 25 bp, Homo sapien
gatgacacagggacttagggctttt

SEQ ID NO: 3678597 - DNA, 25 bp, Homo sapien
tacagcaagctgaatacgtacacag

SEQ ID NO: 3678598 - DNA, 25 bp, Homo sapien
ggagttagccaaacgcaatagcgta

SEQ ID NO: 3678599 - DNA, 25 bp, Homo sapien
tcagaggaaatttccccgcagggta

SEQ ID NO: 3678600 - DNA, 25 bp, Homo sapien
aaaacagaacctcatagatgggtct

SEQ ID NO: 3678601 - DNA, 25 bp, Homo sapien
ggctagcagttggtaacctatataa

SEQ ID NO: 3678602 - DNA, 25 bp, Homo sapien
cattgtatacctgatttgtgggaag

SEQ ID NO: 3678603 - DNA, 25 bp, Homo sapien
ttctaaaaatatgaaggctagcagt

SEQ ID NO: 3678604 - DNA, 25 bp, Homo sapien
tacgtggtttgctcacactgacacc

SEQ ID NO: 3678605 - DNA, 25 bp, Homo sapien
aatctttgttactagccctcactac

SEQ ID NO: 3678606 - DNA, 25 bp, Homo sapien
tactcagaattggtgagacctctcc

SEQ ID NO: 3678607 - DNA, 25 bp, Homo sapien
tttctgcttcactcagcttacgtgg

SEQ ID NO: 3678608 - DNA, 25 bp, Homo sapien
aaatggatagacctacatgcaagag

SEQ ID NO: 3678609 - DNA, 25 bp, Homo sapien
aaattattgtgctgcaactgatacc

SEQ ID NO: 3678610 - DNA, 25 bp, Homo sapien
gaatgaagctagacacctatctcac

SEQ ID NO: 3678611 - DNA, 25 bp, Homo sapien
gaaaacagatatccacaggtgaaag

SEQ ID NO: 3678612 - DNA, 25 bp, Homo sapien
tctctgagtattgcctgttgcctgc

SEQ ID NO: 3678613 - DNA, 25 bp, Homo sapien
ctaattgggccattggattggacca

SEQ ID NO: 3678614 - DNA, 25 bp, Homo sapien
ctttggcttggaaaccctctcttgg

SEQ ID NO: 3678615 - DNA, 25 bp, Homo sapien
ctgcatattgtccagacggccctgc

SEQ ID NO: 3678616 - DNA, 25 bp, Homo sapien
tccatttcgtttttcaggccacagc

SEQ ID NO: 3678617 - DNA, 25 bp, Homo sapien
cagaggctcctcacactaaagtgta

SEQ ID NO: 3678618 - DNA, 25 bp, Homo sapien
ctaaagtgtactgggagaccacagc

SEQ ID NO: 3678619 - DNA, 25 bp, Homo sapien
tgggtctgaccaaaatgacagaggc

SEQ ID NO: 3678620 - DNA, 25 bp, Homo sapien
tctgaaacaggtaccactgattatt

SEQ ID NO: 3678621 - DNA, 25 bp, Homo sapien
gcttccatcaattggctgtcatccc

SEQ ID NO: 3678622 - DNA, 25 bp, Homo sapien
ttttagctgtagaggccttttgttg

SEQ ID NO: 3678623 - DNA, 25 bp, Homo sapien
gcatcctaagacctcccaaaaacag

SEQ ID NO: 3678624 - DNA, 25 bp, Homo sapien
cactgataagaaagcgaccctgtcc

SEQ ID NO: 3678625 - DNA, 25 bp, Homo sapien
tgaattgctcagctgatattcactg

SEQ ID NO: 3678626 - DNA, 25 bp, Homo sapien
cataatgccttcaatagcaccatgc

SEQ ID NO: 3678627 - DNA, 25 bp, Homo sapien
tgccttcaatagcaccatgcatttc

SEQ ID NO: 3678628 - DNA, 25 bp, Homo sapien
tcctctctttggtatggctaatttg

SEQ ID NO: 3678629 - DNA, 25 bp, Homo sapien
tgatccctggcggtacggatttatg

SEQ ID NO: 3678630 - DNA, 25 bp, Homo sapien
ctggcggtacggatttatggacagc

SEQ ID NO: 3678631 - DNA, 25 bp, Homo sapien
ttggtatggctaatttgcagttcct

SEQ ID NO: 3678632 - DNA, 25 bp, Homo sapien
tcccttgggaatttcagtgagggcc

SEQ ID NO: 3678633 - DNA, 25 bp, Homo sapien
gagagtaaaagggacatgtggtcat

SEQ ID NO: 3678634 - DNA, 25 bp, Homo sapien
catgtggtcattagagacatgtccc

SEQ ID NO: 3678635 - DNA, 25 bp, Homo sapien
tcattagagacatgtcccttgggaa

SEQ ID NO: 3678636 - DNA, 25 bp, Homo sapien
tgatccaaaaccttggagtagggtg

SEQ ID NO: 3678637 - DNA, 25 bp, Homo sapien
tgaccaggaagagaattgatccaaa

SEQ ID NO: 3678638 - DNA, 25 bp, Homo sapien
ccttggagtagggtggatcttgcaa

SEQ ID NO: 3678639 - DNA, 25 bp, Homo sapien
gatcttgcaagtggggtaaatggcc

SEQ ID NO: 3678640 - DNA, 25 bp, Homo sapien
ggttctgctggaagcattacagtca

SEQ ID NO: 3678641 - DNA, 25 bp, Homo sapien
tggctgggagacttggcagactttc

SEQ ID NO: 3678642 - DNA, 25 bp, Homo sapien
ggccctgagctggaggttctgctgg

SEQ ID NO: 3678643 - DNA, 25 bp, Homo sapien
cagtcagctaggctgacagtggctg

SEQ ID NO: 3678644 - DNA, 25 bp, Homo sapien
tggctcaagatctctaacaagacta

SEQ ID NO: 3678645 - DNA, 25 bp, Homo sapien
aagccacttgcttggttgctggtag

SEQ ID NO: 3678646 - DNA, 25 bp, Homo sapien
tcaggaatacaggtacagcttagct

SEQ ID NO: 3678647 - DNA, 25 bp, Homo sapien
gactgttggccgaaagcctccttca

SEQ ID NO: 3678648 - DNA, 25 bp, Homo sapien
gctcaactggctcccagcgccgcgg

SEQ ID NO: 3678649 - DNA, 25 bp, Homo sapien
ccggccgggctcaactggctcccag

SEQ ID NO: 3678650 - DNA, 25 bp, Homo sapien
cggccgggctcaactggctcccagc

SEQ ID NO: 3678651 - DNA, 25 bp, Homo sapien
cgggctcaactggctcccagcgccg

SEQ ID NO: 3678652 - DNA, 25 bp, Homo sapien
aggtagccgggctctccctgggcgg

SEQ ID NO: 3678653 - DNA, 25 bp, Homo sapien
cggcgaccaagtcgtcctcggagcc

SEQ ID NO: 3678654 - DNA, 25 bp, Homo sapien
ttcttcctgtccacgcggaagcgct

SEQ ID NO: 3678655 - DNA, 25 bp, Homo sapien
cttgtaacatggcctcaagtttctt

SEQ ID NO: 3678656 - DNA, 25 bp, Homo sapien
gggagtcccgcgaagtctccagtcc

SEQ ID NO: 3678657 - DNA, 25 bp, Homo sapien
agctaaaccggccggccgtaggctg

SEQ ID NO: 3678658 - DNA, 25 bp, Homo sapien
ccgtaggctggagtagcgggcgccg

SEQ ID NO: 3678659 - DNA, 25 bp, Homo sapien
tgtccgaaaaggagttagaggctca

SEQ ID NO: 3678660 - DNA, 25 bp, Homo sapien
ttcccaatagtgagacaaggcccct

SEQ ID NO: 3678661 - DNA, 25 bp, Homo sapien
caaagtccagaacgcaacttgggcg

SEQ ID NO: 3678662 - DNA, 25 bp, Homo sapien
caggtgtccgggctaaagttggcat

SEQ ID NO: 3678663 - DNA, 25 bp, Homo sapien
gacatctgcagagcgtttcccaata

SEQ ID NO: 3678664 - DNA, 25 bp, Homo sapien
cactcgtattataaatcagaatctg

SEQ ID NO: 3678665 - DNA, 25 bp, Homo sapien
tcagaatctgttttcggtccagtat

SEQ ID NO: 3678666 - DNA, 25 bp, Homo sapien
cttggacgttttgacgttcactcca

SEQ ID NO: 3678667 - DNA, 25 bp, Homo sapien
cggtccagtatggttgaagattttc

SEQ ID NO: 3678668 - DNA, 25 bp, Homo sapien
tgtagcacatccaaaaaacgtctgc

SEQ ID NO: 3678669 - DNA, 25 bp, Homo sapien
tactgaatgaatcttcaccagcgcc

SEQ ID NO: 3678670 - DNA, 25 bp, Homo sapien
caagggaggaaagcctgtagcacat

SEQ ID NO: 3678671 - DNA, 25 bp, Homo sapien
taagtgagactaacgcctggtcccg

SEQ ID NO: 3678672 - DNA, 25 bp, Homo sapien
caatgtaacctattcgggagggtgg

SEQ ID NO: 3678673 - DNA, 25 bp, Homo sapien
tgagaagctgagatgaccgcacagg

SEQ ID NO: 3678674 - DNA, 25 bp, Homo sapien
tgtctaggtctacttggaattccaa

SEQ ID NO: 3678675 - DNA, 25 bp, Homo sapien
tgtaaagtacagatcccaatgggca

SEQ ID NO: 3678676 - DNA, 25 bp, Homo sapien
ggtccgctagcccaaaatgaacaaa

SEQ ID NO: 3678677 - DNA, 25 bp, Homo sapien
tcctaaggccaagcacgtgactttg

SEQ ID NO: 3678678 - DNA, 25 bp, Homo sapien
tctacatacggcctagattgagggt

SEQ ID NO: 3678679 - DNA, 25 bp, Homo sapien
tccattccatgaggtcaatgccagg

SEQ ID NO: 3678680 - DNA, 25 bp, Homo sapien
gtgagatactattccagtcataatg

SEQ ID NO: 3678681 - DNA, 25 bp, Homo sapien
gaggtttctatcctggtgtgtatca

SEQ ID NO: 3678682 - DNA, 25 bp, Homo sapien
tataagaatagttcctcctgcttgc

SEQ ID NO: 3678683 - DNA, 25 bp, Homo sapien
taagaatccttgtgttagatgtgtc

SEQ ID NO: 3678684 - DNA, 25 bp, Homo sapien
ttgtaaccttgcagattttttgatg

SEQ ID NO: 3678685 - DNA, 25 bp, Homo sapien
ccaaaaatcactcaggaacagatta

SEQ ID NO: 3678686 - DNA, 25 bp, Homo sapien
tctagctagtagtgtatcagttttg

SEQ ID NO: 3678687 - DNA, 25 bp, Homo sapien
tctagttccctgaggcatgacatta

SEQ ID NO: 3678688 - DNA, 25 bp, Homo sapien
tttgttccacggtctatgtaactac

SEQ ID NO: 3678689 - DNA, 25 bp, Homo sapien
ttgttccacggtctatgtaactact

SEQ ID NO: 3678690 - DNA, 25 bp, Homo sapien
ctatagccctgtagtgtattttgaa

SEQ ID NO: 3678691 - DNA, 25 bp, Homo sapien
ttttgttccacggtctatgtaacta

SEQ ID NO: 3678692 - DNA, 25 bp, Homo sapien
cctgaacactatatccaataggtac

SEQ ID NO: 3678693 - DNA, 25 bp, Homo sapien
tatccataagcttagaaaccacctg

SEQ ID NO: 3678694 - DNA, 25 bp, Homo sapien
tccgtatcattacaattgtgaactg

SEQ ID NO: 3678695 - DNA, 25 bp, Homo sapien
ggatgaacggtaccatggagaagtc

SEQ ID NO: 3678696 - DNA, 25 bp, Homo sapien
gctttaacttgattaccgccgcaaa

SEQ ID NO: 3678697 - DNA, 25 bp, Homo sapien
ggttccagttaccacaggactcagg

SEQ ID NO: 3678698 - DNA, 25 bp, Homo sapien
caacaggaatgttcaagccagcaat

SEQ ID NO: 3678699 - DNA, 25 bp, Homo sapien
tagtagctgagccaaaccatgacag

SEQ ID NO: 3678700 - DNA, 25 bp, Homo sapien
ttgaaagtactggtaacaggataac

SEQ ID NO: 3678701 - DNA, 25 bp, Homo sapien
tatcctctggattgcaaaactgata

SEQ ID NO: 3678702 - DNA, 25 bp, Homo sapien
ggtcaactgtgggtgtcatttggac

SEQ ID NO: 3678703 - DNA, 25 bp, Homo sapien
aattaggtaaaactgtggtcaactg

SEQ ID NO: 3678704 - DNA, 25 bp, Homo sapien
gatcttggtttctagtaacagtctc

SEQ ID NO: 3678705 - DNA, 25 bp, Homo sapien
taaacaagtattagattataatcca

SEQ ID NO: 3678706 - DNA, 25 bp, Homo sapien
ccaactgaaagagcttccatggcca

SEQ ID NO: 3678707 - DNA, 25 bp, Homo sapien
caacagtctgatcaatgaaataaac

SEQ ID NO: 3678708 - DNA, 25 bp, Homo sapien
ggtcttagctatgcaattacaggca

SEQ ID NO: 3678709 - DNA, 25 bp, Homo sapien
tatatatctcccctaaaagatgaca

SEQ ID NO: 3678710 - DNA, 25 bp, Homo sapien
gacagtggctgtctaaggtcttagc

SEQ ID NO: 3678711 - DNA, 25 bp, Homo sapien
tatatatcccctaaaagacacacac

SEQ ID NO: 3678712 - DNA, 25 bp, Homo sapien
tacaggaagtactctgcatgaatct

SEQ ID NO: 3678713 - DNA, 25 bp, Homo sapien
gaacatgcaacttgtagagcttgac

SEQ ID NO: 3678714 - DNA, 25 bp, Homo sapien
cagggattgggtcttaatcacctca

SEQ ID NO: 3678715 - DNA, 25 bp, Homo sapien
taacagcagtgcctgacacggagaa

SEQ ID NO: 3678716 - DNA, 25 bp, Homo sapien
cttagagacagcctgaatctctcca

SEQ ID NO: 3678717 - DNA, 25 bp, Homo sapien
ccagtaagtcgtgtacagcttctcc

SEQ ID NO: 3678718 - DNA, 25 bp, Homo sapien
cttccagtaagtcgtgtacagcttc

SEQ ID NO: 3678719 - DNA, 25 bp, Homo sapien
tccccatagctctgtcttagagaca

SEQ ID NO: 3678720 - DNA, 25 bp, Homo sapien
catttgcaactaagagggctgctgt

SEQ ID NO: 3678721 - DNA, 25 bp, Homo sapien
atttgcaactaagagggctgctgtg

SEQ ID NO: 3678722 - DNA, 25 bp, Homo sapien
tgaaaaaagtcttccccacttctgc

SEQ ID NO: 3678723 - DNA, 25 bp, Homo sapien
cttctgcctttcccttcagcagcag

SEQ ID NO: 3678724 - DNA, 25 bp, Homo sapien
cccacttctgcctttcccttcagca

SEQ ID NO: 3678725 - DNA, 25 bp, Homo sapien
cacttctgcctttcccttcagcagc

SEQ ID NO: 3678726 - DNA, 25 bp, Homo sapien
gctacagagtaatgtcacctgagga

SEQ ID NO: 3678727 - DNA, 25 bp, Homo sapien
tagttcccaaccttagctacagagt

SEQ ID NO: 3678728 - DNA, 25 bp, Homo sapien
ttactatcactaaaatggctgacgg

SEQ ID NO: 3678729 - DNA, 25 bp, Homo sapien
ccttttatcagaggtagagaccaac

SEQ ID NO: 3678730 - DNA, 25 bp, Homo sapien
caaatgctcttggacacatacagct

SEQ ID NO: 3678731 - DNA, 25 bp, Homo sapien
tctgtaatcagaacaaggccatcaa

SEQ ID NO: 3678732 - DNA, 25 bp, Homo sapien
taagtaatgattagctgagaaagcc

SEQ ID NO: 3678733 - DNA, 25 bp, Homo sapien
gcttctgtcccgatctgagagtgac

SEQ ID NO: 3678734 - DNA, 25 bp, Homo sapien
ccctagatgtacaattccatggagc

SEQ ID NO: 3678735 - DNA, 25 bp, Homo sapien
gacaacgttggccaaattaaattca

SEQ ID NO: 3678736 - DNA, 25 bp, Homo sapien
ttcaattttcgaagcttaagaacat

SEQ ID NO: 3678737 - DNA, 25 bp, Homo sapien
tctagttttttcgatcactctaacg

SEQ ID NO: 3678738 - DNA, 25 bp, Homo sapien
tagtcaactggcctcctggcgaaga

SEQ ID NO: 3678739 - DNA, 25 bp, Homo sapien
tgactgccgcaaaatgccaatggga

SEQ ID NO: 3678740 - DNA, 25 bp, Homo sapien
tgaagtctgcctagcaactactggc

SEQ ID NO: 3678741 - DNA, 25 bp, Homo sapien
tagggtttactacactgcgagccag

SEQ ID NO: 3678742 - DNA, 25 bp, Homo sapien
aaaatcagtagatgatggaccatgc

SEQ ID NO: 3678743 - DNA, 25 bp, Homo sapien
tgtaattctggtcacagctaaacac

SEQ ID NO: 3678744 - DNA, 25 bp, Homo sapien
tgatggaccatgcttatcaactttc

SEQ ID NO: 3678745 - DNA, 25 bp, Homo sapien
gtcacagctaaacactgaaggaagc

SEQ ID NO: 3678746 - DNA, 25 bp, Homo sapien
catgagggttcccattgcatacttc

SEQ ID NO: 3678747 - DNA, 25 bp, Homo sapien
gaaaatcggtatctcccatgtctcc

SEQ ID NO: 3678748 - DNA, 25 bp, Homo sapien
gcagctctctcgtgggagttgaaga

SEQ ID NO: 3678749 - DNA, 25 bp, Homo sapien
tctaatattaactggctgctgacag

SEQ ID NO: 3678750 - DNA, 25 bp, Homo sapien
taacacaaagtagcttgaggtctgg

SEQ ID NO: 3678751 - DNA, 25 bp, Homo sapien
taggcacaaccccttgaagacaggg

SEQ ID NO: 3678752 - DNA, 25 bp, Homo sapien
taactgtgctctctggaatccctct

SEQ ID NO: 3678753 - DNA, 25 bp, Homo sapien
gttaacagctcaggaaactcaggtt

SEQ ID NO: 3678754 - DNA, 25 bp, Homo sapien
ggcaggaaatgtgtcccctattact

SEQ ID NO: 3678755 - DNA, 25 bp, Homo sapien
taagggctgtctgggaatattagct

SEQ ID NO: 3678756 - DNA, 25 bp, Homo sapien
ttgagcaccaagtactccaggtttg

SEQ ID NO: 3678757 - DNA, 25 bp, Homo sapien
gggagaagacaaatacactacttga

SEQ ID NO: 3678758 - DNA, 25 bp, Homo sapien
gcaataatgcaccaactgaaatcag

SEQ ID NO: 3678759 - DNA, 25 bp, Homo sapien
gaaatcagagcatctacagatgacg

SEQ ID NO: 3678760 - DNA, 25 bp, Homo sapien
cagatgacgtaaaacttcctttcct

SEQ ID NO: 3678761 - DNA, 25 bp, Homo sapien
ttgcttccagtttgcatgctatgca

SEQ ID NO: 3678762 - DNA, 25 bp, Homo sapien
tgcatctaatcaagagtgcctgact

SEQ ID NO: 3678763 - DNA, 25 bp, Homo sapien
catctaatcaagagtgcctgactca

SEQ ID NO: 3678764 - DNA, 25 bp, Homo sapien
atcatgcatctaatcaagagtgcct

SEQ ID NO: 3678765 - DNA, 25 bp, Homo sapien
ctaatcaagagtgcctgactcagat

SEQ ID NO: 3678766 - DNA, 25 bp, Homo sapien
ctacgtaccgggcacaaggaaatgg

SEQ ID NO: 3678767 - DNA, 25 bp, Homo sapien
gtactggctacgtaccgggcacaag

SEQ ID NO: 3678768 - DNA, 25 bp, Homo sapien
tctcctcagtactggctacgtaccg

SEQ ID NO: 3678769 - DNA, 25 bp, Homo sapien
taccgggcacaaggaaatggttcac

SEQ ID NO: 3678770 - DNA, 25 bp, Homo sapien
gccaagcaatctgcgtatttgtttc

SEQ ID NO: 3678771 - DNA, 25 bp, Homo sapien
tcttggatttggctccgatcttcag

SEQ ID NO: 3678772 - DNA, 25 bp, Homo sapien
ttttgatggccaagcaatctgcgta

SEQ ID NO: 3678773 - DNA, 25 bp, Homo sapien
gctccgatcttcagttttgatggcc

SEQ ID NO: 3678774 - DNA, 25 bp, Homo sapien
tccagaagcgactgtagaaggactc

SEQ ID NO: 3678775 - DNA, 25 bp, Homo sapien
cagttctatagatgccaagatgggc

SEQ ID NO: 3678776 - DNA, 25 bp, Homo sapien
tcagatggtgagatttgtgtttccc

SEQ ID NO: 3678777 - DNA, 25 bp, Homo sapien
tatccaacatttagcacaggcacag

SEQ ID NO: 3678778 - DNA, 25 bp, Homo sapien
cacccatttaaatgtccattatact

SEQ ID NO: 3678779 - DNA, 25 bp, Homo sapien
catttaaatgtccattatactgaac

SEQ ID NO: 3678780 - DNA, 25 bp, Homo sapien
ttaaatgtccattatactgaacctt

SEQ ID NO: 3678781 - DNA, 25 bp, Homo sapien
cccatttaaatgtccattatactga

SEQ ID NO: 3678782 - DNA, 25 bp, Homo sapien
gagagagggcgtgggaaggaagaac

SEQ ID NO: 3678783 - DNA, 25 bp, Homo sapien
tttcaaacagttttaaactcatcag

SEQ ID NO: 3678784 - DNA, 25 bp, Homo sapien
aacagttttaaactcatcagatctt

SEQ ID NO: 3678785 - DNA, 25 bp, Homo sapien
tatcatgagaacagcgtggaaggaa

SEQ ID NO: 3678786 - DNA, 25 bp, Homo sapien
tattttactattggctgcgacgcac

SEQ ID NO: 3678787 - DNA, 25 bp, Homo sapien
taacacctgacacacgaataggttg

SEQ ID NO: 3678788 - DNA, 25 bp, Homo sapien
gaataggttgcaacccaccattagc

SEQ ID NO: 3678789 - DNA, 25 bp, Homo sapien
tagcaacactttggtccagcatgcc

SEQ ID NO: 3678790 - DNA, 25 bp, Homo sapien
cctgtgaatgacaatgatcaggtca

SEQ ID NO: 3678791 - DNA, 25 bp, Homo sapien
cttccctcattagtgcaggcagtca

SEQ ID NO: 3678792 - DNA, 25 bp, Homo sapien
tcaggtcattgtccctaagtttcct

SEQ ID NO: 3678793 - DNA, 25 bp, Homo sapien
cattcaggtgtcctgtgaatgacaa

SEQ ID NO: 3678794 - DNA, 25 bp, Homo sapien
tccggctcagagcaaaatcaagtgg

SEQ ID NO: 3678795 - DNA, 25 bp, Homo sapien
gcagtcacagagtcaggcaagctaa

SEQ ID NO: 3678796 - DNA, 25 bp, Homo sapien
gctttctatacgcaggcacagcctc

SEQ ID NO: 3678797 - DNA, 25 bp, Homo sapien
tatttttcagggcagtttccggctc

SEQ ID NO: 3678798 - DNA, 25 bp, Homo sapien
aatttaattgctcctgagaggcctg

SEQ ID NO: 3678799 - DNA, 25 bp, Homo sapien
tgaattctgtccagccatgccatga

SEQ ID NO: 3678800 - DNA, 25 bp, Homo sapien
cactgaagcaggcacaaaggcataa

SEQ ID NO: 3678801 - DNA, 25 bp, Homo sapien
ggaaaaggtcacacacggtttgaga

SEQ ID NO: 3678802 - DNA, 25 bp, Homo sapien
ccaagatgtcgtttattctccctcc

SEQ ID NO: 3678803 - DNA, 25 bp, Homo sapien
gatataaagggaatgtaactcctca

SEQ ID NO: 3678804 - DNA, 25 bp, Homo sapien
gagccaaaaacacgcatatgctgtg

SEQ ID NO: 3678805 - DNA, 25 bp, Homo sapien
tcagtaccaaggttgcatacaaatg

SEQ ID NO: 3678806 - DNA, 25 bp, Homo sapien
acgccgagggaaaccaggccagaga

SEQ ID NO: 3678807 - DNA, 25 bp, Homo sapien
aggccagagagatggccgaagaggg

SEQ ID NO: 3678808 - DNA, 25 bp, Homo sapien
ctgagcacacagtggcacgccgagg

SEQ ID NO: 3678809 - DNA, 25 bp, Homo sapien
gagggcctgccacaggtcctcttgc

SEQ ID NO: 3678810 - DNA, 25 bp, Homo sapien
tattgggtgcatataggccacccga

SEQ ID NO: 3678811 - DNA, 25 bp, Homo sapien
tgggtgcatataggccacccgattg

SEQ ID NO: 3678812 - DNA, 25 bp, Homo sapien
tgcatataggccacccgattgtccc

SEQ ID NO: 3678813 - DNA, 25 bp, Homo sapien
gtgcatataggccacccgattgtcc

SEQ ID NO: 3678814 - DNA, 25 bp, Homo sapien
ttcttcccaggtaggccttggtcaa

SEQ ID NO: 3678815 - DNA, 25 bp, Homo sapien
ccaggtaggccttggtcaattcaga

SEQ ID NO: 3678816 - DNA, 25 bp, Homo sapien
tcagccaaagccttggaacctttct

SEQ ID NO: 3678817 - DNA, 25 bp, Homo sapien
gataatcctgtattgttggccctga

SEQ ID NO: 3678818 - DNA, 25 bp, Homo sapien
gaagatgaatacctatcagatttct

SEQ ID NO: 3678819 - DNA, 25 bp, Homo sapien
tcacttgcagttaacaatttctccc

SEQ ID NO: 3678820 - DNA, 25 bp, Homo sapien
tttttggatgagctctcacttgcag

SEQ ID NO: 3678821 - DNA, 25 bp, Homo sapien
gaatcagagcttgatgaagaagatg

SEQ ID NO: 3678822 - DNA, 25 bp, Homo sapien
agaagatttatgtgaacggttcttc

SEQ ID NO: 3678823 - DNA, 25 bp, Homo sapien
ttccttgtttcttatcctcatcttc

SEQ ID NO: 3678824 - DNA, 25 bp, Homo sapien
gctttcagaagatttatgtgaacgg

SEQ ID NO: 3678825 - DNA, 25 bp, Homo sapien
ttgtttcttatcctcatcttcagaa

SEQ ID NO: 3678826 - DNA, 25 bp, Homo sapien
ggactcagatgataaaggtttatct

SEQ ID NO: 3678827 - DNA, 25 bp, Homo sapien
tctttttgctgagtcctttaatatc

SEQ ID NO: 3678828 - DNA, 25 bp, Homo sapien
ttctcagttccatcttttgacttct

SEQ ID NO: 3678829 - DNA, 25 bp, Homo sapien
tcagaatacatctttctctttttgc

SEQ ID NO: 3678830 - DNA, 25 bp, Homo sapien
ttcttttttgctcgcacctcctcaa

SEQ ID NO: 3678831 - DNA, 25 bp, Homo sapien
ttttgctcgcacctcctcaatatac

SEQ ID NO: 3678832 - DNA, 25 bp, Homo sapien
ctcgttcttcactgcttttcttctt

SEQ ID NO: 3678833 - DNA, 25 bp, Homo sapien
ttcttcttttttgctcgcacctcct

SEQ ID NO: 3678834 - DNA, 25 bp, Homo sapien
tggttcactcaaagcagcatatgac

SEQ ID NO: 3678835 - DNA, 25 bp, Homo sapien
tagctaaagagatagcaaaccaccc

SEQ ID NO: 3678836 - DNA, 25 bp, Homo sapien
gaacttaagacagcaagagtgagga

SEQ ID NO: 3678837 - DNA, 25 bp, Homo sapien
cactaagctcagtaaagggcaagac

SEQ ID NO: 3678838 - DNA, 25 bp, Homo sapien
ctgacagggcaagtagggctaagca

SEQ ID NO: 3678839 - DNA, 25 bp, Homo sapien
ccatgatgagtaatcggaggtgcaa

SEQ ID NO: 3678840 - DNA, 25 bp, Homo sapien
gacagatgtgttctggtgactgcca

SEQ ID NO: 3678841 - DNA, 25 bp, Homo sapien
aaggtgcagcgcctgtttcaacagg

SEQ ID NO: 3678842 - DNA, 25 bp, Homo sapien
cagaagggtcactgtgatttatttc

SEQ ID NO: 3678843 - DNA, 25 bp, Homo sapien
ctttgtcagaagggtcactgtgatt

SEQ ID NO: 3678844 - DNA, 25 bp, Homo sapien
tatttcttggagaactattaataga

SEQ ID NO: 3678845 - DNA, 25 bp, Homo sapien
tcttggagaactattaatagaattt

SEQ ID NO: 3678846 - DNA, 25 bp, Homo sapien
gtaggtaatcgtgatacttttttgc

SEQ ID NO: 3678847 - DNA, 25 bp, Homo sapien
cagtgatgcttcgtaggtaatcgtg

SEQ ID NO: 3678848 - DNA, 25 bp, Homo sapien
gcttcgtaggtaatcgtgatacttt

SEQ ID NO: 3678849 - DNA, 25 bp, Homo sapien
caattggcagtgatgcttcgtaggt

SEQ ID NO: 3678850 - DNA, 25 bp, Homo sapien
tgatctgcatcacagtctgaagctc

SEQ ID NO: 3678851 - DNA, 25 bp, Homo sapien
tctccttccacaggtgtcaggtctg

SEQ ID NO: 3678852 - DNA, 25 bp, Homo sapien
tattgaccacatagaactgatctgc

SEQ ID NO: 3678853 - DNA, 25 bp, Homo sapien
ctgaagctctcctgtccccatcttg

SEQ ID NO: 3678854 - DNA, 25 bp, Homo sapien
caatgccagtagatgaacacccagc

SEQ ID NO: 3678855 - DNA, 25 bp, Homo sapien
gactgaatctgcagaagtagcccaa

SEQ ID NO: 3678856 - DNA, 25 bp, Homo sapien
tgactctatagcataccaacctggg

SEQ ID NO: 3678857 - DNA, 25 bp, Homo sapien
tcacgggaaccatctaggagaaacc

SEQ ID NO: 3678858 - DNA, 25 bp, Homo sapien
gtcccgtgaacctcagcagctgaca

SEQ ID NO: 3678859 - DNA, 25 bp, Homo sapien
accactctgtgtggtcccgtgaacc

SEQ ID NO: 3678860 - DNA, 25 bp, Homo sapien
gacatgagccatgataaatcacttg

SEQ ID NO: 3678861 - DNA, 25 bp, Homo sapien
cagcagctgacatgagccatgataa

SEQ ID NO: 3678862 - DNA, 25 bp, Homo sapien
tgcaagtttactctggcaccctgga

SEQ ID NO: 3678863 - DNA, 25 bp, Homo sapien
caccctggagctgaagctaatcttc

SEQ ID NO: 3678864 - DNA, 25 bp, Homo sapien
cagcagtagaaatgaccatggcttt

SEQ ID NO: 3678865 - DNA, 25 bp, Homo sapien
tctctaaggcatccaaaaaggcttt

SEQ ID NO: 3678866 - DNA, 25 bp, Homo sapien
ggttgtccaccaaggaatcagctct

SEQ ID NO: 3678867 - DNA, 25 bp, Homo sapien
gacagcgccactgactttgggacca

SEQ ID NO: 3678868 - DNA, 25 bp, Homo sapien
ggaatcagctcttctcagtttataa

SEQ ID NO: 3678869 - DNA, 25 bp, Homo sapien
gaccatggaagctgtagcctttccc

SEQ ID NO: 3678870 - DNA, 25 bp, Homo sapien
gatgatgagaagaaatgtctgataa

SEQ ID NO: 3678871 - DNA, 25 bp, Homo sapien
atgagaagaaatgtctgataaaaca

SEQ ID NO: 3678872 - DNA, 25 bp, Homo sapien
tgatgagaagaaatgtctgataaaa

SEQ ID NO: 3678873 - DNA, 25 bp, Homo sapien
cgatgatgagaagaaatgtctgata

SEQ ID NO: 3678874 - DNA, 25 bp, Homo sapien
gcttaaatcctgtgatgtacttgta

SEQ ID NO: 3678875 - DNA, 25 bp, Homo sapien
tgggcctcctttgtgttacgatgaa

SEQ ID NO: 3678876 - DNA, 25 bp, Homo sapien
caacacaggtggattggctctggca

SEQ ID NO: 3678877 - DNA, 25 bp, Homo sapien
gcactgaagaatgtactgggcctcc

SEQ ID NO: 3678878 - DNA, 25 bp, Homo sapien
taatgtgtcgagaacagggtacagc

SEQ ID NO: 3678879 - DNA, 25 bp, Homo sapien
tggctcagtctagggtctctaggta

SEQ ID NO: 3678880 - DNA, 25 bp, Homo sapien
taggtatgtaagctgattatgggcc

SEQ ID NO: 3678881 - DNA, 25 bp, Homo sapien
tatgggcctctgaagaaacagtgtt

SEQ ID NO: 3678882 - DNA, 25 bp, Homo sapien
tcaaatgctttgtatttgagttcac

SEQ ID NO: 3678883 - DNA, 25 bp, Homo sapien
ggtatcgcataaatcccataagctt

SEQ ID NO: 3678884 - DNA, 25 bp, Homo sapien
cgaatctgctgttgactctctctga

SEQ ID NO: 3678885 - DNA, 25 bp, Homo sapien
ggttctattttacgatgtatatcta

SEQ ID NO: 3678886 - DNA, 25 bp, Homo sapien
agctgttgccagtttttgtgcctca

SEQ ID NO: 3678887 - DNA, 25 bp, Homo sapien
gcaattccactgagtagtctcttgg

SEQ ID NO: 3678888 - DNA, 25 bp, Homo sapien
tcagccctcaggtgatgataatggc

SEQ ID NO: 3678889 - DNA, 25 bp, Homo sapien
gcagtggctgcatggctccatgact

SEQ ID NO: 3678890 - DNA, 25 bp, Homo sapien
gctctgaatacagaattccccagtg

SEQ ID NO: 3678891 - DNA, 25 bp, Homo sapien
agtgaaactggagcaggaatacgta

SEQ ID NO: 3678892 - DNA, 25 bp, Homo sapien
aaactggagcaggaatacgtaatga

SEQ ID NO: 3678893 - DNA, 25 bp, Homo sapien
ctggagcaggaatacgtaatgatgg

SEQ ID NO: 3678894 - DNA, 25 bp, Homo sapien
aagttgggagagagcccaacagcat

SEQ ID NO: 3678895 - DNA, 25 bp, Homo sapien
caacccaagttgggagagagcccaa

SEQ ID NO: 3678896 - DNA, 25 bp, Homo sapien
acccaagttgggagagagcccaaca

SEQ ID NO: 3678897 - DNA, 25 bp, Homo sapien
ccaagttgggagagagcccaacagc

SEQ ID NO: 3678898 - DNA, 25 bp, Homo sapien
tgtgtctaagacagacatgatcatt

SEQ ID NO: 3678899 - DNA, 25 bp, Homo sapien
ttttgtgtctaagacagacatgatc

SEQ ID NO: 3678900 - DNA, 25 bp, Homo sapien
gacagacatgatcatttccttggct

SEQ ID NO: 3678901 - DNA, 25 bp, Homo sapien
tctaagacagacatgatcatttcct

SEQ ID NO: 3678902 - DNA, 25 bp, Homo sapien
gttgccacctttgccgattacatgt

SEQ ID NO: 3678903 - DNA, 25 bp, Homo sapien
tctgtatgtgaaacatccatcttca

SEQ ID NO: 3678904 - DNA, 25 bp, Homo sapien
agtggatatggcatccggtttcttc

SEQ ID NO: 3678905 - DNA, 25 bp, Homo sapien
tccatcttcagtgtgactcgattgc

SEQ ID NO: 3678906 - DNA, 25 bp, Homo sapien
aattctaactcgggcagattctact

SEQ ID NO: 3678907 - DNA, 25 bp, Homo sapien
cctgctggttgtcccgctatagata

SEQ ID NO: 3678908 - DNA, 25 bp, Homo sapien
ccgaattctaactcgggcagattct

SEQ ID NO: 3678909 - DNA, 25 bp, Homo sapien
ctaactcgggcagattctactcctg

SEQ ID NO: 3678910 - DNA, 25 bp, Homo sapien
tatgacagtagcaccatacattcgg

SEQ ID NO: 3678911 - DNA, 25 bp, Homo sapien
gatcaggaaccggttgaagaattcc

SEQ ID NO: 3678912 - DNA, 25 bp, Homo sapien
ggaacgctgtttaaatgatactgaa

SEQ ID NO: 3678913 - DNA, 25 bp, Homo sapien
tctgagaccctcgtactatgacagt

SEQ ID NO: 3678914 - DNA, 25 bp, Homo sapien
gatcaggaaagtggatctgagcacc

SEQ ID NO: 3678915 - DNA, 25 bp, Homo sapien
ccctggaggtagacggtagatttct

SEQ ID NO: 3678916 - DNA, 25 bp, Homo sapien
caagacagacagactcaatggtgcc

SEQ ID NO: 3678917 - DNA, 25 bp, Homo sapien
gaatagctgatgctaagctcccagc

SEQ ID NO: 3678918 - DNA, 25 bp, Homo sapien
aacatcaacacaagaggaagacaac

SEQ ID NO: 3678919 - DNA, 25 bp, Homo sapien
caactgcgcaatgaattgtggatct

SEQ ID NO: 3678920 - DNA, 25 bp, Homo sapien
caaacatcaacacaagaggaagaca

SEQ ID NO: 3678921 - DNA, 25 bp, Homo sapien
gcaatgaattgtggatctacttcaa

SEQ ID NO: 3678922 - DNA, 25 bp, Homo sapien
tgatgaagacatcaagctgttccat

SEQ ID NO: 3678923 - DNA, 25 bp, Homo sapien
actgatgaagacatcaagctgttcc

SEQ ID NO: 3678924 - DNA, 25 bp, Homo sapien
atactgatgaagacatcaagctgtt

SEQ ID NO: 3678925 - DNA, 25 bp, Homo sapien
tactgatgaagacatcaagctgttc

SEQ ID NO: 3678926 - DNA, 25 bp, Homo sapien
ggttgctatggtaaccccactgctt

SEQ ID NO: 3678927 - DNA, 25 bp, Homo sapien
ggcatttcgctcaacacttttcaca

SEQ ID NO: 3678928 - DNA, 25 bp, Homo sapien
aagctaagatatccaggctgggaca

SEQ ID NO: 3678929 - DNA, 25 bp, Homo sapien
cactgctttcaagtccgaggagaca

SEQ ID NO: 3678930 - DNA, 25 bp, Homo sapien
tattaagagcattcaagagtgagtt

SEQ ID NO: 3678931 - DNA, 25 bp, Homo sapien
tgttcagagataaggtggtgggtcc

SEQ ID NO: 3678932 - DNA, 25 bp, Homo sapien
ctgtggcacttgaagtattagcaag

SEQ ID NO: 3678933 - DNA, 25 bp, Homo sapien
ggactgactgagctattaagagcat

SEQ ID NO: 3678934 - DNA, 25 bp, Homo sapien
ggcttgggcagtagatggaatcata

SEQ ID NO: 3678935 - DNA, 25 bp, Homo sapien
gccttcggtctgcatactgttgata

SEQ ID NO: 3678936 - DNA, 25 bp, Homo sapien
gcatgtccatttaaagcagcagaga

SEQ ID NO: 3678937 - DNA, 25 bp, Homo sapien
catcaacaggagtcaagccaggagg

SEQ ID NO: 3678938 - DNA, 25 bp, Homo sapien
gatttgcactcagcactttttctcc

SEQ ID NO: 3678939 - DNA, 25 bp, Homo sapien
gacccacttgtctggatggacggat

SEQ ID NO: 3678940 - DNA, 25 bp, Homo sapien
caagtgatgaagtggatattgcacc

SEQ ID NO: 3678941 - DNA, 25 bp, Homo sapien
gacggatccccgtgatttgcactca

SEQ ID NO: 3678942 - DNA, 25 bp, Homo sapien
atgaatttcagaagggtacagttcc

SEQ ID NO: 3678943 - DNA, 25 bp, Homo sapien
tgaatttcagaagggtacagttccc

SEQ ID NO: 3678944 - DNA, 25 bp, Homo sapien
aaaatgaatttcagaagggtacagt

SEQ ID NO: 3678945 - DNA, 25 bp, Homo sapien
aatgaatttcagaagggtacagttc

SEQ ID NO: 3678946 - DNA, 25 bp, Homo sapien
ttcgtgccttgcaatagttccactg

SEQ ID NO: 3678947 - DNA, 25 bp, Homo sapien
tttggcacaggaaaccttggaggga

SEQ ID NO: 3678948 - DNA, 25 bp, Homo sapien
taagtgtgagtttttcgtgccttgc

SEQ ID NO: 3678949 - DNA, 25 bp, Homo sapien
aatgggaaggacttcgaggcatgcc

SEQ ID NO: 3678950 - DNA, 25 bp, Homo sapien
catgttgacatatgatgaccgtgga

SEQ ID NO: 3678951 - DNA, 25 bp, Homo sapien
catatgatgaccgtggagcaaggtg

SEQ ID NO: 3678952 - DNA, 25 bp, Homo sapien
gccttcttgtcagccaaagggcttt

SEQ ID NO: 3678953 - DNA, 25 bp, Homo sapien
cggtagcactcagttcagggtctga

SEQ ID NO: 3678954 - DNA, 25 bp, Homo sapien
actgacacattataaaggccatagc

SEQ ID NO: 3678955 - DNA, 25 bp, Homo sapien
cacattataaaggccatagctttta

SEQ ID NO: 3678956 - DNA, 25 bp, Homo sapien
ctgacacattataaaggccatagct

SEQ ID NO: 3678957 - DNA, 25 bp, Homo sapien
gacacattataaaggccatagcttt

SEQ ID NO: 3678958 - DNA, 25 bp, Homo sapien
ggtggctaatagcttcttctgttca

SEQ ID NO: 3678959 - DNA, 25 bp, Homo sapien
tggctaatagcttcttctgttcata

SEQ ID NO: 3678960 - DNA, 25 bp, Homo sapien
tggtggctaatagcttcttctgttc

SEQ ID NO: 3678961 - DNA, 25 bp, Homo sapien
ctttggtggctaatagcttcttctg

SEQ ID NO: 3678962 - DNA, 25 bp, Homo sapien
gtatttgtgggcgttctgacctccg

SEQ ID NO: 3678963 - DNA, 25 bp, Homo sapien
catggatttagaaaaacccaggcca

SEQ ID NO: 3678964 - DNA, 25 bp, Homo sapien
caactccttgatagtttcagctggc

SEQ ID NO: 3678965 - DNA, 25 bp, Homo sapien
gcttataggacacatgattggccct

SEQ ID NO: 3678966 - DNA, 25 bp, Homo sapien
gcaaattcactatgacttccaggtc

SEQ ID NO: 3678967 - DNA, 25 bp, Homo sapien
tccaattccatttcggtctctccag

SEQ ID NO: 3678968 - DNA, 25 bp, Homo sapien
tacgcttagggctgccaatagaagc

SEQ ID NO: 3678969 - DNA, 25 bp, Homo sapien
caagtgctcacgactgttggaccgt

SEQ ID NO: 3678970 - DNA, 25 bp, Homo sapien
caagcacttgaagtcagagaggcca

SEQ ID NO: 3678971 - DNA, 25 bp, Homo sapien
aaagtgtgcataaaacacaacgctc

SEQ ID NO: 3678972 - DNA, 25 bp, Homo sapien
agaggccacagtcagtgatactcca

SEQ ID NO: 3678973 - DNA, 25 bp, Homo sapien
cacattctaatctggggatacctaa

SEQ ID NO: 3678974 - DNA, 25 bp, Homo sapien
tggtatggcaagtgctagagtgaaa

SEQ ID NO: 3678975 - DNA, 25 bp, Homo sapien
acaaggagatacagataggtagata

SEQ ID NO: 3678976 - DNA, 25 bp, Homo sapien
tttgtggagcacaaatttcacaagg

SEQ ID NO: 3678977 - DNA, 25 bp, Homo sapien
ttgccctttggtatggcaagtgcta

SEQ ID NO: 3678978 - DNA, 25 bp, Homo sapien
tcagggaggtcagaacctttgaaag

SEQ ID NO: 3678979 - DNA, 25 bp, Homo sapien
caggcccagtttgctgaagagctca

SEQ ID NO: 3678980 - DNA, 25 bp, Homo sapien
ggaaatgcagtccatgtaattgcta

SEQ ID NO: 3678981 - DNA, 25 bp, Homo sapien
tgaaagagctatttaagttacagcc

SEQ ID NO: 3678982 - DNA, 25 bp, Homo sapien
gacttgggttcgatcctgactctgc

SEQ ID NO: 3678983 - DNA, 25 bp, Homo sapien
gagcaacccggcaactatagcaaga

SEQ ID NO: 3678984 - DNA, 25 bp, Homo sapien
catgaagggaaactgcccaaggatc

SEQ ID NO: 3678985 - DNA, 25 bp, Homo sapien
gcactgtctggcatcaggaacaaag

SEQ ID NO: 3678986 - DNA, 25 bp, Homo sapien
tcctcctggcaccaaaagtagttat

SEQ ID NO: 3678987 - DNA, 25 bp, Homo sapien
ttcctcctggcaccaaaagtagtta

SEQ ID NO: 3678988 - DNA, 25 bp, Homo sapien
caaaagtagttattcccagctcctt

SEQ ID NO: 3678989 - DNA, 25 bp, Homo sapien
cctcctggcaccaaaagtagttatt

SEQ ID NO: 3678990 - DNA, 25 bp, Homo sapien
cctttaaaagcaagaggacctggtg

SEQ ID NO: 3678991 - DNA, 25 bp, Homo sapien
aatagagcctcttgggtacacacag

SEQ ID NO: 3678992 - DNA, 25 bp, Homo sapien
ttttccgcagcacatgacacttggc

SEQ ID NO: 3678993 - DNA, 25 bp, Homo sapien
ttagcttgagtctagggatagcccc

SEQ ID NO: 3678994 - DNA, 25 bp, Homo sapien
tccaaggttcacacaatcctggcag

SEQ ID NO: 3678995 - DNA, 25 bp, Homo sapien
tgaaattccaaggttcacacaatcc

SEQ ID NO: 3678996 - DNA, 25 bp, Homo sapien
aaggttcacacaatcctggcagctc

SEQ ID NO: 3678997 - DNA, 25 bp, Homo sapien
aattccaaggttcacacaatcctgg

SEQ ID NO: 3678998 - DNA, 25 bp, Homo sapien
tatttttcagtaagcctacgggatg

SEQ ID NO: 3678999 - DNA, 25 bp, Homo sapien
tcaagctagggactatcttcggcct

SEQ ID NO: 3679000 - DNA, 25 bp, Homo sapien
cagagaggttatcaaggtcaagtcc

SEQ ID NO: 3679001 - DNA, 25 bp, Homo sapien
tgaatccccttaagtacacagcctg

SEQ ID NO: 3679002 - DNA, 25 bp, Homo sapien
ccagataacagagctttatttgcta

SEQ ID NO: 3679003 - DNA, 25 bp, Homo sapien
tatgccagataacagagctttattt

SEQ ID NO: 3679004 - DNA, 25 bp, Homo sapien
tgccagataacagagctttatttgc

SEQ ID NO: 3679005 - DNA, 25 bp, Homo sapien
gtatgccagataacagagctttatt

SEQ ID NO: 3679006 - DNA, 25 bp, Homo sapien
tatgtgggtcctacggtgttattca

SEQ ID NO: 3679007 - DNA, 25 bp, Homo sapien
tagtgtcatatagtgctttaagcgg

SEQ ID NO: 3679008 - DNA, 25 bp, Homo sapien
tcttgacgtggtgggcaaatgcagc

SEQ ID NO: 3679009 - DNA, 25 bp, Homo sapien
ttgcttttgagagcattagcggcac

SEQ ID NO: 3679010 - DNA, 25 bp, Homo sapien
gggtagccttccactcgctccacct

SEQ ID NO: 3679011 - DNA, 25 bp, Homo sapien
cgtgcatttggcgattcaaaaagct

SEQ ID NO: 3679012 - DNA, 25 bp, Homo sapien
tggcgattcaaaaagctttcttcgg

SEQ ID NO: 3679013 - DNA, 25 bp, Homo sapien
tccaggaaagaggtgcgtgcatttg

SEQ ID NO: 3679014 - DNA, 25 bp, Homo sapien
taccagcggccactgacactagcaa

SEQ ID NO: 3679015 - DNA, 25 bp, Homo sapien
gacactagcaatgtctgagtgatac

SEQ ID NO: 3679016 - DNA, 25 bp, Homo sapien
gccactgacactagcaatgtctgag

SEQ ID NO: 3679017 - DNA, 25 bp, Homo sapien
actagcaatgtctgagtgatactga

SEQ ID NO: 3679018 - DNA, 25 bp, Homo sapien
taaagtacaggtgcgaataaaatgc

SEQ ID NO: 3679019 - DNA, 25 bp, Homo sapien
tcctgataccagacacccagagtgc

SEQ ID NO: 3679020 - DNA, 25 bp, Homo sapien
cccagagtgctaaggatggtgtgct

SEQ ID NO: 3679021 - DNA, 25 bp, Homo sapien
tacagttagtcagcgggcatgtgcc

SEQ ID NO: 3679022 - DNA, 25 bp, Homo sapien
tcattttagcattacaggcagcagc

SEQ ID NO: 3679023 - DNA, 25 bp, Homo sapien
cctgtggccatacggaacatagcta

SEQ ID NO: 3679024 - DNA, 25 bp, Homo sapien
tctttatgaactgccaccctggagg

SEQ ID NO: 3679025 - DNA, 25 bp, Homo sapien
tcaagcagacagatacggtttcagg

SEQ ID NO: 3679026 - DNA, 25 bp, Homo sapien
tgacttcaaccttattaaccaggag

SEQ ID NO: 3679027 - DNA, 25 bp, Homo sapien
cctgactttcaggaccgtgttctga

SEQ ID NO: 3679028 - DNA, 25 bp, Homo sapien
taggtccctgagactggagtttaca

SEQ ID NO: 3679029 - DNA, 25 bp, Homo sapien
tgacattcaggcacaggaaatgggc

SEQ ID NO: 3679030 - DNA, 25 bp, Homo sapien
ccacatccccaatcttagaaaactg

SEQ ID NO: 3679031 - DNA, 25 bp, Homo sapien
attgtatcagcaatttggacaaaga

SEQ ID NO: 3679032 - DNA, 25 bp, Homo sapien
agtatcagtctatgattctgttaaa

SEQ ID NO: 3679033 - DNA, 25 bp, Homo sapien
tccatagcgactttgaatcaaattg

SEQ ID NO: 3679034 - DNA, 25 bp, Homo sapien
tcgttcaattctagcaggcacactg

SEQ ID NO: 3679035 - DNA, 25 bp, Homo sapien
tcttcataatcctcaaccagcggat

SEQ ID NO: 3679036 - DNA, 25 bp, Homo sapien
catgccttatgtgtggacagctggt

SEQ ID NO: 3679037 - DNA, 25 bp, Homo sapien
ggtctgttactgtcactccacgtgg

SEQ ID NO: 3679038 - DNA, 25 bp, Homo sapien
gacacaaacccagggatgtcagtct

SEQ ID NO: 3679039 - DNA, 25 bp, Homo sapien
ggactgaatccagaacacgttcaag

SEQ ID NO: 3679040 - DNA, 25 bp, Homo sapien
actgaatccagaacacgttcaagtt

SEQ ID NO: 3679041 - DNA, 25 bp, Homo sapien
cagacacaaacccagggatgtcagt

SEQ ID NO: 3679042 - DNA, 25 bp, Homo sapien
tattttcttttgggtacttgcttgc

SEQ ID NO: 3679043 - DNA, 25 bp, Homo sapien
agcttatcttctccattttcacata

SEQ ID NO: 3679044 - DNA, 25 bp, Homo sapien
ttttcttttgggtacttgcttgcat

SEQ ID NO: 3679045 - DNA, 25 bp, Homo sapien
cagccttgagcttatcttctccatt

SEQ ID NO: 3679046 - DNA, 25 bp, Homo sapien
gggtcactgctacaacacccaggag

SEQ ID NO: 3679047 - DNA, 25 bp, Homo sapien
ggacatctttggtatatgtccagtg

SEQ ID NO: 3679048 - DNA, 25 bp, Homo sapien
cttggtccaaatccacagagctctg

SEQ ID NO: 3679049 - DNA, 25 bp, Homo sapien
aaagccatctactgacaacctcaca

SEQ ID NO: 3679050 - DNA, 25 bp, Homo sapien
gagtacgtcatgacagtgtcttgcc

SEQ ID NO: 3679051 - DNA, 25 bp, Homo sapien
cagggccagctggtctgtcggtctc

SEQ ID NO: 3679052 - DNA, 25 bp, Homo sapien
gtcggtctctcttgagtacgtcatg

SEQ ID NO: 3679053 - DNA, 25 bp, Homo sapien
acagtgtcttgcctcatgcccatgc

SEQ ID NO: 3679054 - DNA, 25 bp, Homo sapien
ttattgccctactgagtgtcatgag

SEQ ID NO: 3679055 - DNA, 25 bp, Homo sapien
gaactgaagctgtcttgacccttgg

SEQ ID NO: 3679056 - DNA, 25 bp, Homo sapien
taaatccatgcccttgccttgctct

SEQ ID NO: 3679057 - DNA, 25 bp, Homo sapien
gataacaggaaatgtactgccctaa

SEQ ID NO: 3679058 - DNA, 25 bp, Homo sapien
tgccactccctcagagtctgggaaa

SEQ ID NO: 3679059 - DNA, 25 bp, Homo sapien
cactccctcagagtctgggaaagca

SEQ ID NO: 3679060 - DNA, 25 bp, Homo sapien
tccctcagagtctgggaaagcatct

SEQ ID NO: 3679061 - DNA, 25 bp, Homo sapien
gccactccctcagagtctgggaaag

SEQ ID NO: 3679062 - DNA, 25 bp, Homo sapien
tgatgggtgagtcgccagttctgcc

SEQ ID NO: 3679063 - DNA, 25 bp, Homo sapien
cagttctgccaataatggtccttca

SEQ ID NO: 3679064 - DNA, 25 bp, Homo sapien
ccttcaatgtcacaactgtggctct

SEQ ID NO: 3679065 - DNA, 25 bp, Homo sapien
tgcctgcctgatgggtgagtcgcca

SEQ ID NO: 3679066 - DNA, 25 bp, Homo sapien
ttttcatcagtttaccatcagggaa

SEQ ID NO: 3679067 - DNA, 25 bp, Homo sapien
ttcatcagtttaccatcagggaaaa

SEQ ID NO: 3679068 - DNA, 25 bp, Homo sapien
tttcatcagtttaccatcagggaaa

SEQ ID NO: 3679069 - DNA, 25 bp, Homo sapien
tcatcagtttaccatcagggaaaat

SEQ ID NO: 3679070 - DNA, 25 bp, Homo sapien
cttgaacttgtgaacccagctccct

SEQ ID NO: 3679071 - DNA, 25 bp, Homo sapien
tggatggagaagtctctcctcttta

SEQ ID NO: 3679072 - DNA, 25 bp, Homo sapien
cagacattcccggactatcagcaaa

SEQ ID NO: 3679073 - DNA, 25 bp, Homo sapien
ccggactatcagcaaagctgggttc

SEQ ID NO: 3679074 - DNA, 25 bp, Homo sapien
tctgctgaaaggcatcgtcagggag

SEQ ID NO: 3679075 - DNA, 25 bp, Homo sapien
caggtgagtctgaatactgggaact

SEQ ID NO: 3679076 - DNA, 25 bp, Homo sapien
tggtggcaggtcaactgcaaggaaa

SEQ ID NO: 3679077 - DNA, 25 bp, Homo sapien
aatgacatcatagggctgtgagcag

SEQ ID NO: 3679078 - DNA, 25 bp, Homo sapien
aagagagaaaaatggggtgggccat

SEQ ID NO: 3679079 - DNA, 25 bp, Homo sapien
cttttctgtcaatcatctgaagaga

SEQ ID NO: 3679080 - DNA, 25 bp, Homo sapien
agagaaaaatggggtgggccatagc

SEQ ID NO: 3679081 - DNA, 25 bp, Homo sapien
tttctgtcaatcatctgaagagaga

SEQ ID NO: 3679082 - DNA, 25 bp, Homo sapien
tggctcccttgccccatctgggcct

SEQ ID NO: 3679083 - DNA, 25 bp, Homo sapien
ccatatggctggctcccttgcccca

SEQ ID NO: 3679084 - DNA, 25 bp, Homo sapien
ctcccttgccccatctgggccttta

SEQ ID NO: 3679085 - DNA, 25 bp, Homo sapien
atggctggctcccttgccccatctg

SEQ ID NO: 3679086 - DNA, 25 bp, Homo sapien
tttggaaagtcttttcaccacatac

SEQ ID NO: 3679087 - DNA, 25 bp, Homo sapien
taaggctctaaatttgctatgtccc

SEQ ID NO: 3679088 - DNA, 25 bp, Homo sapien
cttttggaaagtcttttcaccacat

SEQ ID NO: 3679089 - DNA, 25 bp, Homo sapien
tctaaatttgctatgtccccttttg

SEQ ID NO: 3679090 - DNA, 25 bp, Homo sapien
tcctctcacagtaagtgtgcaggtt

SEQ ID NO: 3679091 - DNA, 25 bp, Homo sapien
tattgtggcttgtgatgactccaac

SEQ ID NO: 3679092 - DNA, 25 bp, Homo sapien
tgtggcttcatcaacccaatggagc

SEQ ID NO: 3679093 - DNA, 25 bp, Homo sapien
gtgatgactccaacttggaaggctg

SEQ ID NO: 3679094 - DNA, 25 bp, Homo sapien
tctctcccctatggaaggtttttca

SEQ ID NO: 3679095 - DNA, 25 bp, Homo sapien
tacaaaccgactgattgccttcctg

SEQ ID NO: 3679096 - DNA, 25 bp, Homo sapien
caataacccagctgtacgctctgca

SEQ ID NO: 3679097 - DNA, 25 bp, Homo sapien
tctgcagcgaagcacattcatcccg

SEQ ID NO: 3679098 - DNA, 25 bp, Homo sapien
tcttcagcgacaagtgcaggagctt

SEQ ID NO: 3679099 - DNA, 25 bp, Homo sapien
tttcctctgcggtggtttttgtcat

SEQ ID NO: 3679100 - DNA, 25 bp, Homo sapien
ttgtcattctgctgcatgtgtccat

SEQ ID NO: 3679101 - DNA, 25 bp, Homo sapien
ctaaaactgaacgagtagcaaaagg

SEQ ID NO: 3679102 - DNA, 25 bp, Homo sapien
aacctccttgctaaaactgaacgag

SEQ ID NO: 3679103 - DNA, 25 bp, Homo sapien
gaagtttaagttttgcttagccatg

SEQ ID NO: 3679104 - DNA, 25 bp, Homo sapien
ctgaacgagtagcaaaaggtgtatt

SEQ ID NO: 3679105 - DNA, 25 bp, Homo sapien
tgccatactgtttctggttcagatt

SEQ ID NO: 3679106 - DNA, 25 bp, Homo sapien
tgtgaagaattataagttcttccct

SEQ ID NO: 3679107 - DNA, 25 bp, Homo sapien
gaattataagttcttccctctgtga

SEQ ID NO: 3679108 - DNA, 25 bp, Homo sapien
ccctctgtgagtcagatcccaattc

SEQ ID NO: 3679109 - DNA, 25 bp, Homo sapien
tagaatttacttgcttgaacccaaa

SEQ ID NO: 3679110 - DNA, 25 bp, Homo sapien
caaacactttatgtatggattctga

SEQ ID NO: 3679111 - DNA, 25 bp, Homo sapien
gaaaatatcatggagatataactgg

SEQ ID NO: 3679112 - DNA, 25 bp, Homo sapien
aactggacattgcaaacactttatg

SEQ ID NO: 3679113 - DNA, 25 bp, Homo sapien
aaaaatatcgcaaagacaagaaaag

SEQ ID NO: 3679114 - DNA, 25 bp, Homo sapien
aagacaagaaaagaaatagctaaat

SEQ ID NO: 3679115 - DNA, 25 bp, Homo sapien
acaagaaaagaaatagctaaatgaa

SEQ ID NO: 3679116 - DNA, 25 bp, Homo sapien
caaaaaaaaatatcgcaaagacaag

SEQ ID NO: 3679117 - DNA, 25 bp, Homo sapien
gagagggcggaatgtggaaagaaac

SEQ ID NO: 3679118 - DNA, 25 bp, Homo sapien
cactgggagggtccataagaaagta

SEQ ID NO: 3679119 - DNA, 25 bp, Homo sapien
caaagatgttggtaaattccactga

SEQ ID NO: 3679120 - DNA, 25 bp, Homo sapien
gaaagtaaggctggggcagttctgc

SEQ ID NO: 3679121 - DNA, 25 bp, Homo sapien
catttctcctagactgagctaccat

SEQ ID NO: 3679122 - DNA, 25 bp, Homo sapien
ctctgccagtatttagttcatgtag

SEQ ID NO: 3679123 - DNA, 25 bp, Homo sapien
cctagactgagctaccattatctcc

SEQ ID NO: 3679124 - DNA, 25 bp, Homo sapien
tcatgtagagatgagcgggctccat

SEQ ID NO: 3679125 - DNA, 25 bp, Homo sapien
gggtcctgtgcacaaatggaaccat

SEQ ID NO: 3679126 - DNA, 25 bp, Homo sapien
tcatgggtcctgtgcacaaatggaa

SEQ ID NO: 3679127 - DNA, 25 bp, Homo sapien
tacttccctagaggctcatgggtcc

SEQ ID NO: 3679128 - DNA, 25 bp, Homo sapien
ctttgggccaaatggggactcttca

SEQ ID NO: 3679129 - DNA, 25 bp, Homo sapien
gcgacattttcgagatcctgctgag

SEQ ID NO: 3679130 - DNA, 25 bp, Homo sapien
ttaagcattgcagaaccctaggagg

SEQ ID NO: 3679131 - DNA, 25 bp, Homo sapien
acaactgctctagggaatcaccaag

SEQ ID NO: 3679132 - DNA, 25 bp, Homo sapien
cctcgaataagatgctagtgccaga

SEQ ID NO: 3679133 - DNA, 25 bp, Homo sapien
gcatttgctgtcacacgtcaggtat

SEQ ID NO: 3679134 - DNA, 25 bp, Homo sapien
tgctgtcacacgtcaggtatttagg

SEQ ID NO: 3679135 - DNA, 25 bp, Homo sapien
tttgctgtcacacgtcaggtattta

SEQ ID NO: 3679136 - DNA, 25 bp, Homo sapien
catttgctgtcacacgtcaggtatt

SEQ ID NO: 3679137 - DNA, 25 bp, Homo sapien
tcttagcggcaaaagctgggatcca

SEQ ID NO: 3679138 - DNA, 25 bp, Homo sapien
caggaggccctatacttgtgtggat

SEQ ID NO: 3679139 - DNA, 25 bp, Homo sapien
tcttagtgttttaatcaggaggccc

SEQ ID NO: 3679140 - DNA, 25 bp, Homo sapien
tgccttgtgagagagcgattgcttc

SEQ ID NO: 3679141 - DNA, 25 bp, Homo sapien
ccaagttcaccaacttcccggcttg

SEQ ID NO: 3679142 - DNA, 25 bp, Homo sapien
aagttcaccaacttcccggcttgct

SEQ ID NO: 3679143 - DNA, 25 bp, Homo sapien
acaaggagctcatcaaattccaagt

SEQ ID NO: 3679144 - DNA, 25 bp, Homo sapien
ccaacttcccggcttgctctctgcc

SEQ ID NO: 3679145 - DNA, 25 bp, Homo sapien
gatgcaaaagcattgtaaagagctg

SEQ ID NO: 3679146 - DNA, 25 bp, Homo sapien
aacccagaccgggtcatctttcagt

SEQ ID NO: 3679147 - DNA, 25 bp, Homo sapien
tatgaccttggtcactaggcctctg

SEQ ID NO: 3679148 - DNA, 25 bp, Homo sapien
agttaggacattgtgattctcagcc

SEQ ID NO: 3679149 - DNA, 25 bp, Homo sapien
caaaaatggaagacggccatgtctc

SEQ ID NO: 3679150 - DNA, 25 bp, Homo sapien
tgcacccagccggaacatctgtatt

SEQ ID NO: 3679151 - DNA, 25 bp, Homo sapien
cagaatctcctgtgaagcctactta

SEQ ID NO: 3679152 - DNA, 25 bp, Homo sapien
tggccaacagcttagacaatcagaa

SEQ ID NO: 3679153 - DNA, 25 bp, Homo sapien
actttgaacataccgccaaaacgca

SEQ ID NO: 3679154 - DNA, 25 bp, Homo sapien
tttccatatgttaacaactttgaac

SEQ ID NO: 3679155 - DNA, 25 bp, Homo sapien
cacaaactgtttcaagggttacaat

SEQ ID NO: 3679156 - DNA, 25 bp, Homo sapien
tcacaaactgtttcaagggttacaa

SEQ ID NO: 3679157 - DNA, 25 bp, Homo sapien
gactgtggtaaagctcagtggagtc

SEQ ID NO: 3679158 - DNA, 25 bp, Homo sapien
tggtaaagctcagtggagtcagact

SEQ ID NO: 3679159 - DNA, 25 bp, Homo sapien
tgtcatgtggtagatcagaggtgat

SEQ ID NO: 3679160 - DNA, 25 bp, Homo sapien
tgtaaggtgtcatgtggtagatcag

SEQ ID NO: 3679161 - DNA, 25 bp, Homo sapien
ccaagattgtctgcatctactgggc

SEQ ID NO: 3679162 - DNA, 25 bp, Homo sapien
cagtgtcaatatcggcagcctcctt

SEQ ID NO: 3679163 - DNA, 25 bp, Homo sapien
tagcttctttgcaaaagccctggcc

SEQ ID NO: 3679164 - DNA, 25 bp, Homo sapien
ctgtaactgtcgagcccttttggcc

SEQ ID NO: 3679165 - DNA, 25 bp, Homo sapien
aatccatagcccaatgtggaatcaa

SEQ ID NO: 3679166 - DNA, 25 bp, Homo sapien
aagaatcatgcctaaatatttcaac

SEQ ID NO: 3679167 - DNA, 25 bp, Homo sapien
agcctgaagaatcatgcctaaatat

SEQ ID NO: 3679168 - DNA, 25 bp, Homo sapien
gaatccatagcccaatgtggaatca

SEQ ID NO: 3679169 - DNA, 25 bp, Homo sapien
cctcttctgccatggaacccttggg

SEQ ID NO: 3679170 - DNA, 25 bp, Homo sapien
ctcttctgccatggaacccttgggc

SEQ ID NO: 3679171 - DNA, 25 bp, Homo sapien
tcttctgccatggaacccttgggca

SEQ ID NO: 3679172 - DNA, 25 bp, Homo sapien
cttctgccatggaacccttgggcat

SEQ ID NO: 3679173 - DNA, 25 bp, Homo sapien
taatatcatgcttaatcgtgaaaaa

SEQ ID NO: 3679174 - DNA, 25 bp, Homo sapien
tcaacacagtaaagactatgtatgg

SEQ ID NO: 3679175 - DNA, 25 bp, Homo sapien
tggcaagcccatagctaatatcatg

SEQ ID NO: 3679176 - DNA, 25 bp, Homo sapien
catgcttaatcgtgaaaaattgaaa

SEQ ID NO: 3679177 - DNA, 25 bp, Homo sapien
gagtttttaggcttcaaatcgaggc

SEQ ID NO: 3679178 - DNA, 25 bp, Homo sapien
ggttcaacatatcaaggctaggcct

SEQ ID NO: 3679179 - DNA, 25 bp, Homo sapien
tctcccatagtaaagacaaggtatc

SEQ ID NO: 3679180 - DNA, 25 bp, Homo sapien
gctaggcctggtggaccaaatgata

SEQ ID NO: 3679181 - DNA, 25 bp, Homo sapien
ttttctgtgttcgaaagcctggctc

SEQ ID NO: 3679182 - DNA, 25 bp, Homo sapien
caacagtgggttcattttttagagt

SEQ ID NO: 3679183 - DNA, 25 bp, Homo sapien
taagcctgtgaaaaatcttggcaca

SEQ ID NO: 3679184 - DNA, 25 bp, Homo sapien
ttggtattgtaagcccaacagtggg

SEQ ID NO: 3679185 - DNA, 25 bp, Homo sapien
tgtgtgagaaatgagcggattacct

SEQ ID NO: 3679186 - DNA, 25 bp, Homo sapien
gtgtgagaaatgagcggattacctg

SEQ ID NO: 3679187 - DNA, 25 bp, Homo sapien
tgtgagaaatgagcggattacctga

SEQ ID NO: 3679188 - DNA, 25 bp, Homo sapien
ctgtgtgagaaatgagcggattacc

SEQ ID NO: 3679189 - DNA, 25 bp, Homo sapien
cgagcatgtttgttgtttaccaaga

SEQ ID NO: 3679190 - DNA, 25 bp, Homo sapien
tctctcctggtgatagccatttggc

SEQ ID NO: 3679191 - DNA, 25 bp, Homo sapien
ggacattcctcggaaacagctgcgt

SEQ ID NO: 3679192 - DNA, 25 bp, Homo sapien
ttcggactctctgtacggtattggg

SEQ ID NO: 3679193 - DNA, 25 bp, Homo sapien
ctctgagagaccgagcaggacccgg

SEQ ID NO: 3679194 - DNA, 25 bp, Homo sapien
agctccgcggagtgtgcggctctga

SEQ ID NO: 3679195 - DNA, 25 bp, Homo sapien
cgaaggcgacggctgtggcaggagc

SEQ ID NO: 3679196 - DNA, 25 bp, Homo sapien
gaagcccgcctgcttcgtatccagg

SEQ ID NO: 3679197 - DNA, 25 bp, Homo sapien
gggcatgatccaggcgcggcacctc

SEQ ID NO: 3679198 - DNA, 25 bp, Homo sapien
gtcccggtcgcacagctgaatggcc

SEQ ID NO: 3679199 - DNA, 25 bp, Homo sapien
gctgaggtttttgatcacctcctca

SEQ ID NO: 3679200 - DNA, 25 bp, Homo sapien
cgtcccggtcgcacagctgaatggc

SEQ ID NO: 3679201 - DNA, 25 bp, Homo sapien
ccaggaaatccggactgcggcaaag

SEQ ID NO: 3679202 - DNA, 25 bp, Homo sapien
ggccaatattttcgacagtctgact

SEQ ID NO: 3679203 - DNA, 25 bp, Homo sapien
ggttgctagaaacatcccgagggca

SEQ ID NO: 3679204 - DNA, 25 bp, Homo sapien
tgcggcaaagatcggaaacgcctcg

SEQ ID NO: 3679205 - DNA, 25 bp, Homo sapien
cgacaaggacctagacactggcaaa

SEQ ID NO: 3679206 - DNA, 25 bp, Homo sapien
catgccaataacataagtgaggtct

SEQ ID NO: 3679207 - DNA, 25 bp, Homo sapien
aggttacacggctttcaagagccaa

SEQ ID NO: 3679208 - DNA, 25 bp, Homo sapien
tatgggtactcctcttagatgtctg

SEQ ID NO: 3679209 - DNA, 25 bp, Homo sapien
tcttccctgggaatgaattagaacc

SEQ ID NO: 3679210 - DNA, 25 bp, Homo sapien
taagaacagagaagggctctaaggc

SEQ ID NO: 3679211 - DNA, 25 bp, Homo sapien
taatctacatgctacgtgtcctagt

SEQ ID NO: 3679212 - DNA, 25 bp, Homo sapien
tctctatagtcatatttgggccaaa

SEQ ID NO: 3679213 - DNA, 25 bp, Homo sapien
gctcagactgtcctattcttctata

SEQ ID NO: 3679214 - DNA, 25 bp, Homo sapien
tttaactactgtcccagcactttgg

SEQ ID NO: 3679215 - DNA, 25 bp, Homo sapien
tctgctcaaaggacggtttaactac

SEQ ID NO: 3679216 - DNA, 25 bp, Homo sapien
tgatcactttccatgttgcctgaaa

SEQ ID NO: 3679217 - DNA, 25 bp, Homo sapien
ttttgcacaacagggtaacagatgc

SEQ ID NO: 3679218 - DNA, 25 bp, Homo sapien
gtcagccaggtgaagttttgcacaa

SEQ ID NO: 3679219 - DNA, 25 bp, Homo sapien
gttttgcacaacagggtaacagatg

SEQ ID NO: 3679220 - DNA, 25 bp, Homo sapien
gaagttttgcacaacagggtaacag

SEQ ID NO: 3679221 - DNA, 25 bp, Homo sapien
ggccagcaccatcctgataccaaag

SEQ ID NO: 3679222 - DNA, 25 bp, Homo sapien
gaatcctccctaactcattttatga

SEQ ID NO: 3679223 - DNA, 25 bp, Homo sapien
ctattccgatcagtagaaaaagggg

SEQ ID NO: 3679224 - DNA, 25 bp, Homo sapien
aactattccgatcagtagaaaaagg

SEQ ID NO: 3679225 - DNA, 25 bp, Homo sapien
tgtctgtttggatgtaagttcttca

SEQ ID NO: 3679226 - DNA, 25 bp, Homo sapien
ataacttgccatgaaccaatggtgc

SEQ ID NO: 3679227 - DNA, 25 bp, Homo sapien
ttcttgtctgtttggatgtaagttc

SEQ ID NO: 3679228 - DNA, 25 bp, Homo sapien
catgaaccaatggtgcttttatcct

SEQ ID NO: 3679229 - DNA, 25 bp, Homo sapien
attgataagccgataaaatcctggg

SEQ ID NO: 3679230 - DNA, 25 bp, Homo sapien
actgtcacctcgaaaatgaattggc

SEQ ID NO: 3679231 - DNA, 25 bp, Homo sapien
tatgaatgtgacttaaccaactgtc

SEQ ID NO: 3679232 - DNA, 25 bp, Homo sapien
cattagttataagaggtcccatagc

SEQ ID NO: 3679233 - DNA, 25 bp, Homo sapien
tcactctatccaatcacagggtgac

SEQ ID NO: 3679234 - DNA, 25 bp, Homo sapien
tatccaatcacagggtgacagcaca

SEQ ID NO: 3679235 - DNA, 25 bp, Homo sapien
tttttcctgcaatactgtgtgattt

SEQ ID NO: 3679236 - DNA, 25 bp, Homo sapien
tctatccaatcacagggtgacagca

SEQ ID NO: 3679237 - DNA, 25 bp, Homo sapien
atcaggagataaagcttcactttct

SEQ ID NO: 3679238 - DNA, 25 bp, Homo sapien
caggagataaagcttcactttctgt

SEQ ID NO: 3679239 - DNA, 25 bp, Homo sapien
catcaggagataaagcttcactttc

SEQ ID NO: 3679240 - DNA, 25 bp, Homo sapien
tcaggagataaagcttcactttctg

SEQ ID NO: 3679241 - DNA, 25 bp, Homo sapien
atgccactgtcttgtgatttgttcc

SEQ ID NO: 3679242 - DNA, 25 bp, Homo sapien
aaatagtgtgtaatgcgatcctttg

SEQ ID NO: 3679243 - DNA, 25 bp, Homo sapien
gagtcacacgttatattgcttattt

SEQ ID NO: 3679244 - DNA, 25 bp, Homo sapien
catgaaatcttgaatgagtcacacg

SEQ ID NO: 3679245 - DNA, 25 bp, Homo sapien
cttattttgatgttatgtggtacag

SEQ ID NO: 3679246 - DNA, 25 bp, Homo sapien
tatgctcctcaaaatgcaacattct

SEQ ID NO: 3679247 - DNA, 25 bp, Homo sapien
acttatactacccaataatttcact

SEQ ID NO: 3679248 - DNA, 25 bp, Homo sapien
caaaatgcaacattctcatactaaa

SEQ ID NO: 3679249 - DNA, 25 bp, Homo sapien
tcttttctgtatactatatgctcct

SEQ ID NO: 3679250 - DNA, 25 bp, Homo sapien
caagggaacagcttttgccaccaat

SEQ ID NO: 3679251 - DNA, 25 bp, Homo sapien
aggcaagggaacagcttttgccacc

SEQ ID NO: 3679252 - DNA, 25 bp, Homo sapien
gcaagggaacagcttttgccaccaa

SEQ ID NO: 3679253 - DNA, 25 bp, Homo sapien
agggaacagcttttgccaccaattt

SEQ ID NO: 3679254 - DNA, 25 bp, Homo sapien
gttttgaggcagtctgcactgctac

SEQ ID NO: 3679255 - DNA, 25 bp, Homo sapien
taaaaaccagtgtccacggacagtc

SEQ ID NO: 3679256 - DNA, 25 bp, Homo sapien
ctgcggtgcagaattctataatttc

SEQ ID NO: 3679257 - DNA, 25 bp, Homo sapien
cagttcttgggcttaaaaaccagtg

SEQ ID NO: 3679258 - DNA, 25 bp, Homo sapien
tattctgttacacaatgctactgac

SEQ ID NO: 3679259 - DNA, 25 bp, Homo sapien
gaagccattactcagatttttctac

SEQ ID NO: 3679260 - DNA, 25 bp, Homo sapien
tactgacaacgcaaaaaatgaccaa

SEQ ID NO: 3679261 - DNA, 25 bp, Homo sapien
tcctccaatcaatacaacattgttt

SEQ ID NO: 3679262 - DNA, 25 bp, Homo sapien
ttttatttgcatagctttcatcttg

SEQ ID NO: 3679263 - DNA, 25 bp, Homo sapien
ttatttgcatagctttcatcttgaa

SEQ ID NO: 3679264 - DNA, 25 bp, Homo sapien
tatttgcatagctttcatcttgaag

SEQ ID NO: 3679265 - DNA, 25 bp, Homo sapien
ctttttatttgcatagctttcatct

SEQ ID NO: 3679266 - DNA, 25 bp, Homo sapien
aaacagaaaacttaagcatgcgtcc

SEQ ID NO: 3679267 - DNA, 25 bp, Homo sapien
cagccttctccaacaattgtgttag

SEQ ID NO: 3679268 - DNA, 25 bp, Homo sapien
tgtgctgattacgataaaaaacaga

SEQ ID NO: 3679269 - DNA, 25 bp, Homo sapien
agcatgcgtcctgcaatcacttcag

SEQ ID NO: 3679270 - DNA, 25 bp, Homo sapien
tttagtaaaacaaatcactatatat

SEQ ID NO: 3679271 - DNA, 25 bp, Homo sapien
ctatatttagtaaaacaaatcacta

SEQ ID NO: 3679272 - DNA, 25 bp, Homo sapien
tatttagtaaaacaaatcactatat

SEQ ID NO: 3679273 - DNA, 25 bp, Homo sapien
actatatttagtaaaacaaatcact

SEQ ID NO: 3679274 - DNA, 25 bp, Homo sapien
caatctcgggtacattttatcagca

SEQ ID NO: 3679275 - DNA, 25 bp, Homo sapien
aaaacacactaatacaacagctaaa

SEQ ID NO: 3679276 - DNA, 25 bp, Homo sapien
tctacttaggtagaagtctgcaaat

SEQ ID NO: 3679277 - DNA, 25 bp, Homo sapien
taggtagaagtctgcaaatcccacc

SEQ ID NO: 3679278 - DNA, 25 bp, Homo sapien
tataccaattgagaaaatgaaggac

SEQ ID NO: 3679279 - DNA, 25 bp, Homo sapien
cagtctgtactctctaaattaggtg

SEQ ID NO: 3679280 - DNA, 25 bp, Homo sapien
gaagaacacagatgcctacgtgtgt

SEQ ID NO: 3679281 - DNA, 25 bp, Homo sapien
gctaagtctatatggtcattgccaa

SEQ ID NO: 3679282 - DNA, 25 bp, Homo sapien
tatacgtactgcaccaagacatatt

SEQ ID NO: 3679283 - DNA, 25 bp, Homo sapien
aattatccattttctaggcactctg

SEQ ID NO: 3679284 - DNA, 25 bp, Homo sapien
taaacacagctttcatactggtagc

SEQ ID NO: 3679285 - DNA, 25 bp, Homo sapien
cagtggccacctaaaatagatattg

SEQ ID NO: 3679286 - DNA, 25 bp, Homo sapien
tcctgactatctaccagtgggtgaa

SEQ ID NO: 3679287 - DNA, 25 bp, Homo sapien
taggagtttaggctcccactaagcc

SEQ ID NO: 3679288 - DNA, 25 bp, Homo sapien
actcagtctccggtgacacagggta

SEQ ID NO: 3679289 - DNA, 25 bp, Homo sapien
tggcttcacacactatgagggcaag

SEQ ID NO: 3679290 - DNA, 25 bp, Homo sapien
aacatctactgttaaaggcctgaat

SEQ ID NO: 3679291 - DNA, 25 bp, Homo sapien
ccactgatttatatatttgaatggc

SEQ ID NO: 3679292 - DNA, 25 bp, Homo sapien
cactgcttaatacaatagtggtaaa

SEQ ID NO: 3679293 - DNA, 25 bp, Homo sapien
taatacaatagtggtaaacccactg

SEQ ID NO: 3679294 - DNA, 25 bp, Homo sapien
agtgatttctgccacggtgcccaca

SEQ ID NO: 3679295 - DNA, 25 bp, Homo sapien
gaaggcgctgcttacaaaattcatc

SEQ ID NO: 3679296 - DNA, 25 bp, Homo sapien
gatcccacaggagcaataacaagaa

SEQ ID NO: 3679297 - DNA, 25 bp, Homo sapien
tccactgataggagagccatggcta

SEQ ID NO: 3679298 - DNA, 25 bp, Homo sapien
aattacaccctttcatgcggtttgg

SEQ ID NO: 3679299 - DNA, 25 bp, Homo sapien
tattgtgtactttgctaaagcagtc

SEQ ID NO: 3679300 - DNA, 25 bp, Homo sapien
cagaggaccaatgctcctaagggag

SEQ ID NO: 3679301 - DNA, 25 bp, Homo sapien
ttggaagtgctgacaattctaggct

SEQ ID NO: 3679302 - DNA, 25 bp, Homo sapien
gacatgtacacagttgctattaaaa

SEQ ID NO: 3679303 - DNA, 25 bp, Homo sapien
gatacacaactatttgaggtttaca

SEQ ID NO: 3679304 - DNA, 25 bp, Homo sapien
tgaagtcatctacttctaacaggac

SEQ ID NO: 3679305 - DNA, 25 bp, Homo sapien
catctttgataagggaaatggtttc

SEQ ID NO: 3679306 - DNA, 25 bp, Homo sapien
gtttgccctgataccttgaaaaaga

SEQ ID NO: 3679307 - DNA, 25 bp, Homo sapien
ttaagtctgctaggctctcagtacc

SEQ ID NO: 3679308 - DNA, 25 bp, Homo sapien
caacaggtagccatataattgggaa

SEQ ID NO: 3679309 - DNA, 25 bp, Homo sapien
catagctaggacacttgttagggaa

SEQ ID NO: 3679310 - DNA, 25 bp, Homo sapien
gaatgactggacaaagaatgccttg

SEQ ID NO: 3679311 - DNA, 25 bp, Homo sapien
taaggtggtattcagacatccagcc

SEQ ID NO: 3679312 - DNA, 25 bp, Homo sapien
caagtggaggccgttacagtatact

SEQ ID NO: 3679313 - DNA, 25 bp, Homo sapien
ttagtgtacagaagagaaccaccac

SEQ ID NO: 3679314 - DNA, 25 bp, Homo sapien
caattttttgcaggaacggtgactt

SEQ ID NO: 3679315 - DNA, 25 bp, Homo sapien
tgccagtgcccagtaatgacaagta

SEQ ID NO: 3679316 - DNA, 25 bp, Homo sapien
caagaagagactgcggaaagcctta

SEQ ID NO: 3679317 - DNA, 25 bp, Homo sapien
tctccgagaaactagggctgacaag

SEQ ID NO: 3679318 - DNA, 25 bp, Homo sapien
tgttagggcccttttaccagatgaa

SEQ ID NO: 3679319 - DNA, 25 bp, Homo sapien
gttctcagtaggcacatgggtcacc

SEQ ID NO: 3679320 - DNA, 25 bp, Homo sapien
tgatgaagaccgtccacagggaagc

SEQ ID NO: 3679321 - DNA, 25 bp, Homo sapien
tttaatgaaactgcggaagagctcc

SEQ ID NO: 3679322 - DNA, 25 bp, Homo sapien
ttcttgcaagagaatcttctagttg

SEQ ID NO: 3679323 - DNA, 25 bp, Homo sapien
ggtaccatttgaccatactgtacaa

SEQ ID NO: 3679324 - DNA, 25 bp, Homo sapien
aatagctctcccctgaacttgtcaa

SEQ ID NO: 3679325 - DNA, 25 bp, Homo sapien
aatacagaactagaaaagcatcaca

SEQ ID NO: 3679326 - DNA, 25 bp, Homo sapien
aatgtgcctgcctaacgcaactgcg

SEQ ID NO: 3679327 - DNA, 25 bp, Homo sapien
tggtcatgagagacaggatagccca

SEQ ID NO: 3679328 - DNA, 25 bp, Homo sapien
gagattcaacttagaccccgagtca

SEQ ID NO: 3679329 - DNA, 25 bp, Homo sapien
tgatggtgataacccactgctgtcg

SEQ ID NO: 3679330 - DNA, 25 bp, Homo sapien
ccatggttcttaactcagggatgga

SEQ ID NO: 3679331 - DNA, 25 bp, Homo sapien
gaatgatctttggacaccttaaaac

SEQ ID NO: 3679332 - DNA, 25 bp, Homo sapien
ttttcatgttagtcctggtgagagg

SEQ ID NO: 3679333 - DNA, 25 bp, Homo sapien
gtgtaagatgaacacagatggccat

SEQ ID NO: 3679334 - DNA, 25 bp, Homo sapien
tgtgaagtactaccattcttcataa

SEQ ID NO: 3679335 - DNA, 25 bp, Homo sapien
gtgaagtactaccattcttcataag

SEQ ID NO: 3679336 - DNA, 25 bp, Homo sapien
ctgtgaagtactaccattcttcata

SEQ ID NO: 3679337 - DNA, 25 bp, Homo sapien
tctaacataacaaagaggtcacaag

SEQ ID NO: 3679338 - DNA, 25 bp, Homo sapien
cacaagtttgcagactggtttccag

SEQ ID NO: 3679339 - DNA, 25 bp, Homo sapien
taagtgagagcacagcttatgtttt

SEQ ID NO: 3679340 - DNA, 25 bp, Homo sapien
gtagattggctagccaacagcaggc

SEQ ID NO: 3679341 - DNA, 25 bp, Homo sapien
tgactcactgctcacccattctctg

SEQ ID NO: 3679342 - DNA, 25 bp, Homo sapien
gaagtggtaccttttccaggacagc

SEQ ID NO: 3679343 - DNA, 25 bp, Homo sapien
taaaccacacccatgtctactttac

SEQ ID NO: 3679344 - DNA, 25 bp, Homo sapien
tgttccagctcaccaaagtgagaag

SEQ ID NO: 3679345 - DNA, 25 bp, Homo sapien
ggaaactttgtccttaacatctgaa

SEQ ID NO: 3679346 - DNA, 25 bp, Homo sapien
taagtgttcagtgtgcctgaggcga

SEQ ID NO: 3679347 - DNA, 25 bp, Homo sapien
caatgaagtcgtggctactcccata

SEQ ID NO: 3679348 - DNA, 25 bp, Homo sapien
caataatgattataggagacagaga

SEQ ID NO: 3679349 - DNA, 25 bp, Homo sapien
agacagagcatgtggtatccagcca

SEQ ID NO: 3679350 - DNA, 25 bp, Homo sapien
acagagcatgtggtatccagccagt

SEQ ID NO: 3679351 - DNA, 25 bp, Homo sapien
aacaccagctcatgagagtccacaa

SEQ ID NO: 3679352 - DNA, 25 bp, Homo sapien
caggaacaccagctcatgagagtcc

SEQ ID NO: 3679353 - DNA, 25 bp, Homo sapien
ggaaagttcctatcctgtctggaaa

SEQ ID NO: 3679354 - DNA, 25 bp, Homo sapien
ttttgtaagctagccagtcagttgc

SEQ ID NO: 3679355 - DNA, 25 bp, Homo sapien
cagtgacaagtgaccagtaaccatc

SEQ ID NO: 3679356 - DNA, 25 bp, Homo sapien
gggtcaataacaacttgctctggca

SEQ ID NO: 3679357 - DNA, 25 bp, Homo sapien
ttgcgacccagcatgggcaacttca

SEQ ID NO: 3679358 - DNA, 25 bp, Homo sapien
aataaagagaactaccccgacgcag

SEQ ID NO: 3679359 - DNA, 25 bp, Homo sapien
ggtagaagagcacgcgccgccctct

SEQ ID NO: 3679360 - DNA, 25 bp, Homo sapien
cgaccgtgctggtggacagcgtatt

SEQ ID NO: 3679361 - DNA, 25 bp, Homo sapien
tttgattgttgaacgaagaacacaa

SEQ ID NO: 3679362 - DNA, 25 bp, Homo sapien
ttgtacagaatttgattgttgaacg

SEQ ID NO: 3679363 - DNA, 25 bp, Homo sapien
cgaagaacacaagtgccatcccagc

SEQ ID NO: 3679364 - DNA, 25 bp, Homo sapien
tgttgaacgaagaacacaagtgcca

SEQ ID NO: 3679365 - DNA, 25 bp, Homo sapien
caaataagagtgttatcatgtcagt

SEQ ID NO: 3679366 - DNA, 25 bp, Homo sapien
aatggcttcaaataagagtgttatc

SEQ ID NO: 3679367 - DNA, 25 bp, Homo sapien
ggcttcaaataagagtgttatcatg

SEQ ID NO: 3679368 - DNA, 25 bp, Homo sapien
cttcaaataagagtgttatcatgtc

SEQ ID NO: 3679369 - DNA, 25 bp, Homo sapien
ctttcagaggagtgacagtgattta

SEQ ID NO: 3679370 - DNA, 25 bp, Homo sapien
cttgtctttggacactccccaagga

SEQ ID NO: 3679371 - DNA, 25 bp, Homo sapien
gcttcataggtataacacatcattg

SEQ ID NO: 3679372 - DNA, 25 bp, Homo sapien
ccccaaggagttctgattgcataag

SEQ ID NO: 3679373 - DNA, 25 bp, Homo sapien
tcctggcattgtaaagattctggct

SEQ ID NO: 3679374 - DNA, 25 bp, Homo sapien
tccagggatgcgcaagtattttaaa

SEQ ID NO: 3679375 - DNA, 25 bp, Homo sapien
cccagcatcttgcagaaagtgattt

SEQ ID NO: 3679376 - DNA, 25 bp, Homo sapien
tctgtccaggccaatagagcaggcc

SEQ ID NO: 3679377 - DNA, 25 bp, Homo sapien
tgatccctggctttatgaaaagctg

SEQ ID NO: 3679378 - DNA, 25 bp, Homo sapien
tgggatttttcgataatgtttgttc

SEQ ID NO: 3679379 - DNA, 25 bp, Homo sapien
aagctgggatttttcgataatgttt

SEQ ID NO: 3679380 - DNA, 25 bp, Homo sapien
ccctggctttatgaaaagctgggat

SEQ ID NO: 3679381 - DNA, 25 bp, Homo sapien
ttgttttcttactagagtggccatc

SEQ ID NO: 3679382 - DNA, 25 bp, Homo sapien
gttttcttactagagtggccatctg

SEQ ID NO: 3679383 - DNA, 25 bp, Homo sapien
ttcttactagagtggccatctgctg

SEQ ID NO: 3679384 - DNA, 25 bp, Homo sapien
ttttcttactagagtggccatctgc

SEQ ID NO: 3679385 - DNA, 25 bp, Homo sapien
ttcaaaagagcctttacaccctgct

SEQ ID NO: 3679386 - DNA, 25 bp, Homo sapien
caccctgctaattcacctaagcgtt

SEQ ID NO: 3679387 - DNA, 25 bp, Homo sapien
cacctaagcgtttattattatactc

SEQ ID NO: 3679388 - DNA, 25 bp, Homo sapien
tcattgactattgttgacttcttaa

SEQ ID NO: 3679389 - DNA, 25 bp, Homo sapien
tctttgaagaatcacacttgtgaat

SEQ ID NO: 3679390 - DNA, 25 bp, Homo sapien
cattttgctacatggaaacttgcta

SEQ ID NO: 3679391 - DNA, 25 bp, Homo sapien
gaagttccacctgcaaatcattact

SEQ ID NO: 3679392 - DNA, 25 bp, Homo sapien
ctactttgcactagtattttgaagt

SEQ ID NO: 3679393 - DNA, 25 bp, Homo sapien
cctcacagggagcaagaaagagaag

SEQ ID NO: 3679394 - DNA, 25 bp, Homo sapien
cacagagaaggtggaaaaaagtcca

SEQ ID NO: 3679395 - DNA, 25 bp, Homo sapien
cactgtgaggtggacagcacagaga

SEQ ID NO: 3679396 - DNA, 25 bp, Homo sapien
gaagagggccactgtgaggtggaca

SEQ ID NO: 3679397 - DNA, 25 bp, Homo sapien
aggggtggagcactagtctgcctgg

SEQ ID NO: 3679398 - DNA, 25 bp, Homo sapien
tggagcactagtctgcctggggtgc

SEQ ID NO: 3679399 - DNA, 25 bp, Homo sapien
ggtggagcactagtctgcctggggt

SEQ ID NO: 3679400 - DNA, 25 bp, Homo sapien
ggggtggagcactagtctgcctggg

SEQ ID NO: 3679401 - DNA, 25 bp, Homo sapien
acaactgcctcgctgaacgggataa

SEQ ID NO: 3679402 - DNA, 25 bp, Homo sapien
tgcctcgctgaacgggataaagtcc

SEQ ID NO: 3679403 - DNA, 25 bp, Homo sapien
gctgaacgggataaagtcctaattc

SEQ ID NO: 3679404 - DNA, 25 bp, Homo sapien
gtcctaattctctgaagatggatgc

SEQ ID NO: 3679405 - DNA, 25 bp, Homo sapien
tatactgttgagtgcaaatagcaaa

SEQ ID NO: 3679406 - DNA, 25 bp, Homo sapien
ccaggagggaccttcaaagatgcac

SEQ ID NO: 3679407 - DNA, 25 bp, Homo sapien
tcatagcagtcaaaaatggcaaaca

SEQ ID NO: 3679408 - DNA, 25 bp, Homo sapien
aaactgataaagtggatctctctgg

SEQ ID NO: 3679409 - DNA, 25 bp, Homo sapien
cagaatcagggtaagtggagcttct

SEQ ID NO: 3679410 - DNA, 25 bp, Homo sapien
cagggtaagtggagcttctctgtgc

SEQ ID NO: 3679411 - DNA, 25 bp, Homo sapien
gaatcagggtaagtggagcttctct

SEQ ID NO: 3679412 - DNA, 25 bp, Homo sapien
aatcagggtaagtggagcttctctg

SEQ ID NO: 3679413 - DNA, 25 bp, Homo sapien
tgaggcgaacgatgacgttgcaggg

SEQ ID NO: 3679414 - DNA, 25 bp, Homo sapien
gcgaacgatgacgttgcaggggttg

SEQ ID NO: 3679415 - DNA, 25 bp, Homo sapien
ctgaggcgaacgatgacgttgcagg

SEQ ID NO: 3679416 - DNA, 25 bp, Homo sapien
aacgatgacgttgcaggggttgggc

SEQ ID NO: 3679417 - DNA, 25 bp, Homo sapien
gtttctgttactgactctcctccga

SEQ ID NO: 3679418 - DNA, 25 bp, Homo sapien
ggcctggctgtcgatcggctccatt

SEQ ID NO: 3679419 - DNA, 25 bp, Homo sapien
tcctccgaaccaaagctgccccttg

SEQ ID NO: 3679420 - DNA, 25 bp, Homo sapien
ctgtagtttctgttactgactctcc

SEQ ID NO: 3679421 - DNA, 25 bp, Homo sapien
gtgccaggccatccacttcatatcc

SEQ ID NO: 3679422 - DNA, 25 bp, Homo sapien
ccaaggcggaagcctcctcagggct

SEQ ID NO: 3679423 - DNA, 25 bp, Homo sapien
tgtgccaggccatccacttcatatc

SEQ ID NO: 3679424 - DNA, 25 bp, Homo sapien
ggctcccctcctcacgtctcttttc

SEQ ID NO: 3679425 - DNA, 25 bp, Homo sapien
tctgcgctttgctctcggtgggctt

SEQ ID NO: 3679426 - DNA, 25 bp, Homo sapien
tgctgtttccaggaggcctctcgga

SEQ ID NO: 3679427 - DNA, 25 bp, Homo sapien
ttttctgtcctgctaccagctgact

SEQ ID NO: 3679428 - DNA, 25 bp, Homo sapien
gccgttttgagtgaacacattgtgt

SEQ ID NO: 3679429 - DNA, 25 bp, Homo sapien
agaggtacagctaccccagtctggg

SEQ ID NO: 3679430 - DNA, 25 bp, Homo sapien
ccccatgatgccgttttgagtgaac

SEQ ID NO: 3679431 - DNA, 25 bp, Homo sapien
ctgctgcttccccatgatgccgttt

SEQ ID NO: 3679432 - DNA, 25 bp, Homo sapien
attcagagttttcaatggtccatac

SEQ ID NO: 3679433 - DNA, 25 bp, Homo sapien
gattcagagttttcaatggtccata

SEQ ID NO: 3679434 - DNA, 25 bp, Homo sapien
gtgattcagagttttcaatggtcca

SEQ ID NO: 3679435 - DNA, 25 bp, Homo sapien
cagtgattcagagttttcaatggtc

SEQ ID NO: 3679436 - DNA, 25 bp, Homo sapien
caggtctggtaatgagcaggctgct

SEQ ID NO: 3679437 - DNA, 25 bp, Homo sapien
tcttggggctggacaaatgagatgt

SEQ ID NO: 3679438 - DNA, 25 bp, Homo sapien
gaagcacttgggaaagcacgcagca

SEQ ID NO: 3679439 - DNA, 25 bp, Homo sapien
cagcaggtctggtaatgagcaggct

SEQ ID NO: 3679440 - DNA, 25 bp, Homo sapien
tataattttactgggcttactagag

SEQ ID NO: 3679441 - DNA, 25 bp, Homo sapien
gggactggaatgacttatttcctgg

SEQ ID NO: 3679442 - DNA, 25 bp, Homo sapien
gaaaccggcaggaaccaatagatgg

SEQ ID NO: 3679443 - DNA, 25 bp, Homo sapien
cacttcaggatataagaggatgagc

SEQ ID NO: 3679444 - DNA, 25 bp, Homo sapien
tgatcttcatgcttttgctcatgct

SEQ ID NO: 3679445 - DNA, 25 bp, Homo sapien
cttagcagcatcctctttgaattct

SEQ ID NO: 3679446 - DNA, 25 bp, Homo sapien
ttagcagcatcctctttgaattctg

SEQ ID NO: 3679447 - DNA, 25 bp, Homo sapien
tgaattctgatcttcatgcttttgc

SEQ ID NO: 3679448 - DNA, 25 bp, Homo sapien
catagcaagactctgtctgtagttt

SEQ ID NO: 3679449 - DNA, 25 bp, Homo sapien
ggaggtcaaggtaggattgcttcag

SEQ ID NO: 3679450 - DNA, 25 bp, Homo sapien
tgggaggtcaaggtaggattgcttc

SEQ ID NO: 3679451 - DNA, 25 bp, Homo sapien
aggtcaaggtaggattgcttcaggc

SEQ ID NO: 3679452 - DNA, 25 bp, Homo sapien
tggctctccatctcagttgagcagc

SEQ ID NO: 3679453 - DNA, 25 bp, Homo sapien
gctctccatctcagttgagcagcca

SEQ ID NO: 3679454 - DNA, 25 bp, Homo sapien
catccctcctcgccccctctctgct

SEQ ID NO: 3679455 - DNA, 25 bp, Homo sapien
ccaagtggctgtgctctcaggctga

SEQ ID NO: 3679456 - DNA, 25 bp, Homo sapien
gccagcatgggcaagctctcttcct

SEQ ID NO: 3679457 - DNA, 25 bp, Homo sapien
agggtgccagcatgggcaagctctc

SEQ ID NO: 3679458 - DNA, 25 bp, Homo sapien
tgccagcatgggcaagctctcttcc

SEQ ID NO: 3679459 - DNA, 25 bp, Homo sapien
ggtgccagcatgggcaagctctctt

SEQ ID NO: 3679460 - DNA, 25 bp, Homo sapien
aagccagcagcataagaagactcca

SEQ ID NO: 3679461 - DNA, 25 bp, Homo sapien
ataagaagactccagttccctgtgc

SEQ ID NO: 3679462 - DNA, 25 bp, Homo sapien
cagcagcataagaagactccagttc

SEQ ID NO: 3679463 - DNA, 25 bp, Homo sapien
cctgaagccagcagcataagaagac

SEQ ID NO: 3679464 - DNA, 25 bp, Homo sapien
tgggggtcccctgacgcagaatgga

SEQ ID NO: 3679465 - DNA, 25 bp, Homo sapien
gaatggagatccaagatgtcaagaa

SEQ ID NO: 3679466 - DNA, 25 bp, Homo sapien
cgcagaatggagatccaagatgtca

SEQ ID NO: 3679467 - DNA, 25 bp, Homo sapien
tgacgcagaatggagatccaagatg

SEQ ID NO: 3679468 - DNA, 25 bp, Homo sapien
ggaattttctgcaggatctgtctgt

SEQ ID NO: 3679469 - DNA, 25 bp, Homo sapien
cctggaattttctgcaggatctgtc

SEQ ID NO: 3679470 - DNA, 25 bp, Homo sapien
ctgtggttaccgtattgcacaacac

SEQ ID NO: 3679471 - DNA, 25 bp, Homo sapien
acaggtctagtaggaaggattgtga

SEQ ID NO: 3679472 - DNA, 25 bp, Homo sapien
taagacatgccagatgggaataggg

SEQ ID NO: 3679473 - DNA, 25 bp, Homo sapien
catgccagatgggaatagggcattc

SEQ ID NO: 3679474 - DNA, 25 bp, Homo sapien
tgactaagacatgccagatgggaat

SEQ ID NO: 3679475 - DNA, 25 bp, Homo sapien
gtgtgactaagacatgccagatggg

SEQ ID NO: 3679476 - DNA, 25 bp, Homo sapien
ggtcctcgctggtgaacagctcttc

SEQ ID NO: 3679477 - DNA, 25 bp, Homo sapien
tgccttctcctttcaaacggacaag

SEQ ID NO: 3679478 - DNA, 25 bp, Homo sapien
tggtttgctgacacattaggtctcc

SEQ ID NO: 3679479 - DNA, 25 bp, Homo sapien
cccgaggcctgttgtaagggttatg

SEQ ID NO: 3679480 - DNA, 25 bp, Homo sapien
aataatgcaataatggagctccaag

SEQ ID NO: 3679481 - DNA, 25 bp, Homo sapien
cgaaggcgcctgaagcactttataa

SEQ ID NO: 3679482 - DNA, 25 bp, Homo sapien
caagttgtcttggacttctacacca

SEQ ID NO: 3679483 - DNA, 25 bp, Homo sapien
taaataggaggcacccttcccattg

SEQ ID NO: 3679484 - DNA, 25 bp, Homo sapien
gactggacccagacctatgatattg

SEQ ID NO: 3679485 - DNA, 25 bp, Homo sapien
tttagtggcttctgcgtcctgctgg

SEQ ID NO: 3679486 - DNA, 25 bp, Homo sapien
taaaccacgctggaagtagtggagt

SEQ ID NO: 3679487 - DNA, 25 bp, Homo sapien
gccttgccctcttgggatacatgca

SEQ ID NO: 3679488 - DNA, 25 bp, Homo sapien
aaaatcccatgctaagtagcacaga

SEQ ID NO: 3679489 - DNA, 25 bp, Homo sapien
ttgaatttgcaacccactcttatcc

SEQ ID NO: 3679490 - DNA, 25 bp, Homo sapien
tcccatgctaagtagcacagactgg

SEQ ID NO: 3679491 - DNA, 25 bp, Homo sapien
cagactggaccagaacttagataca

SEQ ID NO: 3679492 - DNA, 25 bp, Homo sapien
aattctgtaaatcggtatgccctaa

SEQ ID NO: 3679493 - DNA, 25 bp, Homo sapien
ccaggattttccgttgttccatcaa

SEQ ID NO: 3679494 - DNA, 25 bp, Homo sapien
tatccaacacaaactatccccgaag

SEQ ID NO: 3679495 - DNA, 25 bp, Homo sapien
tgagttggcttcagcttcgagaaat

SEQ ID NO: 3679496 - DNA, 25 bp, Homo sapien
ggcttcgagtgtccacggtgcgccc

SEQ ID NO: 3679497 - DNA, 25 bp, Homo sapien
tgctgcccagcgtcctagaggcaag

SEQ ID NO: 3679498 - DNA, 25 bp, Homo sapien
ggcaagaagtaactccgactcggag

SEQ ID NO: 3679499 - DNA, 25 bp, Homo sapien
tggagcagcatggaaccgggctttt

SEQ ID NO: 3679500 - DNA, 25 bp, Homo sapien
tgtagagtcttcgtctaggccagga

SEQ ID NO: 3679501 - DNA, 25 bp, Homo sapien
tcaaggtggttgatggccgcagtcc

SEQ ID NO: 3679502 - DNA, 25 bp, Homo sapien
gaaccactggtacctatggacagcc

SEQ ID NO: 3679503 - DNA, 25 bp, Homo sapien
gccgcagtcccctttaagaagtaga

SEQ ID NO: 3679504 - DNA, 25 bp, Homo sapien
tctgagtttatgacccctgagaacc

SEQ ID NO: 3679505 - DNA, 25 bp, Homo sapien
tacatgtcttaatgctcccctgcag

SEQ ID NO: 3679506 - DNA, 25 bp, Homo sapien
caagtgtctactgccccagggcaag

SEQ ID NO: 3679507 - DNA, 25 bp, Homo sapien
ggcagcagtccccttagccaagtgt

SEQ ID NO: 3679508 - DNA, 25 bp, Homo sapien
ctcaggtgctggtcaagtgtaccac

SEQ ID NO: 3679509 - DNA, 25 bp, Homo sapien
tgacctgatgacaccttgctctgcc

SEQ ID NO: 3679510 - DNA, 25 bp, Homo sapien
tcagggaggaaagtctggtcagcca

SEQ ID NO: 3679511 - DNA, 25 bp, Homo sapien
tcattctctaaaggactaaggtggc

SEQ ID NO: 3679512 - DNA, 25 bp, Homo sapien
agtacatgttaggagcttctcccca

SEQ ID NO: 3679513 - DNA, 25 bp, Homo sapien
tcacttgacatacaattgacatgca

SEQ ID NO: 3679514 - DNA, 25 bp, Homo sapien
taacatgtagcctttcctatctgtc

SEQ ID NO: 3679515 - DNA, 25 bp, Homo sapien
cagagttctgcaatcaacatcacag

SEQ ID NO: 3679516 - DNA, 25 bp, Homo sapien
gaccctcaggagtgctgccaggcga

SEQ ID NO: 3679517 - DNA, 25 bp, Homo sapien
caggagtgctgccaggcgagccaac

SEQ ID NO: 3679518 - DNA, 25 bp, Homo sapien
gcgggtgggtgatcagatggaccct

SEQ ID NO: 3679519 - DNA, 25 bp, Homo sapien
tgggtgatcagatggaccctcagga

SEQ ID NO: 3679520 - DNA, 25 bp, Homo sapien
ctgaggaagcctcgcacagctgatc

SEQ ID NO: 3679521 - DNA, 25 bp, Homo sapien
ctctctgaggaagcctcgcacagct

SEQ ID NO: 3679522 - DNA, 25 bp, Homo sapien
agtgtctgctggcaccgctgcgttg

SEQ ID NO: 3679523 - DNA, 25 bp, Homo sapien
tcctcgcaccactcaaaggacaagt

SEQ ID NO: 3679524 - DNA, 25 bp, Homo sapien
caatggaattagactggaacccaaa

SEQ ID NO: 3679525 - DNA, 25 bp, Homo sapien
tgtgaagaggctgctaaagtccttt

SEQ ID NO: 3679526 - DNA, 25 bp, Homo sapien
tgctaaagtcctttggatttcctga

SEQ ID NO: 3679527 - DNA, 25 bp, Homo sapien
ggtaaatgttcaggcagtgtgaaga

SEQ ID NO: 3679528 - DNA, 25 bp, Homo sapien
aaaagtttcatcagactctcctggt

SEQ ID NO: 3679529 - DNA, 25 bp, Homo sapien
cagactctcctggtacccagatttc

SEQ ID NO: 3679530 - DNA, 25 bp, Homo sapien
ctggtacccagatttccagccatgt

SEQ ID NO: 3679531 - DNA, 25 bp, Homo sapien
actctcctggtacccagatttccag

SEQ ID NO: 3679532 - DNA, 25 bp, Homo sapien
caagcccaggttgcctctcatgagg

SEQ ID NO: 3679533 - DNA, 25 bp, Homo sapien
ttagcctggaaagcgaaagtggact

SEQ ID NO: 3679534 - DNA, 25 bp, Homo sapien
ggttgacccctgagccttctttgga

SEQ ID NO: 3679535 - DNA, 25 bp, Homo sapien
gacttgatttggaacttagcctgga

SEQ ID NO: 3679536 - DNA, 25 bp, Homo sapien
gcacttggagtgagcgaacatttcc

SEQ ID NO: 3679537 - DNA, 25 bp, Homo sapien
tgaggacctatgcagagcctgtaac

SEQ ID NO: 3679538 - DNA, 25 bp, Homo sapien
cctgtaacacttgggtagtacctgc

SEQ ID NO: 3679539 - DNA, 25 bp, Homo sapien
gactgggccatgtcaaacccggaat

SEQ ID NO: 3679540 - DNA, 25 bp, Homo sapien
tactatttgaaatggacattatcgc

SEQ ID NO: 3679541 - DNA, 25 bp, Homo sapien
ataaggtctaaaggaaagtagcaca

SEQ ID NO: 3679542 - DNA, 25 bp, Homo sapien
gcattatcttggcataatggccaga

SEQ ID NO: 3679543 - DNA, 25 bp, Homo sapien
cattgatggctgttcatttcaccca

SEQ ID NO: 3679544 - DNA, 25 bp, Homo sapien
cagatggcccaaagtaatgaatcat

SEQ ID NO: 3679545 - DNA, 25 bp, Homo sapien
catgtctctcgtaaaacagatggcc

SEQ ID NO: 3679546 - DNA, 25 bp, Homo sapien
taaatgttgtcctactcaccggtgg

SEQ ID NO: 3679547 - DNA, 25 bp, Homo sapien
caccggtggtttcaatggctaatta

SEQ ID NO: 3679548 - DNA, 25 bp, Homo sapien
gagggccgagacaaggttgacctta

SEQ ID NO: 3679549 - DNA, 25 bp, Homo sapien
tgaaaaaagtgctctgccttgccca

SEQ ID NO: 3679550 - DNA, 25 bp, Homo sapien
tccctataagatgaaggagggccga

SEQ ID NO: 3679551 - DNA, 25 bp, Homo sapien
gttgaccttaacactgtatccctgg

SEQ ID NO: 3679552 - DNA, 25 bp, Homo sapien
taaccagtatcggagtacttgccat

SEQ ID NO: 3679553 - DNA, 25 bp, Homo sapien
tgagttgcccatatgttaaccagta

SEQ ID NO: 3679554 - DNA, 25 bp, Homo sapien
taggttctgaagtcaccagtggccc

SEQ ID NO: 3679555 - DNA, 25 bp, Homo sapien
cagtggccctgattgtgctcataag

SEQ ID NO: 3679556 - DNA, 25 bp, Homo sapien
gcttaagtctccgtatcttaactga

SEQ ID NO: 3679557 - DNA, 25 bp, Homo sapien
gtctccgtatcttaactgaatactg

SEQ ID NO: 3679558 - DNA, 25 bp, Homo sapien
atactgatacccaaggttggggaat

SEQ ID NO: 3679559 - DNA, 25 bp, Homo sapien
gcagctgtttgcttaagtctccgta

SEQ ID NO: 3679560 - DNA, 25 bp, Homo sapien
tgagttgcacagaggtggcactggg

SEQ ID NO: 3679561 - DNA, 25 bp, Homo sapien
ctgagttgcacagaggtggcactgg

SEQ ID NO: 3679562 - DNA, 25 bp, Homo sapien
gagttgcacagaggtggcactgggc

SEQ ID NO: 3679563 - DNA, 25 bp, Homo sapien
agactgttgggacctgctgggcggg

SEQ ID NO: 3679564 - DNA, 25 bp, Homo sapien
gctgaggagactgttgggacctgct

SEQ ID NO: 3679565 - DNA, 25 bp, Homo sapien
tctgccagattatagaaaggtagtc

SEQ ID NO: 3679566 - DNA, 25 bp, Homo sapien
gggtcgggcagacaacgctctgctc

SEQ ID NO: 3679567 - DNA, 25 bp, Homo sapien
ctctctgaaagccatcgttgactgg

SEQ ID NO: 3679568 - DNA, 25 bp, Homo sapien
aggtatctgccgttacttggccaca

SEQ ID NO: 3679569 - DNA, 25 bp, Homo sapien
actggatgtctcaggtatctgccgt

SEQ ID NO: 3679570 - DNA, 25 bp, Homo sapien
aagccatcgttgactggatgtctca

SEQ ID NO: 3679571 - DNA, 25 bp, Homo sapien
tgctgtctgcttgttgagattgaat

SEQ ID NO: 3679572 - DNA, 25 bp, Homo sapien
gtgttaaacacttcacctgttgctt

SEQ ID NO: 3679573 - DNA, 25 bp, Homo sapien
tgagtcttttgtgctgtctgcttgt

SEQ ID NO: 3679574 - DNA, 25 bp, Homo sapien
tctataagtgaacagtttgagtctt

SEQ ID NO: 3679575 - DNA, 25 bp, Homo sapien
ctggcctggtgctgtagggaataca

SEQ ID NO: 3679576 - DNA, 25 bp, Homo sapien
gaatgttagggctctcccggtagca

SEQ ID NO: 3679577 - DNA, 25 bp, Homo sapien
ttgactttcattcagcctggccctg

SEQ ID NO: 3679578 - DNA, 25 bp, Homo sapien
cctggatcagacatatggagtgcaa

SEQ ID NO: 3679579 - DNA, 25 bp, Homo sapien
gctaccttgcagcatacacctgggt

SEQ ID NO: 3679580 - DNA, 25 bp, Homo sapien
gaaggtgccaacactctctctggga

SEQ ID NO: 3679581 - DNA, 25 bp, Homo sapien
tggctccagaggcacgggtatgtat

SEQ ID NO: 3679582 - DNA, 25 bp, Homo sapien
gaccattgcaatcagtgtgcccttg

SEQ ID NO: 3679583 - DNA, 25 bp, Homo sapien
tggcagcgggaagcgccctctcttt

SEQ ID NO: 3679584 - DNA, 25 bp, Homo sapien
gagccccagtgcaatactgcccaag

SEQ ID NO: 3679585 - DNA, 25 bp, Homo sapien
gggtcccggagctttcagccagctt

SEQ ID NO: 3679586 - DNA, 25 bp, Homo sapien
gccagctttgctgggcggcctaggg

SEQ ID NO: 3679587 - DNA, 25 bp, Homo sapien
taacaaggttaacctgtggctgctg

SEQ ID NO: 3679588 - DNA, 25 bp, Homo sapien
tgtttaaacaattgagcgcagtgtg

SEQ ID NO: 3679589 - DNA, 25 bp, Homo sapien
taatcctactacgagacatgtgctg

SEQ ID NO: 3679590 - DNA, 25 bp, Homo sapien
cgcgcacacacagtcggcggaagat

SEQ ID NO: 3679591 - DNA, 25 bp, Homo sapien
gactgctgtctgcaataaagtcacc

SEQ ID NO: 3679592 - DNA, 25 bp, Homo sapien
cagcctttgcgaggagttgtggatt

SEQ ID NO: 3679593 - DNA, 25 bp, Homo sapien
actgctgtctgcaataaagtcacca

SEQ ID NO: 3679594 - DNA, 25 bp, Homo sapien
ctttgcgaggagttgtggattgact

SEQ ID NO: 3679595 - DNA, 25 bp, Homo sapien
ggaacttggcaatccagtctacttc

SEQ ID NO: 3679596 - DNA, 25 bp, Homo sapien
tgcttaacacgtgcaattttatttc

SEQ ID NO: 3679597 - DNA, 25 bp, Homo sapien
tacttctatcttataattccaccat

SEQ ID NO: 3679598 - DNA, 25 bp, Homo sapien
tctgctgcttaacacgtgcaatttt

SEQ ID NO: 3679599 - DNA, 25 bp, Homo sapien
tgggagacataatcagcacctggcg

SEQ ID NO: 3679600 - DNA, 25 bp, Homo sapien
gacacattagattcaggtatgggag

SEQ ID NO: 3679601 - DNA, 25 bp, Homo sapien
cagttctggcaaatcatcagggtga

SEQ ID NO: 3679602 - DNA, 25 bp, Homo sapien
aaggagggactagcagtgatcagtt

SEQ ID NO: 3679603 - DNA, 25 bp, Homo sapien
tgcccggccatgatgccagctcttg

SEQ ID NO: 3679604 - DNA, 25 bp, Homo sapien
actccagtttgagttagtgcctcca

SEQ ID NO: 3679605 - DNA, 25 bp, Homo sapien
tgagggattcatgcctactgattac

SEQ ID NO: 3679606 - DNA, 25 bp, Homo sapien
gaagaactcatggtccactgaggga

SEQ ID NO: 3679607 - DNA, 25 bp, Homo sapien
tgtggccacgggctatggtgctcat

SEQ ID NO: 3679608 - DNA, 25 bp, Homo sapien
acaacctccttcttagccaaagagt

SEQ ID NO: 3679609 - DNA, 25 bp, Homo sapien
gctcatcctaatcactgactggcca

SEQ ID NO: 3679610 - DNA, 25 bp, Homo sapien
tggatgttccaatacctcatgagca

SEQ ID NO: 3679611 - DNA, 25 bp, Homo sapien
tatgacagggatatgtgagaagccc

SEQ ID NO: 3679612 - DNA, 25 bp, Homo sapien
gtcagcatcagctcacgtttggctg

SEQ ID NO: 3679613 - DNA, 25 bp, Homo sapien
cacgtttggctgtatgacagggata

SEQ ID NO: 3679614 - DNA, 25 bp, Homo sapien
tgacagggatatgtgagaagcccag

SEQ ID NO: 3679615 - DNA, 25 bp, Homo sapien
ggcatcctgatgttcctcgctgttc

SEQ ID NO: 3679616 - DNA, 25 bp, Homo sapien
taaaatgtgctatcactgtattgcc

SEQ ID NO: 3679617 - DNA, 25 bp, Homo sapien
tcattgaacacataagcagctagcc

SEQ ID NO: 3679618 - DNA, 25 bp, Homo sapien
tcctggagttccatcaagactgagg

SEQ ID NO: 3679619 - DNA, 25 bp, Homo sapien
gcctgtccattaaagattgttgcca

SEQ ID NO: 3679620 - DNA, 25 bp, Homo sapien
gccaaatggagtgagttgtccccag

SEQ ID NO: 3679621 - DNA, 25 bp, Homo sapien
ggttgcatctgcatggtatcccaaa

SEQ ID NO: 3679622 - DNA, 25 bp, Homo sapien
cactaaaactggagtgctcactaca

SEQ ID NO: 3679623 - DNA, 25 bp, Homo sapien
tcctggccaatccaccccattggtc

SEQ ID NO: 3679624 - DNA, 25 bp, Homo sapien
ctggccaatccaccccattggtcct

SEQ ID NO: 3679625 - DNA, 25 bp, Homo sapien
gtcctggccaatccaccccattggt

SEQ ID NO: 3679626 - DNA, 25 bp, Homo sapien
caaaaggtagttgtctaatcccttg

SEQ ID NO: 3679627 - DNA, 25 bp, Homo sapien
aaatgcttgccgctttagaggtgga

SEQ ID NO: 3679628 - DNA, 25 bp, Homo sapien
gatgtagacacctttcagtaagcca

SEQ ID NO: 3679629 - DNA, 25 bp, Homo sapien
ggtggatggtgctcataaaaggccc

SEQ ID NO: 3679630 - DNA, 25 bp, Homo sapien
ctagtagaatggcagcacgctgtaa

SEQ ID NO: 3679631 - DNA, 25 bp, Homo sapien
ttggcgcgtgtgcaattagcaatgc

SEQ ID NO: 3679632 - DNA, 25 bp, Homo sapien
gaagaaattcctgccatcagaaggg

SEQ ID NO: 3679633 - DNA, 25 bp, Homo sapien
caaactgtcagggtataaacactat

SEQ ID NO: 3679634 - DNA, 25 bp, Homo sapien
tcactttcatttccggattggcgcg

SEQ ID NO: 3679635 - DNA, 25 bp, Homo sapien
gactgaaccagcatagttaacactg

SEQ ID NO: 3679636 - DNA, 25 bp, Homo sapien
ggactgaaccagcatagttaacact

SEQ ID NO: 3679637 - DNA, 25 bp, Homo sapien
ctggactgaaccagcatagttaaca

SEQ ID NO: 3679638 - DNA, 25 bp, Homo sapien
tggactgaaccagcatagttaacac

SEQ ID NO: 3679639 - DNA, 25 bp, Homo sapien
gaatatgatccaaataacttgaggc

SEQ ID NO: 3679640 - DNA, 25 bp, Homo sapien
tgcgcagacttttgaatatgatcca

SEQ ID NO: 3679641 - DNA, 25 bp, Homo sapien
aaagccattttcaatgcgcagactt

SEQ ID NO: 3679642 - DNA, 25 bp, Homo sapien
caaataacttgaggcttcttggtta

SEQ ID NO: 3679643 - DNA, 25 bp, Homo sapien
tcactacccgagttattcgccggcg

SEQ ID NO: 3679644 - DNA, 25 bp, Homo sapien
tcctgtagctggatcattatgtggc

SEQ ID NO: 3679645 - DNA, 25 bp, Homo sapien
agaggaagagcggagagtcactacc

SEQ ID NO: 3679646 - DNA, 25 bp, Homo sapien
cttgtggttgtagaaactccttcct

SEQ ID NO: 3679647 - DNA, 25 bp, Homo sapien
gagaagctggcaaatttgaagcaaa

SEQ ID NO: 3679648 - DNA, 25 bp, Homo sapien
aggagaagctggcaaatttgaagca

SEQ ID NO: 3679649 - DNA, 25 bp, Homo sapien
agaagctggcaaatttgaagcaaat

SEQ ID NO: 3679650 - DNA, 25 bp, Homo sapien
ggagaagctggcaaatttgaagcaa

SEQ ID NO: 3679651 - DNA, 25 bp, Homo sapien
tacaggttggcagaatgagacatca

SEQ ID NO: 3679652 - DNA, 25 bp, Homo sapien
gagtcctgcgctcaagctcgaagag

SEQ ID NO: 3679653 - DNA, 25 bp, Homo sapien
gaacatagagcattccgcagatgga

SEQ ID NO: 3679654 - DNA, 25 bp, Homo sapien
gatgttaaaccagcagagcctagaa

SEQ ID NO: 3679655 - DNA, 25 bp, Homo sapien
acagcagctaagttggtatttacct

SEQ ID NO: 3679656 - DNA, 25 bp, Homo sapien
gttcacttacctatagcaatttgag

SEQ ID NO: 3679657 - DNA, 25 bp, Homo sapien
caatttgagtttacaacagcagcta

SEQ ID NO: 3679658 - DNA, 25 bp, Homo sapien
taaacctcagctaatcttagccagc

SEQ ID NO: 3679659 - DNA, 25 bp, Homo sapien
aactggcaaagttagattaacaaga

SEQ ID NO: 3679660 - DNA, 25 bp, Homo sapien
ccacccagcctctataatgaatttt

SEQ ID NO: 3679661 - DNA, 25 bp, Homo sapien
caaacacaatgggtaatgaagtaaa

SEQ ID NO: 3679662 - DNA, 25 bp, Homo sapien
taagtctggccaagcactgtctgtc

SEQ ID NO: 3679663 - DNA, 25 bp, Homo sapien
tctcgaacctctccagtgactacag

SEQ ID NO: 3679664 - DNA, 25 bp, Homo sapien
tcgccgataaaaactgtggtgtcac

SEQ ID NO: 3679665 - DNA, 25 bp, Homo sapien
ctagagctccagcagtcacggaagc

SEQ ID NO: 3679666 - DNA, 25 bp, Homo sapien
aaagggctggcatccaattctacgt

SEQ ID NO: 3679667 - DNA, 25 bp, Homo sapien
caatcaaatccacattaggcgcgtc

SEQ ID NO: 3679668 - DNA, 25 bp, Homo sapien
taggcgcgtcaactacatcttcagt

SEQ ID NO: 3679669 - DNA, 25 bp, Homo sapien
gacaacagctccgattacagtgcct

SEQ ID NO: 3679670 - DNA, 25 bp, Homo sapien
tccattagtgacgtggcatctccaa

SEQ ID NO: 3679671 - DNA, 25 bp, Homo sapien
ttactcatacaagccattcttttct

SEQ ID NO: 3679672 - DNA, 25 bp, Homo sapien
caagccattcttttctacaagacca

SEQ ID NO: 3679673 - DNA, 25 bp, Homo sapien
ctcatacaagccattcttttctaca

SEQ ID NO: 3679674 - DNA, 25 bp, Homo sapien
agccattcttttctacaagaccata

SEQ ID NO: 3679675 - DNA, 25 bp, Homo sapien
ggaccaggaagttctatctatgact

SEQ ID NO: 3679676 - DNA, 25 bp, Homo sapien
tctatctatgactgacgagaacagt

SEQ ID NO: 3679677 - DNA, 25 bp, Homo sapien
tgactgacgagaacagtcaactgag

SEQ ID NO: 3679678 - DNA, 25 bp, Homo sapien
agataacgcactaccttcgaacccg

SEQ ID NO: 3679679 - DNA, 25 bp, Homo sapien
agatccttggaaacaaagcaacttt

SEQ ID NO: 3679680 - DNA, 25 bp, Homo sapien
gacggaaattccataaaccaatcac

SEQ ID NO: 3679681 - DNA, 25 bp, Homo sapien
gcccaattgtcactgtggaaccaag

SEQ ID NO: 3679682 - DNA, 25 bp, Homo sapien
ccagcctgttccagatgaaattgtg

SEQ ID NO: 3679683 - DNA, 25 bp, Homo sapien
ctgtgtagacacttagaatgaggcc

SEQ ID NO: 3679684 - DNA, 25 bp, Homo sapien
agaaggcacttttagatccagatgg

SEQ ID NO: 3679685 - DNA, 25 bp, Homo sapien
ggctccaatcctagaagaatgtacg

SEQ ID NO: 3679686 - DNA, 25 bp, Homo sapien
tctgataaaagtgaaggctccaatc

SEQ ID NO: 3679687 - DNA, 25 bp, Homo sapien
tgcctacgaggatatcaagatgctg

SEQ ID NO: 3679688 - DNA, 25 bp, Homo sapien
catgaaggctgtcttggttacccga

SEQ ID NO: 3679689 - DNA, 25 bp, Homo sapien
taccgaaagtctacaccggagcagt

SEQ ID NO: 3679690 - DNA, 25 bp, Homo sapien
tgaaaatcttcgaactctgagtggg

SEQ ID NO: 3679691 - DNA, 25 bp, Homo sapien
tcagtgccataggatcagagttgtc

SEQ ID NO: 3679692 - DNA, 25 bp, Homo sapien
tcataggtcttagggtgtatacatc

SEQ ID NO: 3679693 - DNA, 25 bp, Homo sapien
taggcattaagctagacacatttca

SEQ ID NO: 3679694 - DNA, 25 bp, Homo sapien
gagttgtcctggtgtctatcatagg

SEQ ID NO: 3679695 - DNA, 25 bp, Homo sapien
tgagaaactgatgcatttttagttt

SEQ ID NO: 3679696 - DNA, 25 bp, Homo sapien
tagagaaggaacacatagatctgta

SEQ ID NO: 3679697 - DNA, 25 bp, Homo sapien
gatcaattacttgcaaacaacactg

SEQ ID NO: 3679698 - DNA, 25 bp, Homo sapien
agtagagaaggaacacatagatctg

SEQ ID NO: 3679699 - DNA, 25 bp, Homo sapien
caattacttgcaaacaacactgcat

SEQ ID NO: 3679700 - DNA, 25 bp, Homo sapien
gtctgtgccatctcaagttgaggtg

SEQ ID NO: 3679701 - DNA, 25 bp, Homo sapien
tatttttagtctcgtcaaagcagag

SEQ ID NO: 3679702 - DNA, 25 bp, Homo sapien
tattgttcccctcagcaacctggtc

SEQ ID NO: 3679703 - DNA, 25 bp, Homo sapien
cgccctctcctgtgcatgtttcaat

SEQ ID NO: 3679704 - DNA, 25 bp, Homo sapien
taatttgtgacctctacgttcgttc

SEQ ID NO: 3679705 - DNA, 25 bp, Homo sapien
tattaacactgttgagcctccttac

SEQ ID NO: 3679706 - DNA, 25 bp, Homo sapien
tctctcagacgagaaagctctcatt

SEQ ID NO: 3679707 - DNA, 25 bp, Homo sapien
cctaatggtctgtgcggtcatgcgt

SEQ ID NO: 3679708 - DNA, 25 bp, Homo sapien
cattgcctcattctcgttgaggatg

SEQ ID NO: 3679709 - DNA, 25 bp, Homo sapien
ttgcctcattctcgttgaggatggg

SEQ ID NO: 3679710 - DNA, 25 bp, Homo sapien
gaggatggggtatcggccactgatg

SEQ ID NO: 3679711 - DNA, 25 bp, Homo sapien
ccactgatggtagctggggtcttca

SEQ ID NO: 3679712 - DNA, 25 bp, Homo sapien
cattcagtgaaaataacagctaggg

SEQ ID NO: 3679713 - DNA, 25 bp, Homo sapien
gaaaataacagctaggggctgccat

SEQ ID NO: 3679714 - DNA, 25 bp, Homo sapien
ccccattcagtgaaaataacagcta

SEQ ID NO: 3679715 - DNA, 25 bp, Homo sapien
tgaaaataacagctaggggctgcca

SEQ ID NO: 3679716 - DNA, 25 bp, Homo sapien
tccagagcgagaagggatcatgcct

SEQ ID NO: 3679717 - DNA, 25 bp, Homo sapien
caagtgctgttggagtccagagcga

SEQ ID NO: 3679718 - DNA, 25 bp, Homo sapien
gatcctaagcagaacagaccaagtg

SEQ ID NO: 3679719 - DNA, 25 bp, Homo sapien
gatcatgcctagtgtttatcaggga

SEQ ID NO: 3679720 - DNA, 25 bp, Homo sapien
tccttttattctccactgaccaaat

SEQ ID NO: 3679721 - DNA, 25 bp, Homo sapien
ccttttattctccactgaccaaatc

SEQ ID NO: 3679722 - DNA, 25 bp, Homo sapien
ggctcccctctcatgtgcttgggca

SEQ ID NO: 3679723 - DNA, 25 bp, Homo sapien
ctctaaaatatctggcaactgagtg

SEQ ID NO: 3679724 - DNA, 25 bp, Homo sapien
ctgagtggtcacaatcgggatggcc

SEQ ID NO: 3679725 - DNA, 25 bp, Homo sapien
ccctctcatgtgcttgggcagagcc

SEQ ID NO: 3679726 - DNA, 25 bp, Homo sapien
aagtaaaggcaaactcatgctgtcc

SEQ ID NO: 3679727 - DNA, 25 bp, Homo sapien
tgtatagcttaacccaagtaaaggc

SEQ ID NO: 3679728 - DNA, 25 bp, Homo sapien
tcaagaggtaatcagaaacaggttc

SEQ ID NO: 3679729 - DNA, 25 bp, Homo sapien
catctgcggttattttccaggctta

SEQ ID NO: 3679730 - DNA, 25 bp, Homo sapien
cagtttttcacagggcgagcaccag

SEQ ID NO: 3679731 - DNA, 25 bp, Homo sapien
caagttgtatggagttctcaagtcc

SEQ ID NO: 3679732 - DNA, 25 bp, Homo sapien
gcctgcctttgatggcagattagga

SEQ ID NO: 3679733 - DNA, 25 bp, Homo sapien
aagcatgtcctcatagctcaccaag

SEQ ID NO: 3679734 - DNA, 25 bp, Homo sapien
ccatagggcactacagtaaaatatt

SEQ ID NO: 3679735 - DNA, 25 bp, Homo sapien
tactcaaggtttatcaccatagggc

SEQ ID NO: 3679736 - DNA, 25 bp, Homo sapien
gaacccatcaagcttataccaaatg

SEQ ID NO: 3679737 - DNA, 25 bp, Homo sapien
taagacaactttagatactcaaggt

SEQ ID NO: 3679738 - DNA, 25 bp, Homo sapien
tcactgagtgtcagtaggagggtcc

SEQ ID NO: 3679739 - DNA, 25 bp, Homo sapien
catttagagaacaggtggcagcgat

SEQ ID NO: 3679740 - DNA, 25 bp, Homo sapien
gggttgtgagatttggctgatcatt

SEQ ID NO: 3679741 - DNA, 25 bp, Homo sapien
tggtcagagagtcttccagggagac

SEQ ID NO: 3679742 - DNA, 25 bp, Homo sapien
tgtagttgctcaaaatcctaagttc

SEQ ID NO: 3679743 - DNA, 25 bp, Homo sapien
attaaaattctgatcactccatctg

SEQ ID NO: 3679744 - DNA, 25 bp, Homo sapien
aagtcaagaccgatgagctcattaa

SEQ ID NO: 3679745 - DNA, 25 bp, Homo sapien
tttttaagtcaagaccgatgagctc

SEQ ID NO: 3679746 - DNA, 25 bp, Homo sapien
gatgacaagccactgagcagcaatt

SEQ ID NO: 3679747 - DNA, 25 bp, Homo sapien
tcttgatgacaagccactgagcagc

SEQ ID NO: 3679748 - DNA, 25 bp, Homo sapien
ctttttcttgatgacaagccactga

SEQ ID NO: 3679749 - DNA, 25 bp, Homo sapien
ttttcttgatgacaagccactgagc

SEQ ID NO: 3679750 - DNA, 25 bp, Homo sapien
gttagccgctaccaaatacaagggc

SEQ ID NO: 3679751 - DNA, 25 bp, Homo sapien
caattatggagaccttatcatgcgc

SEQ ID NO: 3679752 - DNA, 25 bp, Homo sapien
tgtatttagcagctgggaagcctga

SEQ ID NO: 3679753 - DNA, 25 bp, Homo sapien
caagggctttactctatgccagaca

SEQ ID NO: 3679754 - DNA, 25 bp, Homo sapien
ccaatgtatgccaaacaccatagtt

SEQ ID NO: 3679755 - DNA, 25 bp, Homo sapien
taataccaatgtatgccaaacacca

SEQ ID NO: 3679756 - DNA, 25 bp, Homo sapien
tatgccaaacaccatagtttccttg

SEQ ID NO: 3679757 - DNA, 25 bp, Homo sapien
gataataccaatgtatgccaaacac

SEQ ID NO: 3679758 - DNA, 25 bp, Homo sapien
aatgaggaactctcctttccacctg

SEQ ID NO: 3679759 - DNA, 25 bp, Homo sapien
tggacattccctgatgaaatgcaaa

SEQ ID NO: 3679760 - DNA, 25 bp, Homo sapien
tgaatgaggaactctcctttccacc

SEQ ID NO: 3679761 - DNA, 25 bp, Homo sapien
agccctgaccactcaatcgtattca

SEQ ID NO: 3679762 - DNA, 25 bp, Homo sapien
aaagcgatggttatcctcatcagtg

SEQ ID NO: 3679763 - DNA, 25 bp, Homo sapien
tatacttaaatgtcactgaggacac

SEQ ID NO: 3679764 - DNA, 25 bp, Homo sapien
taaagagaaagctcgccttttatac

SEQ ID NO: 3679765 - DNA, 25 bp, Homo sapien
ttctgaaagcgatggttatcctcat

SEQ ID NO: 3679766 - DNA, 25 bp, Homo sapien
tctccttgacaacagctctatgctt

SEQ ID NO: 3679767 - DNA, 25 bp, Homo sapien
taaatacatcggtttcgaagggcag

SEQ ID NO: 3679768 - DNA, 25 bp, Homo sapien
tgcctgtgactggaaatgtcctatc

SEQ ID NO: 3679769 - DNA, 25 bp, Homo sapien
tggaaaattcccaaagaggctctag

SEQ ID NO: 3679770 - DNA, 25 bp, Homo sapien
caaggagcacttgggcaggactaca

SEQ ID NO: 3679771 - DNA, 25 bp, Homo sapien
tttcagtgctagaacaaggacggct

SEQ ID NO: 3679772 - DNA, 25 bp, Homo sapien
ggttagcgtaagcacctggcctggt

SEQ ID NO: 3679773 - DNA, 25 bp, Homo sapien
tcaactgatgagagaagaggcttca

SEQ ID NO: 3679774 - DNA, 25 bp, Homo sapien
caaagctgccttctggaggagggct

SEQ ID NO: 3679775 - DNA, 25 bp, Homo sapien
ggagggctgggagagccaaagagct

SEQ ID NO: 3679776 - DNA, 25 bp, Homo sapien
tgggagagccaaagagctggggctc

SEQ ID NO: 3679777 - DNA, 25 bp, Homo sapien
aagctgccttctggaggagggctgg

SEQ ID NO: 3679778 - DNA, 25 bp, Homo sapien
ggtctcttgatatcatctaggatgc

SEQ ID NO: 3679779 - DNA, 25 bp, Homo sapien
taatgaaatgatcgtggatccggat

SEQ ID NO: 3679780 - DNA, 25 bp, Homo sapien
taattaatgaaatgatcgtggatcc

SEQ ID NO: 3679781 - DNA, 25 bp, Homo sapien
taaccattgacaagtttagcgcttg

SEQ ID NO: 3679782 - DNA, 25 bp, Homo sapien
agaatttaataacaaccttgaggtg

SEQ ID NO: 3679783 - DNA, 25 bp, Homo sapien
gaatttaataacaaccttgaggtga

SEQ ID NO: 3679784 - DNA, 25 bp, Homo sapien
ataacaaccttgaggtgaaacttgg

SEQ ID NO: 3679785 - DNA, 25 bp, Homo sapien
tccacctgggtaactgtagcggctc

SEQ ID NO: 3679786 - DNA, 25 bp, Homo sapien
catgtcaacacctgctcattaggaa

SEQ ID NO: 3679787 - DNA, 25 bp, Homo sapien
tcattaggaactggaccaagactcc

SEQ ID NO: 3679788 - DNA, 25 bp, Homo sapien
gagagctctccgatggccctggttt

SEQ ID NO: 3679789 - DNA, 25 bp, Homo sapien
tcaaaccacctggatcatggcctaa

SEQ ID NO: 3679790 - DNA, 25 bp, Homo sapien
catgacatcttccagaacctttatg

SEQ ID NO: 3679791 - DNA, 25 bp, Homo sapien
ggactcactttttccctgagcacac

SEQ ID NO: 3679792 - DNA, 25 bp, Homo sapien
tatgtctaatatcaaggactcactt

SEQ ID NO: 3679793 - DNA, 25 bp, Homo sapien
cctgggggcactcagttttctcagc

SEQ ID NO: 3679794 - DNA, 25 bp, Homo sapien
ttcgttattatagcgtcattgctgg

SEQ ID NO: 3679795 - DNA, 25 bp, Homo sapien
cattgctggttagttcagttaggcg

SEQ ID NO: 3679796 - DNA, 25 bp, Homo sapien
gcagttgcagtctcattcgttatta

SEQ ID NO: 3679797 - DNA, 25 bp, Homo sapien
tcaaaattccaattggcagttgcag

SEQ ID NO: 3679798 - DNA, 25 bp, Homo sapien
tgctgcccttgttatcaggtgtttc

SEQ ID NO: 3679799 - DNA, 25 bp, Homo sapien
gcccttgttatcaggtgtttcaggt

SEQ ID NO: 3679800 - DNA, 25 bp, Homo sapien
taggttgctgcccttgttatcaggt

SEQ ID NO: 3679801 - DNA, 25 bp, Homo sapien
gacgggggaactgtaggttgctgcc

SEQ ID NO: 3679802 - DNA, 25 bp, Homo sapien
ttcgaaagcgactccgtcccatgag

SEQ ID NO: 3679803 - DNA, 25 bp, Homo sapien
ccatgagaccagtggaaatgtgtcc

SEQ ID NO: 3679804 - DNA, 25 bp, Homo sapien
taaagcgctgctttaggtggagttg

SEQ ID NO: 3679805 - DNA, 25 bp, Homo sapien
agttggaatatatctatcagcatgg

SEQ ID NO: 3679806 - DNA, 25 bp, Homo sapien
cctggatattagtcatgctggcaga

SEQ ID NO: 3679807 - DNA, 25 bp, Homo sapien
tgctggcagatacagtgaaatcact

SEQ ID NO: 3679808 - DNA, 25 bp, Homo sapien
caggcagcagaatgtaaggctggct

SEQ ID NO: 3679809 - DNA, 25 bp, Homo sapien
ccagtcgttcagtaggatttccaaa

SEQ ID NO: 3679810 - DNA, 25 bp, Homo sapien
aagtatggtatgacggcttttgctc

SEQ ID NO: 3679811 - DNA, 25 bp, Homo sapien
tgctaggatgcaaatgaaagtatgg

SEQ ID NO: 3679812 - DNA, 25 bp, Homo sapien
aatatgaatgtttaggtgtctgtgc

SEQ ID NO: 3679813 - DNA, 25 bp, Homo sapien
gaaaccctaggcctttgcaattcac

SEQ ID NO: 3679814 - DNA, 25 bp, Homo sapien
aaaggaaagtaacattggattcatc

SEQ ID NO: 3679815 - DNA, 25 bp, Homo sapien
tttcgcctgtgcaatagtaatgctg

SEQ ID NO: 3679816 - DNA, 25 bp, Homo sapien
aaggttaactttgagtcaggaatgg

SEQ ID NO: 3679817 - DNA, 25 bp, Homo sapien
taatgtgtgataggtggaagttgct

SEQ ID NO: 3679818 - DNA, 25 bp, Homo sapien
ttgaaacttacaattcagtcagctt

SEQ ID NO: 3679819 - DNA, 25 bp, Homo sapien
aacttacaattcagtcagcttttct

SEQ ID NO: 3679820 - DNA, 25 bp, Homo sapien
gaaacttacaattcagtcagctttt

SEQ ID NO: 3679821 - DNA, 25 bp, Homo sapien
tacaattcagtcagcttttcttttc

SEQ ID NO: 3679822 - DNA, 25 bp, Homo sapien
ctctttagcatgtaaatgagtcgtg

SEQ ID NO: 3679823 - DNA, 25 bp, Homo sapien
ctttagcatgtaaatgagtcgtgcc

SEQ ID NO: 3679824 - DNA, 25 bp, Homo sapien
tgtaaatgagtcgtgcctttcccag

SEQ ID NO: 3679825 - DNA, 25 bp, Homo sapien
agcatgtaaatgagtcgtgcctttc

SEQ ID NO: 3679826 - DNA, 25 bp, Homo sapien
tgctgctccccacgtgcaatttctt

SEQ ID NO: 3679827 - DNA, 25 bp, Homo sapien
tactgtttctatcttaagcatggtt

SEQ ID NO: 3679828 - DNA, 25 bp, Homo sapien
cccattagtctagcaatattcctag

SEQ ID NO: 3679829 - DNA, 25 bp, Homo sapien
atattcctagccattatatagcagg

SEQ ID NO: 3679830 - DNA, 25 bp, Homo sapien
gaaccttggtagtatccacatctaa

SEQ ID NO: 3679831 - DNA, 25 bp, Homo sapien
aactcttgggttcaatgggtgactg

SEQ ID NO: 3679832 - DNA, 25 bp, Homo sapien
ctaattgctcaacacataggaaagg

SEQ ID NO: 3679833 - DNA, 25 bp, Homo sapien
gagctccatcatataccagacacta

SEQ ID NO: 3679834 - DNA, 25 bp, Homo sapien
tctatttacggcttttttagctgcc

SEQ ID NO: 3679835 - DNA, 25 bp, Homo sapien
gaactacattggcaaactcccagca

SEQ ID NO: 3679836 - DNA, 25 bp, Homo sapien
gaaaactgcagggtagtgaacagtg

SEQ ID NO: 3679837 - DNA, 25 bp, Homo sapien
tgaacagtgatggtatttgctgctc

SEQ ID NO: 3679838 - DNA, 25 bp, Homo sapien
tatacaagataagacccagactggt

SEQ ID NO: 3679839 - DNA, 25 bp, Homo sapien
tccctgagtgttgccacagtgaaga

SEQ ID NO: 3679840 - DNA, 25 bp, Homo sapien
tctgtggagagctgctaaagtttcc

SEQ ID NO: 3679841 - DNA, 25 bp, Homo sapien
aaagttcctggaaacatgtgatgtg

SEQ ID NO: 3679842 - DNA, 25 bp, Homo sapien
ccctgtgtgtgcgttcccttatgaa

SEQ ID NO: 3679843 - DNA, 25 bp, Homo sapien
tgtcttcaggttaggggtgcccaag

SEQ ID NO: 3679844 - DNA, 25 bp, Homo sapien
ccaagatccaaaaccctgtgtgtgc

SEQ ID NO: 3679845 - DNA, 25 bp, Homo sapien
ccttatgaatgtcttcaggttaggg

SEQ ID NO: 3679846 - DNA, 25 bp, Homo sapien
gggagccgctgtgccttccaaggcc

SEQ ID NO: 3679847 - DNA, 25 bp, Homo sapien
tttggtccagtcgtgtccaaattga

SEQ ID NO: 3679848 - DNA, 25 bp, Homo sapien
tccttttggtccagtcgtgtccaaa

SEQ ID NO: 3679849 - DNA, 25 bp, Homo sapien
acacaaccagggagccgctgtgcct

SEQ ID NO: 3679850 - DNA, 25 bp, Homo sapien
tcatccatgtaccttccccactgta

SEQ ID NO: 3679851 - DNA, 25 bp, Homo sapien
ttcatccatgtaccttccccactgt

SEQ ID NO: 3679852 - DNA, 25 bp, Homo sapien
aagttgacatcaaacaattatttac

SEQ ID NO: 3679853 - DNA, 25 bp, Homo sapien
gaagttgacatcaaacaattattta

SEQ ID NO: 3679854 - DNA, 25 bp, Homo sapien
tgcccctgagcgatgttataaagag

SEQ ID NO: 3679855 - DNA, 25 bp, Homo sapien
cacgattttgggcagtaccaggtga

SEQ ID NO: 3679856 - DNA, 25 bp, Homo sapien
aagcaggtgggctatgactgacaac

SEQ ID NO: 3679857 - DNA, 25 bp, Homo sapien
tgagctataccactgggaatttcct

SEQ ID NO: 3679858 - DNA, 25 bp, Homo sapien
gcaagggttgaatcactgaagaact

SEQ ID NO: 3679859 - DNA, 25 bp, Homo sapien
tcaatgagcggtagaagcagtaaag

SEQ ID NO: 3679860 - DNA, 25 bp, Homo sapien
tccctgtgttttgaagatgagcaag

SEQ ID NO: 3679861 - DNA, 25 bp, Homo sapien
tttgccgtcttgagatgttctgcct

SEQ ID NO: 3679862 - DNA, 25 bp, Homo sapien
gtgcgtgccaccacttccagcaaat

SEQ ID NO: 3679863 - DNA, 25 bp, Homo sapien
agagtgcagtggcacaatctcagct

SEQ ID NO: 3679864 - DNA, 25 bp, Homo sapien
gtctcgctctggtgccaggccagag

SEQ ID NO: 3679865 - DNA, 25 bp, Homo sapien
cacaatctcagctcactgcaacctc

SEQ ID NO: 3679866 - DNA, 25 bp, Homo sapien
ggcatttcattcacagaaacccatg

SEQ ID NO: 3679867 - DNA, 25 bp, Homo sapien
cattcacagaaacccatgtagatac

SEQ ID NO: 3679868 - DNA, 25 bp, Homo sapien
aggcatttcattcacagaaacccat

SEQ ID NO: 3679869 - DNA, 25 bp, Homo sapien
tttcattcacagaaacccatgtaga

SEQ ID NO: 3679870 - DNA, 25 bp, Homo sapien
tgctgtacatgatactgcaggcgtg

SEQ ID NO: 3679871 - DNA, 25 bp, Homo sapien
ctcttagcagggatgctgtacatga

SEQ ID NO: 3679872 - DNA, 25 bp, Homo sapien
gatgctgtacatgatactgcaggcg

SEQ ID NO: 3679873 - DNA, 25 bp, Homo sapien
atgctgtacatgatactgcaggcgt

SEQ ID NO: 3679874 - DNA, 25 bp, Homo sapien
tcaggtcacggtaatctctgacatc

SEQ ID NO: 3679875 - DNA, 25 bp, Homo sapien
tccataataggctcctaccccaggg

SEQ ID NO: 3679876 - DNA, 25 bp, Homo sapien
gccctgagcctggaactggatctct

SEQ ID NO: 3679877 - DNA, 25 bp, Homo sapien
tatgccctataatcaaaccagtgac

SEQ ID NO: 3679878 - DNA, 25 bp, Homo sapien
aggggcaccttctctatggaagatc

SEQ ID NO: 3679879 - DNA, 25 bp, Homo sapien
agggccctgtcctgagtgtagctca

SEQ ID NO: 3679880 - DNA, 25 bp, Homo sapien
tcagaagcgaatgtgattgtgaaga

SEQ ID NO: 3679881 - DNA, 25 bp, Homo sapien
tcataaatacaatcagttcaatcct

SEQ ID NO: 3679882 - DNA, 25 bp, Homo sapien
aatgtgattgtgaagaggctggtcc

SEQ ID NO: 3679883 - DNA, 25 bp, Homo sapien
ttgtttgtaagcctggcaagccagt

SEQ ID NO: 3679884 - DNA, 25 bp, Homo sapien
gggtttccgattcatgatctctcac

SEQ ID NO: 3679885 - DNA, 25 bp, Homo sapien
tgcaggaggctacagtttctcaaca

SEQ ID NO: 3679886 - DNA, 25 bp, Homo sapien
gatctctcactaagttgctgccaag

SEQ ID NO: 3679887 - DNA, 25 bp, Homo sapien
aatgcctttgctatgtgatctccac

SEQ ID NO: 3679888 - DNA, 25 bp, Homo sapien
ggttgtataatccagagacccatgt

SEQ ID NO: 3679889 - DNA, 25 bp, Homo sapien
gttttaactattcaccaggctgagg

SEQ ID NO: 3679890 - DNA, 25 bp, Homo sapien
tgccctgtccatgcagcaattttgg

SEQ ID NO: 3679891 - DNA, 25 bp, Homo sapien
cgatatcaacagagtccataagaaa

SEQ ID NO: 3679892 - DNA, 25 bp, Homo sapien
ttcgatatcaacagagtccataaga

SEQ ID NO: 3679893 - DNA, 25 bp, Homo sapien
ggattgaaatgaaggcagactggac

SEQ ID NO: 3679894 - DNA, 25 bp, Homo sapien
attgaaatgaaggcagactggacag

SEQ ID NO: 3679895 - DNA, 25 bp, Homo sapien
ttcctttaggccatctcctatgatt

SEQ ID NO: 3679896 - DNA, 25 bp, Homo sapien
cttcctttaggccatctcctatgat

SEQ ID NO: 3679897 - DNA, 25 bp, Homo sapien
cctttaggccatctcctatgattgc

SEQ ID NO: 3679898 - DNA, 25 bp, Homo sapien
tcctttaggccatctcctatgattg

SEQ ID NO: 3679899 - DNA, 25 bp, Homo sapien
tttaatagcatccaggagggcagac

SEQ ID NO: 3679900 - DNA, 25 bp, Homo sapien
tcattgaacaatacaaagctttaat

SEQ ID NO: 3679901 - DNA, 25 bp, Homo sapien
gctttaatagcatccaggagggcag

SEQ ID NO: 3679902 - DNA, 25 bp, Homo sapien
attgaacaatacaaagctttaatag

SEQ ID NO: 3679903 - DNA, 25 bp, Homo sapien
cttttgtgagcagcaggggctcccc

SEQ ID NO: 3679904 - DNA, 25 bp, Homo sapien
ttttgtgagcagcaggggctcccct

SEQ ID NO: 3679905 - DNA, 25 bp, Homo sapien
aaggccaacaccttgggctacgttg

SEQ ID NO: 3679906 - DNA, 25 bp, Homo sapien
gcagcccatgacagaaaggccaaca

SEQ ID NO: 3679907 - DNA, 25 bp, Homo sapien
taacaacaagatgtacagcagctgg

SEQ ID NO: 3679908 - DNA, 25 bp, Homo sapien
ttgggctacgttggtcttgtctaac

SEQ ID NO: 3679909 - DNA, 25 bp, Homo sapien
aacaagaagtagaaatcggttgcct

SEQ ID NO: 3679910 - DNA, 25 bp, Homo sapien
tgcctgacgagcaaaaccgctgcat

SEQ ID NO: 3679911 - DNA, 25 bp, Homo sapien
gagccttgtaaaggcatgcaaacaa

SEQ ID NO: 3679912 - DNA, 25 bp, Homo sapien
ttctcttcgatctccgatctccgag

SEQ ID NO: 3679913 - DNA, 25 bp, Homo sapien
ctgcacgtttggcggggaggaaatc

SEQ ID NO: 3679914 - DNA, 25 bp, Homo sapien
gcacgtttggcggggaggaaatcac

SEQ ID NO: 3679915 - DNA, 25 bp, Homo sapien
tgcacgtttggcggggaggaaatca

SEQ ID NO: 3679916 - DNA, 25 bp, Homo sapien
gaacctttcctaaggacacgactga

SEQ ID NO: 3679917 - DNA, 25 bp, Homo sapien
tcctaaggacacgactgaagcaggc

SEQ ID NO: 3679918 - DNA, 25 bp, Homo sapien
caactccgtgccaggctgaaccttt

SEQ ID NO: 3679919 - DNA, 25 bp, Homo sapien
cgtgccaggctgaacctttcctaag

SEQ ID NO: 3679920 - DNA, 25 bp, Homo sapien
gttgcggcccgggacagaggcgaga

SEQ ID NO: 3679921 - DNA, 25 bp, Homo sapien
cagttgcgcctggaagttgcggccc

SEQ ID NO: 3679922 - DNA, 25 bp, Homo sapien
agctcgaactcggtcccagtgctgg

SEQ ID NO: 3679923 - DNA, 25 bp, Homo sapien
ttcctgcggatcgtgggagtccagt

SEQ ID NO: 3679924 - DNA, 25 bp, Homo sapien
gccgcgcttggtgttcctgagccgc

SEQ ID NO: 3679925 - DNA, 25 bp, Homo sapien
ggtcgcagcggacacagcaggagga

SEQ ID NO: 3679926 - DNA, 25 bp, Homo sapien
tgagccgcggccgaactttttccca

SEQ ID NO: 3679927 - DNA, 25 bp, Homo sapien
ctggcggtcgcagcggacacagcag

SEQ ID NO: 3679928 - DNA, 25 bp, Homo sapien
gcataggatagccttggaaataatg

SEQ ID NO: 3679929 - DNA, 25 bp, Homo sapien
aggcataggatagccttggaaataa

SEQ ID NO: 3679930 - DNA, 25 bp, Homo sapien
taaaatccaaggcataggatagcct

SEQ ID NO: 3679931 - DNA, 25 bp, Homo sapien
tccaaggcataggatagccttggaa

SEQ ID NO: 3679932 - DNA, 25 bp, Homo sapien
gtatttctcagaaacagacagccag

SEQ ID NO: 3679933 - DNA, 25 bp, Homo sapien
ctggaatacaagtatttctcagaaa

SEQ ID NO: 3679934 - DNA, 25 bp, Homo sapien
tatttctcagaaacagacagccaga

SEQ ID NO: 3679935 - DNA, 25 bp, Homo sapien
caagtatttctcagaaacagacagc

SEQ ID NO: 3679936 - DNA, 25 bp, Homo sapien
tcagttgtgttgcagtatgcctctg

SEQ ID NO: 3679937 - DNA, 25 bp, Homo sapien
ttgtgttgcagtatgcctctggagg

SEQ ID NO: 3679938 - DNA, 25 bp, Homo sapien
agttgtgttgcagtatgcctctgga

SEQ ID NO: 3679939 - DNA, 25 bp, Homo sapien
tgtgttgcagtatgcctctggagga

SEQ ID NO: 3679940 - DNA, 25 bp, Homo sapien
aggtaggagagatgttgccagactg

SEQ ID NO: 3679941 - DNA, 25 bp, Homo sapien
ttaatctttaaaggtaggagagatg

SEQ ID NO: 3679942 - DNA, 25 bp, Homo sapien
tctttaaaggtaggagagatgttgc

SEQ ID NO: 3679943 - DNA, 25 bp, Homo sapien
aaaggtaggagagatgttgccagac

SEQ ID NO: 3679944 - DNA, 25 bp, Homo sapien
tagaagttattgtgggcttactgtc

SEQ ID NO: 3679945 - DNA, 25 bp, Homo sapien
tagataatgggttcagcccaaggct

SEQ ID NO: 3679946 - DNA, 25 bp, Homo sapien
ggcttggcatattgtggatgcttcg

SEQ ID NO: 3679947 - DNA, 25 bp, Homo sapien
ggcttactgtcagctgtgcacaagg

SEQ ID NO: 3679948 - DNA, 25 bp, Homo sapien
cagaaggtcagccagaatatgagac

SEQ ID NO: 3679949 - DNA, 25 bp, Homo sapien
tggtggaggagaaagtttcaagtta

SEQ ID NO: 3679950 - DNA, 25 bp, Homo sapien
gcaataaattcagtaacatcaagag

SEQ ID NO: 3679951 - DNA, 25 bp, Homo sapien
ctttgtcgagtaagaaggttcagca

SEQ ID NO: 3679952 - DNA, 25 bp, Homo sapien
ccaatcagagcccagctacgctggg

SEQ ID NO: 3679953 - DNA, 25 bp, Homo sapien
gccccggattcaccaatcgggtagc

SEQ ID NO: 3679954 - DNA, 25 bp, Homo sapien
ctacgctgggcaggccttcccgggt

SEQ ID NO: 3679955 - DNA, 25 bp, Homo sapien
gggtagcccgtagactttcaaagca

SEQ ID NO: 3679956 - DNA, 25 bp, Homo sapien
ctttgaagccaagtgcgagcagttt

SEQ ID NO: 3679957 - DNA, 25 bp, Homo sapien
gctttgaagccaagtgcgagcagtt

SEQ ID NO: 3679958 - DNA, 25 bp, Homo sapien
cggcttattattccgcggcggccgc

SEQ ID NO: 3679959 - DNA, 25 bp, Homo sapien
ccggcttattattccgcggcggccg

SEQ ID NO: 3679960 - DNA, 25 bp, Homo sapien
ggccgtcccctagacacgaccctga

SEQ ID NO: 3679961 - DNA, 25 bp, Homo sapien
gttcctcaatactcgccctccgagg

SEQ ID NO: 3679962 - DNA, 25 bp, Homo sapien
tagaggaccccgttcctcaatactc

SEQ ID NO: 3679963 - DNA, 25 bp, Homo sapien
tccagtccggccttcttagaggacc

SEQ ID NO: 3679964 - DNA, 25 bp, Homo sapien
tccaggatcggtttctcagggcggc

SEQ ID NO: 3679965 - DNA, 25 bp, Homo sapien
gattttgcttcaatcaagacccgaa

SEQ ID NO: 3679966 - DNA, 25 bp, Homo sapien
aagaaggcccacgagttccaggatc

SEQ ID NO: 3679967 - DNA, 25 bp, Homo sapien
tgagaacagccgacctcgactcatg

SEQ ID NO: 3679968 - DNA, 25 bp, Homo sapien
agttagtcaatgggtatggtagatc

SEQ ID NO: 3679969 - DNA, 25 bp, Homo sapien
caattttctctattttggtataatc

SEQ ID NO: 3679970 - DNA, 25 bp, Homo sapien
ttttctctattttggtataatcttc

SEQ ID NO: 3679971 - DNA, 25 bp, Homo sapien
tttctctattttggtataatcttcc

SEQ ID NO: 3679972 - DNA, 25 bp, Homo sapien
aattttctctattttggtataatct

SEQ ID NO: 3679973 - DNA, 25 bp, Homo sapien
tgtctacccttatacacaactccat

SEQ ID NO: 3679974 - DNA, 25 bp, Homo sapien
ccacttgacctgtagttttgtgtct

SEQ ID NO: 3679975 - DNA, 25 bp, Homo sapien
cccttatacacaactccataggtac

SEQ ID NO: 3679976 - DNA, 25 bp, Homo sapien
tagttttgtgtctacccttatacac

SEQ ID NO: 3679977 - DNA, 25 bp, Homo sapien
gactatatttggatgacgaagttcc

SEQ ID NO: 3679978 - DNA, 25 bp, Homo sapien
gagaaatttcccgaattgcagtact

SEQ ID NO: 3679979 - DNA, 25 bp, Homo sapien
ttaatagagaaatttcccgaattgc

SEQ ID NO: 3679980 - DNA, 25 bp, Homo sapien
gaattgcagtactaggaaccccttc

SEQ ID NO: 3679981 - DNA, 25 bp, Homo sapien
gaatccatgtactgaccaggaggga

SEQ ID NO: 3679982 - DNA, 25 bp, Homo sapien
ccaggagggatagaatccaagtatt

SEQ ID NO: 3679983 - DNA, 25 bp, Homo sapien
cttaacaagtgaagaatccatgtac

SEQ ID NO: 3679984 - DNA, 25 bp, Homo sapien
gaaactcaaagatgagatataacct

SEQ ID NO: 3679985 - DNA, 25 bp, Homo sapien
tagcttccaacaatacctaccagtt

SEQ ID NO: 3679986 - DNA, 25 bp, Homo sapien
aaagaaagaccagactaccctagct

SEQ ID NO: 3679987 - DNA, 25 bp, Homo sapien
taataacatgggtatctctaacctg

SEQ ID NO: 3679988 - DNA, 25 bp, Homo sapien
caaaatgcagggacttctatatata

SEQ ID NO: 3679989 - DNA, 25 bp, Homo sapien
agaacgtatcctaacgaaaatatag

SEQ ID NO: 3679990 - DNA, 25 bp, Homo sapien
ggcggtttataatagctaaatatga

SEQ ID NO: 3679991 - DNA, 25 bp, Homo sapien
aaagtccaaaagtcatgcaagattg

SEQ ID NO: 3679992 - DNA, 25 bp, Homo sapien
ccaaaagtcatgcaagattgttaaa

SEQ ID NO: 3679993 - DNA, 25 bp, Homo sapien
gacaaaaaattaggacgcagagaaa

SEQ ID NO: 3679994 - DNA, 25 bp, Homo sapien
tcaggccattttaggctaataagca

SEQ ID NO: 3679995 - DNA, 25 bp, Homo sapien
tacaaattggttttctacacagaag

SEQ ID NO: 3679996 - DNA, 25 bp, Homo sapien
tataccgctaccaactctattttgt

SEQ ID NO: 3679997 - DNA, 25 bp, Homo sapien
ttaagtctctgtgaagaactcttct

SEQ ID NO: 3679998 - DNA, 25 bp, Homo sapien
gagattttgaggttttaagtctctg

SEQ ID NO: 3679999 - DNA, 25 bp, Homo sapien
gtgacaaaacacaatcccctgtagg

SEQ ID NO: 3680000 - DNA, 25 bp, Homo sapien
cctttgtcatcaatcaagagatttt

SEQ ID NO: 3680001 - DNA, 25 bp, Homo sapien
tgagtaacgagctgaccccagcaat

SEQ ID NO: 3680002 - DNA, 25 bp, Homo sapien
tgctagttcagcaaatatggtgcct

SEQ ID NO: 3680003 - DNA, 25 bp, Homo sapien
tttctgaatccccatggaaaagtgg

SEQ ID NO: 3680004 - DNA, 25 bp, Homo sapien
gcctatactccaaatgtcaactgga

SEQ ID NO: 3680005 - DNA, 25 bp, Homo sapien
attcttatagtcctgtaaagattcc

SEQ ID NO: 3680006 - DNA, 25 bp, Homo sapien
tttttgacatgggatgctaggcttc

SEQ ID NO: 3680007 - DNA, 25 bp, Homo sapien
catttgggaaatgtattcttatagt

SEQ ID NO: 3680008 - DNA, 25 bp, Homo sapien
cacacttcattattgggagtgccca

SEQ ID NO: 3680009 - DNA, 25 bp, Homo sapien
cacacaaatgtctcctcccctacat

SEQ ID NO: 3680010 - DNA, 25 bp, Homo sapien
ttacaaaaatctccataaaacctca

SEQ ID NO: 3680011 - DNA, 25 bp, Homo sapien
cagtgaatatctattaaatgagcat

SEQ ID NO: 3680012 - DNA, 25 bp, Homo sapien
gaatatctattaaatgagcatttcc

SEQ ID NO: 3680013 - DNA, 25 bp, Homo sapien
tgccagaaattcgtttggctggatc

SEQ ID NO: 3680014 - DNA, 25 bp, Homo sapien
gtgccattttgccagaaattcgttt

SEQ ID NO: 3680015 - DNA, 25 bp, Homo sapien
cgtttggctggatcatagattaaca

SEQ ID NO: 3680016 - DNA, 25 bp, Homo sapien
aaattcgtttggctggatcatagat

SEQ ID NO: 3680017 - DNA, 25 bp, Homo sapien
taaaactgccataaggactgagatg

SEQ ID NO: 3680018 - DNA, 25 bp, Homo sapien
gaaattagaagacgaagtacagctg

SEQ ID NO: 3680019 - DNA, 25 bp, Homo sapien
gttttaaactcagactcgaaagcca

SEQ ID NO: 3680020 - DNA, 25 bp, Homo sapien
tcgaaagccaagataagcaactcct

SEQ ID NO: 3680021 - DNA, 25 bp, Homo sapien
tgctggtcgtaaatcactaaagggt

SEQ ID NO: 3680022 - DNA, 25 bp, Homo sapien
cacagacctgtagatatgccattat

SEQ ID NO: 3680023 - DNA, 25 bp, Homo sapien
tctcacttcgcagataaggaaacac

SEQ ID NO: 3680024 - DNA, 25 bp, Homo sapien
aagggttgcaatccacaatttgcaa

SEQ ID NO: 3680025 - DNA, 25 bp, Homo sapien
ttttcagacacttggactccgtgga

SEQ ID NO: 3680026 - DNA, 25 bp, Homo sapien
taatcagaagtaccacagcacaaac

SEQ ID NO: 3680027 - DNA, 25 bp, Homo sapien
gacagtgtcctaccagctatctcat

SEQ ID NO: 3680028 - DNA, 25 bp, Homo sapien
cataggatcaaaagtaggtcactca

SEQ ID NO: 3680029 - DNA, 25 bp, Homo sapien
tataggcccctaatggtcaaactca

SEQ ID NO: 3680030 - DNA, 25 bp, Homo sapien
aactcaccactactgatgacaatgg

SEQ ID NO: 3680031 - DNA, 25 bp, Homo sapien
catctaaatcagcttggcaagcttc

SEQ ID NO: 3680032 - DNA, 25 bp, Homo sapien
ctggtatacgtatgaaatatgcagc

SEQ ID NO: 3680033 - DNA, 25 bp, Homo sapien
attttctcctcactggtcatttgga

SEQ ID NO: 3680034 - DNA, 25 bp, Homo sapien
tcctcaaaatacacaatttcttcct

SEQ ID NO: 3680035 - DNA, 25 bp, Homo sapien
ctttttcctggatattttatcctca

SEQ ID NO: 3680036 - DNA, 25 bp, Homo sapien
tcttccttgacctcatgatgcctat

SEQ ID NO: 3680037 - DNA, 25 bp, Homo sapien
tgccagtggagagacgaacgtccaa

SEQ ID NO: 3680038 - DNA, 25 bp, Homo sapien
aaaatacacgttacacaagctcctg

SEQ ID NO: 3680039 - DNA, 25 bp, Homo sapien
ggaagttgcccctagtgaagccaca

SEQ ID NO: 3680040 - DNA, 25 bp, Homo sapien
agtgggtttatactcgaggctgcca

SEQ ID NO: 3680041 - DNA, 25 bp, Homo sapien
gcccctccaccggtcatcaaaattc

SEQ ID NO: 3680042 - DNA, 25 bp, Homo sapien
tttgacaatgcaatccgagcagcgc

SEQ ID NO: 3680043 - DNA, 25 bp, Homo sapien
agcagcgctgatttcccgcaggcac

SEQ ID NO: 3680044 - DNA, 25 bp, Homo sapien
ggacaaatgaagctgcctgtttact

SEQ ID NO: 3680045 - DNA, 25 bp, Homo sapien
tcatagcacattctaaagcctgggc

SEQ ID NO: 3680046 - DNA, 25 bp, Homo sapien
caatgcacagttgaggccctttaaa

SEQ ID NO: 3680047 - DNA, 25 bp, Homo sapien
ggagtcactcgctttgggcataaaa

SEQ ID NO: 3680048 - DNA, 25 bp, Homo sapien
caagcagcccgttgcacagtgaaac

SEQ ID NO: 3680049 - DNA, 25 bp, Homo sapien
cactttggtctggagcggactgcta

SEQ ID NO: 3680050 - DNA, 25 bp, Homo sapien
attatcccttttgcacaagggtcag

SEQ ID NO: 3680051 - DNA, 25 bp, Homo sapien
gactgctagggattagaggacccat

SEQ ID NO: 3680052 - DNA, 25 bp, Homo sapien
caagggtcagcacctttggcagtca

SEQ ID NO: 3680053 - DNA, 25 bp, Homo sapien
gcagtctgctggtcatcagtggtgt

SEQ ID NO: 3680054 - DNA, 25 bp, Homo sapien
tgaatttggcggaaatccttccagt

SEQ ID NO: 3680055 - DNA, 25 bp, Homo sapien
gtggacatggcagtctgctggtcat

SEQ ID NO: 3680056 - DNA, 25 bp, Homo sapien
gccaattcttttccccgtggacatg

SEQ ID NO: 3680057 - DNA, 25 bp, Homo sapien
gggcatctgtggtgaagaatgtctc

SEQ ID NO: 3680058 - DNA, 25 bp, Homo sapien
gcatctgtggtgaagaatgtctccc

SEQ ID NO: 3680059 - DNA, 25 bp, Homo sapien
ttactccagattatgggcatctgtg

SEQ ID NO: 3680060 - DNA, 25 bp, Homo sapien
atctgtggtgaagaatgtctcccta

SEQ ID NO: 3680061 - DNA, 25 bp, Homo sapien
tctcaactgaggagcgatgtcaata

SEQ ID NO: 3680062 - DNA, 25 bp, Homo sapien
ggagcgccaagcacagggttttgac

SEQ ID NO: 3680063 - DNA, 25 bp, Homo sapien
ccagaaagttagaagggagcgccaa

SEQ ID NO: 3680064 - DNA, 25 bp, Homo sapien
gaagttaagaccagaagagtcgccc

SEQ ID NO: 3680065 - DNA, 25 bp, Homo sapien
aaagccaatgtcctccctcggagtc

SEQ ID NO: 3680066 - DNA, 25 bp, Homo sapien
agtccgcggccggtcagctcctagg

SEQ ID NO: 3680067 - DNA, 25 bp, Homo sapien
aacaaaagccaatgtcctccctcgg

SEQ ID NO: 3680068 - DNA, 25 bp, Homo sapien
cagctgggctcggttttgaaacaaa

SEQ ID NO: 3680069 - DNA, 25 bp, Homo sapien
ttgagaatgacagccccacacccct

SEQ ID NO: 3680070 - DNA, 25 bp, Homo sapien
agggtcctttgagaatgacagcccc

SEQ ID NO: 3680071 - DNA, 25 bp, Homo sapien
gaagccccagggtcctttgagaatg

SEQ ID NO: 3680072 - DNA, 25 bp, Homo sapien
tgggaagccccagggtcctttgaga

SEQ ID NO: 3680073 - DNA, 25 bp, Homo sapien
ttttgtgagctctattttgagtgta

SEQ ID NO: 3680074 - DNA, 25 bp, Homo sapien
catttttgtgagctctattttgagt

SEQ ID NO: 3680075 - DNA, 25 bp, Homo sapien
attttgagtgtaatttgcatggcat

SEQ ID NO: 3680076 - DNA, 25 bp, Homo sapien
ttttgagtgtaatttgcatggcatg

SEQ ID NO: 3680077 - DNA, 25 bp, Homo sapien
ctctgggtttccagaaagataattt

SEQ ID NO: 3680078 - DNA, 25 bp, Homo sapien
caccagttttcctgtagaggtgcag

SEQ ID NO: 3680079 - DNA, 25 bp, Homo sapien
cagatggagctacatttgaattggc

SEQ ID NO: 3680080 - DNA, 25 bp, Homo sapien
aattggctggtgaagaggtaggaga

SEQ ID NO: 3680081 - DNA, 25 bp, Homo sapien
caataccgatctgaattatatggat

SEQ ID NO: 3680082 - DNA, 25 bp, Homo sapien
gatctgaattatatggatcagtaaa

SEQ ID NO: 3680083 - DNA, 25 bp, Homo sapien
tcaataccgatctgaattatatgga

SEQ ID NO: 3680084 - DNA, 25 bp, Homo sapien
taccgatctgaattatatggatcag

SEQ ID NO: 3680085 - DNA, 25 bp, Homo sapien
ctttatatttgaggcagtccatatt

SEQ ID NO: 3680086 - DNA, 25 bp, Homo sapien
tatttgaggcagtccatattgaatc

SEQ ID NO: 3680087 - DNA, 25 bp, Homo sapien
tgaggcagtccatattgaatcctta

SEQ ID NO: 3680088 - DNA, 25 bp, Homo sapien
tatatttgaggcagtccatattgaa

SEQ ID NO: 3680089 - DNA, 25 bp, Homo sapien
tatctgggacttctacgatttcttt

SEQ ID NO: 3680090 - DNA, 25 bp, Homo sapien
tagtttccttggataggagtctatc

SEQ ID NO: 3680091 - DNA, 25 bp, Homo sapien
ccttggataggagtctatctgggac

SEQ ID NO: 3680092 - DNA, 25 bp, Homo sapien
ttgagagagcaaatacaataactgg

SEQ ID NO: 3680093 - DNA, 25 bp, Homo sapien
gcagtccccacatccgcaggctcat

SEQ ID NO: 3680094 - DNA, 25 bp, Homo sapien
cgcagtccccacatccgcaggctca

SEQ ID NO: 3680095 - DNA, 25 bp, Homo sapien
ccgcagtccccacatccgcaggctc

SEQ ID NO: 3680096 - DNA, 25 bp, Homo sapien
gcccctcgggccctgagcggagaat

SEQ ID NO: 3680097 - DNA, 25 bp, Homo sapien
ttccccagacttggcgtccatttgc

SEQ ID NO: 3680098 - DNA, 25 bp, Homo sapien
tgagcggagaatggcgaggccgcag

SEQ ID NO: 3680099 - DNA, 25 bp, Homo sapien
cacaggggccaggtccaaagaccgg

SEQ ID NO: 3680100 - DNA, 25 bp, Homo sapien
ctagagaacgtccctataagaaaag

SEQ ID NO: 3680101 - DNA, 25 bp, Homo sapien
gaacgtccctataagaaaaggctga

SEQ ID NO: 3680102 - DNA, 25 bp, Homo sapien
agaacgtccctataagaaaaggctg

SEQ ID NO: 3680103 - DNA, 25 bp, Homo sapien
ggactaaatcccactagcaaacact

SEQ ID NO: 3680104 - DNA, 25 bp, Homo sapien
tatggaagcacaaagagggaatctg

SEQ ID NO: 3680105 - DNA, 25 bp, Homo sapien
taattgttagactgtgagcaaagcc

SEQ ID NO: 3680106 - DNA, 25 bp, Homo sapien
gaaatttcctctgtcccggtatgga

SEQ ID NO: 3680107 - DNA, 25 bp, Homo sapien
gcggttgcagcaaacagtgcctaga

SEQ ID NO: 3680108 - DNA, 25 bp, Homo sapien
tcctggctcagctaaggcaaacatg

SEQ ID NO: 3680109 - DNA, 25 bp, Homo sapien
gacagaaaggtaagccgaggacact

SEQ ID NO: 3680110 - DNA, 25 bp, Homo sapien
tacgcttgaattgagtagacaccct

SEQ ID NO: 3680111 - DNA, 25 bp, Homo sapien
taaatgagcagagatttgactggcc

SEQ ID NO: 3680112 - DNA, 25 bp, Homo sapien
tttcttttgagcattggccccatga

SEQ ID NO: 3680113 - DNA, 25 bp, Homo sapien
tggcccatttcttttgagcattggc

SEQ ID NO: 3680114 - DNA, 25 bp, Homo sapien
agcattggccccatgaggaagctgg

SEQ ID NO: 3680115 - DNA, 25 bp, Homo sapien
cccatgaggaagctggtgcatggcc

SEQ ID NO: 3680116 - DNA, 25 bp, Homo sapien
aatggaagcgagaaggcaatttttc

SEQ ID NO: 3680117 - DNA, 25 bp, Homo sapien
ctgatgtgtcagaatggaagcgaga

SEQ ID NO: 3680118 - DNA, 25 bp, Homo sapien
tgtcagaatggaagcgagaaggcaa

SEQ ID NO: 3680119 - DNA, 25 bp, Homo sapien
tttactgatgtgtcagaatggaagc

SEQ ID NO: 3680120 - DNA, 25 bp, Homo sapien
tgtggaagtctctctttagtcccct

SEQ ID NO: 3680121 - DNA, 25 bp, Homo sapien
ggcagtaatcccatgccgtcccatg

SEQ ID NO: 3680122 - DNA, 25 bp, Homo sapien
ccttggagatgtgggtagcgactgt

SEQ ID NO: 3680123 - DNA, 25 bp, Homo sapien
cctgcacagcgaagatggcagtaat

SEQ ID NO: 3680124 - DNA, 25 bp, Homo sapien
aatcttcttggaaccgaaatcgccg

SEQ ID NO: 3680125 - DNA, 25 bp, Homo sapien
aatcgccggcgcaagaagggcagat

SEQ ID NO: 3680126 - DNA, 25 bp, Homo sapien
gggtgaaactgcagtgtcattcctt

SEQ ID NO: 3680127 - DNA, 25 bp, Homo sapien
tttcacacagatcagaaggtccatg

SEQ ID NO: 3680128 - DNA, 25 bp, Homo sapien
cactatctttagtctgtctttgtcc

SEQ ID NO: 3680129 - DNA, 25 bp, Homo sapien
tgttgcagccttggcctgatcctac

SEQ ID NO: 3680130 - DNA, 25 bp, Homo sapien
agatcccctctccttccgggatgat

SEQ ID NO: 3680131 - DNA, 25 bp, Homo sapien
tccgggatgatctccaaccctgctg

SEQ ID NO: 3680132 - DNA, 25 bp, Homo sapien
gtctctctgtatgctattatttttc

SEQ ID NO: 3680133 - DNA, 25 bp, Homo sapien
tactccttgtctctctgtatgctat

SEQ ID NO: 3680134 - DNA, 25 bp, Homo sapien
tcttcatctccaactctgttgtcca

SEQ ID NO: 3680135 - DNA, 25 bp, Homo sapien
ccagggtactccttgtctctctgta

SEQ ID NO: 3680136 - DNA, 25 bp, Homo sapien
caatccagttctctagagtgagata

SEQ ID NO: 3680137 - DNA, 25 bp, Homo sapien
ttctctagagtgagatatagagact

SEQ ID NO: 3680138 - DNA, 25 bp, Homo sapien
ccagttctctagagtgagatataga

SEQ ID NO: 3680139 - DNA, 25 bp, Homo sapien
cagccaatccagttctctagagtga

SEQ ID NO: 3680140 - DNA, 25 bp, Homo sapien
aagcaatgtccaataaaggcatgat

SEQ ID NO: 3680141 - DNA, 25 bp, Homo sapien
ggatagggaaccagggaactgtcaa

SEQ ID NO: 3680142 - DNA, 25 bp, Homo sapien
taggatagggaaccagggaactgtc

SEQ ID NO: 3680143 - DNA, 25 bp, Homo sapien
aggatagggaaccagggaactgtca

SEQ ID NO: 3680144 - DNA, 25 bp, Homo sapien
cagctggatatacatacaagtgcta

SEQ ID NO: 3680145 - DNA, 25 bp, Homo sapien
tgggacagctggatatacatacaag

SEQ ID NO: 3680146 - DNA, 25 bp, Homo sapien
tatgttgtcttttgaagtcccccag

SEQ ID NO: 3680147 - DNA, 25 bp, Homo sapien
gcatgggacagctggatatacatac

SEQ ID NO: 3680148 - DNA, 25 bp, Homo sapien
gatctcacgaaaatattcacctctg

SEQ ID NO: 3680149 - DNA, 25 bp, Homo sapien
ggagccagccgcgtacttctggata

SEQ ID NO: 3680150 - DNA, 25 bp, Homo sapien
ccagccgcgtacttctggatattgg

SEQ ID NO: 3680151 - DNA, 25 bp, Homo sapien
tggatattggcatctgagatctcac

SEQ ID NO: 3680152 - DNA, 25 bp, Homo sapien
ctagatctggttctaccagaaaaga

SEQ ID NO: 3680153 - DNA, 25 bp, Homo sapien
tgcttataaaaccatagatttcttg

SEQ ID NO: 3680154 - DNA, 25 bp, Homo sapien
aatcgactgaaagttccacacggcc

SEQ ID NO: 3680155 - DNA, 25 bp, Homo sapien
ttttctagatctggttctaccagaa

SEQ ID NO: 3680156 - DNA, 25 bp, Homo sapien
ctgtaatctacccttagagtaaaat

SEQ ID NO: 3680157 - DNA, 25 bp, Homo sapien
ggcttcgcagatgcttccaaatggt

SEQ ID NO: 3680158 - DNA, 25 bp, Homo sapien
taatgtcacttattgagatcctggg

SEQ ID NO: 3680159 - DNA, 25 bp, Homo sapien
ggtatctctaaagaactctgataaa

SEQ ID NO: 3680160 - DNA, 25 bp, Homo sapien
atgggaataaacatgatgatggaaa

SEQ ID NO: 3680161 - DNA, 25 bp, Homo sapien
gatgggaataaacatgatgatggaa

SEQ ID NO: 3680162 - DNA, 25 bp, Homo sapien
ccagatgaaatgcaatgtgtaaatg

SEQ ID NO: 3680163 - DNA, 25 bp, Homo sapien
tgtgagagagagtgccttccagatg

SEQ ID NO: 3680164 - DNA, 25 bp, Homo sapien
catcattatcctctgaacaaatggg

SEQ ID NO: 3680165 - DNA, 25 bp, Homo sapien
aagatgcacattggttctagcagaa

SEQ ID NO: 3680166 - DNA, 25 bp, Homo sapien
tccagcctctgatgcggtgtttgct

SEQ ID NO: 3680167 - DNA, 25 bp, Homo sapien
tgataatgcagttggcatttcctgt

SEQ ID NO: 3680168 - DNA, 25 bp, Homo sapien
caatgtgttgactgcacttttggcc

SEQ ID NO: 3680169 - DNA, 25 bp, Homo sapien
cactgaccaatgactgtgataatgc

SEQ ID NO: 3680170 - DNA, 25 bp, Homo sapien
caaacagctggtaacgcagatattt

SEQ ID NO: 3680171 - DNA, 25 bp, Homo sapien
cagctggtaacgcagatattttccc

SEQ ID NO: 3680172 - DNA, 25 bp, Homo sapien
taaggatccctccaaagaggttgag

SEQ ID NO: 3680173 - DNA, 25 bp, Homo sapien
gttcactcagccctagcctaaggat

SEQ ID NO: 3680174 - DNA, 25 bp, Homo sapien
tgtcttcaatctcaccaatacacac

SEQ ID NO: 3680175 - DNA, 25 bp, Homo sapien
ctgtcttcaatctcaccaatacaca

SEQ ID NO: 3680176 - DNA, 25 bp, Homo sapien
taacgcagaaactgtaactgagccg

SEQ ID NO: 3680177 - DNA, 25 bp, Homo sapien
tggagaaaagcacctcgtttatctt

SEQ ID NO: 3680178 - DNA, 25 bp, Homo sapien
gccgatttccccttgaggatcaaaa

SEQ ID NO: 3680179 - DNA, 25 bp, Homo sapien
tatctttgggagacagtaacgcaga

SEQ ID NO: 3680180 - DNA, 25 bp, Homo sapien
aatcctctagtggacttcctctctg

SEQ ID NO: 3680181 - DNA, 25 bp, Homo sapien
gagtagacatcaattgccatgattg

SEQ ID NO: 3680182 - DNA, 25 bp, Homo sapien
tgtttctatgtgaaccacaaccgac

SEQ ID NO: 3680183 - DNA, 25 bp, Homo sapien
cactgtcctttgataaccatgtttc

SEQ ID NO: 3680184 - DNA, 25 bp, Homo sapien
ctgtagggaagttagcgcatagtaa

SEQ ID NO: 3680185 - DNA, 25 bp, Homo sapien
gggaagttagcgcatagtaaattcc

SEQ ID NO: 3680186 - DNA, 25 bp, Homo sapien
aagttagcgcatagtaaattccatc

SEQ ID NO: 3680187 - DNA, 25 bp, Homo sapien
tttctgactgtagggaagttagcgc

SEQ ID NO: 3680188 - DNA, 25 bp, Homo sapien
ctcaagtccaatctcccctgcaccc

SEQ ID NO: 3680189 - DNA, 25 bp, Homo sapien
tcaagtccaatctcccctgcaccct

SEQ ID NO: 3680190 - DNA, 25 bp, Homo sapien
tctcaagtccaatctcccctgcacc

SEQ ID NO: 3680191 - DNA, 25 bp, Homo sapien
tactgattgttgcaggtgctccctg

SEQ ID NO: 3680192 - DNA, 25 bp, Homo sapien
ggtcttgttgccatactgattgttg

SEQ ID NO: 3680193 - DNA, 25 bp, Homo sapien
ttgttgccatactgattgttgcagg

SEQ ID NO: 3680194 - DNA, 25 bp, Homo sapien
ttgccatactgattgttgcaggtgc

SEQ ID NO: 3680195 - DNA, 25 bp, Homo sapien
tacttagaatctcctgatgccaagc

SEQ ID NO: 3680196 - DNA, 25 bp, Homo sapien
gataaacaatccaaagtgatttgct

SEQ ID NO: 3680197 - DNA, 25 bp, Homo sapien
taggaagtccaatgagattaactgc

SEQ ID NO: 3680198 - DNA, 25 bp, Homo sapien
gatgccaagccttgtaacttgtttc

SEQ ID NO: 3680199 - DNA, 25 bp, Homo sapien
ctcaataaacgaactgatgttgctg

SEQ ID NO: 3680200 - DNA, 25 bp, Homo sapien
tcctgtaaaatgctcaaatgattaa

SEQ ID NO: 3680201 - DNA, 25 bp, Homo sapien
gttttcacggctgagcagactgctc

SEQ ID NO: 3680202 - DNA, 25 bp, Homo sapien
ctgtttggttttcacggctgagcag

SEQ ID NO: 3680203 - DNA, 25 bp, Homo sapien
ttaagcttctaagcagtaccagatg

SEQ ID NO: 3680204 - DNA, 25 bp, Homo sapien
taagcagtaccagatgttgaatgaa

SEQ ID NO: 3680205 - DNA, 25 bp, Homo sapien
tctaagcagtaccagatgttgaatg

SEQ ID NO: 3680206 - DNA, 25 bp, Homo sapien
gcttctaagcagtaccagatgttga

SEQ ID NO: 3680207 - DNA, 25 bp, Homo sapien
gctggcgggttcatgggtcagattg

SEQ ID NO: 3680208 - DNA, 25 bp, Homo sapien
tggcgggttcatgggtcagattgtc

SEQ ID NO: 3680209 - DNA, 25 bp, Homo sapien
ctgctggcgggttcatgggtcagat

SEQ ID NO: 3680210 - DNA, 25 bp, Homo sapien
cgggttcatgggtcagattgtcaat

SEQ ID NO: 3680211 - DNA, 25 bp, Homo sapien
acagatttagccatagctctcgccg

SEQ ID NO: 3680212 - DNA, 25 bp, Homo sapien
tcattgtgcatctgtgattacagat

SEQ ID NO: 3680213 - DNA, 25 bp, Homo sapien
tgcatctgtgattacagatttagcc

SEQ ID NO: 3680214 - DNA, 25 bp, Homo sapien
tagctctcgccgtattcacatgaga

SEQ ID NO: 3680215 - DNA, 25 bp, Homo sapien
tctgaagcaaaagcagtgtcagccc

SEQ ID NO: 3680216 - DNA, 25 bp, Homo sapien
tgctaaagggtgtattctgaagcaa

SEQ ID NO: 3680217 - DNA, 25 bp, Homo sapien
gcaaaagcagtgtcagcccaacttc

SEQ ID NO: 3680218 - DNA, 25 bp, Homo sapien
cagtgtcagcccaacttcatgtgct

SEQ ID NO: 3680219 - DNA, 25 bp, Homo sapien
ctcagagaaccacatacgaacttca

SEQ ID NO: 3680220 - DNA, 25 bp, Homo sapien
gaaccacatacgaacttcatggata

SEQ ID NO: 3680221 - DNA, 25 bp, Homo sapien
gagaaccacatacgaacttcatgga

SEQ ID NO: 3680222 - DNA, 25 bp, Homo sapien
agagaaccacatacgaacttcatgg

SEQ ID NO: 3680223 - DNA, 25 bp, Homo sapien
ccaggtttccatcttgctttcacat

SEQ ID NO: 3680224 - DNA, 25 bp, Homo sapien
gctgaaggatgctttccaggtttcc

SEQ ID NO: 3680225 - DNA, 25 bp, Homo sapien
ggtttccatcttgctttcacataag

SEQ ID NO: 3680226 - DNA, 25 bp, Homo sapien
ttctctggctgaaggatgctttcca

SEQ ID NO: 3680227 - DNA, 25 bp, Homo sapien
tccttttggtatacctctgtcttct

SEQ ID NO: 3680228 - DNA, 25 bp, Homo sapien
ccttttggtatacctctgtcttctg

SEQ ID NO: 3680229 - DNA, 25 bp, Homo sapien
cttttggtatacctctgtcttctgg

SEQ ID NO: 3680230 - DNA, 25 bp, Homo sapien
ttgatcaaagtttgcttcaatgaca

SEQ ID NO: 3680231 - DNA, 25 bp, Homo sapien
cattggataaatttacttgctgccc

SEQ ID NO: 3680232 - DNA, 25 bp, Homo sapien
tctcagcaccaagctttgccaggat

SEQ ID NO: 3680233 - DNA, 25 bp, Homo sapien
gccaggataagtaccaaataaacat

SEQ ID NO: 3680234 - DNA, 25 bp, Homo sapien
tttactgctaataaagcaataagac

SEQ ID NO: 3680235 - DNA, 25 bp, Homo sapien
tcatttactgctaataaagcaataa

SEQ ID NO: 3680236 - DNA, 25 bp, Homo sapien
ctgctaataaagcaataagactcat

SEQ ID NO: 3680237 - DNA, 25 bp, Homo sapien
tttcatttactgctaataaagcaat

SEQ ID NO: 3680238 - DNA, 25 bp, Homo sapien
ttgaaaacggccagaatatagctct

SEQ ID NO: 3680239 - DNA, 25 bp, Homo sapien
ccaggctctctgacccaacattgta

SEQ ID NO: 3680240 - DNA, 25 bp, Homo sapien
aacattgtacataggtcatccattg

SEQ ID NO: 3680241 - DNA, 25 bp, Homo sapien
gaagagtaatgtgaatactgcaagg

SEQ ID NO: 3680242 - DNA, 25 bp, Homo sapien
tgcaagactcttacccagttcagtc

SEQ ID NO: 3680243 - DNA, 25 bp, Homo sapien
gaaatatggaatattctggtatcag

SEQ ID NO: 3680244 - DNA, 25 bp, Homo sapien
cagttcagtcgttttccagtgtata

SEQ ID NO: 3680245 - DNA, 25 bp, Homo sapien
tacttccttctacagagatgctgat

SEQ ID NO: 3680246 - DNA, 25 bp, Homo sapien
tcagtcccctggtggattgtagaca

SEQ ID NO: 3680247 - DNA, 25 bp, Homo sapien
ggtggattgtagacacttccagagg

SEQ ID NO: 3680248 - DNA, 25 bp, Homo sapien
tgtagacacttccagaggtacttga

SEQ ID NO: 3680249 - DNA, 25 bp, Homo sapien
acttccagaggtacttgataatgcc

SEQ ID NO: 3680250 - DNA, 25 bp, Homo sapien
ccgccacagcttctgattcaggaga

SEQ ID NO: 3680251 - DNA, 25 bp, Homo sapien
tatcacactgatagagttagacact

SEQ ID NO: 3680252 - DNA, 25 bp, Homo sapien
tagacactctttaggcaggttctca

SEQ ID NO: 3680253 - DNA, 25 bp, Homo sapien
gatgttaccaatgtgaggaccacac

SEQ ID NO: 3680254 - DNA, 25 bp, Homo sapien
tctaggcaaggtttcgcagcacaaa

SEQ ID NO: 3680255 - DNA, 25 bp, Homo sapien
aggtttcgcagcacaaaaggcataa

SEQ ID NO: 3680256 - DNA, 25 bp, Homo sapien
ttggtatgcttctaggcaaggtttc

SEQ ID NO: 3680257 - DNA, 25 bp, Homo sapien
tatgcttctaggcaaggtttcgcag

SEQ ID NO: 3680258 - DNA, 25 bp, Homo sapien
cactgcaaggagctgatagatttgc

SEQ ID NO: 3680259 - DNA, 25 bp, Homo sapien
aaaccaagcctgcaggatttcctga

SEQ ID NO: 3680260 - DNA, 25 bp, Homo sapien
ttctgtgattgatgacactgcaagg

SEQ ID NO: 3680261 - DNA, 25 bp, Homo sapien
tacaaggatgggtactgggtccagc

SEQ ID NO: 3680262 - DNA, 25 bp, Homo sapien
aataacatgtatcctgactctgtgc

SEQ ID NO: 3680263 - DNA, 25 bp, Homo sapien
tctgtgcttgagtggatgactgact

SEQ ID NO: 3680264 - DNA, 25 bp, Homo sapien
ctttttcagggatgcataagacaat

SEQ ID NO: 3680265 - DNA, 25 bp, Homo sapien
tggatgactgactggaggttttcca

SEQ ID NO: 3680266 - DNA, 25 bp, Homo sapien
gatggtcttagaagtcattgtgccc

SEQ ID NO: 3680267 - DNA, 25 bp, Homo sapien
tctagcatcagaatacccaagtcgt

SEQ ID NO: 3680268 - DNA, 25 bp, Homo sapien
gcttaggatccttctgtgacaaccc

SEQ ID NO: 3680269 - DNA, 25 bp, Homo sapien
cagtgctgccggcattctagcatca

SEQ ID NO: 3680270 - DNA, 25 bp, Homo sapien
aactggagatgttactaggaagaaa

SEQ ID NO: 3680271 - DNA, 25 bp, Homo sapien
ggaactggagatgttactaggaaga

SEQ ID NO: 3680272 - DNA, 25 bp, Homo sapien
ctggagatgttactaggaagaaagt

SEQ ID NO: 3680273 - DNA, 25 bp, Homo sapien
ctaggaagaaagtagttggggacag

SEQ ID NO: 3680274 - DNA, 25 bp, Homo sapien
actgggcacactggaaccacaaaag

SEQ ID NO: 3680275 - DNA, 25 bp, Homo sapien
agcacgaacatttctatgccccagg

SEQ ID NO: 3680276 - DNA, 25 bp, Homo sapien
tatgccagaccaatacccttgatgc

SEQ ID NO: 3680277 - DNA, 25 bp, Homo sapien
cagtggtggaattatgccagaccaa

SEQ ID NO: 3680278 - DNA, 25 bp, Homo sapien
tggatgcaatatctgtcgcaagaat

SEQ ID NO: 3680279 - DNA, 25 bp, Homo sapien
tatctgtcgcaagaattatcatctt

SEQ ID NO: 3680280 - DNA, 25 bp, Homo sapien
gatgcaatatctgtcgcaagaatta

SEQ ID NO: 3680281 - DNA, 25 bp, Homo sapien
caatatctgtcgcaagaattatcat

SEQ ID NO: 3680282 - DNA, 25 bp, Homo sapien
tttagagactgttgaatcagacttg

SEQ ID NO: 3680283 - DNA, 25 bp, Homo sapien
aatgactgatatttctggatctgct

SEQ ID NO: 3680284 - DNA, 25 bp, Homo sapien
tctgctgttgcttctactttagaga

SEQ ID NO: 3680285 - DNA, 25 bp, Homo sapien
gcttgggagtcaacatcatgagagg

SEQ ID NO: 3680286 - DNA, 25 bp, Homo sapien
ttgatggcccttgatcactgtggga

SEQ ID NO: 3680287 - DNA, 25 bp, Homo sapien
ctttgcagcttgatggcccttgatc

SEQ ID NO: 3680288 - DNA, 25 bp, Homo sapien
tgatcactgtgggatgggcaccata

SEQ ID NO: 3680289 - DNA, 25 bp, Homo sapien
gggcaccataggatccccgaaacat

SEQ ID NO: 3680290 - DNA, 25 bp, Homo sapien
tctattatgcaagagtccccatatg

SEQ ID NO: 3680291 - DNA, 25 bp, Homo sapien
tctaccttctggcaaagtatattct

SEQ ID NO: 3680292 - DNA, 25 bp, Homo sapien
aagtatattctctctattatgcaag

SEQ ID NO: 3680293 - DNA, 25 bp, Homo sapien
caaatgcatagctgaagaattcaga

SEQ ID NO: 3680294 - DNA, 25 bp, Homo sapien
aagattcataaatttcagcccctaa

SEQ ID NO: 3680295 - DNA, 25 bp, Homo sapien
tttttgagcaagatatgagacacca

SEQ ID NO: 3680296 - DNA, 25 bp, Homo sapien
taaatagaccgagttacacaaggga

SEQ ID NO: 3680297 - DNA, 25 bp, Homo sapien
tttggttgtggaatatgaataagca

SEQ ID NO: 3680298 - DNA, 25 bp, Homo sapien
gagcagagagtatacggtcagccct

SEQ ID NO: 3680299 - DNA, 25 bp, Homo sapien
ccagaaattttacggaggacatgca

SEQ ID NO: 3680300 - DNA, 25 bp, Homo sapien
aaaaactcctttgagatggtgctcc

SEQ ID NO: 3680301 - DNA, 25 bp, Homo sapien
taaggcccacttagacaaatgagtc

SEQ ID NO: 3680302 - DNA, 25 bp, Homo sapien
tgcaacactgggaaggctcgatctg

SEQ ID NO: 3680303 - DNA, 25 bp, Homo sapien
agttctaccggcatcgggcgctgag

SEQ ID NO: 3680304 - DNA, 25 bp, Homo sapien
catattcctgctcaccggtgggctc

SEQ ID NO: 3680305 - DNA, 25 bp, Homo sapien
tcaagcgcggcagaggctacaaatg

SEQ ID NO: 3680306 - DNA, 25 bp, Homo sapien
taaaagtgagcagggctacccactg

SEQ ID NO: 3680307 - DNA, 25 bp, Homo sapien
tcccggcttcgggtcagcatgacag

SEQ ID NO: 3680308 - DNA, 25 bp, Homo sapien
ttaattcaagctgggcagtaacggg

SEQ ID NO: 3680309 - DNA, 25 bp, Homo sapien
tcattgatctcaagagcacaggtcc

SEQ ID NO: 3680310 - DNA, 25 bp, Homo sapien
tctcttggcacccagttgagctcct

SEQ ID NO: 3680311 - DNA, 25 bp, Homo sapien
taccattttgtaggtgtcatcctct

SEQ ID NO: 3680312 - DNA, 25 bp, Homo sapien
cccagttgagctcctaccattttgt

SEQ ID NO: 3680313 - DNA, 25 bp, Homo sapien
gatgtattctcttggcacccagttg

SEQ ID NO: 3680314 - DNA, 25 bp, Homo sapien
tatacagtctcttcgcagctctttg

SEQ ID NO: 3680315 - DNA, 25 bp, Homo sapien
ttttctgccaggtatgtgcctcctc

SEQ ID NO: 3680316 - DNA, 25 bp, Homo sapien
catagatctcaagaatgaccctttc

SEQ ID NO: 3680317 - DNA, 25 bp, Homo sapien
tgggtttgcttgataactttgcctc

SEQ ID NO: 3680318 - DNA, 25 bp, Homo sapien
tataggctctgcaggtttgtagaac

SEQ ID NO: 3680319 - DNA, 25 bp, Homo sapien
tcaaaagccagttatctcccacgtg

SEQ ID NO: 3680320 - DNA, 25 bp, Homo sapien
tgcctgatggcctttgaactctgag

SEQ ID NO: 3680321 - DNA, 25 bp, Homo sapien
ggtactacagcagccttacagcctt

SEQ ID NO: 3680322 - DNA, 25 bp, Homo sapien
aagaaggttactcttcaaatcacaa

SEQ ID NO: 3680323 - DNA, 25 bp, Homo sapien
ggtaatttgtagacttcaactagct

SEQ ID NO: 3680324 - DNA, 25 bp, Homo sapien
tagacttcaactagcttctgccatt

SEQ ID NO: 3680325 - DNA, 25 bp, Homo sapien
gttttctgaagaaggttactcttca

SEQ ID NO: 3680326 - DNA, 25 bp, Homo sapien
gattcagttcctcaatcatactagc

SEQ ID NO: 3680327 - DNA, 25 bp, Homo sapien
ccacatttcatgtgttctagcagcc

SEQ ID NO: 3680328 - DNA, 25 bp, Homo sapien
aaatgaaaggaaagattcagttcct

SEQ ID NO: 3680329 - DNA, 25 bp, Homo sapien
tgaaatgcatctagagctgtgctgt

SEQ ID NO: 3680330 - DNA, 25 bp, Homo sapien
gcaattcattttaggttggttcctc

SEQ ID NO: 3680331 - DNA, 25 bp, Homo sapien
ttgcaattcattttaggttggttcc

SEQ ID NO: 3680332 - DNA, 25 bp, Homo sapien
tgcaattcattttaggttggttcct

SEQ ID NO: 3680333 - DNA, 25 bp, Homo sapien
aaattctggttgctttgactcactt

SEQ ID NO: 3680334 - DNA, 25 bp, Homo sapien
taatggtgatacactcaggtgagga

SEQ ID NO: 3680335 - DNA, 25 bp, Homo sapien
ggtgaggaagccagtaaggcctatc

SEQ ID NO: 3680336 - DNA, 25 bp, Homo sapien
aagaggtatcatctaattaatggtg

SEQ ID NO: 3680337 - DNA, 25 bp, Homo sapien
taaggcctatccatgcagactcttc

SEQ ID NO: 3680338 - DNA, 25 bp, Homo sapien
atcataagggtcacagctgatactc

SEQ ID NO: 3680339 - DNA, 25 bp, Homo sapien
catcataagggtcacagctgatact

SEQ ID NO: 3680340 - DNA, 25 bp, Homo sapien
caaagccgcttttatggtccaagtc

SEQ ID NO: 3680341 - DNA, 25 bp, Homo sapien
caattccgtcttctcaacaatgcat

SEQ ID NO: 3680342 - DNA, 25 bp, Homo sapien
cttcacagtggtccacaatgatcat

SEQ ID NO: 3680343 - DNA, 25 bp, Homo sapien
gaatccagtggatgcacctttcaaa

SEQ ID NO: 3680344 - DNA, 25 bp, Homo sapien
tgtgtctcctctttgtgcactactg

SEQ ID NO: 3680345 - DNA, 25 bp, Homo sapien
acctagctccatagaatacttttgg

SEQ ID NO: 3680346 - DNA, 25 bp, Homo sapien
ctggagaaacctagctccatagaat

SEQ ID NO: 3680347 - DNA, 25 bp, Homo sapien
ctttgtgcactactgctcaggcact

SEQ ID NO: 3680348 - DNA, 25 bp, Homo sapien
cgatggtaagtcaaacttctggcac

SEQ ID NO: 3680349 - DNA, 25 bp, Homo sapien
tggcaccttgaacagtagtgatagt

SEQ ID NO: 3680350 - DNA, 25 bp, Homo sapien
cccacgctgacatgtagtgatgatt

SEQ ID NO: 3680351 - DNA, 25 bp, Homo sapien
gatagtttcatcaccgacatgccct

SEQ ID NO: 3680352 - DNA, 25 bp, Homo sapien
tgaatggcaccagtagagaggaact

SEQ ID NO: 3680353 - DNA, 25 bp, Homo sapien
taaagggctcatggtaagtgtcgga

SEQ ID NO: 3680354 - DNA, 25 bp, Homo sapien
aaatgctagggcttcttcaagaccc

SEQ ID NO: 3680355 - DNA, 25 bp, Homo sapien
taacaggttcataatcttacaggca

SEQ ID NO: 3680356 - DNA, 25 bp, Homo sapien
aatcaaggtgtctgaatggctctct

SEQ ID NO: 3680357 - DNA, 25 bp, Homo sapien
aattataagagcacatatttgcctg

SEQ ID NO: 3680358 - DNA, 25 bp, Homo sapien
taacccaatgtctctaatagatagc

SEQ ID NO: 3680359 - DNA, 25 bp, Homo sapien
tgctgccctaacaaaactaccataa

SEQ ID NO: 3680360 - DNA, 25 bp, Homo sapien
tgctagcctgctggtataagtgtcc

SEQ ID NO: 3680361 - DNA, 25 bp, Homo sapien
ccaacaagggcagtaataaagttgt

SEQ ID NO: 3680362 - DNA, 25 bp, Homo sapien
gagtctcatttctatattctgtgca

SEQ ID NO: 3680363 - DNA, 25 bp, Homo sapien
tcattatagatcatgtactcagagt

SEQ ID NO: 3680364 - DNA, 25 bp, Homo sapien
tctgtagggctagcagagggtgcca

SEQ ID NO: 3680365 - DNA, 25 bp, Homo sapien
gtgttgagctgagacaacactcttg

SEQ ID NO: 3680366 - DNA, 25 bp, Homo sapien
ctccatctgtagggctagcagaggg

SEQ ID NO: 3680367 - DNA, 25 bp, Homo sapien
ttgagctgagacaacactcttgaga

SEQ ID NO: 3680368 - DNA, 25 bp, Homo sapien
tattcctatgtagggagcactgaac

SEQ ID NO: 3680369 - DNA, 25 bp, Homo sapien
actgctgtattcctatgtagggagc

SEQ ID NO: 3680370 - DNA, 25 bp, Homo sapien
tcctatgtagggagcactgaaccct

SEQ ID NO: 3680371 - DNA, 25 bp, Homo sapien
tgctgtattcctatgtagggagcac

SEQ ID NO: 3680372 - DNA, 25 bp, Homo sapien
cagctgtctgatcctccttgtcaaa

SEQ ID NO: 3680373 - DNA, 25 bp, Homo sapien
ctgatcaaagattcattcagctgtc

SEQ ID NO: 3680374 - DNA, 25 bp, Homo sapien
ctgatcctccttgtcaaatcagacc

SEQ ID NO: 3680375 - DNA, 25 bp, Homo sapien
tgtctgatcctccttgtcaaatcag

SEQ ID NO: 3680376 - DNA, 25 bp, Homo sapien
gattaagtttggttccatactgagc

SEQ ID NO: 3680377 - DNA, 25 bp, Homo sapien
tgggtactgactcacactgcgtggt

SEQ ID NO: 3680378 - DNA, 25 bp, Homo sapien
tctaccacaccctggcaaaagtggg

SEQ ID NO: 3680379 - DNA, 25 bp, Homo sapien
tgctgcagggtgtcgattaagtttg

SEQ ID NO: 3680380 - DNA, 25 bp, Homo sapien
ttttggattgttctccacaagttgg

SEQ ID NO: 3680381 - DNA, 25 bp, Homo sapien
cacaagttgggtccaatgatatatt

SEQ ID NO: 3680382 - DNA, 25 bp, Homo sapien
gattgttctccacaagttgggtcca

SEQ ID NO: 3680383 - DNA, 25 bp, Homo sapien
tctccacaagttgggtccaatgata

SEQ ID NO: 3680384 - DNA, 25 bp, Homo sapien
tcctcaatcttgtgatgatgaccat

SEQ ID NO: 3680385 - DNA, 25 bp, Homo sapien
agttccctggtattaagcttacatt

SEQ ID NO: 3680386 - DNA, 25 bp, Homo sapien
gtactttctgctgacgaggagcatt

SEQ ID NO: 3680387 - DNA, 25 bp, Homo sapien
cgaggagcattgaccttagagaaat

SEQ ID NO: 3680388 - DNA, 25 bp, Homo sapien
gctccttgaagttctgacttagggc

SEQ ID NO: 3680389 - DNA, 25 bp, Homo sapien
ttagggcagccggtgactcctggac

SEQ ID NO: 3680390 - DNA, 25 bp, Homo sapien
ccaggtgtagtggaagggccaggat

SEQ ID NO: 3680391 - DNA, 25 bp, Homo sapien
ggatggccacgtgccttggttcttg

SEQ ID NO: 3680392 - DNA, 25 bp, Homo sapien
tgtaccaggacctgtgcgaaacagc

SEQ ID NO: 3680393 - DNA, 25 bp, Homo sapien
taccaggacctgtgcgaaacagcat

SEQ ID NO: 3680394 - DNA, 25 bp, Homo sapien
gtaccaggacctgtgcgaaacagca

SEQ ID NO: 3680395 - DNA, 25 bp, Homo sapien
ctgtaccaggacctgtgcgaaacag

SEQ ID NO: 3680396 - DNA, 25 bp, Homo sapien
tgagagtccagagtccacataggct

SEQ ID NO: 3680397 - DNA, 25 bp, Homo sapien
aggaaagtggcagtcttcttgggtt

SEQ ID NO: 3680398 - DNA, 25 bp, Homo sapien
cacataggctcctgctctattgcca

SEQ ID NO: 3680399 - DNA, 25 bp, Homo sapien
taggctcctgctctattgccacagc

SEQ ID NO: 3680400 - DNA, 25 bp, Homo sapien
tgagggccctggattctgaaagttc

SEQ ID NO: 3680401 - DNA, 25 bp, Homo sapien
atgagggccctggattctgaaagtt

SEQ ID NO: 3680402 - DNA, 25 bp, Homo sapien
agggccctggattctgaaagttctc

SEQ ID NO: 3680403 - DNA, 25 bp, Homo sapien
ggccctggattctgaaagttctctg

SEQ ID NO: 3680404 - DNA, 25 bp, Homo sapien
tctggacagcggtatctattggtct

SEQ ID NO: 3680405 - DNA, 25 bp, Homo sapien
cacgctgcagtttggtgatctgtgt

SEQ ID NO: 3680406 - DNA, 25 bp, Homo sapien
gctttgctgtgagcacgctgcagtt

SEQ ID NO: 3680407 - DNA, 25 bp, Homo sapien
tatctattggtctctgggctgtcag

SEQ ID NO: 3680408 - DNA, 25 bp, Homo sapien
tattgttgaagagagtaatggaggc

SEQ ID NO: 3680409 - DNA, 25 bp, Homo sapien
tggaggcttttcgaaacatgaattc

SEQ ID NO: 3680410 - DNA, 25 bp, Homo sapien
ctccatcaagattgtaactttgcat

SEQ ID NO: 3680411 - DNA, 25 bp, Homo sapien
taattttcctccatactctatattg

SEQ ID NO: 3680412 - DNA, 25 bp, Homo sapien
ttgagacagcagagcagaatatgct

SEQ ID NO: 3680413 - DNA, 25 bp, Homo sapien
tggtcactggtacagggtccaagga

SEQ ID NO: 3680414 - DNA, 25 bp, Homo sapien
cataagtgggagactccagtggtca

SEQ ID NO: 3680415 - DNA, 25 bp, Homo sapien
ttccttgactggacaaagaagggcc

SEQ ID NO: 3680416 - DNA, 25 bp, Homo sapien
gagaagcggcccctcgtcacctagg

SEQ ID NO: 3680417 - DNA, 25 bp, Homo sapien
gcgacatcgccgcaatctcggccga

SEQ ID NO: 3680418 - DNA, 25 bp, Homo sapien
gcaatctcggccgagagaagcggcc

SEQ ID NO: 3680419 - DNA, 25 bp, Homo sapien
cagggagtcgtcccctgcgacatcg

SEQ ID NO: 3680420 - DNA, 25 bp, Homo sapien
cagactccgcggactgggaatgagc

SEQ ID NO: 3680421 - DNA, 25 bp, Homo sapien
gacgtgcggcgcctcttcggagacc

SEQ ID NO: 3680422 - DNA, 25 bp, Homo sapien
tgagcgctcggaggtctctggtacc

SEQ ID NO: 3680423 - DNA, 25 bp, Homo sapien
ttcggagaccggatttggcttggcc

SEQ ID NO: 3680424 - DNA, 25 bp, Homo sapien
ttatgagggcgtttgggcacggagc

SEQ ID NO: 3680425 - DNA, 25 bp, Homo sapien
ggtagaagcgcgtggttatgagggc

SEQ ID NO: 3680426 - DNA, 25 bp, Homo sapien
tcatacatttagacccgctggcacc

SEQ ID NO: 3680427 - DNA, 25 bp, Homo sapien
gcacggagccgtccaatggaagaat

SEQ ID NO: 3680428 - DNA, 25 bp, Homo sapien
tcatttttaagaggccagcatagtc

SEQ ID NO: 3680429 - DNA, 25 bp, Homo sapien
ccaaggttggatcatcattagcagg

SEQ ID NO: 3680430 - DNA, 25 bp, Homo sapien
tcaaagatgaactaaaccggaagtc

SEQ ID NO: 3680431 - DNA, 25 bp, Homo sapien
tcacggttggacgagaaaattgatc

SEQ ID NO: 3680432 - DNA, 25 bp, Homo sapien
gcgttgggctgctccggtctccttg

SEQ ID NO: 3680433 - DNA, 25 bp, Homo sapien
agtgcagggatgaagcgttgggctg

SEQ ID NO: 3680434 - DNA, 25 bp, Homo sapien
agaaagtggtgaatgtagtcatgtt

SEQ ID NO: 3680435 - DNA, 25 bp, Homo sapien
gaaaagaaagtggtgaatgtagtca

SEQ ID NO: 3680436 - DNA, 25 bp, Homo sapien
gtgatttgggcaactgaaagaaaat

SEQ ID NO: 3680437 - DNA, 25 bp, Homo sapien
ctccatcgatgtcctccattaacaa

SEQ ID NO: 3680438 - DNA, 25 bp, Homo sapien
tccatcgatgtcctccattaacaaa

SEQ ID NO: 3680439 - DNA, 25 bp, Homo sapien
cattaacaaatcagtgatttgggca

SEQ ID NO: 3680440 - DNA, 25 bp, Homo sapien
tcccttctcggatttttcttccagc

SEQ ID NO: 3680441 - DNA, 25 bp, Homo sapien
ccttctcggatttttcttccagcca

SEQ ID NO: 3680442 - DNA, 25 bp, Homo sapien
cttctcggatttttcttccagccag

SEQ ID NO: 3680443 - DNA, 25 bp, Homo sapien
ctattgttttgcattgcaatgatca

SEQ ID NO: 3680444 - DNA, 25 bp, Homo sapien
attgcaatgatcaataacatttggg

SEQ ID NO: 3680445 - DNA, 25 bp, Homo sapien
gcaatgatcaataacatttggggtt

SEQ ID NO: 3680446 - DNA, 25 bp, Homo sapien
gcattgcaatgatcaataacatttg

SEQ ID NO: 3680447 - DNA, 25 bp, Homo sapien
gaatggcatcctttaaacaagtttc

SEQ ID NO: 3680448 - DNA, 25 bp, Homo sapien
tagaatggcatcctttaaacaagtt

SEQ ID NO: 3680449 - DNA, 25 bp, Homo sapien
aatctagtagaatggcatcctttaa

SEQ ID NO: 3680450 - DNA, 25 bp, Homo sapien
ctagtagaatggcatcctttaaaca

SEQ ID NO: 3680451 - DNA, 25 bp, Homo sapien
gaagtgacatagctagtaaagtcat

SEQ ID NO: 3680452 - DNA, 25 bp, Homo sapien
agtgacatagctagtaaagtcataa

SEQ ID NO: 3680453 - DNA, 25 bp, Homo sapien
gaatactgaataatagagaaatcca

SEQ ID NO: 3680454 - DNA, 25 bp, Homo sapien
aatactgaataatagagaaatccat

SEQ ID NO: 3680455 - DNA, 25 bp, Homo sapien
ctttcctctaaggacatatgtagtg

SEQ ID NO: 3680456 - DNA, 25 bp, Homo sapien
tgatagcattggcttgttttacatc

SEQ ID NO: 3680457 - DNA, 25 bp, Homo sapien
cgaatgtgttggtcctatttcagcc

SEQ ID NO: 3680458 - DNA, 25 bp, Homo sapien
agtaatcaatgatagcattggcttg

SEQ ID NO: 3680459 - DNA, 25 bp, Homo sapien
ccagtcctcactcttttgcgaatgt

SEQ ID NO: 3680460 - DNA, 25 bp, Homo sapien
taaactcgtatagcttgtagtgttg

SEQ ID NO: 3680461 - DNA, 25 bp, Homo sapien
gaacataaactcgtatagcttgtag

SEQ ID NO: 3680462 - DNA, 25 bp, Homo sapien
cataaactcgtatagcttgtagtgt

SEQ ID NO: 3680463 - DNA, 25 bp, Homo sapien
gtagaacataaactcgtatagcttg

SEQ ID NO: 3680464 - DNA, 25 bp, Homo sapien
ctcagttcctatcacaatttcttcc

SEQ ID NO: 3680465 - DNA, 25 bp, Homo sapien
aggaacagagaaccgaacaccgcat

SEQ ID NO: 3680466 - DNA, 25 bp, Homo sapien
catatgtttattgaagcagtattca

SEQ ID NO: 3680467 - DNA, 25 bp, Homo sapien
cacaggaacagagaaccgaacaccg

SEQ ID NO: 3680468 - DNA, 25 bp, Homo sapien
acatatgtttattgaagcagtattc

SEQ ID NO: 3680469 - DNA, 25 bp, Homo sapien
tctccagagtactgggaatgctggt

SEQ ID NO: 3680470 - DNA, 25 bp, Homo sapien
tgacagaaagtctccagagtactgg

SEQ ID NO: 3680471 - DNA, 25 bp, Homo sapien
gactgacagaaagtctccagagtac

SEQ ID NO: 3680472 - DNA, 25 bp, Homo sapien
agagtactgggaatgctggtaggca

SEQ ID NO: 3680473 - DNA, 25 bp, Homo sapien
atgcctggagtgaaaagctgtcaca

SEQ ID NO: 3680474 - DNA, 25 bp, Homo sapien
tcagattcacttctgtgtacccatc

SEQ ID NO: 3680475 - DNA, 25 bp, Homo sapien
tcagcaaatgcctggagtgaaaagc

SEQ ID NO: 3680476 - DNA, 25 bp, Homo sapien
aatgcctggagtgaaaagctgtcac

SEQ ID NO: 3680477 - DNA, 25 bp, Homo sapien
gacaacttgattggttgccttggcc

SEQ ID NO: 3680478 - DNA, 25 bp, Homo sapien
cttgcagtcctaatctgcctcctaa

SEQ ID NO: 3680479 - DNA, 25 bp, Homo sapien
gaactttttccagtgaactgtctac

SEQ ID NO: 3680480 - DNA, 25 bp, Homo sapien
ggttgtcatgacactgtagccctaa

SEQ ID NO: 3680481 - DNA, 25 bp, Homo sapien
catggaggttcaccgctatatagac

SEQ ID NO: 3680482 - DNA, 25 bp, Homo sapien
caccgctatatagactgttctttaa

SEQ ID NO: 3680483 - DNA, 25 bp, Homo sapien
ggttcaccgctatatagactgttct

SEQ ID NO: 3680484 - DNA, 25 bp, Homo sapien
cagcccatggaggttcaccgctata

SEQ ID NO: 3680485 - DNA, 25 bp, Homo sapien
tctttccagtattaatactttttgc

SEQ ID NO: 3680486 - DNA, 25 bp, Homo sapien
cacagggatcacatacaaagttgct

SEQ ID NO: 3680487 - DNA, 25 bp, Homo sapien
gggtatgcctgcctaaaattttgat

SEQ ID NO: 3680488 - DNA, 25 bp, Homo sapien
taaaaaatcgcactgtagtggaatc

SEQ ID NO: 3680489 - DNA, 25 bp, Homo sapien
gactcacttcatccactcgacattg

SEQ ID NO: 3680490 - DNA, 25 bp, Homo sapien
ttttcaatagttaacaggcatccct

SEQ ID NO: 3680491 - DNA, 25 bp, Homo sapien
cacttgtttaatatcccattgaaga

SEQ ID NO: 3680492 - DNA, 25 bp, Homo sapien
ggttctatgattcttaacacttgtt

SEQ ID NO: 3680493 - DNA, 25 bp, Homo sapien
catccctggcagtcgcaaattagaa

SEQ ID NO: 3680494 - DNA, 25 bp, Homo sapien
agctaaaatctgcggctgctttgtt

SEQ ID NO: 3680495 - DNA, 25 bp, Homo sapien
tttgagctaaaatctgcggctgctt

SEQ ID NO: 3680496 - DNA, 25 bp, Homo sapien
tgagctaaaatctgcggctgctttg

SEQ ID NO: 3680497 - DNA, 25 bp, Homo sapien
ttgagctaaaatctgcggctgcttt

SEQ ID NO: 3680498 - DNA, 25 bp, Homo sapien
tgttagggataggccagacaaagag

SEQ ID NO: 3680499 - DNA, 25 bp, Homo sapien
ctgttagggataggccagacaaaga

SEQ ID NO: 3680500 - DNA, 25 bp, Homo sapien
ttgccttcacagatctcgagctcca

SEQ ID NO: 3680501 - DNA, 25 bp, Homo sapien
catgttcttgccttcacagatctcg

SEQ ID NO: 3680502 - DNA, 25 bp, Homo sapien
ctcgagctccagctgtactagacca

SEQ ID NO: 3680503 - DNA, 25 bp, Homo sapien
gctgtactagaccactcactctttc

SEQ ID NO: 3680504 - DNA, 25 bp, Homo sapien
tcaataggttgcctctctagcctgg

SEQ ID NO: 3680505 - DNA, 25 bp, Homo sapien
tagtagcagattctaccactggccc

SEQ ID NO: 3680506 - DNA, 25 bp, Homo sapien
cccctgtggaagttctcaataggtt

SEQ ID NO: 3680507 - DNA, 25 bp, Homo sapien
gcctggtagtagcagattctaccac

SEQ ID NO: 3680508 - DNA, 25 bp, Homo sapien
cttttttcagcactcttgtttttca

SEQ ID NO: 3680509 - DNA, 25 bp, Homo sapien
ttttttcagcactcttgtttttcat

SEQ ID NO: 3680510 - DNA, 25 bp, Homo sapien
gggcaaggcaagacttcactatgag

SEQ ID NO: 3680511 - DNA, 25 bp, Homo sapien
agagtcaaggaagccaactttggca

SEQ ID NO: 3680512 - DNA, 25 bp, Homo sapien
cagaaggaggctgacggttggttaa

SEQ ID NO: 3680513 - DNA, 25 bp, Homo sapien
tctttagcaacagcgtgccactcag

SEQ ID NO: 3680514 - DNA, 25 bp, Homo sapien
tggggggctctatgaatgttgaata

SEQ ID NO: 3680515 - DNA, 25 bp, Homo sapien
aatgagattccttcttccagaggat

SEQ ID NO: 3680516 - DNA, 25 bp, Homo sapien
tcatttccgtatccaatattgtggg

SEQ ID NO: 3680517 - DNA, 25 bp, Homo sapien
gaataaatatcaaatgagattcctt

SEQ ID NO: 3680518 - DNA, 25 bp, Homo sapien
tgaatgccgattaaaatgtcatctg

SEQ ID NO: 3680519 - DNA, 25 bp, Homo sapien
tgaggtgtcagtttctggctgagac

SEQ ID NO: 3680520 - DNA, 25 bp, Homo sapien
tctgtgacttgatccagcactgatt

SEQ ID NO: 3680521 - DNA, 25 bp, Homo sapien
gattttacatcttcaatggtaaaac

SEQ ID NO: 3680522 - DNA, 25 bp, Homo sapien
tgagcatactatcaatactgagtac

SEQ ID NO: 3680523 - DNA, 25 bp, Homo sapien
gtaagtgagcatactatcaatactg

SEQ ID NO: 3680524 - DNA, 25 bp, Homo sapien
taataaagtaagtgagcatactatc

SEQ ID NO: 3680525 - DNA, 25 bp, Homo sapien
taaagtaagtgagcatactatcaat

SEQ ID NO: 3680526 - DNA, 25 bp, Homo sapien
gcacctagcggttctgcatccctgt

SEQ ID NO: 3680527 - DNA, 25 bp, Homo sapien
gattgtggcacctagcggttctgca

SEQ ID NO: 3680528 - DNA, 25 bp, Homo sapien
aaatgattgtggcacctagcggttc

SEQ ID NO: 3680529 - DNA, 25 bp, Homo sapien
tatggaaatgattgtggcacctagc

SEQ ID NO: 3680530 - DNA, 25 bp, Homo sapien
tccaggtcacagaggaactcttcct

SEQ ID NO: 3680531 - DNA, 25 bp, Homo sapien
gaggaactcttcctttaggatgcac

SEQ ID NO: 3680532 - DNA, 25 bp, Homo sapien
agggatggagcggtcctccaggtca

SEQ ID NO: 3680533 - DNA, 25 bp, Homo sapien
caaggagggatggagcggtcctcca

SEQ ID NO: 3680534 - DNA, 25 bp, Homo sapien
cctgtagtgatgtgataacacttta

SEQ ID NO: 3680535 - DNA, 25 bp, Homo sapien
tttcagcctgtagtgatgtgataac

SEQ ID NO: 3680536 - DNA, 25 bp, Homo sapien
catgtctgctatgaacaggaagtgg

SEQ ID NO: 3680537 - DNA, 25 bp, Homo sapien
tgcacatttccaatgtatagcatgt

SEQ ID NO: 3680538 - DNA, 25 bp, Homo sapien
aaaggcctcttcctgtatttgcagt

SEQ ID NO: 3680539 - DNA, 25 bp, Homo sapien
attcgtgcattaaaggcctcttcct

SEQ ID NO: 3680540 - DNA, 25 bp, Homo sapien
attaaaggcctcttcctgtatttgc

SEQ ID NO: 3680541 - DNA, 25 bp, Homo sapien
tgcattaaaggcctcttcctgtatt

SEQ ID NO: 3680542 - DNA, 25 bp, Homo sapien
tcacagtgttccagtaacgtggcag

SEQ ID NO: 3680543 - DNA, 25 bp, Homo sapien
taggtcatgtattctcctgggagag

SEQ ID NO: 3680544 - DNA, 25 bp, Homo sapien
aagtgatggagacacgacgctccag

SEQ ID NO: 3680545 - DNA, 25 bp, Homo sapien
gatgggagatagcaaaattgggacc

SEQ ID NO: 3680546 - DNA, 25 bp, Homo sapien
aaattgactaatgtacgttgttggt

SEQ ID NO: 3680547 - DNA, 25 bp, Homo sapien
aattgactaatgtacgttgttggta

SEQ ID NO: 3680548 - DNA, 25 bp, Homo sapien
aaaaattgactaatgtacgttgttg

SEQ ID NO: 3680549 - DNA, 25 bp, Homo sapien
acaaaaaattgactaatgtacgttg

SEQ ID NO: 3680550 - DNA, 25 bp, Homo sapien
gacatttatttcgaccgaatcgttg

SEQ ID NO: 3680551 - DNA, 25 bp, Homo sapien
cgaccgaatcgttgctggaatccat

SEQ ID NO: 3680552 - DNA, 25 bp, Homo sapien
tatttcgaccgaatcgttgctggaa

SEQ ID NO: 3680553 - DNA, 25 bp, Homo sapien
catgacatttatttcgaccgaatcg

SEQ ID NO: 3680554 - DNA, 25 bp, Homo sapien
tgggaaagtctgctggctagacctg

SEQ ID NO: 3680555 - DNA, 25 bp, Homo sapien
tagacctgtaagaggacttgccctt

SEQ ID NO: 3680556 - DNA, 25 bp, Homo sapien
gatctctctgtggaatatgggaaag

SEQ ID NO: 3680557 - DNA, 25 bp, Homo sapien
gaaacactgaggaagaccgcctaaa

SEQ ID NO: 3680558 - DNA, 25 bp, Homo sapien
cttggacaatgctttgtatcctttt

SEQ ID NO: 3680559 - DNA, 25 bp, Homo sapien
ttggacaatgctttgtatccttttg

SEQ ID NO: 3680560 - DNA, 25 bp, Homo sapien
tctccaagacaaactgattattcat

SEQ ID NO: 3680561 - DNA, 25 bp, Homo sapien
ttctccaagacaaactgattattca

SEQ ID NO: 3680562 - DNA, 25 bp, Homo sapien
agagaagtgtcttgtgttgaaggtt

SEQ ID NO: 3680563 - DNA, 25 bp, Homo sapien
tcttgtgttgaaggtttgcacagtt

SEQ ID NO: 3680564 - DNA, 25 bp, Homo sapien
cacttggtttgccaggtgcttcggg

SEQ ID NO: 3680565 - DNA, 25 bp, Homo sapien
aatgcacttggtttgccaggtgctt

SEQ ID NO: 3680566 - DNA, 25 bp, Homo sapien
atgaagacagaaacaacaggatttc

SEQ ID NO: 3680567 - DNA, 25 bp, Homo sapien
tgaatgaagacagaaacaacaggat

SEQ ID NO: 3680568 - DNA, 25 bp, Homo sapien
gaatgaagacagaaacaacaggatt

SEQ ID NO: 3680569 - DNA, 25 bp, Homo sapien
ctgaatgaagacagaaacaacagga

SEQ ID NO: 3680570 - DNA, 25 bp, Homo sapien
catggccgattcctttgtgcacagc

SEQ ID NO: 3680571 - DNA, 25 bp, Homo sapien
tgtgcacagccttagttaccatggg

SEQ ID NO: 3680572 - DNA, 25 bp, Homo sapien
tctggattaagatactctcatggcc

SEQ ID NO: 3680573 - DNA, 25 bp, Homo sapien
gggatcacgatgtagagtgttctaa

SEQ ID NO: 3680574 - DNA, 25 bp, Homo sapien
gagtcctgaagaggattcacttggc

SEQ ID NO: 3680575 - DNA, 25 bp, Homo sapien
ggcaacagagtcctgaagaggattc

SEQ ID NO: 3680576 - DNA, 25 bp, Homo sapien
gtcctgaagaggattcacttggctc

SEQ ID NO: 3680577 - DNA, 25 bp, Homo sapien
cctgaagaggattcacttggctcat

SEQ ID NO: 3680578 - DNA, 25 bp, Homo sapien
catgtcagagccaaacagagctgca

SEQ ID NO: 3680579 - DNA, 25 bp, Homo sapien
gaaagaagtctcctgcctgatttgg

SEQ ID NO: 3680580 - DNA, 25 bp, Homo sapien
cagcctttgttcagggactgtggac

SEQ ID NO: 3680581 - DNA, 25 bp, Homo sapien
tgatttggtaggtcccagtttagcc

SEQ ID NO: 3680582 - DNA, 25 bp, Homo sapien
tttttgttcaggttctatcaaaata

SEQ ID NO: 3680583 - DNA, 25 bp, Homo sapien
cataatagggttctggataaacttc

SEQ ID NO: 3680584 - DNA, 25 bp, Homo sapien
gggttctggataaacttcatgcttt

SEQ ID NO: 3680585 - DNA, 25 bp, Homo sapien
aaacataacaacatatgttttgtga

SEQ ID NO: 3680586 - DNA, 25 bp, Homo sapien
aatgtgtgcaggtctctggcaagcc

SEQ ID NO: 3680587 - DNA, 25 bp, Homo sapien
gatgttcacactttattgggctaac

SEQ ID NO: 3680588 - DNA, 25 bp, Homo sapien
tctccacgaccagtgtttgatgttc

SEQ ID NO: 3680589 - DNA, 25 bp, Homo sapien
gatatgtgttgctcagaaaccatct

SEQ ID NO: 3680590 - DNA, 25 bp, Homo sapien
catcttcctgaagtgtagtccttgt

SEQ ID NO: 3680591 - DNA, 25 bp, Homo sapien
tggagactggtacccaacaggattg

SEQ ID NO: 3680592 - DNA, 25 bp, Homo sapien
ccatcgttagctgattgatagtggc

SEQ ID NO: 3680593 - DNA, 25 bp, Homo sapien
tctggaagatcctatagttgactct

SEQ ID NO: 3680594 - DNA, 25 bp, Homo sapien
ttctgagtagaatgcacgggagatt

SEQ ID NO: 3680595 - DNA, 25 bp, Homo sapien
gagtatgcggccagccttatccagg

SEQ ID NO: 3680596 - DNA, 25 bp, Homo sapien
catgggctgcacaatttagccttgg

SEQ ID NO: 3680597 - DNA, 25 bp, Homo sapien
tgggttttccagcattggtcaatga

SEQ ID NO: 3680598 - DNA, 25 bp, Homo sapien
ggtgctgcatcctggtctagtgaaa

SEQ ID NO: 3680599 - DNA, 25 bp, Homo sapien
gacctgtctttaatgtgatagcccg

SEQ ID NO: 3680600 - DNA, 25 bp, Homo sapien
gagactacccaagtgtccacacagg

SEQ ID NO: 3680601 - DNA, 25 bp, Homo sapien
gatagcccggaacagtgcatctgag

SEQ ID NO: 3680602 - DNA, 25 bp, Homo sapien
ggaagtatgtcagtgatttacccat

SEQ ID NO: 3680603 - DNA, 25 bp, Homo sapien
taaagtaatatggaagtatgtcagt

SEQ ID NO: 3680604 - DNA, 25 bp, Homo sapien
tatattcaaagcgaggccagtgggc

SEQ ID NO: 3680605 - DNA, 25 bp, Homo sapien
actgagtagcccatttttttcagca

SEQ ID NO: 3680606 - DNA, 25 bp, Homo sapien
tgcatggcatccgtgggcctcagta

SEQ ID NO: 3680607 - DNA, 25 bp, Homo sapien
cctcagtagctcttcactgagtagc

SEQ ID NO: 3680608 - DNA, 25 bp, Homo sapien
gccaccccaaacaacactgacctca

SEQ ID NO: 3680609 - DNA, 25 bp, Homo sapien
accccaaacaacactgacctcacac

SEQ ID NO: 3680610 - DNA, 25 bp, Homo sapien
caccccaaacaacactgacctcaca

SEQ ID NO: 3680611 - DNA, 25 bp, Homo sapien
cccaaacaacactgacctcacacat

SEQ ID NO: 3680612 - DNA, 25 bp, Homo sapien
tggactgcaaagtctcgggaacttg

SEQ ID NO: 3680613 - DNA, 25 bp, Homo sapien
cgggccttgtataggtcgttggcat

SEQ ID NO: 3680614 - DNA, 25 bp, Homo sapien
agctactcctgtgtcgggccttgta

SEQ ID NO: 3680615 - DNA, 25 bp, Homo sapien
cttgatgacacaagagctactcctg

SEQ ID NO: 3680616 - DNA, 25 bp, Homo sapien
aagtgccggcaagtcccttgaccgc

SEQ ID NO: 3680617 - DNA, 25 bp, Homo sapien
attctggctttgtcggaatttctca

SEQ ID NO: 3680618 - DNA, 25 bp, Homo sapien
gtcattcagacccatggaagtgccg

SEQ ID NO: 3680619 - DNA, 25 bp, Homo sapien
tggtcatctgtatagaggcagctgc

SEQ ID NO: 3680620 - DNA, 25 bp, Homo sapien
cgcctggtcccatccccctctatgc

SEQ ID NO: 3680621 - DNA, 25 bp, Homo sapien
gtcccatccccctctatgcctggcg

SEQ ID NO: 3680622 - DNA, 25 bp, Homo sapien
catccccctctatgcctggcgccat

SEQ ID NO: 3680623 - DNA, 25 bp, Homo sapien
gcctggtcccatccccctctatgcc

SEQ ID NO: 3680624 - DNA, 25 bp, Homo sapien
taaatactcataaacagattgaatg

SEQ ID NO: 3680625 - DNA, 25 bp, Homo sapien
agtaataacgtggattcaaggctcc

SEQ ID NO: 3680626 - DNA, 25 bp, Homo sapien
cagagcagatgtaagacttgagaca

SEQ ID NO: 3680627 - DNA, 25 bp, Homo sapien
taatagcctgtttgatttctgcttg

SEQ ID NO: 3680628 - DNA, 25 bp, Homo sapien
tcacagcatctagttgaaacaggat

SEQ ID NO: 3680629 - DNA, 25 bp, Homo sapien
cttgaggtggaaagaccctctgtgt

SEQ ID NO: 3680630 - DNA, 25 bp, Homo sapien
taacgtctgcgtccgctgcagtaag

SEQ ID NO: 3680631 - DNA, 25 bp, Homo sapien
tgaagttaatacacccggcagagca

SEQ ID NO: 3680632 - DNA, 25 bp, Homo sapien
gctcctgtctgggatatcgtctgat

SEQ ID NO: 3680633 - DNA, 25 bp, Homo sapien
tttcctgcagagattccggggcgct

SEQ ID NO: 3680634 - DNA, 25 bp, Homo sapien
gtgcatctgacaggacctgcttgta

SEQ ID NO: 3680635 - DNA, 25 bp, Homo sapien
tctgggatatcgtctgatgagattt

SEQ ID NO: 3680636 - DNA, 25 bp, Homo sapien
ttcgggcaccgaaatgattgaaaat

SEQ ID NO: 3680637 - DNA, 25 bp, Homo sapien
tcgggcaccgaaatgattgaaaata

SEQ ID NO: 3680638 - DNA, 25 bp, Homo sapien
cttcgggcaccgaaatgattgaaaa

SEQ ID NO: 3680639 - DNA, 25 bp, Homo sapien
gggaaacgcattctctgccttcagc

SEQ ID NO: 3680640 - DNA, 25 bp, Homo sapien
cagccggcgtaatgtctcaatataa

SEQ ID NO: 3680641 - DNA, 25 bp, Homo sapien
tgcatcaggtcctggcagggaaacg

SEQ ID NO: 3680642 - DNA, 25 bp, Homo sapien
aacttgttggcttgaatggattgca

SEQ ID NO: 3680643 - DNA, 25 bp, Homo sapien
ccatctcgacgttctgaattgattg

SEQ ID NO: 3680644 - DNA, 25 bp, Homo sapien
acgttctgaattgattgaactcaac

SEQ ID NO: 3680645 - DNA, 25 bp, Homo sapien
tctcgacgttctgaattgattgaac

SEQ ID NO: 3680646 - DNA, 25 bp, Homo sapien
tgggctccatctcgacgttctgaat

SEQ ID NO: 3680647 - DNA, 25 bp, Homo sapien
ttagagctggataaaagttgccggc

SEQ ID NO: 3680648 - DNA, 25 bp, Homo sapien
gaaaatgtaaggtccgtgcaagcca

SEQ ID NO: 3680649 - DNA, 25 bp, Homo sapien
caaatcggatcctttggcgtacatc

SEQ ID NO: 3680650 - DNA, 25 bp, Homo sapien
gctggagctccgctatgcaaatcgg

SEQ ID NO: 3680651 - DNA, 25 bp, Homo sapien
tagaacatcaaatggcttgtccggg

SEQ ID NO: 3680652 - DNA, 25 bp, Homo sapien
atcgcgcaggaggacgtccactttg

SEQ ID NO: 3680653 - DNA, 25 bp, Homo sapien
tgtgcctgttacaccaccgctttga

SEQ ID NO: 3680654 - DNA, 25 bp, Homo sapien
cgtggagtaattgcaaactagaaca

SEQ ID NO: 3680655 - DNA, 25 bp, Homo sapien
gacgaactccagtaattaaccggca

SEQ ID NO: 3680656 - DNA, 25 bp, Homo sapien
gattcgagggcgaacgtttcgacga

SEQ ID NO: 3680657 - DNA, 25 bp, Homo sapien
ttatttccgaaaaggcagattcgag

SEQ ID NO: 3680658 - DNA, 25 bp, Homo sapien
ttaaccggcatagaccactgacgag

SEQ ID NO: 3680659 - DNA, 25 bp, Homo sapien
taattttgaggcgtgtcattatctc

SEQ ID NO: 3680660 - DNA, 25 bp, Homo sapien
taatcatacagctaattaccagccg

SEQ ID NO: 3680661 - DNA, 25 bp, Homo sapien
ttaccagccgtgttagcattaaaaa

SEQ ID NO: 3680662 - DNA, 25 bp, Homo sapien
cagccaaagtcctaatgaaatatac

SEQ ID NO: 3680663 - DNA, 25 bp, Homo sapien
tgccattccctcacacggaaaaact

SEQ ID NO: 3680664 - DNA, 25 bp, Homo sapien
ctaggtgccattccctcacacggaa

SEQ ID NO: 3680665 - DNA, 25 bp, Homo sapien
ggtgccattccctcacacggaaaaa

SEQ ID NO: 3680666 - DNA, 25 bp, Homo sapien
aggtgccattccctcacacggaaaa

SEQ ID NO: 3680667 - DNA, 25 bp, Homo sapien
catatatatcatgaagattaccaca

SEQ ID NO: 3680668 - DNA, 25 bp, Homo sapien
tatttgcacttagttctttgtctcc

SEQ ID NO: 3680669 - DNA, 25 bp, Homo sapien
cagttatactgcgatcctttgtgct

SEQ ID NO: 3680670 - DNA, 25 bp, Homo sapien
ccttttgaccaacaccctatatata

SEQ ID NO: 3680671 - DNA, 25 bp, Homo sapien
cctgagcctatcacattcaggaaag

SEQ ID NO: 3680672 - DNA, 25 bp, Homo sapien
aatttccaaccagaacactgccaaa

SEQ ID NO: 3680673 - DNA, 25 bp, Homo sapien
caccagcgtcttttccacagtgcaa

SEQ ID NO: 3680674 - DNA, 25 bp, Homo sapien
ccttttgccttgtatcaccagcgtc

SEQ ID NO: 3680675 - DNA, 25 bp, Homo sapien
tccaaagctttgctctagagatggc

SEQ ID NO: 3680676 - DNA, 25 bp, Homo sapien
cagcggggctgacgtagagagaatc

SEQ ID NO: 3680677 - DNA, 25 bp, Homo sapien
aaaactgtaatagtccaaagctttg

SEQ ID NO: 3680678 - DNA, 25 bp, Homo sapien
aaatcacatgaaaatctaggtttct

SEQ ID NO: 3680679 - DNA, 25 bp, Homo sapien
tttggaatcatttggcgaggagact

SEQ ID NO: 3680680 - DNA, 25 bp, Homo sapien
aggagactgagtactacagcagtgt

SEQ ID NO: 3680681 - DNA, 25 bp, Homo sapien
tacactgtgggattaatccaaagca

SEQ ID NO: 3680682 - DNA, 25 bp, Homo sapien
cagagaatattcacaaggaacagat

SEQ ID NO: 3680683 - DNA, 25 bp, Homo sapien
cacgctttgttaaatgtaacgcgac

SEQ ID NO: 3680684 - DNA, 25 bp, Homo sapien
gaattttggaaatccatccgggcac

SEQ ID NO: 3680685 - DNA, 25 bp, Homo sapien
gaagattgctctgaggcacgctttg

SEQ ID NO: 3680686 - DNA, 25 bp, Homo sapien
cgcctgtggctcgatgaattttgga

SEQ ID NO: 3680687 - DNA, 25 bp, Homo sapien
ggtgttttccaaaccgtggcatgca

SEQ ID NO: 3680688 - DNA, 25 bp, Homo sapien
ccgtggcatgcagagatgattttag

SEQ ID NO: 3680689 - DNA, 25 bp, Homo sapien
tagcatgtcagaattagctatcatg

SEQ ID NO: 3680690 - DNA, 25 bp, Homo sapien
cagtaattgccaggactcaatgggt

SEQ ID NO: 3680691 - DNA, 25 bp, Homo sapien
ccaaattcctatgtttatggtacat

SEQ ID NO: 3680692 - DNA, 25 bp, Homo sapien
cccaaattcctatgtttatggtaca

SEQ ID NO: 3680693 - DNA, 25 bp, Homo sapien
cagaatgtacccacttgaccaggtc

SEQ ID NO: 3680694 - DNA, 25 bp, Homo sapien
cagttttcactggtccagcgtggaa

SEQ ID NO: 3680695 - DNA, 25 bp, Homo sapien
gaacgtctttgaagttgagtccact

SEQ ID NO: 3680696 - DNA, 25 bp, Homo sapien
cactgtttagggttgactgcctgta

SEQ ID NO: 3680697 - DNA, 25 bp, Homo sapien
tcaaccgaaaagttactatatacgc

SEQ ID NO: 3680698 - DNA, 25 bp, Homo sapien
cgaaaagttactatatacgcccaca

SEQ ID NO: 3680699 - DNA, 25 bp, Homo sapien
agttactatatacgcccacacatta

SEQ ID NO: 3680700 - DNA, 25 bp, Homo sapien
tcttcaaccgaaaagttactatata

SEQ ID NO: 3680701 - DNA, 25 bp, Homo sapien
gatgccaggaaaccgttgatagtta

SEQ ID NO: 3680702 - DNA, 25 bp, Homo sapien
tgacatcaaccaaaagatgccagga

SEQ ID NO: 3680703 - DNA, 25 bp, Homo sapien
gatgtattattcagcattaccgcaa

SEQ ID NO: 3680704 - DNA, 25 bp, Homo sapien
caggtgacaatcaggctgccatatc

SEQ ID NO: 3680705 - DNA, 25 bp, Homo sapien
tccgttctttgcttacttccaccag

SEQ ID NO: 3680706 - DNA, 25 bp, Homo sapien
gaggtggtttcagtgtgaccaacag

SEQ ID NO: 3680707 - DNA, 25 bp, Homo sapien
ctttatccatagaaaggtgagatct

SEQ ID NO: 3680708 - DNA, 25 bp, Homo sapien
caatgaggagttggaagggttctac

SEQ ID NO: 3680709 - DNA, 25 bp, Homo sapien
ttgtctaaatgtgctccctcaaggg

SEQ ID NO: 3680710 - DNA, 25 bp, Homo sapien
tcagagcatttattggaagctgcca

SEQ ID NO: 3680711 - DNA, 25 bp, Homo sapien
gatctgtagttttagtcatcaacca

SEQ ID NO: 3680712 - DNA, 25 bp, Homo sapien
gtttttccactatccagatctgtag

SEQ ID NO: 3680713 - DNA, 25 bp, Homo sapien
gaaaggcagaattcccacaggtagg

SEQ ID NO: 3680714 - DNA, 25 bp, Homo sapien
gaaagtctgatcataaaagccgcat

SEQ ID NO: 3680715 - DNA, 25 bp, Homo sapien
tagaaaggctattccacgagtagag

SEQ ID NO: 3680716 - DNA, 25 bp, Homo sapien
tgtgtgcactttgaaccagcgatcc

SEQ ID NO: 3680717 - DNA, 25 bp, Homo sapien
cgatctgtacttccaacattctgtt

SEQ ID NO: 3680718 - DNA, 25 bp, Homo sapien
ctttacaacatcgatctgtacttcc

SEQ ID NO: 3680719 - DNA, 25 bp, Homo sapien
tacaacatcgatctgtacttccaac

SEQ ID NO: 3680720 - DNA, 25 bp, Homo sapien
catcgatctgtacttccaacattct

SEQ ID NO: 3680721 - DNA, 25 bp, Homo sapien
tatgaggaacctgatgaaacaaact

SEQ ID NO: 3680722 - DNA, 25 bp, Homo sapien
gacttgctgaaaatcgtatcttcca

SEQ ID NO: 3680723 - DNA, 25 bp, Homo sapien
tattgcagagcagctaaggaactct

SEQ ID NO: 3680724 - DNA, 25 bp, Homo sapien
gcagaagacagttgtggcaagatta

SEQ ID NO: 3680725 - DNA, 25 bp, Homo sapien
agggccttcgctaatgggatccaga

SEQ ID NO: 3680726 - DNA, 25 bp, Homo sapien
gcaaaacagggccttcgctaatggg

SEQ ID NO: 3680727 - DNA, 25 bp, Homo sapien
aaacagggccttcgctaatgggatc

SEQ ID NO: 3680728 - DNA, 25 bp, Homo sapien
tcgctaatgggatccagaccatttt

SEQ ID NO: 3680729 - DNA, 25 bp, Homo sapien
acaatgctattattccttcgaaaac

SEQ ID NO: 3680730 - DNA, 25 bp, Homo sapien
aatgtgtaataagcagttagagcac

SEQ ID NO: 3680731 - DNA, 25 bp, Homo sapien
ctgaaaatgtgtaataagcagttag

SEQ ID NO: 3680732 - DNA, 25 bp, Homo sapien
gctattattccttcgaaaactgaaa

SEQ ID NO: 3680733 - DNA, 25 bp, Homo sapien
tcttctagggagactgtgaccaggt

SEQ ID NO: 3680734 - DNA, 25 bp, Homo sapien
cattttaggactacattggtacaca

SEQ ID NO: 3680735 - DNA, 25 bp, Homo sapien
caaggcgatgccttatgaagaggca

SEQ ID NO: 3680736 - DNA, 25 bp, Homo sapien
cactggatttgtaaccatgggcaaa

SEQ ID NO: 3680737 - DNA, 25 bp, Homo sapien
cagtcattatgacatttaatgccaa

SEQ ID NO: 3680738 - DNA, 25 bp, Homo sapien
aagataaggtccagtttgcaaactg

SEQ ID NO: 3680739 - DNA, 25 bp, Homo sapien
tccagtttgcaaactgccaagcaca

SEQ ID NO: 3680740 - DNA, 25 bp, Homo sapien
acacttcctgatgtttattaacacc

SEQ ID NO: 3680741 - DNA, 25 bp, Homo sapien
tatcttgggctaggacgctctttta

SEQ ID NO: 3680742 - DNA, 25 bp, Homo sapien
ttatctttgctcacaccttctttaa

SEQ ID NO: 3680743 - DNA, 25 bp, Homo sapien
taagtgtcaatgagttattccctca

SEQ ID NO: 3680744 - DNA, 25 bp, Homo sapien
tattccctcatggataacgatgaag

SEQ ID NO: 3680745 - DNA, 25 bp, Homo sapien
tggtccgtgttttgaaatctggaaa

SEQ ID NO: 3680746 - DNA, 25 bp, Homo sapien
tattgcaagttggtccgtgttttga

SEQ ID NO: 3680747 - DNA, 25 bp, Homo sapien
tatttcttattgcaagttggtccgt

SEQ ID NO: 3680748 - DNA, 25 bp, Homo sapien
taccctcccacctttctctaacagc

SEQ ID NO: 3680749 - DNA, 25 bp, Homo sapien
ggtcagcagccgagatctctctcaa

SEQ ID NO: 3680750 - DNA, 25 bp, Homo sapien
aacagtctctgaacgccagccaaga

SEQ ID NO: 3680751 - DNA, 25 bp, Homo sapien
aataggtgttatcattcaggaggcc

SEQ ID NO: 3680752 - DNA, 25 bp, Homo sapien
ggcaagtgcttcatacgcaggtcag

SEQ ID NO: 3680753 - DNA, 25 bp, Homo sapien
gacaaagatccacaaccacctgatt

SEQ ID NO: 3680754 - DNA, 25 bp, Homo sapien
tacacacgtagctcacacaattgca

SEQ ID NO: 3680755 - DNA, 25 bp, Homo sapien
accatcactccaatcaatttagaac

SEQ ID NO: 3680756 - DNA, 25 bp, Homo sapien
taagattaaaaatgatacgattaca

SEQ ID NO: 3680757 - DNA, 25 bp, Homo sapien
taagagatgggcctctctctgttct

SEQ ID NO: 3680758 - DNA, 25 bp, Homo sapien
cattactagttgttaatattcccca

SEQ ID NO: 3680759 - DNA, 25 bp, Homo sapien
tagtgttttcacgtctcttttgttc

SEQ ID NO: 3680760 - DNA, 25 bp, Homo sapien
caacaaccttattagtggcattact

SEQ ID NO: 3680761 - DNA, 25 bp, Homo sapien
cacttttgcaggattgttacagata

SEQ ID NO: 3680762 - DNA, 25 bp, Homo sapien
cttttgcaggattgttacagatatc

SEQ ID NO: 3680763 - DNA, 25 bp, Homo sapien
acttttgcaggattgttacagatat

SEQ ID NO: 3680764 - DNA, 25 bp, Homo sapien
ctcttttaacgttcctcaaatccat

SEQ ID NO: 3680765 - DNA, 25 bp, Homo sapien
cctccccatacccatactcctctct

SEQ ID NO: 3680766 - DNA, 25 bp, Homo sapien
ctccccatacccatactcctctctt

SEQ ID NO: 3680767 - DNA, 25 bp, Homo sapien
ccaccctccccatacccatactcct

SEQ ID NO: 3680768 - DNA, 25 bp, Homo sapien
tcttccctctgacaaagaactttca

SEQ ID NO: 3680769 - DNA, 25 bp, Homo sapien
tgcgtttcagcatcgagcggtaccg

SEQ ID NO: 3680770 - DNA, 25 bp, Homo sapien
cgttttctatgagagtcgggtggtc

SEQ ID NO: 3680771 - DNA, 25 bp, Homo sapien
cagggccaatgcaaactggtccgtt

SEQ ID NO: 3680772 - DNA, 25 bp, Homo sapien
caaaggtgtcccgacagtacaggat

SEQ ID NO: 3680773 - DNA, 25 bp, Homo sapien
gcttgtgaaagtgagccccgttccc

SEQ ID NO: 3680774 - DNA, 25 bp, Homo sapien
taaacagaggctacgaaggaggcaa

SEQ ID NO: 3680775 - DNA, 25 bp, Homo sapien
gtccaatttcaaggtcgaccaagca

SEQ ID NO: 3680776 - DNA, 25 bp, Homo sapien
gcaatgacgccttatgccgcaataa

SEQ ID NO: 3680777 - DNA, 25 bp, Homo sapien
tggttaccattggtgcatttttaca

SEQ ID NO: 3680778 - DNA, 25 bp, Homo sapien
taccattggtgcatttttacaatac

SEQ ID NO: 3680779 - DNA, 25 bp, Homo sapien
gttaccattggtgcatttttacaat

SEQ ID NO: 3680780 - DNA, 25 bp, Homo sapien
ggttaccattggtgcatttttacaa

SEQ ID NO: 3680781 - DNA, 25 bp, Homo sapien
gtggttatctatttatccaccatac

SEQ ID NO: 3680782 - DNA, 25 bp, Homo sapien
aattcaggacatggatatctatcac

SEQ ID NO: 3680783 - DNA, 25 bp, Homo sapien
tctatcatctctctacgtgtctatc

SEQ ID NO: 3680784 - DNA, 25 bp, Homo sapien
actgtacagtactaaagtggttatc

SEQ ID NO: 3680785 - DNA, 25 bp, Homo sapien
agacacgtgaccagttagctaggca

SEQ ID NO: 3680786 - DNA, 25 bp, Homo sapien
cgtgaccagttagctaggcagagat

SEQ ID NO: 3680787 - DNA, 25 bp, Homo sapien
tgaccagttagctaggcagagatgc

SEQ ID NO: 3680788 - DNA, 25 bp, Homo sapien
cacgtgaccagttagctaggcagag

SEQ ID NO: 3680789 - DNA, 25 bp, Homo sapien
gaaagtgataatgtaagagaacgac

SEQ ID NO: 3680790 - DNA, 25 bp, Homo sapien
ccgtgtaaggcttcccaaactggtg

SEQ ID NO: 3680791 - DNA, 25 bp, Homo sapien
gagaacgactatcttggcttgcatc

SEQ ID NO: 3680792 - DNA, 25 bp, Homo sapien
tcgccatctactgcaccgtgtaagg

SEQ ID NO: 3680793 - DNA, 25 bp, Homo sapien
aatctgccaactagtgattctcagg

SEQ ID NO: 3680794 - DNA, 25 bp, Homo sapien
taacctgaatctggataatctgcca

SEQ ID NO: 3680795 - DNA, 25 bp, Homo sapien
ccaggtagccatgagggattcagca

SEQ ID NO: 3680796 - DNA, 25 bp, Homo sapien
aaagggaccctatgctctctccagg

SEQ ID NO: 3680797 - DNA, 25 bp, Homo sapien
accagggctgttggaatcatgaaga

SEQ ID NO: 3680798 - DNA, 25 bp, Homo sapien
gaggccatagtggactcctgaaacc

SEQ ID NO: 3680799 - DNA, 25 bp, Homo sapien
aaatttctctagtagcagcaccagg

SEQ ID NO: 3680800 - DNA, 25 bp, Homo sapien
gaagaatcaaatttaagaggccata

SEQ ID NO: 3680801 - DNA, 25 bp, Homo sapien
gctcttagaatctaatggacttaga

SEQ ID NO: 3680802 - DNA, 25 bp, Homo sapien
tcttagaatctaatggacttagatc

SEQ ID NO: 3680803 - DNA, 25 bp, Homo sapien
tggctcttagaatctaatggactta

SEQ ID NO: 3680804 - DNA, 25 bp, Homo sapien
tcatggctcttagaatctaatggac

SEQ ID NO: 3680805 - DNA, 25 bp, Homo sapien
gaagcaacgtttgggagccgagaat

SEQ ID NO: 3680806 - DNA, 25 bp, Homo sapien
ggcactctcggtaatctgacagaag

SEQ ID NO: 3680807 - DNA, 25 bp, Homo sapien
gaatttagagacctcttgagcggca

SEQ ID NO: 3680808 - DNA, 25 bp, Homo sapien
gaaagcttccactttaagaggctgg

SEQ ID NO: 3680809 - DNA, 25 bp, Homo sapien
gaggtcgctcatgggtaaaatgcaa

SEQ ID NO: 3680810 - DNA, 25 bp, Homo sapien
cctcgtagtgtctgttatatggcaa

SEQ ID NO: 3680811 - DNA, 25 bp, Homo sapien
tacttcagcaacatgccaggtctgt

SEQ ID NO: 3680812 - DNA, 25 bp, Homo sapien
gatcttttaactccggtggcaccta

SEQ ID NO: 3680813 - DNA, 25 bp, Homo sapien
caacgccctgtatgctgtcaagcaa

SEQ ID NO: 3680814 - DNA, 25 bp, Homo sapien
taattagaaacctgacaacgccctg

SEQ ID NO: 3680815 - DNA, 25 bp, Homo sapien
cactttccgatatgattccagccca

SEQ ID NO: 3680816 - DNA, 25 bp, Homo sapien
ctgtttcttgattggccacggcgaa

SEQ ID NO: 3680817 - DNA, 25 bp, Homo sapien
tgtggtatgaatctggcagctgtcc

SEQ ID NO: 3680818 - DNA, 25 bp, Homo sapien
gcagctgtcctgataaaagcagatc

SEQ ID NO: 3680819 - DNA, 25 bp, Homo sapien
gatctttgtcacagattgttcttgg

SEQ ID NO: 3680820 - DNA, 25 bp, Homo sapien
tgatgtctaacagaacctggagatg

SEQ ID NO: 3680821 - DNA, 25 bp, Homo sapien
gattgatggaaggagcttccaagac

SEQ ID NO: 3680822 - DNA, 25 bp, Homo sapien
ctgattgatggaaggagcttccaag

SEQ ID NO: 3680823 - DNA, 25 bp, Homo sapien
agacaaagctccaaacctctgggct

SEQ ID NO: 3680824 - DNA, 25 bp, Homo sapien
gcttccaagacaaagctccaaacct

SEQ ID NO: 3680825 - DNA, 25 bp, Homo sapien
ctagctgcaaggttcttattcacaa

SEQ ID NO: 3680826 - DNA, 25 bp, Homo sapien
cctagctgcaaggttcttattcaca

SEQ ID NO: 3680827 - DNA, 25 bp, Homo sapien
tagctgcaaggttcttattcacaat

SEQ ID NO: 3680828 - DNA, 25 bp, Homo sapien
agctgcaaggttcttattcacaata

SEQ ID NO: 3680829 - DNA, 25 bp, Homo sapien
ggcggcctaataaccacaaatgatt

SEQ ID NO: 3680830 - DNA, 25 bp, Homo sapien
tgacataatatctccggcggcctaa

SEQ ID NO: 3680831 - DNA, 25 bp, Homo sapien
cgaggctgccagtgccgtaaattat

SEQ ID NO: 3680832 - DNA, 25 bp, Homo sapien
gttatttcatagtcccgaggctgcc

SEQ ID NO: 3680833 - DNA, 25 bp, Homo sapien
ccgatgtcaaagtcccatcaatcca

SEQ ID NO: 3680834 - DNA, 25 bp, Homo sapien
tgattattctgaagaatatccgatg

SEQ ID NO: 3680835 - DNA, 25 bp, Homo sapien
gctcattttgcccattgtgttggag

SEQ ID NO: 3680836 - DNA, 25 bp, Homo sapien
cattttgcccattgtgttggaggtg

SEQ ID NO: 3680837 - DNA, 25 bp, Homo sapien
gaaactcaatcaatatctacccgtg

SEQ ID NO: 3680838 - DNA, 25 bp, Homo sapien
taacaatacagatgatcattcgtct

SEQ ID NO: 3680839 - DNA, 25 bp, Homo sapien
tacttcttagtaagaacaatgggaa

SEQ ID NO: 3680840 - DNA, 25 bp, Homo sapien
tcagaacccgaaaagaataacaata

SEQ ID NO: 3680841 - DNA, 25 bp, Homo sapien
gtggaaaacactgtgatagatgaca

SEQ ID NO: 3680842 - DNA, 25 bp, Homo sapien
acaaagatgtaagataagaactgtg

SEQ ID NO: 3680843 - DNA, 25 bp, Homo sapien
tactgtgagatttgttgcaataaaa

SEQ ID NO: 3680844 - DNA, 25 bp, Homo sapien
agatgtaagataagaactgtgtgga

SEQ ID NO: 3680845 - DNA, 25 bp, Homo sapien
ttatgtgcagcacttcatttaatcc

SEQ ID NO: 3680846 - DNA, 25 bp, Homo sapien
taagagctttatgtgcagcacttca

SEQ ID NO: 3680847 - DNA, 25 bp, Homo sapien
gagctttatgtgcagcacttcattt

SEQ ID NO: 3680848 - DNA, 25 bp, Homo sapien
tgcccagccccttctaagagcttta

SEQ ID NO: 3680849 - DNA, 25 bp, Homo sapien
tggagcagtccctatgacgtggaca

SEQ ID NO: 3680850 - DNA, 25 bp, Homo sapien
gcagtccctatgacgtggacatgga

SEQ ID NO: 3680851 - DNA, 25 bp, Homo sapien
ccctatgacgtggacatggataagg

SEQ ID NO: 3680852 - DNA, 25 bp, Homo sapien
ccggaactggagcagtccctatgac

SEQ ID NO: 3680853 - DNA, 25 bp, Homo sapien
cccaccgggctactggctctcctag

SEQ ID NO: 3680854 - DNA, 25 bp, Homo sapien
actctcaagcccaccgggctactgg

SEQ ID NO: 3680855 - DNA, 25 bp, Homo sapien
caagactctcaagcccaccgggcta

SEQ ID NO: 3680856 - DNA, 25 bp, Homo sapien
aagcccaccgggctactggctctcc

SEQ ID NO: 3680857 - DNA, 25 bp, Homo sapien
aatacctccatttgggtctctgcag

SEQ ID NO: 3680858 - DNA, 25 bp, Homo sapien
ttaggaaaacctcgggcaccagcta

SEQ ID NO: 3680859 - DNA, 25 bp, Homo sapien
cacccagtgagtagcagagctgcga

SEQ ID NO: 3680860 - DNA, 25 bp, Homo sapien
ttgcatgagatcagcagcagagcct

SEQ ID NO: 3680861 - DNA, 25 bp, Homo sapien
tcttaatctccaactattgagtaag

SEQ ID NO: 3680862 - DNA, 25 bp, Homo sapien
agttaatggtctgactttttggaca

SEQ ID NO: 3680863 - DNA, 25 bp, Homo sapien
aatggagctggagtgattttagttg

SEQ ID NO: 3680864 - DNA, 25 bp, Homo sapien
tggaagtagacacttcttaatctcc

SEQ ID NO: 3680865 - DNA, 25 bp, Homo sapien
tatgggtcgggtataatgtaagcca

SEQ ID NO: 3680866 - DNA, 25 bp, Homo sapien
gggtataatgtaagccattttcatc

SEQ ID NO: 3680867 - DNA, 25 bp, Homo sapien
tgctgtcaatatgggtcgggtataa

SEQ ID NO: 3680868 - DNA, 25 bp, Homo sapien
ctctcctgctgtcaatatgggtcgg

SEQ ID NO: 3680869 - DNA, 25 bp, Homo sapien
ctccagatgccaggtgtccacgagc

SEQ ID NO: 3680870 - DNA, 25 bp, Homo sapien
ttctcctattcatctctccagatgc

SEQ ID NO: 3680871 - DNA, 25 bp, Homo sapien
tttctcctattcatctctccagatg

SEQ ID NO: 3680872 - DNA, 25 bp, Homo sapien
ctttctcctattcatctctccagat

SEQ ID NO: 3680873 - DNA, 25 bp, Homo sapien
ggctgtctgcaatatcctccagggg

SEQ ID NO: 3680874 - DNA, 25 bp, Homo sapien
cccttgtaagaagtggacgtggtag

SEQ ID NO: 3680875 - DNA, 25 bp, Homo sapien
ttgtaagaagtggacgtggtagctc

SEQ ID NO: 3680876 - DNA, 25 bp, Homo sapien
tgtctgcaatatcctccaggggaaa

SEQ ID NO: 3680877 - DNA, 25 bp, Homo sapien
taatctagtccccacatgcaatgca

SEQ ID NO: 3680878 - DNA, 25 bp, Homo sapien
gacttgagtttgcactgggaatgga

SEQ ID NO: 3680879 - DNA, 25 bp, Homo sapien
acgtggtatacttgtcacactgggc

SEQ ID NO: 3680880 - DNA, 25 bp, Homo sapien
ccaaaggcctttggtatctcagtaa

SEQ ID NO: 3680881 - DNA, 25 bp, Homo sapien
ggatgtcagcttccctccgaatgcg

SEQ ID NO: 3680882 - DNA, 25 bp, Homo sapien
cacagcagtgactagcaccgagtgt

SEQ ID NO: 3680883 - DNA, 25 bp, Homo sapien
catgaatttgacacggtccgcagcc

SEQ ID NO: 3680884 - DNA, 25 bp, Homo sapien
tccgaatgcgagctgcgaggctcag

SEQ ID NO: 3680885 - DNA, 25 bp, Homo sapien
taccaaaggtaaacaagctcacaaa

SEQ ID NO: 3680886 - DNA, 25 bp, Homo sapien
gccagcctggaattaccaaaggtaa

SEQ ID NO: 3680887 - DNA, 25 bp, Homo sapien
taaacgctggtctgaaagtccatcc

SEQ ID NO: 3680888 - DNA, 25 bp, Homo sapien
cagttttactgttggtggaagctca

SEQ ID NO: 3680889 - DNA, 25 bp, Homo sapien
ggaatccttaacaccactgaatgaa

SEQ ID NO: 3680890 - DNA, 25 bp, Homo sapien
gccatcggaattgttgttggaatcc

SEQ ID NO: 3680891 - DNA, 25 bp, Homo sapien
catggtttctttttgcgtggtctgc

SEQ ID NO: 3680892 - DNA, 25 bp, Homo sapien
tggcaacggctttgccatcggaatt

SEQ ID NO: 3680893 - DNA, 25 bp, Homo sapien
caacgttttgatggcgaccggcaaa

SEQ ID NO: 3680894 - DNA, 25 bp, Homo sapien
gatcactctatgaaaggcctgggcc

SEQ ID NO: 3680895 - DNA, 25 bp, Homo sapien
tgctaacttgctaggtgaccctcag

SEQ ID NO: 3680896 - DNA, 25 bp, Homo sapien
tcatgttgacctaagaaagcccagc

SEQ ID NO: 3680897 - DNA, 25 bp, Homo sapien
tgctgtccattacaggatttcgaac

SEQ ID NO: 3680898 - DNA, 25 bp, Homo sapien
caatgctgtccattacaggatttcg

SEQ ID NO: 3680899 - DNA, 25 bp, Homo sapien
attctacaatgctgtccattacagg

SEQ ID NO: 3680900 - DNA, 25 bp, Homo sapien
tgtccattacaggatttcgaacctt

SEQ ID NO: 3680901 - DNA, 25 bp, Homo sapien
aaatagggtattcgttctatcggcg

SEQ ID NO: 3680902 - DNA, 25 bp, Homo sapien
tataaagtgccaccaagaaggcttg

SEQ ID NO: 3680903 - DNA, 25 bp, Homo sapien
tatggttattcttcggcttggtcaa

SEQ ID NO: 3680904 - DNA, 25 bp, Homo sapien
agaaggcttgttcatctgccctgca

SEQ ID NO: 3680905 - DNA, 25 bp, Homo sapien
agcttgaaacatagtccaaaggtta

SEQ ID NO: 3680906 - DNA, 25 bp, Homo sapien
gcttgaaacatagtccaaaggttaa

SEQ ID NO: 3680907 - DNA, 25 bp, Homo sapien
atatcctcccagtttttgagcagct

SEQ ID NO: 3680908 - DNA, 25 bp, Homo sapien
cctcccagtttttgagcagcttgaa

SEQ ID NO: 3680909 - DNA, 25 bp, Homo sapien
tagctgataaagagtgtcagagcct

SEQ ID NO: 3680910 - DNA, 25 bp, Homo sapien
gcagcactgacccttgtctaataaa

SEQ ID NO: 3680911 - DNA, 25 bp, Homo sapien
taacttcctgtttatgcagcactga

SEQ ID NO: 3680912 - DNA, 25 bp, Homo sapien
tcagagcctgttccgaataagtttg

SEQ ID NO: 3680913 - DNA, 25 bp, Homo sapien
tctacgtttatgagactaaccctga

SEQ ID NO: 3680914 - DNA, 25 bp, Homo sapien
gatcctatcaaaagactccactaag

SEQ ID NO: 3680915 - DNA, 25 bp, Homo sapien
gttccagagtgtgaaaagacgtttc

SEQ ID NO: 3680916 - DNA, 25 bp, Homo sapien
tatgagctacagtggcaaggagttc

SEQ ID NO: 3680917 - DNA, 25 bp, Homo sapien
gatcattattggctctcttggatgg

SEQ ID NO: 3680918 - DNA, 25 bp, Homo sapien
caacttaaggactgaaattactggc

SEQ ID NO: 3680919 - DNA, 25 bp, Homo sapien
tgagtaagtactttacctgtgtagg

SEQ ID NO: 3680920 - DNA, 25 bp, Homo sapien
tgtagggcactgacctttttccacc

SEQ ID NO: 3680921 - DNA, 25 bp, Homo sapien
tctgaaggcctaacatcagggagct

SEQ ID NO: 3680922 - DNA, 25 bp, Homo sapien
catgaaagggcctagcatctgaagg

SEQ ID NO: 3680923 - DNA, 25 bp, Homo sapien
tcagggagctagcatcggaggactt

SEQ ID NO: 3680924 - DNA, 25 bp, Homo sapien
caaactgaagtatctgcagggccaa

SEQ ID NO: 3680925 - DNA, 25 bp, Homo sapien
ctttcagcaacgctacagagggtga

SEQ ID NO: 3680926 - DNA, 25 bp, Homo sapien
gaagctaagagccatgggaaacact

SEQ ID NO: 3680927 - DNA, 25 bp, Homo sapien
tacaaaaggcaggttatcagatcct

SEQ ID NO: 3680928 - DNA, 25 bp, Homo sapien
gaaactctctgctgctcttgagccg

SEQ ID NO: 3680929 - DNA, 25 bp, Homo sapien
tccaggaactggagcctttcaaaac

SEQ ID NO: 3680930 - DNA, 25 bp, Homo sapien
aattttgaatttaagcgagaggctt

SEQ ID NO: 3680931 - DNA, 25 bp, Homo sapien
ttttgaatttaagcgagaggctttg

SEQ ID NO: 3680932 - DNA, 25 bp, Homo sapien
caaaactacatgacatcatctttgg

SEQ ID NO: 3680933 - DNA, 25 bp, Homo sapien
tgagggtggactgaattcaaggaag

SEQ ID NO: 3680934 - DNA, 25 bp, Homo sapien
ttgagggtggactgaattcaaggaa

SEQ ID NO: 3680935 - DNA, 25 bp, Homo sapien
agggtggactgaattcaaggaagat

SEQ ID NO: 3680936 - DNA, 25 bp, Homo sapien
cttgagggtggactgaattcaagga

SEQ ID NO: 3680937 - DNA, 25 bp, Homo sapien
caagaagactggtctggtgagtgga

SEQ ID NO: 3680938 - DNA, 25 bp, Homo sapien
aagactggtctggtgagtggaaaaa

SEQ ID NO: 3680939 - DNA, 25 bp, Homo sapien
gtcaagaagactggtctggtgagtg

SEQ ID NO: 3680940 - DNA, 25 bp, Homo sapien
actggtctggtgagtggaaaaataa

SEQ ID NO: 3680941 - DNA, 25 bp, Homo sapien
gaatgacctgagaatagcccatgct

SEQ ID NO: 3680942 - DNA, 25 bp, Homo sapien
taactgtgggaatcactgtttctgc

SEQ ID NO: 3680943 - DNA, 25 bp, Homo sapien
gaaatctagctaagaggacagcatc

SEQ ID NO: 3680944 - DNA, 25 bp, Homo sapien
caagttggtaacacagaactctggg

SEQ ID NO: 3680945 - DNA, 25 bp, Homo sapien
ccagattcccctcactcagatgaga

SEQ ID NO: 3680946 - DNA, 25 bp, Homo sapien
cagattcccctcactcagatgagac

SEQ ID NO: 3680947 - DNA, 25 bp, Homo sapien
agattcccctcactcagatgagacc

SEQ ID NO: 3680948 - DNA, 25 bp, Homo sapien
tacatatgcaacagtcagaagagaa

SEQ ID NO: 3680949 - DNA, 25 bp, Homo sapien
tacatcataagagattcatagtgcc

SEQ ID NO: 3680950 - DNA, 25 bp, Homo sapien
aaaaatggcaatgggaaattcaatc

SEQ ID NO: 3680951 - DNA, 25 bp, Homo sapien
tagtgccaggcttcaatacatatgc

SEQ ID NO: 3680952 - DNA, 25 bp, Homo sapien
taatgtctgcgggtacaagtggcag

SEQ ID NO: 3680953 - DNA, 25 bp, Homo sapien
tatgtttccactgacggcgggctgt

SEQ ID NO: 3680954 - DNA, 25 bp, Homo sapien
tggcagcgctggtgctcccaggatt

SEQ ID NO: 3680955 - DNA, 25 bp, Homo sapien
taccgcctaattcatcataaatatg

SEQ ID NO: 3680956 - DNA, 25 bp, Homo sapien
tgagctaacagctgagatacactcc

SEQ ID NO: 3680957 - DNA, 25 bp, Homo sapien
caagtagcctgtggttccttagaca

SEQ ID NO: 3680958 - DNA, 25 bp, Homo sapien
gggatgtccactctcaaaacagaat

SEQ ID NO: 3680959 - DNA, 25 bp, Homo sapien
tactttgtactaggacatcagtggt

SEQ ID NO: 3680960 - DNA, 25 bp, Homo sapien
agaagaacccgcagcctagtaggaa

SEQ ID NO: 3680961 - DNA, 25 bp, Homo sapien
gtagttagcggttgcatctgatcac

SEQ ID NO: 3680962 - DNA, 25 bp, Homo sapien
gcaacctgtgactagcaagaatgaa

SEQ ID NO: 3680963 - DNA, 25 bp, Homo sapien
ttactggaaacatgaaccacagtgc

SEQ ID NO: 3680964 - DNA, 25 bp, Homo sapien
aatgttccacttagaaagaatgagg

SEQ ID NO: 3680965 - DNA, 25 bp, Homo sapien
taacttcatctataaatcctgagca

SEQ ID NO: 3680966 - DNA, 25 bp, Homo sapien
gagacatctacatagcaacagcctt

SEQ ID NO: 3680967 - DNA, 25 bp, Homo sapien
ttgcatcaaaagctacagtaacttc

SEQ ID NO: 3680968 - DNA, 25 bp, Homo sapien
aaatctcatttgagtagcactggtc

SEQ ID NO: 3680969 - DNA, 25 bp, Homo sapien
aaatatacaattctgagatgtggcc

SEQ ID NO: 3680970 - DNA, 25 bp, Homo sapien
tggcaaatttcagcgtaagtgtatc

SEQ ID NO: 3680971 - DNA, 25 bp, Homo sapien
gcgtatctattaactccaagggtgt

SEQ ID NO: 3680972 - DNA, 25 bp, Homo sapien
tgtgtagagcagagtaagagcgcct

SEQ ID NO: 3680973 - DNA, 25 bp, Homo sapien
aaacatagaaggtcaggaagcgcac

SEQ ID NO: 3680974 - DNA, 25 bp, Homo sapien
ggcatctacctacagcaacagtgtg

SEQ ID NO: 3680975 - DNA, 25 bp, Homo sapien
ggaacttggcatcctgtaggctata

SEQ ID NO: 3680976 - DNA, 25 bp, Homo sapien
gttctaatgagtcgtggtggctccc

SEQ ID NO: 3680977 - DNA, 25 bp, Homo sapien
tgtacggcctttgactcagatcttg

SEQ ID NO: 3680978 - DNA, 25 bp, Homo sapien
taaaccaaggatcatggcatcttcc

SEQ ID NO: 3680979 - DNA, 25 bp, Homo sapien
tgattcatcccgtgattctcgtgcc

SEQ ID NO: 3680980 - DNA, 25 bp, Homo sapien
gaagccacgctgacatgaagaacga

SEQ ID NO: 3680981 - DNA, 25 bp, Homo sapien
tcccggagtgtgtgtgaccctaaat

SEQ ID NO: 3680982 - DNA, 25 bp, Homo sapien
aatgtaagtaatctggcaacctgcc

SEQ ID NO: 3680983 - DNA, 25 bp, Homo sapien
gataaatttctacagcttggccaga

SEQ ID NO: 3680984 - DNA, 25 bp, Homo sapien
actgttctcctgtttccgaggtttg

SEQ ID NO: 3680985 - DNA, 25 bp, Homo sapien
tttcatgtttgatgcgtttggttcc

SEQ ID NO: 3680986 - DNA, 25 bp, Homo sapien
cctgtttccgaggtttgattggagg

SEQ ID NO: 3680987 - DNA, 25 bp, Homo sapien
tttgatgcgtttggttccagatact

SEQ ID NO: 3680988 - DNA, 25 bp, Homo sapien
gaactatgtggggaactgtgaagct

SEQ ID NO: 3680989 - DNA, 25 bp, Homo sapien
atttcatctcatgagcaagctgaaa

SEQ ID NO: 3680990 - DNA, 25 bp, Homo sapien
catctcatgagcaagctgaaaggct

SEQ ID NO: 3680991 - DNA, 25 bp, Homo sapien
ttcatctcatgagcaagctgaaagg

SEQ ID NO: 3680992 - DNA, 25 bp, Homo sapien
accaccacacctggctaattttttg

SEQ ID NO: 3680993 - DNA, 25 bp, Homo sapien
caccaccacacctggctaatttttt

SEQ ID NO: 3680994 - DNA, 25 bp, Homo sapien
ctgtcacccaggctgtcgtgatctc

SEQ ID NO: 3680995 - DNA, 25 bp, Homo sapien
cacccaggctgtcgtgatctcagct

SEQ ID NO: 3680996 - DNA, 25 bp, Homo sapien
agaggctcagggatgcttttctggc

SEQ ID NO: 3680997 - DNA, 25 bp, Homo sapien
gcttttctggcttattaaagtctct

SEQ ID NO: 3680998 - DNA, 25 bp, Homo sapien
ctggcttattaaagtctcttgttct

SEQ ID NO: 3680999 - DNA, 25 bp, Homo sapien
gggatgcttttctggcttattaaag

SEQ ID NO: 3681000 - DNA, 25 bp, Homo sapien
atgccaggggcttcgctgaaaattc

SEQ ID NO: 3681001 - DNA, 25 bp, Homo sapien
gatgccaggggcttcgctgaaaatt

SEQ ID NO: 3681002 - DNA, 25 bp, Homo sapien
gaaactctggacgtgctgaatcact

SEQ ID NO: 3681003 - DNA, 25 bp, Homo sapien
aatttcttgcttcaggacgtaggag

SEQ ID NO: 3681004 - DNA, 25 bp, Homo sapien
cctgggttgcccctagagtagagca

SEQ ID NO: 3681005 - DNA, 25 bp, Homo sapien
ctgaatcactgatggccggctgacc

SEQ ID NO: 3681006 - DNA, 25 bp, Homo sapien
gtggccttctgatccgcccccggaa

SEQ ID NO: 3681007 - DNA, 25 bp, Homo sapien
gcttgtggccttctgatccgccccc

SEQ ID NO: 3681008 - DNA, 25 bp, Homo sapien
tggccttctgatccgcccccggaat

SEQ ID NO: 3681009 - DNA, 25 bp, Homo sapien
ttgtggccttctgatccgcccccgg

SEQ ID NO: 3681010 - DNA, 25 bp, Homo sapien
aggtgtagccgcagccaagtgtctg

SEQ ID NO: 3681011 - DNA, 25 bp, Homo sapien
catcacaagcgagtggaaagccagg

SEQ ID NO: 3681012 - DNA, 25 bp, Homo sapien
gagttgaggcccgagttacacaggc

SEQ ID NO: 3681013 - DNA, 25 bp, Homo sapien
taaatgctgttatgcaaaaggtccc

SEQ ID NO: 3681014 - DNA, 25 bp, Homo sapien
gctctgttggccatgccgctttgga

SEQ ID NO: 3681015 - DNA, 25 bp, Homo sapien
tacagctgggactgatcatagcctc

SEQ ID NO: 3681016 - DNA, 25 bp, Homo sapien
gactcaccagccagtcagtttgtgg

SEQ ID NO: 3681017 - DNA, 25 bp, Homo sapien
ttcacaaggcccacgtgcgaagtga

SEQ ID NO: 3681018 - DNA, 25 bp, Homo sapien
taagttgcggatctacaaaggaacg

SEQ ID NO: 3681019 - DNA, 25 bp, Homo sapien
gtcagttatccccaaagatgtggcc

SEQ ID NO: 3681020 - DNA, 25 bp, Homo sapien
ttcatccaagcggtcttcagcaggg

SEQ ID NO: 3681021 - DNA, 25 bp, Homo sapien
tcaaaagaccgaggctagagaagct

SEQ ID NO: 3681022 - DNA, 25 bp, Homo sapien
gttttgccgagggtatgagcttcct

SEQ ID NO: 3681023 - DNA, 25 bp, Homo sapien
aaaacgtcgttctcagccaatgaag

SEQ ID NO: 3681024 - DNA, 25 bp, Homo sapien
aacagtgagtctcctctcagaagag

SEQ ID NO: 3681025 - DNA, 25 bp, Homo sapien
gaaaatggtgtgatcgaattccaac

SEQ ID NO: 3681026 - DNA, 25 bp, Homo sapien
caatggtatgggtctcaccagggca

SEQ ID NO: 3681027 - DNA, 25 bp, Homo sapien
tatttcaaccatgaggagacaggca

SEQ ID NO: 3681028 - DNA, 25 bp, Homo sapien
tagaccagatgcgacttggctgacc

SEQ ID NO: 3681029 - DNA, 25 bp, Homo sapien
tgagaattcatgcaccaggtcagaa

SEQ ID NO: 3681030 - DNA, 25 bp, Homo sapien
ataaatatcacctatttcctggtca

SEQ ID NO: 3681031 - DNA, 25 bp, Homo sapien
tatcagccctaaaacatttgtcaac

SEQ ID NO: 3681032 - DNA, 25 bp, Homo sapien
tcactatcagccctaaaacatttgt

SEQ ID NO: 3681033 - DNA, 25 bp, Homo sapien
ctatttcctggtcactatcagccct

SEQ ID NO: 3681034 - DNA, 25 bp, Homo sapien
cagttctgtaagtgtagaaactggt

SEQ ID NO: 3681035 - DNA, 25 bp, Homo sapien
tctgtaagtgtagaaactggtttta

SEQ ID NO: 3681036 - DNA, 25 bp, Homo sapien
tttctgagactcttcagaagcatcc

SEQ ID NO: 3681037 - DNA, 25 bp, Homo sapien
ctgagactcttcagaagcatccagc

SEQ ID NO: 3681038 - DNA, 25 bp, Homo sapien
ggtctgagaggagtgtggtgtaatg

SEQ ID NO: 3681039 - DNA, 25 bp, Homo sapien
agaggagtgtggtgtaatgaggagt

SEQ ID NO: 3681040 - DNA, 25 bp, Homo sapien
agtgggacatatttgggaccttgag

SEQ ID NO: 3681041 - DNA, 25 bp, Homo sapien
ccttgaggactgagtaggtctgaga

SEQ ID NO: 3681042 - DNA, 25 bp, Homo sapien
tgcccacattagacccaacgaattc

SEQ ID NO: 3681043 - DNA, 25 bp, Homo sapien
gctgctatgcccacattagacccaa

SEQ ID NO: 3681044 - DNA, 25 bp, Homo sapien
caaggcaacagctgctatgcccaca

SEQ ID NO: 3681045 - DNA, 25 bp, Homo sapien
gcaacagctgctatgcccacattag

SEQ ID NO: 3681046 - DNA, 25 bp, Homo sapien
gcagtagggactagagccagggaaa

SEQ ID NO: 3681047 - DNA, 25 bp, Homo sapien
tgagccaatgtctagacaggcttgt

SEQ ID NO: 3681048 - DNA, 25 bp, Homo sapien
agaggctcctgcagtagggactaga

SEQ ID NO: 3681049 - DNA, 25 bp, Homo sapien
caggcttgtgtaccctgagaggctc

SEQ ID NO: 3681050 - DNA, 25 bp, Homo sapien
ttctcctatgtggttagtgtatttt

SEQ ID NO: 3681051 - DNA, 25 bp, Homo sapien
tcattgtagacgtctttctcctatg

SEQ ID NO: 3681052 - DNA, 25 bp, Homo sapien
tgtagacgtctttctcctatgtggt

SEQ ID NO: 3681053 - DNA, 25 bp, Homo sapien
gattctcattgtagacgtctttctc

SEQ ID NO: 3681054 - DNA, 25 bp, Homo sapien
gccactaactggtttaatcatttcc

SEQ ID NO: 3681055 - DNA, 25 bp, Homo sapien
gaaaccatgcctttcgccactaact

SEQ ID NO: 3681056 - DNA, 25 bp, Homo sapien
ccatgcataggccttgactgggcaa

SEQ ID NO: 3681057 - DNA, 25 bp, Homo sapien
catatgggtgtcagttttacctgaa

SEQ ID NO: 3681058 - DNA, 25 bp, Homo sapien
gagtactgacttgacacccttaggg

SEQ ID NO: 3681059 - DNA, 25 bp, Homo sapien
gggaccatagcgaaagacctgaaat

SEQ ID NO: 3681060 - DNA, 25 bp, Homo sapien
gaagtatctagaaccaatggcctgt

SEQ ID NO: 3681061 - DNA, 25 bp, Homo sapien
tttaggccagaggacaaatgcgtcc

SEQ ID NO: 3681062 - DNA, 25 bp, Homo sapien
tgacactgcgagaacaactctttgg

SEQ ID NO: 3681063 - DNA, 25 bp, Homo sapien
cctggtaggacttaatgcatttgac

SEQ ID NO: 3681064 - DNA, 25 bp, Homo sapien
ttttgtccccaagaccactggtggc

SEQ ID NO: 3681065 - DNA, 25 bp, Homo sapien
gcaggacgctcctgacaatgttctg

SEQ ID NO: 3681066 - DNA, 25 bp, Homo sapien
gatatcttctcccaggggtatccta

SEQ ID NO: 3681067 - DNA, 25 bp, Homo sapien
tctcccaggggtatcctagaagctg

SEQ ID NO: 3681068 - DNA, 25 bp, Homo sapien
tcccaggggtatcctagaagctggg

SEQ ID NO: 3681069 - DNA, 25 bp, Homo sapien
ttgatatcttctcccaggggtatcc

SEQ ID NO: 3681070 - DNA, 25 bp, Homo sapien
tcattctcctccacccctaatagag

SEQ ID NO: 3681071 - DNA, 25 bp, Homo sapien
cattctcctccacccctaatagagc

SEQ ID NO: 3681072 - DNA, 25 bp, Homo sapien
tacagctgatagagacccaacacac

SEQ ID NO: 3681073 - DNA, 25 bp, Homo sapien
tcttaagctcacgtgaattccggtg

SEQ ID NO: 3681074 - DNA, 25 bp, Homo sapien
gaagcatggtttgacctgcctccca

SEQ ID NO: 3681075 - DNA, 25 bp, Homo sapien
gaacatgttaggctcacagtgcata

SEQ ID NO: 3681076 - DNA, 25 bp, Homo sapien
tatgccatgtaatatgaaagctgct

SEQ ID NO: 3681077 - DNA, 25 bp, Homo sapien
aaatctaaaaatagttaagcactgt

SEQ ID NO: 3681078 - DNA, 25 bp, Homo sapien
tttttatgagctttcacattccttg

SEQ ID NO: 3681079 - DNA, 25 bp, Homo sapien
tagttaagcactgtgtcaaagagtg

SEQ ID NO: 3681080 - DNA, 25 bp, Homo sapien
ttggcattctctaggtaacaacacc

SEQ ID NO: 3681081 - DNA, 25 bp, Homo sapien
gcagactgacgaaaagcaaatccag

SEQ ID NO: 3681082 - DNA, 25 bp, Homo sapien
caaaaacaatacaggaaacgctggg

SEQ ID NO: 3681083 - DNA, 25 bp, Homo sapien
tctaggatctgggtctatcaataca

SEQ ID NO: 3681084 - DNA, 25 bp, Homo sapien
ggtttcctaccatctttcacaggtg

SEQ ID NO: 3681085 - DNA, 25 bp, Homo sapien
ccaatgtttgactagtagaagcccc

SEQ ID NO: 3681086 - DNA, 25 bp, Homo sapien
catgtcatgtgtctgtccattgcca

SEQ ID NO: 3681087 - DNA, 25 bp, Homo sapien
gaagccccttcgagttgactcttga

SEQ ID NO: 3681088 - DNA, 25 bp, Homo sapien
tctcttaattattgaattctggaat

SEQ ID NO: 3681089 - DNA, 25 bp, Homo sapien
tgcttacccgtgaaaatatctttta

SEQ ID NO: 3681090 - DNA, 25 bp, Homo sapien
aaaatcttgaatattctatatcctg

SEQ ID NO: 3681091 - DNA, 25 bp, Homo sapien
ttttaactattgctccaagctgcca

SEQ ID NO: 3681092 - DNA, 25 bp, Homo sapien
taaaggctgtaactctttaaggata

SEQ ID NO: 3681093 - DNA, 25 bp, Homo sapien
tgcaggaaaaacctgcccctatgat

SEQ ID NO: 3681094 - DNA, 25 bp, Homo sapien
accatatcagatataaacctctttt

SEQ ID NO: 3681095 - DNA, 25 bp, Homo sapien
agcaaagtcatctcttacatgtcag

SEQ ID NO: 3681096 - DNA, 25 bp, Homo sapien
ctgttaatacagatatacccgagac

SEQ ID NO: 3681097 - DNA, 25 bp, Homo sapien
ccgcgccgtgcgctcacattcccca

SEQ ID NO: 3681098 - DNA, 25 bp, Homo sapien
tgtcgatatgtgcattcacaaacct

SEQ ID NO: 3681099 - DNA, 25 bp, Homo sapien
agatacagagttttgacacacaggt

SEQ ID NO: 3681100 - DNA, 25 bp, Homo sapien
ttagatacagagttttgacacacag

SEQ ID NO: 3681101 - DNA, 25 bp, Homo sapien
tcgatatgtgcattcacaaaccttg

SEQ ID NO: 3681102 - DNA, 25 bp, Homo sapien
gagatggtaggacttttcattgcac

SEQ ID NO: 3681103 - DNA, 25 bp, Homo sapien
tttaagactcacaattcagcagatg

SEQ ID NO: 3681104 - DNA, 25 bp, Homo sapien
tggctttaaagagatagatgtgact

SEQ ID NO: 3681105 - DNA, 25 bp, Homo sapien
gatgtgactattgttcaagagctgt

SEQ ID NO: 3681106 - DNA, 25 bp, Homo sapien
tccaccacacattctccaaacgcat

SEQ ID NO: 3681107 - DNA, 25 bp, Homo sapien
tttgtagagtccttcatctttatct

SEQ ID NO: 3681108 - DNA, 25 bp, Homo sapien
caaacgcatgtcatttcatcgttca

SEQ ID NO: 3681109 - DNA, 25 bp, Homo sapien
acattaatatgctcttgtatccacc

SEQ ID NO: 3681110 - DNA, 25 bp, Homo sapien
gacatttccttccacaattgacttc

SEQ ID NO: 3681111 - DNA, 25 bp, Homo sapien
ctcattaagatgttgaatatgacat

SEQ ID NO: 3681112 - DNA, 25 bp, Homo sapien
tatgacatttccttccacaattgac

SEQ ID NO: 3681113 - DNA, 25 bp, Homo sapien
gatgttgaatatgacatttccttcc

SEQ ID NO: 3681114 - DNA, 25 bp, Homo sapien
tacagtgggtttgttagtacacaac

SEQ ID NO: 3681115 - DNA, 25 bp, Homo sapien
tatgacaagctactaacacaggaga

SEQ ID NO: 3681116 - DNA, 25 bp, Homo sapien
tgtggaggaaccagaactcagctct

SEQ ID NO: 3681117 - DNA, 25 bp, Homo sapien
gaccaactgaaagacagcactcaat

SEQ ID NO: 3681118 - DNA, 25 bp, Homo sapien
tggcctttgcctatcgctgggtctc

SEQ ID NO: 3681119 - DNA, 25 bp, Homo sapien
gctttctcaaaggaacagccccagc

SEQ ID NO: 3681120 - DNA, 25 bp, Homo sapien
gccaaacgggcatctgtgaagcttg

SEQ ID NO: 3681121 - DNA, 25 bp, Homo sapien
ggacccaggcatagggtctctctgt

SEQ ID NO: 3681122 - DNA, 25 bp, Homo sapien
gctcaacttgcataatgctatagcc

SEQ ID NO: 3681123 - DNA, 25 bp, Homo sapien
caaacttagtgcagaagctcaactt

SEQ ID NO: 3681124 - DNA, 25 bp, Homo sapien
gcataatgctatagccaagaactcc

SEQ ID NO: 3681125 - DNA, 25 bp, Homo sapien
ggttcatctcaccttgtgcaacttg

SEQ ID NO: 3681126 - DNA, 25 bp, Homo sapien
cactgcgagagatgctgggatcatt

SEQ ID NO: 3681127 - DNA, 25 bp, Homo sapien
aaggaaagacgcgtgtcagcctcgc

SEQ ID NO: 3681128 - DNA, 25 bp, Homo sapien
cgggagcccgatccgactcaggatt

SEQ ID NO: 3681129 - DNA, 25 bp, Homo sapien
caggccctggcaagcttttttgcac

SEQ ID NO: 3681130 - DNA, 25 bp, Homo sapien
ctctgcccagctggcgggagcatca

SEQ ID NO: 3681131 - DNA, 25 bp, Homo sapien
agctggcgggagcatcatctgcccc

SEQ ID NO: 3681132 - DNA, 25 bp, Homo sapien
cgtaaatcagactgagccgggccgg

SEQ ID NO: 3681133 - DNA, 25 bp, Homo sapien
gagcgaagcggttttcagcagagcc

SEQ ID NO: 3681134 - DNA, 25 bp, Homo sapien
gccgggaagccggctctcccaactc

SEQ ID NO: 3681135 - DNA, 25 bp, Homo sapien
ggccctcaaggatgacaagcttcta

SEQ ID NO: 3681136 - DNA, 25 bp, Homo sapien
tctcaaaggactcctgccagggata

SEQ ID NO: 3681137 - DNA, 25 bp, Homo sapien
tgtgactgaactccagatgggccct

SEQ ID NO: 3681138 - DNA, 25 bp, Homo sapien
acctcgggcagcgtaatggcaggca

SEQ ID NO: 3681139 - DNA, 25 bp, Homo sapien
tacagctatcatttccacggccacg

SEQ ID NO: 3681140 - DNA, 25 bp, Homo sapien
gtttaaggcccgctctcgtctctga

SEQ ID NO: 3681141 - DNA, 25 bp, Homo sapien
caggcgttgcctcagtacagctatc

SEQ ID NO: 3681142 - DNA, 25 bp, Homo sapien
gacatgtgcctcgaaagaagctttg

SEQ ID NO: 3681143 - DNA, 25 bp, Homo sapien
ttccaggaaatggttgaatgtgaca

SEQ ID NO: 3681144 - DNA, 25 bp, Homo sapien
caggaaatggttgaatgtgacaact

SEQ ID NO: 3681145 - DNA, 25 bp, Homo sapien
tccaggaaatggttgaatgtgacaa

SEQ ID NO: 3681146 - DNA, 25 bp, Homo sapien
gaaatggttgaatgtgacaacttct

SEQ ID NO: 3681147 - DNA, 25 bp, Homo sapien
gcctgctggctctgatagtactcaa

SEQ ID NO: 3681148 - DNA, 25 bp, Homo sapien
gctgagatcacggacaaagccagag

SEQ ID NO: 3681149 - DNA, 25 bp, Homo sapien
cagttctacccgctgtaacagattc

SEQ ID NO: 3681150 - DNA, 25 bp, Homo sapien
tctcaataaagtcctggagccgggc

SEQ ID NO: 3681151 - DNA, 25 bp, Homo sapien
ctgcaagtcacccagctcccttttc

SEQ ID NO: 3681152 - DNA, 25 bp, Homo sapien
atcttacactcggtggctggcccgg

SEQ ID NO: 3681153 - DNA, 25 bp, Homo sapien
caaccacagggatcttacactcggt

SEQ ID NO: 3681154 - DNA, 25 bp, Homo sapien
aaatgatgtctagagagtccctgca

SEQ ID NO: 3681155 - DNA, 25 bp, Homo sapien
tatggttatttgtacctccctccgc

SEQ ID NO: 3681156 - DNA, 25 bp, Homo sapien
tctaccaactcagcatgatgtggag

SEQ ID NO: 3681157 - DNA, 25 bp, Homo sapien
aactgtatgcaggaatctaccctag

SEQ ID NO: 3681158 - DNA, 25 bp, Homo sapien
gagcgactgaaaacggcacatgcag

SEQ ID NO: 3681159 - DNA, 25 bp, Homo sapien
gtgcactgcagaataagcagaagat

SEQ ID NO: 3681160 - DNA, 25 bp, Homo sapien
tagaacaatgaggaataccatcccc

SEQ ID NO: 3681161 - DNA, 25 bp, Homo sapien
gcagaagattctgactctactcccc

SEQ ID NO: 3681162 - DNA, 25 bp, Homo sapien
tccctcttgcttgcatacctgagct

SEQ ID NO: 3681163 - DNA, 25 bp, Homo sapien
gggcttcctatttgaggagatgtct

SEQ ID NO: 3681164 - DNA, 25 bp, Homo sapien
catttgggcttcctatttgaggaga

SEQ ID NO: 3681165 - DNA, 25 bp, Homo sapien
tttgggcttcctatttgaggagatg

SEQ ID NO: 3681166 - DNA, 25 bp, Homo sapien
tgggcttcctatttgaggagatgtc

SEQ ID NO: 3681167 - DNA, 25 bp, Homo sapien
ccttgagatcagggtggttacatac

SEQ ID NO: 3681168 - DNA, 25 bp, Homo sapien
ggccttgagatcagggtggttacat

SEQ ID NO: 3681169 - DNA, 25 bp, Homo sapien
gaaatgggccttgagatcagggtgg

SEQ ID NO: 3681170 - DNA, 25 bp, Homo sapien
gccttgagatcagggtggttacata

SEQ ID NO: 3681171 - DNA, 25 bp, Homo sapien
tggctctgtcatccttggccttttt

SEQ ID NO: 3681172 - DNA, 25 bp, Homo sapien
tgtcatccttggcctttttcaggtg

SEQ ID NO: 3681173 - DNA, 25 bp, Homo sapien
ggctctgtcatccttggcctttttc

SEQ ID NO: 3681174 - DNA, 25 bp, Homo sapien
catccttggcctttttcaggtggtt

SEQ ID NO: 3681175 - DNA, 25 bp, Homo sapien
gggcctgatgttgcctttgcggcca

SEQ ID NO: 3681176 - DNA, 25 bp, Homo sapien
tgaggactcagcctgttcgtgaatg

SEQ ID NO: 3681177 - DNA, 25 bp, Homo sapien
tgcctttgcggccaaaccccaggag

SEQ ID NO: 3681178 - DNA, 25 bp, Homo sapien
tctgcagaggtctcttgaggactca

SEQ ID NO: 3681179 - DNA, 25 bp, Homo sapien
gcccatgctgggtgctaatcaaaag

SEQ ID NO: 3681180 - DNA, 25 bp, Homo sapien
caaagcccagcgatgattggtccag

SEQ ID NO: 3681181 - DNA, 25 bp, Homo sapien
caaagaagacggcagaggtgtacca

SEQ ID NO: 3681182 - DNA, 25 bp, Homo sapien
ttagtgaccactgcatagaagccca

SEQ ID NO: 3681183 - DNA, 25 bp, Homo sapien
taaaaggctaaggtgcaatcatggt

SEQ ID NO: 3681184 - DNA, 25 bp, Homo sapien
actgtcaaagagagttgccatgccc

SEQ ID NO: 3681185 - DNA, 25 bp, Homo sapien
ttaactctaaggtcaacggcccatg

SEQ ID NO: 3681186 - DNA, 25 bp, Homo sapien
caggacatggtacttagctcaggcc

SEQ ID NO: 3681187 - DNA, 25 bp, Homo sapien
gaaccttgcagataagaacctgtaa

SEQ ID NO: 3681188 - DNA, 25 bp, Homo sapien
aaacaatgtctaagcaacttgaacc

SEQ ID NO: 3681189 - DNA, 25 bp, Homo sapien
caacttgaaccttgcagataagaac

SEQ ID NO: 3681190 - DNA, 25 bp, Homo sapien
tgtctaagcaacttgaaccttgcag

SEQ ID NO: 3681191 - DNA, 25 bp, Homo sapien
ttcctggcttgcattcaggagccat

SEQ ID NO: 3681192 - DNA, 25 bp, Homo sapien
catctctaagtccaacattgccaat

SEQ ID NO: 3681193 - DNA, 25 bp, Homo sapien
tccagtgctggaaagaactgctgtt

SEQ ID NO: 3681194 - DNA, 25 bp, Homo sapien
ctgaacaccagatgaggttcctggc

SEQ ID NO: 3681195 - DNA, 25 bp, Homo sapien
ggcacgatgctggagcctgacatga

SEQ ID NO: 3681196 - DNA, 25 bp, Homo sapien
cacgatgctggagcctgacatgaca

SEQ ID NO: 3681197 - DNA, 25 bp, Homo sapien
tgctggagcctgacatgacacacac

SEQ ID NO: 3681198 - DNA, 25 bp, Homo sapien
gatgctggagcctgacatgacacac

SEQ ID NO: 3681199 - DNA, 25 bp, Homo sapien
acctgtgtaaggacctgtgctgagg

SEQ ID NO: 3681200 - DNA, 25 bp, Homo sapien
cttgacctgtgtaaggacctgtgct

SEQ ID NO: 3681201 - DNA, 25 bp, Homo sapien
aagagatttgcacagctcagaggtg

SEQ ID NO: 3681202 - DNA, 25 bp, Homo sapien
atttgcacagctcagaggtgagggc

SEQ ID NO: 3681203 - DNA, 25 bp, Homo sapien
tcaatctagtaggcgaatcacacaa

SEQ ID NO: 3681204 - DNA, 25 bp, Homo sapien
tagtaggcgaatcacacaatcaggt

SEQ ID NO: 3681205 - DNA, 25 bp, Homo sapien
gggcaaagatgaagagtttggttct

SEQ ID NO: 3681206 - DNA, 25 bp, Homo sapien
cacaatcaggtgtgggggcaaagat

SEQ ID NO: 3681207 - DNA, 25 bp, Homo sapien
ttcacagggccacggcttgcaggtt

SEQ ID NO: 3681208 - DNA, 25 bp, Homo sapien
gttcacagggccacggcttgcaggt

SEQ ID NO: 3681209 - DNA, 25 bp, Homo sapien
ccacggcttgcaggtttaacctgca

SEQ ID NO: 3681210 - DNA, 25 bp, Homo sapien
cagggccacggcttgcaggtttaac

SEQ ID NO: 3681211 - DNA, 25 bp, Homo sapien
tggatcgtcatcaagtatcacttgg

SEQ ID NO: 3681212 - DNA, 25 bp, Homo sapien
tcttaaatccaaatctggatcgtca

SEQ ID NO: 3681213 - DNA, 25 bp, Homo sapien
tatctggtgagtaaagaatccagcg

SEQ ID NO: 3681214 - DNA, 25 bp, Homo sapien
tggagctctgtggagttgaccttct

SEQ ID NO: 3681215 - DNA, 25 bp, Homo sapien
tagatcccaattggttgtccttcca

SEQ ID NO: 3681216 - DNA, 25 bp, Homo sapien
cttagtaagtgcaatgatgttggtc

SEQ ID NO: 3681217 - DNA, 25 bp, Homo sapien
agctttttcagttaattggctctgc

SEQ ID NO: 3681218 - DNA, 25 bp, Homo sapien
ttaattggctctgctcaacaagaag

SEQ ID NO: 3681219 - DNA, 25 bp, Homo sapien
actatgatgaggtccctccttgcca

SEQ ID NO: 3681220 - DNA, 25 bp, Homo sapien
gaccgtcttcagaacaacagggtga

SEQ ID NO: 3681221 - DNA, 25 bp, Homo sapien
cagccaccgcatgtgactctttgac

SEQ ID NO: 3681222 - DNA, 25 bp, Homo sapien
gaatggtaggttctgagtcctgcac

SEQ ID NO: 3681223 - DNA, 25 bp, Homo sapien
tcgtaagccctctgcacttggtaga

SEQ ID NO: 3681224 - DNA, 25 bp, Homo sapien
tagactttcgtaagccctctgcact

SEQ ID NO: 3681225 - DNA, 25 bp, Homo sapien
gaatcttagactttcgtaagccctc

SEQ ID NO: 3681226 - DNA, 25 bp, Homo sapien
ctcctagatttgaaaggaatcttag

SEQ ID NO: 3681227 - DNA, 25 bp, Homo sapien
gacaagccatgaacgagcagctcaa

SEQ ID NO: 3681228 - DNA, 25 bp, Homo sapien
agccatgaacgagcagctcaaattg

SEQ ID NO: 3681229 - DNA, 25 bp, Homo sapien
catcagacaagccatgaacgagcag

SEQ ID NO: 3681230 - DNA, 25 bp, Homo sapien
ggaggccacatcagacaagccatga

SEQ ID NO: 3681231 - DNA, 25 bp, Homo sapien
gtgagagccaagctttttgtcgctg

SEQ ID NO: 3681232 - DNA, 25 bp, Homo sapien
gagccaagctttttgtcgctgccaa

SEQ ID NO: 3681233 - DNA, 25 bp, Homo sapien
ctccacagaacaagtcacaccaggg

SEQ ID NO: 3681234 - DNA, 25 bp, Homo sapien
gctttttgtcgctgccaagccatga

SEQ ID NO: 3681235 - DNA, 25 bp, Homo sapien
ccactagtgaactgtagccaagccc

SEQ ID NO: 3681236 - DNA, 25 bp, Homo sapien
ttggaaacaatgatgggcattattg

SEQ ID NO: 3681237 - DNA, 25 bp, Homo sapien
ccagagagggaatgtcggtaaccac

SEQ ID NO: 3681238 - DNA, 25 bp, Homo sapien
caatgatgggcattattgagctggg

SEQ ID NO: 3681239 - DNA, 25 bp, Homo sapien
ccatgacaatcctccagtttggaat

SEQ ID NO: 3681240 - DNA, 25 bp, Homo sapien
gaggctgtggcgtcagctggatgct

SEQ ID NO: 3681241 - DNA, 25 bp, Homo sapien
gtggttgggaagcatgctccagctc

SEQ ID NO: 3681242 - DNA, 25 bp, Homo sapien
gatgctgctgtggagctgcctctac

SEQ ID NO: 3681243 - DNA, 25 bp, Homo sapien
attttggcacaccaggcgagcttcg

SEQ ID NO: 3681244 - DNA, 25 bp, Homo sapien
gagcttcgccagcacctttccagct

SEQ ID NO: 3681245 - DNA, 25 bp, Homo sapien
ggtcattttggcacaccaggcgagc

SEQ ID NO: 3681246 - DNA, 25 bp, Homo sapien
ttccaggtcattttggcacaccagg

SEQ ID NO: 3681247 - DNA, 25 bp, Homo sapien
ccagtgatatggcccctctcaagag

SEQ ID NO: 3681248 - DNA, 25 bp, Homo sapien
cccagtgatatggcccctctcaaga

SEQ ID NO: 3681249 - DNA, 25 bp, Homo sapien
tcccagtgatatggcccctctcaag

SEQ ID NO: 3681250 - DNA, 25 bp, Homo sapien
ctcccagtgatatggcccctctcaa

SEQ ID NO: 3681251 - DNA, 25 bp, Homo sapien
ctgggaggatcagccctagaagatt

SEQ ID NO: 3681252 - DNA, 25 bp, Homo sapien
catctcccacagtggagatgtgtac

SEQ ID NO: 3681253 - DNA, 25 bp, Homo sapien
tctttaaggcctgctcgctcatatt

SEQ ID NO: 3681254 - DNA, 25 bp, Homo sapien
cccacagtggagatgtgtacttgtc

SEQ ID NO: 3681255 - DNA, 25 bp, Homo sapien
gagatgtgtacttgtctttaaggcc

SEQ ID NO: 3681256 - DNA, 25 bp, Homo sapien
ccctgcgaaagctgattaaactgcc

SEQ ID NO: 3681257 - DNA, 25 bp, Homo sapien
gctcttggcccacgtgtgatagaac

SEQ ID NO: 3681258 - DNA, 25 bp, Homo sapien
agctcctccagcgctaggctcttgg

SEQ ID NO: 3681259 - DNA, 25 bp, Homo sapien
cacgtgtgatagaacgccctgcgaa

SEQ ID NO: 3681260 - DNA, 25 bp, Homo sapien
ggaaaaatcacaggagactcagcca

SEQ ID NO: 3681261 - DNA, 25 bp, Homo sapien
tcaggagctcaacctgtgaaacagc

SEQ ID NO: 3681262 - DNA, 25 bp, Homo sapien
aggagctcaacctgtgaaacagctg

SEQ ID NO: 3681263 - DNA, 25 bp, Homo sapien
caggagctcaacctgtgaaacagct

SEQ ID NO: 3681264 - DNA, 25 bp, Homo sapien
catttgaagaacgtggggcatttcc

SEQ ID NO: 3681265 - DNA, 25 bp, Homo sapien
gggctctatgccacggatctggtcg

SEQ ID NO: 3681266 - DNA, 25 bp, Homo sapien
gagaaaagagtgcaagctccctctc

SEQ ID NO: 3681267 - DNA, 25 bp, Homo sapien
gatctggtcgcagcttggtgagctt

SEQ ID NO: 3681268 - DNA, 25 bp, Homo sapien
tccttagcagtaaaggtgaagtcca

SEQ ID NO: 3681269 - DNA, 25 bp, Homo sapien
actgtctcctatcacctgaagatac

SEQ ID NO: 3681270 - DNA, 25 bp, Homo sapien
ctgtctcctatcacctgaagatact

SEQ ID NO: 3681271 - DNA, 25 bp, Homo sapien
actggccttttccttagcagtaaag

SEQ ID NO: 3681272 - DNA, 25 bp, Homo sapien
tttatttaacaactgagtacctgcc

SEQ ID NO: 3681273 - DNA, 25 bp, Homo sapien
gagtctgaacccactcctggtgagt

SEQ ID NO: 3681274 - DNA, 25 bp, Homo sapien
aagtcaccaagtagcccaagtttct

SEQ ID NO: 3681275 - DNA, 25 bp, Homo sapien
tgccatgtcccaagctaaatagaat

SEQ ID NO: 3681276 - DNA, 25 bp, Homo sapien
tactcttgttattggccactgtggg

SEQ ID NO: 3681277 - DNA, 25 bp, Homo sapien
taagctgtggtccttagcacaagtc

SEQ ID NO: 3681278 - DNA, 25 bp, Homo sapien
gtcccaaaatccaagctcatcagag

SEQ ID NO: 3681279 - DNA, 25 bp, Homo sapien
gaggtactgtacttggatcacacac

SEQ ID NO: 3681280 - DNA, 25 bp, Homo sapien
ctcgctgtgcccaaaatgatggaga

SEQ ID NO: 3681281 - DNA, 25 bp, Homo sapien
taatttccaagatcactcttgacat

SEQ ID NO: 3681282 - DNA, 25 bp, Homo sapien
ctaatttccaagatcactcttgaca

SEQ ID NO: 3681283 - DNA, 25 bp, Homo sapien
gaagcccctcttgtccgacttgaga

SEQ ID NO: 3681284 - DNA, 25 bp, Homo sapien
gtgttcaacaaactgtggacacagt

SEQ ID NO: 3681285 - DNA, 25 bp, Homo sapien
tccgacttgagataagagtgcccat

SEQ ID NO: 3681286 - DNA, 25 bp, Homo sapien
cactgtgttcaacaaactgtggaca

SEQ ID NO: 3681287 - DNA, 25 bp, Homo sapien
tgacaaaatcatgcccttgatgtcc

SEQ ID NO: 3681288 - DNA, 25 bp, Homo sapien
acaaaatcatgcccttgatgtccat

SEQ ID NO: 3681289 - DNA, 25 bp, Homo sapien
gacaaaatcatgcccttgatgtcca

SEQ ID NO: 3681290 - DNA, 25 bp, Homo sapien
atgacaaaatcatgcccttgatgtc

SEQ ID NO: 3681291 - DNA, 25 bp, Homo sapien
tcaaattgttatgcaggacagtaat

SEQ ID NO: 3681292 - DNA, 25 bp, Homo sapien
acaactggtctttcgaccacatccg

SEQ ID NO: 3681293 - DNA, 25 bp, Homo sapien
gaccacatccgatatttccttcaaa

SEQ ID NO: 3681294 - DNA, 25 bp, Homo sapien
tgttatgcaggacagtaattgtctc

SEQ ID NO: 3681295 - DNA, 25 bp, Homo sapien
aggagaaagtcattggcaaagacac

SEQ ID NO: 3681296 - DNA, 25 bp, Homo sapien
taggggctaagaacagaccagaact

SEQ ID NO: 3681297 - DNA, 25 bp, Homo sapien
gacactctcagtaggggctaagaac

SEQ ID NO: 3681298 - DNA, 25 bp, Homo sapien
agtcattggcaaagacactctcagt

SEQ ID NO: 3681299 - DNA, 25 bp, Homo sapien
ctggcaaaatctttcggaaggccac

SEQ ID NO: 3681300 - DNA, 25 bp, Homo sapien
aaaatctttcggaaggccacacctg

SEQ ID NO: 3681301 - DNA, 25 bp, Homo sapien
caaaatctttcggaaggccacacct

SEQ ID NO: 3681302 - DNA, 25 bp, Homo sapien
ggcaaaatctttcggaaggccacac

SEQ ID NO: 3681303 - DNA, 25 bp, Homo sapien
aactgtaccattgaagaatcttcct

SEQ ID NO: 3681304 - DNA, 25 bp, Homo sapien
ctgtaccattgaagaatcttcctgt

SEQ ID NO: 3681305 - DNA, 25 bp, Homo sapien
actgtaccattgaagaatcttcctg

SEQ ID NO: 3681306 - DNA, 25 bp, Homo sapien
gaccttcattgtgaaagccagattg

SEQ ID NO: 3681307 - DNA, 25 bp, Homo sapien
cagttggaccttcattgtgaaagcc

SEQ ID NO: 3681308 - DNA, 25 bp, Homo sapien
tttgaggtttccaatcagaatggag

SEQ ID NO: 3681309 - DNA, 25 bp, Homo sapien
cctgcagttggaccttcattgtgaa

SEQ ID NO: 3681310 - DNA, 25 bp, Homo sapien
taaaaacacagttgcacgagcaagc

SEQ ID NO: 3681311 - DNA, 25 bp, Homo sapien
agcttcttacttggagtattcttac

SEQ ID NO: 3681312 - DNA, 25 bp, Homo sapien
catatcacacaagtccataaaaaca

SEQ ID NO: 3681313 - DNA, 25 bp, Homo sapien
tcatcagacatatcacacaagtcca

SEQ ID NO: 3681314 - DNA, 25 bp, Homo sapien
tgtgaaggagggtttgtttggtgtc

SEQ ID NO: 3681315 - DNA, 25 bp, Homo sapien
attagctcggccatgagggaggcag

SEQ ID NO: 3681316 - DNA, 25 bp, Homo sapien
cccactgattagctcggccatgagg

SEQ ID NO: 3681317 - DNA, 25 bp, Homo sapien
catcacccactgattagctcggcca

SEQ ID NO: 3681318 - DNA, 25 bp, Homo sapien
gatggtaaagaacatcacatagcaa

SEQ ID NO: 3681319 - DNA, 25 bp, Homo sapien
ctgtgcagagtcctgagatggtaaa

SEQ ID NO: 3681320 - DNA, 25 bp, Homo sapien
catcacatagcaaggggactgagtg

SEQ ID NO: 3681321 - DNA, 25 bp, Homo sapien
tgtgcagagtcctgagatggtaaag

SEQ ID NO: 3681322 - DNA, 25 bp, Homo sapien
ataatgataaaacgatttgcccaac

SEQ ID NO: 3681323 - DNA, 25 bp, Homo sapien
taagaaatgacatagacacaacaca

SEQ ID NO: 3681324 - DNA, 25 bp, Homo sapien
atataatgataaaacgatttgccca

SEQ ID NO: 3681325 - DNA, 25 bp, Homo sapien
acctaagaaatgacatagacacaac

SEQ ID NO: 3681326 - DNA, 25 bp, Homo sapien
tcagttagtttcagttggtagatgg

SEQ ID NO: 3681327 - DNA, 25 bp, Homo sapien
gatggtattttgtttagcgattgta

SEQ ID NO: 3681328 - DNA, 25 bp, Homo sapien
tgagggaggcttgctaaaatatgca

SEQ ID NO: 3681329 - DNA, 25 bp, Homo sapien
gctattattgcatggagtatcctat

SEQ ID NO: 3681330 - DNA, 25 bp, Homo sapien
aacttgtctttcttggatctctttt

SEQ ID NO: 3681331 - DNA, 25 bp, Homo sapien
aaaacttgtctttcttggatctctt

SEQ ID NO: 3681332 - DNA, 25 bp, Homo sapien
caaaacttgtctttcttggatctct

SEQ ID NO: 3681333 - DNA, 25 bp, Homo sapien
ccaaaacttgtctttcttggatctc

SEQ ID NO: 3681334 - DNA, 25 bp, Homo sapien
cttggtatgtgcctagtgtggagaa

SEQ ID NO: 3681335 - DNA, 25 bp, Homo sapien
cctcttcatcagaacttggtatgtg

SEQ ID NO: 3681336 - DNA, 25 bp, Homo sapien
tatgtgcctagtgtggagaagcttt

SEQ ID NO: 3681337 - DNA, 25 bp, Homo sapien
tgaggagaatgttcagtgagggact

SEQ ID NO: 3681338 - DNA, 25 bp, Homo sapien
ggctgtctatagggtcataaaggcc

SEQ ID NO: 3681339 - DNA, 25 bp, Homo sapien
cggctgtctatagggtcataaaggc

SEQ ID NO: 3681340 - DNA, 25 bp, Homo sapien
aacggctgtctatagggtcataaag

SEQ ID NO: 3681341 - DNA, 25 bp, Homo sapien
acggctgtctatagggtcataaagg

SEQ ID NO: 3681342 - DNA, 25 bp, Homo sapien
tgctagcaagaaggcttgtatccat

SEQ ID NO: 3681343 - DNA, 25 bp, Homo sapien
ttctgctgctagcaagaaggcttgt

SEQ ID NO: 3681344 - DNA, 25 bp, Homo sapien
tgctgctagcaagaaggcttgtatc

SEQ ID NO: 3681345 - DNA, 25 bp, Homo sapien
tcaattctgctgctagcaagaaggc

SEQ ID NO: 3681346 - DNA, 25 bp, Homo sapien
aaaggttgtcttcaaatgtcggcca

SEQ ID NO: 3681347 - DNA, 25 bp, Homo sapien
tgtcttcaaatgtcggccactgagt

SEQ ID NO: 3681348 - DNA, 25 bp, Homo sapien
ggccactgagtcacaagttcataat

SEQ ID NO: 3681349 - DNA, 25 bp, Homo sapien
caaatgtcggccactgagtcacaag

SEQ ID NO: 3681350 - DNA, 25 bp, Homo sapien
tgtctgtagggtcacattagattgt

SEQ ID NO: 3681351 - DNA, 25 bp, Homo sapien
tttacttctaaaataagaaccatga

SEQ ID NO: 3681352 - DNA, 25 bp, Homo sapien
caggaggtgtctgtagggtcacatt

SEQ ID NO: 3681353 - DNA, 25 bp, Homo sapien
gaaccatgatcacaggaggtgtctg

SEQ ID NO: 3681354 - DNA, 25 bp, Homo sapien
tgattgtacagggagtatgctcaac

SEQ ID NO: 3681355 - DNA, 25 bp, Homo sapien
taggagatgattgtacagggagtat

SEQ ID NO: 3681356 - DNA, 25 bp, Homo sapien
ttgtacagggagtatgctcaacagg

SEQ ID NO: 3681357 - DNA, 25 bp, Homo sapien
tacagggagtatgctcaacaggaaa

SEQ ID NO: 3681358 - DNA, 25 bp, Homo sapien
tacttgtgctatagtttgagttgca

SEQ ID NO: 3681359 - DNA, 25 bp, Homo sapien
ggagccagttgccttggacccaata

SEQ ID NO: 3681360 - DNA, 25 bp, Homo sapien
tgtcaggagtgttgataaaagcgat

SEQ ID NO: 3681361 - DNA, 25 bp, Homo sapien
tgagttgcaaaagtgaaagatgttt

SEQ ID NO: 3681362 - DNA, 25 bp, Homo sapien
gggaaagggtcacaagtgtaatcat

SEQ ID NO: 3681363 - DNA, 25 bp, Homo sapien
tcaactttaggatctccctgggaaa

SEQ ID NO: 3681364 - DNA, 25 bp, Homo sapien
caactttaggatctccctgggaaag

SEQ ID NO: 3681365 - DNA, 25 bp, Homo sapien
cctgggaaagggtcacaagtgtaat

SEQ ID NO: 3681366 - DNA, 25 bp, Homo sapien
agcatggttgatttgaagtcagctt

SEQ ID NO: 3681367 - DNA, 25 bp, Homo sapien
aagcatggttgatttgaagtcagct

SEQ ID NO: 3681368 - DNA, 25 bp, Homo sapien
gaaacttgaagacaatcttcccttg

SEQ ID NO: 3681369 - DNA, 25 bp, Homo sapien
tcatcactggttccatgagtttcct

SEQ ID NO: 3681370 - DNA, 25 bp, Homo sapien
ctctttgaatccacctgaaacttga

SEQ ID NO: 3681371 - DNA, 25 bp, Homo sapien
caatcttcccttgtaatctacagta

SEQ ID NO: 3681372 - DNA, 25 bp, Homo sapien
gaaagtttgcattccatgggttctg

SEQ ID NO: 3681373 - DNA, 25 bp, Homo sapien
ggccccagagtgctttcatagccct

SEQ ID NO: 3681374 - DNA, 25 bp, Homo sapien
cccagagtgctttcatagccctctg

SEQ ID NO: 3681375 - DNA, 25 bp, Homo sapien
tgcattccatgggttctgagcactg

SEQ ID NO: 3681376 - DNA, 25 bp, Homo sapien
ttccactaatccaacagtgttgggc

SEQ ID NO: 3681377 - DNA, 25 bp, Homo sapien
tgatgtctgctgcaagattgggtct

SEQ ID NO: 3681378 - DNA, 25 bp, Homo sapien
ccagaatgtttccttgagtcagtga

SEQ ID NO: 3681379 - DNA, 25 bp, Homo sapien
ttagcagaatgaggggagtccagaa

SEQ ID NO: 3681380 - DNA, 25 bp, Homo sapien
tccagctgaaggagtaactggatct

SEQ ID NO: 3681381 - DNA, 25 bp, Homo sapien
atccagctgaaggagtaactggatc

SEQ ID NO: 3681382 - DNA, 25 bp, Homo sapien
ccccatccaagagagtagagcagcc

SEQ ID NO: 3681383 - DNA, 25 bp, Homo sapien
ccatccaagagagtagagcagcctc

SEQ ID NO: 3681384 - DNA, 25 bp, Homo sapien
ggtgtacctgatgtattagcttcct

SEQ ID NO: 3681385 - DNA, 25 bp, Homo sapien
gaagaatacgttgacttgagagcaa

SEQ ID NO: 3681386 - DNA, 25 bp, Homo sapien
caagtgactagtgagtgcttagcat

SEQ ID NO: 3681387 - DNA, 25 bp, Homo sapien
tttccagtgtctcaagttcgtagag

SEQ ID NO: 3681388 - DNA, 25 bp, Homo sapien
cagattttaatctgccattagtcgt

SEQ ID NO: 3681389 - DNA, 25 bp, Homo sapien
taatctgccattagtcgttttcatt

SEQ ID NO: 3681390 - DNA, 25 bp, Homo sapien
ttttaatctgccattagtcgttttc

SEQ ID NO: 3681391 - DNA, 25 bp, Homo sapien
ggcagattttaatctgccattagtc

SEQ ID NO: 3681392 - DNA, 25 bp, Homo sapien
tatgagtccggaaatgaaccttcca

SEQ ID NO: 3681393 - DNA, 25 bp, Homo sapien
gaaactggtttctgctgtagcatct

SEQ ID NO: 3681394 - DNA, 25 bp, Homo sapien
catagagctgtctcattgcacctgc

SEQ ID NO: 3681395 - DNA, 25 bp, Homo sapien
gagaagtatcaccatagagctgtct

SEQ ID NO: 3681396 - DNA, 25 bp, Homo sapien
ctattggtaaagggggctccacatt

SEQ ID NO: 3681397 - DNA, 25 bp, Homo sapien
tctgaacaagaggagagtcaacacc

SEQ ID NO: 3681398 - DNA, 25 bp, Homo sapien
ccacagggccatatgaaaagtctta

SEQ ID NO: 3681399 - DNA, 25 bp, Homo sapien
tttgagaactggaccctggtatggg

SEQ ID NO: 3681400 - DNA, 25 bp, Homo sapien
tatgggcgactggtgcttgctcccc

SEQ ID NO: 3681401 - DNA, 25 bp, Homo sapien
tatctataagaaacccacagccaat

SEQ ID NO: 3681402 - DNA, 25 bp, Homo sapien
aataataagagctatctataagaaa

SEQ ID NO: 3681403 - DNA, 25 bp, Homo sapien
gagctatctataagaaacccacagc

SEQ ID NO: 3681404 - DNA, 25 bp, Homo sapien
ataagagctatctataagaaaccca

SEQ ID NO: 3681405 - DNA, 25 bp, Homo sapien
gagaacttgaagcttgcttgttgaa

SEQ ID NO: 3681406 - DNA, 25 bp, Homo sapien
aagcttgcttgttgaatatatggta

SEQ ID NO: 3681407 - DNA, 25 bp, Homo sapien
ccatgagaacttgaagcttgcttgt

SEQ ID NO: 3681408 - DNA, 25 bp, Homo sapien
tgttgaatatatggtattcacatag

SEQ ID NO: 3681409 - DNA, 25 bp, Homo sapien
gatcaaagagcccacagctaaaaac

SEQ ID NO: 3681410 - DNA, 25 bp, Homo sapien
tgggtgtctagctgaatattttgtt

SEQ ID NO: 3681411 - DNA, 25 bp, Homo sapien
tcaaagagcccacagctaaaaacat

SEQ ID NO: 3681412 - DNA, 25 bp, Homo sapien
gtatcacattgggtgtctagctgaa

SEQ ID NO: 3681413 - DNA, 25 bp, Homo sapien
ctatctgtgagagaatctaattccc

SEQ ID NO: 3681414 - DNA, 25 bp, Homo sapien
cagagaataaattggaggcgagggc

SEQ ID NO: 3681415 - DNA, 25 bp, Homo sapien
tggtagccctctgctgactggatgg

SEQ ID NO: 3681416 - DNA, 25 bp, Homo sapien
ccctcagtggtgcagaccgtctgct

SEQ ID NO: 3681417 - DNA, 25 bp, Homo sapien
cagtgttccgcaagggatggttgca

SEQ ID NO: 3681418 - DNA, 25 bp, Homo sapien
tccgggtcttgcaaaggagccagag

SEQ ID NO: 3681419 - DNA, 25 bp, Homo sapien
ccatgcagtgtgaaaccaagggagg

SEQ ID NO: 3681420 - DNA, 25 bp, Homo sapien
cacttctgttggttctgagtcaccg

SEQ ID NO: 3681421 - DNA, 25 bp, Homo sapien
tctctcttctgaattgaagcttctg

SEQ ID NO: 3681422 - DNA, 25 bp, Homo sapien
gatgggttcagatgaactgccgtta

SEQ ID NO: 3681423 - DNA, 25 bp, Homo sapien
tgaactgccgttacctcctctgaag

SEQ ID NO: 3681424 - DNA, 25 bp, Homo sapien
ttggtggagcaaatgatgggttcag

SEQ ID NO: 3681425 - DNA, 25 bp, Homo sapien
cctccttctcttatctgaagagtgg

SEQ ID NO: 3681426 - DNA, 25 bp, Homo sapien
agagtggtttcctactaccttctgg

SEQ ID NO: 3681427 - DNA, 25 bp, Homo sapien
gatgttttcttcctgtgacacccaa

SEQ ID NO: 3681428 - DNA, 25 bp, Homo sapien
ctggatgttttcttcctgtgacacc

SEQ ID NO: 3681429 - DNA, 25 bp, Homo sapien
tttgaagcaggttccgaaggccgtc

SEQ ID NO: 3681430 - DNA, 25 bp, Homo sapien
tactgggactagaatggttaagaaa

SEQ ID NO: 3681431 - DNA, 25 bp, Homo sapien
ttaagaaaactctcgtgcgactttg

SEQ ID NO: 3681432 - DNA, 25 bp, Homo sapien
tggatcttcgggtattgtttgaagc

SEQ ID NO: 3681433 - DNA, 25 bp, Homo sapien
ccaggagctccggaatgaagattaa

SEQ ID NO: 3681434 - DNA, 25 bp, Homo sapien
taatgcacttcctgaattcaccctg

SEQ ID NO: 3681435 - DNA, 25 bp, Homo sapien
gaggctgcaagtccaggaaactcca

SEQ ID NO: 3681436 - DNA, 25 bp, Homo sapien
ttcaccctgagttgatgctctggac

SEQ ID NO: 3681437 - DNA, 25 bp, Homo sapien
gaagcattttgttagcttgataacc

SEQ ID NO: 3681438 - DNA, 25 bp, Homo sapien
gcttgataaccattatggctatact

SEQ ID NO: 3681439 - DNA, 25 bp, Homo sapien
tagaagcattttgttagcttgataa

SEQ ID NO: 3681440 - DNA, 25 bp, Homo sapien
tttgttagcttgataaccattatgg

SEQ ID NO: 3681441 - DNA, 25 bp, Homo sapien
cacaggtggggcttgcagaaaaact

SEQ ID NO: 3681442 - DNA, 25 bp, Homo sapien
acaatgagaatctttcaaccccgaa

SEQ ID NO: 3681443 - DNA, 25 bp, Homo sapien
ctgcagtagccgtggaagacgtcca

SEQ ID NO: 3681444 - DNA, 25 bp, Homo sapien
aagacgtccagggatttccgagaat

SEQ ID NO: 3681445 - DNA, 25 bp, Homo sapien
tgtggctttgcaaatacggctacct

SEQ ID NO: 3681446 - DNA, 25 bp, Homo sapien
tggcttgacatctctacagggctcc

SEQ ID NO: 3681447 - DNA, 25 bp, Homo sapien
gggctcctcttcataggcaaccagg

SEQ ID NO: 3681448 - DNA, 25 bp, Homo sapien
tctcggctcatgctgggaccctttt

SEQ ID NO: 3681449 - DNA, 25 bp, Homo sapien
tccagatgtacaatctccagcaggg

SEQ ID NO: 3681450 - DNA, 25 bp, Homo sapien
gaaggtgaccgtagatccagatgta

SEQ ID NO: 3681451 - DNA, 25 bp, Homo sapien
tagatccagatgtacaatctccagc

SEQ ID NO: 3681452 - DNA, 25 bp, Homo sapien
ctctggaggaaggtgaccgtagatc

SEQ ID NO: 3681453 - DNA, 25 bp, Homo sapien
ctctggaggcccattaaagttttat

SEQ ID NO: 3681454 - DNA, 25 bp, Homo sapien
ttattatggcatgcctgaaatgctg

SEQ ID NO: 3681455 - DNA, 25 bp, Homo sapien
gctctggaggcccattaaagtttta

SEQ ID NO: 3681456 - DNA, 25 bp, Homo sapien
tgctcctccagatgcaacgtggtgg

SEQ ID NO: 3681457 - DNA, 25 bp, Homo sapien
tcactcagtattaggatgcaaacaa

SEQ ID NO: 3681458 - DNA, 25 bp, Homo sapien
tcattttgggagtttttagcaggtg

SEQ ID NO: 3681459 - DNA, 25 bp, Homo sapien
cccatgctttgagcacacttgctaa

SEQ ID NO: 3681460 - DNA, 25 bp, Homo sapien
ccttctacttcaccctttgacccag

SEQ ID NO: 3681461 - DNA, 25 bp, Homo sapien
caagggtcatgatggaatgctcttt

SEQ ID NO: 3681462 - DNA, 25 bp, Homo sapien
taattaaaggatgatgctctcaccc

SEQ ID NO: 3681463 - DNA, 25 bp, Homo sapien
tttgacccagggtttgcaacttgac

SEQ ID NO: 3681464 - DNA, 25 bp, Homo sapien
tgatggttatctgacccagcgcaga

SEQ ID NO: 3681465 - DNA, 25 bp, Homo sapien
agtgatggttatctgacccagcgca

SEQ ID NO: 3681466 - DNA, 25 bp, Homo sapien
gtgatggttatctgacccagcgcag

SEQ ID NO: 3681467 - DNA, 25 bp, Homo sapien
cagtgatggttatctgacccagcgc

SEQ ID NO: 3681468 - DNA, 25 bp, Homo sapien
ggagcatgagttgcgatccaggact

SEQ ID NO: 3681469 - DNA, 25 bp, Homo sapien
cagttctggtgaatgaaaaccccta

SEQ ID NO: 3681470 - DNA, 25 bp, Homo sapien
ggcaaacttggcctgcatgacagtt

SEQ ID NO: 3681471 - DNA, 25 bp, Homo sapien
caaagaccaaatacctgggttcgag

SEQ ID NO: 3681472 - DNA, 25 bp, Homo sapien
ttggtgatctctcctttgaagactg

SEQ ID NO: 3681473 - DNA, 25 bp, Homo sapien
tggtgatctctcctttgaagactgg

SEQ ID NO: 3681474 - DNA, 25 bp, Homo sapien
gctccgtgcaggcaaggatttttat

SEQ ID NO: 3681475 - DNA, 25 bp, Homo sapien
gctgaaggtaagctccgtgcaggca

SEQ ID NO: 3681476 - DNA, 25 bp, Homo sapien
gactgtctcccttagctgaaggtaa

SEQ ID NO: 3681477 - DNA, 25 bp, Homo sapien
cttgtttttgactgtctcccttagc

SEQ ID NO: 3681478 - DNA, 25 bp, Homo sapien
tgagatggtctttccaagggggagc

SEQ ID NO: 3681479 - DNA, 25 bp, Homo sapien
tggaaggtgagatggtctttccaag

SEQ ID NO: 3681480 - DNA, 25 bp, Homo sapien
gttggaaggtgagatggtctttcca

SEQ ID NO: 3681481 - DNA, 25 bp, Homo sapien
agatggtctttccaagggggagcct

SEQ ID NO: 3681482 - DNA, 25 bp, Homo sapien
ctgactgccaacgccaaacttgggt

SEQ ID NO: 3681483 - DNA, 25 bp, Homo sapien
tgactgccaacgccaaacttgggtt

SEQ ID NO: 3681484 - DNA, 25 bp, Homo sapien
tgtattcagcacaacgtcacggttg

SEQ ID NO: 3681485 - DNA, 25 bp, Homo sapien
gagagaccacagcacgactctgcaa

SEQ ID NO: 3681486 - DNA, 25 bp, Homo sapien
gaaactcctgcatagggaggtgccg

SEQ ID NO: 3681487 - DNA, 25 bp, Homo sapien
gccgtgatgagctcggagagaccac

SEQ ID NO: 3681488 - DNA, 25 bp, Homo sapien
tgtgatgaaaagtccctccacaaaa

SEQ ID NO: 3681489 - DNA, 25 bp, Homo sapien
tgatgaaaagtccctccacaaaagg

SEQ ID NO: 3681490 - DNA, 25 bp, Homo sapien
tcctggagtcctaagacgtccttct

SEQ ID NO: 3681491 - DNA, 25 bp, Homo sapien
cctggagtcctaagacgtccttctc

SEQ ID NO: 3681492 - DNA, 25 bp, Homo sapien
taaagaaggtgtcacaacgctggcc

SEQ ID NO: 3681493 - DNA, 25 bp, Homo sapien
tctgtggtcatgatagtgtcccgga

SEQ ID NO: 3681494 - DNA, 25 bp, Homo sapien
cagattccatgcctgtcaagggtga

SEQ ID NO: 3681495 - DNA, 25 bp, Homo sapien
gatggtggaccaggcgtactacaag

SEQ ID NO: 3681496 - DNA, 25 bp, Homo sapien
tgctttgacttgtagagacactttc

SEQ ID NO: 3681497 - DNA, 25 bp, Homo sapien
acacaattttggagttgtcctagtg

SEQ ID NO: 3681498 - DNA, 25 bp, Homo sapien
gttgtcctagtgtaagaaggctgat

SEQ ID NO: 3681499 - DNA, 25 bp, Homo sapien
tcctgctttgacttgtagagacact

SEQ ID NO: 3681500 - DNA, 25 bp, Homo sapien
tacacctaacaggtgttcagtcaac

SEQ ID NO: 3681501 - DNA, 25 bp, Homo sapien
cagtcaacaaatcgatgattgtcaa

SEQ ID NO: 3681502 - DNA, 25 bp, Homo sapien
aaagcatatgacaccgtgccttaca

SEQ ID NO: 3681503 - DNA, 25 bp, Homo sapien
gacaccgtgccttacacctaacagg

SEQ ID NO: 3681504 - DNA, 25 bp, Homo sapien
tgtcagaagaagatggccacactct

SEQ ID NO: 3681505 - DNA, 25 bp, Homo sapien
gtagaggctctctcccaagtggata

SEQ ID NO: 3681506 - DNA, 25 bp, Homo sapien
gatgtagggaagtagcaagccagct

SEQ ID NO: 3681507 - DNA, 25 bp, Homo sapien
tttcctagggcaaaccatgagactg

SEQ ID NO: 3681508 - DNA, 25 bp, Homo sapien
ggaaggaagttgctgctgggccacc

SEQ ID NO: 3681509 - DNA, 25 bp, Homo sapien
caatggaaggaagttgctgctgggc

SEQ ID NO: 3681510 - DNA, 25 bp, Homo sapien
ggcaatggaaggaagttgctgctgg

SEQ ID NO: 3681511 - DNA, 25 bp, Homo sapien
atgggcaatggaaggaagttgctgc

SEQ ID NO: 3681512 - DNA, 25 bp, Homo sapien
tgtggctgcctgagctattgctgcc

SEQ ID NO: 3681513 - DNA, 25 bp, Homo sapien
tggctgcctgagctattgctgccat

SEQ ID NO: 3681514 - DNA, 25 bp, Homo sapien
ggttgtggctgcctgagctattgct

SEQ ID NO: 3681515 - DNA, 25 bp, Homo sapien
ttgtggctgcctgagctattgctgc

SEQ ID NO: 3681516 - DNA, 25 bp, Homo sapien
gcggccagcagatggaactgctgga

SEQ ID NO: 3681517 - DNA, 25 bp, Homo sapien
ctggcggccagcagatggaactgct

SEQ ID NO: 3681518 - DNA, 25 bp, Homo sapien
gccagcagatggaactgctggagct

SEQ ID NO: 3681519 - DNA, 25 bp, Homo sapien
agcagatggaactgctggagctccg

SEQ ID NO: 3681520 - DNA, 25 bp, Homo sapien
gtgcattgttcagggcaagcctaga

SEQ ID NO: 3681521 - DNA, 25 bp, Homo sapien
tgcattgttcagggcaagcctagag

SEQ ID NO: 3681522 - DNA, 25 bp, Homo sapien
tgtgcattgttcagggcaagcctag

SEQ ID NO: 3681523 - DNA, 25 bp, Homo sapien
ctgtgcattgttcagggcaagccta

SEQ ID NO: 3681524 - DNA, 25 bp, Homo sapien
ccagagtaagtttgctccagggagt

SEQ ID NO: 3681525 - DNA, 25 bp, Homo sapien
ctggaccacagataagtgtgtgtgc

SEQ ID NO: 3681526 - DNA, 25 bp, Homo sapien
ctctggaattctcaactgttggaat

SEQ ID NO: 3681527 - DNA, 25 bp, Homo sapien
tcatttgactgcttcggctctcctg

SEQ ID NO: 3681528 - DNA, 25 bp, Homo sapien
aggcctgtcccttccataattggat

SEQ ID NO: 3681529 - DNA, 25 bp, Homo sapien
taatgacaagattgagttaggtgga

SEQ ID NO: 3681530 - DNA, 25 bp, Homo sapien
caatcagcagacatttcctaagcag

SEQ ID NO: 3681531 - DNA, 25 bp, Homo sapien
cataattggatacagacatgtcaac

SEQ ID NO: 3681532 - DNA, 25 bp, Homo sapien
cagtgtcttgattgactctatctca

SEQ ID NO: 3681533 - DNA, 25 bp, Homo sapien
gaaaactggacctgcattggcaacc

SEQ ID NO: 3681534 - DNA, 25 bp, Homo sapien
agtggagacagaaaactggacctgc

SEQ ID NO: 3681535 - DNA, 25 bp, Homo sapien
tgtgctcagtgtcttgattgactct

SEQ ID NO: 3681536 - DNA, 25 bp, Homo sapien
cctgggctttgaggatttcccgcac

SEQ ID NO: 3681537 - DNA, 25 bp, Homo sapien
tactgttgaagagggacggtcactc

SEQ ID NO: 3681538 - DNA, 25 bp, Homo sapien
tgatcatggcgtcccgttgctttct

SEQ ID NO: 3681539 - DNA, 25 bp, Homo sapien
tctgtgcataaaggccccacaagtg

SEQ ID NO: 3681540 - DNA, 25 bp, Homo sapien
ccagaccgccttgggatgacatgca

SEQ ID NO: 3681541 - DNA, 25 bp, Homo sapien
cgggcaaccaaatgaaggcgtgtgt

SEQ ID NO: 3681542 - DNA, 25 bp, Homo sapien
tgccaccgtcagtggtagccttcaa

SEQ ID NO: 3681543 - DNA, 25 bp, Homo sapien
gtggcaggttcggtatgtcagacat

SEQ ID NO: 3681544 - DNA, 25 bp, Homo sapien
taatagggatgcaaatgtctcccct

SEQ ID NO: 3681545 - DNA, 25 bp, Homo sapien
tgatgatgatgtatgagacagccgt

SEQ ID NO: 3681546 - DNA, 25 bp, Homo sapien
tatgagacagccgtgcctttggagt

SEQ ID NO: 3681547 - DNA, 25 bp, Homo sapien
caggacgctgagaaaaaggacccct

SEQ ID NO: 3681548 - DNA, 25 bp, Homo sapien
gactgaaacgggttacacaggcctg

SEQ ID NO: 3681549 - DNA, 25 bp, Homo sapien
gaaacgggttacacaggcctgttgc

SEQ ID NO: 3681550 - DNA, 25 bp, Homo sapien
tgttttgaggttgaacatttccaag

SEQ ID NO: 3681551 - DNA, 25 bp, Homo sapien
ttcttgtagactgaaacgggttaca

SEQ ID NO: 3681552 - DNA, 25 bp, Homo sapien
tgtgtagattccacccggactgttg

SEQ ID NO: 3681553 - DNA, 25 bp, Homo sapien
gtgtagattccacccggactgttgc

SEQ ID NO: 3681554 - DNA, 25 bp, Homo sapien
tagattccacccggactgttgccat

SEQ ID NO: 3681555 - DNA, 25 bp, Homo sapien
tgtagattccacccggactgttgcc

SEQ ID NO: 3681556 - DNA, 25 bp, Homo sapien
gtccatagtaagctgtgggtcctag

SEQ ID NO: 3681557 - DNA, 25 bp, Homo sapien
agaactgtccatagtaagctgtggg

SEQ ID NO: 3681558 - DNA, 25 bp, Homo sapien
taggatgatcaagcttcctgacttc

SEQ ID NO: 3681559 - DNA, 25 bp, Homo sapien
gctgtgggtcctaggatgatcaagc

SEQ ID NO: 3681560 - DNA, 25 bp, Homo sapien
gacagccaccgaaggcatggcttca

SEQ ID NO: 3681561 - DNA, 25 bp, Homo sapien
gtggtccaggaataggtaatcccca

SEQ ID NO: 3681562 - DNA, 25 bp, Homo sapien
gaatactgctcagagatgcagctgg

SEQ ID NO: 3681563 - DNA, 25 bp, Homo sapien
caaggttggttgacagctttgctcc

SEQ ID NO: 3681564 - DNA, 25 bp, Homo sapien
tgtgtccactgaaatatgtgtagaa

SEQ ID NO: 3681565 - DNA, 25 bp, Homo sapien
gtcactttctggatagcagtagctt

SEQ ID NO: 3681566 - DNA, 25 bp, Homo sapien
ctgaatggtgtctctgaggaagttt

SEQ ID NO: 3681567 - DNA, 25 bp, Homo sapien
gaaaggacagactcagtagtcattt

SEQ ID NO: 3681568 - DNA, 25 bp, Homo sapien
aattaggtggatctgactgtggtac

SEQ ID NO: 3681569 - DNA, 25 bp, Homo sapien
tctgactgtggtacctttctcttca

SEQ ID NO: 3681570 - DNA, 25 bp, Homo sapien
caacttgataagaattaggtggatc

SEQ ID NO: 3681571 - DNA, 25 bp, Homo sapien
gcaaattctgccctctttacaactt

SEQ ID NO: 3681572 - DNA, 25 bp, Homo sapien
ggacttcgggttgcctgtgcctttc

SEQ ID NO: 3681573 - DNA, 25 bp, Homo sapien
gctctcaggtactggtgatgccact

SEQ ID NO: 3681574 - DNA, 25 bp, Homo sapien
tcccacaggtaaggatgcatgaatg

SEQ ID NO: 3681575 - DNA, 25 bp, Homo sapien
gaaatgaacttgatcaaccgggatg

SEQ ID NO: 3681576 - DNA, 25 bp, Homo sapien
ttatggtttctgccctcttctcaaa

SEQ ID NO: 3681577 - DNA, 25 bp, Homo sapien
tggtttctgccctcttctcaaaggt

SEQ ID NO: 3681578 - DNA, 25 bp, Homo sapien
tctgccctcttctcaaaggttttcc

SEQ ID NO: 3681579 - DNA, 25 bp, Homo sapien
ttctgccctcttctcaaaggttttc

SEQ ID NO: 3681580 - DNA, 25 bp, Homo sapien
aggggtataagtttctcattctctg

SEQ ID NO: 3681581 - DNA, 25 bp, Homo sapien
cctggaagtgtcttgcaagtgtgtt

SEQ ID NO: 3681582 - DNA, 25 bp, Homo sapien
tggcaccacatataggctttgagct

SEQ ID NO: 3681583 - DNA, 25 bp, Homo sapien
tttgagaagtggcaccacatatagg

SEQ ID NO: 3681584 - DNA, 25 bp, Homo sapien
cttgagatgagatgagccttcaggc

SEQ ID NO: 3681585 - DNA, 25 bp, Homo sapien
cgttgctcctcgtaattctgcagga

SEQ ID NO: 3681586 - DNA, 25 bp, Homo sapien
gagatgagccttcaggctgagccca

SEQ ID NO: 3681587 - DNA, 25 bp, Homo sapien
tcatctgaaacaccaagctctctgc

SEQ ID NO: 3681588 - DNA, 25 bp, Homo sapien
tggtagtctctagctgatggaatct

SEQ ID NO: 3681589 - DNA, 25 bp, Homo sapien
gtcttgcccccatgacgctggtagt

SEQ ID NO: 3681590 - DNA, 25 bp, Homo sapien
gatggaatctaagactctggtgcat

SEQ ID NO: 3681591 - DNA, 25 bp, Homo sapien
gagcaaaagcggtttggtcttgccc

SEQ ID NO: 3681592 - DNA, 25 bp, Homo sapien
tgccattcctctaccattagccagt

SEQ ID NO: 3681593 - DNA, 25 bp, Homo sapien
cctgccattcctctaccattagcca

SEQ ID NO: 3681594 - DNA, 25 bp, Homo sapien
ctgccattcctctaccattagccag

SEQ ID NO: 3681595 - DNA, 25 bp, Homo sapien
gccattcctctaccattagccagtt

SEQ ID NO: 3681596 - DNA, 25 bp, Homo sapien
aggtaactgtgggtggccccttcat

SEQ ID NO: 3681597 - DNA, 25 bp, Homo sapien
tgtgaatgtccaccaccagctttgc

SEQ ID NO: 3681598 - DNA, 25 bp, Homo sapien
gatggaactccagtacagtgctttg

SEQ ID NO: 3681599 - DNA, 25 bp, Homo sapien
cacaagcttttgctggatcacctcc

SEQ ID NO: 3681600 - DNA, 25 bp, Homo sapien
caatcatgttagagaatggtggcac

SEQ ID NO: 3681601 - DNA, 25 bp, Homo sapien
tagaagaaagcttactgggcctccc

SEQ ID NO: 3681602 - DNA, 25 bp, Homo sapien
ggataggcttagatgcacagatgca

SEQ ID NO: 3681603 - DNA, 25 bp, Homo sapien
caacatcgtgctgactgctgggact

SEQ ID NO: 3681604 - DNA, 25 bp, Homo sapien
gaagtggagttttctgaccacgtag

SEQ ID NO: 3681605 - DNA, 25 bp, Homo sapien
tgaccacgtagacttcagaatatct

SEQ ID NO: 3681606 - DNA, 25 bp, Homo sapien
gagttttctgaccacgtagacttca

SEQ ID NO: 3681607 - DNA, 25 bp, Homo sapien
ctgaagtggagttttctgaccacgt

SEQ ID NO: 3681608 - DNA, 25 bp, Homo sapien
aacaagcgtgcagccgtgcatgaca

SEQ ID NO: 3681609 - DNA, 25 bp, Homo sapien
gcgtgcagccgtgcatgacaacttt

SEQ ID NO: 3681610 - DNA, 25 bp, Homo sapien
ataacaagcgtgcagccgtgcatga

SEQ ID NO: 3681611 - DNA, 25 bp, Homo sapien
gcagccgtgcatgacaactttgttt

SEQ ID NO: 3681612 - DNA, 25 bp, Homo sapien
acttcaggcaagtcaatttgtctgt

SEQ ID NO: 3681613 - DNA, 25 bp, Homo sapien
gaactcaattatatctagcattcta

SEQ ID NO: 3681614 - DNA, 25 bp, Homo sapien
gcttagttttatcacttcaggcaag

SEQ ID NO: 3681615 - DNA, 25 bp, Homo sapien
gtcatattttaacaccctatcatag

SEQ ID NO: 3681616 - DNA, 25 bp, Homo sapien
ctgatcttcgtgggtttgtctacct

SEQ ID NO: 3681617 - DNA, 25 bp, Homo sapien
tgatcttcgtgggtttgtctacctt

SEQ ID NO: 3681618 - DNA, 25 bp, Homo sapien
tgctcctctgcgtgccgggaccggc

SEQ ID NO: 3681619 - DNA, 25 bp, Homo sapien
tccgggagcagatagcggccgcgca

SEQ ID NO: 3681620 - DNA, 25 bp, Homo sapien
gacggtgccaggctttgccttacgc

SEQ ID NO: 3681621 - DNA, 25 bp, Homo sapien
accccgcactcacgctccgggagca

SEQ ID NO: 3681622 - DNA, 25 bp, Homo sapien
ctgccccggaaggtgaggcaagcct

SEQ ID NO: 3681623 - DNA, 25 bp, Homo sapien
cgatccgttggatcaaggaggccat

SEQ ID NO: 3681624 - DNA, 25 bp, Homo sapien
cagaagccgcgtcgcgatcggaagc

SEQ ID NO: 3681625 - DNA, 25 bp, Homo sapien
cctggcgggcgatccgttggatcaa

SEQ ID NO: 3681626 - DNA, 25 bp, Homo sapien
gcgatgttcaagtcctcggcgcgga

SEQ ID NO: 3681627 - DNA, 25 bp, Homo sapien
taatagtggcagtcccggccatcgt

SEQ ID NO: 3681628 - DNA, 25 bp, Homo sapien
tccacggcgtcgatctggtgcaggt

SEQ ID NO: 3681629 - DNA, 25 bp, Homo sapien
gcaccagaagtcatcggcctgtggg

SEQ ID NO: 3681630 - DNA, 25 bp, Homo sapien
cacattagatgaacccagggctcag

SEQ ID NO: 3681631 - DNA, 25 bp, Homo sapien
gcaggccagctcactttaaacagta

SEQ ID NO: 3681632 - DNA, 25 bp, Homo sapien
tatagggaatgcaacaactggctag

SEQ ID NO: 3681633 - DNA, 25 bp, Homo sapien
tagttatgttgtgagaatgatcccc

SEQ ID NO: 3681634 - DNA, 25 bp, Homo sapien
gcataaagaggcaaaggcacgtact

SEQ ID NO: 3681635 - DNA, 25 bp, Homo sapien
tttaaactacaccagaatgtggagc

SEQ ID NO: 3681636 - DNA, 25 bp, Homo sapien
caaactaagtggcatgaagaactgc

SEQ ID NO: 3681637 - DNA, 25 bp, Homo sapien
caatcaagagggcttagacgacagc

SEQ ID NO: 3681638 - DNA, 25 bp, Homo sapien
cacacaggtgcaagatagtttctgc

SEQ ID NO: 3681639 - DNA, 25 bp, Homo sapien
gactaacagtttatgcacacaggtg

SEQ ID NO: 3681640 - DNA, 25 bp, Homo sapien
tacagccaggatgagttttcgtagc

SEQ ID NO: 3681641 - DNA, 25 bp, Homo sapien
tagcaacacaccaagtcagtcacga

SEQ ID NO: 3681642 - DNA, 25 bp, Homo sapien
cctatttcaaggatgtcgaatctct

SEQ ID NO: 3681643 - DNA, 25 bp, Homo sapien
gcccttaccagcactagaatttgag

SEQ ID NO: 3681644 - DNA, 25 bp, Homo sapien
agctgacatctgaaaatccctttga

SEQ ID NO: 3681645 - DNA, 25 bp, Homo sapien
caaatgtaacatgttgctgcagcgt

SEQ ID NO: 3681646 - DNA, 25 bp, Homo sapien
cagtcattcagtctctgtgggaata

SEQ ID NO: 3681647 - DNA, 25 bp, Homo sapien
cagcactaagcaccagtgaaaatgc

SEQ ID NO: 3681648 - DNA, 25 bp, Homo sapien
agtgcccactcggagacaacacatt

SEQ ID NO: 3681649 - DNA, 25 bp, Homo sapien
tccgttgtctctaacagcctatagc

SEQ ID NO: 3681650 - DNA, 25 bp, Homo sapien
tctctgaaactaggatgcatgcaat

SEQ ID NO: 3681651 - DNA, 25 bp, Homo sapien
tgtacataatgttaccggagctgat

SEQ ID NO: 3681652 - DNA, 25 bp, Homo sapien
catgcaattgtgttggaagtgtcct

SEQ ID NO: 3681653 - DNA, 25 bp, Homo sapien
ccttggtgccttgtgtgatgtagac

SEQ ID NO: 3681654 - DNA, 25 bp, Homo sapien
gaagcccttcgcctgtgactactgt

SEQ ID NO: 3681655 - DNA, 25 bp, Homo sapien
attctgaggcctcgcaagtacccca

SEQ ID NO: 3681656 - DNA, 25 bp, Homo sapien
tactgtggccgaaagtttgcccgga

SEQ ID NO: 3681657 - DNA, 25 bp, Homo sapien
gcacatccgaatccacactgggcat

SEQ ID NO: 3681658 - DNA, 25 bp, Homo sapien
tttctgacactccaggtagcgaggg

SEQ ID NO: 3681659 - DNA, 25 bp, Homo sapien
agcaaatgatgaccgccaaggccgt

SEQ ID NO: 3681660 - DNA, 25 bp, Homo sapien
tgacaacatctacccggtggaggac

SEQ ID NO: 3681661 - DNA, 25 bp, Homo sapien
ggaggcccctttgaccagatgaacg

SEQ ID NO: 3681662 - DNA, 25 bp, Homo sapien
aggctgaggcaacaaactgaaatga

SEQ ID NO: 3681663 - DNA, 25 bp, Homo sapien
aaactgaaatgagcaggttggctgt

SEQ ID NO: 3681664 - DNA, 25 bp, Homo sapien
agatgcaggctgaggcaacaaactg

SEQ ID NO: 3681665 - DNA, 25 bp, Homo sapien
aaatgagcaggttggctgttcctcc

SEQ ID NO: 3681666 - DNA, 25 bp, Homo sapien
gatgccccaaattcagcggctgcag

SEQ ID NO: 3681667 - DNA, 25 bp, Homo sapien
gttcgcagttcctatttcatccagg

SEQ ID NO: 3681668 - DNA, 25 bp, Homo sapien
cttggcctaatgcaagaggctgtct

SEQ ID NO: 3681669 - DNA, 25 bp, Homo sapien
gcagctcaagtgtgttcgcagttcc

SEQ ID NO: 3681670 - DNA, 25 bp, Homo sapien
ctggtgagggacagacgacctgagt

SEQ ID NO: 3681671 - DNA, 25 bp, Homo sapien
ggacagacgacctgagtctggccca

SEQ ID NO: 3681672 - DNA, 25 bp, Homo sapien
gacacttgaaagaggctcgtggccc

SEQ ID NO: 3681673 - DNA, 25 bp, Homo sapien
cagggcacaggtagccatgaattca

SEQ ID NO: 3681674 - DNA, 25 bp, Homo sapien
ctgcttcatcagataacgtcggcat

SEQ ID NO: 3681675 - DNA, 25 bp, Homo sapien
gtcaggctaagtgctgctgggttaa

SEQ ID NO: 3681676 - DNA, 25 bp, Homo sapien
ctggtgtcttgaagatgactgcata

SEQ ID NO: 3681677 - DNA, 25 bp, Homo sapien
ctgggttaaaggcaagctggtgtct

SEQ ID NO: 3681678 - DNA, 25 bp, Homo sapien
ccagaggagaatcttgttgaccaga

SEQ ID NO: 3681679 - DNA, 25 bp, Homo sapien
gtgtctagacccgaagacctcatgt

SEQ ID NO: 3681680 - DNA, 25 bp, Homo sapien
attcctggactcagcaactggtgtc

SEQ ID NO: 3681681 - DNA, 25 bp, Homo sapien
cctcctgggtcttggaatatgtttc

SEQ ID NO: 3681682 - DNA, 25 bp, Homo sapien
gaagacctcatgttcctggagccca

SEQ ID NO: 3681683 - DNA, 25 bp, Homo sapien
ttttaatgtactccctgcctcctta

SEQ ID NO: 3681684 - DNA, 25 bp, Homo sapien
ggtgcttttaatgtactccctgcct

SEQ ID NO: 3681685 - DNA, 25 bp, Homo sapien
cctttggtaaggtctaagttctgca

SEQ ID NO: 3681686 - DNA, 25 bp, Homo sapien
agctgggcattggagcatgtacttc

SEQ ID NO: 3681687 - DNA, 25 bp, Homo sapien
ctggctgagtgcctaaatgcttgca

SEQ ID NO: 3681688 - DNA, 25 bp, Homo sapien
gtgcctaaatgcttgcaagggcaga

SEQ ID NO: 3681689 - DNA, 25 bp, Homo sapien
ctaaatgcttgcaagggcagagaca

SEQ ID NO: 3681690 - DNA, 25 bp, Homo sapien
tgagtgcctaaatgcttgcaagggc

SEQ ID NO: 3681691 - DNA, 25 bp, Homo sapien
ccagctatgtgggttccgattactt

SEQ ID NO: 3681692 - DNA, 25 bp, Homo sapien
tgtgggttccgattacttgctaaat

SEQ ID NO: 3681693 - DNA, 25 bp, Homo sapien
gctatgtgggttccgattacttgct

SEQ ID NO: 3681694 - DNA, 25 bp, Homo sapien
tcccagctatgtgggttccgattac

SEQ ID NO: 3681695 - DNA, 25 bp, Homo sapien
tgggtctgtgccctgttgacctgtc

SEQ ID NO: 3681696 - DNA, 25 bp, Homo sapien
gttgacctgtctacagcatgactcc

SEQ ID NO: 3681697 - DNA, 25 bp, Homo sapien
ggtctgtgccctgttgacctgtcta

SEQ ID NO: 3681698 - DNA, 25 bp, Homo sapien
acagcatgactccccaaggtgagct

SEQ ID NO: 3681699 - DNA, 25 bp, Homo sapien
catgcataaagtccacgtgtttaca

SEQ ID NO: 3681700 - DNA, 25 bp, Homo sapien
ggtccaatcagagcatccttccaca

SEQ ID NO: 3681701 - DNA, 25 bp, Homo sapien
gcataaagtccacgtgtttacagaa

SEQ ID NO: 3681702 - DNA, 25 bp, Homo sapien
tgtaaggagctaattcagtttgatg

SEQ ID NO: 3681703 - DNA, 25 bp, Homo sapien
tgaagtccccttcgggcttagcatg

SEQ ID NO: 3681704 - DNA, 25 bp, Homo sapien
tttgaaatactgccaacaagatagg

SEQ ID NO: 3681705 - DNA, 25 bp, Homo sapien
tgacaaagcagaatgctgaagtccc

SEQ ID NO: 3681706 - DNA, 25 bp, Homo sapien
tgtggacgccaaaacctagcagatt

SEQ ID NO: 3681707 - DNA, 25 bp, Homo sapien
gccagtcgccccagcaattctgaga

SEQ ID NO: 3681708 - DNA, 25 bp, Homo sapien
ttctcgccatgctcctcagggctgt

SEQ ID NO: 3681709 - DNA, 25 bp, Homo sapien
gaagccaatcttcattcgccagtcg

SEQ ID NO: 3681710 - DNA, 25 bp, Homo sapien
gaagcaggacccttggctacagggc

SEQ ID NO: 3681711 - DNA, 25 bp, Homo sapien
cgggtaatgccaaacctgagaaggg

SEQ ID NO: 3681712 - DNA, 25 bp, Homo sapien
ttttgacctttagcgggtaatgcca

SEQ ID NO: 3681713 - DNA, 25 bp, Homo sapien
cacttcttcccttatcctgagcttt

SEQ ID NO: 3681714 - DNA, 25 bp, Homo sapien
tacactcatcgagaaccttttccat

SEQ ID NO: 3681715 - DNA, 25 bp, Homo sapien
tcctcaggaccttttactgcaggga

SEQ ID NO: 3681716 - DNA, 25 bp, Homo sapien
acttgctcactgcatggtcgctggg

SEQ ID NO: 3681717 - DNA, 25 bp, Homo sapien
aattttccatggaggacagtgtcac

SEQ ID NO: 3681718 - DNA, 25 bp, Homo sapien
gtaccttactgcaatcacacttgct

SEQ ID NO: 3681719 - DNA, 25 bp, Homo sapien
aaacaaggcatcacttggacaaggg

SEQ ID NO: 3681720 - DNA, 25 bp, Homo sapien
tcacttggacaagggggagaagtct

SEQ ID NO: 3681721 - DNA, 25 bp, Homo sapien
ctgaaaacaaggcatcacttggaca

SEQ ID NO: 3681722 - DNA, 25 bp, Homo sapien
gaaaacaaggcatcacttggacaag

SEQ ID NO: 3681723 - DNA, 25 bp, Homo sapien
ccaggtgctctcagtacacacagca

SEQ ID NO: 3681724 - DNA, 25 bp, Homo sapien
ttgattgtcaatggtggatgcctgc

SEQ ID NO: 3681725 - DNA, 25 bp, Homo sapien
ccagggaaggtcccgtggtcttgat

SEQ ID NO: 3681726 - DNA, 25 bp, Homo sapien
gctccaggtgctctcagtacacaca

SEQ ID NO: 3681727 - DNA, 25 bp, Homo sapien
cctggcttagtcaggatctttctga

SEQ ID NO: 3681728 - DNA, 25 bp, Homo sapien
gctccctttgggtgcacctcttgtt

SEQ ID NO: 3681729 - DNA, 25 bp, Homo sapien
tgttgatacaagcaaaaactagcat

SEQ ID NO: 3681730 - DNA, 25 bp, Homo sapien
tgttccttggagcaccctggcttag

SEQ ID NO: 3681731 - DNA, 25 bp, Homo sapien
agatactggagtccctactttaaga

SEQ ID NO: 3681732 - DNA, 25 bp, Homo sapien
accctgcttgttcgctcttaccgtt

SEQ ID NO: 3681733 - DNA, 25 bp, Homo sapien
gcttgttcgctcttaccgttctctc

SEQ ID NO: 3681734 - DNA, 25 bp, Homo sapien
ccagatactggagtccctactttaa

SEQ ID NO: 3681735 - DNA, 25 bp, Homo sapien
ccccggtgctcacccagtaacaaag

SEQ ID NO: 3681736 - DNA, 25 bp, Homo sapien
tcagatgaaacacgggagataaaag

SEQ ID NO: 3681737 - DNA, 25 bp, Homo sapien
ggaagtccacatactcacagctgct

SEQ ID NO: 3681738 - DNA, 25 bp, Homo sapien
tgaaacacgggagataaaaggctcc

SEQ ID NO: 3681739 - DNA, 25 bp, Homo sapien
gcttaacgcccttgatcctatctct

SEQ ID NO: 3681740 - DNA, 25 bp, Homo sapien
agttctcaagcttaacgcccttgat

SEQ ID NO: 3681741 - DNA, 25 bp, Homo sapien
tcttgctggaatgtcgtcgctgcca

SEQ ID NO: 3681742 - DNA, 25 bp, Homo sapien
atctcttgctggaatgtcgtcgctg

SEQ ID NO: 3681743 - DNA, 25 bp, Homo sapien
tctattgcttcaggcacccaggaac

SEQ ID NO: 3681744 - DNA, 25 bp, Homo sapien
tgctgtgtttccatctattgcttca

SEQ ID NO: 3681745 - DNA, 25 bp, Homo sapien
tgtttccatctattgcttcaggcac

SEQ ID NO: 3681746 - DNA, 25 bp, Homo sapien
tccatctattgcttcaggcacccag

SEQ ID NO: 3681747 - DNA, 25 bp, Homo sapien
ggtgttatacacatttagttcataa

SEQ ID NO: 3681748 - DNA, 25 bp, Homo sapien
tgttatacacatttagttcataaaa

SEQ ID NO: 3681749 - DNA, 25 bp, Homo sapien
ctttggtgttatacacatttagttc

SEQ ID NO: 3681750 - DNA, 25 bp, Homo sapien
tggtgttatacacatttagttcata

SEQ ID NO: 3681751 - DNA, 25 bp, Homo sapien
ctgcttctgtctgtgtggctgtcat

SEQ ID NO: 3681752 - DNA, 25 bp, Homo sapien
tttgtgttgatgctgtctccaacag

SEQ ID NO: 3681753 - DNA, 25 bp, Homo sapien
ccctttgagcagttccaggaaccat

SEQ ID NO: 3681754 - DNA, 25 bp, Homo sapien
caacagctggccatgtctccctttg

SEQ ID NO: 3681755 - DNA, 25 bp, Homo sapien
ctccctttgagcagttccaggaacc

SEQ ID NO: 3681756 - DNA, 25 bp, Homo sapien
gggattaatttgactgtgaatactg

SEQ ID NO: 3681757 - DNA, 25 bp, Homo sapien
aatttgactgtgaatactgtggact

SEQ ID NO: 3681758 - DNA, 25 bp, Homo sapien
ctggggattaatttgactgtgaata

SEQ ID NO: 3681759 - DNA, 25 bp, Homo sapien
attaatttgactgtgaatactgtgg

SEQ ID NO: 3681760 - DNA, 25 bp, Homo sapien
taacatccaggcttgtgagaatcag

SEQ ID NO: 3681761 - DNA, 25 bp, Homo sapien
cttcttggggctatctgtaagcagc

SEQ ID NO: 3681762 - DNA, 25 bp, Homo sapien
gcagctggctgactctaacatccag

SEQ ID NO: 3681763 - DNA, 25 bp, Homo sapien
tccaggcttgtgagaatcagctctg

SEQ ID NO: 3681764 - DNA, 25 bp, Homo sapien
tcttagaaaatagtccctcaggagt

SEQ ID NO: 3681765 - DNA, 25 bp, Homo sapien
ggtttcaaccatcaggagacctagt

SEQ ID NO: 3681766 - DNA, 25 bp, Homo sapien
ggagtagcttgcattaatccactga

SEQ ID NO: 3681767 - DNA, 25 bp, Homo sapien
tgtgatcttagtcccctacatgctg

SEQ ID NO: 3681768 - DNA, 25 bp, Homo sapien
taattcatcctgaattgcttttgtg

SEQ ID NO: 3681769 - DNA, 25 bp, Homo sapien
ctctttggccctctgaataatcttc

SEQ ID NO: 3681770 - DNA, 25 bp, Homo sapien
catcctgaattgcttttgtgggcac

SEQ ID NO: 3681771 - DNA, 25 bp, Homo sapien
cctctttggccctctgaataatctt

SEQ ID NO: 3681772 - DNA, 25 bp, Homo sapien
acaggcacccacggttcaggcccct

SEQ ID NO: 3681773 - DNA, 25 bp, Homo sapien
caggcacccacggttcaggcccctt

SEQ ID NO: 3681774 - DNA, 25 bp, Homo sapien
ctgctggaactagtggaccatggga

SEQ ID NO: 3681775 - DNA, 25 bp, Homo sapien
catcactggtgagacagctgctgga

SEQ ID NO: 3681776 - DNA, 25 bp, Homo sapien
gcttgtatgtgcatcactggtgaga

SEQ ID NO: 3681777 - DNA, 25 bp, Homo sapien
gcttctgggctacaggtaactgtcc

SEQ ID NO: 3681778 - DNA, 25 bp, Homo sapien
caccggtctcttgctttaggcggca

SEQ ID NO: 3681779 - DNA, 25 bp, Homo sapien
agtagatgggagcagcccaccggtc

SEQ ID NO: 3681780 - DNA, 25 bp, Homo sapien
gcagcccaccggtctcttgctttag

SEQ ID NO: 3681781 - DNA, 25 bp, Homo sapien
tctcttgctttaggcggcacattct

SEQ ID NO: 3681782 - DNA, 25 bp, Homo sapien
gggtttcccctgatgagcttaattg

SEQ ID NO: 3681783 - DNA, 25 bp, Homo sapien
gcttaattgaaagaacttgcttcca

SEQ ID NO: 3681784 - DNA, 25 bp, Homo sapien
tattttaggcgaactggttcagccg

SEQ ID NO: 3681785 - DNA, 25 bp, Homo sapien
tgataaacatctggcaaatgcagga

SEQ ID NO: 3681786 - DNA, 25 bp, Homo sapien
tgcttttgtgtatgctagactgccc

SEQ ID NO: 3681787 - DNA, 25 bp, Homo sapien
tgtgctgcatggagacgctcccaga

SEQ ID NO: 3681788 - DNA, 25 bp, Homo sapien
gaggaaagctacagccgatgccttg

SEQ ID NO: 3681789 - DNA, 25 bp, Homo sapien
tagactgccctaaattggaagtatt

SEQ ID NO: 3681790 - DNA, 25 bp, Homo sapien
gttctttacctaattgtctctggct

SEQ ID NO: 3681791 - DNA, 25 bp, Homo sapien
ttctgttctttacctaattgtctct

SEQ ID NO: 3681792 - DNA, 25 bp, Homo sapien
tctgttctttacctaattgtctctg

SEQ ID NO: 3681793 - DNA, 25 bp, Homo sapien
tgttctttacctaattgtctctggc

SEQ ID NO: 3681794 - DNA, 25 bp, Homo sapien
gagattttgagctgattcatgaaca

SEQ ID NO: 3681795 - DNA, 25 bp, Homo sapien
gaaaatgcgtcatctaaatatgaac

SEQ ID NO: 3681796 - DNA, 25 bp, Homo sapien
gcgtcatctaaatatgaactgagat

SEQ ID NO: 3681797 - DNA, 25 bp, Homo sapien
gcagatgtgcccttcctgtttggca

SEQ ID NO: 3681798 - DNA, 25 bp, Homo sapien
tcgccacatcggccaggctggtttc

SEQ ID NO: 3681799 - DNA, 25 bp, Homo sapien
aaactcctgaccacgtgattcaccc

SEQ ID NO: 3681800 - DNA, 25 bp, Homo sapien
tgaccacgtgattcacccgcctcag

SEQ ID NO: 3681801 - DNA, 25 bp, Homo sapien
ccacgtgattcacccgcctcagcct

SEQ ID NO: 3681802 - DNA, 25 bp, Homo sapien
cagatgagttaggtttgagcagcag

SEQ ID NO: 3681803 - DNA, 25 bp, Homo sapien
catgatgtgggaaagccggagccta

SEQ ID NO: 3681804 - DNA, 25 bp, Homo sapien
gaactgaagggtacatcgtgagtca

SEQ ID NO: 3681805 - DNA, 25 bp, Homo sapien
ctagaactactatcttggctgtagg

SEQ ID NO: 3681806 - DNA, 25 bp, Homo sapien
tatatatgctgctgaagtaagcacc

SEQ ID NO: 3681807 - DNA, 25 bp, Homo sapien
tgtccacacctttatcattgtacat

SEQ ID NO: 3681808 - DNA, 25 bp, Homo sapien
ttaaatctgctaatcgttacaccgt

SEQ ID NO: 3681809 - DNA, 25 bp, Homo sapien
acaccgttacttgtggtcctgtcca

SEQ ID NO: 3681810 - DNA, 25 bp, Homo sapien
gtcctgtccacacctttatcattgt

SEQ ID NO: 3681811 - DNA, 25 bp, Homo sapien
gccccctgcgccaccgccgaggcca

SEQ ID NO: 3681812 - DNA, 25 bp, Homo sapien
cgccaccgccgaggccacgcacggc

SEQ ID NO: 3681813 - DNA, 25 bp, Homo sapien
ccgccgaggccacgcacggcgccat

SEQ ID NO: 3681814 - DNA, 25 bp, Homo sapien
cctgcgccaccgccgaggccacgca

SEQ ID NO: 3681815 - DNA, 25 bp, Homo sapien
gccccaagagccagcgataggcgct

SEQ ID NO: 3681816 - DNA, 25 bp, Homo sapien
ctgcgccccaagagccagcgatagg

SEQ ID NO: 3681817 - DNA, 25 bp, Homo sapien
caagagccagcgataggcgctgaag

SEQ ID NO: 3681818 - DNA, 25 bp, Homo sapien
ccaagagccagcgataggcgctgaa

SEQ ID NO: 3681819 - DNA, 25 bp, Homo sapien
ctgcaagggagctcgacgcagccgc

SEQ ID NO: 3681820 - DNA, 25 bp, Homo sapien
agctcgacgcagccgcggagactgc

SEQ ID NO: 3681821 - DNA, 25 bp, Homo sapien
ggagctcgacgcagccgcggagact

SEQ ID NO: 3681822 - DNA, 25 bp, Homo sapien
aagggagctcgacgcagccgcggag

SEQ ID NO: 3681823 - DNA, 25 bp, Homo sapien
ttgaggggtccttccattacttcca

SEQ ID NO: 3681824 - DNA, 25 bp, Homo sapien
tgaggggtccttccattacttccat

SEQ ID NO: 3681825 - DNA, 25 bp, Homo sapien
caggttgaggggtccttccattact

SEQ ID NO: 3681826 - DNA, 25 bp, Homo sapien
aaagactctgtcgaaactcgctccg

SEQ ID NO: 3681827 - DNA, 25 bp, Homo sapien
taagaattcaaggtgtccgccgggc

SEQ ID NO: 3681828 - DNA, 25 bp, Homo sapien
tgaaatacggagttacgctagcctg

SEQ ID NO: 3681829 - DNA, 25 bp, Homo sapien
tcctgaactggtagtgattctgcag

SEQ ID NO: 3681830 - DNA, 25 bp, Homo sapien
tagccaggtggaaatataggtctgc

SEQ ID NO: 3681831 - DNA, 25 bp, Homo sapien
cagaaaggaggagtgaagcagacaa

SEQ ID NO: 3681832 - DNA, 25 bp, Homo sapien
tcagaggctagccaggtggaaatat

SEQ ID NO: 3681833 - DNA, 25 bp, Homo sapien
gaaatataggtctgcagaaaggagg

SEQ ID NO: 3681834 - DNA, 25 bp, Homo sapien
atagcctcttcgtatttgcctgcag

SEQ ID NO: 3681835 - DNA, 25 bp, Homo sapien
gaaatagcctcttcgtatttgcctg

SEQ ID NO: 3681836 - DNA, 25 bp, Homo sapien
ctaataaacggtctgctcgtctgct

SEQ ID NO: 3681837 - DNA, 25 bp, Homo sapien
tatttgcctgcagctaataaacggt

SEQ ID NO: 3681838 - DNA, 25 bp, Homo sapien
ccaagctttagccaactgaaatgcc

SEQ ID NO: 3681839 - DNA, 25 bp, Homo sapien
taactgctctgctaccgctctgata

SEQ ID NO: 3681840 - DNA, 25 bp, Homo sapien
aaatctgtggagacattctaactgc

SEQ ID NO: 3681841 - DNA, 25 bp, Homo sapien
tgaaatgccaccctttgtagaacct

SEQ ID NO: 3681842 - DNA, 25 bp, Homo sapien
aaatctgtgaagacggccgggtgtg

SEQ ID NO: 3681843 - DNA, 25 bp, Homo sapien
ttaaatctgtgaagacggccgggtg

SEQ ID NO: 3681844 - DNA, 25 bp, Homo sapien
atctgtgaagacggccgggtgtggt

SEQ ID NO: 3681845 - DNA, 25 bp, Homo sapien
taaatctgtgaagacggccgggtgt

SEQ ID NO: 3681846 - DNA, 25 bp, Homo sapien
ctgctctgactgtgtcagcttcatg

SEQ ID NO: 3681847 - DNA, 25 bp, Homo sapien
gactgtgtcagcttcatggcttcag

SEQ ID NO: 3681848 - DNA, 25 bp, Homo sapien
ctgactgtgtcagcttcatggcttc

SEQ ID NO: 3681849 - DNA, 25 bp, Homo sapien
agcttcatggcttcagaaagatatg

SEQ ID NO: 3681850 - DNA, 25 bp, Homo sapien
tcaatctttcttcacgctgggccct

SEQ ID NO: 3681851 - DNA, 25 bp, Homo sapien
gaggagctgtttcatatggctatcc

SEQ ID NO: 3681852 - DNA, 25 bp, Homo sapien
ctttgcaattccagtgaaagatgag

SEQ ID NO: 3681853 - DNA, 25 bp, Homo sapien
ctgctgggctttcaatctttcttca

SEQ ID NO: 3681854 - DNA, 25 bp, Homo sapien
agatgtctgaagatgggcagctgca

SEQ ID NO: 3681855 - DNA, 25 bp, Homo sapien
gaatctcaggcaggcatttctctgt

SEQ ID NO: 3681856 - DNA, 25 bp, Homo sapien
tggatccctgtcaaagatcccctga

SEQ ID NO: 3681857 - DNA, 25 bp, Homo sapien
ttctctgtggaagggctgtacttct

SEQ ID NO: 3681858 - DNA, 25 bp, Homo sapien
cagagagctccataagaggaagttc

SEQ ID NO: 3681859 - DNA, 25 bp, Homo sapien
gctttcccagtatttgctgcgaact

SEQ ID NO: 3681860 - DNA, 25 bp, Homo sapien
ccagtatttgctgcgaacttctgcc

SEQ ID NO: 3681861 - DNA, 25 bp, Homo sapien
gctggctcactcttttgctgaagta

SEQ ID NO: 3681862 - DNA, 25 bp, Homo sapien
gagtttagcgtctgccaagtcggaa

SEQ ID NO: 3681863 - DNA, 25 bp, Homo sapien
tgagtgaatgagatacgcagcgcat

SEQ ID NO: 3681864 - DNA, 25 bp, Homo sapien
tttgtatcaggagaaaccgaacctc

SEQ ID NO: 3681865 - DNA, 25 bp, Homo sapien
catctagaagggtgtgtatcttaca

SEQ ID NO: 3681866 - DNA, 25 bp, Homo sapien
aatactgccaactagcattacgtcc

SEQ ID NO: 3681867 - DNA, 25 bp, Homo sapien
tactgccaactagcattacgtccac

SEQ ID NO: 3681868 - DNA, 25 bp, Homo sapien
gccaactagcattacgtccactctt

SEQ ID NO: 3681869 - DNA, 25 bp, Homo sapien
tgccaactagcattacgtccactct

SEQ ID NO: 3681870 - DNA, 25 bp, Homo sapien
catccagcttggtagagagaatcca

SEQ ID NO: 3681871 - DNA, 25 bp, Homo sapien
aaacatgcccagtagcttgcaccca

SEQ ID NO: 3681872 - DNA, 25 bp, Homo sapien
tctggagtaaccacaactacaggcg

SEQ ID NO: 3681873 - DNA, 25 bp, Homo sapien
cactggatttgtgagcctaacccaa

SEQ ID NO: 3681874 - DNA, 25 bp, Homo sapien
caagtaaaatgtcgagtctaggata

SEQ ID NO: 3681875 - DNA, 25 bp, Homo sapien
gttttatgagcaaggttaggcaagt

SEQ ID NO: 3681876 - DNA, 25 bp, Homo sapien
catgactatttttggcacaagcttt

SEQ ID NO: 3681877 - DNA, 25 bp, Homo sapien
actgagatatttagcagaacagaaa

SEQ ID NO: 3681878 - DNA, 25 bp, Homo sapien
taacacggacgctctcaggatcctg

SEQ ID NO: 3681879 - DNA, 25 bp, Homo sapien
gactctacctacctggaggttatgg

SEQ ID NO: 3681880 - DNA, 25 bp, Homo sapien
gaccaaccagttgcaaatcagaggt

SEQ ID NO: 3681881 - DNA, 25 bp, Homo sapien
caagactacccttaattcagaccca

SEQ ID NO: 3681882 - DNA, 25 bp, Homo sapien
tatcatcacagaaccatggacaagc

SEQ ID NO: 3681883 - DNA, 25 bp, Homo sapien
gagcctatttatcgttgccagcctt

SEQ ID NO: 3681884 - DNA, 25 bp, Homo sapien
tgtaatttacccacccagaggcgat

SEQ ID NO: 3681885 - DNA, 25 bp, Homo sapien
taaggatgaaaactggtctatgacc

SEQ ID NO: 3681886 - DNA, 25 bp, Homo sapien
aggccagcctatacaaccttttagg

SEQ ID NO: 3681887 - DNA, 25 bp, Homo sapien
ttagggcatagcactttaaaacttc

SEQ ID NO: 3681888 - DNA, 25 bp, Homo sapien
aagtcccacaaatacaaaccacagg

SEQ ID NO: 3681889 - DNA, 25 bp, Homo sapien
tcactacactatgaaaagtcccaca

SEQ ID NO: 3681890 - DNA, 25 bp, Homo sapien
ttcactacattgagacagttactgt

SEQ ID NO: 3681891 - DNA, 25 bp, Homo sapien
tgttgatcaagtgtaaatgtgacct

SEQ ID NO: 3681892 - DNA, 25 bp, Homo sapien
tgagaataggacacaaacaccagct

SEQ ID NO: 3681893 - DNA, 25 bp, Homo sapien
gaatcgcacagcagtcatgtcataa

SEQ ID NO: 3681894 - DNA, 25 bp, Homo sapien
tatagcatatgtcacagctcctgtg

SEQ ID NO: 3681895 - DNA, 25 bp, Homo sapien
gatgatatgtatgcacactgacttt

SEQ ID NO: 3681896 - DNA, 25 bp, Homo sapien
tgaactgggattacttaaccttgaa

SEQ ID NO: 3681897 - DNA, 25 bp, Homo sapien
gaagatacacgaggatgaagtagag

SEQ ID NO: 3681898 - DNA, 25 bp, Homo sapien
taatatctggttatcagcctctcca

SEQ ID NO: 3681899 - DNA, 25 bp, Homo sapien
gatacatgtataacagcttaggcag

SEQ ID NO: 3681900 - DNA, 25 bp, Homo sapien
gcagtcattgcctagttggtcacat

SEQ ID NO: 3681901 - DNA, 25 bp, Homo sapien
tagggtgacaaccaaagattaacac

SEQ ID NO: 3681902 - DNA, 25 bp, Homo sapien
tcttggtgaggtctagtttaaagct

SEQ ID NO: 3681903 - DNA, 25 bp, Homo sapien
tgcttggaatcgtttttctgtcagg

SEQ ID NO: 3681904 - DNA, 25 bp, Homo sapien
gtctcactgccttcatctcgtatgg

SEQ ID NO: 3681905 - DNA, 25 bp, Homo sapien
tcaggtatctgtaagacttgcttct

SEQ ID NO: 3681906 - DNA, 25 bp, Homo sapien
tgcaatgcacagagtaatccctccc

SEQ ID NO: 3681907 - DNA, 25 bp, Homo sapien
caacatctgataggtagaggctaca

SEQ ID NO: 3681908 - DNA, 25 bp, Homo sapien
ctgagggagttaaggatatgttgcc

SEQ ID NO: 3681909 - DNA, 25 bp, Homo sapien
gaaaccctgcttagatgtacggcat

SEQ ID NO: 3681910 - DNA, 25 bp, Homo sapien
caagatatggatgtagaacgctcag

SEQ ID NO: 3681911 - DNA, 25 bp, Homo sapien
tacggtgataaacagagtaatgccc

SEQ ID NO: 3681912 - DNA, 25 bp, Homo sapien
cagtgcctcagagtttaccccaaag

SEQ ID NO: 3681913 - DNA, 25 bp, Homo sapien
tacaaagaggaacaccgtcgaattc

SEQ ID NO: 3681914 - DNA, 25 bp, Homo sapien
cattgtttgcagtagagggttgccc

SEQ ID NO: 3681915 - DNA, 25 bp, Homo sapien
tcttcgtatctggtaaaagtggcct

SEQ ID NO: 3681916 - DNA, 25 bp, Homo sapien
aacgtgtgaccttcaaaccagtggg

SEQ ID NO: 3681917 - DNA, 25 bp, Homo sapien
tgtcaagagagaatcccaaagctgt

SEQ ID NO: 3681918 - DNA, 25 bp, Homo sapien
tgcagtgcatctttactgtcttgta

SEQ ID NO: 3681919 - DNA, 25 bp, Homo sapien
tgaacccccctataaattcctctga

SEQ ID NO: 3681920 - DNA, 25 bp, Homo sapien
tttaacaccaatctcgacagctctc

SEQ ID NO: 3681921 - DNA, 25 bp, Homo sapien
cttgatgcttttgaacccccctata

SEQ ID NO: 3681922 - DNA, 25 bp, Homo sapien
aagtgcagtcagtcaaaatcaagtc

SEQ ID NO: 3681923 - DNA, 25 bp, Homo sapien
aaaagtgcagtcagtcaaaatcaag

SEQ ID NO: 3681924 - DNA, 25 bp, Homo sapien
tgcagtcagtcaaaatcaagtccac

SEQ ID NO: 3681925 - DNA, 25 bp, Homo sapien
acaaaagtgcagtcagtcaaaatca

SEQ ID NO: 3681926 - DNA, 25 bp, Homo sapien
cagcatgtgagtttcgacaatgaag

SEQ ID NO: 3681927 - DNA, 25 bp, Homo sapien
tgtgagtttcgacaatgaagaaaca

SEQ ID NO: 3681928 - DNA, 25 bp, Homo sapien
tcagcatgtgagtttcgacaatgaa

SEQ ID NO: 3681929 - DNA, 25 bp, Homo sapien
gcatgtgagtttcgacaatgaagaa

SEQ ID NO: 3681930 - DNA, 25 bp, Homo sapien
aatcctatataaagatccaagtcaa

SEQ ID NO: 3681931 - DNA, 25 bp, Homo sapien
aagatccaagtcaatcaaagcagct

SEQ ID NO: 3681932 - DNA, 25 bp, Homo sapien
tataaagatccaagtcaatcaaagc

SEQ ID NO: 3681933 - DNA, 25 bp, Homo sapien
tcctatataaagatccaagtcaatc

SEQ ID NO: 3681934 - DNA, 25 bp, Homo sapien
atatattttgatccagcatgtgtac

SEQ ID NO: 3681935 - DNA, 25 bp, Homo sapien
ttatatattttgatccagcatgtgt

SEQ ID NO: 3681936 - DNA, 25 bp, Homo sapien
tatattttgatccagcatgtgtact

SEQ ID NO: 3681937 - DNA, 25 bp, Homo sapien
tattttgatccagcatgtgtacttt

SEQ ID NO: 3681938 - DNA, 25 bp, Homo sapien
ctttaatagtattgttatatagtgt

SEQ ID NO: 3681939 - DNA, 25 bp, Homo sapien
tttctgtcttttaagcagtgcccac

SEQ ID NO: 3681940 - DNA, 25 bp, Homo sapien
tcttttaagcagtgcccactttccc

SEQ ID NO: 3681941 - DNA, 25 bp, Homo sapien
ttaagcagtgcccactttcccactt

SEQ ID NO: 3681942 - DNA, 25 bp, Homo sapien
tctgggctcagcgtttcacctgcct

SEQ ID NO: 3681943 - DNA, 25 bp, Homo sapien
aactctgggctcagcgtttcacctg

SEQ ID NO: 3681944 - DNA, 25 bp, Homo sapien
caaactctgggctcagcgtttcacc

SEQ ID NO: 3681945 - DNA, 25 bp, Homo sapien
ttaagaggaggtttctctctgttga

SEQ ID NO: 3681946 - DNA, 25 bp, Homo sapien
gatatgtttctgtataccacatctg

SEQ ID NO: 3681947 - DNA, 25 bp, Homo sapien
tcaatgtcgtactaatagaatagca

SEQ ID NO: 3681948 - DNA, 25 bp, Homo sapien
tgtatgccctctagctaagttaaat

SEQ ID NO: 3681949 - DNA, 25 bp, Homo sapien
taatacctggtacaatcaatgtcgt

SEQ ID NO: 3681950 - DNA, 25 bp, Homo sapien
agggttttatcatgctggtcagtct

SEQ ID NO: 3681951 - DNA, 25 bp, Homo sapien
acagggttttatcatgctggtcagt

SEQ ID NO: 3681952 - DNA, 25 bp, Homo sapien
ttttatcatgctggtcagtctggtc

SEQ ID NO: 3681953 - DNA, 25 bp, Homo sapien
ggttttatcatgctggtcagtctgg

SEQ ID NO: 3681954 - DNA, 25 bp, Homo sapien
aatacacaatagattgttgtgctgt

SEQ ID NO: 3681955 - DNA, 25 bp, Homo sapien
ctcccccaaccctaacaggtctctg

SEQ ID NO: 3681956 - DNA, 25 bp, Homo sapien
tgtttctctcatcgcacatccatat

SEQ ID NO: 3681957 - DNA, 25 bp, Homo sapien
cacatccatatcgtttttcaaggtc

SEQ ID NO: 3681958 - DNA, 25 bp, Homo sapien
gatgagtttctaactgtttctctca

SEQ ID NO: 3681959 - DNA, 25 bp, Homo sapien
ctccaaaggatgagtttctaactgt

SEQ ID NO: 3681960 - DNA, 25 bp, Homo sapien
tgaagtctatatagatgtgctcttg

SEQ ID NO: 3681961 - DNA, 25 bp, Homo sapien
tgagcagttatttgttgtgcatgga

SEQ ID NO: 3681962 - DNA, 25 bp, Homo sapien
ccccagtcagttagagggagttaga

SEQ ID NO: 3681963 - DNA, 25 bp, Homo sapien
gcaaatcccaatttaatagtggagg

SEQ ID NO: 3681964 - DNA, 25 bp, Homo sapien
tgggttcaagcaatgctcctgcctc

SEQ ID NO: 3681965 - DNA, 25 bp, Homo sapien
ttcactgcaacttccgcctcctggg

SEQ ID NO: 3681966 - DNA, 25 bp, Homo sapien
aatgcagtggcacgttcttggttca

SEQ ID NO: 3681967 - DNA, 25 bp, Homo sapien
agcctccagagcagctgggatgaca

SEQ ID NO: 3681968 - DNA, 25 bp, Homo sapien
ttctgtgtattctggggaggcagca

SEQ ID NO: 3681969 - DNA, 25 bp, Homo sapien
tctgtgtattctggggaggcagcat

SEQ ID NO: 3681970 - DNA, 25 bp, Homo sapien
aagtgacataattcaaagacctgat

SEQ ID NO: 3681971 - DNA, 25 bp, Homo sapien
ttgttggaaataagtataggatcat

SEQ ID NO: 3681972 - DNA, 25 bp, Homo sapien
gttggaaataagtataggatcatca

SEQ ID NO: 3681973 - DNA, 25 bp, Homo sapien
agtgacataattcaaagacctgatc

SEQ ID NO: 3681974 - DNA, 25 bp, Homo sapien
taatactggtccttataaacatgtt

SEQ ID NO: 3681975 - DNA, 25 bp, Homo sapien
tgtttcatatggcagtaaagctacc

SEQ ID NO: 3681976 - DNA, 25 bp, Homo sapien
tgttatctcaataatacatcgggtg

SEQ ID NO: 3681977 - DNA, 25 bp, Homo sapien
gagggatatgattgaccagacttaa

SEQ ID NO: 3681978 - DNA, 25 bp, Homo sapien
ttattagtgacaggtttacaccgtg

SEQ ID NO: 3681979 - DNA, 25 bp, Homo sapien
ttttctctgtattgagaccttctat

SEQ ID NO: 3681980 - DNA, 25 bp, Homo sapien
tgaagcacagaaatggccttgggtt

SEQ ID NO: 3681981 - DNA, 25 bp, Homo sapien
ggtttggatatgatgatgaagcaca

SEQ ID NO: 3681982 - DNA, 25 bp, Homo sapien
caggaactttcttggagcaagggcc

SEQ ID NO: 3681983 - DNA, 25 bp, Homo sapien
ggagttttgttaacacactgctttg

SEQ ID NO: 3681984 - DNA, 25 bp, Homo sapien
tatctcctccacagaatcttagttg

SEQ ID NO: 3681985 - DNA, 25 bp, Homo sapien
tataaatctgatctccgtctgcagg

SEQ ID NO: 3681986 - DNA, 25 bp, Homo sapien
aatgagtgggcaggttactgggccc

SEQ ID NO: 3681987 - DNA, 25 bp, Homo sapien
tgcaggtcgattcttgggcttccag

SEQ ID NO: 3681988 - DNA, 25 bp, Homo sapien
taggcgtggcatagttgatgtcagt

SEQ ID NO: 3681989 - DNA, 25 bp, Homo sapien
tgtcagtagcagtggcaagacaacc

SEQ ID NO: 3681990 - DNA, 25 bp, Homo sapien
attttcttttttcggccaggcgcag

SEQ ID NO: 3681991 - DNA, 25 bp, Homo sapien
tggctcacgcctgtaatcccagcac

SEQ ID NO: 3681992 - DNA, 25 bp, Homo sapien
acaaggtcaggagatcaagaccatc

SEQ ID NO: 3681993 - DNA, 25 bp, Homo sapien
tttgggaggctgagacaggcagatc

SEQ ID NO: 3681994 - DNA, 25 bp, Homo sapien
agcttttcgactgggcgggctgtcc

SEQ ID NO: 3681995 - DNA, 25 bp, Homo sapien
cagggtcagttgtacatagctcttc

SEQ ID NO: 3681996 - DNA, 25 bp, Homo sapien
cattgttaagacttccggtcaacag

SEQ ID NO: 3681997 - DNA, 25 bp, Homo sapien
attacattcagcttttcgactgggc

SEQ ID NO: 3681998 - DNA, 25 bp, Homo sapien
gaactttacccacacagagacgtga

SEQ ID NO: 3681999 - DNA, 25 bp, Homo sapien
gaacaatgtgggtttgaactttgag

SEQ ID NO: 3682000 - DNA, 25 bp, Homo sapien
gagacgtgacatggcactatttaca

SEQ ID NO: 3682001 - DNA, 25 bp, Homo sapien
aactcatagatgaaccatgtagcct

SEQ ID NO: 3682002 - DNA, 25 bp, Homo sapien
cagcacagcatgatcagccaaaaag

SEQ ID NO: 3682003 - DNA, 25 bp, Homo sapien
cccttgttacttgacaggcctttca

SEQ ID NO: 3682004 - DNA, 25 bp, Homo sapien
gcatgatcagccaaaaagacagttt

SEQ ID NO: 3682005 - DNA, 25 bp, Homo sapien
gatgtttgagaaattgccagcacag

SEQ ID NO: 3682006 - DNA, 25 bp, Homo sapien
tactgatgccagaaggcggtgaaca

SEQ ID NO: 3682007 - DNA, 25 bp, Homo sapien
tttagaaggggccttgcatttcatc

SEQ ID NO: 3682008 - DNA, 25 bp, Homo sapien
cagagggggctaagccaaactgtct

SEQ ID NO: 3682009 - DNA, 25 bp, Homo sapien
gggctaagccaaactgtctgggatg

SEQ ID NO: 3682010 - DNA, 25 bp, Homo sapien
atccgttagcagtcacttgtgttcc

SEQ ID NO: 3682011 - DNA, 25 bp, Homo sapien
cgttagcagtcacttgtgttcctct

SEQ ID NO: 3682012 - DNA, 25 bp, Homo sapien
tatccgttagcagtcacttgtgttc

SEQ ID NO: 3682013 - DNA, 25 bp, Homo sapien
tccgttagcagtcacttgtgttcct

SEQ ID NO: 3682014 - DNA, 25 bp, Homo sapien
ggagttcgtcttcatcgaacgaaac

SEQ ID NO: 3682015 - DNA, 25 bp, Homo sapien
tgtcatctaatgtaggtgttaagcc

SEQ ID NO: 3682016 - DNA, 25 bp, Homo sapien
tcctcctttcacagaccagtagata

SEQ ID NO: 3682017 - DNA, 25 bp, Homo sapien
cagagtcagtggatcacgtctatac

SEQ ID NO: 3682018 - DNA, 25 bp, Homo sapien
gcacataaactacttcctgggtggg

SEQ ID NO: 3682019 - DNA, 25 bp, Homo sapien
tagggatagtcccaaaggcagtgcc

SEQ ID NO: 3682020 - DNA, 25 bp, Homo sapien
gaacacccgggctagttagctgagt

SEQ ID NO: 3682021 - DNA, 25 bp, Homo sapien
tctggacccaaccactgggctgagc

SEQ ID NO: 3682022 - DNA, 25 bp, Homo sapien
tgtcacaaagataggaaattcctgg

SEQ ID NO: 3682023 - DNA, 25 bp, Homo sapien
gacttgaacctgctctagaaaggct

SEQ ID NO: 3682024 - DNA, 25 bp, Homo sapien
ggtattatacagattgtccccagtt

SEQ ID NO: 3682025 - DNA, 25 bp, Homo sapien
aggaaactgcagtgatcaaggttgc

SEQ ID NO: 3682026 - DNA, 25 bp, Homo sapien
tgacaaagaaagatttagggattac

SEQ ID NO: 3682027 - DNA, 25 bp, Homo sapien
aaattgttaatgttgaaacattgtc

SEQ ID NO: 3682028 - DNA, 25 bp, Homo sapien
ccagcttcacacttttattagatat

SEQ ID NO: 3682029 - DNA, 25 bp, Homo sapien
ggcataattacaggtcatggcagtc

SEQ ID NO: 3682030 - DNA, 25 bp, Homo sapien
gcagacgtaccttgcaggcttccct

SEQ ID NO: 3682031 - DNA, 25 bp, Homo sapien
tctgctgaacccttggcgcgtttgc

SEQ ID NO: 3682032 - DNA, 25 bp, Homo sapien
gccgcaatccggacctggcggtaag

SEQ ID NO: 3682033 - DNA, 25 bp, Homo sapien
tcggagcaggactcccgggatagcc

SEQ ID NO: 3682034 - DNA, 25 bp, Homo sapien
gacgcggctggcgaagctggcgagc

SEQ ID NO: 3682035 - DNA, 25 bp, Homo sapien
gcggctggcgaagctggcgagcggg

SEQ ID NO: 3682036 - DNA, 25 bp, Homo sapien
gagcggacgcggctggcgaagctgg

SEQ ID NO: 3682037 - DNA, 25 bp, Homo sapien
ctgggagagcggacgcggctggcga

SEQ ID NO: 3682038 - DNA, 25 bp, Homo sapien
cagcgacagctatggcggtagagac

SEQ ID NO: 3682039 - DNA, 25 bp, Homo sapien
tcatcggttccctcgcactggagga

SEQ ID NO: 3682040 - DNA, 25 bp, Homo sapien
aaggctgcgaatctgggagtccaaa

SEQ ID NO: 3682041 - DNA, 25 bp, Homo sapien
tcctcagcatgagcggccggtagga

SEQ ID NO: 3682042 - DNA, 25 bp, Homo sapien
ctaattcaggctaactcaggcggcg

SEQ ID NO: 3682043 - DNA, 25 bp, Homo sapien
gctctgaacatcaaaccgcgggtga

SEQ ID NO: 3682044 - DNA, 25 bp, Homo sapien
gctgctgttactgcgggactgctaa

SEQ ID NO: 3682045 - DNA, 25 bp, Homo sapien
cctctgagggagcaacgaatacaaa

SEQ ID NO: 3682046 - DNA, 25 bp, Homo sapien
gttggattacatgcttttcagagga

SEQ ID NO: 3682047 - DNA, 25 bp, Homo sapien
tatatgccctcctgaaaaactttgt

SEQ ID NO: 3682048 - DNA, 25 bp, Homo sapien
aaactctaggcattggctgtagtca

SEQ ID NO: 3682049 - DNA, 25 bp, Homo sapien
tcaacatgtagtgggagttcccagg

SEQ ID NO: 3682050 - DNA, 25 bp, Homo sapien
tcattcttcaggctttgtcacgtct

SEQ ID NO: 3682051 - DNA, 25 bp, Homo sapien
ggctttgtcacgtctatcacttatt

SEQ ID NO: 3682052 - DNA, 25 bp, Homo sapien
tacaattgcttgaagccctttactt

SEQ ID NO: 3682053 - DNA, 25 bp, Homo sapien
tgactacttccctgaccccaatcct

SEQ ID NO: 3682054 - DNA, 25 bp, Homo sapien
cagttactcctcttgcttgcagtac

SEQ ID NO: 3682055 - DNA, 25 bp, Homo sapien
cgtcctttagttacagtttcagctc

SEQ ID NO: 3682056 - DNA, 25 bp, Homo sapien
gccagtactcggtgaaagagtggaa

SEQ ID NO: 3682057 - DNA, 25 bp, Homo sapien
catccaacagttactcctcttgctt

SEQ ID NO: 3682058 - DNA, 25 bp, Homo sapien
agataaagacagcattttatggttt

SEQ ID NO: 3682059 - DNA, 25 bp, Homo sapien
acgatgtgacaaccagccagccatt

SEQ ID NO: 3682060 - DNA, 25 bp, Homo sapien
atttagtctaagataaagacagcat

SEQ ID NO: 3682061 - DNA, 25 bp, Homo sapien
cacgatggaattattcagtaaacga

SEQ ID NO: 3682062 - DNA, 25 bp, Homo sapien
gctcagtgcttttgcccagatttcg

SEQ ID NO: 3682063 - DNA, 25 bp, Homo sapien
tctcttctttcagccaacctgtatt

SEQ ID NO: 3682064 - DNA, 25 bp, Homo sapien
tttcatgctcagtgcttttgcccag

SEQ ID NO: 3682065 - DNA, 25 bp, Homo sapien
agtgcttttgcccagatttcgtttt

SEQ ID NO: 3682066 - DNA, 25 bp, Homo sapien
agccgggcccggtgtgtgcgcgcgg

SEQ ID NO: 3682067 - DNA, 25 bp, Homo sapien
cgcgctggcgccctcaggagccggg

SEQ ID NO: 3682068 - DNA, 25 bp, Homo sapien
gaccaggccgccaacggcaggccgc

SEQ ID NO: 3682069 - DNA, 25 bp, Homo sapien
ggccgcgcgcttcgccggctcctcg

SEQ ID NO: 3682070 - DNA, 25 bp, Homo sapien
gctctggagatcatccaggacacca

SEQ ID NO: 3682071 - DNA, 25 bp, Homo sapien
accacggctctggagatcatccagg

SEQ ID NO: 3682072 - DNA, 25 bp, Homo sapien
acggctctggagatcatccaggaca

SEQ ID NO: 3682073 - DNA, 25 bp, Homo sapien
ccacggctctggagatcatccagga

SEQ ID NO: 3682074 - DNA, 25 bp, Homo sapien
ggtgtcacctttctcggtaagctgc

SEQ ID NO: 3682075 - DNA, 25 bp, Homo sapien
aatatttccgccgagacagggccga

SEQ ID NO: 3682076 - DNA, 25 bp, Homo sapien
ggatacaaaggctcggcactgccgt

SEQ ID NO: 3682077 - DNA, 25 bp, Homo sapien
gaatggcaatcagccgccaagagag

SEQ ID NO: 3682078 - DNA, 25 bp, Homo sapien
cctgaattagataaatgacagactc

SEQ ID NO: 3682079 - DNA, 25 bp, Homo sapien
actttgcgatttaatcaaatgaaaa

SEQ ID NO: 3682080 - DNA, 25 bp, Homo sapien
cagttgatagacatctactaggtca

SEQ ID NO: 3682081 - DNA, 25 bp, Homo sapien
tctactaggtcaagaaaggtatgcc

SEQ ID NO: 3682082 - DNA, 25 bp, Homo sapien
tccgattctggctacattgtgataa

SEQ ID NO: 3682083 - DNA, 25 bp, Homo sapien
ctggcctgatcaaacagaagatact

SEQ ID NO: 3682084 - DNA, 25 bp, Homo sapien
tcaagtaaccaagagataaatgggc

SEQ ID NO: 3682085 - DNA, 25 bp, Homo sapien
gaaagtactcacacattgctgctag

SEQ ID NO: 3682086 - DNA, 25 bp, Homo sapien
caccaggttgcctggattggtctgg

SEQ ID NO: 3682087 - DNA, 25 bp, Homo sapien
ccggcttggactattcttctgagga

SEQ ID NO: 3682088 - DNA, 25 bp, Homo sapien
tgaggtaatctatacgcatcagcct

SEQ ID NO: 3682089 - DNA, 25 bp, Homo sapien
actcctgagctgaggtaatctatac

SEQ ID NO: 3682090 - DNA, 25 bp, Homo sapien
ttttacttagcaaggaaagatcagg

SEQ ID NO: 3682091 - DNA, 25 bp, Homo sapien
ttttagaatatctctacacagaact

SEQ ID NO: 3682092 - DNA, 25 bp, Homo sapien
gaattatttcatcataataagcata

SEQ ID NO: 3682093 - DNA, 25 bp, Homo sapien
acatctagaaattcttaagaattat

SEQ ID NO: 3682094 - DNA, 25 bp, Homo sapien
agaaattggacattcttctttggat

SEQ ID NO: 3682095 - DNA, 25 bp, Homo sapien
ctccagaacctcaaaaatcccttgg

SEQ ID NO: 3682096 - DNA, 25 bp, Homo sapien
aagaaattggacattcttctttgga

SEQ ID NO: 3682097 - DNA, 25 bp, Homo sapien
gaaattggacattcttctttggatt

SEQ ID NO: 3682098 - DNA, 25 bp, Homo sapien
tgtaaagtaagtgaacaataacaga

SEQ ID NO: 3682099 - DNA, 25 bp, Homo sapien
taaagtaagtgaacaataacagaag

SEQ ID NO: 3682100 - DNA, 25 bp, Homo sapien
gagccacactgcctgtttactgtct

SEQ ID NO: 3682101 - DNA, 25 bp, Homo sapien
ttgtaaagtaagtgaacaataacag

SEQ ID NO: 3682102 - DNA, 25 bp, Homo sapien
tagctagaacaatctcgctcttcat

SEQ ID NO: 3682103 - DNA, 25 bp, Homo sapien
tccctgtagctagaacaatctcgct

SEQ ID NO: 3682104 - DNA, 25 bp, Homo sapien
cctgtagctagaacaatctcgctct

SEQ ID NO: 3682105 - DNA, 25 bp, Homo sapien
ccactccctgtagctagaacaatct

SEQ ID NO: 3682106 - DNA, 25 bp, Homo sapien
ttctcatacaatctagtatcatcag

SEQ ID NO: 3682107 - DNA, 25 bp, Homo sapien
cccttggtgagagtacatgcatcca

SEQ ID NO: 3682108 - DNA, 25 bp, Homo sapien
tagaacttggatacaatcaaagtat

SEQ ID NO: 3682109 - DNA, 25 bp, Homo sapien
tacattcaatgtgggattcttcact

SEQ ID NO: 3682110 - DNA, 25 bp, Homo sapien
tttgatgagtatacgataactttgt

SEQ ID NO: 3682111 - DNA, 25 bp, Homo sapien
tgatgagtatacgataactttgtct

SEQ ID NO: 3682112 - DNA, 25 bp, Homo sapien
gatgagtatacgataactttgtcta

SEQ ID NO: 3682113 - DNA, 25 bp, Homo sapien
cttttgatgagtatacgataacttt

SEQ ID NO: 3682114 - DNA, 25 bp, Homo sapien
tatgcaggataaagcattccaaaca

SEQ ID NO: 3682115 - DNA, 25 bp, Homo sapien
cacagctttgtatgaataatatgca

SEQ ID NO: 3682116 - DNA, 25 bp, Homo sapien
atatgcaggataaagcattccaaac

SEQ ID NO: 3682117 - DNA, 25 bp, Homo sapien
tttcacagctttgtatgaataatat

SEQ ID NO: 3682118 - DNA, 25 bp, Homo sapien
tatcccgggcttcttgaatgctttc

SEQ ID NO: 3682119 - DNA, 25 bp, Homo sapien
tgttgagagacataataccctgtac

SEQ ID NO: 3682120 - DNA, 25 bp, Homo sapien
ttattaagcactggccagaagcaga

SEQ ID NO: 3682121 - DNA, 25 bp, Homo sapien
tctatggaattgtacaaggctgtaa

SEQ ID NO: 3682122 - DNA, 25 bp, Homo sapien
gctgcctgattgtccttcttggaaa

SEQ ID NO: 3682123 - DNA, 25 bp, Homo sapien
tgatttcaatgctggtgggtcccgc

SEQ ID NO: 3682124 - DNA, 25 bp, Homo sapien
ccctggtaagctgcctgattgtcct

SEQ ID NO: 3682125 - DNA, 25 bp, Homo sapien
atctatatggccgtggcccccgaac

SEQ ID NO: 3682126 - DNA, 25 bp, Homo sapien
tctactttcagatgcggaactggca

SEQ ID NO: 3682127 - DNA, 25 bp, Homo sapien
gcttaggattgatgtgagctccctc

SEQ ID NO: 3682128 - DNA, 25 bp, Homo sapien
gaaatggatacctctgtcgcaacat

SEQ ID NO: 3682129 - DNA, 25 bp, Homo sapien
cccagtgcccttgaatcagagaagc

SEQ ID NO: 3682130 - DNA, 25 bp, Homo sapien
tgttgccctgctggtatcggactcc

SEQ ID NO: 3682131 - DNA, 25 bp, Homo sapien
tggtacaattacgatcatgactcac

SEQ ID NO: 3682132 - DNA, 25 bp, Homo sapien
gcaaacaacaatcctgggcttctta

SEQ ID NO: 3682133 - DNA, 25 bp, Homo sapien
gcagccataatgctagttacccagg

SEQ ID NO: 3682134 - DNA, 25 bp, Homo sapien
tgtttcaatcacagtatagagagca

SEQ ID NO: 3682135 - DNA, 25 bp, Homo sapien
tttgatcggctactgtttcaatcac

SEQ ID NO: 3682136 - DNA, 25 bp, Homo sapien
caactgtttgatcggctactgtttc

SEQ ID NO: 3682137 - DNA, 25 bp, Homo sapien
caagcaactgtttgatcggctactg

SEQ ID NO: 3682138 - DNA, 25 bp, Homo sapien
gagaaagcagccatatgacaaaagc

SEQ ID NO: 3682139 - DNA, 25 bp, Homo sapien
gaaagaagtggatgaaggaattttc

SEQ ID NO: 3682140 - DNA, 25 bp, Homo sapien
gacaaaagcaatcttcagctcatag

SEQ ID NO: 3682141 - DNA, 25 bp, Homo sapien
taaacttgctcctttggtataggga

SEQ ID NO: 3682142 - DNA, 25 bp, Homo sapien
cagcagtagctgcaaggtttaaacc

SEQ ID NO: 3682143 - DNA, 25 bp, Homo sapien
gcctcgttcctttgcttgtacaata

SEQ ID NO: 3682144 - DNA, 25 bp, Homo sapien
cttgccgtccaaagtttaccatggt

SEQ ID NO: 3682145 - DNA, 25 bp, Homo sapien
taccatggtttcatagcctcgttcc

SEQ ID NO: 3682146 - DNA, 25 bp, Homo sapien
gaagtagaggtgcagaagtaagcca

SEQ ID NO: 3682147 - DNA, 25 bp, Homo sapien
ctcaaattgattgaagtagaggtgc

SEQ ID NO: 3682148 - DNA, 25 bp, Homo sapien
gaggtgcagaagtaagccagaaatc

SEQ ID NO: 3682149 - DNA, 25 bp, Homo sapien
tcaaattgattgaagtagaggtgca

SEQ ID NO: 3682150 - DNA, 25 bp, Homo sapien
tattgggctcctactatatgcaagc

SEQ ID NO: 3682151 - DNA, 25 bp, Homo sapien
tgagtcaaagacctctctgaaaagt

SEQ ID NO: 3682152 - DNA, 25 bp, Homo sapien
tgaattttgaatggagatagacaca

SEQ ID NO: 3682153 - DNA, 25 bp, Homo sapien
tacatgaagcaactaaggaacacag

SEQ ID NO: 3682154 - DNA, 25 bp, Homo sapien
gactgttaatagttcttgagggtga

SEQ ID NO: 3682155 - DNA, 25 bp, Homo sapien
cacaattgagagcttgactgttaat

SEQ ID NO: 3682156 - DNA, 25 bp, Homo sapien
tctgcatgcctagaattaagaaatt

SEQ ID NO: 3682157 - DNA, 25 bp, Homo sapien
gataaccagtaggtaaatcttgtga

SEQ ID NO: 3682158 - DNA, 25 bp, Homo sapien
cattgccgccaatgtattttttcat

SEQ ID NO: 3682159 - DNA, 25 bp, Homo sapien
tcctctttacattgccgccaatgta

SEQ ID NO: 3682160 - DNA, 25 bp, Homo sapien
tttacattgccgccaatgtattttt

SEQ ID NO: 3682161 - DNA, 25 bp, Homo sapien
tacattgccgccaatgtattttttc

SEQ ID NO: 3682162 - DNA, 25 bp, Homo sapien
tagaatgctaaataccaatggaggc

SEQ ID NO: 3682163 - DNA, 25 bp, Homo sapien
gccctacgtgggagtagtaaacaca

SEQ ID NO: 3682164 - DNA, 25 bp, Homo sapien
caatggtgtctcacaaaataggaga

SEQ ID NO: 3682165 - DNA, 25 bp, Homo sapien
tacagacattagctccagacagaca

SEQ ID NO: 3682166 - DNA, 25 bp, Homo sapien
ttcagtgattcttctatgacaatgc

SEQ ID NO: 3682167 - DNA, 25 bp, Homo sapien
tcagtgattcttctatgacaatgcc

SEQ ID NO: 3682168 - DNA, 25 bp, Homo sapien
cggatttttgacctaatcgggatca

SEQ ID NO: 3682169 - DNA, 25 bp, Homo sapien
ctgtaaagctcaaaagtctgtggta

SEQ ID NO: 3682170 - DNA, 25 bp, Homo sapien
tacagtgaccttgcgaacagatgcc

SEQ ID NO: 3682171 - DNA, 25 bp, Homo sapien
tagtgttgctcatctgcacgaaacc

SEQ ID NO: 3682172 - DNA, 25 bp, Homo sapien
tgggtccagagctagcacactcagg

SEQ ID NO: 3682173 - DNA, 25 bp, Homo sapien
tgcctctgtaagaaactgagaatac

SEQ ID NO: 3682174 - DNA, 25 bp, Homo sapien
tctactcaagtatccaagcacgtgg

SEQ ID NO: 3682175 - DNA, 25 bp, Homo sapien
caagggcactaggacatctgaatgt

SEQ ID NO: 3682176 - DNA, 25 bp, Homo sapien
tactacgaggaagtgaccagtgttc

SEQ ID NO: 3682177 - DNA, 25 bp, Homo sapien
ttcacatgcgatttccaaggctggc

SEQ ID NO: 3682178 - DNA, 25 bp, Homo sapien
ttttaagacactagaggagagggac

SEQ ID NO: 3682179 - DNA, 25 bp, Homo sapien
caaatctcttgggatatacctcaca

SEQ ID NO: 3682180 - DNA, 25 bp, Homo sapien
ccataatgttgatgtctcctaaaac

SEQ ID NO: 3682181 - DNA, 25 bp, Homo sapien
acatcagtatatttcaacctcaaca

SEQ ID NO: 3682182 - DNA, 25 bp, Homo sapien
gggcttaccctcagagtaaacagca

SEQ ID NO: 3682183 - DNA, 25 bp, Homo sapien
tgtaaaagatgtatgatgggcttac

SEQ ID NO: 3682184 - DNA, 25 bp, Homo sapien
agttgttaaatcatgcatactgaag

SEQ ID NO: 3682185 - DNA, 25 bp, Homo sapien
aacgttcagttattgctccttggct

SEQ ID NO: 3682186 - DNA, 25 bp, Homo sapien
ttggtatggtctttgtcccacaggc

SEQ ID NO: 3682187 - DNA, 25 bp, Homo sapien
ggctcatcaccttggatagttgtta

SEQ ID NO: 3682188 - DNA, 25 bp, Homo sapien
ctaaacaagttgtcaaaaacagcat

SEQ ID NO: 3682189 - DNA, 25 bp, Homo sapien
tgcgatcttcgaagccctttgtgtg

SEQ ID NO: 3682190 - DNA, 25 bp, Homo sapien
tcatgctttgcgatcttcgaagccc

SEQ ID NO: 3682191 - DNA, 25 bp, Homo sapien
cagatttcatgctttgcgatcttcg

SEQ ID NO: 3682192 - DNA, 25 bp, Homo sapien
ttctcatctccgtctttcagtggaa

SEQ ID NO: 3682193 - DNA, 25 bp, Homo sapien
ttgtattttagtgacccgtaccgca

SEQ ID NO: 3682194 - DNA, 25 bp, Homo sapien
aaatacacttgtggtcgtttcttca

SEQ ID NO: 3682195 - DNA, 25 bp, Homo sapien
tgtattttagtgacccgtaccgcac

SEQ ID NO: 3682196 - DNA, 25 bp, Homo sapien
cacttgtggtcgtttcttcactttg

SEQ ID NO: 3682197 - DNA, 25 bp, Homo sapien
gtcgatgtatttagcataatctgtc

SEQ ID NO: 3682198 - DNA, 25 bp, Homo sapien
tttaatgtgtaaatcctgaatatat

SEQ ID NO: 3682199 - DNA, 25 bp, Homo sapien
cttgggatatttgacgtgtagatga

SEQ ID NO: 3682200 - DNA, 25 bp, Homo sapien
aatatatcatgttagaagatgaagt

SEQ ID NO: 3682201 - DNA, 25 bp, Homo sapien
tgttcttggccaatactctgaggaa

SEQ ID NO: 3682202 - DNA, 25 bp, Homo sapien
gaatatacattaccagctggcttca

SEQ ID NO: 3682203 - DNA, 25 bp, Homo sapien
tatctcaggcactctaggctgttga

SEQ ID NO: 3682204 - DNA, 25 bp, Homo sapien
aggtaaaatggtgcaaatcagctcc

SEQ ID NO: 3682205 - DNA, 25 bp, Homo sapien
aatcccgtgctccatgtgctggcag

SEQ ID NO: 3682206 - DNA, 25 bp, Homo sapien
agggccccgctaaaacacatgtaca

SEQ ID NO: 3682207 - DNA, 25 bp, Homo sapien
gatcttatgcaggacctaggtgggc

SEQ ID NO: 3682208 - DNA, 25 bp, Homo sapien
taggtttgtgcatctaatcccgtgc

SEQ ID NO: 3682209 - DNA, 25 bp, Homo sapien
catttttggaaagcacagactgtgt

SEQ ID NO: 3682210 - DNA, 25 bp, Homo sapien
cattttgtcccatcaatcagtgtag

SEQ ID NO: 3682211 - DNA, 25 bp, Homo sapien
tatactgcaaaccacaataacaatg

SEQ ID NO: 3682212 - DNA, 25 bp, Homo sapien
aaaattacccacatactaggcttag

SEQ ID NO: 3682213 - DNA, 25 bp, Homo sapien
tgagacagctaacccatccaaattg

SEQ ID NO: 3682214 - DNA, 25 bp, Homo sapien
gaatccaacatatgtactctggcat

SEQ ID NO: 3682215 - DNA, 25 bp, Homo sapien
gaaagaccttaacacgcattatgtg

SEQ ID NO: 3682216 - DNA, 25 bp, Homo sapien
taaatgtgaggcagacagacgtcta

SEQ ID NO: 3682217 - DNA, 25 bp, Homo sapien
ggaaagtggccaacagtctgtctgg

SEQ ID NO: 3682218 - DNA, 25 bp, Homo sapien
tccttcatcagtggccgctaccaag

SEQ ID NO: 3682219 - DNA, 25 bp, Homo sapien
agtggccaacagtctgtctggtgga

SEQ ID NO: 3682220 - DNA, 25 bp, Homo sapien
tggccgctaccaagtcccgttcttg

SEQ ID NO: 3682221 - DNA, 25 bp, Homo sapien
ctacgccttgcagttggcggtcggc

SEQ ID NO: 3682222 - DNA, 25 bp, Homo sapien
ccgaggggggcagtattgccttatg

SEQ ID NO: 3682223 - DNA, 25 bp, Homo sapien
tacgccttgcagttggcggtcggcc

SEQ ID NO: 3682224 - DNA, 25 bp, Homo sapien
attgccttatgcagagcttctgcgc

SEQ ID NO: 3682225 - DNA, 25 bp, Homo sapien
gaagttgagagtcgtattccacctg

SEQ ID NO: 3682226 - DNA, 25 bp, Homo sapien
gagaagtggcagtagagttcgcatc

SEQ ID NO: 3682227 - DNA, 25 bp, Homo sapien
ggcttgctctaaagcgctctttgac

SEQ ID NO: 3682228 - DNA, 25 bp, Homo sapien
gaactctgtgactcaatccccttgg

SEQ ID NO: 3682229 - DNA, 25 bp, Homo sapien
tcatctgggttgacgcgtcctgaca

SEQ ID NO: 3682230 - DNA, 25 bp, Homo sapien
taagtaacaacatagtccgccctcg

SEQ ID NO: 3682231 - DNA, 25 bp, Homo sapien
tgattccctggcaaacgctgttgct

SEQ ID NO: 3682232 - DNA, 25 bp, Homo sapien
gatgggagcatcaaatagacgcaag

SEQ ID NO: 3682233 - DNA, 25 bp, Homo sapien
tcagattgacctctatcagtggcgc

SEQ ID NO: 3682234 - DNA, 25 bp, Homo sapien
ggatgggcccaaataagcctttcga

SEQ ID NO: 3682235 - DNA, 25 bp, Homo sapien
gcaggcagttcacaccagatggagg

SEQ ID NO: 3682236 - DNA, 25 bp, Homo sapien
tcaggtgcaatgaactgcaggccca

SEQ ID NO: 3682237 - DNA, 25 bp, Homo sapien
gcagaaagaccttaagcaacactgg

SEQ ID NO: 3682238 - DNA, 25 bp, Homo sapien
cagtagggttacaaataagaggcca

SEQ ID NO: 3682239 - DNA, 25 bp, Homo sapien
tctctaaagagagcatgtgtctatt

SEQ ID NO: 3682240 - DNA, 25 bp, Homo sapien
ctattatccacagtagggttacaaa

SEQ ID NO: 3682241 - DNA, 25 bp, Homo sapien
ttcattccttggaatctgcgaggcc

SEQ ID NO: 3682242 - DNA, 25 bp, Homo sapien
agatttcattccttggaatctgcga

SEQ ID NO: 3682243 - DNA, 25 bp, Homo sapien
aggcttgccaccatcccattttgga

SEQ ID NO: 3682244 - DNA, 25 bp, Homo sapien
tttcattccttggaatctgcgaggc

SEQ ID NO: 3682245 - DNA, 25 bp, Homo sapien
cagagagggaacagctggtgaatcc

SEQ ID NO: 3682246 - DNA, 25 bp, Homo sapien
gctggtgaatcctgaaccctttttg

SEQ ID NO: 3682247 - DNA, 25 bp, Homo sapien
gaacagctggtgaatcctgaaccct

SEQ ID NO: 3682248 - DNA, 25 bp, Homo sapien
agagagggaacagctggtgaatcct

SEQ ID NO: 3682249 - DNA, 25 bp, Homo sapien
tggggataaagaagcgcccagtttc

SEQ ID NO: 3682250 - DNA, 25 bp, Homo sapien
catgctgcaagtgctgctccttaaa

SEQ ID NO: 3682251 - DNA, 25 bp, Homo sapien
tggagcagatgagggcctttggact

SEQ ID NO: 3682252 - DNA, 25 bp, Homo sapien
ctttggacttcttcggcacatgctg

SEQ ID NO: 3682253 - DNA, 25 bp, Homo sapien
catctacatgtgacccaggaaagcc

SEQ ID NO: 3682254 - DNA, 25 bp, Homo sapien
tggttcacacgctccaatctgggtt

SEQ ID NO: 3682255 - DNA, 25 bp, Homo sapien
cccaagaaggagaagagatcggtac

SEQ ID NO: 3682256 - DNA, 25 bp, Homo sapien
ccgagcagaacatccctatggaggg

SEQ ID NO: 3682257 - DNA, 25 bp, Homo sapien
aagtgtgttataagcaaccaaacac

SEQ ID NO: 3682258 - DNA, 25 bp, Homo sapien
caatcgtaatatgaatccactgtcc

SEQ ID NO: 3682259 - DNA, 25 bp, Homo sapien
tctgagcaagagcaatcgtaatatg

SEQ ID NO: 3682260 - DNA, 25 bp, Homo sapien
tgttataagcaaccaaacaccccat

SEQ ID NO: 3682261 - DNA, 25 bp, Homo sapien
agcaggctcagtcccatggagagca

SEQ ID NO: 3682262 - DNA, 25 bp, Homo sapien
agggaaaggcctgtacaactgctca

SEQ ID NO: 3682263 - DNA, 25 bp, Homo sapien
gctccctaatacagaataaagggca

SEQ ID NO: 3682264 - DNA, 25 bp, Homo sapien
tcagtaagccttggccgtaaggtat

SEQ ID NO: 3682265 - DNA, 25 bp, Homo sapien
tgtaacactgtctcttcgataaagc

SEQ ID NO: 3682266 - DNA, 25 bp, Homo sapien
aaagacagtatcacattctgggctg

SEQ ID NO: 3682267 - DNA, 25 bp, Homo sapien
tcagaactgcccatacctcaaaggg

SEQ ID NO: 3682268 - DNA, 25 bp, Homo sapien
ggcctgatttagagttccctccaca

SEQ ID NO: 3682269 - DNA, 25 bp, Homo sapien
tatgtgcaaagcaaaaccgtctctg

SEQ ID NO: 3682270 - DNA, 25 bp, Homo sapien
tatatcttcacctcttatgtgatca

SEQ ID NO: 3682271 - DNA, 25 bp, Homo sapien
tcacctcttatgtgatcatgagtcc

SEQ ID NO: 3682272 - DNA, 25 bp, Homo sapien
ttcaatatgtgcaaagcaaaaccgt

SEQ ID NO: 3682273 - DNA, 25 bp, Homo sapien
taatacgtagagcagatccaatcat

SEQ ID NO: 3682274 - DNA, 25 bp, Homo sapien
attaaccagacacagccccaactga

SEQ ID NO: 3682275 - DNA, 25 bp, Homo sapien
caattattataatacgtagagcaga

SEQ ID NO: 3682276 - DNA, 25 bp, Homo sapien
ccaactgaatggtaacaattattat

SEQ ID NO: 3682277 - DNA, 25 bp, Homo sapien
cactgaagtcctatcgagtgctcag

SEQ ID NO: 3682278 - DNA, 25 bp, Homo sapien
cacaaatttctattgagctgtctac

SEQ ID NO: 3682279 - DNA, 25 bp, Homo sapien
taaagtacgcattgtgtgtagtgac

SEQ ID NO: 3682280 - DNA, 25 bp, Homo sapien
tcagatcttttcagctcgatgccac

SEQ ID NO: 3682281 - DNA, 25 bp, Homo sapien
cagtgatgtagggtaaaaacaggga

SEQ ID NO: 3682282 - DNA, 25 bp, Homo sapien
gttgagggacccagctgttgccagt

SEQ ID NO: 3682283 - DNA, 25 bp, Homo sapien
gacccagctgttgccagtgatgtag

SEQ ID NO: 3682284 - DNA, 25 bp, Homo sapien
cagctgttgccagtgatgtagggta

SEQ ID NO: 3682285 - DNA, 25 bp, Homo sapien
tcatggttgaagtcccatgattggc

SEQ ID NO: 3682286 - DNA, 25 bp, Homo sapien
atgattggccgtcccaccagaatga

SEQ ID NO: 3682287 - DNA, 25 bp, Homo sapien
tgaagtcccatgattggccgtccca

SEQ ID NO: 3682288 - DNA, 25 bp, Homo sapien
cccaccagaatgacatagagtggag

SEQ ID NO: 3682289 - DNA, 25 bp, Homo sapien
tactctcattgatccataaccctag

SEQ ID NO: 3682290 - DNA, 25 bp, Homo sapien
ccataaccctagtctttcacaggac

SEQ ID NO: 3682291 - DNA, 25 bp, Homo sapien
tgtttgcaaacacggcttcgaccca

SEQ ID NO: 3682292 - DNA, 25 bp, Homo sapien
ggacaatcgcttgccaaaatgtttg

SEQ ID NO: 3682293 - DNA, 25 bp, Homo sapien
tctcactggcagaatctaatttagc

SEQ ID NO: 3682294 - DNA, 25 bp, Homo sapien
ctaatttagcttcaagtgagaagag

SEQ ID NO: 3682295 - DNA, 25 bp, Homo sapien
tcacattttcgtctgacctcagaga

SEQ ID NO: 3682296 - DNA, 25 bp, Homo sapien
tcctgagggagtaatggcctctcct

SEQ ID NO: 3682297 - DNA, 25 bp, Homo sapien
tagatattcgctcttgaatctcctc

SEQ ID NO: 3682298 - DNA, 25 bp, Homo sapien
gaatctcctctaagttctgccacca

SEQ ID NO: 3682299 - DNA, 25 bp, Homo sapien
ttcctgttcatcctcccactttcat

SEQ ID NO: 3682300 - DNA, 25 bp, Homo sapien
atcagcaaccttagatattcgctct

SEQ ID NO: 3682301 - DNA, 25 bp, Homo sapien
cattcacggtactctcttgcgtgga

SEQ ID NO: 3682302 - DNA, 25 bp, Homo sapien
aatgcattcacggtactctcttgcg

SEQ ID NO: 3682303 - DNA, 25 bp, Homo sapien
agagaaatgcattcacggtactctc

SEQ ID NO: 3682304 - DNA, 25 bp, Homo sapien
cacggtactctcttgcgtggaagag

SEQ ID NO: 3682305 - DNA, 25 bp, Homo sapien
aaaggttatgttgcctggaaagtct

SEQ ID NO: 3682306 - DNA, 25 bp, Homo sapien
taaaggttatgttgcctggaaagtc

SEQ ID NO: 3682307 - DNA, 25 bp, Homo sapien
ggcttaaaggttatgttgcctggaa

SEQ ID NO: 3682308 - DNA, 25 bp, Homo sapien
cttaaaggttatgttgcctggaaag

SEQ ID NO: 3682309 - DNA, 25 bp, Homo sapien
ctgcccatcctctttcctctcactc

SEQ ID NO: 3682310 - DNA, 25 bp, Homo sapien
tgcccatcctctttcctctcactct

SEQ ID NO: 3682311 - DNA, 25 bp, Homo sapien
ccatcctctttcctctcactcttac

SEQ ID NO: 3682312 - DNA, 25 bp, Homo sapien
gcccatcctctttcctctcactctt

SEQ ID NO: 3682313 - DNA, 25 bp, Homo sapien
ttgagaagccagactccctctttta

SEQ ID NO: 3682314 - DNA, 25 bp, Homo sapien
ccctccgggaaatggttgggcagct

SEQ ID NO: 3682315 - DNA, 25 bp, Homo sapien
tgctccctccgggaaatggttgggc

SEQ ID NO: 3682316 - DNA, 25 bp, Homo sapien
agaagccagactccctcttttagag

SEQ ID NO: 3682317 - DNA, 25 bp, Homo sapien
cacgccaggcagtgcactgcgattc

SEQ ID NO: 3682318 - DNA, 25 bp, Homo sapien
ttctgctccaagagccttggttttg

SEQ ID NO: 3682319 - DNA, 25 bp, Homo sapien
tctgctccaagagccttggttttgc

SEQ ID NO: 3682320 - DNA, 25 bp, Homo sapien
gccaggcagtgcactgcgattcacc

SEQ ID NO: 3682321 - DNA, 25 bp, Homo sapien
atgcagacatccaaattgctgcaat

SEQ ID NO: 3682322 - DNA, 25 bp, Homo sapien
ttatgcagacatccaaattgctgca

SEQ ID NO: 3682323 - DNA, 25 bp, Homo sapien
tgcagacatccaaattgctgcaata

SEQ ID NO: 3682324 - DNA, 25 bp, Homo sapien
tatgcagacatccaaattgctgcaa

SEQ ID NO: 3682325 - DNA, 25 bp, Homo sapien
aattgtctctcctttgcacggagct

SEQ ID NO: 3682326 - DNA, 25 bp, Homo sapien
aggtccccttgaacacctgcactaa

SEQ ID NO: 3682327 - DNA, 25 bp, Homo sapien
tggatttggaggtccaacctcagac

SEQ ID NO: 3682328 - DNA, 25 bp, Homo sapien
cagcacaaagcctatatggatttgg

SEQ ID NO: 3682329 - DNA, 25 bp, Homo sapien
ccccaaaattggcagacatgagaag

SEQ ID NO: 3682330 - DNA, 25 bp, Homo sapien
acatgagaaggtgtgagaaattccc

SEQ ID NO: 3682331 - DNA, 25 bp, Homo sapien
tgagaaattcccgtaggcttcaagt

SEQ ID NO: 3682332 - DNA, 25 bp, Homo sapien
gtttgactcaatgatatcaacaccc

SEQ ID NO: 3682333 - DNA, 25 bp, Homo sapien
tttctttggttgtgaggtataagga

SEQ ID NO: 3682334 - DNA, 25 bp, Homo sapien
agggtaggaggagtaggaagctcca

SEQ ID NO: 3682335 - DNA, 25 bp, Homo sapien
gagggtaggaggagtaggaagctcc

SEQ ID NO: 3682336 - DNA, 25 bp, Homo sapien
gtgagatctgacattccccagcttc

SEQ ID NO: 3682337 - DNA, 25 bp, Homo sapien
agtgagatctgacattccccagctt

SEQ ID NO: 3682338 - DNA, 25 bp, Homo sapien
aatcacaccagccacaatctgcatc

SEQ ID NO: 3682339 - DNA, 25 bp, Homo sapien
ggtaagtggataaatcacaccagcc

SEQ ID NO: 3682340 - DNA, 25 bp, Homo sapien
ctaagaaatctggcaactgtggaag

SEQ ID NO: 3682341 - DNA, 25 bp, Homo sapien
ttttaagtgggatcatatttttaca

SEQ ID NO: 3682342 - DNA, 25 bp, Homo sapien
tagagatctctacagtcttctttgt

SEQ ID NO: 3682343 - DNA, 25 bp, Homo sapien
tgacaggtaaaagttgtatcccttg

SEQ ID NO: 3682344 - DNA, 25 bp, Homo sapien
gtttaacagtttagagatctctaca

SEQ ID NO: 3682345 - DNA, 25 bp, Homo sapien
ctgagagagcggtatccctcactga

SEQ ID NO: 3682346 - DNA, 25 bp, Homo sapien
tcttgaatactgagagagcggtatc

SEQ ID NO: 3682347 - DNA, 25 bp, Homo sapien
aatactgagagagcggtatccctca

SEQ ID NO: 3682348 - DNA, 25 bp, Homo sapien
actgtgtgggtgaatctgttggtga

SEQ ID NO: 3682349 - DNA, 25 bp, Homo sapien
taggcgattttgacatgcacacatg

SEQ ID NO: 3682350 - DNA, 25 bp, Homo sapien
tgagcagaaaacctagccaagctga

SEQ ID NO: 3682351 - DNA, 25 bp, Homo sapien
ggaacttagacatacacctgcaagg

SEQ ID NO: 3682352 - DNA, 25 bp, Homo sapien
cagggattttaagcactaggcgatt

SEQ ID NO: 3682353 - DNA, 25 bp, Homo sapien
aaatgaccagttatgttccaaggag

SEQ ID NO: 3682354 - DNA, 25 bp, Homo sapien
aaaatgaccagttatgttccaagga

SEQ ID NO: 3682355 - DNA, 25 bp, Homo sapien
aatgaccagttatgttccaaggagt

SEQ ID NO: 3682356 - DNA, 25 bp, Homo sapien
aaccagaggcaagtaatgctctcat

SEQ ID NO: 3682357 - DNA, 25 bp, Homo sapien
cttggagcagttctctagtaattcc

SEQ ID NO: 3682358 - DNA, 25 bp, Homo sapien
attccaaaccagaggcaagtaatgc

SEQ ID NO: 3682359 - DNA, 25 bp, Homo sapien
caaaccagaggcaagtaatgctctc

SEQ ID NO: 3682360 - DNA, 25 bp, Homo sapien
agctgagccgccacaacctcgagcc

SEQ ID NO: 3682361 - DNA, 25 bp, Homo sapien
aaactcccatactcctttgaagcag

SEQ ID NO: 3682362 - DNA, 25 bp, Homo sapien
cacaaactcccatactcctttgaag

SEQ ID NO: 3682363 - DNA, 25 bp, Homo sapien
actcccatactcctttgaagcagca

SEQ ID NO: 3682364 - DNA, 25 bp, Homo sapien
tcacggtctgtcatcccaattgttc

SEQ ID NO: 3682365 - DNA, 25 bp, Homo sapien
aatgagagaacatgccttcagaaag

SEQ ID NO: 3682366 - DNA, 25 bp, Homo sapien
tctcagtctctgttgtgtgacctag

SEQ ID NO: 3682367 - DNA, 25 bp, Homo sapien
ttgttctcagcaagtaaatgagaga

SEQ ID NO: 3682368 - DNA, 25 bp, Homo sapien
ggtcaattctgagagttcgctcagt

SEQ ID NO: 3682369 - DNA, 25 bp, Homo sapien
cgctcagtcagttcaggatttccct

SEQ ID NO: 3682370 - DNA, 25 bp, Homo sapien
aatgtgaatcatggtcaattctgag

SEQ ID NO: 3682371 - DNA, 25 bp, Homo sapien
gggtaaaaatgtgaatcatggtcaa

SEQ ID NO: 3682372 - DNA, 25 bp, Homo sapien
tggaacagatttgccctcagggacc

SEQ ID NO: 3682373 - DNA, 25 bp, Homo sapien
taatgtctggaaaagcactctgtga

SEQ ID NO: 3682374 - DNA, 25 bp, Homo sapien
tgtagagcactaaacccatgacaca

SEQ ID NO: 3682375 - DNA, 25 bp, Homo sapien
gaagtcttactaggctaaggcgggc

SEQ ID NO: 3682376 - DNA, 25 bp, Homo sapien
tctagttgtctaatattcatgctat

SEQ ID NO: 3682377 - DNA, 25 bp, Homo sapien
gttgtctaatattcatgctatttgt

SEQ ID NO: 3682378 - DNA, 25 bp, Homo sapien
tcatctagttgtctaatattcatgc

SEQ ID NO: 3682379 - DNA, 25 bp, Homo sapien
cagctcatctagttgtctaatattc

SEQ ID NO: 3682380 - DNA, 25 bp, Homo sapien
cagatatccagggatgttcgattgt

SEQ ID NO: 3682381 - DNA, 25 bp, Homo sapien
cagggatgttcgattgtcttggtct

SEQ ID NO: 3682382 - DNA, 25 bp, Homo sapien
tcgattgtcttggtctgaaggctct

SEQ ID NO: 3682383 - DNA, 25 bp, Homo sapien
tgttcgattgtcttggtctgaaggc

SEQ ID NO: 3682384 - DNA, 25 bp, Homo sapien
ctgggaagctctccagaagaaaggc

SEQ ID NO: 3682385 - DNA, 25 bp, Homo sapien
gaagctctccagaagaaaggctggc

SEQ ID NO: 3682386 - DNA, 25 bp, Homo sapien
ctctccagaagaaaggctggctatc

SEQ ID NO: 3682387 - DNA, 25 bp, Homo sapien
agctctccagaagaaaggctggcta

SEQ ID NO: 3682388 - DNA, 25 bp, Homo sapien
tcacagctcatgggtgtttctatgt

SEQ ID NO: 3682389 - DNA, 25 bp, Homo sapien
cacagctcatgggtgtttctatgta

SEQ ID NO: 3682390 - DNA, 25 bp, Homo sapien
cagctcatgggtgtttctatgtaag

SEQ ID NO: 3682391 - DNA, 25 bp, Homo sapien
acagctcatgggtgtttctatgtaa

SEQ ID NO: 3682392 - DNA, 25 bp, Homo sapien
aggtcccactgatcttcaccggcac

SEQ ID NO: 3682393 - DNA, 25 bp, Homo sapien
cagataccgagtccaacgttctctt

SEQ ID NO: 3682394 - DNA, 25 bp, Homo sapien
gtgatgttatcagacttggcagttc

SEQ ID NO: 3682395 - DNA, 25 bp, Homo sapien
tgctccattgccagataccgagtcc

SEQ ID NO: 3682396 - DNA, 25 bp, Homo sapien
ctctcaaaaacttggtcctgagtag

SEQ ID NO: 3682397 - DNA, 25 bp, Homo sapien
tcaaaaacttggtcctgagtagccc

SEQ ID NO: 3682398 - DNA, 25 bp, Homo sapien
aaaacttggtcctgagtagccccat

SEQ ID NO: 3682399 - DNA, 25 bp, Homo sapien
aactctcaaaaacttggtcctgagt

SEQ ID NO: 3682400 - DNA, 25 bp, Homo sapien
gaattcctctacgttcctaagccca

SEQ ID NO: 3682401 - DNA, 25 bp, Homo sapien
tctacgttcctaagcccaaacagcc

SEQ ID NO: 3682402 - DNA, 25 bp, Homo sapien
tagtgtagaattcctctacgttcct

SEQ ID NO: 3682403 - DNA, 25 bp, Homo sapien
cagcagaggtagtgtagaattcctc

SEQ ID NO: 3682404 - DNA, 25 bp, Homo sapien
aataacagaggtgtccttgcctcac

SEQ ID NO: 3682405 - DNA, 25 bp, Homo sapien
tgctagaaggttcaaatgcccttac

SEQ ID NO: 3682406 - DNA, 25 bp, Homo sapien
gatacagatatcctgctgctagaag

SEQ ID NO: 3682407 - DNA, 25 bp, Homo sapien
agacagcctggcaataacagaggtg

SEQ ID NO: 3682408 - DNA, 25 bp, Homo sapien
gttctaagatctgttgctgaagacc

SEQ ID NO: 3682409 - DNA, 25 bp, Homo sapien
aagccagactgagcactggaccagc

SEQ ID NO: 3682410 - DNA, 25 bp, Homo sapien
gttcatacttcacttctggcaacag

SEQ ID NO: 3682411 - DNA, 25 bp, Homo sapien
aagaccttgactcccgtatcccctg

SEQ ID NO: 3682412 - DNA, 25 bp, Homo sapien
agagtcgcttaaacccaggtagcgg

SEQ ID NO: 3682413 - DNA, 25 bp, Homo sapien
gccgagaacacatcactgcaatcta

SEQ ID NO: 3682414 - DNA, 25 bp, Homo sapien
acacatcactgcaatctagtctggg

SEQ ID NO: 3682415 - DNA, 25 bp, Homo sapien
agtcgcttaaacccaggtagcggag

SEQ ID NO: 3682416 - DNA, 25 bp, Homo sapien
gaagccgaaagccacactggtcaga

SEQ ID NO: 3682417 - DNA, 25 bp, Homo sapien
tggtcagatgtatgcaagacagcag

SEQ ID NO: 3682418 - DNA, 25 bp, Homo sapien
gagtgcctgcaatctccaataagag

SEQ ID NO: 3682419 - DNA, 25 bp, Homo sapien
aaaaggatttcttaggagtgcctgc

SEQ ID NO: 3682420 - DNA, 25 bp, Homo sapien
aaccttggccattgcccgtgtcagg

SEQ ID NO: 3682421 - DNA, 25 bp, Homo sapien
tcagccaggaactagaggccaagtc

SEQ ID NO: 3682422 - DNA, 25 bp, Homo sapien
ccgtgtcaggaggatagacctgtgc

SEQ ID NO: 3682423 - DNA, 25 bp, Homo sapien
tgtgcctctttcacgttcagccagg

SEQ ID NO: 3682424 - DNA, 25 bp, Homo sapien
tataggatgcagcaattgaagcaat

SEQ ID NO: 3682425 - DNA, 25 bp, Homo sapien
caattgaagcaatggagatccactg

SEQ ID NO: 3682426 - DNA, 25 bp, Homo sapien
tccactggagtaacatcacattcat

SEQ ID NO: 3682427 - DNA, 25 bp, Homo sapien
gcaatggagatccactggagtaaca

SEQ ID NO: 3682428 - DNA, 25 bp, Homo sapien
tattccactttgatccatataccca

SEQ ID NO: 3682429 - DNA, 25 bp, Homo sapien
ttcactgagtattctgatagctttg

SEQ ID NO: 3682430 - DNA, 25 bp, Homo sapien
aaatattccactttgatccatatac

SEQ ID NO: 3682431 - DNA, 25 bp, Homo sapien
tcataatccttttcactgagtattc

SEQ ID NO: 3682432 - DNA, 25 bp, Homo sapien
tagcctgtgagttttgcagagttgg

SEQ ID NO: 3682433 - DNA, 25 bp, Homo sapien
agagttggtggaggtcaattttgcc

SEQ ID NO: 3682434 - DNA, 25 bp, Homo sapien
cctatccagcaagtctagatgcaag

SEQ ID NO: 3682435 - DNA, 25 bp, Homo sapien
ggtggcagatgtgaaacctatccag

SEQ ID NO: 3682436 - DNA, 25 bp, Homo sapien
cagtgtttcctcttctctggcaccc

SEQ ID NO: 3682437 - DNA, 25 bp, Homo sapien
ttcaaacccagtgtttcctcttctc

SEQ ID NO: 3682438 - DNA, 25 bp, Homo sapien
gtgtttcctcttctctggcacccac

SEQ ID NO: 3682439 - DNA, 25 bp, Homo sapien
cccagtgtttcctcttctctggcac

SEQ ID NO: 3682440 - DNA, 25 bp, Homo sapien
catccttcgtattggaccattacaa

SEQ ID NO: 3682441 - DNA, 25 bp, Homo sapien
ttcgtattggaccattacaactatt

SEQ ID NO: 3682442 - DNA, 25 bp, Homo sapien
ccttcgtattggaccattacaacta

SEQ ID NO: 3682443 - DNA, 25 bp, Homo sapien
tcatccttcgtattggaccattaca

SEQ ID NO: 3682444 - DNA, 25 bp, Homo sapien
gaaaaggcaattttagtgcctgcca

SEQ ID NO: 3682445 - DNA, 25 bp, Homo sapien
ccaaagacaattcataaaccaaagt

SEQ ID NO: 3682446 - DNA, 25 bp, Homo sapien
aaccaaagttaccaactgctcctgc

SEQ ID NO: 3682447 - DNA, 25 bp, Homo sapien
taaacagtagaatttgccaattctg

SEQ ID NO: 3682448 - DNA, 25 bp, Homo sapien
ttttctggcatccctaaggtctccc

SEQ ID NO: 3682449 - DNA, 25 bp, Homo sapien
aattgcaaggtgatttaacaagtga

SEQ ID NO: 3682450 - DNA, 25 bp, Homo sapien
acctgctgacacattctctatacaa

SEQ ID NO: 3682451 - DNA, 25 bp, Homo sapien
cacattctctatacaaattgcaagg

SEQ ID NO: 3682452 - DNA, 25 bp, Homo sapien
tatcgagtgaatgtacctggcaaga

SEQ ID NO: 3682453 - DNA, 25 bp, Homo sapien
tgaactgccctttacttgcacaagg

SEQ ID NO: 3682454 - DNA, 25 bp, Homo sapien
gacttaagaaaatccctgaactgcc

SEQ ID NO: 3682455 - DNA, 25 bp, Homo sapien
tgcacaaggaatcaatacagtagcc

SEQ ID NO: 3682456 - DNA, 25 bp, Homo sapien
gaatctgaaggggtgatccaagcag

SEQ ID NO: 3682457 - DNA, 25 bp, Homo sapien
ctaaaagagggaaaagaatctgaag

SEQ ID NO: 3682458 - DNA, 25 bp, Homo sapien
gtgatccaagcaggggagttcctag

SEQ ID NO: 3682459 - DNA, 25 bp, Homo sapien
ggaaaagaatctgaaggggtgatcc

SEQ ID NO: 3682460 - DNA, 25 bp, Homo sapien
gagccatcaggaacagaagttgagg

SEQ ID NO: 3682461 - DNA, 25 bp, Homo sapien
agttgaggagtaccgaatgcctcta

SEQ ID NO: 3682462 - DNA, 25 bp, Homo sapien
agaagttgaggagtaccgaatgcct

SEQ ID NO: 3682463 - DNA, 25 bp, Homo sapien
ggaggagccatcaggaacagaagtt

SEQ ID NO: 3682464 - DNA, 25 bp, Homo sapien
gtacagccactctcactttctaaat

SEQ ID NO: 3682465 - DNA, 25 bp, Homo sapien
gatgtacagccactctcactttcta

SEQ ID NO: 3682466 - DNA, 25 bp, Homo sapien
tgtacagccactctcactttctaaa

SEQ ID NO: 3682467 - DNA, 25 bp, Homo sapien
atgtacagccactctcactttctaa

SEQ ID NO: 3682468 - DNA, 25 bp, Homo sapien
taactgttcaggcaaaggctccatc

SEQ ID NO: 3682469 - DNA, 25 bp, Homo sapien
gaatatggatagtttaccttctggt

SEQ ID NO: 3682470 - DNA, 25 bp, Homo sapien
ggtctgataacaataaacagttcac

SEQ ID NO: 3682471 - DNA, 25 bp, Homo sapien
cctgaggaacccaatgaatgtgaca

SEQ ID NO: 3682472 - DNA, 25 bp, Homo sapien
tctactgcgtagaggccgtagccag

SEQ ID NO: 3682473 - DNA, 25 bp, Homo sapien
ggcggccgtcctgtcaacagacgtg

SEQ ID NO: 3682474 - DNA, 25 bp, Homo sapien
cacagacgcggtacctctactgcgt

SEQ ID NO: 3682475 - DNA, 25 bp, Homo sapien
tttctccggacccagcatgtaggtg

SEQ ID NO: 3682476 - DNA, 25 bp, Homo sapien
tctcacggctggatcccattcaggg

SEQ ID NO: 3682477 - DNA, 25 bp, Homo sapien
tgggtctttatgtggatcagcttta

SEQ ID NO: 3682478 - DNA, 25 bp, Homo sapien
ctttatgtggatcagctttattctc

SEQ ID NO: 3682479 - DNA, 25 bp, Homo sapien
tcagctttattctcacggctggatc

SEQ ID NO: 3682480 - DNA, 25 bp, Homo sapien
ccttctgcttatgttcatggactgg

SEQ ID NO: 3682481 - DNA, 25 bp, Homo sapien
ggcttttctactttaggcaccaaga

SEQ ID NO: 3682482 - DNA, 25 bp, Homo sapien
caagagtggttcatgaagtatgagg

SEQ ID NO: 3682483 - DNA, 25 bp, Homo sapien
tgtcactgacacatggtccttctgc

SEQ ID NO: 3682484 - DNA, 25 bp, Homo sapien
ttccagcttgccccatggataaggc

SEQ ID NO: 3682485 - DNA, 25 bp, Homo sapien
tccagcttgccccatggataaggct

SEQ ID NO: 3682486 - DNA, 25 bp, Homo sapien
cagcttgccccatggataaggctga

SEQ ID NO: 3682487 - DNA, 25 bp, Homo sapien
agcttgccccatggataaggctgac

SEQ ID NO: 3682488 - DNA, 25 bp, Homo sapien
cctccctgtgtgctaggtggtctgc

SEQ ID NO: 3682489 - DNA, 25 bp, Homo sapien
aaacctccctgtgtgctaggtggtc

SEQ ID NO: 3682490 - DNA, 25 bp, Homo sapien
cctgtgtgctaggtggtctgctcat

SEQ ID NO: 3682491 - DNA, 25 bp, Homo sapien
gcaaacctccctgtgtgctaggtgg

SEQ ID NO: 3682492 - DNA, 25 bp, Homo sapien
agggcatccagagagaacggttggt

SEQ ID NO: 3682493 - DNA, 25 bp, Homo sapien
ggcatccagagagaacggttggttt

SEQ ID NO: 3682494 - DNA, 25 bp, Homo sapien
catccagagagaacggttggtttac

SEQ ID NO: 3682495 - DNA, 25 bp, Homo sapien
gcatccagagagaacggttggttta

SEQ ID NO: 3682496 - DNA, 25 bp, Homo sapien
tgcccatggcaatgatgtagcatat

SEQ ID NO: 3682497 - DNA, 25 bp, Homo sapien
tctgtctcattttggcattgctgcc

SEQ ID NO: 3682498 - DNA, 25 bp, Homo sapien
tctcaggctgaaatccatggttgcc

SEQ ID NO: 3682499 - DNA, 25 bp, Homo sapien
tgtagcatattgcaatgcactctgt

SEQ ID NO: 3682500 - DNA, 25 bp, Homo sapien
atttggtgatctgctattttaggac

SEQ ID NO: 3682501 - DNA, 25 bp, Homo sapien
ctattttaggaccaatcagaatgac

SEQ ID NO: 3682502 - DNA, 25 bp, Homo sapien
gatctgctattttaggaccaatcag

SEQ ID NO: 3682503 - DNA, 25 bp, Homo sapien
tcccacaggttgtcttgcacacagc

SEQ ID NO: 3682504 - DNA, 25 bp, Homo sapien
taatctattgccagggccaaatacg

SEQ ID NO: 3682505 - DNA, 25 bp, Homo sapien
cagccataatctattgccagggcca

SEQ ID NO: 3682506 - DNA, 25 bp, Homo sapien
ttgccagggccaaatacgttgtcat

SEQ ID NO: 3682507 - DNA, 25 bp, Homo sapien
tattgccagggccaaatacgttgtc

SEQ ID NO: 3682508 - DNA, 25 bp, Homo sapien
tttagagatctcacatagcttggcc

SEQ ID NO: 3682509 - DNA, 25 bp, Homo sapien
tatagccaagagaagtctagaaccc

SEQ ID NO: 3682510 - DNA, 25 bp, Homo sapien
catttactgcattctaggcccagcg

SEQ ID NO: 3682511 - DNA, 25 bp, Homo sapien
tactggcctggaaatggttcaaaca

SEQ ID NO: 3682512 - DNA, 25 bp, Homo sapien
ccagtggaatcttgatgaactaatc

SEQ ID NO: 3682513 - DNA, 25 bp, Homo sapien
tgagcctaagcatggctgtctccgc

SEQ ID NO: 3682514 - DNA, 25 bp, Homo sapien
caccagataactagacggcagaagg

SEQ ID NO: 3682515 - DNA, 25 bp, Homo sapien
tgtctccgcttatcactgactgtca

SEQ ID NO: 3682516 - DNA, 25 bp, Homo sapien
gcagaccaatttcatcagatatggc

SEQ ID NO: 3682517 - DNA, 25 bp, Homo sapien
tccatttgaggcatgtacatctttc

SEQ ID NO: 3682518 - DNA, 25 bp, Homo sapien
gagcttcagttaggaaactatgaga

SEQ ID NO: 3682519 - DNA, 25 bp, Homo sapien
catctttccggtttctttaaatctg

SEQ ID NO: 3682520 - DNA, 25 bp, Homo sapien
accccagtcttggatctccctggat

SEQ ID NO: 3682521 - DNA, 25 bp, Homo sapien
gcagttacaaagacccagacagttt

SEQ ID NO: 3682522 - DNA, 25 bp, Homo sapien
ggatctccctggattctagcagtta

SEQ ID NO: 3682523 - DNA, 25 bp, Homo sapien
gcctggtgcatctcataatattaat

SEQ ID NO: 3682524 - DNA, 25 bp, Homo sapien
tggagtcaacttaataccttcccag

SEQ ID NO: 3682525 - DNA, 25 bp, Homo sapien
taatctttaatacagccaatttttc

SEQ ID NO: 3682526 - DNA, 25 bp, Homo sapien
cttaatctttaatacagccaatttt

SEQ ID NO: 3682527 - DNA, 25 bp, Homo sapien
ccaatttttctggagtcaacttaat

SEQ ID NO: 3682528 - DNA, 25 bp, Homo sapien
tacagtggctccagttatcccctgc

SEQ ID NO: 3682529 - DNA, 25 bp, Homo sapien
tagctttaaggacactgcttgctgc

SEQ ID NO: 3682530 - DNA, 25 bp, Homo sapien
gctctccattctgtgctcgaatctg

SEQ ID NO: 3682531 - DNA, 25 bp, Homo sapien
tgtgctcgaatctgctgtcttccta

SEQ ID NO: 3682532 - DNA, 25 bp, Homo sapien
cagagaactataaaggttaaacagt

SEQ ID NO: 3682533 - DNA, 25 bp, Homo sapien
gtaaattctgacacaagtcctccat

SEQ ID NO: 3682534 - DNA, 25 bp, Homo sapien
ttcagagaactataaaggttaaaca

SEQ ID NO: 3682535 - DNA, 25 bp, Homo sapien
aggttaaacagtaaattctgacaca

SEQ ID NO: 3682536 - DNA, 25 bp, Homo sapien
catgtacaatggttgttcatctttg

SEQ ID NO: 3682537 - DNA, 25 bp, Homo sapien
cacactgcaatagtaagtgagcacc

SEQ ID NO: 3682538 - DNA, 25 bp, Homo sapien
tgttccccgcaaagatgtactctct

SEQ ID NO: 3682539 - DNA, 25 bp, Homo sapien
cttccatacatgtacaatggttgtt

SEQ ID NO: 3682540 - DNA, 25 bp, Homo sapien
ttcttgtccacctggcctatggtcc

SEQ ID NO: 3682541 - DNA, 25 bp, Homo sapien
attcttgtccacctggcctatggtc

SEQ ID NO: 3682542 - DNA, 25 bp, Homo sapien
ttattcttgtccacctggcctatgg

SEQ ID NO: 3682543 - DNA, 25 bp, Homo sapien
tattcttgtccacctggcctatggt

SEQ ID NO: 3682544 - DNA, 25 bp, Homo sapien
cttttcagtcatattgcattcagca

SEQ ID NO: 3682545 - DNA, 25 bp, Homo sapien
tcacatttacatttcgggttggaat

SEQ ID NO: 3682546 - DNA, 25 bp, Homo sapien
cacttcttttcagtcatattgcatt

SEQ ID NO: 3682547 - DNA, 25 bp, Homo sapien
tacatttcgggttggaataacatta

SEQ ID NO: 3682548 - DNA, 25 bp, Homo sapien
ctcgatcacttgaccttgtgattcg

SEQ ID NO: 3682549 - DNA, 25 bp, Homo sapien
caccatactgtccaggatggtctcg

SEQ ID NO: 3682550 - DNA, 25 bp, Homo sapien
gtctcgatcacttgaccttgtgatt

SEQ ID NO: 3682551 - DNA, 25 bp, Homo sapien
tttcaccatactgtccaggatggtc

SEQ ID NO: 3682552 - DNA, 25 bp, Homo sapien
tgaatctaggcctacccagggtcag

SEQ ID NO: 3682553 - DNA, 25 bp, Homo sapien
caaggaagcgcagatctctttgaga

SEQ ID NO: 3682554 - DNA, 25 bp, Homo sapien
tattttggctgctatgaatgcggct

SEQ ID NO: 3682555 - DNA, 25 bp, Homo sapien
ttcagggacactaacactcacggag

SEQ ID NO: 3682556 - DNA, 25 bp, Homo sapien
accataatactacccacagccaagg

SEQ ID NO: 3682557 - DNA, 25 bp, Homo sapien
aaggccttgtagagagcctccatgc

SEQ ID NO: 3682558 - DNA, 25 bp, Homo sapien
tctggagaaaccataatactaccca

SEQ ID NO: 3682559 - DNA, 25 bp, Homo sapien
tcagctgctttctagtgattgcaaa

SEQ ID NO: 3682560 - DNA, 25 bp, Homo sapien
tgcaaaagtcgtaattcgactaaac

SEQ ID NO: 3682561 - DNA, 25 bp, Homo sapien
gctgataatcaagtattccatgcaa

SEQ ID NO: 3682562 - DNA, 25 bp, Homo sapien
cgactaaaccatggctacaggatga

SEQ ID NO: 3682563 - DNA, 25 bp, Homo sapien
ctttgcctgcttatgctgataatca

SEQ ID NO: 3682564 - DNA, 25 bp, Homo sapien
cactccggtatgcttttgagtgatc

SEQ ID NO: 3682565 - DNA, 25 bp, Homo sapien
tcttcagaagaagatcactccggta

SEQ ID NO: 3682566 - DNA, 25 bp, Homo sapien
aagatcactccggtatgcttttgag

SEQ ID NO: 3682567 - DNA, 25 bp, Homo sapien
gaagaagatcactccggtatgcttt

SEQ ID NO: 3682568 - DNA, 25 bp, Homo sapien
gacagtcttctctgaggctcaattt

SEQ ID NO: 3682569 - DNA, 25 bp, Homo sapien
gaagagcctgacagtcttctctgag

SEQ ID NO: 3682570 - DNA, 25 bp, Homo sapien
cagtcttctctgaggctcaatttca

SEQ ID NO: 3682571 - DNA, 25 bp, Homo sapien
cctgacagtcttctctgaggctcaa

SEQ ID NO: 3682572 - DNA, 25 bp, Homo sapien
taccatagaggtctgtgtatttgca

SEQ ID NO: 3682573 - DNA, 25 bp, Homo sapien
gataacagccactagagtaagagag

SEQ ID NO: 3682574 - DNA, 25 bp, Homo sapien
ccactaaattaggtgccctggagct

SEQ ID NO: 3682575 - DNA, 25 bp, Homo sapien
tggagctttccgtgtataaacagtg

SEQ ID NO: 3682576 - DNA, 25 bp, Homo sapien
gagctatgactgtgggtttcttatc

SEQ ID NO: 3682577 - DNA, 25 bp, Homo sapien
agctatgactgtgggtttcttatca

SEQ ID NO: 3682578 - DNA, 25 bp, Homo sapien
ctatgactgtgggtttcttatcagc

SEQ ID NO: 3682579 - DNA, 25 bp, Homo sapien
tatgactgtgggtttcttatcagca

SEQ ID NO: 3682580 - DNA, 25 bp, Homo sapien
tctgtgcccaagagcatcctcataa

SEQ ID NO: 3682581 - DNA, 25 bp, Homo sapien
ccagaggatgagaacatctgtgccc

SEQ ID NO: 3682582 - DNA, 25 bp, Homo sapien
gatagtctataagggactctgagga

SEQ ID NO: 3682583 - DNA, 25 bp, Homo sapien
cattatctgcagcaataccagaagc

SEQ ID NO: 3682584 - DNA, 25 bp, Homo sapien
actgagagctgagagcgtccccaga

SEQ ID NO: 3682585 - DNA, 25 bp, Homo sapien
tgagagctgagagcgtccccagatg

SEQ ID NO: 3682586 - DNA, 25 bp, Homo sapien
ggccaggcactgagagctgagagcg

SEQ ID NO: 3682587 - DNA, 25 bp, Homo sapien
ggcactgagagctgagagcgtcccc

SEQ ID NO: 3682588 - DNA, 25 bp, Homo sapien
ttgactgacccatatgcacctgagg

SEQ ID NO: 3682589 - DNA, 25 bp, Homo sapien
ctttgactgacccatatgcacctga

SEQ ID NO: 3682590 - DNA, 25 bp, Homo sapien
tgactgacccatatgcacctgaggg

SEQ ID NO: 3682591 - DNA, 25 bp, Homo sapien
tttgactgacccatatgcacctgag

SEQ ID NO: 3682592 - DNA, 25 bp, Homo sapien
aacatcctctctccgagcattcctg

SEQ ID NO: 3682593 - DNA, 25 bp, Homo sapien
ctctctccgagcattcctgctgttg

SEQ ID NO: 3682594 - DNA, 25 bp, Homo sapien
ctccgagcattcctgctgttggtca

SEQ ID NO: 3682595 - DNA, 25 bp, Homo sapien
tctctccgagcattcctgctgttgg

SEQ ID NO: 3682596 - DNA, 25 bp, Homo sapien
catcacagaaatcccgggcatcttg

SEQ ID NO: 3682597 - DNA, 25 bp, Homo sapien
agcatcacagaaatcccgggcatct

SEQ ID NO: 3682598 - DNA, 25 bp, Homo sapien
gcatcacagaaatcccgggcatctt

SEQ ID NO: 3682599 - DNA, 25 bp, Homo sapien
tctggaagctcaagctatgttgggc

SEQ ID NO: 3682600 - DNA, 25 bp, Homo sapien
tgctctctcttgatgggctgtagct

SEQ ID NO: 3682601 - DNA, 25 bp, Homo sapien
gcagtgctttttgggtagtcgttct

SEQ ID NO: 3682602 - DNA, 25 bp, Homo sapien
gcccttcatggagtagtacagccaa

SEQ ID NO: 3682603 - DNA, 25 bp, Homo sapien
catccacgttgaatttttcacattg

SEQ ID NO: 3682604 - DNA, 25 bp, Homo sapien
ttcatccacgttgaatttttcacat

SEQ ID NO: 3682605 - DNA, 25 bp, Homo sapien
tcatccacgttgaatttttcacatt

SEQ ID NO: 3682606 - DNA, 25 bp, Homo sapien
tctactgagcattgaagacacatta

SEQ ID NO: 3682607 - DNA, 25 bp, Homo sapien
aaaataggagctggatttaacactt

SEQ ID NO: 3682608 - DNA, 25 bp, Homo sapien
cacaatatcccagggccagaggtat

SEQ ID NO: 3682609 - DNA, 25 bp, Homo sapien
tcgaaactgattgcagatgaggact

SEQ ID NO: 3682610 - DNA, 25 bp, Homo sapien
tgcaatagaggtggcttatttccct

SEQ ID NO: 3682611 - DNA, 25 bp, Homo sapien
tgttttataacaggactacttctaa

SEQ ID NO: 3682612 - DNA, 25 bp, Homo sapien
caacagtttcacaggcacatatgaa

SEQ ID NO: 3682613 - DNA, 25 bp, Homo sapien
tatttaatagagtcaagcatttcat

SEQ ID NO: 3682614 - DNA, 25 bp, Homo sapien
tgattttatctccttcataagcact

SEQ ID NO: 3682615 - DNA, 25 bp, Homo sapien
caagaaagtagacagaaacagagag

SEQ ID NO: 3682616 - DNA, 25 bp, Homo sapien
aacagagagaaattcaaatgaaatt

SEQ ID NO: 3682617 - DNA, 25 bp, Homo sapien
gaaacagagagaaattcaaatgaaa

SEQ ID NO: 3682618 - DNA, 25 bp, Homo sapien
cagagagaaattcaaatgaaatttt

SEQ ID NO: 3682619 - DNA, 25 bp, Homo sapien
gggatgatttagtacatcacttaat

SEQ ID NO: 3682620 - DNA, 25 bp, Homo sapien
gcttttcagagtgatacgcactaac

SEQ ID NO: 3682621 - DNA, 25 bp, Homo sapien
agtgatacgcactaactgtgggtgg

SEQ ID NO: 3682622 - DNA, 25 bp, Homo sapien
cttaatattgaggtctcccagcttg

SEQ ID NO: 3682623 - DNA, 25 bp, Homo sapien
gtgtagtgacaacattgctgctgca

SEQ ID NO: 3682624 - DNA, 25 bp, Homo sapien
tgacatactgagtttctttcctacg

SEQ ID NO: 3682625 - DNA, 25 bp, Homo sapien
tgagtttctttcctacggaaatctc

SEQ ID NO: 3682626 - DNA, 25 bp, Homo sapien
gtagtgacaacattgctgctgcaaa

SEQ ID NO: 3682627 - DNA, 25 bp, Homo sapien
tcacctatttggttgtcagaagaca

SEQ ID NO: 3682628 - DNA, 25 bp, Homo sapien
caaacgccacaggaataagggtcac

SEQ ID NO: 3682629 - DNA, 25 bp, Homo sapien
catcagagattgtacgatggcagtc

SEQ ID NO: 3682630 - DNA, 25 bp, Homo sapien
cagagattgtacgatggcagtccag

SEQ ID NO: 3682631 - DNA, 25 bp, Homo sapien
catagacaacacaagtggaaacaca

SEQ ID NO: 3682632 - DNA, 25 bp, Homo sapien
tgatataaatccatagtcaccaaaa

SEQ ID NO: 3682633 - DNA, 25 bp, Homo sapien
gatttcaacctatgatataaatcca

SEQ ID NO: 3682634 - DNA, 25 bp, Homo sapien
gaaccataaaagagctgcatagcca

SEQ ID NO: 3682635 - DNA, 25 bp, Homo sapien
ttaatcagtaattctttgcttccca

SEQ ID NO: 3682636 - DNA, 25 bp, Homo sapien
aagttaccatcaggctctcgagctg

SEQ ID NO: 3682637 - DNA, 25 bp, Homo sapien
taccatcaggctctcgagctggatc

SEQ ID NO: 3682638 - DNA, 25 bp, Homo sapien
ggctctcgagctggatcaacaggag

SEQ ID NO: 3682639 - DNA, 25 bp, Homo sapien
ttaaaagttaccatcaggctctcga

SEQ ID NO: 3682640 - DNA, 25 bp, Homo sapien
gaggcttttggacaccgcctgccat

SEQ ID NO: 3682641 - DNA, 25 bp, Homo sapien
gggtacaagcttccctttggtggca

SEQ ID NO: 3682642 - DNA, 25 bp, Homo sapien
gtggcattgggcacggatcaccgcc

SEQ ID NO: 3682643 - DNA, 25 bp, Homo sapien
gggcacggatcaccgcctggcagaa

SEQ ID NO: 3682644 - DNA, 25 bp, Homo sapien
gctttcgatgctttccatatctaac

SEQ ID NO: 3682645 - DNA, 25 bp, Homo sapien
ctcatggacttcttggacagccaga

SEQ ID NO: 3682646 - DNA, 25 bp, Homo sapien
acatggattattcttcctaagcctt

SEQ ID NO: 3682647 - DNA, 25 bp, Homo sapien
tggacagccagatccaaaggataag

SEQ ID NO: 3682648 - DNA, 25 bp, Homo sapien
cgacaaatgctgcttcaaaggtatg

SEQ ID NO: 3682649 - DNA, 25 bp, Homo sapien
agtaatatatccaaagcatccgaca

SEQ ID NO: 3682650 - DNA, 25 bp, Homo sapien
gattaatgtacgtctttaaaggcag

SEQ ID NO: 3682651 - DNA, 25 bp, Homo sapien
cgtctttaaaggcagaagtaatata

SEQ ID NO: 3682652 - DNA, 25 bp, Homo sapien
taaaactgacggcatgcgaatattg

SEQ ID NO: 3682653 - DNA, 25 bp, Homo sapien
cttagcaaagctgatattggtctga

SEQ ID NO: 3682654 - DNA, 25 bp, Homo sapien
cactgaatagattggttagactaac

SEQ ID NO: 3682655 - DNA, 25 bp, Homo sapien
cacggttttgaatctagtcactgaa

SEQ ID NO: 3682656 - DNA, 25 bp, Homo sapien
cgtcggcattcaccaaataaacttg

SEQ ID NO: 3682657 - DNA, 25 bp, Homo sapien
caccaaataaacttgctgtctgtgc

SEQ ID NO: 3682658 - DNA, 25 bp, Homo sapien
gatttttgccgtcggcattcaccaa

SEQ ID NO: 3682659 - DNA, 25 bp, Homo sapien
tctcttggatgatttttgccgtcgg

SEQ ID NO: 3682660 - DNA, 25 bp, Homo sapien
gatggtggtggccaaaaacaaggac

SEQ ID NO: 3682661 - DNA, 25 bp, Homo sapien
cctggggagctccaagatgaaatga

SEQ ID NO: 3682662 - DNA, 25 bp, Homo sapien
caacactgaggtgcccaaagtcctg

SEQ ID NO: 3682663 - DNA, 25 bp, Homo sapien
caagatcctgtacagccagcgtggg

SEQ ID NO: 3682664 - DNA, 25 bp, Homo sapien
ggccctgggccagaaattcaccaac

SEQ ID NO: 3682665 - DNA, 25 bp, Homo sapien
tcatggacgcagaacccatcgataa

SEQ ID NO: 3682666 - DNA, 25 bp, Homo sapien
cccatcgataaggaatggagctggt

SEQ ID NO: 3682667 - DNA, 25 bp, Homo sapien
ttggtcgaattcatggacgcagaac

SEQ ID NO: 3682668 - DNA, 25 bp, Homo sapien
aaggaatggagctggtttattactc

SEQ ID NO: 3682669 - DNA, 25 bp, Homo sapien
ctgaagtgtactcgaaaccccaaag

SEQ ID NO: 3682670 - DNA, 25 bp, Homo sapien
ctgtctcctgaagtgtactcgaaac

SEQ ID NO: 3682671 - DNA, 25 bp, Homo sapien
ttgccctgggggataacaacctgtc

SEQ ID NO: 3682672 - DNA, 25 bp, Homo sapien
ccaaaggaatttcaaatacatcatt

SEQ ID NO: 3682673 - DNA, 25 bp, Homo sapien
tttctcctgatcagtattgcatagg

SEQ ID NO: 3682674 - DNA, 25 bp, Homo sapien
gatcagtattgcataggcttctcat

SEQ ID NO: 3682675 - DNA, 25 bp, Homo sapien
cttcacggtatcagaagtcacaggg

SEQ ID NO: 3682676 - DNA, 25 bp, Homo sapien
gaaaccattcttcacggtatcagaa

SEQ ID NO: 3682677 - DNA, 25 bp, Homo sapien
ggaagtcctctgagaatcatcagcc

SEQ ID NO: 3682678 - DNA, 25 bp, Homo sapien
agtcctctgagaatcatcagcctcc

SEQ ID NO: 3682679 - DNA, 25 bp, Homo sapien
gaagtcctctgagaatcatcagcct

SEQ ID NO: 3682680 - DNA, 25 bp, Homo sapien
aagtcctctgagaatcatcagcctc

SEQ ID NO: 3682681 - DNA, 25 bp, Homo sapien
cacttctctccgaaacattgtgagg

SEQ ID NO: 3682682 - DNA, 25 bp, Homo sapien
cagtgtgacatgaatcttgttggct

SEQ ID NO: 3682683 - DNA, 25 bp, Homo sapien
gctgaagcacaatgggccatgcaag

SEQ ID NO: 3682684 - DNA, 25 bp, Homo sapien
tcactcgtgtggcataaaggaatgc

SEQ ID NO: 3682685 - DNA, 25 bp, Homo sapien
ttatgatggagagatagtaataagt

SEQ ID NO: 3682686 - DNA, 25 bp, Homo sapien
gacatctttgtctcttgtcccacac

SEQ ID NO: 3682687 - DNA, 25 bp, Homo sapien
gactgacatctttgtctcttgtccc

SEQ ID NO: 3682688 - DNA, 25 bp, Homo sapien
gtaataagtaagttataagactgac

SEQ ID NO: 3682689 - DNA, 25 bp, Homo sapien
ctgtctcagagtcaggtcaagttta

SEQ ID NO: 3682690 - DNA, 25 bp, Homo sapien
caggtcaagtttagcggggagcagc

SEQ ID NO: 3682691 - DNA, 25 bp, Homo sapien
gcagagacaggcagttgcgtggtgc

SEQ ID NO: 3682692 - DNA, 25 bp, Homo sapien
cagagacaggcagttgcgtggtgcc

SEQ ID NO: 3682693 - DNA, 25 bp, Homo sapien
ggctgcagccagcatgctcaagtgg

SEQ ID NO: 3682694 - DNA, 25 bp, Homo sapien
gctgcagccagcatgctcaagtggg

SEQ ID NO: 3682695 - DNA, 25 bp, Homo sapien
tgcagccagcatgctcaagtgggag

SEQ ID NO: 3682696 - DNA, 25 bp, Homo sapien
agccagcatgctcaagtgggagcag

SEQ ID NO: 3682697 - DNA, 25 bp, Homo sapien
ctgtggggcacgtagcttgcttgca

SEQ ID NO: 3682698 - DNA, 25 bp, Homo sapien
ccgcttccagcatggctcagtggca

SEQ ID NO: 3682699 - DNA, 25 bp, Homo sapien
ttgcagtttgctcccgtagaagtgg

SEQ ID NO: 3682700 - DNA, 25 bp, Homo sapien
tgcttgcagtttgctcccgtagaag

SEQ ID NO: 3682701 - DNA, 25 bp, Homo sapien
caccttggatttcgcatttctcagc

SEQ ID NO: 3682702 - DNA, 25 bp, Homo sapien
atttctcagcacattttctctgcaa

SEQ ID NO: 3682703 - DNA, 25 bp, Homo sapien
gactcttcaccttggatttcgcatt

SEQ ID NO: 3682704 - DNA, 25 bp, Homo sapien
aacactcattttgatggactcttca

SEQ ID NO: 3682705 - DNA, 25 bp, Homo sapien
tgtgtccagggttaatgcaattttc

SEQ ID NO: 3682706 - DNA, 25 bp, Homo sapien
cagcagtttcatgaaacagtaatta

SEQ ID NO: 3682707 - DNA, 25 bp, Homo sapien
tggagacttccaaaccatggcctgc

SEQ ID NO: 3682708 - DNA, 25 bp, Homo sapien
ccagggttaatgcaattttcagcag

SEQ ID NO: 3682709 - DNA, 25 bp, Homo sapien
cttgcagtgctaagagagtgaaggc

SEQ ID NO: 3682710 - DNA, 25 bp, Homo sapien
gcaacccacattgacagctgtgtca

SEQ ID NO: 3682711 - DNA, 25 bp, Homo sapien
agcaggcaacccacattgacagctg

SEQ ID NO: 3682712 - DNA, 25 bp, Homo sapien
tgcagtgctaagagagtgaaggcac

SEQ ID NO: 3682713 - DNA, 25 bp, Homo sapien
gcagcgtgggctttatttgatggcc

SEQ ID NO: 3682714 - DNA, 25 bp, Homo sapien
tttcctgtttggtgtcacaaagcaa

SEQ ID NO: 3682715 - DNA, 25 bp, Homo sapien
gggaaacactaagtgggcactgagc

SEQ ID NO: 3682716 - DNA, 25 bp, Homo sapien
agcaaatacgggaaacactaagtgg

SEQ ID NO: 3682717 - DNA, 25 bp, Homo sapien
gatagatctcttctattttgctcat

SEQ ID NO: 3682718 - DNA, 25 bp, Homo sapien
tagatctcttctattttgctcatca

SEQ ID NO: 3682719 - DNA, 25 bp, Homo sapien
agatctcttctattttgctcatcat

SEQ ID NO: 3682720 - DNA, 25 bp, Homo sapien
atagatctcttctattttgctcatc

SEQ ID NO: 3682721 - DNA, 25 bp, Homo sapien
ttccttagacttcagatcctggagc

SEQ ID NO: 3682722 - DNA, 25 bp, Homo sapien
agctttcttgacagatgttttccac

SEQ ID NO: 3682723 - DNA, 25 bp, Homo sapien
ggaatgctaacagttgtgacaatca

SEQ ID NO: 3682724 - DNA, 25 bp, Homo sapien
tttcttagtgattccttagacttca

SEQ ID NO: 3682725 - DNA, 25 bp, Homo sapien
catccttcagcaatacttccacttg

SEQ ID NO: 3682726 - DNA, 25 bp, Homo sapien
aagcatccttcagcaatacttccac

SEQ ID NO: 3682727 - DNA, 25 bp, Homo sapien
gcatccttcagcaatacttccactt

SEQ ID NO: 3682728 - DNA, 25 bp, Homo sapien
ttaagcatccttcagcaatacttcc

SEQ ID NO: 3682729 - DNA, 25 bp, Homo sapien
tctgcatcatcatcttctgctatca

SEQ ID NO: 3682730 - DNA, 25 bp, Homo sapien
ctttgtctgtatctgcatcatcatc

SEQ ID NO: 3682731 - DNA, 25 bp, Homo sapien
gtatctgcatcatcatcttctgcta

SEQ ID NO: 3682732 - DNA, 25 bp, Homo sapien
ctgcatcatcatcttctgctatcat

SEQ ID NO: 3682733 - DNA, 25 bp, Homo sapien
tacctgattaatgctcaatttgttc

SEQ ID NO: 3682734 - DNA, 25 bp, Homo sapien
agtccactgtacctgattaatgctc

SEQ ID NO: 3682735 - DNA, 25 bp, Homo sapien
tgctgttgcttataaaccctcttta

SEQ ID NO: 3682736 - DNA, 25 bp, Homo sapien
cttttgctgttgcttataaaccctc

SEQ ID NO: 3682737 - DNA, 25 bp, Homo sapien
tcttgatctggtgctatcgactctc

SEQ ID NO: 3682738 - DNA, 25 bp, Homo sapien
gaatctgcttttatccagtgttttg

SEQ ID NO: 3682739 - DNA, 25 bp, Homo sapien
tgaatctgcttttatccagtgtttt

SEQ ID NO: 3682740 - DNA, 25 bp, Homo sapien
gtcttgatctggtgctatcgactct

SEQ ID NO: 3682741 - DNA, 25 bp, Homo sapien
gatcatttccgacatatagaacgat

SEQ ID NO: 3682742 - DNA, 25 bp, Homo sapien
tatagaacgataataacctcctccc

SEQ ID NO: 3682743 - DNA, 25 bp, Homo sapien
tccgacatatagaacgataataacc

SEQ ID NO: 3682744 - DNA, 25 bp, Homo sapien
tttttgggctttgatcatttccgac

SEQ ID NO: 3682745 - DNA, 25 bp, Homo sapien
ctattgctcaggatagattggattc

SEQ ID NO: 3682746 - DNA, 25 bp, Homo sapien
ttgctcaggatagattggattcgga

SEQ ID NO: 3682747 - DNA, 25 bp, Homo sapien
caggatagattggattcggatagag

SEQ ID NO: 3682748 - DNA, 25 bp, Homo sapien
gctcaggatagattggattcggata

SEQ ID NO: 3682749 - DNA, 25 bp, Homo sapien
cagggaaacttgcagactttctagg

SEQ ID NO: 3682750 - DNA, 25 bp, Homo sapien
tcacagggaaacttgcagactttct

SEQ ID NO: 3682751 - DNA, 25 bp, Homo sapien
ggaaacttgcagactttctaggctt

SEQ ID NO: 3682752 - DNA, 25 bp, Homo sapien
gggaaacttgcagactttctaggct

SEQ ID NO: 3682753 - DNA, 25 bp, Homo sapien
cactctcatatgcattgatggggaa

SEQ ID NO: 3682754 - DNA, 25 bp, Homo sapien
catgctcatgactagtcacaaagac

SEQ ID NO: 3682755 - DNA, 25 bp, Homo sapien
gactagtcacaaagacaaccactct

SEQ ID NO: 3682756 - DNA, 25 bp, Homo sapien
cagtcatgctcatgactagtcacaa

SEQ ID NO: 3682757 - DNA, 25 bp, Homo sapien
ccgaggccatttccgctgtgtcaca

SEQ ID NO: 3682758 - DNA, 25 bp, Homo sapien
cacagagctccagtacagaattccc

SEQ ID NO: 3682759 - DNA, 25 bp, Homo sapien
atttccgctgtgtcacagagctcca

SEQ ID NO: 3682760 - DNA, 25 bp, Homo sapien
tgtgaagaagaccgcaggttctcct

SEQ ID NO: 3682761 - DNA, 25 bp, Homo sapien
tcaagttggaaggaactctaaatcc

SEQ ID NO: 3682762 - DNA, 25 bp, Homo sapien
taagctctaggagtcacaggtgccc

SEQ ID NO: 3682763 - DNA, 25 bp, Homo sapien
taaatccatcttggtcgggccacag

SEQ ID NO: 3682764 - DNA, 25 bp, Homo sapien
cagaggcaggatttacaatgacaag

SEQ ID NO: 3682765 - DNA, 25 bp, Homo sapien
tgggtccttgtccattccacgacca

SEQ ID NO: 3682766 - DNA, 25 bp, Homo sapien
cctgttgcgcgccaaaaagcaggac

SEQ ID NO: 3682767 - DNA, 25 bp, Homo sapien
gaggcccctgctagcgtgcttccta

SEQ ID NO: 3682768 - DNA, 25 bp, Homo sapien
cacgacaatttaggctcatagatgg

SEQ ID NO: 3682769 - DNA, 25 bp, Homo sapien
ttagttccatatgccgtgagtgagg

SEQ ID NO: 3682770 - DNA, 25 bp, Homo sapien
tgtgctaactgcaactaaggtgtgc

SEQ ID NO: 3682771 - DNA, 25 bp, Homo sapien
cttggagagttgctttaattgtgtg

SEQ ID NO: 3682772 - DNA, 25 bp, Homo sapien
ctaaggtgtgccttcttagttaggg

SEQ ID NO: 3682773 - DNA, 25 bp, Homo sapien
caagtcttgatcacaggagtatacc

SEQ ID NO: 3682774 - DNA, 25 bp, Homo sapien
atatgctccaagtcttgatcacagg

SEQ ID NO: 3682775 - DNA, 25 bp, Homo sapien
acaaatatgctccaagtcttgatca

SEQ ID NO: 3682776 - DNA, 25 bp, Homo sapien
cataaatagttcaaagtttctttga

SEQ ID NO: 3682777 - DNA, 25 bp, Homo sapien
atcgggaaacggagttggtctctgt

SEQ ID NO: 3682778 - DNA, 25 bp, Homo sapien
gatcgggaaacggagttggtctctg

SEQ ID NO: 3682779 - DNA, 25 bp, Homo sapien
gcagattgcaaagggatcgggaaac

SEQ ID NO: 3682780 - DNA, 25 bp, Homo sapien
attgcaaagggatcgggaaacggag

SEQ ID NO: 3682781 - DNA, 25 bp, Homo sapien
ttcactcctttatcaagaacttgac

SEQ ID NO: 3682782 - DNA, 25 bp, Homo sapien
ttttcactcctttatcaagaacttg

SEQ ID NO: 3682783 - DNA, 25 bp, Homo sapien
tcactcctttatcaagaacttgact

SEQ ID NO: 3682784 - DNA, 25 bp, Homo sapien
ctcctttatcaagaacttgactcat

SEQ ID NO: 3682785 - DNA, 25 bp, Homo sapien
caaatacaggtggatattgctggtg

SEQ ID NO: 3682786 - DNA, 25 bp, Homo sapien
taaatgtcatcctggtgtcattcag

SEQ ID NO: 3682787 - DNA, 25 bp, Homo sapien
ttattgattcaagggcccagcctta

SEQ ID NO: 3682788 - DNA, 25 bp, Homo sapien
ttgttctcttgagtagttctccttc

SEQ ID NO: 3682789 - DNA, 25 bp, Homo sapien
aatatacgttctcttttgacactgg

SEQ ID NO: 3682790 - DNA, 25 bp, Homo sapien
catgtttggtgcagaaagtcatcta

SEQ ID NO: 3682791 - DNA, 25 bp, Homo sapien
tccaaatgacgaaactaagcagaag

SEQ ID NO: 3682792 - DNA, 25 bp, Homo sapien
tacactgtgccaaagtagagcagat

SEQ ID NO: 3682793 - DNA, 25 bp, Homo sapien
aaatttttgcaaactgtgcattcaa

SEQ ID NO: 3682794 - DNA, 25 bp, Homo sapien
tcaacagagtatacagacaactgac

SEQ ID NO: 3682795 - DNA, 25 bp, Homo sapien
aaagtgggccaaaaggctgggcacg

SEQ ID NO: 3682796 - DNA, 25 bp, Homo sapien
tatacagacaactgacagaatggga

SEQ ID NO: 3682797 - DNA, 25 bp, Homo sapien
aaggcaaagagggacactgtataat

SEQ ID NO: 3682798 - DNA, 25 bp, Homo sapien
taagagactcacctaatacataagg

SEQ ID NO: 3682799 - DNA, 25 bp, Homo sapien
tgaaaatccgccaaccacgtatctg

SEQ ID NO: 3682800 - DNA, 25 bp, Homo sapien
gaaggtctggcaagagcagtcagtc

SEQ ID NO: 3682801 - DNA, 25 bp, Homo sapien
cagttttacccatgtagtggcattt

SEQ ID NO: 3682802 - DNA, 25 bp, Homo sapien
ccacgtagaagtgggattaggcaat

SEQ ID NO: 3682803 - DNA, 25 bp, Homo sapien
tgtgcctagccctactctgtacttc

SEQ ID NO: 3682804 - DNA, 25 bp, Homo sapien
gctgatgaacccaggttaattccat

SEQ ID NO: 3682805 - DNA, 25 bp, Homo sapien
gtcttgcttcggacaataatccatg

SEQ ID NO: 3682806 - DNA, 25 bp, Homo sapien
taggcttggtcacatgtcttgcttc

SEQ ID NO: 3682807 - DNA, 25 bp, Homo sapien
tgcccagtggcatgtcacttgtagt

SEQ ID NO: 3682808 - DNA, 25 bp, Homo sapien
gaacatatagctcttcacccagttg

SEQ ID NO: 3682809 - DNA, 25 bp, Homo sapien
tggacggccaacttatattttagga

SEQ ID NO: 3682810 - DNA, 25 bp, Homo sapien
tatccagaggaattatgttccacca

SEQ ID NO: 3682811 - DNA, 25 bp, Homo sapien
caaatcgtgcaaacttgggcaaatc

SEQ ID NO: 3682812 - DNA, 25 bp, Homo sapien
aataggtggaccacaatggacggcc

SEQ ID NO: 3682813 - DNA, 25 bp, Homo sapien
taggaatttattgctctagtgtttc

SEQ ID NO: 3682814 - DNA, 25 bp, Homo sapien
tagttccttgaagtgcaccagatgg

SEQ ID NO: 3682815 - DNA, 25 bp, Homo sapien
tgttatgactcagcatagtctattc

SEQ ID NO: 3682816 - DNA, 25 bp, Homo sapien
gctatatcccataggctttcatttt

SEQ ID NO: 3682817 - DNA, 25 bp, Homo sapien
ccatctgatataggttggatatttg

SEQ ID NO: 3682818 - DNA, 25 bp, Homo sapien
gaggtaatatctcgctgtggtcttg

SEQ ID NO: 3682819 - DNA, 25 bp, Homo sapien
tattcctgctatacctaattgattg

SEQ ID NO: 3682820 - DNA, 25 bp, Homo sapien
tacctgattgtgttaacgtaccaca

SEQ ID NO: 3682821 - DNA, 25 bp, Homo sapien
ccactgctccatccaaatccaagtc

SEQ ID NO: 3682822 - DNA, 25 bp, Homo sapien
tttccccattgaatcagttataaag

SEQ ID NO: 3682823 - DNA, 25 bp, Homo sapien
ccccattgaatcagttataaagata

SEQ ID NO: 3682824 - DNA, 25 bp, Homo sapien
ctgctccatccaaatccaagtctca

SEQ ID NO: 3682825 - DNA, 25 bp, Homo sapien
tccaaaggcctgaaatttcaaattc

SEQ ID NO: 3682826 - DNA, 25 bp, Homo sapien
tcctaatctttgttcattatatcca

SEQ ID NO: 3682827 - DNA, 25 bp, Homo sapien
cctaatctttgttcattatatccat

SEQ ID NO: 3682828 - DNA, 25 bp, Homo sapien
ttatatccatattctccaaaggcct

SEQ ID NO: 3682829 - DNA, 25 bp, Homo sapien
tcttgagactgtttataggaacgta

SEQ ID NO: 3682830 - DNA, 25 bp, Homo sapien
tttaaatggatacaccagtcctctg

SEQ ID NO: 3682831 - DNA, 25 bp, Homo sapien
taagcagcatgcagtaagatcttgc

SEQ ID NO: 3682832 - DNA, 25 bp, Homo sapien
taatactcatgatattggagtctgc

SEQ ID NO: 3682833 - DNA, 25 bp, Homo sapien
acatgattgcagtggtggcatagca

SEQ ID NO: 3682834 - DNA, 25 bp, Homo sapien
cacttcagtggatggtgttggccaa

SEQ ID NO: 3682835 - DNA, 25 bp, Homo sapien
cagacacttcaagagagaggcaaag

SEQ ID NO: 3682836 - DNA, 25 bp, Homo sapien
tgtctcagcagtcacaatggcacag

SEQ ID NO: 3682837 - DNA, 25 bp, Homo sapien
gcattatcatatcagtttggttcct

SEQ ID NO: 3682838 - DNA, 25 bp, Homo sapien
tagtatgtcacaagggctctctgcc

SEQ ID NO: 3682839 - DNA, 25 bp, Homo sapien
tcaggaatgtcaatgggtcataaat

SEQ ID NO: 3682840 - DNA, 25 bp, Homo sapien
tctgagatccattcctaagcttgtt

SEQ ID NO: 3682841 - DNA, 25 bp, Homo sapien
tgtaattgtatggtcttcagcgaac

SEQ ID NO: 3682842 - DNA, 25 bp, Homo sapien
tgtgtcacagacattcggctatgtt

SEQ ID NO: 3682843 - DNA, 25 bp, Homo sapien
tcacatctcaattgcagtcagttag

SEQ ID NO: 3682844 - DNA, 25 bp, Homo sapien
aatagtgcacttggtatgatgtcag

SEQ ID NO: 3682845 - DNA, 25 bp, Homo sapien
cagggtctatgtatcttccagggtt

SEQ ID NO: 3682846 - DNA, 25 bp, Homo sapien
acttttagcatcttcgttatgaaat

SEQ ID NO: 3682847 - DNA, 25 bp, Homo sapien
catttgctgtgctgaatcgctttag

SEQ ID NO: 3682848 - DNA, 25 bp, Homo sapien
ctttgttggatgcacagtttacgat

SEQ ID NO: 3682849 - DNA, 25 bp, Homo sapien
gcaaccaatttataagccccgcagg

SEQ ID NO: 3682850 - DNA, 25 bp, Homo sapien
cagtgcttaaagctgaagagcccac

SEQ ID NO: 3682851 - DNA, 25 bp, Homo sapien
tagaagtataacctgaggcagagcg

SEQ ID NO: 3682852 - DNA, 25 bp, Homo sapien
tgaaatcggctgaaggacacctaca

SEQ ID NO: 3682853 - DNA, 25 bp, Homo sapien
ttgccagggcctgcttttgaacccc

SEQ ID NO: 3682854 - DNA, 25 bp, Homo sapien
agtgaaacacatgagcatcttgctg

SEQ ID NO: 3682855 - DNA, 25 bp, Homo sapien
tataacttttgtggttgtgccaacc

SEQ ID NO: 3682856 - DNA, 25 bp, Homo sapien
ttttgggtcaagcacatttcaggga

SEQ ID NO: 3682857 - DNA, 25 bp, Homo sapien
taacatttgcctacggacactcaga

SEQ ID NO: 3682858 - DNA, 25 bp, Homo sapien
gacctagagaatcagcgtttccgag

SEQ ID NO: 3682859 - DNA, 25 bp, Homo sapien
tttaatttgcagatacctggactcc

SEQ ID NO: 3682860 - DNA, 25 bp, Homo sapien
taccaatatggtacaactcctcact

SEQ ID NO: 3682861 - DNA, 25 bp, Homo sapien
tttacactagaaaaagatggtgcag

SEQ ID NO: 3682862 - DNA, 25 bp, Homo sapien
ctagaaaaagatggtgcaggttctt

SEQ ID NO: 3682863 - DNA, 25 bp, Homo sapien
aaagatggtgcaggttcttatttag

SEQ ID NO: 3682864 - DNA, 25 bp, Homo sapien
gatggtgcaggttcttatttagttg

SEQ ID NO: 3682865 - DNA, 25 bp, Homo sapien
caggctctaaaagacattgtcagga

SEQ ID NO: 3682866 - DNA, 25 bp, Homo sapien
tcaggagaaaactagtcacaggctc

SEQ ID NO: 3682867 - DNA, 25 bp, Homo sapien
cgtgccttcagttatacacccaggg

SEQ ID NO: 3682868 - DNA, 25 bp, Homo sapien
catgaatgcccaagacatctcctgg

SEQ ID NO: 3682869 - DNA, 25 bp, Homo sapien
gaccatttagtctcagcatgtgtaa

SEQ ID NO: 3682870 - DNA, 25 bp, Homo sapien
gagtaagaggtgaattgtccaatat

SEQ ID NO: 3682871 - DNA, 25 bp, Homo sapien
ctacaaggtaaatagacaactaggc

SEQ ID NO: 3682872 - DNA, 25 bp, Homo sapien
caatgacatagaacagaccatttag

SEQ ID NO: 3682873 - DNA, 25 bp, Homo sapien
aaagcaatgtttttggacctgcatc

SEQ ID NO: 3682874 - DNA, 25 bp, Homo sapien
tatatgtaactggtaactgatggct

SEQ ID NO: 3682875 - DNA, 25 bp, Homo sapien
aaacaggacgattggctaggatgca

SEQ ID NO: 3682876 - DNA, 25 bp, Homo sapien
taggtgaaccctatttacagttgtc

SEQ ID NO: 3682877 - DNA, 25 bp, Homo sapien
aaatcacagtggttagacaacataa

SEQ ID NO: 3682878 - DNA, 25 bp, Homo sapien
tgcataggcatcagcaagctttaaa

SEQ ID NO: 3682879 - DNA, 25 bp, Homo sapien
tattaagtagcatcacaagccatga

SEQ ID NO: 3682880 - DNA, 25 bp, Homo sapien
cagataagaactctagacctgagct

SEQ ID NO: 3682881 - DNA, 25 bp, Homo sapien
gacatcttgtttgaccagagtttac

SEQ ID NO: 3682882 - DNA, 25 bp, Homo sapien
ctgtttagtaagtgacatcttgttt

SEQ ID NO: 3682883 - DNA, 25 bp, Homo sapien
taagtgacatcttgtttgaccagag

SEQ ID NO: 3682884 - DNA, 25 bp, Homo sapien
tcttgtttgaccagagtttacccat

SEQ ID NO: 3682885 - DNA, 25 bp, Homo sapien
tcagccaatgtgagggaagagatca

SEQ ID NO: 3682886 - DNA, 25 bp, Homo sapien
gatgtcacagttcggaaagctccag

SEQ ID NO: 3682887 - DNA, 25 bp, Homo sapien
actacagtgtactcagaggtgtggc

SEQ ID NO: 3682888 - DNA, 25 bp, Homo sapien
gggaaaatcatgacctctggcaagg

SEQ ID NO: 3682889 - DNA, 25 bp, Homo sapien
ctgtaaggtaatgcatatttaaata

SEQ ID NO: 3682890 - DNA, 25 bp, Homo sapien
acatttcagtaacggagaaggaata

SEQ ID NO: 3682891 - DNA, 25 bp, Homo sapien
tctggccacaaaagttacgtctgta

SEQ ID NO: 3682892 - DNA, 25 bp, Homo sapien
aataacaatatattgcatacttgaa

SEQ ID NO: 3682893 - DNA, 25 bp, Homo sapien
taaaggacaaccctggtgatgaggt

SEQ ID NO: 3682894 - DNA, 25 bp, Homo sapien
ggataaccgatggcaattgtgctta

SEQ ID NO: 3682895 - DNA, 25 bp, Homo sapien
tgaagtataaagaccttaaaggaca

SEQ ID NO: 3682896 - DNA, 25 bp, Homo sapien
tgatgcatgacttgtggtagactga

SEQ ID NO: 3682897 - DNA, 25 bp, Homo sapien
cgaaaagtactttctggccaggcgt

SEQ ID NO: 3682898 - DNA, 25 bp, Homo sapien
tattactcactgcatgtgaacacgg

SEQ ID NO: 3682899 - DNA, 25 bp, Homo sapien
gccatctatttctaagcaacaggaa

SEQ ID NO: 3682900 - DNA, 25 bp, Homo sapien
cattctttggacatagcttcattgc

SEQ ID NO: 3682901 - DNA, 25 bp, Homo sapien
atacagtaaactgataccactagag

SEQ ID NO: 3682902 - DNA, 25 bp, Homo sapien
cagtaaactgataccactagagtgg

SEQ ID NO: 3682903 - DNA, 25 bp, Homo sapien
gagtggggcgttgctgaagatacct

SEQ ID NO: 3682904 - DNA, 25 bp, Homo sapien
agtaaactgataccactagagtggg

SEQ ID NO: 3682905 - DNA, 25 bp, Homo sapien
gtaacacagattcaggagtcagccc

SEQ ID NO: 3682906 - DNA, 25 bp, Homo sapien
gcacgctgctattcttcacagagaa

SEQ ID NO: 3682907 - DNA, 25 bp, Homo sapien
ggaataaacaaaggtgcacgctgct

SEQ ID NO: 3682908 - DNA, 25 bp, Homo sapien
cactgaggcactgtattgtaaggca

SEQ ID NO: 3682909 - DNA, 25 bp, Homo sapien
gtgttctccaaactcaggcatgcaa

SEQ ID NO: 3682910 - DNA, 25 bp, Homo sapien
taatttatcctaatgtcatgggcca

SEQ ID NO: 3682911 - DNA, 25 bp, Homo sapien
tgcaatgccatcatgaatatctccc

SEQ ID NO: 3682912 - DNA, 25 bp, Homo sapien
atgggccaccaagtcagctaaatgg

SEQ ID NO: 3682913 - DNA, 25 bp, Homo sapien
gattcttataaaccagtgcagtgct

SEQ ID NO: 3682914 - DNA, 25 bp, Homo sapien
gagatagcacatgatttcctggagc

SEQ ID NO: 3682915 - DNA, 25 bp, Homo sapien
gacaataattagaacggcagcttcc

SEQ ID NO: 3682916 - DNA, 25 bp, Homo sapien
gagtgaacccacatacaaagattac

SEQ ID NO: 3682917 - DNA, 25 bp, Homo sapien
ctgttgttagttcatgtgaatattc

SEQ ID NO: 3682918 - DNA, 25 bp, Homo sapien
ttgtcttcaaatatttgaaacttct

SEQ ID NO: 3682919 - DNA, 25 bp, Homo sapien
caggtccacggtccactttgtcttc

SEQ ID NO: 3682920 - DNA, 25 bp, Homo sapien
ggtccacggtccactttgtcttcaa

SEQ ID NO: 3682921 - DNA, 25 bp, Homo sapien
cttcaaatatttgaaacttcttcat

SEQ ID NO: 3682922 - DNA, 25 bp, Homo sapien
taaatcccctttgaagacgctgagc

SEQ ID NO: 3682923 - DNA, 25 bp, Homo sapien
atcccctttgaagacgctgagccat

SEQ ID NO: 3682924 - DNA, 25 bp, Homo sapien
ctaaatcccctttgaagacgctgag

SEQ ID NO: 3682925 - DNA, 25 bp, Homo sapien
aaatcccctttgaagacgctgagcc

SEQ ID NO: 3682926 - DNA, 25 bp, Homo sapien
tgcacaggtactcctatctttgcgg

SEQ ID NO: 3682927 - DNA, 25 bp, Homo sapien
tttgcatctctttgcacaggtactc

SEQ ID NO: 3682928 - DNA, 25 bp, Homo sapien
actcctatctttgcggagagcatac

SEQ ID NO: 3682929 - DNA, 25 bp, Homo sapien
gcatctctttgcacaggtactccta

SEQ ID NO: 3682930 - DNA, 25 bp, Homo sapien
ctgtataatgctgaaggtaaatatt

SEQ ID NO: 3682931 - DNA, 25 bp, Homo sapien
cctttgctgtataatgctgaaggta

SEQ ID NO: 3682932 - DNA, 25 bp, Homo sapien
gctgtataatgctgaaggtaaatat

SEQ ID NO: 3682933 - DNA, 25 bp, Homo sapien
gtttcctttgctgtataatgctgaa

SEQ ID NO: 3682934 - DNA, 25 bp, Homo sapien
gtgtacatggtgtgattttaacaaa

SEQ ID NO: 3682935 - DNA, 25 bp, Homo sapien
ggaacagagcccatccaacccaaga

SEQ ID NO: 3682936 - DNA, 25 bp, Homo sapien
tagcagaagcatagaaacatctgcc

SEQ ID NO: 3682937 - DNA, 25 bp, Homo sapien
tgcctaaatgagctttcccatgagg

SEQ ID NO: 3682938 - DNA, 25 bp, Homo sapien
tcctgggcaggaccattaaacattc

SEQ ID NO: 3682939 - DNA, 25 bp, Homo sapien
tgtccctgatcaagtaaccctgact

SEQ ID NO: 3682940 - DNA, 25 bp, Homo sapien
tcggagatgtaacttccagtcactg

SEQ ID NO: 3682941 - DNA, 25 bp, Homo sapien
cagtcactgcatgtccatcttgtgg

SEQ ID NO: 3682942 - DNA, 25 bp, Homo sapien
ctgctctgacagcattcaggacatt

SEQ ID NO: 3682943 - DNA, 25 bp, Homo sapien
gctctgacagcattcaggacatttg

SEQ ID NO: 3682944 - DNA, 25 bp, Homo sapien
tctgacagcattcaggacatttgcc

SEQ ID NO: 3682945 - DNA, 25 bp, Homo sapien
ctgacagcattcaggacatttgccc

SEQ ID NO: 3682946 - DNA, 25 bp, Homo sapien
ttcctcaggtgctttacactcgttc

SEQ ID NO: 3682947 - DNA, 25 bp, Homo sapien
gctttacactcgttcctctcttctg

SEQ ID NO: 3682948 - DNA, 25 bp, Homo sapien
gctttctggcgatataagaaatatc

SEQ ID NO: 3682949 - DNA, 25 bp, Homo sapien
cagctttctggcgatataagaaata

SEQ ID NO: 3682950 - DNA, 25 bp, Homo sapien
catacttccatgtgcattaggggac

SEQ ID NO: 3682951 - DNA, 25 bp, Homo sapien
aacaaggagtgcacaatcttcccat

SEQ ID NO: 3682952 - DNA, 25 bp, Homo sapien
cattaggggacaacaaggagtgcac

SEQ ID NO: 3682953 - DNA, 25 bp, Homo sapien
gggacaacaaggagtgcacaatctt

SEQ ID NO: 3682954 - DNA, 25 bp, Homo sapien
acctggatgagcctaaccaaacaac

SEQ ID NO: 3682955 - DNA, 25 bp, Homo sapien
tacttggctagtccaaacctggatg

SEQ ID NO: 3682956 - DNA, 25 bp, Homo sapien
ccatcattagaaccagtactgctcg

SEQ ID NO: 3682957 - DNA, 25 bp, Homo sapien
tcaataaatccagggtctgccattc

SEQ ID NO: 3682958 - DNA, 25 bp, Homo sapien
tacatttagtagctccagtcctatc

SEQ ID NO: 3682959 - DNA, 25 bp, Homo sapien
gcggtcaggtaatcactacaggtta

SEQ ID NO: 3682960 - DNA, 25 bp, Homo sapien
tcaaaatgtccagaacccttgcaag

SEQ ID NO: 3682961 - DNA, 25 bp, Homo sapien
ttcaaaccgcttcagtacatttagt

SEQ ID NO: 3682962 - DNA, 25 bp, Homo sapien
aaaggtctgcttcgaagcttacgtg

SEQ ID NO: 3682963 - DNA, 25 bp, Homo sapien
ctgtctgaggacctgtcacaagact

SEQ ID NO: 3682964 - DNA, 25 bp, Homo sapien
tgaaggctcaacaagcgaaaggtct

SEQ ID NO: 3682965 - DNA, 25 bp, Homo sapien
acaagactgcagttaagatgtcagc

SEQ ID NO: 3682966 - DNA, 25 bp, Homo sapien
aaatgctacactttatctcactgcc

SEQ ID NO: 3682967 - DNA, 25 bp, Homo sapien
taatgacaacttaaagttgatggca

SEQ ID NO: 3682968 - DNA, 25 bp, Homo sapien
taggagtttataccctcaaattaca

SEQ ID NO: 3682969 - DNA, 25 bp, Homo sapien
ttatgtattcttgtactatgtcttg

SEQ ID NO: 3682970 - DNA, 25 bp, Homo sapien
cttgacacatagtaaataattagca

SEQ ID NO: 3682971 - DNA, 25 bp, Homo sapien
gacacatagtaaataattagcagct

SEQ ID NO: 3682972 - DNA, 25 bp, Homo sapien
tataagacttgacacatagtaaata

SEQ ID NO: 3682973 - DNA, 25 bp, Homo sapien
gacttgacacatagtaaataattag

SEQ ID NO: 3682974 - DNA, 25 bp, Homo sapien
caaattattcaccaagtccttccac

SEQ ID NO: 3682975 - DNA, 25 bp, Homo sapien
tttcaaattattcaccaagtccttc

SEQ ID NO: 3682976 - DNA, 25 bp, Homo sapien
aagtccttccacctcttgacactca

SEQ ID NO: 3682977 - DNA, 25 bp, Homo sapien
agtccttccacctcttgacactcag

SEQ ID NO: 3682978 - DNA, 25 bp, Homo sapien
ctgatggctggagccagaaatgtgg

SEQ ID NO: 3682979 - DNA, 25 bp, Homo sapien
tggctggagccagaaatgtggccat

SEQ ID NO: 3682980 - DNA, 25 bp, Homo sapien
gatggctggagccagaaatgtggcc

SEQ ID NO: 3682981 - DNA, 25 bp, Homo sapien
atggctggagccagaaatgtggcca

SEQ ID NO: 3682982 - DNA, 25 bp, Homo sapien
agtgggtaataccaaaatccaagtg

SEQ ID NO: 3682983 - DNA, 25 bp, Homo sapien
cttccaagatgagcacttttagtgg

SEQ ID NO: 3682984 - DNA, 25 bp, Homo sapien
tttcctggaccatatagggaaagca

SEQ ID NO: 3682985 - DNA, 25 bp, Homo sapien
cctggaccatatagggaaagcagag

SEQ ID NO: 3682986 - DNA, 25 bp, Homo sapien
cagagcgtaagtactcgatggtcgt

SEQ ID NO: 3682987 - DNA, 25 bp, Homo sapien
tctggcaagggcagacaagtacaca

SEQ ID NO: 3682988 - DNA, 25 bp, Homo sapien
caagtacacattttttgcagagcgt

SEQ ID NO: 3682989 - DNA, 25 bp, Homo sapien
tacccttgcatatgccagtatgaaa

SEQ ID NO: 3682990 - DNA, 25 bp, Homo sapien
ccctgtaaggggtagtaactgtgct

SEQ ID NO: 3682991 - DNA, 25 bp, Homo sapien
ggtaatgcttccagcaaatccctgt

SEQ ID NO: 3682992 - DNA, 25 bp, Homo sapien
aagaaccatcattgaactacgtctg

SEQ ID NO: 3682993 - DNA, 25 bp, Homo sapien
tctgttgaaagatctgactgaacct

SEQ ID NO: 3682994 - DNA, 25 bp, Homo sapien
ctttctgttctcgtgcactgtagct

SEQ ID NO: 3682995 - DNA, 25 bp, Homo sapien
attctttctgttctcgtgcactgta

SEQ ID NO: 3682996 - DNA, 25 bp, Homo sapien
tgaattctttctgttctcgtgcact

SEQ ID NO: 3682997 - DNA, 25 bp, Homo sapien
gaattctttctgttctcgtgcactg

SEQ ID NO: 3682998 - DNA, 25 bp, Homo sapien
catttctatcagtgtttttgccgtc

SEQ ID NO: 3682999 - DNA, 25 bp, Homo sapien
ctctcatttctatcagtgtttttgc

SEQ ID NO: 3683000 - DNA, 25 bp, Homo sapien
ctcatttctatcagtgtttttgccg

SEQ ID NO: 3683001 - DNA, 25 bp, Homo sapien
tttctatcagtgtttttgccgtcat

SEQ ID NO: 3683002 - DNA, 25 bp, Homo sapien
tcctaatgctcagtcgctctatggg

SEQ ID NO: 3683003 - DNA, 25 bp, Homo sapien
tgctcagtcgctctatgggctgcag

SEQ ID NO: 3683004 - DNA, 25 bp, Homo sapien
cagaaagtcctaatgctcagtcgct

SEQ ID NO: 3683005 - DNA, 25 bp, Homo sapien
gaaagtcctaatgctcagtcgctct

SEQ ID NO: 3683006 - DNA, 25 bp, Homo sapien
ttttcttttgggagttcggagatca

SEQ ID NO: 3683007 - DNA, 25 bp, Homo sapien
gaaatacatcgcaattaattccttt

SEQ ID NO: 3683008 - DNA, 25 bp, Homo sapien
gagttcggagatcatagattttgga

SEQ ID NO: 3683009 - DNA, 25 bp, Homo sapien
tttgaaatacatcgcaattaattcc

SEQ ID NO: 3683010 - DNA, 25 bp, Homo sapien
gtggtactcgatcccttatctttga

SEQ ID NO: 3683011 - DNA, 25 bp, Homo sapien
ctcatatgtggtactcgatccctta

SEQ ID NO: 3683012 - DNA, 25 bp, Homo sapien
tatgtggtactcgatcccttatctt

SEQ ID NO: 3683013 - DNA, 25 bp, Homo sapien
ggtactcgatcccttatctttgatc

SEQ ID NO: 3683014 - DNA, 25 bp, Homo sapien
tataagcgcataaaactgtatcgat

SEQ ID NO: 3683015 - DNA, 25 bp, Homo sapien
tgaacatagcaccaagtagacaact

SEQ ID NO: 3683016 - DNA, 25 bp, Homo sapien
caagtagacaacttttggcgaagtc

SEQ ID NO: 3683017 - DNA, 25 bp, Homo sapien
tttccttattataagcgcataaaac

SEQ ID NO: 3683018 - DNA, 25 bp, Homo sapien
agattgaacatggttgagtggcaat

SEQ ID NO: 3683019 - DNA, 25 bp, Homo sapien
ttgaacatggttgagtggcaatgac

SEQ ID NO: 3683020 - DNA, 25 bp, Homo sapien
atgaggagggtaaagattgaacatg

SEQ ID NO: 3683021 - DNA, 25 bp, Homo sapien
gaggagggtaaagattgaacatggt

SEQ ID NO: 3683022 - DNA, 25 bp, Homo sapien
agtgtcagcaaaatgggacaaaact

SEQ ID NO: 3683023 - DNA, 25 bp, Homo sapien
gttctttcccgcttcaatagaaatc

SEQ ID NO: 3683024 - DNA, 25 bp, Homo sapien
gttctgttctttcccgcttcaatag

SEQ ID NO: 3683025 - DNA, 25 bp, Homo sapien
cagcaaaatgggacaaaactgttgt

SEQ ID NO: 3683026 - DNA, 25 bp, Homo sapien
agatacacatgaagtctattcctgg

SEQ ID NO: 3683027 - DNA, 25 bp, Homo sapien
cacaaaaactggaggctattcaaaa

SEQ ID NO: 3683028 - DNA, 25 bp, Homo sapien
tctttatgcagtctgccaattgatg

SEQ ID NO: 3683029 - DNA, 25 bp, Homo sapien
tctatgtgtccatctgtgttcctca

SEQ ID NO: 3683030 - DNA, 25 bp, Homo sapien
tctcttcggtgataaagcctgcatc

SEQ ID NO: 3683031 - DNA, 25 bp, Homo sapien
tccagcaatagtggccaaggtgtac

SEQ ID NO: 3683032 - DNA, 25 bp, Homo sapien
tcaacaaccttcaggctaataaaag

SEQ ID NO: 3683033 - DNA, 25 bp, Homo sapien
taccctgttggcagactctcagcaa

SEQ ID NO: 3683034 - DNA, 25 bp, Homo sapien
aatgagctgaagtaagcttcattaa

SEQ ID NO: 3683035 - DNA, 25 bp, Homo sapien
ctcctctgagctgaaatgagctgaa

SEQ ID NO: 3683036 - DNA, 25 bp, Homo sapien
tcctctgagctgaaatgagctgaag

SEQ ID NO: 3683037 - DNA, 25 bp, Homo sapien
gaaatgagctgaagtaagcttcatt

SEQ ID NO: 3683038 - DNA, 25 bp, Homo sapien
aaattcatgctcaaggggactgcta

SEQ ID NO: 3683039 - DNA, 25 bp, Homo sapien
cttggaaaattcatgctcaagggga

SEQ ID NO: 3683040 - DNA, 25 bp, Homo sapien
aatagattttatcaaagcttggaaa

SEQ ID NO: 3683041 - DNA, 25 bp, Homo sapien
caaggggactgctatatgcagagcc

SEQ ID NO: 3683042 - DNA, 25 bp, Homo sapien
tcattttcctgtgccacatccaagc

SEQ ID NO: 3683043 - DNA, 25 bp, Homo sapien
agcacaggaaattccgtggactgtt

SEQ ID NO: 3683044 - DNA, 25 bp, Homo sapien
caggaaattccgtggactgttttag

SEQ ID NO: 3683045 - DNA, 25 bp, Homo sapien
attccgtggactgttttaggtccat

SEQ ID NO: 3683046 - DNA, 25 bp, Homo sapien
cctctccctgcagtatctgaactct

SEQ ID NO: 3683047 - DNA, 25 bp, Homo sapien
ggtctctttccgtgaggaaatccca

SEQ ID NO: 3683048 - DNA, 25 bp, Homo sapien
cttgggtctctttccgtgaggaaat

SEQ ID NO: 3683049 - DNA, 25 bp, Homo sapien
ctttccgtgaggaaatcccatagcc

SEQ ID NO: 3683050 - DNA, 25 bp, Homo sapien
cgagaggtttatcatgtttttgtaa

SEQ ID NO: 3683051 - DNA, 25 bp, Homo sapien
aagctttgctcgagaggtttatcat

SEQ ID NO: 3683052 - DNA, 25 bp, Homo sapien
tttgctcgagaggtttatcatgttt

SEQ ID NO: 3683053 - DNA, 25 bp, Homo sapien
aaaagctttgctcgagaggtttatc

SEQ ID NO: 3683054 - DNA, 25 bp, Homo sapien
gtttcttctcctgcttggtaccatt

SEQ ID NO: 3683055 - DNA, 25 bp, Homo sapien
taccattatccagactgtgaatagc

SEQ ID NO: 3683056 - DNA, 25 bp, Homo sapien
ccagactgtgaatagcattgttgtc

SEQ ID NO: 3683057 - DNA, 25 bp, Homo sapien
tctcctgcttggtaccattatccag

SEQ ID NO: 3683058 - DNA, 25 bp, Homo sapien
gaatcttcatatctgccatggtgaa

SEQ ID NO: 3683059 - DNA, 25 bp, Homo sapien
tcatgtacttcgtatagctcaaaca

SEQ ID NO: 3683060 - DNA, 25 bp, Homo sapien
tttgaatcttcatatctgccatggt

SEQ ID NO: 3683061 - DNA, 25 bp, Homo sapien
tacattatcatgtacttcgtatagc

SEQ ID NO: 3683062 - DNA, 25 bp, Homo sapien
ggccttgggaatttgcttgtatcat

SEQ ID NO: 3683063 - DNA, 25 bp, Homo sapien
ttattcatcacaggcccaggtgact

SEQ ID NO: 3683064 - DNA, 25 bp, Homo sapien
agcccacaccagagtagttattcat

SEQ ID NO: 3683065 - DNA, 25 bp, Homo sapien
taaatcccccagtatatgaaaacca

SEQ ID NO: 3683066 - DNA, 25 bp, Homo sapien
agaactggagcagaacagcccacac

SEQ ID NO: 3683067 - DNA, 25 bp, Homo sapien
aaaatcccctcactgtggacgtaat

SEQ ID NO: 3683068 - DNA, 25 bp, Homo sapien
tttgacctatgagttggtgccagtg

SEQ ID NO: 3683069 - DNA, 25 bp, Homo sapien
ttgtcagtatgaatctcccatttga

SEQ ID NO: 3683070 - DNA, 25 bp, Homo sapien
cctcactgtggacgtaattgtatta

SEQ ID NO: 3683071 - DNA, 25 bp, Homo sapien
aagcccctttgcagttagattccct

SEQ ID NO: 3683072 - DNA, 25 bp, Homo sapien
tggtgctgatacctttgatgccaga

SEQ ID NO: 3683073 - DNA, 25 bp, Homo sapien
gatggtgctgatacctttgatgcca

SEQ ID NO: 3683074 - DNA, 25 bp, Homo sapien
ccctcgtataggtttggcatgagat

SEQ ID NO: 3683075 - DNA, 25 bp, Homo sapien
taacttggtacagtacagccacaca

SEQ ID NO: 3683076 - DNA, 25 bp, Homo sapien
gaggttgtggtctcttatgcaccag

SEQ ID NO: 3683077 - DNA, 25 bp, Homo sapien
ctccatagccaaggttgatgctgca

SEQ ID NO: 3683078 - DNA, 25 bp, Homo sapien
gaaatgttcagtaaagatatagtca

SEQ ID NO: 3683079 - DNA, 25 bp, Homo sapien
cacatttctggtacaagctaataga

SEQ ID NO: 3683080 - DNA, 25 bp, Homo sapien
tttcagctgagtgttcacatttctg

SEQ ID NO: 3683081 - DNA, 25 bp, Homo sapien
tacccctcacaatagtgttagtttc

SEQ ID NO: 3683082 - DNA, 25 bp, Homo sapien
gaattatacccctcacaatagtgtt

SEQ ID NO: 3683083 - DNA, 25 bp, Homo sapien
tactcaggataatggagctccattt

SEQ ID NO: 3683084 - DNA, 25 bp, Homo sapien
tagtggacagtctgctgccgaaacc

SEQ ID NO: 3683085 - DNA, 25 bp, Homo sapien
tatggtatcccgttttctagtggac

SEQ ID NO: 3683086 - DNA, 25 bp, Homo sapien
tgccgaaaccattcccaaatcaagt

SEQ ID NO: 3683087 - DNA, 25 bp, Homo sapien
tgttatcaagctttaagtgagtggg

SEQ ID NO: 3683088 - DNA, 25 bp, Homo sapien
ccttgcagttgccaaaattgaatag

SEQ ID NO: 3683089 - DNA, 25 bp, Homo sapien
tgggtccttgcagttgccaaaattg

SEQ ID NO: 3683090 - DNA, 25 bp, Homo sapien
aagctttaagtgagtgggtccttgc

SEQ ID NO: 3683091 - DNA, 25 bp, Homo sapien
tagccgtagcaaaacatccgttggt

SEQ ID NO: 3683092 - DNA, 25 bp, Homo sapien
tactgcatcattgcgtttttgcaaa

SEQ ID NO: 3683093 - DNA, 25 bp, Homo sapien
tagattgtgtaggataatgtatgct

SEQ ID NO: 3683094 - DNA, 25 bp, Homo sapien
aatattgtccattaatagccgtagc

SEQ ID NO: 3683095 - DNA, 25 bp, Homo sapien
gcctgatagtgtctgacagctgacg

SEQ ID NO: 3683096 - DNA, 25 bp, Homo sapien
cagctgacgtagagtgtgaactgag

SEQ ID NO: 3683097 - DNA, 25 bp, Homo sapien
gatagtgtctgacagctgacgtaga

SEQ ID NO: 3683098 - DNA, 25 bp, Homo sapien
tgtctgacagctgacgtagagtgtg

SEQ ID NO: 3683099 - DNA, 25 bp, Homo sapien
ccttttagagactccaagagtagaa

SEQ ID NO: 3683100 - DNA, 25 bp, Homo sapien
catccatgggtactggaattgggca

SEQ ID NO: 3683101 - DNA, 25 bp, Homo sapien
ttggaaaaacctgccagtaggtcac

SEQ ID NO: 3683102 - DNA, 25 bp, Homo sapien
gaattgggcaattagaatgatttgg

SEQ ID NO: 3683103 - DNA, 25 bp, Homo sapien
caatgaggaccttactggaaatacc

SEQ ID NO: 3683104 - DNA, 25 bp, Homo sapien
caagtggctcctagcttaagtgggc

SEQ ID NO: 3683105 - DNA, 25 bp, Homo sapien
ctctagtattatcgcaagtggctcc

SEQ ID NO: 3683106 - DNA, 25 bp, Homo sapien
taagtgggctttcaatgaggacctt

SEQ ID NO: 3683107 - DNA, 25 bp, Homo sapien
taaatcccatgaatagctcactgtg

SEQ ID NO: 3683108 - DNA, 25 bp, Homo sapien
tctggttaaatagcgactcattgtc

SEQ ID NO: 3683109 - DNA, 25 bp, Homo sapien
aatcccatgaatagctcactgtgac

SEQ ID NO: 3683110 - DNA, 25 bp, Homo sapien
cactgtgacctctggttaaatagcg

SEQ ID NO: 3683111 - DNA, 25 bp, Homo sapien
caggtgcctgtggtgacccagttct

SEQ ID NO: 3683112 - DNA, 25 bp, Homo sapien
atttccactttgtctccaggtgcct

SEQ ID NO: 3683113 - DNA, 25 bp, Homo sapien
tggtgacccagttctttttggacat

SEQ ID NO: 3683114 - DNA, 25 bp, Homo sapien
tccactttgtctccaggtgcctgtg

SEQ ID NO: 3683115 - DNA, 25 bp, Homo sapien
aggagagccccgtaccgcgcacacg

SEQ ID NO: 3683116 - DNA, 25 bp, Homo sapien
gcacacgctcagctcacttctgcag

SEQ ID NO: 3683117 - DNA, 25 bp, Homo sapien
tcacttctgcagactgtcattctga

SEQ ID NO: 3683118 - DNA, 25 bp, Homo sapien
cgcgcacacgctcagctcacttctg

SEQ ID NO: 3683119 - DNA, 25 bp, Homo sapien
acatctgtattccataccccagcag

SEQ ID NO: 3683120 - DNA, 25 bp, Homo sapien
tcccgtgatgagcacccagttcagc

SEQ ID NO: 3683121 - DNA, 25 bp, Homo sapien
ataccccagcagttcccgtgatgag

SEQ ID NO: 3683122 - DNA, 25 bp, Homo sapien
agcagttcccgtgatgagcacccag

SEQ ID NO: 3683123 - DNA, 25 bp, Homo sapien
tattctttgccagccacgcagaaca

SEQ ID NO: 3683124 - DNA, 25 bp, Homo sapien
tgcactgtagtgagtcagggctcgc

SEQ ID NO: 3683125 - DNA, 25 bp, Homo sapien
gggccagttgcatgacagcccctgt

SEQ ID NO: 3683126 - DNA, 25 bp, Homo sapien
aaacatgatgtattcttccaggcaa

SEQ ID NO: 3683127 - DNA, 25 bp, Homo sapien
gctcagtagcctaattacattgaaa

SEQ ID NO: 3683128 - DNA, 25 bp, Homo sapien
gggggctataaccagtgctacagct

SEQ ID NO: 3683129 - DNA, 25 bp, Homo sapien
cagctgatccgctcagtagcctaat

SEQ ID NO: 3683130 - DNA, 25 bp, Homo sapien
cagtgctacagctgatccgctcagt

SEQ ID NO: 3683131 - DNA, 25 bp, Homo sapien
gccttcacacctacagcccttaggg

SEQ ID NO: 3683132 - DNA, 25 bp, Homo sapien
ccttagggcatcctcgttcggcaga

SEQ ID NO: 3683133 - DNA, 25 bp, Homo sapien
agcccttagggcatcctcgttcggc

SEQ ID NO: 3683134 - DNA, 25 bp, Homo sapien
ttagggcatcctcgttcggcagaag

SEQ ID NO: 3683135 - DNA, 25 bp, Homo sapien
ttgaggcgctgcagattcgggacac

SEQ ID NO: 3683136 - DNA, 25 bp, Homo sapien
catgacacgtagataaccagcagga

SEQ ID NO: 3683137 - DNA, 25 bp, Homo sapien
caaaagttccaggttgcggcagtct

SEQ ID NO: 3683138 - DNA, 25 bp, Homo sapien
gaaagagatgtgctcggcgtcagca

SEQ ID NO: 3683139 - DNA, 25 bp, Homo sapien
tatgaatgcactaaaacggacaagg

SEQ ID NO: 3683140 - DNA, 25 bp, Homo sapien
taaaccggagttcaagcttcacatt

SEQ ID NO: 3683141 - DNA, 25 bp, Homo sapien
gaaggatcttgccagcaaagtgaga

SEQ ID NO: 3683142 - DNA, 25 bp, Homo sapien
tagtcaccagagttcaataaagcac

SEQ ID NO: 3683143 - DNA, 25 bp, Homo sapien
tcaagctccgagcacctggaatcat

SEQ ID NO: 3683144 - DNA, 25 bp, Homo sapien
tctccaagaatcagctcaagctccg

SEQ ID NO: 3683145 - DNA, 25 bp, Homo sapien
taactgtagatttggtcccaccagg

SEQ ID NO: 3683146 - DNA, 25 bp, Homo sapien
catacaggctagaagaaattggcag

SEQ ID NO: 3683147 - DNA, 25 bp, Homo sapien
taggcattaaaaagtgacagctttc

SEQ ID NO: 3683148 - DNA, 25 bp, Homo sapien
atatactagtagcaccatggcattg

SEQ ID NO: 3683149 - DNA, 25 bp, Homo sapien
gaattttaggaatgcttttcaatac

SEQ ID NO: 3683150 - DNA, 25 bp, Homo sapien
tggtatccatcacaagtaaggcaga

SEQ ID NO: 3683151 - DNA, 25 bp, Homo sapien
caaactggagagttctaaagccgga

SEQ ID NO: 3683152 - DNA, 25 bp, Homo sapien
gcaaaactccgtgggttagctacag

SEQ ID NO: 3683153 - DNA, 25 bp, Homo sapien
cattgtcagagagcctaatagaacc

SEQ ID NO: 3683154 - DNA, 25 bp, Homo sapien
tgtggcactgggactatttaactac

SEQ ID NO: 3683155 - DNA, 25 bp, Homo sapien
taatcataattcagtgatgttacct

SEQ ID NO: 3683156 - DNA, 25 bp, Homo sapien
tacctaaccctctattggtgccagt

SEQ ID NO: 3683157 - DNA, 25 bp, Homo sapien
cttggtggaaatacaaatacgtatg

SEQ ID NO: 3683158 - DNA, 25 bp, Homo sapien
atacgtatgtaatatgtcctctgcc

SEQ ID NO: 3683159 - DNA, 25 bp, Homo sapien
gattagactttaactagcagaggga

SEQ ID NO: 3683160 - DNA, 25 bp, Homo sapien
gaagacagactcaatataaagggct

SEQ ID NO: 3683161 - DNA, 25 bp, Homo sapien
taaaagtgaccagagtaaagcccat

SEQ ID NO: 3683162 - DNA, 25 bp, Homo sapien
ggctggaaggaacactatactggca

SEQ ID NO: 3683163 - DNA, 25 bp, Homo sapien
gaagggacagtaatcctgctctcac

SEQ ID NO: 3683164 - DNA, 25 bp, Homo sapien
aagctctgggcaccactggatggag

SEQ ID NO: 3683165 - DNA, 25 bp, Homo sapien
cataagaaaccaagaaagctctggg

SEQ ID NO: 3683166 - DNA, 25 bp, Homo sapien
tctcagagttgactagattgcgctg

SEQ ID NO: 3683167 - DNA, 25 bp, Homo sapien
tattaactacgtgcccagatgccct

SEQ ID NO: 3683168 - DNA, 25 bp, Homo sapien
caaagcgcattgtggtactgagatt

SEQ ID NO: 3683169 - DNA, 25 bp, Homo sapien
gctactttgagaacctgccagtggt

SEQ ID NO: 3683170 - DNA, 25 bp, Homo sapien
tccggaaagtccaccaggagtctgt

SEQ ID NO: 3683171 - DNA, 25 bp, Homo sapien
cttaataactctaacataaggtaga

SEQ ID NO: 3683172 - DNA, 25 bp, Homo sapien
gactgtatcagccaccattggaaga

SEQ ID NO: 3683173 - DNA, 25 bp, Homo sapien
tcaaatcgtgatacaaaccccttaa

SEQ ID NO: 3683174 - DNA, 25 bp, Homo sapien
taacataaggtagactgtgatgcag

SEQ ID NO: 3683175 - DNA, 25 bp, Homo sapien
aatgtttactgtagattgtttgcaa

SEQ ID NO: 3683176 - DNA, 25 bp, Homo sapien
ggttgatacaattaagtttccatag

SEQ ID NO: 3683177 - DNA, 25 bp, Homo sapien
ttgaagcccgttaaatggtaaatga

SEQ ID NO: 3683178 - DNA, 25 bp, Homo sapien
gaagagtgtacatagtgaaaaagtg

SEQ ID NO: 3683179 - DNA, 25 bp, Homo sapien
caaaaatgaaggtgtattcgcagct

SEQ ID NO: 3683180 - DNA, 25 bp, Homo sapien
gactacctagcctctacaaaaatga

SEQ ID NO: 3683181 - DNA, 25 bp, Homo sapien
catagctttggtaactatcacagga

SEQ ID NO: 3683182 - DNA, 25 bp, Homo sapien
tgtagctcttattccctttaacata

SEQ ID NO: 3683183 - DNA, 25 bp, Homo sapien
tctgtcatagcgtagggtgttccct

SEQ ID NO: 3683184 - DNA, 25 bp, Homo sapien
taaggagacatccaagctaaagagc

SEQ ID NO: 3683185 - DNA, 25 bp, Homo sapien
tggaggcctccagtagagtagttac

SEQ ID NO: 3683186 - DNA, 25 bp, Homo sapien
ttggaaacgcgtaaaatcagaggcc

SEQ ID NO: 3683187 - DNA, 25 bp, Homo sapien
tgcagctgttagcatcccctcctcc

SEQ ID NO: 3683188 - DNA, 25 bp, Homo sapien
gcggcttgaattctggctggcacgg

SEQ ID NO: 3683189 - DNA, 25 bp, Homo sapien
ctgcagctgttagcatcccctcctc

SEQ ID NO: 3683190 - DNA, 25 bp, Homo sapien
gcttgaattctggctggcacgggca

SEQ ID NO: 3683191 - DNA, 25 bp, Homo sapien
tgtcccgtaggaggatgaggccctt

SEQ ID NO: 3683192 - DNA, 25 bp, Homo sapien
tctttttgtcccgtaggaggatgag

SEQ ID NO: 3683193 - DNA, 25 bp, Homo sapien
tttgtcccgtaggaggatgaggccc

SEQ ID NO: 3683194 - DNA, 25 bp, Homo sapien
tttttgtcccgtaggaggatgaggc

SEQ ID NO: 3683195 - DNA, 25 bp, Homo sapien
tgagcaaatagtaaatttaggaaaa

SEQ ID NO: 3683196 - DNA, 25 bp, Homo sapien
tactgtggaataaatgtattctttc

SEQ ID NO: 3683197 - DNA, 25 bp, Homo sapien
aatgagcaaatagtaaatttaggaa

SEQ ID NO: 3683198 - DNA, 25 bp, Homo sapien
tctcatttctactgtggaataaatg

SEQ ID NO: 3683199 - DNA, 25 bp, Homo sapien
ccctaagtcggcctacatttttgca

SEQ ID NO: 3683200 - DNA, 25 bp, Homo sapien
caggactctttaccctattctaatg

SEQ ID NO: 3683201 - DNA, 25 bp, Homo sapien
taatgtccttcccactatgcccaag

SEQ ID NO: 3683202 - DNA, 25 bp, Homo sapien
cagactggcacagctctggtaagca

SEQ ID NO: 3683203 - DNA, 25 bp, Homo sapien
tcccttcaggcctagcttagtagtg

SEQ ID NO: 3683204 - DNA, 25 bp, Homo sapien
tgcatttggccatatgtagggttca

SEQ ID NO: 3683205 - DNA, 25 bp, Homo sapien
gagggccctctcactgcttctggtt

SEQ ID NO: 3683206 - DNA, 25 bp, Homo sapien
catatgcgtaagtccaggtggcaga

SEQ ID NO: 3683207 - DNA, 25 bp, Homo sapien
aaggcagaactatagtacacaaagt

SEQ ID NO: 3683208 - DNA, 25 bp, Homo sapien
ttctggaagctggtactgaaggcca

SEQ ID NO: 3683209 - DNA, 25 bp, Homo sapien
tgtgttcaataactgcttttggccc

SEQ ID NO: 3683210 - DNA, 25 bp, Homo sapien
gcaggattcgcttacttacttattg

SEQ ID NO: 3683211 - DNA, 25 bp, Homo sapien
tcaacatctaccctgtggataccag

SEQ ID NO: 3683212 - DNA, 25 bp, Homo sapien
gcagcagactgaagatagtaattat

SEQ ID NO: 3683213 - DNA, 25 bp, Homo sapien
gtgagtctgagggtgtaaaatagca

SEQ ID NO: 3683214 - DNA, 25 bp, Homo sapien
ctgtaagcttttgccgtgagtctga

SEQ ID NO: 3683215 - DNA, 25 bp, Homo sapien
gaatagagtcttggtctccttctat

SEQ ID NO: 3683216 - DNA, 25 bp, Homo sapien
gagtcttggtctccttctattttgg

SEQ ID NO: 3683217 - DNA, 25 bp, Homo sapien
tctcatgaatagagtcttggtctcc

SEQ ID NO: 3683218 - DNA, 25 bp, Homo sapien
tctttctcatgaatagagtcttggt

SEQ ID NO: 3683219 - DNA, 25 bp, Homo sapien
cttccatttcagatgataatgtctc

SEQ ID NO: 3683220 - DNA, 25 bp, Homo sapien
tccatttcagatgataatgtctcac

SEQ ID NO: 3683221 - DNA, 25 bp, Homo sapien
ttccatttcagatgataatgtctca

SEQ ID NO: 3683222 - DNA, 25 bp, Homo sapien
tctgtgagcgatgaagctcagtcct

SEQ ID NO: 3683223 - DNA, 25 bp, Homo sapien
ccttatcagttttagggagggatca

SEQ ID NO: 3683224 - DNA, 25 bp, Homo sapien
aaagctggatgggtttgcagtctgc

SEQ ID NO: 3683225 - DNA, 25 bp, Homo sapien
aattttgagttgtgacttgaacttg

SEQ ID NO: 3683226 - DNA, 25 bp, Homo sapien
cagttggctatgttaaaaagcttct

SEQ ID NO: 3683227 - DNA, 25 bp, Homo sapien
agttggctatgttaaaaagcttctt

SEQ ID NO: 3683228 - DNA, 25 bp, Homo sapien
ctttgaataatctgaaaggtatatc

SEQ ID NO: 3683229 - DNA, 25 bp, Homo sapien
tacagttggctatgttaaaaagctt

SEQ ID NO: 3683230 - DNA, 25 bp, Homo sapien
ctcttcctgccaaagcctgctataa

SEQ ID NO: 3683231 - DNA, 25 bp, Homo sapien
taattatgtttgtatgccacctttc

SEQ ID NO: 3683232 - DNA, 25 bp, Homo sapien
tcaaaaattgaagtaactgctatac

SEQ ID NO: 3683233 - DNA, 25 bp, Homo sapien
tatacaccaaacattgtcctgggtg

SEQ ID NO: 3683234 - DNA, 25 bp, Homo sapien
tattaaacaagcttatctttgagat

SEQ ID NO: 3683235 - DNA, 25 bp, Homo sapien
agatagataattgctttgattcaag

SEQ ID NO: 3683236 - DNA, 25 bp, Homo sapien
gttgcacagctactaagttagatag

SEQ ID NO: 3683237 - DNA, 25 bp, Homo sapien
agatatattaatggcactcttgctc

SEQ ID NO: 3683238 - DNA, 25 bp, Homo sapien
tgagcaagctccttggtaatgatga

SEQ ID NO: 3683239 - DNA, 25 bp, Homo sapien
taggaatgagcaagctccttggtaa

SEQ ID NO: 3683240 - DNA, 25 bp, Homo sapien
agcaagctccttggtaatgatgaca

SEQ ID NO: 3683241 - DNA, 25 bp, Homo sapien
gaatgagcaagctccttggtaatga

SEQ ID NO: 3683242 - DNA, 25 bp, Homo sapien
catctaggagatctggcaccgaggt

SEQ ID NO: 3683243 - DNA, 25 bp, Homo sapien
taggagatctggcaccgaggtggtg

SEQ ID NO: 3683244 - DNA, 25 bp, Homo sapien
gtgggcatctaggagatctggcacc

SEQ ID NO: 3683245 - DNA, 25 bp, Homo sapien
ctgtaggtgggcatctaggagatct

SEQ ID NO: 3683246 - DNA, 25 bp, Homo sapien
tagtggccattgcagtgcataagaa

SEQ ID NO: 3683247 - DNA, 25 bp, Homo sapien
gcagtgcataagaactggtaagatg

SEQ ID NO: 3683248 - DNA, 25 bp, Homo sapien
cataagaactggtaagatgccttac

SEQ ID NO: 3683249 - DNA, 25 bp, Homo sapien
ctagtggccattgcagtgcataaga

SEQ ID NO: 3683250 - DNA, 25 bp, Homo sapien
caaatatagtatcaagagaaagaca

SEQ ID NO: 3683251 - DNA, 25 bp, Homo sapien
acttagacaatatagaaccctggag

SEQ ID NO: 3683252 - DNA, 25 bp, Homo sapien
tggaggaactctgatttaagatggt

SEQ ID NO: 3683253 - DNA, 25 bp, Homo sapien
catgatgagtcaacatcagtagctc

SEQ ID NO: 3683254 - DNA, 25 bp, Homo sapien
aggctctcagcctctaagtctgcat

SEQ ID NO: 3683255 - DNA, 25 bp, Homo sapien
ggctctcagcctctaagtctgcatc

SEQ ID NO: 3683256 - DNA, 25 bp, Homo sapien
tacctgaagttacataatctgtagc

SEQ ID NO: 3683257 - DNA, 25 bp, Homo sapien
tagactctgaggattagaaattgag

SEQ ID NO: 3683258 - DNA, 25 bp, Homo sapien
catagtaacaccatccaagtattga

SEQ ID NO: 3683259 - DNA, 25 bp, Homo sapien
gtattgagtgtcattctacctgaag

SEQ ID NO: 3683260 - DNA, 25 bp, Homo sapien
ggttgggctccatataaagttgtcc

SEQ ID NO: 3683261 - DNA, 25 bp, Homo sapien
ttacttcctagtttgccagatgcca

SEQ ID NO: 3683262 - DNA, 25 bp, Homo sapien
taaatactggaagtcatgcaagctg

SEQ ID NO: 3683263 - DNA, 25 bp, Homo sapien
caagctgtggatgataggtactctc

SEQ ID NO: 3683264 - DNA, 25 bp, Homo sapien
agatgtgtgaacatctctctacttg

SEQ ID NO: 3683265 - DNA, 25 bp, Homo sapien
gaaaggatggcattaaactaaatga

SEQ ID NO: 3683266 - DNA, 25 bp, Homo sapien
ttttttgctgatgcttactgacaca

SEQ ID NO: 3683267 - DNA, 25 bp, Homo sapien
aaattacctattactattagttgag

SEQ ID NO: 3683268 - DNA, 25 bp, Homo sapien
cagaacattaaagggcaccattaga

SEQ ID NO: 3683269 - DNA, 25 bp, Homo sapien
gaatgatgttgtcatagcaaatact

SEQ ID NO: 3683270 - DNA, 25 bp, Homo sapien
caaatactgctagaatgattgctgt

SEQ ID NO: 3683271 - DNA, 25 bp, Homo sapien
ttcagaacattaaagggcaccatta

SEQ ID NO: 3683272 - DNA, 25 bp, Homo sapien
tggaacccttaggatcacatgtaga

SEQ ID NO: 3683273 - DNA, 25 bp, Homo sapien
tagaccgagcaaatgtcaagttcac

SEQ ID NO: 3683274 - DNA, 25 bp, Homo sapien
ccttaggatcacatgtagaccgagc

SEQ ID NO: 3683275 - DNA, 25 bp, Homo sapien
ggatcacatgtagaccgagcaaatg

SEQ ID NO: 3683276 - DNA, 25 bp, Homo sapien
gttgaaagcttcgattatgggccat

SEQ ID NO: 3683277 - DNA, 25 bp, Homo sapien
ccaaaaagtcctgttgaaagcttcg

SEQ ID NO: 3683278 - DNA, 25 bp, Homo sapien
aaagtcctgttgaaagcttcgatta

SEQ ID NO: 3683279 - DNA, 25 bp, Homo sapien
tcctgttgaaagcttcgattatggg

SEQ ID NO: 3683280 - DNA, 25 bp, Homo sapien
aaatcgaagtaaataatttgatgcg

SEQ ID NO: 3683281 - DNA, 25 bp, Homo sapien
taaataatttgatgcgagtggtcat

SEQ ID NO: 3683282 - DNA, 25 bp, Homo sapien
taaataagctacaaatcgaagtaaa

SEQ ID NO: 3683283 - DNA, 25 bp, Homo sapien
taagctacaaatcgaagtaaataat

SEQ ID NO: 3683284 - DNA, 25 bp, Homo sapien
tcctcttaatagagatgccctaagc

SEQ ID NO: 3683285 - DNA, 25 bp, Homo sapien
catcctcttaatagagatgccctaa

SEQ ID NO: 3683286 - DNA, 25 bp, Homo sapien
ctcatcctcttaatagagatgccct

SEQ ID NO: 3683287 - DNA, 25 bp, Homo sapien
ctcctcatcctcttaatagagatgc

SEQ ID NO: 3683288 - DNA, 25 bp, Homo sapien
gataagatctctccccaaagacgcc

SEQ ID NO: 3683289 - DNA, 25 bp, Homo sapien
tgtctcccgccattggaaatactgc

SEQ ID NO: 3683290 - DNA, 25 bp, Homo sapien
aaacaagagtaagtggtgccagatc

SEQ ID NO: 3683291 - DNA, 25 bp, Homo sapien
gaagtgttggactccctacctcaca

SEQ ID NO: 3683292 - DNA, 25 bp, Homo sapien
tggacaggaactgtgtaaagttctg

SEQ ID NO: 3683293 - DNA, 25 bp, Homo sapien
aagttctgttgtgaatctctgtcca

SEQ ID NO: 3683294 - DNA, 25 bp, Homo sapien
tccctttggacaggaactgtgtaaa

SEQ ID NO: 3683295 - DNA, 25 bp, Homo sapien
ttgctttgttaattatccctttgga

SEQ ID NO: 3683296 - DNA, 25 bp, Homo sapien
taaacttgtagaaagtgctctctgg

SEQ ID NO: 3683297 - DNA, 25 bp, Homo sapien
cagcatgttccctaaacttgtagaa

SEQ ID NO: 3683298 - DNA, 25 bp, Homo sapien
tctacatcagcatgttccctaaact

SEQ ID NO: 3683299 - DNA, 25 bp, Homo sapien
tgttccctaaacttgtagaaagtgc

SEQ ID NO: 3683300 - DNA, 25 bp, Homo sapien
caccttcgttgaaagaaattgttga

SEQ ID NO: 3683301 - DNA, 25 bp, Homo sapien
ctccacaccttcgttgaaagaaatt

SEQ ID NO: 3683302 - DNA, 25 bp, Homo sapien
ttttgctggctagttataaaagctt

SEQ ID NO: 3683303 - DNA, 25 bp, Homo sapien
gaaagctcagattttgctggctagt

SEQ ID NO: 3683304 - DNA, 25 bp, Homo sapien
agcattttaaatgccctgccaacag

SEQ ID NO: 3683305 - DNA, 25 bp, Homo sapien
aaatgtataagctctgtctgtcaga

SEQ ID NO: 3683306 - DNA, 25 bp, Homo sapien
aatctgtatttgagatgcaatcaaa

SEQ ID NO: 3683307 - DNA, 25 bp, Homo sapien
gatgcaatcaaattgatgtgctcaa

SEQ ID NO: 3683308 - DNA, 25 bp, Homo sapien
tgatgcaccccacagtaacttattg

SEQ ID NO: 3683309 - DNA, 25 bp, Homo sapien
agctcagtctctaggtgtgtttcca

SEQ ID NO: 3683310 - DNA, 25 bp, Homo sapien
tgttgtgattgtgctcaggtccagc

SEQ ID NO: 3683311 - DNA, 25 bp, Homo sapien
acttattgtgggctggtcgtatgcc

SEQ ID NO: 3683312 - DNA, 25 bp, Homo sapien
tgcatgtttcgcacagcacagaatt

SEQ ID NO: 3683313 - DNA, 25 bp, Homo sapien
gaaatgatgtagtgcacaacgcaaa

SEQ ID NO: 3683314 - DNA, 25 bp, Homo sapien
taacctatgtcaagcaaacagcaca

SEQ ID NO: 3683315 - DNA, 25 bp, Homo sapien
ggatgtttaccgtctacttgagtga

SEQ ID NO: 3683316 - DNA, 25 bp, Homo sapien
tcacccttaacctggacatggcaaa

SEQ ID NO: 3683317 - DNA, 25 bp, Homo sapien
ttagggccttggttgcacagagctg

SEQ ID NO: 3683318 - DNA, 25 bp, Homo sapien
cgtatttggtgtagcttagggcctt

SEQ ID NO: 3683319 - DNA, 25 bp, Homo sapien
gctgtggttccaaggtgattgcttc

SEQ ID NO: 3683320 - DNA, 25 bp, Homo sapien
gggcctacatgcatccacatcttgg

SEQ ID NO: 3683321 - DNA, 25 bp, Homo sapien
tgtgttcaaccctgtactatggatc

SEQ ID NO: 3683322 - DNA, 25 bp, Homo sapien
aattcaactgcaccaattattggcc

SEQ ID NO: 3683323 - DNA, 25 bp, Homo sapien
ttagctccgaattgaacatgtgttc

SEQ ID NO: 3683324 - DNA, 25 bp, Homo sapien
tttcagccagttgaaggttatatta

SEQ ID NO: 3683325 - DNA, 25 bp, Homo sapien
ccagttgaaggttatattattgata

SEQ ID NO: 3683326 - DNA, 25 bp, Homo sapien
tcagccagttgaaggttatattatt

SEQ ID NO: 3683327 - DNA, 25 bp, Homo sapien
cagccagttgaaggttatattattg

SEQ ID NO: 3683328 - DNA, 25 bp, Homo sapien
tgtacttggtgactttattgaccat

SEQ ID NO: 3683329 - DNA, 25 bp, Homo sapien
tattctgtagctcaagccatgtcat

SEQ ID NO: 3683330 - DNA, 25 bp, Homo sapien
tttctccaccttgtcatttgtactt

SEQ ID NO: 3683331 - DNA, 25 bp, Homo sapien
tgtcattgctacagtttgcgactgt

SEQ ID NO: 3683332 - DNA, 25 bp, Homo sapien
tttgtccatctccacgaagtaatga

SEQ ID NO: 3683333 - DNA, 25 bp, Homo sapien
tgatgtagtatgcttccagatccca

SEQ ID NO: 3683334 - DNA, 25 bp, Homo sapien
ccagatcccatatcatctgtgtaag

SEQ ID NO: 3683335 - DNA, 25 bp, Homo sapien
tctgagtaggacaagtagagtctgc

SEQ ID NO: 3683336 - DNA, 25 bp, Homo sapien
ttttttaccacatcttcaacccaga

SEQ ID NO: 3683337 - DNA, 25 bp, Homo sapien
taccaggagcatctttgttgtccac

SEQ ID NO: 3683338 - DNA, 25 bp, Homo sapien
tcttcaacccagataccaggagcat

SEQ ID NO: 3683339 - DNA, 25 bp, Homo sapien
tgtccacaatcagaattattctaga

SEQ ID NO: 3683340 - DNA, 25 bp, Homo sapien
ttagaaggctcttcttccagtaccc

SEQ ID NO: 3683341 - DNA, 25 bp, Homo sapien
ctgttagaaggctcttcttccagta

SEQ ID NO: 3683342 - DNA, 25 bp, Homo sapien
ttatctgttagaaggctcttcttcc

SEQ ID NO: 3683343 - DNA, 25 bp, Homo sapien
tatctgttagaaggctcttcttcca

SEQ ID NO: 3683344 - DNA, 25 bp, Homo sapien
tatattgggaattctcatggctgcc

SEQ ID NO: 3683345 - DNA, 25 bp, Homo sapien
tattagagtcccagttttccagatg

SEQ ID NO: 3683346 - DNA, 25 bp, Homo sapien
gcatgtgccaccctgtagaaaacta

SEQ ID NO: 3683347 - DNA, 25 bp, Homo sapien
gaagcaaaaagtcagtggtaccaag

SEQ ID NO: 3683348 - DNA, 25 bp, Homo sapien
gtcacaggttcttgcaaagtaggtg

SEQ ID NO: 3683349 - DNA, 25 bp, Homo sapien
cacaggttcttgcaaagtaggtggg

SEQ ID NO: 3683350 - DNA, 25 bp, Homo sapien
taaaaaattgtcacaggttcttgca

SEQ ID NO: 3683351 - DNA, 25 bp, Homo sapien
aaaaattgtcacaggttcttgcaaa

SEQ ID NO: 3683352 - DNA, 25 bp, Homo sapien
tctgttgataccatgactctggaga

SEQ ID NO: 3683353 - DNA, 25 bp, Homo sapien
cctgtggttgatttaggaccctgca

SEQ ID NO: 3683354 - DNA, 25 bp, Homo sapien
taaattgagccacgggcaaagagct

SEQ ID NO: 3683355 - DNA, 25 bp, Homo sapien
taggtttggttgtcaggtctggcac

SEQ ID NO: 3683356 - DNA, 25 bp, Homo sapien
ccagagatggaattaaatttgctga

SEQ ID NO: 3683357 - DNA, 25 bp, Homo sapien
tcccccagagatggaattaaatttg

SEQ ID NO: 3683358 - DNA, 25 bp, Homo sapien
cttagagaatgagtttactccccca

SEQ ID NO: 3683359 - DNA, 25 bp, Homo sapien
aatgagtttactcccccagagatgg

SEQ ID NO: 3683360 - DNA, 25 bp, Homo sapien
gacagtctagaactcatcctcatcc

SEQ ID NO: 3683361 - DNA, 25 bp, Homo sapien
taattgacagtctagaactcatcct

SEQ ID NO: 3683362 - DNA, 25 bp, Homo sapien
tcttaattgacagtctagaactcat

SEQ ID NO: 3683363 - DNA, 25 bp, Homo sapien
ctggtctcttaattgacagtctaga

SEQ ID NO: 3683364 - DNA, 25 bp, Homo sapien
tttctgaatgtttcgggtctgtcct

SEQ ID NO: 3683365 - DNA, 25 bp, Homo sapien
tccaacccttgatcttcagccacag

SEQ ID NO: 3683366 - DNA, 25 bp, Homo sapien
tgaatgtttcgggtctgtcctcctg

SEQ ID NO: 3683367 - DNA, 25 bp, Homo sapien
tctgtctttctgaatgtttcgggtc

SEQ ID NO: 3683368 - DNA, 25 bp, Homo sapien
acccatacatatataaatctaatgt

SEQ ID NO: 3683369 - DNA, 25 bp, Homo sapien
ctaatgtttcttcttggaggtgcat

SEQ ID NO: 3683370 - DNA, 25 bp, Homo sapien
aaatctaatgtttcttcttggaggt

SEQ ID NO: 3683371 - DNA, 25 bp, Homo sapien
tctaatgtttcttcttggaggtgca

SEQ ID NO: 3683372 - DNA, 25 bp, Homo sapien
cagttttacttccattccagatttc

SEQ ID NO: 3683373 - DNA, 25 bp, Homo sapien
agacttctcatggattttaacagtt

SEQ ID NO: 3683374 - DNA, 25 bp, Homo sapien
aattctgaatcttcattaattcaag

SEQ ID NO: 3683375 - DNA, 25 bp, Homo sapien
ttaacagttttacttccattccaga

SEQ ID NO: 3683376 - DNA, 25 bp, Homo sapien
cttaggagaatgacgtcgggtttat

SEQ ID NO: 3683377 - DNA, 25 bp, Homo sapien
gagaatgacgtcgggtttattttgc

SEQ ID NO: 3683378 - DNA, 25 bp, Homo sapien
gtcgggtttattttgctcccagcaa

SEQ ID NO: 3683379 - DNA, 25 bp, Homo sapien
tgacgtcgggtttattttgctccca

SEQ ID NO: 3683380 - DNA, 25 bp, Homo sapien
ggtaattttgacttggtcattgtca

SEQ ID NO: 3683381 - DNA, 25 bp, Homo sapien
tattaccgtacatgaccacacttcc

SEQ ID NO: 3683382 - DNA, 25 bp, Homo sapien
ttcccggggataatggcacagctgg

SEQ ID NO: 3683383 - DNA, 25 bp, Homo sapien
ggtcattgtcacataatgcgggtat

SEQ ID NO: 3683384 - DNA, 25 bp, Homo sapien
ccagagagcttaaagcctgagagcc

SEQ ID NO: 3683385 - DNA, 25 bp, Homo sapien
cagaggcagccatgatttctaatac

SEQ ID NO: 3683386 - DNA, 25 bp, Homo sapien
tcttggccagagagcttaaagcctg

SEQ ID NO: 3683387 - DNA, 25 bp, Homo sapien
cctgagagccctttgtcatttgcct

SEQ ID NO: 3683388 - DNA, 25 bp, Homo sapien
gctttatgtagactccaaaatgatg

SEQ ID NO: 3683389 - DNA, 25 bp, Homo sapien
tactgtgttgaccattgtagataca

SEQ ID NO: 3683390 - DNA, 25 bp, Homo sapien
agattgctcttttgggcagtactcc

SEQ ID NO: 3683391 - DNA, 25 bp, Homo sapien
tgtggcacttataggctaatacgtc

SEQ ID NO: 3683392 - DNA, 25 bp, Homo sapien
taagaaaagtctggagcggtgttca

SEQ ID NO: 3683393 - DNA, 25 bp, Homo sapien
taatcatttctcatacagggtacag

SEQ ID NO: 3683394 - DNA, 25 bp, Homo sapien
tcgctattgtgatatgtgcccctgc

SEQ ID NO: 3683395 - DNA, 25 bp, Homo sapien
gcaggcaaggtcacaagtaagttaa

SEQ ID NO: 3683396 - DNA, 25 bp, Homo sapien
acactagaattggatttttcatagt

SEQ ID NO: 3683397 - DNA, 25 bp, Homo sapien
ctgtaaaacttctttccaactcttg

SEQ ID NO: 3683398 - DNA, 25 bp, Homo sapien
ctctgtaaaacttctttccaactct

SEQ ID NO: 3683399 - DNA, 25 bp, Homo sapien
ggtccaatgcagtgtgatgatctgg

SEQ ID NO: 3683400 - DNA, 25 bp, Homo sapien
tcaagaaaatggtccaatgcagtgt

SEQ ID NO: 3683401 - DNA, 25 bp, Homo sapien
gaaattctgaggagctattagctgg

SEQ ID NO: 3683402 - DNA, 25 bp, Homo sapien
gaagaaattctgaggagctattagc

SEQ ID NO: 3683403 - DNA, 25 bp, Homo sapien
tctgtggcacctggatattgtgtat

SEQ ID NO: 3683404 - DNA, 25 bp, Homo sapien
gtggcacctggatattgtgtatgaa

SEQ ID NO: 3683405 - DNA, 25 bp, Homo sapien
cttttctgtggcacctggatattgt

SEQ ID NO: 3683406 - DNA, 25 bp, Homo sapien
ttttctgtggcacctggatattgtg

SEQ ID NO: 3683407 - DNA, 25 bp, Homo sapien
catgaaaactgtagtggtaactctg

SEQ ID NO: 3683408 - DNA, 25 bp, Homo sapien
gaaaactgtagtggtaactctgttc

SEQ ID NO: 3683409 - DNA, 25 bp, Homo sapien
ggtaactctgttcttctgactgcct

SEQ ID NO: 3683410 - DNA, 25 bp, Homo sapien
actgtagtggtaactctgttcttct

SEQ ID NO: 3683411 - DNA, 25 bp, Homo sapien
tttatgataagggactagaaccacc

SEQ ID NO: 3683412 - DNA, 25 bp, Homo sapien
tgataagggactagaaccaccttct

SEQ ID NO: 3683413 - DNA, 25 bp, Homo sapien
taagggactagaaccaccttctctg

SEQ ID NO: 3683414 - DNA, 25 bp, Homo sapien
gggactagaaccaccttctctgcct

SEQ ID NO: 3683415 - DNA, 25 bp, Homo sapien
gccattcatagaggatagctttttg

SEQ ID NO: 3683416 - DNA, 25 bp, Homo sapien
catagaggatagctttttgctgatg

SEQ ID NO: 3683417 - DNA, 25 bp, Homo sapien
agaggatagctttttgctgatgcag

SEQ ID NO: 3683418 - DNA, 25 bp, Homo sapien
cagtggggccctttgacaaaacaag

SEQ ID NO: 3683419 - DNA, 25 bp, Homo sapien
ctctgctctgtacttgtgggtcagt

SEQ ID NO: 3683420 - DNA, 25 bp, Homo sapien
tgggtcagtttcagcatttgagtag

SEQ ID NO: 3683421 - DNA, 25 bp, Homo sapien
gtgggaacatcttctttgccagcag

SEQ ID NO: 3683422 - DNA, 25 bp, Homo sapien
tgttatcttagtgggaacatcttct

SEQ ID NO: 3683423 - DNA, 25 bp, Homo sapien
ctggatgtcttttaggcttgccttc

SEQ ID NO: 3683424 - DNA, 25 bp, Homo sapien
tggaacccacatcacgtgcagtcac

SEQ ID NO: 3683425 - DNA, 25 bp, Homo sapien
aggatacagggcgagccctcagcaa

SEQ ID NO: 3683426 - DNA, 25 bp, Homo sapien
aggaactcccatcttaggatacagg

SEQ ID NO: 3683427 - DNA, 25 bp, Homo sapien
acctgaagttcggtctcttcattag

SEQ ID NO: 3683428 - DNA, 25 bp, Homo sapien
tgaagttcggtctcttcattagaga

SEQ ID NO: 3683429 - DNA, 25 bp, Homo sapien
ctttcaaacctgaagttcggtctct

SEQ ID NO: 3683430 - DNA, 25 bp, Homo sapien
caaacctgaagttcggtctcttcat

SEQ ID NO: 3683431 - DNA, 25 bp, Homo sapien
tcaaataaaccatgatcaaatttag

SEQ ID NO: 3683432 - DNA, 25 bp, Homo sapien
ctatttgtcgttattcgcatgcaaa

SEQ ID NO: 3683433 - DNA, 25 bp, Homo sapien
tcgttattcgcatgcaaacacatgc

SEQ ID NO: 3683434 - DNA, 25 bp, Homo sapien
tttgtcgttattcgcatgcaaacac

SEQ ID NO: 3683435 - DNA, 25 bp, Homo sapien
caccacagtgatgtatagcgacctt

SEQ ID NO: 3683436 - DNA, 25 bp, Homo sapien
cagtaatgtttctcacgctagtgta

SEQ ID NO: 3683437 - DNA, 25 bp, Homo sapien
cattgaactccaagatatgcctagc

SEQ ID NO: 3683438 - DNA, 25 bp, Homo sapien
taggttgctagaaagaaaggagcca

SEQ ID NO: 3683439 - DNA, 25 bp, Homo sapien
tttgcgctcagaatgctcaagtttc

SEQ ID NO: 3683440 - DNA, 25 bp, Homo sapien
ggtgctgttgctttgcgctcagaat

SEQ ID NO: 3683441 - DNA, 25 bp, Homo sapien
tcagggtatatccccaccaggcact

SEQ ID NO: 3683442 - DNA, 25 bp, Homo sapien
gccaaaccctctgtaggaatgtagt

SEQ ID NO: 3683443 - DNA, 25 bp, Homo sapien
tgatcagtcccagtgcgaaaacctg

SEQ ID NO: 3683444 - DNA, 25 bp, Homo sapien
tgagttgtagtcacctttgccaggg

SEQ ID NO: 3683445 - DNA, 25 bp, Homo sapien
gacgctgttcagctccctggattcg

SEQ ID NO: 3683446 - DNA, 25 bp, Homo sapien
tacttctaattggaggtctcggccc

SEQ ID NO: 3683447 - DNA, 25 bp, Homo sapien
tagttatcagccagacatatttgtt

SEQ ID NO: 3683448 - DNA, 25 bp, Homo sapien
catctttcttgctaccaccatagtt

SEQ ID NO: 3683449 - DNA, 25 bp, Homo sapien
tcatgaggaactgttaataagttgc

SEQ ID NO: 3683450 - DNA, 25 bp, Homo sapien
taagttgcacttggaaatcagaaat

SEQ ID NO: 3683451 - DNA, 25 bp, Homo sapien
tagctctcaagctgatgatcagtgg

SEQ ID NO: 3683452 - DNA, 25 bp, Homo sapien
ccaggctgtagtgctcctacataac

SEQ ID NO: 3683453 - DNA, 25 bp, Homo sapien
ggctgcctccgtctctatctggtaa

SEQ ID NO: 3683454 - DNA, 25 bp, Homo sapien
ggccctagctctcaagctgatgatc

SEQ ID NO: 3683455 - DNA, 25 bp, Homo sapien
tatctattgtgggattttcatgtct

SEQ ID NO: 3683456 - DNA, 25 bp, Homo sapien
tctctccacttggtaactggctgca

SEQ ID NO: 3683457 - DNA, 25 bp, Homo sapien
gtacatcataactgtcatgacaaaa

SEQ ID NO: 3683458 - DNA, 25 bp, Homo sapien
tcatgtctttcatatgtgttcataa

SEQ ID NO: 3683459 - DNA, 25 bp, Homo sapien
catctcctgtctattgaaggtacca

SEQ ID NO: 3683460 - DNA, 25 bp, Homo sapien
attctgatccatctcctgtctattg

SEQ ID NO: 3683461 - DNA, 25 bp, Homo sapien
taaataaccacgagaattctgatcc

SEQ ID NO: 3683462 - DNA, 25 bp, Homo sapien
aaggtaccaatagcttcaatagatg

SEQ ID NO: 3683463 - DNA, 25 bp, Homo sapien
ttggggattgctgtccatacctttt

SEQ ID NO: 3683464 - DNA, 25 bp, Homo sapien
tggggattgctgtccataccttttc

SEQ ID NO: 3683465 - DNA, 25 bp, Homo sapien
ctcttcttggccataactttggctt

SEQ ID NO: 3683466 - DNA, 25 bp, Homo sapien
cataactttggctttggggattgct

SEQ ID NO: 3683467 - DNA, 25 bp, Homo sapien
ggctttgttcacacatgaatgtaca

SEQ ID NO: 3683468 - DNA, 25 bp, Homo sapien
cattttgtcccgctttggatatagc

SEQ ID NO: 3683469 - DNA, 25 bp, Homo sapien
tagcaaacccatattttactcttgc

SEQ ID NO: 3683470 - DNA, 25 bp, Homo sapien
catgaatgtacagccaacactgaaa

SEQ ID NO: 3683471 - DNA, 25 bp, Homo sapien
atcaggagccttggcagccagtgga

SEQ ID NO: 3683472 - DNA, 25 bp, Homo sapien
tgctgtaaaggccagctgcgtctca

SEQ ID NO: 3683473 - DNA, 25 bp, Homo sapien
caggaggtgatcctaggatgatcag

SEQ ID NO: 3683474 - DNA, 25 bp, Homo sapien
acacaggaggtgatcctaggatgat

SEQ ID NO: 3683475 - DNA, 25 bp, Homo sapien
tgtcctaagcttaaggtttctagag

SEQ ID NO: 3683476 - DNA, 25 bp, Homo sapien
tgccttcccattagacatcctgtgg

SEQ ID NO: 3683477 - DNA, 25 bp, Homo sapien
agttttatgctcttgtgccttccca

SEQ ID NO: 3683478 - DNA, 25 bp, Homo sapien
actctgagagcaacaagttttatgc

SEQ ID NO: 3683479 - DNA, 25 bp, Homo sapien
gctacataaattgtctacagcatca

SEQ ID NO: 3683480 - DNA, 25 bp, Homo sapien
tggctatccagaattcgatcataaa

SEQ ID NO: 3683481 - DNA, 25 bp, Homo sapien
tgagatttcgcatcagtttcactct

SEQ ID NO: 3683482 - DNA, 25 bp, Homo sapien
tgttgtgacatttctgtttggctac

SEQ ID NO: 3683483 - DNA, 25 bp, Homo sapien
ccgtgtattccagttttgtctggct

SEQ ID NO: 3683484 - DNA, 25 bp, Homo sapien
gaattatgactcacttgtgctccca

SEQ ID NO: 3683485 - DNA, 25 bp, Homo sapien
ctggcttcagcttattgctggtgga

SEQ ID NO: 3683486 - DNA, 25 bp, Homo sapien
tcccaaaccagcgtatctgccgtgt

SEQ ID NO: 3683487 - DNA, 25 bp, Homo sapien
caagtaaggacatatctttacttgt

SEQ ID NO: 3683488 - DNA, 25 bp, Homo sapien
acaatctctaaatcaagtaaggaca

SEQ ID NO: 3683489 - DNA, 25 bp, Homo sapien
aaatcaagtaaggacatatctttac

SEQ ID NO: 3683490 - DNA, 25 bp, Homo sapien
tctctaaatcaagtaaggacatatc

SEQ ID NO: 3683491 - DNA, 25 bp, Homo sapien
tggaaatgaatagttttccactggc

SEQ ID NO: 3683492 - DNA, 25 bp, Homo sapien
ccagggcacgatgaaaacacaacgt

SEQ ID NO: 3683493 - DNA, 25 bp, Homo sapien
ttgctgccagggcacgatgaaaaca

SEQ ID NO: 3683494 - DNA, 25 bp, Homo sapien
aaatgaatagttttccactggcctc

SEQ ID NO: 3683495 - DNA, 25 bp, Homo sapien
tttggttgtatgtgtgaggaaacat

SEQ ID NO: 3683496 - DNA, 25 bp, Homo sapien
ctgcccaagtcaacagctgcggcag

SEQ ID NO: 3683497 - DNA, 25 bp, Homo sapien
cctgcccctcctgcggctgccccag

SEQ ID NO: 3683498 - DNA, 25 bp, Homo sapien
tgcccctcctgcggctgccccagat

SEQ ID NO: 3683499 - DNA, 25 bp, Homo sapien
agcctgcccctcctgcggctgcccc

SEQ ID NO: 3683500 - DNA, 25 bp, Homo sapien
tgtgaagaagaccgagacccgcgat

SEQ ID NO: 3683501 - DNA, 25 bp, Homo sapien
gtgaagaagaccgagacccgcgatg

SEQ ID NO: 3683502 - DNA, 25 bp, Homo sapien
gaagaagaccgagacccgcgatggg

SEQ ID NO: 3683503 - DNA, 25 bp, Homo sapien
tgaagaagaccgagacccgcgatgg

SEQ ID NO: 3683504 - DNA, 25 bp, Homo sapien
aaaagtaaggtcaataagaaatgat

SEQ ID NO: 3683505 - DNA, 25 bp, Homo sapien
taaaagtaaggtcaataagaaatga

SEQ ID NO: 3683506 - DNA, 25 bp, Homo sapien
tcctgaaatacactagggtgcttgt

SEQ ID NO: 3683507 - DNA, 25 bp, Homo sapien
tacagatgcatcataagccaaattg

SEQ ID NO: 3683508 - DNA, 25 bp, Homo sapien
gatgcatcataagccaaattgtgag

SEQ ID NO: 3683509 - DNA, 25 bp, Homo sapien
tacactagggtgcttgtcaggctgt

SEQ ID NO: 3683510 - DNA, 25 bp, Homo sapien
gactttttgattggttgtgccagcc

SEQ ID NO: 3683511 - DNA, 25 bp, Homo sapien
taagggggtgcaagctgactttttg

SEQ ID NO: 3683512 - DNA, 25 bp, Homo sapien
tctttgaagtaagggggtgcaagct

SEQ ID NO: 3683513 - DNA, 25 bp, Homo sapien
ccccaagtctttgataggatgtgag

SEQ ID NO: 3683514 - DNA, 25 bp, Homo sapien
tgtcccctctcatcctgtgctgcat

SEQ ID NO: 3683515 - DNA, 25 bp, Homo sapien
gtacaatatgtcattctttccttgt

SEQ ID NO: 3683516 - DNA, 25 bp, Homo sapien
gagtacaatatgtcattctttcctt

SEQ ID NO: 3683517 - DNA, 25 bp, Homo sapien
cagagtacaatatgtcattctttcc

SEQ ID NO: 3683518 - DNA, 25 bp, Homo sapien
ctttttagcctttccatcacttctt

SEQ ID NO: 3683519 - DNA, 25 bp, Homo sapien
gccaaattcttggatgtttaaatct

SEQ ID NO: 3683520 - DNA, 25 bp, Homo sapien
tttttatcttgacctgtcacttcag

SEQ ID NO: 3683521 - DNA, 25 bp, Homo sapien
aatctttgccaggtctctttttatc

SEQ ID NO: 3683522 - DNA, 25 bp, Homo sapien
tcattctgtgttggagattctccta

SEQ ID NO: 3683523 - DNA, 25 bp, Homo sapien
ggtggaattacatggagaataattc

SEQ ID NO: 3683524 - DNA, 25 bp, Homo sapien
tctcctatgaacaggcttaaagtgg

SEQ ID NO: 3683525 - DNA, 25 bp, Homo sapien
gtcacatgccattggatgattatca

SEQ ID NO: 3683526 - DNA, 25 bp, Homo sapien
aaaaactaatgatgtgaaccattgt

SEQ ID NO: 3683527 - DNA, 25 bp, Homo sapien
acaacaaaaactaatgatgtgaacc

SEQ ID NO: 3683528 - DNA, 25 bp, Homo sapien
atgatgtgaaccattgtttaaaagc

SEQ ID NO: 3683529 - DNA, 25 bp, Homo sapien
tgtgaaccattgtttaaaagcaaaa

SEQ ID NO: 3683530 - DNA, 25 bp, Homo sapien
cgtgtaataatgatgctagctgctt

SEQ ID NO: 3683531 - DNA, 25 bp, Homo sapien
tcgtgtaataatgatgctagctgct

SEQ ID NO: 3683532 - DNA, 25 bp, Homo sapien
gtaggcctggcagtgacaaattccc

SEQ ID NO: 3683533 - DNA, 25 bp, Homo sapien
ctcttgcaaggtaggcctggcagtg

SEQ ID NO: 3683534 - DNA, 25 bp, Homo sapien
tggtattgagctccacaaagatggc

SEQ ID NO: 3683535 - DNA, 25 bp, Homo sapien
tttggtattgagctccacaaagatg

SEQ ID NO: 3683536 - DNA, 25 bp, Homo sapien
ggctttggtattgagctccacaaag

SEQ ID NO: 3683537 - DNA, 25 bp, Homo sapien
gtattgagctccacaaagatggcca

SEQ ID NO: 3683538 - DNA, 25 bp, Homo sapien
tgttcattctgatagacataggcac

SEQ ID NO: 3683539 - DNA, 25 bp, Homo sapien
tcatgttcattctgatagacatagg

SEQ ID NO: 3683540 - DNA, 25 bp, Homo sapien
ctgatagacataggcacagtcaatg

SEQ ID NO: 3683541 - DNA, 25 bp, Homo sapien
cattctgatagacataggcacagtc

SEQ ID NO: 3683542 - DNA, 25 bp, Homo sapien
ggtctctcaaagaaagtgggccaca

SEQ ID NO: 3683543 - DNA, 25 bp, Homo sapien
gtctctcaaagaaagtgggccacaa

SEQ ID NO: 3683544 - DNA, 25 bp, Homo sapien
gggtctctcaaagaaagtgggccac

SEQ ID NO: 3683545 - DNA, 25 bp, Homo sapien
cagcttcagatccttgagggtcttc

SEQ ID NO: 3683546 - DNA, 25 bp, Homo sapien
tcagcttcagatccttgagggtctt

SEQ ID NO: 3683547 - DNA, 25 bp, Homo sapien
gggtcttctcaaaggctttcctcac

SEQ ID NO: 3683548 - DNA, 25 bp, Homo sapien
cttgagggtcttctcaaaggctttc

SEQ ID NO: 3683549 - DNA, 25 bp, Homo sapien
tgaataagatagacatccagataac

SEQ ID NO: 3683550 - DNA, 25 bp, Homo sapien
tagtgaataagatagacatccagat

SEQ ID NO: 3683551 - DNA, 25 bp, Homo sapien
tgctagtgaataagatagacatcca

SEQ ID NO: 3683552 - DNA, 25 bp, Homo sapien
ctgtgctagtgaataagatagacat

SEQ ID NO: 3683553 - DNA, 25 bp, Homo sapien
aaaaatcatccccagacttgtatcc

SEQ ID NO: 3683554 - DNA, 25 bp, Homo sapien
tccaccgatcatattacctttatca

SEQ ID NO: 3683555 - DNA, 25 bp, Homo sapien
cctttatcatctttgcggaaaaaat

SEQ ID NO: 3683556 - DNA, 25 bp, Homo sapien
gcctcccaggcatccaagaacattg

SEQ ID NO: 3683557 - DNA, 25 bp, Homo sapien
tatatttcagtccaggtttgttcaa

SEQ ID NO: 3683558 - DNA, 25 bp, Homo sapien
tatttcagtccaggtttgttcaaga

SEQ ID NO: 3683559 - DNA, 25 bp, Homo sapien
cagtccaggtttgttcaagagcctc

SEQ ID NO: 3683560 - DNA, 25 bp, Homo sapien
ttcagtccaggtttgttcaagagcc

SEQ ID NO: 3683561 - DNA, 25 bp, Homo sapien
tgtgtgaggtatgggtgacactcaa

SEQ ID NO: 3683562 - DNA, 25 bp, Homo sapien
gtgtgaggtatgggtgacactcaac

SEQ ID NO: 3683563 - DNA, 25 bp, Homo sapien
ctgtgtgaggtatgggtgacactca

SEQ ID NO: 3683564 - DNA, 25 bp, Homo sapien
cttggcccaaagtctatccggagag

SEQ ID NO: 3683565 - DNA, 25 bp, Homo sapien
gcttggcccaaagtctatccggaga

SEQ ID NO: 3683566 - DNA, 25 bp, Homo sapien
ttggcccaaagtctatccggagagc

SEQ ID NO: 3683567 - DNA, 25 bp, Homo sapien
tctggatatggaaatggatcagaac

SEQ ID NO: 3683568 - DNA, 25 bp, Homo sapien
ctctggatatggaaatggatcagaa

SEQ ID NO: 3683569 - DNA, 25 bp, Homo sapien
gaggattgcaacatgttacgggccc

SEQ ID NO: 3683570 - DNA, 25 bp, Homo sapien
gagaggattgcaacatgttacgggc

SEQ ID NO: 3683571 - DNA, 25 bp, Homo sapien
gattgcaacatgttacgggccctcc

SEQ ID NO: 3683572 - DNA, 25 bp, Homo sapien
ttgcaacatgttacgggccctccag

SEQ ID NO: 3683573 - DNA, 25 bp, Homo sapien
catttctgcgagagaagcgtcttcc

SEQ ID NO: 3683574 - DNA, 25 bp, Homo sapien
cgagagggccgtgaaacaaaaagat

SEQ ID NO: 3683575 - DNA, 25 bp, Homo sapien
cgcttattaggtctacgagagggcc

SEQ ID NO: 3683576 - DNA, 25 bp, Homo sapien
tgttctgttacgtgctgcgagcccg

SEQ ID NO: 3683577 - DNA, 25 bp, Homo sapien
tgtgctccgaaaatcgcaaccttgc

SEQ ID NO: 3683578 - DNA, 25 bp, Homo sapien
ccttcgctgtgctccgaaaatcgca

SEQ ID NO: 3683579 - DNA, 25 bp, Homo sapien
cgaaaatcgcaaccttgcctggctt

SEQ ID NO: 3683580 - DNA, 25 bp, Homo sapien
tcgctgtgctccgaaaatcgcaacc

SEQ ID NO: 3683581 - DNA, 25 bp, Homo sapien
agcgagcagggttcgaacctgcgcg

SEQ ID NO: 3683582 - DNA, 25 bp, Homo sapien
cagcgagcagggttcgaacctgcgc

SEQ ID NO: 3683583 - DNA, 25 bp, Homo sapien
cgcagcgagcagggttcgaacctgc

SEQ ID NO: 3683584 - DNA, 25 bp, Homo sapien
gcagcgagcagggttcgaacctgcg

SEQ ID NO: 3683585 - DNA, 25 bp, Homo sapien
ttttcctcttggtgtaaacagtaca

SEQ ID NO: 3683586 - DNA, 25 bp, Homo sapien
tttcctcttggtgtaaacagtacat

SEQ ID NO: 3683587 - DNA, 25 bp, Homo sapien
gattttcctcttggtgtaaacagta

SEQ ID NO: 3683588 - DNA, 25 bp, Homo sapien
ggaaggccctcacacatcattaaca

SEQ ID NO: 3683589 - DNA, 25 bp, Homo sapien
caatgcattgggaaggccctcacac

SEQ ID NO: 3683590 - DNA, 25 bp, Homo sapien
ggccctcacacatcattaacatcat

SEQ ID NO: 3683591 - DNA, 25 bp, Homo sapien
attgggaaggccctcacacatcatt

SEQ ID NO: 3683592 - DNA, 25 bp, Homo sapien
ctcttgcatgtcctgaataagccat

SEQ ID NO: 3683593 - DNA, 25 bp, Homo sapien
ggcctcttgcatgtcctgaataagc

SEQ ID NO: 3683594 - DNA, 25 bp, Homo sapien
gcctcttgcatgtcctgaataagcc

SEQ ID NO: 3683595 - DNA, 25 bp, Homo sapien
caggcctcttgcatgtcctgaataa

SEQ ID NO: 3683596 - DNA, 25 bp, Homo sapien
tcaataaaccttgagaagcactgcc

SEQ ID NO: 3683597 - DNA, 25 bp, Homo sapien
tgggccccactttggatctgctaaa

SEQ ID NO: 3683598 - DNA, 25 bp, Homo sapien
gtactcatggagctagtggttccca

SEQ ID NO: 3683599 - DNA, 25 bp, Homo sapien
tttataactgtagggcatctgggag

SEQ ID NO: 3683600 - DNA, 25 bp, Homo sapien
tcccttatgcatacaatgtcacctt

SEQ ID NO: 3683601 - DNA, 25 bp, Homo sapien
ttaactcgtgtgtttataacaatgc

SEQ ID NO: 3683602 - DNA, 25 bp, Homo sapien
tgcccttaactcgtgtgtttataac

SEQ ID NO: 3683603 - DNA, 25 bp, Homo sapien
cgtgtgtttataacaatgccaacag

SEQ ID NO: 3683604 - DNA, 25 bp, Homo sapien
tcttgcccttaactcgtgtgtttat

SEQ ID NO: 3683605 - DNA, 25 bp, Homo sapien
agctatctcggcttttagagtgttt

SEQ ID NO: 3683606 - DNA, 25 bp, Homo sapien
atctcggcttttagagtgtttaatg

SEQ ID NO: 3683607 - DNA, 25 bp, Homo sapien
ctatctcggcttttagagtgtttaa

SEQ ID NO: 3683608 - DNA, 25 bp, Homo sapien
gaagctatctcggcttttagagtgt

SEQ ID NO: 3683609 - DNA, 25 bp, Homo sapien
tacacttctccggctggagcaggct

SEQ ID NO: 3683610 - DNA, 25 bp, Homo sapien
caggaacctttctcattggcttcct

SEQ ID NO: 3683611 - DNA, 25 bp, Homo sapien
agtacacttctccggctggagcagg

SEQ ID NO: 3683612 - DNA, 25 bp, Homo sapien
aaagtacacttctccggctggagca

SEQ ID NO: 3683613 - DNA, 25 bp, Homo sapien
ctcaggcgccttcccattggttccc

SEQ ID NO: 3683614 - DNA, 25 bp, Homo sapien
cagctcaggcgccttcccattggtt

SEQ ID NO: 3683615 - DNA, 25 bp, Homo sapien
agcagctcaggcgccttcccattgg

SEQ ID NO: 3683616 - DNA, 25 bp, Homo sapien
agctcaggcgccttcccattggttc

SEQ ID NO: 3683617 - DNA, 25 bp, Homo sapien
ggaatgcttcgcgaacgtgcctgtt

SEQ ID NO: 3683618 - DNA, 25 bp, Homo sapien
tgcttcgcgaacgtgcctgttgtct

SEQ ID NO: 3683619 - DNA, 25 bp, Homo sapien
cgtgcctgttgtctttgcacaggga

SEQ ID NO: 3683620 - DNA, 25 bp, Homo sapien
atggaatgcttcgcgaacgtgcctg

SEQ ID NO: 3683621 - DNA, 25 bp, Homo sapien
gcagcaatggtcagtccaactgcta

SEQ ID NO: 3683622 - DNA, 25 bp, Homo sapien
cagcaatggtcagtccaactgctac

SEQ ID NO: 3683623 - DNA, 25 bp, Homo sapien
gcaatggtcagtccaactgctacca

SEQ ID NO: 3683624 - DNA, 25 bp, Homo sapien
agcagcaatggtcagtccaactgct

SEQ ID NO: 3683625 - DNA, 25 bp, Homo sapien
tgaaggcagattttgatagactttg

SEQ ID NO: 3683626 - DNA, 25 bp, Homo sapien
ttgatagactttgaaaaacttgctt

SEQ ID NO: 3683627 - DNA, 25 bp, Homo sapien
aggcagattttgatagactttgaaa

SEQ ID NO: 3683628 - DNA, 25 bp, Homo sapien
tcagtaatagccaccactgaaggca

SEQ ID NO: 3683629 - DNA, 25 bp, Homo sapien
gattaagtcatctaaatggatgcaa

SEQ ID NO: 3683630 - DNA, 25 bp, Homo sapien
tgttaattcgaagctcactgtgcct

SEQ ID NO: 3683631 - DNA, 25 bp, Homo sapien
tttccgagggaagaaggactgatta

SEQ ID NO: 3683632 - DNA, 25 bp, Homo sapien
ttttgctatgtggaacatgctgctc

SEQ ID NO: 3683633 - DNA, 25 bp, Homo sapien
tgatagcttatgtgttttgctcctt

SEQ ID NO: 3683634 - DNA, 25 bp, Homo sapien
ctgtatgatagcttatgtgttttgc

SEQ ID NO: 3683635 - DNA, 25 bp, Homo sapien
ctctgtatgatagcttatgtgtttt

SEQ ID NO: 3683636 - DNA, 25 bp, Homo sapien
tatgatagcttatgtgttttgctcc

SEQ ID NO: 3683637 - DNA, 25 bp, Homo sapien
tttaactgaacacgcaatggacatt

SEQ ID NO: 3683638 - DNA, 25 bp, Homo sapien
ctttaactgaacacgcaatggacat

SEQ ID NO: 3683639 - DNA, 25 bp, Homo sapien
cttgccataaggtcattttccttac

SEQ ID NO: 3683640 - DNA, 25 bp, Homo sapien
cctgagtatgaaagtaactggcttg

SEQ ID NO: 3683641 - DNA, 25 bp, Homo sapien
cgccgttctcgcgatgctcgcgatg

SEQ ID NO: 3683642 - DNA, 25 bp, Homo sapien
ggacggtgtccctgagtatgaaagt

SEQ ID NO: 3683643 - DNA, 25 bp, Homo sapien
tggcttgtttccggttcctctgtgg

SEQ ID NO: 3683644 - DNA, 25 bp, Homo sapien
taaggacgaatggttgcaggcacag

SEQ ID NO: 3683645 - DNA, 25 bp, Homo sapien
tgctcgtatttggaaaaaccgctgg

SEQ ID NO: 3683646 - DNA, 25 bp, Homo sapien
tctggaacctgcgttttgtgcctcc

SEQ ID NO: 3683647 - DNA, 25 bp, Homo sapien
gaaaggcgccgatttcattctgcaa

SEQ ID NO: 3683648 - DNA, 25 bp, Homo sapien
gagcgcaaaactcgtgtccaggacc

SEQ ID NO: 3683649 - DNA, 25 bp, Homo sapien
gcgcaaaactcgtgtccaggacccc

SEQ ID NO: 3683650 - DNA, 25 bp, Homo sapien
cagagcgcaaaactcgtgtccagga

SEQ ID NO: 3683651 - DNA, 25 bp, Homo sapien
tcagagcgcaaaactcgtgtccagg

SEQ ID NO: 3683652 - DNA, 25 bp, Homo sapien
gaccaggacgctgtcttgctctgta

SEQ ID NO: 3683653 - DNA, 25 bp, Homo sapien
gactcatccggttcttggaccagga

SEQ ID NO: 3683654 - DNA, 25 bp, Homo sapien
tatgtctgactcaacagtaacgcct

SEQ ID NO: 3683655 - DNA, 25 bp, Homo sapien
tacggtccgggcaggctatgttttc

SEQ ID NO: 3683656 - DNA, 25 bp, Homo sapien
acttcggtggcatggtggaggcggc

SEQ ID NO: 3683657 - DNA, 25 bp, Homo sapien
ttgttggggtcgaacttcggtggca

SEQ ID NO: 3683658 - DNA, 25 bp, Homo sapien
tgggatgaacccggattcggaacga

SEQ ID NO: 3683659 - DNA, 25 bp, Homo sapien
gcggctggtgtgggatgaacccgga

SEQ ID NO: 3683660 - DNA, 25 bp, Homo sapien
gcagaagtggcaccgacttcacctc

SEQ ID NO: 3683661 - DNA, 25 bp, Homo sapien
agtggcaccgacttcacctccggtg

SEQ ID NO: 3683662 - DNA, 25 bp, Homo sapien
agaagtggcaccgacttcacctccg

SEQ ID NO: 3683663 - DNA, 25 bp, Homo sapien
ccgacttcacctccggtgcacctca

SEQ ID NO: 3683664 - DNA, 25 bp, Homo sapien
ctgggcttgtctgttctgaattgtc

SEQ ID NO: 3683665 - DNA, 25 bp, Homo sapien
ggtcagggcggaggcagaaggcacc

SEQ ID NO: 3683666 - DNA, 25 bp, Homo sapien
gatggtcagggcggaggcagaaggc

SEQ ID NO: 3683667 - DNA, 25 bp, Homo sapien
tctgggcttgtctgttctgaattgt

SEQ ID NO: 3683668 - DNA, 25 bp, Homo sapien
catctgtcgagcaaccttgatgatc

SEQ ID NO: 3683669 - DNA, 25 bp, Homo sapien
gcatctgtcgagcaaccttgatgat

SEQ ID NO: 3683670 - DNA, 25 bp, Homo sapien
gatgtcatgagagtggcggccatca

SEQ ID NO: 3683671 - DNA, 25 bp, Homo sapien
tatgatgtcatgagagtggcggcca

SEQ ID NO: 3683672 - DNA, 25 bp, Homo sapien
catctatgatgtcatgagagtggcg

SEQ ID NO: 3683673 - DNA, 25 bp, Homo sapien
tgtcatgagagtggcggccatcaac

SEQ ID NO: 3683674 - DNA, 25 bp, Homo sapien
ttccaactgcctctctggccctcct

SEQ ID NO: 3683675 - DNA, 25 bp, Homo sapien
cttccaactgcctctctggccctcc

SEQ ID NO: 3683676 - DNA, 25 bp, Homo sapien
gccctcctccctcgcctcctctgct

SEQ ID NO: 3683677 - DNA, 25 bp, Homo sapien
ctggccctcctccctcgcctcctct

SEQ ID NO: 3683678 - DNA, 25 bp, Homo sapien
gggagccgccgggctgaagggcgag

SEQ ID NO: 3683679 - DNA, 25 bp, Homo sapien
gggctccgctcgaggccgggaccat

SEQ ID NO: 3683680 - DNA, 25 bp, Homo sapien
tccgcggcctcttgcggagcggctc

SEQ ID NO: 3683681 - DNA, 25 bp, Homo sapien
ggacgacgcggcctccctgtcggcc

SEQ ID NO: 3683682 - DNA, 25 bp, Homo sapien
ctccgcctcccgccacagcgccgcc

SEQ ID NO: 3683683 - DNA, 25 bp, Homo sapien
ctcccgccacagcgccgccgccgcc

SEQ ID NO: 3683684 - DNA, 25 bp, Homo sapien
cgccacagcgccgccgccgccgcac

SEQ ID NO: 3683685 - DNA, 25 bp, Homo sapien
cccgccacagcgccgccgccgccgc

SEQ ID NO: 3683686 - DNA, 25 bp, Homo sapien
ctcttgctccccgcctgccgccgcc

SEQ ID NO: 3683687 - DNA, 25 bp, Homo sapien
ccccgcctgccgccgccgcctctgc

SEQ ID NO: 3683688 - DNA, 25 bp, Homo sapien
ctccccgcctgccgccgccgcctct

SEQ ID NO: 3683689 - DNA, 25 bp, Homo sapien
tgctccccgcctgccgccgccgcct

SEQ ID NO: 3683690 - DNA, 25 bp, Homo sapien
tgcaggcccggcccattgtctcctt

SEQ ID NO: 3683691 - DNA, 25 bp, Homo sapien
gcaggcccggcccattgtctccttc

SEQ ID NO: 3683692 - DNA, 25 bp, Homo sapien
cgtcgtcttcgtcgtacaagttgtc

SEQ ID NO: 3683693 - DNA, 25 bp, Homo sapien
ggccttggagtccagtcactagagc

SEQ ID NO: 3683694 - DNA, 25 bp, Homo sapien
gaaaaccattagtgataatttcatc

SEQ ID NO: 3683695 - DNA, 25 bp, Homo sapien
agtcactagagcttgcatgtgaggc

SEQ ID NO: 3683696 - DNA, 25 bp, Homo sapien
tgtgaggctctatcctcctcatcac

SEQ ID NO: 3683697 - DNA, 25 bp, Homo sapien
aagatgttgctgaacaaaagtatat

SEQ ID NO: 3683698 - DNA, 25 bp, Homo sapien
tgttgctgaacaaaagtatatggac

SEQ ID NO: 3683699 - DNA, 25 bp, Homo sapien
gatgttgctgaacaaaagtatatgg

SEQ ID NO: 3683700 - DNA, 25 bp, Homo sapien
atgttgctgaacaaaagtatatgga

SEQ ID NO: 3683701 - DNA, 25 bp, Homo sapien
taagaattgttcgaggatctgtgcc

SEQ ID NO: 3683702 - DNA, 25 bp, Homo sapien
gtgtcatatcatccaactcaggtgg

SEQ ID NO: 3683703 - DNA, 25 bp, Homo sapien
tgcactcttgcagtaatttcacagc

SEQ ID NO: 3683704 - DNA, 25 bp, Homo sapien
tcaggtggaggtattgtttccggca

SEQ ID NO: 3683705 - DNA, 25 bp, Homo sapien
gaagtctacagcaaggcgagcataa

SEQ ID NO: 3683706 - DNA, 25 bp, Homo sapien
cccttgacctgaagtcaggtattcc

SEQ ID NO: 3683707 - DNA, 25 bp, Homo sapien
caatatcaaacatcgcttgaggatc

SEQ ID NO: 3683708 - DNA, 25 bp, Homo sapien
caaacttgaagaatggtcttggatc

SEQ ID NO: 3683709 - DNA, 25 bp, Homo sapien
taattacaaatgatttttcaggcac

SEQ ID NO: 3683710 - DNA, 25 bp, Homo sapien
ttgactacgaaacaccaaagtgatg

SEQ ID NO: 3683711 - DNA, 25 bp, Homo sapien
ggcttctgaactggacggtgcaact

SEQ ID NO: 3683712 - DNA, 25 bp, Homo sapien
gaataatgatcctctgcaatttgct

SEQ ID NO: 3683713 - DNA, 25 bp, Homo sapien
cgaacatagtatagtcccttttctt

SEQ ID NO: 3683714 - DNA, 25 bp, Homo sapien
cagtgaattcagtatgggacagaaa

SEQ ID NO: 3683715 - DNA, 25 bp, Homo sapien
gaaactacactcttcgaacatagta

SEQ ID NO: 3683716 - DNA, 25 bp, Homo sapien
attttaatcactagggaaagaacag

SEQ ID NO: 3683717 - DNA, 25 bp, Homo sapien
ccctggaaaatggttcatgacatac

SEQ ID NO: 3683718 - DNA, 25 bp, Homo sapien
tgtccatcaatagggaaccggttgt

SEQ ID NO: 3683719 - DNA, 25 bp, Homo sapien
caatcaagtcaggaaggatacaaac

SEQ ID NO: 3683720 - DNA, 25 bp, Homo sapien
gatctagatgaactgccctggaaaa

SEQ ID NO: 3683721 - DNA, 25 bp, Homo sapien
tagtatagagttgctcatgaatgct

SEQ ID NO: 3683722 - DNA, 25 bp, Homo sapien
ctggtatagtatagagttgctcatg

SEQ ID NO: 3683723 - DNA, 25 bp, Homo sapien
catgaatgctgagttgctggatttt

SEQ ID NO: 3683724 - DNA, 25 bp, Homo sapien
tgaatgctgagttgctggattttgt

SEQ ID NO: 3683725 - DNA, 25 bp, Homo sapien
aaaaggacggttgctgtcatatgca

SEQ ID NO: 3683726 - DNA, 25 bp, Homo sapien
ggacggttgctgtcatatgcataaa

SEQ ID NO: 3683727 - DNA, 25 bp, Homo sapien
ctgtcatatgcataaaactcagcaa

SEQ ID NO: 3683728 - DNA, 25 bp, Homo sapien
cggttgctgtcatatgcataaaact

SEQ ID NO: 3683729 - DNA, 25 bp, Homo sapien
gaatttgtgacagagagatggctgg

SEQ ID NO: 3683730 - DNA, 25 bp, Homo sapien
gcaacctgttccagcgtgtctatgt

SEQ ID NO: 3683731 - DNA, 25 bp, Homo sapien
catgacactgaattatcctttggat

SEQ ID NO: 3683732 - DNA, 25 bp, Homo sapien
tatagttgcgaagtagttttccttc

SEQ ID NO: 3683733 - DNA, 25 bp, Homo sapien
tgttctgggtatagttgcgaagtag

SEQ ID NO: 3683734 - DNA, 25 bp, Homo sapien
tcctcgtacagcttcacagtcaact

SEQ ID NO: 3683735 - DNA, 25 bp, Homo sapien
cagcttcacagtcaactttgtattt

SEQ ID NO: 3683736 - DNA, 25 bp, Homo sapien
atttacaaatcaggcaagatgctgt

SEQ ID NO: 3683737 - DNA, 25 bp, Homo sapien
aaaaatatctcctcgtacagcttca

SEQ ID NO: 3683738 - DNA, 25 bp, Homo sapien
tagcaagcggttcatcagctgggca

SEQ ID NO: 3683739 - DNA, 25 bp, Homo sapien
gagggaagacccaataacaatgagg

SEQ ID NO: 3683740 - DNA, 25 bp, Homo sapien
tctctggtttcatgatagcaagcgg

SEQ ID NO: 3683741 - DNA, 25 bp, Homo sapien
gctgggcacctaggacatcgaggaa

SEQ ID NO: 3683742 - DNA, 25 bp, Homo sapien
tagaaccaacattcttcaaatccgg

SEQ ID NO: 3683743 - DNA, 25 bp, Homo sapien
tgggtggcaactctgacaaataagc

SEQ ID NO: 3683744 - DNA, 25 bp, Homo sapien
cctttgccactctattaggccagca

SEQ ID NO: 3683745 - DNA, 25 bp, Homo sapien
tagctgcttggtctaaaagtgtgac

SEQ ID NO: 3683746 - DNA, 25 bp, Homo sapien
tcagtggagaagaatcacgcgtgtt

SEQ ID NO: 3683747 - DNA, 25 bp, Homo sapien
taaaacatcggcttccaaagagtag

SEQ ID NO: 3683748 - DNA, 25 bp, Homo sapien
gacaacaccgcatagtagttaaggg

SEQ ID NO: 3683749 - DNA, 25 bp, Homo sapien
ggtcctgagttttcccacctgaaga

SEQ ID NO: 3683750 - DNA, 25 bp, Homo sapien
tctttgtaagtgtacctctgtgcct

SEQ ID NO: 3683751 - DNA, 25 bp, Homo sapien
cccaatttgtgttaagtagcttctc

SEQ ID NO: 3683752 - DNA, 25 bp, Homo sapien
tacaagcaatacacttagtcctggg

SEQ ID NO: 3683753 - DNA, 25 bp, Homo sapien
aatttacattcacccgagatctcag

SEQ ID NO: 3683754 - DNA, 25 bp, Homo sapien
cagtctgagcagtctggaatgaagt

SEQ ID NO: 3683755 - DNA, 25 bp, Homo sapien
cactaactcagtctgagcagtctgg

SEQ ID NO: 3683756 - DNA, 25 bp, Homo sapien
tctaacactaactcagtctgagcag

SEQ ID NO: 3683757 - DNA, 25 bp, Homo sapien
tcagttttctaacactaactcagtc

SEQ ID NO: 3683758 - DNA, 25 bp, Homo sapien
tcagcgccatggaaaatgtaacgat

SEQ ID NO: 3683759 - DNA, 25 bp, Homo sapien
tggcatgtcccactatcactgttac

SEQ ID NO: 3683760 - DNA, 25 bp, Homo sapien
tgttactgccacaagaactagagga

SEQ ID NO: 3683761 - DNA, 25 bp, Homo sapien
cttctaaacttggactctggcatgt

SEQ ID NO: 3683762 - DNA, 25 bp, Homo sapien
catgtctgttacttcctgtttcaca

SEQ ID NO: 3683763 - DNA, 25 bp, Homo sapien
tcattaattgcctcttgatcatctc

SEQ ID NO: 3683764 - DNA, 25 bp, Homo sapien
gctctctctggaacatcaggctcat

SEQ ID NO: 3683765 - DNA, 25 bp, Homo sapien
caggctcatcttctaagccattgta

SEQ ID NO: 3683766 - DNA, 25 bp, Homo sapien
tccacaggaagtacaaaagccatct

SEQ ID NO: 3683767 - DNA, 25 bp, Homo sapien
gaaagttagtcttgaccaacagctg

SEQ ID NO: 3683768 - DNA, 25 bp, Homo sapien
tccaggcaggcactaatgtttctaa

SEQ ID NO: 3683769 - DNA, 25 bp, Homo sapien
gatcaatgcaagctctaccacagtg

SEQ ID NO: 3683770 - DNA, 25 bp, Homo sapien
tgcagctgagaaagttgatctctag

SEQ ID NO: 3683771 - DNA, 25 bp, Homo sapien
atctctagttttaaggcaggctaag

SEQ ID NO: 3683772 - DNA, 25 bp, Homo sapien
tttgcagctgagaaagttgatctct

SEQ ID NO: 3683773 - DNA, 25 bp, Homo sapien
agaaagttgatctctagttttaagg

SEQ ID NO: 3683774 - DNA, 25 bp, Homo sapien
aaacagtctacaaaacatatgccag

SEQ ID NO: 3683775 - DNA, 25 bp, Homo sapien
gcagtaatggtcctagctgggtgtt

SEQ ID NO: 3683776 - DNA, 25 bp, Homo sapien
tcatctatagcacacaaacatcatg

SEQ ID NO: 3683777 - DNA, 25 bp, Homo sapien
catcttataagtagggaaatggcca

SEQ ID NO: 3683778 - DNA, 25 bp, Homo sapien
gaaactagtcatccagtccacagga

SEQ ID NO: 3683779 - DNA, 25 bp, Homo sapien
caatctacgagtgttcatggaagcc

SEQ ID NO: 3683780 - DNA, 25 bp, Homo sapien
ttttgacaggtagtgatcgcattcc

SEQ ID NO: 3683781 - DNA, 25 bp, Homo sapien
tgaattcagcaaggtgacagaggta

SEQ ID NO: 3683782 - DNA, 25 bp, Homo sapien
gggcagaacatcctacgataaaaat

SEQ ID NO: 3683783 - DNA, 25 bp, Homo sapien
tgggcagaacatcctacgataaaaa

SEQ ID NO: 3683784 - DNA, 25 bp, Homo sapien
ttgggaagtatttcacgaattacca

SEQ ID NO: 3683785 - DNA, 25 bp, Homo sapien
cacgaattaccattggaaaagaaga

SEQ ID NO: 3683786 - DNA, 25 bp, Homo sapien
gatgcgtgacatccagatgcataca

SEQ ID NO: 3683787 - DNA, 25 bp, Homo sapien
ccatgcaggttgaaggacaaaactt

SEQ ID NO: 3683788 - DNA, 25 bp, Homo sapien
taaatcgatagccaaaggtcaacag

SEQ ID NO: 3683789 - DNA, 25 bp, Homo sapien
cagtatcctcagaatgatgcgtgac

SEQ ID NO: 3683790 - DNA, 25 bp, Homo sapien
ttttgagggtgtgagatagagtctt

SEQ ID NO: 3683791 - DNA, 25 bp, Homo sapien
tattttgagggtgtgagatagagtc

SEQ ID NO: 3683792 - DNA, 25 bp, Homo sapien
ttattttgagggtgtgagatagagt

SEQ ID NO: 3683793 - DNA, 25 bp, Homo sapien
tttgagggtgtgagatagagtcttg

SEQ ID NO: 3683794 - DNA, 25 bp, Homo sapien
gattgcaggcgtacaccaccacacc

SEQ ID NO: 3683795 - DNA, 25 bp, Homo sapien
ccacctcagcatcccaaagtgctgg

SEQ ID NO: 3683796 - DNA, 25 bp, Homo sapien
catcacacctggctaattttttttt

SEQ ID NO: 3683797 - DNA, 25 bp, Homo sapien
accacaggcgcctgccatcacacct

SEQ ID NO: 3683798 - DNA, 25 bp, Homo sapien
tctatgctaaatgtaatgcactcaa

SEQ ID NO: 3683799 - DNA, 25 bp, Homo sapien
aaatgtaatgcactcaatattgctc

SEQ ID NO: 3683800 - DNA, 25 bp, Homo sapien
tatgctaaatgtaatgcactcaata

SEQ ID NO: 3683801 - DNA, 25 bp, Homo sapien
gctaaatgtaatgcactcaatattg

SEQ ID NO: 3683802 - DNA, 25 bp, Homo sapien
ccaattgggtttaggtactgactgt

SEQ ID NO: 3683803 - DNA, 25 bp, Homo sapien
caaacttcaccgcagctgcttaagt

SEQ ID NO: 3683804 - DNA, 25 bp, Homo sapien
atatggccaattgggtttaggtact

SEQ ID NO: 3683805 - DNA, 25 bp, Homo sapien
tgttggggacagaataaatatggcc

SEQ ID NO: 3683806 - DNA, 25 bp, Homo sapien
tacaggttgcttgtggttactatca

SEQ ID NO: 3683807 - DNA, 25 bp, Homo sapien
tgtcagatatccagattgtacaggt

SEQ ID NO: 3683808 - DNA, 25 bp, Homo sapien
tggaattaactggtcttgatctgtc

SEQ ID NO: 3683809 - DNA, 25 bp, Homo sapien
tgacctatgtgcatatagtaggcca

SEQ ID NO: 3683810 - DNA, 25 bp, Homo sapien
tccataggctgtaaactcattgagg

SEQ ID NO: 3683811 - DNA, 25 bp, Homo sapien
gggctaggacgcttattttattctc

SEQ ID NO: 3683812 - DNA, 25 bp, Homo sapien
gcttcaactgcttgggctcgagtga

SEQ ID NO: 3683813 - DNA, 25 bp, Homo sapien
gtgcttggagcacaagaagtgtaca

SEQ ID NO: 3683814 - DNA, 25 bp, Homo sapien
gaaagaatagtgttaacattggccg

SEQ ID NO: 3683815 - DNA, 25 bp, Homo sapien
ttgaaagaatagtgttaacattggc

SEQ ID NO: 3683816 - DNA, 25 bp, Homo sapien
tgaaagaatagtgttaacattggcc

SEQ ID NO: 3683817 - DNA, 25 bp, Homo sapien
gttgaaagaatagtgttaacattgg

SEQ ID NO: 3683818 - DNA, 25 bp, Homo sapien
cagagttagtgagactcggtctgaa

SEQ ID NO: 3683819 - DNA, 25 bp, Homo sapien
acagagttagtgagactcggtctga

SEQ ID NO: 3683820 - DNA, 25 bp, Homo sapien
gttaagtccatcatgttagagatcc

SEQ ID NO: 3683821 - DNA, 25 bp, Homo sapien
ttaaaagtatcagttaccatcagcc

SEQ ID NO: 3683822 - DNA, 25 bp, Homo sapien
tggctatggattgtaccattccaaa

SEQ ID NO: 3683823 - DNA, 25 bp, Homo sapien
caggtatggcggcacacttgtgtaa

SEQ ID NO: 3683824 - DNA, 25 bp, Homo sapien
ggtgatccatctgccacgacatccc

SEQ ID NO: 3683825 - DNA, 25 bp, Homo sapien
tcactctgttgcctattgtctaggc

SEQ ID NO: 3683826 - DNA, 25 bp, Homo sapien
tctgccacgacatcccaaattgctg

SEQ ID NO: 3683827 - DNA, 25 bp, Homo sapien
ctctgttgcctattgtctaggctgg

SEQ ID NO: 3683828 - DNA, 25 bp, Homo sapien
tatcaagtgcttgggatatgtatga

SEQ ID NO: 3683829 - DNA, 25 bp, Homo sapien
tatctccttagtaaagattcttagg

SEQ ID NO: 3683830 - DNA, 25 bp, Homo sapien
taggttctgtattcccaatatatca

SEQ ID NO: 3683831 - DNA, 25 bp, Homo sapien
ggcagtctaggtagtctagttacca

SEQ ID NO: 3683832 - DNA, 25 bp, Homo sapien
gtgaatttgaggactggattaaaag

SEQ ID NO: 3683833 - DNA, 25 bp, Homo sapien
tttgtgaatttgaggactggattaa

SEQ ID NO: 3683834 - DNA, 25 bp, Homo sapien
aatttgtgaatttgaggactggatt

SEQ ID NO: 3683835 - DNA, 25 bp, Homo sapien
ttgtgaatttgaggactggattaaa

SEQ ID NO: 3683836 - DNA, 25 bp, Homo sapien
cctctgaagctgttgcgagcggccg

SEQ ID NO: 3683837 - DNA, 25 bp, Homo sapien
cggttgcggtagtcgtctgcttggc

SEQ ID NO: 3683838 - DNA, 25 bp, Homo sapien
ttctctcaggttgaggccgcgcact

SEQ ID NO: 3683839 - DNA, 25 bp, Homo sapien
gccccggggctggaatgtctcatct

SEQ ID NO: 3683840 - DNA, 25 bp, Homo sapien
agggcttgggcgagttgtggcccca

SEQ ID NO: 3683841 - DNA, 25 bp, Homo sapien
ccagcgggttcgggggcgtgtgacg

SEQ ID NO: 3683842 - DNA, 25 bp, Homo sapien
ccgggctgggcggatgcaggccggc

SEQ ID NO: 3683843 - DNA, 25 bp, Homo sapien
cgtgtgacggcgttagggaggggca

SEQ ID NO: 3683844 - DNA, 25 bp, Homo sapien
ggtgccctggtgatcgtcgccactg

SEQ ID NO: 3683845 - DNA, 25 bp, Homo sapien
tcccaggagccggagacgtgcttca

SEQ ID NO: 3683846 - DNA, 25 bp, Homo sapien
gatcgtcgccactggctgacagagg

SEQ ID NO: 3683847 - DNA, 25 bp, Homo sapien
gtgcttcagcgaccgcgctgccttg

SEQ ID NO: 3683848 - DNA, 25 bp, Homo sapien
ggctgtctctggactggacagcagt

SEQ ID NO: 3683849 - DNA, 25 bp, Homo sapien
tgtctctggactggacagcagtggc

SEQ ID NO: 3683850 - DNA, 25 bp, Homo sapien
tggacagcagtggcgtccgcttttc

SEQ ID NO: 3683851 - DNA, 25 bp, Homo sapien
tctggactggacagcagtggcgtcc

SEQ ID NO: 3683852 - DNA, 25 bp, Homo sapien
gctctccgccccgcttgcctcccgt

SEQ ID NO: 3683853 - DNA, 25 bp, Homo sapien
ggtgctctccgccccgcttgcctcc

SEQ ID NO: 3683854 - DNA, 25 bp, Homo sapien
ctccgccccgcttgcctcccgttct

SEQ ID NO: 3683855 - DNA, 25 bp, Homo sapien
tggtgctctccgccccgcttgcctc

SEQ ID NO: 3683856 - DNA, 25 bp, Homo sapien
ttcgtttgtcttcgcaaactccaac

SEQ ID NO: 3683857 - DNA, 25 bp, Homo sapien
acatcttcttcgtttgtcttcgcaa

SEQ ID NO: 3683858 - DNA, 25 bp, Homo sapien
tccaactttctgtatttggcttttc

SEQ ID NO: 3683859 - DNA, 25 bp, Homo sapien
cagttgacatcttcttcgtttgtct

SEQ ID NO: 3683860 - DNA, 25 bp, Homo sapien
tcaatttgctactcgaaagtatgac

SEQ ID NO: 3683861 - DNA, 25 bp, Homo sapien
gctctaacagttgagattccttctt

SEQ ID NO: 3683862 - DNA, 25 bp, Homo sapien
aaagtatgactgataagctctaaca

SEQ ID NO: 3683863 - DNA, 25 bp, Homo sapien
tagtctctgctattgctatgttctg

SEQ ID NO: 3683864 - DNA, 25 bp, Homo sapien
cacaaacagcagtggagctccaaag

SEQ ID NO: 3683865 - DNA, 25 bp, Homo sapien
ctccaaaggctacattgggtagttc

SEQ ID NO: 3683866 - DNA, 25 bp, Homo sapien
ggctacattgggtagttccagccgg

SEQ ID NO: 3683867 - DNA, 25 bp, Homo sapien
aaaggctacattgggtagttccagc

SEQ ID NO: 3683868 - DNA, 25 bp, Homo sapien
ccttgccacagtgcacaggatgctt

SEQ ID NO: 3683869 - DNA, 25 bp, Homo sapien
ctgcagtgtgatttgtgataggctc

SEQ ID NO: 3683870 - DNA, 25 bp, Homo sapien
aaatggctggtacttcagatgggag

SEQ ID NO: 3683871 - DNA, 25 bp, Homo sapien
tcagtttgtggagttgtaaatggct

SEQ ID NO: 3683872 - DNA, 25 bp, Homo sapien
cggtaacatagaggtaaaatgcttc

SEQ ID NO: 3683873 - DNA, 25 bp, Homo sapien
atcttgtacagagcaccaatagtaa

SEQ ID NO: 3683874 - DNA, 25 bp, Homo sapien
tgtacagagcaccaatagtaatcaa

SEQ ID NO: 3683875 - DNA, 25 bp, Homo sapien
gtaatcaagttcagattcacaccgg

SEQ ID NO: 3683876 - DNA, 25 bp, Homo sapien
caactatttgtgactgactgcaaac

SEQ ID NO: 3683877 - DNA, 25 bp, Homo sapien
tcaactatttgtgactgactgcaaa

SEQ ID NO: 3683878 - DNA, 25 bp, Homo sapien
ttgtgactgactgcaaactggactc

SEQ ID NO: 3683879 - DNA, 25 bp, Homo sapien
tgactgactgcaaactggactcatt

SEQ ID NO: 3683880 - DNA, 25 bp, Homo sapien
aatcaaccaggatcatctaaagtcc

SEQ ID NO: 3683881 - DNA, 25 bp, Homo sapien
gatcttatataaaaggcatgacaac

SEQ ID NO: 3683882 - DNA, 25 bp, Homo sapien
aagacaatgaaatcactaagaaatt

SEQ ID NO: 3683883 - DNA, 25 bp, Homo sapien
cattatcctgagaagtaaatttgtg

SEQ ID NO: 3683884 - DNA, 25 bp, Homo sapien
ttgactatccaaaacaatagatggg

SEQ ID NO: 3683885 - DNA, 25 bp, Homo sapien
caaattactcacatataccaaagct

SEQ ID NO: 3683886 - DNA, 25 bp, Homo sapien
catagattcatcttgacatatccag

SEQ ID NO: 3683887 - DNA, 25 bp, Homo sapien
tatatcgctataggctccagttctc

SEQ ID NO: 3683888 - DNA, 25 bp, Homo sapien
gggagaatttccatgctagtagatt

SEQ ID NO: 3683889 - DNA, 25 bp, Homo sapien
gaggaagtcttcacttggacggtaa

SEQ ID NO: 3683890 - DNA, 25 bp, Homo sapien
aagtcttcacttggacggtaagcat

SEQ ID NO: 3683891 - DNA, 25 bp, Homo sapien
ggaagtcttcacttggacggtaagc

SEQ ID NO: 3683892 - DNA, 25 bp, Homo sapien
atctggaagttctatggcagaggaa

SEQ ID NO: 3683893 - DNA, 25 bp, Homo sapien
gagcttttttggattgttcgtccaa

SEQ ID NO: 3683894 - DNA, 25 bp, Homo sapien
agagcttttttggattgttcgtcca

SEQ ID NO: 3683895 - DNA, 25 bp, Homo sapien
gagagcttttttggattgttcgtcc

SEQ ID NO: 3683896 - DNA, 25 bp, Homo sapien
tgacgtttggaatgaacactaaatg

SEQ ID NO: 3683897 - DNA, 25 bp, Homo sapien
tcccttatagctagaggcccatgtt

SEQ ID NO: 3683898 - DNA, 25 bp, Homo sapien
ggattccatagcaggacagcaccta

SEQ ID NO: 3683899 - DNA, 25 bp, Homo sapien
aaatgcattataccatagttcatca

SEQ ID NO: 3683900 - DNA, 25 bp, Homo sapien
gagctgtataaaccatgtgcctgtg

SEQ ID NO: 3683901 - DNA, 25 bp, Homo sapien
tcacaggtcccaagttattttgagc

SEQ ID NO: 3683902 - DNA, 25 bp, Homo sapien
gagagtagccgtccatagagagtga

SEQ ID NO: 3683903 - DNA, 25 bp, Homo sapien
taagaagctggacaacctgtcacca

SEQ ID NO: 3683904 - DNA, 25 bp, Homo sapien
ttagttgacccagatgaggatgtcc

SEQ ID NO: 3683905 - DNA, 25 bp, Homo sapien
ggatgtccaatccaggcactccact

SEQ ID NO: 3683906 - DNA, 25 bp, Homo sapien
gagaacttttagatgaaagcacagg

SEQ ID NO: 3683907 - DNA, 25 bp, Homo sapien
cagggagaacttttagatgaaagca

SEQ ID NO: 3683908 - DNA, 25 bp, Homo sapien
aagaccctggtgtagtgtctccacc

SEQ ID NO: 3683909 - DNA, 25 bp, Homo sapien
tttttgcaggcacgaggtctaatcc

SEQ ID NO: 3683910 - DNA, 25 bp, Homo sapien
ggacttcgagggttatcctggcaga

SEQ ID NO: 3683911 - DNA, 25 bp, Homo sapien
ccccagaaggactgccgaaatggca

SEQ ID NO: 3683912 - DNA, 25 bp, Homo sapien
tcagtggcgaacaaacaggtagggc

SEQ ID NO: 3683913 - DNA, 25 bp, Homo sapien
tacacaggagcacataggttaggct

SEQ ID NO: 3683914 - DNA, 25 bp, Homo sapien
tccaatgaagctatgtccaagaaag

SEQ ID NO: 3683915 - DNA, 25 bp, Homo sapien
tgggatacaggaaaggatcacggcc

SEQ ID NO: 3683916 - DNA, 25 bp, Homo sapien
gatgagctgacactatagatcagtg

SEQ ID NO: 3683917 - DNA, 25 bp, Homo sapien
tgggttcccggctttacattataca

SEQ ID NO: 3683918 - DNA, 25 bp, Homo sapien
caactggtgctagaatattggctat

SEQ ID NO: 3683919 - DNA, 25 bp, Homo sapien
taagagaaagcccatacgtttatgg

SEQ ID NO: 3683920 - DNA, 25 bp, Homo sapien
tcgaatctgtcccatagatgttaga

SEQ ID NO: 3683921 - DNA, 25 bp, Homo sapien
tcttcaaaggcttccgcaatggtca

SEQ ID NO: 3683922 - DNA, 25 bp, Homo sapien
caaagcaggaatagcgtcctgtgtc

SEQ ID NO: 3683923 - DNA, 25 bp, Homo sapien
taaatctcagcagaagtcgaatctg

SEQ ID NO: 3683924 - DNA, 25 bp, Homo sapien
gcctttggcctaacagagcagtatt

SEQ ID NO: 3683925 - DNA, 25 bp, Homo sapien
tgcctttggcctaacagagcagtat

SEQ ID NO: 3683926 - DNA, 25 bp, Homo sapien
cttgttagggtcgccttctgagtca

SEQ ID NO: 3683927 - DNA, 25 bp, Homo sapien
tgttagggtcgccttctgagtcaga

SEQ ID NO: 3683928 - DNA, 25 bp, Homo sapien
ttccttgttagggtcgccttctgag

SEQ ID NO: 3683929 - DNA, 25 bp, Homo sapien
ccttgttagggtcgccttctgagtc

SEQ ID NO: 3683930 - DNA, 25 bp, Homo sapien
agatgacacctcatttggcttctgg

SEQ ID NO: 3683931 - DNA, 25 bp, Homo sapien
ggagatgacacctcatttggcttct

SEQ ID NO: 3683932 - DNA, 25 bp, Homo sapien
aggagatgacacctcatttggcttc

SEQ ID NO: 3683933 - DNA, 25 bp, Homo sapien
gagatgacacctcatttggcttctg

SEQ ID NO: 3683934 - DNA, 25 bp, Homo sapien
ggatggttgccacacgaggttgggc

SEQ ID NO: 3683935 - DNA, 25 bp, Homo sapien
ctgctggatggttgccacacgaggt

SEQ ID NO: 3683936 - DNA, 25 bp, Homo sapien
tgctgggcttggggtactgctggag

SEQ ID NO: 3683937 - DNA, 25 bp, Homo sapien
atggttgccacacgaggttgggcca

SEQ ID NO: 3683938 - DNA, 25 bp, Homo sapien
ctggtagaagggaagcaacagtaaa

SEQ ID NO: 3683939 - DNA, 25 bp, Homo sapien
tggtagaagggaagcaacagtaaat

SEQ ID NO: 3683940 - DNA, 25 bp, Homo sapien
agaagggaagcaacagtaaattcat

SEQ ID NO: 3683941 - DNA, 25 bp, Homo sapien
gtagaagggaagcaacagtaaattc

SEQ ID NO: 3683942 - DNA, 25 bp, Homo sapien
caatgataggttttccatccaatcc

SEQ ID NO: 3683943 - DNA, 25 bp, Homo sapien
tccaatccctgcaagtaattggtgg

SEQ ID NO: 3683944 - DNA, 25 bp, Homo sapien
gcaagtaattggtggggctctgaca

SEQ ID NO: 3683945 - DNA, 25 bp, Homo sapien
aaacacaggagctgcaatgataggt

SEQ ID NO: 3683946 - DNA, 25 bp, Homo sapien
ggttactaatggcatggggtgtaca

SEQ ID NO: 3683947 - DNA, 25 bp, Homo sapien
cctattagaacatagtgtagctgtc

SEQ ID NO: 3683948 - DNA, 25 bp, Homo sapien
tagctgtcatcacgttcatcacaac

SEQ ID NO: 3683949 - DNA, 25 bp, Homo sapien
catagtgtagctgtcatcacgttca

SEQ ID NO: 3683950 - DNA, 25 bp, Homo sapien
tcctatgcccttgacctaagattgg

SEQ ID NO: 3683951 - DNA, 25 bp, Homo sapien
cgcacatggaaacaatgagggagaa

SEQ ID NO: 3683952 - DNA, 25 bp, Homo sapien
ctctagcaggcgagcgtggctactc

SEQ ID NO: 3683953 - DNA, 25 bp, Homo sapien
agaaaaagggcacccgcatagccag

SEQ ID NO: 3683954 - DNA, 25 bp, Homo sapien
accactcaaccttaggagatggagc

SEQ ID NO: 3683955 - DNA, 25 bp, Homo sapien
aatcttctattaaagtcccttctct

SEQ ID NO: 3683956 - DNA, 25 bp, Homo sapien
ttctctataccactcaaccttagga

SEQ ID NO: 3683957 - DNA, 25 bp, Homo sapien
tataccactcaaccttaggagatgg

SEQ ID NO: 3683958 - DNA, 25 bp, Homo sapien
gcagctggactgtagtgtcacgatc

SEQ ID NO: 3683959 - DNA, 25 bp, Homo sapien
tttttattcatctcagtgtaacttc

SEQ ID NO: 3683960 - DNA, 25 bp, Homo sapien
ctgtcgcgcagctggactgtagtgt

SEQ ID NO: 3683961 - DNA, 25 bp, Homo sapien
tcactcatatactaataaattaaag

SEQ ID NO: 3683962 - DNA, 25 bp, Homo sapien
ttatagaatttactggtatcagatg

SEQ ID NO: 3683963 - DNA, 25 bp, Homo sapien
tagaatttactggtatcagatgatg

SEQ ID NO: 3683964 - DNA, 25 bp, Homo sapien
gaatttactggtatcagatgatgat

SEQ ID NO: 3683965 - DNA, 25 bp, Homo sapien
cagaattatagaatttactggtatc

SEQ ID NO: 3683966 - DNA, 25 bp, Homo sapien
tatatgccagtgaaacagaatggtt

SEQ ID NO: 3683967 - DNA, 25 bp, Homo sapien
ctatatgccagtgaaacagaatggt

SEQ ID NO: 3683968 - DNA, 25 bp, Homo sapien
atatgccagtgaaacagaatggtta

SEQ ID NO: 3683969 - DNA, 25 bp, Homo sapien
cctcagcaatgaccaaggtgcaaat

SEQ ID NO: 3683970 - DNA, 25 bp, Homo sapien
cactgtgccgtatttgttgcttgca

SEQ ID NO: 3683971 - DNA, 25 bp, Homo sapien
tctcacgtgcagctgtgcaatgctt

SEQ ID NO: 3683972 - DNA, 25 bp, Homo sapien
gaatcttctgcaaacacctcagcaa

SEQ ID NO: 3683973 - DNA, 25 bp, Homo sapien
tcagccactgtaagcctgaattggg

SEQ ID NO: 3683974 - DNA, 25 bp, Homo sapien
tgtcagccactgtaagcctgaattg

SEQ ID NO: 3683975 - DNA, 25 bp, Homo sapien
gctgtcagccactgtaagcctgaat

SEQ ID NO: 3683976 - DNA, 25 bp, Homo sapien
ctgaaaggacaatcacaggacctga

SEQ ID NO: 3683977 - DNA, 25 bp, Homo sapien
gctgagtgaagagacccgttgttgc

SEQ ID NO: 3683978 - DNA, 25 bp, Homo sapien
gaagagacccgttgttgctgaggtc

SEQ ID NO: 3683979 - DNA, 25 bp, Homo sapien
ggctgtggctcaatagctgccaggt

SEQ ID NO: 3683980 - DNA, 25 bp, Homo sapien
ccaggttggtggtagagttggctga

SEQ ID NO: 3683981 - DNA, 25 bp, Homo sapien
caggcaggttgaagtgcacacgaag

SEQ ID NO: 3683982 - DNA, 25 bp, Homo sapien
gcacacgaagcccaatcctggagct

SEQ ID NO: 3683983 - DNA, 25 bp, Homo sapien
tctcctggaaagaatcgggcctggt

SEQ ID NO: 3683984 - DNA, 25 bp, Homo sapien
gcctgtccgttgaacctctcctgga

SEQ ID NO: 3683985 - DNA, 25 bp, Homo sapien
gaaggagccttcacctgcttactgg

SEQ ID NO: 3683986 - DNA, 25 bp, Homo sapien
ttttggatggaaagccctcctggag

SEQ ID NO: 3683987 - DNA, 25 bp, Homo sapien
gcttactggatgttgtcaccgctgg

SEQ ID NO: 3683988 - DNA, 25 bp, Homo sapien
ctgaacgtctgtgatgaaggagcct

SEQ ID NO: 3683989 - DNA, 25 bp, Homo sapien
gctgtcaaacaccagaactcaagtg

SEQ ID NO: 3683990 - DNA, 25 bp, Homo sapien
tttcagatcaagctattcaatgtgc

SEQ ID NO: 3683991 - DNA, 25 bp, Homo sapien
tcaatgtgcacatcgactcttaact

SEQ ID NO: 3683992 - DNA, 25 bp, Homo sapien
ccacaaaatgagagccctgtttcag

SEQ ID NO: 3683993 - DNA, 25 bp, Homo sapien
cccaagtctcgaatcactgcgttct

SEQ ID NO: 3683994 - DNA, 25 bp, Homo sapien
tcttagtttcacgaatgttatcatc

SEQ ID NO: 3683995 - DNA, 25 bp, Homo sapien
gctggtttggtctgacatcactgaa

SEQ ID NO: 3683996 - DNA, 25 bp, Homo sapien
tcattcactggttgaggagactttg

SEQ ID NO: 3683997 - DNA, 25 bp, Homo sapien
gctaaacactgtgatagacaatggg

SEQ ID NO: 3683998 - DNA, 25 bp, Homo sapien
ccatagtcgtgggttgattcagcaa

SEQ ID NO: 3683999 - DNA, 25 bp, Homo sapien
taactagttatcatagcctaccctg

SEQ ID NO: 3684000 - DNA, 25 bp, Homo sapien
aagatttcatcttggcgaaacctcc

SEQ ID NO: 3684001 - DNA, 25 bp, Homo sapien
aatatactattagagaccgggcgtg

SEQ ID NO: 3684002 - DNA, 25 bp, Homo sapien
ttatcttaaccagtactccaagttg

SEQ ID NO: 3684003 - DNA, 25 bp, Homo sapien
aaaatatactattagagaccgggcg

SEQ ID NO: 3684004 - DNA, 25 bp, Homo sapien
tactccaagttgagaggtcatgaaa

SEQ ID NO: 3684005 - DNA, 25 bp, Homo sapien
gtatgtggatggcacccaccctgga

SEQ ID NO: 3684006 - DNA, 25 bp, Homo sapien
ttttcatgagggtggctgttctcca

SEQ ID NO: 3684007 - DNA, 25 bp, Homo sapien
tgcagatcctagaccccaaactttt

SEQ ID NO: 3684008 - DNA, 25 bp, Homo sapien
ccttaccatgtgagataggtgctac

SEQ ID NO: 3684009 - DNA, 25 bp, Homo sapien
gacccggaagtgcttgagtctcttg

SEQ ID NO: 3684010 - DNA, 25 bp, Homo sapien
gatgggagcaatacacttgcccgtg

SEQ ID NO: 3684011 - DNA, 25 bp, Homo sapien
tggaacaggtatcccaacaattttg

SEQ ID NO: 3684012 - DNA, 25 bp, Homo sapien
caacaggagtacgttccaagcgaaa

SEQ ID NO: 3684013 - DNA, 25 bp, Homo sapien
tgccatcgtcatcactggtagtgga

SEQ ID NO: 3684014 - DNA, 25 bp, Homo sapien
gatggtgtagttgccatcgtcatca

SEQ ID NO: 3684015 - DNA, 25 bp, Homo sapien
gtagtggattcaatgtgcagagagc

SEQ ID NO: 3684016 - DNA, 25 bp, Homo sapien
tgtgcagagagcatgtcccatctcc

SEQ ID NO: 3684017 - DNA, 25 bp, Homo sapien
atgacatcaaccgctccttcctcag

SEQ ID NO: 3684018 - DNA, 25 bp, Homo sapien
agcacagcgcagaaccctgcgtctc

SEQ ID NO: 3684019 - DNA, 25 bp, Homo sapien
cagcacagcgcagaaccctgcgtct

SEQ ID NO: 3684020 - DNA, 25 bp, Homo sapien
gacatcaaccgctccttcctcagag

SEQ ID NO: 3684021 - DNA, 25 bp, Homo sapien
aggttagccgactgcgaatgggcaa

SEQ ID NO: 3684022 - DNA, 25 bp, Homo sapien
tgaccagcagaggttagccgactgc

SEQ ID NO: 3684023 - DNA, 25 bp, Homo sapien
actgcgaatgggcaaactttgtacc

SEQ ID NO: 3684024 - DNA, 25 bp, Homo sapien
aactttgtaccatcaagtggccaga

SEQ ID NO: 3684025 - DNA, 25 bp, Homo sapien
tctttcttgcactcgggatcttccc

SEQ ID NO: 3684026 - DNA, 25 bp, Homo sapien
cctgtaggggctctttgtctctttc

SEQ ID NO: 3684027 - DNA, 25 bp, Homo sapien
tgtggtcggaaaaagcgttcctgta

SEQ ID NO: 3684028 - DNA, 25 bp, Homo sapien
cttacagtccagccgacagaggcgc

SEQ ID NO: 3684029 - DNA, 25 bp, Homo sapien
aaaccagagctcttgaatcttgctg

SEQ ID NO: 3684030 - DNA, 25 bp, Homo sapien
ccgaatattatttaggcagccacag

SEQ ID NO: 3684031 - DNA, 25 bp, Homo sapien
gaagtggaccctttatgaatgctta

SEQ ID NO: 3684032 - DNA, 25 bp, Homo sapien
agtgagaatctctgcggatgggacc

SEQ ID NO: 3684033 - DNA, 25 bp, Homo sapien
tagatagatataataggcctgcagc

SEQ ID NO: 3684034 - DNA, 25 bp, Homo sapien
tgcttggcaccaaacagacagtgag

SEQ ID NO: 3684035 - DNA, 25 bp, Homo sapien
ggcatcgagagaaacgaagagtctg

SEQ ID NO: 3684036 - DNA, 25 bp, Homo sapien
taataaacaacagaacagctgaggc

SEQ ID NO: 3684037 - DNA, 25 bp, Homo sapien
ggtagcacaggttggccattgagta

SEQ ID NO: 3684038 - DNA, 25 bp, Homo sapien
aggcatctggtagcacaggttggcc

SEQ ID NO: 3684039 - DNA, 25 bp, Homo sapien
cacaggttggccattgagtagccat

SEQ ID NO: 3684040 - DNA, 25 bp, Homo sapien
attgagtagccatgtcagctccggg

SEQ ID NO: 3684041 - DNA, 25 bp, Homo sapien
ctgcgtcgcgctgagtgagtgggtc

SEQ ID NO: 3684042 - DNA, 25 bp, Homo sapien
tgagtgggtcaatgagcagagagtg

SEQ ID NO: 3684043 - DNA, 25 bp, Homo sapien
attctgcccggttttgttggtagcg

SEQ ID NO: 3684044 - DNA, 25 bp, Homo sapien
tgcacttataggtccctgcgtcgcg

SEQ ID NO: 3684045 - DNA, 25 bp, Homo sapien
tgcctcacagtcaccacagttctgg

SEQ ID NO: 3684046 - DNA, 25 bp, Homo sapien
tacttgaggatctgggtcgttcgca

SEQ ID NO: 3684047 - DNA, 25 bp, Homo sapien
aattcagcagagtgggcatgcaccc

SEQ ID NO: 3684048 - DNA, 25 bp, Homo sapien
tgcacatcccacgagaggcaatact

SEQ ID NO: 3684049 - DNA, 25 bp, Homo sapien
cgggaacaccgcagttctgtagttt

SEQ ID NO: 3684050 - DNA, 25 bp, Homo sapien
tctctctggtgcaagggatggtctc

SEQ ID NO: 3684051 - DNA, 25 bp, Homo sapien
actccagtctcacggggtggccttc

SEQ ID NO: 3684052 - DNA, 25 bp, Homo sapien
tgggggcatgcctatcacgcggcac

SEQ ID NO: 3684053 - DNA, 25 bp, Homo sapien
aaccaaaatggcaaagaaattgcca

SEQ ID NO: 3684054 - DNA, 25 bp, Homo sapien
caaaatggcaaagaaattgccattt

SEQ ID NO: 3684055 - DNA, 25 bp, Homo sapien
cttgtggtataaaaccaaaatggca

SEQ ID NO: 3684056 - DNA, 25 bp, Homo sapien
aaatggcaaagaaattgccatttcc

SEQ ID NO: 3684057 - DNA, 25 bp, Homo sapien
tgcacgacacgatgccggcttcatt

SEQ ID NO: 3684058 - DNA, 25 bp, Homo sapien
tcttggctgacaacgtgtaccatcc

SEQ ID NO: 3684059 - DNA, 25 bp, Homo sapien
ggcataccctgttgtgtcctggtgc

SEQ ID NO: 3684060 - DNA, 25 bp, Homo sapien
taccatccagcgtctgatttcttgg

SEQ ID NO: 3684061 - DNA, 25 bp, Homo sapien
ggaaaatggaccaaataatgtgtta

SEQ ID NO: 3684062 - DNA, 25 bp, Homo sapien
tggaccaaataatgtgttatgatca

SEQ ID NO: 3684063 - DNA, 25 bp, Homo sapien
gaaaatggaccaaataatgtgttat

SEQ ID NO: 3684064 - DNA, 25 bp, Homo sapien
aaatggaccaaataatgtgttatga

SEQ ID NO: 3684065 - DNA, 25 bp, Homo sapien
gaagagcatgaatacaccatcgtgc

SEQ ID NO: 3684066 - DNA, 25 bp, Homo sapien
gtagcgactgccactgggccggaca

SEQ ID NO: 3684067 - DNA, 25 bp, Homo sapien
tactggtgagagatccgtagcgact

SEQ ID NO: 3684068 - DNA, 25 bp, Homo sapien
taaagttcatcactctccactacac

SEQ ID NO: 3684069 - DNA, 25 bp, Homo sapien
tgagactgcaagaatccctagctga

SEQ ID NO: 3684070 - DNA, 25 bp, Homo sapien
ccagcagtgtgggaacttactcaac

SEQ ID NO: 3684071 - DNA, 25 bp, Homo sapien
tgtttgcccgcatacgtgagttgta

SEQ ID NO: 3684072 - DNA, 25 bp, Homo sapien
catgacctcctaatgctaagtggaa

SEQ ID NO: 3684073 - DNA, 25 bp, Homo sapien
caagcctttctaagcagttactgtc

SEQ ID NO: 3684074 - DNA, 25 bp, Homo sapien
caatgccagctgagtgtgcttggca

SEQ ID NO: 3684075 - DNA, 25 bp, Homo sapien
ccagcacagggaattgaaaacagac

SEQ ID NO: 3684076 - DNA, 25 bp, Homo sapien
tgtgctgtgatgagcattcccaggg

SEQ ID NO: 3684077 - DNA, 25 bp, Homo sapien
tggattccagcactacagctttgtg

SEQ ID NO: 3684078 - DNA, 25 bp, Homo sapien
cacgcgtaaccaggggcagtacctt

SEQ ID NO: 3684079 - DNA, 25 bp, Homo sapien
tgcacgcgtaaccaggggcagtacc

SEQ ID NO: 3684080 - DNA, 25 bp, Homo sapien
ctcatggattccagcactacagctt

SEQ ID NO: 3684081 - DNA, 25 bp, Homo sapien
tccttgtacgtgttcctcagggccc

SEQ ID NO: 3684082 - DNA, 25 bp, Homo sapien
tacgtgttcctcagggccctaagtc

SEQ ID NO: 3684083 - DNA, 25 bp, Homo sapien
cagggccctaagtctacttgctgct

SEQ ID NO: 3684084 - DNA, 25 bp, Homo sapien
gggaatgattcttccttgtacgtgt

SEQ ID NO: 3684085 - DNA, 25 bp, Homo sapien
tagagcagtgagattatagaacatg

SEQ ID NO: 3684086 - DNA, 25 bp, Homo sapien
caagttagagcagtgagattataga

SEQ ID NO: 3684087 - DNA, 25 bp, Homo sapien
atgggacaagttagagcagtgagat

SEQ ID NO: 3684088 - DNA, 25 bp, Homo sapien
atgagatgggacaagttagagcagt

SEQ ID NO: 3684089 - DNA, 25 bp, Homo sapien
tttgttcaactggactggtttcttc

SEQ ID NO: 3684090 - DNA, 25 bp, Homo sapien
taccaagccaagatgtatggaactg

SEQ ID NO: 3684091 - DNA, 25 bp, Homo sapien
agttaaaagactctcgggcatttag

SEQ ID NO: 3684092 - DNA, 25 bp, Homo sapien
cattgtggagcgtgaagcaccctgg

SEQ ID NO: 3684093 - DNA, 25 bp, Homo sapien
aagattcattctgcactctccgaca

SEQ ID NO: 3684094 - DNA, 25 bp, Homo sapien
gcgctaaaagcgctccttccctgag

SEQ ID NO: 3684095 - DNA, 25 bp, Homo sapien
ttgaaaggccttcctcgaaccagcc

SEQ ID NO: 3684096 - DNA, 25 bp, Homo sapien
ttcagctctttgctataaattctcc

SEQ ID NO: 3684097 - DNA, 25 bp, Homo sapien
agaaggcttcatcaggatctgaaca

SEQ ID NO: 3684098 - DNA, 25 bp, Homo sapien
tctgaagctgggcaaaattctgacc

SEQ ID NO: 3684099 - DNA, 25 bp, Homo sapien
ctgggtaactttgtagctgagctga

SEQ ID NO: 3684100 - DNA, 25 bp, Homo sapien
gatctgaacatgagattgggtccat

SEQ ID NO: 3684101 - DNA, 25 bp, Homo sapien
gctctgttactcctacagtgaggca

SEQ ID NO: 3684102 - DNA, 25 bp, Homo sapien
ttatgaaccacaatattgccttcag

SEQ ID NO: 3684103 - DNA, 25 bp, Homo sapien
cccacagttatcactgggaatggct

SEQ ID NO: 3684104 - DNA, 25 bp, Homo sapien
tgatgagctggaaattagtcttggc

SEQ ID NO: 3684105 - DNA, 25 bp, Homo sapien
aagctgctcgaacttgtacagctaa

SEQ ID NO: 3684106 - DNA, 25 bp, Homo sapien
ggctcatctaagctgctcgaacttg

SEQ ID NO: 3684107 - DNA, 25 bp, Homo sapien
cttcaggctcatctaagctgctcga

SEQ ID NO: 3684108 - DNA, 25 bp, Homo sapien
catctaagctgctcgaacttgtaca

SEQ ID NO: 3684109 - DNA, 25 bp, Homo sapien
ggttagccagctggatctgttcctt

SEQ ID NO: 3684110 - DNA, 25 bp, Homo sapien
tgccaggtggttagccagctggatc

SEQ ID NO: 3684111 - DNA, 25 bp, Homo sapien
tccttggctaagtgatttgcatcca

SEQ ID NO: 3684112 - DNA, 25 bp, Homo sapien
tgtaaggcacaagagtgtaaggctg

SEQ ID NO: 3684113 - DNA, 25 bp, Homo sapien
tttttcagggccagacattgatgga

SEQ ID NO: 3684114 - DNA, 25 bp, Homo sapien
ttcccaagagagatggataagcaag

SEQ ID NO: 3684115 - DNA, 25 bp, Homo sapien
caagatcaagtgatgatccatgtgg

SEQ ID NO: 3684116 - DNA, 25 bp, Homo sapien
caatggacgccaagagaatgggagt

SEQ ID NO: 3684117 - DNA, 25 bp, Homo sapien
tcagcttgcaaggactttgtggctc

SEQ ID NO: 3684118 - DNA, 25 bp, Homo sapien
agatactttcaaggaaccagaagca

SEQ ID NO: 3684119 - DNA, 25 bp, Homo sapien
tctgcaaagtagatgggccaaatgg

SEQ ID NO: 3684120 - DNA, 25 bp, Homo sapien
ccagaagcatttaactgtcagcttg

SEQ ID NO: 3684121 - DNA, 25 bp, Homo sapien
ctggccagggcattagcacagctgc

SEQ ID NO: 3684122 - DNA, 25 bp, Homo sapien
gaaaccaacagaggatactgacatg

SEQ ID NO: 3684123 - DNA, 25 bp, Homo sapien
aggacaagaaaccaacagaggatac

SEQ ID NO: 3684124 - DNA, 25 bp, Homo sapien
tccccatcatagcccacagaaaagg

SEQ ID NO: 3684125 - DNA, 25 bp, Homo sapien
ttattgagggtctgcatggtgatct

SEQ ID NO: 3684126 - DNA, 25 bp, Homo sapien
tcttccagggcgttcaccttggcca

SEQ ID NO: 3684127 - DNA, 25 bp, Homo sapien
tgatcttctcgttgcctaccagcag

SEQ ID NO: 3684128 - DNA, 25 bp, Homo sapien
tgacctcttccagggcgttcacctt

SEQ ID NO: 3684129 - DNA, 25 bp, Homo sapien
cacagaacgttgatgtggatctcca

SEQ ID NO: 3684130 - DNA, 25 bp, Homo sapien
cagcaccctgcacagaacgttgatg

SEQ ID NO: 3684131 - DNA, 25 bp, Homo sapien
cctgcacagaacgttgatgtggatc

SEQ ID NO: 3684132 - DNA, 25 bp, Homo sapien
cagaacgttgatgtggatctccagg

SEQ ID NO: 3684133 - DNA, 25 bp, Homo sapien
ctggcaatttttcttcaggtaggcc

SEQ ID NO: 3684134 - DNA, 25 bp, Homo sapien
tggcccctcagggcaacaattcctt

SEQ ID NO: 3684135 - DNA, 25 bp, Homo sapien
agggcaacaattcctttctggcaat

SEQ ID NO: 3684136 - DNA, 25 bp, Homo sapien
ctcagggcaacaattcctttctggc

SEQ ID NO: 3684137 - DNA, 25 bp, Homo sapien
catgaaccactggtgctggttctgc

SEQ ID NO: 3684138 - DNA, 25 bp, Homo sapien
tgggcttcaacacccctgaccagcg

SEQ ID NO: 3684139 - DNA, 25 bp, Homo sapien
accctgctgggcttcaacacccctg

SEQ ID NO: 3684140 - DNA, 25 bp, Homo sapien
cctccagctgagacttgatgtccat

SEQ ID NO: 3684141 - DNA, 25 bp, Homo sapien
gtaggacttacacatctttcactag

SEQ ID NO: 3684142 - DNA, 25 bp, Homo sapien
tctttcactagatttatttccaggt

SEQ ID NO: 3684143 - DNA, 25 bp, Homo sapien
cctgggtaatagagggagacctcat

SEQ ID NO: 3684144 - DNA, 25 bp, Homo sapien
tcagtgtaggacttacacatctttc

SEQ ID NO: 3684145 - DNA, 25 bp, Homo sapien
ttttaagttgcataccccagcgagt

SEQ ID NO: 3684146 - DNA, 25 bp, Homo sapien
ccttcatcagatgtatatactgtga

SEQ ID NO: 3684147 - DNA, 25 bp, Homo sapien
cccagcgagttctgttattgaacaa

SEQ ID NO: 3684148 - DNA, 25 bp, Homo sapien
cattttgggagagtatagtgctatc

SEQ ID NO: 3684149 - DNA, 25 bp, Homo sapien
atttgttcgtgatcatttgggttgt

SEQ ID NO: 3684150 - DNA, 25 bp, Homo sapien
tgtgtaactatattatgctttattt

SEQ ID NO: 3684151 - DNA, 25 bp, Homo sapien
ttgtgtaactatattatgctttatt

SEQ ID NO: 3684152 - DNA, 25 bp, Homo sapien
ttgttcgtgatcatttgggttgttc

SEQ ID NO: 3684153 - DNA, 25 bp, Homo sapien
gaagctctcggtcctatgaaagcaa

SEQ ID NO: 3684154 - DNA, 25 bp, Homo sapien
tacagcaacccaaaaggaactcagg

SEQ ID NO: 3684155 - DNA, 25 bp, Homo sapien
tgagggcagcctgtagccaatagcc

SEQ ID NO: 3684156 - DNA, 25 bp, Homo sapien
gaagagaactcagttgtgcctggac

SEQ ID NO: 3684157 - DNA, 25 bp, Homo sapien
gggaaggcaaatatacgcgcggccg

SEQ ID NO: 3684158 - DNA, 25 bp, Homo sapien
aaggcaaatatacgcgcggccgagc

SEQ ID NO: 3684159 - DNA, 25 bp, Homo sapien
gaaggcaaatatacgcgcggccgag

SEQ ID NO: 3684160 - DNA, 25 bp, Homo sapien
ggaaggcaaatatacgcgcggccga

SEQ ID NO: 3684161 - DNA, 25 bp, Homo sapien
tcaggtacgaagactaaaaatcagg

SEQ ID NO: 3684162 - DNA, 25 bp, Homo sapien
agtaatgtaatctcagctgggcgtg

SEQ ID NO: 3684163 - DNA, 25 bp, Homo sapien
tctcagccgtctcaaaaactgcaag

SEQ ID NO: 3684164 - DNA, 25 bp, Homo sapien
tactaagaaagaggacagtaggcca

SEQ ID NO: 3684165 - DNA, 25 bp, Homo sapien
tctaaatctagagtacaaacgtgaa

SEQ ID NO: 3684166 - DNA, 25 bp, Homo sapien
ttccctggaaagatgtagaaagact

SEQ ID NO: 3684167 - DNA, 25 bp, Homo sapien
cttttggtgccaaaagctcaggaat

SEQ ID NO: 3684168 - DNA, 25 bp, Homo sapien
gaagaaggagatactttccctggaa

SEQ ID NO: 3684169 - DNA, 25 bp, Homo sapien
gaaaattgcgcttccaagtgacacc

SEQ ID NO: 3684170 - DNA, 25 bp, Homo sapien
tgcctcggagactgattagcctgtg

SEQ ID NO: 3684171 - DNA, 25 bp, Homo sapien
aaataggagtgtttctgggccgcga

SEQ ID NO: 3684172 - DNA, 25 bp, Homo sapien
ttcgtcccaatgtgccgcgcgggat

SEQ ID NO: 3684173 - DNA, 25 bp, Homo sapien
catcgacggcgcggaaagggcccca

SEQ ID NO: 3684174 - DNA, 25 bp, Homo sapien
ccgccctggctaggcatcgacggcg

SEQ ID NO: 3684175 - DNA, 25 bp, Homo sapien
gagggccccgccctggctaggcatc

SEQ ID NO: 3684176 - DNA, 25 bp, Homo sapien
gctaggcatcgacggcgcggaaagg

SEQ ID NO: 3684177 - DNA, 25 bp, Homo sapien
agtgtgtagaaggaaccgtgccgta

SEQ ID NO: 3684178 - DNA, 25 bp, Homo sapien
tgccgtagcgctctggagaagttct

SEQ ID NO: 3684179 - DNA, 25 bp, Homo sapien
agaaggaaccgtgccgtagcgctct

SEQ ID NO: 3684180 - DNA, 25 bp, Homo sapien
tggcagttctgccagtgtgtagaag

SEQ ID NO: 3684181 - DNA, 25 bp, Homo sapien
gaaccatccagttttcagagcgtac

SEQ ID NO: 3684182 - DNA, 25 bp, Homo sapien
tagaaccatccagttttcagagcgt

SEQ ID NO: 3684183 - DNA, 25 bp, Homo sapien
agaaccatccagttttcagagcgta

SEQ ID NO: 3684184 - DNA, 25 bp, Homo sapien
gttagaaccatccagttttcagagc

SEQ ID NO: 3684185 - DNA, 25 bp, Homo sapien
tgacaaccgcttagggagctgcgca

SEQ ID NO: 3684186 - DNA, 25 bp, Homo sapien
gaagtcgtttgcctcgtgtagcgct

SEQ ID NO: 3684187 - DNA, 25 bp, Homo sapien
tagttacgccgactctggtgctcgc

SEQ ID NO: 3684188 - DNA, 25 bp, Homo sapien
tgttccagttaaagagctgcagcgc

SEQ ID NO: 3684189 - DNA, 25 bp, Homo sapien
tcctcccatcggcaagccgccctcc

SEQ ID NO: 3684190 - DNA, 25 bp, Homo sapien
agcaagtcctcccatcggcaagccg

SEQ ID NO: 3684191 - DNA, 25 bp, Homo sapien
tgagcaagtcctcccatcggcaagc

SEQ ID NO: 3684192 - DNA, 25 bp, Homo sapien
aagtcctcccatcggcaagccgccc

SEQ ID NO: 3684193 - DNA, 25 bp, Homo sapien
ggcctcggcgtcgtccactgaattc

SEQ ID NO: 3684194 - DNA, 25 bp, Homo sapien
gggcctcggcgtcgtccactgaatt

SEQ ID NO: 3684195 - DNA, 25 bp, Homo sapien
ctcggcgtcgtccactgaattccac

SEQ ID NO: 3684196 - DNA, 25 bp, Homo sapien
cctcggcgtcgtccactgaattcca

SEQ ID NO: 3684197 - DNA, 25 bp, Homo sapien
caaaatggcggaggccaagccagca

SEQ ID NO: 3684198 - DNA, 25 bp, Homo sapien
ccaaaatggcggaggccaagccagc

SEQ ID NO: 3684199 - DNA, 25 bp, Homo sapien
tcccctggccttctagatcagtttt

SEQ ID NO: 3684200 - DNA, 25 bp, Homo sapien
tcatcccttccagggagctttgacc

SEQ ID NO: 3684201 - DNA, 25 bp, Homo sapien
ccctcccctggccttctagatcagt

SEQ ID NO: 3684202 - DNA, 25 bp, Homo sapien
tccagggagctttgaccaccccctc

SEQ ID NO: 3684203 - DNA, 25 bp, Homo sapien
ggaatctgcgtcagaagtcactcgc

SEQ ID NO: 3684204 - DNA, 25 bp, Homo sapien
ttgggaatctgcgtcagaagtcact

SEQ ID NO: 3684205 - DNA, 25 bp, Homo sapien
atcttgggaatctgcgtcagaagtc

SEQ ID NO: 3684206 - DNA, 25 bp, Homo sapien
agaagtcactcgcagtcccgtcagc

SEQ ID NO: 3684207 - DNA, 25 bp, Homo sapien
cagaattacaaaggaggccgtctgc

SEQ ID NO: 3684208 - DNA, 25 bp, Homo sapien
cggcagaattacaaaggaggccgtc

SEQ ID NO: 3684209 - DNA, 25 bp, Homo sapien
tgtcctggatttgggagttgagcac

SEQ ID NO: 3684210 - DNA, 25 bp, Homo sapien
gaattacaaaggaggccgtctgcct

SEQ ID NO: 3684211 - DNA, 25 bp, Homo sapien
taagcgtcctttattcctcccagga

SEQ ID NO: 3684212 - DNA, 25 bp, Homo sapien
tatctagctgccctagagaccagaa

SEQ ID NO: 3684213 - DNA, 25 bp, Homo sapien
cagaaagctagggagagtacgcccc

SEQ ID NO: 3684214 - DNA, 25 bp, Homo sapien
tctggaatataagggccggctaagc

SEQ ID NO: 3684215 - DNA, 25 bp, Homo sapien
gacgacctacttgaaacatgcccat

SEQ ID NO: 3684216 - DNA, 25 bp, Homo sapien
aattacggatccagttctcaggacc

SEQ ID NO: 3684217 - DNA, 25 bp, Homo sapien
caccaccacgtgactgggtttacaa

SEQ ID NO: 3684218 - DNA, 25 bp, Homo sapien
tctagagccttaatgccatcggaaa

SEQ ID NO: 3684219 - DNA, 25 bp, Homo sapien
tagagaatcctcttaacacggaggc

SEQ ID NO: 3684220 - DNA, 25 bp, Homo sapien
gatgccagcaatgggaatgaccagt

SEQ ID NO: 3684221 - DNA, 25 bp, Homo sapien
gtagtgacggtcacacaacgctgtg

SEQ ID NO: 3684222 - DNA, 25 bp, Homo sapien
gatggatttccagataacggcacaa

SEQ ID NO: 3684223 - DNA, 25 bp, Homo sapien
gattaaaactgaggtcaaaggccac

SEQ ID NO: 3684224 - DNA, 25 bp, Homo sapien
aactgtctttgaagggccaacactc

SEQ ID NO: 3684225 - DNA, 25 bp, Homo sapien
aactatttgtgtcccctgaatgcca

SEQ ID NO: 3684226 - DNA, 25 bp, Homo sapien
taatgaagaaacacctctcagaggt

SEQ ID NO: 3684227 - DNA, 25 bp, Homo sapien
caaatggtagtccacgaagtcgtac

SEQ ID NO: 3684228 - DNA, 25 bp, Homo sapien
ggaccattatgtttcataacccaat

SEQ ID NO: 3684229 - DNA, 25 bp, Homo sapien
gaagtcgtactgtcccatcactagc

SEQ ID NO: 3684230 - DNA, 25 bp, Homo sapien
gctgcaaccaaatggtagtccacga

SEQ ID NO: 3684231 - DNA, 25 bp, Homo sapien
aaagcttagtttcccatcaccccat

SEQ ID NO: 3684232 - DNA, 25 bp, Homo sapien
tttgcgaccagtgtaaaaacactgt

SEQ ID NO: 3684233 - DNA, 25 bp, Homo sapien
tatgctccatatactaattcacggt

SEQ ID NO: 3684234 - DNA, 25 bp, Homo sapien
tacattaaccaagactatcatagtt

SEQ ID NO: 3684235 - DNA, 25 bp, Homo sapien
gtgttaaaggctgaaacattcccat

SEQ ID NO: 3684236 - DNA, 25 bp, Homo sapien
catcaaggggaacagtgttaaaggc

SEQ ID NO: 3684237 - DNA, 25 bp, Homo sapien
caaataaccccatcaaggggaacag

SEQ ID NO: 3684238 - DNA, 25 bp, Homo sapien
gggaacagtgttaaaggctgaaaca

SEQ ID NO: 3684239 - DNA, 25 bp, Homo sapien
tgttatcccatttggcacgatttcc

SEQ ID NO: 3684240 - DNA, 25 bp, Homo sapien
cgtcaatgttatcccatttggcacg

SEQ ID NO: 3684241 - DNA, 25 bp, Homo sapien
gttatcccatttggcacgatttcca

SEQ ID NO: 3684242 - DNA, 25 bp, Homo sapien
atcccatttggcacgatttccaacc

SEQ ID NO: 3684243 - DNA, 25 bp, Homo sapien
ccagagcattttctgctatctcctt

SEQ ID NO: 3684244 - DNA, 25 bp, Homo sapien
cccagagcattttctgctatctcct

SEQ ID NO: 3684245 - DNA, 25 bp, Homo sapien
tccccagagcattttctgctatctc

SEQ ID NO: 3684246 - DNA, 25 bp, Homo sapien
ccccagagcattttctgctatctcc

SEQ ID NO: 3684247 - DNA, 25 bp, Homo sapien
gttttaaggtacaggtttcagcata

SEQ ID NO: 3684248 - DNA, 25 bp, Homo sapien
tgcctaaatacaccgtaagttaaca

SEQ ID NO: 3684249 - DNA, 25 bp, Homo sapien
tattagtgtaaattagatactgggc

SEQ ID NO: 3684250 - DNA, 25 bp, Homo sapien
catttaagcaatagtgacccacaac

SEQ ID NO: 3684251 - DNA, 25 bp, Homo sapien
gctacttctgaagatctcaatatac

SEQ ID NO: 3684252 - DNA, 25 bp, Homo sapien
ctgctacttctgaagatctcaatat

SEQ ID NO: 3684253 - DNA, 25 bp, Homo sapien
tgctacttctgaagatctcaatata

SEQ ID NO: 3684254 - DNA, 25 bp, Homo sapien
tcttcttggtggatcataaaatcct

SEQ ID NO: 3684255 - DNA, 25 bp, Homo sapien
cctcttcctcctattggtctatcat

SEQ ID NO: 3684256 - DNA, 25 bp, Homo sapien
gtctatcatatggtcccggtcgctg

SEQ ID NO: 3684257 - DNA, 25 bp, Homo sapien
catatggtcccggtcgctgtcccag

SEQ ID NO: 3684258 - DNA, 25 bp, Homo sapien
ctcctcgtcgcattctgtcatacat

SEQ ID NO: 3684259 - DNA, 25 bp, Homo sapien
ctgtgtaagttttctaggtgccaat

SEQ ID NO: 3684260 - DNA, 25 bp, Homo sapien
gaaaaaagcagtcaacgtgatggaa

SEQ ID NO: 3684261 - DNA, 25 bp, Homo sapien
tatgtgcatcagtcaagtcccacag

SEQ ID NO: 3684262 - DNA, 25 bp, Homo sapien
gggaatccgtattttcatgaacagg

SEQ ID NO: 3684263 - DNA, 25 bp, Homo sapien
ctgtgtaatttaaggagaaacacat

SEQ ID NO: 3684264 - DNA, 25 bp, Homo sapien
cccatagccgtaattattatagcca

SEQ ID NO: 3684265 - DNA, 25 bp, Homo sapien
gtcatcaaagccatcattcccatag

SEQ ID NO: 3684266 - DNA, 25 bp, Homo sapien
tgtcatcaaagccatcattcccata

SEQ ID NO: 3684267 - DNA, 25 bp, Homo sapien
tagccgtaattattatagccaccat

SEQ ID NO: 3684268 - DNA, 25 bp, Homo sapien
ttcagttgcacgaaaaggcaaccct

SEQ ID NO: 3684269 - DNA, 25 bp, Homo sapien
tgaccaccatgaaaacctgaacttg

SEQ ID NO: 3684270 - DNA, 25 bp, Homo sapien
ccctctcatatgtacgaaatgacca

SEQ ID NO: 3684271 - DNA, 25 bp, Homo sapien
tgcacgaaaaggcaaccctctcata

SEQ ID NO: 3684272 - DNA, 25 bp, Homo sapien
aatacgggatatcatgatttggaac

SEQ ID NO: 3684273 - DNA, 25 bp, Homo sapien
taagactatatgaaattgttcccca

SEQ ID NO: 3684274 - DNA, 25 bp, Homo sapien
actatgcggtttgaataaagccacc

SEQ ID NO: 3684275 - DNA, 25 bp, Homo sapien
ggttctaatcacaagttagccaggt

SEQ ID NO: 3684276 - DNA, 25 bp, Homo sapien
tctattgagaatattaaagtaaatt

SEQ ID NO: 3684277 - DNA, 25 bp, Homo sapien
aaagtaaattaccacataccttgat

SEQ ID NO: 3684278 - DNA, 25 bp, Homo sapien
ttctattgagaatattaaagtaaat

SEQ ID NO: 3684279 - DNA, 25 bp, Homo sapien
gaactcgtattggatttagtggtga

SEQ ID NO: 3684280 - DNA, 25 bp, Homo sapien
tgccatcagctccaatatcaatatg

SEQ ID NO: 3684281 - DNA, 25 bp, Homo sapien
tatctttagacatggcagctactgc

SEQ ID NO: 3684282 - DNA, 25 bp, Homo sapien
tatttttatctttagacatggcagc

SEQ ID NO: 3684283 - DNA, 25 bp, Homo sapien
aattcacgtttaggaaataagattg

SEQ ID NO: 3684284 - DNA, 25 bp, Homo sapien
taggaaataagattgtgtgccaaag

SEQ ID NO: 3684285 - DNA, 25 bp, Homo sapien
aataagattgtgtgccaaagacacc

SEQ ID NO: 3684286 - DNA, 25 bp, Homo sapien
cgtttaggaaataagattgtgtgcc

SEQ ID NO: 3684287 - DNA, 25 bp, Homo sapien
aacaactgccaagcgttacctacag

SEQ ID NO: 3684288 - DNA, 25 bp, Homo sapien
tatagaggtcaaatggttttaaatc

SEQ ID NO: 3684289 - DNA, 25 bp, Homo sapien
tacaagctttgtaaaaaagatcaat

SEQ ID NO: 3684290 - DNA, 25 bp, Homo sapien
gtacagcgatatataaagcccacag

SEQ ID NO: 3684291 - DNA, 25 bp, Homo sapien
aagaagagttcaatatatcgatgtt

SEQ ID NO: 3684292 - DNA, 25 bp, Homo sapien
ctcttccgtagcctcccattccaga

SEQ ID NO: 3684293 - DNA, 25 bp, Homo sapien
gataagcagctaaccctgcatattt

SEQ ID NO: 3684294 - DNA, 25 bp, Homo sapien
tgagactcatcgataagcagctaac

SEQ ID NO: 3684295 - DNA, 25 bp, Homo sapien
aaaaaattgagactcatcgataagc

SEQ ID NO: 3684296 - DNA, 25 bp, Homo sapien
tcatcgataagcagctaaccctgca

SEQ ID NO: 3684297 - DNA, 25 bp, Homo sapien
gagtaccatatcctccactgtaatt

SEQ ID NO: 3684298 - DNA, 25 bp, Homo sapien
tcaggagtaccatatcctccactgt

SEQ ID NO: 3684299 - DNA, 25 bp, Homo sapien
cccaaaccatcaggagtaccatatc

SEQ ID NO: 3684300 - DNA, 25 bp, Homo sapien
accatcaggagtaccatatcctcca

SEQ ID NO: 3684301 - DNA, 25 bp, Homo sapien
aaagtttgcactacatatgcggact

SEQ ID NO: 3684302 - DNA, 25 bp, Homo sapien
agtaatacctgcactttaaagtttg

SEQ ID NO: 3684303 - DNA, 25 bp, Homo sapien
tacatatgcggactaacacaaactg

SEQ ID NO: 3684304 - DNA, 25 bp, Homo sapien
tattaagaatcactcagcaggagat

SEQ ID NO: 3684305 - DNA, 25 bp, Homo sapien
cgccttgcccatagtaacctccact

SEQ ID NO: 3684306 - DNA, 25 bp, Homo sapien
ttgcccatagtaacctccactgcct

SEQ ID NO: 3684307 - DNA, 25 bp, Homo sapien
atccacctccactcatgccgccttg

SEQ ID NO: 3684308 - DNA, 25 bp, Homo sapien
cactcatgccgccttgcccatagta

SEQ ID NO: 3684309 - DNA, 25 bp, Homo sapien
taagaaagtctagtagaccagatgc

SEQ ID NO: 3684310 - DNA, 25 bp, Homo sapien
tagaccagatgctgttgtcaagact

SEQ ID NO: 3684311 - DNA, 25 bp, Homo sapien
tgtcaagacttgtatgttggtgttt

SEQ ID NO: 3684312 - DNA, 25 bp, Homo sapien
catcacaatctgttgctttaccaaa

SEQ ID NO: 3684313 - DNA, 25 bp, Homo sapien
ggcagcacatctttaggagtaacta

SEQ ID NO: 3684314 - DNA, 25 bp, Homo sapien
tcagatacaaaacccaactgcagga

SEQ ID NO: 3684315 - DNA, 25 bp, Homo sapien
tatttacagtgttgtccaggaggaa

SEQ ID NO: 3684316 - DNA, 25 bp, Homo sapien
tttacgcagaggtgaaccattatcc

SEQ ID NO: 3684317 - DNA, 25 bp, Homo sapien
cccacaatgacatttattaataaca

SEQ ID NO: 3684318 - DNA, 25 bp, Homo sapien
tcccacaatgacatttattaataac

SEQ ID NO: 3684319 - DNA, 25 bp, Homo sapien
cacaatgacatttattaataacatt

SEQ ID NO: 3684320 - DNA, 25 bp, Homo sapien
ccacaatgacatttattaataacat

SEQ ID NO: 3684321 - DNA, 25 bp, Homo sapien
gacacaaagcattctaggacagacg

SEQ ID NO: 3684322 - DNA, 25 bp, Homo sapien
tcaagaggctccacatatataggct

SEQ ID NO: 3684323 - DNA, 25 bp, Homo sapien
ctcctaaatcatagacatcgtatgt

SEQ ID NO: 3684324 - DNA, 25 bp, Homo sapien
cgtatgtagtaccaccttctaccaa

SEQ ID NO: 3684325 - DNA, 25 bp, Homo sapien
gacagcaacttgctccatgtagttt

SEQ ID NO: 3684326 - DNA, 25 bp, Homo sapien
tctgtatttcgtgattgtgaactcg

SEQ ID NO: 3684327 - DNA, 25 bp, Homo sapien
aagacaggtggtgtatgccctaata

SEQ ID NO: 3684328 - DNA, 25 bp, Homo sapien
caataatgctatcatggtgccaggg

SEQ ID NO: 3684329 - DNA, 25 bp, Homo sapien
atctaacaaagttgccttcacaggg

SEQ ID NO: 3684330 - DNA, 25 bp, Homo sapien
aatcttcagttatacttgggttctt

SEQ ID NO: 3684331 - DNA, 25 bp, Homo sapien
aacaatgggtcaagtaggctgggcc

SEQ ID NO: 3684332 - DNA, 25 bp, Homo sapien
gggtcttctcattgtgaaactgata

SEQ ID NO: 3684333 - DNA, 25 bp, Homo sapien
aaaattctatgattcaagctatctg

SEQ ID NO: 3684334 - DNA, 25 bp, Homo sapien
atgattcaagctatctgactctttg

SEQ ID NO: 3684335 - DNA, 25 bp, Homo sapien
gtctgatatgaactatctagttaaa

SEQ ID NO: 3684336 - DNA, 25 bp, Homo sapien
tgtttgtctgatatgaactatctag

SEQ ID NO: 3684337 - DNA, 25 bp, Homo sapien
gcgtgcaccactatttccagctaat

SEQ ID NO: 3684338 - DNA, 25 bp, Homo sapien
atggggtttcactgtatattgacca

SEQ ID NO: 3684339 - DNA, 25 bp, Homo sapien
gatgattcacccgccttggccccca

SEQ ID NO: 3684340 - DNA, 25 bp, Homo sapien
ggtttcactgtatattgaccaggct

SEQ ID NO: 3684341 - DNA, 25 bp, Homo sapien
ttatgggtgggcaccagcacacccg

SEQ ID NO: 3684342 - DNA, 25 bp, Homo sapien
ctggaattatgggtgggcaccagca

SEQ ID NO: 3684343 - DNA, 25 bp, Homo sapien
ggaattatgggtgggcaccagcaca

SEQ ID NO: 3684344 - DNA, 25 bp, Homo sapien
aattatgggtgggcaccagcacacc

SEQ ID NO: 3684345 - DNA, 25 bp, Homo sapien
gatgatagtagcataccaccacacc

SEQ ID NO: 3684346 - DNA, 25 bp, Homo sapien
tcaaataaacctactcagaaggtgg

SEQ ID NO: 3684347 - DNA, 25 bp, Homo sapien
tagggtaggtctgttggcaataaat

SEQ ID NO: 3684348 - DNA, 25 bp, Homo sapien
taggatgatagtagcataccaccac

SEQ ID NO: 3684349 - DNA, 25 bp, Homo sapien
agatagggacttgttcctctgtcgc

SEQ ID NO: 3684350 - DNA, 25 bp, Homo sapien
ttgagatagggacttgttcctctgt

SEQ ID NO: 3684351 - DNA, 25 bp, Homo sapien
tgagatagggacttgttcctctgtc

SEQ ID NO: 3684352 - DNA, 25 bp, Homo sapien
gagatagggacttgttcctctgtcg

SEQ ID NO: 3684353 - DNA, 25 bp, Homo sapien
gtaacagtcccatagcaaaatggtg

SEQ ID NO: 3684354 - DNA, 25 bp, Homo sapien
aaaattactgcagccatgaggcagc

SEQ ID NO: 3684355 - DNA, 25 bp, Homo sapien
acagatcagaactctacttgggagg

SEQ ID NO: 3684356 - DNA, 25 bp, Homo sapien
aatgaaataattgcccgactagaag

SEQ ID NO: 3684357 - DNA, 25 bp, Homo sapien
ccaatgccttcagaatattctgtga

SEQ ID NO: 3684358 - DNA, 25 bp, Homo sapien
gaacattttagacttagtacaaaga

SEQ ID NO: 3684359 - DNA, 25 bp, Homo sapien
tccaagttctagttatatagctgct

SEQ ID NO: 3684360 - DNA, 25 bp, Homo sapien
tgtcttccaagttctagttatatag

SEQ ID NO: 3684361 - DNA, 25 bp, Homo sapien
taaatttgcacaggtgtccattgtg

SEQ ID NO: 3684362 - DNA, 25 bp, Homo sapien
taatgttgctataaccagagccaaa

SEQ ID NO: 3684363 - DNA, 25 bp, Homo sapien
gaactcttgaaagattggcgacgtc

SEQ ID NO: 3684364 - DNA, 25 bp, Homo sapien
tatttcttacaggttggtgaactct

SEQ ID NO: 3684365 - DNA, 25 bp, Homo sapien
gtgccgtggctccttcagttccaaa

SEQ ID NO: 3684366 - DNA, 25 bp, Homo sapien
ggttgcagctgtttttagcacccac

SEQ ID NO: 3684367 - DNA, 25 bp, Homo sapien
ttccaaatctgggatctatgaggca

SEQ ID NO: 3684368 - DNA, 25 bp, Homo sapien
gaaagcccagggaatcaactactgt

SEQ ID NO: 3684369 - DNA, 25 bp, Homo sapien
tttttgctgcggtccaagttcacga

SEQ ID NO: 3684370 - DNA, 25 bp, Homo sapien
tgacatgatcttccggtgcacgtgc

SEQ ID NO: 3684371 - DNA, 25 bp, Homo sapien
tgcggtttttgctgcggtccaagtt

SEQ ID NO: 3684372 - DNA, 25 bp, Homo sapien
tgatcttccggtgcacgtgcaaggg

SEQ ID NO: 3684373 - DNA, 25 bp, Homo sapien
tctgtacacctggactaccttgcca

SEQ ID NO: 3684374 - DNA, 25 bp, Homo sapien
ctgacctttgtagtgtccttgaact

SEQ ID NO: 3684375 - DNA, 25 bp, Homo sapien
ctgctcagtgtagatgacatctttc

SEQ ID NO: 3684376 - DNA, 25 bp, Homo sapien
atctttctttctgtacacctggact

SEQ ID NO: 3684377 - DNA, 25 bp, Homo sapien
tgtttgggtgagtacccacgtggac

SEQ ID NO: 3684378 - DNA, 25 bp, Homo sapien
tgagtacccacgtggacggttgtgc

SEQ ID NO: 3684379 - DNA, 25 bp, Homo sapien
agtacccacgtggacggttgtgctg

SEQ ID NO: 3684380 - DNA, 25 bp, Homo sapien
cttgtttgggtgagtacccacgtgg

SEQ ID NO: 3684381 - DNA, 25 bp, Homo sapien
ttttccgatccttgttgagatttag

SEQ ID NO: 3684382 - DNA, 25 bp, Homo sapien
gctcactgcaacctttgcctcccag

SEQ ID NO: 3684383 - DNA, 25 bp, Homo sapien
gctggagtgcagtggtgcgatctga

SEQ ID NO: 3684384 - DNA, 25 bp, Homo sapien
gatggagtttggctctggcgcccag

SEQ ID NO: 3684385 - DNA, 25 bp, Homo sapien
tgagatggagtttggctctggcgcc

SEQ ID NO: 3684386 - DNA, 25 bp, Homo sapien
gtgatctcctcagcatttggtggcg

SEQ ID NO: 3684387 - DNA, 25 bp, Homo sapien
cctcagcatttggtggcgatacaat

SEQ ID NO: 3684388 - DNA, 25 bp, Homo sapien
cacgtgtatgagtgatctcctcagc

SEQ ID NO: 3684389 - DNA, 25 bp, Homo sapien
ggaacatttcacgtgtatgagtgat

SEQ ID NO: 3684390 - DNA, 25 bp, Homo sapien
tatgaatactgttttctccgtttta

SEQ ID NO: 3684391 - DNA, 25 bp, Homo sapien
atatgaatactgttttctccgtttt

SEQ ID NO: 3684392 - DNA, 25 bp, Homo sapien
cactgctgtaaaggtaggtagactc

SEQ ID NO: 3684393 - DNA, 25 bp, Homo sapien
aaattctattgaacaccgtagtcag

SEQ ID NO: 3684394 - DNA, 25 bp, Homo sapien
catgtaacattgaagtcgtgaaacc

SEQ ID NO: 3684395 - DNA, 25 bp, Homo sapien
taatgccgctggaacttaaaactgg

SEQ ID NO: 3684396 - DNA, 25 bp, Homo sapien
tagtaaccaagctcaaccctgctta

SEQ ID NO: 3684397 - DNA, 25 bp, Homo sapien
ctgagataagatgagatcggctgcg

SEQ ID NO: 3684398 - DNA, 25 bp, Homo sapien
gctgcgttctgggtggtatgggtgt

SEQ ID NO: 3684399 - DNA, 25 bp, Homo sapien
ataagatgagatcggctgcgttctg

SEQ ID NO: 3684400 - DNA, 25 bp, Homo sapien
aaaatctgtgtagccaattaaagaa

SEQ ID NO: 3684401 - DNA, 25 bp, Homo sapien
ataaaccccaaatctcaagaatgag

SEQ ID NO: 3684402 - DNA, 25 bp, Homo sapien
ccaagactgacatagatgaaacaga

SEQ ID NO: 3684403 - DNA, 25 bp, Homo sapien
agaaagaggacatcattgtggatcc

SEQ ID NO: 3684404 - DNA, 25 bp, Homo sapien
cagccggtctgaatctagagcctat

SEQ ID NO: 3684405 - DNA, 25 bp, Homo sapien
ccaggttcatgtaagtggcagatct

SEQ ID NO: 3684406 - DNA, 25 bp, Homo sapien
tacaattaatgggttgccttgcaga

SEQ ID NO: 3684407 - DNA, 25 bp, Homo sapien
tctaggattcaaattcagccggtct

SEQ ID NO: 3684408 - DNA, 25 bp, Homo sapien
ttaaaaggtagccatgtagagacac

SEQ ID NO: 3684409 - DNA, 25 bp, Homo sapien
gctgatgctggctaaaccgctttaa

SEQ ID NO: 3684410 - DNA, 25 bp, Homo sapien
aagttctatgaaacagccagcattg

SEQ ID NO: 3684411 - DNA, 25 bp, Homo sapien
caagaggttgccattagctttgtca

SEQ ID NO: 3684412 - DNA, 25 bp, Homo sapien
cctagtgtaggagcttcatgcaaaa

SEQ ID NO: 3684413 - DNA, 25 bp, Homo sapien
aactggcctgttagagaaagtggct

SEQ ID NO: 3684414 - DNA, 25 bp, Homo sapien
tgcaaaagaatggacaccctcctgg

SEQ ID NO: 3684415 - DNA, 25 bp, Homo sapien
tctcaggaggtcaggtaacaactag

SEQ ID NO: 3684416 - DNA, 25 bp, Homo sapien
tctctaatctccatttattaccttg

SEQ ID NO: 3684417 - DNA, 25 bp, Homo sapien
aaaataaggatacctatagttctct

SEQ ID NO: 3684418 - DNA, 25 bp, Homo sapien
gtttcttgcctcggttggaagtcac

SEQ ID NO: 3684419 - DNA, 25 bp, Homo sapien
gatattgcattgaaacgccttttgc

SEQ ID NO: 3684420 - DNA, 25 bp, Homo sapien
aacgccttttgcgtttcttgcctcg

SEQ ID NO: 3684421 - DNA, 25 bp, Homo sapien
ttcctgctaatgttggatattgcat

SEQ ID NO: 3684422 - DNA, 25 bp, Homo sapien
tgttcaggaatctttttgccgtctt

SEQ ID NO: 3684423 - DNA, 25 bp, Homo sapien
tctgttcaggaatctttttgccgtc

SEQ ID NO: 3684424 - DNA, 25 bp, Homo sapien
tttctgttcaggaatctttttgccg

SEQ ID NO: 3684425 - DNA, 25 bp, Homo sapien
tttgccgtctttgttcagttttatc

SEQ ID NO: 3684426 - DNA, 25 bp, Homo sapien
agtcatgtaatgcagtgtgagtgga

SEQ ID NO: 3684427 - DNA, 25 bp, Homo sapien
ctgtgatcaatgagttttaaacatc

SEQ ID NO: 3684428 - DNA, 25 bp, Homo sapien
aaggctagtcatgtaatgcagtgtg

SEQ ID NO: 3684429 - DNA, 25 bp, Homo sapien
gactgtgatcaatgagttttaaaca

SEQ ID NO: 3684430 - DNA, 25 bp, Homo sapien
agtgcagtgtcgctggagtggctca

SEQ ID NO: 3684431 - DNA, 25 bp, Homo sapien
ggagtgcagtgtcgctggagtggct

SEQ ID NO: 3684432 - DNA, 25 bp, Homo sapien
cctcaaattataaggaaggagtata

SEQ ID NO: 3684433 - DNA, 25 bp, Homo sapien
tgcctggttgtacttcttattttaa

SEQ ID NO: 3684434 - DNA, 25 bp, Homo sapien
ttaagcattttattccaggtacctc

SEQ ID NO: 3684435 - DNA, 25 bp, Homo sapien
actgcactgggctttaatttatttt

SEQ ID NO: 3684436 - DNA, 25 bp, Homo sapien
cccactttttgtaggtataagatag

SEQ ID NO: 3684437 - DNA, 25 bp, Homo sapien
ggactgcagctacatgccactacgc

SEQ ID NO: 3684438 - DNA, 25 bp, Homo sapien
cttaatccattcaactctgtgacac

SEQ ID NO: 3684439 - DNA, 25 bp, Homo sapien
atccattcaactctgtgacacagca

SEQ ID NO: 3684440 - DNA, 25 bp, Homo sapien
ccattcaactctgtgacacagcaca

SEQ ID NO: 3684441 - DNA, 25 bp, Homo sapien
ttcaactctgtgacacagcacatgt

SEQ ID NO: 3684442 - DNA, 25 bp, Homo sapien
ctctgagctgcacaattggtttgta

SEQ ID NO: 3684443 - DNA, 25 bp, Homo sapien
gcaatcaataggcagaactctgagc

SEQ ID NO: 3684444 - DNA, 25 bp, Homo sapien
caattggtttgtacccatgagccat

SEQ ID NO: 3684445 - DNA, 25 bp, Homo sapien
caatcaataggcagaactctgagct

SEQ ID NO: 3684446 - DNA, 25 bp, Homo sapien
gagagaaagctcagccacatggatg

SEQ ID NO: 3684447 - DNA, 25 bp, Homo sapien
gcaaaaatttccgaacagctgctga

SEQ ID NO: 3684448 - DNA, 25 bp, Homo sapien
gcctttgcaggaatcttcgacgatc

SEQ ID NO: 3684449 - DNA, 25 bp, Homo sapien
gacgatccaagattattcctcagaa

SEQ ID NO: 3684450 - DNA, 25 bp, Homo sapien
tattatggtctatgccagcaaccac

SEQ ID NO: 3684451 - DNA, 25 bp, Homo sapien
gagttggccgctattatggtctatg

SEQ ID NO: 3684452 - DNA, 25 bp, Homo sapien
gaagtacaggtagcagctacagcaa

SEQ ID NO: 3684453 - DNA, 25 bp, Homo sapien
ctgctatgacagtgagttggccgct

SEQ ID NO: 3684454 - DNA, 25 bp, Homo sapien
cagaatcagatgttccagcttggac

SEQ ID NO: 3684455 - DNA, 25 bp, Homo sapien
taggtgttgacattgagaaccctga

SEQ ID NO: 3684456 - DNA, 25 bp, Homo sapien
ccctacagaggtggcgagcatgtaa

SEQ ID NO: 3684457 - DNA, 25 bp, Homo sapien
tattgagaccctcatagagatcgat

SEQ ID NO: 3684458 - DNA, 25 bp, Homo sapien
tcgggcaaactttccaactcgcgcc

SEQ ID NO: 3684459 - DNA, 25 bp, Homo sapien
tgaggagtcggttcccaaaggtcca

SEQ ID NO: 3684460 - DNA, 25 bp, Homo sapien
cgctggccgggtcacattcccaggg

SEQ ID NO: 3684461 - DNA, 25 bp, Homo sapien
tagggctgcatgacttgggcgaggc

SEQ ID NO: 3684462 - DNA, 25 bp, Homo sapien
ctccggagcgggtggccgatacctc

SEQ ID NO: 3684463 - DNA, 25 bp, Homo sapien
gggcattgtttatctccggcaacaa

SEQ ID NO: 3684464 - DNA, 25 bp, Homo sapien
tccggccgggggcattgtttatctc

SEQ ID NO: 3684465 - DNA, 25 bp, Homo sapien
ggcaacaaaagcgtcccgagcgtcc

SEQ ID NO: 3684466 - DNA, 25 bp, Homo sapien
ccagggaaccaaccgctggtatatt

SEQ ID NO: 3684467 - DNA, 25 bp, Homo sapien
gggaaccaaccgctggtatattcag

SEQ ID NO: 3684468 - DNA, 25 bp, Homo sapien
gaaccaaccgctggtatattcagcc

SEQ ID NO: 3684469 - DNA, 25 bp, Homo sapien
ggccagggaaccaaccgctggtata

SEQ ID NO: 3684470 - DNA, 25 bp, Homo sapien
cgacccagtggtgctcataaatgag

SEQ ID NO: 3684471 - DNA, 25 bp, Homo sapien
atgggatcgcaaggccagcgcgtcc

SEQ ID NO: 3684472 - DNA, 25 bp, Homo sapien
agcgcgtccagcgacccagtggtgc

SEQ ID NO: 3684473 - DNA, 25 bp, Homo sapien
gggactgatgggatcgcaaggccag

SEQ ID NO: 3684474 - DNA, 25 bp, Homo sapien
cagctcagtcacacaaggttttggt

SEQ ID NO: 3684475 - DNA, 25 bp, Homo sapien
agaatctggatgcactgctcttcag

SEQ ID NO: 3684476 - DNA, 25 bp, Homo sapien
aaaaatgaaagggcgcaggaaacag

SEQ ID NO: 3684477 - DNA, 25 bp, Homo sapien
aagggcgcaggaaacagagtcattg

SEQ ID NO: 3684478 - DNA, 25 bp, Homo sapien
tcctgactaatctggaaggccttgc

SEQ ID NO: 3684479 - DNA, 25 bp, Homo sapien
ccttggttgtctttcgtagttggct

SEQ ID NO: 3684480 - DNA, 25 bp, Homo sapien
tttccagggcttaaagtcttgactg

SEQ ID NO: 3684481 - DNA, 25 bp, Homo sapien
gccttgcatggcgggatcgagacat

SEQ ID NO: 3684482 - DNA, 25 bp, Homo sapien
tagcgccattgtaaacccattgcag

SEQ ID NO: 3684483 - DNA, 25 bp, Homo sapien
tatccaaattcatgcgtgctgctcc

SEQ ID NO: 3684484 - DNA, 25 bp, Homo sapien
taagagaggtgcttcgtagcgccat

SEQ ID NO: 3684485 - DNA, 25 bp, Homo sapien
tttggatttggctacgaccagtggg

SEQ ID NO: 3684486 - DNA, 25 bp, Homo sapien
catgttgcttttctaaacccttaga

SEQ ID NO: 3684487 - DNA, 25 bp, Homo sapien
agcagggagtatcttataatcacaa

SEQ ID NO: 3684488 - DNA, 25 bp, Homo sapien
gtctctatatcaggaaggacttggg

SEQ ID NO: 3684489 - DNA, 25 bp, Homo sapien
cattggaaccgaatcattttctgag

SEQ ID NO: 3684490 - DNA, 25 bp, Homo sapien
tacagaggtaggagacgtagaccca

SEQ ID NO: 3684491 - DNA, 25 bp, Homo sapien
ccactgtgggtagggatattgatct

SEQ ID NO: 3684492 - DNA, 25 bp, Homo sapien
tctttgggaccaaaactgagttgtc

SEQ ID NO: 3684493 - DNA, 25 bp, Homo sapien
caagcagtttctaaggttcaagtca

SEQ ID NO: 3684494 - DNA, 25 bp, Homo sapien
cagggcctcaccatgaactgggtca

SEQ ID NO: 3684495 - DNA, 25 bp, Homo sapien
gatttgcagtagcttcgaaggcctc

SEQ ID NO: 3684496 - DNA, 25 bp, Homo sapien
aatagtaccaaagacctctccttgg

SEQ ID NO: 3684497 - DNA, 25 bp, Homo sapien
tgggatagcaccaaaggcctgtcct

SEQ ID NO: 3684498 - DNA, 25 bp, Homo sapien
ggcaaaatctgtatagcaccctgga

SEQ ID NO: 3684499 - DNA, 25 bp, Homo sapien
ccctggactgcaagtccatatgaga

SEQ ID NO: 3684500 - DNA, 25 bp, Homo sapien
gctggcaggaagcttatatgaacct

SEQ ID NO: 3684501 - DNA, 25 bp, Homo sapien
gggaacccctgagtgttagctggca

SEQ ID NO: 3684502 - DNA, 25 bp, Homo sapien
gaagaggaggtactgaccattggca

SEQ ID NO: 3684503 - DNA, 25 bp, Homo sapien
cttttccaaagtcggtagcaaagtg

SEQ ID NO: 3684504 - DNA, 25 bp, Homo sapien
gtactgaccattggcactggcatag

SEQ ID NO: 3684505 - DNA, 25 bp, Homo sapien
tcggtagcaaagtggtataggaaga

SEQ ID NO: 3684506 - DNA, 25 bp, Homo sapien
cagtaagtgcattcaccacagttgg

SEQ ID NO: 3684507 - DNA, 25 bp, Homo sapien
agatctgatggctgttctttctgtt

SEQ ID NO: 3684508 - DNA, 25 bp, Homo sapien
gtgcattcaccacagttggtcttct

SEQ ID NO: 3684509 - DNA, 25 bp, Homo sapien
ggcagggttcacagaccccacatcg

SEQ ID NO: 3684510 - DNA, 25 bp, Homo sapien
tccagaggcacaacaacagatggtt

SEQ ID NO: 3684511 - DNA, 25 bp, Homo sapien
ctccagaggcacaacaacagatggt

SEQ ID NO: 3684512 - DNA, 25 bp, Homo sapien
ccagaggcacaacaacagatggttt

SEQ ID NO: 3684513 - DNA, 25 bp, Homo sapien
ccctaaggggagcttgttattcagc

SEQ ID NO: 3684514 - DNA, 25 bp, Homo sapien
gcctaggagaagtgcaatacttgtt

SEQ ID NO: 3684515 - DNA, 25 bp, Homo sapien
ccagtgcatagcctaggagaagtgc

SEQ ID NO: 3684516 - DNA, 25 bp, Homo sapien
attggatttccagtgcatagcctag

SEQ ID NO: 3684517 - DNA, 25 bp, Homo sapien
ggcatgtgccagtccccatggccaa

SEQ ID NO: 3684518 - DNA, 25 bp, Homo sapien
atgtgccagtccccatggccaattt

SEQ ID NO: 3684519 - DNA, 25 bp, Homo sapien
gcatgtgccagtccccatggccaat

SEQ ID NO: 3684520 - DNA, 25 bp, Homo sapien
tgccagtccccatggccaattttgt

SEQ ID NO: 3684521 - DNA, 25 bp, Homo sapien
ggcatagtcatctcgctggaaacca

SEQ ID NO: 3684522 - DNA, 25 bp, Homo sapien
aattctgcatcacatgggaacagtg

SEQ ID NO: 3684523 - DNA, 25 bp, Homo sapien
ggcttggatcaactctggccttcca

SEQ ID NO: 3684524 - DNA, 25 bp, Homo sapien
agaagaaaccaacagacacccgctt

SEQ ID NO: 3684525 - DNA, 25 bp, Homo sapien
cagttctgctggtaatagctgttcc

SEQ ID NO: 3684526 - DNA, 25 bp, Homo sapien
ggttggtccactagaagagcctttc

SEQ ID NO: 3684527 - DNA, 25 bp, Homo sapien
tagtccggatgtaagcggttggtcc

SEQ ID NO: 3684528 - DNA, 25 bp, Homo sapien
tcctgtgacacataggaacctgaaa

SEQ ID NO: 3684529 - DNA, 25 bp, Homo sapien
tgattagtaacctcttggcggttcc

SEQ ID NO: 3684530 - DNA, 25 bp, Homo sapien
tggcggttccgagggcaggtctgca

SEQ ID NO: 3684531 - DNA, 25 bp, Homo sapien
tggtagagccttcctgattagtaac

SEQ ID NO: 3684532 - DNA, 25 bp, Homo sapien
caccattggatcgatggtagagcct

SEQ ID NO: 3684533 - DNA, 25 bp, Homo sapien
agaggatctggtcgcgccgaaatca

SEQ ID NO: 3684534 - DNA, 25 bp, Homo sapien
catggagttcgctgcagaggatctg

SEQ ID NO: 3684535 - DNA, 25 bp, Homo sapien
tctggtcgcgccgaaatcacaggag

SEQ ID NO: 3684536 - DNA, 25 bp, Homo sapien
gacacaggcagccacaagctgcgac

SEQ ID NO: 3684537 - DNA, 25 bp, Homo sapien
cttcttttccctctggggcctcttg

SEQ ID NO: 3684538 - DNA, 25 bp, Homo sapien
tatgaattccagaggtccaaaaaga

SEQ ID NO: 3684539 - DNA, 25 bp, Homo sapien
catctcggttcacctcactctggaa

SEQ ID NO: 3684540 - DNA, 25 bp, Homo sapien
atagggtctcgttcttactctgttg

SEQ ID NO: 3684541 - DNA, 25 bp, Homo sapien
caaatctgggactgcattacttcaa

SEQ ID NO: 3684542 - DNA, 25 bp, Homo sapien
gatcctaatgaaccatacaatattg

SEQ ID NO: 3684543 - DNA, 25 bp, Homo sapien
gccacaacagatcctaatgaaccat

SEQ ID NO: 3684544 - DNA, 25 bp, Homo sapien
tacaatattgaatgccgggcgcagg

SEQ ID NO: 3684545 - DNA, 25 bp, Homo sapien
aaagccagccacaacagatcctaat

SEQ ID NO: 3684546 - DNA, 25 bp, Homo sapien
tctttcaggatcgaggtgggtacct

SEQ ID NO: 3684547 - DNA, 25 bp, Homo sapien
tcaggatcgaggtgggtaccttcat

SEQ ID NO: 3684548 - DNA, 25 bp, Homo sapien
ctttcaggatcgaggtgggtacctt

SEQ ID NO: 3684549 - DNA, 25 bp, Homo sapien
ttcaggatcgaggtgggtaccttca

SEQ ID NO: 3684550 - DNA, 25 bp, Homo sapien
gattgagagcttattgcacatgaaa

SEQ ID NO: 3684551 - DNA, 25 bp, Homo sapien
gtggttgatcttaacttcgtttaca

SEQ ID NO: 3684552 - DNA, 25 bp, Homo sapien
attgcacatgaaatgttttatgtgg

SEQ ID NO: 3684553 - DNA, 25 bp, Homo sapien
aaactttatttacttgattgagagc

SEQ ID NO: 3684554 - DNA, 25 bp, Homo sapien
gtgatgtagggcctcatggctcttc

SEQ ID NO: 3684555 - DNA, 25 bp, Homo sapien
gcctcatggctcttccatatctagg

SEQ ID NO: 3684556 - DNA, 25 bp, Homo sapien
cttggtgatgtagggcctcatggct

SEQ ID NO: 3684557 - DNA, 25 bp, Homo sapien
tgtagggcctcatggctcttccata

SEQ ID NO: 3684558 - DNA, 25 bp, Homo sapien
gaccactagactaggttgcctaagg

SEQ ID NO: 3684559 - DNA, 25 bp, Homo sapien
gaactggcctaggtcacaaacatag

SEQ ID NO: 3684560 - DNA, 25 bp, Homo sapien
caaaactataactgatcagtggtgg

SEQ ID NO: 3684561 - DNA, 25 bp, Homo sapien
ctcctgggaataggagaccactaga

SEQ ID NO: 3684562 - DNA, 25 bp, Homo sapien
taaaatctcctttcacgtgatcagt

SEQ ID NO: 3684563 - DNA, 25 bp, Homo sapien
aacgttacttctccccttgagatga

SEQ ID NO: 3684564 - DNA, 25 bp, Homo sapien
tcagtagcaacagagctcatagcgt

SEQ ID NO: 3684565 - DNA, 25 bp, Homo sapien
ttcaacagtatgtgggttcaattcc

SEQ ID NO: 3684566 - DNA, 25 bp, Homo sapien
gagtcagggcctctatggctaccac

SEQ ID NO: 3684567 - DNA, 25 bp, Homo sapien
tcattaacgataagagacttggttg

SEQ ID NO: 3684568 - DNA, 25 bp, Homo sapien
gacttggttgaacgggagatccatc

SEQ ID NO: 3684569 - DNA, 25 bp, Homo sapien
tgcagctattaagcaaactggctgt

SEQ ID NO: 3684570 - DNA, 25 bp, Homo sapien
ttagtgctgactccggtaagggtgt

SEQ ID NO: 3684571 - DNA, 25 bp, Homo sapien
taatggacctcgtttgagccagtgg

SEQ ID NO: 3684572 - DNA, 25 bp, Homo sapien
taccaggcaatgttggcagtctctg

SEQ ID NO: 3684573 - DNA, 25 bp, Homo sapien
gaaaccgtatttggtcatcgcctgc

SEQ ID NO: 3684574 - DNA, 25 bp, Homo sapien
gagctgaattttccattcttgtggc

SEQ ID NO: 3684575 - DNA, 25 bp, Homo sapien
attcttgtggcagaaccaaaagttc

SEQ ID NO: 3684576 - DNA, 25 bp, Homo sapien
ttcccacagaaaaatggttatagat

SEQ ID NO: 3684577 - DNA, 25 bp, Homo sapien
tgtttttccaaattatgagctgaat

SEQ ID NO: 3684578 - DNA, 25 bp, Homo sapien
tgtgtataatatgggcctttgtctt

SEQ ID NO: 3684579 - DNA, 25 bp, Homo sapien
ctgccccaaggtgtgtataatatgg

SEQ ID NO: 3684580 - DNA, 25 bp, Homo sapien
gccccaaggtgtgtataatatgggc

SEQ ID NO: 3684581 - DNA, 25 bp, Homo sapien
cccaaggtgtgtataatatgggcct

SEQ ID NO: 3684582 - DNA, 25 bp, Homo sapien
cttagcaattggacacccatgagag

SEQ ID NO: 3684583 - DNA, 25 bp, Homo sapien
agcaattggacacccatgagagctt

SEQ ID NO: 3684584 - DNA, 25 bp, Homo sapien
tatttctatccttattgcgtttcct

SEQ ID NO: 3684585 - DNA, 25 bp, Homo sapien
cttctttaccggtgtacactactat

SEQ ID NO: 3684586 - DNA, 25 bp, Homo sapien
agctctgtgtatagccggtcggcca

SEQ ID NO: 3684587 - DNA, 25 bp, Homo sapien
catcttctgtcggtagggtgcccat

SEQ ID NO: 3684588 - DNA, 25 bp, Homo sapien
gggtgcccattgtatgactttagat

SEQ ID NO: 3684589 - DNA, 25 bp, Homo sapien
cgctgccggaccaaacaaagaactt

SEQ ID NO: 3684590 - DNA, 25 bp, Homo sapien
ttgtgagatctagaagagcatcctc

SEQ ID NO: 3684591 - DNA, 25 bp, Homo sapien
tatgttttcactgtgaaagcctgga

SEQ ID NO: 3684592 - DNA, 25 bp, Homo sapien
gaaaatgcctgatacgtaacttagc

SEQ ID NO: 3684593 - DNA, 25 bp, Homo sapien
aatagtcaacaacaccaatagtggg

SEQ ID NO: 3684594 - DNA, 25 bp, Homo sapien
taagattgtaattcaagagagtgaa

SEQ ID NO: 3684595 - DNA, 25 bp, Homo sapien
ttcaagagagtgaattgatgaagca

SEQ ID NO: 3684596 - DNA, 25 bp, Homo sapien
tgtaagattgtaattcaagagagtg

SEQ ID NO: 3684597 - DNA, 25 bp, Homo sapien
gtgaattgatgaagcattacaatac

SEQ ID NO: 3684598 - DNA, 25 bp, Homo sapien
caaaagagaatgaagctccacaagt

SEQ ID NO: 3684599 - DNA, 25 bp, Homo sapien
aaagagaatgaagctccacaagtct

SEQ ID NO: 3684600 - DNA, 25 bp, Homo sapien
gagaatgaagctccacaagtctctg

SEQ ID NO: 3684601 - DNA, 25 bp, Homo sapien
aagagaatgaagctccacaagtctc

SEQ ID NO: 3684602 - DNA, 25 bp, Homo sapien
cggactgattcgttccggtttcata

SEQ ID NO: 3684603 - DNA, 25 bp, Homo sapien
ttcgttccggtttcatatatcttct

SEQ ID NO: 3684604 - DNA, 25 bp, Homo sapien
catggcctcgtgtcccggactgatt

SEQ ID NO: 3684605 - DNA, 25 bp, Homo sapien
tcgtgtcccggactgattcgttccg

SEQ ID NO: 3684606 - DNA, 25 bp, Homo sapien
cttagaaaatggatcaagcactttc

SEQ ID NO: 3684607 - DNA, 25 bp, Homo sapien
aatggatcaagcactttcttcttgg

SEQ ID NO: 3684608 - DNA, 25 bp, Homo sapien
tttcttcttggctccctttgtgctg

SEQ ID NO: 3684609 - DNA, 25 bp, Homo sapien
ttcttcttggctccctttgtgctgc

SEQ ID NO: 3684610 - DNA, 25 bp, Homo sapien
tcaattatggttccttgggttctgg

SEQ ID NO: 3684611 - DNA, 25 bp, Homo sapien
gatgctttcacgtaatacaaatctt

SEQ ID NO: 3684612 - DNA, 25 bp, Homo sapien
agatgctttcacgtaatacaaatct

SEQ ID NO: 3684613 - DNA, 25 bp, Homo sapien
attcaattatggttccttgggttct

SEQ ID NO: 3684614 - DNA, 25 bp, Homo sapien
tcattctgcatatcagcaagactca

SEQ ID NO: 3684615 - DNA, 25 bp, Homo sapien
cattctgcatatcagcaagactcac

SEQ ID NO: 3684616 - DNA, 25 bp, Homo sapien
tttatcattctgcatatcagcaaga

SEQ ID NO: 3684617 - DNA, 25 bp, Homo sapien
tatcattctgcatatcagcaagact

SEQ ID NO: 3684618 - DNA, 25 bp, Homo sapien
catcaggcaatcattcccctgaaca

SEQ ID NO: 3684619 - DNA, 25 bp, Homo sapien
gaagctcatcaggcaatcattcccc

SEQ ID NO: 3684620 - DNA, 25 bp, Homo sapien
tcaggcaatcattcccctgaacatc

SEQ ID NO: 3684621 - DNA, 25 bp, Homo sapien
atcaggcaatcattcccctgaacat

SEQ ID NO: 3684622 - DNA, 25 bp, Homo sapien
acagaacacatgaagcaagtaagca

SEQ ID NO: 3684623 - DNA, 25 bp, Homo sapien
cagaacacatgaagcaagtaagcac

SEQ ID NO: 3684624 - DNA, 25 bp, Homo sapien
ttccccaattcaaagctaggcttct

SEQ ID NO: 3684625 - DNA, 25 bp, Homo sapien
tccccaattcaaagctaggcttctt

SEQ ID NO: 3684626 - DNA, 25 bp, Homo sapien
tagtggttcatatccatcagctcgt

SEQ ID NO: 3684627 - DNA, 25 bp, Homo sapien
tggttcatatccatcagctcgttct

SEQ ID NO: 3684628 - DNA, 25 bp, Homo sapien
gttcatatccatcagctcgttctac

SEQ ID NO: 3684629 - DNA, 25 bp, Homo sapien
agtggttcatatccatcagctcgtt

SEQ ID NO: 3684630 - DNA, 25 bp, Homo sapien
gaacatgcatgtcagatacagaggg

SEQ ID NO: 3684631 - DNA, 25 bp, Homo sapien
taaactgaattactgatctgccctc

SEQ ID NO: 3684632 - DNA, 25 bp, Homo sapien
cctattggtggtcaagattaactcc

SEQ ID NO: 3684633 - DNA, 25 bp, Homo sapien
tagagggatctcattcaagggcaag

SEQ ID NO: 3684634 - DNA, 25 bp, Homo sapien
taaattggagctaatcgtgtagcca

SEQ ID NO: 3684635 - DNA, 25 bp, Homo sapien
taatcgtgtagccaaactctgtaag

SEQ ID NO: 3684636 - DNA, 25 bp, Homo sapien
tactgcttataaattggagctaatc

SEQ ID NO: 3684637 - DNA, 25 bp, Homo sapien
ttggtaagctactggagcatactgc

SEQ ID NO: 3684638 - DNA, 25 bp, Homo sapien
tgccaagccgacattctcgggcaac

SEQ ID NO: 3684639 - DNA, 25 bp, Homo sapien
cccagagaagggacgaccttccttg

SEQ ID NO: 3684640 - DNA, 25 bp, Homo sapien
agccgacattctcgggcaacatttt

SEQ ID NO: 3684641 - DNA, 25 bp, Homo sapien
cagagaagggacgaccttccttgct

SEQ ID NO: 3684642 - DNA, 25 bp, Homo sapien
cccaaagagcggttatcttctcgag

SEQ ID NO: 3684643 - DNA, 25 bp, Homo sapien
tatcttctcgagttaaggtacaaac

SEQ ID NO: 3684644 - DNA, 25 bp, Homo sapien
tctgaaagcttataaagaggtagca

SEQ ID NO: 3684645 - DNA, 25 bp, Homo sapien
gtgtctgaaagcttataaagaggta

SEQ ID NO: 3684646 - DNA, 25 bp, Homo sapien
caggctgagtgaaacacgttctttt

SEQ ID NO: 3684647 - DNA, 25 bp, Homo sapien
ctctgtcatcatcgcagccctcttc

SEQ ID NO: 3684648 - DNA, 25 bp, Homo sapien
tgagttattcttccgcttgattcgg

SEQ ID NO: 3684649 - DNA, 25 bp, Homo sapien
ttccagaacggggaacaggctgagt

SEQ ID NO: 3684650 - DNA, 25 bp, Homo sapien
taaggttggcagtgacgaaggctta

SEQ ID NO: 3684651 - DNA, 25 bp, Homo sapien
ctaaggttggcagtgacgaaggctt

SEQ ID NO: 3684652 - DNA, 25 bp, Homo sapien
aaggttggcagtgacgaaggcttac

SEQ ID NO: 3684653 - DNA, 25 bp, Homo sapien
gatggcatcagcgaataagttttag

SEQ ID NO: 3684654 - DNA, 25 bp, Homo sapien
aggagcggatggcatcagcgaataa

SEQ ID NO: 3684655 - DNA, 25 bp, Homo sapien
tagtgttgtctgaactttttaagat

SEQ ID NO: 3684656 - DNA, 25 bp, Homo sapien
ctttttacttcaggttgcacggtct

SEQ ID NO: 3684657 - DNA, 25 bp, Homo sapien
ttctttctgaaaacccgcatgaggc

SEQ ID NO: 3684658 - DNA, 25 bp, Homo sapien
tgttgcgtcattcttcagtggagct

SEQ ID NO: 3684659 - DNA, 25 bp, Homo sapien
gctcagtcacaccagtggaaggctc

SEQ ID NO: 3684660 - DNA, 25 bp, Homo sapien
ctgatgaggcgttagcggctcagtc

SEQ ID NO: 3684661 - DNA, 25 bp, Homo sapien
aaaccgagccgtgagcaggtgcgat

SEQ ID NO: 3684662 - DNA, 25 bp, Homo sapien
ggttcgtctgatggaggctcatctg

SEQ ID NO: 3684663 - DNA, 25 bp, Homo sapien
tctgaccaatactcatcaatgtggg

SEQ ID NO: 3684664 - DNA, 25 bp, Homo sapien
caacaggagtggtagcgtgcagctc

SEQ ID NO: 3684665 - DNA, 25 bp, Homo sapien
aatggttatagggccccgcaacgtg

SEQ ID NO: 3684666 - DNA, 25 bp, Homo sapien
ggacacggtgacaacattgtcatgg

SEQ ID NO: 3684667 - DNA, 25 bp, Homo sapien
tacttcagaggactgttctggacct

SEQ ID NO: 3684668 - DNA, 25 bp, Homo sapien
cccgcaacgtgtgtgagagcataag

SEQ ID NO: 3684669 - DNA, 25 bp, Homo sapien
gcagaaatctacttgtacacgatgg

SEQ ID NO: 3684670 - DNA, 25 bp, Homo sapien
caccagaagctgtgtagagttaaca

SEQ ID NO: 3684671 - DNA, 25 bp, Homo sapien
cattaggttttccatactcccaagg

SEQ ID NO: 3684672 - DNA, 25 bp, Homo sapien
gaagatgttggaacaatggcaccat

SEQ ID NO: 3684673 - DNA, 25 bp, Homo sapien
caaaaatatacatgtcttaaaacgg

SEQ ID NO: 3684674 - DNA, 25 bp, Homo sapien
catgtcttaaaacggaaatctaagg

SEQ ID NO: 3684675 - DNA, 25 bp, Homo sapien
aatatacatgtcttaaaacggaaat

SEQ ID NO: 3684676 - DNA, 25 bp, Homo sapien
tacatgtcttaaaacggaaatctaa

SEQ ID NO: 3684677 - DNA, 25 bp, Homo sapien
cataatctcgcaagggtgtattcct

SEQ ID NO: 3684678 - DNA, 25 bp, Homo sapien
aataatttctagtgggagctaaggc

SEQ ID NO: 3684679 - DNA, 25 bp, Homo sapien
tggtaaactgcaacaagcgtcacaa

SEQ ID NO: 3684680 - DNA, 25 bp, Homo sapien
tagatgagtggatgcataaagagcc

SEQ ID NO: 3684681 - DNA, 25 bp, Homo sapien
ttaggaatacctttggattactaga

SEQ ID NO: 3684682 - DNA, 25 bp, Homo sapien
gaatgttgcatactaccaaatgaga

SEQ ID NO: 3684683 - DNA, 25 bp, Homo sapien
ggcccttaaagagaagcgaaaatga

SEQ ID NO: 3684684 - DNA, 25 bp, Homo sapien
tagaacatactataaggcccttaaa

SEQ ID NO: 3684685 - DNA, 25 bp, Homo sapien
gaggtgctcaccctagctttttaaa

SEQ ID NO: 3684686 - DNA, 25 bp, Homo sapien
tataaaacttcataaatctaagccc

SEQ ID NO: 3684687 - DNA, 25 bp, Homo sapien
aatacattaaattttgattgtgagg

SEQ ID NO: 3684688 - DNA, 25 bp, Homo sapien
tctaagccctattgtggaatttagg

SEQ ID NO: 3684689 - DNA, 25 bp, Homo sapien
gacccacagattttacgtggcaaga

SEQ ID NO: 3684690 - DNA, 25 bp, Homo sapien
tgagcaaatctctgggtcaagaccc

SEQ ID NO: 3684691 - DNA, 25 bp, Homo sapien
gagacactactatctcttagagagg

SEQ ID NO: 3684692 - DNA, 25 bp, Homo sapien
tgctctgtcttagagatgccaacaa

SEQ ID NO: 3684693 - DNA, 25 bp, Homo sapien
cttcccaatgtgctgggattacagc

SEQ ID NO: 3684694 - DNA, 25 bp, Homo sapien
cagcttcccaatgtgctgggattac

SEQ ID NO: 3684695 - DNA, 25 bp, Homo sapien
actgcaatcttcgtctcccaggttc

SEQ ID NO: 3684696 - DNA, 25 bp, Homo sapien
tcccaatgtgctgggattacagcca

SEQ ID NO: 3684697 - DNA, 25 bp, Homo sapien
gtcgggtcccggctaacatcgaagc

SEQ ID NO: 3684698 - DNA, 25 bp, Homo sapien
taacatcgaagccatttcaaacccg

SEQ ID NO: 3684699 - DNA, 25 bp, Homo sapien
atttcaaacccgtcagctttaggcg

SEQ ID NO: 3684700 - DNA, 25 bp, Homo sapien
ccgtcagctttaggcgcatgcgcca

SEQ ID NO: 3684701 - DNA, 25 bp, Homo sapien
gatgttaagagacccggcttggccg

SEQ ID NO: 3684702 - DNA, 25 bp, Homo sapien
cggcccttccacagattcgacaaga

SEQ ID NO: 3684703 - DNA, 25 bp, Homo sapien
cactgctccaactacggggaccaga

SEQ ID NO: 3684704 - DNA, 25 bp, Homo sapien
tcgacaagatgttaagagacccggc

SEQ ID NO: 3684705 - DNA, 25 bp, Homo sapien
gaaagcctctattccccaagaccca

SEQ ID NO: 3684706 - DNA, 25 bp, Homo sapien
gggcggcggactgcagcgtcgccat

SEQ ID NO: 3684707 - DNA, 25 bp, Homo sapien
aaaccgcagcggctcgggagcaatg

SEQ ID NO: 3684708 - DNA, 25 bp, Homo sapien
ccaggagggtaaaaccgcagcggct

SEQ ID NO: 3684709 - DNA, 25 bp, Homo sapien
cttgtttgtcttctatagcatcgat

SEQ ID NO: 3684710 - DNA, 25 bp, Homo sapien
ttcccttgtttgtcttctatagcat

SEQ ID NO: 3684711 - DNA, 25 bp, Homo sapien
accttcccttgtttgtcttctatag

SEQ ID NO: 3684712 - DNA, 25 bp, Homo sapien
cccttgtttgtcttctatagcatcg

SEQ ID NO: 3684713 - DNA, 25 bp, Homo sapien
tggcggattcttctgtcctccaaat

SEQ ID NO: 3684714 - DNA, 25 bp, Homo sapien
gctgtgatactgcagtggctgtaaa

SEQ ID NO: 3684715 - DNA, 25 bp, Homo sapien
atactgcagtggctgtaaactgagt

SEQ ID NO: 3684716 - DNA, 25 bp, Homo sapien
gagtagcccatggcggattcttctg

SEQ ID NO: 3684717 - DNA, 25 bp, Homo sapien
caactggctagtcctggtggttcac

SEQ ID NO: 3684718 - DNA, 25 bp, Homo sapien
tggagtgtagcgttgcgatatcagc

SEQ ID NO: 3684719 - DNA, 25 bp, Homo sapien
ccaaaagttcaagatccacctgggt

SEQ ID NO: 3684720 - DNA, 25 bp, Homo sapien
tacaggcttgcacaaacacgccaag

SEQ ID NO: 3684721 - DNA, 25 bp, Homo sapien
gagagccaaaatcgcagaatgtcca

SEQ ID NO: 3684722 - DNA, 25 bp, Homo sapien
ggaagtattgacagttgccacagca

SEQ ID NO: 3684723 - DNA, 25 bp, Homo sapien
actcccacaaccctgggaagtattg

SEQ ID NO: 3684724 - DNA, 25 bp, Homo sapien
ccacagcagaagtgctgagagccaa

SEQ ID NO: 3684725 - DNA, 25 bp, Homo sapien
cattcaaagtttgaggtttaccatc

SEQ ID NO: 3684726 - DNA, 25 bp, Homo sapien
caaagtttgaggtttaccatcaact

SEQ ID NO: 3684727 - DNA, 25 bp, Homo sapien
cttgaacatcacaaaaattcattca

SEQ ID NO: 3684728 - DNA, 25 bp, Homo sapien
taatgaaccgaccaaaggcaggtac

SEQ ID NO: 3684729 - DNA, 25 bp, Homo sapien
tgtgtataaatggtaggagatgctc

SEQ ID NO: 3684730 - DNA, 25 bp, Homo sapien
tttgtgtggtaaggcctgctgctgc

SEQ ID NO: 3684731 - DNA, 25 bp, Homo sapien
cagctgcggcttgttgctgcaatgc

SEQ ID NO: 3684732 - DNA, 25 bp, Homo sapien
tgctccaaggagtgatggctgttga

SEQ ID NO: 3684733 - DNA, 25 bp, Homo sapien
ctgttgttgcacactatacagggcc

SEQ ID NO: 3684734 - DNA, 25 bp, Homo sapien
gttgttgcacactatacagggcctg

SEQ ID NO: 3684735 - DNA, 25 bp, Homo sapien
tgcacactatacagggcctgctgag

SEQ ID NO: 3684736 - DNA, 25 bp, Homo sapien
tgttgcacactatacagggcctgct

SEQ ID NO: 3684737 - DNA, 25 bp, Homo sapien
ctgtgttaagagggtttgctggggt

SEQ ID NO: 3684738 - DNA, 25 bp, Homo sapien
agagggtttgctggggttgctgtaa

SEQ ID NO: 3684739 - DNA, 25 bp, Homo sapien
tgttaagagggtttgctggggttgc

SEQ ID NO: 3684740 - DNA, 25 bp, Homo sapien
ttaagagggtttgctggggttgctg

SEQ ID NO: 3684741 - DNA, 25 bp, Homo sapien
gctaaggcttgtaggcagtgcaaca

SEQ ID NO: 3684742 - DNA, 25 bp, Homo sapien
ctaaggcttgtaggcagtgcaacag

SEQ ID NO: 3684743 - DNA, 25 bp, Homo sapien
cacaaatccaaacgtatcatgtagt

SEQ ID NO: 3684744 - DNA, 25 bp, Homo sapien
tgtagttttgtaaccacccctgtga

SEQ ID NO: 3684745 - DNA, 25 bp, Homo sapien
gtttgctgttgactggaccttggtg

SEQ ID NO: 3684746 - DNA, 25 bp, Homo sapien
gtgaaaacacgctgcttctgaggct

SEQ ID NO: 3684747 - DNA, 25 bp, Homo sapien
ttaaaaggcatattaggattataag

SEQ ID NO: 3684748 - DNA, 25 bp, Homo sapien
ttaggattataagtagcttcaacca

SEQ ID NO: 3684749 - DNA, 25 bp, Homo sapien
attaggattataagtagcttcaacc

SEQ ID NO: 3684750 - DNA, 25 bp, Homo sapien
gcaggaggagtcttcagtaatggct

SEQ ID NO: 3684751 - DNA, 25 bp, Homo sapien
ggaggagtcttcagtaatggctggg

SEQ ID NO: 3684752 - DNA, 25 bp, Homo sapien
gtaatggctgggtttgcgactgatt

SEQ ID NO: 3684753 - DNA, 25 bp, Homo sapien
aggagtcttcagtaatggctgggtt

SEQ ID NO: 3684754 - DNA, 25 bp, Homo sapien
tgtaataagggctgtggttgagtct

SEQ ID NO: 3684755 - DNA, 25 bp, Homo sapien
tgagtctgcaatagtggtgtaatag

SEQ ID NO: 3684756 - DNA, 25 bp, Homo sapien
gcaatagtggtgtaatagaagctgc

SEQ ID NO: 3684757 - DNA, 25 bp, Homo sapien
gggctgagtctgaacaccaaatgtt

SEQ ID NO: 3684758 - DNA, 25 bp, Homo sapien
catcttttctgttaggcacttgatc

SEQ ID NO: 3684759 - DNA, 25 bp, Homo sapien
tctaatcgtcgtgccggttgtggct

SEQ ID NO: 3684760 - DNA, 25 bp, Homo sapien
gaaaatcgggatgggggatctaatc

SEQ ID NO: 3684761 - DNA, 25 bp, Homo sapien
tctgttaggcacttgatcccctctg

SEQ ID NO: 3684762 - DNA, 25 bp, Homo sapien
actgaactgtgtaacgtggaacaac

SEQ ID NO: 3684763 - DNA, 25 bp, Homo sapien
gggaacgtttcctctgaggtgatct

SEQ ID NO: 3684764 - DNA, 25 bp, Homo sapien
tcttcgtggagatctttcccgggaa

SEQ ID NO: 3684765 - DNA, 25 bp, Homo sapien
cacgtcgaactctccgaggtgatcg

SEQ ID NO: 3684766 - DNA, 25 bp, Homo sapien
ctgaaaaacagacataagtagtgaa

SEQ ID NO: 3684767 - DNA, 25 bp, Homo sapien
gaaaaacagacataagtagtgaata

SEQ ID NO: 3684768 - DNA, 25 bp, Homo sapien
cagacataagtagtgaataaatagc

SEQ ID NO: 3684769 - DNA, 25 bp, Homo sapien
aaacagacataagtagtgaataaat

SEQ ID NO: 3684770 - DNA, 25 bp, Homo sapien
gacaaagggaaagcatccacccatg

SEQ ID NO: 3684771 - DNA, 25 bp, Homo sapien
catctggtggatcaagaatggccat

SEQ ID NO: 3684772 - DNA, 25 bp, Homo sapien
ccagctgaaatggtcttgacaaagg

SEQ ID NO: 3684773 - DNA, 25 bp, Homo sapien
acaaattttgataacggcgccttag

SEQ ID NO: 3684774 - DNA, 25 bp, Homo sapien
tagtcaaataattcaatcctgtcaa

SEQ ID NO: 3684775 - DNA, 25 bp, Homo sapien
aataattcaatcctgtcaaaagtct

SEQ ID NO: 3684776 - DNA, 25 bp, Homo sapien
ctattatagtcaaataattcaatcc

SEQ ID NO: 3684777 - DNA, 25 bp, Homo sapien
tatagtcaaataattcaatcctgtc

SEQ ID NO: 3684778 - DNA, 25 bp, Homo sapien
gagcacatgacttatgatataaatc

SEQ ID NO: 3684779 - DNA, 25 bp, Homo sapien
tccatactagggctagccatcagca

SEQ ID NO: 3684780 - DNA, 25 bp, Homo sapien
ttggaatccatctcgaagttcttgt

SEQ ID NO: 3684781 - DNA, 25 bp, Homo sapien
cttaacaagtctagcaggatgttgg

SEQ ID NO: 3684782 - DNA, 25 bp, Homo sapien
tatgtgtacaaagttacagctaagc

SEQ ID NO: 3684783 - DNA, 25 bp, Homo sapien
aatattaaaatgtagggctttagat

SEQ ID NO: 3684784 - DNA, 25 bp, Homo sapien
cacttagatcaatgcctgtcagagc

SEQ ID NO: 3684785 - DNA, 25 bp, Homo sapien
caacgaaggagaccagtggcctcca

SEQ ID NO: 3684786 - DNA, 25 bp, Homo sapien
tgggtctggtccatccaacgaagga

SEQ ID NO: 3684787 - DNA, 25 bp, Homo sapien
gagccttacaacaacgaatagcagt

SEQ ID NO: 3684788 - DNA, 25 bp, Homo sapien
gacgatcttctccagctatgcatga

SEQ ID NO: 3684789 - DNA, 25 bp, Homo sapien
gaatacctgaagaagctggatagct

SEQ ID NO: 3684790 - DNA, 25 bp, Homo sapien
tcaagtttgattacagagctacccg

SEQ ID NO: 3684791 - DNA, 25 bp, Homo sapien
gagctacccgcattttagagaatac

SEQ ID NO: 3684792 - DNA, 25 bp, Homo sapien
agctggaactgtacgccccttgtgg

SEQ ID NO: 3684793 - DNA, 25 bp, Homo sapien
caatgccaaacatccgggaaaaata

SEQ ID NO: 3684794 - DNA, 25 bp, Homo sapien
accactgtctccacatgagctggaa

SEQ ID NO: 3684795 - DNA, 25 bp, Homo sapien
tggtagcgaatctctgcaaaacggt

SEQ ID NO: 3684796 - DNA, 25 bp, Homo sapien
agcctccttgcgttcaccctgaagc

SEQ ID NO: 3684797 - DNA, 25 bp, Homo sapien
tccatcagcctccttgcgttcaccc

SEQ ID NO: 3684798 - DNA, 25 bp, Homo sapien
tccttgcgttcaccctgaagcttct

SEQ ID NO: 3684799 - DNA, 25 bp, Homo sapien
tgcgttcaccctgaagcttctcgac

SEQ ID NO: 3684800 - DNA, 25 bp, Homo sapien
agaaaaagggattagcgttcagtgc

SEQ ID NO: 3684801 - DNA, 25 bp, Homo sapien
tgtgtggtgtgcatttgtgcctgtg

SEQ ID NO: 3684802 - DNA, 25 bp, Homo sapien
tgagaagcggaaatagaaaaaggga

SEQ ID NO: 3684803 - DNA, 25 bp, Homo sapien
gttcctgtgcctgtgagaagcggaa

SEQ ID NO: 3684804 - DNA, 25 bp, Homo sapien
cacaaaggatatcagggatgcacaa

SEQ ID NO: 3684805 - DNA, 25 bp, Homo sapien
ggtctccacaaaccacacagtgtgt

SEQ ID NO: 3684806 - DNA, 25 bp, Homo sapien
caaagacgttgccacatagcctgaa

SEQ ID NO: 3684807 - DNA, 25 bp, Homo sapien
gattaccagtcgctgttaccagtta

SEQ ID NO: 3684808 - DNA, 25 bp, Homo sapien
gaatgtaattactattatgaaacct

SEQ ID NO: 3684809 - DNA, 25 bp, Homo sapien
tgtaattactattatgaaaccttaa

SEQ ID NO: 3684810 - DNA, 25 bp, Homo sapien
tctcctaaagttattatttaggcaa

SEQ ID NO: 3684811 - DNA, 25 bp, Homo sapien
ctcctaaagttattatttaggcaag

SEQ ID NO: 3684812 - DNA, 25 bp, Homo sapien
ccaatgggtaggtgtagaaatttct

SEQ ID NO: 3684813 - DNA, 25 bp, Homo sapien
tagaaatttctttagcttcaccatc

SEQ ID NO: 3684814 - DNA, 25 bp, Homo sapien
tctttagcttcaccatcatccttct

SEQ ID NO: 3684815 - DNA, 25 bp, Homo sapien
tgtctttggatcaagtttagaccaa

SEQ ID NO: 3684816 - DNA, 25 bp, Homo sapien
ataaaatccatccttatcaaagtta

SEQ ID NO: 3684817 - DNA, 25 bp, Homo sapien
taaaatccatccttatcaaagttac

SEQ ID NO: 3684818 - DNA, 25 bp, Homo sapien
aaataaaatccatccttatcaaagt

SEQ ID NO: 3684819 - DNA, 25 bp, Homo sapien
ataaataaaatccatccttatcaaa

SEQ ID NO: 3684820 - DNA, 25 bp, Homo sapien
gcaagagaatctactgaacccagga

SEQ ID NO: 3684821 - DNA, 25 bp, Homo sapien
caaactggccaacattctgaaacct

SEQ ID NO: 3684822 - DNA, 25 bp, Homo sapien
gaccaaactggccaacattctgaaa

SEQ ID NO: 3684823 - DNA, 25 bp, Homo sapien
aactggccaacattctgaaaccttg

SEQ ID NO: 3684824 - DNA, 25 bp, Homo sapien
gaagttacttagtgcagaaatccta

SEQ ID NO: 3684825 - DNA, 25 bp, Homo sapien
tcatatattataggcattcaacaga

SEQ ID NO: 3684826 - DNA, 25 bp, Homo sapien
tagttacactatagaccctcatata

SEQ ID NO: 3684827 - DNA, 25 bp, Homo sapien
tagttctcaaagttactatagttac

SEQ ID NO: 3684828 - DNA, 25 bp, Homo sapien
tacacgcataaagcattgtgcccag

SEQ ID NO: 3684829 - DNA, 25 bp, Homo sapien
gagctaccttgcctggcttattact

SEQ ID NO: 3684830 - DNA, 25 bp, Homo sapien
ggcagcattgaccttccaagttcaa

SEQ ID NO: 3684831 - DNA, 25 bp, Homo sapien
ggctcaccgcggcagcattgacctt

SEQ ID NO: 3684832 - DNA, 25 bp, Homo sapien
attacagatgcgcacaatcacatcc

SEQ ID NO: 3684833 - DNA, 25 bp, Homo sapien
caaactagctacaattaacaattat

SEQ ID NO: 3684834 - DNA, 25 bp, Homo sapien
gggcagcggatattgaaataggaaa

SEQ ID NO: 3684835 - DNA, 25 bp, Homo sapien
gcggatattgaaataggaaacaaac

SEQ ID NO: 3684836 - DNA, 25 bp, Homo sapien
cagcggatattgaaataggaaacaa

SEQ ID NO: 3684837 - DNA, 25 bp, Homo sapien
tgtcaatcgggctattaactgggat

SEQ ID NO: 3684838 - DNA, 25 bp, Homo sapien
tggaactaagagctcgactttctaa

SEQ ID NO: 3684839 - DNA, 25 bp, Homo sapien
actttaagctgttttgtcaatcggg

SEQ ID NO: 3684840 - DNA, 25 bp, Homo sapien
ctctttatcgtcttcagatttccta

SEQ ID NO: 3684841 - DNA, 25 bp, Homo sapien
taaatattgaaacccagatggagca

SEQ ID NO: 3684842 - DNA, 25 bp, Homo sapien
ctggaagaattagaggcacctgtgt

SEQ ID NO: 3684843 - DNA, 25 bp, Homo sapien
ggtctcacgaagttgtctccatcta

SEQ ID NO: 3684844 - DNA, 25 bp, Homo sapien
taatgtctacacaggagacggaggc

SEQ ID NO: 3684845 - DNA, 25 bp, Homo sapien
caaacttgccactttttgcagccca

SEQ ID NO: 3684846 - DNA, 25 bp, Homo sapien
gacgctggcgttctatttcctcttg

SEQ ID NO: 3684847 - DNA, 25 bp, Homo sapien
tctgtagtccaataggacactcaaa

SEQ ID NO: 3684848 - DNA, 25 bp, Homo sapien
tatatcttctttctcgacgctggcg

SEQ ID NO: 3684849 - DNA, 25 bp, Homo sapien
tatacggacaccaaaatctctttga

SEQ ID NO: 3684850 - DNA, 25 bp, Homo sapien
tcgttgaaaagttccgcaaacaatg

SEQ ID NO: 3684851 - DNA, 25 bp, Homo sapien
catcgcctgattttctccgtttggg

SEQ ID NO: 3684852 - DNA, 25 bp, Homo sapien
aatgatttgtatatacggacaccaa

SEQ ID NO: 3684853 - DNA, 25 bp, Homo sapien
agcttcttctgcttccatagggtca

SEQ ID NO: 3684854 - DNA, 25 bp, Homo sapien
tcttgattgttatcttcttcagttt

SEQ ID NO: 3684855 - DNA, 25 bp, Homo sapien
tcatcatctttagaatcatcttttc

SEQ ID NO: 3684856 - DNA, 25 bp, Homo sapien
tccatagggtcatattcatcttgat

SEQ ID NO: 3684857 - DNA, 25 bp, Homo sapien
tgttcactgcactatcaactttttg

SEQ ID NO: 3684858 - DNA, 25 bp, Homo sapien
gtgttcactgcactatcaacttttt

SEQ ID NO: 3684859 - DNA, 25 bp, Homo sapien
gctgacagctggaacactaacaaaa

SEQ ID NO: 3684860 - DNA, 25 bp, Homo sapien
gctgtatgaatattatgtcactgct

SEQ ID NO: 3684861 - DNA, 25 bp, Homo sapien
tagatgctattacgaccttattttc

SEQ ID NO: 3684862 - DNA, 25 bp, Homo sapien
ataaaataatactgggcgtacaggg

SEQ ID NO: 3684863 - DNA, 25 bp, Homo sapien
taaacagctgggtgcaatggcatgc

SEQ ID NO: 3684864 - DNA, 25 bp, Homo sapien
actaagtggaggtgtcaagtagaca

SEQ ID NO: 3684865 - DNA, 25 bp, Homo sapien
tttgaaatgccagataactaagtgg

SEQ ID NO: 3684866 - DNA, 25 bp, Homo sapien
gagagaagtctgatatgagatagaa

SEQ ID NO: 3684867 - DNA, 25 bp, Homo sapien
agtaaaaatgatggggatacactgg

SEQ ID NO: 3684868 - DNA, 25 bp, Homo sapien
atgcccagcctgaacagtggcttct

SEQ ID NO: 3684869 - DNA, 25 bp, Homo sapien
ctgaacagtggcttcttctatgaag

SEQ ID NO: 3684870 - DNA, 25 bp, Homo sapien
cagcctgaacagtggcttcttctat

SEQ ID NO: 3684871 - DNA, 25 bp, Homo sapien
gagtcttgtaagtcattgtgagcac

SEQ ID NO: 3684872 - DNA, 25 bp, Homo sapien
ggaaagaccctgctagcagaaagaa

SEQ ID NO: 3684873 - DNA, 25 bp, Homo sapien
gaaagaactgccaatgtaaatctcc

SEQ ID NO: 3684874 - DNA, 25 bp, Homo sapien
taactggagacatgacgtggtagag

SEQ ID NO: 3684875 - DNA, 25 bp, Homo sapien
aaaaccttatgctaaaacatacatg

SEQ ID NO: 3684876 - DNA, 25 bp, Homo sapien
ccttgataacaggctaagtaaaaga

SEQ ID NO: 3684877 - DNA, 25 bp, Homo sapien
ttgtcatctcgtttggtcatttctt

SEQ ID NO: 3684878 - DNA, 25 bp, Homo sapien
gcctctccttgcagtatctgttgat

SEQ ID NO: 3684879 - DNA, 25 bp, Homo sapien
ctcttttgtcatctcgtttggtcat

SEQ ID NO: 3684880 - DNA, 25 bp, Homo sapien
cttatctttagagggcctctccttg

SEQ ID NO: 3684881 - DNA, 25 bp, Homo sapien
aaagaatacagtattcaataaacac

SEQ ID NO: 3684882 - DNA, 25 bp, Homo sapien
catattataaagaatacagtattca

SEQ ID NO: 3684883 - DNA, 25 bp, Homo sapien
tattataaagaatacagtattcaat

SEQ ID NO: 3684884 - DNA, 25 bp, Homo sapien
ataaagaatacagtattcaataaac

SEQ ID NO: 3684885 - DNA, 25 bp, Homo sapien
ctagttatctgacatagccacaaaa

SEQ ID NO: 3684886 - DNA, 25 bp, Homo sapien
ggactaataaacttcacaactgtgt

SEQ ID NO: 3684887 - DNA, 25 bp, Homo sapien
aaacggagactgtgcataagatagc

SEQ ID NO: 3684888 - DNA, 25 bp, Homo sapien
gatatttgcctcatcctagctaaaa

SEQ ID NO: 3684889 - DNA, 25 bp, Homo sapien
gagtataaagtatttcttccaaatc

SEQ ID NO: 3684890 - DNA, 25 bp, Homo sapien
ctgagcccgagaaagatgtagtcca

SEQ ID NO: 3684891 - DNA, 25 bp, Homo sapien
taattgtgatcatttgagtcttttc

SEQ ID NO: 3684892 - DNA, 25 bp, Homo sapien
aacagatctctgttaattgtgatca

SEQ ID NO: 3684893 - DNA, 25 bp, Homo sapien
catctgtataatgggtactgtgcag

SEQ ID NO: 3684894 - DNA, 25 bp, Homo sapien
aaaaatggaactgagctgcttacaa

SEQ ID NO: 3684895 - DNA, 25 bp, Homo sapien
ggcaggtctctattttcatggtgaa

SEQ ID NO: 3684896 - DNA, 25 bp, Homo sapien
tagtcctaaggagtagaaacagagg

SEQ ID NO: 3684897 - DNA, 25 bp, Homo sapien
agaaaaactatgatataattttcac

SEQ ID NO: 3684898 - DNA, 25 bp, Homo sapien
aaaaactatgatataattttcactt

SEQ ID NO: 3684899 - DNA, 25 bp, Homo sapien
gaaaaactatgatataattttcact

SEQ ID NO: 3684900 - DNA, 25 bp, Homo sapien
gattcacggagcactactttattaa

SEQ ID NO: 3684901 - DNA, 25 bp, Homo sapien
taaaagcaagattcacggagcacta

SEQ ID NO: 3684902 - DNA, 25 bp, Homo sapien
tcacggagcactactttattaagaa

SEQ ID NO: 3684903 - DNA, 25 bp, Homo sapien
gcaagattcacggagcactacttta

SEQ ID NO: 3684904 - DNA, 25 bp, Homo sapien
tcttctttaattactagtatattta

SEQ ID NO: 3684905 - DNA, 25 bp, Homo sapien
aatataccatattttagtaagttat

SEQ ID NO: 3684906 - DNA, 25 bp, Homo sapien
agcaaaatcttaatattactcagac

SEQ ID NO: 3684907 - DNA, 25 bp, Homo sapien
aaaagcaaaatcttaatattactca

SEQ ID NO: 3684908 - DNA, 25 bp, Homo sapien
gattcctgctttactgttggtgttg

SEQ ID NO: 3684909 - DNA, 25 bp, Homo sapien
tctaccattgcaccattgtacacaa

SEQ ID NO: 3684910 - DNA, 25 bp, Homo sapien
caatttttgcaagaggcttcctaca

SEQ ID NO: 3684911 - DNA, 25 bp, Homo sapien
gctcttactttttcgctcttttcca

SEQ ID NO: 3684912 - DNA, 25 bp, Homo sapien
ggtaacaatgaacctgagaatacac

SEQ ID NO: 3684913 - DNA, 25 bp, Homo sapien
taagcaattttataacctgaaccag

SEQ ID NO: 3684914 - DNA, 25 bp, Homo sapien
cagcttgagcgaagtggcacgatct

SEQ ID NO: 3684915 - DNA, 25 bp, Homo sapien
cctaagattcagataaagctaagca

SEQ ID NO: 3684916 - DNA, 25 bp, Homo sapien
tggttttcaaattgtaaattcatgt

SEQ ID NO: 3684917 - DNA, 25 bp, Homo sapien
tccattaccgtagataagtttctga

SEQ ID NO: 3684918 - DNA, 25 bp, Homo sapien
taccgtagataagtttctgattgtc

SEQ ID NO: 3684919 - DNA, 25 bp, Homo sapien
tgtggatttcatccattaccgtaga

SEQ ID NO: 3684920 - DNA, 25 bp, Homo sapien
ctttttactaatctcaggaaggtca

SEQ ID NO: 3684921 - DNA, 25 bp, Homo sapien
tcaggaaggtcacaatgctatcatt

SEQ ID NO: 3684922 - DNA, 25 bp, Homo sapien
caggaaggtcacaatgctatcatta

SEQ ID NO: 3684923 - DNA, 25 bp, Homo sapien
ctcaggaaggtcacaatgctatcat

SEQ ID NO: 3684924 - DNA, 25 bp, Homo sapien
gcttcaagaagtctgtatacttaaa

SEQ ID NO: 3684925 - DNA, 25 bp, Homo sapien
gttgacattccaactaagatttaga

SEQ ID NO: 3684926 - DNA, 25 bp, Homo sapien
ccgcgcccggtctgaaaccctgtct

SEQ ID NO: 3684927 - DNA, 25 bp, Homo sapien
atagcgccactaacaaaccagcctg

SEQ ID NO: 3684928 - DNA, 25 bp, Homo sapien
ctccttggatttttgatctttgtct

SEQ ID NO: 3684929 - DNA, 25 bp, Homo sapien
tctccttggatttttgatctttgtc

SEQ ID NO: 3684930 - DNA, 25 bp, Homo sapien
tccttggatttttgatctttgtctt

SEQ ID NO: 3684931 - DNA, 25 bp, Homo sapien
cactcaaggagtgtttaataatttg

SEQ ID NO: 3684932 - DNA, 25 bp, Homo sapien
aatttgaaggctaggaattacaagc

SEQ ID NO: 3684933 - DNA, 25 bp, Homo sapien
tcaaacattcttatatcatgatttt

SEQ ID NO: 3684934 - DNA, 25 bp, Homo sapien
atacatcatttgaactaaaatacat

SEQ ID NO: 3684935 - DNA, 25 bp, Homo sapien
acaaagttcatcctaaaacactttg

SEQ ID NO: 3684936 - DNA, 25 bp, Homo sapien
gacatctactggcttggtactaaac

SEQ ID NO: 3684937 - DNA, 25 bp, Homo sapien
taatttaaggcatcatactgacatc

SEQ ID NO: 3684938 - DNA, 25 bp, Homo sapien
tgcttttagagactgatcaagaggg

SEQ ID NO: 3684939 - DNA, 25 bp, Homo sapien
gcagtaacattgacatcaggacaac

SEQ ID NO: 3684940 - DNA, 25 bp, Homo sapien
gcacctaccagattagacacttgga

SEQ ID NO: 3684941 - DNA, 25 bp, Homo sapien
aattagactgtatgcaggtctctgg

SEQ ID NO: 3684942 - DNA, 25 bp, Homo sapien
taatacggatactggatggactacc

SEQ ID NO: 3684943 - DNA, 25 bp, Homo sapien
aattcaagcggataaacttccctgg

SEQ ID NO: 3684944 - DNA, 25 bp, Homo sapien
ttccgggtcgagtgattcccttgcc

SEQ ID NO: 3684945 - DNA, 25 bp, Homo sapien
cttccgggtcgagtgattcccttgc

SEQ ID NO: 3684946 - DNA, 25 bp, Homo sapien
ccttccgggtcgagtgattcccttg

SEQ ID NO: 3684947 - DNA, 25 bp, Homo sapien
taatcttgggcaactgaatctaatg

SEQ ID NO: 3684948 - DNA, 25 bp, Homo sapien
ttaaaacctttgctatccaagcaca

SEQ ID NO: 3684949 - DNA, 25 bp, Homo sapien
tcccaggaaacaagagctggtttgc

SEQ ID NO: 3684950 - DNA, 25 bp, Homo sapien
aagcacataaatattggctcccagg

SEQ ID NO: 3684951 - DNA, 25 bp, Homo sapien
gatgtccgtagtttctctggagtct

SEQ ID NO: 3684952 - DNA, 25 bp, Homo sapien
tggatgtccgtagtttctctggagt

SEQ ID NO: 3684953 - DNA, 25 bp, Homo sapien
gacatttggatgtccgtagtttctc

SEQ ID NO: 3684954 - DNA, 25 bp, Homo sapien
ccagacatttggatgtccgtagttt

SEQ ID NO: 3684955 - DNA, 25 bp, Homo sapien
cccatggccgcaggtactaaggtaa

SEQ ID NO: 3684956 - DNA, 25 bp, Homo sapien
tgcagtaaggaccattgtagggcct

SEQ ID NO: 3684957 - DNA, 25 bp, Homo sapien
taaccatcataagcatcagggtgcc

SEQ ID NO: 3684958 - DNA, 25 bp, Homo sapien
tagggcctttttgagccaacataga

SEQ ID NO: 3684959 - DNA, 25 bp, Homo sapien
agccggcacagcactagcgccagcg

SEQ ID NO: 3684960 - DNA, 25 bp, Homo sapien
ctccagccggcacagcactagcgcc

SEQ ID NO: 3684961 - DNA, 25 bp, Homo sapien
ggcacagcactagcgccagcgagcc

SEQ ID NO: 3684962 - DNA, 25 bp, Homo sapien
cagcactagcgccagcgagcccggc

SEQ ID NO: 3684963 - DNA, 25 bp, Homo sapien
cgccagccgcgcgttccagaagcag

SEQ ID NO: 3684964 - DNA, 25 bp, Homo sapien
cgttccagaagcagcgcgcgttggc

SEQ ID NO: 3684965 - DNA, 25 bp, Homo sapien
agccgcgcgttccagaagcagcgcg

SEQ ID NO: 3684966 - DNA, 25 bp, Homo sapien
cgcgacggaaagcgcggaacaccgc

SEQ ID NO: 3684967 - DNA, 25 bp, Homo sapien
ctgcaggcaggcggggggcgcgcgc

SEQ ID NO: 3684968 - DNA, 25 bp, Homo sapien
tgcaggcaggcggggggcgcgcgca

SEQ ID NO: 3684969 - DNA, 25 bp, Homo sapien
gcaggcaggcggggggcgcgcgcac

SEQ ID NO: 3684970 - DNA, 25 bp, Homo sapien
ggcgccgccaggcatcgcgcagcac

SEQ ID NO: 3684971 - DNA, 25 bp, Homo sapien
ccaccgccctgatgcggaagccgcg

SEQ ID NO: 3684972 - DNA, 25 bp, Homo sapien
cctgatgcggaagccgcgcggcggc

SEQ ID NO: 3684973 - DNA, 25 bp, Homo sapien
cccggcgccgccaggcatcgcgcag

SEQ ID NO: 3684974 - DNA, 25 bp, Homo sapien
ctccagccggcacagcactagcgcc

SEQ ID NO: 3684975 - DNA, 25 bp, Homo sapien
agccggcacagcactagcgccagcg

SEQ ID NO: 3684976 - DNA, 25 bp, Homo sapien
ggcacagcactagcgccagcgagcc

SEQ ID NO: 3684977 - DNA, 25 bp, Homo sapien
cagcactagcgccagcgagcccggc

SEQ ID NO: 3684978 - DNA, 25 bp, Homo sapien
cgccagccgcgcgttccagaagcag

SEQ ID NO: 3684979 - DNA, 25 bp, Homo sapien
agccgcgcgttccagaagcagcgcg

SEQ ID NO: 3684980 - DNA, 25 bp, Homo sapien
cgttccagaagcagcgcgcgttggc

SEQ ID NO: 3684981 - DNA, 25 bp, Homo sapien
cgcgacggaaagcgcggaacaccgc

SEQ ID NO: 3684982 - DNA, 25 bp, Homo sapien
ggcgccgccaggcatcgcgcagcac

SEQ ID NO: 3684983 - DNA, 25 bp, Homo sapien
ccaccgccctgatgcggaagccgcg

SEQ ID NO: 3684984 - DNA, 25 bp, Homo sapien
cctgatgcggaagccgcgcggcggc

SEQ ID NO: 3684985 - DNA, 25 bp, Homo sapien
cccggcgccgccaggcatcgcgcag

SEQ ID NO: 3684986 - DNA, 25 bp, Homo sapien
agccagtactagcagcggccaggca

SEQ ID NO: 3684987 - DNA, 25 bp, Homo sapien
tcagcccggagccagtactagcagc

SEQ ID NO: 3684988 - DNA, 25 bp, Homo sapien
agttgaggaacggactcagcccgga

SEQ ID NO: 3684989 - DNA, 25 bp, Homo sapien
cacaccttggggactatagctgcag

SEQ ID NO: 3684990 - DNA, 25 bp, Homo sapien
tgctctcagagccagaaacctattt

SEQ ID NO: 3684991 - DNA, 25 bp, Homo sapien
ctcttcgctcgtgaggattttggct

SEQ ID NO: 3684992 - DNA, 25 bp, Homo sapien
tgtctgaaagacctcttcgctcgtg

SEQ ID NO: 3684993 - DNA, 25 bp, Homo sapien
gaaatgtgtatatgtggttttgcaa

SEQ ID NO: 3684994 - DNA, 25 bp, Homo sapien
cccaagtcaagggtgatgagccggc

SEQ ID NO: 3684995 - DNA, 25 bp, Homo sapien
caggtgacgtgtgatacatatttca

SEQ ID NO: 3684996 - DNA, 25 bp, Homo sapien
tcctgagttgtgctatgaggcagca

SEQ ID NO: 3684997 - DNA, 25 bp, Homo sapien
tggcagcccgtgacttagcacaagc

SEQ ID NO: 3684998 - DNA, 25 bp, Homo sapien
agcacagttggacttataaagctga

SEQ ID NO: 3684999 - DNA, 25 bp, Homo sapien
ttataaagctgaccgccatccctct

SEQ ID NO: 3685000 - DNA, 25 bp, Homo sapien
tgtaagtcccaggtcttataagacc

SEQ ID NO: 3685001 - DNA, 25 bp, Homo sapien
caggtcttataagacccaaggcagc

SEQ ID NO: 3685002 - DNA, 25 bp, Homo sapien
catcacttccctttcgccaacctga

SEQ ID NO: 3685003 - DNA, 25 bp, Homo sapien
ccctttcgccaacctgatgtgcctg

SEQ ID NO: 3685004 - DNA, 25 bp, Homo sapien
acctgatgtgcctgatcttcagtac

SEQ ID NO: 3685005 - DNA, 25 bp, Homo sapien
cttcagtacctcccaaagcacaaag

SEQ ID NO: 3685006 - DNA, 25 bp, Homo sapien
atttgtacacactcccccacaccat

SEQ ID NO: 3685007 - DNA, 25 bp, Homo sapien
catttgtacacactcccccacacca

SEQ ID NO: 3685008 - DNA, 25 bp, Homo sapien
tttgtacacactcccccacaccatt

SEQ ID NO: 3685009 - DNA, 25 bp, Homo sapien
tgtacacactcccccacaccattcc

SEQ ID NO: 3685010 - DNA, 25 bp, Homo sapien
cattaatttgtatgtcacccttgca

SEQ ID NO: 3685011 - DNA, 25 bp, Homo sapien
attaatttgtatgtcacccttgcac

SEQ ID NO: 3685012 - DNA, 25 bp, Homo sapien
gcaagccgtatctttcttagggttg

SEQ ID NO: 3685013 - DNA, 25 bp, Homo sapien
gatgaatggtaagtttaggagaaga

SEQ ID NO: 3685014 - DNA, 25 bp, Homo sapien
aaagggcaagccgtatctttcttag

SEQ ID NO: 3685015 - DNA, 25 bp, Homo sapien
cttagggttgtgaagagtcagatga

SEQ ID NO: 3685016 - DNA, 25 bp, Homo sapien
cttcaccaaccctcatgcccaggcc

SEQ ID NO: 3685017 - DNA, 25 bp, Homo sapien
aagctcccttcaccaaccctcatgc

SEQ ID NO: 3685018 - DNA, 25 bp, Homo sapien
agctcccttcaccaaccctcatgcc

SEQ ID NO: 3685019 - DNA, 25 bp, Homo sapien
ttatatctgggtggaggtgaccgct

SEQ ID NO: 3685020 - DNA, 25 bp, Homo sapien
tctgggtggaggtgaccgctcctca

SEQ ID NO: 3685021 - DNA, 25 bp, Homo sapien
gaaggaaggtttcaggttatatctg

SEQ ID NO: 3685022 - DNA, 25 bp, Homo sapien
tttcaggttatatctgggtggaggt

SEQ ID NO: 3685023 - DNA, 25 bp, Homo sapien
tctccctgaatagtcagtatctgtc

SEQ ID NO: 3685024 - DNA, 25 bp, Homo sapien
atagtcagtatctgtccatatcctg

SEQ ID NO: 3685025 - DNA, 25 bp, Homo sapien
tggcctctccctgaatagtcagtat

SEQ ID NO: 3685026 - DNA, 25 bp, Homo sapien
cctgaatagtcagtatctgtccata

SEQ ID NO: 3685027 - DNA, 25 bp, Homo sapien
gggggtgccctttgagcctctagct

SEQ ID NO: 3685028 - DNA, 25 bp, Homo sapien
ccgggggtgccctttgagcctctag

SEQ ID NO: 3685029 - DNA, 25 bp, Homo sapien
tcagcacactgatacaccaagaaga

SEQ ID NO: 3685030 - DNA, 25 bp, Homo sapien
actgatacaccaagaagacaggtgg

SEQ ID NO: 3685031 - DNA, 25 bp, Homo sapien
gtgtccctgctgtgtccgcctgcag

SEQ ID NO: 3685032 - DNA, 25 bp, Homo sapien
ggtgtccctgctgtgtccgcctgca

SEQ ID NO: 3685033 - DNA, 25 bp, Homo sapien
tgtccctgctgtgtccgcctgcagg

SEQ ID NO: 3685034 - DNA, 25 bp, Homo sapien
cccaaaggtacgaactgagattgag

SEQ ID NO: 3685035 - DNA, 25 bp, Homo sapien
gattgagttattggattcatttgca

SEQ ID NO: 3685036 - DNA, 25 bp, Homo sapien
tgagctgtattcatatcagatatag

SEQ ID NO: 3685037 - DNA, 25 bp, Homo sapien
tgtattcatatcagatatagcacag

SEQ ID NO: 3685038 - DNA, 25 bp, Homo sapien
tgggtaatgtttcatcaaacgctcc

SEQ ID NO: 3685039 - DNA, 25 bp, Homo sapien
ggtaatgtttcatcaaacgctccaa

SEQ ID NO: 3685040 - DNA, 25 bp, Homo sapien
tgtttcatcaaacgctccaaaagtg

SEQ ID NO: 3685041 - DNA, 25 bp, Homo sapien
tcaaacgctccaaaagtgattcctg

SEQ ID NO: 3685042 - DNA, 25 bp, Homo sapien
taatgaagtaagtctgaggagtaac

SEQ ID NO: 3685043 - DNA, 25 bp, Homo sapien
gatatgtcatggaagctggcatcag

SEQ ID NO: 3685044 - DNA, 25 bp, Homo sapien
tcagcgttcccagagtggtataaag

SEQ ID NO: 3685045 - DNA, 25 bp, Homo sapien
tcaggcgactttcatctgatggcag

SEQ ID NO: 3685046 - DNA, 25 bp, Homo sapien
cattctgtacccaagatacggattc

SEQ ID NO: 3685047 - DNA, 25 bp, Homo sapien
tacggattccccaagacctctgtga

SEQ ID NO: 3685048 - DNA, 25 bp, Homo sapien
gcatgtcccggaaacactggcaaga

SEQ ID NO: 3685049 - DNA, 25 bp, Homo sapien
ttcctgaacatcctgagtgtgcatg

SEQ ID NO: 3685050 - DNA, 25 bp, Homo sapien
gataagctgcgccataagagactaa

SEQ ID NO: 3685051 - DNA, 25 bp, Homo sapien
aagtcatcttcatctcggacgggcc

SEQ ID NO: 3685052 - DNA, 25 bp, Homo sapien
tcacaaatgtggtgctccgcagaca

SEQ ID NO: 3685053 - DNA, 25 bp, Homo sapien
gacgggccattcttcaggtgggaac

SEQ ID NO: 3685054 - DNA, 25 bp, Homo sapien
acagtgtgtttgattaaattgtcaa

SEQ ID NO: 3685055 - DNA, 25 bp, Homo sapien
cagtgtgtttgattaaattgtcaac

SEQ ID NO: 3685056 - DNA, 25 bp, Homo sapien
ggacagtgtgtttgattaaattgtc

SEQ ID NO: 3685057 - DNA, 25 bp, Homo sapien
tctaatgcttcctggctgaaactca

SEQ ID NO: 3685058 - DNA, 25 bp, Homo sapien
cccgattgtcagcatgtcagtggaa

SEQ ID NO: 3685059 - DNA, 25 bp, Homo sapien
gcttcctcggtgagacaaaccctgg

SEQ ID NO: 3685060 - DNA, 25 bp, Homo sapien
taaatcaaatgggaacctagcactg

SEQ ID NO: 3685061 - DNA, 25 bp, Homo sapien
gccaggcagcatttgacgtaagtcg

SEQ ID NO: 3685062 - DNA, 25 bp, Homo sapien
caaggcctggtcatcgttagaaagc

SEQ ID NO: 3685063 - DNA, 25 bp, Homo sapien
taatctacaagcagagggtgttcgg

SEQ ID NO: 3685064 - DNA, 25 bp, Homo sapien
cctgtgaaggaatactgactgtggc

SEQ ID NO: 3685065 - DNA, 25 bp, Homo sapien
tggagaatctattccactatctcct

SEQ ID NO: 3685066 - DNA, 25 bp, Homo sapien
cgtggagaatctattccactatctc

SEQ ID NO: 3685067 - DNA, 25 bp, Homo sapien
atctattccactatctcctgccatg

SEQ ID NO: 3685068 - DNA, 25 bp, Homo sapien
gaatctattccactatctcctgcca

SEQ ID NO: 3685069 - DNA, 25 bp, Homo sapien
ttagcggtagtaaggaattagatgt

SEQ ID NO: 3685070 - DNA, 25 bp, Homo sapien
gaattattagatcccagactctgtg

SEQ ID NO: 3685071 - DNA, 25 bp, Homo sapien
taaacgtttatgactggagttagcg

SEQ ID NO: 3685072 - DNA, 25 bp, Homo sapien
ctttgtgccttcgacattttgcaga

SEQ ID NO: 3685073 - DNA, 25 bp, Homo sapien
ggttaatagtatagatatgcttgcc

SEQ ID NO: 3685074 - DNA, 25 bp, Homo sapien
caaaatgtgtaatgtggttaatagt

SEQ ID NO: 3685075 - DNA, 25 bp, Homo sapien
gcttgcctttagacaattcttatat

SEQ ID NO: 3685076 - DNA, 25 bp, Homo sapien
tcttacatgattgaaagattctgta

SEQ ID NO: 3685077 - DNA, 25 bp, Homo sapien
cgaaaataatctatatactcccaat

SEQ ID NO: 3685078 - DNA, 25 bp, Homo sapien
cactttttaatcgaaaataatctat

SEQ ID NO: 3685079 - DNA, 25 bp, Homo sapien
ttttaatcgaaaataatctatatac

SEQ ID NO: 3685080 - DNA, 25 bp, Homo sapien
aataatctatatactcccaataaac

SEQ ID NO: 3685081 - DNA, 25 bp, Homo sapien
ggtgagatccacttaacttagaact

SEQ ID NO: 3685082 - DNA, 25 bp, Homo sapien
gaaccatttgttcatgtccaagctg

SEQ ID NO: 3685083 - DNA, 25 bp, Homo sapien
gaaccagaggaacagtagtacagcc

SEQ ID NO: 3685084 - DNA, 25 bp, Homo sapien
cattgtcagtcacattgggaaccat

SEQ ID NO: 3685085 - DNA, 25 bp, Homo sapien
ggcaaaattagatggacttcattag

SEQ ID NO: 3685086 - DNA, 25 bp, Homo sapien
cattagttgcgcaacatggcaaaac

SEQ ID NO: 3685087 - DNA, 25 bp, Homo sapien
tgtctgtgttatatgatgagtttca

SEQ ID NO: 3685088 - DNA, 25 bp, Homo sapien
caatttaatcgcacatattcccatc

SEQ ID NO: 3685089 - DNA, 25 bp, Homo sapien
gaagagggcaccattatccaagtaa

SEQ ID NO: 3685090 - DNA, 25 bp, Homo sapien
ttgaaccaagtagtaggagacaggg

SEQ ID NO: 3685091 - DNA, 25 bp, Homo sapien
ggcccgctcttaggacctctgacat

SEQ ID NO: 3685092 - DNA, 25 bp, Homo sapien
caagtaatgtttggaagcggcttct

SEQ ID NO: 3685093 - DNA, 25 bp, Homo sapien
tatgtcagaggtcctaagagcgggc

SEQ ID NO: 3685094 - DNA, 25 bp, Homo sapien
tagatatggctaagaatgccgcacg

SEQ ID NO: 3685095 - DNA, 25 bp, Homo sapien
ctacaacagggtatgatgatgtgca

SEQ ID NO: 3685096 - DNA, 25 bp, Homo sapien
cttgtggttgaaggttaataacagc

SEQ ID NO: 3685097 - DNA, 25 bp, Homo sapien
cttcatgatccttgcgacccagcta

SEQ ID NO: 3685098 - DNA, 25 bp, Homo sapien
gggctactctcacaaaccacttgat

SEQ ID NO: 3685099 - DNA, 25 bp, Homo sapien
ttgataacgtctagcacaccagcct

SEQ ID NO: 3685100 - DNA, 25 bp, Homo sapien
tactctacccaatggagacacaggg

SEQ ID NO: 3685101 - DNA, 25 bp, Homo sapien
tcaccgaggctagttggcttttcac

SEQ ID NO: 3685102 - DNA, 25 bp, Homo sapien
tatcaccgaggctagttggcttttc

SEQ ID NO: 3685103 - DNA, 25 bp, Homo sapien
ccgaggctagttggcttttcacagc

SEQ ID NO: 3685104 - DNA, 25 bp, Homo sapien
caccgaggctagttggcttttcaca

SEQ ID NO: 3685105 - DNA, 25 bp, Homo sapien
ttttagtgatggagattaactgccc

SEQ ID NO: 3685106 - DNA, 25 bp, Homo sapien
ctgaaacctttgacaatacaaaggg

SEQ ID NO: 3685107 - DNA, 25 bp, Homo sapien
gattaactgcccgtgaatcaccacc

SEQ ID NO: 3685108 - DNA, 25 bp, Homo sapien
tacacaaaactgaaacctttgacaa

SEQ ID NO: 3685109 - DNA, 25 bp, Homo sapien
cttcaacggcggtagacagggtccg

SEQ ID NO: 3685110 - DNA, 25 bp, Homo sapien
gaagcccttcaacggcggtagacag

SEQ ID NO: 3685111 - DNA, 25 bp, Homo sapien
gctgggaagcccttcaacggcggta

SEQ ID NO: 3685112 - DNA, 25 bp, Homo sapien
gaggccagtgggcaacgccgcgcgc

SEQ ID NO: 3685113 - DNA, 25 bp, Homo sapien
gggcccgcccttgttctgaagtgat

SEQ ID NO: 3685114 - DNA, 25 bp, Homo sapien
gatactctcggtttaagaccttcca

SEQ ID NO: 3685115 - DNA, 25 bp, Homo sapien
tccataaaggaagcatgcactgatt

SEQ ID NO: 3685116 - DNA, 25 bp, Homo sapien
agtgtgagagatatcaacgggcccg

SEQ ID NO: 3685117 - DNA, 25 bp, Homo sapien
ccaccgccgcctccctccgggcaca

SEQ ID NO: 3685118 - DNA, 25 bp, Homo sapien
cgccgcctccctccgggcacagtgg

SEQ ID NO: 3685119 - DNA, 25 bp, Homo sapien
gccaccgccgcctccctccgggcac

SEQ ID NO: 3685120 - DNA, 25 bp, Homo sapien
accgccgcctccctccgggcacagt

SEQ ID NO: 3685121 - DNA, 25 bp, Homo sapien
tctcggactcctccaagggtgcttc

SEQ ID NO: 3685122 - DNA, 25 bp, Homo sapien
tctggctctcggactcctccaaggg

SEQ ID NO: 3685123 - DNA, 25 bp, Homo sapien
gctctcggactcctccaagggtgct

SEQ ID NO: 3685124 - DNA, 25 bp, Homo sapien
cggactcctccaagggtgcttccag

SEQ ID NO: 3685125 - DNA, 25 bp, Homo sapien
taagagggccaatgaaaacgaaatg

SEQ ID NO: 3685126 - DNA, 25 bp, Homo sapien
catctgagattcaggcgccaacggg

SEQ ID NO: 3685127 - DNA, 25 bp, Homo sapien
gacaaatcctggcaagtctcagtga

SEQ ID NO: 3685128 - DNA, 25 bp, Homo sapien
gaaatggcaagcgtcactgcttcag

SEQ ID NO: 3685129 - DNA, 25 bp, Homo sapien
caggattgggatgcaaaagacaaga

SEQ ID NO: 3685130 - DNA, 25 bp, Homo sapien
ccttgaccgctggacaggattggga

SEQ ID NO: 3685131 - DNA, 25 bp, Homo sapien
ggttttctgcttacactctaggtaa

SEQ ID NO: 3685132 - DNA, 25 bp, Homo sapien
gcttacactctaggtaacttcagta

SEQ ID NO: 3685133 - DNA, 25 bp, Homo sapien
ccgaaattgcgatatccataaagct

SEQ ID NO: 3685134 - DNA, 25 bp, Homo sapien
acaggtccataatcccttatccgaa

SEQ ID NO: 3685135 - DNA, 25 bp, Homo sapien
tcccttatccgaaattgcgatatcc

SEQ ID NO: 3685136 - DNA, 25 bp, Homo sapien
gaagtacaggtccataatcccttat

SEQ ID NO: 3685137 - DNA, 25 bp, Homo sapien
atgtgttttcagcttatcttgttta

SEQ ID NO: 3685138 - DNA, 25 bp, Homo sapien
gtgttttcagcttatcttgtttaaa

SEQ ID NO: 3685139 - DNA, 25 bp, Homo sapien
ccagcactgtgtaatgtgttttcag

SEQ ID NO: 3685140 - DNA, 25 bp, Homo sapien
cagcttatcttgtttaaatcttcat

SEQ ID NO: 3685141 - DNA, 25 bp, Homo sapien
tctgaaagtctattaaatccttctt

SEQ ID NO: 3685142 - DNA, 25 bp, Homo sapien
tgaaagtctattaaatccttcttca

SEQ ID NO: 3685143 - DNA, 25 bp, Homo sapien
ctgaaagtctattaaatccttcttc

SEQ ID NO: 3685144 - DNA, 25 bp, Homo sapien
ccttctttctgttcacgtgttaagg

SEQ ID NO: 3685145 - DNA, 25 bp, Homo sapien
ttatagtctcttcagaaataggaaa

SEQ ID NO: 3685146 - DNA, 25 bp, Homo sapien
aataggaaaattggagaaggctcct

SEQ ID NO: 3685147 - DNA, 25 bp, Homo sapien
agaagctttatagtctcttcagaaa

SEQ ID NO: 3685148 - DNA, 25 bp, Homo sapien
ggaaagagatatgttacccctcgac

SEQ ID NO: 3685149 - DNA, 25 bp, Homo sapien
cttgaataggaaagagatatgttac

SEQ ID NO: 3685150 - DNA, 25 bp, Homo sapien
taggaaagagatatgttacccctcg

SEQ ID NO: 3685151 - DNA, 25 bp, Homo sapien
gaataggaaagagatatgttacccc

SEQ ID NO: 3685152 - DNA, 25 bp, Homo sapien
tcatatacaggaccaaaggtcttaa

SEQ ID NO: 3685153 - DNA, 25 bp, Homo sapien
cttcatatacaggaccaaaggtctt

SEQ ID NO: 3685154 - DNA, 25 bp, Homo sapien
aatcttttccttcatatacaggacc

SEQ ID NO: 3685155 - DNA, 25 bp, Homo sapien
tttccttcatatacaggaccaaagg

SEQ ID NO: 3685156 - DNA, 25 bp, Homo sapien
gctacttggtttgccagttcccttg

SEQ ID NO: 3685157 - DNA, 25 bp, Homo sapien
tggctacttggtttgccagttccct

SEQ ID NO: 3685158 - DNA, 25 bp, Homo sapien
gagaaatgccaccaatatgtaaaat

SEQ ID NO: 3685159 - DNA, 25 bp, Homo sapien
gaaatgccaccaatatgtaaaattc

SEQ ID NO: 3685160 - DNA, 25 bp, Homo sapien
gagaagagagaaatgccaccaatat

SEQ ID NO: 3685161 - DNA, 25 bp, Homo sapien
agagagaaatgccaccaatatgtaa

SEQ ID NO: 3685162 - DNA, 25 bp, Homo sapien
ctaacatctgatccacttcatcaag

SEQ ID NO: 3685163 - DNA, 25 bp, Homo sapien
tagaaagatccaatcggccactctg

SEQ ID NO: 3685164 - DNA, 25 bp, Homo sapien
tcagcgaaacctaaatctaacatct

SEQ ID NO: 3685165 - DNA, 25 bp, Homo sapien
aacatgtcgcagtttagaaagatcc

SEQ ID NO: 3685166 - DNA, 25 bp, Homo sapien
gtatacccactgtgggcaagttgca

SEQ ID NO: 3685167 - DNA, 25 bp, Homo sapien
tgtatacccactgtgggcaagttgc

SEQ ID NO: 3685168 - DNA, 25 bp, Homo sapien
tatacccactgtgggcaagttgcag

SEQ ID NO: 3685169 - DNA, 25 bp, Homo sapien
ctgcttgtgtgtttcctattaggac

SEQ ID NO: 3685170 - DNA, 25 bp, Homo sapien
tctatcatgctagaaagctacttac

SEQ ID NO: 3685171 - DNA, 25 bp, Homo sapien
gattaggcatgaagaggtacccaaa

SEQ ID NO: 3685172 - DNA, 25 bp, Homo sapien
attaggacttgcctattcacgtgct

SEQ ID NO: 3685173 - DNA, 25 bp, Homo sapien
ctgagaccaatgacactggatggcc

SEQ ID NO: 3685174 - DNA, 25 bp, Homo sapien
gagaccaatgacactggatggccaa

SEQ ID NO: 3685175 - DNA, 25 bp, Homo sapien
gaccaatgacactggatggccaaat

SEQ ID NO: 3685176 - DNA, 25 bp, Homo sapien
accaatgacactggatggccaaatg

SEQ ID NO: 3685177 - DNA, 25 bp, Homo sapien
ccttcagacccactgtagacttgaa

SEQ ID NO: 3685178 - DNA, 25 bp, Homo sapien
cttcagacccactgtagacttgaag

SEQ ID NO: 3685179 - DNA, 25 bp, Homo sapien
tcccttcagacccactgtagacttg

SEQ ID NO: 3685180 - DNA, 25 bp, Homo sapien
cccttcagacccactgtagacttga

SEQ ID NO: 3685181 - DNA, 25 bp, Homo sapien
cgggtatggtgttgcacacctgtaa

SEQ ID NO: 3685182 - DNA, 25 bp, Homo sapien
gaagaaagggaccaggctgggcaca

SEQ ID NO: 3685183 - DNA, 25 bp, Homo sapien
gggcagaggacggaggtttcagtga

SEQ ID NO: 3685184 - DNA, 25 bp, Homo sapien
gtggctcacacctgtaatcccagta

SEQ ID NO: 3685185 - DNA, 25 bp, Homo sapien
gcaatgtccccatgtaaacactggg

SEQ ID NO: 3685186 - DNA, 25 bp, Homo sapien
aatgtccaaaccacgggcagccaca

SEQ ID NO: 3685187 - DNA, 25 bp, Homo sapien
cttcaggaatgtccaaaccacgggc

SEQ ID NO: 3685188 - DNA, 25 bp, Homo sapien
gaactttgaatcaccaggtcaactt

SEQ ID NO: 3685189 - DNA, 25 bp, Homo sapien
tccacatatcttagttgacctcttt

SEQ ID NO: 3685190 - DNA, 25 bp, Homo sapien
acatatcttagttgacctctttctc

SEQ ID NO: 3685191 - DNA, 25 bp, Homo sapien
cacatatcttagttgacctctttct

SEQ ID NO: 3685192 - DNA, 25 bp, Homo sapien
ccacatatcttagttgacctctttc

SEQ ID NO: 3685193 - DNA, 25 bp, Homo sapien
tgtagaaggaacacctacacgttta

SEQ ID NO: 3685194 - DNA, 25 bp, Homo sapien
aatccattgtagaaggaacacctac

SEQ ID NO: 3685195 - DNA, 25 bp, Homo sapien
actaaatccattgtagaaggaacac

SEQ ID NO: 3685196 - DNA, 25 bp, Homo sapien
tggcatccatgcttttagatttaac

SEQ ID NO: 3685197 - DNA, 25 bp, Homo sapien
aattttctgctatttgaactgggag

SEQ ID NO: 3685198 - DNA, 25 bp, Homo sapien
taaatgtctgctggtaaaactggtg

SEQ ID NO: 3685199 - DNA, 25 bp, Homo sapien
tattcagcaagttcagaaagcatac

SEQ ID NO: 3685200 - DNA, 25 bp, Homo sapien
gcttacagatgaatagcctaataca

SEQ ID NO: 3685201 - DNA, 25 bp, Homo sapien
tctgagctgatggtcggaaaaaatc

SEQ ID NO: 3685202 - DNA, 25 bp, Homo sapien
tcaaagcttgatgcaccagaaatgt

SEQ ID NO: 3685203 - DNA, 25 bp, Homo sapien
gcagcgtaagaaacggaagccagag

SEQ ID NO: 3685204 - DNA, 25 bp, Homo sapien
tgatcaaagatcgtggttcaaagct

SEQ ID NO: 3685205 - DNA, 25 bp, Homo sapien
catgtacaattttctcacagatttc

SEQ ID NO: 3685206 - DNA, 25 bp, Homo sapien
ttttcccactcatgtacaattttct

SEQ ID NO: 3685207 - DNA, 25 bp, Homo sapien
cttttcccactcatgtacaattttc

SEQ ID NO: 3685208 - DNA, 25 bp, Homo sapien
gtacaattttctcacagatttctac

SEQ ID NO: 3685209 - DNA, 25 bp, Homo sapien
tctgagacactgcattactactcag

SEQ ID NO: 3685210 - DNA, 25 bp, Homo sapien
aatctgagacactgcattactactc

SEQ ID NO: 3685211 - DNA, 25 bp, Homo sapien
tgagacactgcattactactcagct

SEQ ID NO: 3685212 - DNA, 25 bp, Homo sapien
gagacactgcattactactcagctt

SEQ ID NO: 3685213 - DNA, 25 bp, Homo sapien
agttgtaggaacatcaaagcaaaca

SEQ ID NO: 3685214 - DNA, 25 bp, Homo sapien
cagacaggccattaataagtagtgc

SEQ ID NO: 3685215 - DNA, 25 bp, Homo sapien
cagcactatttggtatctcagcaca

SEQ ID NO: 3685216 - DNA, 25 bp, Homo sapien
taagtagtgcgttgttttcagcagg

SEQ ID NO: 3685217 - DNA, 25 bp, Homo sapien
gattaaatacaagtcaacaccagcc

SEQ ID NO: 3685218 - DNA, 25 bp, Homo sapien
tgtctggaattagaagatgtgtttc

SEQ ID NO: 3685219 - DNA, 25 bp, Homo sapien
ctgtctggaattagaagatgtgttt

SEQ ID NO: 3685220 - DNA, 25 bp, Homo sapien
cgaccacctgaccggcctgaccggc

SEQ ID NO: 3685221 - DNA, 25 bp, Homo sapien
atcgaccacctgaccggcctgaccg

SEQ ID NO: 3685222 - DNA, 25 bp, Homo sapien
tcgaccacctgaccggcctgaccgg

SEQ ID NO: 3685223 - DNA, 25 bp, Homo sapien
gatttctattcccacttcgtcttct

SEQ ID NO: 3685224 - DNA, 25 bp, Homo sapien
tcagtcaaaactccgtttgtggccc

SEQ ID NO: 3685225 - DNA, 25 bp, Homo sapien
ctaccatcttgtcgacttcctgagc

SEQ ID NO: 3685226 - DNA, 25 bp, Homo sapien
cgacttccttgtcgactctgtctac

SEQ ID NO: 3685227 - DNA, 25 bp, Homo sapien
gacacatacctcaactatgatgacc

SEQ ID NO: 3685228 - DNA, 25 bp, Homo sapien
attaggcagaaataggcaagctcac

SEQ ID NO: 3685229 - DNA, 25 bp, Homo sapien
caactatgatgacctaatttttggt

SEQ ID NO: 3685230 - DNA, 25 bp, Homo sapien
tggtggataatgtacatgattaggc

SEQ ID NO: 3685231 - DNA, 25 bp, Homo sapien
ttgagattacattgagaaaattctt

SEQ ID NO: 3685232 - DNA, 25 bp, Homo sapien
tgagaaaattcttaacacataagtg

SEQ ID NO: 3685233 - DNA, 25 bp, Homo sapien
ttgagaaaattcttaacacataagt

SEQ ID NO: 3685234 - DNA, 25 bp, Homo sapien
agaaatttttgagattacattgaga

SEQ ID NO: 3685235 - DNA, 25 bp, Homo sapien
tgtcaacagtttacacagcccttta

SEQ ID NO: 3685236 - DNA, 25 bp, Homo sapien
tttttatcacataacctatgggagg

SEQ ID NO: 3685237 - DNA, 25 bp, Homo sapien
tacacctaactaaccatgtcaacag

SEQ ID NO: 3685238 - DNA, 25 bp, Homo sapien
ctgtgtctagactaaaatgatacac

SEQ ID NO: 3685239 - DNA, 25 bp, Homo sapien
taggagacctcactgtccttgagta

SEQ ID NO: 3685240 - DNA, 25 bp, Homo sapien
aggagacctcactgtccttgagtac

SEQ ID NO: 3685241 - DNA, 25 bp, Homo sapien
ggagacctcactgtccttgagtacc

SEQ ID NO: 3685242 - DNA, 25 bp, Homo sapien
cagtctgctctgttatttttggaaa

SEQ ID NO: 3685243 - DNA, 25 bp, Homo sapien
ccagtctgctctgttatttttggaa

SEQ ID NO: 3685244 - DNA, 25 bp, Homo sapien
tcaagaagctttatagactagcggg

SEQ ID NO: 3685245 - DNA, 25 bp, Homo sapien
aaaataattcagtcgggtctggtcg

SEQ ID NO: 3685246 - DNA, 25 bp, Homo sapien
tctggtcgttcattcatgcgagcac

SEQ ID NO: 3685247 - DNA, 25 bp, Homo sapien
tcttatgagcgttcactgtgtcagg

SEQ ID NO: 3685248 - DNA, 25 bp, Homo sapien
acttgcggcccttggtctagaaggc

SEQ ID NO: 3685249 - DNA, 25 bp, Homo sapien
ggtaaattcaaagcagcggcctgtg

SEQ ID NO: 3685250 - DNA, 25 bp, Homo sapien
ctgctttccgcgtggtaaattcaaa

SEQ ID NO: 3685251 - DNA, 25 bp, Homo sapien
tggttggatttagtgaattgaccac

SEQ ID NO: 3685252 - DNA, 25 bp, Homo sapien
ccaggccgaccggtcttctcaaccg

SEQ ID NO: 3685253 - DNA, 25 bp, Homo sapien
ttcagcgcaggttgcccaggccgac

SEQ ID NO: 3685254 - DNA, 25 bp, Homo sapien
ttctcaaccgcgtggagaggaagag

SEQ ID NO: 3685255 - DNA, 25 bp, Homo sapien
cgaccggtcttctcaaccgcgtgga

SEQ ID NO: 3685256 - DNA, 25 bp, Homo sapien
ccagcgtcactacggagttttcccg

SEQ ID NO: 3685257 - DNA, 25 bp, Homo sapien
ggtttgctttcgcagtgtctcccct

SEQ ID NO: 3685258 - DNA, 25 bp, Homo sapien
tgattccaaaccagcgtcactacgg

SEQ ID NO: 3685259 - DNA, 25 bp, Homo sapien
tttcattgcggtgtctgattccaaa

SEQ ID NO: 3685260 - DNA, 25 bp, Homo sapien
ttccgctccattcagcgtccctcct

SEQ ID NO: 3685261 - DNA, 25 bp, Homo sapien
gggttccgctccattcagcgtccct

SEQ ID NO: 3685262 - DNA, 25 bp, Homo sapien
cccggggttccgctccattcagcgt

SEQ ID NO: 3685263 - DNA, 25 bp, Homo sapien
gcaccccggggttccgctccattca

SEQ ID NO: 3685264 - DNA, 25 bp, Homo sapien
tggacgcgctgttatccgccgcgcg

SEQ ID NO: 3685265 - DNA, 25 bp, Homo sapien
actcctgggcgaccgcccgccaaga

SEQ ID NO: 3685266 - DNA, 25 bp, Homo sapien
gcgctcccacgatcccagcccgggc

SEQ ID NO: 3685267 - DNA, 25 bp, Homo sapien
aagacccacgcccggtgtctggacg

SEQ ID NO: 3685268 - DNA, 25 bp, Homo sapien
tttgacttgacgtgtaacttccttc

SEQ ID NO: 3685269 - DNA, 25 bp, Homo sapien
ttcgcgcacgctcatgccgggagtt

SEQ ID NO: 3685270 - DNA, 25 bp, Homo sapien
tgccgggagttctgtcttagccaac

SEQ ID NO: 3685271 - DNA, 25 bp, Homo sapien
gtgtaacttccttcgcgcacgctca

SEQ ID NO: 3685272 - DNA, 25 bp, Homo sapien
tctcttcagtcttatcagattttgg

SEQ ID NO: 3685273 - DNA, 25 bp, Homo sapien
tgctatctcttcagtcttatcagat

SEQ ID NO: 3685274 - DNA, 25 bp, Homo sapien
tcttctgctatctcttcagtcttat

SEQ ID NO: 3685275 - DNA, 25 bp, Homo sapien
cagtcttatcagattttggcttctc

SEQ ID NO: 3685276 - DNA, 25 bp, Homo sapien
cctttttggatttaggagaattcat

SEQ ID NO: 3685277 - DNA, 25 bp, Homo sapien
taggagaaatgtcattttgagatgg

SEQ ID NO: 3685278 - DNA, 25 bp, Homo sapien
aaatgtcattttgagatggctcctc

SEQ ID NO: 3685279 - DNA, 25 bp, Homo sapien
accactttcttttcaatgggctcct

SEQ ID NO: 3685280 - DNA, 25 bp, Homo sapien
tcttcttgggcttaggagcatctat

SEQ ID NO: 3685281 - DNA, 25 bp, Homo sapien
ttcactggggttacagtccggttca

SEQ ID NO: 3685282 - DNA, 25 bp, Homo sapien
ggatgaggaaatccattcttcagtt

SEQ ID NO: 3685283 - DNA, 25 bp, Homo sapien
cagtccggttcaggatgaggaaatc

SEQ ID NO: 3685284 - DNA, 25 bp, Homo sapien
tagagaaagcgccttctttttgttc

SEQ ID NO: 3685285 - DNA, 25 bp, Homo sapien
aatagtttcttcagatatgggaaaa

SEQ ID NO: 3685286 - DNA, 25 bp, Homo sapien
taatagtttcttcagatatgggaaa

SEQ ID NO: 3685287 - DNA, 25 bp, Homo sapien
attagagaaagcgccttctttttgt

SEQ ID NO: 3685288 - DNA, 25 bp, Homo sapien
aggaaataggaaggtcactcctcgg

SEQ ID NO: 3685289 - DNA, 25 bp, Homo sapien
ggaaataggaaggtcactcctcggc

SEQ ID NO: 3685290 - DNA, 25 bp, Homo sapien
tgcctgtgcaattaagtccttcccg

SEQ ID NO: 3685291 - DNA, 25 bp, Homo sapien
gtccttcccgctgtaaacatgatgg

SEQ ID NO: 3685292 - DNA, 25 bp, Homo sapien
gatggcaaaggagaatgtcttccca

SEQ ID NO: 3685293 - DNA, 25 bp, Homo sapien
gaagtttctcaatcaaagggatggc

SEQ ID NO: 3685294 - DNA, 25 bp, Homo sapien
ctcttgtaggtgcaagaaccagtac

SEQ ID NO: 3685295 - DNA, 25 bp, Homo sapien
agtctttgcttacttgatttgccaa

SEQ ID NO: 3685296 - DNA, 25 bp, Homo sapien
ggagttccaccataaaaacaagcca

SEQ ID NO: 3685297 - DNA, 25 bp, Homo sapien
cctccatagggagttccaccataaa

SEQ ID NO: 3685298 - DNA, 25 bp, Homo sapien
ctagtttgccattctgtatgtggtc

SEQ ID NO: 3685299 - DNA, 25 bp, Homo sapien
ggtgttccaaccaggatatcaatcc

SEQ ID NO: 3685300 - DNA, 25 bp, Homo sapien
tggtctttgatacgacctggtgttc

SEQ ID NO: 3685301 - DNA, 25 bp, Homo sapien
tatcaatcccattcctcatgcgttc

SEQ ID NO: 3685302 - DNA, 25 bp, Homo sapien
tcagcttcttgaatttgtggattac

SEQ ID NO: 3685303 - DNA, 25 bp, Homo sapien
cttcctttggtcttttttatcagct

SEQ ID NO: 3685304 - DNA, 25 bp, Homo sapien
tttatcagcttcttgaatttgtgga

SEQ ID NO: 3685305 - DNA, 25 bp, Homo sapien
tatcagcttcttgaatttgtggatt

SEQ ID NO: 3685306 - DNA, 25 bp, Homo sapien
tccacctgttcatatgtagatttca

SEQ ID NO: 3685307 - DNA, 25 bp, Homo sapien
tccacagttattgccgttttctgag

SEQ ID NO: 3685308 - DNA, 25 bp, Homo sapien
tgagtctttttaccaatcaggtcca

SEQ ID NO: 3685309 - DNA, 25 bp, Homo sapien
aatacccaatgagggcaagttgcag

SEQ ID NO: 3685310 - DNA, 25 bp, Homo sapien
gagtccagtggcacttaatagccag

SEQ ID NO: 3685311 - DNA, 25 bp, Homo sapien
gatgatagtgcgtccttgatgacca

SEQ ID NO: 3685312 - DNA, 25 bp, Homo sapien
gaccactatatactcggatgacatc

SEQ ID NO: 3685313 - DNA, 25 bp, Homo sapien
ggatgacatccccaataactgctgc

SEQ ID NO: 3685314 - DNA, 25 bp, Homo sapien
ggtggagagctttgtataaccaaat

SEQ ID NO: 3685315 - DNA, 25 bp, Homo sapien
ccaaatcaacctcagggatgtctaa

SEQ ID NO: 3685316 - DNA, 25 bp, Homo sapien
ggatgtctaacccacgtgcagcaac

SEQ ID NO: 3685317 - DNA, 25 bp, Homo sapien
tggaatgtctccatgcaaggactga

SEQ ID NO: 3685318 - DNA, 25 bp, Homo sapien
tacacagatcaattcagaccaccta

SEQ ID NO: 3685319 - DNA, 25 bp, Homo sapien
tctatacaaaccagggtaccaatgc

SEQ ID NO: 3685320 - DNA, 25 bp, Homo sapien
aatccagaccgcataataaaaagtt

SEQ ID NO: 3685321 - DNA, 25 bp, Homo sapien
cacgcctgtcagaatatccaagtct

SEQ ID NO: 3685322 - DNA, 25 bp, Homo sapien
ataaaagcagatgcacacccccgtc

SEQ ID NO: 3685323 - DNA, 25 bp, Homo sapien
cggatcgatgaatgtaggactctac

SEQ ID NO: 3685324 - DNA, 25 bp, Homo sapien
tactaactgatattcttccttgtgc

SEQ ID NO: 3685325 - DNA, 25 bp, Homo sapien
tttgctccacttgtactaactgata

SEQ ID NO: 3685326 - DNA, 25 bp, Homo sapien
tgcagaaggaacacctattcgtttg

SEQ ID NO: 3685327 - DNA, 25 bp, Homo sapien
ctgttgcagaaggaacacctattcg

SEQ ID NO: 3685328 - DNA, 25 bp, Homo sapien
cagaaggaacacctattcgtttgaa

SEQ ID NO: 3685329 - DNA, 25 bp, Homo sapien
gttgcagaaggaacacctattcgtt

SEQ ID NO: 3685330 - DNA, 25 bp, Homo sapien
ctgttgtttgagagtgtgttaggag

SEQ ID NO: 3685331 - DNA, 25 bp, Homo sapien
tgagagtgtgttaggagaaaggata

SEQ ID NO: 3685332 - DNA, 25 bp, Homo sapien
gttgtttgagagtgtgttaggagaa

SEQ ID NO: 3685333 - DNA, 25 bp, Homo sapien
tttgagagtgtgttaggagaaagga

SEQ ID NO: 3685334 - DNA, 25 bp, Homo sapien
cagtgggaggcacggaatccaaaag

SEQ ID NO: 3685335 - DNA, 25 bp, Homo sapien
gcagtgggaggcacggaatccaaaa

SEQ ID NO: 3685336 - DNA, 25 bp, Homo sapien
agtgggaggcacggaatccaaaagc

SEQ ID NO: 3685337 - DNA, 25 bp, Homo sapien
gcttctcagctgattgtttgaagtg

SEQ ID NO: 3685338 - DNA, 25 bp, Homo sapien
catttgagttgatcaaggagcgctg

SEQ ID NO: 3685339 - DNA, 25 bp, Homo sapien
agttgatcaaggagcgctggtctac

SEQ ID NO: 3685340 - DNA, 25 bp, Homo sapien
tgagttgatcaaggagcgctggtct

SEQ ID NO: 3685341 - DNA, 25 bp, Homo sapien
tttgagttgatcaaggagcgctggt

SEQ ID NO: 3685342 - DNA, 25 bp, Homo sapien
gttctttccaagcataactaatatt

SEQ ID NO: 3685343 - DNA, 25 bp, Homo sapien
accattcccttcactttggaatcaa

SEQ ID NO: 3685344 - DNA, 25 bp, Homo sapien
tggaatcaatctcctcgcccagctg

SEQ ID NO: 3685345 - DNA, 25 bp, Homo sapien
ctaatatttggcatttcaattgagc

SEQ ID NO: 3685346 - DNA, 25 bp, Homo sapien
tccattagcaaacacagcaaggtaa

SEQ ID NO: 3685347 - DNA, 25 bp, Homo sapien
caggcattcactgggtatagaggta

SEQ ID NO: 3685348 - DNA, 25 bp, Homo sapien
tgttaactaatacaggcactcctct

SEQ ID NO: 3685349 - DNA, 25 bp, Homo sapien
tacgaagtagagtataatcccaggc

SEQ ID NO: 3685350 - DNA, 25 bp, Homo sapien
gatgcggtaggtacatcaaagcaaa

SEQ ID NO: 3685351 - DNA, 25 bp, Homo sapien
tgtatttctgttactgatgcggtag

SEQ ID NO: 3685352 - DNA, 25 bp, Homo sapien
tactgatgcggtaggtacatcaaag

SEQ ID NO: 3685353 - DNA, 25 bp, Homo sapien
tctgttactgatgcggtaggtacat

SEQ ID NO: 3685354 - DNA, 25 bp, Homo sapien
tggccacccatcatggtccaaaagc

SEQ ID NO: 3685355 - DNA, 25 bp, Homo sapien
agtgcttaacaagtcactggtcaaa

SEQ ID NO: 3685356 - DNA, 25 bp, Homo sapien
aggtgataacataagtgcttaacaa

SEQ ID NO: 3685357 - DNA, 25 bp, Homo sapien
aagtgcttaacaagtcactggtcaa

SEQ ID NO: 3685358 - DNA, 25 bp, Homo sapien
ctgttgagagaatgttttgtttttg

SEQ ID NO: 3685359 - DNA, 25 bp, Homo sapien
tgttgagagaatgttttgtttttgt

SEQ ID NO: 3685360 - DNA, 25 bp, Homo sapien
gttgagagaatgttttgtttttgtg

SEQ ID NO: 3685361 - DNA, 25 bp, Homo sapien
tgagagaatgttttgtttttgtgtg

SEQ ID NO: 3685362 - DNA, 25 bp, Homo sapien
cagcgtcgtgaatcatgccatttct

SEQ ID NO: 3685363 - DNA, 25 bp, Homo sapien
agagagctgccagcgtcgtgaatca

SEQ ID NO: 3685364 - DNA, 25 bp, Homo sapien
gctgccagcgtcgtgaatcatgcca

SEQ ID NO: 3685365 - DNA, 25 bp, Homo sapien
tgccagcgtcgtgaatcatgccatt

SEQ ID NO: 3685366 - DNA, 25 bp, Homo sapien
gaatcttctgtttccgtcccgctgt

SEQ ID NO: 3685367 - DNA, 25 bp, Homo sapien
tgttacttttgttgccacctcctga

SEQ ID NO: 3685368 - DNA, 25 bp, Homo sapien
acctcctgatcgctgtcctctcggg

SEQ ID NO: 3685369 - DNA, 25 bp, Homo sapien
tgaaactccgcttctggcctttgtt

SEQ ID NO: 3685370 - DNA, 25 bp, Homo sapien
cttggcaagtggtcaaaaggaggca

SEQ ID NO: 3685371 - DNA, 25 bp, Homo sapien
tatactgtggctttaggaactaggc

SEQ ID NO: 3685372 - DNA, 25 bp, Homo sapien
cagagctcctagtacatggtgatca

SEQ ID NO: 3685373 - DNA, 25 bp, Homo sapien
taggaccacatgagaaactgttcgg

SEQ ID NO: 3685374 - DNA, 25 bp, Homo sapien
aaaacatttatgcacaactgtagag

SEQ ID NO: 3685375 - DNA, 25 bp, Homo sapien
gagaaactgctgcacagatagctcc

SEQ ID NO: 3685376 - DNA, 25 bp, Homo sapien
catttaccaagctaacccaacaagt

SEQ ID NO: 3685377 - DNA, 25 bp, Homo sapien
cagatagctccaacttaaattagaa

SEQ ID NO: 3685378 - DNA, 25 bp, Homo sapien
aatgtttgcagtcgggactcccgcc

SEQ ID NO: 3685379 - DNA, 25 bp, Homo sapien
tactgcctggctttcctcaatgttt

SEQ ID NO: 3685380 - DNA, 25 bp, Homo sapien
ttccttctgctttgcgacactttac

SEQ ID NO: 3685381 - DNA, 25 bp, Homo sapien
ttctgctttgcgacactttacttac

SEQ ID NO: 3685382 - DNA, 25 bp, Homo sapien
ccgaggtggaactcgatgactgcca

SEQ ID NO: 3685383 - DNA, 25 bp, Homo sapien
tgtcgatgtggttcaccccgaggtg

SEQ ID NO: 3685384 - DNA, 25 bp, Homo sapien
cccgggcgctgtatttggacttgta

SEQ ID NO: 3685385 - DNA, 25 bp, Homo sapien
gagcgccgcctggaatttctcgcag

SEQ ID NO: 3685386 - DNA, 25 bp, Homo sapien
gagagagatgcagtcgtgcgagagc

SEQ ID NO: 3685387 - DNA, 25 bp, Homo sapien
cagagagagatgcagtcgtgcgaga

SEQ ID NO: 3685388 - DNA, 25 bp, Homo sapien
gagagatgcagtcgtgcgagagccg

SEQ ID NO: 3685389 - DNA, 25 bp, Homo sapien
agatgcagtcgtgcgagagccggta

SEQ ID NO: 3685390 - DNA, 25 bp, Homo sapien
aagcagcagcaagcgatattggtgt

SEQ ID NO: 3685391 - DNA, 25 bp, Homo sapien
gccgactgtgggagatctagttaca

SEQ ID NO: 3685392 - DNA, 25 bp, Homo sapien
cagacgctctttgggactcagtcca

SEQ ID NO: 3685393 - DNA, 25 bp, Homo sapien
ggcaataagtccataagactggctt

SEQ ID NO: 3685394 - DNA, 25 bp, Homo sapien
ttggactggtggagaggaaagcgca

SEQ ID NO: 3685395 - DNA, 25 bp, Homo sapien
gaggaaagcgcatgacgatgtagga

SEQ ID NO: 3685396 - DNA, 25 bp, Homo sapien
ggtctcggacaccaatgcatcgcca

SEQ ID NO: 3685397 - DNA, 25 bp, Homo sapien
ggattttcttaacagaatgaacagg

SEQ ID NO: 3685398 - DNA, 25 bp, Homo sapien
ggttggggccccgatggctgcccaa

SEQ ID NO: 3685399 - DNA, 25 bp, Homo sapien
tggtggttggggccccgatggctgc

SEQ ID NO: 3685400 - DNA, 25 bp, Homo sapien
ttggggccccgatggctgcccaaag

SEQ ID NO: 3685401 - DNA, 25 bp, Homo sapien
gtggttggggccccgatggctgccc

SEQ ID NO: 3685402 - DNA, 25 bp, Homo sapien
actccatgtcatccaccaaagtact

SEQ ID NO: 3685403 - DNA, 25 bp, Homo sapien
ccaaagtactgttagaaggtctcag

SEQ ID NO: 3685404 - DNA, 25 bp, Homo sapien
catccaccaaagtactgttagaagg

SEQ ID NO: 3685405 - DNA, 25 bp, Homo sapien
aagtactgttagaaggtctcagagg

SEQ ID NO: 3685406 - DNA, 25 bp, Homo sapien
tgacttaacggagaggcaaagcaag

SEQ ID NO: 3685407 - DNA, 25 bp, Homo sapien
ggagacatcgacatcctcattgata

SEQ ID NO: 3685408 - DNA, 25 bp, Homo sapien
tgtatacaccgatcaacaccagttc

SEQ ID NO: 3685409 - DNA, 25 bp, Homo sapien
catttcttagttcggagacatcgac

SEQ ID NO: 3685410 - DNA, 25 bp, Homo sapien
ttaacaaccttgaggttgcaggagc

SEQ ID NO: 3685411 - DNA, 25 bp, Homo sapien
taaaagctttgtttaggctgggctc

SEQ ID NO: 3685412 - DNA, 25 bp, Homo sapien
ggcaataactggcacatatactaat

SEQ ID NO: 3685413 - DNA, 25 bp, Homo sapien
catgagatgaccaggttaacaacct

SEQ ID NO: 3685414 - DNA, 25 bp, Homo sapien
gatgactctaggtaagcctgtgcag

SEQ ID NO: 3685415 - DNA, 25 bp, Homo sapien
tcagaccacaagatacccaggttat

SEQ ID NO: 3685416 - DNA, 25 bp, Homo sapien
tatactgattatatagtgcttctga

SEQ ID NO: 3685417 - DNA, 25 bp, Homo sapien
agcctgtgcagtttcaatttcttct

SEQ ID NO: 3685418 - DNA, 25 bp, Homo sapien
ctcttgttcagtaagtttctcttct

SEQ ID NO: 3685419 - DNA, 25 bp, Homo sapien
tctcttgttcagtaagtttctcttc

SEQ ID NO: 3685420 - DNA, 25 bp, Homo sapien
tatggcaatagtgagcagccttctc

SEQ ID NO: 3685421 - DNA, 25 bp, Homo sapien
caaggtagcagcattgatagcccac

SEQ ID NO: 3685422 - DNA, 25 bp, Homo sapien
tagcccactctataggatggtaggc

SEQ ID NO: 3685423 - DNA, 25 bp, Homo sapien
taggcattgtgctcaagctggcgtt

SEQ ID NO: 3685424 - DNA, 25 bp, Homo sapien
tatctttccattatggcaaattcag

SEQ ID NO: 3685425 - DNA, 25 bp, Homo sapien
tgcagcattaaatgtatctttccat

SEQ ID NO: 3685426 - DNA, 25 bp, Homo sapien
aggctttaaatggttggctataact

SEQ ID NO: 3685427 - DNA, 25 bp, Homo sapien
aaattgcagcattaaatgtatcttt

SEQ ID NO: 3685428 - DNA, 25 bp, Homo sapien
gatattcctgtgttctaaaatcttt

SEQ ID NO: 3685429 - DNA, 25 bp, Homo sapien
taggtttagagagcccctttacatc

SEQ ID NO: 3685430 - DNA, 25 bp, Homo sapien
taaactcaggtaagaagatattcct

SEQ ID NO: 3685431 - DNA, 25 bp, Homo sapien
ctttacatcctactatacaaaggca

SEQ ID NO: 3685432 - DNA, 25 bp, Homo sapien
ttagcagctgataaacagtgcctgg

SEQ ID NO: 3685433 - DNA, 25 bp, Homo sapien
cattagcagctgataaacagtgcct

SEQ ID NO: 3685434 - DNA, 25 bp, Homo sapien
accaaaaatgacattagcagctgat

SEQ ID NO: 3685435 - DNA, 25 bp, Homo sapien
tctttccagtttgaccaaaaatgac

SEQ ID NO: 3685436 - DNA, 25 bp, Homo sapien
taatggtcacaactgtaattttcat

SEQ ID NO: 3685437 - DNA, 25 bp, Homo sapien
tttaagttaatggtcacaactgtaa

SEQ ID NO: 3685438 - DNA, 25 bp, Homo sapien
gttaatggtcacaactgtaattttc

SEQ ID NO: 3685439 - DNA, 25 bp, Homo sapien
taagttaatggtcacaactgtaatt

SEQ ID NO: 3685440 - DNA, 25 bp, Homo sapien
gtcaaacagtatttgatccagcacc

SEQ ID NO: 3685441 - DNA, 25 bp, Homo sapien
ttgatgataaagctctggcacttct

SEQ ID NO: 3685442 - DNA, 25 bp, Homo sapien
ttgatccagcaccttgctatttccc

SEQ ID NO: 3685443 - DNA, 25 bp, Homo sapien
tctttgatgataaagctctggcact

SEQ ID NO: 3685444 - DNA, 25 bp, Homo sapien
agtggtccaatctcggctcacgcag

SEQ ID NO: 3685445 - DNA, 25 bp, Homo sapien
gtggtccaatctcggctcacgcagc

SEQ ID NO: 3685446 - DNA, 25 bp, Homo sapien
gcagtggtccaatctcggctcacgc

SEQ ID NO: 3685447 - DNA, 25 bp, Homo sapien
ggtccaatctcggctcacgcagcct

SEQ ID NO: 3685448 - DNA, 25 bp, Homo sapien
tcaccggttccaaactgcacagctt

SEQ ID NO: 3685449 - DNA, 25 bp, Homo sapien
gacatagtgctgacccaataagaaa

SEQ ID NO: 3685450 - DNA, 25 bp, Homo sapien
ggatcccttagcctgtcagcaatgg

SEQ ID NO: 3685451 - DNA, 25 bp, Homo sapien
atggcatcacacagttcaccggttc

SEQ ID NO: 3685452 - DNA, 25 bp, Homo sapien
agagacgggcaactcgaaacttagc

SEQ ID NO: 3685453 - DNA, 25 bp, Homo sapien
gaacatcttcccctatatgctcagg

SEQ ID NO: 3685454 - DNA, 25 bp, Homo sapien
cggcctcaggatgcttttcacagta

SEQ ID NO: 3685455 - DNA, 25 bp, Homo sapien
gaaacttagctaacatggcagggcg

SEQ ID NO: 3685456 - DNA, 25 bp, Homo sapien
tccatttttgttgggagaagactaa

SEQ ID NO: 3685457 - DNA, 25 bp, Homo sapien
catcttggttctgaatctctccatt

SEQ ID NO: 3685458 - DNA, 25 bp, Homo sapien
atctctccatttttgttgggagaag

SEQ ID NO: 3685459 - DNA, 25 bp, Homo sapien
ttaagtcagggccatcttggttctg

SEQ ID NO: 3685460 - DNA, 25 bp, Homo sapien
gcactcacctggctataaaggtaaa

SEQ ID NO: 3685461 - DNA, 25 bp, Homo sapien
caaatcacatgtctttaacaaggca

SEQ ID NO: 3685462 - DNA, 25 bp, Homo sapien
gaattgggcctgtctgactagggaa

SEQ ID NO: 3685463 - DNA, 25 bp, Homo sapien
taggatcctagcaaacactcagttg

SEQ ID NO: 3685464 - DNA, 25 bp, Homo sapien
tcaagtactagccaacaaatagtct

SEQ ID NO: 3685465 - DNA, 25 bp, Homo sapien
ggaatctatcaagtactagccaaca

SEQ ID NO: 3685466 - DNA, 25 bp, Homo sapien
gccaacaaatagtctacatttagaa

SEQ ID NO: 3685467 - DNA, 25 bp, Homo sapien
cttacaaggaatctatcaagtacta

SEQ ID NO: 3685468 - DNA, 25 bp, Homo sapien
tattttagaaggagtaactatagaa

SEQ ID NO: 3685469 - DNA, 25 bp, Homo sapien
caatcttaatatattaacaggcttg

SEQ ID NO: 3685470 - DNA, 25 bp, Homo sapien
ctcctataattaagacaaaccattt

SEQ ID NO: 3685471 - DNA, 25 bp, Homo sapien
ttgttaccaggtacattacccagca

SEQ ID NO: 3685472 - DNA, 25 bp, Homo sapien
agcacagggtactcctcgaaagcca

SEQ ID NO: 3685473 - DNA, 25 bp, Homo sapien
tgaaggtctccaacataatctgggc

SEQ ID NO: 3685474 - DNA, 25 bp, Homo sapien
cagcagcacagggtactcctcgaaa

SEQ ID NO: 3685475 - DNA, 25 bp, Homo sapien
ggtctccaacataatctgggccatc

SEQ ID NO: 3685476 - DNA, 25 bp, Homo sapien
gtatggccagaggagtacaggtaca

SEQ ID NO: 3685477 - DNA, 25 bp, Homo sapien
gtggtatggccagaggagtacaggt

SEQ ID NO: 3685478 - DNA, 25 bp, Homo sapien
cagaggagtacaggtacagcacgac

SEQ ID NO: 3685479 - DNA, 25 bp, Homo sapien
ccagaggagtacaggtacagcacga

SEQ ID NO: 3685480 - DNA, 25 bp, Homo sapien
cttcataaggcggtcggtcaggtcc

SEQ ID NO: 3685481 - DNA, 25 bp, Homo sapien
gggcgtgcccctcatatatgcacac

SEQ ID NO: 3685482 - DNA, 25 bp, Homo sapien
agggcgtgcccctcatatatgcaca

SEQ ID NO: 3685483 - DNA, 25 bp, Homo sapien
taaggcggtcggtcaggtcctggcc

SEQ ID NO: 3685484 - DNA, 25 bp, Homo sapien
ctccttgatgatgtcacacaggagc

SEQ ID NO: 3685485 - DNA, 25 bp, Homo sapien
ccttgatgatgtcacacaggagctc

SEQ ID NO: 3685486 - DNA, 25 bp, Homo sapien
atgatgtcacacaggagctctccct

SEQ ID NO: 3685487 - DNA, 25 bp, Homo sapien
gcttctccttgatgatgtcacacag

SEQ ID NO: 3685488 - DNA, 25 bp, Homo sapien
tctgcatcctgcagagcgatgccag

SEQ ID NO: 3685489 - DNA, 25 bp, Homo sapien
catcctgcagagcgatgccagggta

SEQ ID NO: 3685490 - DNA, 25 bp, Homo sapien
ctctgcatcctgcagagcgatgcca

SEQ ID NO: 3685491 - DNA, 25 bp, Homo sapien
gatggagccacgcatccacagagta

SEQ ID NO: 3685492 - DNA, 25 bp, Homo sapien
ggtcaggatggagccacgcatccac

SEQ ID NO: 3685493 - DNA, 25 bp, Homo sapien
aggatggagccacgcatccacagag

SEQ ID NO: 3685494 - DNA, 25 bp, Homo sapien
tcaggatggagccacgcatccacag

SEQ ID NO: 3685495 - DNA, 25 bp, Homo sapien
gggaccaggccctcagagacagcca

SEQ ID NO: 3685496 - DNA, 25 bp, Homo sapien
catacgtgtcagcaacagttgggcc

SEQ ID NO: 3685497 - DNA, 25 bp, Homo sapien
tgagcactctgtcccatctggcata

SEQ ID NO: 3685498 - DNA, 25 bp, Homo sapien
gattgtatcccaaggagagccagct

SEQ ID NO: 3685499 - DNA, 25 bp, Homo sapien
agtgatacaaatgccctagctgagg

SEQ ID NO: 3685500 - DNA, 25 bp, Homo sapien
cattgggtgtggccatggtgaaaat

SEQ ID NO: 3685501 - DNA, 25 bp, Homo sapien
ttgggtgtggccatggtgaaaatac

SEQ ID NO: 3685502 - DNA, 25 bp, Homo sapien
agcattgggtgtggccatggtgaaa

SEQ ID NO: 3685503 - DNA, 25 bp, Homo sapien
tagcattgggtgtggccatggtgaa

SEQ ID NO: 3685504 - DNA, 25 bp, Homo sapien
gactttaaggaatcggctcatgcga

SEQ ID NO: 3685505 - DNA, 25 bp, Homo sapien
cacctcaggcactgtagtagtcagg

SEQ ID NO: 3685506 - DNA, 25 bp, Homo sapien
taaatcctaaggtggtctagagacg

SEQ ID NO: 3685507 - DNA, 25 bp, Homo sapien
cacactgtgggaggtaatctgcttt

SEQ ID NO: 3685508 - DNA, 25 bp, Homo sapien
catccccaatgctttgcctgatgaa

SEQ ID NO: 3685509 - DNA, 25 bp, Homo sapien
gaggccatgagagtcgccggaactt

SEQ ID NO: 3685510 - DNA, 25 bp, Homo sapien
tggatcacccttccgggcaaacaca

SEQ ID NO: 3685511 - DNA, 25 bp, Homo sapien
tgatgaagccctggatcacccttcc

SEQ ID NO: 3685512 - DNA, 25 bp, Homo sapien
tgtgagccatggtaactggcttgat

SEQ ID NO: 3685513 - DNA, 25 bp, Homo sapien
tctcatcaacttgctgaaatttgcc

SEQ ID NO: 3685514 - DNA, 25 bp, Homo sapien
ttctcatcaacttgctgaaatttgc

SEQ ID NO: 3685515 - DNA, 25 bp, Homo sapien
tttctcatcaacttgctgaaatttg

SEQ ID NO: 3685516 - DNA, 25 bp, Homo sapien
cccacaggtggccaaagatcggtca

SEQ ID NO: 3685517 - DNA, 25 bp, Homo sapien
aaagatcggtcactccatctgccag

SEQ ID NO: 3685518 - DNA, 25 bp, Homo sapien
ggtggccaaagatcggtcactccat

SEQ ID NO: 3685519 - DNA, 25 bp, Homo sapien
ggccaaagatcggtcactccatctg

SEQ ID NO: 3685520 - DNA, 25 bp, Homo sapien
ctaaagccaagaggagtcagggaga

SEQ ID NO: 3685521 - DNA, 25 bp, Homo sapien
gggagaagagtctgtcctgggctgc

SEQ ID NO: 3685522 - DNA, 25 bp, Homo sapien
gtcagggagaagagtctgtcctggg

SEQ ID NO: 3685523 - DNA, 25 bp, Homo sapien
tctgtcctgggctgctcgactcgtg

SEQ ID NO: 3685524 - DNA, 25 bp, Homo sapien
ccttatctgtaggtggaggcagctg

SEQ ID NO: 3685525 - DNA, 25 bp, Homo sapien
cctccttatctgtaggtggaggcag

SEQ ID NO: 3685526 - DNA, 25 bp, Homo sapien
tgatcctccacttatttccagtagg

SEQ ID NO: 3685527 - DNA, 25 bp, Homo sapien
aggcagctgggagactgtgggtgat

SEQ ID NO: 3685528 - DNA, 25 bp, Homo sapien
tatctcttaatgacttaagaaaact

SEQ ID NO: 3685529 - DNA, 25 bp, Homo sapien
tccgtgtgtttgctccaaattagta

SEQ ID NO: 3685530 - DNA, 25 bp, Homo sapien
tgcctggctggggagtatctcttaa

SEQ ID NO: 3685531 - DNA, 25 bp, Homo sapien
aaactcttcactatttggtccgtgt

SEQ ID NO: 3685532 - DNA, 25 bp, Homo sapien
caaggtcaaaaggaaaacacgctct

SEQ ID NO: 3685533 - DNA, 25 bp, Homo sapien
cagaggcagcgaagtacaggaagta

SEQ ID NO: 3685534 - DNA, 25 bp, Homo sapien
ggtcgaatggaacagaatttgctgc

SEQ ID NO: 3685535 - DNA, 25 bp, Homo sapien
cactatcgtgtacgttgggtcgaat

SEQ ID NO: 3685536 - DNA, 25 bp, Homo sapien
gaattactgcgtgggttggcttccc

SEQ ID NO: 3685537 - DNA, 25 bp, Homo sapien
gattgcaagttcagcctgtgtccct

SEQ ID NO: 3685538 - DNA, 25 bp, Homo sapien
tgcgtgggttggcttccctctgaaa

SEQ ID NO: 3685539 - DNA, 25 bp, Homo sapien
tccacatttagcaacttttccactg

SEQ ID NO: 3685540 - DNA, 25 bp, Homo sapien
gctgcctaggccgaactgcagtggc

SEQ ID NO: 3685541 - DNA, 25 bp, Homo sapien
gctcagattgtgagaacctcaaggc

SEQ ID NO: 3685542 - DNA, 25 bp, Homo sapien
cacaagctcagattgtgagaacctc

SEQ ID NO: 3685543 - DNA, 25 bp, Homo sapien
agagctgttcttgatactcacaagc

SEQ ID NO: 3685544 - DNA, 25 bp, Homo sapien
ggaagagggcatagtttcaagggca

SEQ ID NO: 3685545 - DNA, 25 bp, Homo sapien
gaagagggcatagtttcaagggcat

SEQ ID NO: 3685546 - DNA, 25 bp, Homo sapien
aagcccctcacatcagccagaagtg

SEQ ID NO: 3685547 - DNA, 25 bp, Homo sapien
agttcctatcaatagcttcgatgag

SEQ ID NO: 3685548 - DNA, 25 bp, Homo sapien
taactcccaattgaaaaccctggca

SEQ ID NO: 3685549 - DNA, 25 bp, Homo sapien
ccctggcaccaaaacaatagttcct

SEQ ID NO: 3685550 - DNA, 25 bp, Homo sapien
ccagctgcacgccaacttcttgatt

SEQ ID NO: 3685551 - DNA, 25 bp, Homo sapien
tcttgattaggaaatgtagcagggt

SEQ ID NO: 3685552 - DNA, 25 bp, Homo sapien
gcacgccaacttcttgattaggaaa

SEQ ID NO: 3685553 - DNA, 25 bp, Homo sapien
gaccaacttagtctagctctcccag

SEQ ID NO: 3685554 - DNA, 25 bp, Homo sapien
ggacaagccgactgcatttgagtag

SEQ ID NO: 3685555 - DNA, 25 bp, Homo sapien
acaagccgactgcatttgagtagct

SEQ ID NO: 3685556 - DNA, 25 bp, Homo sapien
ccaggacaagccgactgcatttgag

SEQ ID NO: 3685557 - DNA, 25 bp, Homo sapien
gagccaggacaagccgactgcattt

SEQ ID NO: 3685558 - DNA, 25 bp, Homo sapien
cttgcatggaccacagggcttacag

SEQ ID NO: 3685559 - DNA, 25 bp, Homo sapien
atgacttgcatggaccacagggctt

SEQ ID NO: 3685560 - DNA, 25 bp, Homo sapien
gacttgcatggaccacagggcttac

SEQ ID NO: 3685561 - DNA, 25 bp, Homo sapien
ggggaacaagactcctgagtcttac

SEQ ID NO: 3685562 - DNA, 25 bp, Homo sapien
taagagtttacaagactgcacacgc

SEQ ID NO: 3685563 - DNA, 25 bp, Homo sapien
ccgtcacagcgcactaaaacttggg

SEQ ID NO: 3685564 - DNA, 25 bp, Homo sapien
tcctccatgcaacaggcacaggagt

SEQ ID NO: 3685565 - DNA, 25 bp, Homo sapien
cgctttgacgaaacaaatctaggac

SEQ ID NO: 3685566 - DNA, 25 bp, Homo sapien
taaagtatgggcctcattactctcg

SEQ ID NO: 3685567 - DNA, 25 bp, Homo sapien
gaagcctgttccctacaattgacaa

SEQ ID NO: 3685568 - DNA, 25 bp, Homo sapien
tctggccattcaagactgtactaaa

SEQ ID NO: 3685569 - DNA, 25 bp, Homo sapien
gaccacttggctattcgggaattat

SEQ ID NO: 3685570 - DNA, 25 bp, Homo sapien
gcaacccgagcaaaccactatagtg

SEQ ID NO: 3685571 - DNA, 25 bp, Homo sapien
gaaatcagacgaccagttcagccgt

SEQ ID NO: 3685572 - DNA, 25 bp, Homo sapien
tatacagtggacacatggcgggcct

SEQ ID NO: 3685573 - DNA, 25 bp, Homo sapien
tgcctggtgaccctctaagaagatg

SEQ ID NO: 3685574 - DNA, 25 bp, Homo sapien
gaaaagaagaccatttgatttattc

SEQ ID NO: 3685575 - DNA, 25 bp, Homo sapien
tattcaaaatggtagcattatctaa

SEQ ID NO: 3685576 - DNA, 25 bp, Homo sapien
ccactgtaccgagcctaatttccta

SEQ ID NO: 3685577 - DNA, 25 bp, Homo sapien
ttactgcaggcatgttagagaaact

SEQ ID NO: 3685578 - DNA, 25 bp, Homo sapien
gaaatcaaaagtagaagggatccca

SEQ ID NO: 3685579 - DNA, 25 bp, Homo sapien
gatcccactccaaaagcctatctaa

SEQ ID NO: 3685580 - DNA, 25 bp, Homo sapien
tgtgaacactatctcaacaaagcta

SEQ ID NO: 3685581 - DNA, 25 bp, Homo sapien
cacctggcctaatcactgaattgaa

SEQ ID NO: 3685582 - DNA, 25 bp, Homo sapien
gaccaactttgtccaatagaaacac

SEQ ID NO: 3685583 - DNA, 25 bp, Homo sapien
taattgctacttagacgtctcttcc

SEQ ID NO: 3685584 - DNA, 25 bp, Homo sapien
gaggcagcattagtttagcatctaa

SEQ ID NO: 3685585 - DNA, 25 bp, Homo sapien
tcttcacaccttgtactgtctagac

SEQ ID NO: 3685586 - DNA, 25 bp, Homo sapien
gacaggtgcccacaatcatatccag

SEQ ID NO: 3685587 - DNA, 25 bp, Homo sapien
tgcccggcctatataggaggttctt

SEQ ID NO: 3685588 - DNA, 25 bp, Homo sapien
gagaaatacttcaccgcccttcaaa

SEQ ID NO: 3685589 - DNA, 25 bp, Homo sapien
taataattacctagcaagaaggagc

SEQ ID NO: 3685590 - DNA, 25 bp, Homo sapien
agattttgtgcccattcatataaca

SEQ ID NO: 3685591 - DNA, 25 bp, Homo sapien
tgtagacagattttgtgcccattca

SEQ ID NO: 3685592 - DNA, 25 bp, Homo sapien
gacagattttgtgcccattcatata

SEQ ID NO: 3685593 - DNA, 25 bp, Homo sapien
ggaatacaggggcaccacaacgccc

SEQ ID NO: 3685594 - DNA, 25 bp, Homo sapien
attggtacctggctctccgcgtagg

SEQ ID NO: 3685595 - DNA, 25 bp, Homo sapien
gcagtttgcagaattactgtctgga

SEQ ID NO: 3685596 - DNA, 25 bp, Homo sapien
tgtctggattgcagcgcacccattg

SEQ ID NO: 3685597 - DNA, 25 bp, Homo sapien
ggattgcagcgcacccattggtacc

SEQ ID NO: 3685598 - DNA, 25 bp, Homo sapien
cagacgggggatcttgttggattca

SEQ ID NO: 3685599 - DNA, 25 bp, Homo sapien
gggatcttgttggattcacctggaa

SEQ ID NO: 3685600 - DNA, 25 bp, Homo sapien
aaaggtcagtcctcagacgggggat

SEQ ID NO: 3685601 - DNA, 25 bp, Homo sapien
ggattcacctggaagtagttcgaac

SEQ ID NO: 3685602 - DNA, 25 bp, Homo sapien
tagttggtaatcctgttccatttcc

SEQ ID NO: 3685603 - DNA, 25 bp, Homo sapien
cggagccgaagcctgatccagagta

SEQ ID NO: 3685604 - DNA, 25 bp, Homo sapien
gatacgattcaagtcctggattctc

SEQ ID NO: 3685605 - DNA, 25 bp, Homo sapien
catttccgttaggaagccactccca

SEQ ID NO: 3685606 - DNA, 25 bp, Homo sapien
catggaaagcatcactttcgtctac

SEQ ID NO: 3685607 - DNA, 25 bp, Homo sapien
gctgtctgagggcagattcctgtca

SEQ ID NO: 3685608 - DNA, 25 bp, Homo sapien
tcctgtcaagagacctaaggttgtc

SEQ ID NO: 3685609 - DNA, 25 bp, Homo sapien
taaggttgtcatggaaagcatcact

SEQ ID NO: 3685610 - DNA, 25 bp, Homo sapien
gcctggtgtcaaggtgggaaaatcc

SEQ ID NO: 3685611 - DNA, 25 bp, Homo sapien
ttgtagacaaacacatccactagct

SEQ ID NO: 3685612 - DNA, 25 bp, Homo sapien
cactccaccctgtaaaatatgtcaa

SEQ ID NO: 3685613 - DNA, 25 bp, Homo sapien
taattcacaatccaagtcagagtct

SEQ ID NO: 3685614 - DNA, 25 bp, Homo sapien
aaaatacacagatatccaggaaaaa

SEQ ID NO: 3685615 - DNA, 25 bp, Homo sapien
gaaaatacacagatatccaggaaaa

SEQ ID NO: 3685616 - DNA, 25 bp, Homo sapien
tgaaaatacacagatatccaggaaa

SEQ ID NO: 3685617 - DNA, 25 bp, Homo sapien
cagcatcggtccttaaagcatggga

SEQ ID NO: 3685618 - DNA, 25 bp, Homo sapien
tctgtagattcagaggttcaaagga

SEQ ID NO: 3685619 - DNA, 25 bp, Homo sapien
taaaacttgaatgtatcagcccaga

SEQ ID NO: 3685620 - DNA, 25 bp, Homo sapien
tttttccccagtaaggactctgagc

SEQ ID NO: 3685621 - DNA, 25 bp, Homo sapien
ctttagcgagtgcagctgtaatcat

SEQ ID NO: 3685622 - DNA, 25 bp, Homo sapien
aaaactttagcgagtgcagctgtaa

SEQ ID NO: 3685623 - DNA, 25 bp, Homo sapien
ttaaaaactttagcgagtgcagctg

SEQ ID NO: 3685624 - DNA, 25 bp, Homo sapien
tttgcttaaaaactttagcgagtgc

SEQ ID NO: 3685625 - DNA, 25 bp, Homo sapien
ttccttaggcctcgcaagaagagat

SEQ ID NO: 3685626 - DNA, 25 bp, Homo sapien
gcctcgcaagaagagatgtgctctc

SEQ ID NO: 3685627 - DNA, 25 bp, Homo sapien
agatgtgctctcttcgtccacggcg

SEQ ID NO: 3685628 - DNA, 25 bp, Homo sapien
acggcgaggcgttctgccaccttgc

SEQ ID NO: 3685629 - DNA, 25 bp, Homo sapien
tctcttcggtcaccggacgagcggt

SEQ ID NO: 3685630 - DNA, 25 bp, Homo sapien
gcgggcaaattacgtcgagtgggcg

SEQ ID NO: 3685631 - DNA, 25 bp, Homo sapien
acgagcggttccgtgtccggcctct

SEQ ID NO: 3685632 - DNA, 25 bp, Homo sapien
aacagaggcgggttcgcgggctcct

SEQ ID NO: 3685633 - DNA, 25 bp, Homo sapien
cgcgtcccccctactccactcctct

SEQ ID NO: 3685634 - DNA, 25 bp, Homo sapien
ctcctccggcgacgcccggcccgcg

SEQ ID NO: 3685635 - DNA, 25 bp, Homo sapien
gtgctcgggcctcgccgagaccggg

SEQ ID NO: 3685636 - DNA, 25 bp, Homo sapien
cccaacaagcagtcgaagaacgcgg

SEQ ID NO: 3685637 - DNA, 25 bp, Homo sapien
gagccccaacaagcagtcgaagaac

SEQ ID NO: 3685638 - DNA, 25 bp, Homo sapien
caagcagtcgaagaacgcgggcaga

SEQ ID NO: 3685639 - DNA, 25 bp, Homo sapien
tgcggacggaaatgagagccaatgc

SEQ ID NO: 3685640 - DNA, 25 bp, Homo sapien
tattaggagagcatacagtaggcgc

SEQ ID NO: 3685641 - DNA, 25 bp, Homo sapien
ttcagcgaaatagcttgcggacgga

SEQ ID NO: 3685642 - DNA, 25 bp, Homo sapien
caacccagagcgttaagttcagcga

SEQ ID NO: 3685643 - DNA, 25 bp, Homo sapien
ttaaagaagcctgccctaacactga

SEQ ID NO: 3685644 - DNA, 25 bp, Homo sapien
taggcacacctgagcaattatttgt

SEQ ID NO: 3685645 - DNA, 25 bp, Homo sapien
caggtaggcgctgtttccattttac

SEQ ID NO: 3685646 - DNA, 25 bp, Homo sapien
tccctacattgtaagctacgagagc

SEQ ID NO: 3685647 - DNA, 25 bp, Homo sapien
tgtgggaggagcaatcatgaaaggg

SEQ ID NO: 3685648 - DNA, 25 bp, Homo sapien
taatcgaatatgtgctgagctagca

SEQ ID NO: 3685649 - DNA, 25 bp, Homo sapien
aatcatgaaagggtagaagacaaca

SEQ ID NO: 3685650 - DNA, 25 bp, Homo sapien
tttactaatcgaatatgtgctgagc

SEQ ID NO: 3685651 - DNA, 25 bp, Homo sapien
gaaataaaatgaaaatggtcataat

SEQ ID NO: 3685652 - DNA, 25 bp, Homo sapien
aataaaatgaaaatggtcataatta

SEQ ID NO: 3685653 - DNA, 25 bp, Homo sapien
taaaatgaaaatggtcataattatc

SEQ ID NO: 3685654 - DNA, 25 bp, Homo sapien
aaatgaaaatggtcataattatcat

SEQ ID NO: 3685655 - DNA, 25 bp, Homo sapien
gaacaatatcgatctcacaaattgg

SEQ ID NO: 3685656 - DNA, 25 bp, Homo sapien
aagaacaatatcgatctcacaaatt

SEQ ID NO: 3685657 - DNA, 25 bp, Homo sapien
aatatcgatctcacaaattggacca

SEQ ID NO: 3685658 - DNA, 25 bp, Homo sapien
tatcgatctcacaaattggaccaaa

SEQ ID NO: 3685659 - DNA, 25 bp, Homo sapien
gattctccgtcatagaagagatagt

SEQ ID NO: 3685660 - DNA, 25 bp, Homo sapien
tgaaacggattctccgtcatagaag

SEQ ID NO: 3685661 - DNA, 25 bp, Homo sapien
aacggattctccgtcatagaagaga

SEQ ID NO: 3685662 - DNA, 25 bp, Homo sapien
agaagagatagtgtttttctacttt

SEQ ID NO: 3685663 - DNA, 25 bp, Homo sapien
gctccgatctgaagaaactgtctga

SEQ ID NO: 3685664 - DNA, 25 bp, Homo sapien
ttactctcaatctctaacttaatgt

SEQ ID NO: 3685665 - DNA, 25 bp, Homo sapien
cctttagaaagttataccagagaat

SEQ ID NO: 3685666 - DNA, 25 bp, Homo sapien
actttgggtgaattacagctccgat

SEQ ID NO: 3685667 - DNA, 25 bp, Homo sapien
gaccccagtaggtaatctggcaaag

SEQ ID NO: 3685668 - DNA, 25 bp, Homo sapien
ttcggattcaacactaagaccccag

SEQ ID NO: 3685669 - DNA, 25 bp, Homo sapien
tggcaaaggaccagaagagacaatg

SEQ ID NO: 3685670 - DNA, 25 bp, Homo sapien
catattcaatgctgccttgggtgaa

SEQ ID NO: 3685671 - DNA, 25 bp, Homo sapien
gaattctattgtttggctacaccac

SEQ ID NO: 3685672 - DNA, 25 bp, Homo sapien
gttctgccacattggactcccaaag

SEQ ID NO: 3685673 - DNA, 25 bp, Homo sapien
catataggttgtttctcaattgtct

SEQ ID NO: 3685674 - DNA, 25 bp, Homo sapien
tgaatcccctgtatggtcatatagg

SEQ ID NO: 3685675 - DNA, 25 bp, Homo sapien
aagagatgttaacaatcctatgagt

SEQ ID NO: 3685676 - DNA, 25 bp, Homo sapien
tcctatgagtgggcctactagtagc

SEQ ID NO: 3685677 - DNA, 25 bp, Homo sapien
ctatgagtgggcctactagtagctt

SEQ ID NO: 3685678 - DNA, 25 bp, Homo sapien
aatcctatgagtgggcctactagta

SEQ ID NO: 3685679 - DNA, 25 bp, Homo sapien
ctttccaggttgcttaaaggctagg

SEQ ID NO: 3685680 - DNA, 25 bp, Homo sapien
caatttgacctacaaattcaattct

SEQ ID NO: 3685681 - DNA, 25 bp, Homo sapien
tttgacctacaaattcaattctaat

SEQ ID NO: 3685682 - DNA, 25 bp, Homo sapien
cttggtgttctagcctctttccagg

SEQ ID NO: 3685683 - DNA, 25 bp, Homo sapien
gacattggcaccgatgtaagattca

SEQ ID NO: 3685684 - DNA, 25 bp, Homo sapien
ctcaagcggacattggcaccgatgt

SEQ ID NO: 3685685 - DNA, 25 bp, Homo sapien
ttggcaccgatgtaagattcatatg

SEQ ID NO: 3685686 - DNA, 25 bp, Homo sapien
gcggacattggcaccgatgtaagat

SEQ ID NO: 3685687 - DNA, 25 bp, Homo sapien
atctgtcagtcttctcactattgtc

SEQ ID NO: 3685688 - DNA, 25 bp, Homo sapien
aaatctgtcagtcttctcactattg

SEQ ID NO: 3685689 - DNA, 25 bp, Homo sapien
aatctgtcagtcttctcactattgt

SEQ ID NO: 3685690 - DNA, 25 bp, Homo sapien
atataaattatgtcaggccgggcac

SEQ ID NO: 3685691 - DNA, 25 bp, Homo sapien
tactcaagttctacaagagtgcagc

SEQ ID NO: 3685692 - DNA, 25 bp, Homo sapien
tgtgatagctaataaccaaaggtcg

SEQ ID NO: 3685693 - DNA, 25 bp, Homo sapien
ggtcgctcccacgtaccttgtaatg

SEQ ID NO: 3685694 - DNA, 25 bp, Homo sapien
tcttttttgatcagctgtaactcca

SEQ ID NO: 3685695 - DNA, 25 bp, Homo sapien
taaatttttccaacaatcacatcct

SEQ ID NO: 3685696 - DNA, 25 bp, Homo sapien
cagctgtaactccatatgttgtatt

SEQ ID NO: 3685697 - DNA, 25 bp, Homo sapien
gaagtaaatttttccaacaatcaca

SEQ ID NO: 3685698 - DNA, 25 bp, Homo sapien
ttacctatgagtagctagagtacag

SEQ ID NO: 3685699 - DNA, 25 bp, Homo sapien
tagtactcaatgtggatatcaaatt

SEQ ID NO: 3685700 - DNA, 25 bp, Homo sapien
acattaaataacttactgccagcaa

SEQ ID NO: 3685701 - DNA, 25 bp, Homo sapien
gccagcaatattaactagcaaaatt

SEQ ID NO: 3685702 - DNA, 25 bp, Homo sapien
ttatttcatatttggcgattgtttc

SEQ ID NO: 3685703 - DNA, 25 bp, Homo sapien
tcatatttggcgattgtttctgttt

SEQ ID NO: 3685704 - DNA, 25 bp, Homo sapien
cctacaggaattaatgctcagccat

SEQ ID NO: 3685705 - DNA, 25 bp, Homo sapien
ctggcttcattgtctcagatactga

SEQ ID NO: 3685706 - DNA, 25 bp, Homo sapien
ccacctagctcaaagagttttagag

SEQ ID NO: 3685707 - DNA, 25 bp, Homo sapien
tagagcacctaagattacattgcct

SEQ ID NO: 3685708 - DNA, 25 bp, Homo sapien
cattcattgtgaggtgaagttgccc

SEQ ID NO: 3685709 - DNA, 25 bp, Homo sapien
aaagaccagggttcatcctcagtag

SEQ ID NO: 3685710 - DNA, 25 bp, Homo sapien
gactaagcactatagagttgacact

SEQ ID NO: 3685711 - DNA, 25 bp, Homo sapien
gttgcccctagacgagaactactgt

SEQ ID NO: 3685712 - DNA, 25 bp, Homo sapien
aaatagccttattggaattgattca

SEQ ID NO: 3685713 - DNA, 25 bp, Homo sapien
gctgtttgaagtacctccggtcttc

SEQ ID NO: 3685714 - DNA, 25 bp, Homo sapien
tgggtcatatcctgctaaaaatagc

SEQ ID NO: 3685715 - DNA, 25 bp, Homo sapien
ctctcattgttggagttgggtcata

SEQ ID NO: 3685716 - DNA, 25 bp, Homo sapien
tttagaaactcccactcgctcagta

SEQ ID NO: 3685717 - DNA, 25 bp, Homo sapien
tcagtacagtgaagcttagaagagt

SEQ ID NO: 3685718 - DNA, 25 bp, Homo sapien
ttcgaggtatttttagatctgccgc

SEQ ID NO: 3685719 - DNA, 25 bp, Homo sapien
tttatctatcatacccacagtgttt

SEQ ID NO: 3685720 - DNA, 25 bp, Homo sapien
aaattaaagaatacagctgggcacg

SEQ ID NO: 3685721 - DNA, 25 bp, Homo sapien
aattaacctgtagcgagactctgtc

SEQ ID NO: 3685722 - DNA, 25 bp, Homo sapien
gaaagatattcaagacactactgag

SEQ ID NO: 3685723 - DNA, 25 bp, Homo sapien
tgtttaaaagggataaatcagcagg

SEQ ID NO: 3685724 - DNA, 25 bp, Homo sapien
tacaacattaggatggcaatactgg

SEQ ID NO: 3685725 - DNA, 25 bp, Homo sapien
tcccagatatctacaatgtgagaac

SEQ ID NO: 3685726 - DNA, 25 bp, Homo sapien
ccaatagtgccatgatatgcaattg

SEQ ID NO: 3685727 - DNA, 25 bp, Homo sapien
tatttttcacagtacttaggacagg

SEQ ID NO: 3685728 - DNA, 25 bp, Homo sapien
tctattgattgccacttcaatttta

SEQ ID NO: 3685729 - DNA, 25 bp, Homo sapien
tgtttgatatgatgccttatctcta

SEQ ID NO: 3685730 - DNA, 25 bp, Homo sapien
tgatatgatgccttatctctattga

SEQ ID NO: 3685731 - DNA, 25 bp, Homo sapien
tgatgccttatctctattgattgcc

SEQ ID NO: 3685732 - DNA, 25 bp, Homo sapien
atttcaggctgttcggcagatgcct

SEQ ID NO: 3685733 - DNA, 25 bp, Homo sapien
tggagattcaaatcgctggtgaaag

SEQ ID NO: 3685734 - DNA, 25 bp, Homo sapien
gcctgtgattctggagattcaaatc

SEQ ID NO: 3685735 - DNA, 25 bp, Homo sapien
gattctggagattcaaatcgctggt

SEQ ID NO: 3685736 - DNA, 25 bp, Homo sapien
cgctgtaagataaaggaagactaac

SEQ ID NO: 3685737 - DNA, 25 bp, Homo sapien
ttacaaataccagcctactcacatg

SEQ ID NO: 3685738 - DNA, 25 bp, Homo sapien
tctgagtgcttatcatcaaagtagg

SEQ ID NO: 3685739 - DNA, 25 bp, Homo sapien
taatcattagcctgaaaagagagga

SEQ ID NO: 3685740 - DNA, 25 bp, Homo sapien
tagtgtatttgcgatcagaccccat

SEQ ID NO: 3685741 - DNA, 25 bp, Homo sapien
tagataactacatgcttcacaggtc

SEQ ID NO: 3685742 - DNA, 25 bp, Homo sapien
gaagtgcctgcggtgaaacactcca

SEQ ID NO: 3685743 - DNA, 25 bp, Homo sapien
ggtggtacatggacccttttgccag

SEQ ID NO: 3685744 - DNA, 25 bp, Homo sapien
ttctttattatacatcatggttgca

SEQ ID NO: 3685745 - DNA, 25 bp, Homo sapien
aattctttattatacatcatggttg

SEQ ID NO: 3685746 - DNA, 25 bp, Homo sapien
ctttattatacatcatggttgcaca

SEQ ID NO: 3685747 - DNA, 25 bp, Homo sapien
tcaaattctttattatacatcatgg

SEQ ID NO: 3685748 - DNA, 25 bp, Homo sapien
ccagctagccagagtgcgttttaca

SEQ ID NO: 3685749 - DNA, 25 bp, Homo sapien
tttacaaacttctagccaggctgga

SEQ ID NO: 3685750 - DNA, 25 bp, Homo sapien
tcttgagcaaaacggataggcatcc

SEQ ID NO: 3685751 - DNA, 25 bp, Homo sapien
tattggtcagagtaggacccgggcc

SEQ ID NO: 3685752 - DNA, 25 bp, Homo sapien
gcacctggccacgtctcttgtttat

SEQ ID NO: 3685753 - DNA, 25 bp, Homo sapien
taggcacctggccacgtctcttgtt

SEQ ID NO: 3685754 - DNA, 25 bp, Homo sapien
aaagagttaggcacctggccacgtc

SEQ ID NO: 3685755 - DNA, 25 bp, Homo sapien
gcctctcaaaagagttaggcacctg

SEQ ID NO: 3685756 - DNA, 25 bp, Homo sapien
ggcggacagtgacgcgcacctccag

SEQ ID NO: 3685757 - DNA, 25 bp, Homo sapien
actgtctggcgcagccgcggacacg

SEQ ID NO: 3685758 - DNA, 25 bp, Homo sapien
cgaggccgcaggttctacactgtct

SEQ ID NO: 3685759 - DNA, 25 bp, Homo sapien
cgcctgctgtccagaaagacccagg

SEQ ID NO: 3685760 - DNA, 25 bp, Homo sapien
ggcacgaacaaggacgtgtttggta

SEQ ID NO: 3685761 - DNA, 25 bp, Homo sapien
tccagaggccgggttagctcggccc

SEQ ID NO: 3685762 - DNA, 25 bp, Homo sapien
ccacaatagggcacgggagaaggac

SEQ ID NO: 3685763 - DNA, 25 bp, Homo sapien
tattttggagccaccggaggcagag

SEQ ID NO: 3685764 - DNA, 25 bp, Homo sapien
tagtgctgacaaacccatgtcttta

SEQ ID NO: 3685765 - DNA, 25 bp, Homo sapien
gaagtatctaaggattctccaccag

SEQ ID NO: 3685766 - DNA, 25 bp, Homo sapien
ggcacacagacccaatgaagtatct

SEQ ID NO: 3685767 - DNA, 25 bp, Homo sapien
tctatcttcttacaggaagcagcaa

SEQ ID NO: 3685768 - DNA, 25 bp, Homo sapien
atcaagtccataatcagcacccagt

SEQ ID NO: 3685769 - DNA, 25 bp, Homo sapien
tcaagtccataatcagcacccagtt

SEQ ID NO: 3685770 - DNA, 25 bp, Homo sapien
catcaagtccataatcagcacccag

SEQ ID NO: 3685771 - DNA, 25 bp, Homo sapien
tctatgaagatgttttgggccttac

SEQ ID NO: 3685772 - DNA, 25 bp, Homo sapien
ctctatgaagatgttttgggcctta

SEQ ID NO: 3685773 - DNA, 25 bp, Homo sapien
cacatccagggaatgagactgcata

SEQ ID NO: 3685774 - DNA, 25 bp, Homo sapien
tgtccacatccagggaatgagactg

SEQ ID NO: 3685775 - DNA, 25 bp, Homo sapien
tgtgaatgtccacatccagggaatg

SEQ ID NO: 3685776 - DNA, 25 bp, Homo sapien
agcttatgaaagcttggtggaagag

SEQ ID NO: 3685777 - DNA, 25 bp, Homo sapien
tacagaggatgttaccagacccact

SEQ ID NO: 3685778 - DNA, 25 bp, Homo sapien
tcagggacccaatataaaagcaaac

SEQ ID NO: 3685779 - DNA, 25 bp, Homo sapien
cacaaggtacaggtctaagagtcaa

SEQ ID NO: 3685780 - DNA, 25 bp, Homo sapien
cattacagagatgaaggcgcaaaca

SEQ ID NO: 3685781 - DNA, 25 bp, Homo sapien
tttacgtagatcatccttacagtcc

SEQ ID NO: 3685782 - DNA, 25 bp, Homo sapien
taagtcactgattttacgtagatca

SEQ ID NO: 3685783 - DNA, 25 bp, Homo sapien
aaatgggaataaatcatccgcatga

SEQ ID NO: 3685784 - DNA, 25 bp, Homo sapien
aatgggaataaatcatccgcatgag

SEQ ID NO: 3685785 - DNA, 25 bp, Homo sapien
gattgcgtgataagtctttccactg

SEQ ID NO: 3685786 - DNA, 25 bp, Homo sapien
tgtgccagtaattttagagggccac

SEQ ID NO: 3685787 - DNA, 25 bp, Homo sapien
gcattactcttttcgaagatctcat

SEQ ID NO: 3685788 - DNA, 25 bp, Homo sapien
gggccacaatacactccagactttg

SEQ ID NO: 3685789 - DNA, 25 bp, Homo sapien
aaggagttgtaacactgcacatctc

SEQ ID NO: 3685790 - DNA, 25 bp, Homo sapien
tcccatttggctgaactgtcacacg

SEQ ID NO: 3685791 - DNA, 25 bp, Homo sapien
cactgcacatctcaactgtacaaga

SEQ ID NO: 3685792 - DNA, 25 bp, Homo sapien
gctcttcacctgtcaccaagtcaca

SEQ ID NO: 3685793 - DNA, 25 bp, Homo sapien
caaaccatagtttcttaaacagcat

SEQ ID NO: 3685794 - DNA, 25 bp, Homo sapien
aaaccatagtttcttaaacagcata

SEQ ID NO: 3685795 - DNA, 25 bp, Homo sapien
ccatagtttcttaaacagcatatac

SEQ ID NO: 3685796 - DNA, 25 bp, Homo sapien
agtttcttaaacagcatatacatac

SEQ ID NO: 3685797 - DNA, 25 bp, Homo sapien
gatcgcacgtttgtcatacttattc

SEQ ID NO: 3685798 - DNA, 25 bp, Homo sapien
catttgtcagtggtggcaggatcgc

SEQ ID NO: 3685799 - DNA, 25 bp, Homo sapien
caaaaaaatcgtatttcacatgttc

SEQ ID NO: 3685800 - DNA, 25 bp, Homo sapien
ggtgcaggcatttgtcagtggtggc

SEQ ID NO: 3685801 - DNA, 25 bp, Homo sapien
tattgattccggataggtgggactg

SEQ ID NO: 3685802 - DNA, 25 bp, Homo sapien
gagtaaacaagcaagtggtagaaca

SEQ ID NO: 3685803 - DNA, 25 bp, Homo sapien
tgcatacacaacatgaacacaaata

SEQ ID NO: 3685804 - DNA, 25 bp, Homo sapien
aacacaacaatctagaatactggta

SEQ ID NO: 3685805 - DNA, 25 bp, Homo sapien
tctggctggatctctaatcatttga

SEQ ID NO: 3685806 - DNA, 25 bp, Homo sapien
ggctggatctctaatcatttgaatt

SEQ ID NO: 3685807 - DNA, 25 bp, Homo sapien
ctggctggatctctaatcatttgaa

SEQ ID NO: 3685808 - DNA, 25 bp, Homo sapien
tggctggatctctaatcatttgaat

SEQ ID NO: 3685809 - DNA, 25 bp, Homo sapien
tcagcgcagatgtcataaagcacgg

SEQ ID NO: 3685810 - DNA, 25 bp, Homo sapien
ggttttatagcattacgaccaccaa

SEQ ID NO: 3685811 - DNA, 25 bp, Homo sapien
taaaaatgcatctcagcgcagatgt

SEQ ID NO: 3685812 - DNA, 25 bp, Homo sapien
ggtgactctatttggttggcaatgg

SEQ ID NO: 3685813 - DNA, 25 bp, Homo sapien
aacatagggagactctgtctttaca

SEQ ID NO: 3685814 - DNA, 25 bp, Homo sapien
ggcaacatagggagactctgtcttt

SEQ ID NO: 3685815 - DNA, 25 bp, Homo sapien
gtgggaagagtgcttgaacccagga

SEQ ID NO: 3685816 - DNA, 25 bp, Homo sapien
gttcaagaccagcctgggcaacata

SEQ ID NO: 3685817 - DNA, 25 bp, Homo sapien
cacccagccaagttcagctatttgt

SEQ ID NO: 3685818 - DNA, 25 bp, Homo sapien
gacctcggttcactgtggttcactg

SEQ ID NO: 3685819 - DNA, 25 bp, Homo sapien
catctgccctaaaacatgatcaaaa

SEQ ID NO: 3685820 - DNA, 25 bp, Homo sapien
ttgaaaacatctgccctaaaacatg

SEQ ID NO: 3685821 - DNA, 25 bp, Homo sapien
atcaccaggtcaatagcagcaggtt

SEQ ID NO: 3685822 - DNA, 25 bp, Homo sapien
tctccacacaaatgaacctcttcag

SEQ ID NO: 3685823 - DNA, 25 bp, Homo sapien
cataagctccatcaccaggtcaata

SEQ ID NO: 3685824 - DNA, 25 bp, Homo sapien
ttcctcccccgttgtgtacataagc

SEQ ID NO: 3685825 - DNA, 25 bp, Homo sapien
caactcaacttcttgtgactagtaa

SEQ ID NO: 3685826 - DNA, 25 bp, Homo sapien
tcattttcacggcaatgtgttaagt

SEQ ID NO: 3685827 - DNA, 25 bp, Homo sapien
gattgtaatgcagttaagagtagct

SEQ ID NO: 3685828 - DNA, 25 bp, Homo sapien
tggcaaaatgacacacccaactcaa

SEQ ID NO: 3685829 - DNA, 25 bp, Homo sapien
taaagattctagtgcatggtccagc

SEQ ID NO: 3685830 - DNA, 25 bp, Homo sapien
cccaggccgaaggttatctaaagat

SEQ ID NO: 3685831 - DNA, 25 bp, Homo sapien
taatccccgaatttcaatctgccga

SEQ ID NO: 3685832 - DNA, 25 bp, Homo sapien
gggagactgccatatataacagctg

SEQ ID NO: 3685833 - DNA, 25 bp, Homo sapien
ggacatggtcaagaccagatttcaa

SEQ ID NO: 3685834 - DNA, 25 bp, Homo sapien
aattaccaatacatcaagcagctta

SEQ ID NO: 3685835 - DNA, 25 bp, Homo sapien
caacataaattgcaaagataggaga

SEQ ID NO: 3685836 - DNA, 25 bp, Homo sapien
gatacagtctaataatagcagcaac

SEQ ID NO: 3685837 - DNA, 25 bp, Homo sapien
accaagattttgcatgggtcattgg

SEQ ID NO: 3685838 - DNA, 25 bp, Homo sapien
ttgcatgggtcattgggatcattaa

SEQ ID NO: 3685839 - DNA, 25 bp, Homo sapien
tgcatctgtagcaaccaagattttg

SEQ ID NO: 3685840 - DNA, 25 bp, Homo sapien
catctgtagcaaccaagattttgca

SEQ ID NO: 3685841 - DNA, 25 bp, Homo sapien
gagaggttgtgattggttctagttc

SEQ ID NO: 3685842 - DNA, 25 bp, Homo sapien
gattcattgttgtaacctctccttc

SEQ ID NO: 3685843 - DNA, 25 bp, Homo sapien
tttaaaccgtgagctgaatctgcca

SEQ ID NO: 3685844 - DNA, 25 bp, Homo sapien
ttcattgatactgggctttataagg

SEQ ID NO: 3685845 - DNA, 25 bp, Homo sapien
caccatatgaagtaaatgccaagaa

SEQ ID NO: 3685846 - DNA, 25 bp, Homo sapien
tcttaagttattgcacgataaagtc

SEQ ID NO: 3685847 - DNA, 25 bp, Homo sapien
attgcacgataaagtcccattcagg

SEQ ID NO: 3685848 - DNA, 25 bp, Homo sapien
ttcaggctaagctctcaccatatga

SEQ ID NO: 3685849 - DNA, 25 bp, Homo sapien
tgctcagcagttggatgaagaccag

SEQ ID NO: 3685850 - DNA, 25 bp, Homo sapien
ctgctcagcagttggatgaagacca

SEQ ID NO: 3685851 - DNA, 25 bp, Homo sapien
agattggacagtgttgcatcaggga

SEQ ID NO: 3685852 - DNA, 25 bp, Homo sapien
aatgagattggacagtgttgcatca

SEQ ID NO: 3685853 - DNA, 25 bp, Homo sapien
gcatcagggagatggtaggcaaaca

SEQ ID NO: 3685854 - DNA, 25 bp, Homo sapien
ggagatggtaggcaaacatttcaat

SEQ ID NO: 3685855 - DNA, 25 bp, Homo sapien
cattcatgctcatgaggttaaccag

SEQ ID NO: 3685856 - DNA, 25 bp, Homo sapien
tcctcagggctaaagtcccaaaaga

SEQ ID NO: 3685857 - DNA, 25 bp, Homo sapien
gtaatcacctgacatatcaacattt

SEQ ID NO: 3685858 - DNA, 25 bp, Homo sapien
aaggcagactatccattcatgctca

SEQ ID NO: 3685859 - DNA, 25 bp, Homo sapien
tactgcccatcaacttgtgaaaagt

SEQ ID NO: 3685860 - DNA, 25 bp, Homo sapien
tccatattgcagacaaaatactgcc

SEQ ID NO: 3685861 - DNA, 25 bp, Homo sapien
gaatatgctggatcaactctgcaga

SEQ ID NO: 3685862 - DNA, 25 bp, Homo sapien
gaaaacatacctcactcgcagactt

SEQ ID NO: 3685863 - DNA, 25 bp, Homo sapien
caagtaaagatccaagacatcgtgg

SEQ ID NO: 3685864 - DNA, 25 bp, Homo sapien
tcggcgtaaccatgcaaaggtcagg

SEQ ID NO: 3685865 - DNA, 25 bp, Homo sapien
gacagcttcaagatccatgaggtct

SEQ ID NO: 3685866 - DNA, 25 bp, Homo sapien
ggctcattcctgctatactgcctgg

SEQ ID NO: 3685867 - DNA, 25 bp, Homo sapien
ccctagagctttggtgccgcgtgtc

SEQ ID NO: 3685868 - DNA, 25 bp, Homo sapien
tcgtcccttttggatgagtcccaga

SEQ ID NO: 3685869 - DNA, 25 bp, Homo sapien
tctggagatctcgaataaggctggc

SEQ ID NO: 3685870 - DNA, 25 bp, Homo sapien
taaggttcctgacaatcgtgactgg

SEQ ID NO: 3685871 - DNA, 25 bp, Homo sapien
ccagatagccacaatactagaggag

SEQ ID NO: 3685872 - DNA, 25 bp, Homo sapien
caatactagaggagggagtaaatgc

SEQ ID NO: 3685873 - DNA, 25 bp, Homo sapien
ctagaggagggagtaaatgcatatg

SEQ ID NO: 3685874 - DNA, 25 bp, Homo sapien
cccagtaccagatagccacaatact

SEQ ID NO: 3685875 - DNA, 25 bp, Homo sapien
tggagtgttgcacgcttccagtcca

SEQ ID NO: 3685876 - DNA, 25 bp, Homo sapien
gggagcgaggtgttgcggactaaat

SEQ ID NO: 3685877 - DNA, 25 bp, Homo sapien
gagatgggcagagattcctgtgcag

SEQ ID NO: 3685878 - DNA, 25 bp, Homo sapien
gcagtgttcactcctacgactctgg

SEQ ID NO: 3685879 - DNA, 25 bp, Homo sapien
atgccatcaagtggaccgcaaacat

SEQ ID NO: 3685880 - DNA, 25 bp, Homo sapien
aatgccatcaagtggaccgcaaaca

SEQ ID NO: 3685881 - DNA, 25 bp, Homo sapien
aaatgccatcaagtggaccgcaaac

SEQ ID NO: 3685882 - DNA, 25 bp, Homo sapien
ttggacaaacatgtcccgcatgatc

SEQ ID NO: 3685883 - DNA, 25 bp, Homo sapien
accagggctgttggacaaacatgtc

SEQ ID NO: 3685884 - DNA, 25 bp, Homo sapien
gcagaggctgcatttcccatcacag

SEQ ID NO: 3685885 - DNA, 25 bp, Homo sapien
gcatttcccatcacagggtgctcct

SEQ ID NO: 3685886 - DNA, 25 bp, Homo sapien
cattgaaaaaggctgactgtccttc

SEQ ID NO: 3685887 - DNA, 25 bp, Homo sapien
tcagctcccggcattgaaaaaggct

SEQ ID NO: 3685888 - DNA, 25 bp, Homo sapien
cagctcccggcattgaaaaaggctg

SEQ ID NO: 3685889 - DNA, 25 bp, Homo sapien
ttgaaaaaggctgactgtccttcca

SEQ ID NO: 3685890 - DNA, 25 bp, Homo sapien
cggagagccgcatgtgatacaggaa

SEQ ID NO: 3685891 - DNA, 25 bp, Homo sapien
aaccatcgggaatggccctgacgaa

SEQ ID NO: 3685892 - DNA, 25 bp, Homo sapien
ccctgacgaaggtgggcaacatctt

SEQ ID NO: 3685893 - DNA, 25 bp, Homo sapien
ccaaaagggtgtcatcggagagccg

SEQ ID NO: 3685894 - DNA, 25 bp, Homo sapien
ttcacgagctcggtttgggcactgg

SEQ ID NO: 3685895 - DNA, 25 bp, Homo sapien
gcactgggaccctgacatgggagaa

SEQ ID NO: 3685896 - DNA, 25 bp, Homo sapien
gaggtccagaacacgactgatccca

SEQ ID NO: 3685897 - DNA, 25 bp, Homo sapien
tgacatgggagaaaccccttggtcc

SEQ ID NO: 3685898 - DNA, 25 bp, Homo sapien
agcactcggaacttggaccctccga

SEQ ID NO: 3685899 - DNA, 25 bp, Homo sapien
ttcagcactcggaacttggaccctc

SEQ ID NO: 3685900 - DNA, 25 bp, Homo sapien
cttcagcactcggaacttggaccct

SEQ ID NO: 3685901 - DNA, 25 bp, Homo sapien
ctcggaacttggaccctccgagatc

SEQ ID NO: 3685902 - DNA, 25 bp, Homo sapien
ctctgtgccgttcccgcggatgatt

SEQ ID NO: 3685903 - DNA, 25 bp, Homo sapien
gactctccatctgcacgtgtcgctt

SEQ ID NO: 3685904 - DNA, 25 bp, Homo sapien
ttcccgcggatgatttcattgggcg

SEQ ID NO: 3685905 - DNA, 25 bp, Homo sapien
tcattgggcgttgggtagaactgac

SEQ ID NO: 3685906 - DNA, 25 bp, Homo sapien
tagtctgtcgacaggggaaagaaaa

SEQ ID NO: 3685907 - DNA, 25 bp, Homo sapien
ctcttccagtttagtctgtcgacag

SEQ ID NO: 3685908 - DNA, 25 bp, Homo sapien
cttccagtttagtctgtcgacaggg

SEQ ID NO: 3685909 - DNA, 25 bp, Homo sapien
tttagtctgtcgacaggggaaagaa

SEQ ID NO: 3685910 - DNA, 25 bp, Homo sapien
tgtcctgaactcctcgtgccttaaa

SEQ ID NO: 3685911 - DNA, 25 bp, Homo sapien
gtcagacggctcaccacatccgtgt

SEQ ID NO: 3685912 - DNA, 25 bp, Homo sapien
cttctcatggctttggtcagacggc

SEQ ID NO: 3685913 - DNA, 25 bp, Homo sapien
ctgaactcctcgtgccttaaacttt

SEQ ID NO: 3685914 - DNA, 25 bp, Homo sapien
tgatgacaccaacttcgcagtaggg

SEQ ID NO: 3685915 - DNA, 25 bp, Homo sapien
cggtgtcattgaccagggccaggat

SEQ ID NO: 3685916 - DNA, 25 bp, Homo sapien
cgcagtaggggtcgtcataggcaca

SEQ ID NO: 3685917 - DNA, 25 bp, Homo sapien
taggggtcgtcataggcacaggtca

SEQ ID NO: 3685918 - DNA, 25 bp, Homo sapien
cacggacactgtttaggcgtggccc

SEQ ID NO: 3685919 - DNA, 25 bp, Homo sapien
tctgtggttaccagacgcagccaca

SEQ ID NO: 3685920 - DNA, 25 bp, Homo sapien
tgacaggcgggtgccatgactggca

SEQ ID NO: 3685921 - DNA, 25 bp, Homo sapien
cttttctcagaaatgcacggacact

SEQ ID NO: 3685922 - DNA, 25 bp, Homo sapien
ggtcaatgttgctcatgtcctccat

SEQ ID NO: 3685923 - DNA, 25 bp, Homo sapien
gctccctgtcgaactcagtgcgaat

SEQ ID NO: 3685924 - DNA, 25 bp, Homo sapien
atgtaacacgcattggtgccagttc

SEQ ID NO: 3685925 - DNA, 25 bp, Homo sapien
tctgtgttgatgcacatcctgccct

SEQ ID NO: 3685926 - DNA, 25 bp, Homo sapien
cgtgtttcgatcttgcccttagtgt

SEQ ID NO: 3685927 - DNA, 25 bp, Homo sapien
atggcagccacgtgccgtgtttcga

SEQ ID NO: 3685928 - DNA, 25 bp, Homo sapien
gagagcagaagatttctcaccacca

SEQ ID NO: 3685929 - DNA, 25 bp, Homo sapien
gccacgtgccgtgtttcgatcttgc

SEQ ID NO: 3685930 - DNA, 25 bp, Homo sapien
tcagacggttccagacccaggtcca

SEQ ID NO: 3685931 - DNA, 25 bp, Homo sapien
gatctctcttgtattagcaaggcct

SEQ ID NO: 3685932 - DNA, 25 bp, Homo sapien
caggatctctcttgtattagcaagg

SEQ ID NO: 3685933 - DNA, 25 bp, Homo sapien
ccaccaggatctctcttgtattagc

SEQ ID NO: 3685934 - DNA, 25 bp, Homo sapien
cagacatgctggacggcaatgcagt

SEQ ID NO: 3685935 - DNA, 25 bp, Homo sapien
tgttctcccggaggcgtgtcaggat

SEQ ID NO: 3685936 - DNA, 25 bp, Homo sapien
tgtatcttgtagagggtgccgtcca

SEQ ID NO: 3685937 - DNA, 25 bp, Homo sapien
ctgcacagagattggccgagcggaa

SEQ ID NO: 3685938 - DNA, 25 bp, Homo sapien
aaagccagcaccctgtcgatctgct

SEQ ID NO: 3685939 - DNA, 25 bp, Homo sapien
ctgtcgatctgcttccgctgggcct

SEQ ID NO: 3685940 - DNA, 25 bp, Homo sapien
acatcacagcttgggaccagtttcc

SEQ ID NO: 3685941 - DNA, 25 bp, Homo sapien
tgctctcgggtcagctggaacaaag

SEQ ID NO: 3685942 - DNA, 25 bp, Homo sapien
tgggcagcatcctgaccgtggccag

SEQ ID NO: 3685943 - DNA, 25 bp, Homo sapien
ggcagcccgcagacgtaggtgggca

SEQ ID NO: 3685944 - DNA, 25 bp, Homo sapien
taggtgggcagcatcctgaccgtgg

SEQ ID NO: 3685945 - DNA, 25 bp, Homo sapien
tgtgccgtccggcagcccgcagacg

SEQ ID NO: 3685946 - DNA, 25 bp, Homo sapien
cattagagacgtgaacccaagtttc

SEQ ID NO: 3685947 - DNA, 25 bp, Homo sapien
cactggctttaaggagttttgacgg

SEQ ID NO: 3685948 - DNA, 25 bp, Homo sapien
tgtttttactgcaaatgccttgggt

SEQ ID NO: 3685949 - DNA, 25 bp, Homo sapien
tgccttgggttaacaaaggccaaca

SEQ ID NO: 3685950 - DNA, 25 bp, Homo sapien
tcttgttgtacattcgcactgacct

SEQ ID NO: 3685951 - DNA, 25 bp, Homo sapien
gatggcgaagatcttgttgtacatt

SEQ ID NO: 3685952 - DNA, 25 bp, Homo sapien
cttcaccaggaggacccggaagttg

SEQ ID NO: 3685953 - DNA, 25 bp, Homo sapien
aagatccagggcgagaaactttcct

SEQ ID NO: 3685954 - DNA, 25 bp, Homo sapien
catctgcctgcagggaaatgagaat

SEQ ID NO: 3685955 - DNA, 25 bp, Homo sapien
gcctgcagggaaatgagaatgtgaa

SEQ ID NO: 3685956 - DNA, 25 bp, Homo sapien
ccttgaggcccatgtagtccaggaa

SEQ ID NO: 3685957 - DNA, 25 bp, Homo sapien
ccatgtagtccaggaagtcggcgat

SEQ ID NO: 3685958 - DNA, 25 bp, Homo sapien
tggttgacctgctgagctgaccaga

SEQ ID NO: 3685959 - DNA, 25 bp, Homo sapien
ggtgctacccttattattgtcctga

SEQ ID NO: 3685960 - DNA, 25 bp, Homo sapien
ctttatgccagtctcggaagcttgg

SEQ ID NO: 3685961 - DNA, 25 bp, Homo sapien
tctccacaagctggtgagtctgtct

SEQ ID NO: 3685962 - DNA, 25 bp, Homo sapien
tccatagttcttgggaaactggacc

SEQ ID NO: 3685963 - DNA, 25 bp, Homo sapien
cctgaggctgttagcccacaagccc

SEQ ID NO: 3685964 - DNA, 25 bp, Homo sapien
tgaggctgttagcccacaagcccca

SEQ ID NO: 3685965 - DNA, 25 bp, Homo sapien
tcttgggaaactggacccctggctg

SEQ ID NO: 3685966 - DNA, 25 bp, Homo sapien
ggaagcccaaagttacattgttagc

SEQ ID NO: 3685967 - DNA, 25 bp, Homo sapien
aagttacattgttagcctgaggcag

SEQ ID NO: 3685968 - DNA, 25 bp, Homo sapien
tagcctcgcactccatcatctagaa

SEQ ID NO: 3685969 - DNA, 25 bp, Homo sapien
tgaggcaggagttagtctagcctcg

SEQ ID NO: 3685970 - DNA, 25 bp, Homo sapien
ctttggtccaccctatgagtgttcc

SEQ ID NO: 3685971 - DNA, 25 bp, Homo sapien
ctgcaatcaggccaatctcacaatt

SEQ ID NO: 3685972 - DNA, 25 bp, Homo sapien
gccaatctcacaattaggatcttca

SEQ ID NO: 3685973 - DNA, 25 bp, Homo sapien
attcacgactgcaacaatgtccagg

SEQ ID NO: 3685974 - DNA, 25 bp, Homo sapien
catggtccccactgtatcattcacg

SEQ ID NO: 3685975 - DNA, 25 bp, Homo sapien
gtcctccatgtagcacatgttgctg

SEQ ID NO: 3685976 - DNA, 25 bp, Homo sapien
ccatgtagcacatgttgctgcctgt

SEQ ID NO: 3685977 - DNA, 25 bp, Homo sapien
tccatgtagcacatgttgctgcctg

SEQ ID NO: 3685978 - DNA, 25 bp, Homo sapien
tcctccatgtagcacatgttgctgc

SEQ ID NO: 3685979 - DNA, 25 bp, Homo sapien
tatcgggtccagatgtcatctatgc

SEQ ID NO: 3685980 - DNA, 25 bp, Homo sapien
ctccgtgtcgtatcgggtccagatg

SEQ ID NO: 3685981 - DNA, 25 bp, Homo sapien
gggtccagatgtcatctatgcagcc

SEQ ID NO: 3685982 - DNA, 25 bp, Homo sapien
tgtcgtatcgggtccagatgtcatc

SEQ ID NO: 3685983 - DNA, 25 bp, Homo sapien
tgcttgccaggattcaaggacccct

SEQ ID NO: 3685984 - DNA, 25 bp, Homo sapien
tctgcttgccaggattcaaggaccc

SEQ ID NO: 3685985 - DNA, 25 bp, Homo sapien
tgccaggattcaaggacccctcatc

SEQ ID NO: 3685986 - DNA, 25 bp, Homo sapien
gcttgccaggattcaaggacccctc

SEQ ID NO: 3685987 - DNA, 25 bp, Homo sapien
gctcttgaaggcctgaggatgttgg

SEQ ID NO: 3685988 - DNA, 25 bp, Homo sapien
tcttgaaggcctgaggatgttggcc

SEQ ID NO: 3685989 - DNA, 25 bp, Homo sapien
ctcttgaaggcctgaggatgttggc

SEQ ID NO: 3685990 - DNA, 25 bp, Homo sapien
cttgaaggcctgaggatgttggcct

SEQ ID NO: 3685991 - DNA, 25 bp, Homo sapien
gagaagaaggataaggttggggcag

SEQ ID NO: 3685992 - DNA, 25 bp, Homo sapien
tggagaagaaggataaggttggggc

SEQ ID NO: 3685993 - DNA, 25 bp, Homo sapien
gaagaaggataaggttggggcagac

SEQ ID NO: 3685994 - DNA, 25 bp, Homo sapien
agaagaaggataaggttggggcaga

SEQ ID NO: 3685995 - DNA, 25 bp, Homo sapien
tggtttcgaagatgcccctggtccg

SEQ ID NO: 3685996 - DNA, 25 bp, Homo sapien
gacgctctgaaatctgccctcggaa

SEQ ID NO: 3685997 - DNA, 25 bp, Homo sapien
tcgatcaggatctgccgcacaatct

SEQ ID NO: 3685998 - DNA, 25 bp, Homo sapien
ccctgcttggtcaggtcgatcagga

SEQ ID NO: 3685999 - DNA, 25 bp, Homo sapien
gcagcatatgccagtcagagcctca

SEQ ID NO: 3686000 - DNA, 25 bp, Homo sapien
tgttgaaagcgatcctgaatcagtt

SEQ ID NO: 3686001 - DNA, 25 bp, Homo sapien
gaggcaatcccttacccagccaggg

SEQ ID NO: 3686002 - DNA, 25 bp, Homo sapien
cccagtttggccatgagtttattat

SEQ ID NO: 3686003 - DNA, 25 bp, Homo sapien
tttattaagaatccttatatttcag

SEQ ID NO: 3686004 - DNA, 25 bp, Homo sapien
ttattaagaatccttatatttcaga

SEQ ID NO: 3686005 - DNA, 25 bp, Homo sapien
atggtactgtagttatgttttatta

SEQ ID NO: 3686006 - DNA, 25 bp, Homo sapien
aatggtactgtagttatgttttatt

SEQ ID NO: 3686007 - DNA, 25 bp, Homo sapien
tctagtgaaataatagatccaggca

SEQ ID NO: 3686008 - DNA, 25 bp, Homo sapien
taataactgcaggaatcatcaccat

SEQ ID NO: 3686009 - DNA, 25 bp, Homo sapien
tcctctttctagaagtattccagct

SEQ ID NO: 3686010 - DNA, 25 bp, Homo sapien
catcaccatttacgatgtctagtga

SEQ ID NO: 3686011 - DNA, 25 bp, Homo sapien
ctgcagaatcctcctgacctggaga

SEQ ID NO: 3686012 - DNA, 25 bp, Homo sapien
tcaggtgctctagcccctggtcttc

SEQ ID NO: 3686013 - DNA, 25 bp, Homo sapien
ttttccactatagcggccaggccag

SEQ ID NO: 3686014 - DNA, 25 bp, Homo sapien
gcagcttgtacagggtgccgtccac

SEQ ID NO: 3686015 - DNA, 25 bp, Homo sapien
cacagtgatcctcaggtgctctagc

SEQ ID NO: 3686016 - DNA, 25 bp, Homo sapien
catgaatgtcacatcacatcgaggg

SEQ ID NO: 3686017 - DNA, 25 bp, Homo sapien
catcgaggggctagttccttcacag

SEQ ID NO: 3686018 - DNA, 25 bp, Homo sapien
tgacagcatgaatgtcacatcacat

SEQ ID NO: 3686019 - DNA, 25 bp, Homo sapien
tcacagtttcctgcaatattctaga

SEQ ID NO: 3686020 - DNA, 25 bp, Homo sapien
tcctacagggtgctgacataactcg

SEQ ID NO: 3686021 - DNA, 25 bp, Homo sapien
tgatctgccagaggaaaagctgttc

SEQ ID NO: 3686022 - DNA, 25 bp, Homo sapien
gagggtgcccattggtctctgacca

SEQ ID NO: 3686023 - DNA, 25 bp, Homo sapien
gatactaagagtacccgagaacctg

SEQ ID NO: 3686024 - DNA, 25 bp, Homo sapien
tttactggatttcctatacctaaca

SEQ ID NO: 3686025 - DNA, 25 bp, Homo sapien
ttactggatttcctatacctaacaa

SEQ ID NO: 3686026 - DNA, 25 bp, Homo sapien
taatttactggatttcctataccta

SEQ ID NO: 3686027 - DNA, 25 bp, Homo sapien
tattaatttactggatttcctatac

SEQ ID NO: 3686028 - DNA, 25 bp, Homo sapien
ttgcccaagatgtttcaggggctgg

SEQ ID NO: 3686029 - DNA, 25 bp, Homo sapien
ctttgagaagttaaccctccattgc

SEQ ID NO: 3686030 - DNA, 25 bp, Homo sapien
gaagttaaccctccattgcccaaga

SEQ ID NO: 3686031 - DNA, 25 bp, Homo sapien
tgtccaaacacagcaagatagatgt

SEQ ID NO: 3686032 - DNA, 25 bp, Homo sapien
cagggcttggcattcattgaatcat

SEQ ID NO: 3686033 - DNA, 25 bp, Homo sapien
aacagggcttggcattcattgaatc

SEQ ID NO: 3686034 - DNA, 25 bp, Homo sapien
acagggcttggcattcattgaatca

SEQ ID NO: 3686035 - DNA, 25 bp, Homo sapien
gatttccaatttgatccatagtact

SEQ ID NO: 3686036 - DNA, 25 bp, Homo sapien
atttccaatttgatccatagtactt

SEQ ID NO: 3686037 - DNA, 25 bp, Homo sapien
ttccaatttgatccatagtactttc

SEQ ID NO: 3686038 - DNA, 25 bp, Homo sapien
tttccaatttgatccatagtacttt

SEQ ID NO: 3686039 - DNA, 25 bp, Homo sapien
gggcaccaggactaccacagtaact

SEQ ID NO: 3686040 - DNA, 25 bp, Homo sapien
ccagacgccgtccaacagttcggat

SEQ ID NO: 3686041 - DNA, 25 bp, Homo sapien
tatgtgctcccacagggttccagtc

SEQ ID NO: 3686042 - DNA, 25 bp, Homo sapien
gatccaagcttcaatcccgggacgt

SEQ ID NO: 3686043 - DNA, 25 bp, Homo sapien
gtgagccgagatctctccagcctgg

SEQ ID NO: 3686044 - DNA, 25 bp, Homo sapien
cagcctgggtgacagtgcgagactc

SEQ ID NO: 3686045 - DNA, 25 bp, Homo sapien
gagccgagatctctccagcctgggt

SEQ ID NO: 3686046 - DNA, 25 bp, Homo sapien
cctgggtgacagtgcgagactctgt

SEQ ID NO: 3686047 - DNA, 25 bp, Homo sapien
tgctctggggaacagttctttagtt

SEQ ID NO: 3686048 - DNA, 25 bp, Homo sapien
cttctcaggaacaatgctctgggga

SEQ ID NO: 3686049 - DNA, 25 bp, Homo sapien
ttgcaatccaactgtggattcttgg

SEQ ID NO: 3686050 - DNA, 25 bp, Homo sapien
tgtccttgcaatccaactgtggatt

SEQ ID NO: 3686051 - DNA, 25 bp, Homo sapien
gcttgttcttcatttgggctcactc

SEQ ID NO: 3686052 - DNA, 25 bp, Homo sapien
cttgttcttcatttgggctcactct

SEQ ID NO: 3686053 - DNA, 25 bp, Homo sapien
ttcatttgggctcactctcattttt

SEQ ID NO: 3686054 - DNA, 25 bp, Homo sapien
ttctccatatactctccaccccgaa

SEQ ID NO: 3686055 - DNA, 25 bp, Homo sapien
gtttatagctagtcattccattctc

SEQ ID NO: 3686056 - DNA, 25 bp, Homo sapien
atatactctccaccccgaagtaact

SEQ ID NO: 3686057 - DNA, 25 bp, Homo sapien
ttatagctagtcattccattctcca

SEQ ID NO: 3686058 - DNA, 25 bp, Homo sapien
tatgagttaccaaagtacttgcaga

SEQ ID NO: 3686059 - DNA, 25 bp, Homo sapien
aacactgctatgagttaccaaagta

SEQ ID NO: 3686060 - DNA, 25 bp, Homo sapien
cccaggcaacttcccgagtctagtt

SEQ ID NO: 3686061 - DNA, 25 bp, Homo sapien
tgctatgagttaccaaagtacttgc

SEQ ID NO: 3686062 - DNA, 25 bp, Homo sapien
cacttgctgacctcgggtcctttct

SEQ ID NO: 3686063 - DNA, 25 bp, Homo sapien
ggcacttgctgacctcgggtccttt

SEQ ID NO: 3686064 - DNA, 25 bp, Homo sapien
gagggcacttgctgacctcgggtcc

SEQ ID NO: 3686065 - DNA, 25 bp, Homo sapien
tgctgacctcgggtcctttcttctg

SEQ ID NO: 3686066 - DNA, 25 bp, Homo sapien
gattctcgctggcagatctgcccca

SEQ ID NO: 3686067 - DNA, 25 bp, Homo sapien
cgattctcgctggcagatctgcccc

SEQ ID NO: 3686068 - DNA, 25 bp, Homo sapien
attctcgctggcagatctgccccat

SEQ ID NO: 3686069 - DNA, 25 bp, Homo sapien
tcacttgacgccagggatttaagaa

SEQ ID NO: 3686070 - DNA, 25 bp, Homo sapien
acgccagggatttaagaacagcctg

SEQ ID NO: 3686071 - DNA, 25 bp, Homo sapien
tgacgccagggatttaagaacagcc

SEQ ID NO: 3686072 - DNA, 25 bp, Homo sapien
cttgacgccagggatttaagaacag

SEQ ID NO: 3686073 - DNA, 25 bp, Homo sapien
ccctgcaggtatctctgcagcactg

SEQ ID NO: 3686074 - DNA, 25 bp, Homo sapien
tctgcagcactggaggttgggggaa

SEQ ID NO: 3686075 - DNA, 25 bp, Homo sapien
ctgcagcactggaggttgggggaaa

SEQ ID NO: 3686076 - DNA, 25 bp, Homo sapien
atctctgcagcactggaggttgggg

SEQ ID NO: 3686077 - DNA, 25 bp, Homo sapien
aagctgctgccaatcaagagaaaag

SEQ ID NO: 3686078 - DNA, 25 bp, Homo sapien
gcttttacatagtctccactcacag

SEQ ID NO: 3686079 - DNA, 25 bp, Homo sapien
gacaatagcaatgccatgcaaacag

SEQ ID NO: 3686080 - DNA, 25 bp, Homo sapien
ttgaaatatgcttgtgcagggccgg

SEQ ID NO: 3686081 - DNA, 25 bp, Homo sapien
gtaatggaagcgcagcagcaccgga

SEQ ID NO: 3686082 - DNA, 25 bp, Homo sapien
taatggaagcgcagcagcaccggag

SEQ ID NO: 3686083 - DNA, 25 bp, Homo sapien
agtaatggaagcgcagcagcaccgg

SEQ ID NO: 3686084 - DNA, 25 bp, Homo sapien
tcagtaatggaagcgcagcagcacc

SEQ ID NO: 3686085 - DNA, 25 bp, Homo sapien
tcactttcagcaagtagatgaagtt

SEQ ID NO: 3686086 - DNA, 25 bp, Homo sapien
tgggactaggtaatggccccggaca

SEQ ID NO: 3686087 - DNA, 25 bp, Homo sapien
gattcataaagtgtacacctcacca

SEQ ID NO: 3686088 - DNA, 25 bp, Homo sapien
taaagctacgcaatcagtggaatga

SEQ ID NO: 3686089 - DNA, 25 bp, Homo sapien
ttcgcatgaagcaacccatctcaga

SEQ ID NO: 3686090 - DNA, 25 bp, Homo sapien
ctctctggtttcctggatgcccaag

SEQ ID NO: 3686091 - DNA, 25 bp, Homo sapien
cccctctctggtttcctggatgccc

SEQ ID NO: 3686092 - DNA, 25 bp, Homo sapien
atgcccaaggcttcctccagctcaa

SEQ ID NO: 3686093 - DNA, 25 bp, Homo sapien
ttcctccagctcaagctccttgcta

SEQ ID NO: 3686094 - DNA, 25 bp, Homo sapien
caccacagtggtgcacattaatgtc

SEQ ID NO: 3686095 - DNA, 25 bp, Homo sapien
acagtggtgcacattaatgtcctgg

SEQ ID NO: 3686096 - DNA, 25 bp, Homo sapien
accacagtggtgcacattaatgtcc

SEQ ID NO: 3686097 - DNA, 25 bp, Homo sapien
gtggtgcacattaatgtcctggctg

SEQ ID NO: 3686098 - DNA, 25 bp, Homo sapien
aatcatgcagggctctttttgccat

SEQ ID NO: 3686099 - DNA, 25 bp, Homo sapien
aaatcatgcagggctctttttgcca

SEQ ID NO: 3686100 - DNA, 25 bp, Homo sapien
aaaatcatgcagggctctttttgcc

SEQ ID NO: 3686101 - DNA, 25 bp, Homo sapien
ccctatagtcggatgcaggcatgtg

SEQ ID NO: 3686102 - DNA, 25 bp, Homo sapien
catgtgaccaagctctggccagaga

SEQ ID NO: 3686103 - DNA, 25 bp, Homo sapien
caatttttaggtgaactcaggcctc

SEQ ID NO: 3686104 - DNA, 25 bp, Homo sapien
gagcctcccttaagagacacagcta

SEQ ID NO: 3686105 - DNA, 25 bp, Homo sapien
gagactgagtcgtggcttagattcc

SEQ ID NO: 3686106 - DNA, 25 bp, Homo sapien
tcaggtccagtgaaggggtccaaga

SEQ ID NO: 3686107 - DNA, 25 bp, Homo sapien
tagattcctaaagcgtggcaagtgg

SEQ ID NO: 3686108 - DNA, 25 bp, Homo sapien
caagaacctgcaccgaggagactga

SEQ ID NO: 3686109 - DNA, 25 bp, Homo sapien
attgactgatattttattgtcttcc

SEQ ID NO: 3686110 - DNA, 25 bp, Homo sapien
ggctactggctgctcatatttggct

SEQ ID NO: 3686111 - DNA, 25 bp, Homo sapien
gggctactggctgctcatatttggc

SEQ ID NO: 3686112 - DNA, 25 bp, Homo sapien
tattttacagactgactctttatca

SEQ ID NO: 3686113 - DNA, 25 bp, Homo sapien
aggtgggccatcttgcccagtgtca

SEQ ID NO: 3686114 - DNA, 25 bp, Homo sapien
aacctgggatgccacaggtgggcca

SEQ ID NO: 3686115 - DNA, 25 bp, Homo sapien
tcttgcccagtgtcaggttgtggta

SEQ ID NO: 3686116 - DNA, 25 bp, Homo sapien
ccagactcctctttacagggcagga

SEQ ID NO: 3686117 - DNA, 25 bp, Homo sapien
agcacctcgacagggcaaactcagg

SEQ ID NO: 3686118 - DNA, 25 bp, Homo sapien
aaactcaggctgtgctcacagtcca

SEQ ID NO: 3686119 - DNA, 25 bp, Homo sapien
gcctcagcacctcgacagggcaaac

SEQ ID NO: 3686120 - DNA, 25 bp, Homo sapien
aactcaggctgtgctcacagtccat

SEQ ID NO: 3686121 - DNA, 25 bp, Homo sapien
tattgctgaacccaaagcgacaccc

SEQ ID NO: 3686122 - DNA, 25 bp, Homo sapien
ggtcttcagcggcagtgcatcacct

SEQ ID NO: 3686123 - DNA, 25 bp, Homo sapien
ttgggccacaggtcgtggcctgtcc

SEQ ID NO: 3686124 - DNA, 25 bp, Homo sapien
gcgcactccctctgggcgggacttg

SEQ ID NO: 3686125 - DNA, 25 bp, Homo sapien
aaggcggtcccattcctcggaaatg

SEQ ID NO: 3686126 - DNA, 25 bp, Homo sapien
gagaagcccctagggctagtctagg

SEQ ID NO: 3686127 - DNA, 25 bp, Homo sapien
tcgcccctaggagtccggtggacgc

SEQ ID NO: 3686128 - DNA, 25 bp, Homo sapien
cctagggctagtctagggactggca

SEQ ID NO: 3686129 - DNA, 25 bp, Homo sapien
cattggttgcggcgcgcctctgcaa

SEQ ID NO: 3686130 - DNA, 25 bp, Homo sapien
acgcccattggttgcggcgcgcctc

SEQ ID NO: 3686131 - DNA, 25 bp, Homo sapien
ctccacgcccattggttgcggcgcg

SEQ ID NO: 3686132 - DNA, 25 bp, Homo sapien
ttggttgcggcgcgcctctgcaacg

SEQ ID NO: 3686133 - DNA, 25 bp, Homo sapien
ctggcgagccgtggtcctccggcgg

SEQ ID NO: 3686134 - DNA, 25 bp, Homo sapien
gcaggcgtggggacggtcggtcctc

SEQ ID NO: 3686135 - DNA, 25 bp, Homo sapien
cgtggggacggtcggtcctccgcag

SEQ ID NO: 3686136 - DNA, 25 bp, Homo sapien
tcctccgcagccctggcgagccgtg

SEQ ID NO: 3686137 - DNA, 25 bp, Homo sapien
tccgtgaagtaataggccaggagct

SEQ ID NO: 3686138 - DNA, 25 bp, Homo sapien
cgtgaagtaataggccaggagctgc

SEQ ID NO: 3686139 - DNA, 25 bp, Homo sapien
tcatccttcagctccgtgaagtaat

SEQ ID NO: 3686140 - DNA, 25 bp, Homo sapien
tcagctccgtgaagtaataggccag

SEQ ID NO: 3686141 - DNA, 25 bp, Homo sapien
ttgcgccctgcagtccaactcgatg

SEQ ID NO: 3686142 - DNA, 25 bp, Homo sapien
agacactgacaatgccggtagaatc

SEQ ID NO: 3686143 - DNA, 25 bp, Homo sapien
caatgccggtagaatcgaaggcgaa

SEQ ID NO: 3686144 - DNA, 25 bp, Homo sapien
cgaaggcgaaggctttccttgcgcc

SEQ ID NO: 3686145 - DNA, 25 bp, Homo sapien
gaacctagggctgtgcagttaagcc

SEQ ID NO: 3686146 - DNA, 25 bp, Homo sapien
tagaaatcgaaagacctcaggcctc

SEQ ID NO: 3686147 - DNA, 25 bp, Homo sapien
tagctgttatgaaccccacatgagg

SEQ ID NO: 3686148 - DNA, 25 bp, Homo sapien
gcttcctgactggtaaaagtggcca

SEQ ID NO: 3686149 - DNA, 25 bp, Homo sapien
agagaacacacagcctcgccaagct

SEQ ID NO: 3686150 - DNA, 25 bp, Homo sapien
ggcgggcgctcttgctcaaacactt

SEQ ID NO: 3686151 - DNA, 25 bp, Homo sapien
tgagggtagccagaccggctgcaca

SEQ ID NO: 3686152 - DNA, 25 bp, Homo sapien
tgaagagcccttcctatgagggtag

SEQ ID NO: 3686153 - DNA, 25 bp, Homo sapien
tccactgcaagcctcggtctgtgga

SEQ ID NO: 3686154 - DNA, 25 bp, Homo sapien
agttggggaggacaccgcacagcac

SEQ ID NO: 3686155 - DNA, 25 bp, Homo sapien
ccaaacatcagtgcccgaagaatcc

SEQ ID NO: 3686156 - DNA, 25 bp, Homo sapien
tgtccccttctcttaggtgctgcct

SEQ ID NO: 3686157 - DNA, 25 bp, Homo sapien
gagtttcatcggagagccgcatggc

SEQ ID NO: 3686158 - DNA, 25 bp, Homo sapien
gccgcatggcatagagatacttgtc

SEQ ID NO: 3686159 - DNA, 25 bp, Homo sapien
cttgactgtggctgttggattaaaa

SEQ ID NO: 3686160 - DNA, 25 bp, Homo sapien
ccttcctgaagcgagtcatgatatc

SEQ ID NO: 3686161 - DNA, 25 bp, Homo sapien
ggaatggaccttacgaatgttggca

SEQ ID NO: 3686162 - DNA, 25 bp, Homo sapien
tggaccttacgaatgttggcaacat

SEQ ID NO: 3686163 - DNA, 25 bp, Homo sapien
gccatcaggaatggaccttacgaat

SEQ ID NO: 3686164 - DNA, 25 bp, Homo sapien
tcaggaatggaccttacgaatgttg

SEQ ID NO: 3686165 - DNA, 25 bp, Homo sapien
tcagtctccgctcagccaggtgcag

SEQ ID NO: 3686166 - DNA, 25 bp, Homo sapien
ccaggtgcaggggctgataccactc

SEQ ID NO: 3686167 - DNA, 25 bp, Homo sapien
agccaggtgcaggggctgataccac

SEQ ID NO: 3686168 - DNA, 25 bp, Homo sapien
aggtgcaggggctgataccactcct

SEQ ID NO: 3686169 - DNA, 25 bp, Homo sapien
acagaagcccggcacaacacgaagg

SEQ ID NO: 3686170 - DNA, 25 bp, Homo sapien
tatccaagtccttagcatcaacagc

SEQ ID NO: 3686171 - DNA, 25 bp, Homo sapien
tactattaagagacccagattctga

SEQ ID NO: 3686172 - DNA, 25 bp, Homo sapien
tctgattactgcagggatctcctga

SEQ ID NO: 3686173 - DNA, 25 bp, Homo sapien
actagtaagagacagatgaatccct

SEQ ID NO: 3686174 - DNA, 25 bp, Homo sapien
gagatggcctatgaatgaagccaac

SEQ ID NO: 3686175 - DNA, 25 bp, Homo sapien
cacagcgagacttcccagttatagg

SEQ ID NO: 3686176 - DNA, 25 bp, Homo sapien
gatacagaagtcaactcacagcgag

SEQ ID NO: 3686177 - DNA, 25 bp, Homo sapien
tgaagacagtgaaagctcagtctga

SEQ ID NO: 3686178 - DNA, 25 bp, Homo sapien
gagatgaaatgatcggtacttttta

SEQ ID NO: 3686179 - DNA, 25 bp, Homo sapien
aaccacttgtgcatagggggaaaag

SEQ ID NO: 3686180 - DNA, 25 bp, Homo sapien
tctgataaacaactataaaccactt

SEQ ID NO: 3686181 - DNA, 25 bp, Homo sapien
tttgtgtagtgacagggttttacca

SEQ ID NO: 3686182 - DNA, 25 bp, Homo sapien
gagtgcagtgcagttgcatgatcac

SEQ ID NO: 3686183 - DNA, 25 bp, Homo sapien
tattttgtgtagtgacagggtttta

SEQ ID NO: 3686184 - DNA, 25 bp, Homo sapien
cctcaacctccagagcccaagcgat

SEQ ID NO: 3686185 - DNA, 25 bp, Homo sapien
ccaggctggaatgctacccaggctg

SEQ ID NO: 3686186 - DNA, 25 bp, Homo sapien
tgttccattagtctgcatgtctacc

SEQ ID NO: 3686187 - DNA, 25 bp, Homo sapien
ggtatgaggtgtaggtcaaacttca

SEQ ID NO: 3686188 - DNA, 25 bp, Homo sapien
gaatagtcctagcattcttgtcaaa

SEQ ID NO: 3686189 - DNA, 25 bp, Homo sapien
tatatacctaggacaagaatcgctg

SEQ ID NO: 3686190 - DNA, 25 bp, Homo sapien
gaatcgctgtcaaatagtaacccat

SEQ ID NO: 3686191 - DNA, 25 bp, Homo sapien
gtgcttattggccacttggagaaat

SEQ ID NO: 3686192 - DNA, 25 bp, Homo sapien
actactatgaatatttgtgcccaag

SEQ ID NO: 3686193 - DNA, 25 bp, Homo sapien
tgagaccatcggacagcaaaggcag

SEQ ID NO: 3686194 - DNA, 25 bp, Homo sapien
gctgagaccatcggacagcaaaggc

SEQ ID NO: 3686195 - DNA, 25 bp, Homo sapien
ctgagaccatcggacagcaaaggca

SEQ ID NO: 3686196 - DNA, 25 bp, Homo sapien
ctccctcgggagtgacatgtgcagc

SEQ ID NO: 3686197 - DNA, 25 bp, Homo sapien
cgcttcctggcagggcgtaggccct

SEQ ID NO: 3686198 - DNA, 25 bp, Homo sapien
agggcgtaggccctgtctgcctccc

SEQ ID NO: 3686199 - DNA, 25 bp, Homo sapien
gcccgcttcctggcagggcgtaggc

SEQ ID NO: 3686200 - DNA, 25 bp, Homo sapien
tcctggcagggcgtaggccctgtct

SEQ ID NO: 3686201 - DNA, 25 bp, Homo sapien
ccgcagaattcgaaaggaagaccca

SEQ ID NO: 3686202 - DNA, 25 bp, Homo sapien
aaggaagacccaccaagatccaggg

SEQ ID NO: 3686203 - DNA, 25 bp, Homo sapien
ttcgaaaggaagacccaccaagatc

SEQ ID NO: 3686204 - DNA, 25 bp, Homo sapien
agacccaccaagatccagggcaatg

SEQ ID NO: 3686205 - DNA, 25 bp, Homo sapien
acctcggactccatgtgaacattct

SEQ ID NO: 3686206 - DNA, 25 bp, Homo sapien
actgccgtgcacgatgttctctggg

SEQ ID NO: 3686207 - DNA, 25 bp, Homo sapien
ctggcttccactgccgtgcacgatg

SEQ ID NO: 3686208 - DNA, 25 bp, Homo sapien
ttctctggggtgtcataaacctcgg

SEQ ID NO: 3686209 - DNA, 25 bp, Homo sapien
tctattttggattgttggcaaggaa

SEQ ID NO: 3686210 - DNA, 25 bp, Homo sapien
ctattttggattgttggcaaggaaa

SEQ ID NO: 3686211 - DNA, 25 bp, Homo sapien
tattttggattgttggcaaggaaaa

SEQ ID NO: 3686212 - DNA, 25 bp, Homo sapien
aacgtgaatcccacaggtaacttct

SEQ ID NO: 3686213 - DNA, 25 bp, Homo sapien
gagcccgataatcccagaacatcct

SEQ ID NO: 3686214 - DNA, 25 bp, Homo sapien
gcatctgcagagcccgataatccca

SEQ ID NO: 3686215 - DNA, 25 bp, Homo sapien
gcagagcccgataatcccagaacat

SEQ ID NO: 3686216 - DNA, 25 bp, Homo sapien
catctgcagagcccgataatcccag

SEQ ID NO: 3686217 - DNA, 25 bp, Homo sapien
tttgatggctttgttaagcagtttg

SEQ ID NO: 3686218 - DNA, 25 bp, Homo sapien
cgctttaaatcgctttgtccaggtg

SEQ ID NO: 3686219 - DNA, 25 bp, Homo sapien
tgctccttccactccgctcgcttta

SEQ ID NO: 3686220 - DNA, 25 bp, Homo sapien
cactccgctcgctttaaatcgcttt

SEQ ID NO: 3686221 - DNA, 25 bp, Homo sapien
ggagctacattcctctgcaaacctc

SEQ ID NO: 3686222 - DNA, 25 bp, Homo sapien
tgcaaacctccacaggaggtccacg

SEQ ID NO: 3686223 - DNA, 25 bp, Homo sapien
tggggattttactcatggagctaca

SEQ ID NO: 3686224 - DNA, 25 bp, Homo sapien
gtccccgataaggcgggctcctctg

SEQ ID NO: 3686225 - DNA, 25 bp, Homo sapien
atcaggccgacttcacagtgctggt

SEQ ID NO: 3686226 - DNA, 25 bp, Homo sapien
cacagtgctggtcgtcatagccaca

SEQ ID NO: 3686227 - DNA, 25 bp, Homo sapien
gacttcacagtgctggtcgtcatag

SEQ ID NO: 3686228 - DNA, 25 bp, Homo sapien
gtgctggtcgtcatagccacaggtc

SEQ ID NO: 3686229 - DNA, 25 bp, Homo sapien
ctggaaagatgggccgaacaaatgg

SEQ ID NO: 3686230 - DNA, 25 bp, Homo sapien
aaagatgggccgaacaaatggatgg

SEQ ID NO: 3686231 - DNA, 25 bp, Homo sapien
atgggccgaacaaatggatgggcaa

SEQ ID NO: 3686232 - DNA, 25 bp, Homo sapien
tgggccgaacaaatggatgggcaaa

SEQ ID NO: 3686233 - DNA, 25 bp, Homo sapien
aactctgtccggatgtcttctaatg

SEQ ID NO: 3686234 - DNA, 25 bp, Homo sapien
ggtctatctccctgtcaaactctgt

SEQ ID NO: 3686235 - DNA, 25 bp, Homo sapien
cagggttgagggatccccggtctat

SEQ ID NO: 3686236 - DNA, 25 bp, Homo sapien
tctaatgatccatcgtctccaaagg

SEQ ID NO: 3686237 - DNA, 25 bp, Homo sapien
caactctgggtgtaagaacttggga

SEQ ID NO: 3686238 - DNA, 25 bp, Homo sapien
ggagctcgccattgatgaaaatcca

SEQ ID NO: 3686239 - DNA, 25 bp, Homo sapien
cagtaataagttcatgtcatgccag

SEQ ID NO: 3686240 - DNA, 25 bp, Homo sapien
tgcaatggtgatgctcaactctggg

SEQ ID NO: 3686241 - DNA, 25 bp, Homo sapien
aatcattagtgagaggatgcctgga

SEQ ID NO: 3686242 - DNA, 25 bp, Homo sapien
tacaatacagaggactgggcaaccc

SEQ ID NO: 3686243 - DNA, 25 bp, Homo sapien
gaaaagattctggaagctcactctg

SEQ ID NO: 3686244 - DNA, 25 bp, Homo sapien
taaaaattggaatcgcccagggagc

SEQ ID NO: 3686245 - DNA, 25 bp, Homo sapien
tgaacaggtaatgcccaggtgtctc

SEQ ID NO: 3686246 - DNA, 25 bp, Homo sapien
gcccaggtgtctcggcagtcagaca

SEQ ID NO: 3686247 - DNA, 25 bp, Homo sapien
ctgtgataactgaacgggtaacgcc

SEQ ID NO: 3686248 - DNA, 25 bp, Homo sapien
tttccttgtgataactgaacaggta

SEQ ID NO: 3686249 - DNA, 25 bp, Homo sapien
aggcccacggccagggtctgtcctt

SEQ ID NO: 3686250 - DNA, 25 bp, Homo sapien
agaggcccacggccagggtctgtcc

SEQ ID NO: 3686251 - DNA, 25 bp, Homo sapien
gaggcccacggccagggtctgtcct

SEQ ID NO: 3686252 - DNA, 25 bp, Homo sapien
ccggtcaagcaccgaccaatgacag

SEQ ID NO: 3686253 - DNA, 25 bp, Homo sapien
cagccccggtcaagcaccgaccaat

SEQ ID NO: 3686254 - DNA, 25 bp, Homo sapien
cgaccaatgacagaatgagcccaat

SEQ ID NO: 3686255 - DNA, 25 bp, Homo sapien
ccgaccaatgacagaatgagcccaa

SEQ ID NO: 3686256 - DNA, 25 bp, Homo sapien
tggagagggcaggagtcatccagac

SEQ ID NO: 3686257 - DNA, 25 bp, Homo sapien
gagagggcaggagtcatccagaccc

SEQ ID NO: 3686258 - DNA, 25 bp, Homo sapien
ggcaggagtcatccagaccccatgc

SEQ ID NO: 3686259 - DNA, 25 bp, Homo sapien
agggcaggagtcatccagaccccat

SEQ ID NO: 3686260 - DNA, 25 bp, Homo sapien
cagcctcgctggcaggcaaaaccat

SEQ ID NO: 3686261 - DNA, 25 bp, Homo sapien
ggcaggcaaaaccatgtgcttgagt

SEQ ID NO: 3686262 - DNA, 25 bp, Homo sapien
aaccatgtgcttgagtgactgaaca

SEQ ID NO: 3686263 - DNA, 25 bp, Homo sapien
tcgctggcaggcaaaaccatgtgct

SEQ ID NO: 3686264 - DNA, 25 bp, Homo sapien
cagacataaaaggaatgggaagccc

SEQ ID NO: 3686265 - DNA, 25 bp, Homo sapien
ggacagacataaaaggaatgggaag

SEQ ID NO: 3686266 - DNA, 25 bp, Homo sapien
acagacataaaaggaatgggaagcc

SEQ ID NO: 3686267 - DNA, 25 bp, Homo sapien
gacagacataaaaggaatgggaagc

SEQ ID NO: 3686268 - DNA, 25 bp, Homo sapien
tggagaaaggcacaccggcacttgt

SEQ ID NO: 3686269 - DNA, 25 bp, Homo sapien
gagaaaggcacaccggcacttgtca

SEQ ID NO: 3686270 - DNA, 25 bp, Homo sapien
ttgtcagccttcctctgcgccccac

SEQ ID NO: 3686271 - DNA, 25 bp, Homo sapien
aggcacaccggcacttgtcagcctt

SEQ ID NO: 3686272 - DNA, 25 bp, Homo sapien
ttaaacttccctcgggtgagcagct

SEQ ID NO: 3686273 - DNA, 25 bp, Homo sapien
ggtgatccgcccttcaaataagagg

SEQ ID NO: 3686274 - DNA, 25 bp, Homo sapien
ttcgatggctgacacatcactggtg

SEQ ID NO: 3686275 - DNA, 25 bp, Homo sapien
ctaggatcagtcgaaccagctctcc

SEQ ID NO: 3686276 - DNA, 25 bp, Homo sapien
ggacgctaatcttaccctgagtgtg

SEQ ID NO: 3686277 - DNA, 25 bp, Homo sapien
catcttgaggttactagggtgccct

SEQ ID NO: 3686278 - DNA, 25 bp, Homo sapien
gaagtcttttttcagggagcaccta

SEQ ID NO: 3686279 - DNA, 25 bp, Homo sapien
gctcgaatagtctgcttcctggacg

SEQ ID NO: 3686280 - DNA, 25 bp, Homo sapien
ctacagttagttgctggctggctct

SEQ ID NO: 3686281 - DNA, 25 bp, Homo sapien
tacatgctttcttgagctagctggg

SEQ ID NO: 3686282 - DNA, 25 bp, Homo sapien
tcccgggtttcttgtgtgatgccaa

SEQ ID NO: 3686283 - DNA, 25 bp, Homo sapien
caggagactcatgaaaagggacagc

SEQ ID NO: 3686284 - DNA, 25 bp, Homo sapien
caggcgggtcaggatttctttggca

SEQ ID NO: 3686285 - DNA, 25 bp, Homo sapien
tgcaaacgtgctggactgagacaca

SEQ ID NO: 3686286 - DNA, 25 bp, Homo sapien
tcacgcaggcggttcaagatggcgc

SEQ ID NO: 3686287 - DNA, 25 bp, Homo sapien
tcttgtaaagagatccgtcgacacc

SEQ ID NO: 3686288 - DNA, 25 bp, Homo sapien
ttgagccatcaacagaactgggtgt

SEQ ID NO: 3686289 - DNA, 25 bp, Homo sapien
ttgaagtcgacattctttgagccat

SEQ ID NO: 3686290 - DNA, 25 bp, Homo sapien
tgccaggccagaactatttcaattg

SEQ ID NO: 3686291 - DNA, 25 bp, Homo sapien
caacagaactgggtgtgaaggtgca

SEQ ID NO: 3686292 - DNA, 25 bp, Homo sapien
aggaagcgcacatcggagtctggca

SEQ ID NO: 3686293 - DNA, 25 bp, Homo sapien
cagggtctcctctatctgccggtgc

SEQ ID NO: 3686294 - DNA, 25 bp, Homo sapien
gagggcagcatcttaaccacggcat

SEQ ID NO: 3686295 - DNA, 25 bp, Homo sapien
gagtctggcaccaagcgccttagag

SEQ ID NO: 3686296 - DNA, 25 bp, Homo sapien
gttgtgcatttccaccgttctcttt

SEQ ID NO: 3686297 - DNA, 25 bp, Homo sapien
cagcacacggaaattggttcctcca

SEQ ID NO: 3686298 - DNA, 25 bp, Homo sapien
cctgcatgatttcaataggaatggc

SEQ ID NO: 3686299 - DNA, 25 bp, Homo sapien
cactacggattttcaccagcagcac

SEQ ID NO: 3686300 - DNA, 25 bp, Homo sapien
cacacacatgcagagtgagcctcct

SEQ ID NO: 3686301 - DNA, 25 bp, Homo sapien
accccgtggcggattttggtcatca

SEQ ID NO: 3686302 - DNA, 25 bp, Homo sapien
gacacaaatccatgtgggcaccccg

SEQ ID NO: 3686303 - DNA, 25 bp, Homo sapien
gaaaagaaaggatcgcccgtgctct

SEQ ID NO: 3686304 - DNA, 25 bp, Homo sapien
aagtcagagatgcaggagacaatgt

SEQ ID NO: 3686305 - DNA, 25 bp, Homo sapien
catcctggggcctttgatccccatg

SEQ ID NO: 3686306 - DNA, 25 bp, Homo sapien
tgcaggagacaatgtgatcaaacag

SEQ ID NO: 3686307 - DNA, 25 bp, Homo sapien
cagagatgcaggagacaatgtgatc

SEQ ID NO: 3686308 - DNA, 25 bp, Homo sapien
taaggtgactacatcgtggcccacg

SEQ ID NO: 3686309 - DNA, 25 bp, Homo sapien
cccacgcagtctgttgccttaaaac

SEQ ID NO: 3686310 - DNA, 25 bp, Homo sapien
ctttttatcgcatcccttagtaagg

SEQ ID NO: 3686311 - DNA, 25 bp, Homo sapien
ttaaaaccctttgtccacgtgatca

SEQ ID NO: 3686312 - DNA, 25 bp, Homo sapien
ggcctgaattctttacaacaggcaa

SEQ ID NO: 3686313 - DNA, 25 bp, Homo sapien
ctggcctgaattctttacaacaggc

SEQ ID NO: 3686314 - DNA, 25 bp, Homo sapien
tggcctgaattctttacaacaggca

SEQ ID NO: 3686315 - DNA, 25 bp, Homo sapien
caacaatgagtccaacctcacaggt

SEQ ID NO: 3686316 - DNA, 25 bp, Homo sapien
caatgagtccaacctcacaggtggg

SEQ ID NO: 3686317 - DNA, 25 bp, Homo sapien
acaatgagtccaacctcacaggtgg

SEQ ID NO: 3686318 - DNA, 25 bp, Homo sapien
atgagtccaacctcacaggtgggct

SEQ ID NO: 3686319 - DNA, 25 bp, Homo sapien
tccaccatctccacgttcttcatct

SEQ ID NO: 3686320 - DNA, 25 bp, Homo sapien
ccatctccacgttcttcatctcctc

SEQ ID NO: 3686321 - DNA, 25 bp, Homo sapien
caccatctccacgttcttcatctcc

SEQ ID NO: 3686322 - DNA, 25 bp, Homo sapien
cccctccaccatctccacgttcttc

SEQ ID NO: 3686323 - DNA, 25 bp, Homo sapien
tgatatcatccagacacccgttgtc

SEQ ID NO: 3686324 - DNA, 25 bp, Homo sapien
tccaccagtctgtcgtagtgtgtcc

SEQ ID NO: 3686325 - DNA, 25 bp, Homo sapien
tagtgtgtcctgatatcatccagac

SEQ ID NO: 3686326 - DNA, 25 bp, Homo sapien
tagggaatattcgtccaccagtctg

SEQ ID NO: 3686327 - DNA, 25 bp, Homo sapien
ctgagacaggaggaggggcctgggg

SEQ ID NO: 3686328 - DNA, 25 bp, Homo sapien
tgagacaggaggaggggcctggggt

SEQ ID NO: 3686329 - DNA, 25 bp, Homo sapien
agatgccccgggtcttcagcgtctc

SEQ ID NO: 3686330 - DNA, 25 bp, Homo sapien
gcggacgatttcacccaggtacata

SEQ ID NO: 3686331 - DNA, 25 bp, Homo sapien
tggtgaagtcgattaagatgttgcg

SEQ ID NO: 3686332 - DNA, 25 bp, Homo sapien
gatctgccctcggaagaggaatccc

SEQ ID NO: 3686333 - DNA, 25 bp, Homo sapien
cacagtcacattcagacggtccagt

SEQ ID NO: 3686334 - DNA, 25 bp, Homo sapien
gacgaggatactgtcatcgcaggtg

SEQ ID NO: 3686335 - DNA, 25 bp, Homo sapien
ggtccagtcctctgttctcgcggat

SEQ ID NO: 3686336 - DNA, 25 bp, Homo sapien
gacctagctgctggaggatagcccg

SEQ ID NO: 3686337 - DNA, 25 bp, Homo sapien
aggacgagaaaacagaaggtagttg

SEQ ID NO: 3686338 - DNA, 25 bp, Homo sapien
aaacagaaggtagttggaggaagat

SEQ ID NO: 3686339 - DNA, 25 bp, Homo sapien
gacgagaaaacagaaggtagttgga

SEQ ID NO: 3686340 - DNA, 25 bp, Homo sapien
tggtgacagttccttcaccgtctgg

SEQ ID NO: 3686341 - DNA, 25 bp, Homo sapien
cacgttacattttggtgacagttcc

SEQ ID NO: 3686342 - DNA, 25 bp, Homo sapien
ccttcaccgtctggtgcatgattct

SEQ ID NO: 3686343 - DNA, 25 bp, Homo sapien
caggaggaaggacacgttacatttt

SEQ ID NO: 3686344 - DNA, 25 bp, Homo sapien
agctgcttgcctctgtgcgtaaccg

SEQ ID NO: 3686345 - DNA, 25 bp, Homo sapien
ttagctgcttgcctctgtgcgtaac

SEQ ID NO: 3686346 - DNA, 25 bp, Homo sapien
ttgcctctgtgcgtaaccgcacgcc

SEQ ID NO: 3686347 - DNA, 25 bp, Homo sapien
gcttgcctctgtgcgtaaccgcacg

SEQ ID NO: 3686348 - DNA, 25 bp, Homo sapien
gagacaagacacatttccgcaggac

SEQ ID NO: 3686349 - DNA, 25 bp, Homo sapien
gataatacatttcacacagggaggg

SEQ ID NO: 3686350 - DNA, 25 bp, Homo sapien
gaatgcaagactgtcacacgcggct

SEQ ID NO: 3686351 - DNA, 25 bp, Homo sapien
gacacggctcacaaagcggtgggaa

SEQ ID NO: 3686352 - DNA, 25 bp, Homo sapien
tacccccaagaatcttagaatgata

SEQ ID NO: 3686353 - DNA, 25 bp, Homo sapien
ccttcgcgcgaagtctggggccaga

SEQ ID NO: 3686354 - DNA, 25 bp, Homo sapien
taaagccccgtagaattcagatacc

SEQ ID NO: 3686355 - DNA, 25 bp, Homo sapien
cccagccgggcggatttgcctttgg

SEQ ID NO: 3686356 - DNA, 25 bp, Homo sapien
tgatatggaaggacgcagggctact

SEQ ID NO: 3686357 - DNA, 25 bp, Homo sapien
tactgctggcgtcccttttgcaggg

SEQ ID NO: 3686358 - DNA, 25 bp, Homo sapien
cagggaagccgtctcctggcacaca

SEQ ID NO: 3686359 - DNA, 25 bp, Homo sapien
caggctacccaatgccacctttatt

SEQ ID NO: 3686360 - DNA, 25 bp, Homo sapien
agcagtcctcccatcctggtctccc

SEQ ID NO: 3686361 - DNA, 25 bp, Homo sapien
gaattacaggtgtgccccattacgc

SEQ ID NO: 3686362 - DNA, 25 bp, Homo sapien
caggtgtgccccattacgcctggct

SEQ ID NO: 3686363 - DNA, 25 bp, Homo sapien
tacaggtgtgccccattacgcctgg

SEQ ID NO: 3686364 - DNA, 25 bp, Homo sapien
gatgcaaggcttagataccataggg

SEQ ID NO: 3686365 - DNA, 25 bp, Homo sapien
tgagggaatttacagaccgaagtgg

SEQ ID NO: 3686366 - DNA, 25 bp, Homo sapien
gagtcacagcctacgatttgtggag

SEQ ID NO: 3686367 - DNA, 25 bp, Homo sapien
caggcaagaacgctacgtgagtcac

SEQ ID NO: 3686368 - DNA, 25 bp, Homo sapien
ggctctgtggggatcacctgcctgt

SEQ ID NO: 3686369 - DNA, 25 bp, Homo sapien
cctcttcgccatgtgaggctctgtg

SEQ ID NO: 3686370 - DNA, 25 bp, Homo sapien
tctgtggggatcacctgcctgtccc

SEQ ID NO: 3686371 - DNA, 25 bp, Homo sapien
gctgttccgtttgatggttaccttc

SEQ ID NO: 3686372 - DNA, 25 bp, Homo sapien
tgcggctgccgggctaccagccccg

SEQ ID NO: 3686373 - DNA, 25 bp, Homo sapien
tcagccagcgctcgtggccccacct

SEQ ID NO: 3686374 - DNA, 25 bp, Homo sapien
ggggctctccggctcggtccctcag

SEQ ID NO: 3686375 - DNA, 25 bp, Homo sapien
accagccccgccaccggcgttctct

SEQ ID NO: 3686376 - DNA, 25 bp, Homo sapien
aggtaggagaagcgcgcgcagtagc

SEQ ID NO: 3686377 - DNA, 25 bp, Homo sapien
ccagaacacggtggaatagatgata

SEQ ID NO: 3686378 - DNA, 25 bp, Homo sapien
cagaacacggtggaatagatgataa

SEQ ID NO: 3686379 - DNA, 25 bp, Homo sapien
aagcgcgcgcagtagcgcacctgct

SEQ ID NO: 3686380 - DNA, 25 bp, Homo sapien
agcggacgcacagcgggcaaaccgc

SEQ ID NO: 3686381 - DNA, 25 bp, Homo sapien
acacaggtgagccaggtggcactcg

SEQ ID NO: 3686382 - DNA, 25 bp, Homo sapien
ggtcggtcgacaaccggctctcaca

SEQ ID NO: 3686383 - DNA, 25 bp, Homo sapien
cgcccagccggtgcacacaggtgag

SEQ ID NO: 3686384 - DNA, 25 bp, Homo sapien
atttaaataaatacctatgccaggg

SEQ ID NO: 3686385 - DNA, 25 bp, Homo sapien
tcccatcccacatatgaccttctgt

SEQ ID NO: 3686386 - DNA, 25 bp, Homo sapien
gtaatttactacaattaagcttatg

SEQ ID NO: 3686387 - DNA, 25 bp, Homo sapien
gatgcaaccgctgatttatagctca

SEQ ID NO: 3686388 - DNA, 25 bp, Homo sapien
tggggtacatgccagctctgacaag

SEQ ID NO: 3686389 - DNA, 25 bp, Homo sapien
tctgacaagtgagcctcaaacacac

SEQ ID NO: 3686390 - DNA, 25 bp, Homo sapien
gctctgacaagtgagcctcaaacac

SEQ ID NO: 3686391 - DNA, 25 bp, Homo sapien
cagctctgacaagtgagcctcaaac

SEQ ID NO: 3686392 - DNA, 25 bp, Homo sapien
ggctcttgagcagcaaggctagaga

SEQ ID NO: 3686393 - DNA, 25 bp, Homo sapien
ttcaggcaactcacttctcttcagg

SEQ ID NO: 3686394 - DNA, 25 bp, Homo sapien
ggatctggtcttggcctgtcactga

SEQ ID NO: 3686395 - DNA, 25 bp, Homo sapien
gcactagaggtgtctttaacagccc

SEQ ID NO: 3686396 - DNA, 25 bp, Homo sapien
gccagggacgtggcctctttcagaa

SEQ ID NO: 3686397 - DNA, 25 bp, Homo sapien
cagaaaggttatcttctaccctcac

SEQ ID NO: 3686398 - DNA, 25 bp, Homo sapien
gcttcactgggaggccagggacgtg

SEQ ID NO: 3686399 - DNA, 25 bp, Homo sapien
tgggaggccagggacgtggcctctt

SEQ ID NO: 3686400 - DNA, 25 bp, Homo sapien
gcagcaaggtccagtcctacgacat

SEQ ID NO: 3686401 - DNA, 25 bp, Homo sapien
cccctgtgtggagccagttggtaca

SEQ ID NO: 3686402 - DNA, 25 bp, Homo sapien
cttatcaggttgaccgtgagcccca

SEQ ID NO: 3686403 - DNA, 25 bp, Homo sapien
gaaggacacttctcagggccttagt

SEQ ID NO: 3686404 - DNA, 25 bp, Homo sapien
catggccaaccctctggtaggagat

SEQ ID NO: 3686405 - DNA, 25 bp, Homo sapien
tcctgagagggacttccagtggccc

SEQ ID NO: 3686406 - DNA, 25 bp, Homo sapien
tgaagcaaactgtggtgagacacgt

SEQ ID NO: 3686407 - DNA, 25 bp, Homo sapien
tgcaaatgtcttggcgagaaagtcc

SEQ ID NO: 3686408 - DNA, 25 bp, Homo sapien
agcgcagagcttcggggaggatcag

SEQ ID NO: 3686409 - DNA, 25 bp, Homo sapien
cagagcttcggggaggatcagagat

SEQ ID NO: 3686410 - DNA, 25 bp, Homo sapien
tctggaagcgcagagcttcggggag

SEQ ID NO: 3686411 - DNA, 25 bp, Homo sapien
gcgcagagcttcggggaggatcaga

SEQ ID NO: 3686412 - DNA, 25 bp, Homo sapien
taagttctggggacactgaacctcc

SEQ ID NO: 3686413 - DNA, 25 bp, Homo sapien
gaccaccaggcggtactctaagttc

SEQ ID NO: 3686414 - DNA, 25 bp, Homo sapien
aggaccaccaggcggtactctaagt

SEQ ID NO: 3686415 - DNA, 25 bp, Homo sapien
caccaggcggtactctaagttctgg

SEQ ID NO: 3686416 - DNA, 25 bp, Homo sapien
tcgggagaaaacagtcttctctccc

SEQ ID NO: 3686417 - DNA, 25 bp, Homo sapien
cccagggcagctgggttcctgctgt

SEQ ID NO: 3686418 - DNA, 25 bp, Homo sapien
gggcagctgggttcctgctgtccca

SEQ ID NO: 3686419 - DNA, 25 bp, Homo sapien
agaaaacagtcttctctcccacatc

SEQ ID NO: 3686420 - DNA, 25 bp, Homo sapien
agcaggagactctgtgaggcattcc

SEQ ID NO: 3686421 - DNA, 25 bp, Homo sapien
aagcaggagactctgtgaggcattc

SEQ ID NO: 3686422 - DNA, 25 bp, Homo sapien
tctgccgctcaacctctgcatagat

SEQ ID NO: 3686423 - DNA, 25 bp, Homo sapien
agatgcccacagacaggaccagggc

SEQ ID NO: 3686424 - DNA, 25 bp, Homo sapien
tgaacatgacgacgcccaggaggat

SEQ ID NO: 3686425 - DNA, 25 bp, Homo sapien
aaggagaccatgaacatgacgacgc

SEQ ID NO: 3686426 - DNA, 25 bp, Homo sapien
tgcttggagaaggtacaggttgtca

SEQ ID NO: 3686427 - DNA, 25 bp, Homo sapien
ttgtcacggagggacgccagcacac

SEQ ID NO: 3686428 - DNA, 25 bp, Homo sapien
caggttgtcacggagggacgccagc

SEQ ID NO: 3686429 - DNA, 25 bp, Homo sapien
aggttgtcacggagggacgccagca

SEQ ID NO: 3686430 - DNA, 25 bp, Homo sapien
taaggagctctctaaaggaggtggt

SEQ ID NO: 3686431 - DNA, 25 bp, Homo sapien
tgatctaaggagctctctaaaggag

SEQ ID NO: 3686432 - DNA, 25 bp, Homo sapien
gatgggctgatctaaggagctctct

SEQ ID NO: 3686433 - DNA, 25 bp, Homo sapien
gcattcttgggccagtgtggtcaga

SEQ ID NO: 3686434 - DNA, 25 bp, Homo sapien
ctggaaaacagaattcagagactca

SEQ ID NO: 3686435 - DNA, 25 bp, Homo sapien
tggaaaacagaattcagagactcac

SEQ ID NO: 3686436 - DNA, 25 bp, Homo sapien
ggcagatcccaaggatgtacatgaa

SEQ ID NO: 3686437 - DNA, 25 bp, Homo sapien
agctccatgatgaggcagatcccaa

SEQ ID NO: 3686438 - DNA, 25 bp, Homo sapien
aggcagatcccaaggatgtacatga

SEQ ID NO: 3686439 - DNA, 25 bp, Homo sapien
atgagctccatgatgaggcagatcc

SEQ ID NO: 3686440 - DNA, 25 bp, Homo sapien
agcaactgtccagatgcaccaggac

SEQ ID NO: 3686441 - DNA, 25 bp, Homo sapien
agcagcaactgtccagatgcaccag

SEQ ID NO: 3686442 - DNA, 25 bp, Homo sapien
gcagtggacacagagaatggggctt

SEQ ID NO: 3686443 - DNA, 25 bp, Homo sapien
aggcagtggacacagagaatggggc

SEQ ID NO: 3686444 - DNA, 25 bp, Homo sapien
ctggtggagattcctccttatatcc

SEQ ID NO: 3686445 - DNA, 25 bp, Homo sapien
gcagcagaaaccatgcccggggtca

SEQ ID NO: 3686446 - DNA, 25 bp, Homo sapien
tcctccttatatccaggagtctgtt

SEQ ID NO: 3686447 - DNA, 25 bp, Homo sapien
gtctgtttagttggccacaaactgg

SEQ ID NO: 3686448 - DNA, 25 bp, Homo sapien
catcctggatctgccagctcagaag

SEQ ID NO: 3686449 - DNA, 25 bp, Homo sapien
gctacgtactcatggggtgccgcca

SEQ ID NO: 3686450 - DNA, 25 bp, Homo sapien
ctgaacgacatgattggctgagcta

SEQ ID NO: 3686451 - DNA, 25 bp, Homo sapien
agcactgaacgacatgattggctga

SEQ ID NO: 3686452 - DNA, 25 bp, Homo sapien
gattggctgagctacgtactcatgg

SEQ ID NO: 3686453 - DNA, 25 bp, Homo sapien
tgatgaagggacaggccagctggct

SEQ ID NO: 3686454 - DNA, 25 bp, Homo sapien
tcacaaagcttttccatccttgggt

SEQ ID NO: 3686455 - DNA, 25 bp, Homo sapien
ctctgggtgatgaagggacaggcca

SEQ ID NO: 3686456 - DNA, 25 bp, Homo sapien
tttccatccttgggtgcctgctcct

SEQ ID NO: 3686457 - DNA, 25 bp, Homo sapien
gatgtggctagtccgaggttgccca

SEQ ID NO: 3686458 - DNA, 25 bp, Homo sapien
ggctgtcaagcctcataatcaagga

SEQ ID NO: 3686459 - DNA, 25 bp, Homo sapien
ctgtgaaccaaacccgtaggcctat

SEQ ID NO: 3686460 - DNA, 25 bp, Homo sapien
gaaggtgtttagcaggacaccaggc

SEQ ID NO: 3686461 - DNA, 25 bp, Homo sapien
gactgaagagccagacaattcccgg

SEQ ID NO: 3686462 - DNA, 25 bp, Homo sapien
cacggaggtcgagtatcagcagaga

SEQ ID NO: 3686463 - DNA, 25 bp, Homo sapien
ttctcggctccggtgccagactgaa

SEQ ID NO: 3686464 - DNA, 25 bp, Homo sapien
taacaatcgcagctttcagagcacg

SEQ ID NO: 3686465 - DNA, 25 bp, Homo sapien
gcagcactcggtccccctcggctag

SEQ ID NO: 3686466 - DNA, 25 bp, Homo sapien
ctcggtccccctcggctagggctgg

SEQ ID NO: 3686467 - DNA, 25 bp, Homo sapien
cactcggtccccctcggctagggct

SEQ ID NO: 3686468 - DNA, 25 bp, Homo sapien
atcactgcagcactcggtccccctc

SEQ ID NO: 3686469 - DNA, 25 bp, Homo sapien
acagatgaggagctcgagacttggg

SEQ ID NO: 3686470 - DNA, 25 bp, Homo sapien
tctttctaccgcccagggatgggcc

SEQ ID NO: 3686471 - DNA, 25 bp, Homo sapien
ggcccacgctggaatcttccctttg

SEQ ID NO: 3686472 - DNA, 25 bp, Homo sapien
agggatgggcccacgctggaatctt

SEQ ID NO: 3686473 - DNA, 25 bp, Homo sapien
tccactccctttgcagaccagacag

SEQ ID NO: 3686474 - DNA, 25 bp, Homo sapien
cctgagtgcctgtgctatgtcccag

SEQ ID NO: 3686475 - DNA, 25 bp, Homo sapien
ctgatgccgccatgcctgagctgag

SEQ ID NO: 3686476 - DNA, 25 bp, Homo sapien
cagcaggagtaattcactccactcc

SEQ ID NO: 3686477 - DNA, 25 bp, Homo sapien
cctcttcgaatgttgtcgttcagga

SEQ ID NO: 3686478 - DNA, 25 bp, Homo sapien
catcatagtagttctcaattcctct

SEQ ID NO: 3686479 - DNA, 25 bp, Homo sapien
aagtccagatcatcatagtagttct

SEQ ID NO: 3686480 - DNA, 25 bp, Homo sapien
tcaattcctcttcgaatgttgtcgt

SEQ ID NO: 3686481 - DNA, 25 bp, Homo sapien
cagtcgtggtactgattcttgctcc

SEQ ID NO: 3686482 - DNA, 25 bp, Homo sapien
gggcactgcagtcgtggtactgatt

SEQ ID NO: 3686483 - DNA, 25 bp, Homo sapien
tcttgctccaatctcggtagtcctc

SEQ ID NO: 3686484 - DNA, 25 bp, Homo sapien
agtcctccccgccacagcacttgaa

SEQ ID NO: 3686485 - DNA, 25 bp, Homo sapien
ccccagtccccacaggagcagtgtc

SEQ ID NO: 3686486 - DNA, 25 bp, Homo sapien
cagtccccacaggagcagtgtctac

SEQ ID NO: 3686487 - DNA, 25 bp, Homo sapien
ccagtccccacaggagcagtgtcta

SEQ ID NO: 3686488 - DNA, 25 bp, Homo sapien
ccccccagtccccacaggagcagtg

SEQ ID NO: 3686489 - DNA, 25 bp, Homo sapien
gatatttggccagacattatcctgg

SEQ ID NO: 3686490 - DNA, 25 bp, Homo sapien
ttttatatgtcaacatgaccaggcc

SEQ ID NO: 3686491 - DNA, 25 bp, Homo sapien
tgaccaggccatgggatacccagat

SEQ ID NO: 3686492 - DNA, 25 bp, Homo sapien
taaatcagcagactaagtaaagcag

SEQ ID NO: 3686493 - DNA, 25 bp, Homo sapien
tgcctgaccatagaatcgatattct

SEQ ID NO: 3686494 - DNA, 25 bp, Homo sapien
ctgctgaagttcacaggccccaaga

SEQ ID NO: 3686495 - DNA, 25 bp, Homo sapien
gaccatagaatcgatattctgcaag

SEQ ID NO: 3686496 - DNA, 25 bp, Homo sapien
accagggtccagtagcctcttccat

SEQ ID NO: 3686497 - DNA, 25 bp, Homo sapien
ggctgccgcgggcacttcccatcac

SEQ ID NO: 3686498 - DNA, 25 bp, Homo sapien
catgtaagtgaacgctgccgtgagt

SEQ ID NO: 3686499 - DNA, 25 bp, Homo sapien
tgctctacatgtaagtgaacgctgc

SEQ ID NO: 3686500 - DNA, 25 bp, Homo sapien
tctacatgtaagtgaacgctgccgt

SEQ ID NO: 3686501 - DNA, 25 bp, Homo sapien
tccttgtcgatagttttgtagccac

SEQ ID NO: 3686502 - DNA, 25 bp, Homo sapien
ccttgtcgatagttttgtagccaca

SEQ ID NO: 3686503 - DNA, 25 bp, Homo sapien
gccatgtacacaaggtccaggctag

SEQ ID NO: 3686504 - DNA, 25 bp, Homo sapien
aaggtccaggctagtccctcaaccg

SEQ ID NO: 3686505 - DNA, 25 bp, Homo sapien
tcaaccgctgtgatcctcagtttcc

SEQ ID NO: 3686506 - DNA, 25 bp, Homo sapien
aggctagtccctcaaccgctgtgat

SEQ ID NO: 3686507 - DNA, 25 bp, Homo sapien
ggtgtagttgtccatgaaccagatg

SEQ ID NO: 3686508 - DNA, 25 bp, Homo sapien
ggtgcagccccgcacgtagatgaca

SEQ ID NO: 3686509 - DNA, 25 bp, Homo sapien
gatgatcacggcgttggtgcagccc

SEQ ID NO: 3686510 - DNA, 25 bp, Homo sapien
acgtagatgacatcctgcacactga

SEQ ID NO: 3686511 - DNA, 25 bp, Homo sapien
cttctgcaatcaccaagtcacactt

SEQ ID NO: 3686512 - DNA, 25 bp, Homo sapien
tctgcaatcaccaagtcacactttc

SEQ ID NO: 3686513 - DNA, 25 bp, Homo sapien
tctgcccttctgcaatcaccaagtc

SEQ ID NO: 3686514 - DNA, 25 bp, Homo sapien
agtcacactttctctgaacccacgg

SEQ ID NO: 3686515 - DNA, 25 bp, Homo sapien
atgatgatgtcctccacccgggtga

SEQ ID NO: 3686516 - DNA, 25 bp, Homo sapien
gtagcacaagcagcatcccgtgcct

SEQ ID NO: 3686517 - DNA, 25 bp, Homo sapien
gtgacagagtgctccatgatgatgt

SEQ ID NO: 3686518 - DNA, 25 bp, Homo sapien
tgggcttggcaccgggccccaggag

SEQ ID NO: 3686519 - DNA, 25 bp, Homo sapien
gagaggtgctatcccagacggtcct

SEQ ID NO: 3686520 - DNA, 25 bp, Homo sapien
cagccctggctttggtcagtactga

SEQ ID NO: 3686521 - DNA, 25 bp, Homo sapien
ccagccccacgatgttgactgagag

SEQ ID NO: 3686522 - DNA, 25 bp, Homo sapien
aattacaggtgctacaaaactgcct

SEQ ID NO: 3686523 - DNA, 25 bp, Homo sapien
gacatgcggggaaataccagctttg

SEQ ID NO: 3686524 - DNA, 25 bp, Homo sapien
ataccagctttgattagtcagaaac

SEQ ID NO: 3686525 - DNA, 25 bp, Homo sapien
aagacatgcggggaaataccagctt

SEQ ID NO: 3686526 - DNA, 25 bp, Homo sapien
aagaataagacatgcggggaaatac

SEQ ID NO: 3686527 - DNA, 25 bp, Homo sapien
gagtgcatgctgtatgagtccacct

SEQ ID NO: 3686528 - DNA, 25 bp, Homo sapien
gaaacaaaacgtccatcagtaggtg

SEQ ID NO: 3686529 - DNA, 25 bp, Homo sapien
catacaacagtatgctgctccgcaa

SEQ ID NO: 3686530 - DNA, 25 bp, Homo sapien
catccttgtgagacaagaggccaag

SEQ ID NO: 3686531 - DNA, 25 bp, Homo sapien
ttaaacatatagttacatataatcc

SEQ ID NO: 3686532 - DNA, 25 bp, Homo sapien
gagaaatgaaagtatgtgtttttat

SEQ ID NO: 3686533 - DNA, 25 bp, Homo sapien
tatagttacatataatccagccatt

SEQ ID NO: 3686534 - DNA, 25 bp, Homo sapien
cattctacttctagatatttaccca

SEQ ID NO: 3686535 - DNA, 25 bp, Homo sapien
cagccaccagcgaggtgacaggtga

SEQ ID NO: 3686536 - DNA, 25 bp, Homo sapien
gaagggagagcgcagccaccagcga

SEQ ID NO: 3686537 - DNA, 25 bp, Homo sapien
gccaccagcgaggtgacaggtgaca

SEQ ID NO: 3686538 - DNA, 25 bp, Homo sapien
agagcgcagccaccagcgaggtgac

SEQ ID NO: 3686539 - DNA, 25 bp, Homo sapien
aagaactgcctcaagcgcaggctta

SEQ ID NO: 3686540 - DNA, 25 bp, Homo sapien
tttttccactggatattggggctgg

SEQ ID NO: 3686541 - DNA, 25 bp, Homo sapien
gtctgggcccctgctagaagctgct

SEQ ID NO: 3686542 - DNA, 25 bp, Homo sapien
ggccagtcataaaaacctccttcag

SEQ ID NO: 3686543 - DNA, 25 bp, Homo sapien
ctttattaggttaatcattgcttga

SEQ ID NO: 3686544 - DNA, 25 bp, Homo sapien
tgaatcggttgccatggtttgggca

SEQ ID NO: 3686545 - DNA, 25 bp, Homo sapien
cttgaatcggttgccatggtttggg

SEQ ID NO: 3686546 - DNA, 25 bp, Homo sapien
cctttgcctctgctttattaggtta

SEQ ID NO: 3686547 - DNA, 25 bp, Homo sapien
tgcaatagccaactttccacctggg

SEQ ID NO: 3686548 - DNA, 25 bp, Homo sapien
gcaatagccaactttccacctgggt

SEQ ID NO: 3686549 - DNA, 25 bp, Homo sapien
ctgcaatagccaactttccacctgg

SEQ ID NO: 3686550 - DNA, 25 bp, Homo sapien
aggaggccctagagaagcatggttt

SEQ ID NO: 3686551 - DNA, 25 bp, Homo sapien
aggtccaccgccagatgagagtcat

SEQ ID NO: 3686552 - DNA, 25 bp, Homo sapien
taaatcaggcaaggctggcctatga

SEQ ID NO: 3686553 - DNA, 25 bp, Homo sapien
gaaaccagagcggtgcttggatccc

SEQ ID NO: 3686554 - DNA, 25 bp, Homo sapien
ccgggcagctcgctcgccagatttt

SEQ ID NO: 3686555 - DNA, 25 bp, Homo sapien
gctgtttgaagtggccagtctcggc

SEQ ID NO: 3686556 - DNA, 25 bp, Homo sapien
tattttagcaaacactggagacagg

SEQ ID NO: 3686557 - DNA, 25 bp, Homo sapien
cagctcgctcgccagatttttgtct

SEQ ID NO: 3686558 - DNA, 25 bp, Homo sapien
cggatgatactgttagagtggtcgc

SEQ ID NO: 3686559 - DNA, 25 bp, Homo sapien
cttaagtttgcaggctctgaagtgg

SEQ ID NO: 3686560 - DNA, 25 bp, Homo sapien
tagagtggtcgcttaagtttgcagg

SEQ ID NO: 3686561 - DNA, 25 bp, Homo sapien
gtcataaccacggatgatactgtta

SEQ ID NO: 3686562 - DNA, 25 bp, Homo sapien
agccacctttataacctctatgact

SEQ ID NO: 3686563 - DNA, 25 bp, Homo sapien
aagccacctttataacctctatgac

SEQ ID NO: 3686564 - DNA, 25 bp, Homo sapien
aaagatggctcaacatctgtcttta

SEQ ID NO: 3686565 - DNA, 25 bp, Homo sapien
tggctcaacatctgtctttagattt

SEQ ID NO: 3686566 - DNA, 25 bp, Homo sapien
gatggctcaacatctgtctttagat

SEQ ID NO: 3686567 - DNA, 25 bp, Homo sapien
ctaaaaagatggctcaacatctgtc

SEQ ID NO: 3686568 - DNA, 25 bp, Homo sapien
gcaagtcaacatgaaatatcacctc

SEQ ID NO: 3686569 - DNA, 25 bp, Homo sapien
caggcaggattgaagctgttccttt

SEQ ID NO: 3686570 - DNA, 25 bp, Homo sapien
tttgcaagtcaacatgaaatatcac

SEQ ID NO: 3686571 - DNA, 25 bp, Homo sapien
tgaatttgcaagtcaacatgaaata

SEQ ID NO: 3686572 - DNA, 25 bp, Homo sapien
gattggtgggacctaaacccatgaa

SEQ ID NO: 3686573 - DNA, 25 bp, Homo sapien
agattggtgggacctaaacccatga

SEQ ID NO: 3686574 - DNA, 25 bp, Homo sapien
tagattggtgggacctaaacccatg

SEQ ID NO: 3686575 - DNA, 25 bp, Homo sapien
tcaattgtatgcaaatcaattgctt

SEQ ID NO: 3686576 - DNA, 25 bp, Homo sapien
aagactctgtcctacatcaattgta

SEQ ID NO: 3686577 - DNA, 25 bp, Homo sapien
gtcctacatcaattgtatgcaaatc

SEQ ID NO: 3686578 - DNA, 25 bp, Homo sapien
gtatgcaaatcaattgctttactta

SEQ ID NO: 3686579 - DNA, 25 bp, Homo sapien
caggagttgagcctacccctgagaa

SEQ ID NO: 3686580 - DNA, 25 bp, Homo sapien
atgctacctaatataccatatcctg

SEQ ID NO: 3686581 - DNA, 25 bp, Homo sapien
gaattacaggagttgagcctacccc

SEQ ID NO: 3686582 - DNA, 25 bp, Homo sapien
tagaattacaggagttgagcctacc

SEQ ID NO: 3686583 - DNA, 25 bp, Homo sapien
gacacatgttccttagcatttgaag

SEQ ID NO: 3686584 - DNA, 25 bp, Homo sapien
aaccacatagagagtttgacacatg

SEQ ID NO: 3686585 - DNA, 25 bp, Homo sapien
cacattcgaaaagtctaagagagtc

SEQ ID NO: 3686586 - DNA, 25 bp, Homo sapien
ggcacctccagccaaattaaagagt

SEQ ID NO: 3686587 - DNA, 25 bp, Homo sapien
agaattttggcagcggccccagagg

SEQ ID NO: 3686588 - DNA, 25 bp, Homo sapien
ttcagggtggaacatatgttcaggg

SEQ ID NO: 3686589 - DNA, 25 bp, Homo sapien
ctggctgaggtttgggactgaaatt

SEQ ID NO: 3686590 - DNA, 25 bp, Homo sapien
ctgaaatttcaatggtgctgggacc

SEQ ID NO: 3686591 - DNA, 25 bp, Homo sapien
ggaacatatgttcagggtctggctg

SEQ ID NO: 3686592 - DNA, 25 bp, Homo sapien
cggcggcgtccactcccggcggctc

SEQ ID NO: 3686593 - DNA, 25 bp, Homo sapien
ctcggcggcgtccactcccggcggc

SEQ ID NO: 3686594 - DNA, 25 bp, Homo sapien
gcaggcgcgactccgggcctcggcg

SEQ ID NO: 3686595 - DNA, 25 bp, Homo sapien
ctgcaggcgcgactccgggcctcgg

SEQ ID NO: 3686596 - DNA, 25 bp, Homo sapien
cagaggtgacccacgctgagtagat

SEQ ID NO: 3686597 - DNA, 25 bp, Homo sapien
aggcttgcagtcagtgatgttcaca

SEQ ID NO: 3686598 - DNA, 25 bp, Homo sapien
gacccacgctgagtagatgctgtgt

SEQ ID NO: 3686599 - DNA, 25 bp, Homo sapien
ggaggcttgcagtcagtgatgttca

SEQ ID NO: 3686600 - DNA, 25 bp, Homo sapien
gccaagtggcacagaagttctcccc

SEQ ID NO: 3686601 - DNA, 25 bp, Homo sapien
tttagctgttagtgatctgggacca

SEQ ID NO: 3686602 - DNA, 25 bp, Homo sapien
gcaggctaatggaagccaagtggca

SEQ ID NO: 3686603 - DNA, 25 bp, Homo sapien
tctgggaccagactcgtgaagatct

SEQ ID NO: 3686604 - DNA, 25 bp, Homo sapien
gctgtgggtccctgatgggctgcac

SEQ ID NO: 3686605 - DNA, 25 bp, Homo sapien
tcatcctgcacgatttccccattgg

SEQ ID NO: 3686606 - DNA, 25 bp, Homo sapien
cttggtggctgggtagtggtcctca

SEQ ID NO: 3686607 - DNA, 25 bp, Homo sapien
tagtggtcctcactcgggggtcgtc

SEQ ID NO: 3686608 - DNA, 25 bp, Homo sapien
cgaggaatgctacctcttggtggct

SEQ ID NO: 3686609 - DNA, 25 bp, Homo sapien
tccagcttctgtcatccaacccact

SEQ ID NO: 3686610 - DNA, 25 bp, Homo sapien
tgcccagggctcatctcctccactt

SEQ ID NO: 3686611 - DNA, 25 bp, Homo sapien
tttaaaatgattattctgtgcccag

SEQ ID NO: 3686612 - DNA, 25 bp, Homo sapien
tctgtcatccaacccactcttaaaa

SEQ ID NO: 3686613 - DNA, 25 bp, Homo sapien
tagacaaggccaaccaggaggaggc

SEQ ID NO: 3686614 - DNA, 25 bp, Homo sapien
atgccactgcggaaagcccatgttc

SEQ ID NO: 3686615 - DNA, 25 bp, Homo sapien
ggccacgaacaccaagcatcatgag

SEQ ID NO: 3686616 - DNA, 25 bp, Homo sapien
ggctccacagcatggttgccaagat

SEQ ID NO: 3686617 - DNA, 25 bp, Homo sapien
gacgtcggcatgtcttccacaggca

SEQ ID NO: 3686618 - DNA, 25 bp, Homo sapien
tctgcctcacgcttaacacaaaggg

SEQ ID NO: 3686619 - DNA, 25 bp, Homo sapien
cacaggcatcggaacatgttggcat

SEQ ID NO: 3686620 - DNA, 25 bp, Homo sapien
gaaatgctggactaacgtctccctc

SEQ ID NO: 3686621 - DNA, 25 bp, Homo sapien
gagcaactcccctctgtagccaggg

SEQ ID NO: 3686622 - DNA, 25 bp, Homo sapien
tgatagatccatgcgcagccatggg

SEQ ID NO: 3686623 - DNA, 25 bp, Homo sapien
tagccagggtgtccatacaagtgtt

SEQ ID NO: 3686624 - DNA, 25 bp, Homo sapien
ccatcttctagttgagtctcgctga

SEQ ID NO: 3686625 - DNA, 25 bp, Homo sapien
agtcccagctcggcatctcatccag

SEQ ID NO: 3686626 - DNA, 25 bp, Homo sapien
atcccaaccacatggacacagcagc

SEQ ID NO: 3686627 - DNA, 25 bp, Homo sapien
agcatcccaaccacatggacacagc

SEQ ID NO: 3686628 - DNA, 25 bp, Homo sapien
gagtcccagctcggcatctcatcca

SEQ ID NO: 3686629 - DNA, 25 bp, Homo sapien
tcttcagagatctctgtgttttcca

SEQ ID NO: 3686630 - DNA, 25 bp, Homo sapien
ttcagagatctctgtgttttccagg

SEQ ID NO: 3686631 - DNA, 25 bp, Homo sapien
tcagtctgcgctgtcttcagagatc

SEQ ID NO: 3686632 - DNA, 25 bp, Homo sapien
tgtcttcagagatctctgtgttttc

SEQ ID NO: 3686633 - DNA, 25 bp, Homo sapien
tcactctagaacaatgcggacaatg

SEQ ID NO: 3686634 - DNA, 25 bp, Homo sapien
ctctagaacaatgcggacaatgcta

SEQ ID NO: 3686635 - DNA, 25 bp, Homo sapien
gaacaatgcggacaatgctaaacca

SEQ ID NO: 3686636 - DNA, 25 bp, Homo sapien
caatgcggacaatgctaaaccaaca

SEQ ID NO: 3686637 - DNA, 25 bp, Homo sapien
gcaagaagagcttgcagtcctccca

SEQ ID NO: 3686638 - DNA, 25 bp, Homo sapien
ccagctggaggcagtaggcactcat

SEQ ID NO: 3686639 - DNA, 25 bp, Homo sapien
tgggtgagagcaagaagagcttgca

SEQ ID NO: 3686640 - DNA, 25 bp, Homo sapien
agtcctcccagctggaggcagtagg

SEQ ID NO: 3686641 - DNA, 25 bp, Homo sapien
ctctctgagaaggacgccagccagg

SEQ ID NO: 3686642 - DNA, 25 bp, Homo sapien
ctctgagaaggacgccagccagggc

SEQ ID NO: 3686643 - DNA, 25 bp, Homo sapien
tctctgagaaggacgccagccaggg

SEQ ID NO: 3686644 - DNA, 25 bp, Homo sapien
gccccagacaagctgcccgtggccc

SEQ ID NO: 3686645 - DNA, 25 bp, Homo sapien
atctgacccgacagtcccaagaccc

SEQ ID NO: 3686646 - DNA, 25 bp, Homo sapien
tggcccatctgacccgacagtccca

SEQ ID NO: 3686647 - DNA, 25 bp, Homo sapien
gacaagctgcccgtggcccatctga

SEQ ID NO: 3686648 - DNA, 25 bp, Homo sapien
aatcctgttgcctcgaagcctgagc

SEQ ID NO: 3686649 - DNA, 25 bp, Homo sapien
atttggctgcgtgagcaaatccgtc

SEQ ID NO: 3686650 - DNA, 25 bp, Homo sapien
aggtgaaacgggcagaaagagcctc

SEQ ID NO: 3686651 - DNA, 25 bp, Homo sapien
gagtctcaacctgcgatccttcgtc

SEQ ID NO: 3686652 - DNA, 25 bp, Homo sapien
ctcagagcctggatacctgctatgg

SEQ ID NO: 3686653 - DNA, 25 bp, Homo sapien
cagagcctggatacctgctatgggt

SEQ ID NO: 3686654 - DNA, 25 bp, Homo sapien
gagcctggatacctgctatgggtga

SEQ ID NO: 3686655 - DNA, 25 bp, Homo sapien
agcctggatacctgctatgggtgag

SEQ ID NO: 3686656 - DNA, 25 bp, Homo sapien
gctgatgcaacagtcatacactgcc

SEQ ID NO: 3686657 - DNA, 25 bp, Homo sapien
agccaccttcatggctgatgcaaca

SEQ ID NO: 3686658 - DNA, 25 bp, Homo sapien
gaaccgcaaagccacaacttttatc

SEQ ID NO: 3686659 - DNA, 25 bp, Homo sapien
gcaaagccacaacttttatctccat

SEQ ID NO: 3686660 - DNA, 25 bp, Homo sapien
ctgacaagattagggccaaggctcc

SEQ ID NO: 3686661 - DNA, 25 bp, Homo sapien
tgctttgggtgctgccacccgttgc

SEQ ID NO: 3686662 - DNA, 25 bp, Homo sapien
cattaggccccctcaatggcttttc

SEQ ID NO: 3686663 - DNA, 25 bp, Homo sapien
cagctctggaaaccctccatgccat

SEQ ID NO: 3686664 - DNA, 25 bp, Homo sapien
gaggatgccacgcagaatgcgctga

SEQ ID NO: 3686665 - DNA, 25 bp, Homo sapien
tccttgcctgcactggcgaggatgc

SEQ ID NO: 3686666 - DNA, 25 bp, Homo sapien
tcccagcagccggaatggaacatga

SEQ ID NO: 3686667 - DNA, 25 bp, Homo sapien
aatgcgctgacaggccttcgaaagc

SEQ ID NO: 3686668 - DNA, 25 bp, Homo sapien
tgtgggaagtttttactgaagctgg

SEQ ID NO: 3686669 - DNA, 25 bp, Homo sapien
tgggaagtttttactgaagctgggc

SEQ ID NO: 3686670 - DNA, 25 bp, Homo sapien
aagtttttactgaagctgggctctc

SEQ ID NO: 3686671 - DNA, 25 bp, Homo sapien
tttttactgaagctgggctctccca

SEQ ID NO: 3686672 - DNA, 25 bp, Homo sapien
tgaacgatgattggttcatccagac

SEQ ID NO: 3686673 - DNA, 25 bp, Homo sapien
tctcttgccagctcttgaacgatga

SEQ ID NO: 3686674 - DNA, 25 bp, Homo sapien
gattggttcatccagactgccccac

SEQ ID NO: 3686675 - DNA, 25 bp, Homo sapien
cagctcttgaacgatgattggttca

SEQ ID NO: 3686676 - DNA, 25 bp, Homo sapien
cttgaatctttaggtgggccataca

SEQ ID NO: 3686677 - DNA, 25 bp, Homo sapien
cattgtcggccttcaggaggagtga

SEQ ID NO: 3686678 - DNA, 25 bp, Homo sapien
ccctggtgtctaggatgggacccct

SEQ ID NO: 3686679 - DNA, 25 bp, Homo sapien
tgctactgtgaacaaaggaggctgg

SEQ ID NO: 3686680 - DNA, 25 bp, Homo sapien
tgttctgtgctgatttgatcaaggt

SEQ ID NO: 3686681 - DNA, 25 bp, Homo sapien
tcaaggtcttccactttcctagaaa

SEQ ID NO: 3686682 - DNA, 25 bp, Homo sapien
tctgtgctgatttgatcaaggtctt

SEQ ID NO: 3686683 - DNA, 25 bp, Homo sapien
ctttcctagaaatgactctcctttg

SEQ ID NO: 3686684 - DNA, 25 bp, Homo sapien
caaggccaggaagcgtcagcatgtg

SEQ ID NO: 3686685 - DNA, 25 bp, Homo sapien
caggaagcgtcagcatgtgggtctt

SEQ ID NO: 3686686 - DNA, 25 bp, Homo sapien
gcttccggacgagccaaggatggca

SEQ ID NO: 3686687 - DNA, 25 bp, Homo sapien
agtgtcttgggggacaagctgacaa

SEQ ID NO: 3686688 - DNA, 25 bp, Homo sapien
tggccttgcagctccgtttgtccct

SEQ ID NO: 3686689 - DNA, 25 bp, Homo sapien
gtagtacatctggaccccaaaaggc

SEQ ID NO: 3686690 - DNA, 25 bp, Homo sapien
cgcggaacccacagaccttccctga

SEQ ID NO: 3686691 - DNA, 25 bp, Homo sapien
tccttctggtagtacatctggaccc

SEQ ID NO: 3686692 - DNA, 25 bp, Homo sapien
tatgacagtcctttgggcatcgatg

SEQ ID NO: 3686693 - DNA, 25 bp, Homo sapien
ggcatcgatgtgcaaaggagagctc

SEQ ID NO: 3686694 - DNA, 25 bp, Homo sapien
tcattcagggcggtgttggcccacc

SEQ ID NO: 3686695 - DNA, 25 bp, Homo sapien
ttatgttggtcttgcaaagccttgg

SEQ ID NO: 3686696 - DNA, 25 bp, Homo sapien
gcctggggggttgtttctctctgga

SEQ ID NO: 3686697 - DNA, 25 bp, Homo sapien
ttgggggtaggtgatgggattttca

SEQ ID NO: 3686698 - DNA, 25 bp, Homo sapien
atcagctcagcaaagcccagtggcc

SEQ ID NO: 3686699 - DNA, 25 bp, Homo sapien
gtaggtgatgggattttcatcagcc

SEQ ID NO: 3686700 - DNA, 25 bp, Homo sapien
tcacttggtacctcttaaagtagga

SEQ ID NO: 3686701 - DNA, 25 bp, Homo sapien
atcagttttaccctatcatcttctt

SEQ ID NO: 3686702 - DNA, 25 bp, Homo sapien
gcataataatcagttttaccctatc

SEQ ID NO: 3686703 - DNA, 25 bp, Homo sapien
ataatcagttttaccctatcatctt

SEQ ID NO: 3686704 - DNA, 25 bp, Homo sapien
ctagatgggagtaagcaatctgaca

SEQ ID NO: 3686705 - DNA, 25 bp, Homo sapien
agttcatgtgcatatgctgtgcaga

SEQ ID NO: 3686706 - DNA, 25 bp, Homo sapien
gccatattttggcagttcatgtgca

SEQ ID NO: 3686707 - DNA, 25 bp, Homo sapien
ggcagttcatgtgcatatgctgtgc

SEQ ID NO: 3686708 - DNA, 25 bp, Homo sapien
ttggcagttcatgtgcatatgctgt

SEQ ID NO: 3686709 - DNA, 25 bp, Homo sapien
cacttggtgttcacagatcttttcc

SEQ ID NO: 3686710 - DNA, 25 bp, Homo sapien
tattgcggttctagcaaggcctgca

SEQ ID NO: 3686711 - DNA, 25 bp, Homo sapien
ttattgcggttctagcaaggcctgc

SEQ ID NO: 3686712 - DNA, 25 bp, Homo sapien
ctttattgcggttctagcaaggcct

SEQ ID NO: 3686713 - DNA, 25 bp, Homo sapien
tgcggttctagcaaggcctgcatcc

SEQ ID NO: 3686714 - DNA, 25 bp, Homo sapien
ataactagggaggcatttggtactg

SEQ ID NO: 3686715 - DNA, 25 bp, Homo sapien
taactagggaggcatttggtactgt

SEQ ID NO: 3686716 - DNA, 25 bp, Homo sapien
agacatcactgatggtgaaaaatga

SEQ ID NO: 3686717 - DNA, 25 bp, Homo sapien
catcactgatggtgaaaaatgagtt

SEQ ID NO: 3686718 - DNA, 25 bp, Homo sapien
gctgtctgaagacatcactgatggt

SEQ ID NO: 3686719 - DNA, 25 bp, Homo sapien
tgaagacatcactgatggtgaaaaa

SEQ ID NO: 3686720 - DNA, 25 bp, Homo sapien
taacccatatcttgtggtaactcac

SEQ ID NO: 3686721 - DNA, 25 bp, Homo sapien
ccattccactaacccatatcttgtg

SEQ ID NO: 3686722 - DNA, 25 bp, Homo sapien
tccactaacccatatcttgtggtaa

SEQ ID NO: 3686723 - DNA, 25 bp, Homo sapien
tttccattccactaacccatatctt

SEQ ID NO: 3686724 - DNA, 25 bp, Homo sapien
tttgggtaggctgtcgacagcaaag

SEQ ID NO: 3686725 - DNA, 25 bp, Homo sapien
agacctgcaagaccaccagtctgat

SEQ ID NO: 3686726 - DNA, 25 bp, Homo sapien
caaagatgccaagggaacctgacat

SEQ ID NO: 3686727 - DNA, 25 bp, Homo sapien
gagaagacctgcaagaccaccagtc

SEQ ID NO: 3686728 - DNA, 25 bp, Homo sapien
tgtccgtttgcagggcccttgctga

SEQ ID NO: 3686729 - DNA, 25 bp, Homo sapien
gctcttacgagcaatgaggtcattc

SEQ ID NO: 3686730 - DNA, 25 bp, Homo sapien
tgtccttgttcattggtccctgcag

SEQ ID NO: 3686731 - DNA, 25 bp, Homo sapien
gcaggttgtccgtttgcagggccct

SEQ ID NO: 3686732 - DNA, 25 bp, Homo sapien
tgaggctcggactttcaacgagaaa

SEQ ID NO: 3686733 - DNA, 25 bp, Homo sapien
tgttttgtgtgaggctcggactttc

SEQ ID NO: 3686734 - DNA, 25 bp, Homo sapien
aaactcctgatgtgttttgtgtgag

SEQ ID NO: 3686735 - DNA, 25 bp, Homo sapien
ctttcaacgagaaagctgtttccct

SEQ ID NO: 3686736 - DNA, 25 bp, Homo sapien
tccttcacatccacgagcaagattt

SEQ ID NO: 3686737 - DNA, 25 bp, Homo sapien
cgtcattctccttcacatccacgag

SEQ ID NO: 3686738 - DNA, 25 bp, Homo sapien
tcacatccacgagcaagatttctgt

SEQ ID NO: 3686739 - DNA, 25 bp, Homo sapien
tcagctctcctcttcgtcattctcc

SEQ ID NO: 3686740 - DNA, 25 bp, Homo sapien
tgatgtcacattggtggtgtgattg

SEQ ID NO: 3686741 - DNA, 25 bp, Homo sapien
taaatggtggcattgatggatgaca

SEQ ID NO: 3686742 - DNA, 25 bp, Homo sapien
tcacattggtggtgtgattggtagt

SEQ ID NO: 3686743 - DNA, 25 bp, Homo sapien
cacaggcccaaacgacccaagaaag

SEQ ID NO: 3686744 - DNA, 25 bp, Homo sapien
ataaataaaggcgacagccgctgcc

SEQ ID NO: 3686745 - DNA, 25 bp, Homo sapien
gattccggcgcctctgtaacttgac

SEQ ID NO: 3686746 - DNA, 25 bp, Homo sapien
tgctcccggcaaagaggacggaaaa

SEQ ID NO: 3686747 - DNA, 25 bp, Homo sapien
caaaaggctctatccaaactgcggg

SEQ ID NO: 3686748 - DNA, 25 bp, Homo sapien
tgcagctcggccgtccgaaagtggg

SEQ ID NO: 3686749 - DNA, 25 bp, Homo sapien
gcaccggtggctgccgctttgtggg

SEQ ID NO: 3686750 - DNA, 25 bp, Homo sapien
ggctgagtgccagcgagcagagggc

SEQ ID NO: 3686751 - DNA, 25 bp, Homo sapien
cgctttgtgggtgcgctccgctacc

SEQ ID NO: 3686752 - DNA, 25 bp, Homo sapien
cagcagttgattgactcgtcccaaa

SEQ ID NO: 3686753 - DNA, 25 bp, Homo sapien
ctcgtccagcagttgattgactcgt

SEQ ID NO: 3686754 - DNA, 25 bp, Homo sapien
tgactcgtcccaaaatagccgtctc

SEQ ID NO: 3686755 - DNA, 25 bp, Homo sapien
tgattgactcgtcccaaaatagccg

SEQ ID NO: 3686756 - DNA, 25 bp, Homo sapien
ccgcggggagggataaaagccagca

SEQ ID NO: 3686757 - DNA, 25 bp, Homo sapien
gcggggagggataaaagccagcaac

SEQ ID NO: 3686758 - DNA, 25 bp, Homo sapien
cgcggggagggataaaagccagcaa

SEQ ID NO: 3686759 - DNA, 25 bp, Homo sapien
gccgcggggagggataaaagccagc

SEQ ID NO: 3686760 - DNA, 25 bp, Homo sapien
ggctcgcagagagcgagcgcccgcg

SEQ ID NO: 3686761 - DNA, 25 bp, Homo sapien
cgcccgcggacaccggctgaacagt

SEQ ID NO: 3686762 - DNA, 25 bp, Homo sapien
gtagggcagcgtctgtccgtgtccc

SEQ ID NO: 3686763 - DNA, 25 bp, Homo sapien
gcaactcgcgcgaacctggggctcg

SEQ ID NO: 3686764 - DNA, 25 bp, Homo sapien
tgcccgaggcgggagtcgctgggtc

SEQ ID NO: 3686765 - DNA, 25 bp, Homo sapien
aagccgggggcgcttgcccgaggcg

SEQ ID NO: 3686766 - DNA, 25 bp, Homo sapien
aggcgggagtcgctgggtcatgctc

SEQ ID NO: 3686767 - DNA, 25 bp, Homo sapien
gggcgcttgcccgaggcgggagtcg

SEQ ID NO: 3686768 - DNA, 25 bp, Homo sapien
aggagtggagcttgcccgcctccgc

SEQ ID NO: 3686769 - DNA, 25 bp, Homo sapien
cgcgcttgccgctgcgcgggcgcgg

SEQ ID NO: 3686770 - DNA, 25 bp, Homo sapien
aagggaggagtggagcttgcccgcc

SEQ ID NO: 3686771 - DNA, 25 bp, Homo sapien
gcggctgtcacaccaccctggccgg

SEQ ID NO: 3686772 - DNA, 25 bp, Homo sapien
aaaagaaggtgtggactaatttgtg

SEQ ID NO: 3686773 - DNA, 25 bp, Homo sapien
tgtggactaatttgtggccaaggac

SEQ ID NO: 3686774 - DNA, 25 bp, Homo sapien
cacacttggaccctagcggcctggg

SEQ ID NO: 3686775 - DNA, 25 bp, Homo sapien
ctaatttgtggccaaggacagcaga

SEQ ID NO: 3686776 - DNA, 25 bp, Homo sapien
agtacgcttgccctgtgaccgctct

SEQ ID NO: 3686777 - DNA, 25 bp, Homo sapien
tgcaccactagcaccagtacgcttg

SEQ ID NO: 3686778 - DNA, 25 bp, Homo sapien
catggacggcccgatggagttctcc

SEQ ID NO: 3686779 - DNA, 25 bp, Homo sapien
ggcagggcgtgggaatgagctgaca

SEQ ID NO: 3686780 - DNA, 25 bp, Homo sapien
ttctgcctgagcccagagatgctgc

SEQ ID NO: 3686781 - DNA, 25 bp, Homo sapien
ctgcctgagcccagagatgctgcac

SEQ ID NO: 3686782 - DNA, 25 bp, Homo sapien
tcattctgcctgagcccagagatgc

SEQ ID NO: 3686783 - DNA, 25 bp, Homo sapien
cattctgcctgagcccagagatgct

SEQ ID NO: 3686784 - DNA, 25 bp, Homo sapien
gagtatgcgacttggcatgtctaag

SEQ ID NO: 3686785 - DNA, 25 bp, Homo sapien
tggcatgtctaagtctgaagcagtg

SEQ ID NO: 3686786 - DNA, 25 bp, Homo sapien
gcgacttggcatgtctaagtctgaa

SEQ ID NO: 3686787 - DNA, 25 bp, Homo sapien
ctagagtatgcgacttggcatgtct

SEQ ID NO: 3686788 - DNA, 25 bp, Homo sapien
aagtaatatgggaggtgtcataagg

SEQ ID NO: 3686789 - DNA, 25 bp, Homo sapien
taggatgacagccagagctatttgc

SEQ ID NO: 3686790 - DNA, 25 bp, Homo sapien
ttgccactcagtgtgggccacaaga

SEQ ID NO: 3686791 - DNA, 25 bp, Homo sapien
cctgacaaggttgacgagttaggat

SEQ ID NO: 3686792 - DNA, 25 bp, Homo sapien
cccgaccctcgaggagttgtcatgt

SEQ ID NO: 3686793 - DNA, 25 bp, Homo sapien
accccgaccctcgaggagttgtcat

SEQ ID NO: 3686794 - DNA, 25 bp, Homo sapien
gaccctcgaggagttgtcatgttca

SEQ ID NO: 3686795 - DNA, 25 bp, Homo sapien
cgaccctcgaggagttgtcatgttc

SEQ ID NO: 3686796 - DNA, 25 bp, Homo sapien
accaggagctcgtagacaccaagcc

SEQ ID NO: 3686797 - DNA, 25 bp, Homo sapien
gagtcaccaggagctcgtagacacc

SEQ ID NO: 3686798 - DNA, 25 bp, Homo sapien
agacaccaagccctggaaagcagct

SEQ ID NO: 3686799 - DNA, 25 bp, Homo sapien
aagaggagtcaccaggagctcgtag

SEQ ID NO: 3686800 - DNA, 25 bp, Homo sapien
atgtctttggggcctcccggcgcct

SEQ ID NO: 3686801 - DNA, 25 bp, Homo sapien
ctggagatgtctttggggcctcccg

SEQ ID NO: 3686802 - DNA, 25 bp, Homo sapien
ctggtgggcagttacatcctggaga

SEQ ID NO: 3686803 - DNA, 25 bp, Homo sapien
ccggcgcctccttgagtggagcttc

SEQ ID NO: 3686804 - DNA, 25 bp, Homo sapien
gcttctcccattaggctggctgaag

SEQ ID NO: 3686805 - DNA, 25 bp, Homo sapien
taggctggctgaaggcgacttctcc

SEQ ID NO: 3686806 - DNA, 25 bp, Homo sapien
aaggcgacttctccgctttcatccg

SEQ ID NO: 3686807 - DNA, 25 bp, Homo sapien
cagcacactgacccggaaggcagct

SEQ ID NO: 3686808 - DNA, 25 bp, Homo sapien
tttccactcatgtcgtcatcaccat

SEQ ID NO: 3686809 - DNA, 25 bp, Homo sapien
gcccttttccactcatgtcgtcatc

SEQ ID NO: 3686810 - DNA, 25 bp, Homo sapien
catcaccatcatcgtggcaactaac

SEQ ID NO: 3686811 - DNA, 25 bp, Homo sapien
catcatcgtggcaactaacaatcat

SEQ ID NO: 3686812 - DNA, 25 bp, Homo sapien
cagcctttaaggcaagtcctgctct

SEQ ID NO: 3686813 - DNA, 25 bp, Homo sapien
aacacagcctttaaggcaagtcctg

SEQ ID NO: 3686814 - DNA, 25 bp, Homo sapien
cacaaacacagcctttaaggcaagt

SEQ ID NO: 3686815 - DNA, 25 bp, Homo sapien
gggcacaaacacagcctttaaggca

SEQ ID NO: 3686816 - DNA, 25 bp, Homo sapien
agaatcacttccaacccaactacag

SEQ ID NO: 3686817 - DNA, 25 bp, Homo sapien
ccctggagagttccttggacaatgg

SEQ ID NO: 3686818 - DNA, 25 bp, Homo sapien
caactacagctgctacaaatgtagc

SEQ ID NO: 3686819 - DNA, 25 bp, Homo sapien
ccttggacaatggatttcctgcaaa

SEQ ID NO: 3686820 - DNA, 25 bp, Homo sapien
gggtgctcaatctagttactgtaac

SEQ ID NO: 3686821 - DNA, 25 bp, Homo sapien
taacttccagttattgtaactgccc

SEQ ID NO: 3686822 - DNA, 25 bp, Homo sapien
gggcagtccttcttcacttaactcc

SEQ ID NO: 3686823 - DNA, 25 bp, Homo sapien
cattgtgggagtgaatgacgcccct

SEQ ID NO: 3686824 - DNA, 25 bp, Homo sapien
agagcacgtaggcagtccagaagtc

SEQ ID NO: 3686825 - DNA, 25 bp, Homo sapien
aaagagcacgtaggcagtccagaag

SEQ ID NO: 3686826 - DNA, 25 bp, Homo sapien
ctaaagagcacgtaggcagtccaga

SEQ ID NO: 3686827 - DNA, 25 bp, Homo sapien
gagcacgtaggcagtccagaagtct

SEQ ID NO: 3686828 - DNA, 25 bp, Homo sapien
gcttgttgatgtagttcatgttcat

SEQ ID NO: 3686829 - DNA, 25 bp, Homo sapien
tgtagttcatgttcatcctggagcc

SEQ ID NO: 3686830 - DNA, 25 bp, Homo sapien
tgatgtagttcatgttcatcctgga

SEQ ID NO: 3686831 - DNA, 25 bp, Homo sapien
tctacccgcaggtggacccaggctg

SEQ ID NO: 3686832 - DNA, 25 bp, Homo sapien
cccaaactagatgcctatgcttctg

SEQ ID NO: 3686833 - DNA, 25 bp, Homo sapien
cattcagggattccttcaaatgcca

SEQ ID NO: 3686834 - DNA, 25 bp, Homo sapien
tcaggagtagtcactccttttcttg

SEQ ID NO: 3686835 - DNA, 25 bp, Homo sapien
gatgcctatgcttctgtttagcact

SEQ ID NO: 3686836 - DNA, 25 bp, Homo sapien
tggggcatggcacagaaccagtgct

SEQ ID NO: 3686837 - DNA, 25 bp, Homo sapien
agccactgagttacccgtgtgtttc

SEQ ID NO: 3686838 - DNA, 25 bp, Homo sapien
gccactgagttacccgtgtgtttcc

SEQ ID NO: 3686839 - DNA, 25 bp, Homo sapien
aggatggggcatggcacagaaccag

SEQ ID NO: 3686840 - DNA, 25 bp, Homo sapien
ttgagaaggactcacatccaggttc

SEQ ID NO: 3686841 - DNA, 25 bp, Homo sapien
gggcctcattgtccagattcccgaa

SEQ ID NO: 3686842 - DNA, 25 bp, Homo sapien
taaggtcccccatgggatgctgatg

SEQ ID NO: 3686843 - DNA, 25 bp, Homo sapien
ttgttgagaaggactcacatccagg

SEQ ID NO: 3686844 - DNA, 25 bp, Homo sapien
tagccgcaggtgatagacaacaaac

SEQ ID NO: 3686845 - DNA, 25 bp, Homo sapien
cacactgatgactgctatgagaagt

SEQ ID NO: 3686846 - DNA, 25 bp, Homo sapien
gttggagtcgaaacctagataatga

SEQ ID NO: 3686847 - DNA, 25 bp, Homo sapien
tgctttagcttggatgactgaggaa

SEQ ID NO: 3686848 - DNA, 25 bp, Homo sapien
agctcccttgatgccagagtcccac

SEQ ID NO: 3686849 - DNA, 25 bp, Homo sapien
cagagtcccacatcccttggaatgg

SEQ ID NO: 3686850 - DNA, 25 bp, Homo sapien
ttgatgccagagtcccacatccctt

SEQ ID NO: 3686851 - DNA, 25 bp, Homo sapien
gctcaggaaaatggccgcagaaggc

SEQ ID NO: 3686852 - DNA, 25 bp, Homo sapien
taacccctgctttcaatctggaggt

SEQ ID NO: 3686853 - DNA, 25 bp, Homo sapien
agcctggcggggcacttggtctggc

SEQ ID NO: 3686854 - DNA, 25 bp, Homo sapien
cttgcattgtttggcaagtgcctga

SEQ ID NO: 3686855 - DNA, 25 bp, Homo sapien
tccaggggcttcttgacactctgcc

SEQ ID NO: 3686856 - DNA, 25 bp, Homo sapien
tgaggaccgttagcatgcccgtgtc

SEQ ID NO: 3686857 - DNA, 25 bp, Homo sapien
tgctttgcagaacacgggacagtgg

SEQ ID NO: 3686858 - DNA, 25 bp, Homo sapien
ctcactgtgcacgtcagggagggcc

SEQ ID NO: 3686859 - DNA, 25 bp, Homo sapien
taacagatcccgtagagatgaggac

SEQ ID NO: 3686860 - DNA, 25 bp, Homo sapien
tgtgtccttacaaccgacatcatcc

SEQ ID NO: 3686861 - DNA, 25 bp, Homo sapien
tacaaccgacatcatccacatcgtg

SEQ ID NO: 3686862 - DNA, 25 bp, Homo sapien
tccttacaaccgacatcatccacat

SEQ ID NO: 3686863 - DNA, 25 bp, Homo sapien
gtgtccttacaaccgacatcatcca

SEQ ID NO: 3686864 - DNA, 25 bp, Homo sapien
tggggctacagcgttcatggggaca

SEQ ID NO: 3686865 - DNA, 25 bp, Homo sapien
aatgtggggctacagcgttcatggg

SEQ ID NO: 3686866 - DNA, 25 bp, Homo sapien
gctacagcgttcatggggacaggac

SEQ ID NO: 3686867 - DNA, 25 bp, Homo sapien
ggaatgtggggctacagcgttcatg

SEQ ID NO: 3686868 - DNA, 25 bp, Homo sapien
tgggagtccgggtcttccagtggga

SEQ ID NO: 3686869 - DNA, 25 bp, Homo sapien
ggtacacatacccactactcaactc

SEQ ID NO: 3686870 - DNA, 25 bp, Homo sapien
ctgagggcccatggtacacataccc

SEQ ID NO: 3686871 - DNA, 25 bp, Homo sapien
catggtacacatacccggtacacat

SEQ ID NO: 3686872 - DNA, 25 bp, Homo sapien
gggcccatggtacacatacccggta

SEQ ID NO: 3686873 - DNA, 25 bp, Homo sapien
cacacgtccaggcatcccaatggca

SEQ ID NO: 3686874 - DNA, 25 bp, Homo sapien
aggcatcccaatggcacctttgtcc

SEQ ID NO: 3686875 - DNA, 25 bp, Homo sapien
gtccaggcatcccaatggcaccttt

SEQ ID NO: 3686876 - DNA, 25 bp, Homo sapien
tccaggcatcccaatggcacctttg

SEQ ID NO: 3686877 - DNA, 25 bp, Homo sapien
cccaggactgtgttgtgatgctggt

SEQ ID NO: 3686878 - DNA, 25 bp, Homo sapien
ggtgtctaggaggtttgcaggtcca

SEQ ID NO: 3686879 - DNA, 25 bp, Homo sapien
gccaagctagacaagcctggagtcc

SEQ ID NO: 3686880 - DNA, 25 bp, Homo sapien
gacacacacctctggaagaacggag

SEQ ID NO: 3686881 - DNA, 25 bp, Homo sapien
tctcgcctggttggccctttactcc

SEQ ID NO: 3686882 - DNA, 25 bp, Homo sapien
cttctcgcctggttggccctttact

SEQ ID NO: 3686883 - DNA, 25 bp, Homo sapien
ttctcgcctggttggccctttactc

SEQ ID NO: 3686884 - DNA, 25 bp, Homo sapien
gaagaggagcgggaaagagaggaac

SEQ ID NO: 3686885 - DNA, 25 bp, Homo sapien
gagcgaggggcagggaggtatggag

SEQ ID NO: 3686886 - DNA, 25 bp, Homo sapien
cgaggggcagggaggtatggagaag

SEQ ID NO: 3686887 - DNA, 25 bp, Homo sapien
gaggagcgggaaagagaggaaccaa

SEQ ID NO: 3686888 - DNA, 25 bp, Homo sapien
ggccgcggggaccaatgatggacag

SEQ ID NO: 3686889 - DNA, 25 bp, Homo sapien
gggggccgcggggaccaatgatgga

SEQ ID NO: 3686890 - DNA, 25 bp, Homo sapien
gcggggaccaatgatggacagccca

SEQ ID NO: 3686891 - DNA, 25 bp, Homo sapien
ccgcggggaccaatgatggacagcc

SEQ ID NO: 3686892 - DNA, 25 bp, Homo sapien
cggggcagccaccgtgtgagcccag

SEQ ID NO: 3686893 - DNA, 25 bp, Homo sapien
ccaggagcacatgcgacagtgacat

SEQ ID NO: 3686894 - DNA, 25 bp, Homo sapien
gcccaggagcacatgcgacagtgac

SEQ ID NO: 3686895 - DNA, 25 bp, Homo sapien
cccaggagcacatgcgacagtgaca

SEQ ID NO: 3686896 - DNA, 25 bp, Homo sapien
gggcattggtgctgcacctcctcca

SEQ ID NO: 3686897 - DNA, 25 bp, Homo sapien
ttggccagggcattggtgctgcacc

SEQ ID NO: 3686898 - DNA, 25 bp, Homo sapien
tggccagggcattggtgctgcacct

SEQ ID NO: 3686899 - DNA, 25 bp, Homo sapien
gttagaacctgggagcctgtcttct

SEQ ID NO: 3686900 - DNA, 25 bp, Homo sapien
gtcctcgatgttagaacctgggagc

SEQ ID NO: 3686901 - DNA, 25 bp, Homo sapien
tcagtcctcgatgttagaacctggg

SEQ ID NO: 3686902 - DNA, 25 bp, Homo sapien
gatgttagaacctgggagcctgtct

SEQ ID NO: 3686903 - DNA, 25 bp, Homo sapien
gaggatgctgggcttcgttaagact

SEQ ID NO: 3686904 - DNA, 25 bp, Homo sapien
gatagctcgagccactgggtgatgg

SEQ ID NO: 3686905 - DNA, 25 bp, Homo sapien
tgccaatgtaggcacccacctggag

SEQ ID NO: 3686906 - DNA, 25 bp, Homo sapien
ttaagactcctggtatgataaaacc

SEQ ID NO: 3686907 - DNA, 25 bp, Homo sapien
tacacccaccatagccgatttcaag

SEQ ID NO: 3686908 - DNA, 25 bp, Homo sapien
gcagatgacagttcccattggactt

SEQ ID NO: 3686909 - DNA, 25 bp, Homo sapien
cattggactttacggcatctctaac

SEQ ID NO: 3686910 - DNA, 25 bp, Homo sapien
caacaagactccttgccggcaaatg

SEQ ID NO: 3686911 - DNA, 25 bp, Homo sapien
tccagggctaaccaaggctttttca

SEQ ID NO: 3686912 - DNA, 25 bp, Homo sapien
ggtagggataatcacacagtttgtt

SEQ ID NO: 3686913 - DNA, 25 bp, Homo sapien
agtttgttaattacagagcctgccc

SEQ ID NO: 3686914 - DNA, 25 bp, Homo sapien
ggatgaatgtctccaaccaggatca

SEQ ID NO: 3686915 - DNA, 25 bp, Homo sapien
aagaaacatcttccatcccgctagg

SEQ ID NO: 3686916 - DNA, 25 bp, Homo sapien
aacatcttccatcccgctagggaca

SEQ ID NO: 3686917 - DNA, 25 bp, Homo sapien
tccatcccgctagggacaatgttta

SEQ ID NO: 3686918 - DNA, 25 bp, Homo sapien
tcttccatcccgctagggacaatgt

SEQ ID NO: 3686919 - DNA, 25 bp, Homo sapien
gagacacatgagattgagcaaggag

SEQ ID NO: 3686920 - DNA, 25 bp, Homo sapien
acaagagacacatgagattgagcaa

SEQ ID NO: 3686921 - DNA, 25 bp, Homo sapien
gacacatgagattgagcaaggagga

SEQ ID NO: 3686922 - DNA, 25 bp, Homo sapien
aagagacacatgagattgagcaagg

SEQ ID NO: 3686923 - DNA, 25 bp, Homo sapien
ctgaaaccagaaaggccagatgtaa

SEQ ID NO: 3686924 - DNA, 25 bp, Homo sapien
gaaaggccagatgtaaagactgagc

SEQ ID NO: 3686925 - DNA, 25 bp, Homo sapien
aaggccagatgtaaagactgagcat

SEQ ID NO: 3686926 - DNA, 25 bp, Homo sapien
accagaaaggccagatgtaaagact

SEQ ID NO: 3686927 - DNA, 25 bp, Homo sapien
tggaaggagaagagggtgagtacca

SEQ ID NO: 3686928 - DNA, 25 bp, Homo sapien
ggagaagagggtgagtaccaggtgc

SEQ ID NO: 3686929 - DNA, 25 bp, Homo sapien
gagaagagggtgagtaccaggtgca

SEQ ID NO: 3686930 - DNA, 25 bp, Homo sapien
aaggagaagagggtgagtaccaggt

SEQ ID NO: 3686931 - DNA, 25 bp, Homo sapien
atgtcgccctttggtcctgggtggc

SEQ ID NO: 3686932 - DNA, 25 bp, Homo sapien
tgtcgccctttggtcctgggtggcc

SEQ ID NO: 3686933 - DNA, 25 bp, Homo sapien
catgtcgccctttggtcctgggtgg

SEQ ID NO: 3686934 - DNA, 25 bp, Homo sapien
cacccatctcgggaaggcaggaaag

SEQ ID NO: 3686935 - DNA, 25 bp, Homo sapien
ccccacccatctcgggaaggcagga

SEQ ID NO: 3686936 - DNA, 25 bp, Homo sapien
cccacccatctcgggaaggcaggaa

SEQ ID NO: 3686937 - DNA, 25 bp, Homo sapien
ccacccatctcgggaaggcaggaaa

SEQ ID NO: 3686938 - DNA, 25 bp, Homo sapien
agtgcttggctgtgcctgtgaggct

SEQ ID NO: 3686939 - DNA, 25 bp, Homo sapien
gcagtgcttggctgtgcctgtgagg

SEQ ID NO: 3686940 - DNA, 25 bp, Homo sapien
tttgcagtgcttggctgtgcctgtg

SEQ ID NO: 3686941 - DNA, 25 bp, Homo sapien
ttgcagtgcttggctgtgcctgtga

SEQ ID NO: 3686942 - DNA, 25 bp, Homo sapien
cggctgtcctgggggacccgtcaga

SEQ ID NO: 3686943 - DNA, 25 bp, Homo sapien
ggctgtcctgggggacccgtcagac

SEQ ID NO: 3686944 - DNA, 25 bp, Homo sapien
gctgtcctgggggacccgtcagacc

SEQ ID NO: 3686945 - DNA, 25 bp, Homo sapien
gggaaatagatggatgaggtaccaa

SEQ ID NO: 3686946 - DNA, 25 bp, Homo sapien
ggaaatagatggatgaggtaccaac

SEQ ID NO: 3686947 - DNA, 25 bp, Homo sapien
cggtgtgggtactctccacactgac

SEQ ID NO: 3686948 - DNA, 25 bp, Homo sapien
ggtgtgggtactctccacactgacc

SEQ ID NO: 3686949 - DNA, 25 bp, Homo sapien
ccggtgtgggtactctccacactga

SEQ ID NO: 3686950 - DNA, 25 bp, Homo sapien
gagtcagacgtacgtacaaaggggc

SEQ ID NO: 3686951 - DNA, 25 bp, Homo sapien
tacagacacgcacgggtgatgagcg

SEQ ID NO: 3686952 - DNA, 25 bp, Homo sapien
tacaaaggggcggatgtacagacac

SEQ ID NO: 3686953 - DNA, 25 bp, Homo sapien
tgatgagcggctccatatagcacat

SEQ ID NO: 3686954 - DNA, 25 bp, Homo sapien
ttccaggccccgagacctgccaccc

SEQ ID NO: 3686955 - DNA, 25 bp, Homo sapien
gggccacctggatttcttggtgtct

SEQ ID NO: 3686956 - DNA, 25 bp, Homo sapien
ggatttcttggtgtcttccaggccc

SEQ ID NO: 3686957 - DNA, 25 bp, Homo sapien
tggtgtcttccaggccccgagacct

SEQ ID NO: 3686958 - DNA, 25 bp, Homo sapien
cagagacagggcgacagggaccgtg

SEQ ID NO: 3686959 - DNA, 25 bp, Homo sapien
gaggtggcagagacagggcgacagg

SEQ ID NO: 3686960 - DNA, 25 bp, Homo sapien
gagacagggcgacagggaccgtgag

SEQ ID NO: 3686961 - DNA, 25 bp, Homo sapien
gcgacagggaccgtgaggggagagc

SEQ ID NO: 3686962 - DNA, 25 bp, Homo sapien
cttcagggcaattatttggctggag

SEQ ID NO: 3686963 - DNA, 25 bp, Homo sapien
agggcaattatttggctggagcgca

SEQ ID NO: 3686964 - DNA, 25 bp, Homo sapien
tcagggcaattatttggctggagcg

SEQ ID NO: 3686965 - DNA, 25 bp, Homo sapien
ggcaattatttggctggagcgcaga

SEQ ID NO: 3686966 - DNA, 25 bp, Homo sapien
tcgcactgaattgaggagaggcagc

SEQ ID NO: 3686967 - DNA, 25 bp, Homo sapien
gagccagtcgcactgaattgaggag

SEQ ID NO: 3686968 - DNA, 25 bp, Homo sapien
ggtggagccagtcgcactgaattga

SEQ ID NO: 3686969 - DNA, 25 bp, Homo sapien
cagtcgcactgaattgaggagaggc

SEQ ID NO: 3686970 - DNA, 25 bp, Homo sapien
agggaggtagcgatggcatcatgct

SEQ ID NO: 3686971 - DNA, 25 bp, Homo sapien
ggaggtagcgatggcatcatgctcc

SEQ ID NO: 3686972 - DNA, 25 bp, Homo sapien
gggaggtagcgatggcatcatgctc

SEQ ID NO: 3686973 - DNA, 25 bp, Homo sapien
catgcctgtccacgggatggactgt

SEQ ID NO: 3686974 - DNA, 25 bp, Homo sapien
tgttagagggaaggcccccagagct

SEQ ID NO: 3686975 - DNA, 25 bp, Homo sapien
gttcatggaaacgaatgttagaggg

SEQ ID NO: 3686976 - DNA, 25 bp, Homo sapien
catggaaacgaatgttagagggaag

SEQ ID NO: 3686977 - DNA, 25 bp, Homo sapien
tcatggaaacgaatgttagagggaa

SEQ ID NO: 3686978 - DNA, 25 bp, Homo sapien
gggccctggtggaccttggatgctg

SEQ ID NO: 3686979 - DNA, 25 bp, Homo sapien
tgggtgccccagaggtccacttggt

SEQ ID NO: 3686980 - DNA, 25 bp, Homo sapien
ggatgctggcctggctctgttcgcc

SEQ ID NO: 3686981 - DNA, 25 bp, Homo sapien
aggtggccccataggccctggcagt

SEQ ID NO: 3686982 - DNA, 25 bp, Homo sapien
gcaggcaggccattggcggtctcct

SEQ ID NO: 3686983 - DNA, 25 bp, Homo sapien
gggcaggcaggccattggcggtctc

SEQ ID NO: 3686984 - DNA, 25 bp, Homo sapien
caggcaggccattggcggtctcctc

SEQ ID NO: 3686985 - DNA, 25 bp, Homo sapien
aggcaggccattggcggtctcctcc

SEQ ID NO: 3686986 - DNA, 25 bp, Homo sapien
tgggtggaagacccgttttctctga

SEQ ID NO: 3686987 - DNA, 25 bp, Homo sapien
tcctggggctttgttgtataaattg

SEQ ID NO: 3686988 - DNA, 25 bp, Homo sapien
ataacattagtcttacgggtgggtg

SEQ ID NO: 3686989 - DNA, 25 bp, Homo sapien
tgaagtccaggtacccactgagtta

SEQ ID NO: 3686990 - DNA, 25 bp, Homo sapien
ctttggtccaggaggcccaggtaag

SEQ ID NO: 3686991 - DNA, 25 bp, Homo sapien
ttggtccaggaggcccaggtaagcc

SEQ ID NO: 3686992 - DNA, 25 bp, Homo sapien
tttggtccaggaggcccaggtaagc

SEQ ID NO: 3686993 - DNA, 25 bp, Homo sapien
gccgtggtagccctggatccctggg

SEQ ID NO: 3686994 - DNA, 25 bp, Homo sapien
ttccggccgtggtagccctggatcc

SEQ ID NO: 3686995 - DNA, 25 bp, Homo sapien
cttccggccgtggtagccctggatc

SEQ ID NO: 3686996 - DNA, 25 bp, Homo sapien
cggccgtggtagccctggatccctg

SEQ ID NO: 3686997 - DNA, 25 bp, Homo sapien
taatttcgcaagtgacccgggcttc

SEQ ID NO: 3686998 - DNA, 25 bp, Homo sapien
tcttaatttcgcaagtgacccgggc

SEQ ID NO: 3686999 - DNA, 25 bp, Homo sapien
tgacccgggcttccttgatccccat

SEQ ID NO: 3687000 - DNA, 25 bp, Homo sapien
aattctcttaatttcgcaagtgacc

SEQ ID NO: 3687001 - DNA, 25 bp, Homo sapien
gaaatgagaaagcatgaggagagga

SEQ ID NO: 3687002 - DNA, 25 bp, Homo sapien
gaagaaatgagaaagcatgaggaga

SEQ ID NO: 3687003 - DNA, 25 bp, Homo sapien
aatgagaaagcatgaggagaggacc

SEQ ID NO: 3687004 - DNA, 25 bp, Homo sapien
aagaaatgagaaagcatgaggagag

SEQ ID NO: 3687005 - DNA, 25 bp, Homo sapien
gcttgcctggcatccctggcatgcc

SEQ ID NO: 3687006 - DNA, 25 bp, Homo sapien
tggcatccctggcatgccccgttct

SEQ ID NO: 3687007 - DNA, 25 bp, Homo sapien
tgcctggcatccctggcatgccccg

SEQ ID NO: 3687008 - DNA, 25 bp, Homo sapien
gcatccctggcatgccccgttctcc

SEQ ID NO: 3687009 - DNA, 25 bp, Homo sapien
ttggggctgcctgggatgtggggaa

SEQ ID NO: 3687010 - DNA, 25 bp, Homo sapien
gaggggccttggggctgcctgggat

SEQ ID NO: 3687011 - DNA, 25 bp, Homo sapien
ccttggggctgcctgggatgtgggg

SEQ ID NO: 3687012 - DNA, 25 bp, Homo sapien
ctgcctgggatgtggggaaggggga

SEQ ID NO: 3687013 - DNA, 25 bp, Homo sapien
atggctttttatgacccagggatgc

SEQ ID NO: 3687014 - DNA, 25 bp, Homo sapien
gatggctttttatgacccagggatg

SEQ ID NO: 3687015 - DNA, 25 bp, Homo sapien
ctgagatggctttttatgacccagg

SEQ ID NO: 3687016 - DNA, 25 bp, Homo sapien
gagatggctttttatgacccaggga

SEQ ID NO: 3687017 - DNA, 25 bp, Homo sapien
gaaggggctttgtgtagctcagtct

SEQ ID NO: 3687018 - DNA, 25 bp, Homo sapien
ctgagctgacgccacgagaatggac

SEQ ID NO: 3687019 - DNA, 25 bp, Homo sapien
ggctttgtgtagctcagtctgcggg

SEQ ID NO: 3687020 - DNA, 25 bp, Homo sapien
ctgacgccacgagaatggaccctga

SEQ ID NO: 3687021 - DNA, 25 bp, Homo sapien
cccagccacggcaattccgggcgcc

SEQ ID NO: 3687022 - DNA, 25 bp, Homo sapien
tcccagccacggcaattccgggcgc

SEQ ID NO: 3687023 - DNA, 25 bp, Homo sapien
ccagccacggcaattccgggcgccc

SEQ ID NO: 3687024 - DNA, 25 bp, Homo sapien
cagccacggcaattccgggcgcccc

SEQ ID NO: 3687025 - DNA, 25 bp, Homo sapien
tggttcctgggatccctggctcacc

SEQ ID NO: 3687026 - DNA, 25 bp, Homo sapien
ttggttcctgggatccctggctcac

SEQ ID NO: 3687027 - DNA, 25 bp, Homo sapien
cttggttcctgggatccctggctca

SEQ ID NO: 3687028 - DNA, 25 bp, Homo sapien
gggagatgcagacagtgtgggggtt

SEQ ID NO: 3687029 - DNA, 25 bp, Homo sapien
ctgcagggagatgcagacagtgtgg

SEQ ID NO: 3687030 - DNA, 25 bp, Homo sapien
tgcagggagatgcagacagtgtggg

SEQ ID NO: 3687031 - DNA, 25 bp, Homo sapien
atgcagacagtgtgggggttaggaa

SEQ ID NO: 3687032 - DNA, 25 bp, Homo sapien
aggaagcccaggggagccttcagcc

SEQ ID NO: 3687033 - DNA, 25 bp, Homo sapien
ggggagccttcagcccccttctcac

SEQ ID NO: 3687034 - DNA, 25 bp, Homo sapien
ccaggaagcccaggggagccttcag

SEQ ID NO: 3687035 - DNA, 25 bp, Homo sapien
caggggagccttcagcccccttctc

SEQ ID NO: 3687036 - DNA, 25 bp, Homo sapien
ttgaaccctccattcagagcaacac

SEQ ID NO: 3687037 - DNA, 25 bp, Homo sapien
atgtgggtgacgaaggacttgaacc

SEQ ID NO: 3687038 - DNA, 25 bp, Homo sapien
aggacttgaaccctccattcagagc

SEQ ID NO: 3687039 - DNA, 25 bp, Homo sapien
caggtcatcactaccgaattcttta

SEQ ID NO: 3687040 - DNA, 25 bp, Homo sapien
cctccaatggagttgccagcatcgc

SEQ ID NO: 3687041 - DNA, 25 bp, Homo sapien
tcctccaatggagttgccagcatcg

SEQ ID NO: 3687042 - DNA, 25 bp, Homo sapien
cctcctccaatggagttgccagcat

SEQ ID NO: 3687043 - DNA, 25 bp, Homo sapien
tccaatggagttgccagcatcgcct

SEQ ID NO: 3687044 - DNA, 25 bp, Homo sapien
tctcctggctgccctggggggccaa

SEQ ID NO: 3687045 - DNA, 25 bp, Homo sapien
ctcctggctgccctggggggccaac

SEQ ID NO: 3687046 - DNA, 25 bp, Homo sapien
cttgtctcctggctgccctgggggg

SEQ ID NO: 3687047 - DNA, 25 bp, Homo sapien
tgtctcctggctgccctggggggcc

SEQ ID NO: 3687048 - DNA, 25 bp, Homo sapien
gccacaacactttagccactgtgaa

SEQ ID NO: 3687049 - DNA, 25 bp, Homo sapien
caacactttagccactgtgaactca

SEQ ID NO: 3687050 - DNA, 25 bp, Homo sapien
actgccacaacactttagccactgt

SEQ ID NO: 3687051 - DNA, 25 bp, Homo sapien
tcctccactgccacaacactttagc

SEQ ID NO: 3687052 - DNA, 25 bp, Homo sapien
ggggccatctggtccctgttctcca

SEQ ID NO: 3687053 - DNA, 25 bp, Homo sapien
cttggggccatctggtccctgttct

SEQ ID NO: 3687054 - DNA, 25 bp, Homo sapien
catctggtccctgttctccagctgc

SEQ ID NO: 3687055 - DNA, 25 bp, Homo sapien
ccatctggtccctgttctccagctg

SEQ ID NO: 3687056 - DNA, 25 bp, Homo sapien
aaggcaaatgagatctcaacccacg

SEQ ID NO: 3687057 - DNA, 25 bp, Homo sapien
ggcaaatgagatctcaacccacggc

SEQ ID NO: 3687058 - DNA, 25 bp, Homo sapien
tggaaggcaaatgagatctcaaccc

SEQ ID NO: 3687059 - DNA, 25 bp, Homo sapien
aggcaaatgagatctcaacccacgg

SEQ ID NO: 3687060 - DNA, 25 bp, Homo sapien
tggagagcctcattgatgtttccat

SEQ ID NO: 3687061 - DNA, 25 bp, Homo sapien
aggtgggccaatttgcccaggaaga

SEQ ID NO: 3687062 - DNA, 25 bp, Homo sapien
ggtgggccaatttgcccaggaagac

SEQ ID NO: 3687063 - DNA, 25 bp, Homo sapien
gtgggccaatttgcccaggaagacc

SEQ ID NO: 3687064 - DNA, 25 bp, Homo sapien
tgggccaatttgcccaggaagacca

SEQ ID NO: 3687065 - DNA, 25 bp, Homo sapien
ttccccatcgtgtcctggagggcct

SEQ ID NO: 3687066 - DNA, 25 bp, Homo sapien
cttcactcctggaggtccatccttt

SEQ ID NO: 3687067 - DNA, 25 bp, Homo sapien
ttcactcctggaggtccatcctttc

SEQ ID NO: 3687068 - DNA, 25 bp, Homo sapien
ccttcactcctggaggtccatcctt

SEQ ID NO: 3687069 - DNA, 25 bp, Homo sapien
tcctgccactctgggtctgctctgg

SEQ ID NO: 3687070 - DNA, 25 bp, Homo sapien
gattaggcaatcctgccactctggg

SEQ ID NO: 3687071 - DNA, 25 bp, Homo sapien
ctgctctggccaccatgttctcctc

SEQ ID NO: 3687072 - DNA, 25 bp, Homo sapien
gagcccagctggattaggcaatcct

SEQ ID NO: 3687073 - DNA, 25 bp, Homo sapien
ctctgctcctggattgcccttctcc

SEQ ID NO: 3687074 - DNA, 25 bp, Homo sapien
ccgggaggcccctctggccctggca

SEQ ID NO: 3687075 - DNA, 25 bp, Homo sapien
aggcccctctggccctggcagccca

SEQ ID NO: 3687076 - DNA, 25 bp, Homo sapien
tccgggaggcccctctggccctggc

SEQ ID NO: 3687077 - DNA, 25 bp, Homo sapien
cctctggccctggcagcccaggaac

SEQ ID NO: 3687078 - DNA, 25 bp, Homo sapien
ttggtccaggaacaccttggagccc

SEQ ID NO: 3687079 - DNA, 25 bp, Homo sapien
tttggtccaggaacaccttggagcc

SEQ ID NO: 3687080 - DNA, 25 bp, Homo sapien
ctttggtccaggaacaccttggagc

SEQ ID NO: 3687081 - DNA, 25 bp, Homo sapien
tggaagcctttctctccttttgctc

SEQ ID NO: 3687082 - DNA, 25 bp, Homo sapien
ttttctccctggaagcctttctctc

SEQ ID NO: 3687083 - DNA, 25 bp, Homo sapien
ttctctccttttgctccatctagtc

SEQ ID NO: 3687084 - DNA, 25 bp, Homo sapien
gaagcctttctctccttttgctcca

SEQ ID NO: 3687085 - DNA, 25 bp, Homo sapien
ctgtttggtcgctgtgccttttgca

SEQ ID NO: 3687086 - DNA, 25 bp, Homo sapien
gactgaattctcgagtgttcatcaa

SEQ ID NO: 3687087 - DNA, 25 bp, Homo sapien
tcgagtgttcatcaaggtcgttggg

SEQ ID NO: 3687088 - DNA, 25 bp, Homo sapien
gccttttgcatttcaacccctgact

SEQ ID NO: 3687089 - DNA, 25 bp, Homo sapien
ggcctgccgtccaaacctgaagctc

SEQ ID NO: 3687090 - DNA, 25 bp, Homo sapien
ccaggcctgccgtccaaacctgaag

SEQ ID NO: 3687091 - DNA, 25 bp, Homo sapien
gcctgccgtccaaacctgaagctcc

SEQ ID NO: 3687092 - DNA, 25 bp, Homo sapien
aggcctgccgtccaaacctgaagct

SEQ ID NO: 3687093 - DNA, 25 bp, Homo sapien
ggactgaaacccttttgcttcacaa

SEQ ID NO: 3687094 - DNA, 25 bp, Homo sapien
gccagatttgtggactgaaaccctt

SEQ ID NO: 3687095 - DNA, 25 bp, Homo sapien
ccttttgcttcacaaccaagcttgc

SEQ ID NO: 3687096 - DNA, 25 bp, Homo sapien
agccagatttgtggactgaaaccct

SEQ ID NO: 3687097 - DNA, 25 bp, Homo sapien
tctcgccctttggtcccgctgggcc

SEQ ID NO: 3687098 - DNA, 25 bp, Homo sapien
cctctcgccctttggtcccgctggg

SEQ ID NO: 3687099 - DNA, 25 bp, Homo sapien
ctctcgccctttggtcccgctgggc

SEQ ID NO: 3687100 - DNA, 25 bp, Homo sapien
gcctggaactccaattggtcctgga

SEQ ID NO: 3687101 - DNA, 25 bp, Homo sapien
cagctgctcccgttggtcctgtcat

SEQ ID NO: 3687102 - DNA, 25 bp, Homo sapien
ctcccgttggtcctgtcatcccagg

SEQ ID NO: 3687103 - DNA, 25 bp, Homo sapien
agctgctcccgttggtcctgtcatc

SEQ ID NO: 3687104 - DNA, 25 bp, Homo sapien
ccgttggtcctgtcatcccagggtc

SEQ ID NO: 3687105 - DNA, 25 bp, Homo sapien
tagcaatgctaagctggtggctgcc

SEQ ID NO: 3687106 - DNA, 25 bp, Homo sapien
caacctagaaagagctggacacatg

SEQ ID NO: 3687107 - DNA, 25 bp, Homo sapien
ttagtaactagagcacgagtgcagg

SEQ ID NO: 3687108 - DNA, 25 bp, Homo sapien
catgttggtcaggaatcaccgatcg

SEQ ID NO: 3687109 - DNA, 25 bp, Homo sapien
tctaagaacctgtgcaattgcccca

SEQ ID NO: 3687110 - DNA, 25 bp, Homo sapien
tttcctaatgaagaagccgggcaaa

SEQ ID NO: 3687111 - DNA, 25 bp, Homo sapien
gactttcacaacaggtaacggacac

SEQ ID NO: 3687112 - DNA, 25 bp, Homo sapien
tattagagtagtaacgttgcctgcg

SEQ ID NO: 3687113 - DNA, 25 bp, Homo sapien
tgctaatactaagcccagcgtgggt

SEQ ID NO: 3687114 - DNA, 25 bp, Homo sapien
tgctttaaattaggatattctcccc

SEQ ID NO: 3687115 - DNA, 25 bp, Homo sapien
tgaacacagtggctagggaccaact

SEQ ID NO: 3687116 - DNA, 25 bp, Homo sapien
tccccagtaggatttggagtcaata

SEQ ID NO: 3687117 - DNA, 25 bp, Homo sapien
cctttaggccctctagagcctttct

SEQ ID NO: 3687118 - DNA, 25 bp, Homo sapien
tttaggccctctagagcctttcttc

SEQ ID NO: 3687119 - DNA, 25 bp, Homo sapien
cagggggcatctaatccaggcgctc

SEQ ID NO: 3687120 - DNA, 25 bp, Homo sapien
gggcatctaatccaggcgctccttg

SEQ ID NO: 3687121 - DNA, 25 bp, Homo sapien
caaccatggaatagagaggcccagt

SEQ ID NO: 3687122 - DNA, 25 bp, Homo sapien
aacccagcagaagtgcctcatcatt

SEQ ID NO: 3687123 - DNA, 25 bp, Homo sapien
acccttgaggcatctacaaacaggg

SEQ ID NO: 3687124 - DNA, 25 bp, Homo sapien
ccacgatgattattcaggtcaaggc

SEQ ID NO: 3687125 - DNA, 25 bp, Homo sapien
gcatggggcatccagtccgtccagc

SEQ ID NO: 3687126 - DNA, 25 bp, Homo sapien
catggggcatccagtccgtccagcc

SEQ ID NO: 3687127 - DNA, 25 bp, Homo sapien
atggggcatccagtccgtccagccc

SEQ ID NO: 3687128 - DNA, 25 bp, Homo sapien
tggggcatccagtccgtccagccct

SEQ ID NO: 3687129 - DNA, 25 bp, Homo sapien
ggaagcccaaatcggccatgcaggc

SEQ ID NO: 3687130 - DNA, 25 bp, Homo sapien
ccaaatcggccatgcaggcaagcaa

SEQ ID NO: 3687131 - DNA, 25 bp, Homo sapien
aagcccaaatcggccatgcaggcaa

SEQ ID NO: 3687132 - DNA, 25 bp, Homo sapien
gcccaaatcggccatgcaggcaagc

SEQ ID NO: 3687133 - DNA, 25 bp, Homo sapien
tgcttgatgtgaccgctaagggcct

SEQ ID NO: 3687134 - DNA, 25 bp, Homo sapien
aaagagaattcctgtgtgaccccag

SEQ ID NO: 3687135 - DNA, 25 bp, Homo sapien
tccgtgccacgaagaaacagtctct

SEQ ID NO: 3687136 - DNA, 25 bp, Homo sapien
tgacacacgtcacatggatgccggg

SEQ ID NO: 3687137 - DNA, 25 bp, Homo sapien
gccttggactggtaagccatcttcg

SEQ ID NO: 3687138 - DNA, 25 bp, Homo sapien
cagccttggactggtaagccatctt

SEQ ID NO: 3687139 - DNA, 25 bp, Homo sapien
cttggactggtaagccatcttcgcc

SEQ ID NO: 3687140 - DNA, 25 bp, Homo sapien
agcagccttggactggtaagccatc

SEQ ID NO: 3687141 - DNA, 25 bp, Homo sapien
tcattgtaagtgtgactctgctgcc

SEQ ID NO: 3687142 - DNA, 25 bp, Homo sapien
caggactggattcgttgagcacaga

SEQ ID NO: 3687143 - DNA, 25 bp, Homo sapien
tctccggtccctttatgaggatgaa

SEQ ID NO: 3687144 - DNA, 25 bp, Homo sapien
tgaacatgttggagtctccggtccc

SEQ ID NO: 3687145 - DNA, 25 bp, Homo sapien
acaaaacaatgttctgttagtttca

SEQ ID NO: 3687146 - DNA, 25 bp, Homo sapien
gaggtaaatcttgtcctgggttgga

SEQ ID NO: 3687147 - DNA, 25 bp, Homo sapien
aaatcttgtcctgggttggatggga

SEQ ID NO: 3687148 - DNA, 25 bp, Homo sapien
caaaacaatgttctgttagtttcag

SEQ ID NO: 3687149 - DNA, 25 bp, Homo sapien
cacacaggccaatccaaggttagag

SEQ ID NO: 3687150 - DNA, 25 bp, Homo sapien
acacacacaggccaatccaaggtta

SEQ ID NO: 3687151 - DNA, 25 bp, Homo sapien
acaggccaatccaaggttagaggca

SEQ ID NO: 3687152 - DNA, 25 bp, Homo sapien
cacaggccaatccaaggttagaggc

SEQ ID NO: 3687153 - DNA, 25 bp, Homo sapien
tcatgcagacattacgaccaaacaa

SEQ ID NO: 3687154 - DNA, 25 bp, Homo sapien
tttctgtacaaaatatgcaggtttt

SEQ ID NO: 3687155 - DNA, 25 bp, Homo sapien
ctgtaagatgcatcatacttctggc

SEQ ID NO: 3687156 - DNA, 25 bp, Homo sapien
tattagagacataggcttatacaaa

SEQ ID NO: 3687157 - DNA, 25 bp, Homo sapien
acacatgagctagccagcacctcag

SEQ ID NO: 3687158 - DNA, 25 bp, Homo sapien
gagctagccagcacctcagttctgg

SEQ ID NO: 3687159 - DNA, 25 bp, Homo sapien
tcatggacctctacatttatgtgaa

SEQ ID NO: 3687160 - DNA, 25 bp, Homo sapien
taaaatactcttagacacacctagc

SEQ ID NO: 3687161 - DNA, 25 bp, Homo sapien
tggcccaggcttgagctcactggaa

SEQ ID NO: 3687162 - DNA, 25 bp, Homo sapien
gcccaggcttgagctcactggaaga

SEQ ID NO: 3687163 - DNA, 25 bp, Homo sapien
ccaggcttgagctcactggaagatt

SEQ ID NO: 3687164 - DNA, 25 bp, Homo sapien
ctgagaagcgagcatggcccaggct

SEQ ID NO: 3687165 - DNA, 25 bp, Homo sapien
gaagtttgccacaagacacaatgaa

SEQ ID NO: 3687166 - DNA, 25 bp, Homo sapien
tccattaaccgaactgaagtttgcc

SEQ ID NO: 3687167 - DNA, 25 bp, Homo sapien
taagacgtcagattgatcacatggg

SEQ ID NO: 3687168 - DNA, 25 bp, Homo sapien
agtctgcccagcgtgtctccaaggg

SEQ ID NO: 3687169 - DNA, 25 bp, Homo sapien
tcccttctgaaggacagtaaaggta

SEQ ID NO: 3687170 - DNA, 25 bp, Homo sapien
gggagaaggtggcgtgggcgttcat

SEQ ID NO: 3687171 - DNA, 25 bp, Homo sapien
tgggagaaggtggcgtgggcgttca

SEQ ID NO: 3687172 - DNA, 25 bp, Homo sapien
gtgggagaaggtggcgtgggcgttc

SEQ ID NO: 3687173 - DNA, 25 bp, Homo sapien
tggtgggagaaggtggcgtgggcgt

SEQ ID NO: 3687174 - DNA, 25 bp, Homo sapien
agttctctgggccgcggatagtagc

SEQ ID NO: 3687175 - DNA, 25 bp, Homo sapien
gagggagaagggattgctccttctc

SEQ ID NO: 3687176 - DNA, 25 bp, Homo sapien
tccttctccacataaccacctctag

SEQ ID NO: 3687177 - DNA, 25 bp, Homo sapien
cacctctaggaggagttgctcagcc

SEQ ID NO: 3687178 - DNA, 25 bp, Homo sapien
gcccctccacgggcgcaggtttggc

SEQ ID NO: 3687179 - DNA, 25 bp, Homo sapien
tgcgcgcccctccacgggcgcaggt

SEQ ID NO: 3687180 - DNA, 25 bp, Homo sapien
cctccacgggcgcaggtttggccca

SEQ ID NO: 3687181 - DNA, 25 bp, Homo sapien
tccacgggcgcaggtttggcccacg

SEQ ID NO: 3687182 - DNA, 25 bp, Homo sapien
gtcattgaaccctgctcagcatttg

SEQ ID NO: 3687183 - DNA, 25 bp, Homo sapien
gaacgatctttaggttatcatttag

SEQ ID NO: 3687184 - DNA, 25 bp, Homo sapien
gagtattaacatttttagtgtcaaa

SEQ ID NO: 3687185 - DNA, 25 bp, Homo sapien
gaaacagaactatcttacttgaacg

SEQ ID NO: 3687186 - DNA, 25 bp, Homo sapien
gcttgtggcgactaagatgttttgc

SEQ ID NO: 3687187 - DNA, 25 bp, Homo sapien
ttttgctgctccgtgtacgtgcatg

SEQ ID NO: 3687188 - DNA, 25 bp, Homo sapien
aaggtgtgcttgtggcgactaagat

SEQ ID NO: 3687189 - DNA, 25 bp, Homo sapien
gcgactaagatgttttgctgctccg

SEQ ID NO: 3687190 - DNA, 25 bp, Homo sapien
catgctggagacattaagaactctg

SEQ ID NO: 3687191 - DNA, 25 bp, Homo sapien
gagagacaagtacaggcaacaaggg

SEQ ID NO: 3687192 - DNA, 25 bp, Homo sapien
taaaatgaagagcaacagtttctca

SEQ ID NO: 3687193 - DNA, 25 bp, Homo sapien
gcttaaacctatacttctgacttgc

SEQ ID NO: 3687194 - DNA, 25 bp, Homo sapien
tccctctcagcttgctgacacagtg

SEQ ID NO: 3687195 - DNA, 25 bp, Homo sapien
cctctcagcttgctgacacagtggc

SEQ ID NO: 3687196 - DNA, 25 bp, Homo sapien
ctcagcttgctgacacagtggcctc

SEQ ID NO: 3687197 - DNA, 25 bp, Homo sapien
gtttccctctcagcttgctgacaca

SEQ ID NO: 3687198 - DNA, 25 bp, Homo sapien
tcttcttcccactccggcccgacat

SEQ ID NO: 3687199 - DNA, 25 bp, Homo sapien
tgccctagctgaacgggacagcttg

SEQ ID NO: 3687200 - DNA, 25 bp, Homo sapien
aatgactgccgccatgtagacaggg

SEQ ID NO: 3687201 - DNA, 25 bp, Homo sapien
tttcttcagataacgcatcagcctc

SEQ ID NO: 3687202 - DNA, 25 bp, Homo sapien
gcccacgctgatccggtacttgaac

SEQ ID NO: 3687203 - DNA, 25 bp, Homo sapien
aggcaatttggagcatccctcccca

SEQ ID NO: 3687204 - DNA, 25 bp, Homo sapien
gcagcctcctttgcgtgtcctcatt

SEQ ID NO: 3687205 - DNA, 25 bp, Homo sapien
agcctcctttgcgtgtcctcattac

SEQ ID NO: 3687206 - DNA, 25 bp, Homo sapien
cccagcctgcgagggggacccaggg

SEQ ID NO: 3687207 - DNA, 25 bp, Homo sapien
ctaagagggcagggcaggactgagc

SEQ ID NO: 3687208 - DNA, 25 bp, Homo sapien
aagagggcagggcaggactgagcat

SEQ ID NO: 3687209 - DNA, 25 bp, Homo sapien
taagagggcagggcaggactgagca

SEQ ID NO: 3687210 - DNA, 25 bp, Homo sapien
gctttcatttcataagaggaaggaa

SEQ ID NO: 3687211 - DNA, 25 bp, Homo sapien
ttcctccttggatccgtggatcaag

SEQ ID NO: 3687212 - DNA, 25 bp, Homo sapien
ggaaggctttcatttcataagagga

SEQ ID NO: 3687213 - DNA, 25 bp, Homo sapien
gtggatcaaggaaaacctttcacca

SEQ ID NO: 3687214 - DNA, 25 bp, Homo sapien
caggaggactttggcaatggcaccc

SEQ ID NO: 3687215 - DNA, 25 bp, Homo sapien
gaggactttggcaatggcacccttg

SEQ ID NO: 3687216 - DNA, 25 bp, Homo sapien
aggaggactttggcaatggcaccct

SEQ ID NO: 3687217 - DNA, 25 bp, Homo sapien
ggaggactttggcaatggcaccctt

SEQ ID NO: 3687218 - DNA, 25 bp, Homo sapien
caattccactaatatgattcattcc

SEQ ID NO: 3687219 - DNA, 25 bp, Homo sapien
ttgtcctgaatgattttgtcagctc

SEQ ID NO: 3687220 - DNA, 25 bp, Homo sapien
ttattgagtgcatcctatacgccag

SEQ ID NO: 3687221 - DNA, 25 bp, Homo sapien
ctgaaaatacaacaccttaatggaa

SEQ ID NO: 3687222 - DNA, 25 bp, Homo sapien
ccacagtggctgcacgcttttttaa

SEQ ID NO: 3687223 - DNA, 25 bp, Homo sapien
ctcttaggtatatggctaggagtgg

SEQ ID NO: 3687224 - DNA, 25 bp, Homo sapien
agtggctgcacgcttttttaaaaat

SEQ ID NO: 3687225 - DNA, 25 bp, Homo sapien
gcttggttgtattggtaattctatg

SEQ ID NO: 3687226 - DNA, 25 bp, Homo sapien
ggccaacattatcacaattccacag

SEQ ID NO: 3687227 - DNA, 25 bp, Homo sapien
gggccaacattatcacaattccaca

SEQ ID NO: 3687228 - DNA, 25 bp, Homo sapien
tgggccaacattatcacaattccac

SEQ ID NO: 3687229 - DNA, 25 bp, Homo sapien
actgggccaacattatcacaattcc

SEQ ID NO: 3687230 - DNA, 25 bp, Homo sapien
catccttgagacatggacttcacca

SEQ ID NO: 3687231 - DNA, 25 bp, Homo sapien
ctcttttggatgtttagtctggaca

SEQ ID NO: 3687232 - DNA, 25 bp, Homo sapien
tattggcaatcaataggaaaactgg

SEQ ID NO: 3687233 - DNA, 25 bp, Homo sapien
tattatggcaaatatagtcccatga

SEQ ID NO: 3687234 - DNA, 25 bp, Homo sapien
ctctgggatgaggaaatggttaacc

SEQ ID NO: 3687235 - DNA, 25 bp, Homo sapien
tctgggatgaggaaatggttaaccc

SEQ ID NO: 3687236 - DNA, 25 bp, Homo sapien
ctgggatgaggaaatggttaacccg

SEQ ID NO: 3687237 - DNA, 25 bp, Homo sapien
tgggatgaggaaatggttaacccga

SEQ ID NO: 3687238 - DNA, 25 bp, Homo sapien
ctggttgagctcctcgtcattggca

SEQ ID NO: 3687239 - DNA, 25 bp, Homo sapien
ggctatccgggccttcttgttgtcc

SEQ ID NO: 3687240 - DNA, 25 bp, Homo sapien
ggcattgccggccaattctagaatt

SEQ ID NO: 3687241 - DNA, 25 bp, Homo sapien
cttgttgtccctcgcggcattgccg

SEQ ID NO: 3687242 - DNA, 25 bp, Homo sapien
ttttggacgtccgtggtttggcagc

SEQ ID NO: 3687243 - DNA, 25 bp, Homo sapien
cttcttgcctgacgtggccttcctg

SEQ ID NO: 3687244 - DNA, 25 bp, Homo sapien
gcaggacgcctccactggcgatggt

SEQ ID NO: 3687245 - DNA, 25 bp, Homo sapien
ggtccctcgctttttggccagcagt

SEQ ID NO: 3687246 - DNA, 25 bp, Homo sapien
tgaaattccactggcggaactcagg

SEQ ID NO: 3687247 - DNA, 25 bp, Homo sapien
tccactggcggaactcagggaatgc

SEQ ID NO: 3687248 - DNA, 25 bp, Homo sapien
aattccactggcggaactcagggaa

SEQ ID NO: 3687249 - DNA, 25 bp, Homo sapien
ctgaaattccactggcggaactcag

SEQ ID NO: 3687250 - DNA, 25 bp, Homo sapien
aagcctgaggtgcctttattaagct

SEQ ID NO: 3687251 - DNA, 25 bp, Homo sapien
tattaagctcttctcacggctgcca

SEQ ID NO: 3687252 - DNA, 25 bp, Homo sapien
cctttattaagctcttctcacggct

SEQ ID NO: 3687253 - DNA, 25 bp, Homo sapien
caatccagaaaaagcctgaggtgcc

SEQ ID NO: 3687254 - DNA, 25 bp, Homo sapien
gttccttctttatcgctgtcctttg

SEQ ID NO: 3687255 - DNA, 25 bp, Homo sapien
tgtcccagaacaaggctcttagaag

SEQ ID NO: 3687256 - DNA, 25 bp, Homo sapien
acaaggctcttagaagacagaatgg

SEQ ID NO: 3687257 - DNA, 25 bp, Homo sapien
gaagttccttctttatcgctgtcct

SEQ ID NO: 3687258 - DNA, 25 bp, Homo sapien
caatttcggctgtggttgggtggac

SEQ ID NO: 3687259 - DNA, 25 bp, Homo sapien
tctcatggagccaatatggctgatg

SEQ ID NO: 3687260 - DNA, 25 bp, Homo sapien
ctctcatggagccaatatggctgat

SEQ ID NO: 3687261 - DNA, 25 bp, Homo sapien
tctttgaggtcaatttcggctgtgg

SEQ ID NO: 3687262 - DNA, 25 bp, Homo sapien
gaatacaagcatactcaacgacatg

SEQ ID NO: 3687263 - DNA, 25 bp, Homo sapien
ggtagaatagatcaataaactgtca

SEQ ID NO: 3687264 - DNA, 25 bp, Homo sapien
cactatagctcaaactggaaactac

SEQ ID NO: 3687265 - DNA, 25 bp, Homo sapien
caacgacatggatagatttcacaat

SEQ ID NO: 3687266 - DNA, 25 bp, Homo sapien
tgcgaagctcctttaccgtttccaa

SEQ ID NO: 3687267 - DNA, 25 bp, Homo sapien
agggccttgggatttgcgaagctcc

SEQ ID NO: 3687268 - DNA, 25 bp, Homo sapien
tgggatttgcgaagctcctttaccg

SEQ ID NO: 3687269 - DNA, 25 bp, Homo sapien
cttcggcgacttccaaagggccttg

SEQ ID NO: 3687270 - DNA, 25 bp, Homo sapien
ttgcaccctatcaggcagtttctgg

SEQ ID NO: 3687271 - DNA, 25 bp, Homo sapien
cctgatgccgtcttagatgactgag

SEQ ID NO: 3687272 - DNA, 25 bp, Homo sapien
ggagcttctcattctgtgcagagca

SEQ ID NO: 3687273 - DNA, 25 bp, Homo sapien
tgtggtagagccaaacattgagtcg

SEQ ID NO: 3687274 - DNA, 25 bp, Homo sapien
aaaattgtgtcctgtagccctctcc

SEQ ID NO: 3687275 - DNA, 25 bp, Homo sapien
tggatgccaaggtcaagatatttgc

SEQ ID NO: 3687276 - DNA, 25 bp, Homo sapien
cctttctgcgtggtgggttcatgtc

SEQ ID NO: 3687277 - DNA, 25 bp, Homo sapien
ggtgttagacagtggcgaaccatct

SEQ ID NO: 3687278 - DNA, 25 bp, Homo sapien
cgggctgtgaaactgaattaggcca

SEQ ID NO: 3687279 - DNA, 25 bp, Homo sapien
aaagcgggctgtgaaactgaattag

SEQ ID NO: 3687280 - DNA, 25 bp, Homo sapien
caaaagcgggctgtgaaactgaatt

SEQ ID NO: 3687281 - DNA, 25 bp, Homo sapien
ctgtgaaactgaattaggccagcct

SEQ ID NO: 3687282 - DNA, 25 bp, Homo sapien
tgccatttgatgatctccacatgcc

SEQ ID NO: 3687283 - DNA, 25 bp, Homo sapien
gggactgccatttgatgatctccac

SEQ ID NO: 3687284 - DNA, 25 bp, Homo sapien
tgtagttccttgacagggactgcca

SEQ ID NO: 3687285 - DNA, 25 bp, Homo sapien
aaccactgaacttgattgtgtagtt

SEQ ID NO: 3687286 - DNA, 25 bp, Homo sapien
acccagaggtcctgactcagtaggt

SEQ ID NO: 3687287 - DNA, 25 bp, Homo sapien
cacagagtcagggtactgaccaccc

SEQ ID NO: 3687288 - DNA, 25 bp, Homo sapien
gggtactgaccacccagaggtcctg

SEQ ID NO: 3687289 - DNA, 25 bp, Homo sapien
gcttatgcttatgtgattttaggac

SEQ ID NO: 3687290 - DNA, 25 bp, Homo sapien
tatgtttaacgagagcaagagctgg

SEQ ID NO: 3687291 - DNA, 25 bp, Homo sapien
catatggtctgccaagtagtccctg

SEQ ID NO: 3687292 - DNA, 25 bp, Homo sapien
ggttgggctacctcctcacaatggt

SEQ ID NO: 3687293 - DNA, 25 bp, Homo sapien
cgtttaatgctgctctgatgcgcca

SEQ ID NO: 3687294 - DNA, 25 bp, Homo sapien
taggagagaaaatgccgcgggttat

SEQ ID NO: 3687295 - DNA, 25 bp, Homo sapien
acataggagagaaaatgccgcgggt

SEQ ID NO: 3687296 - DNA, 25 bp, Homo sapien
gagagaaaatgccgcgggttatttc

SEQ ID NO: 3687297 - DNA, 25 bp, Homo sapien
ctgggacataggagagaaaatgccg

SEQ ID NO: 3687298 - DNA, 25 bp, Homo sapien
gacaaatttggctgcgagtccactg

SEQ ID NO: 3687299 - DNA, 25 bp, Homo sapien
gaacgcgacggactttagcttcttg

SEQ ID NO: 3687300 - DNA, 25 bp, Homo sapien
tcctccgccgctgacaggcagtttt

SEQ ID NO: 3687301 - DNA, 25 bp, Homo sapien
cttcacatttgtcggagccccactg

SEQ ID NO: 3687302 - DNA, 25 bp, Homo sapien
aatgtatgctccaaacctgtcttcg

SEQ ID NO: 3687303 - DNA, 25 bp, Homo sapien
tcagcattgtgactccgggcatggc

SEQ ID NO: 3687304 - DNA, 25 bp, Homo sapien
gagctactgatagtgccatccacca

SEQ ID NO: 3687305 - DNA, 25 bp, Homo sapien
ggcacaggcccatgtaatttcagca

SEQ ID NO: 3687306 - DNA, 25 bp, Homo sapien
tcctgcacgtagatgccgatgctct

SEQ ID NO: 3687307 - DNA, 25 bp, Homo sapien
tacttggcgtcgagcttggccatct

SEQ ID NO: 3687308 - DNA, 25 bp, Homo sapien
tctcgctgtcgaagagcaggaagta

SEQ ID NO: 3687309 - DNA, 25 bp, Homo sapien
tacacgttcttcagcgaggacgcgc

SEQ ID NO: 3687310 - DNA, 25 bp, Homo sapien
gtcgtcctccgatccctgctggaaa

SEQ ID NO: 3687311 - DNA, 25 bp, Homo sapien
cagagggctccctgcgccggcagga

SEQ ID NO: 3687312 - DNA, 25 bp, Homo sapien
tggaggctcttttggaggagagtgt

SEQ ID NO: 3687313 - DNA, 25 bp, Homo sapien
ccactcttgggactcgggtcgtcct

SEQ ID NO: 3687314 - DNA, 25 bp, Homo sapien
gctataaatctaaaacgaggtctgt

SEQ ID NO: 3687315 - DNA, 25 bp, Homo sapien
gagaaaagcaccagtgagatgtctt

SEQ ID NO: 3687316 - DNA, 25 bp, Homo sapien
gaatgtgtgtaaaagtcaatgctat

SEQ ID NO: 3687317 - DNA, 25 bp, Homo sapien
caacagagcccaggccactttttgc

SEQ ID NO: 3687318 - DNA, 25 bp, Homo sapien
ttaaggaagggcagataatgtgact

SEQ ID NO: 3687319 - DNA, 25 bp, Homo sapien
aatgtgctcttctggttaccccacc

SEQ ID NO: 3687320 - DNA, 25 bp, Homo sapien
gagtgcatttttacacggctagcag

SEQ ID NO: 3687321 - DNA, 25 bp, Homo sapien
tgcttacccattagcgagcagaggg

SEQ ID NO: 3687322 - DNA, 25 bp, Homo sapien
tccaacttggaggatcaagcccagg

SEQ ID NO: 3687323 - DNA, 25 bp, Homo sapien
tcaaaagacagagatcctaccgggc

SEQ ID NO: 3687324 - DNA, 25 bp, Homo sapien
tcaggagctctgtatcaagaaccgg

SEQ ID NO: 3687325 - DNA, 25 bp, Homo sapien
tagacagtaagggtagtagcagcca

SEQ ID NO: 3687326 - DNA, 25 bp, Homo sapien
aaggtggtggtcttgacctggcagc

SEQ ID NO: 3687327 - DNA, 25 bp, Homo sapien
gtgagctcacgggatacggtcctgc

SEQ ID NO: 3687328 - DNA, 25 bp, Homo sapien
cagactggccctcatagctggtcat

SEQ ID NO: 3687329 - DNA, 25 bp, Homo sapien
cagaaatacaccctttctgtgctgt

SEQ ID NO: 3687330 - DNA, 25 bp, Homo sapien
actcctgggtcttcatatgccaaca

SEQ ID NO: 3687331 - DNA, 25 bp, Homo sapien
tcttgaggggtagaacatgtctggt

SEQ ID NO: 3687332 - DNA, 25 bp, Homo sapien
tcagggatcttgaggggtagaacat

SEQ ID NO: 3687333 - DNA, 25 bp, Homo sapien
caggggcgctcttgacactgtgcct

SEQ ID NO: 3687334 - DNA, 25 bp, Homo sapien
tctgtagagctgttcctttggaggc

SEQ ID NO: 3687335 - DNA, 25 bp, Homo sapien
gaggcagcatcacttattggcagta

SEQ ID NO: 3687336 - DNA, 25 bp, Homo sapien
tgtgggttatacatagggcagctct

SEQ ID NO: 3687337 - DNA, 25 bp, Homo sapien
aaagcaccggcatccctacttgggt

SEQ ID NO: 3687338 - DNA, 25 bp, Homo sapien
aagtgctactggtttccgagacgca

SEQ ID NO: 3687339 - DNA, 25 bp, Homo sapien
agtgctactggtttccgagacgcaa

SEQ ID NO: 3687340 - DNA, 25 bp, Homo sapien
gtgctactggtttccgagacgcaac

SEQ ID NO: 3687341 - DNA, 25 bp, Homo sapien
tgctactggtttccgagacgcaacc

SEQ ID NO: 3687342 - DNA, 25 bp, Homo sapien
tctttgttgttatagttccatcacc

SEQ ID NO: 3687343 - DNA, 25 bp, Homo sapien
tgaaaaaacttctttgaattctaca

SEQ ID NO: 3687344 - DNA, 25 bp, Homo sapien
aacttctttgaattctacaatctgc

SEQ ID NO: 3687345 - DNA, 25 bp, Homo sapien
tacaatctgctcctcagtcagttgg

SEQ ID NO: 3687346 - DNA, 25 bp, Homo sapien
ggtgaagttctacaccactaatata

SEQ ID NO: 3687347 - DNA, 25 bp, Homo sapien
catggtgaagttctacaccactaat

SEQ ID NO: 3687348 - DNA, 25 bp, Homo sapien
gtgaagttctacaccactaatatag

SEQ ID NO: 3687349 - DNA, 25 bp, Homo sapien
acatggtgaagttctacaccactaa

SEQ ID NO: 3687350 - DNA, 25 bp, Homo sapien
aatgacagtaagggaagaacacatg

SEQ ID NO: 3687351 - DNA, 25 bp, Homo sapien
cacaggcaacatgttacttcatcag

SEQ ID NO: 3687352 - DNA, 25 bp, Homo sapien
acaggcaacatgttacttcatcagt

SEQ ID NO: 3687353 - DNA, 25 bp, Homo sapien
ggataatacacccattctgcagtag

SEQ ID NO: 3687354 - DNA, 25 bp, Homo sapien
tattgttggctgtccgtagtccaca

SEQ ID NO: 3687355 - DNA, 25 bp, Homo sapien
ccatacttcaacaccatgctgacag

SEQ ID NO: 3687356 - DNA, 25 bp, Homo sapien
gaggtacctgggagtacctggataa

SEQ ID NO: 3687357 - DNA, 25 bp, Homo sapien
cagcagtcgtatgtctagggaatgt

SEQ ID NO: 3687358 - DNA, 25 bp, Homo sapien
gatttcctagagttgttcttcactg

SEQ ID NO: 3687359 - DNA, 25 bp, Homo sapien
gaatgtgaatgaaccgctgcctgga

SEQ ID NO: 3687360 - DNA, 25 bp, Homo sapien
tttataaattgagacccgtgtctgc

SEQ ID NO: 3687361 - DNA, 25 bp, Homo sapien
tcaactgagccgtcttaaaggactc

SEQ ID NO: 3687362 - DNA, 25 bp, Homo sapien
tagagatgagggtttaagccctggc

SEQ ID NO: 3687363 - DNA, 25 bp, Homo sapien
tactgttaacaggaagagcttaggc

SEQ ID NO: 3687364 - DNA, 25 bp, Homo sapien
gaggagccaccaaggccattttcag

SEQ ID NO: 3687365 - DNA, 25 bp, Homo sapien
cagccgctgttttgccggaggagcc

SEQ ID NO: 3687366 - DNA, 25 bp, Homo sapien
gctgctgggccggataacagtttct

SEQ ID NO: 3687367 - DNA, 25 bp, Homo sapien
gctccggtttacgaaatggctccat

SEQ ID NO: 3687368 - DNA, 25 bp, Homo sapien
agtttcttgtctgtaccgtgcgctc

SEQ ID NO: 3687369 - DNA, 25 bp, Homo sapien
gtctcgcgcggtcagctagccagac

SEQ ID NO: 3687370 - DNA, 25 bp, Homo sapien
gagcgcgctttgtcacgccttatgc

SEQ ID NO: 3687371 - DNA, 25 bp, Homo sapien
gcgatcccgagtgtaccaggccgct

SEQ ID NO: 3687372 - DNA, 25 bp, Homo sapien
cgtctggaatgggaagccgcgatcc

SEQ ID NO: 3687373 - DNA, 25 bp, Homo sapien
ctaaaactgctcctccacaccagag

SEQ ID NO: 3687374 - DNA, 25 bp, Homo sapien
ccacaccagagccaaagcctaaaaa

SEQ ID NO: 3687375 - DNA, 25 bp, Homo sapien
cctccacaccagagccaaagcctaa

SEQ ID NO: 3687376 - DNA, 25 bp, Homo sapien
taaaactgctcctccacaccagagc

SEQ ID NO: 3687377 - DNA, 25 bp, Homo sapien
ttagcacatgcttaaatatcaaagc

SEQ ID NO: 3687378 - DNA, 25 bp, Homo sapien
ttgctacatcgtgttcatctggatg

SEQ ID NO: 3687379 - DNA, 25 bp, Homo sapien
tcacttgtgaatagatgtgcaaggg

SEQ ID NO: 3687380 - DNA, 25 bp, Homo sapien
catctaactaaagtaaattctgctg

SEQ ID NO: 3687381 - DNA, 25 bp, Homo sapien
gctataagccaattacagtagaact

SEQ ID NO: 3687382 - DNA, 25 bp, Homo sapien
tacagtagaactatcattgattaaa

SEQ ID NO: 3687383 - DNA, 25 bp, Homo sapien
ttttatagtagtcagtttaaggcta

SEQ ID NO: 3687384 - DNA, 25 bp, Homo sapien
ttaaactgcacatctgggaatttac

SEQ ID NO: 3687385 - DNA, 25 bp, Homo sapien
ggtgtagtggcacgcccctgtgtta

SEQ ID NO: 3687386 - DNA, 25 bp, Homo sapien
gaaaacagtaattgcagatttagct

SEQ ID NO: 3687387 - DNA, 25 bp, Homo sapien
gtggcacgcccctgtgttatcccag

SEQ ID NO: 3687388 - DNA, 25 bp, Homo sapien
aacagtaattgcagatttagcttca

SEQ ID NO: 3687389 - DNA, 25 bp, Homo sapien
taagttattgctctacacaggtaca

SEQ ID NO: 3687390 - DNA, 25 bp, Homo sapien
cacaacagtgtgaacttcggtcatc

SEQ ID NO: 3687391 - DNA, 25 bp, Homo sapien
taagttaatgatctcccttggaatc

SEQ ID NO: 3687392 - DNA, 25 bp, Homo sapien
gagctgcaatgagtagaaaatctat

SEQ ID NO: 3687393 - DNA, 25 bp, Homo sapien
tggtacctactcttattgctgcttc

SEQ ID NO: 3687394 - DNA, 25 bp, Homo sapien
taccaaggaccagaatgatcataga

SEQ ID NO: 3687395 - DNA, 25 bp, Homo sapien
taagtgactgtattcctaccaagga

SEQ ID NO: 3687396 - DNA, 25 bp, Homo sapien
taataccctggcatacaggtatgct

SEQ ID NO: 3687397 - DNA, 25 bp, Homo sapien
tgtttgctccactctaagttccagg

SEQ ID NO: 3687398 - DNA, 25 bp, Homo sapien
gaagaaaattcctaagcagttgtac

SEQ ID NO: 3687399 - DNA, 25 bp, Homo sapien
tcccttaaccgacacacagtgactg

SEQ ID NO: 3687400 - DNA, 25 bp, Homo sapien
cacaaagtgactgaagctcaaaggg

SEQ ID NO: 3687401 - DNA, 25 bp, Homo sapien
acgttgaccaggctggtcttgaact

SEQ ID NO: 3687402 - DNA, 25 bp, Homo sapien
caggcatgcgtcaccatgcatggct

SEQ ID NO: 3687403 - DNA, 25 bp, Homo sapien
cgttgaccaggctggtcttgaactc

SEQ ID NO: 3687404 - DNA, 25 bp, Homo sapien
aggcatgcgtcaccatgcatggcta

SEQ ID NO: 3687405 - DNA, 25 bp, Homo sapien
caaggccaaaattctaaagtattgg

SEQ ID NO: 3687406 - DNA, 25 bp, Homo sapien
ggtattgcgtttcagatttttccca

SEQ ID NO: 3687407 - DNA, 25 bp, Homo sapien
aatcaaggcctcagaatttcataca

SEQ ID NO: 3687408 - DNA, 25 bp, Homo sapien
taaaaggaagtcacactacaatgaa

SEQ ID NO: 3687409 - DNA, 25 bp, Homo sapien
cctcatattaacctagcaagttggg

SEQ ID NO: 3687410 - DNA, 25 bp, Homo sapien
tcagcctctttagtggaaatgcaca

SEQ ID NO: 3687411 - DNA, 25 bp, Homo sapien
caggtgtatacattttgtgctctca

SEQ ID NO: 3687412 - DNA, 25 bp, Homo sapien
ctcacagtaactccctgaagcagat

SEQ ID NO: 3687413 - DNA, 25 bp, Homo sapien
tgttttgttcagactcacatgagta

SEQ ID NO: 3687414 - DNA, 25 bp, Homo sapien
cgcccggctgacaagtgtatattta

SEQ ID NO: 3687415 - DNA, 25 bp, Homo sapien
tgctgttacatccacatatgcactg

SEQ ID NO: 3687416 - DNA, 25 bp, Homo sapien
cattaagtgctactgaaactcagag

SEQ ID NO: 3687417 - DNA, 25 bp, Homo sapien
tcctcatcagaatcgcaagtcggag

SEQ ID NO: 3687418 - DNA, 25 bp, Homo sapien
aaatattcagcccaggtgatcccac

SEQ ID NO: 3687419 - DNA, 25 bp, Homo sapien
gaggccaggattgcttcagtgctgt

SEQ ID NO: 3687420 - DNA, 25 bp, Homo sapien
ccctcatacctaggagatgctcagt

SEQ ID NO: 3687421 - DNA, 25 bp, Homo sapien
ggctccggaggctccggttgcccat

SEQ ID NO: 3687422 - DNA, 25 bp, Homo sapien
ccggcttggcatggtccagagcccg

SEQ ID NO: 3687423 - DNA, 25 bp, Homo sapien
gctccccggcttggcatggtccaga

SEQ ID NO: 3687424 - DNA, 25 bp, Homo sapien
agcggtagggccagcttgcacacat

SEQ ID NO: 3687425 - DNA, 25 bp, Homo sapien
gaaatgcatcagctgatccctgccg

SEQ ID NO: 3687426 - DNA, 25 bp, Homo sapien
tacaacgacaccagtctcagtggat

SEQ ID NO: 3687427 - DNA, 25 bp, Homo sapien
gcaacggccctacttccaaataaga

SEQ ID NO: 3687428 - DNA, 25 bp, Homo sapien
caaggtgtctggagggttagttcct

SEQ ID NO: 3687429 - DNA, 25 bp, Homo sapien
caggatgatgtgtcggggcagggtc

SEQ ID NO: 3687430 - DNA, 25 bp, Homo sapien
tctagttcctggctgtcggtagctc

SEQ ID NO: 3687431 - DNA, 25 bp, Homo sapien
cctggctgtcggtagctcagctcca

SEQ ID NO: 3687432 - DNA, 25 bp, Homo sapien
gttcctggctgtcggtagctcagct

SEQ ID NO: 3687433 - DNA, 25 bp, Homo sapien
tgagatggttcattctgggtgaatg

SEQ ID NO: 3687434 - DNA, 25 bp, Homo sapien
gggtgaatgagggaacaaatactct

SEQ ID NO: 3687435 - DNA, 25 bp, Homo sapien
tatgaagtatcttaggagaggtaac

SEQ ID NO: 3687436 - DNA, 25 bp, Homo sapien
gatagcttcctactatactatgcat

SEQ ID NO: 3687437 - DNA, 25 bp, Homo sapien
aacgagactgggctgagcttaactg

SEQ ID NO: 3687438 - DNA, 25 bp, Homo sapien
cgagactgggctgagcttaactgta

SEQ ID NO: 3687439 - DNA, 25 bp, Homo sapien
ctgggctgagcttaactgtatactt

SEQ ID NO: 3687440 - DNA, 25 bp, Homo sapien
gactgggctgagcttaactgtatac

SEQ ID NO: 3687441 - DNA, 25 bp, Homo sapien
gaaatggacttttctgagtcaggag

SEQ ID NO: 3687442 - DNA, 25 bp, Homo sapien
tctagtctcagtcacgttaaaaggt

SEQ ID NO: 3687443 - DNA, 25 bp, Homo sapien
ggatcatgttcttttctcgctctac

SEQ ID NO: 3687444 - DNA, 25 bp, Homo sapien
tttggtccagctcatcttgcattgc

SEQ ID NO: 3687445 - DNA, 25 bp, Homo sapien
agcccagatttttacgatgactggg

SEQ ID NO: 3687446 - DNA, 25 bp, Homo sapien
gatttttcttgggtgagcccagatt

SEQ ID NO: 3687447 - DNA, 25 bp, Homo sapien
tgactgggtgggcactgttggattc

SEQ ID NO: 3687448 - DNA, 25 bp, Homo sapien
caagttgaggcaagaggtaagaggc

SEQ ID NO: 3687449 - DNA, 25 bp, Homo sapien
atgggtacaactcctataacccctg

SEQ ID NO: 3687450 - DNA, 25 bp, Homo sapien
tatttagtagaagattcttcatggg

SEQ ID NO: 3687451 - DNA, 25 bp, Homo sapien
ctgatatttagtagaagattcttca

SEQ ID NO: 3687452 - DNA, 25 bp, Homo sapien
gattcttcatgggtacaactcctat

SEQ ID NO: 3687453 - DNA, 25 bp, Homo sapien
cgacgacgacgaccggaagcgggcg

SEQ ID NO: 3687454 - DNA, 25 bp, Homo sapien
tcaggcggacggaaaagcgcgctct

SEQ ID NO: 3687455 - DNA, 25 bp, Homo sapien
gaagcgggcgaaggcgggagccaga

SEQ ID NO: 3687456 - DNA, 25 bp, Homo sapien
ggctctcggctttgtccggcgggca

SEQ ID NO: 3687457 - DNA, 25 bp, Homo sapien
cgctgatggccacggtgcgggtggg

SEQ ID NO: 3687458 - DNA, 25 bp, Homo sapien
ggccgctgccggctgacgaggacat

SEQ ID NO: 3687459 - DNA, 25 bp, Homo sapien
aatagtcatgaggtagctgcgcggc

SEQ ID NO: 3687460 - DNA, 25 bp, Homo sapien
ccccgggcgtggtgcaatagtcatg

SEQ ID NO: 3687461 - DNA, 25 bp, Homo sapien
tgagcaataccacaaagaattctgg

SEQ ID NO: 3687462 - DNA, 25 bp, Homo sapien
ttatagctgagtgcagttgtcacta

SEQ ID NO: 3687463 - DNA, 25 bp, Homo sapien
tcactatgacgtgttctgaacttct

SEQ ID NO: 3687464 - DNA, 25 bp, Homo sapien
ccatcacctcggaaaacagcatcta

SEQ ID NO: 3687465 - DNA, 25 bp, Homo sapien
tggtaacagcatacttttccatggc

SEQ ID NO: 3687466 - DNA, 25 bp, Homo sapien
gtaacagcatacttttccatggctg

SEQ ID NO: 3687467 - DNA, 25 bp, Homo sapien
tatggtaacagcatacttttccatg

SEQ ID NO: 3687468 - DNA, 25 bp, Homo sapien
ttatggtaacagcatacttttccat

SEQ ID NO: 3687469 - DNA, 25 bp, Homo sapien
catttacgaaaggacaattactacg

SEQ ID NO: 3687470 - DNA, 25 bp, Homo sapien
ggtactgcttaatgggaagttattg

SEQ ID NO: 3687471 - DNA, 25 bp, Homo sapien
tttaactgagattcctagagtagtc

SEQ ID NO: 3687472 - DNA, 25 bp, Homo sapien
tactacgtggttccatttaactgag

SEQ ID NO: 3687473 - DNA, 25 bp, Homo sapien
tgagcaggaaaccaacaatgtcagc

SEQ ID NO: 3687474 - DNA, 25 bp, Homo sapien
caagaagagggaatagctattgagc

SEQ ID NO: 3687475 - DNA, 25 bp, Homo sapien
gggagaagggtgtatataacaacta

SEQ ID NO: 3687476 - DNA, 25 bp, Homo sapien
taggagacagaagtatatacattgg

SEQ ID NO: 3687477 - DNA, 25 bp, Homo sapien
gcaacaatggtagccagcaaaagca

SEQ ID NO: 3687478 - DNA, 25 bp, Homo sapien
agtggctgtctactggcattttacc

SEQ ID NO: 3687479 - DNA, 25 bp, Homo sapien
tatacagtggagagctaaagttgac

SEQ ID NO: 3687480 - DNA, 25 bp, Homo sapien
taaagataactactagaggagccaa

SEQ ID NO: 3687481 - DNA, 25 bp, Homo sapien
cagcactatctgttgaaaactgttc

SEQ ID NO: 3687482 - DNA, 25 bp, Homo sapien
tcagcactatctgttgaaaactgtt

SEQ ID NO: 3687483 - DNA, 25 bp, Homo sapien
cattaatagcttttgctctgacatt

SEQ ID NO: 3687484 - DNA, 25 bp, Homo sapien
cttcttctaaaggttgtacattaat

SEQ ID NO: 3687485 - DNA, 25 bp, Homo sapien
aacaaaaactagagtagcactcaaa

SEQ ID NO: 3687486 - DNA, 25 bp, Homo sapien
aactagagtagcactcaaaaaggca

SEQ ID NO: 3687487 - DNA, 25 bp, Homo sapien
actagagtagcactcaaaaaggcat

SEQ ID NO: 3687488 - DNA, 25 bp, Homo sapien
tgaaaaacaaaaactagagtagcac

SEQ ID NO: 3687489 - DNA, 25 bp, Homo sapien
agccatgggagaattgcgacgatcc

SEQ ID NO: 3687490 - DNA, 25 bp, Homo sapien
ggagaattgcgacgatccaacagaa

SEQ ID NO: 3687491 - DNA, 25 bp, Homo sapien
catgggagaattgcgacgatccaac

SEQ ID NO: 3687492 - DNA, 25 bp, Homo sapien
gggagaattgcgacgatccaacaga

SEQ ID NO: 3687493 - DNA, 25 bp, Homo sapien
gtctccaacatcgccattctcttac

SEQ ID NO: 3687494 - DNA, 25 bp, Homo sapien
ggtctccaacatcgccattctctta

SEQ ID NO: 3687495 - DNA, 25 bp, Homo sapien
ctaggtctccaacatcgccattctc

SEQ ID NO: 3687496 - DNA, 25 bp, Homo sapien
taggtctccaacatcgccattctct

SEQ ID NO: 3687497 - DNA, 25 bp, Homo sapien
atgtccatctcgaactgagcatcat

SEQ ID NO: 3687498 - DNA, 25 bp, Homo sapien
tccatctcgaactgagcatcatccc

SEQ ID NO: 3687499 - DNA, 25 bp, Homo sapien
tcagatgtccatctcgaactgagca

SEQ ID NO: 3687500 - DNA, 25 bp, Homo sapien
cagatgtccatctcgaactgagcat

SEQ ID NO: 3687501 - DNA, 25 bp, Homo sapien
ttttcactgttgatcctattggcca

SEQ ID NO: 3687502 - DNA, 25 bp, Homo sapien
gggactgctggtattgcctcttctg

SEQ ID NO: 3687503 - DNA, 25 bp, Homo sapien
tcccatcatttggcacccagaggaa

SEQ ID NO: 3687504 - DNA, 25 bp, Homo sapien
tgcacacaagtatcagtgttgctgc

SEQ ID NO: 3687505 - DNA, 25 bp, Homo sapien
aatacagcaagggccttcaatctaa

SEQ ID NO: 3687506 - DNA, 25 bp, Homo sapien
agaaatacagcaagggccttcaatc

SEQ ID NO: 3687507 - DNA, 25 bp, Homo sapien
atacagcaagggccttcaatctaac

SEQ ID NO: 3687508 - DNA, 25 bp, Homo sapien
gaaatacagcaagggccttcaatct

SEQ ID NO: 3687509 - DNA, 25 bp, Homo sapien
acaagctgtgctctgtcccgaggga

SEQ ID NO: 3687510 - DNA, 25 bp, Homo sapien
aacagtgtcacagggtaacgctacc

SEQ ID NO: 3687511 - DNA, 25 bp, Homo sapien
caagggctctcttctgatgtacaga

SEQ ID NO: 3687512 - DNA, 25 bp, Homo sapien
atggcctgttactctcaccctggga

SEQ ID NO: 3687513 - DNA, 25 bp, Homo sapien
tacaaagaggtcctgagcatgcttc

SEQ ID NO: 3687514 - DNA, 25 bp, Homo sapien
gattgtccgcccaagtatagaagca

SEQ ID NO: 3687515 - DNA, 25 bp, Homo sapien
ccatgaggcatgacacaaaggtatc

SEQ ID NO: 3687516 - DNA, 25 bp, Homo sapien
taaatccattcctcaccgttcagtg

SEQ ID NO: 3687517 - DNA, 25 bp, Homo sapien
taagacaggtttagtggctcggctg

SEQ ID NO: 3687518 - DNA, 25 bp, Homo sapien
gagtcttacagacaccaagtctagg

SEQ ID NO: 3687519 - DNA, 25 bp, Homo sapien
gtaacttcatgataccatgggccag

SEQ ID NO: 3687520 - DNA, 25 bp, Homo sapien
gacaaaactcttggcttggaagccc

SEQ ID NO: 3687521 - DNA, 25 bp, Homo sapien
tactggctaaatgatggactccggc

SEQ ID NO: 3687522 - DNA, 25 bp, Homo sapien
aagtatactctcaagcaagcagggc

SEQ ID NO: 3687523 - DNA, 25 bp, Homo sapien
gacagggcgcaactcttgtctcaga

SEQ ID NO: 3687524 - DNA, 25 bp, Homo sapien
cattgccatcaagaagcccaggaag

SEQ ID NO: 3687525 - DNA, 25 bp, Homo sapien
cagaaactgccctcccaaagaaaca

SEQ ID NO: 3687526 - DNA, 25 bp, Homo sapien
ggataactaagtccacctcaaagtc

SEQ ID NO: 3687527 - DNA, 25 bp, Homo sapien
gtccagacagaaactgccctcccaa

SEQ ID NO: 3687528 - DNA, 25 bp, Homo sapien
agaactgtagggataactaagtcca

SEQ ID NO: 3687529 - DNA, 25 bp, Homo sapien
caccggcaagagctccctttggaaa

SEQ ID NO: 3687530 - DNA, 25 bp, Homo sapien
ccgctgaacagggactcaagccttc

SEQ ID NO: 3687531 - DNA, 25 bp, Homo sapien
gacatacagtatggtctgccagggc

SEQ ID NO: 3687532 - DNA, 25 bp, Homo sapien
aaggttatcaacttccaggaccagc

SEQ ID NO: 3687533 - DNA, 25 bp, Homo sapien
taaggtttacccctggagtagcaga

SEQ ID NO: 3687534 - DNA, 25 bp, Homo sapien
taggagcaggatggcttacccagca

SEQ ID NO: 3687535 - DNA, 25 bp, Homo sapien
taaaatggacaccttagcacgtgag

SEQ ID NO: 3687536 - DNA, 25 bp, Homo sapien
catcatgggagacaaagggaagacc

SEQ ID NO: 3687537 - DNA, 25 bp, Homo sapien
agtacaacgcctatcgctgtgaggg

SEQ ID NO: 3687538 - DNA, 25 bp, Homo sapien
gaggagtttcatccgaccaaccatg

SEQ ID NO: 3687539 - DNA, 25 bp, Homo sapien
aagtcaactgtgtcggaaggtcaag

SEQ ID NO: 3687540 - DNA, 25 bp, Homo sapien
tatataaggtaaggcctccagcaag

SEQ ID NO: 3687541 - DNA, 25 bp, Homo sapien
caccgggctccgtaggtcctgccat

SEQ ID NO: 3687542 - DNA, 25 bp, Homo sapien
ggcctggcgcgctcacctcaccggg

SEQ ID NO: 3687543 - DNA, 25 bp, Homo sapien
gcgctcacctcaccgggctccgtag

SEQ ID NO: 3687544 - DNA, 25 bp, Homo sapien
cacctcaccgggctccgtaggtcct

SEQ ID NO: 3687545 - DNA, 25 bp, Homo sapien
gcccgtctgctcttcggctgactca

SEQ ID NO: 3687546 - DNA, 25 bp, Homo sapien
ctccagcctcggtcttcttgctccg

SEQ ID NO: 3687547 - DNA, 25 bp, Homo sapien
gcctcggtcttcttgctccgcagcc

SEQ ID NO: 3687548 - DNA, 25 bp, Homo sapien
gctccgcagcccgtctgctcttcgg

SEQ ID NO: 3687549 - DNA, 25 bp, Homo sapien
gggcgccgagtcaggcagcgacggg

SEQ ID NO: 3687550 - DNA, 25 bp, Homo sapien
tgcgcccgaactgcgggcgccgagt

SEQ ID NO: 3687551 - DNA, 25 bp, Homo sapien
acccggcgaggccacgcgagaggga

SEQ ID NO: 3687552 - DNA, 25 bp, Homo sapien
acttcgccagcccatgcgggggcag

SEQ ID NO: 3687553 - DNA, 25 bp, Homo sapien
agccccctggagcagagactactcc

SEQ ID NO: 3687554 - DNA, 25 bp, Homo sapien
acctgatgccttagggcccagctca

SEQ ID NO: 3687555 - DNA, 25 bp, Homo sapien
gcttatttacctgatgccttagggc

SEQ ID NO: 3687556 - DNA, 25 bp, Homo sapien
tccccaaagggcaactctggggctc

SEQ ID NO: 3687557 - DNA, 25 bp, Homo sapien
gcagcaggaggatacatccacccag

SEQ ID NO: 3687558 - DNA, 25 bp, Homo sapien
cagcggcagccaagtcggggtcatt

SEQ ID NO: 3687559 - DNA, 25 bp, Homo sapien
cagcagtaggaggatacatccaccc

SEQ ID NO: 3687560 - DNA, 25 bp, Homo sapien
ttggtgaagcggcagaaggacacat

SEQ ID NO: 3687561 - DNA, 25 bp, Homo sapien
cagaaacatcaggtggctactccaa

SEQ ID NO: 3687562 - DNA, 25 bp, Homo sapien
gaaagagccatgagctagccggtgc

SEQ ID NO: 3687563 - DNA, 25 bp, Homo sapien
gactgaaggaagtgacaaggcagcc

SEQ ID NO: 3687564 - DNA, 25 bp, Homo sapien
cgttcctagggtattgaaagagcca

SEQ ID NO: 3687565 - DNA, 25 bp, Homo sapien
gtaagaaggagctgcgtagacgcca

SEQ ID NO: 3687566 - DNA, 25 bp, Homo sapien
gggtgaggacgctcccgaggtgcca

SEQ ID NO: 3687567 - DNA, 25 bp, Homo sapien
acaccttctcatgggaaaactggcc

SEQ ID NO: 3687568 - DNA, 25 bp, Homo sapien
gaggtgccactgctggaacgctcaa

SEQ ID NO: 3687569 - DNA, 25 bp, Homo sapien
tctcgggatgacaaagcctgccccg

SEQ ID NO: 3687570 - DNA, 25 bp, Homo sapien
agcggtccctgggtcaccgggtgtg

SEQ ID NO: 3687571 - DNA, 25 bp, Homo sapien
ctggcaggcgggttctcgggatgac

SEQ ID NO: 3687572 - DNA, 25 bp, Homo sapien
tgggtcaccgggtgtgggccagcca

SEQ ID NO: 3687573 - DNA, 25 bp, Homo sapien
ctctgttctgggccctcgcacaagt

SEQ ID NO: 3687574 - DNA, 25 bp, Homo sapien
attcgggataggttcccatctgctc

SEQ ID NO: 3687575 - DNA, 25 bp, Homo sapien
ctggtaagccattcgggataggttc

SEQ ID NO: 3687576 - DNA, 25 bp, Homo sapien
tgttctgggccctcgcacaagtcct

SEQ ID NO: 3687577 - DNA, 25 bp, Homo sapien
agtccctggctctcaaccaaggcag

SEQ ID NO: 3687578 - DNA, 25 bp, Homo sapien
tcgcccaggcgccatctgtgaatgg

SEQ ID NO: 3687579 - DNA, 25 bp, Homo sapien
gctgccacagacgtgaaccttcagg

SEQ ID NO: 3687580 - DNA, 25 bp, Homo sapien
ttcaggaccaggactagaaccaggg

SEQ ID NO: 3687581 - DNA, 25 bp, Homo sapien
tagcaatcctagacagaagcctgac

SEQ ID NO: 3687582 - DNA, 25 bp, Homo sapien
ttcaggtgaactcaacaagcttgga

SEQ ID NO: 3687583 - DNA, 25 bp, Homo sapien
caagcttggagaatcctagcaatcc

SEQ ID NO: 3687584 - DNA, 25 bp, Homo sapien
tgaccttgccttataaaactagctg

SEQ ID NO: 3687585 - DNA, 25 bp, Homo sapien
ggcaatgacaggctacagctggtgc

SEQ ID NO: 3687586 - DNA, 25 bp, Homo sapien
ccctgcaagggtggcccagagacga

SEQ ID NO: 3687587 - DNA, 25 bp, Homo sapien
ccagagacgacacagatgttcacag

SEQ ID NO: 3687588 - DNA, 25 bp, Homo sapien
tctcatgggctccagaggcaatgac

SEQ ID NO: 3687589 - DNA, 25 bp, Homo sapien
caagaagtggaaggtagggtcatgg

SEQ ID NO: 3687590 - DNA, 25 bp, Homo sapien
ccaggcctcctctggaccatgcact

SEQ ID NO: 3687591 - DNA, 25 bp, Homo sapien
aacaactccagactcatcggccctc

SEQ ID NO: 3687592 - DNA, 25 bp, Homo sapien
ctgaggtcaggtcagtctgaaggct

SEQ ID NO: 3687593 - DNA, 25 bp, Homo sapien
tgctgggctgtgctggccgttgtac

SEQ ID NO: 3687594 - DNA, 25 bp, Homo sapien
gggctgtgctggccgttgtacccat

SEQ ID NO: 3687595 - DNA, 25 bp, Homo sapien
ctgggctgtgctggccgttgtaccc

SEQ ID NO: 3687596 - DNA, 25 bp, Homo sapien
ctgccgagaccgtctgctgggctgt

SEQ ID NO: 3687597 - DNA, 25 bp, Homo sapien
cactgccctgtaggccctcaaatgg

SEQ ID NO: 3687598 - DNA, 25 bp, Homo sapien
gtgccactgccctgtaggccctcaa

SEQ ID NO: 3687599 - DNA, 25 bp, Homo sapien
gccactgccctgtaggccctcaaat

SEQ ID NO: 3687600 - DNA, 25 bp, Homo sapien
cgtgccactgccctgtaggccctca

SEQ ID NO: 3687601 - DNA, 25 bp, Homo sapien
tgcaagctagtgctctggaaggagt

SEQ ID NO: 3687602 - DNA, 25 bp, Homo sapien
ggagtggatgctgacggagtgccga

SEQ ID NO: 3687603 - DNA, 25 bp, Homo sapien
tgctgacggagtgccgactgtccat

SEQ ID NO: 3687604 - DNA, 25 bp, Homo sapien
tgctgttatgcaagctagtgctctg

SEQ ID NO: 3687605 - DNA, 25 bp, Homo sapien
caacgtgtaatgagccttgagcagc

SEQ ID NO: 3687606 - DNA, 25 bp, Homo sapien
ttgtccgagagccggcccaacgtgt

SEQ ID NO: 3687607 - DNA, 25 bp, Homo sapien
cgagagccggcccaacgtgtaatga

SEQ ID NO: 3687608 - DNA, 25 bp, Homo sapien
gccggcccaacgtgtaatgagcctt

SEQ ID NO: 3687609 - DNA, 25 bp, Homo sapien
ttctcagtgacatcccgcaccagga

SEQ ID NO: 3687610 - DNA, 25 bp, Homo sapien
tctggagtttctggaggacccgcct

SEQ ID NO: 3687611 - DNA, 25 bp, Homo sapien
gaggctgggctgtcccatgccgaac

SEQ ID NO: 3687612 - DNA, 25 bp, Homo sapien
tgtcccatgccgaacacagtgagcc

SEQ ID NO: 3687613 - DNA, 25 bp, Homo sapien
tcgtaggcaaaatcatgtcctggtc

SEQ ID NO: 3687614 - DNA, 25 bp, Homo sapien
tgcaacctgaatcctacccaagaaa

SEQ ID NO: 3687615 - DNA, 25 bp, Homo sapien
tcctgtcagggtcaagagtccttca

SEQ ID NO: 3687616 - DNA, 25 bp, Homo sapien
taatggaccacaggttcctcgtagg

SEQ ID NO: 3687617 - DNA, 25 bp, Homo sapien
ggacacaaagtcctcatctgcacgc

SEQ ID NO: 3687618 - DNA, 25 bp, Homo sapien
ttctgcttgtctcgaggtgtgtagg

SEQ ID NO: 3687619 - DNA, 25 bp, Homo sapien
tcgaggtgtgtaggacacaaagtcc

SEQ ID NO: 3687620 - DNA, 25 bp, Homo sapien
ggttcctcccgcacacagaagatga

SEQ ID NO: 3687621 - DNA, 25 bp, Homo sapien
taggcatgcgcaagcacgtccagct

SEQ ID NO: 3687622 - DNA, 25 bp, Homo sapien
tataggcatgcgcaagcacgtccag

SEQ ID NO: 3687623 - DNA, 25 bp, Homo sapien
gtcttgaactcctgcccacctcggc

SEQ ID NO: 3687624 - DNA, 25 bp, Homo sapien
attataggcatgcgcaagcacgtcc

SEQ ID NO: 3687625 - DNA, 25 bp, Homo sapien
gaagaggggccgcttgtacacctcc

SEQ ID NO: 3687626 - DNA, 25 bp, Homo sapien
cgctcagctgggcaaagtcgtggat

SEQ ID NO: 3687627 - DNA, 25 bp, Homo sapien
cacaggtcctcggtgttatggtaca

SEQ ID NO: 3687628 - DNA, 25 bp, Homo sapien
aagtcgtcctcaccatggatggcca

SEQ ID NO: 3687629 - DNA, 25 bp, Homo sapien
tattcccgggcactgtttggaaatg

SEQ ID NO: 3687630 - DNA, 25 bp, Homo sapien
tccgcccaacctgcagatggtgaaa

SEQ ID NO: 3687631 - DNA, 25 bp, Homo sapien
gtgtgggggactccgcccaacctgc

SEQ ID NO: 3687632 - DNA, 25 bp, Homo sapien
ctattcccgggcactgtttggaaat

SEQ ID NO: 3687633 - DNA, 25 bp, Homo sapien
gacaaaggcgtccaactgggcctcc

SEQ ID NO: 3687634 - DNA, 25 bp, Homo sapien
gactcccttgctcgggcaggggcag

SEQ ID NO: 3687635 - DNA, 25 bp, Homo sapien
cactgacaaaggcgtccaactgggc

SEQ ID NO: 3687636 - DNA, 25 bp, Homo sapien
ctgacaaaggcgtccaactgggcct

SEQ ID NO: 3687637 - DNA, 25 bp, Homo sapien
cagtgagaccaggaaaccctgggct

SEQ ID NO: 3687638 - DNA, 25 bp, Homo sapien
ccatgaggatcaggccccagtgaga

SEQ ID NO: 3687639 - DNA, 25 bp, Homo sapien
aagaccatgaggatcaggccccagt

SEQ ID NO: 3687640 - DNA, 25 bp, Homo sapien
tgggaaagaccatgaggatcaggcc

SEQ ID NO: 3687641 - DNA, 25 bp, Homo sapien
tcccactgcggtgaagcaggatgag

SEQ ID NO: 3687642 - DNA, 25 bp, Homo sapien
ccgtgggcatcacggagctgcagca

SEQ ID NO: 3687643 - DNA, 25 bp, Homo sapien
caggttggtcctgcccacgcccatc

SEQ ID NO: 3687644 - DNA, 25 bp, Homo sapien
tggtcccactgcggtgaagcaggat

SEQ ID NO: 3687645 - DNA, 25 bp, Homo sapien
ctggaactgctccataggcaggggc

SEQ ID NO: 3687646 - DNA, 25 bp, Homo sapien
agctctggatcacctggaactgctc

SEQ ID NO: 3687647 - DNA, 25 bp, Homo sapien
gaactgctccataggcaggggcttg

SEQ ID NO: 3687648 - DNA, 25 bp, Homo sapien
aaagctctggatcacctggaactgc

SEQ ID NO: 3687649 - DNA, 25 bp, Homo sapien
ctctccggtcggataccttctaact

SEQ ID NO: 3687650 - DNA, 25 bp, Homo sapien
gggctctccggtcggataccttcta

SEQ ID NO: 3687651 - DNA, 25 bp, Homo sapien
ctgggctctccggtcggataccttc

SEQ ID NO: 3687652 - DNA, 25 bp, Homo sapien
tgggctgggctctccggtcggatac

SEQ ID NO: 3687653 - DNA, 25 bp, Homo sapien
agacgctgtgtcggctgccgcttcc

SEQ ID NO: 3687654 - DNA, 25 bp, Homo sapien
cagacgctgtgtcggctgccgcttc

SEQ ID NO: 3687655 - DNA, 25 bp, Homo sapien
ctgccagacgctgtgtcggctgccg

SEQ ID NO: 3687656 - DNA, 25 bp, Homo sapien
gccagacgctgtgtcggctgccgct

SEQ ID NO: 3687657 - DNA, 25 bp, Homo sapien
gtagaagtatcgctccaggctccac

SEQ ID NO: 3687658 - DNA, 25 bp, Homo sapien
ctgctcatgaaggtagtagttaaac

SEQ ID NO: 3687659 - DNA, 25 bp, Homo sapien
taaacaggatcaggtagaagtatcg

SEQ ID NO: 3687660 - DNA, 25 bp, Homo sapien
tagtagttaaacaggatcaggtaga

SEQ ID NO: 3687661 - DNA, 25 bp, Homo sapien
acagggcctgctgagctcagcgtca

SEQ ID NO: 3687662 - DNA, 25 bp, Homo sapien
ctcagcgtcacgggcaggcggtaca

SEQ ID NO: 3687663 - DNA, 25 bp, Homo sapien
tggcgatgaggtccctcggagccac

SEQ ID NO: 3687664 - DNA, 25 bp, Homo sapien
ctgctgagctcagcgtcacgggcag

SEQ ID NO: 3687665 - DNA, 25 bp, Homo sapien
atccagtgtttaggggccagggcca

SEQ ID NO: 3687666 - DNA, 25 bp, Homo sapien
cccaaccctacaggaatccagtgtt

SEQ ID NO: 3687667 - DNA, 25 bp, Homo sapien
gggccagggccagtacacagccatg

SEQ ID NO: 3687668 - DNA, 25 bp, Homo sapien
acagccatgcccacttctccgactg

SEQ ID NO: 3687669 - DNA, 25 bp, Homo sapien
ctgtggggagagcaccaagcctggg

SEQ ID NO: 3687670 - DNA, 25 bp, Homo sapien
agagcaccaagcctgggacccacag

SEQ ID NO: 3687671 - DNA, 25 bp, Homo sapien
ggggagagcaccaagcctgggaccc

SEQ ID NO: 3687672 - DNA, 25 bp, Homo sapien
ggagagcaccaagcctgggacccac

SEQ ID NO: 3687673 - DNA, 25 bp, Homo sapien
ggcacccgccggaagttggccacat

SEQ ID NO: 3687674 - DNA, 25 bp, Homo sapien
ctctctgacagtgctgagcgcgtcc

SEQ ID NO: 3687675 - DNA, 25 bp, Homo sapien
tgggctgggccgtgccgtagatggg

SEQ ID NO: 3687676 - DNA, 25 bp, Homo sapien
gcgtccggggagaccagatcgtcct

SEQ ID NO: 3687677 - DNA, 25 bp, Homo sapien
ggacccaggccctgagggccggtca

SEQ ID NO: 3687678 - DNA, 25 bp, Homo sapien
gacccaggccctgagggccggtcac

SEQ ID NO: 3687679 - DNA, 25 bp, Homo sapien
ttggcgtccgtcaggtaggccagga

SEQ ID NO: 3687680 - DNA, 25 bp, Homo sapien
aaggctcacccagacaaccttccgc

SEQ ID NO: 3687681 - DNA, 25 bp, Homo sapien
taggtgtgcccgtcacactccaaca

SEQ ID NO: 3687682 - DNA, 25 bp, Homo sapien
ctgtaggtgtgcccgtcacactcca

SEQ ID NO: 3687683 - DNA, 25 bp, Homo sapien
ggctcacccagacaaccttccgcag

SEQ ID NO: 3687684 - DNA, 25 bp, Homo sapien
ctgggggaggctcgcttagatgggc

SEQ ID NO: 3687685 - DNA, 25 bp, Homo sapien
tgcggtggtaggtgaggccaggaca

SEQ ID NO: 3687686 - DNA, 25 bp, Homo sapien
gaagacctcctgcatggtaaggcag

SEQ ID NO: 3687687 - DNA, 25 bp, Homo sapien
cctgcatggtaaggcaggtctggaa

SEQ ID NO: 3687688 - DNA, 25 bp, Homo sapien
cctcctgcatggtaaggcaggtctg

SEQ ID NO: 3687689 - DNA, 25 bp, Homo sapien
gtcgtttcattctcccagagcccag

SEQ ID NO: 3687690 - DNA, 25 bp, Homo sapien
tcggaaaacctcgtgagaccattcc

SEQ ID NO: 3687691 - DNA, 25 bp, Homo sapien
gaatgtgaataaaccacttgggcca

SEQ ID NO: 3687692 - DNA, 25 bp, Homo sapien
tatgcacatacgtaacagaatacac

SEQ ID NO: 3687693 - DNA, 25 bp, Homo sapien
catcgcagttgtggtacggccctgg

SEQ ID NO: 3687694 - DNA, 25 bp, Homo sapien
agctgaacacgaagccagtgcctgg

SEQ ID NO: 3687695 - DNA, 25 bp, Homo sapien
ccctggccgctgaggcagctgaaca

SEQ ID NO: 3687696 - DNA, 25 bp, Homo sapien
ggacagccaccaccatcgcagttgt

SEQ ID NO: 3687697 - DNA, 25 bp, Homo sapien
gtgaacttggcatcaggcacactca

SEQ ID NO: 3687698 - DNA, 25 bp, Homo sapien
tgaaattcacccttagtgaacttgg

SEQ ID NO: 3687699 - DNA, 25 bp, Homo sapien
ctgaaattcacccttagtgaacttg

SEQ ID NO: 3687700 - DNA, 25 bp, Homo sapien
ttggcatcaggcacactcacgagct

SEQ ID NO: 3687701 - DNA, 25 bp, Homo sapien
ctcttaggttcaagaaattctcccg

SEQ ID NO: 3687702 - DNA, 25 bp, Homo sapien
tcttaggttcaagaaattctcccgc

SEQ ID NO: 3687703 - DNA, 25 bp, Homo sapien
cacggtgcccatcgggtagcagctg

SEQ ID NO: 3687704 - DNA, 25 bp, Homo sapien
tgcccatcgggtagcagctgcacca

SEQ ID NO: 3687705 - DNA, 25 bp, Homo sapien
catcgggtagcagctgcaccacctt

SEQ ID NO: 3687706 - DNA, 25 bp, Homo sapien
tcacacggtgcccatcgggtagcag

SEQ ID NO: 3687707 - DNA, 25 bp, Homo sapien
atctcccgcaggtggtagtgcatgg

SEQ ID NO: 3687708 - DNA, 25 bp, Homo sapien
gatgatctcccgcaggtggtagtgc

SEQ ID NO: 3687709 - DNA, 25 bp, Homo sapien
caggtggtagtgcatgggcgtcatg

SEQ ID NO: 3687710 - DNA, 25 bp, Homo sapien
tgatctcccgcaggtggtagtgcat

SEQ ID NO: 3687711 - DNA, 25 bp, Homo sapien
aactttatttttataatgtaatgag

SEQ ID NO: 3687712 - DNA, 25 bp, Homo sapien
atgtaatgagttatttaaaaacaat

SEQ ID NO: 3687713 - DNA, 25 bp, Homo sapien
ttacagataaaaaacaccccatctg

SEQ ID NO: 3687714 - DNA, 25 bp, Homo sapien
acagataaaaaacaccccatctggg

SEQ ID NO: 3687715 - DNA, 25 bp, Homo sapien
acctgatgcgccttcccaggctgtc

SEQ ID NO: 3687716 - DNA, 25 bp, Homo sapien
ctttgctgcctctaaactcgttttg

SEQ ID NO: 3687717 - DNA, 25 bp, Homo sapien
tgcgggcaccgaaccacctttgctg

SEQ ID NO: 3687718 - DNA, 25 bp, Homo sapien
ttctgtgtcatcagatgcgggcacc

SEQ ID NO: 3687719 - DNA, 25 bp, Homo sapien
cctgccaacgcttcccttctctgcc

SEQ ID NO: 3687720 - DNA, 25 bp, Homo sapien
tttggtcgcaggaccaactctgcac

SEQ ID NO: 3687721 - DNA, 25 bp, Homo sapien
ggaagctcctttggtcgcaggacca

SEQ ID NO: 3687722 - DNA, 25 bp, Homo sapien
tcctggaagctcctttggtcgcagg

SEQ ID NO: 3687723 - DNA, 25 bp, Homo sapien
tcaacaattctaagcccagtggtgc

SEQ ID NO: 3687724 - DNA, 25 bp, Homo sapien
ggtgcacacttagaaaccatagctg

SEQ ID NO: 3687725 - DNA, 25 bp, Homo sapien
ccatagctgctcaatggatgtttgt

SEQ ID NO: 3687726 - DNA, 25 bp, Homo sapien
aaataccagcttgccctacaatggg

SEQ ID NO: 3687727 - DNA, 25 bp, Homo sapien
gaaagctcactaatccgctcatcca

SEQ ID NO: 3687728 - DNA, 25 bp, Homo sapien
ccaggtttatggaagtaggatttct

SEQ ID NO: 3687729 - DNA, 25 bp, Homo sapien
gaaggcacgtgtgcaccacagaaag

SEQ ID NO: 3687730 - DNA, 25 bp, Homo sapien
taggatttctcagcaaagtgaggga

SEQ ID NO: 3687731 - DNA, 25 bp, Homo sapien
tctttgcctccagggtcgcagagta

SEQ ID NO: 3687732 - DNA, 25 bp, Homo sapien
ttgcctccagggtcgcagagtagat

SEQ ID NO: 3687733 - DNA, 25 bp, Homo sapien
tttgcctccagggtcgcagagtaga

SEQ ID NO: 3687734 - DNA, 25 bp, Homo sapien
gtctttgcctccagggtcgcagagt

SEQ ID NO: 3687735 - DNA, 25 bp, Homo sapien
tccctgctccaggaagaggacgtgg

SEQ ID NO: 3687736 - DNA, 25 bp, Homo sapien
agaggacgtggcacaggggtcatcc

SEQ ID NO: 3687737 - DNA, 25 bp, Homo sapien
acaggggtcatccctcgggcaccag

SEQ ID NO: 3687738 - DNA, 25 bp, Homo sapien
tgctccaggaagaggacgtggcaca

SEQ ID NO: 3687739 - DNA, 25 bp, Homo sapien
gacatagcgctccaagtactgcagg

SEQ ID NO: 3687740 - DNA, 25 bp, Homo sapien
agtcggccttctccaggtggaggta

SEQ ID NO: 3687741 - DNA, 25 bp, Homo sapien
tggaggtacgcgttgaagagaatca

SEQ ID NO: 3687742 - DNA, 25 bp, Homo sapien
gcagcctccgcatttcttgcgcctc

SEQ ID NO: 3687743 - DNA, 25 bp, Homo sapien
gagggtgccactaaggccactgagt

SEQ ID NO: 3687744 - DNA, 25 bp, Homo sapien
gacagtgagtgctccacacagatag

SEQ ID NO: 3687745 - DNA, 25 bp, Homo sapien
tgacctgaacaagtttgcaccttga

SEQ ID NO: 3687746 - DNA, 25 bp, Homo sapien
gactgtctcaaggaggactctacac

SEQ ID NO: 3687747 - DNA, 25 bp, Homo sapien
gagaagggctggtcctccccgctct

SEQ ID NO: 3687748 - DNA, 25 bp, Homo sapien
ccgctctccagctcggggaagccca

SEQ ID NO: 3687749 - DNA, 25 bp, Homo sapien
tcgtagatgccagccttcgatgcca

SEQ ID NO: 3687750 - DNA, 25 bp, Homo sapien
ccaccggtagcgcagcctggagaag

SEQ ID NO: 3687751 - DNA, 25 bp, Homo sapien
acagcaagtcctcgggggcagaggg

SEQ ID NO: 3687752 - DNA, 25 bp, Homo sapien
tacagcaagtcctcgggggcagagg

SEQ ID NO: 3687753 - DNA, 25 bp, Homo sapien
ctcgggggcagagggctcgaggctg

SEQ ID NO: 3687754 - DNA, 25 bp, Homo sapien
cacacaccttggtggtttgcaaggg

SEQ ID NO: 3687755 - DNA, 25 bp, Homo sapien
ctgaacgccggcctgtctgcaaggt

SEQ ID NO: 3687756 - DNA, 25 bp, Homo sapien
gtgtgcaccttgtgagcactccagt

SEQ ID NO: 3687757 - DNA, 25 bp, Homo sapien
gacagagagatccacagtgtttggc

SEQ ID NO: 3687758 - DNA, 25 bp, Homo sapien
ttcccagacaagtggagcaggcctc

SEQ ID NO: 3687759 - DNA, 25 bp, Homo sapien
ggctcaacgcaaacatggcacttct

SEQ ID NO: 3687760 - DNA, 25 bp, Homo sapien
gataaatgggaacaacttcggcctc

SEQ ID NO: 3687761 - DNA, 25 bp, Homo sapien
ttcctgcagaagtacacgagcctaa

SEQ ID NO: 3687762 - DNA, 25 bp, Homo sapien
cagtctgctattgccaaggaaggga

SEQ ID NO: 3687763 - DNA, 25 bp, Homo sapien
tgtgtaaggcccagcaataggaact

SEQ ID NO: 3687764 - DNA, 25 bp, Homo sapien
taaagaacttagtgcaggcctcagc

SEQ ID NO: 3687765 - DNA, 25 bp, Homo sapien
caagctgaggtgctgcattccgaga

SEQ ID NO: 3687766 - DNA, 25 bp, Homo sapien
cctagtgctacaggagggtgccgaa

SEQ ID NO: 3687767 - DNA, 25 bp, Homo sapien
tagtcacagaagaagttagcggcag

SEQ ID NO: 3687768 - DNA, 25 bp, Homo sapien
cctagcaggaggaagggattcaact

SEQ ID NO: 3687769 - DNA, 25 bp, Homo sapien
cacagccctgacaagaaatggaagt

SEQ ID NO: 3687770 - DNA, 25 bp, Homo sapien
catcggctatcgttagtgctagtgg

SEQ ID NO: 3687771 - DNA, 25 bp, Homo sapien
gatacgcatcagacagatggaaaag

SEQ ID NO: 3687772 - DNA, 25 bp, Homo sapien
caaaagattggatacgcatcagaca

SEQ ID NO: 3687773 - DNA, 25 bp, Homo sapien
ggtggctgggtttacacgctaatcc

SEQ ID NO: 3687774 - DNA, 25 bp, Homo sapien
tactccatagacaacatcttgtgtc

SEQ ID NO: 3687775 - DNA, 25 bp, Homo sapien
gaaggctttccctactccatagaca

SEQ ID NO: 3687776 - DNA, 25 bp, Homo sapien
tagacaacatcttgtgtcctcacac

SEQ ID NO: 3687777 - DNA, 25 bp, Homo sapien
gggaagtctacgatcgaggtgccag

SEQ ID NO: 3687778 - DNA, 25 bp, Homo sapien
caccagggtaagagcaaaaggtgaa

SEQ ID NO: 3687779 - DNA, 25 bp, Homo sapien
ggtaagagcaaaaggtgaagatggc

SEQ ID NO: 3687780 - DNA, 25 bp, Homo sapien
ccagggtaagagcaaaaggtgaaga

SEQ ID NO: 3687781 - DNA, 25 bp, Homo sapien
aagagcaaaaggtgaagatggccat

SEQ ID NO: 3687782 - DNA, 25 bp, Homo sapien
gagatcatggatgagcatgaaagcc

SEQ ID NO: 3687783 - DNA, 25 bp, Homo sapien
taaatgagatcatggatgagcatga

SEQ ID NO: 3687784 - DNA, 25 bp, Homo sapien
tatagggtgcacaaacacgctccca

SEQ ID NO: 3687785 - DNA, 25 bp, Homo sapien
gctgttcatgactatagggtgcaca

SEQ ID NO: 3687786 - DNA, 25 bp, Homo sapien
gagatgttgctctacttttaagcta

SEQ ID NO: 3687787 - DNA, 25 bp, Homo sapien
tgttgctctacttttaagctaatcc

SEQ ID NO: 3687788 - DNA, 25 bp, Homo sapien
tgaagtgtgagagatgttgctctac

SEQ ID NO: 3687789 - DNA, 25 bp, Homo sapien
taaagagctatgaagtgtgagagat

SEQ ID NO: 3687790 - DNA, 25 bp, Homo sapien
cagatccaaggggtcttccagaaag

SEQ ID NO: 3687791 - DNA, 25 bp, Homo sapien
aagccatgtctccatcagcacccat

SEQ ID NO: 3687792 - DNA, 25 bp, Homo sapien
agatccaaggggtcttccagaaagc

SEQ ID NO: 3687793 - DNA, 25 bp, Homo sapien
agaaagccatgtctccatcagcacc

SEQ ID NO: 3687794 - DNA, 25 bp, Homo sapien
tggtcatgatggtaagagtgtcatt

SEQ ID NO: 3687795 - DNA, 25 bp, Homo sapien
ctgtggtcatgatggtaagagtgtc

SEQ ID NO: 3687796 - DNA, 25 bp, Homo sapien
catgatggtaagagtgtcatttagc

SEQ ID NO: 3687797 - DNA, 25 bp, Homo sapien
tcatgatggtaagagtgtcatttag

SEQ ID NO: 3687798 - DNA, 25 bp, Homo sapien
agatgttgagcattgaaaacaaggg

SEQ ID NO: 3687799 - DNA, 25 bp, Homo sapien
caacactgctcagcttgtgagtgct

SEQ ID NO: 3687800 - DNA, 25 bp, Homo sapien
gcttggctcacgaatcaactgtcag

SEQ ID NO: 3687801 - DNA, 25 bp, Homo sapien
atgggcggagaacttctgggaacca

SEQ ID NO: 3687802 - DNA, 25 bp, Homo sapien
cagtgcaaaggcagcaggtaggaca

SEQ ID NO: 3687803 - DNA, 25 bp, Homo sapien
aggtaggacagcagcgcgcggagtg

SEQ ID NO: 3687804 - DNA, 25 bp, Homo sapien
gcgcagagcgcacagtgcaaaggca

SEQ ID NO: 3687805 - DNA, 25 bp, Homo sapien
gcgcacagtgcaaaggcagcaggta

SEQ ID NO: 3687806 - DNA, 25 bp, Homo sapien
gtgaggtcatggccccatgctccag

SEQ ID NO: 3687807 - DNA, 25 bp, Homo sapien
ttgggctgaattaactgtgaggtca

SEQ ID NO: 3687808 - DNA, 25 bp, Homo sapien
atgctccaggccacatgccagcagg

SEQ ID NO: 3687809 - DNA, 25 bp, Homo sapien
ttaactgtgaggtcatggccccatg

SEQ ID NO: 3687810 - DNA, 25 bp, Homo sapien
cactgtcacaccatagtcactgagc

SEQ ID NO: 3687811 - DNA, 25 bp, Homo sapien
agcgtccccgaaagtctgtgctgca

SEQ ID NO: 3687812 - DNA, 25 bp, Homo sapien
tgtcacaccatagtcactgagcttt

SEQ ID NO: 3687813 - DNA, 25 bp, Homo sapien
acaccacgtgggagaggaagcgtcc

SEQ ID NO: 3687814 - DNA, 25 bp, Homo sapien
actggagtgtcgtggtagtgtgggt

SEQ ID NO: 3687815 - DNA, 25 bp, Homo sapien
gagccacccggaggtgactggagtg

SEQ ID NO: 3687816 - DNA, 25 bp, Homo sapien
gggtgcagagggctgcgagccaccc

SEQ ID NO: 3687817 - DNA, 25 bp, Homo sapien
agtgtgggtggcgtgtccactacca

SEQ ID NO: 3687818 - DNA, 25 bp, Homo sapien
ggaacagctcccgaaaatcctcctg

SEQ ID NO: 3687819 - DNA, 25 bp, Homo sapien
tggcactaccaacctccgattgggc

SEQ ID NO: 3687820 - DNA, 25 bp, Homo sapien
cccgaaaacagtgacattgaagtag

SEQ ID NO: 3687821 - DNA, 25 bp, Homo sapien
gtacacacactcctgccgtaagggc

SEQ ID NO: 3687822 - DNA, 25 bp, Homo sapien
ggcagggaagagctgcccaacagga

SEQ ID NO: 3687823 - DNA, 25 bp, Homo sapien
tgtgccagctcacaagggcctgcac

SEQ ID NO: 3687824 - DNA, 25 bp, Homo sapien
agagctgcccaacaggaccttgagg

SEQ ID NO: 3687825 - DNA, 25 bp, Homo sapien
ggaccttgaggctgctgtgccagct

SEQ ID NO: 3687826 - DNA, 25 bp, Homo sapien
tagccagcggggtgaccaagggccc

SEQ ID NO: 3687827 - DNA, 25 bp, Homo sapien
ctagccagcggggtgaccaagggcc

SEQ ID NO: 3687828 - DNA, 25 bp, Homo sapien
gattttccaccaaaacttgtggcca

SEQ ID NO: 3687829 - DNA, 25 bp, Homo sapien
ttccaccaaaacttgtggccatggc

SEQ ID NO: 3687830 - DNA, 25 bp, Homo sapien
caaaacttgtggccatggcatagct

SEQ ID NO: 3687831 - DNA, 25 bp, Homo sapien
ttttccaccaaaacttgtggccatg

SEQ ID NO: 3687832 - DNA, 25 bp, Homo sapien
agctgctggcttgcaccagcacttt

SEQ ID NO: 3687833 - DNA, 25 bp, Homo sapien
ctgtatccctggatgattcctaaca

SEQ ID NO: 3687834 - DNA, 25 bp, Homo sapien
gctgctggcttgcaccagcactttc

SEQ ID NO: 3687835 - DNA, 25 bp, Homo sapien
gatactgtatccctggatgattcct

SEQ ID NO: 3687836 - DNA, 25 bp, Homo sapien
cgtgtggctgcttccgcgccaggcc

SEQ ID NO: 3687837 - DNA, 25 bp, Homo sapien
acgtgtggctgcttccgcgccaggc

SEQ ID NO: 3687838 - DNA, 25 bp, Homo sapien
ctgtcaggagccacttggagcaaga

SEQ ID NO: 3687839 - DNA, 25 bp, Homo sapien
gtctgatacccagaggggctgttcc

SEQ ID NO: 3687840 - DNA, 25 bp, Homo sapien
ccgtgtctgatacccagaggggctg

SEQ ID NO: 3687841 - DNA, 25 bp, Homo sapien
tgtctgatacccagaggggctgttc

SEQ ID NO: 3687842 - DNA, 25 bp, Homo sapien
gtgtctgatacccagaggggctgtt

SEQ ID NO: 3687843 - DNA, 25 bp, Homo sapien
tcggtgctgtctgtgcggatgaggc

SEQ ID NO: 3687844 - DNA, 25 bp, Homo sapien
cttcattgtgcaggtccccgtcagg

SEQ ID NO: 3687845 - DNA, 25 bp, Homo sapien
tgctggacggcctcccggcggtaca

SEQ ID NO: 3687846 - DNA, 25 bp, Homo sapien
tccagaggctcaatgaagaagtcgg

SEQ ID NO: 3687847 - DNA, 25 bp, Homo sapien
tctgtgaggacaactagcttccagg

SEQ ID NO: 3687848 - DNA, 25 bp, Homo sapien
cttatgagtgatacttggagagcaa

SEQ ID NO: 3687849 - DNA, 25 bp, Homo sapien
gagcaactggagcttcaacggatgc

SEQ ID NO: 3687850 - DNA, 25 bp, Homo sapien
gcttccaggcatttctcacaccagg

SEQ ID NO: 3687851 - DNA, 25 bp, Homo sapien
catttctttgggtctgaactccagc

SEQ ID NO: 3687852 - DNA, 25 bp, Homo sapien
ctggtgtggggcaagagtcgcagcc

SEQ ID NO: 3687853 - DNA, 25 bp, Homo sapien
ccatcactggtgcccctttccctgc

SEQ ID NO: 3687854 - DNA, 25 bp, Homo sapien
catcactggtgcccctttccctgcc

SEQ ID NO: 3687855 - DNA, 25 bp, Homo sapien
caggttgggaaggtctcccaggcca

SEQ ID NO: 3687856 - DNA, 25 bp, Homo sapien
atggaagcgaaccaccgagtcgtcc

SEQ ID NO: 3687857 - DNA, 25 bp, Homo sapien
cagcagcacctcgatgctgtagctg

SEQ ID NO: 3687858 - DNA, 25 bp, Homo sapien
ggtgaggacatagttctgcacatgc

SEQ ID NO: 3687859 - DNA, 25 bp, Homo sapien
agccagaaccccacaccgcccatgt

SEQ ID NO: 3687860 - DNA, 25 bp, Homo sapien
atgtacccgcgatggcagcagcagg

SEQ ID NO: 3687861 - DNA, 25 bp, Homo sapien
cacaccgcccatgtacccgcgatgg

SEQ ID NO: 3687862 - DNA, 25 bp, Homo sapien
accgcccatgtacccgcgatggcag

SEQ ID NO: 3687863 - DNA, 25 bp, Homo sapien
gggcatgagacctgttcagccttcc

SEQ ID NO: 3687864 - DNA, 25 bp, Homo sapien
tagtggggagtttttcatcattgga

SEQ ID NO: 3687865 - DNA, 25 bp, Homo sapien
gcactgaatagtggggagtttttca

SEQ ID NO: 3687866 - DNA, 25 bp, Homo sapien
ccctggggcatgagacctgttcagc

SEQ ID NO: 3687867 - DNA, 25 bp, Homo sapien
gctgccccagttcatgaatgggcag

SEQ ID NO: 3687868 - DNA, 25 bp, Homo sapien
cactttccgcagtgcccagaactgg

SEQ ID NO: 3687869 - DNA, 25 bp, Homo sapien
taagcacgaaactgtgggcagcaga

SEQ ID NO: 3687870 - DNA, 25 bp, Homo sapien
agcagaagccgcgtgcatcaccaag

SEQ ID NO: 3687871 - DNA, 25 bp, Homo sapien
ccccagggactcatcgtggtaaatc

SEQ ID NO: 3687872 - DNA, 25 bp, Homo sapien
cagggactcatcgtggtaaatctca

SEQ ID NO: 3687873 - DNA, 25 bp, Homo sapien
cgagggcaatatttatatgaacccc

SEQ ID NO: 3687874 - DNA, 25 bp, Homo sapien
caaccatgatcaagcggacgagggc

SEQ ID NO: 3687875 - DNA, 25 bp, Homo sapien
aagtcctgccgggtgaggaacacaa

SEQ ID NO: 3687876 - DNA, 25 bp, Homo sapien
cacaacgtggtcatggtgctcagcg

SEQ ID NO: 3687877 - DNA, 25 bp, Homo sapien
tgctgggagtgtgcccagcgacaca

SEQ ID NO: 3687878 - DNA, 25 bp, Homo sapien
gttcccgcgctcgatcaggctcagg

SEQ ID NO: 3687879 - DNA, 25 bp, Homo sapien
aagccccatcttaggtgtcccacag

SEQ ID NO: 3687880 - DNA, 25 bp, Homo sapien
tgttccccattccacaattgggagg

SEQ ID NO: 3687881 - DNA, 25 bp, Homo sapien
aatgggggaaggcaagtattatgat

SEQ ID NO: 3687882 - DNA, 25 bp, Homo sapien
gaccactgggttggcaaggtgtgga

SEQ ID NO: 3687883 - DNA, 25 bp, Homo sapien
acgtggccggtctcatgagctatca

SEQ ID NO: 3687884 - DNA, 25 bp, Homo sapien
tcctcatggttgagggcacagctcc

SEQ ID NO: 3687885 - DNA, 25 bp, Homo sapien
gagctatcacgaaggctgaggagaa

SEQ ID NO: 3687886 - DNA, 25 bp, Homo sapien
gctcctcagggggtgacacatgcca

SEQ ID NO: 3687887 - DNA, 25 bp, Homo sapien
cagcttgctgcagcgggaccaatgg

SEQ ID NO: 3687888 - DNA, 25 bp, Homo sapien
ccattcccctgaccgtcatgctcca

SEQ ID NO: 3687889 - DNA, 25 bp, Homo sapien
cctgaccgtcatgctccatgccgag

SEQ ID NO: 3687890 - DNA, 25 bp, Homo sapien
tccagcttgctgcagcgggaccaat

SEQ ID NO: 3687891 - DNA, 25 bp, Homo sapien
gctaatggggtatgttttaggccag

SEQ ID NO: 3687892 - DNA, 25 bp, Homo sapien
tgagtcacggaagagtcaagccagg

SEQ ID NO: 3687893 - DNA, 25 bp, Homo sapien
ctcagagtggcaggtcgcatgctcc

SEQ ID NO: 3687894 - DNA, 25 bp, Homo sapien
atgctcccctatcccagctctgagg

SEQ ID NO: 3687895 - DNA, 25 bp, Homo sapien
gccaaagtcaaagcggcactgctca

SEQ ID NO: 3687896 - DNA, 25 bp, Homo sapien
gcaggtctggtagccactgccaaag

SEQ ID NO: 3687897 - DNA, 25 bp, Homo sapien
ggtcatcgaggaggcagtcgtagga

SEQ ID NO: 3687898 - DNA, 25 bp, Homo sapien
cattgagtagttgatcccaggcagc

SEQ ID NO: 3687899 - DNA, 25 bp, Homo sapien
ctggcagaggccagatggctactta

SEQ ID NO: 3687900 - DNA, 25 bp, Homo sapien
tggcagaggccagatggctacttac

SEQ ID NO: 3687901 - DNA, 25 bp, Homo sapien
cttgccgggtgcacactcagtccca

SEQ ID NO: 3687902 - DNA, 25 bp, Homo sapien
gggtgcacactcagtcccatccagc

SEQ ID NO: 3687903 - DNA, 25 bp, Homo sapien
ttgccgggtgcacactcagtcccat

SEQ ID NO: 3687904 - DNA, 25 bp, Homo sapien
tgcacactcagtcccatccagcggg

SEQ ID NO: 3687905 - DNA, 25 bp, Homo sapien
cacatgaccgcgaacatgacccaaa

SEQ ID NO: 3687906 - DNA, 25 bp, Homo sapien
tctgctccggcgacttccagatgca

SEQ ID NO: 3687907 - DNA, 25 bp, Homo sapien
ggttgttgcagctccggctgcggga

SEQ ID NO: 3687908 - DNA, 25 bp, Homo sapien
catcctggccatatgtctgctccgg

SEQ ID NO: 3687909 - DNA, 25 bp, Homo sapien
acatagtaggagttgcgcttggcac

SEQ ID NO: 3687910 - DNA, 25 bp, Homo sapien
aagtcctcgtaggtcccagggcact

SEQ ID NO: 3687911 - DNA, 25 bp, Homo sapien
tggtactcgaacatgggccctaagc

SEQ ID NO: 3687912 - DNA, 25 bp, Homo sapien
tcgctgttgcagacctggtactcga

SEQ ID NO: 3687913 - DNA, 25 bp, Homo sapien
gtgtcccatcgtgaaccacctggtt

SEQ ID NO: 3687914 - DNA, 25 bp, Homo sapien
gtgtccgccgactggcagatcagct

SEQ ID NO: 3687915 - DNA, 25 bp, Homo sapien
ggtcccggtagctgcagcgtgtccc

SEQ ID NO: 3687916 - DNA, 25 bp, Homo sapien
cacagacgctgtatgggtcccggta

SEQ ID NO: 3687917 - DNA, 25 bp, Homo sapien
cacacttgtcatccgccttcatgga

SEQ ID NO: 3687918 - DNA, 25 bp, Homo sapien
gtgggagttgtcacccccgcagact

SEQ ID NO: 3687919 - DNA, 25 bp, Homo sapien
gtcctgcagtgggagttgtcacccc

SEQ ID NO: 3687920 - DNA, 25 bp, Homo sapien
ccccgcagactccacacttgtcatc

SEQ ID NO: 3687921 - DNA, 25 bp, Homo sapien
ggggggacttctccagtgcctcaat

SEQ ID NO: 3687922 - DNA, 25 bp, Homo sapien
atgcggtggggggacttctccagtg

SEQ ID NO: 3687923 - DNA, 25 bp, Homo sapien
cctcaatctggatgtgcctggcacc

SEQ ID NO: 3687924 - DNA, 25 bp, Homo sapien
tgggatctgcaccagcttgagagct

SEQ ID NO: 3687925 - DNA, 25 bp, Homo sapien
gagacctaccagctgagggcatctg

SEQ ID NO: 3687926 - DNA, 25 bp, Homo sapien
taatgggacgctagaaaacatgaca

SEQ ID NO: 3687927 - DNA, 25 bp, Homo sapien
aactgatgacccataggaccgtgag

SEQ ID NO: 3687928 - DNA, 25 bp, Homo sapien
acatgtgagcgaggccatcctagac

SEQ ID NO: 3687929 - DNA, 25 bp, Homo sapien
gggcccgctggtcttgaggctttcc

SEQ ID NO: 3687930 - DNA, 25 bp, Homo sapien
ggcccgctggtcttgaggctttcct

SEQ ID NO: 3687931 - DNA, 25 bp, Homo sapien
gtgaaggtccggcttgtggcttcct

SEQ ID NO: 3687932 - DNA, 25 bp, Homo sapien
atggcggtgaaggtccggcttgtgg

SEQ ID NO: 3687933 - DNA, 25 bp, Homo sapien
tggatcagctgcattaaaggcccga

SEQ ID NO: 3687934 - DNA, 25 bp, Homo sapien
ccagccatgctacgatgcacacaga

SEQ ID NO: 3687935 - DNA, 25 bp, Homo sapien
caagactgccttaaagagagcaggc

SEQ ID NO: 3687936 - DNA, 25 bp, Homo sapien
gctcttgtccccttttcaggaggct

SEQ ID NO: 3687937 - DNA, 25 bp, Homo sapien
tttgcatgtagacatccaggtgtcc

SEQ ID NO: 3687938 - DNA, 25 bp, Homo sapien
gaatggccttggtacacttgttgaa

SEQ ID NO: 3687939 - DNA, 25 bp, Homo sapien
gatatgctgacaccaataggccaca

SEQ ID NO: 3687940 - DNA, 25 bp, Homo sapien
tgtcccggcaccatattttgaagag

SEQ ID NO: 3687941 - DNA, 25 bp, Homo sapien
accagagaaagaagcaagggcggca

SEQ ID NO: 3687942 - DNA, 25 bp, Homo sapien
gcacaggaccagagaaagaagcaag

SEQ ID NO: 3687943 - DNA, 25 bp, Homo sapien
gagaaagaagcaagggcggcatgca

SEQ ID NO: 3687944 - DNA, 25 bp, Homo sapien
ctggcacaggaccagagaaagaagc

SEQ ID NO: 3687945 - DNA, 25 bp, Homo sapien
atgacgtacttgtaggccaggctgc

SEQ ID NO: 3687946 - DNA, 25 bp, Homo sapien
agcacattgttgctcccgataaggg

SEQ ID NO: 3687947 - DNA, 25 bp, Homo sapien
caggtcctcatggatgacgtacttg

SEQ ID NO: 3687948 - DNA, 25 bp, Homo sapien
tcttgagcgcccactcataggtgtc

SEQ ID NO: 3687949 - DNA, 25 bp, Homo sapien
caacaaagcactggcgggtcaggga

SEQ ID NO: 3687950 - DNA, 25 bp, Homo sapien
ctgccccaacaaagcactggcgggt

SEQ ID NO: 3687951 - DNA, 25 bp, Homo sapien
gggatcctgggctgccccaacaaag

SEQ ID NO: 3687952 - DNA, 25 bp, Homo sapien
tgcctctcaagggatcctgggctgc

SEQ ID NO: 3687953 - DNA, 25 bp, Homo sapien
cagccgtatttggtgaactggatcc

SEQ ID NO: 3687954 - DNA, 25 bp, Homo sapien
cacaggtgtcgctgcaccatgtggt

SEQ ID NO: 3687955 - DNA, 25 bp, Homo sapien
ggcctcttcttgtggtcacacaggt

SEQ ID NO: 3687956 - DNA, 25 bp, Homo sapien
accatgtggtggtctcgtctgcgcc

SEQ ID NO: 3687957 - DNA, 25 bp, Homo sapien
ggctttggccggcatgaccttgtgg

SEQ ID NO: 3687958 - DNA, 25 bp, Homo sapien
tgggcagggcactcggagacagggc

SEQ ID NO: 3687959 - DNA, 25 bp, Homo sapien
gcactcggagacagggccgtcgggc

SEQ ID NO: 3687960 - DNA, 25 bp, Homo sapien
agcaggcactgtatcccccgtgtct

SEQ ID NO: 3687961 - DNA, 25 bp, Homo sapien
tggacagtgtctggcctatccccct

SEQ ID NO: 3687962 - DNA, 25 bp, Homo sapien
ccgctgctggatgccctctccacag

SEQ ID NO: 3687963 - DNA, 25 bp, Homo sapien
ggctgttggcgttggtcctgcacac

SEQ ID NO: 3687964 - DNA, 25 bp, Homo sapien
ctcgcaatgcccgaggctgttggcg

SEQ ID NO: 3687965 - DNA, 25 bp, Homo sapien
cccctctggcgtcccaagttcccag

SEQ ID NO: 3687966 - DNA, 25 bp, Homo sapien
gatgtaggggttcagattgtggcac

SEQ ID NO: 3687967 - DNA, 25 bp, Homo sapien
tcttgttaatgggatgtaggggttc

SEQ ID NO: 3687968 - DNA, 25 bp, Homo sapien
ggccctcaccgtggagttctggtga

SEQ ID NO: 3687969 - DNA, 25 bp, Homo sapien
gaatggagcagtagcgatcgagcac

SEQ ID NO: 3687970 - DNA, 25 bp, Homo sapien
agcagagccggtggtagccgggaat

SEQ ID NO: 3687971 - DNA, 25 bp, Homo sapien
gcagaagacagacctgtctcccgtg

SEQ ID NO: 3687972 - DNA, 25 bp, Homo sapien
agtagcgatcgagcacttccatctg

SEQ ID NO: 3687973 - DNA, 25 bp, Homo sapien
ttggggcccgaggccttcttgatgc

SEQ ID NO: 3687974 - DNA, 25 bp, Homo sapien
cccgaggccttcttgatgcaggaca

SEQ ID NO: 3687975 - DNA, 25 bp, Homo sapien
gcccgaggccttcttgatgcaggac

SEQ ID NO: 3687976 - DNA, 25 bp, Homo sapien
gaggccttcttgatgcaggacacac

SEQ ID NO: 3687977 - DNA, 25 bp, Homo sapien
ctgcagggtcctggggtcctggtaa

SEQ ID NO: 3687978 - DNA, 25 bp, Homo sapien
tgcagggtcctggggtcctggtaag

SEQ ID NO: 3687979 - DNA, 25 bp, Homo sapien
tggtgccgggatgtctcaggtcttc

SEQ ID NO: 3687980 - DNA, 25 bp, Homo sapien
tcctcagggactggcgtaggtgtct

SEQ ID NO: 3687981 - DNA, 25 bp, Homo sapien
gatcccgttggctttccaggaggct

SEQ ID NO: 3687982 - DNA, 25 bp, Homo sapien
caggtcttctccaggttgccctttg

SEQ ID NO: 3687983 - DNA, 25 bp, Homo sapien
cagagtgtaaacgtgccagtgggat

SEQ ID NO: 3687984 - DNA, 25 bp, Homo sapien
tacacagagtgtaaacgtgccagtg

SEQ ID NO: 3687985 - DNA, 25 bp, Homo sapien
gggcagtacacagagtgtaaacgtg

SEQ ID NO: 3687986 - DNA, 25 bp, Homo sapien
cgtgccagtgggatggcagggcaca

SEQ ID NO: 3687987 - DNA, 25 bp, Homo sapien
tagctacagaccagccgggattcag

SEQ ID NO: 3687988 - DNA, 25 bp, Homo sapien
gcagcttgctgaggtatctccgatt

SEQ ID NO: 3687989 - DNA, 25 bp, Homo sapien
ggagcaatagttgaccctggtcttg

SEQ ID NO: 3687990 - DNA, 25 bp, Homo sapien
gggcctgcgatcaccttgtgttcca

SEQ ID NO: 3687991 - DNA, 25 bp, Homo sapien
gttctcacaggaatgactccgcgtg

SEQ ID NO: 3687992 - DNA, 25 bp, Homo sapien
cctggcaggagtttaggagacatcc

SEQ ID NO: 3687993 - DNA, 25 bp, Homo sapien
tgaagatgtccgactccagcaggag

SEQ ID NO: 3687994 - DNA, 25 bp, Homo sapien
tcaggcccttacagcaccgtgggtg

SEQ ID NO: 3687995 - DNA, 25 bp, Homo sapien
taaaacacctgtccaaatgcaagcc

SEQ ID NO: 3687996 - DNA, 25 bp, Homo sapien
tgtctgaggccacacaactaggaag

SEQ ID NO: 3687997 - DNA, 25 bp, Homo sapien
tccctctgggtaatgcgggctgcca

SEQ ID NO: 3687998 - DNA, 25 bp, Homo sapien
cagaatagggactcgaagcaaggat

SEQ ID NO: 3687999 - DNA, 25 bp, Homo sapien
agtctccttccctcgagcacccggc

SEQ ID NO: 3688000 - DNA, 25 bp, Homo sapien
ctcgcaggccgcgagacccaggctc

SEQ ID NO: 3688001 - DNA, 25 bp, Homo sapien
cgccgccgccgagattggaggcccg

SEQ ID NO: 3688002 - DNA, 25 bp, Homo sapien
ccctcagcacgcgacggactcgcag

SEQ ID NO: 3688003 - DNA, 25 bp, Homo sapien
actcccttcagaatcagcacggcct

SEQ ID NO: 3688004 - DNA, 25 bp, Homo sapien
cttcagaatcagcacggcctcgctc

SEQ ID NO: 3688005 - DNA, 25 bp, Homo sapien
tgccgaggctaccagggtcctgcct

SEQ ID NO: 3688006 - DNA, 25 bp, Homo sapien
tgaaggtgccgaggctaccagggtc

SEQ ID NO: 3688007 - DNA, 25 bp, Homo sapien
ctcctctccgcgctcccctttttca

SEQ ID NO: 3688008 - DNA, 25 bp, Homo sapien
agcctcctctccgcgctcccctttt

SEQ ID NO: 3688009 - DNA, 25 bp, Homo sapien
tctccgcgctcccctttttcagact

SEQ ID NO: 3688010 - DNA, 25 bp, Homo sapien
cctctccgcgctcccctttttcaga

SEQ ID NO: 3688011 - DNA, 25 bp, Homo sapien
acatcagaaggtctgtgctaggcat

SEQ ID NO: 3688012 - DNA, 25 bp, Homo sapien
caacatcagaaggtctgtgctaggc

SEQ ID NO: 3688013 - DNA, 25 bp, Homo sapien
aacatcagaaggtctgtgctaggca

SEQ ID NO: 3688014 - DNA, 25 bp, Homo sapien
taaagcaggcatacctctctgtcca

SEQ ID NO: 3688015 - DNA, 25 bp, Homo sapien
ggcagaccctgataaaacgtaataa

SEQ ID NO: 3688016 - DNA, 25 bp, Homo sapien
gataaactagtatatggcagaccct

SEQ ID NO: 3688017 - DNA, 25 bp, Homo sapien
gacatgattatctgcctgtcgagga

SEQ ID NO: 3688018 - DNA, 25 bp, Homo sapien
agcctgggagacaagagctaaactc

SEQ ID NO: 3688019 - DNA, 25 bp, Homo sapien
tgggagacaagagctaaactccatc

SEQ ID NO: 3688020 - DNA, 25 bp, Homo sapien
gggagacaagagctaaactccatct

SEQ ID NO: 3688021 - DNA, 25 bp, Homo sapien
cctgggagacaagagctaaactcca

SEQ ID NO: 3688022 - DNA, 25 bp, Homo sapien
tcagtcacaatggtcagcaacctct

SEQ ID NO: 3688023 - DNA, 25 bp, Homo sapien
tgtagttactctctataagcctcgt

SEQ ID NO: 3688024 - DNA, 25 bp, Homo sapien
taaggacacaaagtaggcaagaggg

SEQ ID NO: 3688025 - DNA, 25 bp, Homo sapien
gggtggagctatcctatcccatctg

SEQ ID NO: 3688026 - DNA, 25 bp, Homo sapien
cagcgcccttcaggacacttctgaa

SEQ ID NO: 3688027 - DNA, 25 bp, Homo sapien
atcctcatatttgccctccccagcg

SEQ ID NO: 3688028 - DNA, 25 bp, Homo sapien
ccttcaggacacttctgaaaggcat

SEQ ID NO: 3688029 - DNA, 25 bp, Homo sapien
cctggcatcctcatatttgccctcc

SEQ ID NO: 3688030 - DNA, 25 bp, Homo sapien
ggtattcacgcagcagggaaaagac

SEQ ID NO: 3688031 - DNA, 25 bp, Homo sapien
gacacccaatcaccaaacttaatgg

SEQ ID NO: 3688032 - DNA, 25 bp, Homo sapien
gggaaaagacatccacgaagctttc

SEQ ID NO: 3688033 - DNA, 25 bp, Homo sapien
acttaatggctacccggtattcacg

SEQ ID NO: 3688034 - DNA, 25 bp, Homo sapien
gggtccacacgacactccatgcaat

SEQ ID NO: 3688035 - DNA, 25 bp, Homo sapien
gctgccagggctcatacttggtgca

SEQ ID NO: 3688036 - DNA, 25 bp, Homo sapien
caaaatctctaagtagggctcaaag

SEQ ID NO: 3688037 - DNA, 25 bp, Homo sapien
catatccccagactatcagcagggt

SEQ ID NO: 3688038 - DNA, 25 bp, Homo sapien
tttacagaggagacagcatacttac

SEQ ID NO: 3688039 - DNA, 25 bp, Homo sapien
ctttacagaggagacagcatactta

SEQ ID NO: 3688040 - DNA, 25 bp, Homo sapien
ttcctggtgagcttaaaacatttct

SEQ ID NO: 3688041 - DNA, 25 bp, Homo sapien
ctggtgagcttaaaacatttctttt

SEQ ID NO: 3688042 - DNA, 25 bp, Homo sapien
cttcctggtgagcttaaaacatttc

SEQ ID NO: 3688043 - DNA, 25 bp, Homo sapien
tcctggtgagcttaaaacatttctt

SEQ ID NO: 3688044 - DNA, 25 bp, Homo sapien
tggtcttgttcaacttgtcttgaat

SEQ ID NO: 3688045 - DNA, 25 bp, Homo sapien
gctttcacatactctttgtccactt

SEQ ID NO: 3688046 - DNA, 25 bp, Homo sapien
atagagctgtactccttaagtttct

SEQ ID NO: 3688047 - DNA, 25 bp, Homo sapien
aagctttcacatactctttgtccac

SEQ ID NO: 3688048 - DNA, 25 bp, Homo sapien
ccatagagctgtactccttaagttt

SEQ ID NO: 3688049 - DNA, 25 bp, Homo sapien
cactgtacactgttccagaggctct

SEQ ID NO: 3688050 - DNA, 25 bp, Homo sapien
tcctccccactgtacactgttccag

SEQ ID NO: 3688051 - DNA, 25 bp, Homo sapien
tccccactgtacactgttccagagg

SEQ ID NO: 3688052 - DNA, 25 bp, Homo sapien
ctgtacactgttccagaggctctcc

SEQ ID NO: 3688053 - DNA, 25 bp, Homo sapien
cacacgaatctggtcccccattgaa

SEQ ID NO: 3688054 - DNA, 25 bp, Homo sapien
ccccattgaacagggaacaagctat

SEQ ID NO: 3688055 - DNA, 25 bp, Homo sapien
gctatcctcacgatttctgcctcta

SEQ ID NO: 3688056 - DNA, 25 bp, Homo sapien
tgcctctatcttgcgtagtcctggg

SEQ ID NO: 3688057 - DNA, 25 bp, Homo sapien
aaggctattggatgccccttgcata

SEQ ID NO: 3688058 - DNA, 25 bp, Homo sapien
aaaaataaggctattggatgcccct

SEQ ID NO: 3688059 - DNA, 25 bp, Homo sapien
ttggatgccccttgcatatacttac

SEQ ID NO: 3688060 - DNA, 25 bp, Homo sapien
cctaaaaaataaggctattggatgc

SEQ ID NO: 3688061 - DNA, 25 bp, Homo sapien
ggcatatcacctttattactactaa

SEQ ID NO: 3688062 - DNA, 25 bp, Homo sapien
tcatggcgccaacatattagaaaaa

SEQ ID NO: 3688063 - DNA, 25 bp, Homo sapien
tgccaggcatatcacctttattact

SEQ ID NO: 3688064 - DNA, 25 bp, Homo sapien
ttttcatggcgccaacatattagaa

SEQ ID NO: 3688065 - DNA, 25 bp, Homo sapien
gctacaatggattgaggcacacaca

SEQ ID NO: 3688066 - DNA, 25 bp, Homo sapien
caatatgatgtttccactggccaaa

SEQ ID NO: 3688067 - DNA, 25 bp, Homo sapien
tctgtgtcctgtggataggcatttg

SEQ ID NO: 3688068 - DNA, 25 bp, Homo sapien
tcatgtaaatggacctaggagccaa

SEQ ID NO: 3688069 - DNA, 25 bp, Homo sapien
caagagaacaacatctacttggaaa

SEQ ID NO: 3688070 - DNA, 25 bp, Homo sapien
taacctaatttcttttagtatgtga

SEQ ID NO: 3688071 - DNA, 25 bp, Homo sapien
caagaagaatgtttcacatggtaac

SEQ ID NO: 3688072 - DNA, 25 bp, Homo sapien
tctgataacattagcacaagccaag

SEQ ID NO: 3688073 - DNA, 25 bp, Homo sapien
tgttatgcaaacaccagtggacttt

SEQ ID NO: 3688074 - DNA, 25 bp, Homo sapien
gagggaccagcaaagtccaagtcac

SEQ ID NO: 3688075 - DNA, 25 bp, Homo sapien
gaatgtcacaagagtcgtcaagcca

SEQ ID NO: 3688076 - DNA, 25 bp, Homo sapien
gcaacaatctcttcgtaaggtccag

SEQ ID NO: 3688077 - DNA, 25 bp, Homo sapien
gagttttgatccccttctcaaaggc

SEQ ID NO: 3688078 - DNA, 25 bp, Homo sapien
gccatcagtatgctttctgttcccc

SEQ ID NO: 3688079 - DNA, 25 bp, Homo sapien
gatcccgatatgctttgcaggccat

SEQ ID NO: 3688080 - DNA, 25 bp, Homo sapien
ttctcaaaggccagatcccgatatg

SEQ ID NO: 3688081 - DNA, 25 bp, Homo sapien
aagttttcccagagagtaccctgag

SEQ ID NO: 3688082 - DNA, 25 bp, Homo sapien
tatgtccaaggaaggcaatgtgggt

SEQ ID NO: 3688083 - DNA, 25 bp, Homo sapien
tacatatgaaccacagcatgagacc

SEQ ID NO: 3688084 - DNA, 25 bp, Homo sapien
ggaagtaccaagcaccaaagatcga

SEQ ID NO: 3688085 - DNA, 25 bp, Homo sapien
ccgcacaatcttcatcccaaagtaa

SEQ ID NO: 3688086 - DNA, 25 bp, Homo sapien
aatgggacccgcacaatcttcatcc

SEQ ID NO: 3688087 - DNA, 25 bp, Homo sapien
cccaaagtaactggctgctttgtta

SEQ ID NO: 3688088 - DNA, 25 bp, Homo sapien
cctccatcatcttcgtcaatgggac

SEQ ID NO: 3688089 - DNA, 25 bp, Homo sapien
aagaaaaagtgatggcgctgaccgc

SEQ ID NO: 3688090 - DNA, 25 bp, Homo sapien
tctgactggaaacggctagtcaaca

SEQ ID NO: 3688091 - DNA, 25 bp, Homo sapien
gactagatcacctccctttcagaat

SEQ ID NO: 3688092 - DNA, 25 bp, Homo sapien
gaacctatgaaaagactgaagctgc

SEQ ID NO: 3688093 - DNA, 25 bp, Homo sapien
ctgtggggtagaacagacgagcatg

SEQ ID NO: 3688094 - DNA, 25 bp, Homo sapien
gtagaacagacgagcatggcagtgt

SEQ ID NO: 3688095 - DNA, 25 bp, Homo sapien
gtggggtagaacagacgagcatggc

SEQ ID NO: 3688096 - DNA, 25 bp, Homo sapien
acagacgagcatggcagtgttcctg

SEQ ID NO: 3688097 - DNA, 25 bp, Homo sapien
tcagggacaggatctattacaccat

SEQ ID NO: 3688098 - DNA, 25 bp, Homo sapien
gacaggatctattacaccatgagga

SEQ ID NO: 3688099 - DNA, 25 bp, Homo sapien
gggacaggatctattacaccatgag

SEQ ID NO: 3688100 - DNA, 25 bp, Homo sapien
caggatctattacaccatgaggaaa

SEQ ID NO: 3688101 - DNA, 25 bp, Homo sapien
gaacataagagaatttcctttatag

SEQ ID NO: 3688102 - DNA, 25 bp, Homo sapien
tccaaaaaacaaagaacataagaga

SEQ ID NO: 3688103 - DNA, 25 bp, Homo sapien
aacaaagaacataagagaatttcct

SEQ ID NO: 3688104 - DNA, 25 bp, Homo sapien
acataagagaatttcctttatagcc

SEQ ID NO: 3688105 - DNA, 25 bp, Homo sapien
caaatgggtgctccagtgggtatcc

SEQ ID NO: 3688106 - DNA, 25 bp, Homo sapien
aatgctggttacacctttcacccgg

SEQ ID NO: 3688107 - DNA, 25 bp, Homo sapien
tcccagacaagcgtcgacatgaagg

SEQ ID NO: 3688108 - DNA, 25 bp, Homo sapien
tgctttctccataaagacgatgagg

SEQ ID NO: 3688109 - DNA, 25 bp, Homo sapien
caagggtaagtttgcaatggaagcc

SEQ ID NO: 3688110 - DNA, 25 bp, Homo sapien
tgaggctgctaatacttcttccaca

SEQ ID NO: 3688111 - DNA, 25 bp, Homo sapien
ctttgtctcagtccaccaagggtgg

SEQ ID NO: 3688112 - DNA, 25 bp, Homo sapien
ggcgtggccatctcaaatgctgaat

SEQ ID NO: 3688113 - DNA, 25 bp, Homo sapien
gtgcatcaaggcagcccaacaggct

SEQ ID NO: 3688114 - DNA, 25 bp, Homo sapien
caccctgccaatctgtatcgacgaa

SEQ ID NO: 3688115 - DNA, 25 bp, Homo sapien
gccgttctcaccgaagtgcatcaag

SEQ ID NO: 3688116 - DNA, 25 bp, Homo sapien
ggtagcttcaacatagccgttctca

SEQ ID NO: 3688117 - DNA, 25 bp, Homo sapien
ggatcccagagcaatgactgacaat

SEQ ID NO: 3688118 - DNA, 25 bp, Homo sapien
gatgtcaaaatcacgggatcccaga

SEQ ID NO: 3688119 - DNA, 25 bp, Homo sapien
ctgggtgggaactgcaactggttca

SEQ ID NO: 3688120 - DNA, 25 bp, Homo sapien
tggttcaagttccaccccttagcag

SEQ ID NO: 3688121 - DNA, 25 bp, Homo sapien
ttcaaccacgtcaccatcaatgaga

SEQ ID NO: 3688122 - DNA, 25 bp, Homo sapien
cacgtcaccatcaatgagacacttt

SEQ ID NO: 3688123 - DNA, 25 bp, Homo sapien
ctgagaaccatgctaagaggatgaa

SEQ ID NO: 3688124 - DNA, 25 bp, Homo sapien
ttctcggcatgactgagaaccatgc

SEQ ID NO: 3688125 - DNA, 25 bp, Homo sapien
tttctgacaagtgtagtcatccaag

SEQ ID NO: 3688126 - DNA, 25 bp, Homo sapien
ttgttcctagtcctgggaatctcgg

SEQ ID NO: 3688127 - DNA, 25 bp, Homo sapien
gttctaaaatgatgcagccccaaat

SEQ ID NO: 3688128 - DNA, 25 bp, Homo sapien
cagccccaaatacgggaatttcctg

SEQ ID NO: 3688129 - DNA, 25 bp, Homo sapien
cattcctgtggtcttcgctttagga

SEQ ID NO: 3688130 - DNA, 25 bp, Homo sapien
gtatagctactcgtttccgggcgtg

SEQ ID NO: 3688131 - DNA, 25 bp, Homo sapien
tccgggcgtgtagtaatgtgatgca

SEQ ID NO: 3688132 - DNA, 25 bp, Homo sapien
cagattctcgaatgtcctttaggaa

SEQ ID NO: 3688133 - DNA, 25 bp, Homo sapien
tgcaaccatattcctgtcaacagtt

SEQ ID NO: 3688134 - DNA, 25 bp, Homo sapien
gactgaggacaattctgcaaccata

SEQ ID NO: 3688135 - DNA, 25 bp, Homo sapien
gtcaacagttgtctgggccatgcca

SEQ ID NO: 3688136 - DNA, 25 bp, Homo sapien
tgctgtacaagctgtccaagaagac

SEQ ID NO: 3688137 - DNA, 25 bp, Homo sapien
tcaaagttgtgcacggcctgttcca

SEQ ID NO: 3688138 - DNA, 25 bp, Homo sapien
ggctggaatccccttgagactagaa

SEQ ID NO: 3688139 - DNA, 25 bp, Homo sapien
cagtttttgcagaggccgatgtgac

SEQ ID NO: 3688140 - DNA, 25 bp, Homo sapien
cataatggcttaacgcaagggtgca

SEQ ID NO: 3688141 - DNA, 25 bp, Homo sapien
gacacgacttcctagataagccagg

SEQ ID NO: 3688142 - DNA, 25 bp, Homo sapien
caggtactcaggaactaggccattt

SEQ ID NO: 3688143 - DNA, 25 bp, Homo sapien
tgtatggagcagcaataagcacccc

SEQ ID NO: 3688144 - DNA, 25 bp, Homo sapien
cattggtcttggtatcagtgggcac

SEQ ID NO: 3688145 - DNA, 25 bp, Homo sapien
tctgggggtgagtgaggtggtgctg

SEQ ID NO: 3688146 - DNA, 25 bp, Homo sapien
ggtctgggggtgagtgaggtggtgc

SEQ ID NO: 3688147 - DNA, 25 bp, Homo sapien
gggtgagtgaggtggtgctggccat

SEQ ID NO: 3688148 - DNA, 25 bp, Homo sapien
cctggaggggtctgggggtgagtga

SEQ ID NO: 3688149 - DNA, 25 bp, Homo sapien
agtcagggctaggacgggacagtta

SEQ ID NO: 3688150 - DNA, 25 bp, Homo sapien
gagtcagggctaggacgggacagtt

SEQ ID NO: 3688151 - DNA, 25 bp, Homo sapien
tcagggctaggacgggacagttacc

SEQ ID NO: 3688152 - DNA, 25 bp, Homo sapien
gtcagggctaggacgggacagttac

SEQ ID NO: 3688153 - DNA, 25 bp, Homo sapien
ccaggctccattcctccgggtcaga

SEQ ID NO: 3688154 - DNA, 25 bp, Homo sapien
cattcctccgggtcagacatctcct

SEQ ID NO: 3688155 - DNA, 25 bp, Homo sapien
ggctccattcctccgggtcagacat

SEQ ID NO: 3688156 - DNA, 25 bp, Homo sapien
tcacccaggctccattcctccgggt

SEQ ID NO: 3688157 - DNA, 25 bp, Homo sapien
cagcaagctgattttgcccaccttg

SEQ ID NO: 3688158 - DNA, 25 bp, Homo sapien
ctgattttgcccaccttgatccagg

SEQ ID NO: 3688159 - DNA, 25 bp, Homo sapien
cccaccttgatccaggtgcctaggg

SEQ ID NO: 3688160 - DNA, 25 bp, Homo sapien
cccggaggcccagcaagctgatttt

SEQ ID NO: 3688161 - DNA, 25 bp, Homo sapien
gaaagtccacaagagctgatcgagc

SEQ ID NO: 3688162 - DNA, 25 bp, Homo sapien
cattgaacgggctatatgcaccagt

SEQ ID NO: 3688163 - DNA, 25 bp, Homo sapien
caaagccagggaatatcaaccaggg

SEQ ID NO: 3688164 - DNA, 25 bp, Homo sapien
tgtgaaagagaagacaccgtccctg

SEQ ID NO: 3688165 - DNA, 25 bp, Homo sapien
gcagatgcagcatcctgcacagagc

SEQ ID NO: 3688166 - DNA, 25 bp, Homo sapien
gtgcagatgcagcatcctgcacaga

SEQ ID NO: 3688167 - DNA, 25 bp, Homo sapien
cagatgcagcatcctgcacagagcc

SEQ ID NO: 3688168 - DNA, 25 bp, Homo sapien
agatgcagcatcctgcacagagcct

SEQ ID NO: 3688169 - DNA, 25 bp, Homo sapien
ctgctgaatgttccactcccagctt

SEQ ID NO: 3688170 - DNA, 25 bp, Homo sapien
ttacttggtatacccaggattgatt

SEQ ID NO: 3688171 - DNA, 25 bp, Homo sapien
ccccagacccaatgcataaaacaga

SEQ ID NO: 3688172 - DNA, 25 bp, Homo sapien
tgggttgaaggtggatggggcccag

SEQ ID NO: 3688173 - DNA, 25 bp, Homo sapien
atggtaaggagcgaaggctcctcct

SEQ ID NO: 3688174 - DNA, 25 bp, Homo sapien
aaggagcgaaggctcctcctgaaaa

SEQ ID NO: 3688175 - DNA, 25 bp, Homo sapien
tggtgggatggtaaggagcgaaggc

SEQ ID NO: 3688176 - DNA, 25 bp, Homo sapien
gaaggctcctcctgaaaactgtagg

SEQ ID NO: 3688177 - DNA, 25 bp, Homo sapien
tcattcatggcctcgaggcccctgg

SEQ ID NO: 3688178 - DNA, 25 bp, Homo sapien
ctcattcatggcctcgaggcccctg

SEQ ID NO: 3688179 - DNA, 25 bp, Homo sapien
cagagacgccggatggctgggaact

SEQ ID NO: 3688180 - DNA, 25 bp, Homo sapien
gtggcggtggtctctgcatcctcag

SEQ ID NO: 3688181 - DNA, 25 bp, Homo sapien
ggccttgcagagacgccggatggct

SEQ ID NO: 3688182 - DNA, 25 bp, Homo sapien
caagagaacgtgaggacagtggcgg

SEQ ID NO: 3688183 - DNA, 25 bp, Homo sapien
tccggaccgggcctgcatcactgca

SEQ ID NO: 3688184 - DNA, 25 bp, Homo sapien
acgtcttccggaccgggcctgcatc

SEQ ID NO: 3688185 - DNA, 25 bp, Homo sapien
ggatgaggccacgtcttccggaccg

SEQ ID NO: 3688186 - DNA, 25 bp, Homo sapien
tgaggccacgtcttccggaccgggc

SEQ ID NO: 3688187 - DNA, 25 bp, Homo sapien
ctcagcacccacaacgacggccgaa

SEQ ID NO: 3688188 - DNA, 25 bp, Homo sapien
agccagagagtcatgccaaccagat

SEQ ID NO: 3688189 - DNA, 25 bp, Homo sapien
gagagtcatgccaaccagatactcc

SEQ ID NO: 3688190 - DNA, 25 bp, Homo sapien
aacgacggccgaacctctgcccagc

SEQ ID NO: 3688191 - DNA, 25 bp, Homo sapien
tgaggtgcccatttctgggcagcag

SEQ ID NO: 3688192 - DNA, 25 bp, Homo sapien
gcagcagcattgcaggaagaggaaa

SEQ ID NO: 3688193 - DNA, 25 bp, Homo sapien
cccatttctgggcagcagcattgca

SEQ ID NO: 3688194 - DNA, 25 bp, Homo sapien
tcaggcgcctctgaggtgcccattt

SEQ ID NO: 3688195 - DNA, 25 bp, Homo sapien
tgctgccacgaggactggggggaat

SEQ ID NO: 3688196 - DNA, 25 bp, Homo sapien
aacgtgctgtatccaaggcagggac

SEQ ID NO: 3688197 - DNA, 25 bp, Homo sapien
gtgctgtatccaaggcagggactga

SEQ ID NO: 3688198 - DNA, 25 bp, Homo sapien
tcaacgtgctgtatccaaggcaggg

SEQ ID NO: 3688199 - DNA, 25 bp, Homo sapien
ctgcacgccagccaccgtgtctgga

SEQ ID NO: 3688200 - DNA, 25 bp, Homo sapien
agctgcacgccagccaccgtgtctg

SEQ ID NO: 3688201 - DNA, 25 bp, Homo sapien
gcacgccagccaccgtgtctggagg

SEQ ID NO: 3688202 - DNA, 25 bp, Homo sapien
tgcacgccagccaccgtgtctggag

SEQ ID NO: 3688203 - DNA, 25 bp, Homo sapien
ttcatttcactcaggagtcccagcc

SEQ ID NO: 3688204 - DNA, 25 bp, Homo sapien
catttcactcaggagtcccagcctg

SEQ ID NO: 3688205 - DNA, 25 bp, Homo sapien
tcatttcactcaggagtcccagcct

SEQ ID NO: 3688206 - DNA, 25 bp, Homo sapien
cttcatttcactcaggagtcccagc

SEQ ID NO: 3688207 - DNA, 25 bp, Homo sapien
gaggccactcggacagacttggcaa

SEQ ID NO: 3688208 - DNA, 25 bp, Homo sapien
tacctcctgagtggcattaggcaag

SEQ ID NO: 3688209 - DNA, 25 bp, Homo sapien
tcatctgtaacacgggcatcctctc

SEQ ID NO: 3688210 - DNA, 25 bp, Homo sapien
gacttgccaatgactgaggccactc

SEQ ID NO: 3688211 - DNA, 25 bp, Homo sapien
caagttggatcctccgcggttgagc

SEQ ID NO: 3688212 - DNA, 25 bp, Homo sapien
tctccactaatcaagttggatcctc

SEQ ID NO: 3688213 - DNA, 25 bp, Homo sapien
tatgaggtagtctgagctctagtgg

SEQ ID NO: 3688214 - DNA, 25 bp, Homo sapien
atcctccgcggttgagctccagaga

SEQ ID NO: 3688215 - DNA, 25 bp, Homo sapien
gtgaaaatctgcaccatcaggtaca

SEQ ID NO: 3688216 - DNA, 25 bp, Homo sapien
tggtgaaaatctgcaccatcaggta

SEQ ID NO: 3688217 - DNA, 25 bp, Homo sapien
ccatcaggtacactctcagcagctc

SEQ ID NO: 3688218 - DNA, 25 bp, Homo sapien
gaaaatctgcaccatcaggtacact

SEQ ID NO: 3688219 - DNA, 25 bp, Homo sapien
acttccaatccagcagcagataagg

SEQ ID NO: 3688220 - DNA, 25 bp, Homo sapien
ggcttacaccccaggcaccgagaaa

SEQ ID NO: 3688221 - DNA, 25 bp, Homo sapien
catcagcttcgggcttacaccccag

SEQ ID NO: 3688222 - DNA, 25 bp, Homo sapien
ttcgggcttacaccccaggcaccga

SEQ ID NO: 3688223 - DNA, 25 bp, Homo sapien
tggcaatgggtccagggaccttgct

SEQ ID NO: 3688224 - DNA, 25 bp, Homo sapien
ggcaatgggtccagggaccttgcta

SEQ ID NO: 3688225 - DNA, 25 bp, Homo sapien
cttggcaatgggtccagggaccttg

SEQ ID NO: 3688226 - DNA, 25 bp, Homo sapien
gcaatgggtccagggaccttgctac

SEQ ID NO: 3688227 - DNA, 25 bp, Homo sapien
ggcccttcacaaaggcttcgagaag

SEQ ID NO: 3688228 - DNA, 25 bp, Homo sapien
agaattggcaccttcggcaaagcag

SEQ ID NO: 3688229 - DNA, 25 bp, Homo sapien
ggagcgcctgcagcgaggcctcagg

SEQ ID NO: 3688230 - DNA, 25 bp, Homo sapien
tcggcaaagcagtggagcgcctgca

SEQ ID NO: 3688231 - DNA, 25 bp, Homo sapien
ctgaaagccacaggagctggggacc

SEQ ID NO: 3688232 - DNA, 25 bp, Homo sapien
ccacaggagctggggaccagggagg

SEQ ID NO: 3688233 - DNA, 25 bp, Homo sapien
aaagccacaggagctggggaccagg

SEQ ID NO: 3688234 - DNA, 25 bp, Homo sapien
aagccacaggagctggggaccaggg

SEQ ID NO: 3688235 - DNA, 25 bp, Homo sapien
gttgggttaccacaggtgacaagtg

SEQ ID NO: 3688236 - DNA, 25 bp, Homo sapien
cagggttgggttaccacaggtgaca

SEQ ID NO: 3688237 - DNA, 25 bp, Homo sapien
cacaggtgacaagtgtggaggcttc

SEQ ID NO: 3688238 - DNA, 25 bp, Homo sapien
ggttaccacaggtgacaagtgtgga

SEQ ID NO: 3688239 - DNA, 25 bp, Homo sapien
cttctcaccacactgagccactttt

SEQ ID NO: 3688240 - DNA, 25 bp, Homo sapien
tcaccacactgagccacttttatta

SEQ ID NO: 3688241 - DNA, 25 bp, Homo sapien
tctcaccacactgagccacttttat

SEQ ID NO: 3688242 - DNA, 25 bp, Homo sapien
accacactgagccacttttattatt

SEQ ID NO: 3688243 - DNA, 25 bp, Homo sapien
gtgaggcccaacagcaccttctgca

SEQ ID NO: 3688244 - DNA, 25 bp, Homo sapien
gagccctgggtgaggcccaacagca

SEQ ID NO: 3688245 - DNA, 25 bp, Homo sapien
gggtgaggcccaacagcaccttctg

SEQ ID NO: 3688246 - DNA, 25 bp, Homo sapien
ctgggtgaggcccaacagcaccttc

SEQ ID NO: 3688247 - DNA, 25 bp, Homo sapien
ctggagttgtaagcgctggtcaccc

SEQ ID NO: 3688248 - DNA, 25 bp, Homo sapien
tcgctggagttgtaagcgctggtca

SEQ ID NO: 3688249 - DNA, 25 bp, Homo sapien
ttgtaagcgctggtcacccagcagc

SEQ ID NO: 3688250 - DNA, 25 bp, Homo sapien
ccccagggaagtcgctggagttgta

SEQ ID NO: 3688251 - DNA, 25 bp, Homo sapien
tgtgtgcccatcctgtgcacacgga

SEQ ID NO: 3688252 - DNA, 25 bp, Homo sapien
gcacacggatggggccaaaaagtgt

SEQ ID NO: 3688253 - DNA, 25 bp, Homo sapien
ctgtgtgcccatcctgtgcacacgg

SEQ ID NO: 3688254 - DNA, 25 bp, Homo sapien
gtgtgcccatcctgtgcacacggat

SEQ ID NO: 3688255 - DNA, 25 bp, Homo sapien
gggtgtctgataccggctcacctcc

SEQ ID NO: 3688256 - DNA, 25 bp, Homo sapien
tcctgggtatccaaagtcctgggag

SEQ ID NO: 3688257 - DNA, 25 bp, Homo sapien
ggagggtgtctgataccggctcacc

SEQ ID NO: 3688258 - DNA, 25 bp, Homo sapien
ctcctgggtatccaaagtcctggga

SEQ ID NO: 3688259 - DNA, 25 bp, Homo sapien
cctggaccggtgaggcccaggagct

SEQ ID NO: 3688260 - DNA, 25 bp, Homo sapien
agccctggaccggtgaggcccagga

SEQ ID NO: 3688261 - DNA, 25 bp, Homo sapien
tttccagccctggaccggtgaggcc

SEQ ID NO: 3688262 - DNA, 25 bp, Homo sapien
gccctggaccggtgaggcccaggag

SEQ ID NO: 3688263 - DNA, 25 bp, Homo sapien
gagagagagtattcgagtcaacacg

SEQ ID NO: 3688264 - DNA, 25 bp, Homo sapien
aggaaatgccagtttttatcccagg

SEQ ID NO: 3688265 - DNA, 25 bp, Homo sapien
aatcaggtcatcgaattctcccaag

SEQ ID NO: 3688266 - DNA, 25 bp, Homo sapien
tgcttggaagggattaggaaatgcc

SEQ ID NO: 3688267 - DNA, 25 bp, Homo sapien
cagcttggcagtaggaggtgacatg

SEQ ID NO: 3688268 - DNA, 25 bp, Homo sapien
cagtaggaggtgacatgcccacagt

SEQ ID NO: 3688269 - DNA, 25 bp, Homo sapien
taggaggtgacatgcccacagtcct

SEQ ID NO: 3688270 - DNA, 25 bp, Homo sapien
cttggcagtaggaggtgacatgccc

SEQ ID NO: 3688271 - DNA, 25 bp, Homo sapien
gaaaactagccgcttcatgttcaca

SEQ ID NO: 3688272 - DNA, 25 bp, Homo sapien
tgggatgcctgactggacattgtta

SEQ ID NO: 3688273 - DNA, 25 bp, Homo sapien
ttaatggagctcgatcctccagggt

SEQ ID NO: 3688274 - DNA, 25 bp, Homo sapien
taacagggtatcgacagttactggg

SEQ ID NO: 3688275 - DNA, 25 bp, Homo sapien
gtggacgtccacaggaccaccaatg

SEQ ID NO: 3688276 - DNA, 25 bp, Homo sapien
ggacgtccacaggaccaccaatgtg

SEQ ID NO: 3688277 - DNA, 25 bp, Homo sapien
acgtccacaggaccaccaatgtggg

SEQ ID NO: 3688278 - DNA, 25 bp, Homo sapien
acaggaccaccaatgtggggcccag

SEQ ID NO: 3688279 - DNA, 25 bp, Homo sapien
caggcagaactcaaactggatgttt

SEQ ID NO: 3688280 - DNA, 25 bp, Homo sapien
tgcaggcagaactcaaactggatgt

SEQ ID NO: 3688281 - DNA, 25 bp, Homo sapien
tgtgcaggcagaactcaaactggat

SEQ ID NO: 3688282 - DNA, 25 bp, Homo sapien
gtgtgcaggcagaactcaaactgga

SEQ ID NO: 3688283 - DNA, 25 bp, Homo sapien
ccatgatctttgccattagagaaat

SEQ ID NO: 3688284 - DNA, 25 bp, Homo sapien
tgacccccccacgtgctaacttctc

SEQ ID NO: 3688285 - DNA, 25 bp, Homo sapien
gatctttgccattagagaaatttta

SEQ ID NO: 3688286 - DNA, 25 bp, Homo sapien
atcagggaccatctcatcgtgaccc

SEQ ID NO: 3688287 - DNA, 25 bp, Homo sapien
cagtgggcatgcaaagggctgggat

SEQ ID NO: 3688288 - DNA, 25 bp, Homo sapien
gtcatcaggccccttgttgcctggg

SEQ ID NO: 3688289 - DNA, 25 bp, Homo sapien
agggtcatcaggccccttgttgcct

SEQ ID NO: 3688290 - DNA, 25 bp, Homo sapien
gccagtgggcatgcaaagggctggg

SEQ ID NO: 3688291 - DNA, 25 bp, Homo sapien
agtcccagagttggcaaaaacacag

SEQ ID NO: 3688292 - DNA, 25 bp, Homo sapien
acaataagggtgtcgcccagggctc

SEQ ID NO: 3688293 - DNA, 25 bp, Homo sapien
caggagtcccagagttggcaaaaac

SEQ ID NO: 3688294 - DNA, 25 bp, Homo sapien
gtccttggtttctctagcccgacaa

SEQ ID NO: 3688295 - DNA, 25 bp, Homo sapien
gaataatgggctttaatgcactggg

SEQ ID NO: 3688296 - DNA, 25 bp, Homo sapien
ccagggctcttggagaaaagcctgt

SEQ ID NO: 3688297 - DNA, 25 bp, Homo sapien
tgttgctggctagggcagggagtgc

SEQ ID NO: 3688298 - DNA, 25 bp, Homo sapien
gggctacgcttcttgccggcaagtc

SEQ ID NO: 3688299 - DNA, 25 bp, Homo sapien
tatttaatatctccagagaggtgac

SEQ ID NO: 3688300 - DNA, 25 bp, Homo sapien
gacatcagcaaaattgcctggcctg

SEQ ID NO: 3688301 - DNA, 25 bp, Homo sapien
gaggtactgtgtggttccctgcacc

SEQ ID NO: 3688302 - DNA, 25 bp, Homo sapien
gccatctagatggacagtgggacag

SEQ ID NO: 3688303 - DNA, 25 bp, Homo sapien
aggcaggtcgggcttctgatgaccc

SEQ ID NO: 3688304 - DNA, 25 bp, Homo sapien
gcaggtcgggcttctgatgacccat

SEQ ID NO: 3688305 - DNA, 25 bp, Homo sapien
aagtctcatgtgagtaggcaggtcg

SEQ ID NO: 3688306 - DNA, 25 bp, Homo sapien
gagcagaagtctcatgtgagtaggc

SEQ ID NO: 3688307 - DNA, 25 bp, Homo sapien
cttgcccacttttctccgtgttccg

SEQ ID NO: 3688308 - DNA, 25 bp, Homo sapien
tcttgcccacttttctccgtgttcc

SEQ ID NO: 3688309 - DNA, 25 bp, Homo sapien
aggaaagctcaaggtggccaccaac

SEQ ID NO: 3688310 - DNA, 25 bp, Homo sapien
gaccaggaaagctcaaggtggccac

SEQ ID NO: 3688311 - DNA, 25 bp, Homo sapien
ccaggaaagctcaaggtggccacca

SEQ ID NO: 3688312 - DNA, 25 bp, Homo sapien
aggaccaggaaagctcaaggtggcc

SEQ ID NO: 3688313 - DNA, 25 bp, Homo sapien
tcaggatgtgcaagccgtagaattc

SEQ ID NO: 3688314 - DNA, 25 bp, Homo sapien
tggcattttagtgccgctcagcagc

SEQ ID NO: 3688315 - DNA, 25 bp, Homo sapien
tcgcctccagtataaacatccaact

SEQ ID NO: 3688316 - DNA, 25 bp, Homo sapien
gtgcaagccgtagaattcgacatgt

SEQ ID NO: 3688317 - DNA, 25 bp, Homo sapien
tgtcctgtgttatggggtgctgatc

SEQ ID NO: 3688318 - DNA, 25 bp, Homo sapien
ggaagttctcaggacagctcccaga

SEQ ID NO: 3688319 - DNA, 25 bp, Homo sapien
gagagcacgtggcttcccttaggga

SEQ ID NO: 3688320 - DNA, 25 bp, Homo sapien
gggatgcattgccaggtctcctgac

SEQ ID NO: 3688321 - DNA, 25 bp, Homo sapien
caggctggagtcgcggatgcctcat

SEQ ID NO: 3688322 - DNA, 25 bp, Homo sapien
acgcaggctggagtcgcggatgcct

SEQ ID NO: 3688323 - DNA, 25 bp, Homo sapien
aacgcaggctggagtcgcggatgcc

SEQ ID NO: 3688324 - DNA, 25 bp, Homo sapien
gcaggctggagtcgcggatgcctca

SEQ ID NO: 3688325 - DNA, 25 bp, Homo sapien
acagaacagaacttgtcagctggtc

SEQ ID NO: 3688326 - DNA, 25 bp, Homo sapien
aaagcagctagaatgttctgtgaag

SEQ ID NO: 3688327 - DNA, 25 bp, Homo sapien
ttaatgagctttggatccccaaaca

SEQ ID NO: 3688328 - DNA, 25 bp, Homo sapien
ctctcaagcagatacgcaaagcccg

SEQ ID NO: 3688329 - DNA, 25 bp, Homo sapien
ttccccacgtaaattaagataagca

SEQ ID NO: 3688330 - DNA, 25 bp, Homo sapien
taagataagcaattcccaggaagcc

SEQ ID NO: 3688331 - DNA, 25 bp, Homo sapien
aggaggaggcacttgattgcaggga

SEQ ID NO: 3688332 - DNA, 25 bp, Homo sapien
cacttgattgcagggaaaacagcct

SEQ ID NO: 3688333 - DNA, 25 bp, Homo sapien
ggaactcggcccacaccattctccc

SEQ ID NO: 3688334 - DNA, 25 bp, Homo sapien
gaactcggcccacaccattctcccc

SEQ ID NO: 3688335 - DNA, 25 bp, Homo sapien
agataacgggaaggatgcgccgcct

SEQ ID NO: 3688336 - DNA, 25 bp, Homo sapien
caggccctggacagaaagtgctgcc

SEQ ID NO: 3688337 - DNA, 25 bp, Homo sapien
aatctccgaggtttccagcggcggg

SEQ ID NO: 3688338 - DNA, 25 bp, Homo sapien
gaggttaggactaaatgagctcccc

SEQ ID NO: 3688339 - DNA, 25 bp, Homo sapien
taatatgcttgacccaatctggagc

SEQ ID NO: 3688340 - DNA, 25 bp, Homo sapien
ccgaggaatgcccaggagttaatta

SEQ ID NO: 3688341 - DNA, 25 bp, Homo sapien
tgctgagccgcatgctgtgattctc

SEQ ID NO: 3688342 - DNA, 25 bp, Homo sapien
gtgacattaagacagagccccgagg

SEQ ID NO: 3688343 - DNA, 25 bp, Homo sapien
tgagcacaaacttccagaggtgtct

SEQ ID NO: 3688344 - DNA, 25 bp, Homo sapien
tttgaatccccgacactgcagtctg

SEQ ID NO: 3688345 - DNA, 25 bp, Homo sapien
tgtggaagctcaggtccctctgact

SEQ ID NO: 3688346 - DNA, 25 bp, Homo sapien
tgcagggaagtgtactctacacccc

SEQ ID NO: 3688347 - DNA, 25 bp, Homo sapien
ctaggccagtactctgctctctcca

SEQ ID NO: 3688348 - DNA, 25 bp, Homo sapien
tccctaggccagtactctgctctct

SEQ ID NO: 3688349 - DNA, 25 bp, Homo sapien
tcttccctaggccagtactctgctc

SEQ ID NO: 3688350 - DNA, 25 bp, Homo sapien
cttccctaggccagtactctgctct

SEQ ID NO: 3688351 - DNA, 25 bp, Homo sapien
ctgtcttgctcaggcacatggaaat

SEQ ID NO: 3688352 - DNA, 25 bp, Homo sapien
ggaagggtctttgcaattcgagctt

SEQ ID NO: 3688353 - DNA, 25 bp, Homo sapien
tcctgggagagctgatcccctctga

SEQ ID NO: 3688354 - DNA, 25 bp, Homo sapien
tgggagagctgatcccctctgagca

SEQ ID NO: 3688355 - DNA, 25 bp, Homo sapien
tctgtgggctcatctgagcaggcat

SEQ ID NO: 3688356 - DNA, 25 bp, Homo sapien
catctgtgggctcatctgagcaggc

SEQ ID NO: 3688357 - DNA, 25 bp, Homo sapien
atctgtgggctcatctgagcaggca

SEQ ID NO: 3688358 - DNA, 25 bp, Homo sapien
ccatctgtgggctcatctgagcagg

SEQ ID NO: 3688359 - DNA, 25 bp, Homo sapien
gaccccgatgatgtattcagctgct

SEQ ID NO: 3688360 - DNA, 25 bp, Homo sapien
gctctgtctttgaccccgatgatgt

SEQ ID NO: 3688361 - DNA, 25 bp, Homo sapien
ctccagctgccaagctcgtctggag

SEQ ID NO: 3688362 - DNA, 25 bp, Homo sapien
cgatgatgtattcagctgctccctg

SEQ ID NO: 3688363 - DNA, 25 bp, Homo sapien
ccatggtgtgaacttgattgccaaa

SEQ ID NO: 3688364 - DNA, 25 bp, Homo sapien
ctgatggaaacttagccatggtgtg

SEQ ID NO: 3688365 - DNA, 25 bp, Homo sapien
ggctctgatggaaacttagccatgg

SEQ ID NO: 3688366 - DNA, 25 bp, Homo sapien
catggtgtgaacttgattgccaaac

SEQ ID NO: 3688367 - DNA, 25 bp, Homo sapien
cctgtggtaaggaataccactcctg

SEQ ID NO: 3688368 - DNA, 25 bp, Homo sapien
tcggcctgtggtaaggaataccact

SEQ ID NO: 3688369 - DNA, 25 bp, Homo sapien
ctacttcggcctgtggtaaggaata

SEQ ID NO: 3688370 - DNA, 25 bp, Homo sapien
cttcggcctgtggtaaggaatacca

SEQ ID NO: 3688371 - DNA, 25 bp, Homo sapien
tgaacagtaagaatccagtattctt

SEQ ID NO: 3688372 - DNA, 25 bp, Homo sapien
cagtaagaatccagtattctttgcc

SEQ ID NO: 3688373 - DNA, 25 bp, Homo sapien
ttgaacagtaagaatccagtattct

SEQ ID NO: 3688374 - DNA, 25 bp, Homo sapien
taagaatccagtattctttgcctcc

SEQ ID NO: 3688375 - DNA, 25 bp, Homo sapien
cctgttctgcctcatattgttgagg

SEQ ID NO: 3688376 - DNA, 25 bp, Homo sapien
ccagggaaaataagctgagttgatg

SEQ ID NO: 3688377 - DNA, 25 bp, Homo sapien
ttagttggggtacaatggtgaccag

SEQ ID NO: 3688378 - DNA, 25 bp, Homo sapien
gttgatgggatactaggagtcccca

SEQ ID NO: 3688379 - DNA, 25 bp, Homo sapien
ctcaatagctgcatggcagtatggg

SEQ ID NO: 3688380 - DNA, 25 bp, Homo sapien
tcaatagctgcatggcagtatgggg

SEQ ID NO: 3688381 - DNA, 25 bp, Homo sapien
cacagtggctcctagaagacttctc

SEQ ID NO: 3688382 - DNA, 25 bp, Homo sapien
acagtggctcctagaagacttctct

SEQ ID NO: 3688383 - DNA, 25 bp, Homo sapien
gaaggatgacttccagaattggcat

SEQ ID NO: 3688384 - DNA, 25 bp, Homo sapien
tgaaggatgacttccagaattggca

SEQ ID NO: 3688385 - DNA, 25 bp, Homo sapien
ctgaaggatgacttccagaattggc

SEQ ID NO: 3688386 - DNA, 25 bp, Homo sapien
gatatagtaatggtcttcctcttaa

SEQ ID NO: 3688387 - DNA, 25 bp, Homo sapien
actaacttggaacgcttttctggca

SEQ ID NO: 3688388 - DNA, 25 bp, Homo sapien
gctgctcatagactaacttggaacg

SEQ ID NO: 3688389 - DNA, 25 bp, Homo sapien
catagactaacttggaacgcttttc

SEQ ID NO: 3688390 - DNA, 25 bp, Homo sapien
tagtgctgctcatagactaacttgg

SEQ ID NO: 3688391 - DNA, 25 bp, Homo sapien
gcaggactccatagctcaatagcta

SEQ ID NO: 3688392 - DNA, 25 bp, Homo sapien
attgaaggtattggaacttgcatcc

SEQ ID NO: 3688393 - DNA, 25 bp, Homo sapien
aatcggctacaaaggcaattgaagg

SEQ ID NO: 3688394 - DNA, 25 bp, Homo sapien
acgactgggccagtggcaggactcc

SEQ ID NO: 3688395 - DNA, 25 bp, Homo sapien
cttgttgctgtgctacagccctcac

SEQ ID NO: 3688396 - DNA, 25 bp, Homo sapien
ggtagggtagaacagaagtcctgta

SEQ ID NO: 3688397 - DNA, 25 bp, Homo sapien
tctagagaacgggtagggtagaaca

SEQ ID NO: 3688398 - DNA, 25 bp, Homo sapien
tagggtagaacagaagtcctgtatg

SEQ ID NO: 3688399 - DNA, 25 bp, Homo sapien
gggtagaacagaagtcctgtatgcc

SEQ ID NO: 3688400 - DNA, 25 bp, Homo sapien
gctgtgaaatcctttggcagccact

SEQ ID NO: 3688401 - DNA, 25 bp, Homo sapien
agagtctttaagcagcagcttggct

SEQ ID NO: 3688402 - DNA, 25 bp, Homo sapien
gctagcaggcaaaagctccaagtgc

SEQ ID NO: 3688403 - DNA, 25 bp, Homo sapien
gaccagagtctttaagcagcagctt

SEQ ID NO: 3688404 - DNA, 25 bp, Homo sapien
ctgggataaggactgcgtggaagct

SEQ ID NO: 3688405 - DNA, 25 bp, Homo sapien
ctggccaatggggatgaagttctga

SEQ ID NO: 3688406 - DNA, 25 bp, Homo sapien
tggcctggtgactgcgatgctcttg

SEQ ID NO: 3688407 - DNA, 25 bp, Homo sapien
tccaggtgacaccctcactctggat

SEQ ID NO: 3688408 - DNA, 25 bp, Homo sapien
tggtgactgcgatgctcttgacttg

SEQ ID NO: 3688409 - DNA, 25 bp, Homo sapien
ctccttggctccatagttaccagtg

SEQ ID NO: 3688410 - DNA, 25 bp, Homo sapien
gccagtccctaaagctagggcttaa

SEQ ID NO: 3688411 - DNA, 25 bp, Homo sapien
ccttggggacaataatttcacctag

SEQ ID NO: 3688412 - DNA, 25 bp, Homo sapien
ttcacctaggtaaagccagtcccta

SEQ ID NO: 3688413 - DNA, 25 bp, Homo sapien
tcaaatctggagtggtacttgctcc

SEQ ID NO: 3688414 - DNA, 25 bp, Homo sapien
aaatctggagtggtacttgctccca

SEQ ID NO: 3688415 - DNA, 25 bp, Homo sapien
atctggagtggtacttgctcccata

SEQ ID NO: 3688416 - DNA, 25 bp, Homo sapien
caaatctggagtggtacttgctccc

SEQ ID NO: 3688417 - DNA, 25 bp, Homo sapien
tcagagagctgaactcaggagcaga

SEQ ID NO: 3688418 - DNA, 25 bp, Homo sapien
cagagagctgaactcaggagcagaa

SEQ ID NO: 3688419 - DNA, 25 bp, Homo sapien
ccgaagttgcgcgaccgctcagtgg

SEQ ID NO: 3688420 - DNA, 25 bp, Homo sapien
ctggcactcggagcgcggtgggtgc

SEQ ID NO: 3688421 - DNA, 25 bp, Homo sapien
ctccggcgctgtgcctccgaagttg

SEQ ID NO: 3688422 - DNA, 25 bp, Homo sapien
tccgggtctctgagcgctcgcctgg

SEQ ID NO: 3688423 - DNA, 25 bp, Homo sapien
gcagcagcgcgccccgagctccgct

SEQ ID NO: 3688424 - DNA, 25 bp, Homo sapien
cagcgcgccccgagctccgctccgg

SEQ ID NO: 3688425 - DNA, 25 bp, Homo sapien
ctgcttggctcagcctcgggtccca

SEQ ID NO: 3688426 - DNA, 25 bp, Homo sapien
agcctcgggtcccagcagagcagca

SEQ ID NO: 3688427 - DNA, 25 bp, Homo sapien
ttttcctgcgcgcatcgatgcgacg

SEQ ID NO: 3688428 - DNA, 25 bp, Homo sapien
ttgggcgcccttgccgcttttcctg

SEQ ID NO: 3688429 - DNA, 25 bp, Homo sapien
gcatcgatgcgacgaaagaccacct

SEQ ID NO: 3688430 - DNA, 25 bp, Homo sapien
tacattctaacttgggcgcccttgc

SEQ ID NO: 3688431 - DNA, 25 bp, Homo sapien
cgtggccagcccacttgcttgggtt

SEQ ID NO: 3688432 - DNA, 25 bp, Homo sapien
agccgtggccagcccacttgcttgg

SEQ ID NO: 3688433 - DNA, 25 bp, Homo sapien
cacttgcttgggttcgggtaccaga

SEQ ID NO: 3688434 - DNA, 25 bp, Homo sapien
tgggttcgggtaccagagagaggct

SEQ ID NO: 3688435 - DNA, 25 bp, Homo sapien
cttggatcaaatggttgagtgttgt

SEQ ID NO: 3688436 - DNA, 25 bp, Homo sapien
caaatggttgagtgttgtaactcta

SEQ ID NO: 3688437 - DNA, 25 bp, Homo sapien
tgctttaaataccagagtctgccca

SEQ ID NO: 3688438 - DNA, 25 bp, Homo sapien
cactgctttaaataccagagtctgc

SEQ ID NO: 3688439 - DNA, 25 bp, Homo sapien
tccatttgtttaagtgagatgggtg

SEQ ID NO: 3688440 - DNA, 25 bp, Homo sapien
catttgtttaagtgagatgggtgtt

SEQ ID NO: 3688441 - DNA, 25 bp, Homo sapien
ccatttgtttaagtgagatgggtgt

SEQ ID NO: 3688442 - DNA, 25 bp, Homo sapien
ccggggctccgcagaccgatttagc

SEQ ID NO: 3688443 - DNA, 25 bp, Homo sapien
cggggctccgcagaccgatttagct

SEQ ID NO: 3688444 - DNA, 25 bp, Homo sapien
gggctccgcagaccgatttagctcg

SEQ ID NO: 3688445 - DNA, 25 bp, Homo sapien
tcccggggctccgcagaccgattta

SEQ ID NO: 3688446 - DNA, 25 bp, Homo sapien
accacagccgctcccatgctctggg

SEQ ID NO: 3688447 - DNA, 25 bp, Homo sapien
cctgggggcagtagcccaagctgct

SEQ ID NO: 3688448 - DNA, 25 bp, Homo sapien
aaaccacagccgctcccatgctctg

SEQ ID NO: 3688449 - DNA, 25 bp, Homo sapien
cagccgctcccatgctctggggaag

SEQ ID NO: 3688450 - DNA, 25 bp, Homo sapien
tttgggggagacaggctgaagcata

SEQ ID NO: 3688451 - DNA, 25 bp, Homo sapien
gggagacaggctgaagcataagctg

SEQ ID NO: 3688452 - DNA, 25 bp, Homo sapien
gggggagacaggctgaagcataagc

SEQ ID NO: 3688453 - DNA, 25 bp, Homo sapien
gagacaggctgaagcataagctgac

SEQ ID NO: 3688454 - DNA, 25 bp, Homo sapien
tggttagaacgaacaggagccacct

SEQ ID NO: 3688455 - DNA, 25 bp, Homo sapien
agtttatggagaagccagctcaggc

SEQ ID NO: 3688456 - DNA, 25 bp, Homo sapien
cacacatttaacctgcgtgggcagc

SEQ ID NO: 3688457 - DNA, 25 bp, Homo sapien
tgtatgacatgcaggagaaacccca

SEQ ID NO: 3688458 - DNA, 25 bp, Homo sapien
ggtgccaggctttcgctatctgagc

SEQ ID NO: 3688459 - DNA, 25 bp, Homo sapien
taagaaatgtctaggtgctgccgcc

SEQ ID NO: 3688460 - DNA, 25 bp, Homo sapien
tatctgagccggaatcaggacctgc

SEQ ID NO: 3688461 - DNA, 25 bp, Homo sapien
tggagtgctcgctaaaacccaggct

SEQ ID NO: 3688462 - DNA, 25 bp, Homo sapien
ctgcagagtgagtggagacctccat

SEQ ID NO: 3688463 - DNA, 25 bp, Homo sapien
gggagcacctcgctgccagaatcag

SEQ ID NO: 3688464 - DNA, 25 bp, Homo sapien
cagggagcacctcgctgccagaatc

SEQ ID NO: 3688465 - DNA, 25 bp, Homo sapien
tcagggagcacctcgctgccagaat

SEQ ID NO: 3688466 - DNA, 25 bp, Homo sapien
gagcacctcgctgccagaatcagtg

SEQ ID NO: 3688467 - DNA, 25 bp, Homo sapien
caggcttgttcttcacaatgtaggc

SEQ ID NO: 3688468 - DNA, 25 bp, Homo sapien
caggccttcctgtgtgacgtggtcg

SEQ ID NO: 3688469 - DNA, 25 bp, Homo sapien
tcctgcaggaagtagggcagcggct

SEQ ID NO: 3688470 - DNA, 25 bp, Homo sapien
gccgttgcacttgaagtagatctgt

SEQ ID NO: 3688471 - DNA, 25 bp, Homo sapien
acctgctgccgcgacacctcgatct

SEQ ID NO: 3688472 - DNA, 25 bp, Homo sapien
aggcgatgcggacgtaggctcggcg

SEQ ID NO: 3688473 - DNA, 25 bp, Homo sapien
tgctgccgcgacacctcgatctgca

SEQ ID NO: 3688474 - DNA, 25 bp, Homo sapien
taggctcggcgactcttggtggtgc

SEQ ID NO: 3688475 - DNA, 25 bp, Homo sapien
cttgcccagaggctcctgatcgaag

SEQ ID NO: 3688476 - DNA, 25 bp, Homo sapien
tcctgatcgaagttcttgcgcaggt

SEQ ID NO: 3688477 - DNA, 25 bp, Homo sapien
actgcaggagaacctcatggtccag

SEQ ID NO: 3688478 - DNA, 25 bp, Homo sapien
tgcaggagaacctcatggtccaggg

SEQ ID NO: 3688479 - DNA, 25 bp, Homo sapien
gggtcgatgacatcctcattcttga

SEQ ID NO: 3688480 - DNA, 25 bp, Homo sapien
tgctccggcgtttggccacgatgtt

SEQ ID NO: 3688481 - DNA, 25 bp, Homo sapien
tatagttggcagtgtccgacaggcg

SEQ ID NO: 3688482 - DNA, 25 bp, Homo sapien
gacgatgacggtggcagtggtgctc

SEQ ID NO: 3688483 - DNA, 25 bp, Homo sapien
cagaaggcccctccgttgagtggag

SEQ ID NO: 3688484 - DNA, 25 bp, Homo sapien
gtgcaggcggtcttctggaatgcct

SEQ ID NO: 3688485 - DNA, 25 bp, Homo sapien
gaatgcctggccctcgcagaaggcc

SEQ ID NO: 3688486 - DNA, 25 bp, Homo sapien
agcctcggccacagcggttggagca

SEQ ID NO: 3688487 - DNA, 25 bp, Homo sapien
tcttagagtcgagcagcgtcccgct

SEQ ID NO: 3688488 - DNA, 25 bp, Homo sapien
atgcactcgcggctacgccagtggg

SEQ ID NO: 3688489 - DNA, 25 bp, Homo sapien
catctgtgcagttcttagagtcgag

SEQ ID NO: 3688490 - DNA, 25 bp, Homo sapien
ggctacgccagtgggcacactcagt

SEQ ID NO: 3688491 - DNA, 25 bp, Homo sapien
ggtggctgttggggtcgcttagagt

SEQ ID NO: 3688492 - DNA, 25 bp, Homo sapien
ctgttggggtcgcttagagttttct

SEQ ID NO: 3688493 - DNA, 25 bp, Homo sapien
tggctgttggggtcgcttagagttt

SEQ ID NO: 3688494 - DNA, 25 bp, Homo sapien
gctgttggggtcgcttagagttttc

SEQ ID NO: 3688495 - DNA, 25 bp, Homo sapien
tgaggattgccacgaccacgaagat

SEQ ID NO: 3688496 - DNA, 25 bp, Homo sapien
tgggccttgccgtcttaaagttgac

SEQ ID NO: 3688497 - DNA, 25 bp, Homo sapien
ggtggaaaccaccagtcagggcagc

SEQ ID NO: 3688498 - DNA, 25 bp, Homo sapien
tgatgtctgtgtcgaagtcacggca

SEQ ID NO: 3688499 - DNA, 25 bp, Homo sapien
tgtagaccttgaccttaaggctggg

SEQ ID NO: 3688500 - DNA, 25 bp, Homo sapien
cccgtggtgctggagctgtagacct

SEQ ID NO: 3688501 - DNA, 25 bp, Homo sapien
agtcctgcagggcatacacgggtcc

SEQ ID NO: 3688502 - DNA, 25 bp, Homo sapien
gaaatcgctagggtatgtgccaggc

SEQ ID NO: 3688503 - DNA, 25 bp, Homo sapien
tgagtagatacatctcgtagaactt

SEQ ID NO: 3688504 - DNA, 25 bp, Homo sapien
ctccattgggcaccagcaagctgac

SEQ ID NO: 3688505 - DNA, 25 bp, Homo sapien
tacatctcgtagaacttgccctggg

SEQ ID NO: 3688506 - DNA, 25 bp, Homo sapien
ggctccattgggcaccagcaagctg

SEQ ID NO: 3688507 - DNA, 25 bp, Homo sapien
ggtcttgagctgaaagatccagtca

SEQ ID NO: 3688508 - DNA, 25 bp, Homo sapien
gggctcaatactgtctgggtccctt

SEQ ID NO: 3688509 - DNA, 25 bp, Homo sapien
gaaagatccagtcacgggcactgac

SEQ ID NO: 3688510 - DNA, 25 bp, Homo sapien
cactgacttcggcacagtggggcat

SEQ ID NO: 3688511 - DNA, 25 bp, Homo sapien
ccgtgaacacgtaggtgcccagctg

SEQ ID NO: 3688512 - DNA, 25 bp, Homo sapien
agctggagccgcttgactgctgagc

SEQ ID NO: 3688513 - DNA, 25 bp, Homo sapien
gcagtagacccggaggctgtactcc

SEQ ID NO: 3688514 - DNA, 25 bp, Homo sapien
ctgctgagcgggaataggactcgcc

SEQ ID NO: 3688515 - DNA, 25 bp, Homo sapien
tatttggccagcagcttgctcctcc

SEQ ID NO: 3688516 - DNA, 25 bp, Homo sapien
ttcggctcctccaccaagtatccgc

SEQ ID NO: 3688517 - DNA, 25 bp, Homo sapien
tccttgaacattagcggtttcggct

SEQ ID NO: 3688518 - DNA, 25 bp, Homo sapien
aagtatccgcccagagtccgctcca

SEQ ID NO: 3688519 - DNA, 25 bp, Homo sapien
tggctgccactccaaatgtgataga

SEQ ID NO: 3688520 - DNA, 25 bp, Homo sapien
cacgcagatcttgcaggtgagctct

SEQ ID NO: 3688521 - DNA, 25 bp, Homo sapien
tgtgcctctccagggtgaaagtgca

SEQ ID NO: 3688522 - DNA, 25 bp, Homo sapien
tatgcagctggaatatctggccctc

SEQ ID NO: 3688523 - DNA, 25 bp, Homo sapien
gtgcagctggaatatgtggccccga

SEQ ID NO: 3688524 - DNA, 25 bp, Homo sapien
gctggaatatgtggccccgacttcc

SEQ ID NO: 3688525 - DNA, 25 bp, Homo sapien
tgcagctggaatatgtggccccgac

SEQ ID NO: 3688526 - DNA, 25 bp, Homo sapien
cagctggaatatgtggccccgactt

SEQ ID NO: 3688527 - DNA, 25 bp, Homo sapien
tgaaggcataaggtcccagctgggt

SEQ ID NO: 3688528 - DNA, 25 bp, Homo sapien
tgcatatcttctggcggatggacag

SEQ ID NO: 3688529 - DNA, 25 bp, Homo sapien
tggacagtgggatcttgaaggcata

SEQ ID NO: 3688530 - DNA, 25 bp, Homo sapien
gggcatctaggctgttgcatatctt

SEQ ID NO: 3688531 - DNA, 25 bp, Homo sapien
catctcctccaaggcactcgccagg

SEQ ID NO: 3688532 - DNA, 25 bp, Homo sapien
caaggcactcgccaggctgttgagg

SEQ ID NO: 3688533 - DNA, 25 bp, Homo sapien
gatcacacccgtggggctcgctttg

SEQ ID NO: 3688534 - DNA, 25 bp, Homo sapien
ggtccccatcgtcctgctgcagagc

SEQ ID NO: 3688535 - DNA, 25 bp, Homo sapien
tcagcagtccccgtcggtggccaca

SEQ ID NO: 3688536 - DNA, 25 bp, Homo sapien
ggtggccacagccaccagcatctca

SEQ ID NO: 3688537 - DNA, 25 bp, Homo sapien
gtggccacagccaccagcatctcac

SEQ ID NO: 3688538 - DNA, 25 bp, Homo sapien
gcagtccccgtcggtggccacagcc

SEQ ID NO: 3688539 - DNA, 25 bp, Homo sapien
taagaagccccacgagctactgagt

SEQ ID NO: 3688540 - DNA, 25 bp, Homo sapien
aaatacctgcgtaagggccctgcaa

SEQ ID NO: 3688541 - DNA, 25 bp, Homo sapien
ttcagatctctcagaccgtagcggg

SEQ ID NO: 3688542 - DNA, 25 bp, Homo sapien
catgtgggcacattagagcctgcga

SEQ ID NO: 3688543 - DNA, 25 bp, Homo sapien
gtcgccgctgcgccacgccgccgct

SEQ ID NO: 3688544 - DNA, 25 bp, Homo sapien
ccacgccgccgctgcctccggcgca

SEQ ID NO: 3688545 - DNA, 25 bp, Homo sapien
cgccgccgctgcctccggcgcacgg

SEQ ID NO: 3688546 - DNA, 25 bp, Homo sapien
tcgccgctgcgccacgccgccgctg

SEQ ID NO: 3688547 - DNA, 25 bp, Homo sapien
ccatacaggcggtgaggtccagtct

SEQ ID NO: 3688548 - DNA, 25 bp, Homo sapien
ggcagaaccggctttgcggtgtaaa

SEQ ID NO: 3688549 - DNA, 25 bp, Homo sapien
ccgcagctgggaccgagagaatcag

SEQ ID NO: 3688550 - DNA, 25 bp, Homo sapien
caccgtctggatacttcgggccgac

SEQ ID NO: 3688551 - DNA, 25 bp, Homo sapien
tgctggggccgcggcaaaacctcat

SEQ ID NO: 3688552 - DNA, 25 bp, Homo sapien
gggagcccggccatgcacagacaga

SEQ ID NO: 3688553 - DNA, 25 bp, Homo sapien
agccccacacaaggaggcaggcact

SEQ ID NO: 3688554 - DNA, 25 bp, Homo sapien
acagccccacacaaggaggcaggca

SEQ ID NO: 3688555 - DNA, 25 bp, Homo sapien
ggcctggaacgtgctcctgggtcac

SEQ ID NO: 3688556 - DNA, 25 bp, Homo sapien
ggctgtggcctggaacgtgctcctg

SEQ ID NO: 3688557 - DNA, 25 bp, Homo sapien
tccccaaaacaagctggctgtggcc

SEQ ID NO: 3688558 - DNA, 25 bp, Homo sapien
cttccccaaaacaagctggctgtgg

SEQ ID NO: 3688559 - DNA, 25 bp, Homo sapien
ctgcttgtggttctgtaggtggagt

SEQ ID NO: 3688560 - DNA, 25 bp, Homo sapien
actgtgctgaaagtcgtcctctgag

SEQ ID NO: 3688561 - DNA, 25 bp, Homo sapien
agtttgaactgtgctgaaagtcgtc

SEQ ID NO: 3688562 - DNA, 25 bp, Homo sapien
tctgtaggtggagtttgaactgtgc

SEQ ID NO: 3688563 - DNA, 25 bp, Homo sapien
catggcagtagactgccaatgccca

SEQ ID NO: 3688564 - DNA, 25 bp, Homo sapien
gaggagttgcggagtttgaacatcc

SEQ ID NO: 3688565 - DNA, 25 bp, Homo sapien
ccagtactccttggcagtgataaag

SEQ ID NO: 3688566 - DNA, 25 bp, Homo sapien
tatgtgccacagaagcggtcctcgg

SEQ ID NO: 3688567 - DNA, 25 bp, Homo sapien
gacgggtaatgtgccgatgacataa

SEQ ID NO: 3688568 - DNA, 25 bp, Homo sapien
tcggacgggtaatgtgccgatgaca

SEQ ID NO: 3688569 - DNA, 25 bp, Homo sapien
tcacacatgtgcgtggaaacccagt

SEQ ID NO: 3688570 - DNA, 25 bp, Homo sapien
catgtgcgtggaaacccagtcatca

SEQ ID NO: 3688571 - DNA, 25 bp, Homo sapien
cgtagcagggctcagaatgccaagt

SEQ ID NO: 3688572 - DNA, 25 bp, Homo sapien
ttgcggtgaaagcagtacacgaggc

SEQ ID NO: 3688573 - DNA, 25 bp, Homo sapien
cctgcagctgggaagggatcgcctt

SEQ ID NO: 3688574 - DNA, 25 bp, Homo sapien
gaggccataaagcatcgtagcaggg

SEQ ID NO: 3688575 - DNA, 25 bp, Homo sapien
gaaggaaggtgtagagagcggctgt

SEQ ID NO: 3688576 - DNA, 25 bp, Homo sapien
ggaatggccaggagaaggtgcagac

SEQ ID NO: 3688577 - DNA, 25 bp, Homo sapien
atggccaggagaaggtgcagacact

SEQ ID NO: 3688578 - DNA, 25 bp, Homo sapien
aaggaaggtgtagagagcggctgtg

SEQ ID NO: 3688579 - DNA, 25 bp, Homo sapien
tccctcagagaggagtccctgggca

SEQ ID NO: 3688580 - DNA, 25 bp, Homo sapien
gccgcatcctgcagtccctcagaga

SEQ ID NO: 3688581 - DNA, 25 bp, Homo sapien
tggccgcatcctgcagtccctcaga

SEQ ID NO: 3688582 - DNA, 25 bp, Homo sapien
ctggccgcatcctgcagtccctcag

SEQ ID NO: 3688583 - DNA, 25 bp, Homo sapien
gtagagtgcctagcccgggtcccag

SEQ ID NO: 3688584 - DNA, 25 bp, Homo sapien
tcgggctgtaggtcccactcatgac

SEQ ID NO: 3688585 - DNA, 25 bp, Homo sapien
gctgacactaagtcgggctgtaggt

SEQ ID NO: 3688586 - DNA, 25 bp, Homo sapien
gggcatcagtagagtgcctagcccg

SEQ ID NO: 3688587 - DNA, 25 bp, Homo sapien
tgtctgcagcgttatgtaaatgctg

SEQ ID NO: 3688588 - DNA, 25 bp, Homo sapien
tgtgtctgcagcgttatgtaaatgc

SEQ ID NO: 3688589 - DNA, 25 bp, Homo sapien
tctgcagcgttatgtaaatgctgcc

SEQ ID NO: 3688590 - DNA, 25 bp, Homo sapien
cagcgttatgtaaatgctgccaggt

SEQ ID NO: 3688591 - DNA, 25 bp, Homo sapien
ccagagggtcccgtgcatcagtgtc

SEQ ID NO: 3688592 - DNA, 25 bp, Homo sapien
gagggtcccgtgcatcagtgtcaca

SEQ ID NO: 3688593 - DNA, 25 bp, Homo sapien
gtcccgtgcatcagtgtcacaaggc

SEQ ID NO: 3688594 - DNA, 25 bp, Homo sapien
gggtcccgtgcatcagtgtcacaag

SEQ ID NO: 3688595 - DNA, 25 bp, Homo sapien
cagcgagcaggttggagccaagaat

SEQ ID NO: 3688596 - DNA, 25 bp, Homo sapien
gccattgcaaacttgccgctttcgg

SEQ ID NO: 3688597 - DNA, 25 bp, Homo sapien
ggcatgaaattagcagcagcgagca

SEQ ID NO: 3688598 - DNA, 25 bp, Homo sapien
gccgctttcggatagctgagttctg

SEQ ID NO: 3688599 - DNA, 25 bp, Homo sapien
cagaccctggttaagctttctcttc

SEQ ID NO: 3688600 - DNA, 25 bp, Homo sapien
tctggcagaccctggttaagctttc

SEQ ID NO: 3688601 - DNA, 25 bp, Homo sapien
gccccgaaatgagcccgtttatctc

SEQ ID NO: 3688602 - DNA, 25 bp, Homo sapien
cagggaggccccgaaatgagcccgt

SEQ ID NO: 3688603 - DNA, 25 bp, Homo sapien
aggctcagagtccaggtaaagaggt

SEQ ID NO: 3688604 - DNA, 25 bp, Homo sapien
gaagaattcaattccaggctcagag

SEQ ID NO: 3688605 - DNA, 25 bp, Homo sapien
cactgagaggctccgtgctaagggt

SEQ ID NO: 3688606 - DNA, 25 bp, Homo sapien
ttatgacgggccacatttcctctcc

SEQ ID NO: 3688607 - DNA, 25 bp, Homo sapien
gggaggtggacgcaagcctggagct

SEQ ID NO: 3688608 - DNA, 25 bp, Homo sapien
gagctggagtacaacagatacaaag

SEQ ID NO: 3688609 - DNA, 25 bp, Homo sapien
agtacaacagatacaaagtgttggg

SEQ ID NO: 3688610 - DNA, 25 bp, Homo sapien
aggtggacgcaagcctggagctgga

SEQ ID NO: 3688611 - DNA, 25 bp, Homo sapien
tggtcataaaatcactgccactgct

SEQ ID NO: 3688612 - DNA, 25 bp, Homo sapien
cattggtcccatggtcataaaatca

SEQ ID NO: 3688613 - DNA, 25 bp, Homo sapien
tggaggtgagcagttccacgcgagc

SEQ ID NO: 3688614 - DNA, 25 bp, Homo sapien
tgagcagttccacgcgagcagagac

SEQ ID NO: 3688615 - DNA, 25 bp, Homo sapien
gatggaggtgagcagttccacgcga

SEQ ID NO: 3688616 - DNA, 25 bp, Homo sapien
aggtgagcagttccacgcgagcaga

SEQ ID NO: 3688617 - DNA, 25 bp, Homo sapien
gcacggtggaggcaacggcaaggta

SEQ ID NO: 3688618 - DNA, 25 bp, Homo sapien
cggtggaggcaacggcaaggtagct

SEQ ID NO: 3688619 - DNA, 25 bp, Homo sapien
tggaggcaacggcaaggtagctctc

SEQ ID NO: 3688620 - DNA, 25 bp, Homo sapien
tggagggcacggtggaggcaacggc

SEQ ID NO: 3688621 - DNA, 25 bp, Homo sapien
tcagggccagcgctcagtgggttct

SEQ ID NO: 3688622 - DNA, 25 bp, Homo sapien
gggagagttgattcaactcacaggg

SEQ ID NO: 3688623 - DNA, 25 bp, Homo sapien
ccttgggtaagggactcagttgctc

SEQ ID NO: 3688624 - DNA, 25 bp, Homo sapien
ttgctgtgaggttcaaggacacgag

SEQ ID NO: 3688625 - DNA, 25 bp, Homo sapien
ttaagggaagcaggcgagcttagca

SEQ ID NO: 3688626 - DNA, 25 bp, Homo sapien
gtgagccaccttaagggaagcaggc

SEQ ID NO: 3688627 - DNA, 25 bp, Homo sapien
agaagcagttagacaccccttcggg

SEQ ID NO: 3688628 - DNA, 25 bp, Homo sapien
ccagaagcagttagacaccccttcg

SEQ ID NO: 3688629 - DNA, 25 bp, Homo sapien
gccaggatgaccgtcagtgaggcca

SEQ ID NO: 3688630 - DNA, 25 bp, Homo sapien
caggacacggatgtggactgcaacc

SEQ ID NO: 3688631 - DNA, 25 bp, Homo sapien
tcctcataggaaaggagccggtcat

SEQ ID NO: 3688632 - DNA, 25 bp, Homo sapien
caatggtgaccgcaaaaaagccacg

SEQ ID NO: 3688633 - DNA, 25 bp, Homo sapien
ccatgcagagcacgaggaagacagt

SEQ ID NO: 3688634 - DNA, 25 bp, Homo sapien
aaggccagggcgctgttcctcacat

SEQ ID NO: 3688635 - DNA, 25 bp, Homo sapien
tcctcacatcactggatgcagccaa

SEQ ID NO: 3688636 - DNA, 25 bp, Homo sapien
acagtggccgtcaggaagaaggcca

SEQ ID NO: 3688637 - DNA, 25 bp, Homo sapien
ggagtagcccttcaacacataactg

SEQ ID NO: 3688638 - DNA, 25 bp, Homo sapien
ggagcaaggaccacatttgactgtt

SEQ ID NO: 3688639 - DNA, 25 bp, Homo sapien
tactgtgtgaccttgcctgagccac

SEQ ID NO: 3688640 - DNA, 25 bp, Homo sapien
taaatcttcaggcacggagtagccc

SEQ ID NO: 3688641 - DNA, 25 bp, Homo sapien
gccggccacataggtcagcaaagtt

SEQ ID NO: 3688642 - DNA, 25 bp, Homo sapien
cagaaaacacatgggccgcaagaac

SEQ ID NO: 3688643 - DNA, 25 bp, Homo sapien
tacacatcggactggaagaccacag

SEQ ID NO: 3688644 - DNA, 25 bp, Homo sapien
cagtgagcccgaacccttgttgagg

SEQ ID NO: 3688645 - DNA, 25 bp, Homo sapien
ctgagcccagtgttaagcccaagca

SEQ ID NO: 3688646 - DNA, 25 bp, Homo sapien
gagcccagtgttaagcccaagcaca

SEQ ID NO: 3688647 - DNA, 25 bp, Homo sapien
aggctgagcccagtgttaagcccaa

SEQ ID NO: 3688648 - DNA, 25 bp, Homo sapien
gaggtgcaccaggagggtagagcag

SEQ ID NO: 3688649 - DNA, 25 bp, Homo sapien
gggagtacccctgatttgtgctatt

SEQ ID NO: 3688650 - DNA, 25 bp, Homo sapien
aatatctgccttgcacggaatgggc

SEQ ID NO: 3688651 - DNA, 25 bp, Homo sapien
gcatggacgtggctcactggcatct

SEQ ID NO: 3688652 - DNA, 25 bp, Homo sapien
cttcaactgtctcaggagtgttctg

SEQ ID NO: 3688653 - DNA, 25 bp, Homo sapien
actctagggcgaacactggcagcat

SEQ ID NO: 3688654 - DNA, 25 bp, Homo sapien
tggctttgtaataactctagggcga

SEQ ID NO: 3688655 - DNA, 25 bp, Homo sapien
caggggacttccattccagggagac

SEQ ID NO: 3688656 - DNA, 25 bp, Homo sapien
tcgctgtcagctggaatgagcgcag

SEQ ID NO: 3688657 - DNA, 25 bp, Homo sapien
tctgtgcacacttgagtcttgggcc

SEQ ID NO: 3688658 - DNA, 25 bp, Homo sapien
gacatgcttgatcccttgcacaggg

SEQ ID NO: 3688659 - DNA, 25 bp, Homo sapien
tgaaagaccctcatcttgacccagg

SEQ ID NO: 3688660 - DNA, 25 bp, Homo sapien
tttattacgcccttgaaccaatggc

SEQ ID NO: 3688661 - DNA, 25 bp, Homo sapien
acgggatttcgacatgttggtcagg

SEQ ID NO: 3688662 - DNA, 25 bp, Homo sapien
gacgggatttcgacatgttggtcag

SEQ ID NO: 3688663 - DNA, 25 bp, Homo sapien
agagcaacagtgactcaggcccaga

SEQ ID NO: 3688664 - DNA, 25 bp, Homo sapien
tgctggagtcaaagctagaccggga

SEQ ID NO: 3688665 - DNA, 25 bp, Homo sapien
ctcagcgagtgggtgaagagcaaca

SEQ ID NO: 3688666 - DNA, 25 bp, Homo sapien
cagaggcatactggcactgacaatg

SEQ ID NO: 3688667 - DNA, 25 bp, Homo sapien
tagcactaggctccattccaaatgt

SEQ ID NO: 3688668 - DNA, 25 bp, Homo sapien
gatgagagcagtactacaatcgccc

SEQ ID NO: 3688669 - DNA, 25 bp, Homo sapien
tgtgcattgccagtatatcatcata

SEQ ID NO: 3688670 - DNA, 25 bp, Homo sapien
tcgcccctagtgttcagatgagaaa

SEQ ID NO: 3688671 - DNA, 25 bp, Homo sapien
ccatgagttgctgaactgggtggtt

SEQ ID NO: 3688672 - DNA, 25 bp, Homo sapien
ggtggttttgcggacctgacgattc

SEQ ID NO: 3688673 - DNA, 25 bp, Homo sapien
ttttgcggacctgacgattcgccat

SEQ ID NO: 3688674 - DNA, 25 bp, Homo sapien
cgggctcggcatagccatgagttgc

SEQ ID NO: 3688675 - DNA, 25 bp, Homo sapien
gcggccatctatttcgtggccggtg

SEQ ID NO: 3688676 - DNA, 25 bp, Homo sapien
catctatttcgtggccggtggctgt

SEQ ID NO: 3688677 - DNA, 25 bp, Homo sapien
agccctcgcggccatctatttcgtg

SEQ ID NO: 3688678 - DNA, 25 bp, Homo sapien
gccctcgcggccatctatttcgtgg

SEQ ID NO: 3688679 - DNA, 25 bp, Homo sapien
catcattcctacatcgcagggagaa

SEQ ID NO: 3688680 - DNA, 25 bp, Homo sapien
ttgttaacaagacggctggaacctc

SEQ ID NO: 3688681 - DNA, 25 bp, Homo sapien
gcagatctggctcaatttccaggta

SEQ ID NO: 3688682 - DNA, 25 bp, Homo sapien
ggcagggccattcctcttaagtgta

SEQ ID NO: 3688683 - DNA, 25 bp, Homo sapien
tagtgagcctgcactgacacaccat

SEQ ID NO: 3688684 - DNA, 25 bp, Homo sapien
tgagaagatggtacagagactgccc

SEQ ID NO: 3688685 - DNA, 25 bp, Homo sapien
ccagcagagcagagcatttgataca

SEQ ID NO: 3688686 - DNA, 25 bp, Homo sapien
tgtgcacagcctgccacagtatcaa

SEQ ID NO: 3688687 - DNA, 25 bp, Homo sapien
agccaggcataggcggccagggtga

SEQ ID NO: 3688688 - DNA, 25 bp, Homo sapien
ggcataggcggccagggtgagaggg

SEQ ID NO: 3688689 - DNA, 25 bp, Homo sapien
gaaggagttgaggtgtgagttccca

SEQ ID NO: 3688690 - DNA, 25 bp, Homo sapien
ggagttgaggtgtgagttcccatct

SEQ ID NO: 3688691 - DNA, 25 bp, Homo sapien
atggctctaacctagcttccaggag

SEQ ID NO: 3688692 - DNA, 25 bp, Homo sapien
ccagagctagtgagtcacatggctc

SEQ ID NO: 3688693 - DNA, 25 bp, Homo sapien
gaggcaaggttttgcacacagacgg

SEQ ID NO: 3688694 - DNA, 25 bp, Homo sapien
ctaagaatctgcaacacgggagccg

SEQ ID NO: 3688695 - DNA, 25 bp, Homo sapien
ggacgcgtcctctagccaagcatcg

SEQ ID NO: 3688696 - DNA, 25 bp, Homo sapien
ggcgcgaaggctcatccgcggcgtg

SEQ ID NO: 3688697 - DNA, 25 bp, Homo sapien
ctcgccgctcgcaacttcaggcgcg

SEQ ID NO: 3688698 - DNA, 25 bp, Homo sapien
tgggcgcgccccaaacgtccagagg

SEQ ID NO: 3688699 - DNA, 25 bp, Homo sapien
ctcgtagcggaccagttccagggcc

SEQ ID NO: 3688700 - DNA, 25 bp, Homo sapien
agcgagagccgcaaaaggctcccgg

SEQ ID NO: 3688701 - DNA, 25 bp, Homo sapien
cagcaccgctcgtagcggaccagtt

SEQ ID NO: 3688702 - DNA, 25 bp, Homo sapien
cagggccaggaaggcgaagcgagag

SEQ ID NO: 3688703 - DNA, 25 bp, Homo sapien
ggctggcgccgtcactgccttggaa

SEQ ID NO: 3688704 - DNA, 25 bp, Homo sapien
cacgcgggctctgctcgagtcctgg

SEQ ID NO: 3688705 - DNA, 25 bp, Homo sapien
gtcactgccttggaacacgcgggct

SEQ ID NO: 3688706 - DNA, 25 bp, Homo sapien
tctaggtgcccgctccgagaaagcc

SEQ ID NO: 3688707 - DNA, 25 bp, Homo sapien
caaggggctggaaggcgaggtcaat

SEQ ID NO: 3688708 - DNA, 25 bp, Homo sapien
ggaaggcgaggtcaatgtcaatgcc

SEQ ID NO: 3688709 - DNA, 25 bp, Homo sapien
gctggaaggcgaggtcaatgtcaat

SEQ ID NO: 3688710 - DNA, 25 bp, Homo sapien
gggctggaaggcgaggtcaatgtca

SEQ ID NO: 3688711 - DNA, 25 bp, Homo sapien
ggaccaggggtataacttgccacca

SEQ ID NO: 3688712 - DNA, 25 bp, Homo sapien
accatcggctacaccaggcctctga

SEQ ID NO: 3688713 - DNA, 25 bp, Homo sapien
agtgtttcaaatctcctactctcag

SEQ ID NO: 3688714 - DNA, 25 bp, Homo sapien
tgacaccatcggctacaccaggcct

SEQ ID NO: 3688715 - DNA, 25 bp, Homo sapien
tcttcacattagctcgctctttgta

SEQ ID NO: 3688716 - DNA, 25 bp, Homo sapien
tctgaatgtcttcacattagctcgc

SEQ ID NO: 3688717 - DNA, 25 bp, Homo sapien
tctttgtaaggcccatgactgtgtc

SEQ ID NO: 3688718 - DNA, 25 bp, Homo sapien
tgattttcaaatcgatgtctgaatg

SEQ ID NO: 3688719 - DNA, 25 bp, Homo sapien
gactggattaagatgatcagctgct

SEQ ID NO: 3688720 - DNA, 25 bp, Homo sapien
ccctgactggattaagatgatcagc

SEQ ID NO: 3688721 - DNA, 25 bp, Homo sapien
agctcaggccctgactggattaaga

SEQ ID NO: 3688722 - DNA, 25 bp, Homo sapien
caggccctgactggattaagatgat

SEQ ID NO: 3688723 - DNA, 25 bp, Homo sapien
ccattcctgtagcacaagcagctct

SEQ ID NO: 3688724 - DNA, 25 bp, Homo sapien
gagagtccattcctgtagcacaagc

SEQ ID NO: 3688725 - DNA, 25 bp, Homo sapien
gtccattcctgtagcacaagcagct

SEQ ID NO: 3688726 - DNA, 25 bp, Homo sapien
gagtccattcctgtagcacaagcag

SEQ ID NO: 3688727 - DNA, 25 bp, Homo sapien
agcagaggctaagggatgttgctcc

SEQ ID NO: 3688728 - DNA, 25 bp, Homo sapien
gagagcagaggctaagggatgttgc

SEQ ID NO: 3688729 - DNA, 25 bp, Homo sapien
gaggctaagggatgttgctccattc

SEQ ID NO: 3688730 - DNA, 25 bp, Homo sapien
tgctccattccccctcaaggtcact

SEQ ID NO: 3688731 - DNA, 25 bp, Homo sapien
ccccactggaaagggcacagtgatg

SEQ ID NO: 3688732 - DNA, 25 bp, Homo sapien
ccactggaaagggcacagtgatgta

SEQ ID NO: 3688733 - DNA, 25 bp, Homo sapien
gcccccactggaaagggcacagtga

SEQ ID NO: 3688734 - DNA, 25 bp, Homo sapien
cagcccccactggaaagggcacagt

SEQ ID NO: 3688735 - DNA, 25 bp, Homo sapien
gcagggcagacccagaccaggcgat

SEQ ID NO: 3688736 - DNA, 25 bp, Homo sapien
ctgtgagagcaggcagggcagaccc

SEQ ID NO: 3688737 - DNA, 25 bp, Homo sapien
gagcaggcagggcagacccagacca

SEQ ID NO: 3688738 - DNA, 25 bp, Homo sapien
gtgagagcaggcagggcagacccag

SEQ ID NO: 3688739 - DNA, 25 bp, Homo sapien
aaccatgctccgttgtatgtagagc

SEQ ID NO: 3688740 - DNA, 25 bp, Homo sapien
atagtgacaaccatgctccgttgta

SEQ ID NO: 3688741 - DNA, 25 bp, Homo sapien
gttgcactcatcacaagcacccgac

SEQ ID NO: 3688742 - DNA, 25 bp, Homo sapien
attctcaagccaacagtcatagtga

SEQ ID NO: 3688743 - DNA, 25 bp, Homo sapien
agcaggggaacagcccacagacccc

SEQ ID NO: 3688744 - DNA, 25 bp, Homo sapien
acagaccccagctcaggcctggcat

SEQ ID NO: 3688745 - DNA, 25 bp, Homo sapien
cagcaggggaacagcccacagaccc

SEQ ID NO: 3688746 - DNA, 25 bp, Homo sapien
cccacagaccccagctcaggcctgg

SEQ ID NO: 3688747 - DNA, 25 bp, Homo sapien
ttcgtgcgtgcaagaaggcgcctgc

SEQ ID NO: 3688748 - DNA, 25 bp, Homo sapien
cagatgacaccattagggctgctaa

SEQ ID NO: 3688749 - DNA, 25 bp, Homo sapien
ttcaaagcccacactatccaggcca

SEQ ID NO: 3688750 - DNA, 25 bp, Homo sapien
gccaagcccttgtaggtcaccgatg

SEQ ID NO: 3688751 - DNA, 25 bp, Homo sapien
ctccaaagggtaaagcaaagcagct

SEQ ID NO: 3688752 - DNA, 25 bp, Homo sapien
gctccaaagggtaaagcaaagcagc

SEQ ID NO: 3688753 - DNA, 25 bp, Homo sapien
ggctccaaagggtaaagcaaagcag

SEQ ID NO: 3688754 - DNA, 25 bp, Homo sapien
ccacgtggcagctggtggcaacatg

SEQ ID NO: 3688755 - DNA, 25 bp, Homo sapien
agctggtggcaacatggcgccccat

SEQ ID NO: 3688756 - DNA, 25 bp, Homo sapien
gcagctggtggcaacatggcgcccc

SEQ ID NO: 3688757 - DNA, 25 bp, Homo sapien
gtggcagctggtggcaacatggcgc

SEQ ID NO: 3688758 - DNA, 25 bp, Homo sapien
cctgaatgcacgaagcatctttcat

SEQ ID NO: 3688759 - DNA, 25 bp, Homo sapien
ggcctccagcgaagcgggaatgtaa

SEQ ID NO: 3688760 - DNA, 25 bp, Homo sapien
ctgttaaagcgcagcagctgtgtgc

SEQ ID NO: 3688761 - DNA, 25 bp, Homo sapien
gggcagacaggtgacttattctcaa

SEQ ID NO: 3688762 - DNA, 25 bp, Homo sapien
gacttattctcaaagccgctgttaa

SEQ ID NO: 3688763 - DNA, 25 bp, Homo sapien
gacctgtgttcccagagcaggccca

SEQ ID NO: 3688764 - DNA, 25 bp, Homo sapien
aggacctgtgttcccagagcaggcc

SEQ ID NO: 3688765 - DNA, 25 bp, Homo sapien
acaggacctgtgttcccagagcagg

SEQ ID NO: 3688766 - DNA, 25 bp, Homo sapien
caaacaggacctgtgttcccagagc

SEQ ID NO: 3688767 - DNA, 25 bp, Homo sapien
cacaggcgtgtcctcgctgatcagc

SEQ ID NO: 3688768 - DNA, 25 bp, Homo sapien
caggcgtgtcctcgctgatcagcag

SEQ ID NO: 3688769 - DNA, 25 bp, Homo sapien
acaggcgtgtcctcgctgatcagca

SEQ ID NO: 3688770 - DNA, 25 bp, Homo sapien
agaagtggttggtgaagaagggcag

SEQ ID NO: 3688771 - DNA, 25 bp, Homo sapien
cctttgcacatgtagagatggcaga

SEQ ID NO: 3688772 - DNA, 25 bp, Homo sapien
cctgatgcacttggcctctggcaca

SEQ ID NO: 3688773 - DNA, 25 bp, Homo sapien
gaagccccggatgacaggcactttc

SEQ ID NO: 3688774 - DNA, 25 bp, Homo sapien
tagagatggcagacccgagagtaag

SEQ ID NO: 3688775 - DNA, 25 bp, Homo sapien
agtgatgctccctaaagatgcacca

SEQ ID NO: 3688776 - DNA, 25 bp, Homo sapien
ctccctaaagatgcaccatgctgac

SEQ ID NO: 3688777 - DNA, 25 bp, Homo sapien
tcaagtgatgctccctaaagatgca

SEQ ID NO: 3688778 - DNA, 25 bp, Homo sapien
gctccctaaagatgcaccatgctga

SEQ ID NO: 3688779 - DNA, 25 bp, Homo sapien
gccgatcgatgctggcgtttgcaaa

SEQ ID NO: 3688780 - DNA, 25 bp, Homo sapien
cttccggaggccgatcgatgctggc

SEQ ID NO: 3688781 - DNA, 25 bp, Homo sapien
aggccgatcgatgctggcgtttgca

SEQ ID NO: 3688782 - DNA, 25 bp, Homo sapien
ctgcttccggaggccgatcgatgct

SEQ ID NO: 3688783 - DNA, 25 bp, Homo sapien
ggggacacagtgatggccaggccac

SEQ ID NO: 3688784 - DNA, 25 bp, Homo sapien
caggcgcagggctaggccctgggga

SEQ ID NO: 3688785 - DNA, 25 bp, Homo sapien
ggcgcagggctaggccctggggaca

SEQ ID NO: 3688786 - DNA, 25 bp, Homo sapien
cctggggacacagtgatggccaggc

SEQ ID NO: 3688787 - DNA, 25 bp, Homo sapien
ggccttgccgttcacaagcataggc

SEQ ID NO: 3688788 - DNA, 25 bp, Homo sapien
agcataggcacgtacagcatctgtg

SEQ ID NO: 3688789 - DNA, 25 bp, Homo sapien
catctgtgccatctgcgggaaagtg

SEQ ID NO: 3688790 - DNA, 25 bp, Homo sapien
tgccatctgcgggaaagtgctctcc

SEQ ID NO: 3688791 - DNA, 25 bp, Homo sapien
gctgggcattgatggagtttggaga

SEQ ID NO: 3688792 - DNA, 25 bp, Homo sapien
ttaatcagcaccgactggcagcagt

SEQ ID NO: 3688793 - DNA, 25 bp, Homo sapien
tcagcaccgactggcagcagtgcca

SEQ ID NO: 3688794 - DNA, 25 bp, Homo sapien
aaattaatcagcaccgactggcagc

SEQ ID NO: 3688795 - DNA, 25 bp, Homo sapien
ggttcttttgttgtggtcaattcca

SEQ ID NO: 3688796 - DNA, 25 bp, Homo sapien
cctttcgaaaatatgtttataggag

SEQ ID NO: 3688797 - DNA, 25 bp, Homo sapien
cagcagccttccaatagaaaggaca

SEQ ID NO: 3688798 - DNA, 25 bp, Homo sapien
gaagcttgtctgacacattaaagtt

SEQ ID NO: 3688799 - DNA, 25 bp, Homo sapien
gccggggtgacgcacaggctctttt

SEQ ID NO: 3688800 - DNA, 25 bp, Homo sapien
cggggtgacgcacaggctcttttga

SEQ ID NO: 3688801 - DNA, 25 bp, Homo sapien
tcttgcttttccggaatgtcctgcc

SEQ ID NO: 3688802 - DNA, 25 bp, Homo sapien
ctgcctgcgttgaagccgtccctgg

SEQ ID NO: 3688803 - DNA, 25 bp, Homo sapien
gcagagccaggagctttactggcag

SEQ ID NO: 3688804 - DNA, 25 bp, Homo sapien
gccaggagctttactggcagagcta

SEQ ID NO: 3688805 - DNA, 25 bp, Homo sapien
gagccaggagctttactggcagagc

SEQ ID NO: 3688806 - DNA, 25 bp, Homo sapien
aggagctttactggcagagctagag

SEQ ID NO: 3688807 - DNA, 25 bp, Homo sapien
gtcgagcaccagatccattccaggc

SEQ ID NO: 3688808 - DNA, 25 bp, Homo sapien
tctgtcgagcaccagatccattcca

SEQ ID NO: 3688809 - DNA, 25 bp, Homo sapien
tgtcgagcaccagatccattccagg

SEQ ID NO: 3688810 - DNA, 25 bp, Homo sapien
tcatctgtcgagcaccagatccatt

SEQ ID NO: 3688811 - DNA, 25 bp, Homo sapien
ctctccagtagggaagactccggga

SEQ ID NO: 3688812 - DNA, 25 bp, Homo sapien
tgagtaagtccaggacaaagtctcc

SEQ ID NO: 3688813 - DNA, 25 bp, Homo sapien
gactcggcagatgggcttcccttca

SEQ ID NO: 3688814 - DNA, 25 bp, Homo sapien
gactgtgctattgccaagtgaccag

SEQ ID NO: 3688815 - DNA, 25 bp, Homo sapien
taatattggctttgataaagacgtc

SEQ ID NO: 3688816 - DNA, 25 bp, Homo sapien
gaggcattatcatccttgtcagctg

SEQ ID NO: 3688817 - DNA, 25 bp, Homo sapien
tttgataaagacgtcggcgccagct

SEQ ID NO: 3688818 - DNA, 25 bp, Homo sapien
tcagctgggctaacgactgggtaag

SEQ ID NO: 3688819 - DNA, 25 bp, Homo sapien
gtggacgccatccctgatgtgtgca

SEQ ID NO: 3688820 - DNA, 25 bp, Homo sapien
tcctggctcacaggtcgtggacgcc

SEQ ID NO: 3688821 - DNA, 25 bp, Homo sapien
gctcctggctcacaggtcgtggacg

SEQ ID NO: 3688822 - DNA, 25 bp, Homo sapien
tggctcacaggtcgtggacgccatc

SEQ ID NO: 3688823 - DNA, 25 bp, Homo sapien
aattacccacaatgatcacagcacc

SEQ ID NO: 3688824 - DNA, 25 bp, Homo sapien
tgaggagactcgtaattacccacaa

SEQ ID NO: 3688825 - DNA, 25 bp, Homo sapien
tctttgaggagactcgtaattaccc

SEQ ID NO: 3688826 - DNA, 25 bp, Homo sapien
aggagactcgtaattacccacaatg

SEQ ID NO: 3688827 - DNA, 25 bp, Homo sapien
tctgggacacgcttggcaaatcttc

SEQ ID NO: 3688828 - DNA, 25 bp, Homo sapien
agcaggcaagaggccatcacccctt

SEQ ID NO: 3688829 - DNA, 25 bp, Homo sapien
caggcccctgcatggattcattgtt

SEQ ID NO: 3688830 - DNA, 25 bp, Homo sapien
gatattctgggacacgcttggcaaa

SEQ ID NO: 3688831 - DNA, 25 bp, Homo sapien
tctctgtccagtggctgccggagcc

SEQ ID NO: 3688832 - DNA, 25 bp, Homo sapien
tccactgcaaagaagcgagaggcct

SEQ ID NO: 3688833 - DNA, 25 bp, Homo sapien
ggagccacaccacgccagtgtcagg

SEQ ID NO: 3688834 - DNA, 25 bp, Homo sapien
tgtccatgtcttgggccagcaactg

SEQ ID NO: 3688835 - DNA, 25 bp, Homo sapien
ctggtggtcgctgacagagaactcc

SEQ ID NO: 3688836 - DNA, 25 bp, Homo sapien
tgacagagaactccacggtgaactc

SEQ ID NO: 3688837 - DNA, 25 bp, Homo sapien
tggtcgctgacagagaactccacgg

SEQ ID NO: 3688838 - DNA, 25 bp, Homo sapien
actccacggtgaactctgacttggt

SEQ ID NO: 3688839 - DNA, 25 bp, Homo sapien
ccaacctggatgttcaccttccgtg

SEQ ID NO: 3688840 - DNA, 25 bp, Homo sapien
ggatgttcaccttccgtgtgatcac

SEQ ID NO: 3688841 - DNA, 25 bp, Homo sapien
tcagggatgcggacgctgtagggct

SEQ ID NO: 3688842 - DNA, 25 bp, Homo sapien
attgtgaaatgtgggcgcgttgtca

SEQ ID NO: 3688843 - DNA, 25 bp, Homo sapien
ggacttcgacaagtgaattgcaggg

SEQ ID NO: 3688844 - DNA, 25 bp, Homo sapien
ttaatgaggtctgtcgaggctggct

SEQ ID NO: 3688845 - DNA, 25 bp, Homo sapien
cactgcctcgttaggacttcgacaa

SEQ ID NO: 3688846 - DNA, 25 bp, Homo sapien
aattaagttgccaattctagcagga

SEQ ID NO: 3688847 - DNA, 25 bp, Homo sapien
gagcagggctccaggcatgtgtcac

SEQ ID NO: 3688848 - DNA, 25 bp, Homo sapien
agcagggctccaggcatgtgtcact

SEQ ID NO: 3688849 - DNA, 25 bp, Homo sapien
ctgccgcaagagagcagggctccag

SEQ ID NO: 3688850 - DNA, 25 bp, Homo sapien
agggctccaggcatgtgtcactgtg

SEQ ID NO: 3688851 - DNA, 25 bp, Homo sapien
cagcccagagcttgctgtcctggct

SEQ ID NO: 3688852 - DNA, 25 bp, Homo sapien
gcatatgtcgcttcaccactaccag

SEQ ID NO: 3688853 - DNA, 25 bp, Homo sapien
tgctgctctgcccacaagcatatgt

SEQ ID NO: 3688854 - DNA, 25 bp, Homo sapien
ctggctgccgcaggcgatggcatct

SEQ ID NO: 3688855 - DNA, 25 bp, Homo sapien
ctgaaatggagggttcgtctcagca

SEQ ID NO: 3688856 - DNA, 25 bp, Homo sapien
atggagggttcgtctcagcaatggt

SEQ ID NO: 3688857 - DNA, 25 bp, Homo sapien
aaatggagggttcgtctcagcaatg

SEQ ID NO: 3688858 - DNA, 25 bp, Homo sapien
tgaaatggagggttcgtctcagcaa

SEQ ID NO: 3688859 - DNA, 25 bp, Homo sapien
tggctccgtggaaatgtctgtaatc

SEQ ID NO: 3688860 - DNA, 25 bp, Homo sapien
gccccaatagctgctattgcatttc

SEQ ID NO: 3688861 - DNA, 25 bp, Homo sapien
catttagagctttccgccccaatag

SEQ ID NO: 3688862 - DNA, 25 bp, Homo sapien
tcgccagcacactttaggcattact

SEQ ID NO: 3688863 - DNA, 25 bp, Homo sapien
ggtttgccgctcgtttgtactgtag

SEQ ID NO: 3688864 - DNA, 25 bp, Homo sapien
aatcacgaatcattaggtttgccgc

SEQ ID NO: 3688865 - DNA, 25 bp, Homo sapien
ttttctgctgcgaggaagccttgcc

SEQ ID NO: 3688866 - DNA, 25 bp, Homo sapien
aatctgtaacagtgggacccttcaa

SEQ ID NO: 3688867 - DNA, 25 bp, Homo sapien
gatgctgctacagtctttaatatct

SEQ ID NO: 3688868 - DNA, 25 bp, Homo sapien
tatttatggaatgcttgctagatgc

SEQ ID NO: 3688869 - DNA, 25 bp, Homo sapien
tacagagcctgttataaaatgcatt

SEQ ID NO: 3688870 - DNA, 25 bp, Homo sapien
cataggtgccatctctaaaggtgtt

SEQ ID NO: 3688871 - DNA, 25 bp, Homo sapien
tcacttctgatggacctgctgtaaa

SEQ ID NO: 3688872 - DNA, 25 bp, Homo sapien
catatcacttctgatggacctgctg

SEQ ID NO: 3688873 - DNA, 25 bp, Homo sapien
tgatggacctgctgtaaatgggcca

SEQ ID NO: 3688874 - DNA, 25 bp, Homo sapien
gctccatatcacttctgatggacct

SEQ ID NO: 3688875 - DNA, 25 bp, Homo sapien
attgtggacactcgccctgggtcca

SEQ ID NO: 3688876 - DNA, 25 bp, Homo sapien
ggagcagccgtggtctttggaagaa

SEQ ID NO: 3688877 - DNA, 25 bp, Homo sapien
gagcagccgtggtctttggaagaaa

SEQ ID NO: 3688878 - DNA, 25 bp, Homo sapien
ccattgtggacactcgccctgggtc

SEQ ID NO: 3688879 - DNA, 25 bp, Homo sapien
tggactgctaatgagggcacagtgc

SEQ ID NO: 3688880 - DNA, 25 bp, Homo sapien
ccaccactcctggactgctaatgag

SEQ ID NO: 3688881 - DNA, 25 bp, Homo sapien
ccacagcaagcaaagtgccaggcca

SEQ ID NO: 3688882 - DNA, 25 bp, Homo sapien
gatgggactctacctctttagcgcc

SEQ ID NO: 3688883 - DNA, 25 bp, Homo sapien
tctctgctgattggatcctggctgc

SEQ ID NO: 3688884 - DNA, 25 bp, Homo sapien
acatctctgctgattggatcctggc

SEQ ID NO: 3688885 - DNA, 25 bp, Homo sapien
catctctgctgattggatcctggct

SEQ ID NO: 3688886 - DNA, 25 bp, Homo sapien
aacatctctgctgattggatcctgg

SEQ ID NO: 3688887 - DNA, 25 bp, Homo sapien
actccccagtgccctttgcatagaa

SEQ ID NO: 3688888 - DNA, 25 bp, Homo sapien
tggtccattcccgtctcccccttca

SEQ ID NO: 3688889 - DNA, 25 bp, Homo sapien
ccattcccgtctcccccttcacatt

SEQ ID NO: 3688890 - DNA, 25 bp, Homo sapien
tccccagtgccctttgcatagaaca

SEQ ID NO: 3688891 - DNA, 25 bp, Homo sapien
tgtgtggtctcgtagtccagctccc

SEQ ID NO: 3688892 - DNA, 25 bp, Homo sapien
actgtgacgataccgcgggcgctgt

SEQ ID NO: 3688893 - DNA, 25 bp, Homo sapien
ttcacgatgaagatgggcgtcccca

SEQ ID NO: 3688894 - DNA, 25 bp, Homo sapien
cgggcgctgtcaatggcgaagaatt

SEQ ID NO: 3688895 - DNA, 25 bp, Homo sapien
tggctccagctatgccctgaggcag

SEQ ID NO: 3688896 - DNA, 25 bp, Homo sapien
tggcgtaagctttgtcaacagaatc

SEQ ID NO: 3688897 - DNA, 25 bp, Homo sapien
agggttgagagggactcccatgttt

SEQ ID NO: 3688898 - DNA, 25 bp, Homo sapien
aacagaatctaagggacaacaggcc

SEQ ID NO: 3688899 - DNA, 25 bp, Homo sapien
gagaatgctcgtagatgttggtgct

SEQ ID NO: 3688900 - DNA, 25 bp, Homo sapien
tgctcgtagatgttggtgctgtaag

SEQ ID NO: 3688901 - DNA, 25 bp, Homo sapien
gaatgctcgtagatgttggtgctgt

SEQ ID NO: 3688902 - DNA, 25 bp, Homo sapien
tcgtagatgttggtgctgtaaggca

SEQ ID NO: 3688903 - DNA, 25 bp, Homo sapien
gctgagaaggtatcggcctggcaaa

SEQ ID NO: 3688904 - DNA, 25 bp, Homo sapien
aaggtatcggcctggcaaagttggg

SEQ ID NO: 3688905 - DNA, 25 bp, Homo sapien
gagaaggtatcggcctggcaaagtt

SEQ ID NO: 3688906 - DNA, 25 bp, Homo sapien
ctgagaaggtatcggcctggcaaag

SEQ ID NO: 3688907 - DNA, 25 bp, Homo sapien
tctatggcggtgatgatgcgcaccg

SEQ ID NO: 3688908 - DNA, 25 bp, Homo sapien
aaacgatggtgtagccaatgccccg

SEQ ID NO: 3688909 - DNA, 25 bp, Homo sapien
ctgaaacgatggtgtagccaatgcc

SEQ ID NO: 3688910 - DNA, 25 bp, Homo sapien
gggacgtcctttatcctggtctatg

SEQ ID NO: 3688911 - DNA, 25 bp, Homo sapien
cagagcctgagatgcctactggctc

SEQ ID NO: 3688912 - DNA, 25 bp, Homo sapien
gagcctgagatgcctactggctctc

SEQ ID NO: 3688913 - DNA, 25 bp, Homo sapien
tcagagcctgagatgcctactggct

SEQ ID NO: 3688914 - DNA, 25 bp, Homo sapien
cctcagagcctgagatgcctactgg

SEQ ID NO: 3688915 - DNA, 25 bp, Homo sapien
tcacaaaggcgagctcatgagagca

SEQ ID NO: 3688916 - DNA, 25 bp, Homo sapien
aggcgagctcatgagagcatcagga

SEQ ID NO: 3688917 - DNA, 25 bp, Homo sapien
caaaggcgagctcatgagagcatca

SEQ ID NO: 3688918 - DNA, 25 bp, Homo sapien
agcatcaggagaggccggctggcag

SEQ ID NO: 3688919 - DNA, 25 bp, Homo sapien
ctgtgatggaggagcgatttctcat

SEQ ID NO: 3688920 - DNA, 25 bp, Homo sapien
gacagcaccagccgctcagcaaatg

SEQ ID NO: 3688921 - DNA, 25 bp, Homo sapien
tgacagcaccagccgctcagcaaat

SEQ ID NO: 3688922 - DNA, 25 bp, Homo sapien
aaaaggtgccttcaacaatagctgc

SEQ ID NO: 3688923 - DNA, 25 bp, Homo sapien
tctgctcagcgctcacagaacaggc

SEQ ID NO: 3688924 - DNA, 25 bp, Homo sapien
tcaacaatagctgcaatgttccctt

SEQ ID NO: 3688925 - DNA, 25 bp, Homo sapien
ttctgctcagcgctcacagaacagg

SEQ ID NO: 3688926 - DNA, 25 bp, Homo sapien
cagctggctgaaccagcccgaatga

SEQ ID NO: 3688927 - DNA, 25 bp, Homo sapien
gaatcaaattgtgctccgtcaggac

SEQ ID NO: 3688928 - DNA, 25 bp, Homo sapien
gcagcccagaaatagatgtggtcgg

SEQ ID NO: 3688929 - DNA, 25 bp, Homo sapien
cagcccgaatgaccgaccttgaggg

SEQ ID NO: 3688930 - DNA, 25 bp, Homo sapien
tttcatctgttcagccccacttctg

SEQ ID NO: 3688931 - DNA, 25 bp, Homo sapien
cgtgtcggccttctggtctcccaga

SEQ ID NO: 3688932 - DNA, 25 bp, Homo sapien
tgtcggccttctggtctcccagaca

SEQ ID NO: 3688933 - DNA, 25 bp, Homo sapien
tgctctcctggaaactgatacctcc

SEQ ID NO: 3688934 - DNA, 25 bp, Homo sapien
ggaaactgatacctccgtgtcggcc

SEQ ID NO: 3688935 - DNA, 25 bp, Homo sapien
cccctccacaggcgctgtgggcttg

SEQ ID NO: 3688936 - DNA, 25 bp, Homo sapien
acgtcctcccctccacaggcgctgt

SEQ ID NO: 3688937 - DNA, 25 bp, Homo sapien
ctccacaggcgctgtgggcttggca

SEQ ID NO: 3688938 - DNA, 25 bp, Homo sapien
gtcctcccctccacaggcgctgtgg

SEQ ID NO: 3688939 - DNA, 25 bp, Homo sapien
aagcacgagtgattaactccccaga

SEQ ID NO: 3688940 - DNA, 25 bp, Homo sapien
agaccaacagccagaaagagctata

SEQ ID NO: 3688941 - DNA, 25 bp, Homo sapien
gaccaacagccagaaagagctatac

SEQ ID NO: 3688942 - DNA, 25 bp, Homo sapien
ctcctgccaagcacgagtgattaac

SEQ ID NO: 3688943 - DNA, 25 bp, Homo sapien
catggctgtacagggggttctcccg

SEQ ID NO: 3688944 - DNA, 25 bp, Homo sapien
cacagtcaggatgaagccatggctg

SEQ ID NO: 3688945 - DNA, 25 bp, Homo sapien
ctccgctgatgtagtccagggcaaa

SEQ ID NO: 3688946 - DNA, 25 bp, Homo sapien
gccattcaaggtcagcactccgctg

SEQ ID NO: 3688947 - DNA, 25 bp, Homo sapien
cgggtgcgggactgtagctctgcct

SEQ ID NO: 3688948 - DNA, 25 bp, Homo sapien
gctgcagcgggtgcgggactgtagc

SEQ ID NO: 3688949 - DNA, 25 bp, Homo sapien
cagcgggtgcgggactgtagctctg

SEQ ID NO: 3688950 - DNA, 25 bp, Homo sapien
tgcagcgggtgcgggactgtagctc

SEQ ID NO: 3688951 - DNA, 25 bp, Homo sapien
tattgaaggtcgtggtgactgtagc

SEQ ID NO: 3688952 - DNA, 25 bp, Homo sapien
tcagtgatggccacgctgtactcgg

SEQ ID NO: 3688953 - DNA, 25 bp, Homo sapien
ggtgcggtcatcgttcagctccgtg

SEQ ID NO: 3688954 - DNA, 25 bp, Homo sapien
aagggcaaagccgacctgtgccagc

SEQ ID NO: 3688955 - DNA, 25 bp, Homo sapien
gaatacacaaatacaaggcaggctg

SEQ ID NO: 3688956 - DNA, 25 bp, Homo sapien
tcttaaagactgactggcccaactc

SEQ ID NO: 3688957 - DNA, 25 bp, Homo sapien
tttgccggaaccgagtccgtggagc

SEQ ID NO: 3688958 - DNA, 25 bp, Homo sapien
cctgaatgcggaagaagaactgggc

SEQ ID NO: 3688959 - DNA, 25 bp, Homo sapien
cccttgctgcgaggtcagagtcacc

SEQ ID NO: 3688960 - DNA, 25 bp, Homo sapien
tgtgtggatgctcaacccttgctgc

SEQ ID NO: 3688961 - DNA, 25 bp, Homo sapien
cagagtcaccagagaaccttttcaa

SEQ ID NO: 3688962 - DNA, 25 bp, Homo sapien
caaaataagaacatccaggatgggc

SEQ ID NO: 3688963 - DNA, 25 bp, Homo sapien
cactccctccggtcggccctgaagc

SEQ ID NO: 3688964 - DNA, 25 bp, Homo sapien
ccactccctccggtcggccctgaag

SEQ ID NO: 3688965 - DNA, 25 bp, Homo sapien
ccctccggtcggccctgaagccagc

SEQ ID NO: 3688966 - DNA, 25 bp, Homo sapien
ctccctccggtcggccctgaagcca

SEQ ID NO: 3688967 - DNA, 25 bp, Homo sapien
ccatcattttcaccgcggatgtgtg

SEQ ID NO: 3688968 - DNA, 25 bp, Homo sapien
ttttcaccgcggatgtgtgtattat

SEQ ID NO: 3688969 - DNA, 25 bp, Homo sapien
gcaccatcattttcaccgcggatgt

SEQ ID NO: 3688970 - DNA, 25 bp, Homo sapien
attttcaccgcggatgtgtgtatta

SEQ ID NO: 3688971 - DNA, 25 bp, Homo sapien
aagggtaatttgctggtgaattcca

SEQ ID NO: 3688972 - DNA, 25 bp, Homo sapien
aattcaatccgattggcagctggca

SEQ ID NO: 3688973 - DNA, 25 bp, Homo sapien
tgcctcgccttcagcttatctctgc

SEQ ID NO: 3688974 - DNA, 25 bp, Homo sapien
ctgcacagacgggatcaatccgagg

SEQ ID NO: 3688975 - DNA, 25 bp, Homo sapien
tgagcttacatgttgggccctcaac

SEQ ID NO: 3688976 - DNA, 25 bp, Homo sapien
tccgtgtgctgacccagcgtggttg

SEQ ID NO: 3688977 - DNA, 25 bp, Homo sapien
ggccctcaacagacatcagctcgtt

SEQ ID NO: 3688978 - DNA, 25 bp, Homo sapien
tgagtctgtcccagcagacccggct

SEQ ID NO: 3688979 - DNA, 25 bp, Homo sapien
gactgggcccagtactgttttaaca

SEQ ID NO: 3688980 - DNA, 25 bp, Homo sapien
caatcgtgtgcaggctgaggtcaac

SEQ ID NO: 3688981 - DNA, 25 bp, Homo sapien
tgaagcccggctatgacacaggcgt

SEQ ID NO: 3688982 - DNA, 25 bp, Homo sapien
taagttggtgcaaaacccctactga

SEQ ID NO: 3688983 - DNA, 25 bp, Homo sapien
cagaacaaactgagatgtaccatct

SEQ ID NO: 3688984 - DNA, 25 bp, Homo sapien
aacaaactgagatgtaccatctgag

SEQ ID NO: 3688985 - DNA, 25 bp, Homo sapien
aactgagatgtaccatctgagcgct

SEQ ID NO: 3688986 - DNA, 25 bp, Homo sapien
gatgtaccatctgagcgctccaggg

SEQ ID NO: 3688987 - DNA, 25 bp, Homo sapien
cccctggacggaggtcggggagatg

SEQ ID NO: 3688988 - DNA, 25 bp, Homo sapien
tgggagttgttccccaccaagtaca

SEQ ID NO: 3688989 - DNA, 25 bp, Homo sapien
gagatgatgaagtggtgggagttgt

SEQ ID NO: 3688990 - DNA, 25 bp, Homo sapien
accaagtacacctcaaacatgctgt

SEQ ID NO: 3688991 - DNA, 25 bp, Homo sapien
aaagtcgtagcggtccacggtctcg

SEQ ID NO: 3688992 - DNA, 25 bp, Homo sapien
gtctcgtagtccagtgggatggcca

SEQ ID NO: 3688993 - DNA, 25 bp, Homo sapien
ggatggccacccgaatacgaatgtc

SEQ ID NO: 3688994 - DNA, 25 bp, Homo sapien
tagcggtccacggtctcgtagtcca

SEQ ID NO: 3688995 - DNA, 25 bp, Homo sapien
gacgttctcgtacaggctgatgttg

SEQ ID NO: 3688996 - DNA, 25 bp, Homo sapien
gatgagagtgatcttcaccttggca

SEQ ID NO: 3688997 - DNA, 25 bp, Homo sapien
acagaggtccccacggtgacgttct

SEQ ID NO: 3688998 - DNA, 25 bp, Homo sapien
gaagatgggccggttgtcattttca

SEQ ID NO: 3688999 - DNA, 25 bp, Homo sapien
cagtggccctgcagtgaagcgggga

SEQ ID NO: 3689000 - DNA, 25 bp, Homo sapien
accacagtcggccctggagagctca

SEQ ID NO: 3689001 - DNA, 25 bp, Homo sapien
gggtgcctcaccacagtcggccctg

SEQ ID NO: 3689002 - DNA, 25 bp, Homo sapien
gctgaggtcccttggacaaaatccc

SEQ ID NO: 3689003 - DNA, 25 bp, Homo sapien
aaatgacactgggagggccccttgt

SEQ ID NO: 3689004 - DNA, 25 bp, Homo sapien
tcaaagggcaagtccagccatgggc

SEQ ID NO: 3689005 - DNA, 25 bp, Homo sapien
tattgcaacctaggtcaagggagcc

SEQ ID NO: 3689006 - DNA, 25 bp, Homo sapien
cgagcccggcctgaaatcacttata

SEQ ID NO: 3689007 - DNA, 25 bp, Homo sapien
cccggcataccagaatcacaattgg

SEQ ID NO: 3689008 - DNA, 25 bp, Homo sapien
ccaactgggccgatgagaatctgct

SEQ ID NO: 3689009 - DNA, 25 bp, Homo sapien
tctcagacggtgtaattcaggcggg

SEQ ID NO: 3689010 - DNA, 25 bp, Homo sapien
gtgtagcacacatctaccacttgga

SEQ ID NO: 3689011 - DNA, 25 bp, Homo sapien
cctcaagcgcctggtgatttattgc

SEQ ID NO: 3689012 - DNA, 25 bp, Homo sapien
tgcagggagcaccttggtgaaagct

SEQ ID NO: 3689013 - DNA, 25 bp, Homo sapien
atttattgcagggagcaccttggtg

SEQ ID NO: 3689014 - DNA, 25 bp, Homo sapien
ggcctcaagcgcctggtgatttatt

SEQ ID NO: 3689015 - DNA, 25 bp, Homo sapien
tgagcaggcagccataatttcagcc

SEQ ID NO: 3689016 - DNA, 25 bp, Homo sapien
aaggaattttacagtccctgagcag

SEQ ID NO: 3689017 - DNA, 25 bp, Homo sapien
acatcccagaaaaggtcacggagaa

SEQ ID NO: 3689018 - DNA, 25 bp, Homo sapien
tcagccccttttgtggcagaggagg

SEQ ID NO: 3689019 - DNA, 25 bp, Homo sapien
aagcctgtcttgtctgaagtccatc

SEQ ID NO: 3689020 - DNA, 25 bp, Homo sapien
tcttgtctgaagtccatcttctgcc

SEQ ID NO: 3689021 - DNA, 25 bp, Homo sapien
cccagtcaggacttttcagggcctc

SEQ ID NO: 3689022 - DNA, 25 bp, Homo sapien
ttcttggcttcctccgactggggaa

SEQ ID NO: 3689023 - DNA, 25 bp, Homo sapien
taaagacgccgtggcaagaaaatgc

SEQ ID NO: 3689024 - DNA, 25 bp, Homo sapien
ttgatggtctccaataggaaggagg

SEQ ID NO: 3689025 - DNA, 25 bp, Homo sapien
caggtgagtagcaagtaaagacgcc

SEQ ID NO: 3689026 - DNA, 25 bp, Homo sapien
ctttttaaggcggtgctgccaagga

SEQ ID NO: 3689027 - DNA, 25 bp, Homo sapien
gactcgtatgccctgattaggacta

SEQ ID NO: 3689028 - DNA, 25 bp, Homo sapien
tcagcgttgaccttggactcgtatg

SEQ ID NO: 3689029 - DNA, 25 bp, Homo sapien
ggcagggcagatttcagcgttgacc

SEQ ID NO: 3689030 - DNA, 25 bp, Homo sapien
cctgattaggactaggaggcccagg

SEQ ID NO: 3689031 - DNA, 25 bp, Homo sapien
gatggagacgcatgcaccttgctgg

SEQ ID NO: 3689032 - DNA, 25 bp, Homo sapien
gcggagatggagacgcatgcacctt

SEQ ID NO: 3689033 - DNA, 25 bp, Homo sapien
tcagtcaggcggagatggagacgca

SEQ ID NO: 3689034 - DNA, 25 bp, Homo sapien
gagatggagacgcatgcaccttgct

SEQ ID NO: 3689035 - DNA, 25 bp, Homo sapien
ggaacaatcagcagcgaacctactg

SEQ ID NO: 3689036 - DNA, 25 bp, Homo sapien
tcagcagcgaacctactgaagggtg

SEQ ID NO: 3689037 - DNA, 25 bp, Homo sapien
caatcagcagcgaacctactgaagg

SEQ ID NO: 3689038 - DNA, 25 bp, Homo sapien
cagcgaacctactgaagggtgactt

SEQ ID NO: 3689039 - DNA, 25 bp, Homo sapien
gggtccattgtcttcgctctggtgt

SEQ ID NO: 3689040 - DNA, 25 bp, Homo sapien
tacaaactcattctggcgctggcca

SEQ ID NO: 3689041 - DNA, 25 bp, Homo sapien
aggcatttggtctgcagcatttaca

SEQ ID NO: 3689042 - DNA, 25 bp, Homo sapien
cattctggcgctggccacttgtaca

SEQ ID NO: 3689043 - DNA, 25 bp, Homo sapien
gagaaaatacgaaagccggcattgg

SEQ ID NO: 3689044 - DNA, 25 bp, Homo sapien
taatgggttgaatggtgacctccca

SEQ ID NO: 3689045 - DNA, 25 bp, Homo sapien
gagtccagggaccatgagtcagtca

SEQ ID NO: 3689046 - DNA, 25 bp, Homo sapien
tatagatccatgtcccaacctctgg

SEQ ID NO: 3689047 - DNA, 25 bp, Homo sapien
tagtgttctcgtatctacctcttcc

SEQ ID NO: 3689048 - DNA, 25 bp, Homo sapien
ttgggcttagtgttctcgtatctac

SEQ ID NO: 3689049 - DNA, 25 bp, Homo sapien
cctggtacaccccagactgttctct

SEQ ID NO: 3689050 - DNA, 25 bp, Homo sapien
tcttccctggtacaccccagactgt

SEQ ID NO: 3689051 - DNA, 25 bp, Homo sapien
tgaggcctggtgaaagcctgctgcc

SEQ ID NO: 3689052 - DNA, 25 bp, Homo sapien
ttcaggtccacaggaaacccatgtt

SEQ ID NO: 3689053 - DNA, 25 bp, Homo sapien
tgttcctctcgcacgtctcctttgg

SEQ ID NO: 3689054 - DNA, 25 bp, Homo sapien
gggtgaattttctgaggcccagacc

SEQ ID NO: 3689055 - DNA, 25 bp, Homo sapien
gtcagggtcatcactgaagaagtag

SEQ ID NO: 3689056 - DNA, 25 bp, Homo sapien
tcagggtcatcactgaagaagtagc

SEQ ID NO: 3689057 - DNA, 25 bp, Homo sapien
tgtcagggtcatcactgaagaagta

SEQ ID NO: 3689058 - DNA, 25 bp, Homo sapien
gtccagcctggcaatcagcatgatg

SEQ ID NO: 3689059 - DNA, 25 bp, Homo sapien
tgtgacagaaggctcgttctcccgc

SEQ ID NO: 3689060 - DNA, 25 bp, Homo sapien
gcaatgatcgtcagggtgaagcgct

SEQ ID NO: 3689061 - DNA, 25 bp, Homo sapien
tgatgagtcccgtgtccttgtccag

SEQ ID NO: 3689062 - DNA, 25 bp, Homo sapien
tacaggctgatgtcgaagtagctgc

SEQ ID NO: 3689063 - DNA, 25 bp, Homo sapien
tctggttgttgggaggggagtcttc

SEQ ID NO: 3689064 - DNA, 25 bp, Homo sapien
gacaatgctgtaggtgatctggttg

SEQ ID NO: 3689065 - DNA, 25 bp, Homo sapien
ctcgtacaggctgatgtcgaagtag

SEQ ID NO: 3689066 - DNA, 25 bp, Homo sapien
tctgtaagcagacttgagatgcccg

SEQ ID NO: 3689067 - DNA, 25 bp, Homo sapien
taagcagacttgagatgcccgtcca

SEQ ID NO: 3689068 - DNA, 25 bp, Homo sapien
cctctgtaagcagacttgagatgcc

SEQ ID NO: 3689069 - DNA, 25 bp, Homo sapien
cagacttgagatgcccgtccagaca

SEQ ID NO: 3689070 - DNA, 25 bp, Homo sapien
agcatccatggccatgaccgtcaga

SEQ ID NO: 3689071 - DNA, 25 bp, Homo sapien
tgttcataatccagggggcgactga

SEQ ID NO: 3689072 - DNA, 25 bp, Homo sapien
aaacacctcgatggtgacagggacg

SEQ ID NO: 3689073 - DNA, 25 bp, Homo sapien
aatcagcccattggatatctgttca

SEQ ID NO: 3689074 - DNA, 25 bp, Homo sapien
agatacccagcagtctcaggattcc

SEQ ID NO: 3689075 - DNA, 25 bp, Homo sapien
ctcaggattcccctgatgtccaatg

SEQ ID NO: 3689076 - DNA, 25 bp, Homo sapien
ctgatgtccaatgccccagctgcgt

SEQ ID NO: 3689077 - DNA, 25 bp, Homo sapien
cagatacccagcagtctcaggattc

SEQ ID NO: 3689078 - DNA, 25 bp, Homo sapien
taggcgggcttgctgaaggtgggag

SEQ ID NO: 3689079 - DNA, 25 bp, Homo sapien
tgatgttctccaccacggagacgaa

SEQ ID NO: 3689080 - DNA, 25 bp, Homo sapien
tgttctccaccacggagacgaagta

SEQ ID NO: 3689081 - DNA, 25 bp, Homo sapien
tccaccacggagacgaagtaggcgg

SEQ ID NO: 3689082 - DNA, 25 bp, Homo sapien
tggccgtactcccgggagcggtcca

SEQ ID NO: 3689083 - DNA, 25 bp, Homo sapien
atccgaaactgggtggagccttcca

SEQ ID NO: 3689084 - DNA, 25 bp, Homo sapien
gcattgatccgaaactgggtggagc

SEQ ID NO: 3689085 - DNA, 25 bp, Homo sapien
gagtagatgatggactcctggccgt

SEQ ID NO: 3689086 - DNA, 25 bp, Homo sapien
ggtggcgatgccagttttctggttg

SEQ ID NO: 3689087 - DNA, 25 bp, Homo sapien
tctctcggtcaagcagagacgtggt

SEQ ID NO: 3689088 - DNA, 25 bp, Homo sapien
ctgcgcgaacgatgaggatgtattc

SEQ ID NO: 3689089 - DNA, 25 bp, Homo sapien
cgtccactgcgcgaacgatgaggat

SEQ ID NO: 3689090 - DNA, 25 bp, Homo sapien
cagagcctgggctttcgagggcagg

SEQ ID NO: 3689091 - DNA, 25 bp, Homo sapien
gcagagcctgggctttcgagggcag

SEQ ID NO: 3689092 - DNA, 25 bp, Homo sapien
agagcctgggctttcgagggcagga

SEQ ID NO: 3689093 - DNA, 25 bp, Homo sapien
ggcagagcctgggctttcgagggca

SEQ ID NO: 3689094 - DNA, 25 bp, Homo sapien
gcaatcttcgcattaattctgccag

SEQ ID NO: 3689095 - DNA, 25 bp, Homo sapien
caatcttcgcattaattctgccagc

SEQ ID NO: 3689096 - DNA, 25 bp, Homo sapien
ggcaatcttcgcattaattctgcca

SEQ ID NO: 3689097 - DNA, 25 bp, Homo sapien
ttgatgtccaggagggtgatgttta

SEQ ID NO: 3689098 - DNA, 25 bp, Homo sapien
tagtagggtgcgtccttccacgtgg

SEQ ID NO: 3689099 - DNA, 25 bp, Homo sapien
gttgatgtagtagggtgcgtccttc

SEQ ID NO: 3689100 - DNA, 25 bp, Homo sapien
cttccacgtggggtggttgtcattg

SEQ ID NO: 3689101 - DNA, 25 bp, Homo sapien
tgcccctcaatcccctttgggagga

SEQ ID NO: 3689102 - DNA, 25 bp, Homo sapien
ctgcccctcaatcccctttgggagg

SEQ ID NO: 3689103 - DNA, 25 bp, Homo sapien
tccattgtccatgcctgctcatggc

SEQ ID NO: 3689104 - DNA, 25 bp, Homo sapien
ccattgtccatgcctgctcatggct

SEQ ID NO: 3689105 - DNA, 25 bp, Homo sapien
gcaggtccttggtccattgtccatg

SEQ ID NO: 3689106 - DNA, 25 bp, Homo sapien
agcaggtccttggtccattgtccat

SEQ ID NO: 3689107 - DNA, 25 bp, Homo sapien
cattccctgatagctcgtggatttc

SEQ ID NO: 3689108 - DNA, 25 bp, Homo sapien
ctcagcctgacaagcgtggggcctg

SEQ ID NO: 3689109 - DNA, 25 bp, Homo sapien
taggcattccctgatagctcgtgga

SEQ ID NO: 3689110 - DNA, 25 bp, Homo sapien
tgcagtaggcattccctgatagctc

SEQ ID NO: 3689111 - DNA, 25 bp, Homo sapien
caccagaccagaacagacagatgag

SEQ ID NO: 3689112 - DNA, 25 bp, Homo sapien
accagaccagaacagacagatgagc

SEQ ID NO: 3689113 - DNA, 25 bp, Homo sapien
gccaccagaccagaacagacagatg

SEQ ID NO: 3689114 - DNA, 25 bp, Homo sapien
ccagaccagaacagacagatgagct

SEQ ID NO: 3689115 - DNA, 25 bp, Homo sapien
tctcccggtccagcatggcgtgggt

SEQ ID NO: 3689116 - DNA, 25 bp, Homo sapien
gctgttgaggctgtagaacttgttg

SEQ ID NO: 3689117 - DNA, 25 bp, Homo sapien
gatcttgcccgtggtgctgttgagg

SEQ ID NO: 3689118 - DNA, 25 bp, Homo sapien
gacgattttgcgcatcagctcggcc

SEQ ID NO: 3689119 - DNA, 25 bp, Homo sapien
gggatgccttcaagcacctcggcca

SEQ ID NO: 3689120 - DNA, 25 bp, Homo sapien
tcattgagatccaagaggttcacaa

SEQ ID NO: 3689121 - DNA, 25 bp, Homo sapien
tgtcattgagatccaagaggttcac

SEQ ID NO: 3689122 - DNA, 25 bp, Homo sapien
caaaaggcaggttctgaaaggtggg

SEQ ID NO: 3689123 - DNA, 25 bp, Homo sapien
atgcggtaggacaccaggccgttca

SEQ ID NO: 3689124 - DNA, 25 bp, Homo sapien
tcttggtgggcgtgcctgcatcact

SEQ ID NO: 3689125 - DNA, 25 bp, Homo sapien
cgcagctggtactccgcgatgcgct

SEQ ID NO: 3689126 - DNA, 25 bp, Homo sapien
cgttcaggccctcatcgaggtcgat

SEQ ID NO: 3689127 - DNA, 25 bp, Homo sapien
gcattgaggcccacgtcgttgtccg

SEQ ID NO: 3689128 - DNA, 25 bp, Homo sapien
aagaaggtgggcgtctcgtcgttca

SEQ ID NO: 3689129 - DNA, 25 bp, Homo sapien
tcgttgtccgtgcagttcagccaga

SEQ ID NO: 3689130 - DNA, 25 bp, Homo sapien
acagacacattgtacacggccggga

SEQ ID NO: 3689131 - DNA, 25 bp, Homo sapien
gcctgcacaggtgggcggaggccgg

SEQ ID NO: 3689132 - DNA, 25 bp, Homo sapien
cctgcacaggtgggcggaggccggg

SEQ ID NO: 3689133 - DNA, 25 bp, Homo sapien
ctagtctggctgtccatctgggagg

SEQ ID NO: 3689134 - DNA, 25 bp, Homo sapien
ctgcacaggtgggcggaggccgggg

SEQ ID NO: 3689135 - DNA, 25 bp, Homo sapien
taaagcccaacagtagagccctgac

SEQ ID NO: 3689136 - DNA, 25 bp, Homo sapien
gcctctaaacaggtgggaattctca

SEQ ID NO: 3689137 - DNA, 25 bp, Homo sapien
tagaatgaaccttggtagatgctcc

SEQ ID NO: 3689138 - DNA, 25 bp, Homo sapien
ggagcaaatcctcgggaggcaccac

SEQ ID NO: 3689139 - DNA, 25 bp, Homo sapien
tccaggatgagcatgtaggcggctg

SEQ ID NO: 3689140 - DNA, 25 bp, Homo sapien
acggttctcacaacggcatcgcggt

SEQ ID NO: 3689141 - DNA, 25 bp, Homo sapien
gcatcgcggtaacccacgctgaact

SEQ ID NO: 3689142 - DNA, 25 bp, Homo sapien
cggtccaggcccaccacggttctca

SEQ ID NO: 3689143 - DNA, 25 bp, Homo sapien
ggaagacaggtgttagcagctgcct

SEQ ID NO: 3689144 - DNA, 25 bp, Homo sapien
aaggaagacaggtgttagcagctgc

SEQ ID NO: 3689145 - DNA, 25 bp, Homo sapien
tgtcgcttccctacagggccgttgt

SEQ ID NO: 3689146 - DNA, 25 bp, Homo sapien
gctgtgcccgtgtgtcgcttcccta

SEQ ID NO: 3689147 - DNA, 25 bp, Homo sapien
catccaggacagtgacgaacacggt

SEQ ID NO: 3689148 - DNA, 25 bp, Homo sapien
cagaaagatgggccggttgtcattc

SEQ ID NO: 3689149 - DNA, 25 bp, Homo sapien
ggccgtgtgtggctccgcctccccc

SEQ ID NO: 3689150 - DNA, 25 bp, Homo sapien
tcagggccgtgtgtggctccgcctc

SEQ ID NO: 3689151 - DNA, 25 bp, Homo sapien
ccgtgtgtggctccgcctcccccag

SEQ ID NO: 3689152 - DNA, 25 bp, Homo sapien
agggccgtgtgtggctccgcctccc

SEQ ID NO: 3689153 - DNA, 25 bp, Homo sapien
gtggggagccagagccctatcctca

SEQ ID NO: 3689154 - DNA, 25 bp, Homo sapien
ggagccagagccctatcctcagctc

SEQ ID NO: 3689155 - DNA, 25 bp, Homo sapien
tttgtggggagccagagccctatcc

SEQ ID NO: 3689156 - DNA, 25 bp, Homo sapien
ctgtttgtggggagccagagcccta

SEQ ID NO: 3689157 - DNA, 25 bp, Homo sapien
tgtgcctgtttacttcccaagaggg

SEQ ID NO: 3689158 - DNA, 25 bp, Homo sapien
tctcaattgggtttcaggcaccagg

SEQ ID NO: 3689159 - DNA, 25 bp, Homo sapien
cctctgagccttggagctgttgcgc

SEQ ID NO: 3689160 - DNA, 25 bp, Homo sapien
ctttccgggaaattgtgacgtctct

SEQ ID NO: 3689161 - DNA, 25 bp, Homo sapien
cctgctggccactaggcactgtctt

SEQ ID NO: 3689162 - DNA, 25 bp, Homo sapien
ggccctgctggccactaggcactgt

SEQ ID NO: 3689163 - DNA, 25 bp, Homo sapien
agcaggccctgctggccactaggca

SEQ ID NO: 3689164 - DNA, 25 bp, Homo sapien
tgctggccactaggcactgtcttcc

SEQ ID NO: 3689165 - DNA, 25 bp, Homo sapien
cctccctgcaaatcctaggctggat

SEQ ID NO: 3689166 - DNA, 25 bp, Homo sapien
gatttcagtaagagtagtattgtgt

SEQ ID NO: 3689167 - DNA, 25 bp, Homo sapien
gtattgtgtaaatagaaaccaagtc

SEQ ID NO: 3689168 - DNA, 25 bp, Homo sapien
tatattaactcgctggctctaggat

SEQ ID NO: 3689169 - DNA, 25 bp, Homo sapien
aagtcatcctgagacgctgcatttc

SEQ ID NO: 3689170 - DNA, 25 bp, Homo sapien
agtcatcctgagacgctgcatttct

SEQ ID NO: 3689171 - DNA, 25 bp, Homo sapien
tagccaaagctcctcagcgcagtgt

SEQ ID NO: 3689172 - DNA, 25 bp, Homo sapien
gaacattctcttggcagcatgggtc

SEQ ID NO: 3689173 - DNA, 25 bp, Homo sapien
tctgtgtacagagtgaagcgtggcc

SEQ ID NO: 3689174 - DNA, 25 bp, Homo sapien
gagtgctttgctgatgacccgtcaa

SEQ ID NO: 3689175 - DNA, 25 bp, Homo sapien
tcttggcagccgtcttggtggcccc

SEQ ID NO: 3689176 - DNA, 25 bp, Homo sapien
gaagttgccaaatggcaaaggttcc

SEQ ID NO: 3689177 - DNA, 25 bp, Homo sapien
ttgaagatgatcgaggaggctccct

SEQ ID NO: 3689178 - DNA, 25 bp, Homo sapien
cccacgttgggatcaatcaggaagg

SEQ ID NO: 3689179 - DNA, 25 bp, Homo sapien
tctggtcaagagatgtgcactcgtg

SEQ ID NO: 3689180 - DNA, 25 bp, Homo sapien
gagatgtgcactcgtggtcatctgg

SEQ ID NO: 3689181 - DNA, 25 bp, Homo sapien
cagaccccctcgctgctgcttgatg

SEQ ID NO: 3689182 - DNA, 25 bp, Homo sapien
gtcaagagatgtgcactcgtggtca

SEQ ID NO: 3689183 - DNA, 25 bp, Homo sapien
ccaggccagcgccctttcccaaaga

SEQ ID NO: 3689184 - DNA, 25 bp, Homo sapien
tcaccccccgaagctccttgcatgc

SEQ ID NO: 3689185 - DNA, 25 bp, Homo sapien
actcaccccccgaagctccttgcat

SEQ ID NO: 3689186 - DNA, 25 bp, Homo sapien
ggccagcgccctttcccaaagatga

SEQ ID NO: 3689187 - DNA, 25 bp, Homo sapien
ccgcagccactgtgactacatggaa

SEQ ID NO: 3689188 - DNA, 25 bp, Homo sapien
tcctgcttcagagaccggtgctgca

SEQ ID NO: 3689189 - DNA, 25 bp, Homo sapien
ttcatgacgctctgcaagccggccg

SEQ ID NO: 3689190 - DNA, 25 bp, Homo sapien
ggtctacctgtagatcctcctgctt

SEQ ID NO: 3689191 - DNA, 25 bp, Homo sapien
cacctgtcgtgggagcaagttggac

SEQ ID NO: 3689192 - DNA, 25 bp, Homo sapien
gtccagtttaacagtgccttgcccc

SEQ ID NO: 3689193 - DNA, 25 bp, Homo sapien
tgctgtcttaacctgtgatgtggcc

SEQ ID NO: 3689194 - DNA, 25 bp, Homo sapien
ttgatttgaaaatgcggacaggcca

SEQ ID NO: 3689195 - DNA, 25 bp, Homo sapien
gaaactgacagagctgaccacactg

SEQ ID NO: 3689196 - DNA, 25 bp, Homo sapien
cagcctggttttccatcgacaagga

SEQ ID NO: 3689197 - DNA, 25 bp, Homo sapien
ggtcatgtgttatctgctggccagg

SEQ ID NO: 3689198 - DNA, 25 bp, Homo sapien
tgctgcactgcgtctaatgggatga

SEQ ID NO: 3689199 - DNA, 25 bp, Homo sapien
agctccggacggctggggtctggct

SEQ ID NO: 3689200 - DNA, 25 bp, Homo sapien
agctgagaagacctctccacggagc

SEQ ID NO: 3689201 - DNA, 25 bp, Homo sapien
tgagaagacctctccacggagctcc

SEQ ID NO: 3689202 - DNA, 25 bp, Homo sapien
gaagacctctccacggagctccgga

SEQ ID NO: 3689203 - DNA, 25 bp, Homo sapien
ctccccagagtcttccacccctgag

SEQ ID NO: 3689204 - DNA, 25 bp, Homo sapien
ccagagtcttccacccctgagaggg

SEQ ID NO: 3689205 - DNA, 25 bp, Homo sapien
gggccgcagaggcagtaaaaccctc

SEQ ID NO: 3689206 - DNA, 25 bp, Homo sapien
cctgagagggctccaaggagacagg

SEQ ID NO: 3689207 - DNA, 25 bp, Homo sapien
gccgccgaccataccattcaaactt

SEQ ID NO: 3689208 - DNA, 25 bp, Homo sapien
taccattcaaacttccgacagggga

SEQ ID NO: 3689209 - DNA, 25 bp, Homo sapien
ctggctgccgccgaccataccattc

SEQ ID NO: 3689210 - DNA, 25 bp, Homo sapien
gctgccgccgaccataccattcaaa

SEQ ID NO: 3689211 - DNA, 25 bp, Homo sapien
ggctggcaggcactgaatagcgaac

SEQ ID NO: 3689212 - DNA, 25 bp, Homo sapien
ctggtggctggcaggcactgaatag

SEQ ID NO: 3689213 - DNA, 25 bp, Homo sapien
tggtggctggcaggcactgaatagc

SEQ ID NO: 3689214 - DNA, 25 bp, Homo sapien
gtggctggcaggcactgaatagcga

SEQ ID NO: 3689215 - DNA, 25 bp, Homo sapien
ctcgcttctgtagccagacaccttc

SEQ ID NO: 3689216 - DNA, 25 bp, Homo sapien
tcgcttctgtagccagacaccttca

SEQ ID NO: 3689217 - DNA, 25 bp, Homo sapien
cctcgcttctgtagccagacacctt

SEQ ID NO: 3689218 - DNA, 25 bp, Homo sapien
ccctcgcttctgtagccagacacct

SEQ ID NO: 3689219 - DNA, 25 bp, Homo sapien
aactcgccctcatctgcgtccgtgg

SEQ ID NO: 3689220 - DNA, 25 bp, Homo sapien
atggaggatgcggtaccacacacgc

SEQ ID NO: 3689221 - DNA, 25 bp, Homo sapien
ggatgcggtaccacacacgcccaaa

SEQ ID NO: 3689222 - DNA, 25 bp, Homo sapien
acacgcccaaactcgccctcatctg

SEQ ID NO: 3689223 - DNA, 25 bp, Homo sapien
ggcctgcagctctttcctgaaagcc

SEQ ID NO: 3689224 - DNA, 25 bp, Homo sapien
aatgcgtttcacctgctccgggaag

SEQ ID NO: 3689225 - DNA, 25 bp, Homo sapien
ggcaaggcagacaggccatccccaa

SEQ ID NO: 3689226 - DNA, 25 bp, Homo sapien
cagacaggccatccccaatgcgttt

SEQ ID NO: 3689227 - DNA, 25 bp, Homo sapien
gcccattgctgacatggatccggaa

SEQ ID NO: 3689228 - DNA, 25 bp, Homo sapien
gatgagttccgctcccggtccaggg

SEQ ID NO: 3689229 - DNA, 25 bp, Homo sapien
taggcctccactatcagcacgtggg

SEQ ID NO: 3689230 - DNA, 25 bp, Homo sapien
cccaggtcgtggttgtaggcctcca

SEQ ID NO: 3689231 - DNA, 25 bp, Homo sapien
tgcggtctctcgaagccccagacgg

SEQ ID NO: 3689232 - DNA, 25 bp, Homo sapien
gggcctcatcgttgatgtcctccac

SEQ ID NO: 3689233 - DNA, 25 bp, Homo sapien
tgatgtcctccacgtacacaatcac

SEQ ID NO: 3689234 - DNA, 25 bp, Homo sapien
gaccacgatgactgacgttccaatg

SEQ ID NO: 3689235 - DNA, 25 bp, Homo sapien
taattcacggtgatgataagccctg

SEQ ID NO: 3689236 - DNA, 25 bp, Homo sapien
tctgcgcccgacaggatgcggtagt

SEQ ID NO: 3689237 - DNA, 25 bp, Homo sapien
tgatgtagacgctgcagaagccctg

SEQ ID NO: 3689238 - DNA, 25 bp, Homo sapien
tctatcttgaagagggctttggcct

SEQ ID NO: 3689239 - DNA, 25 bp, Homo sapien
ttagattggaagaaatggtgctccc

SEQ ID NO: 3689240 - DNA, 25 bp, Homo sapien
gattggaagaaatggtgctccctgc

SEQ ID NO: 3689241 - DNA, 25 bp, Homo sapien
ttggaagaaatggtgctccctgccc

SEQ ID NO: 3689242 - DNA, 25 bp, Homo sapien
tggaagaaatggtgctccctgcccc

SEQ ID NO: 3689243 - DNA, 25 bp, Homo sapien
gtgttacagggatattgatctcggg

SEQ ID NO: 3689244 - DNA, 25 bp, Homo sapien
attttatgacaaagaggagagtgct

SEQ ID NO: 3689245 - DNA, 25 bp, Homo sapien
tatgaaaatggatgtgttacaggga

SEQ ID NO: 3689246 - DNA, 25 bp, Homo sapien
aggtacctaacaccacacttggcca

SEQ ID NO: 3689247 - DNA, 25 bp, Homo sapien
cactgtcaaggtatagaagtcgccc

SEQ ID NO: 3689248 - DNA, 25 bp, Homo sapien
tagaagtcgcccttctcacggtcca

SEQ ID NO: 3689249 - DNA, 25 bp, Homo sapien
caaggtatagaagtcgcccttctca

SEQ ID NO: 3689250 - DNA, 25 bp, Homo sapien
catctgccaccactgtcaaggtata

SEQ ID NO: 3689251 - DNA, 25 bp, Homo sapien
ttgacagtagccactcgctggccca

SEQ ID NO: 3689252 - DNA, 25 bp, Homo sapien
gccttgacagtagccactcgctggc

SEQ ID NO: 3689253 - DNA, 25 bp, Homo sapien
ggcagtcctcgggtatgctgaccgc

SEQ ID NO: 3689254 - DNA, 25 bp, Homo sapien
ccgccgagtcggaggtgaagtcaaa

SEQ ID NO: 3689255 - DNA, 25 bp, Homo sapien
caatggagtcattggtggtgacgat

SEQ ID NO: 3689256 - DNA, 25 bp, Homo sapien
gaggatgtagtgatccagctcttct

SEQ ID NO: 3689257 - DNA, 25 bp, Homo sapien
ccacaaacacttcgccaatggagtc

SEQ ID NO: 3689258 - DNA, 25 bp, Homo sapien
ccccgcgatgttgccagaggccagg

SEQ ID NO: 3689259 - DNA, 25 bp, Homo sapien
attcacactgacattgtatccaaag

SEQ ID NO: 3689260 - DNA, 25 bp, Homo sapien
aggatgtggtccttcttccgtggag

SEQ ID NO: 3689261 - DNA, 25 bp, Homo sapien
tatccaaaggggctctcgatgactg

SEQ ID NO: 3689262 - DNA, 25 bp, Homo sapien
gggtgcctcggtcagaagccacaac

SEQ ID NO: 3689263 - DNA, 25 bp, Homo sapien
gccatgtccttgttgccctcggtga

SEQ ID NO: 3689264 - DNA, 25 bp, Homo sapien
tgtggcgatctcaccgctgatgcgg

SEQ ID NO: 3689265 - DNA, 25 bp, Homo sapien
tgatgcggtccatgcggaaggccat

SEQ ID NO: 3689266 - DNA, 25 bp, Homo sapien
gaacactgttgatcccgatgtcacg

SEQ ID NO: 3689267 - DNA, 25 bp, Homo sapien
tgttcccctcactcggaggcggagc

SEQ ID NO: 3689268 - DNA, 25 bp, Homo sapien
tgctgtgtggaattccattctcacc

SEQ ID NO: 3689269 - DNA, 25 bp, Homo sapien
ggaattccattctcacccatcttgt

SEQ ID NO: 3689270 - DNA, 25 bp, Homo sapien
tcttgttcccctcactcggaggcgg

SEQ ID NO: 3689271 - DNA, 25 bp, Homo sapien
gctgctgtcaaaggggagaggtcta

SEQ ID NO: 3689272 - DNA, 25 bp, Homo sapien
cacagtgctgctgtcaaaggggaga

SEQ ID NO: 3689273 - DNA, 25 bp, Homo sapien
gtgctgctgtcaaaggggagaggtc

SEQ ID NO: 3689274 - DNA, 25 bp, Homo sapien
tgctgtcaaaggggagaggtctaac

SEQ ID NO: 3689275 - DNA, 25 bp, Homo sapien
ctgtttgcaggaatgtccagctctc

SEQ ID NO: 3689276 - DNA, 25 bp, Homo sapien
gcaggaatgtccagctctcaggaac

SEQ ID NO: 3689277 - DNA, 25 bp, Homo sapien
tgcaggaatgtccagctctcaggaa

SEQ ID NO: 3689278 - DNA, 25 bp, Homo sapien
tttgcaggaatgtccagctctcagg

SEQ ID NO: 3689279 - DNA, 25 bp, Homo sapien
gctatgtcaccctaactatcctgga

SEQ ID NO: 3689280 - DNA, 25 bp, Homo sapien
cacaatgcacgaaagaggaactggg

SEQ ID NO: 3689281 - DNA, 25 bp, Homo sapien
cagtgccgagatagatagccatgtc

SEQ ID NO: 3689282 - DNA, 25 bp, Homo sapien
tatagcttggtgagacagtgccgag

SEQ ID NO: 3689283 - DNA, 25 bp, Homo sapien
tgcctacaacgcactagggacgtcc

SEQ ID NO: 3689284 - DNA, 25 bp, Homo sapien
tcctggagtcgaaggacaagcccac

SEQ ID NO: 3689285 - DNA, 25 bp, Homo sapien
gcatctgggcttcgtggtttcctgt

SEQ ID NO: 3689286 - DNA, 25 bp, Homo sapien
cttttacaactgaacgcatctgggc

SEQ ID NO: 3689287 - DNA, 25 bp, Homo sapien
ggaaacaacatgtctaccaacaggg

SEQ ID NO: 3689288 - DNA, 25 bp, Homo sapien
ggctcagcactttgaccgctaggaa

SEQ ID NO: 3689289 - DNA, 25 bp, Homo sapien
gacactgtgacaaggtatcccagcc

SEQ ID NO: 3689290 - DNA, 25 bp, Homo sapien
ggttctgagggcacgtctgttccca

SEQ ID NO: 3689291 - DNA, 25 bp, Homo sapien
ggcctagaattaaactacttcagat

SEQ ID NO: 3689292 - DNA, 25 bp, Homo sapien
aactacctttcctgagttcccactg

SEQ ID NO: 3689293 - DNA, 25 bp, Homo sapien
tgggcactggactaagtctttttaa

SEQ ID NO: 3689294 - DNA, 25 bp, Homo sapien
gaacagaactacctttcctgagttc

SEQ ID NO: 3689295 - DNA, 25 bp, Homo sapien
ggttcccgcctggcacatgctcagg

SEQ ID NO: 3689296 - DNA, 25 bp, Homo sapien
aactggacggttcccgcctggcaca

SEQ ID NO: 3689297 - DNA, 25 bp, Homo sapien
cagcagcacggcaactggacggttc

SEQ ID NO: 3689298 - DNA, 25 bp, Homo sapien
ggcggggggcctgggtcttgacagc

SEQ ID NO: 3689299 - DNA, 25 bp, Homo sapien
tgcagtggcaactgtgccaagtgcc

SEQ ID NO: 3689300 - DNA, 25 bp, Homo sapien
tgccaagtgccccagctaggcatcg

SEQ ID NO: 3689301 - DNA, 25 bp, Homo sapien
taggcatcgggcacatctgcatgct

SEQ ID NO: 3689302 - DNA, 25 bp, Homo sapien
gctctgacagctgcccaagtggcag

SEQ ID NO: 3689303 - DNA, 25 bp, Homo sapien
ctcgcactcagtcgcgggaggcttc

SEQ ID NO: 3689304 - DNA, 25 bp, Homo sapien
ccacgcggccctcggagaggcagtt

SEQ ID NO: 3689305 - DNA, 25 bp, Homo sapien
cgggtgcctggagcacggcgctggg

SEQ ID NO: 3689306 - DNA, 25 bp, Homo sapien
ggcaccagaagttcctctgcgcgtc

SEQ ID NO: 3689307 - DNA, 25 bp, Homo sapien
ggacatggtggctttccttgacagt

SEQ ID NO: 3689308 - DNA, 25 bp, Homo sapien
catggtggctttccttgacagtcat

SEQ ID NO: 3689309 - DNA, 25 bp, Homo sapien
gatggacatggtggctttccttgac

SEQ ID NO: 3689310 - DNA, 25 bp, Homo sapien
cctgcagagccacaagatggacatg

SEQ ID NO: 3689311 - DNA, 25 bp, Homo sapien
catccacaatggtcacgtacacgtg

SEQ ID NO: 3689312 - DNA, 25 bp, Homo sapien
cataggtgactgtgccgttgggacc

SEQ ID NO: 3689313 - DNA, 25 bp, Homo sapien
gaacatgggcgcgttatcattctca

SEQ ID NO: 3689314 - DNA, 25 bp, Homo sapien
gttgacgatgttgcctgcgacgatg

SEQ ID NO: 3689315 - DNA, 25 bp, Homo sapien
acgatcagggtgtagcggccgtggc

SEQ ID NO: 3689316 - DNA, 25 bp, Homo sapien
cggccgtggctgatctcgtagtcca

SEQ ID NO: 3689317 - DNA, 25 bp, Homo sapien
gcactggtctgtggcagtgacgatc

SEQ ID NO: 3689318 - DNA, 25 bp, Homo sapien
actggtctgtggcagtgacgatcag

SEQ ID NO: 3689319 - DNA, 25 bp, Homo sapien
cagtgacttcaaatggtccctcata

SEQ ID NO: 3689320 - DNA, 25 bp, Homo sapien
ccgggggaaggtaggcacattgtcg

SEQ ID NO: 3689321 - DNA, 25 bp, Homo sapien
ctgagtctcggtcatgggccaggaa

SEQ ID NO: 3689322 - DNA, 25 bp, Homo sapien
tccacctgcccgttgggtcctgagt

SEQ ID NO: 3689323 - DNA, 25 bp, Homo sapien
cacagatggtcaggttgtagaaggc

SEQ ID NO: 3689324 - DNA, 25 bp, Homo sapien
tagaaggcgatggtctcccggtcca

SEQ ID NO: 3689325 - DNA, 25 bp, Homo sapien
tcaggttgtagaaggcgatggtctc

SEQ ID NO: 3689326 - DNA, 25 bp, Homo sapien
tccacgtccttccggacccttagca

SEQ ID NO: 3689327 - DNA, 25 bp, Homo sapien
aaggtgaggcgtgcattgcagccac

SEQ ID NO: 3689328 - DNA, 25 bp, Homo sapien
cgcggttgcccgcagtgatgttgaa

SEQ ID NO: 3689329 - DNA, 25 bp, Homo sapien
ggttcagcagcacagggtcgttgtc

SEQ ID NO: 3689330 - DNA, 25 bp, Homo sapien
gacatgggcgacaaagctggagaca

SEQ ID NO: 3689331 - DNA, 25 bp, Homo sapien
ttgtactctgggatccgctcgcggt

SEQ ID NO: 3689332 - DNA, 25 bp, Homo sapien
tatgcgtggattctccgggttgtcc

SEQ ID NO: 3689333 - DNA, 25 bp, Homo sapien
ggccggttcacagtgacgatccctg

SEQ ID NO: 3689334 - DNA, 25 bp, Homo sapien
cacagaaatggtcagcttgtactct

SEQ ID NO: 3689335 - DNA, 25 bp, Homo sapien
cctggtaggtgcttttagtgaagag

SEQ ID NO: 3689336 - DNA, 25 bp, Homo sapien
gcctggtaggtgcttttagtgaaga

SEQ ID NO: 3689337 - DNA, 25 bp, Homo sapien
aaaggaagatcagaagcaagtcata

SEQ ID NO: 3689338 - DNA, 25 bp, Homo sapien
ggaagatcagaagcaagtcataatc

SEQ ID NO: 3689339 - DNA, 25 bp, Homo sapien
caccacggcgtagatgtcttggtct

SEQ ID NO: 3689340 - DNA, 25 bp, Homo sapien
gatgggcccattgagcaccgtgaga

SEQ ID NO: 3689341 - DNA, 25 bp, Homo sapien
ggtaggtcaccacggcgtagatgtc

SEQ ID NO: 3689342 - DNA, 25 bp, Homo sapien
atgggcccattgagcaccgtgagag

SEQ ID NO: 3689343 - DNA, 25 bp, Homo sapien
tgctgttgagcagcccgatgtcctc

SEQ ID NO: 3689344 - DNA, 25 bp, Homo sapien
ggtgggccggttgtcattgtcatcc

SEQ ID NO: 3689345 - DNA, 25 bp, Homo sapien
gaatgcctcccggtcaatgatgaca

SEQ ID NO: 3689346 - DNA, 25 bp, Homo sapien
caggcgggcagttctctagcagatg

SEQ ID NO: 3689347 - DNA, 25 bp, Homo sapien
tgagccccagcttctattcggtaga

SEQ ID NO: 3689348 - DNA, 25 bp, Homo sapien
gcgatcagtgtcgtccttggccaca

SEQ ID NO: 3689349 - DNA, 25 bp, Homo sapien
tgttgatattcacagcaaaggcgtc

SEQ ID NO: 3689350 - DNA, 25 bp, Homo sapien
caaaggcgtcctcctggttgggcac

SEQ ID NO: 3689351 - DNA, 25 bp, Homo sapien
ccagtagaatctgggacttgtggct

SEQ ID NO: 3689352 - DNA, 25 bp, Homo sapien
caaaggatgacggtccccagtagaa

SEQ ID NO: 3689353 - DNA, 25 bp, Homo sapien
ccaggttcagcctgagaagaacccc

SEQ ID NO: 3689354 - DNA, 25 bp, Homo sapien
gcctcctcataagcttgggtcacgt

SEQ ID NO: 3689355 - DNA, 25 bp, Homo sapien
tggcaaccagctcccgattcatggg

SEQ ID NO: 3689356 - DNA, 25 bp, Homo sapien
gcacactgacagagcgctctggtag

SEQ ID NO: 3689357 - DNA, 25 bp, Homo sapien
catgggggacttcaccattacagat

SEQ ID NO: 3689358 - DNA, 25 bp, Homo sapien
gctctggtaggtcgctggcattgtc

SEQ ID NO: 3689359 - DNA, 25 bp, Homo sapien
ggtgaccagcccattaaggcccttg

SEQ ID NO: 3689360 - DNA, 25 bp, Homo sapien
gtcctccagctggacataccctggg

SEQ ID NO: 3689361 - DNA, 25 bp, Homo sapien
tccaggacgttgacagtcagcttgg

SEQ ID NO: 3689362 - DNA, 25 bp, Homo sapien
ccaggatccgctccatgtagtaggt

SEQ ID NO: 3689363 - DNA, 25 bp, Homo sapien
aagttgagccagtgcacctcctcgt

SEQ ID NO: 3689364 - DNA, 25 bp, Homo sapien
tgatgtccacgatttccaggtagac

SEQ ID NO: 3689365 - DNA, 25 bp, Homo sapien
cactgtccggttggcaatgaccttc

SEQ ID NO: 3689366 - DNA, 25 bp, Homo sapien
caggtagacagggatctcagctgcc

SEQ ID NO: 3689367 - DNA, 25 bp, Homo sapien
tccaaggctgtactcaatgagtgca

SEQ ID NO: 3689368 - DNA, 25 bp, Homo sapien
gagtgcaaagttgcctgagtcagca

SEQ ID NO: 3689369 - DNA, 25 bp, Homo sapien
gggttgatggcaaacttgctctctc

SEQ ID NO: 3689370 - DNA, 25 bp, Homo sapien
agtcagcatcagtggcagtgactgt

SEQ ID NO: 3689371 - DNA, 25 bp, Homo sapien
tttcgcgacggttgctggctacatc

SEQ ID NO: 3689372 - DNA, 25 bp, Homo sapien
catccccagggttgtctttggccaa

SEQ ID NO: 3689373 - DNA, 25 bp, Homo sapien
tctttggccaaggcagtcaggatat

SEQ ID NO: 3689374 - DNA, 25 bp, Homo sapien
gagaagacagcacatagatgtcacc

SEQ ID NO: 3689375 - DNA, 25 bp, Homo sapien
tctcatacacgcttgtgctgaactg

SEQ ID NO: 3689376 - DNA, 25 bp, Homo sapien
gtgagtaggtcaactctccattggg

SEQ ID NO: 3689377 - DNA, 25 bp, Homo sapien
ctgtggccggcagtcattgacatcc

SEQ ID NO: 3689378 - DNA, 25 bp, Homo sapien
acgccagggccctcaagtgagtagg

SEQ ID NO: 3689379 - DNA, 25 bp, Homo sapien
catcatgggtgtccaaggaaggcca

SEQ ID NO: 3689380 - DNA, 25 bp, Homo sapien
tcatgggtgtccaaggaaggccaca

SEQ ID NO: 3689381 - DNA, 25 bp, Homo sapien
atgggtgtccaaggaaggccacata

SEQ ID NO: 3689382 - DNA, 25 bp, Homo sapien
acatcatgggtgtccaaggaaggcc

SEQ ID NO: 3689383 - DNA, 25 bp, Homo sapien
tggccaccacggtcagactgaactt

SEQ ID NO: 3689384 - DNA, 25 bp, Homo sapien
agtggccgctgtgtggtcaccaagc

SEQ ID NO: 3689385 - DNA, 25 bp, Homo sapien
ttctcgtaggactgcagtggccgct

SEQ ID NO: 3689386 - DNA, 25 bp, Homo sapien
caagcccgagtccatgtccacatgg

SEQ ID NO: 3689387 - DNA, 25 bp, Homo sapien
cagcccatatagtaaccactgttca

SEQ ID NO: 3689388 - DNA, 25 bp, Homo sapien
taaccactgttcaatactgccctgt

SEQ ID NO: 3689389 - DNA, 25 bp, Homo sapien
ttttactagcacagcccatatagta

SEQ ID NO: 3689390 - DNA, 25 bp, Homo sapien
tgcacctggccaaaccaaagatctt

SEQ ID NO: 3689391 - DNA, 25 bp, Homo sapien
tccaggcgctgagcagtctggatga

SEQ ID NO: 3689392 - DNA, 25 bp, Homo sapien
agctgtagcgcaccgccccgttgag

SEQ ID NO: 3689393 - DNA, 25 bp, Homo sapien
atccttgtccgtggcgtagacctcg

SEQ ID NO: 3689394 - DNA, 25 bp, Homo sapien
gggtcgatgatgaagaactcccagt

SEQ ID NO: 3689395 - DNA, 25 bp, Homo sapien
gctgcatagtctcgtatggcactgg

SEQ ID NO: 3689396 - DNA, 25 bp, Homo sapien
atagtctcgtatggcactggctggc

SEQ ID NO: 3689397 - DNA, 25 bp, Homo sapien
gaaaaggggttcgttgtcatcgatg

SEQ ID NO: 3689398 - DNA, 25 bp, Homo sapien
cctgcagcggctgcatagtctcgta

SEQ ID NO: 3689399 - DNA, 25 bp, Homo sapien
tgaagtagtacacgatcgcgttggg

SEQ ID NO: 3689400 - DNA, 25 bp, Homo sapien
agggtgccgcgtggtgagtgctcag

SEQ ID NO: 3689401 - DNA, 25 bp, Homo sapien
gcccacgagggtgccgcgtggtgag

SEQ ID NO: 3689402 - DNA, 25 bp, Homo sapien
tgcatccactgcgcctgtcacgttg

SEQ ID NO: 3689403 - DNA, 25 bp, Homo sapien
tgcgattgctggaggccttgacgat

SEQ ID NO: 3689404 - DNA, 25 bp, Homo sapien
gaaggagaagatggcttctcgctcc

SEQ ID NO: 3689405 - DNA, 25 bp, Homo sapien
gcagacacccatcgggctgcagatg

SEQ ID NO: 3689406 - DNA, 25 bp, Homo sapien
tgatgtcctctagcacaacgcgcac

SEQ ID NO: 3689407 - DNA, 25 bp, Homo sapien
tgagcccaccttggcgtcggtggcc

SEQ ID NO: 3689408 - DNA, 25 bp, Homo sapien
cttcagagtcgttggcaagggcccg

SEQ ID NO: 3689409 - DNA, 25 bp, Homo sapien
ccacatcttcagagtcgttggcaag

SEQ ID NO: 3689410 - DNA, 25 bp, Homo sapien
caagggcccggaagtagtggatggc

SEQ ID NO: 3689411 - DNA, 25 bp, Homo sapien
cgtccctcaggatgtagatgccgat

SEQ ID NO: 3689412 - DNA, 25 bp, Homo sapien
aaggtgcgcagaatgccgtccatgc

SEQ ID NO: 3689413 - DNA, 25 bp, Homo sapien
cagtattgacaatggccccagtgat

SEQ ID NO: 3689414 - DNA, 25 bp, Homo sapien
gttaatgacgatcttgacgcgctgg

SEQ ID NO: 3689415 - DNA, 25 bp, Homo sapien
taagcagttctgtctgcgcaaagtt

SEQ ID NO: 3689416 - DNA, 25 bp, Homo sapien
ttctgtctgcgcaaagttcacccgg

SEQ ID NO: 3689417 - DNA, 25 bp, Homo sapien
gatgcggttggtatcgcggttcacc

SEQ ID NO: 3689418 - DNA, 25 bp, Homo sapien
tcgcggttcaccacgtggataagca

SEQ ID NO: 3689419 - DNA, 25 bp, Homo sapien
gggcagacatgtcatccggcagccg

SEQ ID NO: 3689420 - DNA, 25 bp, Homo sapien
agttccggaaaagattccgtagctg

SEQ ID NO: 3689421 - DNA, 25 bp, Homo sapien
catgtcatccggcagccggacagag

SEQ ID NO: 3689422 - DNA, 25 bp, Homo sapien
aagattccgtagctgctccttgttc

SEQ ID NO: 3689423 - DNA, 25 bp, Homo sapien
gacaaagagcatggcggccaggaac

SEQ ID NO: 3689424 - DNA, 25 bp, Homo sapien
ccaggaacaggaggatagccaggac

SEQ ID NO: 3689425 - DNA, 25 bp, Homo sapien
acagtcctgtagtaccagttcatga

SEQ ID NO: 3689426 - DNA, 25 bp, Homo sapien
ctgtagtaccagttcatgaggacaa

SEQ ID NO: 3689427 - DNA, 25 bp, Homo sapien
agctgagccagccacaatggccttg

SEQ ID NO: 3689428 - DNA, 25 bp, Homo sapien
gccagccacaatggccttgagcttc

SEQ ID NO: 3689429 - DNA, 25 bp, Homo sapien
gagccagccacaatggccttgagct

SEQ ID NO: 3689430 - DNA, 25 bp, Homo sapien
ctgagccagccacaatggccttgag

SEQ ID NO: 3689431 - DNA, 25 bp, Homo sapien
atgatgtcgatgaagccacgattcc

SEQ ID NO: 3689432 - DNA, 25 bp, Homo sapien
tccatgatgtcgatgaagccacgat

SEQ ID NO: 3689433 - DNA, 25 bp, Homo sapien
ttgttggtgttaggcatgtccatga

SEQ ID NO: 3689434 - DNA, 25 bp, Homo sapien
gagtacttgttggtgttaggcatgt

SEQ ID NO: 3689435 - DNA, 25 bp, Homo sapien
cactcaggttctccggtaggtcatc

SEQ ID NO: 3689436 - DNA, 25 bp, Homo sapien
gttccgacagaagggatccagccac

SEQ ID NO: 3689437 - DNA, 25 bp, Homo sapien
ggtaggtcatcctcatgctccgcct

SEQ ID NO: 3689438 - DNA, 25 bp, Homo sapien
tgttccacaggtcggcgatctcact

SEQ ID NO: 3689439 - DNA, 25 bp, Homo sapien
tctggcccagcttggcaatgttgtc

SEQ ID NO: 3689440 - DNA, 25 bp, Homo sapien
gattggcccctcacgaatgatctgg

SEQ ID NO: 3689441 - DNA, 25 bp, Homo sapien
aggcttgacagctgctggctcacgc

SEQ ID NO: 3689442 - DNA, 25 bp, Homo sapien
gcaggtatcggtcatcatcaggctt

SEQ ID NO: 3689443 - DNA, 25 bp, Homo sapien
cgcaggtaatcctccaggaccacct

SEQ ID NO: 3689444 - DNA, 25 bp, Homo sapien
ccaggaccaccttcagcagcgagcc

SEQ ID NO: 3689445 - DNA, 25 bp, Homo sapien
ggctttttgcaccatccgctgtgca

SEQ ID NO: 3689446 - DNA, 25 bp, Homo sapien
caaagagctttttgagccgcaggta

SEQ ID NO: 3689447 - DNA, 25 bp, Homo sapien
gggtctccatgatcacgtcgcgaag

SEQ ID NO: 3689448 - DNA, 25 bp, Homo sapien
cgtgctgccgtgcaccacatggatc

SEQ ID NO: 3689449 - DNA, 25 bp, Homo sapien
cgttgcgctcgaaggcagtggcctc

SEQ ID NO: 3689450 - DNA, 25 bp, Homo sapien
tctggtcttcctcgggcaggctgtt

SEQ ID NO: 3689451 - DNA, 25 bp, Homo sapien
tataagctgggcacacatttgggaa

SEQ ID NO: 3689452 - DNA, 25 bp, Homo sapien
ttcaaaaccggagggaacatcagtc

SEQ ID NO: 3689453 - DNA, 25 bp, Homo sapien
tccagaaacttgtagtgagtaccag

SEQ ID NO: 3689454 - DNA, 25 bp, Homo sapien
tgagcgtctggcaaaagtgggatct

SEQ ID NO: 3689455 - DNA, 25 bp, Homo sapien
tgaagttgctattaaatggacttcg

SEQ ID NO: 3689456 - DNA, 25 bp, Homo sapien
agttgctattaaatggacttcgtga

SEQ ID NO: 3689457 - DNA, 25 bp, Homo sapien
ttgttttgcactaaagtttctgtga

SEQ ID NO: 3689458 - DNA, 25 bp, Homo sapien
tttgttttgcactaaagtttctgtg

SEQ ID NO: 3689459 - DNA, 25 bp, Homo sapien
tctgtggcccacttgggcacccacg

SEQ ID NO: 3689460 - DNA, 25 bp, Homo sapien
gcggcatgccgaagggtctgctggg

SEQ ID NO: 3689461 - DNA, 25 bp, Homo sapien
gcttcctggtagagggcggcatgcc

SEQ ID NO: 3689462 - DNA, 25 bp, Homo sapien
atggcgagctcctaggcctctggct

SEQ ID NO: 3689463 - DNA, 25 bp, Homo sapien
gggccatctgcctgaatgtaacctg

SEQ ID NO: 3689464 - DNA, 25 bp, Homo sapien
gtaattcccactgtaatagcatagg

SEQ ID NO: 3689465 - DNA, 25 bp, Homo sapien
tctgagccctgacatgtgcttgggc

SEQ ID NO: 3689466 - DNA, 25 bp, Homo sapien
tgtaacctgctagctctccgaaggc

SEQ ID NO: 3689467 - DNA, 25 bp, Homo sapien
cctttattgtagcattgctgtctgc

SEQ ID NO: 3689468 - DNA, 25 bp, Homo sapien
ggaggtcttttagcctgcccttgca

SEQ ID NO: 3689469 - DNA, 25 bp, Homo sapien
agacatagctgcttcagtgcccctt

SEQ ID NO: 3689470 - DNA, 25 bp, Homo sapien
gggaatgaacgcacagatctgtttg

SEQ ID NO: 3689471 - DNA, 25 bp, Homo sapien
gatagtggaccgatagtgagcccct

SEQ ID NO: 3689472 - DNA, 25 bp, Homo sapien
caaagtgacggccagagaaagtgaa

SEQ ID NO: 3689473 - DNA, 25 bp, Homo sapien
gccgaagtgtcagctggaatccagg

SEQ ID NO: 3689474 - DNA, 25 bp, Homo sapien
tgtgtgatgccttaacacgtggcac

SEQ ID NO: 3689475 - DNA, 25 bp, Homo sapien
tgcctggctcctaaaggtctttgag

SEQ ID NO: 3689476 - DNA, 25 bp, Homo sapien
cagacacgagccctttaacatggaa

SEQ ID NO: 3689477 - DNA, 25 bp, Homo sapien
tgccctggaactggtggagcccatt

SEQ ID NO: 3689478 - DNA, 25 bp, Homo sapien
cgccaaagtggcctccaagaatgtc

SEQ ID NO: 3689479 - DNA, 25 bp, Homo sapien
gatttaatctcgtgaagtacttcct

SEQ ID NO: 3689480 - DNA, 25 bp, Homo sapien
gagacatgcacctgaagtaggtaaa

SEQ ID NO: 3689481 - DNA, 25 bp, Homo sapien
taaaagttatactgtgtagaaatgt

SEQ ID NO: 3689482 - DNA, 25 bp, Homo sapien
taggtaaagataagcattgacggga

SEQ ID NO: 3689483 - DNA, 25 bp, Homo sapien
gcaggctgaagcatcttgatcccag

SEQ ID NO: 3689484 - DNA, 25 bp, Homo sapien
tctaggtctggctttaaccctggga

SEQ ID NO: 3689485 - DNA, 25 bp, Homo sapien
taaatcgacccctctggctaggaga

SEQ ID NO: 3689486 - DNA, 25 bp, Homo sapien
ggccagccatcaggtttctaggtct

SEQ ID NO: 3689487 - DNA, 25 bp, Homo sapien
ttgttcaaccctactgagatgcctg

SEQ ID NO: 3689488 - DNA, 25 bp, Homo sapien
tcatgccaccatcctctatgtgtag

SEQ ID NO: 3689489 - DNA, 25 bp, Homo sapien
gaaacataggcactctcaaggcagt

SEQ ID NO: 3689490 - DNA, 25 bp, Homo sapien
cctgttggagtttgaccctcatgcc

SEQ ID NO: 3689491 - DNA, 25 bp, Homo sapien
ccgcgcccggctagctcccttgctt

SEQ ID NO: 3689492 - DNA, 25 bp, Homo sapien
cttttaaccagttgttgtgtggtct

SEQ ID NO: 3689493 - DNA, 25 bp, Homo sapien
gcttttaaccagttgttgtgtggtc

SEQ ID NO: 3689494 - DNA, 25 bp, Homo sapien
gcccggctagctcccttgcttttaa

SEQ ID NO: 3689495 - DNA, 25 bp, Homo sapien
gccgccacgcctgactggttttcgt

SEQ ID NO: 3689496 - DNA, 25 bp, Homo sapien
gcgccgccacgcctgactggttttc

SEQ ID NO: 3689497 - DNA, 25 bp, Homo sapien
tttggtgaagacagggtttcgctgt

SEQ ID NO: 3689498 - DNA, 25 bp, Homo sapien
gcgcgccgccacgcctgactggttt

SEQ ID NO: 3689499 - DNA, 25 bp, Homo sapien
aaacccagaggcaatcctggtcatc

SEQ ID NO: 3689500 - DNA, 25 bp, Homo sapien
acaaacccagaggcaatcctggtca

SEQ ID NO: 3689501 - DNA, 25 bp, Homo sapien
caaacccagaggcaatcctggtcat

SEQ ID NO: 3689502 - DNA, 25 bp, Homo sapien
ctgaggaagtggttgcgtctgcatc

SEQ ID NO: 3689503 - DNA, 25 bp, Homo sapien
tgtccttaaacccagataaagcggc

SEQ ID NO: 3689504 - DNA, 25 bp, Homo sapien
gaagaactagcttgtctttcacgga

SEQ ID NO: 3689505 - DNA, 25 bp, Homo sapien
cagcaccaagcccatagagtgcagt

SEQ ID NO: 3689506 - DNA, 25 bp, Homo sapien
cagaatggtccatcctgaacccctg

SEQ ID NO: 3689507 - DNA, 25 bp, Homo sapien
tggcccagaatggtccatctcaggg

SEQ ID NO: 3689508 - DNA, 25 bp, Homo sapien
cgtaagctttgagggatgagccacc

SEQ ID NO: 3689509 - DNA, 25 bp, Homo sapien
tgaggttgcttgtctcatacagaag

SEQ ID NO: 3689510 - DNA, 25 bp, Homo sapien
cctgctggagaactttgaatgggtt

SEQ ID NO: 3689511 - DNA, 25 bp, Homo sapien
tgacttgacattacccctttgtttg

SEQ ID NO: 3689512 - DNA, 25 bp, Homo sapien
ctgtggtacatgacttgacattacc

SEQ ID NO: 3689513 - DNA, 25 bp, Homo sapien
tacatgacttgacattacccctttg

SEQ ID NO: 3689514 - DNA, 25 bp, Homo sapien
tgacattacccctttgtttggcctc

SEQ ID NO: 3689515 - DNA, 25 bp, Homo sapien
gatatatacactaggaacagtccct

SEQ ID NO: 3689516 - DNA, 25 bp, Homo sapien
ccgtgcatggaccagttggcttcca

SEQ ID NO: 3689517 - DNA, 25 bp, Homo sapien
gattgtctgtgcttggtctcgcctc

SEQ ID NO: 3689518 - DNA, 25 bp, Homo sapien
gagtttcattacacttcggccgtgc

SEQ ID NO: 3689519 - DNA, 25 bp, Homo sapien
gggtccaggccagctaaagcttcca

SEQ ID NO: 3689520 - DNA, 25 bp, Homo sapien
ggagtcaaaagtcccagttcatcat

SEQ ID NO: 3689521 - DNA, 25 bp, Homo sapien
tcagtcggtgggagtcaaaagtccc

SEQ ID NO: 3689522 - DNA, 25 bp, Homo sapien
gggacccggatgaagcactccagat

SEQ ID NO: 3689523 - DNA, 25 bp, Homo sapien
ggaagatcccggcagaagcggttcc

SEQ ID NO: 3689524 - DNA, 25 bp, Homo sapien
tcgcaacttcgctttcctcctggaa

SEQ ID NO: 3689525 - DNA, 25 bp, Homo sapien
gcggattcctgaaccgcgtccaagg

SEQ ID NO: 3689526 - DNA, 25 bp, Homo sapien
tgcgagaggtcctgcctggcgccct

SEQ ID NO: 3689527 - DNA, 25 bp, Homo sapien
ctgtgggcagacagaggctcaggcc

SEQ ID NO: 3689528 - DNA, 25 bp, Homo sapien
gaggctcaggcctctgaatcaacct

SEQ ID NO: 3689529 - DNA, 25 bp, Homo sapien
tgtgggcagacagaggctcaggcct

SEQ ID NO: 3689530 - DNA, 25 bp, Homo sapien
ggcctctgaatcaacctcacaccca

SEQ ID NO: 3689531 - DNA, 25 bp, Homo sapien
ctgcaccagggcctgaagaatgagg

SEQ ID NO: 3689532 - DNA, 25 bp, Homo sapien
gggatgggcgtttctccctgctgca

SEQ ID NO: 3689533 - DNA, 25 bp, Homo sapien
tcctggggccttacactgccctggg

SEQ ID NO: 3689534 - DNA, 25 bp, Homo sapien
tggacagaacggaatcactcctggg

SEQ ID NO: 3689535 - DNA, 25 bp, Homo sapien
tgtgcctgggaatttttataagttc

SEQ ID NO: 3689536 - DNA, 25 bp, Homo sapien
gaagcattgaattcatgtcagcagt

SEQ ID NO: 3689537 - DNA, 25 bp, Homo sapien
cctagagactactgggcagccaggg

SEQ ID NO: 3689538 - DNA, 25 bp, Homo sapien
cacagcatctgacagactggaggcc

SEQ ID NO: 3689539 - DNA, 25 bp, Homo sapien
tattcatgtgtagtgataagcgtgg

SEQ ID NO: 3689540 - DNA, 25 bp, Homo sapien
gaccttcctgggatctattcatgtg

SEQ ID NO: 3689541 - DNA, 25 bp, Homo sapien
tcctggagggaatagcatgatatgt

SEQ ID NO: 3689542 - DNA, 25 bp, Homo sapien
aaaggctaaatgaggatgctactcc

SEQ ID NO: 3689543 - DNA, 25 bp, Homo sapien
gacattaggctaggctttcacagaa

SEQ ID NO: 3689544 - DNA, 25 bp, Homo sapien
taaaattgcgtgtgaatctactgtt

SEQ ID NO: 3689545 - DNA, 25 bp, Homo sapien
cagactagtattgccaagggtcaag

SEQ ID NO: 3689546 - DNA, 25 bp, Homo sapien
ggtaacagattcatgagacctctct

SEQ ID NO: 3689547 - DNA, 25 bp, Homo sapien
agcgctgaaacccactgcgggaaag

SEQ ID NO: 3689548 - DNA, 25 bp, Homo sapien
agtgggagcgctgaaacccactgcg

SEQ ID NO: 3689549 - DNA, 25 bp, Homo sapien
cactgcgggaaagctccatgtgtgc

SEQ ID NO: 3689550 - DNA, 25 bp, Homo sapien
ccaccttgttgccaaacaccttgga

SEQ ID NO: 3689551 - DNA, 25 bp, Homo sapien
gaggagctgcatgggaaagaggagc

SEQ ID NO: 3689552 - DNA, 25 bp, Homo sapien
aggagctgcatgggaaagaggagcc

SEQ ID NO: 3689553 - DNA, 25 bp, Homo sapien
accgaataatgctcccgacggcgtc

SEQ ID NO: 3689554 - DNA, 25 bp, Homo sapien
ctccaccgaataatgctcccgacgg

SEQ ID NO: 3689555 - DNA, 25 bp, Homo sapien
taatgctcccgacggcgtccacaat

SEQ ID NO: 3689556 - DNA, 25 bp, Homo sapien
ccgcacccctccaccgaataatgct

SEQ ID NO: 3689557 - DNA, 25 bp, Homo sapien
gggcatcactcaggacccagcttgc

SEQ ID NO: 3689558 - DNA, 25 bp, Homo sapien
tcaggacccagcttgccgtcttcag

SEQ ID NO: 3689559 - DNA, 25 bp, Homo sapien
acccagcttgccgtcttcaggtggg

SEQ ID NO: 3689560 - DNA, 25 bp, Homo sapien
tgaggggcatcactcaggacccagc

SEQ ID NO: 3689561 - DNA, 25 bp, Homo sapien
gggctcctcgggccagccttggaca

SEQ ID NO: 3689562 - DNA, 25 bp, Homo sapien
gtgggggctcctcgggccagccttg

SEQ ID NO: 3689563 - DNA, 25 bp, Homo sapien
ggccgtgggggctcctcgggccagc

SEQ ID NO: 3689564 - DNA, 25 bp, Homo sapien
cctcgggccagccttggacactcag

SEQ ID NO: 3689565 - DNA, 25 bp, Homo sapien
gaaaagggcgtatttgcttctcatc

SEQ ID NO: 3689566 - DNA, 25 bp, Homo sapien
caagaaaagggcgtatttgcttctc

SEQ ID NO: 3689567 - DNA, 25 bp, Homo sapien
tgtgcacaaagtcccggcagtcctg

SEQ ID NO: 3689568 - DNA, 25 bp, Homo sapien
ccttttcgatgaagacaaaaactat

SEQ ID NO: 3689569 - DNA, 25 bp, Homo sapien
tgcaagctgaggttgcggagacggc

SEQ ID NO: 3689570 - DNA, 25 bp, Homo sapien
tcagctaagatcagggctgggtcgg

SEQ ID NO: 3689571 - DNA, 25 bp, Homo sapien
tcgagctcgctcagggacaagagag

SEQ ID NO: 3689572 - DNA, 25 bp, Homo sapien
gctgttggcatctgctagagcttgg

SEQ ID NO: 3689573 - DNA, 25 bp, Homo sapien
cttgaagggcatgctgaagcgccac

SEQ ID NO: 3689574 - DNA, 25 bp, Homo sapien
ttcttctgcgtggagtagatgccgc

SEQ ID NO: 3689575 - DNA, 25 bp, Homo sapien
caggtcttatacttgccggcgaagg

SEQ ID NO: 3689576 - DNA, 25 bp, Homo sapien
ccccggcggaacatgaactgagtca

SEQ ID NO: 3689577 - DNA, 25 bp, Homo sapien
tatggacatgttcgggagccagcca

SEQ ID NO: 3689578 - DNA, 25 bp, Homo sapien
ttgtgacctgtctcaaacacccggg

SEQ ID NO: 3689579 - DNA, 25 bp, Homo sapien
tcttggtaccatcctcagagggcgg

SEQ ID NO: 3689580 - DNA, 25 bp, Homo sapien
tgagatcgaagcttgccaacaggcc

SEQ ID NO: 3689581 - DNA, 25 bp, Homo sapien
ttctgtcctattttgctctcggtat

SEQ ID NO: 3689582 - DNA, 25 bp, Homo sapien
gctctcggtatgagctctgctcttc

SEQ ID NO: 3689583 - DNA, 25 bp, Homo sapien
tctgcaaacttccacgtctcgctct

SEQ ID NO: 3689584 - DNA, 25 bp, Homo sapien
tttgctctcggtatgagctctgctc

SEQ ID NO: 3689585 - DNA, 25 bp, Homo sapien
gggacccagtctgcaatgaagtcat

SEQ ID NO: 3689586 - DNA, 25 bp, Homo sapien
tctgagtaggattggccagcatcca

SEQ ID NO: 3689587 - DNA, 25 bp, Homo sapien
cttggtcactggcttgcctgcttgg

SEQ ID NO: 3689588 - DNA, 25 bp, Homo sapien
ggtcactggcttgcctgcttggttt

SEQ ID NO: 3689589 - DNA, 25 bp, Homo sapien
cacattccagagataggctgtccaa

SEQ ID NO: 3689590 - DNA, 25 bp, Homo sapien
taattatcaaggactcaggagacgt

SEQ ID NO: 3689591 - DNA, 25 bp, Homo sapien
ccaatatggcggcttgagtcttgcc

SEQ ID NO: 3689592 - DNA, 25 bp, Homo sapien
caaattaatgagtagtggcacgacg

SEQ ID NO: 3689593 - DNA, 25 bp, Homo sapien
gcatgagagctgagtaagcttctgg

SEQ ID NO: 3689594 - DNA, 25 bp, Homo sapien
tccttggggcactaactccttgcca

SEQ ID NO: 3689595 - DNA, 25 bp, Homo sapien
cagcatctctcgtctccttggggca

SEQ ID NO: 3689596 - DNA, 25 bp, Homo sapien
ctgagtaagcttctggagctttgga

SEQ ID NO: 3689597 - DNA, 25 bp, Homo sapien
cctttatggccagtggaggacggct

SEQ ID NO: 3689598 - DNA, 25 bp, Homo sapien
gggtagggcccaacacaaacagcca

SEQ ID NO: 3689599 - DNA, 25 bp, Homo sapien
cagggtgcaccagccggctggttca

SEQ ID NO: 3689600 - DNA, 25 bp, Homo sapien
tgtgtcctcgtgcctgccagcagtg

SEQ ID NO: 3689601 - DNA, 25 bp, Homo sapien
gggctgtgtgttcattcctggattc

SEQ ID NO: 3689602 - DNA, 25 bp, Homo sapien
agaacaggggctgtgtgttcattcc

SEQ ID NO: 3689603 - DNA, 25 bp, Homo sapien
ttatgttgtgggttgaggaagaaca

SEQ ID NO: 3689604 - DNA, 25 bp, Homo sapien
cattcctggattcaggacctcgcag

SEQ ID NO: 3689605 - DNA, 25 bp, Homo sapien
tctgaatgagcgtcttcaaccgtca

SEQ ID NO: 3689606 - DNA, 25 bp, Homo sapien
ggctgctcccagcatgtaggatgaa

SEQ ID NO: 3689607 - DNA, 25 bp, Homo sapien
agaacagcggtttcggattcggagt

SEQ ID NO: 3689608 - DNA, 25 bp, Homo sapien
cttcaaccgtcagggaaatgttggc

SEQ ID NO: 3689609 - DNA, 25 bp, Homo sapien
tcattgtgtctcaatgccaccagca

SEQ ID NO: 3689610 - DNA, 25 bp, Homo sapien
gctggaacgactccttaggaaggga

SEQ ID NO: 3689611 - DNA, 25 bp, Homo sapien
agggcacgctctgcccgtctggctg

SEQ ID NO: 3689612 - DNA, 25 bp, Homo sapien
ccccgtgctttccaaacagcgaaag

SEQ ID NO: 3689613 - DNA, 25 bp, Homo sapien
tgccttcagccttccatgagcttca

SEQ ID NO: 3689614 - DNA, 25 bp, Homo sapien
tgaagcctgcttaaactgtgtgatg

SEQ ID NO: 3689615 - DNA, 25 bp, Homo sapien
tcagatctggtaggttgcagcagag

SEQ ID NO: 3689616 - DNA, 25 bp, Homo sapien
tgccttgagagaccactcagagagg

SEQ ID NO: 3689617 - DNA, 25 bp, Homo sapien
tctgctcttgctaggattggagtct

SEQ ID NO: 3689618 - DNA, 25 bp, Homo sapien
aggcagccgcgcctctgactcggag

SEQ ID NO: 3689619 - DNA, 25 bp, Homo sapien
gactcggagctacttgaaacttctg

SEQ ID NO: 3689620 - DNA, 25 bp, Homo sapien
caaaagggactgaactagcctctgg

SEQ ID NO: 3689621 - DNA, 25 bp, Homo sapien
tgtcgtccatctcgcagtacagcgg

SEQ ID NO: 3689622 - DNA, 25 bp, Homo sapien
tcatggaggacgagcaatggctgtc

SEQ ID NO: 3689623 - DNA, 25 bp, Homo sapien
cagacaagtgcatctcctaaccagg

SEQ ID NO: 3689624 - DNA, 25 bp, Homo sapien
taaccaggtcacatttcagccgcga

SEQ ID NO: 3689625 - DNA, 25 bp, Homo sapien
taattgccaagcagggatgtggaca

SEQ ID NO: 3689626 - DNA, 25 bp, Homo sapien
tcatccatgttgtgtcaggtgacag

SEQ ID NO: 3689627 - DNA, 25 bp, Homo sapien
ataatgctgtgtggccgtcaccgcc

SEQ ID NO: 3689628 - DNA, 25 bp, Homo sapien
gaatgttccgttacatgtgcgtacc

SEQ ID NO: 3689629 - DNA, 25 bp, Homo sapien
gaatggccatttgggaaacagggac

SEQ ID NO: 3689630 - DNA, 25 bp, Homo sapien
gataatgtcgaccagcaataatgga

SEQ ID NO: 3689631 - DNA, 25 bp, Homo sapien
cacagaaatgaggtcagtgcttaaa

SEQ ID NO: 3689632 - DNA, 25 bp, Homo sapien
caacttaggagtgtaggacctggca

SEQ ID NO: 3689633 - DNA, 25 bp, Homo sapien
cttttggcattaccatgaatggaca

SEQ ID NO: 3689634 - DNA, 25 bp, Homo sapien
gaatggacacgtctttctcaattaa

SEQ ID NO: 3689635 - DNA, 25 bp, Homo sapien
ggcattaccatgaatggacacgtct

SEQ ID NO: 3689636 - DNA, 25 bp, Homo sapien
taccatgaatggacacgtctttctc

SEQ ID NO: 3689637 - DNA, 25 bp, Homo sapien
tgtggagctcttaccttgctataga

SEQ ID NO: 3689638 - DNA, 25 bp, Homo sapien
gacctagctaggttcttggagacca

SEQ ID NO: 3689639 - DNA, 25 bp, Homo sapien
ccaggctacagcttcggtgtgatat

SEQ ID NO: 3689640 - DNA, 25 bp, Homo sapien
atatgaatgtagctccctctggtgt

SEQ ID NO: 3689641 - DNA, 25 bp, Homo sapien
cattttcaaggctatgggtgttttg

SEQ ID NO: 3689642 - DNA, 25 bp, Homo sapien
gtcattttcaaggctatgggtgttt

SEQ ID NO: 3689643 - DNA, 25 bp, Homo sapien
ggtcattttcaaggctatgggtgtt

SEQ ID NO: 3689644 - DNA, 25 bp, Homo sapien
tcattttcaaggctatgggtgtttt

SEQ ID NO: 3689645 - DNA, 25 bp, Homo sapien
atagaataatgcttttgaaccaatc

SEQ ID NO: 3689646 - DNA, 25 bp, Homo sapien
tagaataatgcttttgaaccaatca

SEQ ID NO: 3689647 - DNA, 25 bp, Homo sapien
tgacacgaagatggctatgaaagcc

SEQ ID NO: 3689648 - DNA, 25 bp, Homo sapien
gatttcgccagaatgagcttgttcg

SEQ ID NO: 3689649 - DNA, 25 bp, Homo sapien
caaattcggccctgataacagctgg

SEQ ID NO: 3689650 - DNA, 25 bp, Homo sapien
ttcgctgtgaacgtcatgctggcct

SEQ ID NO: 3689651 - DNA, 25 bp, Homo sapien
tgttttcggccaccacagcgaacat

SEQ ID NO: 3689652 - DNA, 25 bp, Homo sapien
gggtgttttcggccaccacagcgaa

SEQ ID NO: 3689653 - DNA, 25 bp, Homo sapien
ctgggtgttttcggccaccacagcg

SEQ ID NO: 3689654 - DNA, 25 bp, Homo sapien
ggtgttttcggccaccacagcgaac

SEQ ID NO: 3689655 - DNA, 25 bp, Homo sapien
tagcgataatggtggagctggagag

SEQ ID NO: 3689656 - DNA, 25 bp, Homo sapien
cctgcgagaaccaccaatagtgtgg

SEQ ID NO: 3689657 - DNA, 25 bp, Homo sapien
ttagcgataatggtggagctggaga

SEQ ID NO: 3689658 - DNA, 25 bp, Homo sapien
ccaagctgccctgcgagaaccacca

SEQ ID NO: 3689659 - DNA, 25 bp, Homo sapien
cacctgtaagcacacatgactgtct

SEQ ID NO: 3689660 - DNA, 25 bp, Homo sapien
acaaataacacctgtaagcacacat

SEQ ID NO: 3689661 - DNA, 25 bp, Homo sapien
gtaagcacacatgactgtcttaaat

SEQ ID NO: 3689662 - DNA, 25 bp, Homo sapien
taacacctgtaagcacacatgactg

SEQ ID NO: 3689663 - DNA, 25 bp, Homo sapien
taagagacaagcgcattctggagtg

SEQ ID NO: 3689664 - DNA, 25 bp, Homo sapien
tttttaagagacaagcgcattctgg

SEQ ID NO: 3689665 - DNA, 25 bp, Homo sapien
tttaagagacaagcgcattctggag

SEQ ID NO: 3689666 - DNA, 25 bp, Homo sapien
agagacaagcgcattctggagtgca

SEQ ID NO: 3689667 - DNA, 25 bp, Homo sapien
tctccaaaccacctcgaagcagggt

SEQ ID NO: 3689668 - DNA, 25 bp, Homo sapien
tccgagcagtctcgtagcgcagggc

SEQ ID NO: 3689669 - DNA, 25 bp, Homo sapien
ccatgtaggacaggtagatgctgca

SEQ ID NO: 3689670 - DNA, 25 bp, Homo sapien
tgttcttccggagctcgtggtctga

SEQ ID NO: 3689671 - DNA, 25 bp, Homo sapien
cggcgtgttcgccccccaacagacg

SEQ ID NO: 3689672 - DNA, 25 bp, Homo sapien
cacgacgaggaccgcggcgtgttcg

SEQ ID NO: 3689673 - DNA, 25 bp, Homo sapien
gtgttcgccccccaacagacggagc

SEQ ID NO: 3689674 - DNA, 25 bp, Homo sapien
ccgcggcgtgttcgccccccaacag

SEQ ID NO: 3689675 - DNA, 25 bp, Homo sapien
ctcagcggctttagcactttcccct

SEQ ID NO: 3689676 - DNA, 25 bp, Homo sapien
tagtccctgcaggtaggatcctggg

SEQ ID NO: 3689677 - DNA, 25 bp, Homo sapien
actcccttttcaccaagctcccgag

SEQ ID NO: 3689678 - DNA, 25 bp, Homo sapien
ctcccttttcaccaagctcccgagg

SEQ ID NO: 3689679 - DNA, 25 bp, Homo sapien
ccatttttctagtccctgcaggtag

SEQ ID NO: 3689680 - DNA, 25 bp, Homo sapien
gcaggcgccagccctcggcccgcat

SEQ ID NO: 3689681 - DNA, 25 bp, Homo sapien
gcgcaggcgccagccctcggcccgc

SEQ ID NO: 3689682 - DNA, 25 bp, Homo sapien
cgcaggcgccagccctcggcccgca

SEQ ID NO: 3689683 - DNA, 25 bp, Homo sapien
tgcgcaggcgccagccctcggcccg

SEQ ID NO: 3689684 - DNA, 25 bp, Homo sapien
aaatagatgccgcagctgtaacggg

SEQ ID NO: 3689685 - DNA, 25 bp, Homo sapien
gcagggatgacctcgcattcatata

SEQ ID NO: 3689686 - DNA, 25 bp, Homo sapien
atttacttcatgtacggcagggatg

SEQ ID NO: 3689687 - DNA, 25 bp, Homo sapien
acaaatcgttccacttcaaaacagc

SEQ ID NO: 3689688 - DNA, 25 bp, Homo sapien
tgtgcttccagtcccgagcatttcg

SEQ ID NO: 3689689 - DNA, 25 bp, Homo sapien
ttaagaaacaccctgccaccttcga

SEQ ID NO: 3689690 - DNA, 25 bp, Homo sapien
ctcaatgccgagcacagaacctggg

SEQ ID NO: 3689691 - DNA, 25 bp, Homo sapien
tgaacaaacgacagaacgcagggcg

SEQ ID NO: 3689692 - DNA, 25 bp, Homo sapien
gctattcaaagtcattaacggagag

SEQ ID NO: 3689693 - DNA, 25 bp, Homo sapien
acacttggaacagttacaggcttag

SEQ ID NO: 3689694 - DNA, 25 bp, Homo sapien
cgaaatgcttgggacttggaagtat

SEQ ID NO: 3689695 - DNA, 25 bp, Homo sapien
cacacaggtgtgacaaagattagtt

SEQ ID NO: 3689696 - DNA, 25 bp, Homo sapien
cttaagcagtaagggaccaggtcca

SEQ ID NO: 3689697 - DNA, 25 bp, Homo sapien
tcagttcagagtagaacccacggtg

SEQ ID NO: 3689698 - DNA, 25 bp, Homo sapien
gactacactgggtcaaaatacagcc

SEQ ID NO: 3689699 - DNA, 25 bp, Homo sapien
aaattgtactcatatccacagaggc

SEQ ID NO: 3689700 - DNA, 25 bp, Homo sapien
catgcctggctgaaacttatgtttt

SEQ ID NO: 3689701 - DNA, 25 bp, Homo sapien
attttgtatttctagtagagatggg

SEQ ID NO: 3689702 - DNA, 25 bp, Homo sapien
aattttgtatttctagtagagatgg

SEQ ID NO: 3689703 - DNA, 25 bp, Homo sapien
cctggctgaaacttatgttttcttt

SEQ ID NO: 3689704 - DNA, 25 bp, Homo sapien
tgctagttgcaaaatgaacatattt

SEQ ID NO: 3689705 - DNA, 25 bp, Homo sapien
aagtcgctgggacctgacctcaggt

SEQ ID NO: 3689706 - DNA, 25 bp, Homo sapien
tgttgcccctagactggtatgaact

SEQ ID NO: 3689707 - DNA, 25 bp, Homo sapien
tgcccctagactggtatgaactcct

SEQ ID NO: 3689708 - DNA, 25 bp, Homo sapien
actggtggtgatcagttactgtaaa

SEQ ID NO: 3689709 - DNA, 25 bp, Homo sapien
aactggtggtgatcagttactgtaa

SEQ ID NO: 3689710 - DNA, 25 bp, Homo sapien
ttactgtaaacaccacttcacctag

SEQ ID NO: 3689711 - DNA, 25 bp, Homo sapien
aacaccacttcacctagaccagcct

SEQ ID NO: 3689712 - DNA, 25 bp, Homo sapien
cccaaagtctcactgcgctcagccc

SEQ ID NO: 3689713 - DNA, 25 bp, Homo sapien
ctgcgctcagccctctaacaagtgt

SEQ ID NO: 3689714 - DNA, 25 bp, Homo sapien
gctcagccctctaacaagtgtattt

SEQ ID NO: 3689715 - DNA, 25 bp, Homo sapien
gcgctcagccctctaacaagtgtat

SEQ ID NO: 3689716 - DNA, 25 bp, Homo sapien
tgcagtggcatgatatcggctcacc

SEQ ID NO: 3689717 - DNA, 25 bp, Homo sapien
gcaacctccgtctcctaggttcaag

SEQ ID NO: 3689718 - DNA, 25 bp, Homo sapien
ctcgctcttgtcgcccacgctagag

SEQ ID NO: 3689719 - DNA, 25 bp, Homo sapien
agtctcgctcttgtcgcccacgcta

SEQ ID NO: 3689720 - DNA, 25 bp, Homo sapien
tgaattcctaccattagcgaactgt

SEQ ID NO: 3689721 - DNA, 25 bp, Homo sapien
tggatacatcctgatcaagccacaa

SEQ ID NO: 3689722 - DNA, 25 bp, Homo sapien
gtaagggccagcatacagttttgta

SEQ ID NO: 3689723 - DNA, 25 bp, Homo sapien
catttcattctagctgctgtaaggg

SEQ ID NO: 3689724 - DNA, 25 bp, Homo sapien
ttcctctctagcagagttcttactt

SEQ ID NO: 3689725 - DNA, 25 bp, Homo sapien
cagatccagtgacagaacttccact

SEQ ID NO: 3689726 - DNA, 25 bp, Homo sapien
tctgagacactgaaaccagatccag

SEQ ID NO: 3689727 - DNA, 25 bp, Homo sapien
gacactgaaaccagatccagtgaca

SEQ ID NO: 3689728 - DNA, 25 bp, Homo sapien
gaacttccactgaccccaccagctg

SEQ ID NO: 3689729 - DNA, 25 bp, Homo sapien
tcagggcaaactcatctttaatcca

SEQ ID NO: 3689730 - DNA, 25 bp, Homo sapien
atgcattgcagatctgaatccaatt

SEQ ID NO: 3689731 - DNA, 25 bp, Homo sapien
tctttaatccacttaatagcttctt

SEQ ID NO: 3689732 - DNA, 25 bp, Homo sapien
gcattgcagatctgaatccaattat

SEQ ID NO: 3689733 - DNA, 25 bp, Homo sapien
caccaaatatggtaacagggcccca

SEQ ID NO: 3689734 - DNA, 25 bp, Homo sapien
ccaatcctagggagctctatggtcc

SEQ ID NO: 3689735 - DNA, 25 bp, Homo sapien
cacaaatgattttgggcttaacccg

SEQ ID NO: 3689736 - DNA, 25 bp, Homo sapien
ccccgtggtttcctgtcacaaatga

SEQ ID NO: 3689737 - DNA, 25 bp, Homo sapien
aaggatgtaacatcaagttgaacct

SEQ ID NO: 3689738 - DNA, 25 bp, Homo sapien
aattgtactggtgccaagaactgcc

SEQ ID NO: 3689739 - DNA, 25 bp, Homo sapien
tctgacaatcacagaacactgctgg

SEQ ID NO: 3689740 - DNA, 25 bp, Homo sapien
ttcaggcagtacttcacgttagcac

SEQ ID NO: 3689741 - DNA, 25 bp, Homo sapien
tctgtgaacgcaaactgtaaccttg

SEQ ID NO: 3689742 - DNA, 25 bp, Homo sapien
tcctgtatgtcaagcaaacactggc

SEQ ID NO: 3689743 - DNA, 25 bp, Homo sapien
cagctgacacatttggccttgtggc

SEQ ID NO: 3689744 - DNA, 25 bp, Homo sapien
ttaatgttctcctgtatgtcaagca

SEQ ID NO: 3689745 - DNA, 25 bp, Homo sapien
tgtcaaaatataaaggttcaccaaa

SEQ ID NO: 3689746 - DNA, 25 bp, Homo sapien
tacattcagggtctagttctcagtg

SEQ ID NO: 3689747 - DNA, 25 bp, Homo sapien
gcttcatttagaactaagactgtta

SEQ ID NO: 3689748 - DNA, 25 bp, Homo sapien
tatggcttctgataaaccaagtaaa

SEQ ID NO: 3689749 - DNA, 25 bp, Homo sapien
ctcagtgtttacaaagacgggttct

SEQ ID NO: 3689750 - DNA, 25 bp, Homo sapien
acctgtttaagcgtggatgccactt

SEQ ID NO: 3689751 - DNA, 25 bp, Homo sapien
cttgatagctaaaaacagattcgca

SEQ ID NO: 3689752 - DNA, 25 bp, Homo sapien
cgtggatgccacttgatagctaaaa

SEQ ID NO: 3689753 - DNA, 25 bp, Homo sapien
aaacagattcgcagaggaatctctc

SEQ ID NO: 3689754 - DNA, 25 bp, Homo sapien
tcctagggttagaggcaattacagc

SEQ ID NO: 3689755 - DNA, 25 bp, Homo sapien
gcctggtgaggcctaatgtaacaga

SEQ ID NO: 3689756 - DNA, 25 bp, Homo sapien
tatagacagaccaggaggtatcgta

SEQ ID NO: 3689757 - DNA, 25 bp, Homo sapien
cagtgctgtgattccggctcattgc

SEQ ID NO: 3689758 - DNA, 25 bp, Homo sapien
tttttccatccgagcaacttgctga

SEQ ID NO: 3689759 - DNA, 25 bp, Homo sapien
agcctccagctcttctaccaaacca

SEQ ID NO: 3689760 - DNA, 25 bp, Homo sapien
gcagctgctcgatgggcttaaaccg

SEQ ID NO: 3689761 - DNA, 25 bp, Homo sapien
gatgggcttaaaccgccactcgtca

SEQ ID NO: 3689762 - DNA, 25 bp, Homo sapien
tttgcacttgctgcgcaccagaggt

SEQ ID NO: 3689763 - DNA, 25 bp, Homo sapien
aaatctgatatatgccctacttggc

SEQ ID NO: 3689764 - DNA, 25 bp, Homo sapien
ggatctctggatggctatgtaagct

SEQ ID NO: 3689765 - DNA, 25 bp, Homo sapien
tgacaggacagacgccattcagttg

SEQ ID NO: 3689766 - DNA, 25 bp, Homo sapien
aaaggattttgcttactgctttatt

SEQ ID NO: 3689767 - DNA, 25 bp, Homo sapien
aattgcttgagtccaccaatgagaa

SEQ ID NO: 3689768 - DNA, 25 bp, Homo sapien
cttgagtccaccaatgagaagaact

SEQ ID NO: 3689769 - DNA, 25 bp, Homo sapien
ttgcttgagtccaccaatgagaaga

SEQ ID NO: 3689770 - DNA, 25 bp, Homo sapien
gagtccaccaatgagaagaactcag

SEQ ID NO: 3689771 - DNA, 25 bp, Homo sapien
tctgcctgggctatgtgaccatgag

SEQ ID NO: 3689772 - DNA, 25 bp, Homo sapien
cctcccgtcaggtagaatgtgttaa

SEQ ID NO: 3689773 - DNA, 25 bp, Homo sapien
taagcaactctaagcagatcagatg

SEQ ID NO: 3689774 - DNA, 25 bp, Homo sapien
gggctcaggctcttaaccgactgaa

SEQ ID NO: 3689775 - DNA, 25 bp, Homo sapien
acttgcccaaaagggcgccagcttc

SEQ ID NO: 3689776 - DNA, 25 bp, Homo sapien
gaggtgaaagttctagccttaaggc

SEQ ID NO: 3689777 - DNA, 25 bp, Homo sapien
gatgataggaatctcccagctctgg

SEQ ID NO: 3689778 - DNA, 25 bp, Homo sapien
accacttctgtatctggtactctga

SEQ ID NO: 3689779 - DNA, 25 bp, Homo sapien
ccatgaggacggcagggaaccacca

SEQ ID NO: 3689780 - DNA, 25 bp, Homo sapien
accagtgccctttgccttggctcat

SEQ ID NO: 3689781 - DNA, 25 bp, Homo sapien
gacggcagggaaccaccagtgccct

SEQ ID NO: 3689782 - DNA, 25 bp, Homo sapien
aggagcccatgaggacggcagggaa

SEQ ID NO: 3689783 - DNA, 25 bp, Homo sapien
taactgtgaggtgagattagctcgt

SEQ ID NO: 3689784 - DNA, 25 bp, Homo sapien
cgtggttgctgacatgtgaacctac

SEQ ID NO: 3689785 - DNA, 25 bp, Homo sapien
acttgacagacacgagaaattagag

SEQ ID NO: 3689786 - DNA, 25 bp, Homo sapien
cctggcctctaaacagcttatatta

SEQ ID NO: 3689787 - DNA, 25 bp, Homo sapien
gttgcatgaggcttttagaagtgcc

SEQ ID NO: 3689788 - DNA, 25 bp, Homo sapien
agagatctatcagctgcttgccagc

SEQ ID NO: 3689789 - DNA, 25 bp, Homo sapien
tggtgaattctcacaacagcaaaat

SEQ ID NO: 3689790 - DNA, 25 bp, Homo sapien
gtttctcctgctagttgcatgaggc

SEQ ID NO: 3689791 - DNA, 25 bp, Homo sapien
gaatcgcaaccctttgtgatggaaa

SEQ ID NO: 3689792 - DNA, 25 bp, Homo sapien
ggtcccaggagagcaaccaatgcag

SEQ ID NO: 3689793 - DNA, 25 bp, Homo sapien
tgctataatatgttgtcccaccgag

SEQ ID NO: 3689794 - DNA, 25 bp, Homo sapien
gccaagtttggagcagaacatccta

SEQ ID NO: 3689795 - DNA, 25 bp, Homo sapien
cccattgcctttagagccagtctgg

SEQ ID NO: 3689796 - DNA, 25 bp, Homo sapien
gcttagttcagcctcgcaagcctcg

SEQ ID NO: 3689797 - DNA, 25 bp, Homo sapien
tgttcagcctcactaggacctccct

SEQ ID NO: 3689798 - DNA, 25 bp, Homo sapien
tagagccagtctggctgcttagttc

SEQ ID NO: 3689799 - DNA, 25 bp, Homo sapien
ggttggcgcctttctggtgagagcc

SEQ ID NO: 3689800 - DNA, 25 bp, Homo sapien
tgggggcagggcgcagggttggcgc

SEQ ID NO: 3689801 - DNA, 25 bp, Homo sapien
cagggttggcgcctttctggtgaga

SEQ ID NO: 3689802 - DNA, 25 bp, Homo sapien
cgcagggttggcgcctttctggtga

SEQ ID NO: 3689803 - DNA, 25 bp, Homo sapien
cctcccactgcccgggaggagggca

SEQ ID NO: 3689804 - DNA, 25 bp, Homo sapien
tcctcccactgcccgggaggagggc

SEQ ID NO: 3689805 - DNA, 25 bp, Homo sapien
cccagaattcaggatggaaacccct

SEQ ID NO: 3689806 - DNA, 25 bp, Homo sapien
cgttcaggcggttccgtctggagca

SEQ ID NO: 3689807 - DNA, 25 bp, Homo sapien
gtctggcaagtcaccctggtcgggt

SEQ ID NO: 3689808 - DNA, 25 bp, Homo sapien
agctcgctcgcatgcctctgcttgg

SEQ ID NO: 3689809 - DNA, 25 bp, Homo sapien
ccagcgctcgcctagcgctttgtgt

SEQ ID NO: 3689810 - DNA, 25 bp, Homo sapien
gctcgcctagcgctttgtgtaaaag

SEQ ID NO: 3689811 - DNA, 25 bp, Homo sapien
gcctagcgctttgtgtaaaagatcc

SEQ ID NO: 3689812 - DNA, 25 bp, Homo sapien
gtcctagcacccagcgctcgcctag

SEQ ID NO: 3689813 - DNA, 25 bp, Homo sapien
tcttggatcctaaagcttcgggaac

SEQ ID NO: 3689814 - DNA, 25 bp, Homo sapien
ccccagcgtcttggatcctaaagct

SEQ ID NO: 3689815 - DNA, 25 bp, Homo sapien
ttcgggaacaactgggcacacacgg

SEQ ID NO: 3689816 - DNA, 25 bp, Homo sapien
caaggaaaatggttgcccccagcgt

SEQ ID NO: 3689817 - DNA, 25 bp, Homo sapien
ttctggaaaggatccgcggcggctg

SEQ ID NO: 3689818 - DNA, 25 bp, Homo sapien
agctgccaaggtccccgagggcgct

SEQ ID NO: 3689819 - DNA, 25 bp, Homo sapien
tattatagggttgcattgctggagg

SEQ ID NO: 3689820 - DNA, 25 bp, Homo sapien
gcggcaggggaggatcaaggaaaga

SEQ ID NO: 3689821 - DNA, 25 bp, Homo sapien
aatgggtgtgcgaacccgtgccaac

SEQ ID NO: 3689822 - DNA, 25 bp, Homo sapien
tccgggcgcacgtaagcaacgttct

SEQ ID NO: 3689823 - DNA, 25 bp, Homo sapien
cagcctataaggactagcgcggcga

SEQ ID NO: 3689824 - DNA, 25 bp, Homo sapien
tgctaagacaagtgcgtcctgccgc

SEQ ID NO: 3689825 - DNA, 25 bp, Homo sapien
agaccagaccgcgagctctaggacc

SEQ ID NO: 3689826 - DNA, 25 bp, Homo sapien
accaggcgtcagtctggggaccaga

SEQ ID NO: 3689827 - DNA, 25 bp, Homo sapien
agaccagaccagaccgcgagctcta

SEQ ID NO: 3689828 - DNA, 25 bp, Homo sapien
aagagggggaccgaccaggcgtcag

SEQ ID NO: 3689829 - DNA, 25 bp, Homo sapien
ctcagagtgccggagcgtagaagcc

SEQ ID NO: 3689830 - DNA, 25 bp, Homo sapien
ctgatgaactcagagtgccggagcg

SEQ ID NO: 3689831 - DNA, 25 bp, Homo sapien
tgaactcagagtgccggagcgtaga

SEQ ID NO: 3689832 - DNA, 25 bp, Homo sapien
gaggacagacgccagggcgtttgct

SEQ ID NO: 3689833 - DNA, 25 bp, Homo sapien
tccaggctcgtggagcggtcaaacc

SEQ ID NO: 3689834 - DNA, 25 bp, Homo sapien
tggacgacgacgagaagcggtccca

SEQ ID NO: 3689835 - DNA, 25 bp, Homo sapien
tccagggactcgcagtccgagctct

SEQ ID NO: 3689836 - DNA, 25 bp, Homo sapien
gacgagaagcggtcccaaaggctag

SEQ ID NO: 3689837 - DNA, 25 bp, Homo sapien
cttcaaaacgaaacgcacaggcggg

SEQ ID NO: 3689838 - DNA, 25 bp, Homo sapien
gtattagagcggcttcaaaacgaaa

SEQ ID NO: 3689839 - DNA, 25 bp, Homo sapien
gagcggcttcaaaacgaaacgcaca

SEQ ID NO: 3689840 - DNA, 25 bp, Homo sapien
gaagccaaggcggctctgacccctt

SEQ ID NO: 3689841 - DNA, 25 bp, Homo sapien
tggcggagctaaacagcccctggat

SEQ ID NO: 3689842 - DNA, 25 bp, Homo sapien
taccaactggctaggcatcagcagg

SEQ ID NO: 3689843 - DNA, 25 bp, Homo sapien
cacacaagtgttcatcctcagggtc

SEQ ID NO: 3689844 - DNA, 25 bp, Homo sapien
cactgagcagctcgaagtcgggcaa

SEQ ID NO: 3689845 - DNA, 25 bp, Homo sapien
tacaacaggtcagtagtgatgctcc

SEQ ID NO: 3689846 - DNA, 25 bp, Homo sapien
caccccaaaagttcagtcgtctctg

SEQ ID NO: 3689847 - DNA, 25 bp, Homo sapien
catgcgtctgtaagatagctgccta

SEQ ID NO: 3689848 - DNA, 25 bp, Homo sapien
ggtatgtgtccccaatgcacagcca

SEQ ID NO: 3689849 - DNA, 25 bp, Homo sapien
gctgccaggtgtaatttttcaagtg

SEQ ID NO: 3689850 - DNA, 25 bp, Homo sapien
gggaaggcttaaacgcagctgccag

SEQ ID NO: 3689851 - DNA, 25 bp, Homo sapien
gctcaactctgcagtacacgatggg

SEQ ID NO: 3689852 - DNA, 25 bp, Homo sapien
gcttaaacgcagctgccaggtgtaa

SEQ ID NO: 3689853 - DNA, 25 bp, Homo sapien
gaacagtgagtatcttatcttcatg

SEQ ID NO: 3689854 - DNA, 25 bp, Homo sapien
ccagatggcactcctcccggggagg

SEQ ID NO: 3689855 - DNA, 25 bp, Homo sapien
aacagttctagatggaagacccaga

SEQ ID NO: 3689856 - DNA, 25 bp, Homo sapien
tcttcatgtaaacagttctagatgg

SEQ ID NO: 3689857 - DNA, 25 bp, Homo sapien
aatattgcataggtcttaatacttg

SEQ ID NO: 3689858 - DNA, 25 bp, Homo sapien
aaaatattgcataggtcttaatact

SEQ ID NO: 3689859 - DNA, 25 bp, Homo sapien
aaaaatattgcataggtcttaatac

SEQ ID NO: 3689860 - DNA, 25 bp, Homo sapien
tattgcataggtcttaatacttgaa

SEQ ID NO: 3689861 - DNA, 25 bp, Homo sapien
gcacttctaatccaagtttatccat

SEQ ID NO: 3689862 - DNA, 25 bp, Homo sapien
ttcactgttctcactatccatttcc

SEQ ID NO: 3689863 - DNA, 25 bp, Homo sapien
ggcaccttcttcactgttctcacta

SEQ ID NO: 3689864 - DNA, 25 bp, Homo sapien
tttccaaatgcacttctaatccaag

SEQ ID NO: 3689865 - DNA, 25 bp, Homo sapien
agaatgagggaagccagtttggctc

SEQ ID NO: 3689866 - DNA, 25 bp, Homo sapien
ctgtgagaatgagggaagccagttt

SEQ ID NO: 3689867 - DNA, 25 bp, Homo sapien
tgagaatgagggaagccagtttggc

SEQ ID NO: 3689868 - DNA, 25 bp, Homo sapien
aatgagggaagccagtttggctctg

SEQ ID NO: 3689869 - DNA, 25 bp, Homo sapien
cccacttgcggacccttctgtcctg

SEQ ID NO: 3689870 - DNA, 25 bp, Homo sapien
gctcccacttgcggacccttctgtc

SEQ ID NO: 3689871 - DNA, 25 bp, Homo sapien
gggctcccacttgcggacccttctg

SEQ ID NO: 3689872 - DNA, 25 bp, Homo sapien
agggctcccacttgcggacccttct

SEQ ID NO: 3689873 - DNA, 25 bp, Homo sapien
caagtccggtacctggggcaaagct

SEQ ID NO: 3689874 - DNA, 25 bp, Homo sapien
cttccctttactgtgagactcaagc

SEQ ID NO: 3689875 - DNA, 25 bp, Homo sapien
cagacctcaggacccagaactgtct

SEQ ID NO: 3689876 - DNA, 25 bp, Homo sapien
tctgaaagcatttaccaaagttgat

SEQ ID NO: 3689877 - DNA, 25 bp, Homo sapien
ggctgcatctgctgccccagaagtt

SEQ ID NO: 3689878 - DNA, 25 bp, Homo sapien
cacatagccacaggctgcatctgct

SEQ ID NO: 3689879 - DNA, 25 bp, Homo sapien
tctacattcagagccgccagctcca

SEQ ID NO: 3689880 - DNA, 25 bp, Homo sapien
agagccgccagctccacatagccac

SEQ ID NO: 3689881 - DNA, 25 bp, Homo sapien
tgactttctcttgcagcccacatgg

SEQ ID NO: 3689882 - DNA, 25 bp, Homo sapien
actttctcttgcagcccacatggac

SEQ ID NO: 3689883 - DNA, 25 bp, Homo sapien
gactttctcttgcagcccacatgga

SEQ ID NO: 3689884 - DNA, 25 bp, Homo sapien
tttgactttctcttgcagcccacat

SEQ ID NO: 3689885 - DNA, 25 bp, Homo sapien
agtgggtgcagcaggacttgcctgt

SEQ ID NO: 3689886 - DNA, 25 bp, Homo sapien
tgggtgcagcaggacttgcctgttg

SEQ ID NO: 3689887 - DNA, 25 bp, Homo sapien
gtgcagcaggacttgcctgttgagg

SEQ ID NO: 3689888 - DNA, 25 bp, Homo sapien
gagtgggtgcagcaggacttgcctg

SEQ ID NO: 3689889 - DNA, 25 bp, Homo sapien
ctccagcacctacggcctctgggag

SEQ ID NO: 3689890 - DNA, 25 bp, Homo sapien
ctcgtgctccagcacctacggcctc

SEQ ID NO: 3689891 - DNA, 25 bp, Homo sapien
tccccaacctgctgattaaccaagt

SEQ ID NO: 3689892 - DNA, 25 bp, Homo sapien
cctccccaacctgctgattaaccaa

SEQ ID NO: 3689893 - DNA, 25 bp, Homo sapien
tcgtgccaagccgtgagactcggtg

SEQ ID NO: 3689894 - DNA, 25 bp, Homo sapien
taaccgccgcaaactggtaacagcg

SEQ ID NO: 3689895 - DNA, 25 bp, Homo sapien
gactcggtggtttcctgcagcaaat

SEQ ID NO: 3689896 - DNA, 25 bp, Homo sapien
gcccggaaggaagagttcgtgccaa

SEQ ID NO: 3689897 - DNA, 25 bp, Homo sapien
ttcccagatgtgagaatgatgtggc

SEQ ID NO: 3689898 - DNA, 25 bp, Homo sapien
cccagatgtgagaatgatgtggccg

SEQ ID NO: 3689899 - DNA, 25 bp, Homo sapien
tcagttcccagatgtgagaatgatg

SEQ ID NO: 3689900 - DNA, 25 bp, Homo sapien
aatgatgtggccgggttggtggtta

SEQ ID NO: 3689901 - DNA, 25 bp, Homo sapien
ccctgggtcggggtcacgctcgctg

SEQ ID NO: 3689902 - DNA, 25 bp, Homo sapien
tagcgggtgacgcatctctcccagt

SEQ ID NO: 3689903 - DNA, 25 bp, Homo sapien
gtcacgctcgctgggcgcgcctcgg

SEQ ID NO: 3689904 - DNA, 25 bp, Homo sapien
cccgcgatcctacgggcgcagccgt

SEQ ID NO: 3689905 - DNA, 25 bp, Homo sapien
ccatatgagatttcctgggactcgg

SEQ ID NO: 3689906 - DNA, 25 bp, Homo sapien
aatcaccccatatgagatttcctgg

SEQ ID NO: 3689907 - DNA, 25 bp, Homo sapien
gagatttcctgggactcggtcccca

SEQ ID NO: 3689908 - DNA, 25 bp, Homo sapien
ctggacctgggaatcaccccatatg

SEQ ID NO: 3689909 - DNA, 25 bp, Homo sapien
cagacacagtgcaagcctgcaaggg

SEQ ID NO: 3689910 - DNA, 25 bp, Homo sapien
acacagtgcaagcctgcaagggcat

SEQ ID NO: 3689911 - DNA, 25 bp, Homo sapien
gacacagtgcaagcctgcaagggca

SEQ ID NO: 3689912 - DNA, 25 bp, Homo sapien
tggcagacacagtgcaagcctgcaa

SEQ ID NO: 3689913 - DNA, 25 bp, Homo sapien
agcagggctttgacagcggcaaaca

SEQ ID NO: 3689914 - DNA, 25 bp, Homo sapien
tcgtgcgggatgaagggcctggttc

SEQ ID NO: 3689915 - DNA, 25 bp, Homo sapien
tgacggcagggtgtgggtagcagtg

SEQ ID NO: 3689916 - DNA, 25 bp, Homo sapien
caaacagcacgtgggagtgtgttga

SEQ ID NO: 3689917 - DNA, 25 bp, Homo sapien
aaagactggagcaggtttgccggcc

SEQ ID NO: 3689918 - DNA, 25 bp, Homo sapien
ctggagcaggtttgccggccaagaa

SEQ ID NO: 3689919 - DNA, 25 bp, Homo sapien
taaaaaagactggagcaggtttgcc

SEQ ID NO: 3689920 - DNA, 25 bp, Homo sapien
caggataaaaaagactggagcaggt

SEQ ID NO: 3689921 - DNA, 25 bp, Homo sapien
ccagacacctttgatggctgccctt

SEQ ID NO: 3689922 - DNA, 25 bp, Homo sapien
cagacacctttgatggctgcccttt

SEQ ID NO: 3689923 - DNA, 25 bp, Homo sapien
cagcagggtggactgaggacccact

SEQ ID NO: 3689924 - DNA, 25 bp, Homo sapien
cctcgcccagcccggcttcatgagt

SEQ ID NO: 3689925 - DNA, 25 bp, Homo sapien
gggtggactgaggacccactgtgtg

SEQ ID NO: 3689926 - DNA, 25 bp, Homo sapien
ggtcagcagggtggactgaggaccc

SEQ ID NO: 3689927 - DNA, 25 bp, Homo sapien
acaggcccacagtgcagtccgaggc

SEQ ID NO: 3689928 - DNA, 25 bp, Homo sapien
tccgaggcctgatgaggtctgctga

SEQ ID NO: 3689929 - DNA, 25 bp, Homo sapien
cagtccgaggcctgatgaggtctgc

SEQ ID NO: 3689930 - DNA, 25 bp, Homo sapien
aggctccacagtccatcagagaccc

SEQ ID NO: 3689931 - DNA, 25 bp, Homo sapien
ggtgttcaggctgtgagtgacaggc

SEQ ID NO: 3689932 - DNA, 25 bp, Homo sapien
tgcaggggccacatgggcagcaagt

SEQ ID NO: 3689933 - DNA, 25 bp, Homo sapien
aggggccacatgggcagcaagtgtg

SEQ ID NO: 3689934 - DNA, 25 bp, Homo sapien
ggccacatgggcagcaagtgtgtcc

SEQ ID NO: 3689935 - DNA, 25 bp, Homo sapien
ctgcaggggccacatgggcagcaag

SEQ ID NO: 3689936 - DNA, 25 bp, Homo sapien
catggcctgcgtgcagaaggtggca

SEQ ID NO: 3689937 - DNA, 25 bp, Homo sapien
ggcatcgtgggccctaattttgctt

SEQ ID NO: 3689938 - DNA, 25 bp, Homo sapien
cccatggcctgcgtgcagaaggtgg

SEQ ID NO: 3689939 - DNA, 25 bp, Homo sapien
catcgtgggccctaattttgcttcc

SEQ ID NO: 3689940 - DNA, 25 bp, Homo sapien
tcagccacggtgtgcatccagctgg

SEQ ID NO: 3689941 - DNA, 25 bp, Homo sapien
agcagtcgctcatgggacgggcact

SEQ ID NO: 3689942 - DNA, 25 bp, Homo sapien
tttcctgcctccggggggaagcaga

SEQ ID NO: 3689943 - DNA, 25 bp, Homo sapien
cacggtgtgcatccagctggacggt

SEQ ID NO: 3689944 - DNA, 25 bp, Homo sapien
ttcactcgctgttgatgtgaccgcc

SEQ ID NO: 3689945 - DNA, 25 bp, Homo sapien
ggcctcctctcgtaccttggacaaa

SEQ ID NO: 3689946 - DNA, 25 bp, Homo sapien
tggtagatgtccctagacgggctga

SEQ ID NO: 3689947 - DNA, 25 bp, Homo sapien
taagaactgatgtggccagagtgcc

SEQ ID NO: 3689948 - DNA, 25 bp, Homo sapien
ggctgcttccctccctcgcagggct

SEQ ID NO: 3689949 - DNA, 25 bp, Homo sapien
atggggctgcttccctccctcgcag

SEQ ID NO: 3689950 - DNA, 25 bp, Homo sapien
gctgcttccctccctcgcagggctg

SEQ ID NO: 3689951 - DNA, 25 bp, Homo sapien
ggggctgcttccctccctcgcaggg

SEQ ID NO: 3689952 - DNA, 25 bp, Homo sapien
gaggacatttcatgagccgttaggg

SEQ ID NO: 3689953 - DNA, 25 bp, Homo sapien
gctacacagtgggtgcacatcttca

SEQ ID NO: 3689954 - DNA, 25 bp, Homo sapien
gagtgaacttgaggacatttcatga

SEQ ID NO: 3689955 - DNA, 25 bp, Homo sapien
tgaatgcttagtctcgactgccagg

SEQ ID NO: 3689956 - DNA, 25 bp, Homo sapien
taatttcggcggctttgtgactctt

SEQ ID NO: 3689957 - DNA, 25 bp, Homo sapien
tgccaaccctgacgaagaacctctg

SEQ ID NO: 3689958 - DNA, 25 bp, Homo sapien
tttgcatataatttcggcggctttg

SEQ ID NO: 3689959 - DNA, 25 bp, Homo sapien
tttcggcggctttgtgactcttccc

SEQ ID NO: 3689960 - DNA, 25 bp, Homo sapien
gaaattgcagcgagagctacagaac

SEQ ID NO: 3689961 - DNA, 25 bp, Homo sapien
tcccctaagaaattgcagcgagagc

SEQ ID NO: 3689962 - DNA, 25 bp, Homo sapien
gagagctacagaacttttccctaaa

SEQ ID NO: 3689963 - DNA, 25 bp, Homo sapien
ctattcaactaggactcttaagctt

SEQ ID NO: 3689964 - DNA, 25 bp, Homo sapien
ctcatcctgattctcgtgtcagctc

SEQ ID NO: 3689965 - DNA, 25 bp, Homo sapien
ccaagaccgtgagtacatgggtgag

SEQ ID NO: 3689966 - DNA, 25 bp, Homo sapien
gcagctgatgcctatcctcatcctg

SEQ ID NO: 3689967 - DNA, 25 bp, Homo sapien
tacagtctgagtccaagaccgtgag

SEQ ID NO: 3689968 - DNA, 25 bp, Homo sapien
gaacggcagagtggtgtcatgtctc

SEQ ID NO: 3689969 - DNA, 25 bp, Homo sapien
agtggtgtcatgtctccccaggctc

SEQ ID NO: 3689970 - DNA, 25 bp, Homo sapien
tccactattctaggggagctagtgg

SEQ ID NO: 3689971 - DNA, 25 bp, Homo sapien
gagctagtggtgattatggctgaca

SEQ ID NO: 3689972 - DNA, 25 bp, Homo sapien
ttcctcctgtatttcacaccagttg

SEQ ID NO: 3689973 - DNA, 25 bp, Homo sapien
aacttgtatatactgcatgtctcct

SEQ ID NO: 3689974 - DNA, 25 bp, Homo sapien
acttgtatatactgcatgtctcctt

SEQ ID NO: 3689975 - DNA, 25 bp, Homo sapien
aaacttgtatatactgcatgtctcc

SEQ ID NO: 3689976 - DNA, 25 bp, Homo sapien
gtttgctttttctgcaccctagaac

SEQ ID NO: 3689977 - DNA, 25 bp, Homo sapien
tgtttgctttttctgcaccctagaa

SEQ ID NO: 3689978 - DNA, 25 bp, Homo sapien
taagaaccataacaaccggcctggc

SEQ ID NO: 3689979 - DNA, 25 bp, Homo sapien
tgcatttcaccataaggacctaagt

SEQ ID NO: 3689980 - DNA, 25 bp, Homo sapien
cattgtccccgcacagtttggttag

SEQ ID NO: 3689981 - DNA, 25 bp, Homo sapien
gaatcatctagtatggtggacctaa

SEQ ID NO: 3689982 - DNA, 25 bp, Homo sapien
aatgatgaggatgacctaggcaccc

SEQ ID NO: 3689983 - DNA, 25 bp, Homo sapien
tacgctagtgtgagaagcctgcgcc

SEQ ID NO: 3689984 - DNA, 25 bp, Homo sapien
cagcctccctaagatgactccagtg

SEQ ID NO: 3689985 - DNA, 25 bp, Homo sapien
tagggaagatatctggcaggcagaa

SEQ ID NO: 3689986 - DNA, 25 bp, Homo sapien
tcgcctcatgcaggccatgtggaaa

SEQ ID NO: 3689987 - DNA, 25 bp, Homo sapien
tgaagcaacggctgatgagaggcct

SEQ ID NO: 3689988 - DNA, 25 bp, Homo sapien
cctggaaaagcccaaagacatgggt

SEQ ID NO: 3689989 - DNA, 25 bp, Homo sapien
agacatgggtttcactcgcctcatg

SEQ ID NO: 3689990 - DNA, 25 bp, Homo sapien
tcttctccaaatcattccagtttga

SEQ ID NO: 3689991 - DNA, 25 bp, Homo sapien
cttctccaaatcattccagtttgag

SEQ ID NO: 3689992 - DNA, 25 bp, Homo sapien
ccaaatcattccagtttgagtatat

SEQ ID NO: 3689993 - DNA, 25 bp, Homo sapien
tctccaaatcattccagtttgagta

SEQ ID NO: 3689994 - DNA, 25 bp, Homo sapien
tggagcccactgaaaatggataccc

SEQ ID NO: 3689995 - DNA, 25 bp, Homo sapien
taaagatattgacttgagaccgggt

SEQ ID NO: 3689996 - DNA, 25 bp, Homo sapien
taccctctttgcctctattagacag

SEQ ID NO: 3689997 - DNA, 25 bp, Homo sapien
taatttgcttcatgctggagcccac

SEQ ID NO: 3689998 - DNA, 25 bp, Homo sapien
aaaaatttcgtctaaggctactgag

SEQ ID NO: 3689999 - DNA, 25 bp, Homo sapien
gagttccttggagataggtgccaaa

SEQ ID NO: 3690000 - DNA, 25 bp, Homo sapien
tagcaagtaggatgtcagtcaaaac

SEQ ID NO: 3690001 - DNA, 25 bp, Homo sapien
ggctactgagaactattgagttcct

SEQ ID NO: 3690002 - DNA, 25 bp, Homo sapien
tgagccagccctttcatggccgcca

SEQ ID NO: 3690003 - DNA, 25 bp, Homo sapien
gagccagccctttcatggccgccat

SEQ ID NO: 3690004 - DNA, 25 bp, Homo sapien
tcagaatcctctgggcgagcgcatg

SEQ ID NO: 3690005 - DNA, 25 bp, Homo sapien
gggttcaactgtactgctccgcttc

SEQ ID NO: 3690006 - DNA, 25 bp, Homo sapien
tcctctgggcgagcgcatgactgtc

SEQ ID NO: 3690007 - DNA, 25 bp, Homo sapien
tctttgcctaaatatagctctgcag

SEQ ID NO: 3690008 - DNA, 25 bp, Homo sapien
tttttacctcggatgaagccgtcca

SEQ ID NO: 3690009 - DNA, 25 bp, Homo sapien
gaagagcagcaaaattgcccaaccc

SEQ ID NO: 3690010 - DNA, 25 bp, Homo sapien
aggcagaagagcagcaaaattgccc

SEQ ID NO: 3690011 - DNA, 25 bp, Homo sapien
aagagcagcaaaattgcccaacccc

SEQ ID NO: 3690012 - DNA, 25 bp, Homo sapien
gcagaagagcagcaaaattgcccaa

SEQ ID NO: 3690013 - DNA, 25 bp, Homo sapien
tggacgaagacaaattgaggggaaa

SEQ ID NO: 3690014 - DNA, 25 bp, Homo sapien
ctggacgaagacaaattgaggggaa

SEQ ID NO: 3690015 - DNA, 25 bp, Homo sapien
gctccttaggctttccagtggtgga

SEQ ID NO: 3690016 - DNA, 25 bp, Homo sapien
tttccactagtaggaggaagccctc

SEQ ID NO: 3690017 - DNA, 25 bp, Homo sapien
cagtggtggaacgtcagtgaaaaac

SEQ ID NO: 3690018 - DNA, 25 bp, Homo sapien
gactgtcccggttcataattctgtt

SEQ ID NO: 3690019 - DNA, 25 bp, Homo sapien
ctttgaagaggcaattttcctcctc

SEQ ID NO: 3690020 - DNA, 25 bp, Homo sapien
tcctctcgtttcactaccaaattca

SEQ ID NO: 3690021 - DNA, 25 bp, Homo sapien
gaagaggcaattttcctcctctcgt

SEQ ID NO: 3690022 - DNA, 25 bp, Homo sapien
cctctcgtttcactaccaaattcat

SEQ ID NO: 3690023 - DNA, 25 bp, Homo sapien
tttccatggaatcaattccttgtgg

SEQ ID NO: 3690024 - DNA, 25 bp, Homo sapien
gaatagcatatgtcgccctgtaaag

SEQ ID NO: 3690025 - DNA, 25 bp, Homo sapien
tgctatatgggctgatactgccacc

SEQ ID NO: 3690026 - DNA, 25 bp, Homo sapien
ttatgtctgcataaattttgtcctc

SEQ ID NO: 3690027 - DNA, 25 bp, Homo sapien
gtagatgaacgatatgaacagacac

SEQ ID NO: 3690028 - DNA, 25 bp, Homo sapien
gaagcaggacaccaaagtatatact

SEQ ID NO: 3690029 - DNA, 25 bp, Homo sapien
attacagtgtggatgaatcttcccc

SEQ ID NO: 3690030 - DNA, 25 bp, Homo sapien
tgttccatatcttgataaagacgtc

SEQ ID NO: 3690031 - DNA, 25 bp, Homo sapien
tactcagttttagctcctctttcaa

SEQ ID NO: 3690032 - DNA, 25 bp, Homo sapien
gtaattaatttgcaaaagtgaattg

SEQ ID NO: 3690033 - DNA, 25 bp, Homo sapien
taatttgcaaaagtgaattgaggaa

SEQ ID NO: 3690034 - DNA, 25 bp, Homo sapien
actcagttttagctcctctttcaaa

SEQ ID NO: 3690035 - DNA, 25 bp, Homo sapien
cctgggttcccaagcgattctcctg

SEQ ID NO: 3690036 - DNA, 25 bp, Homo sapien
tgcaatgtcgtgatctcggcccact

SEQ ID NO: 3690037 - DNA, 25 bp, Homo sapien
gcaacctctgcctcctgggttccca

SEQ ID NO: 3690038 - DNA, 25 bp, Homo sapien
tgcccagcctctagagctatcttag

SEQ ID NO: 3690039 - DNA, 25 bp, Homo sapien
gtgaggttcctctagtctgacttgg

SEQ ID NO: 3690040 - DNA, 25 bp, Homo sapien
ttggtagagcttgattgtttcctgc

SEQ ID NO: 3690041 - DNA, 25 bp, Homo sapien
tctttctgggatgttactaaatgcc

SEQ ID NO: 3690042 - DNA, 25 bp, Homo sapien
ccctgtgagtgagagtagacctttt

SEQ ID NO: 3690043 - DNA, 25 bp, Homo sapien
aaattccgctggcatgagttgtcca

SEQ ID NO: 3690044 - DNA, 25 bp, Homo sapien
tcagtagagagactagaaggaccct

SEQ ID NO: 3690045 - DNA, 25 bp, Homo sapien
aactagtgggacactcaatggcacc

SEQ ID NO: 3690046 - DNA, 25 bp, Homo sapien
tggtgttaccatattgatattgaac

SEQ ID NO: 3690047 - DNA, 25 bp, Homo sapien
gatattgaacttattgtggacactc

SEQ ID NO: 3690048 - DNA, 25 bp, Homo sapien
cgatggtcatgtagcacactatagc

SEQ ID NO: 3690049 - DNA, 25 bp, Homo sapien
acttattgtggacactcgatggtca

SEQ ID NO: 3690050 - DNA, 25 bp, Homo sapien
caagcagccgagactatagggacac

SEQ ID NO: 3690051 - DNA, 25 bp, Homo sapien
catgtacctctcgtcaaaactgggt

SEQ ID NO: 3690052 - DNA, 25 bp, Homo sapien
cgttgtgacagtgatggagttgctt

SEQ ID NO: 3690053 - DNA, 25 bp, Homo sapien
acagtgcccagatagcgttgtgaca

SEQ ID NO: 3690054 - DNA, 25 bp, Homo sapien
ttttcaccgtcgcattctggccggc

SEQ ID NO: 3690055 - DNA, 25 bp, Homo sapien
ccgtcgcattctggccggccatagg

SEQ ID NO: 3690056 - DNA, 25 bp, Homo sapien
ctgttttgttttcaccgtcgcattc

SEQ ID NO: 3690057 - DNA, 25 bp, Homo sapien
tttgttttcaccgtcgcattctggc

SEQ ID NO: 3690058 - DNA, 25 bp, Homo sapien
tcttagagaacatatagaaattgag

SEQ ID NO: 3690059 - DNA, 25 bp, Homo sapien
cttagagaacatatagaaattgaga

SEQ ID NO: 3690060 - DNA, 25 bp, Homo sapien
ttcttagagaacatatagaaattga

SEQ ID NO: 3690061 - DNA, 25 bp, Homo sapien
gagcttctatagtctatggcaaata

SEQ ID NO: 3690062 - DNA, 25 bp, Homo sapien
gcctgtgcccttgcaaatacctgta

SEQ ID NO: 3690063 - DNA, 25 bp, Homo sapien
atatgaaaagtttcactgttgaaga

SEQ ID NO: 3690064 - DNA, 25 bp, Homo sapien
tttatatccctttaagcagtgcaaa

SEQ ID NO: 3690065 - DNA, 25 bp, Homo sapien
taagcagtgcaaatgcctgtgccct

SEQ ID NO: 3690066 - DNA, 25 bp, Homo sapien
aacgctgctctttaaatttagccat

SEQ ID NO: 3690067 - DNA, 25 bp, Homo sapien
gttaacaacaggtgcaaacgctgct

SEQ ID NO: 3690068 - DNA, 25 bp, Homo sapien
cagggcgtggaggaaactgtaggcg

SEQ ID NO: 3690069 - DNA, 25 bp, Homo sapien
gaaactgtaggcgtgagattggtca

SEQ ID NO: 3690070 - DNA, 25 bp, Homo sapien
gtccaatcgacaggcgggagaacca

SEQ ID NO: 3690071 - DNA, 25 bp, Homo sapien
atcgacaggcgggagaaccacactg

SEQ ID NO: 3690072 - DNA, 25 bp, Homo sapien
ctgcaaggtccaatcgacaggcggg

SEQ ID NO: 3690073 - DNA, 25 bp, Homo sapien
aggcgggagaaccacactggaagct

SEQ ID NO: 3690074 - DNA, 25 bp, Homo sapien
agcccttgactgagttgatgaggcg

SEQ ID NO: 3690075 - DNA, 25 bp, Homo sapien
taaagcccttgactgagttgatgag

SEQ ID NO: 3690076 - DNA, 25 bp, Homo sapien
caactaaagcccttgactgagttga

SEQ ID NO: 3690077 - DNA, 25 bp, Homo sapien
ccgggccaactaaagcccttgactg

SEQ ID NO: 3690078 - DNA, 25 bp, Homo sapien
ctggaaacggcgccgacccaggcag

SEQ ID NO: 3690079 - DNA, 25 bp, Homo sapien
actggaaacggcgccgacccaggca

SEQ ID NO: 3690080 - DNA, 25 bp, Homo sapien
ccggtggcggctgacgcccagccca

SEQ ID NO: 3690081 - DNA, 25 bp, Homo sapien
ggtggcggctgacgcccagcccagg

SEQ ID NO: 3690082 - DNA, 25 bp, Homo sapien
gccggtggcggctgacgcccagccc

SEQ ID NO: 3690083 - DNA, 25 bp, Homo sapien
cggtggcggctgacgcccagcccag

SEQ ID NO: 3690084 - DNA, 25 bp, Homo sapien
ttccatctggctccgttcagggagc

SEQ ID NO: 3690085 - DNA, 25 bp, Homo sapien
aggcggccgcggcaactcagaactc

SEQ ID NO: 3690086 - DNA, 25 bp, Homo sapien
aatgcagcatccatctcgagggagc

SEQ ID NO: 3690087 - DNA, 25 bp, Homo sapien
tggcacacacaaggcggccgcggca

SEQ ID NO: 3690088 - DNA, 25 bp, Homo sapien
cttcaggcacgcgtgaacacgctta

SEQ ID NO: 3690089 - DNA, 25 bp, Homo sapien
tgctgaccacccttcccgcttcagg

SEQ ID NO: 3690090 - DNA, 25 bp, Homo sapien
tatacagtagccctcgaaaggaccc

SEQ ID NO: 3690091 - DNA, 25 bp, Homo sapien
gcgtgaacacgcttatacagtagcc

SEQ ID NO: 3690092 - DNA, 25 bp, Homo sapien
tagaaattatccctgaaagtatcat

SEQ ID NO: 3690093 - DNA, 25 bp, Homo sapien
ttctagtaacgaattatagaaatta

SEQ ID NO: 3690094 - DNA, 25 bp, Homo sapien
tgtttttttctctacacatttagag

SEQ ID NO: 3690095 - DNA, 25 bp, Homo sapien
ttctctacacatttagagaaacttt

SEQ ID NO: 3690096 - DNA, 25 bp, Homo sapien
agtggctggaattatggcgcccccc

SEQ ID NO: 3690097 - DNA, 25 bp, Homo sapien
ccaagaagcacatatcttagacctc

SEQ ID NO: 3690098 - DNA, 25 bp, Homo sapien
gaagcacatatcttagacctctaac

SEQ ID NO: 3690099 - DNA, 25 bp, Homo sapien
tatcttagacctctaacagctaaca

SEQ ID NO: 3690100 - DNA, 25 bp, Homo sapien
ttcggcaatttggattagagaaaag

SEQ ID NO: 3690101 - DNA, 25 bp, Homo sapien
ctccactcccttcggcaatttggat

SEQ ID NO: 3690102 - DNA, 25 bp, Homo sapien
tctctcaactctccaactctctggg

SEQ ID NO: 3690103 - DNA, 25 bp, Homo sapien
cccttcggcaatttggattagagaa

SEQ ID NO: 3690104 - DNA, 25 bp, Homo sapien
cacactctagcagctaagatgtcac

SEQ ID NO: 3690105 - DNA, 25 bp, Homo sapien
cactgtaggaatggtagtgaaagac

SEQ ID NO: 3690106 - DNA, 25 bp, Homo sapien
gagagtgaggtagaaacggtatctt

SEQ ID NO: 3690107 - DNA, 25 bp, Homo sapien
gaaacggtatcttgccaatcactgt

SEQ ID NO: 3690108 - DNA, 25 bp, Homo sapien
tcagcattatgacacaggtcttgac

SEQ ID NO: 3690109 - DNA, 25 bp, Homo sapien
ttatgctacagtttgtcaacgcctg

SEQ ID NO: 3690110 - DNA, 25 bp, Homo sapien
tgaacgcctacacccagtgagaaag

SEQ ID NO: 3690111 - DNA, 25 bp, Homo sapien
tctgtccttatagtgccagggcaac

SEQ ID NO: 3690112 - DNA, 25 bp, Homo sapien
gaccgatcattctttactgtactaa

SEQ ID NO: 3690113 - DNA, 25 bp, Homo sapien
tgcacaactatttgaccgatcattc

SEQ ID NO: 3690114 - DNA, 25 bp, Homo sapien
gcactcgtaaacacatgaatattcc

SEQ ID NO: 3690115 - DNA, 25 bp, Homo sapien
cagcactcgtaaacacatgaatatt

SEQ ID NO: 3690116 - DNA, 25 bp, Homo sapien
gaacatctattataagacactgcag

SEQ ID NO: 3690117 - DNA, 25 bp, Homo sapien
tctgaagtttaaactaaagcatccg

SEQ ID NO: 3690118 - DNA, 25 bp, Homo sapien
tcatttcaattgatcaacatataca

SEQ ID NO: 3690119 - DNA, 25 bp, Homo sapien
tcctcaaggaggttacaatctgaag

SEQ ID NO: 3690120 - DNA, 25 bp, Homo sapien
gcaacatttacaggtagttccctac

SEQ ID NO: 3690121 - DNA, 25 bp, Homo sapien
taaaaaccagctaatccaaccatcc

SEQ ID NO: 3690122 - DNA, 25 bp, Homo sapien
gctcaggagagtaagccatgcttgt

SEQ ID NO: 3690123 - DNA, 25 bp, Homo sapien
tgtgcctaagagttgaatgtccaga

SEQ ID NO: 3690124 - DNA, 25 bp, Homo sapien
agaaaaggtacagtatacgatacta

SEQ ID NO: 3690125 - DNA, 25 bp, Homo sapien
tgtaacaaatagtataggcaactgt

SEQ ID NO: 3690126 - DNA, 25 bp, Homo sapien
ggacatatggtatgtcctattgctc

SEQ ID NO: 3690127 - DNA, 25 bp, Homo sapien
gcctactacatatctaggacatatg

SEQ ID NO: 3690128 - DNA, 25 bp, Homo sapien
tcaggagttgcccaaagagcaagct

SEQ ID NO: 3690129 - DNA, 25 bp, Homo sapien
tgtccattcgataccaaaacttgtt

SEQ ID NO: 3690130 - DNA, 25 bp, Homo sapien
taccttgaataaaatccctagcagc

SEQ ID NO: 3690131 - DNA, 25 bp, Homo sapien
aatttatctatagttcagcccctgc

SEQ ID NO: 3690132 - DNA, 25 bp, Homo sapien
taaactcctgaattttgagacgaag

SEQ ID NO: 3690133 - DNA, 25 bp, Homo sapien
atgaagtcaatctgtggatcaagcc

SEQ ID NO: 3690134 - DNA, 25 bp, Homo sapien
cagctgtgtgccaatttaaggaacc

SEQ ID NO: 3690135 - DNA, 25 bp, Homo sapien
tctgtcactaagtaggaatagcaca

SEQ ID NO: 3690136 - DNA, 25 bp, Homo sapien
ccgtgcctgacctatttctatgttt

SEQ ID NO: 3690137 - DNA, 25 bp, Homo sapien
cataacaggcactgcagcgaagtgc

SEQ ID NO: 3690138 - DNA, 25 bp, Homo sapien
atttttgtattaccaatagcaggca

SEQ ID NO: 3690139 - DNA, 25 bp, Homo sapien
ccaatagcaggcataacaggcactg

SEQ ID NO: 3690140 - DNA, 25 bp, Homo sapien
tattacacttccatggtttggtttg

SEQ ID NO: 3690141 - DNA, 25 bp, Homo sapien
ggatctcgttctgtcaagccagtgg

SEQ ID NO: 3690142 - DNA, 25 bp, Homo sapien
aaaaagatggttgtcgtaagactct

SEQ ID NO: 3690143 - DNA, 25 bp, Homo sapien
tgtcgtaagactcttgaagattaag

SEQ ID NO: 3690144 - DNA, 25 bp, Homo sapien
cccagccattatatctccttgacat

SEQ ID NO: 3690145 - DNA, 25 bp, Homo sapien
gattctcccctctaggcttctcaaa

SEQ ID NO: 3690146 - DNA, 25 bp, Homo sapien
gatagttcactagacaggaaaaaag

SEQ ID NO: 3690147 - DNA, 25 bp, Homo sapien
tatcactccttgttaatcgatctga

SEQ ID NO: 3690148 - DNA, 25 bp, Homo sapien
tgcccatgtcaccattctcaagttg

SEQ ID NO: 3690149 - DNA, 25 bp, Homo sapien
aaagctcctatcagtcaggttggag

SEQ ID NO: 3690150 - DNA, 25 bp, Homo sapien
cactctagtaaataccttatacctt

SEQ ID NO: 3690151 - DNA, 25 bp, Homo sapien
gcatataaatagcttcacactctag

SEQ ID NO: 3690152 - DNA, 25 bp, Homo sapien
gcctgggatagtccagcttaacacc

SEQ ID NO: 3690153 - DNA, 25 bp, Homo sapien
accctttaactagggtgaccatatg

SEQ ID NO: 3690154 - DNA, 25 bp, Homo sapien
tatttattgtcagcactctctttca

SEQ ID NO: 3690155 - DNA, 25 bp, Homo sapien
tagtccagcttaacacctgctcctg

SEQ ID NO: 3690156 - DNA, 25 bp, Homo sapien
tctcctaagggttgacttcaaatag

SEQ ID NO: 3690157 - DNA, 25 bp, Homo sapien
agatataaatgtgcggccgggcatg

SEQ ID NO: 3690158 - DNA, 25 bp, Homo sapien
tcctaagggttgacttcaaatagac

SEQ ID NO: 3690159 - DNA, 25 bp, Homo sapien
attaaagatataaatgtgcggccgg

SEQ ID NO: 3690160 - DNA, 25 bp, Homo sapien
cctttactgtaatgtttgggatatt

SEQ ID NO: 3690161 - DNA, 25 bp, Homo sapien
gggatatttaaagcttctattacca

SEQ ID NO: 3690162 - DNA, 25 bp, Homo sapien
gctccttccacctttactgtaatgt

SEQ ID NO: 3690163 - DNA, 25 bp, Homo sapien
tattaccataaattccaaacttaca

SEQ ID NO: 3690164 - DNA, 25 bp, Homo sapien
tatgcgcaaggcactattctaaatg

SEQ ID NO: 3690165 - DNA, 25 bp, Homo sapien
caacaagggttgaagagatgccata

SEQ ID NO: 3690166 - DNA, 25 bp, Homo sapien
taaagcaagtactctggcacaacct

SEQ ID NO: 3690167 - DNA, 25 bp, Homo sapien
taaaaactgattttggccgggctca

SEQ ID NO: 3690168 - DNA, 25 bp, Homo sapien
ggctggacccatactcctgagttcg

SEQ ID NO: 3690169 - DNA, 25 bp, Homo sapien
gatgaactctgagatcaaaactctt

SEQ ID NO: 3690170 - DNA, 25 bp, Homo sapien
cttaaggtaatatgctagctatgcc

SEQ ID NO: 3690171 - DNA, 25 bp, Homo sapien
agtaaggtcaaatcaaggagtctcc

SEQ ID NO: 3690172 - DNA, 25 bp, Homo sapien
aaatgggctatgactttgaatggtc

SEQ ID NO: 3690173 - DNA, 25 bp, Homo sapien
gattctgcaatctcctaaagtacag

SEQ ID NO: 3690174 - DNA, 25 bp, Homo sapien
taataccctcgccacaagattctgc

SEQ ID NO: 3690175 - DNA, 25 bp, Homo sapien
tgacagagcgttaaacaacctggct

SEQ ID NO: 3690176 - DNA, 25 bp, Homo sapien
tcctaggcaacttcagaaacgagaa

SEQ ID NO: 3690177 - DNA, 25 bp, Homo sapien
aaacgagaagatcatgacagacagc

SEQ ID NO: 3690178 - DNA, 25 bp, Homo sapien
gaattgcagctaagacctttcctag

SEQ ID NO: 3690179 - DNA, 25 bp, Homo sapien
catagtcctatgtaatctctgagcc

SEQ ID NO: 3690180 - DNA, 25 bp, Homo sapien
ggaaactcttcatcttaatagatag

SEQ ID NO: 3690181 - DNA, 25 bp, Homo sapien
taaaagagcctaacaagatgaagat

SEQ ID NO: 3690182 - DNA, 25 bp, Homo sapien
taaactcctgtctattcatacattc

SEQ ID NO: 3690183 - DNA, 25 bp, Homo sapien
tatcccaaaattaaactcctgtcta

SEQ ID NO: 3690184 - DNA, 25 bp, Homo sapien
catgggacttatggaacatacctcc

SEQ ID NO: 3690185 - DNA, 25 bp, Homo sapien
aggctggctaggagtttgtgcccat

SEQ ID NO: 3690186 - DNA, 25 bp, Homo sapien
tagatgtatctgcttagtgaatcaa

SEQ ID NO: 3690187 - DNA, 25 bp, Homo sapien
aatcaatattgctaagtcactgcct

SEQ ID NO: 3690188 - DNA, 25 bp, Homo sapien
agcactttgaaaggctaaggtagga

SEQ ID NO: 3690189 - DNA, 25 bp, Homo sapien
cccaggaattcaagaccagcctggc

SEQ ID NO: 3690190 - DNA, 25 bp, Homo sapien
ttgagcccaggaattcaagaccagc

SEQ ID NO: 3690191 - DNA, 25 bp, Homo sapien
tgaaaggctaaggtaggaggaacac

SEQ ID NO: 3690192 - DNA, 25 bp, Homo sapien
ataacagtggtaaaagtagccattc

SEQ ID NO: 3690193 - DNA, 25 bp, Homo sapien
ttccactcctaagagaaaaggctgt

SEQ ID NO: 3690194 - DNA, 25 bp, Homo sapien
cttccactcctaagagaaaaggctg

SEQ ID NO: 3690195 - DNA, 25 bp, Homo sapien
aaagtagccattcttatcttcttcc

SEQ ID NO: 3690196 - DNA, 25 bp, Homo sapien
tgcacttggtaaggatagtgatttt

SEQ ID NO: 3690197 - DNA, 25 bp, Homo sapien
tatcaacatgattgtgctaccactt

SEQ ID NO: 3690198 - DNA, 25 bp, Homo sapien
tcttgctagcatgaatcaattaagt

SEQ ID NO: 3690199 - DNA, 25 bp, Homo sapien
gaccagttagtcaaatattcaatcg

SEQ ID NO: 3690200 - DNA, 25 bp, Homo sapien
ttgggggctggtaatttctatagtg

SEQ ID NO: 3690201 - DNA, 25 bp, Homo sapien
gtgcctatggctctagacttcctaa

SEQ ID NO: 3690202 - DNA, 25 bp, Homo sapien
gcttttccttaatctgcttttgaaa

SEQ ID NO: 3690203 - DNA, 25 bp, Homo sapien
tctagacttcctaataagcttttcc

SEQ ID NO: 3690204 - DNA, 25 bp, Homo sapien
gagatctaatccctgctgacaactg

SEQ ID NO: 3690205 - DNA, 25 bp, Homo sapien
cacgcacacatacggacaggctttc

SEQ ID NO: 3690206 - DNA, 25 bp, Homo sapien
aatgaggagactgttcccttgactc

SEQ ID NO: 3690207 - DNA, 25 bp, Homo sapien
caactgctttgtggaactttctgtc

SEQ ID NO: 3690208 - DNA, 25 bp, Homo sapien
tgtaatatatgtggaaatgtgggag

SEQ ID NO: 3690209 - DNA, 25 bp, Homo sapien
gacggcagtagcactgccaggtttg

SEQ ID NO: 3690210 - DNA, 25 bp, Homo sapien
cagtagcactgccaggtttggctgg

SEQ ID NO: 3690211 - DNA, 25 bp, Homo sapien
gaaaagtgacggcagtagcactgcc

SEQ ID NO: 3690212 - DNA, 25 bp, Homo sapien
ttattagaaaagtgacggcagtagc

SEQ ID NO: 3690213 - DNA, 25 bp, Homo sapien
tccatttctactacgacattgacaa

SEQ ID NO: 3690214 - DNA, 25 bp, Homo sapien
tcatccatttctactacgacattga

SEQ ID NO: 3690215 - DNA, 25 bp, Homo sapien
tctactacgacattgacaattgaca

SEQ ID NO: 3690216 - DNA, 25 bp, Homo sapien
tttctactacgacattgacaattga

SEQ ID NO: 3690217 - DNA, 25 bp, Homo sapien
tctacacaagcgatataactcagat

SEQ ID NO: 3690218 - DNA, 25 bp, Homo sapien
tattcagattagttgcaccggtgat

SEQ ID NO: 3690219 - DNA, 25 bp, Homo sapien
aaggcatagccttttcagcactgtt

SEQ ID NO: 3690220 - DNA, 25 bp, Homo sapien
tcccctggactacggtatagatagg

SEQ ID NO: 3690221 - DNA, 25 bp, Homo sapien
taggtacctagctatattgtggcag

SEQ ID NO: 3690222 - DNA, 25 bp, Homo sapien
tctaggtacctagctatattgtggc

SEQ ID NO: 3690223 - DNA, 25 bp, Homo sapien
tttctaggtacctagctatattgtg

SEQ ID NO: 3690224 - DNA, 25 bp, Homo sapien
gatttctaggtacctagctatattg

SEQ ID NO: 3690225 - DNA, 25 bp, Homo sapien
gaggctacttaacctagtcgataag

SEQ ID NO: 3690226 - DNA, 25 bp, Homo sapien
aaaagtatattatggccagtcgcag

SEQ ID NO: 3690227 - DNA, 25 bp, Homo sapien
tagaccatcgcagttcatgtagaca

SEQ ID NO: 3690228 - DNA, 25 bp, Homo sapien
caatattatgggtgcactctgtacc

SEQ ID NO: 3690229 - DNA, 25 bp, Homo sapien
actgtaatcatccaaccaaatgtta

SEQ ID NO: 3690230 - DNA, 25 bp, Homo sapien
gactgcagcatgttacatgaggtca

SEQ ID NO: 3690231 - DNA, 25 bp, Homo sapien
tgttgtgttcctgcgttttgactgc

SEQ ID NO: 3690232 - DNA, 25 bp, Homo sapien
gaaaagacacatcgcaactggaagg

SEQ ID NO: 3690233 - DNA, 25 bp, Homo sapien
taagtgttagttcagctgactgtac

SEQ ID NO: 3690234 - DNA, 25 bp, Homo sapien
taaatgaaaatgctactcctgagtg

SEQ ID NO: 3690235 - DNA, 25 bp, Homo sapien
aatgtcactccttagagctgtgtta

SEQ ID NO: 3690236 - DNA, 25 bp, Homo sapien
ttctcagtgacttaaggaaccacgt

SEQ ID NO: 3690237 - DNA, 25 bp, Homo sapien
tgattctagccatgattccgcctcc

SEQ ID NO: 3690238 - DNA, 25 bp, Homo sapien
gattaatgcgtgaagctttccagaa

SEQ ID NO: 3690239 - DNA, 25 bp, Homo sapien
taaagcattaagcacagtgagcacg

SEQ ID NO: 3690240 - DNA, 25 bp, Homo sapien
gcagaggccctaaagtcacaaatgg

SEQ ID NO: 3690241 - DNA, 25 bp, Homo sapien
ctttacattgctttgcaacaatttg

SEQ ID NO: 3690242 - DNA, 25 bp, Homo sapien
tacattgctttgcaacaatttgctt

SEQ ID NO: 3690243 - DNA, 25 bp, Homo sapien
tttacattgctttgcaacaatttgc

SEQ ID NO: 3690244 - DNA, 25 bp, Homo sapien
ttacattgctttgcaacaatttgct

SEQ ID NO: 3690245 - DNA, 25 bp, Homo sapien
gatccaggaatcagaggtgacagtt

SEQ ID NO: 3690246 - DNA, 25 bp, Homo sapien
aatgttgggctaggacactgggcta

SEQ ID NO: 3690247 - DNA, 25 bp, Homo sapien
tgtttgaacgaactcttgccatgag

SEQ ID NO: 3690248 - DNA, 25 bp, Homo sapien
tacagctctggacgttacatcacat

SEQ ID NO: 3690249 - DNA, 25 bp, Homo sapien
caaaaatatgctatccatagtgcag

SEQ ID NO: 3690250 - DNA, 25 bp, Homo sapien
caatcgtgttgtttcacagtcagga

SEQ ID NO: 3690251 - DNA, 25 bp, Homo sapien
tatagacctgaagaacatagactaa

SEQ ID NO: 3690252 - DNA, 25 bp, Homo sapien
catagactaaatagacctgcaggtt

SEQ ID NO: 3690253 - DNA, 25 bp, Homo sapien
ttctgccaggaagcgatcctctggt

SEQ ID NO: 3690254 - DNA, 25 bp, Homo sapien
caaattctgccaggaagcgatcctc

SEQ ID NO: 3690255 - DNA, 25 bp, Homo sapien
aattctgccaggaagcgatcctctg

SEQ ID NO: 3690256 - DNA, 25 bp, Homo sapien
ctcccaaattctgccaggaagcgat

SEQ ID NO: 3690257 - DNA, 25 bp, Homo sapien
aacacagctacctttctggccacaa

SEQ ID NO: 3690258 - DNA, 25 bp, Homo sapien
tgcaggatgctctttcagtggttgt

SEQ ID NO: 3690259 - DNA, 25 bp, Homo sapien
aaattcacgtaacagctttgggagg

SEQ ID NO: 3690260 - DNA, 25 bp, Homo sapien
taggcacccttgtaaatttgcagga

SEQ ID NO: 3690261 - DNA, 25 bp, Homo sapien
ggtggcattatggtcctctggctct

SEQ ID NO: 3690262 - DNA, 25 bp, Homo sapien
tagaaagtactgttatctgggtaca

SEQ ID NO: 3690263 - DNA, 25 bp, Homo sapien
tggctcttggccacgtagaaagtac

SEQ ID NO: 3690264 - DNA, 25 bp, Homo sapien
tgtagcatagccaggtggcattatg

SEQ ID NO: 3690265 - DNA, 25 bp, Homo sapien
ccctgcagtggtaatggagtaagtc

SEQ ID NO: 3690266 - DNA, 25 bp, Homo sapien
ctatttaatggaccaagcagtgtca

SEQ ID NO: 3690267 - DNA, 25 bp, Homo sapien
tttattcaaactatctaatgatggc

SEQ ID NO: 3690268 - DNA, 25 bp, Homo sapien
ggacagtcaccatttggctatttaa

SEQ ID NO: 3690269 - DNA, 25 bp, Homo sapien
ccagtccctatcctggttccctcca

SEQ ID NO: 3690270 - DNA, 25 bp, Homo sapien
gaggaagtttccctggatctaagat

SEQ ID NO: 3690271 - DNA, 25 bp, Homo sapien
aggctttattcctctccatttggat

SEQ ID NO: 3690272 - DNA, 25 bp, Homo sapien
tcattgcttcctggtcccttcccag

SEQ ID NO: 3690273 - DNA, 25 bp, Homo sapien
tcttaactagatggccaagctctgt

SEQ ID NO: 3690274 - DNA, 25 bp, Homo sapien
taccaaatgttcatgtgtccaaggc

SEQ ID NO: 3690275 - DNA, 25 bp, Homo sapien
gatgcctatgcagatttccgagact

SEQ ID NO: 3690276 - DNA, 25 bp, Homo sapien
tctactgtggctagagggaagcaaa

SEQ ID NO: 3690277 - DNA, 25 bp, Homo sapien
tataaataaaatcacgctatggacc

SEQ ID NO: 3690278 - DNA, 25 bp, Homo sapien
ctatggacccttttatatctggctt

SEQ ID NO: 3690279 - DNA, 25 bp, Homo sapien
aataaaatcacgctatggacccttt

SEQ ID NO: 3690280 - DNA, 25 bp, Homo sapien
attcacctatgttgttattagtagt

SEQ ID NO: 3690281 - DNA, 25 bp, Homo sapien
tcactgcagactcgagctcccaagc

SEQ ID NO: 3690282 - DNA, 25 bp, Homo sapien
actgcagactcgagctcccaagctc

SEQ ID NO: 3690283 - DNA, 25 bp, Homo sapien
tgcagactcgagctcccaagctcaa

SEQ ID NO: 3690284 - DNA, 25 bp, Homo sapien
cagactcgagctcccaagctcaagc

SEQ ID NO: 3690285 - DNA, 25 bp, Homo sapien
ctgaatgaaaaagacccacaaacat

SEQ ID NO: 3690286 - DNA, 25 bp, Homo sapien
gatagcaactctgtcaattccccga

SEQ ID NO: 3690287 - DNA, 25 bp, Homo sapien
gagataggcttgagtgtgaactgac

SEQ ID NO: 3690288 - DNA, 25 bp, Homo sapien
tgaactgacagcgttcacgccggga

SEQ ID NO: 3690289 - DNA, 25 bp, Homo sapien
tgcagttgtcgtaaaaatacaccaa

SEQ ID NO: 3690290 - DNA, 25 bp, Homo sapien
gaagctctgtttttaggactcaagt

SEQ ID NO: 3690291 - DNA, 25 bp, Homo sapien
taatactgcctataatggaagctgg

SEQ ID NO: 3690292 - DNA, 25 bp, Homo sapien
gaaatctagggtcactgggacagct

SEQ ID NO: 3690293 - DNA, 25 bp, Homo sapien
caaacaaagtttaggttgaagctct

SEQ ID NO: 3690294 - DNA, 25 bp, Homo sapien
gttgaagcagcaacgcgaacaccat

SEQ ID NO: 3690295 - DNA, 25 bp, Homo sapien
cgtacgtggtatgttaagtcattaa

SEQ ID NO: 3690296 - DNA, 25 bp, Homo sapien
gaggaggaggtctattcctgttgaa

SEQ ID NO: 3690297 - DNA, 25 bp, Homo sapien
gtcattaatgaccagcttaaagtca

SEQ ID NO: 3690298 - DNA, 25 bp, Homo sapien
ccaacatggcaaaaccccatctcta

SEQ ID NO: 3690299 - DNA, 25 bp, Homo sapien
tcaaaaccattctggccaacatggc

SEQ ID NO: 3690300 - DNA, 25 bp, Homo sapien
gagttcaaaaccattctggccaaca

SEQ ID NO: 3690301 - DNA, 25 bp, Homo sapien
gttcaaaaccattctggccaacatg

SEQ ID NO: 3690302 - DNA, 25 bp, Homo sapien
gagatcctctagtctttcaataagc

SEQ ID NO: 3690303 - DNA, 25 bp, Homo sapien
cacagtgtggtgtatagttgctgga

SEQ ID NO: 3690304 - DNA, 25 bp, Homo sapien
ctttacatcattcagcgttgctgca

SEQ ID NO: 3690305 - DNA, 25 bp, Homo sapien
tcaatgcacagtgtggtgtatagtt

SEQ ID NO: 3690306 - DNA, 25 bp, Homo sapien
catagcaccaaagtggtcctcttct

SEQ ID NO: 3690307 - DNA, 25 bp, Homo sapien
taagccgggccaaaatgccaaactg

SEQ ID NO: 3690308 - DNA, 25 bp, Homo sapien
aactgtgtggccatgtaggcaaggc

SEQ ID NO: 3690309 - DNA, 25 bp, Homo sapien
gccatggcacttccataagtgatga

SEQ ID NO: 3690310 - DNA, 25 bp, Homo sapien
caaaaccacaatgaaggcagggcac

SEQ ID NO: 3690311 - DNA, 25 bp, Homo sapien
aaacggtcagcagagtgaggagaca

SEQ ID NO: 3690312 - DNA, 25 bp, Homo sapien
tgcaaaagctattcatatgacacag

SEQ ID NO: 3690313 - DNA, 25 bp, Homo sapien
tcttgtacggcaaaggaaacggtca

SEQ ID NO: 3690314 - DNA, 25 bp, Homo sapien
ggaaatcgtgtaaaattcagtacag

SEQ ID NO: 3690315 - DNA, 25 bp, Homo sapien
gctagccctaaataggaaaatgcca

SEQ ID NO: 3690316 - DNA, 25 bp, Homo sapien
cttgggtctgagaggtagatgcttc

SEQ ID NO: 3690317 - DNA, 25 bp, Homo sapien
gaagatgcagacagttttgttagga

SEQ ID NO: 3690318 - DNA, 25 bp, Homo sapien
aaaaatagtaagtattgtctgtctc

SEQ ID NO: 3690319 - DNA, 25 bp, Homo sapien
tgagcaattgcatccttgagttgat

SEQ ID NO: 3690320 - DNA, 25 bp, Homo sapien
tgcatccttgagttgattgtatttc

SEQ ID NO: 3690321 - DNA, 25 bp, Homo sapien
caattgcatccttgagttgattgta

SEQ ID NO: 3690322 - DNA, 25 bp, Homo sapien
tacttgtaatgggtctctcagtctc

SEQ ID NO: 3690323 - DNA, 25 bp, Homo sapien
gtctctcagtctcttaaggtccatt

SEQ ID NO: 3690324 - DNA, 25 bp, Homo sapien
gggtctctcagtctcttaaggtcca

SEQ ID NO: 3690325 - DNA, 25 bp, Homo sapien
agatgtacttgtaatgggtctctca

SEQ ID NO: 3690326 - DNA, 25 bp, Homo sapien
gagcttatattccacaatgcctgat

SEQ ID NO: 3690327 - DNA, 25 bp, Homo sapien
gacaatattcactaagccctttgag

SEQ ID NO: 3690328 - DNA, 25 bp, Homo sapien
tccttctgccaggattcagaggctt

SEQ ID NO: 3690329 - DNA, 25 bp, Homo sapien
aagaagatgcaagaaacgaacaccc

SEQ ID NO: 3690330 - DNA, 25 bp, Homo sapien
tgtccttcgagatgaacaaagcctc

SEQ ID NO: 3690331 - DNA, 25 bp, Homo sapien
tgaatcacgtgaaagaaaaggccaa

SEQ ID NO: 3690332 - DNA, 25 bp, Homo sapien
gaaactccttgccacaatgaggaag

SEQ ID NO: 3690333 - DNA, 25 bp, Homo sapien
gatttggtagtacagctgaacaccc

SEQ ID NO: 3690334 - DNA, 25 bp, Homo sapien
aattgaataagtatttattgttcca

SEQ ID NO: 3690335 - DNA, 25 bp, Homo sapien
ctcttaatactggtgttcctttgtc

SEQ ID NO: 3690336 - DNA, 25 bp, Homo sapien
ttttaaggcctctaggctctcacga

SEQ ID NO: 3690337 - DNA, 25 bp, Homo sapien
gaaaatcctcttaatactggtgttc

SEQ ID NO: 3690338 - DNA, 25 bp, Homo sapien
aaagactttatcagcactggtaggg

SEQ ID NO: 3690339 - DNA, 25 bp, Homo sapien
ccacgggtgacacggaggtgcctgt

SEQ ID NO: 3690340 - DNA, 25 bp, Homo sapien
acgggtgacacggaggtgcctgtga

SEQ ID NO: 3690341 - DNA, 25 bp, Homo sapien
gggtgacacggaggtgcctgtgatg

SEQ ID NO: 3690342 - DNA, 25 bp, Homo sapien
cgggtgacacggaggtgcctgtgat

SEQ ID NO: 3690343 - DNA, 25 bp, Homo sapien
tgcacatgaggttgacttacgtaac

SEQ ID NO: 3690344 - DNA, 25 bp, Homo sapien
tcacatgtagagaaaagtgtagccc

SEQ ID NO: 3690345 - DNA, 25 bp, Homo sapien
tctggaaataacacgcagggttgca

SEQ ID NO: 3690346 - DNA, 25 bp, Homo sapien
taaaatgccccttatgtatctcggc

SEQ ID NO: 3690347 - DNA, 25 bp, Homo sapien
tggagtgtttcggatcacaccacca

SEQ ID NO: 3690348 - DNA, 25 bp, Homo sapien
caccaacagcccaagtccaacttct

SEQ ID NO: 3690349 - DNA, 25 bp, Homo sapien
gaaaaagatacctcagagtacctgg

SEQ ID NO: 3690350 - DNA, 25 bp, Homo sapien
gagtgtttcggatcacaccaccaac

SEQ ID NO: 3690351 - DNA, 25 bp, Homo sapien
gcagaaggtaggcatggcatctccc

SEQ ID NO: 3690352 - DNA, 25 bp, Homo sapien
gacgatacacatagtagcctccagg

SEQ ID NO: 3690353 - DNA, 25 bp, Homo sapien
tccaccgtggtgttccagagacagc

SEQ ID NO: 3690354 - DNA, 25 bp, Homo sapien
cacagtagacgtggaagcagacgct

SEQ ID NO: 3690355 - DNA, 25 bp, Homo sapien
cacagttcctggagcgcatgtgcac

SEQ ID NO: 3690356 - DNA, 25 bp, Homo sapien
catgtgcactcgctggtatctgagc

SEQ ID NO: 3690357 - DNA, 25 bp, Homo sapien
catggcagtcctcgtcgcagatgtc

SEQ ID NO: 3690358 - DNA, 25 bp, Homo sapien
agtcctcgtcgcagatgtcataaaa

SEQ ID NO: 3690359 - DNA, 25 bp, Homo sapien
ggctttcggtccaggcataaactaa

SEQ ID NO: 3690360 - DNA, 25 bp, Homo sapien
gtgcgagccaccgtgtgtagccaaa

SEQ ID NO: 3690361 - DNA, 25 bp, Homo sapien
taatcatgatacaaatttggcgtgg

SEQ ID NO: 3690362 - DNA, 25 bp, Homo sapien
ggccatctgtggctaccctagtgga

SEQ ID NO: 3690363 - DNA, 25 bp, Homo sapien
ttgccatcacttcttagcacacggc

SEQ ID NO: 3690364 - DNA, 25 bp, Homo sapien
gaggttcacacagatctcactgcag

SEQ ID NO: 3690365 - DNA, 25 bp, Homo sapien
cccacactcacagcggtaggagttt

SEQ ID NO: 3690366 - DNA, 25 bp, Homo sapien
gcagccaccgttgttttgctcacat

SEQ ID NO: 3690367 - DNA, 25 bp, Homo sapien
tctttgcacagccaaacggttgctc

SEQ ID NO: 3690368 - DNA, 25 bp, Homo sapien
cggttgctctcttcggacactaagg

SEQ ID NO: 3690369 - DNA, 25 bp, Homo sapien
tctgtccatagcgtgagtattctca

SEQ ID NO: 3690370 - DNA, 25 bp, Homo sapien
gacactaaggcagtttcctgaacat

SEQ ID NO: 3690371 - DNA, 25 bp, Homo sapien
cttggcaagtgtggttatcctcaga

SEQ ID NO: 3690372 - DNA, 25 bp, Homo sapien
agtgtggttatcctcagacagcacc

SEQ ID NO: 3690373 - DNA, 25 bp, Homo sapien
tctcagatccaaggcaagagtggct

SEQ ID NO: 3690374 - DNA, 25 bp, Homo sapien
gggacattcacactggtagcctttc

SEQ ID NO: 3690375 - DNA, 25 bp, Homo sapien
ctcggcaggaggtgttggtcaggaa

SEQ ID NO: 3690376 - DNA, 25 bp, Homo sapien
gcatttgatttgcacaacacaggga

SEQ ID NO: 3690377 - DNA, 25 bp, Homo sapien
tcaatggcatttgatttgcacaaca

SEQ ID NO: 3690378 - DNA, 25 bp, Homo sapien
atgttgacatgggtgccgttggaca

SEQ ID NO: 3690379 - DNA, 25 bp, Homo sapien
tcattccccaagtgccctccaggag

SEQ ID NO: 3690380 - DNA, 25 bp, Homo sapien
ttccccaagtgccctccaggaggaa

SEQ ID NO: 3690381 - DNA, 25 bp, Homo sapien
attccccaagtgccctccaggagga

SEQ ID NO: 3690382 - DNA, 25 bp, Homo sapien
tccccaagtgccctccaggaggaac

SEQ ID NO: 3690383 - DNA, 25 bp, Homo sapien
gaatatccctcacttgtctcactgc

SEQ ID NO: 3690384 - DNA, 25 bp, Homo sapien
gatacgatcgacataacttgcctca

SEQ ID NO: 3690385 - DNA, 25 bp, Homo sapien
tgggaccgcctgctccttgaatatc

SEQ ID NO: 3690386 - DNA, 25 bp, Homo sapien
gtctcactgcaagtcgaatcagctt

SEQ ID NO: 3690387 - DNA, 25 bp, Homo sapien
tgctggttcggatgatgaagtcccc

SEQ ID NO: 3690388 - DNA, 25 bp, Homo sapien
tctgcttgggtagacctgtcacgag

SEQ ID NO: 3690389 - DNA, 25 bp, Homo sapien
tccttcagaaatggtgtacaggcgt

SEQ ID NO: 3690390 - DNA, 25 bp, Homo sapien
tggaaactcgcaggtcaccgggatc

SEQ ID NO: 3690391 - DNA, 25 bp, Homo sapien
tgcaccacgggctcaatgccaaagt

SEQ ID NO: 3690392 - DNA, 25 bp, Homo sapien
gatttcggctcatgatttccagtgg

SEQ ID NO: 3690393 - DNA, 25 bp, Homo sapien
tcccggtaaggctcttcaaactcat

SEQ ID NO: 3690394 - DNA, 25 bp, Homo sapien
ccaaagtagagggagtcacgaagct

SEQ ID NO: 3690395 - DNA, 25 bp, Homo sapien
atcttggaggtgggggtggcaaagc

SEQ ID NO: 3690396 - DNA, 25 bp, Homo sapien
tggaggtgggggtggcaaagcagct

SEQ ID NO: 3690397 - DNA, 25 bp, Homo sapien
ttggaggtgggggtggcaaagcagc

SEQ ID NO: 3690398 - DNA, 25 bp, Homo sapien
ctcgtcgatcttggaggtgggggtg

SEQ ID NO: 3690399 - DNA, 25 bp, Homo sapien
tcccggatgaggtagtatttcagga

SEQ ID NO: 3690400 - DNA, 25 bp, Homo sapien
catcccggatgaggtagtatttcag

SEQ ID NO: 3690401 - DNA, 25 bp, Homo sapien
ccatcccggatgaggtagtatttca

SEQ ID NO: 3690402 - DNA, 25 bp, Homo sapien
cccggatgaggtagtatttcaggac

SEQ ID NO: 3690403 - DNA, 25 bp, Homo sapien
ctttaccgagtcatctgaaacacag

SEQ ID NO: 3690404 - DNA, 25 bp, Homo sapien
aagtgctttgctaggtgatcccggg

SEQ ID NO: 3690405 - DNA, 25 bp, Homo sapien
tgatcccgggatgtgtactgcttta

SEQ ID NO: 3690406 - DNA, 25 bp, Homo sapien
cttgaagacagggacctggaagtgc

SEQ ID NO: 3690407 - DNA, 25 bp, Homo sapien
cagattatcagacaatgttccagca

SEQ ID NO: 3690408 - DNA, 25 bp, Homo sapien
taacaatgctctacaaacacttcca

SEQ ID NO: 3690409 - DNA, 25 bp, Homo sapien
tgcattaaattgatatactgtggcc

SEQ ID NO: 3690410 - DNA, 25 bp, Homo sapien
tcagctgcctaagtaagctaggact

SEQ ID NO: 3690411 - DNA, 25 bp, Homo sapien
ttctgcaagcacctttctgtaggta

SEQ ID NO: 3690412 - DNA, 25 bp, Homo sapien
gcacctttctgtaggtaactgcctg

SEQ ID NO: 3690413 - DNA, 25 bp, Homo sapien
tgtgctgtcaaataaccagtgtttt

SEQ ID NO: 3690414 - DNA, 25 bp, Homo sapien
ttctgtaggtaactgcctgagcttc

SEQ ID NO: 3690415 - DNA, 25 bp, Homo sapien
gaagagatgatcacgactgttaata

SEQ ID NO: 3690416 - DNA, 25 bp, Homo sapien
cacaagtagagtttatcatccccat

SEQ ID NO: 3690417 - DNA, 25 bp, Homo sapien
gggcacttacaagacacaatactaa

SEQ ID NO: 3690418 - DNA, 25 bp, Homo sapien
ggaacttgcccaaatgtacacattt

SEQ ID NO: 3690419 - DNA, 25 bp, Homo sapien
acaagaacccggcagtgcagaaaca

SEQ ID NO: 3690420 - DNA, 25 bp, Homo sapien
tcctcccagtcgatgcggatcgggc

SEQ ID NO: 3690421 - DNA, 25 bp, Homo sapien
tcgtccaacactccacagacaagaa

SEQ ID NO: 3690422 - DNA, 25 bp, Homo sapien
gcctgttagcgtctggccctgtaga

SEQ ID NO: 3690423 - DNA, 25 bp, Homo sapien
ctgttggcagatgttcttagagggc

SEQ ID NO: 3690424 - DNA, 25 bp, Homo sapien
cagggactcgaggtatggctacgaa

SEQ ID NO: 3690425 - DNA, 25 bp, Homo sapien
aagctccaaagagcagagccgtcca

SEQ ID NO: 3690426 - DNA, 25 bp, Homo sapien
gaagtctgaacccagctgttggcag

SEQ ID NO: 3690427 - DNA, 25 bp, Homo sapien
ccagaatcagagtgagttggtgctg

SEQ ID NO: 3690428 - DNA, 25 bp, Homo sapien
tgtgcccactgaatggaccagaatc

SEQ ID NO: 3690429 - DNA, 25 bp, Homo sapien
ggtctgattgcaccatacacgaggt

SEQ ID NO: 3690430 - DNA, 25 bp, Homo sapien
caggccacattgttcagcagtgctg

SEQ ID NO: 3690431 - DNA, 25 bp, Homo sapien
tgttttattgatacacttccaaatt

SEQ ID NO: 3690432 - DNA, 25 bp, Homo sapien
ctgttttattgatacacttccaaat

SEQ ID NO: 3690433 - DNA, 25 bp, Homo sapien
cttccaaattccctataattagtct

SEQ ID NO: 3690434 - DNA, 25 bp, Homo sapien
atgcaacagaaaaaccaaatactac

SEQ ID NO: 3690435 - DNA, 25 bp, Homo sapien
agaaaatagtatgcaacagaaaaac

SEQ ID NO: 3690436 - DNA, 25 bp, Homo sapien
agtatgcaacagaaaaaccaaatac

SEQ ID NO: 3690437 - DNA, 25 bp, Homo sapien
gaaaatagtatgcaacagaaaaacc

SEQ ID NO: 3690438 - DNA, 25 bp, Homo sapien
tgagggcacagaataccaaatcaca

SEQ ID NO: 3690439 - DNA, 25 bp, Homo sapien
tgttacagctcattgaagcacttaa

SEQ ID NO: 3690440 - DNA, 25 bp, Homo sapien
cagctcattgaagcacttaaataca

SEQ ID NO: 3690441 - DNA, 25 bp, Homo sapien
acagaataccaaatcacagggaaca

SEQ ID NO: 3690442 - DNA, 25 bp, Homo sapien
aacgtattcattccctctttacata

SEQ ID NO: 3690443 - DNA, 25 bp, Homo sapien
aaagaaagctgatcagcatagaggg

SEQ ID NO: 3690444 - DNA, 25 bp, Homo sapien
gacctgctggacaagattaactttc

SEQ ID NO: 3690445 - DNA, 25 bp, Homo sapien
gattcaagtattagaagacctgctg

SEQ ID NO: 3690446 - DNA, 25 bp, Homo sapien
ctgtacccagcatgaaagtcttata

SEQ ID NO: 3690447 - DNA, 25 bp, Homo sapien
aatattacccaaagtcgtctataga

SEQ ID NO: 3690448 - DNA, 25 bp, Homo sapien
gaatcgtaaggatccccaaacagcc

SEQ ID NO: 3690449 - DNA, 25 bp, Homo sapien
cgtctatagatttgatgcaattcct

SEQ ID NO: 3690450 - DNA, 25 bp, Homo sapien
cccttgaacgggagggaatagagca

SEQ ID NO: 3690451 - DNA, 25 bp, Homo sapien
cagaacttttcagtagtgttgctca

SEQ ID NO: 3690452 - DNA, 25 bp, Homo sapien
cagtgtggcttatagatgagctgcc

SEQ ID NO: 3690453 - DNA, 25 bp, Homo sapien
tgaaacagtgctagtcagtgtggct

SEQ ID NO: 3690454 - DNA, 25 bp, Homo sapien
tattcctgctacagcagggtggtaa

SEQ ID NO: 3690455 - DNA, 25 bp, Homo sapien
gaaagtcctgcataacaacactggg

SEQ ID NO: 3690456 - DNA, 25 bp, Homo sapien
tacaagtcctttcagtgatgaggga

SEQ ID NO: 3690457 - DNA, 25 bp, Homo sapien
taaaatgctcaccacttagcctgtt

SEQ ID NO: 3690458 - DNA, 25 bp, Homo sapien
acatctcagttggtgggtgttaagc

SEQ ID NO: 3690459 - DNA, 25 bp, Homo sapien
gactaacactccatgattgattcag

SEQ ID NO: 3690460 - DNA, 25 bp, Homo sapien
gatgtgcctaggtgttctgtttacc

SEQ ID NO: 3690461 - DNA, 25 bp, Homo sapien
gaaacaaatgccttacagatgtgcc

SEQ ID NO: 3690462 - DNA, 25 bp, Homo sapien
tcctgaatctgaacttccatgcatt

SEQ ID NO: 3690463 - DNA, 25 bp, Homo sapien
aacacattgttaagaagccctcaaa

SEQ ID NO: 3690464 - DNA, 25 bp, Homo sapien
gagctcaagtagtccgtctgcctcc

SEQ ID NO: 3690465 - DNA, 25 bp, Homo sapien
tttagactggcatttatgtatacca

SEQ ID NO: 3690466 - DNA, 25 bp, Homo sapien
tccaaactagactaataaggtacat

SEQ ID NO: 3690467 - DNA, 25 bp, Homo sapien
taaggtacattaatagaagtctcac

SEQ ID NO: 3690468 - DNA, 25 bp, Homo sapien
aataaggtacattaatagaagtctc

SEQ ID NO: 3690469 - DNA, 25 bp, Homo sapien
aattctttgacagtccaaactagac

SEQ ID NO: 3690470 - DNA, 25 bp, Homo sapien
cgtctccaggatacctacaatttgg

SEQ ID NO: 3690471 - DNA, 25 bp, Homo sapien
gccaaagctctgttacgtctccagg

SEQ ID NO: 3690472 - DNA, 25 bp, Homo sapien
ccatctcaaagggtaatcttccagg

SEQ ID NO: 3690473 - DNA, 25 bp, Homo sapien
gccttcgaagactaaagaatcacct

SEQ ID NO: 3690474 - DNA, 25 bp, Homo sapien
gtgtttgtaagcagtgaagtaaact

SEQ ID NO: 3690475 - DNA, 25 bp, Homo sapien
tccagcatatctgattcatgccagt

SEQ ID NO: 3690476 - DNA, 25 bp, Homo sapien
ttgtctcatagaatgaaacagtctc

SEQ ID NO: 3690477 - DNA, 25 bp, Homo sapien
ttccccttctaggtcagatgactga

SEQ ID NO: 3690478 - DNA, 25 bp, Homo sapien
gaagaaaagatagtctccagcatat

SEQ ID NO: 3690479 - DNA, 25 bp, Homo sapien
gctccctcgatcccggagactgagg

SEQ ID NO: 3690480 - DNA, 25 bp, Homo sapien
ccgtggaccttctcggacggctgcg

SEQ ID NO: 3690481 - DNA, 25 bp, Homo sapien
gctgagggtaggaagtagccgctcc

SEQ ID NO: 3690482 - DNA, 25 bp, Homo sapien
tgccatcgcggcctagaggttataa

SEQ ID NO: 3690483 - DNA, 25 bp, Homo sapien
tggtgtgatcgagctcacgtagcga

SEQ ID NO: 3690484 - DNA, 25 bp, Homo sapien
ggcgctggtgtgatcgagctcacgt

SEQ ID NO: 3690485 - DNA, 25 bp, Homo sapien
gctggtgtgatcgagctcacgtagc

SEQ ID NO: 3690486 - DNA, 25 bp, Homo sapien
gcgctggtgtgatcgagctcacgta

SEQ ID NO: 3690487 - DNA, 25 bp, Homo sapien
ccagccactcctctcggcctcagac

SEQ ID NO: 3690488 - DNA, 25 bp, Homo sapien
cacggcggccggtcccagccactcc

SEQ ID NO: 3690489 - DNA, 25 bp, Homo sapien
gccggtcccagccactcctctcggc

SEQ ID NO: 3690490 - DNA, 25 bp, Homo sapien
ccacaccacggcggccggtcccagc

SEQ ID NO: 3690491 - DNA, 25 bp, Homo sapien
attgccggcggcctcgtcgcttagg

SEQ ID NO: 3690492 - DNA, 25 bp, Homo sapien
cctcgtcgcttaggcctgacgcgga

SEQ ID NO: 3690493 - DNA, 25 bp, Homo sapien
ttattgccggcggcctcgtcgctta

SEQ ID NO: 3690494 - DNA, 25 bp, Homo sapien
cggcggcctcgtcgcttaggcctga

SEQ ID NO: 3690495 - DNA, 25 bp, Homo sapien
ttcggggcaccttcctagtcctcag

SEQ ID NO: 3690496 - DNA, 25 bp, Homo sapien
tgttcacgttcaacggcttccgttc

SEQ ID NO: 3690497 - DNA, 25 bp, Homo sapien
aagaggaaactccaaatgttcacgt

SEQ ID NO: 3690498 - DNA, 25 bp, Homo sapien
tccctggagggaccattgctgcttc

SEQ ID NO: 3690499 - DNA, 25 bp, Homo sapien
ttttctcctgcaagctattccacaa

SEQ ID NO: 3690500 - DNA, 25 bp, Homo sapien
tttctcctgcaagctattccacaat

SEQ ID NO: 3690501 - DNA, 25 bp, Homo sapien
attttctcctgcaagctattccaca

SEQ ID NO: 3690502 - DNA, 25 bp, Homo sapien
cttagtaacataggttgacagcagc

SEQ ID NO: 3690503 - DNA, 25 bp, Homo sapien
gtcttagtaacataggttgacagca

SEQ ID NO: 3690504 - DNA, 25 bp, Homo sapien
tcttagtaacataggttgacagcag

SEQ ID NO: 3690505 - DNA, 25 bp, Homo sapien
tgtcttagtaacataggttgacagc

SEQ ID NO: 3690506 - DNA, 25 bp, Homo sapien
aatgaagagatgcatttaggtcagg

SEQ ID NO: 3690507 - DNA, 25 bp, Homo sapien
agatgcatttaggtcaggtatgtgg

SEQ ID NO: 3690508 - DNA, 25 bp, Homo sapien
aagagatgcatttaggtcaggtatg

SEQ ID NO: 3690509 - DNA, 25 bp, Homo sapien
tgaagagatgcatttaggtcaggta

SEQ ID NO: 3690510 - DNA, 25 bp, Homo sapien
aatgctgtcgctgcatccctctctt

SEQ ID NO: 3690511 - DNA, 25 bp, Homo sapien
gaatgctgtcgctgcatccctctct

SEQ ID NO: 3690512 - DNA, 25 bp, Homo sapien
ctgtcgctgcatccctctcttacca

SEQ ID NO: 3690513 - DNA, 25 bp, Homo sapien
tgctgtcgctgcatccctctcttac

SEQ ID NO: 3690514 - DNA, 25 bp, Homo sapien
tgccggggggccaggtattgatgtg

SEQ ID NO: 3690515 - DNA, 25 bp, Homo sapien
gccaggtattgatgtgctgaagtct

SEQ ID NO: 3690516 - DNA, 25 bp, Homo sapien
cagaggagccagactatgaaagagg

SEQ ID NO: 3690517 - DNA, 25 bp, Homo sapien
agaggagccagactatgaaagaggt

SEQ ID NO: 3690518 - DNA, 25 bp, Homo sapien
tcctgtccaaatttacccaggagcc

SEQ ID NO: 3690519 - DNA, 25 bp, Homo sapien
ctgtccaaatttacccaggagcctt

SEQ ID NO: 3690520 - DNA, 25 bp, Homo sapien
caatcagcacagaatcttctattct

SEQ ID NO: 3690521 - DNA, 25 bp, Homo sapien
atccaatcagcacagaatcttctat

SEQ ID NO: 3690522 - DNA, 25 bp, Homo sapien
acttatggaaaaggagctatccaga

SEQ ID NO: 3690523 - DNA, 25 bp, Homo sapien
cacttatggaaaaggagctatccag

SEQ ID NO: 3690524 - DNA, 25 bp, Homo sapien
cttatggaaaaggagctatccagac

SEQ ID NO: 3690525 - DNA, 25 bp, Homo sapien
tctcagctcaatgaaagaccccttg

SEQ ID NO: 3690526 - DNA, 25 bp, Homo sapien
aatgaaagaccccttgagctctgtc

SEQ ID NO: 3690527 - DNA, 25 bp, Homo sapien
gagttgaaagagtgcctttctcagc

SEQ ID NO: 3690528 - DNA, 25 bp, Homo sapien
gcaaggaggcatcccttgcattgag

SEQ ID NO: 3690529 - DNA, 25 bp, Homo sapien
tactaaatttcctacagaatgagaa

SEQ ID NO: 3690530 - DNA, 25 bp, Homo sapien
tgctctactaaatttcctacagaat

SEQ ID NO: 3690531 - DNA, 25 bp, Homo sapien
tctactaaatttcctacagaatgag

SEQ ID NO: 3690532 - DNA, 25 bp, Homo sapien
tacagaatgagaaatcagaatctac

SEQ ID NO: 3690533 - DNA, 25 bp, Homo sapien
ctgatgagcatcatgccagcggaga

SEQ ID NO: 3690534 - DNA, 25 bp, Homo sapien
gctgcagaactgatgagcatcatgc

SEQ ID NO: 3690535 - DNA, 25 bp, Homo sapien
ccagccacgttcttcttggtgggct

SEQ ID NO: 3690536 - DNA, 25 bp, Homo sapien
tattggaagggcacacacgcttgct

SEQ ID NO: 3690537 - DNA, 25 bp, Homo sapien
tgacaccagcgtgatcgccacagga

SEQ ID NO: 3690538 - DNA, 25 bp, Homo sapien
ggcagaatacattcccttgggaaag

SEQ ID NO: 3690539 - DNA, 25 bp, Homo sapien
agcaggcatcgggtcccatctgaca

SEQ ID NO: 3690540 - DNA, 25 bp, Homo sapien
tcacaaaaacctgccaaggcagaat

SEQ ID NO: 3690541 - DNA, 25 bp, Homo sapien
caagcactcagattaattcaggaca

SEQ ID NO: 3690542 - DNA, 25 bp, Homo sapien
ctacaagcactcagattaattcagg

SEQ ID NO: 3690543 - DNA, 25 bp, Homo sapien
actcagattaattcaggacagccct

SEQ ID NO: 3690544 - DNA, 25 bp, Homo sapien
gcactcagattaattcaggacagcc

SEQ ID NO: 3690545 - DNA, 25 bp, Homo sapien
cagttgcatggcaagcaatcatgag

SEQ ID NO: 3690546 - DNA, 25 bp, Homo sapien
agtgagccactagggaagggccaat

SEQ ID NO: 3690547 - DNA, 25 bp, Homo sapien
ggatgcatagtactgcaggctttcc

SEQ ID NO: 3690548 - DNA, 25 bp, Homo sapien
ggccaatgctgggatgcatagtact

SEQ ID NO: 3690549 - DNA, 25 bp, Homo sapien
cagttggtgggagatggctaactta

SEQ ID NO: 3690550 - DNA, 25 bp, Homo sapien
tccacccactccttaatcagttggt

SEQ ID NO: 3690551 - DNA, 25 bp, Homo sapien
gggcagccagaatgggaaagtccca

SEQ ID NO: 3690552 - DNA, 25 bp, Homo sapien
ctcatcatgactgaaccaggcagct

SEQ ID NO: 3690553 - DNA, 25 bp, Homo sapien
gaaaatgactgaacaagggcctaca

SEQ ID NO: 3690554 - DNA, 25 bp, Homo sapien
taccaaggagcgatctaagtgactt

SEQ ID NO: 3690555 - DNA, 25 bp, Homo sapien
ttaacaagccatatgccagaagatg

SEQ ID NO: 3690556 - DNA, 25 bp, Homo sapien
ccagaagatgtttgcttccaaggcc

SEQ ID NO: 3690557 - DNA, 25 bp, Homo sapien
gaaaaagatttactgtctggagtcc

SEQ ID NO: 3690558 - DNA, 25 bp, Homo sapien
caggcatggcaaagcaatagtcttt

SEQ ID NO: 3690559 - DNA, 25 bp, Homo sapien
tgtggatgtgcaaatgccagcaact

SEQ ID NO: 3690560 - DNA, 25 bp, Homo sapien
tcaacagagcctcagggcatctgat

SEQ ID NO: 3690561 - DNA, 25 bp, Homo sapien
tagtcctatgggactttgacatgta

SEQ ID NO: 3690562 - DNA, 25 bp, Homo sapien
acttagtcctatgggactttgacat

SEQ ID NO: 3690563 - DNA, 25 bp, Homo sapien
gtcctatgggactttgacatgtaaa

SEQ ID NO: 3690564 - DNA, 25 bp, Homo sapien
tatgggactttgacatgtaaataac

SEQ ID NO: 3690565 - DNA, 25 bp, Homo sapien
gccaatctaacaagacaatcaagtc

SEQ ID NO: 3690566 - DNA, 25 bp, Homo sapien
ctcttttgtgagtgcttttcccttc

SEQ ID NO: 3690567 - DNA, 25 bp, Homo sapien
caagatatgaagaaatctcaggacc

SEQ ID NO: 3690568 - DNA, 25 bp, Homo sapien
ttcagcccaggtaaaggcaagctgc

SEQ ID NO: 3690569 - DNA, 25 bp, Homo sapien
gctagtacaagggcaaacattaaaa

SEQ ID NO: 3690570 - DNA, 25 bp, Homo sapien
ctgctagtacaagggcaaacattaa

SEQ ID NO: 3690571 - DNA, 25 bp, Homo sapien
caagggcaaacattaaaaatttcat

SEQ ID NO: 3690572 - DNA, 25 bp, Homo sapien
cactgctagtacaagggcaaacatt

SEQ ID NO: 3690573 - DNA, 25 bp, Homo sapien
aggcgtcgggacagagcctgatcca

SEQ ID NO: 3690574 - DNA, 25 bp, Homo sapien
cagtgacgacacacaaggtttcggg

SEQ ID NO: 3690575 - DNA, 25 bp, Homo sapien
tggcttcaggttccggtcaggcgtc

SEQ ID NO: 3690576 - DNA, 25 bp, Homo sapien
tcgatcagctctcgcagtcggagag

SEQ ID NO: 3690577 - DNA, 25 bp, Homo sapien
acctagactccgagcagccacctcc

SEQ ID NO: 3690578 - DNA, 25 bp, Homo sapien
gccccgtcacctagactccgagcag

SEQ ID NO: 3690579 - DNA, 25 bp, Homo sapien
tcgccccgtcacctagactccgagc

SEQ ID NO: 3690580 - DNA, 25 bp, Homo sapien
tctcgccccgtcacctagactccga

SEQ ID NO: 3690581 - DNA, 25 bp, Homo sapien
aagctctgtggcaccgccttccgag

SEQ ID NO: 3690582 - DNA, 25 bp, Homo sapien
tccgagtgtatctggagatcatcct

SEQ ID NO: 3690583 - DNA, 25 bp, Homo sapien
tgtggcaccgccttccgagtgtatc

SEQ ID NO: 3690584 - DNA, 25 bp, Homo sapien
gcaccgccttccgagtgtatctgga

SEQ ID NO: 3690585 - DNA, 25 bp, Homo sapien
gacatcaggtttgtacctctcagct

SEQ ID NO: 3690586 - DNA, 25 bp, Homo sapien
tgtcaagtgagcactttcctggagc

SEQ ID NO: 3690587 - DNA, 25 bp, Homo sapien
gatggttatgaccacaggcttcgga

SEQ ID NO: 3690588 - DNA, 25 bp, Homo sapien
gcttcggaatcagatcgacatcagg

SEQ ID NO: 3690589 - DNA, 25 bp, Homo sapien
agtggtcctacaaccaagagcttgt

SEQ ID NO: 3690590 - DNA, 25 bp, Homo sapien
tcagtggtcctacaaccaagagctt

SEQ ID NO: 3690591 - DNA, 25 bp, Homo sapien
tatgtctctcattcagtggtcctac

SEQ ID NO: 3690592 - DNA, 25 bp, Homo sapien
tgtatgtctctcattcagtggtcct

SEQ ID NO: 3690593 - DNA, 25 bp, Homo sapien
atgtgaccacctgaaaattttaaat

SEQ ID NO: 3690594 - DNA, 25 bp, Homo sapien
gatggttaagagcatgttttgttat

SEQ ID NO: 3690595 - DNA, 25 bp, Homo sapien
tctcatgactgtcactggtggggga

SEQ ID NO: 3690596 - DNA, 25 bp, Homo sapien
ttctcatgactgtcactggtggggg

SEQ ID NO: 3690597 - DNA, 25 bp, Homo sapien
gttaagagcatgttttgttattcct

SEQ ID NO: 3690598 - DNA, 25 bp, Homo sapien
tccccaggagaagtccgagcttcct

SEQ ID NO: 3690599 - DNA, 25 bp, Homo sapien
gagaagtccgagcttccttcagtag

SEQ ID NO: 3690600 - DNA, 25 bp, Homo sapien
gtccgagcttccttcagtagatatc

SEQ ID NO: 3690601 - DNA, 25 bp, Homo sapien
gaagtccgagcttccttcagtagat

SEQ ID NO: 3690602 - DNA, 25 bp, Homo sapien
caaggcctcctgtgaccgtcttatt

SEQ ID NO: 3690603 - DNA, 25 bp, Homo sapien
tgtgtggaaagcttatcaaggcctc

SEQ ID NO: 3690604 - DNA, 25 bp, Homo sapien
cagccagggatgtgtagatagctta

SEQ ID NO: 3690605 - DNA, 25 bp, Homo sapien
gatagcttagtcagtcctgtgtgga

SEQ ID NO: 3690606 - DNA, 25 bp, Homo sapien
tgtaaattgttcttgtatactgtga

SEQ ID NO: 3690607 - DNA, 25 bp, Homo sapien
tgtaacatgtatcggaacttctttc

SEQ ID NO: 3690608 - DNA, 25 bp, Homo sapien
tatactgtgacctaactgaactaat

SEQ ID NO: 3690609 - DNA, 25 bp, Homo sapien
taataatcgcattgtatgaaaacca

SEQ ID NO: 3690610 - DNA, 25 bp, Homo sapien
cctaggattttgatagagagtgcac

SEQ ID NO: 3690611 - DNA, 25 bp, Homo sapien
ctctatggaattgctcttctgggca

SEQ ID NO: 3690612 - DNA, 25 bp, Homo sapien
cctggccatatgtcctctaattttc

SEQ ID NO: 3690613 - DNA, 25 bp, Homo sapien
gagatgtggtagtatatgtcctcta

SEQ ID NO: 3690614 - DNA, 25 bp, Homo sapien
acttttcaaacatgtctttcttcgg

SEQ ID NO: 3690615 - DNA, 25 bp, Homo sapien
cttttcaaacatgtctttcttcggg

SEQ ID NO: 3690616 - DNA, 25 bp, Homo sapien
atagacttttcaaacatgtctttct

SEQ ID NO: 3690617 - DNA, 25 bp, Homo sapien
agacttttcaaacatgtctttcttc

SEQ ID NO: 3690618 - DNA, 25 bp, Homo sapien
ctttttcagtggcattttgatcgag

SEQ ID NO: 3690619 - DNA, 25 bp, Homo sapien
tagactcttggtatgcacactcaac

SEQ ID NO: 3690620 - DNA, 25 bp, Homo sapien
gtagactcttggtatgcacactcaa

SEQ ID NO: 3690621 - DNA, 25 bp, Homo sapien
gaggtgaggaaagctagctgtccac

SEQ ID NO: 3690622 - DNA, 25 bp, Homo sapien
agactcttggtatgcacactcaact

SEQ ID NO: 3690623 - DNA, 25 bp, Homo sapien
gaaggggatctaggatacaatctat

SEQ ID NO: 3690624 - DNA, 25 bp, Homo sapien
tcttgagacaaggttgtttcatatg

SEQ ID NO: 3690625 - DNA, 25 bp, Homo sapien
gagacaaggttgtttcatatgaagc

SEQ ID NO: 3690626 - DNA, 25 bp, Homo sapien
ggatctaggatacaatctataacct

SEQ ID NO: 3690627 - DNA, 25 bp, Homo sapien
taagggtccaacttcgttgttctgc

SEQ ID NO: 3690628 - DNA, 25 bp, Homo sapien
gataagccccttagctaacttgaag

SEQ ID NO: 3690629 - DNA, 25 bp, Homo sapien
tacccaggtagtcttggcactcttg

SEQ ID NO: 3690630 - DNA, 25 bp, Homo sapien
gcatgtagtcatgtactttagccac

SEQ ID NO: 3690631 - DNA, 25 bp, Homo sapien
gaaatcataagcatagataccccaa

SEQ ID NO: 3690632 - DNA, 25 bp, Homo sapien
tgaaatcataagcatagatacccca

SEQ ID NO: 3690633 - DNA, 25 bp, Homo sapien
aggttgctcccatataatctccaag

SEQ ID NO: 3690634 - DNA, 25 bp, Homo sapien
tccaccaatgcaggcatgacaggtt

SEQ ID NO: 3690635 - DNA, 25 bp, Homo sapien
caatatgtggtacttcagcctgcag

SEQ ID NO: 3690636 - DNA, 25 bp, Homo sapien
ggcatgacaggttgctcccatataa

SEQ ID NO: 3690637 - DNA, 25 bp, Homo sapien
tttaatggtgccttgtacaagtcac

SEQ ID NO: 3690638 - DNA, 25 bp, Homo sapien
ctgttcgattccttcaaggttcaag

SEQ ID NO: 3690639 - DNA, 25 bp, Homo sapien
aaataacagcctgtttaatggtgcc

SEQ ID NO: 3690640 - DNA, 25 bp, Homo sapien
ccagaatttgaataggatctttagt

SEQ ID NO: 3690641 - DNA, 25 bp, Homo sapien
tcagtcccacgtgccaacaagtaaa

SEQ ID NO: 3690642 - DNA, 25 bp, Homo sapien
gacacttgttggacatcagtcccac

SEQ ID NO: 3690643 - DNA, 25 bp, Homo sapien
tcatgactgctaggtagatcatagt

SEQ ID NO: 3690644 - DNA, 25 bp, Homo sapien
gcatacaaatctcagtgtcacgaag

SEQ ID NO: 3690645 - DNA, 25 bp, Homo sapien
ctcacgactaatgttgctttggtat

SEQ ID NO: 3690646 - DNA, 25 bp, Homo sapien
gctcacgactaatgttgctttggta

SEQ ID NO: 3690647 - DNA, 25 bp, Homo sapien
gagctcacgactaatgttgctttgg

SEQ ID NO: 3690648 - DNA, 25 bp, Homo sapien
agctcacgactaatgttgctttggt

SEQ ID NO: 3690649 - DNA, 25 bp, Homo sapien
caatggaagatgctttatgagcata

SEQ ID NO: 3690650 - DNA, 25 bp, Homo sapien
tatgagcataagaagatgaaaaatg

SEQ ID NO: 3690651 - DNA, 25 bp, Homo sapien
gaggatttggcaatggaagatgctt

SEQ ID NO: 3690652 - DNA, 25 bp, Homo sapien
tggcaatggaagatgctttatgagc

SEQ ID NO: 3690653 - DNA, 25 bp, Homo sapien
tgctaggtattcctcaattattcct

SEQ ID NO: 3690654 - DNA, 25 bp, Homo sapien
gctaggtattcctcaattattcctt

SEQ ID NO: 3690655 - DNA, 25 bp, Homo sapien
ctaggtattcctcaattattccttc

SEQ ID NO: 3690656 - DNA, 25 bp, Homo sapien
ttcatgcagtaaaatggagcaatgg

SEQ ID NO: 3690657 - DNA, 25 bp, Homo sapien
caatgggaggataccctaatttctg

SEQ ID NO: 3690658 - DNA, 25 bp, Homo sapien
agtgactacgtgtcaactgctccat

SEQ ID NO: 3690659 - DNA, 25 bp, Homo sapien
tgctccatacagctcacaaccttgc

SEQ ID NO: 3690660 - DNA, 25 bp, Homo sapien
cagtctcttgcgtagctggaactat

SEQ ID NO: 3690661 - DNA, 25 bp, Homo sapien
atttttttagagagatgggatctca

SEQ ID NO: 3690662 - DNA, 25 bp, Homo sapien
tggaactataggtgaatgccaccat

SEQ ID NO: 3690663 - DNA, 25 bp, Homo sapien
cctcagtctcttgcgtagctggaac

SEQ ID NO: 3690664 - DNA, 25 bp, Homo sapien
taaattgccctgaacagactgagag

SEQ ID NO: 3690665 - DNA, 25 bp, Homo sapien
taagccttcaactccgtaaacatgg

SEQ ID NO: 3690666 - DNA, 25 bp, Homo sapien
ttggcacccttgaaaactaattggc

SEQ ID NO: 3690667 - DNA, 25 bp, Homo sapien
gaacatgttattggccactggaggg

SEQ ID NO: 3690668 - DNA, 25 bp, Homo sapien
aaagacatggtaggagaacactcta

SEQ ID NO: 3690669 - DNA, 25 bp, Homo sapien
catggtaggagaacactctaatgat

SEQ ID NO: 3690670 - DNA, 25 bp, Homo sapien
gaaggtcttcaaaggttgtgtaaca

SEQ ID NO: 3690671 - DNA, 25 bp, Homo sapien
ctacacttcctgtcccaccggaagg

SEQ ID NO: 3690672 - DNA, 25 bp, Homo sapien
gtaactgcaacattactctcatcat

SEQ ID NO: 3690673 - DNA, 25 bp, Homo sapien
ggtaactgcaacattactctcatca

SEQ ID NO: 3690674 - DNA, 25 bp, Homo sapien
tgtaaatccagctgtataacatctg

SEQ ID NO: 3690675 - DNA, 25 bp, Homo sapien
gctgtataacatctggccaatatgc

SEQ ID NO: 3690676 - DNA, 25 bp, Homo sapien
tgtataacatctggccaatatgcca

SEQ ID NO: 3690677 - DNA, 25 bp, Homo sapien
tccagctgtataacatctggccaat

SEQ ID NO: 3690678 - DNA, 25 bp, Homo sapien
ggcttaggtcactaaaccacggcca

SEQ ID NO: 3690679 - DNA, 25 bp, Homo sapien
aatgtttcttggactggcattgccc

SEQ ID NO: 3690680 - DNA, 25 bp, Homo sapien
tcttaggtcatcagcgaccagaacg

SEQ ID NO: 3690681 - DNA, 25 bp, Homo sapien
gaccagaacgtctaactattcaggg

SEQ ID NO: 3690682 - DNA, 25 bp, Homo sapien
cggttggagaagatacctgtttggt

SEQ ID NO: 3690683 - DNA, 25 bp, Homo sapien
ctacgtgttgaaagaagacagtact

SEQ ID NO: 3690684 - DNA, 25 bp, Homo sapien
acagtactcttgatcggttggagaa

SEQ ID NO: 3690685 - DNA, 25 bp, Homo sapien
ctcttgatcggttggagaagatacc

SEQ ID NO: 3690686 - DNA, 25 bp, Homo sapien
cacatttggctgatgtctgcttgct

SEQ ID NO: 3690687 - DNA, 25 bp, Homo sapien
tcacatttggctgatgtctgcttgc

SEQ ID NO: 3690688 - DNA, 25 bp, Homo sapien
ggaggaggtcatacacaacaacgtg

SEQ ID NO: 3690689 - DNA, 25 bp, Homo sapien
gggctgtcatagcactcattctgga

SEQ ID NO: 3690690 - DNA, 25 bp, Homo sapien
tcattctggacagcacgcacatggc

SEQ ID NO: 3690691 - DNA, 25 bp, Homo sapien
tgatggtggagaccatgtcccttgg

SEQ ID NO: 3690692 - DNA, 25 bp, Homo sapien
cctgtgtggccgcttgagtgcagac

SEQ ID NO: 3690693 - DNA, 25 bp, Homo sapien
cagacccttagtagctcatgcgtgg

SEQ ID NO: 3690694 - DNA, 25 bp, Homo sapien
tgattgtcttctctagccaggtgac

SEQ ID NO: 3690695 - DNA, 25 bp, Homo sapien
acattgccagtgagatggcccctca

SEQ ID NO: 3690696 - DNA, 25 bp, Homo sapien
gtttccagatggtactctagctcag

SEQ ID NO: 3690697 - DNA, 25 bp, Homo sapien
tccagatggtactctagctcaggca

SEQ ID NO: 3690698 - DNA, 25 bp, Homo sapien
gatggtactctagctcaggcatgag

SEQ ID NO: 3690699 - DNA, 25 bp, Homo sapien
cactagtttccagatggtactctag

SEQ ID NO: 3690700 - DNA, 25 bp, Homo sapien
ctagtagccaaatcagaaacccaca

SEQ ID NO: 3690701 - DNA, 25 bp, Homo sapien
gaagtaaagatcagtatgtcaagga

SEQ ID NO: 3690702 - DNA, 25 bp, Homo sapien
agatcagtatgtcaaggaagacaag

SEQ ID NO: 3690703 - DNA, 25 bp, Homo sapien
cagaaacccacaatgaagtaaagat

SEQ ID NO: 3690704 - DNA, 25 bp, Homo sapien
tccacagctcgatttggccaatttc

SEQ ID NO: 3690705 - DNA, 25 bp, Homo sapien
cgatttggccaatttcgagttgaaa

SEQ ID NO: 3690706 - DNA, 25 bp, Homo sapien
tgaaaggatggtactggacccaggc

SEQ ID NO: 3690707 - DNA, 25 bp, Homo sapien
ggacccaggcctcataagtagcttg

SEQ ID NO: 3690708 - DNA, 25 bp, Homo sapien
ttcgtggtggtggattgcgtctcct

SEQ ID NO: 3690709 - DNA, 25 bp, Homo sapien
atcggatgaagagttcgtggtggtg

SEQ ID NO: 3690710 - DNA, 25 bp, Homo sapien
ttcagcacatgaatggctcgtgctg

SEQ ID NO: 3690711 - DNA, 25 bp, Homo sapien
tcagcacatgaatggctcgtgctga

SEQ ID NO: 3690712 - DNA, 25 bp, Homo sapien
cggtttccagaagttctgcttttga

SEQ ID NO: 3690713 - DNA, 25 bp, Homo sapien
cacggtttccagaagttctgctttt

SEQ ID NO: 3690714 - DNA, 25 bp, Homo sapien
ggtttccagaagttctgcttttgaa

SEQ ID NO: 3690715 - DNA, 25 bp, Homo sapien
tttccagaagttctgcttttgaaac

SEQ ID NO: 3690716 - DNA, 25 bp, Homo sapien
gaagctctatactctgggtacacaa

SEQ ID NO: 3690717 - DNA, 25 bp, Homo sapien
taataatgcttaacttggaagccgc

SEQ ID NO: 3690718 - DNA, 25 bp, Homo sapien
ttcagtaggatctggagcagcttgc

SEQ ID NO: 3690719 - DNA, 25 bp, Homo sapien
gatcccaccaacaaacacgaaggta

SEQ ID NO: 3690720 - DNA, 25 bp, Homo sapien
taggtggtagcagattatttcgact

SEQ ID NO: 3690721 - DNA, 25 bp, Homo sapien
ggtagcagattatttcgactcaggg

SEQ ID NO: 3690722 - DNA, 25 bp, Homo sapien
ggtggtagcagattatttcgactca

SEQ ID NO: 3690723 - DNA, 25 bp, Homo sapien
tggtagcagattatttcgactcagg

SEQ ID NO: 3690724 - DNA, 25 bp, Homo sapien
cagatatggtaagtgcaggccaaac

SEQ ID NO: 3690725 - DNA, 25 bp, Homo sapien
gaattactgcccattaggttgtatg

SEQ ID NO: 3690726 - DNA, 25 bp, Homo sapien
gttaaaaccctatcgaccatggcag

SEQ ID NO: 3690727 - DNA, 25 bp, Homo sapien
cagtataaatcaagatcagggcaca

SEQ ID NO: 3690728 - DNA, 25 bp, Homo sapien
tgagctcgactagagtcgccatggg

SEQ ID NO: 3690729 - DNA, 25 bp, Homo sapien
caccgcactttgagctcgactagag

SEQ ID NO: 3690730 - DNA, 25 bp, Homo sapien
accaccgcactttgagctcgactag

SEQ ID NO: 3690731 - DNA, 25 bp, Homo sapien
gcactttgagctcgactagagtcgc

SEQ ID NO: 3690732 - DNA, 25 bp, Homo sapien
tgggttaagcctctagataaaatct

SEQ ID NO: 3690733 - DNA, 25 bp, Homo sapien
ctgggttaagcctctagataaaatc

SEQ ID NO: 3690734 - DNA, 25 bp, Homo sapien
ggttaagcctctagataaaatctta

SEQ ID NO: 3690735 - DNA, 25 bp, Homo sapien
tcaagggtcatgagttgggacaagt

SEQ ID NO: 3690736 - DNA, 25 bp, Homo sapien
ttagcctgctgtggttcaagggtca

SEQ ID NO: 3690737 - DNA, 25 bp, Homo sapien
tgtgctgcaaacactaccatcctga

SEQ ID NO: 3690738 - DNA, 25 bp, Homo sapien
tggttacttccccaggctctccaag

SEQ ID NO: 3690739 - DNA, 25 bp, Homo sapien
agcaaagtgctagtctgtagtgcca

SEQ ID NO: 3690740 - DNA, 25 bp, Homo sapien
ggttgttgcaattactcagcttcgc

SEQ ID NO: 3690741 - DNA, 25 bp, Homo sapien
caaaacaaggcggtaggccaagtga

SEQ ID NO: 3690742 - DNA, 25 bp, Homo sapien
tgaaggcagccatagatagcacata

SEQ ID NO: 3690743 - DNA, 25 bp, Homo sapien
gatgaggatactcaactgcacatga

SEQ ID NO: 3690744 - DNA, 25 bp, Homo sapien
caactgcacatgagcgacgatactg

SEQ ID NO: 3690745 - DNA, 25 bp, Homo sapien
catgagcgacgatactgtgtatcca

SEQ ID NO: 3690746 - DNA, 25 bp, Homo sapien
caggtcgggcctgatgaggatactc

SEQ ID NO: 3690747 - DNA, 25 bp, Homo sapien
taggcatcgtaaggttgagctgtcc

SEQ ID NO: 3690748 - DNA, 25 bp, Homo sapien
gagagactggtctgcctccgctttg

SEQ ID NO: 3690749 - DNA, 25 bp, Homo sapien
tatggtccctgcctggttcgagaga

SEQ ID NO: 3690750 - DNA, 25 bp, Homo sapien
tgaatgcccttaggaaaaggtccac

SEQ ID NO: 3690751 - DNA, 25 bp, Homo sapien
cctggtttccctagcatgaagagat

SEQ ID NO: 3690752 - DNA, 25 bp, Homo sapien
gctttgagggaaaacacacagggtg

SEQ ID NO: 3690753 - DNA, 25 bp, Homo sapien
gaataggctctctacccagctagaa

SEQ ID NO: 3690754 - DNA, 25 bp, Homo sapien
gagatgtatgttgtagtcctgccac

SEQ ID NO: 3690755 - DNA, 25 bp, Homo sapien
gacctttgcgaggaagtgttcggca

SEQ ID NO: 3690756 - DNA, 25 bp, Homo sapien
tttgggcgcgaaaaagaagcagtcc

SEQ ID NO: 3690757 - DNA, 25 bp, Homo sapien
gtccgacgaggctaccacaaggtgt

SEQ ID NO: 3690758 - DNA, 25 bp, Homo sapien
cgccgcttccaggtatgcagggtcc

SEQ ID NO: 3690759 - DNA, 25 bp, Homo sapien
tatgttctgagaacgattaccagcc

SEQ ID NO: 3690760 - DNA, 25 bp, Homo sapien
caaattctgtggttgtcaaagctcc

SEQ ID NO: 3690761 - DNA, 25 bp, Homo sapien
tgctttgagactttgatgccagggc

SEQ ID NO: 3690762 - DNA, 25 bp, Homo sapien
gacttcagctgagtttgatcttgga

SEQ ID NO: 3690763 - DNA, 25 bp, Homo sapien
taaagataccattggggcagtggct

SEQ ID NO: 3690764 - DNA, 25 bp, Homo sapien
taggtctcaagtattcccatgtgtt

SEQ ID NO: 3690765 - DNA, 25 bp, Homo sapien
caagaatttgaagtaacttgtaagg

SEQ ID NO: 3690766 - DNA, 25 bp, Homo sapien
tggtgttgctcacccatagttccag

SEQ ID NO: 3690767 - DNA, 25 bp, Homo sapien
tactggaatagggaattaggacacc

SEQ ID NO: 3690768 - DNA, 25 bp, Homo sapien
catagatgggatccttctgagaata

SEQ ID NO: 3690769 - DNA, 25 bp, Homo sapien
taatgttgacaacctgtaatgagtg

SEQ ID NO: 3690770 - DNA, 25 bp, Homo sapien
ttaggacaccaagccaattcagctg

SEQ ID NO: 3690771 - DNA, 25 bp, Homo sapien
cttgtaccgcttggcggtgcggcct

SEQ ID NO: 3690772 - DNA, 25 bp, Homo sapien
tgtgggaagtatagggcggcaagcg

SEQ ID NO: 3690773 - DNA, 25 bp, Homo sapien
gatcatccgcttccggagtcgaggt

SEQ ID NO: 3690774 - DNA, 25 bp, Homo sapien
tggtgtcggcttgcaggttctttct

SEQ ID NO: 3690775 - DNA, 25 bp, Homo sapien
tcacaagtctgagagggatcgcacc

SEQ ID NO: 3690776 - DNA, 25 bp, Homo sapien
tgagctccacgaggaaagaacagcg

SEQ ID NO: 3690777 - DNA, 25 bp, Homo sapien
tttgtagcactttccttggcgcgcc

SEQ ID NO: 3690778 - DNA, 25 bp, Homo sapien
tgggattcgcctaaaacttctgact

SEQ ID NO: 3690779 - DNA, 25 bp, Homo sapien
cttctcctagtctcggccctgacac

SEQ ID NO: 3690780 - DNA, 25 bp, Homo sapien
ctcctagtctcggccctgacactac

SEQ ID NO: 3690781 - DNA, 25 bp, Homo sapien
ccttctcctagtctcggccctgaca

SEQ ID NO: 3690782 - DNA, 25 bp, Homo sapien
ttctcctagtctcggccctgacact

SEQ ID NO: 3690783 - DNA, 25 bp, Homo sapien
ctgcctcgataggggtgggacgaca

SEQ ID NO: 3690784 - DNA, 25 bp, Homo sapien
cctcgataggggtgggacgacaaca

SEQ ID NO: 3690785 - DNA, 25 bp, Homo sapien
taggggtgggacgacaacaggagaa

SEQ ID NO: 3690786 - DNA, 25 bp, Homo sapien
gataggggtgggacgacaacaggag

SEQ ID NO: 3690787 - DNA, 25 bp, Homo sapien
tggatcacagcacggcaaaagcagg

SEQ ID NO: 3690788 - DNA, 25 bp, Homo sapien
cctggatcacagcacggcaaaagca

SEQ ID NO: 3690789 - DNA, 25 bp, Homo sapien
tcacagcacggcaaaagcaggaata

SEQ ID NO: 3690790 - DNA, 25 bp, Homo sapien
gatcacagcacggcaaaagcaggaa

SEQ ID NO: 3690791 - DNA, 25 bp, Homo sapien
tctaaaccactagggctccaaggag

SEQ ID NO: 3690792 - DNA, 25 bp, Homo sapien
tgaaagcttattggatcactcctgg

SEQ ID NO: 3690793 - DNA, 25 bp, Homo sapien
tattagggcaaagagcatgctagcc

SEQ ID NO: 3690794 - DNA, 25 bp, Homo sapien
catcaccgaggtcatattctagggc

SEQ ID NO: 3690795 - DNA, 25 bp, Homo sapien
tcactataaacagagacccattcat

SEQ ID NO: 3690796 - DNA, 25 bp, Homo sapien
ggatgttttactggttgacgagaaa

SEQ ID NO: 3690797 - DNA, 25 bp, Homo sapien
ctggagaacgaaagaatcttcacta

SEQ ID NO: 3690798 - DNA, 25 bp, Homo sapien
tggctgtgttactggatgttttact

SEQ ID NO: 3690799 - DNA, 25 bp, Homo sapien
tacaaatcatgaccgtgcatagtgc

SEQ ID NO: 3690800 - DNA, 25 bp, Homo sapien
gggaactatgttctttagccgtagc

SEQ ID NO: 3690801 - DNA, 25 bp, Homo sapien
gaacaattttctgcatgggactctg

SEQ ID NO: 3690802 - DNA, 25 bp, Homo sapien
gagttttaccgtatgaagcctggag

SEQ ID NO: 3690803 - DNA, 25 bp, Homo sapien
tataaatgtatctgacagcccactg

SEQ ID NO: 3690804 - DNA, 25 bp, Homo sapien
ccactgtgtgtggagaaatcactga

SEQ ID NO: 3690805 - DNA, 25 bp, Homo sapien
tcactgaatgatgcacacatgagag

SEQ ID NO: 3690806 - DNA, 25 bp, Homo sapien
caaccttgcacctgaaactccatgg

SEQ ID NO: 3690807 - DNA, 25 bp, Homo sapien
cagctgaccttgattccttggcctt

SEQ ID NO: 3690808 - DNA, 25 bp, Homo sapien
cctgctatcgggtaagaggatgaag

SEQ ID NO: 3690809 - DNA, 25 bp, Homo sapien
cattggaatagcaatcagggctgtc

SEQ ID NO: 3690810 - DNA, 25 bp, Homo sapien
ctggctaggactgggaatcgcctgc

SEQ ID NO: 3690811 - DNA, 25 bp, Homo sapien
tagtatgatgaccagcaagaccaga

SEQ ID NO: 3690812 - DNA, 25 bp, Homo sapien
ggaagtctgcctattacatgggaag

SEQ ID NO: 3690813 - DNA, 25 bp, Homo sapien
aagtaatcatgagttggctgggcgc

SEQ ID NO: 3690814 - DNA, 25 bp, Homo sapien
gggattgagccacattaagcaggag

SEQ ID NO: 3690815 - DNA, 25 bp, Homo sapien
ggttagatccaactagaaacataca

SEQ ID NO: 3690816 - DNA, 25 bp, Homo sapien
cttcccttctaggttagatccaact

SEQ ID NO: 3690817 - DNA, 25 bp, Homo sapien
gaaacatacacagtactatgtgggg

SEQ ID NO: 3690818 - DNA, 25 bp, Homo sapien
ttatgggaattcattttgtgagtgt

SEQ ID NO: 3690819 - DNA, 25 bp, Homo sapien
tagtatgtgtgctactaaagtgagg

SEQ ID NO: 3690820 - DNA, 25 bp, Homo sapien
gcttcaggaatctgtgagtcatcct

SEQ ID NO: 3690821 - DNA, 25 bp, Homo sapien
tcaggaatctgtgagtcatccttgt

SEQ ID NO: 3690822 - DNA, 25 bp, Homo sapien
tatgtgtgctactaaagtgaggacg

SEQ ID NO: 3690823 - DNA, 25 bp, Homo sapien
gcttagtcttgtgggacatctccaa

SEQ ID NO: 3690824 - DNA, 25 bp, Homo sapien
tatgaaccaatgtaaggtgacacct

SEQ ID NO: 3690825 - DNA, 25 bp, Homo sapien
gcattcaggctatatagggaaacca

SEQ ID NO: 3690826 - DNA, 25 bp, Homo sapien
gaagagttaatttcagaacaggcag

SEQ ID NO: 3690827 - DNA, 25 bp, Homo sapien
ttagagattggtccgtgagccccag

SEQ ID NO: 3690828 - DNA, 25 bp, Homo sapien
cagaatctggatcactggttggact

SEQ ID NO: 3690829 - DNA, 25 bp, Homo sapien
cctactaaaggccagaacagtgatt

SEQ ID NO: 3690830 - DNA, 25 bp, Homo sapien
ggttggactatggtgccttctgcct

SEQ ID NO: 3690831 - DNA, 25 bp, Homo sapien
tagttaagcacagtagtgagaagtg

SEQ ID NO: 3690832 - DNA, 25 bp, Homo sapien
aagactagttaagcacagtagtgag

SEQ ID NO: 3690833 - DNA, 25 bp, Homo sapien
aaagaatagaacaaagaatttgatc

SEQ ID NO: 3690834 - DNA, 25 bp, Homo sapien
ggaaagaatagaacaaagaatttga

SEQ ID NO: 3690835 - DNA, 25 bp, Homo sapien
ccttactggaaggtcagatgtgtgc

SEQ ID NO: 3690836 - DNA, 25 bp, Homo sapien
gaagagaagaccttaattcttggtc

SEQ ID NO: 3690837 - DNA, 25 bp, Homo sapien
ccttcttcccttactggaaggtcag

SEQ ID NO: 3690838 - DNA, 25 bp, Homo sapien
gtcaggctgtggtggaccttcttcc

SEQ ID NO: 3690839 - DNA, 25 bp, Homo sapien
catgtatgacagacacacagctaac

SEQ ID NO: 3690840 - DNA, 25 bp, Homo sapien
taaataaagaccatgtatgacagac

SEQ ID NO: 3690841 - DNA, 25 bp, Homo sapien
tgaatgaggacacgttgaaagcttt

SEQ ID NO: 3690842 - DNA, 25 bp, Homo sapien
aactgctagaagtaataaattcagt

SEQ ID NO: 3690843 - DNA, 25 bp, Homo sapien
gaaagagctttctgtcaaggaccgt

SEQ ID NO: 3690844 - DNA, 25 bp, Homo sapien
tcaaacatcagctaaccgaaagagc

SEQ ID NO: 3690845 - DNA, 25 bp, Homo sapien
caaggaccgtatcagggtaatgtgc

SEQ ID NO: 3690846 - DNA, 25 bp, Homo sapien
ccggaatccctctaagtctgcttga

SEQ ID NO: 3690847 - DNA, 25 bp, Homo sapien
ggctgaaatacagtggcataatctc

SEQ ID NO: 3690848 - DNA, 25 bp, Homo sapien
actcctgacctgatgatccgtctgc

SEQ ID NO: 3690849 - DNA, 25 bp, Homo sapien
ttataggcatgagccaccacacccg

SEQ ID NO: 3690850 - DNA, 25 bp, Homo sapien
aatctcggcttactgcaacctctgc

SEQ ID NO: 3690851 - DNA, 25 bp, Homo sapien
tcctgtgttatattcagtcgcccat

SEQ ID NO: 3690852 - DNA, 25 bp, Homo sapien
tgtagaatgtgcctctacgtattcc

SEQ ID NO: 3690853 - DNA, 25 bp, Homo sapien
tattcagtcgcccatgtagaatgtg

SEQ ID NO: 3690854 - DNA, 25 bp, Homo sapien
tctacgtattccttgtgccagttgc

SEQ ID NO: 3690855 - DNA, 25 bp, Homo sapien
caggaaatccgagaaattgtcagat

SEQ ID NO: 3690856 - DNA, 25 bp, Homo sapien
ccttcatttcatgtagggagcagga

SEQ ID NO: 3690857 - DNA, 25 bp, Homo sapien
gcaggaactcaggaacgtgtattga

SEQ ID NO: 3690858 - DNA, 25 bp, Homo sapien
gacgaagatttaattacttgcagaa

SEQ ID NO: 3690859 - DNA, 25 bp, Homo sapien
ccgcgatcctaacgggctcgcgaga

SEQ ID NO: 3690860 - DNA, 25 bp, Homo sapien
ggctgcagccgcgatcctaacgggc

SEQ ID NO: 3690861 - DNA, 25 bp, Homo sapien
gatcctaacgggctcgcgagacgcc

SEQ ID NO: 3690862 - DNA, 25 bp, Homo sapien
tgttcccggctgcagccgcgatcct

SEQ ID NO: 3690863 - DNA, 25 bp, Homo sapien
ttattgcaaggtataatatggagta

SEQ ID NO: 3690864 - DNA, 25 bp, Homo sapien
ctggtgctaaggaaatagagtgaaa

SEQ ID NO: 3690865 - DNA, 25 bp, Homo sapien
attgcaaggtataatatggagtaag

SEQ ID NO: 3690866 - DNA, 25 bp, Homo sapien
tggtgctaaggaaatagagtgaaaa

SEQ ID NO: 3690867 - DNA, 25 bp, Homo sapien
ggcagcggaaccatctattgttttg

SEQ ID NO: 3690868 - DNA, 25 bp, Homo sapien
gtttgccagaaagtgcaccctgtat

SEQ ID NO: 3690869 - DNA, 25 bp, Homo sapien
tatgcatgtgcaggactattcgagt

SEQ ID NO: 3690870 - DNA, 25 bp, Homo sapien
tggaatacaactcagagctccaggc

SEQ ID NO: 3690871 - DNA, 25 bp, Homo sapien
aaatggacagatcacccgaggagct

SEQ ID NO: 3690872 - DNA, 25 bp, Homo sapien
cacctcggaaagatgctgtacagca

SEQ ID NO: 3690873 - DNA, 25 bp, Homo sapien
gatcaatgagagaatgccacctcgg

SEQ ID NO: 3690874 - DNA, 25 bp, Homo sapien
gagggccctgggacatgtgctatct

SEQ ID NO: 3690875 - DNA, 25 bp, Homo sapien
cagctttgtagcaccttgttttgag

SEQ ID NO: 3690876 - DNA, 25 bp, Homo sapien
tagagttaactacctgcttaggccc

SEQ ID NO: 3690877 - DNA, 25 bp, Homo sapien
tgtaccctggtaaatgatgccaaag

SEQ ID NO: 3690878 - DNA, 25 bp, Homo sapien
tctgtcttgcaatgtagaagcagct

SEQ ID NO: 3690879 - DNA, 25 bp, Homo sapien
ttgggcattccaccgaaattcttgg

SEQ ID NO: 3690880 - DNA, 25 bp, Homo sapien
tttagaggaacacttgttagtacat

SEQ ID NO: 3690881 - DNA, 25 bp, Homo sapien
tagtgatgcctttctaatttagagg

SEQ ID NO: 3690882 - DNA, 25 bp, Homo sapien
gctttgcttgaaatgggcccttctg

SEQ ID NO: 3690883 - DNA, 25 bp, Homo sapien
ggcggagattgcagtgagccgagtt

SEQ ID NO: 3690884 - DNA, 25 bp, Homo sapien
gcaggagaatcgcttgaacctgcga

SEQ ID NO: 3690885 - DNA, 25 bp, Homo sapien
aatcccagctactcgggaggctgag

SEQ ID NO: 3690886 - DNA, 25 bp, Homo sapien
attagcctggtgtggtggtacacgc

SEQ ID NO: 3690887 - DNA, 25 bp, Homo sapien
aaacactgatttgcacctaggctta

SEQ ID NO: 3690888 - DNA, 25 bp, Homo sapien
cgagatttgcgccagtgtgctccaa

SEQ ID NO: 3690889 - DNA, 25 bp, Homo sapien
gatttgcacctaggcttaagttagt

SEQ ID NO: 3690890 - DNA, 25 bp, Homo sapien
gagccgagatttgcgccagtgtgct

SEQ ID NO: 3690891 - DNA, 25 bp, Homo sapien
gaaggccagcctttatagtgcagaa

SEQ ID NO: 3690892 - DNA, 25 bp, Homo sapien
cagtcagaaatcacctcggctttgg

SEQ ID NO: 3690893 - DNA, 25 bp, Homo sapien
ggtgccacccggagcagaaattagg

SEQ ID NO: 3690894 - DNA, 25 bp, Homo sapien
ttcactcggcctgtcaaagcggcgc

SEQ ID NO: 3690895 - DNA, 25 bp, Homo sapien
atgccggtcttagcccctctgtagg

SEQ ID NO: 3690896 - DNA, 25 bp, Homo sapien
agagggtccgccatgttccccggcg

SEQ ID NO: 3690897 - DNA, 25 bp, Homo sapien
ccttggcctcgtcctgtttctctcc

SEQ ID NO: 3690898 - DNA, 25 bp, Homo sapien
cgcacgcgcagtgcatgccggtctt

SEQ ID NO: 3690899 - DNA, 25 bp, Homo sapien
gtttcctcgcagtcgttcgatcgca

SEQ ID NO: 3690900 - DNA, 25 bp, Homo sapien
ggcgcctaaattgctctagctgcag

SEQ ID NO: 3690901 - DNA, 25 bp, Homo sapien
catgagagcgggtgtgtttcctcgc

SEQ ID NO: 3690902 - DNA, 25 bp, Homo sapien
gttttgacaaactatggcgcctaaa

SEQ ID NO: 3690903 - DNA, 25 bp, Homo sapien
taaaggttccataagtcacctgggc

SEQ ID NO: 3690904 - DNA, 25 bp, Homo sapien
ggtgtcgtggacacactcatctaat

SEQ ID NO: 3690905 - DNA, 25 bp, Homo sapien
gaacagtcagttcttgcccctctac

SEQ ID NO: 3690906 - DNA, 25 bp, Homo sapien
catgagtgtcagtcaccgtggtctc

SEQ ID NO: 3690907 - DNA, 25 bp, Homo sapien
gcggagctgccaacataacattcac

SEQ ID NO: 3690908 - DNA, 25 bp, Homo sapien
ccctccaaaccttaggcctagaatg

SEQ ID NO: 3690909 - DNA, 25 bp, Homo sapien
gcccaggtattatggcctgtcagca

SEQ ID NO: 3690910 - DNA, 25 bp, Homo sapien
ggtcatggttctgatgacatcatca

SEQ ID NO: 3690911 - DNA, 25 bp, Homo sapien
tcctttcctggagctacacctttct

SEQ ID NO: 3690912 - DNA, 25 bp, Homo sapien
tagagtcctgcagcacagtcaatgg

SEQ ID NO: 3690913 - DNA, 25 bp, Homo sapien
gaacccctggtcctcgaagagtaga

SEQ ID NO: 3690914 - DNA, 25 bp, Homo sapien
cagatcctgttccagggtcccgaac

SEQ ID NO: 3690915 - DNA, 25 bp, Homo sapien
agaccagcctgggcaacacagtgag

SEQ ID NO: 3690916 - DNA, 25 bp, Homo sapien
tgggcaacacagtgagatcccgtct

SEQ ID NO: 3690917 - DNA, 25 bp, Homo sapien
aggatgacttgagtccagcagttcg

SEQ ID NO: 3690918 - DNA, 25 bp, Homo sapien
gcctgggcaacacagtgagatcccg

SEQ ID NO: 3690919 - DNA, 25 bp, Homo sapien
tagatctcagagatcaaacaaaggc

SEQ ID NO: 3690920 - DNA, 25 bp, Homo sapien
gatctcagagatcaaacaaaggcag

SEQ ID NO: 3690921 - DNA, 25 bp, Homo sapien
tctcagagatcaaacaaaggcagct

SEQ ID NO: 3690922 - DNA, 25 bp, Homo sapien
cattagatctcagagatcaaacaaa

SEQ ID NO: 3690923 - DNA, 25 bp, Homo sapien
agtaagtttcattcaatttatcgtt

SEQ ID NO: 3690924 - DNA, 25 bp, Homo sapien
gccgaatttatagtaagtttcattc

SEQ ID NO: 3690925 - DNA, 25 bp, Homo sapien
tagtaagtttcattcaatttatcgt

SEQ ID NO: 3690926 - DNA, 25 bp, Homo sapien
ccagccgaatttatagtaagtttca

SEQ ID NO: 3690927 - DNA, 25 bp, Homo sapien
agtgttcatcacagtagaggtcagg

SEQ ID NO: 3690928 - DNA, 25 bp, Homo sapien
tcagggtacaaagtaccagtgcatt

SEQ ID NO: 3690929 - DNA, 25 bp, Homo sapien
aagtaccagtgcattgaaggttgtc

SEQ ID NO: 3690930 - DNA, 25 bp, Homo sapien
tccttgcccaagttgagtgttcatc

SEQ ID NO: 3690931 - DNA, 25 bp, Homo sapien
tagcagttctgaaaggccgtgcgtg

SEQ ID NO: 3690932 - DNA, 25 bp, Homo sapien
agcccaagccattagagatcaacaa

SEQ ID NO: 3690933 - DNA, 25 bp, Homo sapien
aaggctgctgattgggtcagaaccc

SEQ ID NO: 3690934 - DNA, 25 bp, Homo sapien
tcagcaaaaataaggacacgcagtc

SEQ ID NO: 3690935 - DNA, 25 bp, Homo sapien
cataccctgaggatactgtctgtgg

SEQ ID NO: 3690936 - DNA, 25 bp, Homo sapien
gaacagtgcgtacttctcaggtagc

SEQ ID NO: 3690937 - DNA, 25 bp, Homo sapien
cagtggcaccgttgtctcagagagg

SEQ ID NO: 3690938 - DNA, 25 bp, Homo sapien
gctgctaggcttagaggttaggccc

SEQ ID NO: 3690939 - DNA, 25 bp, Homo sapien
tcttctataggtgggcattacttta

SEQ ID NO: 3690940 - DNA, 25 bp, Homo sapien
tttaagtggctggacaatatctggt

SEQ ID NO: 3690941 - DNA, 25 bp, Homo sapien
caggattagaatcgttgggcaacag

SEQ ID NO: 3690942 - DNA, 25 bp, Homo sapien
caaaccttctgattcagctctgtgg

SEQ ID NO: 3690943 - DNA, 25 bp, Homo sapien
tcagccttccgagtgcaggtgtgca

SEQ ID NO: 3690944 - DNA, 25 bp, Homo sapien
cctcatagttcctttggccgggctg

SEQ ID NO: 3690945 - DNA, 25 bp, Homo sapien
taggacttgcctccctgtatagcat

SEQ ID NO: 3690946 - DNA, 25 bp, Homo sapien
gattggaatgcgacttcacaggtag

SEQ ID NO: 3690947 - DNA, 25 bp, Homo sapien
tatttacctgagtgtgagctgacca

SEQ ID NO: 3690948 - DNA, 25 bp, Homo sapien
tccgctcgcactgtcatataagtac

SEQ ID NO: 3690949 - DNA, 25 bp, Homo sapien
ccgctcgcactgtcatataagtacc

SEQ ID NO: 3690950 - DNA, 25 bp, Homo sapien
cgctcgcactgtcatataagtaccg

SEQ ID NO: 3690951 - DNA, 25 bp, Homo sapien
ctccgctcgcactgtcatataagta

SEQ ID NO: 3690952 - DNA, 25 bp, Homo sapien
gcagtgctctggcaaagactttcca

SEQ ID NO: 3690953 - DNA, 25 bp, Homo sapien
cagtgtagtagtgaaaaagtgcttc

SEQ ID NO: 3690954 - DNA, 25 bp, Homo sapien
tccaggatgaacaacgtttccagct

SEQ ID NO: 3690955 - DNA, 25 bp, Homo sapien
tcagtgtagtagtgaaaaagtgctt

SEQ ID NO: 3690956 - DNA, 25 bp, Homo sapien
agattttaggtatgttgctaaagag

SEQ ID NO: 3690957 - DNA, 25 bp, Homo sapien
ggcctaaagtgagagatttctgact

SEQ ID NO: 3690958 - DNA, 25 bp, Homo sapien
caaagaaaatggcctaaagtgagag

SEQ ID NO: 3690959 - DNA, 25 bp, Homo sapien
aatggcctaaagtgagagatttctg

SEQ ID NO: 3690960 - DNA, 25 bp, Homo sapien
ttagactgctaacatggccttccca

SEQ ID NO: 3690961 - DNA, 25 bp, Homo sapien
cagttcctagtttgtgtgtgcttac

SEQ ID NO: 3690962 - DNA, 25 bp, Homo sapien
tgttagcctgatactggaaagtttg

SEQ ID NO: 3690963 - DNA, 25 bp, Homo sapien
tactcagaacagatcttagactgct

SEQ ID NO: 3690964 - DNA, 25 bp, Homo sapien
tcagactggagtgcgatggcctgat

SEQ ID NO: 3690965 - DNA, 25 bp, Homo sapien
acaggcgcgtaccactactgcctgg

SEQ ID NO: 3690966 - DNA, 25 bp, Homo sapien
ggatctcactctgtccaactcagac

SEQ ID NO: 3690967 - DNA, 25 bp, Homo sapien
ctcactctgtccaactcagactgga

SEQ ID NO: 3690968 - DNA, 25 bp, Homo sapien
tcttgaggatcaggtgtgcatctga

SEQ ID NO: 3690969 - DNA, 25 bp, Homo sapien
gtgtgcatctgaaagggatgagctc

SEQ ID NO: 3690970 - DNA, 25 bp, Homo sapien
gcttcttgaggatcaggtgtgcatc

SEQ ID NO: 3690971 - DNA, 25 bp, Homo sapien
aggtgtgcatctgaaagggatgagc

SEQ ID NO: 3690972 - DNA, 25 bp, Homo sapien
tgcccggccaaatctgaataacttg

SEQ ID NO: 3690973 - DNA, 25 bp, Homo sapien
gagtaatatcgtgtggcaggagcta

SEQ ID NO: 3690974 - DNA, 25 bp, Homo sapien
taggcttaacacttcgcacactgca

SEQ ID NO: 3690975 - DNA, 25 bp, Homo sapien
tactactcaattaagcacatttctt

SEQ ID NO: 3690976 - DNA, 25 bp, Homo sapien
gatgttgaccccagtcagagctgta

SEQ ID NO: 3690977 - DNA, 25 bp, Homo sapien
cctttgatggtacatcctgtcttgg

SEQ ID NO: 3690978 - DNA, 25 bp, Homo sapien
acatcctgtcttggatgttgacccc

SEQ ID NO: 3690979 - DNA, 25 bp, Homo sapien
tatagtgccaaaacaagatagttct

SEQ ID NO: 3690980 - DNA, 25 bp, Homo sapien
tatggcaccacgtgtgactaatttt

SEQ ID NO: 3690981 - DNA, 25 bp, Homo sapien
gtagctgtaactacatgtgtatggc

SEQ ID NO: 3690982 - DNA, 25 bp, Homo sapien
gctgtaactacatgtgtatggcacc

SEQ ID NO: 3690983 - DNA, 25 bp, Homo sapien
acatgtgtatggcaccacgtgtgac

SEQ ID NO: 3690984 - DNA, 25 bp, Homo sapien
aagagacagggtttcaccatgttcg

SEQ ID NO: 3690985 - DNA, 25 bp, Homo sapien
attttgtatttttagaagagacagg

SEQ ID NO: 3690986 - DNA, 25 bp, Homo sapien
ccaccatccctggctaattttgtat

SEQ ID NO: 3690987 - DNA, 25 bp, Homo sapien
caagtagctagcattacaggcactt

SEQ ID NO: 3690988 - DNA, 25 bp, Homo sapien
tgtgcccagcctaacatctttttat

SEQ ID NO: 3690989 - DNA, 25 bp, Homo sapien
tgcccagcctaacatctttttattt

SEQ ID NO: 3690990 - DNA, 25 bp, Homo sapien
cccagcctaacatctttttatttct

SEQ ID NO: 3690991 - DNA, 25 bp, Homo sapien
actgtgcccagcctaacatcttttt

SEQ ID NO: 3690992 - DNA, 25 bp, Homo sapien
tctttccggagagataccccacgga

SEQ ID NO: 3690993 - DNA, 25 bp, Homo sapien
tcttgagatgcgaacggagagtcct

SEQ ID NO: 3690994 - DNA, 25 bp, Homo sapien
gaatggtggcgtcccagatcgtcgc

SEQ ID NO: 3690995 - DNA, 25 bp, Homo sapien
ttcgctgagaaactacgagtaggat

SEQ ID NO: 3690996 - DNA, 25 bp, Homo sapien
gctagtcggggaccgcgcgccggga

SEQ ID NO: 3690997 - DNA, 25 bp, Homo sapien
ctctgcctgaggctagtcggggacc

SEQ ID NO: 3690998 - DNA, 25 bp, Homo sapien
cctgaggctagtcggggaccgcgcg

SEQ ID NO: 3690999 - DNA, 25 bp, Homo sapien
aggctagtcggggaccgcgcgccgg

SEQ ID NO: 3691000 - DNA, 25 bp, Homo sapien
cgccaggagctgtgagtgcgacacc

SEQ ID NO: 3691001 - DNA, 25 bp, Homo sapien
tcttgcgagagtctcttctcgtgtg

SEQ ID NO: 3691002 - DNA, 25 bp, Homo sapien
gtagctatagcagccgcggcggtta

SEQ ID NO: 3691003 - DNA, 25 bp, Homo sapien
aaagtgtcgcgagagctggttgcct

SEQ ID NO: 3691004 - DNA, 25 bp, Homo sapien
cgagatatacttcgctgtttccagc

SEQ ID NO: 3691005 - DNA, 25 bp, Homo sapien
taaacagtgctatcgcgagatatac

SEQ ID NO: 3691006 - DNA, 25 bp, Homo sapien
tgctatcgcgagatatacttcgctg

SEQ ID NO: 3691007 - DNA, 25 bp, Homo sapien
acttcgctgtttccagcctgactca

SEQ ID NO: 3691008 - DNA, 25 bp, Homo sapien
gaatcttcggctaaagacgacgctg

SEQ ID NO: 3691009 - DNA, 25 bp, Homo sapien
caatcgttttccgactcctggccaa

SEQ ID NO: 3691010 - DNA, 25 bp, Homo sapien
tatcccagtttagggtctgccacgc

SEQ ID NO: 3691011 - DNA, 25 bp, Homo sapien
cgtgaaacgccttgaagccgccatt

SEQ ID NO: 3691012 - DNA, 25 bp, Homo sapien
cactagttgcatgtggctcttgagc

SEQ ID NO: 3691013 - DNA, 25 bp, Homo sapien
ttattgttacttgcctagcctctgc

SEQ ID NO: 3691014 - DNA, 25 bp, Homo sapien
tagagtctaggactgcgctgtccga

SEQ ID NO: 3691015 - DNA, 25 bp, Homo sapien
ccccggacatctagagagctcattc

SEQ ID NO: 3691016 - DNA, 25 bp, Homo sapien
tagattaagtttgccagaatctgca

SEQ ID NO: 3691017 - DNA, 25 bp, Homo sapien
ttagtgcaccttgggtcaaatggca

SEQ ID NO: 3691018 - DNA, 25 bp, Homo sapien
ccatgagctgctaatggttagatta

SEQ ID NO: 3691019 - DNA, 25 bp, Homo sapien
tagatggatcatattttagtgcacc

SEQ ID NO: 3691020 - DNA, 25 bp, Homo sapien
tgattgtcacagactagagcatgcc

SEQ ID NO: 3691021 - DNA, 25 bp, Homo sapien
gctacagttatagtatgccaggctc

SEQ ID NO: 3691022 - DNA, 25 bp, Homo sapien
ttacaagggcactacagtggtacct

SEQ ID NO: 3691023 - DNA, 25 bp, Homo sapien
ggtgttcacccgctttatgtagttg

SEQ ID NO: 3691024 - DNA, 25 bp, Homo sapien
tacaacgtggatattggcatcccct

SEQ ID NO: 3691025 - DNA, 25 bp, Homo sapien
aatcgaacccctattccctggctga

SEQ ID NO: 3691026 - DNA, 25 bp, Homo sapien
gggcccttgctgagtgaacccctgg

SEQ ID NO: 3691027 - DNA, 25 bp, Homo sapien
tggatatgagaaggcctccaaacgc

SEQ ID NO: 3691028 - DNA, 25 bp, Homo sapien
aagttagcaacttgagaggccagtg

SEQ ID NO: 3691029 - DNA, 25 bp, Homo sapien
gaagggtcagatatccccacatgga

SEQ ID NO: 3691030 - DNA, 25 bp, Homo sapien
tagcaggtgtacagcatcttgtgaa

SEQ ID NO: 3691031 - DNA, 25 bp, Homo sapien
tgagttataccagctagaccaggaa

SEQ ID NO: 3691032 - DNA, 25 bp, Homo sapien
aaccccgagctgctatcgctggtac

SEQ ID NO: 3691033 - DNA, 25 bp, Homo sapien
ccccgagctgctatcgctggtacag

SEQ ID NO: 3691034 - DNA, 25 bp, Homo sapien
caaccccgagctgctatcgctggta

SEQ ID NO: 3691035 - DNA, 25 bp, Homo sapien
ccgagctgctatcgctggtacagaa

SEQ ID NO: 3691036 - DNA, 25 bp, Homo sapien
tgagcctcatcgatgcctcaggaaa

SEQ ID NO: 3691037 - DNA, 25 bp, Homo sapien
gactccgagagagggaccagctctt

SEQ ID NO: 3691038 - DNA, 25 bp, Homo sapien
tctcagattcgaagacggagccagg

SEQ ID NO: 3691039 - DNA, 25 bp, Homo sapien
cactgtgcagcggtatggacctctc

SEQ ID NO: 3691040 - DNA, 25 bp, Homo sapien
tgtcaggcctaagtgttgatagtgg

SEQ ID NO: 3691041 - DNA, 25 bp, Homo sapien
gtagtagtgggcaagatgcctggcc

SEQ ID NO: 3691042 - DNA, 25 bp, Homo sapien
gcctaagtgttgatagtgggtagta

SEQ ID NO: 3691043 - DNA, 25 bp, Homo sapien
tcttctcatgagcaagtcagtatca

SEQ ID NO: 3691044 - DNA, 25 bp, Homo sapien
acattcatggcagtgtgtcggaggt

SEQ ID NO: 3691045 - DNA, 25 bp, Homo sapien
tcggaggttccagtatgaatggcat

SEQ ID NO: 3691046 - DNA, 25 bp, Homo sapien
atttcccagatgtcagcgcgaggtc

SEQ ID NO: 3691047 - DNA, 25 bp, Homo sapien
gtatgaatggcatttcccagatgtc

SEQ ID NO: 3691048 - DNA, 25 bp, Homo sapien
ttttgtgcccttttgcgtcctgaat

SEQ ID NO: 3691049 - DNA, 25 bp, Homo sapien
taacttcttaaatgcacaaatttat

SEQ ID NO: 3691050 - DNA, 25 bp, Homo sapien
tctttatatgtgctgtatacagagt

SEQ ID NO: 3691051 - DNA, 25 bp, Homo sapien
aaaatcaaaccccttccagcatggc

SEQ ID NO: 3691052 - DNA, 25 bp, Homo sapien
gccccgacgagtgcgtgtagtatct

SEQ ID NO: 3691053 - DNA, 25 bp, Homo sapien
cagccaggagtgcatcaacgtgctt

SEQ ID NO: 3691054 - DNA, 25 bp, Homo sapien
aacgtgcttctgcagtacggctgcc

SEQ ID NO: 3691055 - DNA, 25 bp, Homo sapien
tacggctgccccgacgagtgcgtgt

SEQ ID NO: 3691056 - DNA, 25 bp, Homo sapien
ctcagtaaagtccacgagggaagag

SEQ ID NO: 3691057 - DNA, 25 bp, Homo sapien
gagaaggaacggtggatccgttcca

SEQ ID NO: 3691058 - DNA, 25 bp, Homo sapien
taaagtccacgagggaagagaagga

SEQ ID NO: 3691059 - DNA, 25 bp, Homo sapien
tggatccgttccaaatatgaggaga

SEQ ID NO: 3691060 - DNA, 25 bp, Homo sapien
ggaagatcgcgagtgggaaggtcct

SEQ ID NO: 3691061 - DNA, 25 bp, Homo sapien
gggaagatcgcgagtgggaaggtcc

SEQ ID NO: 3691062 - DNA, 25 bp, Homo sapien
gcccgcactcagctgttgacagtct

SEQ ID NO: 3691063 - DNA, 25 bp, Homo sapien
ggcgcccgcactcagctgttgacag

SEQ ID NO: 3691064 - DNA, 25 bp, Homo sapien
caatccgacctgaggagtcacagtt

SEQ ID NO: 3691065 - DNA, 25 bp, Homo sapien
ttccggtggtgtccaatccgacctg

SEQ ID NO: 3691066 - DNA, 25 bp, Homo sapien
agggcggtgtacgctgctccggagt

SEQ ID NO: 3691067 - DNA, 25 bp, Homo sapien
ggtgtacgctgctccggagtcccac

SEQ ID NO: 3691068 - DNA, 25 bp, Homo sapien
gggcggtgtacgctgctccggagtc

SEQ ID NO: 3691069 - DNA, 25 bp, Homo sapien
gcggtgtacgctgctccggagtccc

SEQ ID NO: 3691070 - DNA, 25 bp, Homo sapien
gaagcagctcatatgtcagaacacc

SEQ ID NO: 3691071 - DNA, 25 bp, Homo sapien
gtaactatgatttcacaagacaaaa

SEQ ID NO: 3691072 - DNA, 25 bp, Homo sapien
gacaaaaatcactgtgcaatgaatt

SEQ ID NO: 3691073 - DNA, 25 bp, Homo sapien
gggatatatttagaacaaacttcag

SEQ ID NO: 3691074 - DNA, 25 bp, Homo sapien
ttttacttcatctacactcacatca

SEQ ID NO: 3691075 - DNA, 25 bp, Homo sapien
atagcatcttaacagtaaccatgtg

SEQ ID NO: 3691076 - DNA, 25 bp, Homo sapien
aacatatttccccagagttctcatt

SEQ ID NO: 3691077 - DNA, 25 bp, Homo sapien
cattaggtagcaagaaaggcgatca

SEQ ID NO: 3691078 - DNA, 25 bp, Homo sapien
tcagttctgataaggtatatttcta

SEQ ID NO: 3691079 - DNA, 25 bp, Homo sapien
gttaatcagtgctctttacaacttc

SEQ ID NO: 3691080 - DNA, 25 bp, Homo sapien
gggtctctaatatagagttaatcag

SEQ ID NO: 3691081 - DNA, 25 bp, Homo sapien
tctaatatagagttaatcagtgctc

SEQ ID NO: 3691082 - DNA, 25 bp, Homo sapien
gggcggggtctctaatatagagtta

SEQ ID NO: 3691083 - DNA, 25 bp, Homo sapien
cagctcggctgcgccgaccatgggc

SEQ ID NO: 3691084 - DNA, 25 bp, Homo sapien
agctcggctgcgccgaccatgggcc

SEQ ID NO: 3691085 - DNA, 25 bp, Homo sapien
ctgggagtgacctagcacatggtgc

SEQ ID NO: 3691086 - DNA, 25 bp, Homo sapien
gcagcagatgttgacggagctgagc

SEQ ID NO: 3691087 - DNA, 25 bp, Homo sapien
cagcagatgttgacggagctgagca

SEQ ID NO: 3691088 - DNA, 25 bp, Homo sapien
agcagatgttgacggagctgagcac

SEQ ID NO: 3691089 - DNA, 25 bp, Homo sapien
ccatttggctgcgtgtggccagcca

SEQ ID NO: 3691090 - DNA, 25 bp, Homo sapien
ctccatttggctgcgtgtggccagc

SEQ ID NO: 3691091 - DNA, 25 bp, Homo sapien
cctccatttggctgcgtgtggccag

SEQ ID NO: 3691092 - DNA, 25 bp, Homo sapien
tccatttggctgcgtgtggccagcc

SEQ ID NO: 3691093 - DNA, 25 bp, Homo sapien
atgaagcggctctcgcagatgaagt

SEQ ID NO: 3691094 - DNA, 25 bp, Homo sapien
tgaagcggctctcgcagatgaagtc

SEQ ID NO: 3691095 - DNA, 25 bp, Homo sapien
agcggctctcgcagatgaagtcagg

SEQ ID NO: 3691096 - DNA, 25 bp, Homo sapien
cggctctcgcagatgaagtcaggct

SEQ ID NO: 3691097 - DNA, 25 bp, Homo sapien
gcttgcctttacagatgaactccat

SEQ ID NO: 3691098 - DNA, 25 bp, Homo sapien
tggactggcgcctatccttcatgaa

SEQ ID NO: 3691099 - DNA, 25 bp, Homo sapien
gagataccgaccagacagtggacga

SEQ ID NO: 3691100 - DNA, 25 bp, Homo sapien
catgaacctgtaggtgtcgtcggag

SEQ ID NO: 3691101 - DNA, 25 bp, Homo sapien
ggagagtacaggccgcgcagccctg

SEQ ID NO: 3691102 - DNA, 25 bp, Homo sapien
aggagagtacaggccgcgcagccct

SEQ ID NO: 3691103 - DNA, 25 bp, Homo sapien
gagagtacaggccgcgcagccctgc

SEQ ID NO: 3691104 - DNA, 25 bp, Homo sapien
gttcgctgatttgatgtacagcgag

SEQ ID NO: 3691105 - DNA, 25 bp, Homo sapien
ctgatttgatgtacagcgagaagga

SEQ ID NO: 3691106 - DNA, 25 bp, Homo sapien
cggccgggggtgttcgctgatttga

SEQ ID NO: 3691107 - DNA, 25 bp, Homo sapien
atttgatgtacagcgagaaggagcg

SEQ ID NO: 3691108 - DNA, 25 bp, Homo sapien
ccgtgcagcttgcagagctttggga

SEQ ID NO: 3691109 - DNA, 25 bp, Homo sapien
gccgtgcagcttgcagagctttggg

SEQ ID NO: 3691110 - DNA, 25 bp, Homo sapien
gggccgtgcagcttgcagagctttg

SEQ ID NO: 3691111 - DNA, 25 bp, Homo sapien
ggccgtgcagcttgcagagctttgg

SEQ ID NO: 3691112 - DNA, 25 bp, Homo sapien
gcgtctccgtctccggggcggctcg

SEQ ID NO: 3691113 - DNA, 25 bp, Homo sapien
gggcggctcgtcgggccagttggtc

SEQ ID NO: 3691114 - DNA, 25 bp, Homo sapien
tcgtcgggccagttggtccgcgcgt

SEQ ID NO: 3691115 - DNA, 25 bp, Homo sapien
tctccggggcggctcgtcgggccag

SEQ ID NO: 3691116 - DNA, 25 bp, Homo sapien
cgccgcgagtgcgcccctccaggat

SEQ ID NO: 3691117 - DNA, 25 bp, Homo sapien
ccgcgagtgcgcccctccaggatgc

SEQ ID NO: 3691118 - DNA, 25 bp, Homo sapien
ctcgccgcgagtgcgcccctccagg

SEQ ID NO: 3691119 - DNA, 25 bp, Homo sapien
cctcgccgcgagtgcgcccctccag

SEQ ID NO: 3691120 - DNA, 25 bp, Homo sapien
gtaaaaatagagctcgaggaccacc

SEQ ID NO: 3691121 - DNA, 25 bp, Homo sapien
tgttgccaaatcattgccagaatga

SEQ ID NO: 3691122 - DNA, 25 bp, Homo sapien
taaataccagacagtaaaaatagag

SEQ ID NO: 3691123 - DNA, 25 bp, Homo sapien
gaaggtggcctcgtattgcttagaa

SEQ ID NO: 3691124 - DNA, 25 bp, Homo sapien
tgctcccccaacctatggctttggg

SEQ ID NO: 3691125 - DNA, 25 bp, Homo sapien
gagggctggccgcatctctctggca

SEQ ID NO: 3691126 - DNA, 25 bp, Homo sapien
cctgtcctcccttgagaaggaacag

SEQ ID NO: 3691127 - DNA, 25 bp, Homo sapien
tccctgccaccaagatttggtgcct

SEQ ID NO: 3691128 - DNA, 25 bp, Homo sapien
actcctgcgtcacccccggaggcca

SEQ ID NO: 3691129 - DNA, 25 bp, Homo sapien
tacacactctgttctattcctcagc

SEQ ID NO: 3691130 - DNA, 25 bp, Homo sapien
cgtcctgcctggcaggtagttctgg

SEQ ID NO: 3691131 - DNA, 25 bp, Homo sapien
ggaatggcctttctgagccaccagt

SEQ ID NO: 3691132 - DNA, 25 bp, Homo sapien
cctgcctggggacttgctaggtggg

SEQ ID NO: 3691133 - DNA, 25 bp, Homo sapien
agcacctgctcttggagccccttag

SEQ ID NO: 3691134 - DNA, 25 bp, Homo sapien
cctgaacttcctgtgcgaagcagca

SEQ ID NO: 3691135 - DNA, 25 bp, Homo sapien
taccccagaagcacagggacttggc

SEQ ID NO: 3691136 - DNA, 25 bp, Homo sapien
tgagggcagcgctccctaagtgaag

SEQ ID NO: 3691137 - DNA, 25 bp, Homo sapien
tgtctagagagagtgccctgggaaa

SEQ ID NO: 3691138 - DNA, 25 bp, Homo sapien
gacaaggctgatggttgttattcca

SEQ ID NO: 3691139 - DNA, 25 bp, Homo sapien
ccagggtgactggtccactcctaga

SEQ ID NO: 3691140 - DNA, 25 bp, Homo sapien
agtatagttcttgggattgatctta

SEQ ID NO: 3691141 - DNA, 25 bp, Homo sapien
agctttagcacccccaaatggcaca

SEQ ID NO: 3691142 - DNA, 25 bp, Homo sapien
tcttgggattgatcttaacaccagc

SEQ ID NO: 3691143 - DNA, 25 bp, Homo sapien
gattgatcttaacaccagctttagc

SEQ ID NO: 3691144 - DNA, 25 bp, Homo sapien
ggaccattgatctcactgatatggg

SEQ ID NO: 3691145 - DNA, 25 bp, Homo sapien
taggtgacctttatatggcaaaaca

SEQ ID NO: 3691146 - DNA, 25 bp, Homo sapien
tgacaaccagtttgaatttgcttgg

SEQ ID NO: 3691147 - DNA, 25 bp, Homo sapien
ccactacgcctgattaattagatca

SEQ ID NO: 3691148 - DNA, 25 bp, Homo sapien
tatctcctattacaaatagtaggag

SEQ ID NO: 3691149 - DNA, 25 bp, Homo sapien
gaccctatctcctattacaaatagt

SEQ ID NO: 3691150 - DNA, 25 bp, Homo sapien
tctgaccctatctcctattacaaat

SEQ ID NO: 3691151 - DNA, 25 bp, Homo sapien
cctatctcctattacaaatagtagg

SEQ ID NO: 3691152 - DNA, 25 bp, Homo sapien
tcgttcctaacgtcaaggctcccag

SEQ ID NO: 3691153 - DNA, 25 bp, Homo sapien
tagacttcgttcctaacgtcaaggc

SEQ ID NO: 3691154 - DNA, 25 bp, Homo sapien
ccggctccagatccaggttagactt

SEQ ID NO: 3691155 - DNA, 25 bp, Homo sapien
gatccaggttagacttcgttcctaa

SEQ ID NO: 3691156 - DNA, 25 bp, Homo sapien
cttatcagacagtgatcagtttaat

SEQ ID NO: 3691157 - DNA, 25 bp, Homo sapien
atgaaagcattcccaatttgatctc

SEQ ID NO: 3691158 - DNA, 25 bp, Homo sapien
tgaaagcattcccaatttgatctca

SEQ ID NO: 3691159 - DNA, 25 bp, Homo sapien
gaaagcattcccaatttgatctcac

SEQ ID NO: 3691160 - DNA, 25 bp, Homo sapien
tatgaaagcattcccaatttgatct

SEQ ID NO: 3691161 - DNA, 25 bp, Homo sapien
tgatgataccctgggtagatgggct

SEQ ID NO: 3691162 - DNA, 25 bp, Homo sapien
tttgctgatagcctggtactgggcc

SEQ ID NO: 3691163 - DNA, 25 bp, Homo sapien
cattgtaggctccatagggaatggc

SEQ ID NO: 3691164 - DNA, 25 bp, Homo sapien
tgtggaccctgattgcccaccatag

SEQ ID NO: 3691165 - DNA, 25 bp, Homo sapien
cttggccaaactggccatatgcagc

SEQ ID NO: 3691166 - DNA, 25 bp, Homo sapien
ggcccattctgtacatctccttggc

SEQ ID NO: 3691167 - DNA, 25 bp, Homo sapien
ttctgtacatctccttggccaaact

SEQ ID NO: 3691168 - DNA, 25 bp, Homo sapien
agcctggccacaaggagcctgtgct

SEQ ID NO: 3691169 - DNA, 25 bp, Homo sapien
gctggacgtcagcagtacctgtaac

SEQ ID NO: 3691170 - DNA, 25 bp, Homo sapien
tagggtagtctcaacaggactgcaa

SEQ ID NO: 3691171 - DNA, 25 bp, Homo sapien
gaagaatatgcaaaggaacccaggt

SEQ ID NO: 3691172 - DNA, 25 bp, Homo sapien
tcaataatccacagggctggacgtc

SEQ ID NO: 3691173 - DNA, 25 bp, Homo sapien
ccaaggtgttgagattactacaggc

SEQ ID NO: 3691174 - DNA, 25 bp, Homo sapien
tgcacctggcctctaatttaaaaaa

SEQ ID NO: 3691175 - DNA, 25 bp, Homo sapien
aaggtgttgagattactacaggcat

SEQ ID NO: 3691176 - DNA, 25 bp, Homo sapien
ctcccaaggtgttgagattactaca

SEQ ID NO: 3691177 - DNA, 25 bp, Homo sapien
caatggggacccaaatggctgagac

SEQ ID NO: 3691178 - DNA, 25 bp, Homo sapien
cgtagccacctgtgcacttgtcggg

SEQ ID NO: 3691179 - DNA, 25 bp, Homo sapien
cagacagctgcgtagccacctgtgc

SEQ ID NO: 3691180 - DNA, 25 bp, Homo sapien
gggagggccatagggctgaagcaca

SEQ ID NO: 3691181 - DNA, 25 bp, Homo sapien
gctggggccacagcaccgctgatct

SEQ ID NO: 3691182 - DNA, 25 bp, Homo sapien
ctggggccacagcaccgctgatctg

SEQ ID NO: 3691183 - DNA, 25 bp, Homo sapien
tggggccacagcaccgctgatctgc

SEQ ID NO: 3691184 - DNA, 25 bp, Homo sapien
tggccctgaggataggagccataca

SEQ ID NO: 3691185 - DNA, 25 bp, Homo sapien
gagccatacagaccagagttaggga

SEQ ID NO: 3691186 - DNA, 25 bp, Homo sapien
caggcaggagtggaccagtcatcga

SEQ ID NO: 3691187 - DNA, 25 bp, Homo sapien
agtcatcgaaggcagccgaggaccc

SEQ ID NO: 3691188 - DNA, 25 bp, Homo sapien
aagacacatggttgggctggctcac

SEQ ID NO: 3691189 - DNA, 25 bp, Homo sapien
caggggcccagtcatctgggtgcca

SEQ ID NO: 3691190 - DNA, 25 bp, Homo sapien
gggagtgcataggtggcagtggtcc

SEQ ID NO: 3691191 - DNA, 25 bp, Homo sapien
gggcagagcttgaggaggtgaagac

SEQ ID NO: 3691192 - DNA, 25 bp, Homo sapien
tccaggcgcttaggaggcagtggct

SEQ ID NO: 3691193 - DNA, 25 bp, Homo sapien
tgctgctgggtaggggcctccataa

SEQ ID NO: 3691194 - DNA, 25 bp, Homo sapien
gaggcccaggctgactgccaaaggt

SEQ ID NO: 3691195 - DNA, 25 bp, Homo sapien
ctccataattagactgagggccccg

SEQ ID NO: 3691196 - DNA, 25 bp, Homo sapien
gactaggaatggcatcggggtctat

SEQ ID NO: 3691197 - DNA, 25 bp, Homo sapien
taggaatggcatcggggtctattct

SEQ ID NO: 3691198 - DNA, 25 bp, Homo sapien
aatggcatcggggtctattctgtgc

SEQ ID NO: 3691199 - DNA, 25 bp, Homo sapien
tggactaggaatggcatcggggtct

SEQ ID NO: 3691200 - DNA, 25 bp, Homo sapien
tggccccgtactccagtaacaaatg

SEQ ID NO: 3691201 - DNA, 25 bp, Homo sapien
tcctgtcatcttcaatgacctgaat

SEQ ID NO: 3691202 - DNA, 25 bp, Homo sapien
agtaacaaatggctctgtaccccgg

SEQ ID NO: 3691203 - DNA, 25 bp, Homo sapien
tgtaccccggttgttcctgtcatct

SEQ ID NO: 3691204 - DNA, 25 bp, Homo sapien
gaagttggtagtgactaagggtggc

SEQ ID NO: 3691205 - DNA, 25 bp, Homo sapien
agttggtagtgactaagggtggcac

SEQ ID NO: 3691206 - DNA, 25 bp, Homo sapien
caggaagttggtagtgactaagggt

SEQ ID NO: 3691207 - DNA, 25 bp, Homo sapien
aggaagttggtagtgactaagggtg

SEQ ID NO: 3691208 - DNA, 25 bp, Homo sapien
caagggatattataggatgtacatc

SEQ ID NO: 3691209 - DNA, 25 bp, Homo sapien
tgagcctgcttagccatgtcagatg

SEQ ID NO: 3691210 - DNA, 25 bp, Homo sapien
taggatgtacatcggatgtatcggg

SEQ ID NO: 3691211 - DNA, 25 bp, Homo sapien
catgtcagatgtgcaagggatatta

SEQ ID NO: 3691212 - DNA, 25 bp, Homo sapien
agccttgccagcggtttgatgactg

SEQ ID NO: 3691213 - DNA, 25 bp, Homo sapien
gcagccttgccagcggtttgatgac

SEQ ID NO: 3691214 - DNA, 25 bp, Homo sapien
cagccttgccagcggtttgatgact

SEQ ID NO: 3691215 - DNA, 25 bp, Homo sapien
ggcagccttgccagcggtttgatga

SEQ ID NO: 3691216 - DNA, 25 bp, Homo sapien
gcttgtttcctctagagactctgtt

SEQ ID NO: 3691217 - DNA, 25 bp, Homo sapien
ggaatcacatccaggaagacgcttt

SEQ ID NO: 3691218 - DNA, 25 bp, Homo sapien
aatatcttccattgtgaagctggaa

SEQ ID NO: 3691219 - DNA, 25 bp, Homo sapien
ggaagacgctttagacccctctcta

SEQ ID NO: 3691220 - DNA, 25 bp, Homo sapien
gttgcagcgcaaagggccagattcc

SEQ ID NO: 3691221 - DNA, 25 bp, Homo sapien
catggtccacaacatacggtgaagc

SEQ ID NO: 3691222 - DNA, 25 bp, Homo sapien
catgtatgctttgcagcggttgcag

SEQ ID NO: 3691223 - DNA, 25 bp, Homo sapien
ctgcatgaagggacacatgtatgct

SEQ ID NO: 3691224 - DNA, 25 bp, Homo sapien
cagcactggaaacgcctccctcctt

SEQ ID NO: 3691225 - DNA, 25 bp, Homo sapien
ggaaacgcctccctccttcaatgaa

SEQ ID NO: 3691226 - DNA, 25 bp, Homo sapien
ctggaaacgcctccctccttcaatg

SEQ ID NO: 3691227 - DNA, 25 bp, Homo sapien
cactggaaacgcctccctccttcaa

SEQ ID NO: 3691228 - DNA, 25 bp, Homo sapien
cccagggatagctcagggcggtcat

SEQ ID NO: 3691229 - DNA, 25 bp, Homo sapien
tcataagcatccacacgtttgccgg

SEQ ID NO: 3691230 - DNA, 25 bp, Homo sapien
cgtttgccggtatgatccaggtgct

SEQ ID NO: 3691231 - DNA, 25 bp, Homo sapien
tgcagtaatctacagtggccaagaa

SEQ ID NO: 3691232 - DNA, 25 bp, Homo sapien
tgctcctcccatgctaccttccctc

SEQ ID NO: 3691233 - DNA, 25 bp, Homo sapien
ctaggtagaaagtctaacagtgact

SEQ ID NO: 3691234 - DNA, 25 bp, Homo sapien
gaggagcctaacaagaccagtcctg

SEQ ID NO: 3691235 - DNA, 25 bp, Homo sapien
gtctaacagtgacttgagctcctca

SEQ ID NO: 3691236 - DNA, 25 bp, Homo sapien
ctgatggcattgtaggagacgtcaa

SEQ ID NO: 3691237 - DNA, 25 bp, Homo sapien
caacgcggattgctgactcttctgc

SEQ ID NO: 3691238 - DNA, 25 bp, Homo sapien
tgtaggtgacaaagccaacgcggat

SEQ ID NO: 3691239 - DNA, 25 bp, Homo sapien
gacacaaccatcatctgtggctggg

SEQ ID NO: 3691240 - DNA, 25 bp, Homo sapien
gagactcattgacgttgaccaggaa

SEQ ID NO: 3691241 - DNA, 25 bp, Homo sapien
ctggtacaaatactgtctctgtttc

SEQ ID NO: 3691242 - DNA, 25 bp, Homo sapien
aacatttctggaatctgatccaata

SEQ ID NO: 3691243 - DNA, 25 bp, Homo sapien
tccagcctggataactggtacaaat

SEQ ID NO: 3691244 - DNA, 25 bp, Homo sapien
ggataactggtacaaatactgtctc

SEQ ID NO: 3691245 - DNA, 25 bp, Homo sapien
tgggcagggatgtatggaatagaaa

SEQ ID NO: 3691246 - DNA, 25 bp, Homo sapien
ctgcaatgggcagggatgtatggaa

SEQ ID NO: 3691247 - DNA, 25 bp, Homo sapien
cagggatgtatggaatagaaagagc

SEQ ID NO: 3691248 - DNA, 25 bp, Homo sapien
ggatgtatggaatagaaagagcttc

SEQ ID NO: 3691249 - DNA, 25 bp, Homo sapien
cagggtctgataggcacctgtctga

SEQ ID NO: 3691250 - DNA, 25 bp, Homo sapien
cacacactctttggccagggtctga

SEQ ID NO: 3691251 - DNA, 25 bp, Homo sapien
aaagagatctacacagcagccttgg

SEQ ID NO: 3691252 - DNA, 25 bp, Homo sapien
ctttggccagggtctgataggcacc

SEQ ID NO: 3691253 - DNA, 25 bp, Homo sapien
gggcacaacagagagtgtggccaca

SEQ ID NO: 3691254 - DNA, 25 bp, Homo sapien
gcacaacagagagtgtggccacatc

SEQ ID NO: 3691255 - DNA, 25 bp, Homo sapien
acaacagagagtgtggccacatcca

SEQ ID NO: 3691256 - DNA, 25 bp, Homo sapien
ccagtgagctggggcacaacagaga

SEQ ID NO: 3691257 - DNA, 25 bp, Homo sapien
gccaggtaccacacagagtgcttta

SEQ ID NO: 3691258 - DNA, 25 bp, Homo sapien
ttaaacacttagactgcatgccagg

SEQ ID NO: 3691259 - DNA, 25 bp, Homo sapien
tcaatgcaggactgattccaaggcc

SEQ ID NO: 3691260 - DNA, 25 bp, Homo sapien
tagacatagctcatcgtgcagacaa

SEQ ID NO: 3691261 - DNA, 25 bp, Homo sapien
accttctggacatcacgacgcaggt

SEQ ID NO: 3691262 - DNA, 25 bp, Homo sapien
gacatcacgacgcaggtcactcagg

SEQ ID NO: 3691263 - DNA, 25 bp, Homo sapien
tgcttgtccggacccgcatcacagc

SEQ ID NO: 3691264 - DNA, 25 bp, Homo sapien
caggaaccgctcctggtcgttctcc

SEQ ID NO: 3691265 - DNA, 25 bp, Homo sapien
tgagccgatcgtcatgcttgaactc

SEQ ID NO: 3691266 - DNA, 25 bp, Homo sapien
cgtgttgctcatgtagaaagctcca

SEQ ID NO: 3691267 - DNA, 25 bp, Homo sapien
cagtcactgttttgtccccatctag

SEQ ID NO: 3691268 - DNA, 25 bp, Homo sapien
cagctccacatctgtcgtgttgctc

SEQ ID NO: 3691269 - DNA, 25 bp, Homo sapien
aggccctttgctacactattaaact

SEQ ID NO: 3691270 - DNA, 25 bp, Homo sapien
cctttgctacactattaaactggaa

SEQ ID NO: 3691271 - DNA, 25 bp, Homo sapien
ttgctacactattaaactggaagag

SEQ ID NO: 3691272 - DNA, 25 bp, Homo sapien
tacactattaaactggaagagagaa

SEQ ID NO: 3691273 - DNA, 25 bp, Homo sapien
gagcgtgtcagtctcacagtttcga

SEQ ID NO: 3691274 - DNA, 25 bp, Homo sapien
gccagattatggatgcggagccgac

SEQ ID NO: 3691275 - DNA, 25 bp, Homo sapien
agttgatgagcgtgtcagtctcaca

SEQ ID NO: 3691276 - DNA, 25 bp, Homo sapien
agtttcgatatagatcagccagctg

SEQ ID NO: 3691277 - DNA, 25 bp, Homo sapien
caccatcacaactacccactcacca

SEQ ID NO: 3691278 - DNA, 25 bp, Homo sapien
tgcccatcatgtgtgcattcccacc

SEQ ID NO: 3691279 - DNA, 25 bp, Homo sapien
attcccaccatcacaactacccact

SEQ ID NO: 3691280 - DNA, 25 bp, Homo sapien
ccatcatgtgtgcattcccaccatc

SEQ ID NO: 3691281 - DNA, 25 bp, Homo sapien
cgtgtcacgaacagccttcacaggg

SEQ ID NO: 3691282 - DNA, 25 bp, Homo sapien
cagggctattcaggactccccgata

SEQ ID NO: 3691283 - DNA, 25 bp, Homo sapien
gaggaggggctagcacagttctttc

SEQ ID NO: 3691284 - DNA, 25 bp, Homo sapien
gcacactgggtgatgagcgtgtcac

SEQ ID NO: 3691285 - DNA, 25 bp, Homo sapien
gtcaatgatcatgagaaatccctcc

SEQ ID NO: 3691286 - DNA, 25 bp, Homo sapien
acctcccactaatatacttgcccca

SEQ ID NO: 3691287 - DNA, 25 bp, Homo sapien
aaataaagtcaatgatcatgagaaa

SEQ ID NO: 3691288 - DNA, 25 bp, Homo sapien
accccacctcccactaatatacttg

SEQ ID NO: 3691289 - DNA, 25 bp, Homo sapien
taaactgggagtagcttcatgcact

SEQ ID NO: 3691290 - DNA, 25 bp, Homo sapien
ggctgcaggacatcactcttcaaca

SEQ ID NO: 3691291 - DNA, 25 bp, Homo sapien
tagctgtcggacataggcacggtca

SEQ ID NO: 3691292 - DNA, 25 bp, Homo sapien
ccgagggtagaagaagacattggtc

SEQ ID NO: 3691293 - DNA, 25 bp, Homo sapien
gccctttgctccgtgcaagatctca

SEQ ID NO: 3691294 - DNA, 25 bp, Homo sapien
gggtctcagtaactctctcagtgtg

SEQ ID NO: 3691295 - DNA, 25 bp, Homo sapien
aacaaattccactagtgtctgactg

SEQ ID NO: 3691296 - DNA, 25 bp, Homo sapien
gagcaaaaggttaccaaggaccata

SEQ ID NO: 3691297 - DNA, 25 bp, Homo sapien
tatatatccccattgcttagacgct

SEQ ID NO: 3691298 - DNA, 25 bp, Homo sapien
gagcccattctccagtaaatatata

SEQ ID NO: 3691299 - DNA, 25 bp, Homo sapien
tcttcagaggctcgaactgctggtg

SEQ ID NO: 3691300 - DNA, 25 bp, Homo sapien
tcggtagtactctcaacgggagact

SEQ ID NO: 3691301 - DNA, 25 bp, Homo sapien
agacgctgaaaaggctctggacaac

SEQ ID NO: 3691302 - DNA, 25 bp, Homo sapien
caaaccactggtgatctgactgaag

SEQ ID NO: 3691303 - DNA, 25 bp, Homo sapien
cactggtgatctgactgaaggagga

SEQ ID NO: 3691304 - DNA, 25 bp, Homo sapien
gacaacaccctgttggacgcttgct

SEQ ID NO: 3691305 - DNA, 25 bp, Homo sapien
tatattggctcccaattgtttcaca

SEQ ID NO: 3691306 - DNA, 25 bp, Homo sapien
tacttccacacccatattctccttg

SEQ ID NO: 3691307 - DNA, 25 bp, Homo sapien
caattgtttcacaaagtatacttcc

SEQ ID NO: 3691308 - DNA, 25 bp, Homo sapien
attgtttcacaaagtatacttccac

SEQ ID NO: 3691309 - DNA, 25 bp, Homo sapien
tgaaacaggcaaacctgggaagaat

SEQ ID NO: 3691310 - DNA, 25 bp, Homo sapien
taaggcactctgagttcagtcaagg

SEQ ID NO: 3691311 - DNA, 25 bp, Homo sapien
tgggaagaatgacagcaactgccct

SEQ ID NO: 3691312 - DNA, 25 bp, Homo sapien
tatttgagggtactagcacactaac

SEQ ID NO: 3691313 - DNA, 25 bp, Homo sapien
ttcatgtaccgggatctctgtgccc

SEQ ID NO: 3691314 - DNA, 25 bp, Homo sapien
gcctcgaaccttcttggacagtgga

SEQ ID NO: 3691315 - DNA, 25 bp, Homo sapien
tctgtgcccgtaagctatcaatgag

SEQ ID NO: 3691316 - DNA, 25 bp, Homo sapien
taagctatcaatgaggcctcgaacc

SEQ ID NO: 3691317 - DNA, 25 bp, Homo sapien
ctacggccagaattcagggttcata

SEQ ID NO: 3691318 - DNA, 25 bp, Homo sapien
aatccagggttcagatcagtgttac

SEQ ID NO: 3691319 - DNA, 25 bp, Homo sapien
tctcattaggcagtcacttactcat

SEQ ID NO: 3691320 - DNA, 25 bp, Homo sapien
cttgacaaggtaagaaatccagggt

SEQ ID NO: 3691321 - DNA, 25 bp, Homo sapien
agaaagtccacataagatgctcccc

SEQ ID NO: 3691322 - DNA, 25 bp, Homo sapien
cccactcagactcttgtcttccacc

SEQ ID NO: 3691323 - DNA, 25 bp, Homo sapien
ttagctcagtagctgccgaatctcc

SEQ ID NO: 3691324 - DNA, 25 bp, Homo sapien
gacagagaaagtccacataagatgc

SEQ ID NO: 3691325 - DNA, 25 bp, Homo sapien
atatgttactgtcccaatttctctg

SEQ ID NO: 3691326 - DNA, 25 bp, Homo sapien
ctagcctgggccctatgccatttac

SEQ ID NO: 3691327 - DNA, 25 bp, Homo sapien
tggaagctagcctgggccctatgcc

SEQ ID NO: 3691328 - DNA, 25 bp, Homo sapien
gatatgttactgtcccaatttctct

SEQ ID NO: 3691329 - DNA, 25 bp, Homo sapien
ggacacataatattgccagggtctg

SEQ ID NO: 3691330 - DNA, 25 bp, Homo sapien
acagagtggcaggatacttgagccc

SEQ ID NO: 3691331 - DNA, 25 bp, Homo sapien
ttgggagactggtccaaagggacac

SEQ ID NO: 3691332 - DNA, 25 bp, Homo sapien
catcagcaggacatgacagagtggc

SEQ ID NO: 3691333 - DNA, 25 bp, Homo sapien
tcttgtgcacctatatgttttatcc

SEQ ID NO: 3691334 - DNA, 25 bp, Homo sapien
gtgcacctatatgttttatccctaa

SEQ ID NO: 3691335 - DNA, 25 bp, Homo sapien
ttatccctaatataggaagttgtgg

SEQ ID NO: 3691336 - DNA, 25 bp, Homo sapien
ggatgacactgagccccctgtagta

SEQ ID NO: 3691337 - DNA, 25 bp, Homo sapien
gcccaagaaggactgaccacttttc

SEQ ID NO: 3691338 - DNA, 25 bp, Homo sapien
gaaggactgaccacttttctctcca

SEQ ID NO: 3691339 - DNA, 25 bp, Homo sapien
caggcccaagaaggactgaccactt

SEQ ID NO: 3691340 - DNA, 25 bp, Homo sapien
ctccaggcccaagaaggactgacca

SEQ ID NO: 3691341 - DNA, 25 bp, Homo sapien
tattgcaagttgatgaccaggctcc

SEQ ID NO: 3691342 - DNA, 25 bp, Homo sapien
aggctccctacagaaccatccagtg

SEQ ID NO: 3691343 - DNA, 25 bp, Homo sapien
gacagtgtgcctctctatccacgga

SEQ ID NO: 3691344 - DNA, 25 bp, Homo sapien
cagtgtttctcgtgggagctcagag

SEQ ID NO: 3691345 - DNA, 25 bp, Homo sapien
agcaggagagaacggcgctccagct

SEQ ID NO: 3691346 - DNA, 25 bp, Homo sapien
ataccaaagcccaagcggtgtccca

SEQ ID NO: 3691347 - DNA, 25 bp, Homo sapien
ctcagtcaataccaaagcccaagcg

SEQ ID NO: 3691348 - DNA, 25 bp, Homo sapien
aagcccaagcggtgtcccagcagga

SEQ ID NO: 3691349 - DNA, 25 bp, Homo sapien
ggccaccatcaagcctagcccttgt

SEQ ID NO: 3691350 - DNA, 25 bp, Homo sapien
aagcctggccaccatcaagcctagc

SEQ ID NO: 3691351 - DNA, 25 bp, Homo sapien
tgcccccaagccagttggggttgga

SEQ ID NO: 3691352 - DNA, 25 bp, Homo sapien
ccatcaagcctagcccttgtcctgc

SEQ ID NO: 3691353 - DNA, 25 bp, Homo sapien
aaagatgcattgaaaaataaaccaa

SEQ ID NO: 3691354 - DNA, 25 bp, Homo sapien
caatgaagagaaatgagaggtccag

SEQ ID NO: 3691355 - DNA, 25 bp, Homo sapien
aataaaccaatgaagagaaatgaga

SEQ ID NO: 3691356 - DNA, 25 bp, Homo sapien
aatgagaggtccagagcaggggcat

SEQ ID NO: 3691357 - DNA, 25 bp, Homo sapien
ccagcggatagtcgtgaccggacga

SEQ ID NO: 3691358 - DNA, 25 bp, Homo sapien
caaagtgagctttcgggagtaaaga

SEQ ID NO: 3691359 - DNA, 25 bp, Homo sapien
taaaagcaaagtgagctttcgggag

SEQ ID NO: 3691360 - DNA, 25 bp, Homo sapien
tcagccgacggccaggactaaaagc

SEQ ID NO: 3691361 - DNA, 25 bp, Homo sapien
agaaggaccaacaccaccctaatgg

SEQ ID NO: 3691362 - DNA, 25 bp, Homo sapien
ctagaaggaccaacaccaccctaat

SEQ ID NO: 3691363 - DNA, 25 bp, Homo sapien
ccaccctaatggggccggccgccat

SEQ ID NO: 3691364 - DNA, 25 bp, Homo sapien
tagaaggaccaacaccaccctaatg

SEQ ID NO: 3691365 - DNA, 25 bp, Homo sapien
ccgggccgtggctcagcaagaagtt

SEQ ID NO: 3691366 - DNA, 25 bp, Homo sapien
gaagtctgtgccgtagaagagcagc

SEQ ID NO: 3691367 - DNA, 25 bp, Homo sapien
agccactgcagcgacagcgggtaat

SEQ ID NO: 3691368 - DNA, 25 bp, Homo sapien
tccgctggcacgtcgcagtgtgact

SEQ ID NO: 3691369 - DNA, 25 bp, Homo sapien
tagaccgggtacagtaaggctgtca

SEQ ID NO: 3691370 - DNA, 25 bp, Homo sapien
accgggtacagtaaggctgtcatga

SEQ ID NO: 3691371 - DNA, 25 bp, Homo sapien
ctagaccgggtacagtaaggctgtc

SEQ ID NO: 3691372 - DNA, 25 bp, Homo sapien
gaccgggtacagtaaggctgtcatg

SEQ ID NO: 3691373 - DNA, 25 bp, Homo sapien
caagagctctggatcctcggtggtg

SEQ ID NO: 3691374 - DNA, 25 bp, Homo sapien
gacgaaacactcgaagccgttgagg

SEQ ID NO: 3691375 - DNA, 25 bp, Homo sapien
gcatccagccgagccagttcgtagt

SEQ ID NO: 3691376 - DNA, 25 bp, Homo sapien
caggtgcatgggacgccacagtttt

SEQ ID NO: 3691377 - DNA, 25 bp, Homo sapien
tgtccaagtcggtttctataggcca

SEQ ID NO: 3691378 - DNA, 25 bp, Homo sapien
ccccaataggtgtggcttgctacaa

SEQ ID NO: 3691379 - DNA, 25 bp, Homo sapien
ggtgtaacccctgactactgcagaa

SEQ ID NO: 3691380 - DNA, 25 bp, Homo sapien
ggtgaaggattccaaccatcaggac

SEQ ID NO: 3691381 - DNA, 25 bp, Homo sapien
gtttcattgttgtggatcatggcag

SEQ ID NO: 3691382 - DNA, 25 bp, Homo sapien
taggtaatcccaaaatttcgtctgc

SEQ ID NO: 3691383 - DNA, 25 bp, Homo sapien
gcctcttcatgaagatttcatgtag

SEQ ID NO: 3691384 - DNA, 25 bp, Homo sapien
cagtgagagcttccccctggtccag

SEQ ID NO: 3691385 - DNA, 25 bp, Homo sapien
ttagctccgccaagttaaaggctct

SEQ ID NO: 3691386 - DNA, 25 bp, Homo sapien
gaggccctatgttagaccttggcta

SEQ ID NO: 3691387 - DNA, 25 bp, Homo sapien
tgtcccatggtagaataagatctcc

SEQ ID NO: 3691388 - DNA, 25 bp, Homo sapien
taaaaactctgttggaccagcacct

SEQ ID NO: 3691389 - DNA, 25 bp, Homo sapien
ctaaaaccaggaaagacaaggccat

SEQ ID NO: 3691390 - DNA, 25 bp, Homo sapien
agtcaagaaatcgagactatccttg

SEQ ID NO: 3691391 - DNA, 25 bp, Homo sapien
aaaaatgtatttgaggccgggtgcg

SEQ ID NO: 3691392 - DNA, 25 bp, Homo sapien
cacgaagtcaagaaatcgagactat

SEQ ID NO: 3691393 - DNA, 25 bp, Homo sapien
gaagctggactattcattgcactta

SEQ ID NO: 3691394 - DNA, 25 bp, Homo sapien
tcccagatacaccataaatgagatg

SEQ ID NO: 3691395 - DNA, 25 bp, Homo sapien
ttactaaaacatacagccacactgt

SEQ ID NO: 3691396 - DNA, 25 bp, Homo sapien
gggcaatacattaaattgacaaggc

SEQ ID NO: 3691397 - DNA, 25 bp, Homo sapien
acacgagaattgcttgaacctggga

SEQ ID NO: 3691398 - DNA, 25 bp, Homo sapien
ggcagaggctgcagtgagccaaaat

SEQ ID NO: 3691399 - DNA, 25 bp, Homo sapien
ccaccactctggaggctgagacacg

SEQ ID NO: 3691400 - DNA, 25 bp, Homo sapien
atcccaccactctggaggctgagac

SEQ ID NO: 3691401 - DNA, 25 bp, Homo sapien
tacaactagagtagccctaaggtcc

SEQ ID NO: 3691402 - DNA, 25 bp, Homo sapien
tgtagaccctagttgttgaagcatc

SEQ ID NO: 3691403 - DNA, 25 bp, Homo sapien
tcttggccgcatccttagatgtcag

SEQ ID NO: 3691404 - DNA, 25 bp, Homo sapien
cttttatttagccagccacttgtgg

SEQ ID NO: 3691405 - DNA, 25 bp, Homo sapien
gcaaaaggtcaaacagggtaagcaa

SEQ ID NO: 3691406 - DNA, 25 bp, Homo sapien
ctgcaaaaggtcaaacagggtaagc

SEQ ID NO: 3691407 - DNA, 25 bp, Homo sapien
tgcaaaaggtcaaacagggtaagca

SEQ ID NO: 3691408 - DNA, 25 bp, Homo sapien
cagttggcactcataggcgcactca

SEQ ID NO: 3691409 - DNA, 25 bp, Homo sapien
tcccttgtggaaatgtaatacctgg

SEQ ID NO: 3691410 - DNA, 25 bp, Homo sapien
cccatgtcattaggagaggtaagga

SEQ ID NO: 3691411 - DNA, 25 bp, Homo sapien
taatgccaacctctgtatacagcag

SEQ ID NO: 3691412 - DNA, 25 bp, Homo sapien
ggaaggctcgttggcttgctggcag

SEQ ID NO: 3691413 - DNA, 25 bp, Homo sapien
gagctcggggaaggctcgttggctt

SEQ ID NO: 3691414 - DNA, 25 bp, Homo sapien
tcggggaaggctcgttggcttgctg

SEQ ID NO: 3691415 - DNA, 25 bp, Homo sapien
ctggacgaatcggcgcggagctcgg

SEQ ID NO: 3691416 - DNA, 25 bp, Homo sapien
tcccggcaggctttgcggttccgtg

SEQ ID NO: 3691417 - DNA, 25 bp, Homo sapien
gttccgtgcgtgacctcgcgtgacc

SEQ ID NO: 3691418 - DNA, 25 bp, Homo sapien
caggctttgcggttccgtgcgtgac

SEQ ID NO: 3691419 - DNA, 25 bp, Homo sapien
tttgcggttccgtgcgtgacctcgc

SEQ ID NO: 3691420 - DNA, 25 bp, Homo sapien
ccgacgcggttagctagaatgagag

SEQ ID NO: 3691421 - DNA, 25 bp, Homo sapien
gccgctccccgacgcggttagctag

SEQ ID NO: 3691422 - DNA, 25 bp, Homo sapien
gcggttagctagaatgagaggttta

SEQ ID NO: 3691423 - DNA, 25 bp, Homo sapien
cttcagcacaggcttccgcgggttc

SEQ ID NO: 3691424 - DNA, 25 bp, Homo sapien
ggccgtcctgactccgactgctcac

SEQ ID NO: 3691425 - DNA, 25 bp, Homo sapien
ccacccgcccctgctcatgctccgg

SEQ ID NO: 3691426 - DNA, 25 bp, Homo sapien
acccgcccctgctcatgctccggct

SEQ ID NO: 3691427 - DNA, 25 bp, Homo sapien
gcttccgctccggggccgtcctgac

SEQ ID NO: 3691428 - DNA, 25 bp, Homo sapien
gcatcgtcgcggaattcattctgct

SEQ ID NO: 3691429 - DNA, 25 bp, Homo sapien
atcaccgacatctccgtgatgcaag

SEQ ID NO: 3691430 - DNA, 25 bp, Homo sapien
tcgcggcacaatcgaggaagccctg

SEQ ID NO: 3691431 - DNA, 25 bp, Homo sapien
tctcttttctgcacgcatcgtcgcg

SEQ ID NO: 3691432 - DNA, 25 bp, Homo sapien
tcaagtttgtcctgatgtaggccca

SEQ ID NO: 3691433 - DNA, 25 bp, Homo sapien
cagcctggagagatctatgtcagcc

SEQ ID NO: 3691434 - DNA, 25 bp, Homo sapien
gcgttgggacctacaaatgagacta

SEQ ID NO: 3691435 - DNA, 25 bp, Homo sapien
tgtaggcccatagttctcacaatgc

SEQ ID NO: 3691436 - DNA, 25 bp, Homo sapien
gtattgatctcatctttcgggcttc

SEQ ID NO: 3691437 - DNA, 25 bp, Homo sapien
tcagctgaggtaaggtttgttagga

SEQ ID NO: 3691438 - DNA, 25 bp, Homo sapien
cagctgaggtaaggtttgttaggaa

SEQ ID NO: 3691439 - DNA, 25 bp, Homo sapien
tgtattgatctcatctttcgggctt

SEQ ID NO: 3691440 - DNA, 25 bp, Homo sapien
ctatgattccaaagggtgaaaaaag

SEQ ID NO: 3691441 - DNA, 25 bp, Homo sapien
atactatgattccaaagggtgaaaa

SEQ ID NO: 3691442 - DNA, 25 bp, Homo sapien
cagaagctatatttcagtcattgaa

SEQ ID NO: 3691443 - DNA, 25 bp, Homo sapien
tgcatagttgtcagaagctatattt

SEQ ID NO: 3691444 - DNA, 25 bp, Homo sapien
ttattgcatccaaaagcaagggcac

SEQ ID NO: 3691445 - DNA, 25 bp, Homo sapien
cagggactacgcacaaaataggcaa

SEQ ID NO: 3691446 - DNA, 25 bp, Homo sapien
gtatttacagacgaaggcaacttca

SEQ ID NO: 3691447 - DNA, 25 bp, Homo sapien
gagagtacctaattcacaacaaaag

SEQ ID NO: 3691448 - DNA, 25 bp, Homo sapien
tcggcggctggggcctctaggcggc

SEQ ID NO: 3691449 - DNA, 25 bp, Homo sapien
tggggcctctaggcggctgcggagc

SEQ ID NO: 3691450 - DNA, 25 bp, Homo sapien
cggctggggcctctaggcggctgcg

SEQ ID NO: 3691451 - DNA, 25 bp, Homo sapien
ctcggcggctggggcctctaggcgg

SEQ ID NO: 3691452 - DNA, 25 bp, Homo sapien
gtgatcttggccagtctccgagact

SEQ ID NO: 3691453 - DNA, 25 bp, Homo sapien
tctccgagacttagggccgggacga

SEQ ID NO: 3691454 - DNA, 25 bp, Homo sapien
cgtgccgggcgagaatctcaggcct

SEQ ID NO: 3691455 - DNA, 25 bp, Homo sapien
acagcgcggtgcaagcggtgatctt

SEQ ID NO: 3691456 - DNA, 25 bp, Homo sapien
tctcggcctcggagatgaaggaaca

SEQ ID NO: 3691457 - DNA, 25 bp, Homo sapien
tgggccccgctgactgtttgcgcca

SEQ ID NO: 3691458 - DNA, 25 bp, Homo sapien
tcctcaaaacggtccgaatcctcga

SEQ ID NO: 3691459 - DNA, 25 bp, Homo sapien
ctcgaatgagaagcgctctccgtcc

SEQ ID NO: 3691460 - DNA, 25 bp, Homo sapien
tggtcggggacagctcctggtcccg

SEQ ID NO: 3691461 - DNA, 25 bp, Homo sapien
ctggtcccggacagctcccgagcga

SEQ ID NO: 3691462 - DNA, 25 bp, Homo sapien
gaagagagctcttggtcggggacag

SEQ ID NO: 3691463 - DNA, 25 bp, Homo sapien
agctcccgagcgaggcccaagcagg

SEQ ID NO: 3691464 - DNA, 25 bp, Homo sapien
tactttccggtatgcctcagactga

SEQ ID NO: 3691465 - DNA, 25 bp, Homo sapien
ctttgcaatgcggtgacaagccaca

SEQ ID NO: 3691466 - DNA, 25 bp, Homo sapien
tatgaactatggactctctggcagg

SEQ ID NO: 3691467 - DNA, 25 bp, Homo sapien
cagatatttgacatggccagaagca

SEQ ID NO: 3691468 - DNA, 25 bp, Homo sapien
taaggagacaagatagaccagagcc

SEQ ID NO: 3691469 - DNA, 25 bp, Homo sapien
tttggcgcgcctaaatgacaacttc

SEQ ID NO: 3691470 - DNA, 25 bp, Homo sapien
gatctcaagaagcacgagaggccag

SEQ ID NO: 3691471 - DNA, 25 bp, Homo sapien
ggagagagttatcgcagggcaccta

SEQ ID NO: 3691472 - DNA, 25 bp, Homo sapien
ctttgcaaacaatggttgggatcag

SEQ ID NO: 3691473 - DNA, 25 bp, Homo sapien
aataggaaatgaaaagggccatggt

SEQ ID NO: 3691474 - DNA, 25 bp, Homo sapien
caaacaatggttgggatcaggggaa

SEQ ID NO: 3691475 - DNA, 25 bp, Homo sapien
ttgcaaacaatggttgggatcaggg

SEQ ID NO: 3691476 - DNA, 25 bp, Homo sapien
aaaaagcaattcggagctgtagctg

SEQ ID NO: 3691477 - DNA, 25 bp, Homo sapien
tccaccaatgggatcaccagtccat

SEQ ID NO: 3691478 - DNA, 25 bp, Homo sapien
gctccaccaatgggatcaccagtcc

SEQ ID NO: 3691479 - DNA, 25 bp, Homo sapien
tccaaaaagcaattcggagctgtag

SEQ ID NO: 3691480 - DNA, 25 bp, Homo sapien
gggtccttcacagcccgcatgcgga

SEQ ID NO: 3691481 - DNA, 25 bp, Homo sapien
gagctgatcccctcgctgaaactca

SEQ ID NO: 3691482 - DNA, 25 bp, Homo sapien
gaaactcatccgcactgccattggc

SEQ ID NO: 3691483 - DNA, 25 bp, Homo sapien
ccgcatgcggaagagctgatcccct

SEQ ID NO: 3691484 - DNA, 25 bp, Homo sapien
gaccatctgaggtggcaccactgta

SEQ ID NO: 3691485 - DNA, 25 bp, Homo sapien
gacgtgggtgcaccatttggcccca

SEQ ID NO: 3691486 - DNA, 25 bp, Homo sapien
ggcagcggtcaaacatcacagccac

SEQ ID NO: 3691487 - DNA, 25 bp, Homo sapien
ttgtggatgcggaagagacagagtg

SEQ ID NO: 3691488 - DNA, 25 bp, Homo sapien
gaggtactgagcaaacttttgcagc

SEQ ID NO: 3691489 - DNA, 25 bp, Homo sapien
gcaaacttttgcagctggtccctct

SEQ ID NO: 3691490 - DNA, 25 bp, Homo sapien
tctgtagccgggacagggactctga

SEQ ID NO: 3691491 - DNA, 25 bp, Homo sapien
agctggtccctctgtagccgggaca

SEQ ID NO: 3691492 - DNA, 25 bp, Homo sapien
aacaggaaggctgttatgcggcctg

SEQ ID NO: 3691493 - DNA, 25 bp, Homo sapien
gcctggcccggagctaattgcagga

SEQ ID NO: 3691494 - DNA, 25 bp, Homo sapien
cagaacacggcctaggtgaacccat

SEQ ID NO: 3691495 - DNA, 25 bp, Homo sapien
gaaagagacggaggcaggcagaaca

SEQ ID NO: 3691496 - DNA, 25 bp, Homo sapien
gacaggagttcgtccaggagacgct

SEQ ID NO: 3691497 - DNA, 25 bp, Homo sapien
ggagctccacacactgtattgatgg

SEQ ID NO: 3691498 - DNA, 25 bp, Homo sapien
gctccacacactgtattgatggctg

SEQ ID NO: 3691499 - DNA, 25 bp, Homo sapien
acacactgtattgatggctgttgac

SEQ ID NO: 3691500 - DNA, 25 bp, Homo sapien
gagtgtcgattcatccagataccaa

SEQ ID NO: 3691501 - DNA, 25 bp, Homo sapien
gtactctggtccgatgctgagggcc

SEQ ID NO: 3691502 - DNA, 25 bp, Homo sapien
gggccacagaacttgtgcagtgtct

SEQ ID NO: 3691503 - DNA, 25 bp, Homo sapien
gatgttgtcagtgagtgtcgattca

SEQ ID NO: 3691504 - DNA, 25 bp, Homo sapien
ttagcaggttccagacgccctctgg

SEQ ID NO: 3691505 - DNA, 25 bp, Homo sapien
cagcattgctgtccctccgcttgaa

SEQ ID NO: 3691506 - DNA, 25 bp, Homo sapien
gaacatctcccgcacaatgcttagc

SEQ ID NO: 3691507 - DNA, 25 bp, Homo sapien
gacatgcccattcagcagcggctgg

SEQ ID NO: 3691508 - DNA, 25 bp, Homo sapien
tgactgcccgttgctacggcccgtg

SEQ ID NO: 3691509 - DNA, 25 bp, Homo sapien
tacgtacgctataccaccaacctgt

SEQ ID NO: 3691510 - DNA, 25 bp, Homo sapien
tgtgaggctgaggtacgtacgctat

SEQ ID NO: 3691511 - DNA, 25 bp, Homo sapien
gaccatctcgtcacacatgctggca

SEQ ID NO: 3691512 - DNA, 25 bp, Homo sapien
tcatctgtagaagggaggtcgtcct

SEQ ID NO: 3691513 - DNA, 25 bp, Homo sapien
tgggtacagacatccccaggcagta

SEQ ID NO: 3691514 - DNA, 25 bp, Homo sapien
tgttggccccgcttgacgttctcaa

SEQ ID NO: 3691515 - DNA, 25 bp, Homo sapien
cattcagatagtacgcctggtagtc

SEQ ID NO: 3691516 - DNA, 25 bp, Homo sapien
ctccatgcgactctcctgttccagt

SEQ ID NO: 3691517 - DNA, 25 bp, Homo sapien
ccatgcgactctcctgttccagtgg

SEQ ID NO: 3691518 - DNA, 25 bp, Homo sapien
tccatgcgactctcctgttccagtg

SEQ ID NO: 3691519 - DNA, 25 bp, Homo sapien
cgggaggcctcactgctatagccat

SEQ ID NO: 3691520 - DNA, 25 bp, Homo sapien
actgctatagccatgcgcatgcagg

SEQ ID NO: 3691521 - DNA, 25 bp, Homo sapien
gccatgcgcatgcagggcctcagca

SEQ ID NO: 3691522 - DNA, 25 bp, Homo sapien
cttgaggtcgggtgggttggctagc

SEQ ID NO: 3691523 - DNA, 25 bp, Homo sapien
tagaaagggaagaaacacaggagac

SEQ ID NO: 3691524 - DNA, 25 bp, Homo sapien
ctagaaagggaagaaacacaggaga

SEQ ID NO: 3691525 - DNA, 25 bp, Homo sapien
ccttgctcagggtgttggtagccac

SEQ ID NO: 3691526 - DNA, 25 bp, Homo sapien
caggttgtggtgctctggacgctca

SEQ ID NO: 3691527 - DNA, 25 bp, Homo sapien
catgccaactcggaaggccaggttg

SEQ ID NO: 3691528 - DNA, 25 bp, Homo sapien
tctgtagctccaaggcaaacatgcc

SEQ ID NO: 3691529 - DNA, 25 bp, Homo sapien
cagagggatcttcttgagcagggca

SEQ ID NO: 3691530 - DNA, 25 bp, Homo sapien
caacacaggccgatagtcacagagt

SEQ ID NO: 3691531 - DNA, 25 bp, Homo sapien
tggccagcatgagaggcaacacagg

SEQ ID NO: 3691532 - DNA, 25 bp, Homo sapien
tactcatctcacttggacccagagg

SEQ ID NO: 3691533 - DNA, 25 bp, Homo sapien
gacctacccatgaagctgcctgatg

SEQ ID NO: 3691534 - DNA, 25 bp, Homo sapien
gggtaagtcaggcagacagaagtat

SEQ ID NO: 3691535 - DNA, 25 bp, Homo sapien
cctgatgggtcctaaaggtgattca

SEQ ID NO: 3691536 - DNA, 25 bp, Homo sapien
gacagaagtatcatgcatgggaaaa

SEQ ID NO: 3691537 - DNA, 25 bp, Homo sapien
caggtgtctcgctgttccagttgcg

SEQ ID NO: 3691538 - DNA, 25 bp, Homo sapien
tgtctcgctgttccagttgcgactt

SEQ ID NO: 3691539 - DNA, 25 bp, Homo sapien
ggtgtctcgctgttccagttgcgac

SEQ ID NO: 3691540 - DNA, 25 bp, Homo sapien
ctcgctgttccagttgcgacttggg

SEQ ID NO: 3691541 - DNA, 25 bp, Homo sapien
gcccagccatatagcacacattttt

SEQ ID NO: 3691542 - DNA, 25 bp, Homo sapien
acctgaaccaggcttagctcgttga

SEQ ID NO: 3691543 - DNA, 25 bp, Homo sapien
gctcgttgatatgctcaagactcac

SEQ ID NO: 3691544 - DNA, 25 bp, Homo sapien
tacaggcactagttggctcacacat

SEQ ID NO: 3691545 - DNA, 25 bp, Homo sapien
cttcttaagcttggcctggtcgtcc

SEQ ID NO: 3691546 - DNA, 25 bp, Homo sapien
cgtccttgtaagtgatcattagtgc

SEQ ID NO: 3691547 - DNA, 25 bp, Homo sapien
cattagtgctaatgccaggtcaccc

SEQ ID NO: 3691548 - DNA, 25 bp, Homo sapien
cccgacgtgtgccttcacataagag

SEQ ID NO: 3691549 - DNA, 25 bp, Homo sapien
tgagtagaaagaactcagcgtctgt

SEQ ID NO: 3691550 - DNA, 25 bp, Homo sapien
ccccgtgctttgaaggagacctctg

SEQ ID NO: 3691551 - DNA, 25 bp, Homo sapien
ctggctgtggttgggcggctagatg

SEQ ID NO: 3691552 - DNA, 25 bp, Homo sapien
ctgaggtcagtggttgcagggcccc

SEQ ID NO: 3691553 - DNA, 25 bp, Homo sapien
tgcttcttcttaggccgtcctgggg

SEQ ID NO: 3691554 - DNA, 25 bp, Homo sapien
ccttggggtcaaagctgcctcagat

SEQ ID NO: 3691555 - DNA, 25 bp, Homo sapien
tgccaagcggctaggaaccttccct

SEQ ID NO: 3691556 - DNA, 25 bp, Homo sapien
ttatagcctccacgactgccaagtg

SEQ ID NO: 3691557 - DNA, 25 bp, Homo sapien
cccagggagtccgaagaagagctgc

SEQ ID NO: 3691558 - DNA, 25 bp, Homo sapien
gcccggcgacttccactggaggatg

SEQ ID NO: 3691559 - DNA, 25 bp, Homo sapien
ggaactatccgatgttgtttcaggg

SEQ ID NO: 3691560 - DNA, 25 bp, Homo sapien
tcgaagtggtctccggcttaaggtg

SEQ ID NO: 3691561 - DNA, 25 bp, Homo sapien
ctgatggctgattgggtacatgagg

SEQ ID NO: 3691562 - DNA, 25 bp, Homo sapien
tgatggctgattgggtacatgaggg

SEQ ID NO: 3691563 - DNA, 25 bp, Homo sapien
tgaggggcatgactctcggggcggc

SEQ ID NO: 3691564 - DNA, 25 bp, Homo sapien
attgggtacatgaggggcatgactc

SEQ ID NO: 3691565 - DNA, 25 bp, Homo sapien
gatcagcactgtcttcgccagctcg

SEQ ID NO: 3691566 - DNA, 25 bp, Homo sapien
ccagctcgaagtagaagtgtgcagc

SEQ ID NO: 3691567 - DNA, 25 bp, Homo sapien
tgctgttgccccctgccttgatcag

SEQ ID NO: 3691568 - DNA, 25 bp, Homo sapien
gatgtgtgaaaatggaagtgctgct

SEQ ID NO: 3691569 - DNA, 25 bp, Homo sapien
tgggaagaataagtacgtgagagcc

SEQ ID NO: 3691570 - DNA, 25 bp, Homo sapien
tctcgaaggcgcaaaggtgcaggtt

SEQ ID NO: 3691571 - DNA, 25 bp, Homo sapien
tgtgcaggccaagggcataaagccc

SEQ ID NO: 3691572 - DNA, 25 bp, Homo sapien
tacgtgagagccagttgggagaaac

SEQ ID NO: 3691573 - DNA, 25 bp, Homo sapien
cagagttgggttagtgtgggcacca

SEQ ID NO: 3691574 - DNA, 25 bp, Homo sapien
tcagatcagtaaccccacaaagata

SEQ ID NO: 3691575 - DNA, 25 bp, Homo sapien
cacaaagataagggtcttatcccca

SEQ ID NO: 3691576 - DNA, 25 bp, Homo sapien
tcccatacccaagtcaggtcaaatg

SEQ ID NO: 3691577 - DNA, 25 bp, Homo sapien
tgtcagccagggatgcaacctcagg

SEQ ID NO: 3691578 - DNA, 25 bp, Homo sapien
attggagtctcttgcccgtgatgcc

SEQ ID NO: 3691579 - DNA, 25 bp, Homo sapien
tctaccagtatagtcagggctgcgc

SEQ ID NO: 3691580 - DNA, 25 bp, Homo sapien
tgcgctgcctatctccatggcctgg

SEQ ID NO: 3691581 - DNA, 25 bp, Homo sapien
cattagggttcaatgcatgggcgtg

SEQ ID NO: 3691582 - DNA, 25 bp, Homo sapien
ccgctggatctcattagggttcaat

SEQ ID NO: 3691583 - DNA, 25 bp, Homo sapien
caccagggcccgctggatctcatta

SEQ ID NO: 3691584 - DNA, 25 bp, Homo sapien
aatgcatgggcgtgaggcaggcagc

SEQ ID NO: 3691585 - DNA, 25 bp, Homo sapien
tgtagccccttcacgggctgtggat

SEQ ID NO: 3691586 - DNA, 25 bp, Homo sapien
tggtgagcaacctcaaacaacactt

SEQ ID NO: 3691587 - DNA, 25 bp, Homo sapien
tggcactacagcttgtagccccttc

SEQ ID NO: 3691588 - DNA, 25 bp, Homo sapien
tgctcatacagccagaaccactggt

SEQ ID NO: 3691589 - DNA, 25 bp, Homo sapien
cgatatgacgggcaccactgtggct

SEQ ID NO: 3691590 - DNA, 25 bp, Homo sapien
actgtaaccggctcagtccctgggc

SEQ ID NO: 3691591 - DNA, 25 bp, Homo sapien
cgctgccactgtaaccggctcagtc

SEQ ID NO: 3691592 - DNA, 25 bp, Homo sapien
tctaccctcaggcataccccgccca

SEQ ID NO: 3691593 - DNA, 25 bp, Homo sapien
tgccccagtcctggacccgggtata

SEQ ID NO: 3691594 - DNA, 25 bp, Homo sapien
catgccccagtcctggacccgggta

SEQ ID NO: 3691595 - DNA, 25 bp, Homo sapien
ggctgtagagcagtgtaggggtgca

SEQ ID NO: 3691596 - DNA, 25 bp, Homo sapien
ctgtagagcagtgtaggggtgcagg

SEQ ID NO: 3691597 - DNA, 25 bp, Homo sapien
aagacggcaggccggggcatgtgag

SEQ ID NO: 3691598 - DNA, 25 bp, Homo sapien
cggcaggccggggcatgtgaggcat

SEQ ID NO: 3691599 - DNA, 25 bp, Homo sapien
gggaagacggcaggccggggcatgt

SEQ ID NO: 3691600 - DNA, 25 bp, Homo sapien
gaagacggcaggccggggcatgtga

SEQ ID NO: 3691601 - DNA, 25 bp, Homo sapien
gaattcccagtattttcccatgcct

SEQ ID NO: 3691602 - DNA, 25 bp, Homo sapien
catttcttattttagttgggctggg

SEQ ID NO: 3691603 - DNA, 25 bp, Homo sapien
ccaggactctccgactgaccaatta

SEQ ID NO: 3691604 - DNA, 25 bp, Homo sapien
gactgaccaattatactcccagagt

SEQ ID NO: 3691605 - DNA, 25 bp, Homo sapien
aaaggggaagatgccaaacttgatt

SEQ ID NO: 3691606 - DNA, 25 bp, Homo sapien
agaaaggggaagatgccaaacttga

SEQ ID NO: 3691607 - DNA, 25 bp, Homo sapien
gaaaggggaagatgccaaacttgat

SEQ ID NO: 3691608 - DNA, 25 bp, Homo sapien
tagggatgtactgtgatgggtgcca

SEQ ID NO: 3691609 - DNA, 25 bp, Homo sapien
ggaggagtcactgaataagggtact

SEQ ID NO: 3691610 - DNA, 25 bp, Homo sapien
tgatgggtgccatggaaggaacggg

SEQ ID NO: 3691611 - DNA, 25 bp, Homo sapien
gtcactgaataagggtactgagccc

SEQ ID NO: 3691612 - DNA, 25 bp, Homo sapien
ggtggaaaacctccgctcaccagag

SEQ ID NO: 3691613 - DNA, 25 bp, Homo sapien
cgtggatgctggatggacactgctc

SEQ ID NO: 3691614 - DNA, 25 bp, Homo sapien
tcgggcggtggaaaacctccgctca

SEQ ID NO: 3691615 - DNA, 25 bp, Homo sapien
tgaggcaccttggatggctggaaac

SEQ ID NO: 3691616 - DNA, 25 bp, Homo sapien
ccactggcacaactgcaggtaggag

SEQ ID NO: 3691617 - DNA, 25 bp, Homo sapien
gccactggcacaactgcaggtagga

SEQ ID NO: 3691618 - DNA, 25 bp, Homo sapien
agccccagcaaccatttgacatcat

SEQ ID NO: 3691619 - DNA, 25 bp, Homo sapien
accatttgacatcatcagtgtaggg

SEQ ID NO: 3691620 - DNA, 25 bp, Homo sapien
acccagcatctccagtgccagcatt

SEQ ID NO: 3691621 - DNA, 25 bp, Homo sapien
gtgatcgttgtgtgcccggcgaccc

SEQ ID NO: 3691622 - DNA, 25 bp, Homo sapien
tctgccctagggacccaacttacag

SEQ ID NO: 3691623 - DNA, 25 bp, Homo sapien
ttacagatctcagctctggcctggc

SEQ ID NO: 3691624 - DNA, 25 bp, Homo sapien
cgaccaaggcctcaactctgagcaa

SEQ ID NO: 3691625 - DNA, 25 bp, Homo sapien
aactctgagcaagagctaggaagga

SEQ ID NO: 3691626 - DNA, 25 bp, Homo sapien
cagaactggtgcacgtagttcactc

SEQ ID NO: 3691627 - DNA, 25 bp, Homo sapien
cccacacagaactggtgcacgtagt

SEQ ID NO: 3691628 - DNA, 25 bp, Homo sapien
cacagaactggtgcacgtagttcac

SEQ ID NO: 3691629 - DNA, 25 bp, Homo sapien
cacacagaactggtgcacgtagttc

SEQ ID NO: 3691630 - DNA, 25 bp, Homo sapien
ctgcatgtatgcctgctggcagcgc

SEQ ID NO: 3691631 - DNA, 25 bp, Homo sapien
gttgtgggcatgagcgggactcagc

SEQ ID NO: 3691632 - DNA, 25 bp, Homo sapien
atgagcgggactcagccgctgcagc

SEQ ID NO: 3691633 - DNA, 25 bp, Homo sapien
tgctggcagcgctgcaccagttggt

SEQ ID NO: 3691634 - DNA, 25 bp, Homo sapien
tggaggaggatgtgtgcaggatgag

SEQ ID NO: 3691635 - DNA, 25 bp, Homo sapien
ctggaggaggatgtgtgcaggatga

SEQ ID NO: 3691636 - DNA, 25 bp, Homo sapien
ggaggaggatgtgtgcaggatgagc

SEQ ID NO: 3691637 - DNA, 25 bp, Homo sapien
ttgaactgcatcatgcccatgggcg

SEQ ID NO: 3691638 - DNA, 25 bp, Homo sapien
cacaaagtcgtcgtagtccgcagga

SEQ ID NO: 3691639 - DNA, 25 bp, Homo sapien
tccgcaggagtcaggtgaatcaagc

SEQ ID NO: 3691640 - DNA, 25 bp, Homo sapien
ggcactccggatcgcattcacaaag

SEQ ID NO: 3691641 - DNA, 25 bp, Homo sapien
gaactgagtgaggatgatctgtcca

SEQ ID NO: 3691642 - DNA, 25 bp, Homo sapien
tctagggtgtgagacatcttggccc

SEQ ID NO: 3691643 - DNA, 25 bp, Homo sapien
tccctgtataggaccctaagggtga

SEQ ID NO: 3691644 - DNA, 25 bp, Homo sapien
gctgtcagtctgtgctaccagggaa

SEQ ID NO: 3691645 - DNA, 25 bp, Homo sapien
tggtaccccacataatagtgctagg

SEQ ID NO: 3691646 - DNA, 25 bp, Homo sapien
tagagccgagtatgagccctagctg

SEQ ID NO: 3691647 - DNA, 25 bp, Homo sapien
ctatacctggctatgggagagaccc

SEQ ID NO: 3691648 - DNA, 25 bp, Homo sapien
tagtgctaggtacctttgacccatc

SEQ ID NO: 3691649 - DNA, 25 bp, Homo sapien
gggtaggctctccaaatctgacatg

SEQ ID NO: 3691650 - DNA, 25 bp, Homo sapien
caattatggaaatgaccggctgggc

SEQ ID NO: 3691651 - DNA, 25 bp, Homo sapien
gaggctctcgtgaactagaccggag

SEQ ID NO: 3691652 - DNA, 25 bp, Homo sapien
cggctgggcctatacacctttgaga

SEQ ID NO: 3691653 - DNA, 25 bp, Homo sapien
cggcagtgccatcgcgcggagagga

SEQ ID NO: 3691654 - DNA, 25 bp, Homo sapien
tgcggagggccgcttgatttcccgg

SEQ ID NO: 3691655 - DNA, 25 bp, Homo sapien
cggaacccaggtcgcgcggctgcta

SEQ ID NO: 3691656 - DNA, 25 bp, Homo sapien
cctgctccgaagtcgtggtccccga

SEQ ID NO: 3691657 - DNA, 25 bp, Homo sapien
ccaggaggaagagatctatacccta

SEQ ID NO: 3691658 - DNA, 25 bp, Homo sapien
ggagcaattggtcatggccttggtt

SEQ ID NO: 3691659 - DNA, 25 bp, Homo sapien
cagatagcaaagaagataatggagg

SEQ ID NO: 3691660 - DNA, 25 bp, Homo sapien
gatctataccctaagcagatagcaa

SEQ ID NO: 3691661 - DNA, 25 bp, Homo sapien
tgctggacaatctgcatgggcatca

SEQ ID NO: 3691662 - DNA, 25 bp, Homo sapien
gcatcacccctccccgcatgtaacc

SEQ ID NO: 3691663 - DNA, 25 bp, Homo sapien
tcacccctccccgcatgtaacccaa

SEQ ID NO: 3691664 - DNA, 25 bp, Homo sapien
taacccaaaagaggtgtccagagcc

SEQ ID NO: 3691665 - DNA, 25 bp, Homo sapien
aagaagaggtgtccttacagaggcc

SEQ ID NO: 3691666 - DNA, 25 bp, Homo sapien
ggtggtcgtttctatgcattcaggc

SEQ ID NO: 3691667 - DNA, 25 bp, Homo sapien
gtctttgagattgacctgactgctc

SEQ ID NO: 3691668 - DNA, 25 bp, Homo sapien
tgactgctctggcaagaagaagagg

SEQ ID NO: 3691669 - DNA, 25 bp, Homo sapien
gtcagggctcccgtgccgcctttgg

SEQ ID NO: 3691670 - DNA, 25 bp, Homo sapien
cctttggcggttctgtttctgtgct

SEQ ID NO: 3691671 - DNA, 25 bp, Homo sapien
catgctgaccctcatctgggcctgg

SEQ ID NO: 3691672 - DNA, 25 bp, Homo sapien
tcttgccttttcacggtagtggtcc

SEQ ID NO: 3691673 - DNA, 25 bp, Homo sapien
tttgacaggggctttaggagattcc

SEQ ID NO: 3691674 - DNA, 25 bp, Homo sapien
cagccggaggtccaaccttcgcagc

SEQ ID NO: 3691675 - DNA, 25 bp, Homo sapien
gacaggggctttaggagattccagc

SEQ ID NO: 3691676 - DNA, 25 bp, Homo sapien
ccggaggtccaaccttcgcagccag

SEQ ID NO: 3691677 - DNA, 25 bp, Homo sapien
tataagtaaagcacttagttagtgc

SEQ ID NO: 3691678 - DNA, 25 bp, Homo sapien
ttagtgcttagcaaatgggaggcag

SEQ ID NO: 3691679 - DNA, 25 bp, Homo sapien
taagcattagcttcacccactttcc

SEQ ID NO: 3691680 - DNA, 25 bp, Homo sapien
ccgacttggccatgtgtttagcgtg

SEQ ID NO: 3691681 - DNA, 25 bp, Homo sapien
ctcacttatttcttgccgggcgcgg

SEQ ID NO: 3691682 - DNA, 25 bp, Homo sapien
agctcacttatttcttgccgggcgc

SEQ ID NO: 3691683 - DNA, 25 bp, Homo sapien
gctcacttatttcttgccgggcgcg

SEQ ID NO: 3691684 - DNA, 25 bp, Homo sapien
aggcctcacttcctttgagcctgag

SEQ ID NO: 3691685 - DNA, 25 bp, Homo sapien
gagcctgaggcccttggtaacctcg

SEQ ID NO: 3691686 - DNA, 25 bp, Homo sapien
tgtgatccaggcctcacttcctttg

SEQ ID NO: 3691687 - DNA, 25 bp, Homo sapien
ctgaggcccttggtaacctcgtgga

SEQ ID NO: 3691688 - DNA, 25 bp, Homo sapien
gtgcgaaaacaggagatcattaaga

SEQ ID NO: 3691689 - DNA, 25 bp, Homo sapien
acaggagatcattaagattacagaa

SEQ ID NO: 3691690 - DNA, 25 bp, Homo sapien
gctgattgaagccatcaacaatggg

SEQ ID NO: 3691691 - DNA, 25 bp, Homo sapien
gattacagaacagctgattgaagcc

SEQ ID NO: 3691692 - DNA, 25 bp, Homo sapien
acaccaccacagaagatgaggacct

SEQ ID NO: 3691693 - DNA, 25 bp, Homo sapien
aacaccaccacagaagatgaggacc

SEQ ID NO: 3691694 - DNA, 25 bp, Homo sapien
caccaccacagaagatgaggacctc

SEQ ID NO: 3691695 - DNA, 25 bp, Homo sapien
accaccacagaagatgaggacctca

SEQ ID NO: 3691696 - DNA, 25 bp, Homo sapien
tgccaaaatccagggctatcccagc

SEQ ID NO: 3691697 - DNA, 25 bp, Homo sapien
cgggaccccagttgagccgggatat

SEQ ID NO: 3691698 - DNA, 25 bp, Homo sapien
gccgggatattttgtcttctggaga

SEQ ID NO: 3691699 - DNA, 25 bp, Homo sapien
caaaatccagggctatcccagctgc

SEQ ID NO: 3691700 - DNA, 25 bp, Homo sapien
gccgcgctccatcccgcatggcaga

SEQ ID NO: 3691701 - DNA, 25 bp, Homo sapien
catcccgcatggcagaagtgctgct

SEQ ID NO: 3691702 - DNA, 25 bp, Homo sapien
cctggccgcgctccatcccgcatgg

SEQ ID NO: 3691703 - DNA, 25 bp, Homo sapien
ttccccttcattgtcccgcctggcc

SEQ ID NO: 3691704 - DNA, 25 bp, Homo sapien
tgggccccacaaatacttcctctga

SEQ ID NO: 3691705 - DNA, 25 bp, Homo sapien
ttcctctgatcatctctctagccat

SEQ ID NO: 3691706 - DNA, 25 bp, Homo sapien
tgagggtgcccccagagctaggtct

SEQ ID NO: 3691707 - DNA, 25 bp, Homo sapien
ccccagagctaggtctctgggcccc

SEQ ID NO: 3691708 - DNA, 25 bp, Homo sapien
gaacttctttgggtcaggtgtggat

SEQ ID NO: 3691709 - DNA, 25 bp, Homo sapien
ttttgcaatgacctggcacctggca

SEQ ID NO: 3691710 - DNA, 25 bp, Homo sapien
tgggttgaaagtgcagcaggagact

SEQ ID NO: 3691711 - DNA, 25 bp, Homo sapien
taagcagagatttctggagggatgc

SEQ ID NO: 3691712 - DNA, 25 bp, Homo sapien
tctagcctgtcgcagtctgtggagt

SEQ ID NO: 3691713 - DNA, 25 bp, Homo sapien
gcttgaggttccatgcctagccctg

SEQ ID NO: 3691714 - DNA, 25 bp, Homo sapien
tgtctgagccattgacagcaagctg

SEQ ID NO: 3691715 - DNA, 25 bp, Homo sapien
gacggcttcaggtctggtccaagag

SEQ ID NO: 3691716 - DNA, 25 bp, Homo sapien
gggaatggctgcttggccaaggtag

SEQ ID NO: 3691717 - DNA, 25 bp, Homo sapien
tgggaatggctgcttggccaaggta

SEQ ID NO: 3691718 - DNA, 25 bp, Homo sapien
atggctgcttggccaaggtagagga

SEQ ID NO: 3691719 - DNA, 25 bp, Homo sapien
gaatggctgcttggccaaggtagag

SEQ ID NO: 3691720 - DNA, 25 bp, Homo sapien
agaggagatcctgaggtgccaccct

SEQ ID NO: 3691721 - DNA, 25 bp, Homo sapien
ccatggcacctagggatggagccct

SEQ ID NO: 3691722 - DNA, 25 bp, Homo sapien
gacccagtgaacctggtgaggacct

SEQ ID NO: 3691723 - DNA, 25 bp, Homo sapien
tcctctaagtgtcgtgcatccatgc

SEQ ID NO: 3691724 - DNA, 25 bp, Homo sapien
tgagtcctccccgaccgcctgcctc

SEQ ID NO: 3691725 - DNA, 25 bp, Homo sapien
ccagcatgccgggcccactcaccag

SEQ ID NO: 3691726 - DNA, 25 bp, Homo sapien
gtggcatgagtcctccccgaccgcc

SEQ ID NO: 3691727 - DNA, 25 bp, Homo sapien
gggccagcatgccgggcccactcac

SEQ ID NO: 3691728 - DNA, 25 bp, Homo sapien
gccctctccatctggtggggacgca

SEQ ID NO: 3691729 - DNA, 25 bp, Homo sapien
agctcggctggcttggccacgccgc

SEQ ID NO: 3691730 - DNA, 25 bp, Homo sapien
tcaggcatttcgctgtggaccctcc

SEQ ID NO: 3691731 - DNA, 25 bp, Homo sapien
ggacgcagtgttccctatgccctgg

SEQ ID NO: 3691732 - DNA, 25 bp, Homo sapien
ttcttatttaactctctgaagactc

SEQ ID NO: 3691733 - DNA, 25 bp, Homo sapien
gaggtgagtggatcaggaatgggct

SEQ ID NO: 3691734 - DNA, 25 bp, Homo sapien
ctgggccacaccttgaccagggcga

SEQ ID NO: 3691735 - DNA, 25 bp, Homo sapien
accgctgggtttcctcggcgtcctg

SEQ ID NO: 3691736 - DNA, 25 bp, Homo sapien
ccagggcgagtgaggatcctgtttt

SEQ ID NO: 3691737 - DNA, 25 bp, Homo sapien
caggtatgttttcccagctgtgtac

SEQ ID NO: 3691738 - DNA, 25 bp, Homo sapien
tcaggtatgttttcccagctgtgta

SEQ ID NO: 3691739 - DNA, 25 bp, Homo sapien
gaggccccgtagtgttggtgggcac

SEQ ID NO: 3691740 - DNA, 25 bp, Homo sapien
ttttctgacaggctggtgaagacag

SEQ ID NO: 3691741 - DNA, 25 bp, Homo sapien
ttctgacaggctggtgaagacagca

SEQ ID NO: 3691742 - DNA, 25 bp, Homo sapien
tgagggaaaggatgcgaggaggccc

SEQ ID NO: 3691743 - DNA, 25 bp, Homo sapien
tcttgctgatgacctctcattttgc

SEQ ID NO: 3691744 - DNA, 25 bp, Homo sapien
tgtggaggcaggtgaagatcggctt

SEQ ID NO: 3691745 - DNA, 25 bp, Homo sapien
tggagaaatttacaccgaggaggag

SEQ ID NO: 3691746 - DNA, 25 bp, Homo sapien
cgaggaggaggtaaaatgagagact

SEQ ID NO: 3691747 - DNA, 25 bp, Homo sapien
ggatgaccatgatccccctgagact

SEQ ID NO: 3691748 - DNA, 25 bp, Homo sapien
ggaagcaaaggtttggacagcagaa

SEQ ID NO: 3691749 - DNA, 25 bp, Homo sapien
ctaattgaggaagcaaaggtttgga

SEQ ID NO: 3691750 - DNA, 25 bp, Homo sapien
ccatcccggggatgaccatgatccc

SEQ ID NO: 3691751 - DNA, 25 bp, Homo sapien
aggagctcctactgttcctggtggg

SEQ ID NO: 3691752 - DNA, 25 bp, Homo sapien
aatctaatgagagtacaggagctcc

SEQ ID NO: 3691753 - DNA, 25 bp, Homo sapien
ggagacaggcactcaaacaggcagt

SEQ ID NO: 3691754 - DNA, 25 bp, Homo sapien
caaaagatcatctagggagacaggc

SEQ ID NO: 3691755 - DNA, 25 bp, Homo sapien
ccaggattctcagggttgggtctct

SEQ ID NO: 3691756 - DNA, 25 bp, Homo sapien
tccaggattctcagggttgggtctc

SEQ ID NO: 3691757 - DNA, 25 bp, Homo sapien
tctccaggattctcagggttgggtc

SEQ ID NO: 3691758 - DNA, 25 bp, Homo sapien
cctctccaggattctcagggttggg

SEQ ID NO: 3691759 - DNA, 25 bp, Homo sapien
caggacagcattcctctcgcacttc

SEQ ID NO: 3691760 - DNA, 25 bp, Homo sapien
cccaggacagcattcctctcgcact

SEQ ID NO: 3691761 - DNA, 25 bp, Homo sapien
gacagcattcctctcgcacttctgt

SEQ ID NO: 3691762 - DNA, 25 bp, Homo sapien
ggacagcattcctctcgcacttctg

SEQ ID NO: 3691763 - DNA, 25 bp, Homo sapien
catctggtcattgttgtcccctgcc

SEQ ID NO: 3691764 - DNA, 25 bp, Homo sapien
tcaccatcgtgcatcatatcccagg

SEQ ID NO: 3691765 - DNA, 25 bp, Homo sapien
ttctcggagaccagccctctgggaa

SEQ ID NO: 3691766 - DNA, 25 bp, Homo sapien
tcaacattgctaggtgctgctcacg

SEQ ID NO: 3691767 - DNA, 25 bp, Homo sapien
tgccggctgggttgtatactttgct

SEQ ID NO: 3691768 - DNA, 25 bp, Homo sapien
cctgaggaaacgtgtgacactggaa

SEQ ID NO: 3691769 - DNA, 25 bp, Homo sapien
ctttgtctcctagcactgaactggt

SEQ ID NO: 3691770 - DNA, 25 bp, Homo sapien
acatagggaagcacctcagccctga

SEQ ID NO: 3691771 - DNA, 25 bp, Homo sapien
ccccacgtgctaggagcccggttgg

SEQ ID NO: 3691772 - DNA, 25 bp, Homo sapien
ccgggacaagcccataagtcgcgaa

SEQ ID NO: 3691773 - DNA, 25 bp, Homo sapien
aggtcagtggtccagactcctacac

SEQ ID NO: 3691774 - DNA, 25 bp, Homo sapien
taggacccgtccagagaggtcagtg

SEQ ID NO: 3691775 - DNA, 25 bp, Homo sapien
tttgttgaaaggcagctagctccac

SEQ ID NO: 3691776 - DNA, 25 bp, Homo sapien
tgcaaaatgctttacgtggttaccc

SEQ ID NO: 3691777 - DNA, 25 bp, Homo sapien
tacctagagacacaatgcaaaatgc

SEQ ID NO: 3691778 - DNA, 25 bp, Homo sapien
tagtactatgagtcacccctgaggc

SEQ ID NO: 3691779 - DNA, 25 bp, Homo sapien
gggccccacatgccgctcttcctgc

SEQ ID NO: 3691780 - DNA, 25 bp, Homo sapien
tcacttctagctccagacccagatt

SEQ ID NO: 3691781 - DNA, 25 bp, Homo sapien
agacccagatttatgtctgtccttg

SEQ ID NO: 3691782 - DNA, 25 bp, Homo sapien
ttcaggtctcctttgtttgtgagca

SEQ ID NO: 3691783 - DNA, 25 bp, Homo sapien
gagcatggaggtagcctgtccttgt

SEQ ID NO: 3691784 - DNA, 25 bp, Homo sapien
gtggcccgcaccatctccaggttct

SEQ ID NO: 3691785 - DNA, 25 bp, Homo sapien
tggcccgcaccatctccaggttctc

SEQ ID NO: 3691786 - DNA, 25 bp, Homo sapien
ctgtggcccgcaccatctccaggtt

SEQ ID NO: 3691787 - DNA, 25 bp, Homo sapien
ttctgtggcccgcaccatctccagg

SEQ ID NO: 3691788 - DNA, 25 bp, Homo sapien
agcctgctagtggtctgggcatgca

SEQ ID NO: 3691789 - DNA, 25 bp, Homo sapien
gaatgctgctgtcttaacttaagcc

SEQ ID NO: 3691790 - DNA, 25 bp, Homo sapien
gcatgcagggccatcacagcgggcc

SEQ ID NO: 3691791 - DNA, 25 bp, Homo sapien
ggcagattgcccagggaatgctgct

SEQ ID NO: 3691792 - DNA, 25 bp, Homo sapien
tatttgaaggccagtagtctcctgg

SEQ ID NO: 3691793 - DNA, 25 bp, Homo sapien
ctcctggattggagtgggaagaacc

SEQ ID NO: 3691794 - DNA, 25 bp, Homo sapien
gccagtagcacctgttgagtccaaa

SEQ ID NO: 3691795 - DNA, 25 bp, Homo sapien
ggtagaaagccccactgcccaatgc

SEQ ID NO: 3691796 - DNA, 25 bp, Homo sapien
tgcagaggggacagtctcctttgag

SEQ ID NO: 3691797 - DNA, 25 bp, Homo sapien
ctttgagaaggctgctagaggacta

SEQ ID NO: 3691798 - DNA, 25 bp, Homo sapien
tctcctttgagaaggctgctagagg

SEQ ID NO: 3691799 - DNA, 25 bp, Homo sapien
gctgctagaggactaaatgtatgaa

SEQ ID NO: 3691800 - DNA, 25 bp, Homo sapien
tctctggtttgctgagcctctgagg

SEQ ID NO: 3691801 - DNA, 25 bp, Homo sapien
gcagaaggtgcttcttttctctggt

SEQ ID NO: 3691802 - DNA, 25 bp, Homo sapien
tgaggagggtttggaggcagccacg

SEQ ID NO: 3691803 - DNA, 25 bp, Homo sapien
cctcctgcagaaggtgcttcttttc

SEQ ID NO: 3691804 - DNA, 25 bp, Homo sapien
ttttcccgatcaccatccatcccca

SEQ ID NO: 3691805 - DNA, 25 bp, Homo sapien
cccatcctcaatctatcttgcccac

SEQ ID NO: 3691806 - DNA, 25 bp, Homo sapien
ttattctgaatcctcagctcctccc

SEQ ID NO: 3691807 - DNA, 25 bp, Homo sapien
tcccttttcccgatcaccatccatc

SEQ ID NO: 3691808 - DNA, 25 bp, Homo sapien
tcccagggaccgtcatgattcatgt

SEQ ID NO: 3691809 - DNA, 25 bp, Homo sapien
aggaaattcccagggaccgtcatga

SEQ ID NO: 3691810 - DNA, 25 bp, Homo sapien
tctcatgactccagattacttggct

SEQ ID NO: 3691811 - DNA, 25 bp, Homo sapien
tgattcatgttgctcccctagcagc

SEQ ID NO: 3691812 - DNA, 25 bp, Homo sapien
agcattttcctgccttgcaaatctg

SEQ ID NO: 3691813 - DNA, 25 bp, Homo sapien
tttcctgccttgcaaatctggacct

SEQ ID NO: 3691814 - DNA, 25 bp, Homo sapien
cagcattttcctgccttgcaaatct

SEQ ID NO: 3691815 - DNA, 25 bp, Homo sapien
gcagcattttcctgccttgcaaatc

SEQ ID NO: 3691816 - DNA, 25 bp, Homo sapien
gggctgcggtctccgcactgtgctg

SEQ ID NO: 3691817 - DNA, 25 bp, Homo sapien
gctgcggtctccgcactgtgctgcg

SEQ ID NO: 3691818 - DNA, 25 bp, Homo sapien
tgcggtctccgcactgtgctgcgac

SEQ ID NO: 3691819 - DNA, 25 bp, Homo sapien
tccggggctgcggtctccgcactgt

SEQ ID NO: 3691820 - DNA, 25 bp, Homo sapien
cagacgctcgggagctggggccgcc

SEQ ID NO: 3691821 - DNA, 25 bp, Homo sapien
gggcgccttgactccgtgcagccgc

SEQ ID NO: 3691822 - DNA, 25 bp, Homo sapien
ggcagcctggatcggcacccgcggg

SEQ ID NO: 3691823 - DNA, 25 bp, Homo sapien
gactccgggcagcctggatcggcac

SEQ ID NO: 3691824 - DNA, 25 bp, Homo sapien
cgaggtcggggcgctagacggcggc

SEQ ID NO: 3691825 - DNA, 25 bp, Homo sapien
ggtggcgaggtcggggcgctagacg

SEQ ID NO: 3691826 - DNA, 25 bp, Homo sapien
ggcgaggtcggggcgctagacggcg

SEQ ID NO: 3691827 - DNA, 25 bp, Homo sapien
tggcgaggtcggggcgctagacggc

SEQ ID NO: 3691828 - DNA, 25 bp, Homo sapien
gtcgctcacgaccaggacgcagaga

SEQ ID NO: 3691829 - DNA, 25 bp, Homo sapien
acgaccaggacgcagagaagcaggc

SEQ ID NO: 3691830 - DNA, 25 bp, Homo sapien
tcacgaccaggacgcagagaagcag

SEQ ID NO: 3691831 - DNA, 25 bp, Homo sapien
gctcacgaccaggacgcagagaagc

SEQ ID NO: 3691832 - DNA, 25 bp, Homo sapien
atcagtcaaagcaagagcgcactca

SEQ ID NO: 3691833 - DNA, 25 bp, Homo sapien
tcagtcaaagcaagagcgcactcac

SEQ ID NO: 3691834 - DNA, 25 bp, Homo sapien
gaacttgatgaagttcattgctgcc

SEQ ID NO: 3691835 - DNA, 25 bp, Homo sapien
atggaacttgatgaagttcattgct

SEQ ID NO: 3691836 - DNA, 25 bp, Homo sapien
ggaacttgatgaagttcattgctgc

SEQ ID NO: 3691837 - DNA, 25 bp, Homo sapien
tggaacttgatgaagttcattgctg

SEQ ID NO: 3691838 - DNA, 25 bp, Homo sapien
taagcgagggggagtggaagtggta

SEQ ID NO: 3691839 - DNA, 25 bp, Homo sapien
agcgagggggagtggaagtggtaag

SEQ ID NO: 3691840 - DNA, 25 bp, Homo sapien
ctttgggcagttgcaccagtgaatg

SEQ ID NO: 3691841 - DNA, 25 bp, Homo sapien
gcaccagtgaatgttggagaagtac

SEQ ID NO: 3691842 - DNA, 25 bp, Homo sapien
gagaagtacttgttggacacacatg

SEQ ID NO: 3691843 - DNA, 25 bp, Homo sapien
gtgctgccctccgaatttctttggg

SEQ ID NO: 3691844 - DNA, 25 bp, Homo sapien
tgtcgtttcagacctgccagaagac

SEQ ID NO: 3691845 - DNA, 25 bp, Homo sapien
cgtttcagacctgccagaagactgg

SEQ ID NO: 3691846 - DNA, 25 bp, Homo sapien
tcagacctgccagaagactggacag

SEQ ID NO: 3691847 - DNA, 25 bp, Homo sapien
aagatgtcgtttcagacctgccaga

SEQ ID NO: 3691848 - DNA, 25 bp, Homo sapien
gcatcagatctgtgggcatggtacg

SEQ ID NO: 3691849 - DNA, 25 bp, Homo sapien
tgctggcctttcctcggtaaaagtg

SEQ ID NO: 3691850 - DNA, 25 bp, Homo sapien
catggtacgtttgctgaaggacagt

SEQ ID NO: 3691851 - DNA, 25 bp, Homo sapien
tgaccattcccctcatagcaggttt

SEQ ID NO: 3691852 - DNA, 25 bp, Homo sapien
tcttggacaagcagctttaggccca

SEQ ID NO: 3691853 - DNA, 25 bp, Homo sapien
gacaagcagctttaggcccacctgc

SEQ ID NO: 3691854 - DNA, 25 bp, Homo sapien
gtcatgcaccatgcactcttggaca

SEQ ID NO: 3691855 - DNA, 25 bp, Homo sapien
tgcacatagcaccagggtcgcctcc

SEQ ID NO: 3691856 - DNA, 25 bp, Homo sapien
aattttaattcttctggaggagagg

SEQ ID NO: 3691857 - DNA, 25 bp, Homo sapien
gaaattttaattcttctggaggaga

SEQ ID NO: 3691858 - DNA, 25 bp, Homo sapien
ctgaaattttaattcttctggagga

SEQ ID NO: 3691859 - DNA, 25 bp, Homo sapien
tctggaggagaggagggcttttttc

SEQ ID NO: 3691860 - DNA, 25 bp, Homo sapien
aaaccagggctggttctcgatggtg

SEQ ID NO: 3691861 - DNA, 25 bp, Homo sapien
gtaggtgacagagcccccccggtgc

SEQ ID NO: 3691862 - DNA, 25 bp, Homo sapien
caataatcttaaagcggggcctcag

SEQ ID NO: 3691863 - DNA, 25 bp, Homo sapien
gtgcctcctgtagatggccgcaaac

SEQ ID NO: 3691864 - DNA, 25 bp, Homo sapien
cacccagcaagggctgatgaggctg

SEQ ID NO: 3691865 - DNA, 25 bp, Homo sapien
cccagcaagggctgatgaggctgcc

SEQ ID NO: 3691866 - DNA, 25 bp, Homo sapien
acccagcaagggctgatgaggctgc

SEQ ID NO: 3691867 - DNA, 25 bp, Homo sapien
gagttaagccttgagcgacccaggt

SEQ ID NO: 3691868 - DNA, 25 bp, Homo sapien
tccccttgcgtgttggagttaagcc

SEQ ID NO: 3691869 - DNA, 25 bp, Homo sapien
caatgtcgttgtggtgagcaagcgt

SEQ ID NO: 3691870 - DNA, 25 bp, Homo sapien
gacccaggtagacgatgtagtcctc

SEQ ID NO: 3691871 - DNA, 25 bp, Homo sapien
tggccacagtagtcgcggggttccc

SEQ ID NO: 3691872 - DNA, 25 bp, Homo sapien
ctctccccaagccattatggccaca

SEQ ID NO: 3691873 - DNA, 25 bp, Homo sapien
tccccaagccattatggccacagta

SEQ ID NO: 3691874 - DNA, 25 bp, Homo sapien
cccaagccattatggccacagtagt

SEQ ID NO: 3691875 - DNA, 25 bp, Homo sapien
cgttatacatcgagggcaggcagat

SEQ ID NO: 3691876 - DNA, 25 bp, Homo sapien
gtatagtccgggatggctgcgcaca

SEQ ID NO: 3691877 - DNA, 25 bp, Homo sapien
gccagtgatctcacagcttgtgcca

SEQ ID NO: 3691878 - DNA, 25 bp, Homo sapien
gcaggcagatggtctgtatagtccg

SEQ ID NO: 3691879 - DNA, 25 bp, Homo sapien
tttgcagcccatcgctccctaaaca

SEQ ID NO: 3691880 - DNA, 25 bp, Homo sapien
gatttatctgtccactgggagtctg

SEQ ID NO: 3691881 - DNA, 25 bp, Homo sapien
gaaggcccttattctcttccatgca

SEQ ID NO: 3691882 - DNA, 25 bp, Homo sapien
tgagcctttactccacctatagccc

SEQ ID NO: 3691883 - DNA, 25 bp, Homo sapien
agcacacagcattttggtggtgact

SEQ ID NO: 3691884 - DNA, 25 bp, Homo sapien
gggaaatcagcttcacaacagtcat

SEQ ID NO: 3691885 - DNA, 25 bp, Homo sapien
cagctgctccggatagagatagtcg

SEQ ID NO: 3691886 - DNA, 25 bp, Homo sapien
cagcattttggtggtgacttcagag

SEQ ID NO: 3691887 - DNA, 25 bp, Homo sapien
catcacccaaccataccagagagag

SEQ ID NO: 3691888 - DNA, 25 bp, Homo sapien
cacccaaccataccagagagaggga

SEQ ID NO: 3691889 - DNA, 25 bp, Homo sapien
agtccttagcgacttcccattttct

SEQ ID NO: 3691890 - DNA, 25 bp, Homo sapien
agagtttcccagtcaaagtccttag

SEQ ID NO: 3691891 - DNA, 25 bp, Homo sapien
tgacgccaaagatacaaaagatgag

SEQ ID NO: 3691892 - DNA, 25 bp, Homo sapien
tgtgacgccaaagatacaaaagatg

SEQ ID NO: 3691893 - DNA, 25 bp, Homo sapien
ctgtgacgccaaagatacaaaagat

SEQ ID NO: 3691894 - DNA, 25 bp, Homo sapien
acgccaaagatacaaaagatgagcc

SEQ ID NO: 3691895 - DNA, 25 bp, Homo sapien
tcatgcggccttggagggaacagac

SEQ ID NO: 3691896 - DNA, 25 bp, Homo sapien
tgagactctcgtgtagacgcctggc

SEQ ID NO: 3691897 - DNA, 25 bp, Homo sapien
ccagggtaagaagtgtgagactctc

SEQ ID NO: 3691898 - DNA, 25 bp, Homo sapien
caattccagtcaaagtcatgcggcc

SEQ ID NO: 3691899 - DNA, 25 bp, Homo sapien
tatgcctgagggtaaagctattgtc

SEQ ID NO: 3691900 - DNA, 25 bp, Homo sapien
gctattgtcgttcgccctggtgggt

SEQ ID NO: 3691901 - DNA, 25 bp, Homo sapien
cagtaacatgttgagtcaggaccac

SEQ ID NO: 3691902 - DNA, 25 bp, Homo sapien
aaccagcaagaaagcgggtggtgcc

SEQ ID NO: 3691903 - DNA, 25 bp, Homo sapien
tcccttcacccatgcacaggagatg

SEQ ID NO: 3691904 - DNA, 25 bp, Homo sapien
atgcacaggagatgccctgcccttt

SEQ ID NO: 3691905 - DNA, 25 bp, Homo sapien
caggagatgccctgccctttttaac

SEQ ID NO: 3691906 - DNA, 25 bp, Homo sapien
tctcccttcacccatgcacaggaga

SEQ ID NO: 3691907 - DNA, 25 bp, Homo sapien
ccacccagtgaggattggatgaact

SEQ ID NO: 3691908 - DNA, 25 bp, Homo sapien
cattcatggaatatcagagccctgc

SEQ ID NO: 3691909 - DNA, 25 bp, Homo sapien
gagccctgccctgaagtcgttagtg

SEQ ID NO: 3691910 - DNA, 25 bp, Homo sapien
gataactggccaagaaagggacatc

SEQ ID NO: 3691911 - DNA, 25 bp, Homo sapien
agggctcgttgttcaagtggtaaca

SEQ ID NO: 3691912 - DNA, 25 bp, Homo sapien
ggctcgttgttcaagtggtaacacc

SEQ ID NO: 3691913 - DNA, 25 bp, Homo sapien
gggctcgttgttcaagtggtaacac

SEQ ID NO: 3691914 - DNA, 25 bp, Homo sapien
agtaaaactgaccaccctctggtgg

SEQ ID NO: 3691915 - DNA, 25 bp, Homo sapien
gtcaacctgtcaggccaatgccggg

SEQ ID NO: 3691916 - DNA, 25 bp, Homo sapien
caattactacaaatcggatattccc

SEQ ID NO: 3691917 - DNA, 25 bp, Homo sapien
tattcccctttattgtccaccagta

SEQ ID NO: 3691918 - DNA, 25 bp, Homo sapien
acaaggaaatccaagcgggttgcca

SEQ ID NO: 3691919 - DNA, 25 bp, Homo sapien
gcacttttagttcactgtggctgac

SEQ ID NO: 3691920 - DNA, 25 bp, Homo sapien
gttgtctccacgtataatcctctga

SEQ ID NO: 3691921 - DNA, 25 bp, Homo sapien
tgcacagtacagcaaagtatgcgtt

SEQ ID NO: 3691922 - DNA, 25 bp, Homo sapien
ttgtggtagacagaattctaagatg

SEQ ID NO: 3691923 - DNA, 25 bp, Homo sapien
ctattgtggtagacagaattctaag

SEQ ID NO: 3691924 - DNA, 25 bp, Homo sapien
tgtggtagacagaattctaagatgt

SEQ ID NO: 3691925 - DNA, 25 bp, Homo sapien
tattgtggtagacagaattctaaga

SEQ ID NO: 3691926 - DNA, 25 bp, Homo sapien
tctgtgtatttatctagcgcaaatg

SEQ ID NO: 3691927 - DNA, 25 bp, Homo sapien
ctgtgtatttatctagcgcaaatgc

SEQ ID NO: 3691928 - DNA, 25 bp, Homo sapien
ccgggaaccggcgaagagacagact

SEQ ID NO: 3691929 - DNA, 25 bp, Homo sapien
gacagactgtgcagcgactacggag

SEQ ID NO: 3691930 - DNA, 25 bp, Homo sapien
cgggcgacagagaagtaggatccac

SEQ ID NO: 3691931 - DNA, 25 bp, Homo sapien
cgaaccgcgggcgacagagaagtag

SEQ ID NO: 3691932 - DNA, 25 bp, Homo sapien
tctgctgtgccaccggctccaggat

SEQ ID NO: 3691933 - DNA, 25 bp, Homo sapien
acgaggttgctgacggccgcctgca

SEQ ID NO: 3691934 - DNA, 25 bp, Homo sapien
ccacgggcgcggtgaggtcaggaat

SEQ ID NO: 3691935 - DNA, 25 bp, Homo sapien
cgatcgtgcgcgtatgaaacactgg

SEQ ID NO: 3691936 - DNA, 25 bp, Homo sapien
tcccgcgccaggccctgcgcgctca

SEQ ID NO: 3691937 - DNA, 25 bp, Homo sapien
gcgcccgctcccgcgccaggccctg

SEQ ID NO: 3691938 - DNA, 25 bp, Homo sapien
ccgctcccgcgccaggccctgcgcg

SEQ ID NO: 3691939 - DNA, 25 bp, Homo sapien
gctcccgcgccaggccctgcgcgct

SEQ ID NO: 3691940 - DNA, 25 bp, Homo sapien
tagaaaggaggacaacgtggctcaa

SEQ ID NO: 3691941 - DNA, 25 bp, Homo sapien
taacgccaggtgaaaatgtccacag

SEQ ID NO: 3691942 - DNA, 25 bp, Homo sapien
taaaagggcggaatacagggagctc

SEQ ID NO: 3691943 - DNA, 25 bp, Homo sapien
aaaaccgggcttgtggtcacgaatg

SEQ ID NO: 3691944 - DNA, 25 bp, Homo sapien
ggcggcagatcccagattccacagg

SEQ ID NO: 3691945 - DNA, 25 bp, Homo sapien
cagctgtgggttacaggggtctgca

SEQ ID NO: 3691946 - DNA, 25 bp, Homo sapien
cccagccttctctccggcaggggcg

SEQ ID NO: 3691947 - DNA, 25 bp, Homo sapien
gatggggagcggatgccccagcctt

SEQ ID NO: 3691948 - DNA, 25 bp, Homo sapien
catacttggccaagtaatacctttc

SEQ ID NO: 3691949 - DNA, 25 bp, Homo sapien
agtaatacctttcttaccacatctc

SEQ ID NO: 3691950 - DNA, 25 bp, Homo sapien
tacctttcttaccacatctctaaat

SEQ ID NO: 3691951 - DNA, 25 bp, Homo sapien
ccatacttggccaagtaataccttt

SEQ ID NO: 3691952 - DNA, 25 bp, Homo sapien
tagatatctgtctcgttcttacatc

SEQ ID NO: 3691953 - DNA, 25 bp, Homo sapien
tctgtctcgttcttacatctctttt

SEQ ID NO: 3691954 - DNA, 25 bp, Homo sapien
gatatagatatctgtctcgttctta

SEQ ID NO: 3691955 - DNA, 25 bp, Homo sapien
gatatctgtctcgttcttacatctc

SEQ ID NO: 3691956 - DNA, 25 bp, Homo sapien
tgaaaaggataagagctggtgcatc

SEQ ID NO: 3691957 - DNA, 25 bp, Homo sapien
cataaattggtttggagtaacaaga

SEQ ID NO: 3691958 - DNA, 25 bp, Homo sapien
aattccctacttacatattctcaac

SEQ ID NO: 3691959 - DNA, 25 bp, Homo sapien
tgcaaatcaagttcaagtagacaga

SEQ ID NO: 3691960 - DNA, 25 bp, Homo sapien
cctcagcaccccagagtgctgggct

SEQ ID NO: 3691961 - DNA, 25 bp, Homo sapien
tcagcaccccagagtgctgggctta

SEQ ID NO: 3691962 - DNA, 25 bp, Homo sapien
agtgcaatggcgcagctaactgcaa

SEQ ID NO: 3691963 - DNA, 25 bp, Homo sapien
agcaccccagagtgctgggcttaca

SEQ ID NO: 3691964 - DNA, 25 bp, Homo sapien
agtacatgatagaagggcctaacct

SEQ ID NO: 3691965 - DNA, 25 bp, Homo sapien
caggaagcactgtactttggaggaa

SEQ ID NO: 3691966 - DNA, 25 bp, Homo sapien
aaaacagtttttgatcgcagcagaa

SEQ ID NO: 3691967 - DNA, 25 bp, Homo sapien
cctagcttagaggtagtcagggaaa

SEQ ID NO: 3691968 - DNA, 25 bp, Homo sapien
acaacatatggaattctactgaaag

SEQ ID NO: 3691969 - DNA, 25 bp, Homo sapien
ttctactgaaagctttcattggcat

SEQ ID NO: 3691970 - DNA, 25 bp, Homo sapien
attctactgaaagctttcattggca

SEQ ID NO: 3691971 - DNA, 25 bp, Homo sapien
gaaaataggacactggccgggcata

SEQ ID NO: 3691972 - DNA, 25 bp, Homo sapien
aaataggacactggccgggcatagt

SEQ ID NO: 3691973 - DNA, 25 bp, Homo sapien
gccaggcatggctgtacatgcttgt

SEQ ID NO: 3691974 - DNA, 25 bp, Homo sapien
aggcatggctgtacatgcttgtagt

SEQ ID NO: 3691975 - DNA, 25 bp, Homo sapien
gagacagaaagaatggtggttgctg

SEQ ID NO: 3691976 - DNA, 25 bp, Homo sapien
caaattcacagagacagaaagaatg

SEQ ID NO: 3691977 - DNA, 25 bp, Homo sapien
gacagaaagaatggtggttgctggg

SEQ ID NO: 3691978 - DNA, 25 bp, Homo sapien
atagagtagtcaaattcacagagac

SEQ ID NO: 3691979 - DNA, 25 bp, Homo sapien
tactacaggcgcctgccaccatgcc

SEQ ID NO: 3691980 - DNA, 25 bp, Homo sapien
caccttggcctcccaaaatgctggg

SEQ ID NO: 3691981 - DNA, 25 bp, Homo sapien
tcagtctcccgagtacctggtacta

SEQ ID NO: 3691982 - DNA, 25 bp, Homo sapien
agtctcccgagtacctggtactaca

SEQ ID NO: 3691983 - DNA, 25 bp, Homo sapien
cattttcatatctgtgcgcacatgc

SEQ ID NO: 3691984 - DNA, 25 bp, Homo sapien
catagccatgacacatggtgactgg

SEQ ID NO: 3691985 - DNA, 25 bp, Homo sapien
gcgcacatgctctttagctcctcaa

SEQ ID NO: 3691986 - DNA, 25 bp, Homo sapien
gactggcacatagcatatgctcaga

SEQ ID NO: 3691987 - DNA, 25 bp, Homo sapien
tacataaatgttagcagagcaacct

SEQ ID NO: 3691988 - DNA, 25 bp, Homo sapien
cataccatgggaagtagaatttcag

SEQ ID NO: 3691989 - DNA, 25 bp, Homo sapien
ggcaagttctgatgtcaagcaagct

SEQ ID NO: 3691990 - DNA, 25 bp, Homo sapien
cataggctaggcagcagatgaacca

SEQ ID NO: 3691991 - DNA, 25 bp, Homo sapien
aggcttcatctaacctgagatcatg

SEQ ID NO: 3691992 - DNA, 25 bp, Homo sapien
gaaaaccaagcatactgataggcta

SEQ ID NO: 3691993 - DNA, 25 bp, Homo sapien
atggtataagaaaaggtcgtcattt

SEQ ID NO: 3691994 - DNA, 25 bp, Homo sapien
ttggtgtaacacttaagaaggcttc

SEQ ID NO: 3691995 - DNA, 25 bp, Homo sapien
gatggttcctcagttcacttaccgg

SEQ ID NO: 3691996 - DNA, 25 bp, Homo sapien
cagaaatctaggatggctcccagcc

SEQ ID NO: 3691997 - DNA, 25 bp, Homo sapien
cagattaactgtagcagaagcagca

SEQ ID NO: 3691998 - DNA, 25 bp, Homo sapien
gactgggtcaattggtaacatagga

SEQ ID NO: 3691999 - DNA, 25 bp, Homo sapien
tgccaactatgtgtccactaggtgg

SEQ ID NO: 3692000 - DNA, 25 bp, Homo sapien
gctaaatgcagaagtgtggaaccca

SEQ ID NO: 3692001 - DNA, 25 bp, Homo sapien
tattccattgccgagagaaactcag

SEQ ID NO: 3692002 - DNA, 25 bp, Homo sapien
gagagccaactgtacgtgttatccc

SEQ ID NO: 3692003 - DNA, 25 bp, Homo sapien
taacaagtcgagaacttccaaagaa

SEQ ID NO: 3692004 - DNA, 25 bp, Homo sapien
caaaataacaagtcgagaacttcca

SEQ ID NO: 3692005 - DNA, 25 bp, Homo sapien
agtcgagaacttccaaagaaccact

SEQ ID NO: 3692006 - DNA, 25 bp, Homo sapien
caagtcgagaacttccaaagaacca

SEQ ID NO: 3692007 - DNA, 25 bp, Homo sapien
cctcagtggtttgaacagtctcttt

SEQ ID NO: 3692008 - DNA, 25 bp, Homo sapien
tcagtggtttgaacagtctcttttc

SEQ ID NO: 3692009 - DNA, 25 bp, Homo sapien
agtggtttgaacagtctcttttcca

SEQ ID NO: 3692010 - DNA, 25 bp, Homo sapien
tggtttgaacagtctcttttccaac

SEQ ID NO: 3692011 - DNA, 25 bp, Homo sapien
ggaacatacccgacagtggaactgc

SEQ ID NO: 3692012 - DNA, 25 bp, Homo sapien
cccaacagcagtgtaagaacattcc

SEQ ID NO: 3692013 - DNA, 25 bp, Homo sapien
cattctactctagatagaccagtgg

SEQ ID NO: 3692014 - DNA, 25 bp, Homo sapien
tgtggacgagtatctttagggaaca

SEQ ID NO: 3692015 - DNA, 25 bp, Homo sapien
tttaaataagtggaacctacatatc

SEQ ID NO: 3692016 - DNA, 25 bp, Homo sapien
taagtggaacctacatatctatcta

SEQ ID NO: 3692017 - DNA, 25 bp, Homo sapien
ctttaaataagtggaacctacatat

SEQ ID NO: 3692018 - DNA, 25 bp, Homo sapien
aaataagtggaacctacatatctat

SEQ ID NO: 3692019 - DNA, 25 bp, Homo sapien
acaatacagcatagctgctgcactc

SEQ ID NO: 3692020 - DNA, 25 bp, Homo sapien
tgggcagtttcgatggcaatcacca

SEQ ID NO: 3692021 - DNA, 25 bp, Homo sapien
cctgaagtttatgacaatctgggca

SEQ ID NO: 3692022 - DNA, 25 bp, Homo sapien
gatggcaatcaccatgcaaccctac

SEQ ID NO: 3692023 - DNA, 25 bp, Homo sapien
tataaaatttcaggcatcagcaact

SEQ ID NO: 3692024 - DNA, 25 bp, Homo sapien
tgccttcccgcatattaagaaccta

SEQ ID NO: 3692025 - DNA, 25 bp, Homo sapien
tgagaacagcctagactacgtagcg

SEQ ID NO: 3692026 - DNA, 25 bp, Homo sapien
cttcataatataaggcctgagtgag

SEQ ID NO: 3692027 - DNA, 25 bp, Homo sapien
gatcagcggacttgtctgaagtaca

SEQ ID NO: 3692028 - DNA, 25 bp, Homo sapien
gccatacatctggtatcagaagcgt

SEQ ID NO: 3692029 - DNA, 25 bp, Homo sapien
caggcttacatctgggatcagcgga

SEQ ID NO: 3692030 - DNA, 25 bp, Homo sapien
cagaagcgttgagtaaaaacatccc

SEQ ID NO: 3692031 - DNA, 25 bp, Homo sapien
caaacaccatctacctaaaagtcaa

SEQ ID NO: 3692032 - DNA, 25 bp, Homo sapien
tccttaatgatcaatgatggtgaac

SEQ ID NO: 3692033 - DNA, 25 bp, Homo sapien
gagtttcttagataagctagttatt

SEQ ID NO: 3692034 - DNA, 25 bp, Homo sapien
tttccattgaggttgaggattttca

SEQ ID NO: 3692035 - DNA, 25 bp, Homo sapien
gatcatatatggtcactcgctgcat

SEQ ID NO: 3692036 - DNA, 25 bp, Homo sapien
caagcttggtgcaagcattctcaac

SEQ ID NO: 3692037 - DNA, 25 bp, Homo sapien
aagcttggtgcaagcattctcaacc

SEQ ID NO: 3692038 - DNA, 25 bp, Homo sapien
gagctgcctggacaagcttggtgca

SEQ ID NO: 3692039 - DNA, 25 bp, Homo sapien
tcaattagataatctcgagcaggca

SEQ ID NO: 3692040 - DNA, 25 bp, Homo sapien
gttccagagaggatgccccttgacc

SEQ ID NO: 3692041 - DNA, 25 bp, Homo sapien
cagcctcatcgaaggtaaggagcag

SEQ ID NO: 3692042 - DNA, 25 bp, Homo sapien
gataatctcgagcaggcactgagta

SEQ ID NO: 3692043 - DNA, 25 bp, Homo sapien
gtgaccaaatcttccatagtctcca

SEQ ID NO: 3692044 - DNA, 25 bp, Homo sapien
gtgtaagtgaccaaatcttccatag

SEQ ID NO: 3692045 - DNA, 25 bp, Homo sapien
tctttgtgtaagtgaccaaatcttc

SEQ ID NO: 3692046 - DNA, 25 bp, Homo sapien
tggcccaagattctttgtgtaagtg

SEQ ID NO: 3692047 - DNA, 25 bp, Homo sapien
ctggcagcaactctttcacggtgtt

SEQ ID NO: 3692048 - DNA, 25 bp, Homo sapien
ctgtctctcgtcaatcatcttggcc

SEQ ID NO: 3692049 - DNA, 25 bp, Homo sapien
tcaccaacatcactcggtgctcctg

SEQ ID NO: 3692050 - DNA, 25 bp, Homo sapien
gcagcaactctttcacggtgttcat

SEQ ID NO: 3692051 - DNA, 25 bp, Homo sapien
ggtgagttgtaacacacgaattatc

SEQ ID NO: 3692052 - DNA, 25 bp, Homo sapien
tttagttgttacaaaaatcttcata

SEQ ID NO: 3692053 - DNA, 25 bp, Homo sapien
ccaagaggtgagttgtaacacacga

SEQ ID NO: 3692054 - DNA, 25 bp, Homo sapien
tctacagtaaaattgcgatttttta

SEQ ID NO: 3692055 - DNA, 25 bp, Homo sapien
gagagttggggattttgcttatttc

SEQ ID NO: 3692056 - DNA, 25 bp, Homo sapien
gtatgagacaggtgccaatcaaaac

SEQ ID NO: 3692057 - DNA, 25 bp, Homo sapien
taaagtatgagacaggtgccaatca

SEQ ID NO: 3692058 - DNA, 25 bp, Homo sapien
agataaagtatgagacaggtgccaa

SEQ ID NO: 3692059 - DNA, 25 bp, Homo sapien
ttaaaccagtatctaccccacatgc

SEQ ID NO: 3692060 - DNA, 25 bp, Homo sapien
gcctatttacttgttctaccttaga

SEQ ID NO: 3692061 - DNA, 25 bp, Homo sapien
tagcaagtaacctatgaaacagaaa

SEQ ID NO: 3692062 - DNA, 25 bp, Homo sapien
tggaaaagctataaatctcagcctt

SEQ ID NO: 3692063 - DNA, 25 bp, Homo sapien
gggaatatactcttccaccagtcca

SEQ ID NO: 3692064 - DNA, 25 bp, Homo sapien
acccatatacaaggcagagctccca

SEQ ID NO: 3692065 - DNA, 25 bp, Homo sapien
agagctcccatccacgggaatatac

SEQ ID NO: 3692066 - DNA, 25 bp, Homo sapien
ttccaccagtccaaccaataagact

SEQ ID NO: 3692067 - DNA, 25 bp, Homo sapien
tagatttctctggatcaaagattgg

SEQ ID NO: 3692068 - DNA, 25 bp, Homo sapien
tgaagggatccctcaaactaactga

SEQ ID NO: 3692069 - DNA, 25 bp, Homo sapien
tgctaacaggctctagaaggaatct

SEQ ID NO: 3692070 - DNA, 25 bp, Homo sapien
tggaatgatcaagggacacatctag

SEQ ID NO: 3692071 - DNA, 25 bp, Homo sapien
tacatcttgggctcctacaaggaaa

SEQ ID NO: 3692072 - DNA, 25 bp, Homo sapien
ggaaagtatgaacccaagtatctct

SEQ ID NO: 3692073 - DNA, 25 bp, Homo sapien
gcacccaatggaagtcatacaacaa

SEQ ID NO: 3692074 - DNA, 25 bp, Homo sapien
tctttagttgactaccagccttctg

SEQ ID NO: 3692075 - DNA, 25 bp, Homo sapien
cattaccttacagatcccggagaac

SEQ ID NO: 3692076 - DNA, 25 bp, Homo sapien
tgaagtcaatgggaaagaccaggcc

SEQ ID NO: 3692077 - DNA, 25 bp, Homo sapien
ttcagagcccgcaaagaagactggt

SEQ ID NO: 3692078 - DNA, 25 bp, Homo sapien
catgaggtcatggagaactacagct

SEQ ID NO: 3692079 - DNA, 25 bp, Homo sapien
tttctagaggaatcatcactttcca

SEQ ID NO: 3692080 - DNA, 25 bp, Homo sapien
ttcttagttcccttactatccctca

SEQ ID NO: 3692081 - DNA, 25 bp, Homo sapien
tcttagttcccttactatccctcac

SEQ ID NO: 3692082 - DNA, 25 bp, Homo sapien
tcacggagccaacctttggcctggt

SEQ ID NO: 3692083 - DNA, 25 bp, Homo sapien
tggttcagtttggagtctatggagg

SEQ ID NO: 3692084 - DNA, 25 bp, Homo sapien
aggcactagggtcacggagccaacc

SEQ ID NO: 3692085 - DNA, 25 bp, Homo sapien
tctatggaggccaatgctctcttca

SEQ ID NO: 3692086 - DNA, 25 bp, Homo sapien
gccacttgatcagtcatctgcccta

SEQ ID NO: 3692087 - DNA, 25 bp, Homo sapien
cagcttcatctaagatctgtctgat

SEQ ID NO: 3692088 - DNA, 25 bp, Homo sapien
ctggcacggaggtcagccacttgat

SEQ ID NO: 3692089 - DNA, 25 bp, Homo sapien
gaatctccctgcgttctttgcctgc

SEQ ID NO: 3692090 - DNA, 25 bp, Homo sapien
catggcttccagcttgcgagctgca

SEQ ID NO: 3692091 - DNA, 25 bp, Homo sapien
gcttgcgagctgcattttccacttt

SEQ ID NO: 3692092 - DNA, 25 bp, Homo sapien
gagcacatccagaccctgagatacc

SEQ ID NO: 3692093 - DNA, 25 bp, Homo sapien
tggccaccggtgaggatccttgtcc

SEQ ID NO: 3692094 - DNA, 25 bp, Homo sapien
agtcagagcagatatttccccaagg

SEQ ID NO: 3692095 - DNA, 25 bp, Homo sapien
tccaccatttggatctgcaagccag

SEQ ID NO: 3692096 - DNA, 25 bp, Homo sapien
tccccaagggaacgtagaatgtcat

SEQ ID NO: 3692097 - DNA, 25 bp, Homo sapien
tcagccaaagcacctcgaatctgct

SEQ ID NO: 3692098 - DNA, 25 bp, Homo sapien
ctgatcgtggctactcctggcaaga

SEQ ID NO: 3692099 - DNA, 25 bp, Homo sapien
catgattctgatcgtggctactcct

SEQ ID NO: 3692100 - DNA, 25 bp, Homo sapien
aagagggtctttaacatgattctga

SEQ ID NO: 3692101 - DNA, 25 bp, Homo sapien
taagagttcctttatgattctaaat

SEQ ID NO: 3692102 - DNA, 25 bp, Homo sapien
cctgtttggccaaggctcgagcctc

SEQ ID NO: 3692103 - DNA, 25 bp, Homo sapien
cacagcccggttggttttggtctgc

SEQ ID NO: 3692104 - DNA, 25 bp, Homo sapien
tcttgccctcaaggtgtacagctgc

SEQ ID NO: 3692105 - DNA, 25 bp, Homo sapien
gtacagctgctttggccggtctgct

SEQ ID NO: 3692106 - DNA, 25 bp, Homo sapien
taaggccccatcataacattagcca

SEQ ID NO: 3692107 - DNA, 25 bp, Homo sapien
cacacttggcgagaagatcttgccg

SEQ ID NO: 3692108 - DNA, 25 bp, Homo sapien
acattagccagacgatgcccttcgg

SEQ ID NO: 3692109 - DNA, 25 bp, Homo sapien
tgggctgtcagctggtccactcggt

SEQ ID NO: 3692110 - DNA, 25 bp, Homo sapien
taaggagtcttggagctgagatgca

SEQ ID NO: 3692111 - DNA, 25 bp, Homo sapien
tgagatgcaagtgctcgtgcctgag

SEQ ID NO: 3692112 - DNA, 25 bp, Homo sapien
gatgcaagtgctcgtgcctgaggac

SEQ ID NO: 3692113 - DNA, 25 bp, Homo sapien
agctgagatgcaagtgctcgtgcct

SEQ ID NO: 3692114 - DNA, 25 bp, Homo sapien
tggcctcctgcatccgagcttttag

SEQ ID NO: 3692115 - DNA, 25 bp, Homo sapien
tgtggtatcgctgaaaacatctgac

SEQ ID NO: 3692116 - DNA, 25 bp, Homo sapien
tcttccctgttaggcgcatcaggag

SEQ ID NO: 3692117 - DNA, 25 bp, Homo sapien
tgccaacagcttgatgggagttgtg

SEQ ID NO: 3692118 - DNA, 25 bp, Homo sapien
tcggccgtagcaccaagctttcctg

SEQ ID NO: 3692119 - DNA, 25 bp, Homo sapien
agttctcgggccgtcttcactgagg

SEQ ID NO: 3692120 - DNA, 25 bp, Homo sapien
tttattagcagtaccaaccgcagcc

SEQ ID NO: 3692121 - DNA, 25 bp, Homo sapien
ggtgtgagttctcgggccgtcttca

SEQ ID NO: 3692122 - DNA, 25 bp, Homo sapien
tttttcaacattatcgatccactgg

SEQ ID NO: 3692123 - DNA, 25 bp, Homo sapien
agtaagatacgagcagccgagacca

SEQ ID NO: 3692124 - DNA, 25 bp, Homo sapien
cgatccactggttcttcatggtctc

SEQ ID NO: 3692125 - DNA, 25 bp, Homo sapien
gttcctaagtaagatacgagcagcc

SEQ ID NO: 3692126 - DNA, 25 bp, Homo sapien
cagaaactccaaaacactgttatcc

SEQ ID NO: 3692127 - DNA, 25 bp, Homo sapien
acttctcatgagaaagtataacatc

SEQ ID NO: 3692128 - DNA, 25 bp, Homo sapien
tctcatgagaaagtataacatccag

SEQ ID NO: 3692129 - DNA, 25 bp, Homo sapien
agtataacatccagaattctcttct

SEQ ID NO: 3692130 - DNA, 25 bp, Homo sapien
gaacttgggatcctcggaattctcc

SEQ ID NO: 3692131 - DNA, 25 bp, Homo sapien
ttggcccgacgagcaatactggttg

SEQ ID NO: 3692132 - DNA, 25 bp, Homo sapien
ggttttgctcaattcatcagaggca

SEQ ID NO: 3692133 - DNA, 25 bp, Homo sapien
caacagagatttggtatcaatggct

SEQ ID NO: 3692134 - DNA, 25 bp, Homo sapien
ccccaaagcactgtctgtgcagcag

SEQ ID NO: 3692135 - DNA, 25 bp, Homo sapien
gctgccagtaaatatcacgggcagt

SEQ ID NO: 3692136 - DNA, 25 bp, Homo sapien
tatcacgggcagtgattgaagaagg

SEQ ID NO: 3692137 - DNA, 25 bp, Homo sapien
gtgggtcagtgccccaaagcactgt

SEQ ID NO: 3692138 - DNA, 25 bp, Homo sapien
acagctcccaggatccgatatcctg

SEQ ID NO: 3692139 - DNA, 25 bp, Homo sapien
ccaggatccgatatcctgagtccag

SEQ ID NO: 3692140 - DNA, 25 bp, Homo sapien
tgttcaaggtctggtggaggcggcg

SEQ ID NO: 3692141 - DNA, 25 bp, Homo sapien
gcggcgggaagtcaggctcctgagg

SEQ ID NO: 3692142 - DNA, 25 bp, Homo sapien
cagaggtggtttgggaggagcaagc

SEQ ID NO: 3692143 - DNA, 25 bp, Homo sapien
aggtggtttgggaggagcaagctca

SEQ ID NO: 3692144 - DNA, 25 bp, Homo sapien
gaggtggtttgggaggagcaagctc

SEQ ID NO: 3692145 - DNA, 25 bp, Homo sapien
ggtggtttgggaggagcaagctcat

SEQ ID NO: 3692146 - DNA, 25 bp, Homo sapien
gaccatttgcgagcttcatcatgga

SEQ ID NO: 3692147 - DNA, 25 bp, Homo sapien
gctggaccatttgcgagcttcatca

SEQ ID NO: 3692148 - DNA, 25 bp, Homo sapien
tggaccatttgcgagcttcatcatg

SEQ ID NO: 3692149 - DNA, 25 bp, Homo sapien
tgctggaccatttgcgagcttcatc

SEQ ID NO: 3692150 - DNA, 25 bp, Homo sapien
catggtccttcatcctttccgagaa

SEQ ID NO: 3692151 - DNA, 25 bp, Homo sapien
tatgctattggcaacacaggaacca

SEQ ID NO: 3692152 - DNA, 25 bp, Homo sapien
tctaatggacaaaggacaggaatcc

SEQ ID NO: 3692153 - DNA, 25 bp, Homo sapien
gcaagcttgaaggagaaaccatcag

SEQ ID NO: 3692154 - DNA, 25 bp, Homo sapien
ttctggccacaaatggcagagtggg

SEQ ID NO: 3692155 - DNA, 25 bp, Homo sapien
tcttgcacacttcaggagatagacc

SEQ ID NO: 3692156 - DNA, 25 bp, Homo sapien
tgccacatgcagttggagagatacc

SEQ ID NO: 3692157 - DNA, 25 bp, Homo sapien
cacacatggttcaagtagcttctga

SEQ ID NO: 3692158 - DNA, 25 bp, Homo sapien
aacctgactccaaagggtgacgatg

SEQ ID NO: 3692159 - DNA, 25 bp, Homo sapien
taaaaactgccacaatgaagccaaa

SEQ ID NO: 3692160 - DNA, 25 bp, Homo sapien
gagtcccacagtgtacaaagacaga

SEQ ID NO: 3692161 - DNA, 25 bp, Homo sapien
gacagataggttgacagacacacga

SEQ ID NO: 3692162 - DNA, 25 bp, Homo sapien
tttagtaaccaaagcctgcctagga

SEQ ID NO: 3692163 - DNA, 25 bp, Homo sapien
agaaacatgttctctaggagccttg

SEQ ID NO: 3692164 - DNA, 25 bp, Homo sapien
atacgacttgggaaactgggcttca

SEQ ID NO: 3692165 - DNA, 25 bp, Homo sapien
aaatagggatagtgttagtaagagc

SEQ ID NO: 3692166 - DNA, 25 bp, Homo sapien
acaacacctatacccacctcagcgg

SEQ ID NO: 3692167 - DNA, 25 bp, Homo sapien
agcatcggccgcatctgcctcagct

SEQ ID NO: 3692168 - DNA, 25 bp, Homo sapien
gcatctgcctcagctacaacaccta

SEQ ID NO: 3692169 - DNA, 25 bp, Homo sapien
tcagctacaacacctatacccacct

SEQ ID NO: 3692170 - DNA, 25 bp, Homo sapien
cagctcaggttcgtaatcgtcttcc

SEQ ID NO: 3692171 - DNA, 25 bp, Homo sapien
tagaccacttggtagcttcccgatg

SEQ ID NO: 3692172 - DNA, 25 bp, Homo sapien
tgcaaggactgagccgcggccagaa

SEQ ID NO: 3692173 - DNA, 25 bp, Homo sapien
gaccggctgattggatggcattaac

SEQ ID NO: 3692174 - DNA, 25 bp, Homo sapien
gagaccctgccctataaagctgcct

SEQ ID NO: 3692175 - DNA, 25 bp, Homo sapien
caggcaaagctcaatggtcaggcca

SEQ ID NO: 3692176 - DNA, 25 bp, Homo sapien
caaactagctttggttcattcccca

SEQ ID NO: 3692177 - DNA, 25 bp, Homo sapien
tcccactgagatacctggacaagca

SEQ ID NO: 3692178 - DNA, 25 bp, Homo sapien
ggctgctaacaaccccaagtcatag

SEQ ID NO: 3692179 - DNA, 25 bp, Homo sapien
caagtaactattctcagctgggtga

SEQ ID NO: 3692180 - DNA, 25 bp, Homo sapien
aaagaatgagacagggcactcgccc

SEQ ID NO: 3692181 - DNA, 25 bp, Homo sapien
tgttgcaaatagcagccaagcgttc

SEQ ID NO: 3692182 - DNA, 25 bp, Homo sapien
catccctccggaagggtgagaagag

SEQ ID NO: 3692183 - DNA, 25 bp, Homo sapien
gagaaaagggccgttcttgagtgat

SEQ ID NO: 3692184 - DNA, 25 bp, Homo sapien
cttagcatccctccggaagggtgag

SEQ ID NO: 3692185 - DNA, 25 bp, Homo sapien
ccgttcttgagtgatacggatagca

SEQ ID NO: 3692186 - DNA, 25 bp, Homo sapien
ccacgctctggccatgttaaggaag

SEQ ID NO: 3692187 - DNA, 25 bp, Homo sapien
tctgcccacgctctggccatgttaa

SEQ ID NO: 3692188 - DNA, 25 bp, Homo sapien
agagggaagcaaagatacagtgtga

SEQ ID NO: 3692189 - DNA, 25 bp, Homo sapien
agatacagtgtgagctctgcccacg

SEQ ID NO: 3692190 - DNA, 25 bp, Homo sapien
tggcaacctccttggccaaccgagt

SEQ ID NO: 3692191 - DNA, 25 bp, Homo sapien
aatccgtttatctgtgcactgcttg

SEQ ID NO: 3692192 - DNA, 25 bp, Homo sapien
cactgaatgagtgcccgcttggtac

SEQ ID NO: 3692193 - DNA, 25 bp, Homo sapien
tcatctgaggccttggcgatgtcct

SEQ ID NO: 3692194 - DNA, 25 bp, Homo sapien
tcatcactgatgttggtccggccca

SEQ ID NO: 3692195 - DNA, 25 bp, Homo sapien
gtgcttatggttgggattcgctcac

SEQ ID NO: 3692196 - DNA, 25 bp, Homo sapien
cctcatcactgatgttggtccggcc

SEQ ID NO: 3692197 - DNA, 25 bp, Homo sapien
gctgggtgcttatggttgggattcg

SEQ ID NO: 3692198 - DNA, 25 bp, Homo sapien
gggatgcagctaaccccactggtac

SEQ ID NO: 3692199 - DNA, 25 bp, Homo sapien
taaaataggtttcagccaggagtgg

SEQ ID NO: 3692200 - DNA, 25 bp, Homo sapien
gatctttgctcacttgtcaccttgg

SEQ ID NO: 3692201 - DNA, 25 bp, Homo sapien
gatgcaggcctgtctctaaaatagg

SEQ ID NO: 3692202 - DNA, 25 bp, Homo sapien
taacccagcgcagtgtaaatccagc

SEQ ID NO: 3692203 - DNA, 25 bp, Homo sapien
ctgttcgaattttgattgaagcagc

SEQ ID NO: 3692204 - DNA, 25 bp, Homo sapien
ctactggtaccagggagtctttcta

SEQ ID NO: 3692205 - DNA, 25 bp, Homo sapien
ttcacagactgcatgaggttctggg

SEQ ID NO: 3692206 - DNA, 25 bp, Homo sapien
ttctggaagagtgaatgggagccaa

SEQ ID NO: 3692207 - DNA, 25 bp, Homo sapien
gaaacccagtctgcctattgggata

SEQ ID NO: 3692208 - DNA, 25 bp, Homo sapien
ttagtagaggtttctgtgccagcca

SEQ ID NO: 3692209 - DNA, 25 bp, Homo sapien
gaagtccatgggctagaaacccagt

SEQ ID NO: 3692210 - DNA, 25 bp, Homo sapien
tgggaactaacacacagcgatgggt

SEQ ID NO: 3692211 - DNA, 25 bp, Homo sapien
ccactggaagaaccgggagagcaaa

SEQ ID NO: 3692212 - DNA, 25 bp, Homo sapien
tctcccttaggcaggaagtgtcctt

SEQ ID NO: 3692213 - DNA, 25 bp, Homo sapien
gaaagcctgagtgtaaaggaccaac

SEQ ID NO: 3692214 - DNA, 25 bp, Homo sapien
tgcttcactgtgtctcgagcactga

SEQ ID NO: 3692215 - DNA, 25 bp, Homo sapien
gagaaaagcacatccggcataaagt

SEQ ID NO: 3692216 - DNA, 25 bp, Homo sapien
tttagcggtgatgtctctaatcatc

SEQ ID NO: 3692217 - DNA, 25 bp, Homo sapien
cgagcactgatattggagaaaagca

SEQ ID NO: 3692218 - DNA, 25 bp, Homo sapien
tttgcatataacaaatcctagctta

SEQ ID NO: 3692219 - DNA, 25 bp, Homo sapien
ttgcatataacaaatcctagcttat

SEQ ID NO: 3692220 - DNA, 25 bp, Homo sapien
tatttgcatataacaaatcctagct

SEQ ID NO: 3692221 - DNA, 25 bp, Homo sapien
gcatataacaaatcctagcttataa

SEQ ID NO: 3692222 - DNA, 25 bp, Homo sapien
gttttatagccctggtggatccctg

SEQ ID NO: 3692223 - DNA, 25 bp, Homo sapien
gaaggcagcaccagtgaacatatgg

SEQ ID NO: 3692224 - DNA, 25 bp, Homo sapien
cttaagtggtgctacagaaggaccc

SEQ ID NO: 3692225 - DNA, 25 bp, Homo sapien
tatgaaaaatggacctgtgtggccg

SEQ ID NO: 3692226 - DNA, 25 bp, Homo sapien
gttcgtacctcaaaagaacaatgag

SEQ ID NO: 3692227 - DNA, 25 bp, Homo sapien
tattaatttgctagaatccagtaaa

SEQ ID NO: 3692228 - DNA, 25 bp, Homo sapien
caagtagaatgtacgccaggagctc

SEQ ID NO: 3692229 - DNA, 25 bp, Homo sapien
aacaatctatacctggactgtccag

SEQ ID NO: 3692230 - DNA, 25 bp, Homo sapien
ggtccttgcccagttattttgcctc

SEQ ID NO: 3692231 - DNA, 25 bp, Homo sapien
ggcagaaacaaaatcctcggtaaca

SEQ ID NO: 3692232 - DNA, 25 bp, Homo sapien
cccttttcatattgtgtgcttccca

SEQ ID NO: 3692233 - DNA, 25 bp, Homo sapien
gatgatactctaccgatcaccgtgg

SEQ ID NO: 3692234 - DNA, 25 bp, Homo sapien
gtcagatttaccatatagcgctcat

SEQ ID NO: 3692235 - DNA, 25 bp, Homo sapien
tttaaaggagtcaaatacgtcacga

SEQ ID NO: 3692236 - DNA, 25 bp, Homo sapien
gtctcacaggcaccgaccaaatgat

SEQ ID NO: 3692237 - DNA, 25 bp, Homo sapien
tacgtcacgaaagctggaaagttcc

SEQ ID NO: 3692238 - DNA, 25 bp, Homo sapien
tagttaagggtaattgagttttgca

SEQ ID NO: 3692239 - DNA, 25 bp, Homo sapien
aagggtaattgagttttgcaagctc

SEQ ID NO: 3692240 - DNA, 25 bp, Homo sapien
gagttttgcaagctcatttattagg

SEQ ID NO: 3692241 - DNA, 25 bp, Homo sapien
tttgcaagctcatttattaggcatt

SEQ ID NO: 3692242 - DNA, 25 bp, Homo sapien
tgtccagtttcatctcccctcttcc

SEQ ID NO: 3692243 - DNA, 25 bp, Homo sapien
ctccttgtccagtttcatctcccct

SEQ ID NO: 3692244 - DNA, 25 bp, Homo sapien
tccagtttcatctcccctcttccct

SEQ ID NO: 3692245 - DNA, 25 bp, Homo sapien
cttgtccagtttcatctcccctctt

SEQ ID NO: 3692246 - DNA, 25 bp, Homo sapien
caaaacccgggagtaggctgaatag

SEQ ID NO: 3692247 - DNA, 25 bp, Homo sapien
cttccgggctttctcgccagcaagg

SEQ ID NO: 3692248 - DNA, 25 bp, Homo sapien
gaatcactgactggcacaggtgttg

SEQ ID NO: 3692249 - DNA, 25 bp, Homo sapien
tccgatctgggctctaggagcgtct

SEQ ID NO: 3692250 - DNA, 25 bp, Homo sapien
ttcgcgctcccaccccactttggct

SEQ ID NO: 3692251 - DNA, 25 bp, Homo sapien
ctctgccatccactctctggtcccg

SEQ ID NO: 3692252 - DNA, 25 bp, Homo sapien
tttggctctacagcccacctctgcc

SEQ ID NO: 3692253 - DNA, 25 bp, Homo sapien
cacctctgccatccactctctggtc

SEQ ID NO: 3692254 - DNA, 25 bp, Homo sapien
ctttttgggcttcggctcctcctca

SEQ ID NO: 3692255 - DNA, 25 bp, Homo sapien
cttcagctttttgggcttcggctcc

SEQ ID NO: 3692256 - DNA, 25 bp, Homo sapien
cagctttttgggcttcggctcctcc

SEQ ID NO: 3692257 - DNA, 25 bp, Homo sapien
accttcagctttttgggcttcggct

SEQ ID NO: 3692258 - DNA, 25 bp, Homo sapien
ccctggcttgcttgcagcgccgtca

SEQ ID NO: 3692259 - DNA, 25 bp, Homo sapien
gtcctgcgtgttggccccaagctgg

SEQ ID NO: 3692260 - DNA, 25 bp, Homo sapien
aggggtcgcggccaagcgggcagct

SEQ ID NO: 3692261 - DNA, 25 bp, Homo sapien
gcaaccccacgtgggccctggcttg

SEQ ID NO: 3692262 - DNA, 25 bp, Homo sapien
ggcggggactcagccaaacggagag

SEQ ID NO: 3692263 - DNA, 25 bp, Homo sapien
gacaggcggggactcagccaaacgg

SEQ ID NO: 3692264 - DNA, 25 bp, Homo sapien
cggggactcagccaaacggagagaa

SEQ ID NO: 3692265 - DNA, 25 bp, Homo sapien
gggactcagccaaacggagagaacg

SEQ ID NO: 3692266 - DNA, 25 bp, Homo sapien
cagcctgggcttgctcgcaggtggc

SEQ ID NO: 3692267 - DNA, 25 bp, Homo sapien
cccctgcgggccacgactggcgaag

SEQ ID NO: 3692268 - DNA, 25 bp, Homo sapien
cacgactggcgaagggctgctggag

SEQ ID NO: 3692269 - DNA, 25 bp, Homo sapien
aggtggcgcggtcagccagctcggt

SEQ ID NO: 3692270 - DNA, 25 bp, Homo sapien
agacgctgctccggtccgaccctcc

SEQ ID NO: 3692271 - DNA, 25 bp, Homo sapien
gaaggtcaacgtgcccttccgcaac

SEQ ID NO: 3692272 - DNA, 25 bp, Homo sapien
cagaatgtgcacgaaaaggaaggtc

SEQ ID NO: 3692273 - DNA, 25 bp, Homo sapien
caacactctgaaaaatccccaagaa

SEQ ID NO: 3692274 - DNA, 25 bp, Homo sapien
agaattctgactttgccccagtgta

SEQ ID NO: 3692275 - DNA, 25 bp, Homo sapien
ccagtttggcgaaggaggtgcctta

SEQ ID NO: 3692276 - DNA, 25 bp, Homo sapien
taaagggcagagtagggaaagcaca

SEQ ID NO: 3692277 - DNA, 25 bp, Homo sapien
tatgttcttggtataaggtaggcac

SEQ ID NO: 3692278 - DNA, 25 bp, Homo sapien
taggtctgattcaaaagccgttgct

SEQ ID NO: 3692279 - DNA, 25 bp, Homo sapien
ttatcagtgccactctatgcaacaa

SEQ ID NO: 3692280 - DNA, 25 bp, Homo sapien
tgccactctatgcaacaaacattaa

SEQ ID NO: 3692281 - DNA, 25 bp, Homo sapien
tcagtgccactctatgcaacaaaca

SEQ ID NO: 3692282 - DNA, 25 bp, Homo sapien
tatatatagggtctagaaaaatgaa

SEQ ID NO: 3692283 - DNA, 25 bp, Homo sapien
tggacacaggaaagatattttgttt

SEQ ID NO: 3692284 - DNA, 25 bp, Homo sapien
gacacaggaaagatattttgttttc

SEQ ID NO: 3692285 - DNA, 25 bp, Homo sapien
ctttggacacaggaaagatattttg

SEQ ID NO: 3692286 - DNA, 25 bp, Homo sapien
tttggacacaggaaagatattttgt

SEQ ID NO: 3692287 - DNA, 25 bp, Homo sapien
tgctcttgtactagctgatagtggg

SEQ ID NO: 3692288 - DNA, 25 bp, Homo sapien
cagagtccacgacctccaagcttgg

SEQ ID NO: 3692289 - DNA, 25 bp, Homo sapien
acgacctccaagcttggtgctcttg

SEQ ID NO: 3692290 - DNA, 25 bp, Homo sapien
ggttctgtgataggccacccctctt

SEQ ID NO: 3692291 - DNA, 25 bp, Homo sapien
cctaaggttggaacttcaagaccag

SEQ ID NO: 3692292 - DNA, 25 bp, Homo sapien
aagtggaagtgtacccaggaggcca

SEQ ID NO: 3692293 - DNA, 25 bp, Homo sapien
gcaagacacatgagtcagaggtcct

SEQ ID NO: 3692294 - DNA, 25 bp, Homo sapien
cagaggtcctgaacgtgagatgaat

SEQ ID NO: 3692295 - DNA, 25 bp, Homo sapien
taaaaccctcagtattccatggaaa

SEQ ID NO: 3692296 - DNA, 25 bp, Homo sapien
gatcataagtgctattcaaagaatt

SEQ ID NO: 3692297 - DNA, 25 bp, Homo sapien
taaaaccagcagatcaatgtagaga

SEQ ID NO: 3692298 - DNA, 25 bp, Homo sapien
tgaaaatttaccaaaagcagacaaa

SEQ ID NO: 3692299 - DNA, 25 bp, Homo sapien
aagagtacaataacatttgactgat

SEQ ID NO: 3692300 - DNA, 25 bp, Homo sapien
taacatttgactgattgaactttat

SEQ ID NO: 3692301 - DNA, 25 bp, Homo sapien
ttagtaagaattcttagcaaaactc

SEQ ID NO: 3692302 - DNA, 25 bp, Homo sapien
ttctgtgagctacaaatctttgact

SEQ ID NO: 3692303 - DNA, 25 bp, Homo sapien
aaaatgcaggtttggcactgcaggt

SEQ ID NO: 3692304 - DNA, 25 bp, Homo sapien
aacatgcatacaaatctcgtggatc

SEQ ID NO: 3692305 - DNA, 25 bp, Homo sapien
atttctttatgttcccaggtctcac

SEQ ID NO: 3692306 - DNA, 25 bp, Homo sapien
ggtctcactaattgcttctggtctg

SEQ ID NO: 3692307 - DNA, 25 bp, Homo sapien
tagcgagatgactagcgggcgcggt

SEQ ID NO: 3692308 - DNA, 25 bp, Homo sapien
tggcgcgcgggctagcgagatgact

SEQ ID NO: 3692309 - DNA, 25 bp, Homo sapien
cgtcaccccgcagtttacagggcga

SEQ ID NO: 3692310 - DNA, 25 bp, Homo sapien
ttgagtcctagtaacagcgtcccgt

SEQ ID NO: 3692311 - DNA, 25 bp, Homo sapien
tgggccaccgcgtgtctcgtgccag

SEQ ID NO: 3692312 - DNA, 25 bp, Homo sapien
gagatcgtccccagacgccgtgggc

SEQ ID NO: 3692313 - DNA, 25 bp, Homo sapien
ctggagatcgtccccagacgccgtg

SEQ ID NO: 3692314 - DNA, 25 bp, Homo sapien
cgccgtgggccaccgcgtgtctcgt

SEQ ID NO: 3692315 - DNA, 25 bp, Homo sapien
gcgggcgctccgccccgtgcgaagg

SEQ ID NO: 3692316 - DNA, 25 bp, Homo sapien
aggcgggcgctccgccccgtgcgaa

SEQ ID NO: 3692317 - DNA, 25 bp, Homo sapien
cgggcgctccgccccgtgcgaaggg

SEQ ID NO: 3692318 - DNA, 25 bp, Homo sapien
gaaggcgggcgctccgccccgtgcg

SEQ ID NO: 3692319 - DNA, 25 bp, Homo sapien
acggcgcccgcgtccgatgctctac

SEQ ID NO: 3692320 - DNA, 25 bp, Homo sapien
tcaggcactcagcgactgggagcgc

SEQ ID NO: 3692321 - DNA, 25 bp, Homo sapien
gatgctctacgtccgctcgggcagc

SEQ ID NO: 3692322 - DNA, 25 bp, Homo sapien
gcactcagcgactgggagcgcgtcc

SEQ ID NO: 3692323 - DNA, 25 bp, Homo sapien
cacttatccaacaacactggtagga

SEQ ID NO: 3692324 - DNA, 25 bp, Homo sapien
tccaacaacactggtaggatgcata

SEQ ID NO: 3692325 - DNA, 25 bp, Homo sapien
tttacacttatccaacaacactggt

SEQ ID NO: 3692326 - DNA, 25 bp, Homo sapien
cactggtaggatgcatattagtatc

SEQ ID NO: 3692327 - DNA, 25 bp, Homo sapien
tagcaattgttttagccacaataaa

SEQ ID NO: 3692328 - DNA, 25 bp, Homo sapien
acaatacacccactagcactaggcc

SEQ ID NO: 3692329 - DNA, 25 bp, Homo sapien
gtacctggatttcccacaatacacc

SEQ ID NO: 3692330 - DNA, 25 bp, Homo sapien
tcttggttttatcaaacgcttcctg

SEQ ID NO: 3692331 - DNA, 25 bp, Homo sapien
atttggcaactatcagtaatatcaa

SEQ ID NO: 3692332 - DNA, 25 bp, Homo sapien
atcaatggactaacatgccaatatt

SEQ ID NO: 3692333 - DNA, 25 bp, Homo sapien
atatcaatggactaacatgccaata

SEQ ID NO: 3692334 - DNA, 25 bp, Homo sapien
tatcaatggactaacatgccaatat

SEQ ID NO: 3692335 - DNA, 25 bp, Homo sapien
ctttgtccactacagcagagatgtc

SEQ ID NO: 3692336 - DNA, 25 bp, Homo sapien
aaatctttgtccactacagcagaga

SEQ ID NO: 3692337 - DNA, 25 bp, Homo sapien
atctttgtccactacagcagagatg

SEQ ID NO: 3692338 - DNA, 25 bp, Homo sapien
tctttgtccactacagcagagatgt

SEQ ID NO: 3692339 - DNA, 25 bp, Homo sapien
ggaggccaagacgggtggatcacaa

SEQ ID NO: 3692340 - DNA, 25 bp, Homo sapien
ggcttacacctataatcccataact

SEQ ID NO: 3692341 - DNA, 25 bp, Homo sapien
ttacacctataatcccataactttg

SEQ ID NO: 3692342 - DNA, 25 bp, Homo sapien
aaaagacctaaggctaggcacagtg

SEQ ID NO: 3692343 - DNA, 25 bp, Homo sapien
cctttgacatttgagtttagccaaa

SEQ ID NO: 3692344 - DNA, 25 bp, Homo sapien
tattgtcccccataattacttatat

SEQ ID NO: 3692345 - DNA, 25 bp, Homo sapien
atatttctacatactatcaatgaac

SEQ ID NO: 3692346 - DNA, 25 bp, Homo sapien
agtttagccaaatatacttacaggg

SEQ ID NO: 3692347 - DNA, 25 bp, Homo sapien
tttgtcttcagccaagatttggtca

SEQ ID NO: 3692348 - DNA, 25 bp, Homo sapien
gtttgtcttcagccaagatttggtc

SEQ ID NO: 3692349 - DNA, 25 bp, Homo sapien
ttgtcttcagccaagatttggtcat

SEQ ID NO: 3692350 - DNA, 25 bp, Homo sapien
tgtcttcagccaagatttggtcatt

SEQ ID NO: 3692351 - DNA, 25 bp, Homo sapien
tcactaaaggcccataaaggtggta

SEQ ID NO: 3692352 - DNA, 25 bp, Homo sapien
caagcctatcaccagatttttcact

SEQ ID NO: 3692353 - DNA, 25 bp, Homo sapien
tgcaaagagcccacaacacacgaac

SEQ ID NO: 3692354 - DNA, 25 bp, Homo sapien
aggaccaagcctatcaccagatttt

SEQ ID NO: 3692355 - DNA, 25 bp, Homo sapien
agcctcctgatagctagtaccagag

SEQ ID NO: 3692356 - DNA, 25 bp, Homo sapien
cctagcctattctttctacaaggtt

SEQ ID NO: 3692357 - DNA, 25 bp, Homo sapien
tgatagctagtaccagaggtacaca

SEQ ID NO: 3692358 - DNA, 25 bp, Homo sapien
ttctacaaggttgactgaccccata

SEQ ID NO: 3692359 - DNA, 25 bp, Homo sapien
tggttcaatctcatgaccagagaag

SEQ ID NO: 3692360 - DNA, 25 bp, Homo sapien
taatggatcgtcattcaatggctgc

SEQ ID NO: 3692361 - DNA, 25 bp, Homo sapien
aatcactgacaatgatgactttggc

SEQ ID NO: 3692362 - DNA, 25 bp, Homo sapien
tgaacactgtaccacatagtttgcc

SEQ ID NO: 3692363 - DNA, 25 bp, Homo sapien
ccttttgaagttaatagtaccagca

SEQ ID NO: 3692364 - DNA, 25 bp, Homo sapien
taatccatccctgtgttctaaagtc

SEQ ID NO: 3692365 - DNA, 25 bp, Homo sapien
tgtttgcctgctgaaaaatcttcca

SEQ ID NO: 3692366 - DNA, 25 bp, Homo sapien
ggtatacctgcctttccatagcctc

SEQ ID NO: 3692367 - DNA, 25 bp, Homo sapien
tttcataagtacttcggtatcacca

SEQ ID NO: 3692368 - DNA, 25 bp, Homo sapien
cactcttaaaagcttcagggaatta

SEQ ID NO: 3692369 - DNA, 25 bp, Homo sapien
tactatgcatagttccaaaagcaac

SEQ ID NO: 3692370 - DNA, 25 bp, Homo sapien
ttttaaatgatccaactacagtgtc

SEQ ID NO: 3692371 - DNA, 25 bp, Homo sapien
ttgtcatccagaacaactactctca

SEQ ID NO: 3692372 - DNA, 25 bp, Homo sapien
tgtcatccagaacaactactctcat

SEQ ID NO: 3692373 - DNA, 25 bp, Homo sapien
aaagtggctaactgaagcttgcttc

SEQ ID NO: 3692374 - DNA, 25 bp, Homo sapien
tctacgtcagtaaatcagaacctac

SEQ ID NO: 3692375 - DNA, 25 bp, Homo sapien
tgaagcttgcttctacgtcagtaaa

SEQ ID NO: 3692376 - DNA, 25 bp, Homo sapien
gactaaagtggctaactgaagcttg

SEQ ID NO: 3692377 - DNA, 25 bp, Homo sapien
taagtctgttgattgcacctaccag

SEQ ID NO: 3692378 - DNA, 25 bp, Homo sapien
aatgataaagaccactcgcggtggc

SEQ ID NO: 3692379 - DNA, 25 bp, Homo sapien
cagggactgaaggatcgctttaggc

SEQ ID NO: 3692380 - DNA, 25 bp, Homo sapien
tataagaaccatactcctgccctgg

SEQ ID NO: 3692381 - DNA, 25 bp, Homo sapien
ttagttggaagggaatacaaaatga

SEQ ID NO: 3692382 - DNA, 25 bp, Homo sapien
ttactatagtagtcaacgtcagagc

SEQ ID NO: 3692383 - DNA, 25 bp, Homo sapien
cacgattaagaaagtaaactgagag

SEQ ID NO: 3692384 - DNA, 25 bp, Homo sapien
ctcttcagaaaagcacacgattaag

SEQ ID NO: 3692385 - DNA, 25 bp, Homo sapien
gaagagtataaagaagcaggctgac

SEQ ID NO: 3692386 - DNA, 25 bp, Homo sapien
tactagatgaatactggtcacaaat

SEQ ID NO: 3692387 - DNA, 25 bp, Homo sapien
taacccaagataattataaacacag

SEQ ID NO: 3692388 - DNA, 25 bp, Homo sapien
tatcacggatacttattttgcatac

SEQ ID NO: 3692389 - DNA, 25 bp, Homo sapien
ctgacaagatattgaaggcagcaaa

SEQ ID NO: 3692390 - DNA, 25 bp, Homo sapien
taaaatgtccgccaatctgttgtgc

SEQ ID NO: 3692391 - DNA, 25 bp, Homo sapien
tggtataagtgatcagatttcagga

SEQ ID NO: 3692392 - DNA, 25 bp, Homo sapien
cagatgactttagcgatttagatgg

SEQ ID NO: 3692393 - DNA, 25 bp, Homo sapien
tatcaattaaaagtcctagaggttc

SEQ ID NO: 3692394 - DNA, 25 bp, Homo sapien
ggtggactgtttcagagcggagacc

SEQ ID NO: 3692395 - DNA, 25 bp, Homo sapien
acctctgaggtcagtttggtaccct

SEQ ID NO: 3692396 - DNA, 25 bp, Homo sapien
gaccactggtatcaattaaaagtcc

SEQ ID NO: 3692397 - DNA, 25 bp, Homo sapien
ttaagctagaaacctctgcattaac

SEQ ID NO: 3692398 - DNA, 25 bp, Homo sapien
taaatttccggagaggtgagacctg

SEQ ID NO: 3692399 - DNA, 25 bp, Homo sapien
tcatggtaaacctagagcatcaccc

SEQ ID NO: 3692400 - DNA, 25 bp, Homo sapien
tatggaacttccgattctgggtagc

SEQ ID NO: 3692401 - DNA, 25 bp, Homo sapien
caatttccagttctacctaagggca

SEQ ID NO: 3692402 - DNA, 25 bp, Homo sapien
tctccttatctaacacgaaaaaata

SEQ ID NO: 3692403 - DNA, 25 bp, Homo sapien
gacttcatgattatacccttcaaca

SEQ ID NO: 3692404 - DNA, 25 bp, Homo sapien
aaaaaagacttcatgattataccct

SEQ ID NO: 3692405 - DNA, 25 bp, Homo sapien
tacccttcaacatagaatcatttat

SEQ ID NO: 3692406 - DNA, 25 bp, Homo sapien
gagccaccagcatgatattcgactt

SEQ ID NO: 3692407 - DNA, 25 bp, Homo sapien
ccagcatgatattcgactttgaatt

SEQ ID NO: 3692408 - DNA, 25 bp, Homo sapien
gccaccagcatgatattcgactttg

SEQ ID NO: 3692409 - DNA, 25 bp, Homo sapien
tagagccaccagcatgatattcgac

SEQ ID NO: 3692410 - DNA, 25 bp, Homo sapien
caattactcattggaagatatggga

SEQ ID NO: 3692411 - DNA, 25 bp, Homo sapien
tcttgtggcagaaacgtccttcgta

SEQ ID NO: 3692412 - DNA, 25 bp, Homo sapien
caagattaggttaagctggtaactc

SEQ ID NO: 3692413 - DNA, 25 bp, Homo sapien
ctcaaagagtatatgcctaatgggt

SEQ ID NO: 3692414 - DNA, 25 bp, Homo sapien
cgtgcctggccgtaaatcatccttt

SEQ ID NO: 3692415 - DNA, 25 bp, Homo sapien
ggaagttcataaagtgaccaccagg

SEQ ID NO: 3692416 - DNA, 25 bp, Homo sapien
gaccaatacaaagactcaggccact

SEQ ID NO: 3692417 - DNA, 25 bp, Homo sapien
gccacttcatattaatgaccgcctt

SEQ ID NO: 3692418 - DNA, 25 bp, Homo sapien
tgtttggacaagatatcaaccatac

SEQ ID NO: 3692419 - DNA, 25 bp, Homo sapien
tacatgctgtgcaggatattgagca

SEQ ID NO: 3692420 - DNA, 25 bp, Homo sapien
caagttatacccctttttagcagtg

SEQ ID NO: 3692421 - DNA, 25 bp, Homo sapien
gagtcacaatgccaacgtttttcca

SEQ ID NO: 3692422 - DNA, 25 bp, Homo sapien
tctcatacacagaaaaccctaaaga

SEQ ID NO: 3692423 - DNA, 25 bp, Homo sapien
tctagaagacccagccagaacaatt

SEQ ID NO: 3692424 - DNA, 25 bp, Homo sapien
cacattcagtaaagttgtaggacac

SEQ ID NO: 3692425 - DNA, 25 bp, Homo sapien
gacaaggatgtatactttcaccatt

SEQ ID NO: 3692426 - DNA, 25 bp, Homo sapien
caggaggtagagcacctctgcacct

SEQ ID NO: 3692427 - DNA, 25 bp, Homo sapien
aaagccagcacattaacaagataat

SEQ ID NO: 3692428 - DNA, 25 bp, Homo sapien
aaaaaagccagcacattaacaagat

SEQ ID NO: 3692429 - DNA, 25 bp, Homo sapien
ccaggaggtagagcacctctgcacc

SEQ ID NO: 3692430 - DNA, 25 bp, Homo sapien
tgctggggtactggcgtaagccaac

SEQ ID NO: 3692431 - DNA, 25 bp, Homo sapien
gcgaaactaatacgaattcttctca

SEQ ID NO: 3692432 - DNA, 25 bp, Homo sapien
gtaagccaacacaccctaccaaata

SEQ ID NO: 3692433 - DNA, 25 bp, Homo sapien
cctaccaaatattcaaagcgaaact

SEQ ID NO: 3692434 - DNA, 25 bp, Homo sapien
caaaatttaattacgaagatataga

SEQ ID NO: 3692435 - DNA, 25 bp, Homo sapien
ccaaaatttaattacgaagatatag

SEQ ID NO: 3692436 - DNA, 25 bp, Homo sapien
aattataagagactctcattaacaa

SEQ ID NO: 3692437 - DNA, 25 bp, Homo sapien
tagctagactaagaaaaaaaggaga

SEQ ID NO: 3692438 - DNA, 25 bp, Homo sapien
gaaacatgcttcaggatagagtaca

SEQ ID NO: 3692439 - DNA, 25 bp, Homo sapien
agaacattctatccagcggctgaag

SEQ ID NO: 3692440 - DNA, 25 bp, Homo sapien
tctacctagtaggaaacttcagcac

SEQ ID NO: 3692441 - DNA, 25 bp, Homo sapien
taaactgcactcttgaccaaatagg

SEQ ID NO: 3692442 - DNA, 25 bp, Homo sapien
ttctgacaaaattgacacaaattgc

SEQ ID NO: 3692443 - DNA, 25 bp, Homo sapien
tctgacaaaattgacacaaattgca

SEQ ID NO: 3692444 - DNA, 25 bp, Homo sapien
taaagattcatgtactcaccagcac

SEQ ID NO: 3692445 - DNA, 25 bp, Homo sapien
taggctgagatacgtgaaatgggca

SEQ ID NO: 3692446 - DNA, 25 bp, Homo sapien
gattaccaaacgtttcacttcacag

SEQ ID NO: 3692447 - DNA, 25 bp, Homo sapien
catgaaaaagggatataggctgaga

SEQ ID NO: 3692448 - DNA, 25 bp, Homo sapien
aatgggcaataaatttgccagccat

SEQ ID NO: 3692449 - DNA, 25 bp, Homo sapien
ttcttgactctattctgatgcccag

SEQ ID NO: 3692450 - DNA, 25 bp, Homo sapien
cataaaggataatgatagatgtcta

SEQ ID NO: 3692451 - DNA, 25 bp, Homo sapien
taatatgcagcatgctatatagaca

SEQ ID NO: 3692452 - DNA, 25 bp, Homo sapien
ggcactctaaagtctgtgtccttac

SEQ ID NO: 3692453 - DNA, 25 bp, Homo sapien
tatggaactgtcgtggcactctaaa

SEQ ID NO: 3692454 - DNA, 25 bp, Homo sapien
gtgtccttactagccaccttcaggg

SEQ ID NO: 3692455 - DNA, 25 bp, Homo sapien
tcattcctgttatggaactgtcgtg

SEQ ID NO: 3692456 - DNA, 25 bp, Homo sapien
tgtgggctgcaaccactgcctaatt

SEQ ID NO: 3692457 - DNA, 25 bp, Homo sapien
accactgcctaattagtcccaatga

SEQ ID NO: 3692458 - DNA, 25 bp, Homo sapien
accttctgtgttggtcttgctggga

SEQ ID NO: 3692459 - DNA, 25 bp, Homo sapien
tgcaaccactgcctaattagtccca

SEQ ID NO: 3692460 - DNA, 25 bp, Homo sapien
gggcatttaggccatgtacagctaa

SEQ ID NO: 3692461 - DNA, 25 bp, Homo sapien
tagacagttctgtagcaaccccatg

SEQ ID NO: 3692462 - DNA, 25 bp, Homo sapien
taggccatgtacagctaaggttaat

SEQ ID NO: 3692463 - DNA, 25 bp, Homo sapien
tacacactaattgaagcagtttctt

SEQ ID NO: 3692464 - DNA, 25 bp, Homo sapien
tttttgacatgtcgctggattcgtt

SEQ ID NO: 3692465 - DNA, 25 bp, Homo sapien
atgtcgctggattcgtttgccagca

SEQ ID NO: 3692466 - DNA, 25 bp, Homo sapien
accagccttacatgtcaagccgact

SEQ ID NO: 3692467 - DNA, 25 bp, Homo sapien
gccttacatgtcaagccgacttgat

SEQ ID NO: 3692468 - DNA, 25 bp, Homo sapien
agcaggttcctgctgcaaggaactt

SEQ ID NO: 3692469 - DNA, 25 bp, Homo sapien
ctaagcaggttcctgctgcaaggaa

SEQ ID NO: 3692470 - DNA, 25 bp, Homo sapien
gcaggacatcaagggctccagacat

SEQ ID NO: 3692471 - DNA, 25 bp, Homo sapien
tttgcaggacatcaagggctccaga

SEQ ID NO: 3692472 - DNA, 25 bp, Homo sapien
acggtagataggttaacgtaagatg

SEQ ID NO: 3692473 - DNA, 25 bp, Homo sapien
caaagcaacggtagataggttaacg

SEQ ID NO: 3692474 - DNA, 25 bp, Homo sapien
cggtagataggttaacgtaagatgc

SEQ ID NO: 3692475 - DNA, 25 bp, Homo sapien
acgcgcgcaaaccttcccgggctgg

SEQ ID NO: 3692476 - DNA, 25 bp, Homo sapien
gaaatggtgccacacgcgcgcaaac

SEQ ID NO: 3692477 - DNA, 25 bp, Homo sapien
aatggtgccacacgcgcgcaaacct

SEQ ID NO: 3692478 - DNA, 25 bp, Homo sapien
aaccttcccgggctggcatccacca

SEQ ID NO: 3692479 - DNA, 25 bp, Homo sapien
tgtggaccagccttccgtggcaggc

SEQ ID NO: 3692480 - DNA, 25 bp, Homo sapien
agcattgggagctgtggaccagcct

SEQ ID NO: 3692481 - DNA, 25 bp, Homo sapien
aatggcctgagcattgggagctgtg

SEQ ID NO: 3692482 - DNA, 25 bp, Homo sapien
ttgggagctgtggaccagccttccg

SEQ ID NO: 3692483 - DNA, 25 bp, Homo sapien
aagacctttcagtgtttgctcctac

SEQ ID NO: 3692484 - DNA, 25 bp, Homo sapien
taagacctttcagtgtttgctccta

SEQ ID NO: 3692485 - DNA, 25 bp, Homo sapien
ttaagacctttcagtgtttgctcct

SEQ ID NO: 3692486 - DNA, 25 bp, Homo sapien
gacaggttaccataaatgtgaagac

SEQ ID NO: 3692487 - DNA, 25 bp, Homo sapien
tgggcaggtgttctagtacccttca

SEQ ID NO: 3692488 - DNA, 25 bp, Homo sapien
taagagcagcttgtcaaattgtgca

SEQ ID NO: 3692489 - DNA, 25 bp, Homo sapien
tatgccatggcacacttatagaaag

SEQ ID NO: 3692490 - DNA, 25 bp, Homo sapien
caatgcatccaaaaaatgttgctgc

SEQ ID NO: 3692491 - DNA, 25 bp, Homo sapien
gcacaagttcctgttggctgctcat

SEQ ID NO: 3692492 - DNA, 25 bp, Homo sapien
tgttgtcaccagtgatgcatgcagc

SEQ ID NO: 3692493 - DNA, 25 bp, Homo sapien
caaatttatctatcccaatgcatcc

SEQ ID NO: 3692494 - DNA, 25 bp, Homo sapien
ttttataacaattggcagcagcaag

SEQ ID NO: 3692495 - DNA, 25 bp, Homo sapien
ttataacaattggcagcagcaagat

SEQ ID NO: 3692496 - DNA, 25 bp, Homo sapien
ttggcagcagcaagattagctatga

SEQ ID NO: 3692497 - DNA, 25 bp, Homo sapien
attggcagcagcaagattagctatg

SEQ ID NO: 3692498 - DNA, 25 bp, Homo sapien
tagaattctgcgcttggttggcaag

SEQ ID NO: 3692499 - DNA, 25 bp, Homo sapien
ggttggcaagcacctatgcataatg

SEQ ID NO: 3692500 - DNA, 25 bp, Homo sapien
cccagatttaagagatttgtcacga

SEQ ID NO: 3692501 - DNA, 25 bp, Homo sapien
cacagagctcaggtaatgaaatggc

SEQ ID NO: 3692502 - DNA, 25 bp, Homo sapien
ggaggtaaacattgtatgtggattt

SEQ ID NO: 3692503 - DNA, 25 bp, Homo sapien
gtgcccagaaccctcacattgttca

SEQ ID NO: 3692504 - DNA, 25 bp, Homo sapien
tatgtggattttcgaaggggtcagt

SEQ ID NO: 3692505 - DNA, 25 bp, Homo sapien
ggcttccaattaactactattagta

SEQ ID NO: 3692506 - DNA, 25 bp, Homo sapien
tccagaagcaaacattagtgacatt

SEQ ID NO: 3692507 - DNA, 25 bp, Homo sapien
ttcccttattccagaagcaaacatt

SEQ ID NO: 3692508 - DNA, 25 bp, Homo sapien
aactctaccctcacaaaaaccacat

SEQ ID NO: 3692509 - DNA, 25 bp, Homo sapien
gacatttgaaaactctaccctcaca

SEQ ID NO: 3692510 - DNA, 25 bp, Homo sapien
aaggacacctgcaaggacattgtaa

SEQ ID NO: 3692511 - DNA, 25 bp, Homo sapien
taatgaagttaatgaagcagtccag

SEQ ID NO: 3692512 - DNA, 25 bp, Homo sapien
tacgagttcaaaactgcacttggaa

SEQ ID NO: 3692513 - DNA, 25 bp, Homo sapien
ccaatataatgggagttctaacaca

SEQ ID NO: 3692514 - DNA, 25 bp, Homo sapien
aaagatgtctttgcttaactcaaat

SEQ ID NO: 3692515 - DNA, 25 bp, Homo sapien
cacagtttgggctttacttgaagtg

SEQ ID NO: 3692516 - DNA, 25 bp, Homo sapien
atgttaacacagtttgggctttact

SEQ ID NO: 3692517 - DNA, 25 bp, Homo sapien
ctttgcttaactcaaatgttaacac

SEQ ID NO: 3692518 - DNA, 25 bp, Homo sapien
taagcttcacgtaccatgtcatcca

SEQ ID NO: 3692519 - DNA, 25 bp, Homo sapien
ttaagcttcacgtaccatgtcatcc

SEQ ID NO: 3692520 - DNA, 25 bp, Homo sapien
acatggcatgtcagatatggttcgc

SEQ ID NO: 3692521 - DNA, 25 bp, Homo sapien
aaagactggcatgtttcaggattgc

SEQ ID NO: 3692522 - DNA, 25 bp, Homo sapien
tattgctggcactaagtctacaaca

SEQ ID NO: 3692523 - DNA, 25 bp, Homo sapien
tatggttcgctgatgccttgcttta

SEQ ID NO: 3692524 - DNA, 25 bp, Homo sapien
gctgggaagtttatcgacaatctaa

SEQ ID NO: 3692525 - DNA, 25 bp, Homo sapien
aaaggccaatgttcccaaaatgttg

SEQ ID NO: 3692526 - DNA, 25 bp, Homo sapien
gaaaaggtgttccttccattatcaa

SEQ ID NO: 3692527 - DNA, 25 bp, Homo sapien
cagggtgcaatgactgagctcagtt

SEQ ID NO: 3692528 - DNA, 25 bp, Homo sapien
gactggctgtgtaagtgctctaata

SEQ ID NO: 3692529 - DNA, 25 bp, Homo sapien
agactggctgtgtaagtgctctaat

SEQ ID NO: 3692530 - DNA, 25 bp, Homo sapien
tagactggctgtgtaagtgctctaa

SEQ ID NO: 3692531 - DNA, 25 bp, Homo sapien
actggctgtgtaagtgctctaataa

SEQ ID NO: 3692532 - DNA, 25 bp, Homo sapien
aaacagccaatttaatgagtgcgga

SEQ ID NO: 3692533 - DNA, 25 bp, Homo sapien
cagagttcacaatcagtagagtcca

SEQ ID NO: 3692534 - DNA, 25 bp, Homo sapien
tgctttgtcattaatcgcctcagga

SEQ ID NO: 3692535 - DNA, 25 bp, Homo sapien
aaatccatcggaggtaatcagactg

SEQ ID NO: 3692536 - DNA, 25 bp, Homo sapien
ttgttccagggtttgattagaaatc

SEQ ID NO: 3692537 - DNA, 25 bp, Homo sapien
gcagaggcatcatgtaactttattt

SEQ ID NO: 3692538 - DNA, 25 bp, Homo sapien
gattgatgcttttctagtaatatgc

SEQ ID NO: 3692539 - DNA, 25 bp, Homo sapien
tgtacctgaaagaccgattgatgct

SEQ ID NO: 3692540 - DNA, 25 bp, Homo sapien
taccaggacactactgaacccaagg

SEQ ID NO: 3692541 - DNA, 25 bp, Homo sapien
taaagttgggatcctaaagagctac

SEQ ID NO: 3692542 - DNA, 25 bp, Homo sapien
gctgggtgcaggtaaatacatcttc

SEQ ID NO: 3692543 - DNA, 25 bp, Homo sapien
gaatgatgtctaccctacagaagga

SEQ ID NO: 3692544 - DNA, 25 bp, Homo sapien
tgagcactctaaaatctggtgtgta

SEQ ID NO: 3692545 - DNA, 25 bp, Homo sapien
ggaagtagacattcatcatgaatga

SEQ ID NO: 3692546 - DNA, 25 bp, Homo sapien
ttgctaattaatgggcagtgtgtgc

SEQ ID NO: 3692547 - DNA, 25 bp, Homo sapien
cagatgattctatgttggtttgcta

SEQ ID NO: 3692548 - DNA, 25 bp, Homo sapien
tacattctaataagtcatagggcct

SEQ ID NO: 3692549 - DNA, 25 bp, Homo sapien
catagggcctaaatacaattataca

SEQ ID NO: 3692550 - DNA, 25 bp, Homo sapien
gctttgttgccatgcacctcctttc

SEQ ID NO: 3692551 - DNA, 25 bp, Homo sapien
ggtgtccttttcttactcactccaa

SEQ ID NO: 3692552 - DNA, 25 bp, Homo sapien
cacttttgacgtcatgttgccacag

SEQ ID NO: 3692553 - DNA, 25 bp, Homo sapien
tgattacccctagattctgagattg

SEQ ID NO: 3692554 - DNA, 25 bp, Homo sapien
taaggctgtgatccatttactcgat

SEQ ID NO: 3692555 - DNA, 25 bp, Homo sapien
tcaggtcaaggttcactttttggtc

SEQ ID NO: 3692556 - DNA, 25 bp, Homo sapien
caccttttagtacacacagaattgc

SEQ ID NO: 3692557 - DNA, 25 bp, Homo sapien
gtctgtatgcattgaaacatgtcca

SEQ ID NO: 3692558 - DNA, 25 bp, Homo sapien
tggaaaaacgctgactacaaactct

SEQ ID NO: 3692559 - DNA, 25 bp, Homo sapien
aaaggcagccaattcagttgacacc

SEQ ID NO: 3692560 - DNA, 25 bp, Homo sapien
gaacttagctgaggagaccttcaca

SEQ ID NO: 3692561 - DNA, 25 bp, Homo sapien
ggtcacattgcttcacaggatacgt

SEQ ID NO: 3692562 - DNA, 25 bp, Homo sapien
ggatacgtatagtaggcagcctcaa

SEQ ID NO: 3692563 - DNA, 25 bp, Homo sapien
taaagctcacatggttatgccactg

SEQ ID NO: 3692564 - DNA, 25 bp, Homo sapien
aatatttccaccagtggtgcatgag

SEQ ID NO: 3692565 - DNA, 25 bp, Homo sapien
gaactgccaatatttccaccagtgg

SEQ ID NO: 3692566 - DNA, 25 bp, Homo sapien
tccaccagtggtgcatgagggttcc

SEQ ID NO: 3692567 - DNA, 25 bp, Homo sapien
ttgaggaactgccaatatttccacc

SEQ ID NO: 3692568 - DNA, 25 bp, Homo sapien
tcatcctataactaaaagtttacac

SEQ ID NO: 3692569 - DNA, 25 bp, Homo sapien
tgtgtgtggtagaagacttaagagc

SEQ ID NO: 3692570 - DNA, 25 bp, Homo sapien
ctgttgacagactcctagggtattt

SEQ ID NO: 3692571 - DNA, 25 bp, Homo sapien
tatagttaccatgttttacattagg

SEQ ID NO: 3692572 - DNA, 25 bp, Homo sapien
tcatatttgtaatggcgtcctcctc

SEQ ID NO: 3692573 - DNA, 25 bp, Homo sapien
tagtagattattagcgaagccttca

SEQ ID NO: 3692574 - DNA, 25 bp, Homo sapien
taaaatgatatgtaagccccttggt

SEQ ID NO: 3692575 - DNA, 25 bp, Homo sapien
gaattatcttaactcagtaccctgg

SEQ ID NO: 3692576 - DNA, 25 bp, Homo sapien
tattattttgcttgtgctgaggagt

SEQ ID NO: 3692577 - DNA, 25 bp, Homo sapien
gtaagggcgatgtggtgcggagaag

SEQ ID NO: 3692578 - DNA, 25 bp, Homo sapien
ttcttaagtagtctgtctagcagtc

SEQ ID NO: 3692579 - DNA, 25 bp, Homo sapien
agatcttttcatcgtgatgttagtg

SEQ ID NO: 3692580 - DNA, 25 bp, Homo sapien
tttcttcttaagtagtctgtctagc

SEQ ID NO: 3692581 - DNA, 25 bp, Homo sapien
gggtatctgaccagcaatgtatcca

SEQ ID NO: 3692582 - DNA, 25 bp, Homo sapien
tgagccaccgcacccggctgagcct

SEQ ID NO: 3692583 - DNA, 25 bp, Homo sapien
tctctgcctccctggttcaagcgat

SEQ ID NO: 3692584 - DNA, 25 bp, Homo sapien
tggcaccatctaggcttactgcaat

SEQ ID NO: 3692585 - DNA, 25 bp, Homo sapien
ggcgtgtgctaccacgcccaggtaa

SEQ ID NO: 3692586 - DNA, 25 bp, Homo sapien
tacttgctacaacaccatcttctcc

SEQ ID NO: 3692587 - DNA, 25 bp, Homo sapien
gggccttttaatactacttgctaca

SEQ ID NO: 3692588 - DNA, 25 bp, Homo sapien
ctccctcttccccagtcagaatcat

SEQ ID NO: 3692589 - DNA, 25 bp, Homo sapien
atactacttgctacaacaccatctt

SEQ ID NO: 3692590 - DNA, 25 bp, Homo sapien
tcaaatgatgggctcaaacactatt

SEQ ID NO: 3692591 - DNA, 25 bp, Homo sapien
tgatgggctcaaacactattaaaga

SEQ ID NO: 3692592 - DNA, 25 bp, Homo sapien
catatagattatgactggaaccatg

SEQ ID NO: 3692593 - DNA, 25 bp, Homo sapien
gaaatattggttacatgctccaatg

SEQ ID NO: 3692594 - DNA, 25 bp, Homo sapien
taatcacagatccatgagtacaaat

SEQ ID NO: 3692595 - DNA, 25 bp, Homo sapien
caaagatcagctgactggcttgtcc

SEQ ID NO: 3692596 - DNA, 25 bp, Homo sapien
cacgtggtacctaaacatggacacc

SEQ ID NO: 3692597 - DNA, 25 bp, Homo sapien
tatcaggcagagacgaacggtattg

SEQ ID NO: 3692598 - DNA, 25 bp, Homo sapien
gggtgtcagtgcacagtttcggaac

SEQ ID NO: 3692599 - DNA, 25 bp, Homo sapien
aaatatcctgtagcactcttgtgag

SEQ ID NO: 3692600 - DNA, 25 bp, Homo sapien
gtttcggaactgtggctctacttga

SEQ ID NO: 3692601 - DNA, 25 bp, Homo sapien
tattccaagtggatactgctacctt

SEQ ID NO: 3692602 - DNA, 25 bp, Homo sapien
taggaaggcagcatagaggcactca

SEQ ID NO: 3692603 - DNA, 25 bp, Homo sapien
gaggcactcaaactcgtggtcccat

SEQ ID NO: 3692604 - DNA, 25 bp, Homo sapien
cacctagatcagatctgcctggaga

SEQ ID NO: 3692605 - DNA, 25 bp, Homo sapien
gcagaagatccctaccagcctcttt

SEQ ID NO: 3692606 - DNA, 25 bp, Homo sapien
cacccagctcattttaatctgttta

SEQ ID NO: 3692607 - DNA, 25 bp, Homo sapien
agctctgttgaacataaagtgtgag

SEQ ID NO: 3692608 - DNA, 25 bp, Homo sapien
tacataggagcatatttatatagct

SEQ ID NO: 3692609 - DNA, 25 bp, Homo sapien
gggctttaagggaatacataggagc

SEQ ID NO: 3692610 - DNA, 25 bp, Homo sapien
ccagccacagaatggtctacataaa

SEQ ID NO: 3692611 - DNA, 25 bp, Homo sapien
cacttggagaattaaaacgaacagt

SEQ ID NO: 3692612 - DNA, 25 bp, Homo sapien
tgtgcccctggagtctaaatctggc

SEQ ID NO: 3692613 - DNA, 25 bp, Homo sapien
aaataaaaacctcccatagctagca

SEQ ID NO: 3692614 - DNA, 25 bp, Homo sapien
taaacggtgcagatagattcaaagt

SEQ ID NO: 3692615 - DNA, 25 bp, Homo sapien
tttcagaagcatggtgagccacctt

SEQ ID NO: 3692616 - DNA, 25 bp, Homo sapien
tgtagaactggctaataaacggtgc

SEQ ID NO: 3692617 - DNA, 25 bp, Homo sapien
caacataaggcataactttcatcaa

SEQ ID NO: 3692618 - DNA, 25 bp, Homo sapien
ctgcaccggcaaaggcagaggcagc

SEQ ID NO: 3692619 - DNA, 25 bp, Homo sapien
gcaccggcaaaggcagaggcagcta

SEQ ID NO: 3692620 - DNA, 25 bp, Homo sapien
tgcaccggcaaaggcagaggcagct

SEQ ID NO: 3692621 - DNA, 25 bp, Homo sapien
caccggcaaaggcagaggcagctat

SEQ ID NO: 3692622 - DNA, 25 bp, Homo sapien
gaagatgccaaaatattcagaggcc

SEQ ID NO: 3692623 - DNA, 25 bp, Homo sapien
ccaaaatattcagaggccataagat

SEQ ID NO: 3692624 - DNA, 25 bp, Homo sapien
tgccaaaatattcagaggccataag

SEQ ID NO: 3692625 - DNA, 25 bp, Homo sapien
aaaatattcagaggccataagattc

SEQ ID NO: 3692626 - DNA, 25 bp, Homo sapien
gacaatgcagaaataagagaggcat

SEQ ID NO: 3692627 - DNA, 25 bp, Homo sapien
acaatgcagaaataagagaggcatt

SEQ ID NO: 3692628 - DNA, 25 bp, Homo sapien
ttcttataaccagcccttctcatcc

SEQ ID NO: 3692629 - DNA, 25 bp, Homo sapien
gccttttcctgtactgacgtatgtt

SEQ ID NO: 3692630 - DNA, 25 bp, Homo sapien
ccttttcctgtactgacgtatgtta

SEQ ID NO: 3692631 - DNA, 25 bp, Homo sapien
ataaccagcccttctcatccaaagg

SEQ ID NO: 3692632 - DNA, 25 bp, Homo sapien
ataaggatcatggacataccagttt

SEQ ID NO: 3692633 - DNA, 25 bp, Homo sapien
tgataaggatcatggacataccagt

SEQ ID NO: 3692634 - DNA, 25 bp, Homo sapien
tctgataaggatcatggacatacca

SEQ ID NO: 3692635 - DNA, 25 bp, Homo sapien
ctgataaggatcatggacataccag

SEQ ID NO: 3692636 - DNA, 25 bp, Homo sapien
aatcatcagttttataacatgttta

SEQ ID NO: 3692637 - DNA, 25 bp, Homo sapien
tagtagttgataaataaatcagagt

SEQ ID NO: 3692638 - DNA, 25 bp, Homo sapien
gatgaggaaaaggaatagtagttga

SEQ ID NO: 3692639 - DNA, 25 bp, Homo sapien
catcagttttataacatgtttaagc

SEQ ID NO: 3692640 - DNA, 25 bp, Homo sapien
aacacataataattagatggctttt

SEQ ID NO: 3692641 - DNA, 25 bp, Homo sapien
taataattagatggctttttaccag

SEQ ID NO: 3692642 - DNA, 25 bp, Homo sapien
gattatctccgtagtaattcaaact

SEQ ID NO: 3692643 - DNA, 25 bp, Homo sapien
tatattatggcatactatacaaata

SEQ ID NO: 3692644 - DNA, 25 bp, Homo sapien
ctaaccagcatttcccttctggaag

SEQ ID NO: 3692645 - DNA, 25 bp, Homo sapien
ctcctaaccagcatttcccttctgg

SEQ ID NO: 3692646 - DNA, 25 bp, Homo sapien
cctaaccagcatttcccttctggaa

SEQ ID NO: 3692647 - DNA, 25 bp, Homo sapien
tcctaaccagcatttcccttctgga

SEQ ID NO: 3692648 - DNA, 25 bp, Homo sapien
gctgtaactgtatgactgtatgtgt

SEQ ID NO: 3692649 - DNA, 25 bp, Homo sapien
tcccagtggcatctttgctgtaact

SEQ ID NO: 3692650 - DNA, 25 bp, Homo sapien
gtctattagtacatccttgagtcag

SEQ ID NO: 3692651 - DNA, 25 bp, Homo sapien
ggtgcatgccatccctgtagatcca

SEQ ID NO: 3692652 - DNA, 25 bp, Homo sapien
taaataccactgcatttggaccaga

SEQ ID NO: 3692653 - DNA, 25 bp, Homo sapien
gtaaataccactgcatttggaccag

SEQ ID NO: 3692654 - DNA, 25 bp, Homo sapien
aataccactgcatttggaccagact

SEQ ID NO: 3692655 - DNA, 25 bp, Homo sapien
aaataccactgcatttggaccagac

SEQ ID NO: 3692656 - DNA, 25 bp, Homo sapien
accccaaagtcagaataagcattag

SEQ ID NO: 3692657 - DNA, 25 bp, Homo sapien
taattaccctttcatgggaagaaca

SEQ ID NO: 3692658 - DNA, 25 bp, Homo sapien
tctgcagaggattggcaggatcttc

SEQ ID NO: 3692659 - DNA, 25 bp, Homo sapien
tagtagagatgttgggttgacttgc

SEQ ID NO: 3692660 - DNA, 25 bp, Homo sapien
taattctggcttatggcactgctag

SEQ ID NO: 3692661 - DNA, 25 bp, Homo sapien
gctggatctgacacctatgacataa

SEQ ID NO: 3692662 - DNA, 25 bp, Homo sapien
tggcactgctagctggatctgacac

SEQ ID NO: 3692663 - DNA, 25 bp, Homo sapien
gcttatggcactgctagctggatct

SEQ ID NO: 3692664 - DNA, 25 bp, Homo sapien
ctgagagggaagaagccagactgcc

SEQ ID NO: 3692665 - DNA, 25 bp, Homo sapien
gcccagagcatgaggctgcaggcct

SEQ ID NO: 3692666 - DNA, 25 bp, Homo sapien
cagagcatgaggctgcaggcctgag

SEQ ID NO: 3692667 - DNA, 25 bp, Homo sapien
aggcccccacaacaccagcttccag

SEQ ID NO: 3692668 - DNA, 25 bp, Homo sapien
gatgaacagcgtcagggagcagtgc

SEQ ID NO: 3692669 - DNA, 25 bp, Homo sapien
atgaacagcgtcagggagcagtgct

SEQ ID NO: 3692670 - DNA, 25 bp, Homo sapien
cagtggatgaacagcgtcagggagc

SEQ ID NO: 3692671 - DNA, 25 bp, Homo sapien
tggatgaacagcgtcagggagcagt

SEQ ID NO: 3692672 - DNA, 25 bp, Homo sapien
caattctggagattgagcctataga

SEQ ID NO: 3692673 - DNA, 25 bp, Homo sapien
tgatttggtagaatcccctgaaggg

SEQ ID NO: 3692674 - DNA, 25 bp, Homo sapien
aacccaggttgcgtgtagtctgcca

SEQ ID NO: 3692675 - DNA, 25 bp, Homo sapien
cctttactaagaattggcagttcaa

SEQ ID NO: 3692676 - DNA, 25 bp, Homo sapien
ttagaagccaaagacgcatcattct

SEQ ID NO: 3692677 - DNA, 25 bp, Homo sapien
gcatttaacttaaatcgtctttctg

SEQ ID NO: 3692678 - DNA, 25 bp, Homo sapien
agccaaagacgcatcattctcagta

SEQ ID NO: 3692679 - DNA, 25 bp, Homo sapien
catttaacttaaatcgtctttctgg

SEQ ID NO: 3692680 - DNA, 25 bp, Homo sapien
tactcactcaaaactaggtcaggcc

SEQ ID NO: 3692681 - DNA, 25 bp, Homo sapien
gctgcctcgcacatgtaggtactaa

SEQ ID NO: 3692682 - DNA, 25 bp, Homo sapien
ggcatccttgcacacaactgttaga

SEQ ID NO: 3692683 - DNA, 25 bp, Homo sapien
tgtagtctcttaaccagtctccagt

SEQ ID NO: 3692684 - DNA, 25 bp, Homo sapien
catatgcttcccgtctacagaatgc

SEQ ID NO: 3692685 - DNA, 25 bp, Homo sapien
tgcttcccgtctacagaatgctgaa

SEQ ID NO: 3692686 - DNA, 25 bp, Homo sapien
tatgcttcccgtctacagaatgctg

SEQ ID NO: 3692687 - DNA, 25 bp, Homo sapien
cttcccgtctacagaatgctgaata

SEQ ID NO: 3692688 - DNA, 25 bp, Homo sapien
aaagccttgctctctagcaaaagtg

SEQ ID NO: 3692689 - DNA, 25 bp, Homo sapien
aagccttgctctctagcaaaagtgg

SEQ ID NO: 3692690 - DNA, 25 bp, Homo sapien
cttgctctctagcaaaagtggcagc

SEQ ID NO: 3692691 - DNA, 25 bp, Homo sapien
gccttgctctctagcaaaagtggca

SEQ ID NO: 3692692 - DNA, 25 bp, Homo sapien
catctgtaggcgatgttgggtgcag

SEQ ID NO: 3692693 - DNA, 25 bp, Homo sapien
ggtgcagacctagcagagtgcgtca

SEQ ID NO: 3692694 - DNA, 25 bp, Homo sapien
tagcagagtgcgtcataacactgtg

SEQ ID NO: 3692695 - DNA, 25 bp, Homo sapien
cgatgttgggtgcagacctagcaga

SEQ ID NO: 3692696 - DNA, 25 bp, Homo sapien
aatcttttcacttctttcttctcat

SEQ ID NO: 3692697 - DNA, 25 bp, Homo sapien
ttaatcttttcacttctttcttctc

SEQ ID NO: 3692698 - DNA, 25 bp, Homo sapien
ttttcacttctttcttctcattcat

SEQ ID NO: 3692699 - DNA, 25 bp, Homo sapien
tcttttcacttctttcttctcattc

SEQ ID NO: 3692700 - DNA, 25 bp, Homo sapien
tctttacctccttgctttgtatgaa

SEQ ID NO: 3692701 - DNA, 25 bp, Homo sapien
cagcatatagttagacctcagtttt

SEQ ID NO: 3692702 - DNA, 25 bp, Homo sapien
taatgcagttgaattaatatctgcc

SEQ ID NO: 3692703 - DNA, 25 bp, Homo sapien
tcatattatttactccagattaaca

SEQ ID NO: 3692704 - DNA, 25 bp, Homo sapien
aagtaaatagaatagcacagtgact

SEQ ID NO: 3692705 - DNA, 25 bp, Homo sapien
tagaggtttacagaacataattatg

SEQ ID NO: 3692706 - DNA, 25 bp, Homo sapien
gactaagtatcagcaaatatccagg

SEQ ID NO: 3692707 - DNA, 25 bp, Homo sapien
taaagtaaactccaagaactataca

SEQ ID NO: 3692708 - DNA, 25 bp, Homo sapien
gtctttttggctatctctttaatgt

SEQ ID NO: 3692709 - DNA, 25 bp, Homo sapien
tgtgtctttttggctatctctttaa

SEQ ID NO: 3692710 - DNA, 25 bp, Homo sapien
gtgaagatcacgattcgctgcctct

SEQ ID NO: 3692711 - DNA, 25 bp, Homo sapien
aagatcacgattcgctgcctctttg

SEQ ID NO: 3692712 - DNA, 25 bp, Homo sapien
ttgggtgaagatcacgattcgctgc

SEQ ID NO: 3692713 - DNA, 25 bp, Homo sapien
cccttgggtgaagatcacgattcgc

SEQ ID NO: 3692714 - DNA, 25 bp, Homo sapien
tagatgaaattcctgttttatgagt

SEQ ID NO: 3692715 - DNA, 25 bp, Homo sapien
agatgaaattcctgttttatgagtg

SEQ ID NO: 3692716 - DNA, 25 bp, Homo sapien
cactttatctaccactcactgaact

SEQ ID NO: 3692717 - DNA, 25 bp, Homo sapien
caacacaaatgtacttcatattcac

SEQ ID NO: 3692718 - DNA, 25 bp, Homo sapien
caacatctctgaatcttgtttgaaa

SEQ ID NO: 3692719 - DNA, 25 bp, Homo sapien
gatatcaatgtatcttgggaaagcc

SEQ ID NO: 3692720 - DNA, 25 bp, Homo sapien
tcccagggctcaaaactgcattaac

SEQ ID NO: 3692721 - DNA, 25 bp, Homo sapien
gcactgaatagcttatcccagggct

SEQ ID NO: 3692722 - DNA, 25 bp, Homo sapien
tgaacagattctctatccatcttgt

SEQ ID NO: 3692723 - DNA, 25 bp, Homo sapien
caataaggaagacacttgtacagta

SEQ ID NO: 3692724 - DNA, 25 bp, Homo sapien
cccagagcctggcgaatgattgcat

SEQ ID NO: 3692725 - DNA, 25 bp, Homo sapien
cacccagagcctggcgaatgattgc

SEQ ID NO: 3692726 - DNA, 25 bp, Homo sapien
ccagagcctggcgaatgattgcatc

SEQ ID NO: 3692727 - DNA, 25 bp, Homo sapien
acccagagcctggcgaatgattgca

SEQ ID NO: 3692728 - DNA, 25 bp, Homo sapien
tgccccacaggccaagcatttttat

SEQ ID NO: 3692729 - DNA, 25 bp, Homo sapien
ctgatccatattcaagaggaaagga

SEQ ID NO: 3692730 - DNA, 25 bp, Homo sapien
cccacaggccaagcatttttatgtt

SEQ ID NO: 3692731 - DNA, 25 bp, Homo sapien
gctgatccatattcaagaggaaagg

SEQ ID NO: 3692732 - DNA, 25 bp, Homo sapien
cctgaaactcaggagaggaaatact

SEQ ID NO: 3692733 - DNA, 25 bp, Homo sapien
taaggcatccataaggcagagtggt

SEQ ID NO: 3692734 - DNA, 25 bp, Homo sapien
gttcagaacccattaatgagtaggg

SEQ ID NO: 3692735 - DNA, 25 bp, Homo sapien
ccaagacaccaagtataaggcatcc

SEQ ID NO: 3692736 - DNA, 25 bp, Homo sapien
gagaatctgggcaatggactactac

SEQ ID NO: 3692737 - DNA, 25 bp, Homo sapien
caaattcctgtgtcgggtaagaggc

SEQ ID NO: 3692738 - DNA, 25 bp, Homo sapien
caaaaattcgagtttgggactgtca

SEQ ID NO: 3692739 - DNA, 25 bp, Homo sapien
caaaatttgacaagagaaggtctca

SEQ ID NO: 3692740 - DNA, 25 bp, Homo sapien
gaaatatgaaccttgctagggatcc

SEQ ID NO: 3692741 - DNA, 25 bp, Homo sapien
gagggcctaaggtctaaatgcttta

SEQ ID NO: 3692742 - DNA, 25 bp, Homo sapien
ccaaggccatggattatgttccaca

SEQ ID NO: 3692743 - DNA, 25 bp, Homo sapien
catataactgttgcaggaaactacc

SEQ ID NO: 3692744 - DNA, 25 bp, Homo sapien
actgctctaactccaaggtgttggt

SEQ ID NO: 3692745 - DNA, 25 bp, Homo sapien
gaagaccaatataactccttttaca

SEQ ID NO: 3692746 - DNA, 25 bp, Homo sapien
aagtgacactggctatctaagagag

SEQ ID NO: 3692747 - DNA, 25 bp, Homo sapien
cagctcacacaatatcttggttgta

SEQ ID NO: 3692748 - DNA, 25 bp, Homo sapien
tctcgaatttctaagatgtaccagc

SEQ ID NO: 3692749 - DNA, 25 bp, Homo sapien
gatcaccagtgtgatgtgaagtcat

SEQ ID NO: 3692750 - DNA, 25 bp, Homo sapien
tcacaaaccagttcatatgtcactt

SEQ ID NO: 3692751 - DNA, 25 bp, Homo sapien
caacatttatcccactagtagtggg

SEQ ID NO: 3692752 - DNA, 25 bp, Homo sapien
gaagtgggaaaccttacagccatta

SEQ ID NO: 3692753 - DNA, 25 bp, Homo sapien
caatgtgctactttgctcttcaata

SEQ ID NO: 3692754 - DNA, 25 bp, Homo sapien
gatctccactgtaaggaatctgtag

SEQ ID NO: 3692755 - DNA, 25 bp, Homo sapien
tattctgcctgtggttcacagggct

SEQ ID NO: 3692756 - DNA, 25 bp, Homo sapien
ctgagagagagccactttcaaggcc

SEQ ID NO: 3692757 - DNA, 25 bp, Homo sapien
gagagagccactttcaaggccctgc

SEQ ID NO: 3692758 - DNA, 25 bp, Homo sapien
tgagagagagccactttcaaggccc

SEQ ID NO: 3692759 - DNA, 25 bp, Homo sapien
gagagccactttcaaggccctgcct

SEQ ID NO: 3692760 - DNA, 25 bp, Homo sapien
ggtaaccaggctgtgtaggtcccag

SEQ ID NO: 3692761 - DNA, 25 bp, Homo sapien
gcttcagctttagccagtccctgag

SEQ ID NO: 3692762 - DNA, 25 bp, Homo sapien
ctgggtaaccaggctgtgtaggtcc

SEQ ID NO: 3692763 - DNA, 25 bp, Homo sapien
cttcagctttagccagtccctgagg

SEQ ID NO: 3692764 - DNA, 25 bp, Homo sapien
cacaaggaatgctctgcctaaagca

SEQ ID NO: 3692765 - DNA, 25 bp, Homo sapien
taaaagccacatatggtgttggcac

SEQ ID NO: 3692766 - DNA, 25 bp, Homo sapien
gagtctcttaaaagccacatatggt

SEQ ID NO: 3692767 - DNA, 25 bp, Homo sapien
aagcaagagtcctgccgagtctctt

SEQ ID NO: 3692768 - DNA, 25 bp, Homo sapien
ggctgaactggcacaatttgcatag

SEQ ID NO: 3692769 - DNA, 25 bp, Homo sapien
cattaatggacagccaactgcttct

SEQ ID NO: 3692770 - DNA, 25 bp, Homo sapien
tgcatgatgctctaggtggttccca

SEQ ID NO: 3692771 - DNA, 25 bp, Homo sapien
taatatcgaaaaaatgcagggctga

SEQ ID NO: 3692772 - DNA, 25 bp, Homo sapien
tctaagctagcaattaagtgtattt

SEQ ID NO: 3692773 - DNA, 25 bp, Homo sapien
gacagtagaatttaaaagacttcta

SEQ ID NO: 3692774 - DNA, 25 bp, Homo sapien
gctgacagtagaatttaaaagactt

SEQ ID NO: 3692775 - DNA, 25 bp, Homo sapien
cccggctgacagtagaatttaaaag

SEQ ID NO: 3692776 - DNA, 25 bp, Homo sapien
gggtaaggttcccagagcggatgaa

SEQ ID NO: 3692777 - DNA, 25 bp, Homo sapien
gtgaaggggtgccagtcgctgcctg

SEQ ID NO: 3692778 - DNA, 25 bp, Homo sapien
gaaggggtgccagtcgctgcctgct

SEQ ID NO: 3692779 - DNA, 25 bp, Homo sapien
tgtccatctctgtccctttcatgtt

SEQ ID NO: 3692780 - DNA, 25 bp, Homo sapien
ccagggtcatcaatgaaatcgtcct

SEQ ID NO: 3692781 - DNA, 25 bp, Homo sapien
tgcacaggcatgttgcgagtgtcat

SEQ ID NO: 3692782 - DNA, 25 bp, Homo sapien
ggcatgttgcgagtgtcattcctca

SEQ ID NO: 3692783 - DNA, 25 bp, Homo sapien
tgtcattcctcagcccagggtcatc

SEQ ID NO: 3692784 - DNA, 25 bp, Homo sapien
tcacatgtcccaggtctatcatctc

SEQ ID NO: 3692785 - DNA, 25 bp, Homo sapien
gcttcctggtcgttctcctgcttga

SEQ ID NO: 3692786 - DNA, 25 bp, Homo sapien
tgcttgatgagtaccacctctctgt

SEQ ID NO: 3692787 - DNA, 25 bp, Homo sapien
gagttgcaccctttcggacttgcag

SEQ ID NO: 3692788 - DNA, 25 bp, Homo sapien
tacatcattgtttgtggtaaaatct

SEQ ID NO: 3692789 - DNA, 25 bp, Homo sapien
cctctacatcattgtttgtggtaaa

SEQ ID NO: 3692790 - DNA, 25 bp, Homo sapien
ctctacatcattgtttgtggtaaaa

SEQ ID NO: 3692791 - DNA, 25 bp, Homo sapien
ctacatcattgtttgtggtaaaatc

SEQ ID NO: 3692792 - DNA, 25 bp, Homo sapien
ttaataggtgccatacagaaaataa

SEQ ID NO: 3692793 - DNA, 25 bp, Homo sapien
caggcttgccttgaaatcgtgagct

SEQ ID NO: 3692794 - DNA, 25 bp, Homo sapien
taaaacaggatgatatgatgaagtg

SEQ ID NO: 3692795 - DNA, 25 bp, Homo sapien
tgagatattaataggtgccatacag

SEQ ID NO: 3692796 - DNA, 25 bp, Homo sapien
tgcatctggcttaaactttttttct

SEQ ID NO: 3692797 - DNA, 25 bp, Homo sapien
ttgagacggagtctcattctattgc

SEQ ID NO: 3692798 - DNA, 25 bp, Homo sapien
cactgcatctggcttaaactttttt

SEQ ID NO: 3692799 - DNA, 25 bp, Homo sapien
gccactgcatctggcttaaactttt

SEQ ID NO: 3692800 - DNA, 25 bp, Homo sapien
ccagtaacatctgaagctccttcat

SEQ ID NO: 3692801 - DNA, 25 bp, Homo sapien
tttctggtcttgatccaagacagca

SEQ ID NO: 3692802 - DNA, 25 bp, Homo sapien
atctccagctccattggtatcaata

SEQ ID NO: 3692803 - DNA, 25 bp, Homo sapien
tcttgatccaagacagcaaaagcag

SEQ ID NO: 3692804 - DNA, 25 bp, Homo sapien
tctccagctccattggtatcaataa

SEQ ID NO: 3692805 - DNA, 25 bp, Homo sapien
gatcaatctaagtcatcaagccaag

SEQ ID NO: 3692806 - DNA, 25 bp, Homo sapien
tgttaacatttaagcctgaagggct

SEQ ID NO: 3692807 - DNA, 25 bp, Homo sapien
tatctgtgaggaagcgaaagctttc

SEQ ID NO: 3692808 - DNA, 25 bp, Homo sapien
aacctggtctggcttgatgttaaga

SEQ ID NO: 3692809 - DNA, 25 bp, Homo sapien
cacctagtatcggtagcattacaga

SEQ ID NO: 3692810 - DNA, 25 bp, Homo sapien
gaatctgttgttgccgggccaggaa

SEQ ID NO: 3692811 - DNA, 25 bp, Homo sapien
tcagtatcctaagaatggcctctcc

SEQ ID NO: 3692812 - DNA, 25 bp, Homo sapien
cagaggtagtggctatttaggtcac

SEQ ID NO: 3692813 - DNA, 25 bp, Homo sapien
tgcaaagggctgtcacattggtgac

SEQ ID NO: 3692814 - DNA, 25 bp, Homo sapien
ctccaactcgtttgtgtgacctcat

SEQ ID NO: 3692815 - DNA, 25 bp, Homo sapien
caatggagggtcactcaactgagct

SEQ ID NO: 3692816 - DNA, 25 bp, Homo sapien
gatgccggacaagaactcgggtgcc

SEQ ID NO: 3692817 - DNA, 25 bp, Homo sapien
gattaacacaggctggtattgacag

SEQ ID NO: 3692818 - DNA, 25 bp, Homo sapien
tttcactgggaacaatgacagtgcc

SEQ ID NO: 3692819 - DNA, 25 bp, Homo sapien
tccatttgttactatggcagtgaca

SEQ ID NO: 3692820 - DNA, 25 bp, Homo sapien
gagagttgtatataagtgcctacac

SEQ ID NO: 3692821 - DNA, 25 bp, Homo sapien
tcttggtcaccatcaagtaaatcct

SEQ ID NO: 3692822 - DNA, 25 bp, Homo sapien
taaatcctcagcagatgtgggtcat

SEQ ID NO: 3692823 - DNA, 25 bp, Homo sapien
gagaagatgtcccattagagcagaa

SEQ ID NO: 3692824 - DNA, 25 bp, Homo sapien
acattgggttgtttagcagtgggca

SEQ ID NO: 3692825 - DNA, 25 bp, Homo sapien
tgctgcctgttaggagcaagcctcc

SEQ ID NO: 3692826 - DNA, 25 bp, Homo sapien
ggttgcacaacctcctgactggtgg

SEQ ID NO: 3692827 - DNA, 25 bp, Homo sapien
tcaatgcaatgttcaccctggatat

SEQ ID NO: 3692828 - DNA, 25 bp, Homo sapien
caagcctccagagtgggtatagctc

SEQ ID NO: 3692829 - DNA, 25 bp, Homo sapien
tataaacgaaggaatggcagcaaag

SEQ ID NO: 3692830 - DNA, 25 bp, Homo sapien
tggcagcaaagatcctaggtaggac

SEQ ID NO: 3692831 - DNA, 25 bp, Homo sapien
tgaattaaacccttcccactggaca

SEQ ID NO: 3692832 - DNA, 25 bp, Homo sapien
taggacagggcaaggttctattatc

SEQ ID NO: 3692833 - DNA, 25 bp, Homo sapien
catatgttgatagggtctcaaaatc

SEQ ID NO: 3692834 - DNA, 25 bp, Homo sapien
ccagggaagcatatgttgatagggt

SEQ ID NO: 3692835 - DNA, 25 bp, Homo sapien
ggaagcatatgttgatagggtctca

SEQ ID NO: 3692836 - DNA, 25 bp, Homo sapien
ccagccagggaagcatatgttgata

SEQ ID NO: 3692837 - DNA, 25 bp, Homo sapien
ttatgatgcttgctgcatagtggcc

SEQ ID NO: 3692838 - DNA, 25 bp, Homo sapien
cacggatacattcagtcagaggctt

SEQ ID NO: 3692839 - DNA, 25 bp, Homo sapien
tcagagaccagttgagacagaaaac

SEQ ID NO: 3692840 - DNA, 25 bp, Homo sapien
ggtgcagccagtccgtctaattatg

SEQ ID NO: 3692841 - DNA, 25 bp, Homo sapien
gattcagcattattatagtaggaaa

SEQ ID NO: 3692842 - DNA, 25 bp, Homo sapien
ccctctaaattaagattcagcatta

SEQ ID NO: 3692843 - DNA, 25 bp, Homo sapien
ttgtaccctctaaattaagattcag

SEQ ID NO: 3692844 - DNA, 25 bp, Homo sapien
ctcaggaagcaattagggcagtgtc

SEQ ID NO: 3692845 - DNA, 25 bp, Homo sapien
aaagattctacaagcattaccatac

SEQ ID NO: 3692846 - DNA, 25 bp, Homo sapien
ttaagtggcactatcaaactatgga

SEQ ID NO: 3692847 - DNA, 25 bp, Homo sapien
taataaagattctacaagcattacc

SEQ ID NO: 3692848 - DNA, 25 bp, Homo sapien
ctatcaaactatggaaataaacatc

SEQ ID NO: 3692849 - DNA, 25 bp, Homo sapien
gagattatttggcataattgacaag

SEQ ID NO: 3692850 - DNA, 25 bp, Homo sapien
gactatcaggtgtatatgtggtata

SEQ ID NO: 3692851 - DNA, 25 bp, Homo sapien
taaatacacacgaatttacaaagta

SEQ ID NO: 3692852 - DNA, 25 bp, Homo sapien
catgtttgagtgcacattaaagaga

SEQ ID NO: 3692853 - DNA, 25 bp, Homo sapien
tattgtggtacaacttaaatttggc

SEQ ID NO: 3692854 - DNA, 25 bp, Homo sapien
tttttgtttgtgtccaattacagag

SEQ ID NO: 3692855 - DNA, 25 bp, Homo sapien
cagagttccataagactatgatttg

SEQ ID NO: 3692856 - DNA, 25 bp, Homo sapien
aaattcctatatgacaagtttttgt

SEQ ID NO: 3692857 - DNA, 25 bp, Homo sapien
attggtctctgatactaagttattc

SEQ ID NO: 3692858 - DNA, 25 bp, Homo sapien
aaagtgatttattggtctctgatac

SEQ ID NO: 3692859 - DNA, 25 bp, Homo sapien
caaattgggtgtcatttcagggccc

SEQ ID NO: 3692860 - DNA, 25 bp, Homo sapien
gggcccagtattaaataatgatctt

SEQ ID NO: 3692861 - DNA, 25 bp, Homo sapien
tcccgagtagctataagtgcaaacc

SEQ ID NO: 3692862 - DNA, 25 bp, Homo sapien
cccgagtagctataagtgcaaacca

SEQ ID NO: 3692863 - DNA, 25 bp, Homo sapien
gagtagctataagtgcaaaccacca

SEQ ID NO: 3692864 - DNA, 25 bp, Homo sapien
cgagtagctataagtgcaaaccacc

SEQ ID NO: 3692865 - DNA, 25 bp, Homo sapien
aatcctattacgatgcggcatatca

SEQ ID NO: 3692866 - DNA, 25 bp, Homo sapien
cttaagtgggctatttcctgagcat

SEQ ID NO: 3692867 - DNA, 25 bp, Homo sapien
tgtgtgtgtgacgtaaaacctaaat

SEQ ID NO: 3692868 - DNA, 25 bp, Homo sapien
tcagttcagaaagtcccctcacgac

SEQ ID NO: 3692869 - DNA, 25 bp, Homo sapien
gaactggaatcagtatgtcacagat

SEQ ID NO: 3692870 - DNA, 25 bp, Homo sapien
tgatccaacgatcccacttcttggg

SEQ ID NO: 3692871 - DNA, 25 bp, Homo sapien
agaatgtaatctatatacacaattg

SEQ ID NO: 3692872 - DNA, 25 bp, Homo sapien
cagtatgtcacagatatgtctgttc

SEQ ID NO: 3692873 - DNA, 25 bp, Homo sapien
tctgaggttacagtgcgttgtgtca

SEQ ID NO: 3692874 - DNA, 25 bp, Homo sapien
tgaggttacagtgcgttgtgtcaca

SEQ ID NO: 3692875 - DNA, 25 bp, Homo sapien
gttacagtgcgttgtgtcacatcac

SEQ ID NO: 3692876 - DNA, 25 bp, Homo sapien
aggtcaaggtgggaagatgagtttg

SEQ ID NO: 3692877 - DNA, 25 bp, Homo sapien
gaactctacttcagaccaaataaac

SEQ ID NO: 3692878 - DNA, 25 bp, Homo sapien
gaacattctacctattctttaagtc

SEQ ID NO: 3692879 - DNA, 25 bp, Homo sapien
ggaagcattgtacttgaactctact

SEQ ID NO: 3692880 - DNA, 25 bp, Homo sapien
gacagataatcaataaggaagcatt

SEQ ID NO: 3692881 - DNA, 25 bp, Homo sapien
gcaactaattgcctgggtattacag

SEQ ID NO: 3692882 - DNA, 25 bp, Homo sapien
gagaaaaacggatgaagcagcaact

SEQ ID NO: 3692883 - DNA, 25 bp, Homo sapien
ttaaacagaccagggaatgtgactg

SEQ ID NO: 3692884 - DNA, 25 bp, Homo sapien
gtggtaatccagttagaagcatgag

SEQ ID NO: 3692885 - DNA, 25 bp, Homo sapien
cacctcagcctcccaaactgctggg

SEQ ID NO: 3692886 - DNA, 25 bp, Homo sapien
cgagcagctggtactacaggtgcgc

SEQ ID NO: 3692887 - DNA, 25 bp, Homo sapien
accaccatgcatggctaatttttgt

SEQ ID NO: 3692888 - DNA, 25 bp, Homo sapien
atatttagtagatacagagtttcac

SEQ ID NO: 3692889 - DNA, 25 bp, Homo sapien
gctgttaagcccctcttgtgaaatt

SEQ ID NO: 3692890 - DNA, 25 bp, Homo sapien
taatctcaatcttcaaggccaccga

SEQ ID NO: 3692891 - DNA, 25 bp, Homo sapien
ggtgctggccactaagccctgctaa

SEQ ID NO: 3692892 - DNA, 25 bp, Homo sapien
ggccaccgattctttcgcttgttca

SEQ ID NO: 3692893 - DNA, 25 bp, Homo sapien
tgctcccagccaagttcttcatttc

SEQ ID NO: 3692894 - DNA, 25 bp, Homo sapien
ttatctgagaaccttttaagtacat

SEQ ID NO: 3692895 - DNA, 25 bp, Homo sapien
cacttcttgaaaggactgacttttt

SEQ ID NO: 3692896 - DNA, 25 bp, Homo sapien
ctcctggcgagtgcaggactggact

SEQ ID NO: 3692897 - DNA, 25 bp, Homo sapien
ctgtttgatactcctggcgagtgca

SEQ ID NO: 3692898 - DNA, 25 bp, Homo sapien
aacggattggctttgtacaaggtag

SEQ ID NO: 3692899 - DNA, 25 bp, Homo sapien
ggtgcaattgtctggcaccacagag

SEQ ID NO: 3692900 - DNA, 25 bp, Homo sapien
actgtgctgcccaaggtaaaccttt

SEQ ID NO: 3692901 - DNA, 25 bp, Homo sapien
cagtcccgtctttcaatggtgcaat

SEQ ID NO: 3692902 - DNA, 25 bp, Homo sapien
cactcgagcaaggaaacagtccgct

SEQ ID NO: 3692903 - DNA, 25 bp, Homo sapien
atgtcagagataacagtgtgattcc

SEQ ID NO: 3692904 - DNA, 25 bp, Homo sapien
tcagagataacagtgtgattcctaa

SEQ ID NO: 3692905 - DNA, 25 bp, Homo sapien
taacagtgtgattcctaataatcat

SEQ ID NO: 3692906 - DNA, 25 bp, Homo sapien
gagataacagtgtgattcctaataa

SEQ ID NO: 3692907 - DNA, 25 bp, Homo sapien
gggttgtttccattgtcctgctgcc

SEQ ID NO: 3692908 - DNA, 25 bp, Homo sapien
gttgtttccattgtcctgctgccac

SEQ ID NO: 3692909 - DNA, 25 bp, Homo sapien
gtttccattgtcctgctgccaccat

SEQ ID NO: 3692910 - DNA, 25 bp, Homo sapien
cgggttgtttccattgtcctgctgc

SEQ ID NO: 3692911 - DNA, 25 bp, Homo sapien
tgaagagtccggcaagggcaccgcc

SEQ ID NO: 3692912 - DNA, 25 bp, Homo sapien
gacgagtgggatttagtccatgaag

SEQ ID NO: 3692913 - DNA, 25 bp, Homo sapien
gatttagtccatgaagagtccggca

SEQ ID NO: 3692914 - DNA, 25 bp, Homo sapien
ccaggttttgcaggacgagtgggat

SEQ ID NO: 3692915 - DNA, 25 bp, Homo sapien
cctgtatgcactctgactccgtact

SEQ ID NO: 3692916 - DNA, 25 bp, Homo sapien
tactctgaaccactgccgcatggat

SEQ ID NO: 3692917 - DNA, 25 bp, Homo sapien
cactggcttttccctgtatgcactc

SEQ ID NO: 3692918 - DNA, 25 bp, Homo sapien
tctgactccgtactctgaaccactg

SEQ ID NO: 3692919 - DNA, 25 bp, Homo sapien
tttcagtgtcaatgacgttggcaag

SEQ ID NO: 3692920 - DNA, 25 bp, Homo sapien
cctcgatgcaggtgacttctcgctg

SEQ ID NO: 3692921 - DNA, 25 bp, Homo sapien
ctttttcagtgtcaatgacgttggc

SEQ ID NO: 3692922 - DNA, 25 bp, Homo sapien
tctcgctgtgtctctaagccccagg

SEQ ID NO: 3692923 - DNA, 25 bp, Homo sapien
ttgagcatttttgttcctcgggcac

SEQ ID NO: 3692924 - DNA, 25 bp, Homo sapien
ccttttgagcatttttgttcctcgg

SEQ ID NO: 3692925 - DNA, 25 bp, Homo sapien
tgagcatttttgttcctcgggcaca

SEQ ID NO: 3692926 - DNA, 25 bp, Homo sapien
ttttgagcatttttgttcctcgggc

SEQ ID NO: 3692927 - DNA, 25 bp, Homo sapien
gctccagtgaagcccgtgataaagt

SEQ ID NO: 3692928 - DNA, 25 bp, Homo sapien
tccagtgaagcccgtgataaagtgg

SEQ ID NO: 3692929 - DNA, 25 bp, Homo sapien
ccagtgaagcccgtgataaagtggt

SEQ ID NO: 3692930 - DNA, 25 bp, Homo sapien
cagtgaagcccgtgataaagtggtt

SEQ ID NO: 3692931 - DNA, 25 bp, Homo sapien
caggtacgagtggaattggatgcaa

SEQ ID NO: 3692932 - DNA, 25 bp, Homo sapien
gtggaattggatgcaaatccacact

SEQ ID NO: 3692933 - DNA, 25 bp, Homo sapien
tctttttggcaggtacgagtggaat

SEQ ID NO: 3692934 - DNA, 25 bp, Homo sapien
ctttcataaagcgtctttttggcag

SEQ ID NO: 3692935 - DNA, 25 bp, Homo sapien
tccagctctccactggtgggctgac

SEQ ID NO: 3692936 - DNA, 25 bp, Homo sapien
ctctccactggtgggctgacaggca

SEQ ID NO: 3692937 - DNA, 25 bp, Homo sapien
ggtgggctgacaggcacgtccccac

SEQ ID NO: 3692938 - DNA, 25 bp, Homo sapien
tccactggtgggctgacaggcacgt

SEQ ID NO: 3692939 - DNA, 25 bp, Homo sapien
gagtattagcgttggtttttgtctc

SEQ ID NO: 3692940 - DNA, 25 bp, Homo sapien
tgcacggatggtgagtattagcgtt

SEQ ID NO: 3692941 - DNA, 25 bp, Homo sapien
ctcagtggcacatccaactccttgc

SEQ ID NO: 3692942 - DNA, 25 bp, Homo sapien
agaaggcaatgcacggatggtgagt

SEQ ID NO: 3692943 - DNA, 25 bp, Homo sapien
tgaccgtggccccaggcatttgtta

SEQ ID NO: 3692944 - DNA, 25 bp, Homo sapien
accccaggcgcggacaaggagaggg

SEQ ID NO: 3692945 - DNA, 25 bp, Homo sapien
gcggcgagccccgaagccaccccag

SEQ ID NO: 3692946 - DNA, 25 bp, Homo sapien
ggccccaggcatttgttacgcttac

SEQ ID NO: 3692947 - DNA, 25 bp, Homo sapien
ccgggcctccgatgctctgcgcctt

SEQ ID NO: 3692948 - DNA, 25 bp, Homo sapien
agctgcaagcctccgccatcccttg

SEQ ID NO: 3692949 - DNA, 25 bp, Homo sapien
tttgtcattccgcatcccacggtgc

SEQ ID NO: 3692950 - DNA, 25 bp, Homo sapien
ccacggtgccagctaagtcactcag

SEQ ID NO: 3692951 - DNA, 25 bp, Homo sapien
ctgttgcctgaagtctgtccctgga

SEQ ID NO: 3692952 - DNA, 25 bp, Homo sapien
ctgaagtctgtccctggagtcaggg

SEQ ID NO: 3692953 - DNA, 25 bp, Homo sapien
ttgcctgaagtctgtccctggagtc

SEQ ID NO: 3692954 - DNA, 25 bp, Homo sapien
gcctgaagtctgtccctggagtcag

SEQ ID NO: 3692955 - DNA, 25 bp, Homo sapien
agcagtgacattcagcgactgcgga

SEQ ID NO: 3692956 - DNA, 25 bp, Homo sapien
gcggcggcatccttgtgtgggagtg

SEQ ID NO: 3692957 - DNA, 25 bp, Homo sapien
tgacattcagcgactgcggacaggg

SEQ ID NO: 3692958 - DNA, 25 bp, Homo sapien
acattcagcgactgcggacagggca

SEQ ID NO: 3692959 - DNA, 25 bp, Homo sapien
ccttcgggcgatcgcggcagttttg

SEQ ID NO: 3692960 - DNA, 25 bp, Homo sapien
ggacgcctcgggagctgtgtctacc

SEQ ID NO: 3692961 - DNA, 25 bp, Homo sapien
caggctttgcgccttcgggcgatcg

SEQ ID NO: 3692962 - DNA, 25 bp, Homo sapien
ttcgcccaggctttgcgccttcggg

SEQ ID NO: 3692963 - DNA, 25 bp, Homo sapien
cactcccgtcgctgtgggccccaaa

SEQ ID NO: 3692964 - DNA, 25 bp, Homo sapien
ggtcctcgccaacgcgtccccactc

SEQ ID NO: 3692965 - DNA, 25 bp, Homo sapien
gaggtgcggtcctcgccaacgcgtc

SEQ ID NO: 3692966 - DNA, 25 bp, Homo sapien
aggatggggacgcctgggccgtttg

SEQ ID NO: 3692967 - DNA, 25 bp, Homo sapien
ctgcagcccggccaatcgctcgctg

SEQ ID NO: 3692968 - DNA, 25 bp, Homo sapien
gcctcgtcctttgccagccgcccgg

SEQ ID NO: 3692969 - DNA, 25 bp, Homo sapien
gccaatcgctcgctgccctttgttg

SEQ ID NO: 3692970 - DNA, 25 bp, Homo sapien
tcgtcctttgccagccgcccgggtc

SEQ ID NO: 3692971 - DNA, 25 bp, Homo sapien
tcgcccgtgtctgcaagcacgtgca

SEQ ID NO: 3692972 - DNA, 25 bp, Homo sapien
gcacgtgcaccgctcgccgctgcct

SEQ ID NO: 3692973 - DNA, 25 bp, Homo sapien
cccgtgtctgcaagcacgtgcaccg

SEQ ID NO: 3692974 - DNA, 25 bp, Homo sapien
agcacgtgcaccgctcgccgctgcc

SEQ ID NO: 3692975 - DNA, 25 bp, Homo sapien
gagtctcattaaacccgagtcgcgg

SEQ ID NO: 3692976 - DNA, 25 bp, Homo sapien
caaagacacttaaggccacccgttg

SEQ ID NO: 3692977 - DNA, 25 bp, Homo sapien
gggagggtccactgccaataccaat

SEQ ID NO: 3692978 - DNA, 25 bp, Homo sapien
gacactgattacagcccaatggagt

SEQ ID NO: 3692979 - DNA, 25 bp, Homo sapien
tgcctgagaaactgcggctgccgcc

SEQ ID NO: 3692980 - DNA, 25 bp, Homo sapien
ctggaggaggtgccgtcgcctccgc

SEQ ID NO: 3692981 - DNA, 25 bp, Homo sapien
gccgctgcctgagaaactgcggctg

SEQ ID NO: 3692982 - DNA, 25 bp, Homo sapien
gctgcctgagaaactgcggctgccg

SEQ ID NO: 3692983 - DNA, 25 bp, Homo sapien
cggccccgcggtgaccctcgcgcag

SEQ ID NO: 3692984 - DNA, 25 bp, Homo sapien
ccgagcggccccgcggtgaccctcg

SEQ ID NO: 3692985 - DNA, 25 bp, Homo sapien
aggggcagcctgaccccgagcggcc

SEQ ID NO: 3692986 - DNA, 25 bp, Homo sapien
cccgcggtgaccctcgcgcagaggc

SEQ ID NO: 3692987 - DNA, 25 bp, Homo sapien
taacagtccatgacaaaaatggaga

SEQ ID NO: 3692988 - DNA, 25 bp, Homo sapien
tgacaaaaatggagattatccaggt

SEQ ID NO: 3692989 - DNA, 25 bp, Homo sapien
agattatccaggtcttcaggcaaat

SEQ ID NO: 3692990 - DNA, 25 bp, Homo sapien
acttcaaacgttttaacagtccatg

SEQ ID NO: 3692991 - DNA, 25 bp, Homo sapien
tcaacacaaaagttacccatagagg

SEQ ID NO: 3692992 - DNA, 25 bp, Homo sapien
gactgcattcgggtgaagaacatct

SEQ ID NO: 3692993 - DNA, 25 bp, Homo sapien
aagcagacaaacaggcaatgttgat

SEQ ID NO: 3692994 - DNA, 25 bp, Homo sapien
tcaacaaatggacagagtattccag

SEQ ID NO: 3692995 - DNA, 25 bp, Homo sapien
tttaactgatgaaaagcgcccaggg

SEQ ID NO: 3692996 - DNA, 25 bp, Homo sapien
ggtgactttgagaactgagccatcc

SEQ ID NO: 3692997 - DNA, 25 bp, Homo sapien
tagaccccttggctgacttaggaaa

SEQ ID NO: 3692998 - DNA, 25 bp, Homo sapien
aatgcactgggatactgaggtgccc

SEQ ID NO: 3692999 - DNA, 25 bp, Homo sapien
aagacaaaaggacagtagtgagaat

SEQ ID NO: 3693000 - DNA, 25 bp, Homo sapien
ggacagtagtgagaatgcacgaaca

SEQ ID NO: 3693001 - DNA, 25 bp, Homo sapien
tgcacgaacattactccttcgctta

SEQ ID NO: 3693002 - DNA, 25 bp, Homo sapien
tagtgagaatgcacgaacattactc

SEQ ID NO: 3693003 - DNA, 25 bp, Homo sapien
ctttattcagaacttttgtccacat

SEQ ID NO: 3693004 - DNA, 25 bp, Homo sapien
tcaattttatcaaactttattcaga

SEQ ID NO: 3693005 - DNA, 25 bp, Homo sapien
ttcaattttatcaaactttattcag

SEQ ID NO: 3693006 - DNA, 25 bp, Homo sapien
tattcagaacttttgtccacataaa

SEQ ID NO: 3693007 - DNA, 25 bp, Homo sapien
tgcaaattacatggctgacgcattt

SEQ ID NO: 3693008 - DNA, 25 bp, Homo sapien
taaatgctagtgtgatcagagaaca

SEQ ID NO: 3693009 - DNA, 25 bp, Homo sapien
gacagagagataagcacacccactc

SEQ ID NO: 3693010 - DNA, 25 bp, Homo sapien
ttggccctgctaactcaaaatgtca

SEQ ID NO: 3693011 - DNA, 25 bp, Homo sapien
aagcagaggcatatgtacagttagc

SEQ ID NO: 3693012 - DNA, 25 bp, Homo sapien
tctcaattacctctcctgcaatagt

SEQ ID NO: 3693013 - DNA, 25 bp, Homo sapien
tcctgcaatagtacctttttccctg

SEQ ID NO: 3693014 - DNA, 25 bp, Homo sapien
ccactccttcccttgaattgtggaa

SEQ ID NO: 3693015 - DNA, 25 bp, Homo sapien
gaagagtcgctgatatctcaattac

SEQ ID NO: 3693016 - DNA, 25 bp, Homo sapien
tagggtggcaagcatgacagggaaa

SEQ ID NO: 3693017 - DNA, 25 bp, Homo sapien
ttaaacttcatcatacccatagggt

SEQ ID NO: 3693018 - DNA, 25 bp, Homo sapien
aacttcatcatacccatagggtggc

SEQ ID NO: 3693019 - DNA, 25 bp, Homo sapien
agggtggcaagcatgacagggaaac

SEQ ID NO: 3693020 - DNA, 25 bp, Homo sapien
ggcatgagccaaagagcctatcttg

SEQ ID NO: 3693021 - DNA, 25 bp, Homo sapien
gggccaggcatagcggctctcactt

SEQ ID NO: 3693022 - DNA, 25 bp, Homo sapien
tgtatttttcatgcaccctgtgggc

SEQ ID NO: 3693023 - DNA, 25 bp, Homo sapien
caaaacccatgcctatcaaatatac

SEQ ID NO: 3693024 - DNA, 25 bp, Homo sapien
tatctcacacctatccaggagcctg

SEQ ID NO: 3693025 - DNA, 25 bp, Homo sapien
actgagtatctagtctgtgccagac

SEQ ID NO: 3693026 - DNA, 25 bp, Homo sapien
gagcccatgtgcctagaagccgctt

SEQ ID NO: 3693027 - DNA, 25 bp, Homo sapien
tgtcatgcaacctctataccagctg

SEQ ID NO: 3693028 - DNA, 25 bp, Homo sapien
tattatcagacttaggacacttaac

SEQ ID NO: 3693029 - DNA, 25 bp, Homo sapien
ccatatgccctttaaaactggccac

SEQ ID NO: 3693030 - DNA, 25 bp, Homo sapien
taaagaccatgatcattcaccccgc

SEQ ID NO: 3693031 - DNA, 25 bp, Homo sapien
tcaccccgcttaagaacaaggtcat

SEQ ID NO: 3693032 - DNA, 25 bp, Homo sapien
ggaattcagtctgcaaccatcaggg

SEQ ID NO: 3693033 - DNA, 25 bp, Homo sapien
tgcacctgataactctaaatgagtc

SEQ ID NO: 3693034 - DNA, 25 bp, Homo sapien
tagagtggctgaattgaggaaaaga

SEQ ID NO: 3693035 - DNA, 25 bp, Homo sapien
tgctgataggaactcattatgttga

SEQ ID NO: 3693036 - DNA, 25 bp, Homo sapien
tctagaccttaagcctgaatagcca

SEQ ID NO: 3693037 - DNA, 25 bp, Homo sapien
tacatactaagtggaatctagacct

SEQ ID NO: 3693038 - DNA, 25 bp, Homo sapien
gaggtcccctcactattcaagattg

SEQ ID NO: 3693039 - DNA, 25 bp, Homo sapien
atggtaatctagtaatgaggtcccc

SEQ ID NO: 3693040 - DNA, 25 bp, Homo sapien
gtgtgctggttaatggcatccttgc

SEQ ID NO: 3693041 - DNA, 25 bp, Homo sapien
tgcaacacagggtttaacacgaaaa

SEQ ID NO: 3693042 - DNA, 25 bp, Homo sapien
ggttaatggcatccttgcaacacag

SEQ ID NO: 3693043 - DNA, 25 bp, Homo sapien
ccttgcaacacagggtttaacacga

SEQ ID NO: 3693044 - DNA, 25 bp, Homo sapien
tgacactattgtcccagaagagctg

SEQ ID NO: 3693045 - DNA, 25 bp, Homo sapien
taagacaggtaatcctcagacagcg

SEQ ID NO: 3693046 - DNA, 25 bp, Homo sapien
tcagacagcggcaagcagaaccgta

SEQ ID NO: 3693047 - DNA, 25 bp, Homo sapien
gatactgaccttgactttactgaaa

SEQ ID NO: 3693048 - DNA, 25 bp, Homo sapien
tctctgagttattctcttgaggcct

SEQ ID NO: 3693049 - DNA, 25 bp, Homo sapien
caaccgtaatctctgagttattctc

SEQ ID NO: 3693050 - DNA, 25 bp, Homo sapien
cctcttgaattcaaccgtaatctct

SEQ ID NO: 3693051 - DNA, 25 bp, Homo sapien
ttgaattcaaccgtaatctctgagt

SEQ ID NO: 3693052 - DNA, 25 bp, Homo sapien
gagacccctttgctgggacctccat

SEQ ID NO: 3693053 - DNA, 25 bp, Homo sapien
tcctgcagcctgtaaaatatcttcc

SEQ ID NO: 3693054 - DNA, 25 bp, Homo sapien
ctgcctgatgcaggcaacgggtgcc

SEQ ID NO: 3693055 - DNA, 25 bp, Homo sapien
gtggttcacccacaacctctttctg

SEQ ID NO: 3693056 - DNA, 25 bp, Homo sapien
gctagtgcccaacaacgtattaaat

SEQ ID NO: 3693057 - DNA, 25 bp, Homo sapien
cactcagagtgcaggcaatagggag

SEQ ID NO: 3693058 - DNA, 25 bp, Homo sapien
aggatttaccctaggcagcccaatt

SEQ ID NO: 3693059 - DNA, 25 bp, Homo sapien
tgtgagaagggcaacaacagcatac

SEQ ID NO: 3693060 - DNA, 25 bp, Homo sapien
tgagcctggagcttatgcacaaagg

SEQ ID NO: 3693061 - DNA, 25 bp, Homo sapien
gaaagctaagggaaaccagcgcaca

SEQ ID NO: 3693062 - DNA, 25 bp, Homo sapien
ccagaaggccagtatccatccagaa

SEQ ID NO: 3693063 - DNA, 25 bp, Homo sapien
tctgctgtagaacttaagaaggtcc

SEQ ID NO: 3693064 - DNA, 25 bp, Homo sapien
cagtcaacggcagctcaaaaatggg

SEQ ID NO: 3693065 - DNA, 25 bp, Homo sapien
caatcaatagcaacaaggacactct

SEQ ID NO: 3693066 - DNA, 25 bp, Homo sapien
caaaaatgggtgaacacacagcaca

SEQ ID NO: 3693067 - DNA, 25 bp, Homo sapien
tagagacttcagtactatcagtggt

SEQ ID NO: 3693068 - DNA, 25 bp, Homo sapien
agaaataggtaagcatgagaccccg

SEQ ID NO: 3693069 - DNA, 25 bp, Homo sapien
aaacaggtctactatactggcacag

SEQ ID NO: 3693070 - DNA, 25 bp, Homo sapien
taaggctcatgctaggcttgaaaac

SEQ ID NO: 3693071 - DNA, 25 bp, Homo sapien
gatggctcccctgcagggcggttta

SEQ ID NO: 3693072 - DNA, 25 bp, Homo sapien
tgttgaattcaaaaaacgatggctc

SEQ ID NO: 3693073 - DNA, 25 bp, Homo sapien
aaaaaatatcaatttgcactgaggg

SEQ ID NO: 3693074 - DNA, 25 bp, Homo sapien
tcttgagccagttgcttgaaaaagt

SEQ ID NO: 3693075 - DNA, 25 bp, Homo sapien
tggaatcatatcctaactatgcagc

SEQ ID NO: 3693076 - DNA, 25 bp, Homo sapien
taaaggcactacattgttttagcat

SEQ ID NO: 3693077 - DNA, 25 bp, Homo sapien
ctagggagatagtacaaaggccttt

SEQ ID NO: 3693078 - DNA, 25 bp, Homo sapien
tttcatgccaaatgcccctgcctgt

SEQ ID NO: 3693079 - DNA, 25 bp, Homo sapien
tccactccatttctccacaaggaaa

SEQ ID NO: 3693080 - DNA, 25 bp, Homo sapien
tattcagtgagtcagcaactctctc

SEQ ID NO: 3693081 - DNA, 25 bp, Homo sapien
caagtgatttgccagtctgcaaaca

SEQ ID NO: 3693082 - DNA, 25 bp, Homo sapien
acttggcttgaggaggccttaaact

SEQ ID NO: 3693083 - DNA, 25 bp, Homo sapien
gcttgaggaggccttaaactgtaca

SEQ ID NO: 3693084 - DNA, 25 bp, Homo sapien
ggcttgaggaggccttaaactgtac

SEQ ID NO: 3693085 - DNA, 25 bp, Homo sapien
ttggcttgaggaggccttaaactgt

SEQ ID NO: 3693086 - DNA, 25 bp, Homo sapien
caacatgtgcagaggcatgggccca

SEQ ID NO: 3693087 - DNA, 25 bp, Homo sapien
attacatggagggaacaaggtggca

SEQ ID NO: 3693088 - DNA, 25 bp, Homo sapien
caagaaaggacctccgtcaggttat

SEQ ID NO: 3693089 - DNA, 25 bp, Homo sapien
caaactctagggtttcacagacgta

SEQ ID NO: 3693090 - DNA, 25 bp, Homo sapien
gaaattgccagtttcctgaccctac

SEQ ID NO: 3693091 - DNA, 25 bp, Homo sapien
ccttcactacttgctgagattctga

SEQ ID NO: 3693092 - DNA, 25 bp, Homo sapien
tccattccaagctagcatgagagag

SEQ ID NO: 3693093 - DNA, 25 bp, Homo sapien
gcagcggtggtggatgcttataaac

SEQ ID NO: 3693094 - DNA, 25 bp, Homo sapien
cacacatgagtacttggtctgaata

SEQ ID NO: 3693095 - DNA, 25 bp, Homo sapien
cagagggtcttctctatccagaagc

SEQ ID NO: 3693096 - DNA, 25 bp, Homo sapien
ccagaagcactggagagtcacacat

SEQ ID NO: 3693097 - DNA, 25 bp, Homo sapien
taagcctgtggagtattctcttgcg

SEQ ID NO: 3693098 - DNA, 25 bp, Homo sapien
tgtctgactcatgatctggtttggc

SEQ ID NO: 3693099 - DNA, 25 bp, Homo sapien
tctgactcatgatctggtttggctt

SEQ ID NO: 3693100 - DNA, 25 bp, Homo sapien
gtctgactcatgatctggtttggct

SEQ ID NO: 3693101 - DNA, 25 bp, Homo sapien
tcaaacaataatatgccaggtagac

SEQ ID NO: 3693102 - DNA, 25 bp, Homo sapien
caataatatgccaggtagaccattt

SEQ ID NO: 3693103 - DNA, 25 bp, Homo sapien
taatatgccaggtagaccatttctt

SEQ ID NO: 3693104 - DNA, 25 bp, Homo sapien
agaccatttctttttcctggagcac

SEQ ID NO: 3693105 - DNA, 25 bp, Homo sapien
tgatgtcacccagcaatgagatgtg

SEQ ID NO: 3693106 - DNA, 25 bp, Homo sapien
tatcccaaaaaagagctccctgatg

SEQ ID NO: 3693107 - DNA, 25 bp, Homo sapien
gaacagatggacagctatcccaaaa

SEQ ID NO: 3693108 - DNA, 25 bp, Homo sapien
taaaagggttcacagcgtaagtcga

SEQ ID NO: 3693109 - DNA, 25 bp, Homo sapien
tgattcaggctcttttgaagccagc

SEQ ID NO: 3693110 - DNA, 25 bp, Homo sapien
agccaagtggcagtggcacggatcc

SEQ ID NO: 3693111 - DNA, 25 bp, Homo sapien
gtggcagtggcacggatccaggagt

SEQ ID NO: 3693112 - DNA, 25 bp, Homo sapien
ccaagtggcagtggcacggatccag

SEQ ID NO: 3693113 - DNA, 25 bp, Homo sapien
tattcaatggtggatgattaggcca

SEQ ID NO: 3693114 - DNA, 25 bp, Homo sapien
caggagactacctcaaggacatgca

SEQ ID NO: 3693115 - DNA, 25 bp, Homo sapien
gccaagtgacctgtttcctgatcag

SEQ ID NO: 3693116 - DNA, 25 bp, Homo sapien
tttttccaaggaactaatagcaggc

SEQ ID NO: 3693117 - DNA, 25 bp, Homo sapien
gttggcccaggattcccttcagcat

SEQ ID NO: 3693118 - DNA, 25 bp, Homo sapien
ctgttggcccaggattcccttcagc

SEQ ID NO: 3693119 - DNA, 25 bp, Homo sapien
tgttggcccaggattcccttcagca

SEQ ID NO: 3693120 - DNA, 25 bp, Homo sapien
gctggtagtctatgtagggagccat

SEQ ID NO: 3693121 - DNA, 25 bp, Homo sapien
tgatactgctggtagtctatgtagg

SEQ ID NO: 3693122 - DNA, 25 bp, Homo sapien
gggcctggttcacatgatactgctg

SEQ ID NO: 3693123 - DNA, 25 bp, Homo sapien
tgccctatctactttgagggcctgg

SEQ ID NO: 3693124 - DNA, 25 bp, Homo sapien
tattccgtttaatgttactcagtgc

SEQ ID NO: 3693125 - DNA, 25 bp, Homo sapien
tgcatgtgtgagtagattattccgt

SEQ ID NO: 3693126 - DNA, 25 bp, Homo sapien
tgtcacgacagattagtttcgcctg

SEQ ID NO: 3693127 - DNA, 25 bp, Homo sapien
tatgaaatcatacaatccgtactct

SEQ ID NO: 3693128 - DNA, 25 bp, Homo sapien
attggatttatcttctgaagaggga

SEQ ID NO: 3693129 - DNA, 25 bp, Homo sapien
tattggatttatcttctgaagaggg

SEQ ID NO: 3693130 - DNA, 25 bp, Homo sapien
gtattggatttatcttctgaagagg

SEQ ID NO: 3693131 - DNA, 25 bp, Homo sapien
ggtattggatttatcttctgaagag

SEQ ID NO: 3693132 - DNA, 25 bp, Homo sapien
gaagctacatattggaatgggatca

SEQ ID NO: 3693133 - DNA, 25 bp, Homo sapien
tactgccacaatctgcacaagagag

SEQ ID NO: 3693134 - DNA, 25 bp, Homo sapien
tgattctttagtccccaaacagaag

SEQ ID NO: 3693135 - DNA, 25 bp, Homo sapien
caagagaggagttcttctggtttct

SEQ ID NO: 3693136 - DNA, 25 bp, Homo sapien
ggaatttacctataatgcagacatc

SEQ ID NO: 3693137 - DNA, 25 bp, Homo sapien
gggaagtcattgtacaacacatagg

SEQ ID NO: 3693138 - DNA, 25 bp, Homo sapien
tatgtcagtactaacatactcacgc

SEQ ID NO: 3693139 - DNA, 25 bp, Homo sapien
tgctattaccatataactgccttaa

SEQ ID NO: 3693140 - DNA, 25 bp, Homo sapien
ttgaacattatgaacggtctcaatt

SEQ ID NO: 3693141 - DNA, 25 bp, Homo sapien
cattatgaacggtctcaattcaatc

SEQ ID NO: 3693142 - DNA, 25 bp, Homo sapien
tatgaacggtctcaattcaatccca

SEQ ID NO: 3693143 - DNA, 25 bp, Homo sapien
tgaacggtctcaattcaatcccaga

SEQ ID NO: 3693144 - DNA, 25 bp, Homo sapien
ttatttagctcaagagaattggcca

SEQ ID NO: 3693145 - DNA, 25 bp, Homo sapien
ctttatttagctcaagagaattggc

SEQ ID NO: 3693146 - DNA, 25 bp, Homo sapien
tttatttagctcaagagaattggcc

SEQ ID NO: 3693147 - DNA, 25 bp, Homo sapien
tatttagctcaagagaattggccat

SEQ ID NO: 3693148 - DNA, 25 bp, Homo sapien
tgcttgtcgacttctaagaagcaca

SEQ ID NO: 3693149 - DNA, 25 bp, Homo sapien
gacagcttgcttgtcgacttctaag

SEQ ID NO: 3693150 - DNA, 25 bp, Homo sapien
gcttgcttgtcgacttctaagaagc

SEQ ID NO: 3693151 - DNA, 25 bp, Homo sapien
aaagacagcttgcttgtcgacttct

SEQ ID NO: 3693152 - DNA, 25 bp, Homo sapien
tgtcttgcattcgatgcactgccac

SEQ ID NO: 3693153 - DNA, 25 bp, Homo sapien
ttggactctacaggcactgcatgtc

SEQ ID NO: 3693154 - DNA, 25 bp, Homo sapien
tacatttgttgttaattcaggacaa

SEQ ID NO: 3693155 - DNA, 25 bp, Homo sapien
catttctgccttggactctacaggc

SEQ ID NO: 3693156 - DNA, 25 bp, Homo sapien
ctggaggcggattacgggagccata

SEQ ID NO: 3693157 - DNA, 25 bp, Homo sapien
tggaggcggattacgggagccatac

SEQ ID NO: 3693158 - DNA, 25 bp, Homo sapien
tatgaaatcctctatcacaggaatc

SEQ ID NO: 3693159 - DNA, 25 bp, Homo sapien
catatgaaatcctctatcacaggaa

SEQ ID NO: 3693160 - DNA, 25 bp, Homo sapien
tccatatgaaatcctctatcacagg

SEQ ID NO: 3693161 - DNA, 25 bp, Homo sapien
ttccatatgaaatcctctatcacag

SEQ ID NO: 3693162 - DNA, 25 bp, Homo sapien
tttctatgcttttatactcctctat

SEQ ID NO: 3693163 - DNA, 25 bp, Homo sapien
tgcttttatactcctctattcacaa

SEQ ID NO: 3693164 - DNA, 25 bp, Homo sapien
ctatgcttttatactcctctattca

SEQ ID NO: 3693165 - DNA, 25 bp, Homo sapien
tttatactcctctattcacaacctg

SEQ ID NO: 3693166 - DNA, 25 bp, Homo sapien
attctaataggggaatggtttggag

SEQ ID NO: 3693167 - DNA, 25 bp, Homo sapien
agagatggtcttttcatccctgggt

SEQ ID NO: 3693168 - DNA, 25 bp, Homo sapien
gtcttttcatccctgggtctgaatt

SEQ ID NO: 3693169 - DNA, 25 bp, Homo sapien
agagagagatggtcttttcatccct

SEQ ID NO: 3693170 - DNA, 25 bp, Homo sapien
tcaactaatggccaagaaaatggtg

SEQ ID NO: 3693171 - DNA, 25 bp, Homo sapien
gatcattcagatgctcgtgttcaaa

SEQ ID NO: 3693172 - DNA, 25 bp, Homo sapien
aatggtgatggcttcctgttgtagg

SEQ ID NO: 3693173 - DNA, 25 bp, Homo sapien
tcagacacaatcagctataagatca

SEQ ID NO: 3693174 - DNA, 25 bp, Homo sapien
attgtaccaacaaagcatatctgtg

SEQ ID NO: 3693175 - DNA, 25 bp, Homo sapien
atattgtaccaacaaagcatatctg

SEQ ID NO: 3693176 - DNA, 25 bp, Homo sapien
aaatattgtaccaacaaagcatatc

SEQ ID NO: 3693177 - DNA, 25 bp, Homo sapien
aaaatattgtaccaacaaagcatat

SEQ ID NO: 3693178 - DNA, 25 bp, Homo sapien
aaatacctccaggaaggacctagat

SEQ ID NO: 3693179 - DNA, 25 bp, Homo sapien
ttgtaatatccaccctaagggactg

SEQ ID NO: 3693180 - DNA, 25 bp, Homo sapien
aagcaaattggaacgtaagacagca

SEQ ID NO: 3693181 - DNA, 25 bp, Homo sapien
tgagtactggtcacaatacaggaaa

SEQ ID NO: 3693182 - DNA, 25 bp, Homo sapien
catatcgtcgttttatttgtgcagc

SEQ ID NO: 3693183 - DNA, 25 bp, Homo sapien
ttgcatatcgtcgttttatttgtgc

SEQ ID NO: 3693184 - DNA, 25 bp, Homo sapien
ccaatgggttttgcatatcgtcgtt

SEQ ID NO: 3693185 - DNA, 25 bp, Homo sapien
gcagctttctcatgaagtagttttc

SEQ ID NO: 3693186 - DNA, 25 bp, Homo sapien
ggccactgcgaatatattattttat

SEQ ID NO: 3693187 - DNA, 25 bp, Homo sapien
taatggcaattatacagcaacaaga

SEQ ID NO: 3693188 - DNA, 25 bp, Homo sapien
tatatatatgtctgcactagtgcag

SEQ ID NO: 3693189 - DNA, 25 bp, Homo sapien
cttcagaggtaagtggtcatctgca

SEQ ID NO: 3693190 - DNA, 25 bp, Homo sapien
tagtcaaatctatactctacacagg

SEQ ID NO: 3693191 - DNA, 25 bp, Homo sapien
gtcaaatctatactctacacaggtt

SEQ ID NO: 3693192 - DNA, 25 bp, Homo sapien
tcaaatctatactctacacaggtta

SEQ ID NO: 3693193 - DNA, 25 bp, Homo sapien
caaatctatactctacacaggttaa

SEQ ID NO: 3693194 - DNA, 25 bp, Homo sapien
tatggacccatgttgggaacaatgc

SEQ ID NO: 3693195 - DNA, 25 bp, Homo sapien
gattgtatctggaatcgattgccca

SEQ ID NO: 3693196 - DNA, 25 bp, Homo sapien
acagtgagagttaccaacaaggaac

SEQ ID NO: 3693197 - DNA, 25 bp, Homo sapien
caagtcaggtgaacgctagagatct

SEQ ID NO: 3693198 - DNA, 25 bp, Homo sapien
tgcttacatgaacagcggccgactg

SEQ ID NO: 3693199 - DNA, 25 bp, Homo sapien
tggacccaagggcaatataagcaag

SEQ ID NO: 3693200 - DNA, 25 bp, Homo sapien
cacctcaggctagggtttgcgaagc

SEQ ID NO: 3693201 - DNA, 25 bp, Homo sapien
tgaagaagcggcacatttaccatgg

SEQ ID NO: 3693202 - DNA, 25 bp, Homo sapien
ggatccttcatcactggttacagac

SEQ ID NO: 3693203 - DNA, 25 bp, Homo sapien
gtgacccccttcctgtgaatgcatt

SEQ ID NO: 3693204 - DNA, 25 bp, Homo sapien
aggtgacccccttcctgtgaatgca

SEQ ID NO: 3693205 - DNA, 25 bp, Homo sapien
acccccttcctgtgaatgcattcat

SEQ ID NO: 3693206 - DNA, 25 bp, Homo sapien
caggtgacccccttcctgtgaatgc

SEQ ID NO: 3693207 - DNA, 25 bp, Homo sapien
gggtctgtaacagccaatctgctgc

SEQ ID NO: 3693208 - DNA, 25 bp, Homo sapien
ccagatgcagcatgaccagatgaag

SEQ ID NO: 3693209 - DNA, 25 bp, Homo sapien
taagtgtagaggcagaaatgtaggt

SEQ ID NO: 3693210 - DNA, 25 bp, Homo sapien
aaggtgtggtacagactttagtctt

SEQ ID NO: 3693211 - DNA, 25 bp, Homo sapien
tccttggacgatagtgctttgaaaa

SEQ ID NO: 3693212 - DNA, 25 bp, Homo sapien
aaaagtctataatttcacctcgtga

SEQ ID NO: 3693213 - DNA, 25 bp, Homo sapien
caggtgatggtgtaaaaaacttagt

SEQ ID NO: 3693214 - DNA, 25 bp, Homo sapien
cacatgagaagtgcatgactgtttc

SEQ ID NO: 3693215 - DNA, 25 bp, Homo sapien
ggtatagatatgagaaagcccatca

SEQ ID NO: 3693216 - DNA, 25 bp, Homo sapien
ggtggtgcataactcgggtgtccct

SEQ ID NO: 3693217 - DNA, 25 bp, Homo sapien
tacgacgcatacgtttgggtggtgc

SEQ ID NO: 3693218 - DNA, 25 bp, Homo sapien
tccctttttgcgagactgtccctga

SEQ ID NO: 3693219 - DNA, 25 bp, Homo sapien
tctccctaaggtggatacacacaca

SEQ ID NO: 3693220 - DNA, 25 bp, Homo sapien
catgcgggactacaaagccataagc

SEQ ID NO: 3693221 - DNA, 25 bp, Homo sapien
tgacagcacacaactgaacagcgct

SEQ ID NO: 3693222 - DNA, 25 bp, Homo sapien
tcacagagtcacagatcaggctttg

SEQ ID NO: 3693223 - DNA, 25 bp, Homo sapien
gttcctgggcctgcttaaaaacatc

SEQ ID NO: 3693224 - DNA, 25 bp, Homo sapien
ttcagtaacgacatccttgtttcca

SEQ ID NO: 3693225 - DNA, 25 bp, Homo sapien
tccaaatcctcttcagtaacgacat

SEQ ID NO: 3693226 - DNA, 25 bp, Homo sapien
gcctgcttaaaaacatccaaatcct

SEQ ID NO: 3693227 - DNA, 25 bp, Homo sapien
gtagtcactgacacaacaaattcac

SEQ ID NO: 3693228 - DNA, 25 bp, Homo sapien
gaccacactggtcatagaaaccgaa

SEQ ID NO: 3693229 - DNA, 25 bp, Homo sapien
ttcacaattcatattagattcgtct

SEQ ID NO: 3693230 - DNA, 25 bp, Homo sapien
ttagattcgtctttgagaagtctga

SEQ ID NO: 3693231 - DNA, 25 bp, Homo sapien
ctggagtaaagtggccattcaaggg

SEQ ID NO: 3693232 - DNA, 25 bp, Homo sapien
gagtaaagtggccattcaagggcac

SEQ ID NO: 3693233 - DNA, 25 bp, Homo sapien
taaagtggccattcaagggcacaat

SEQ ID NO: 3693234 - DNA, 25 bp, Homo sapien
gtggccattcaagggcacaatccca

SEQ ID NO: 3693235 - DNA, 25 bp, Homo sapien
ccaccccactctcacactctatttt

SEQ ID NO: 3693236 - DNA, 25 bp, Homo sapien
aattcaatcacagaagggtaccggc

SEQ ID NO: 3693237 - DNA, 25 bp, Homo sapien
catattcctgtgggtaaggcgagga

SEQ ID NO: 3693238 - DNA, 25 bp, Homo sapien
cacagaagggtaccggccacagtct

SEQ ID NO: 3693239 - DNA, 25 bp, Homo sapien
ggagcataaggaatttaccgagaac

SEQ ID NO: 3693240 - DNA, 25 bp, Homo sapien
tataatgcccatgtaactaaggagc

SEQ ID NO: 3693241 - DNA, 25 bp, Homo sapien
caaaagcaatagtttgggaagcact

SEQ ID NO: 3693242 - DNA, 25 bp, Homo sapien
tgtgacattcaagttatacacctgc

SEQ ID NO: 3693243 - DNA, 25 bp, Homo sapien
tctcccatttttccttcttttgcta

SEQ ID NO: 3693244 - DNA, 25 bp, Homo sapien
ccacacttcttggagtgtcttagca

SEQ ID NO: 3693245 - DNA, 25 bp, Homo sapien
tccacacttcttggagtgtcttagc

SEQ ID NO: 3693246 - DNA, 25 bp, Homo sapien
catggtgaatatatctagtgtagac

SEQ ID NO: 3693247 - DNA, 25 bp, Homo sapien
tgtaccttctaaacacaaatcagca

SEQ ID NO: 3693248 - DNA, 25 bp, Homo sapien
gcacatagtcaacaattaggagtac

SEQ ID NO: 3693249 - DNA, 25 bp, Homo sapien
tcttcatcagtctaaatggttgctt

SEQ ID NO: 3693250 - DNA, 25 bp, Homo sapien
tggagctgctgaacaaagctcattt

SEQ ID NO: 3693251 - DNA, 25 bp, Homo sapien
ctgccagacattggctggagctgct

SEQ ID NO: 3693252 - DNA, 25 bp, Homo sapien
tggctggagctgctgaacaaagctc

SEQ ID NO: 3693253 - DNA, 25 bp, Homo sapien
gctggagctgctgaacaaagctcat

SEQ ID NO: 3693254 - DNA, 25 bp, Homo sapien
gattatccacactgccaagaagtgg

SEQ ID NO: 3693255 - DNA, 25 bp, Homo sapien
gtattgaggagatatgtacagctgc

SEQ ID NO: 3693256 - DNA, 25 bp, Homo sapien
gatggaaacacaggtggttgtgtat

SEQ ID NO: 3693257 - DNA, 25 bp, Homo sapien
gaaacacaggtggttgtgtattgag

SEQ ID NO: 3693258 - DNA, 25 bp, Homo sapien
gagaaacgtgaaaagccctgcagac

SEQ ID NO: 3693259 - DNA, 25 bp, Homo sapien
gcatccaattagcagaggccagaga

SEQ ID NO: 3693260 - DNA, 25 bp, Homo sapien
gacaggaggctaggcacagatgcca

SEQ ID NO: 3693261 - DNA, 25 bp, Homo sapien
gaaaggcatggtctcctcaaggtga

SEQ ID NO: 3693262 - DNA, 25 bp, Homo sapien
ggctaacaagcaaaggttttggcaa

SEQ ID NO: 3693263 - DNA, 25 bp, Homo sapien
taaaaaaggaatggctcgacatcat

SEQ ID NO: 3693264 - DNA, 25 bp, Homo sapien
taatacaacgttttgtggtccagga

SEQ ID NO: 3693265 - DNA, 25 bp, Homo sapien
gaagtatccaaccagatgacagccc

SEQ ID NO: 3693266 - DNA, 25 bp, Homo sapien
aatgccagcgtcctaactcactgag

SEQ ID NO: 3693267 - DNA, 25 bp, Homo sapien
caaagacgctaagtggtccacaagg

SEQ ID NO: 3693268 - DNA, 25 bp, Homo sapien
tcatgttgacaccacttaaagggaa

SEQ ID NO: 3693269 - DNA, 25 bp, Homo sapien
caattagagtgtcatcaaggcggca

SEQ ID NO: 3693270 - DNA, 25 bp, Homo sapien
gaagtgggcaattccctgcacctgc

SEQ ID NO: 3693271 - DNA, 25 bp, Homo sapien
ggaaggagaaacagatcaagtatgt

SEQ ID NO: 3693272 - DNA, 25 bp, Homo sapien
agccctgctgaagtgggcaattccc

SEQ ID NO: 3693273 - DNA, 25 bp, Homo sapien
gccactgtccttgtaaaactgtcca

SEQ ID NO: 3693274 - DNA, 25 bp, Homo sapien
tgcctttggtgctggggcatgatca

SEQ ID NO: 3693275 - DNA, 25 bp, Homo sapien
aaatcaatgagaaaccgtccaaatc

SEQ ID NO: 3693276 - DNA, 25 bp, Homo sapien
tatgcaggagacattatacttctgc

SEQ ID NO: 3693277 - DNA, 25 bp, Homo sapien
aatgagaaaccgtccaaatccttgc

SEQ ID NO: 3693278 - DNA, 25 bp, Homo sapien
tatgagtccatattgctataatcag

SEQ ID NO: 3693279 - DNA, 25 bp, Homo sapien
gagtccatattgctataatcagggg

SEQ ID NO: 3693280 - DNA, 25 bp, Homo sapien
tgagtccatattgctataatcaggg

SEQ ID NO: 3693281 - DNA, 25 bp, Homo sapien
ctatgagtccatattgctataatca

SEQ ID NO: 3693282 - DNA, 25 bp, Homo sapien
cagctcctgagggtaagccatgtgc

SEQ ID NO: 3693283 - DNA, 25 bp, Homo sapien
cctgttttccagaggagataggcca

SEQ ID NO: 3693284 - DNA, 25 bp, Homo sapien
taagctgaccacacggtgcagagac

SEQ ID NO: 3693285 - DNA, 25 bp, Homo sapien
tgaaacggcttactggaatccaacc

SEQ ID NO: 3693286 - DNA, 25 bp, Homo sapien
aagcaaggaaaaatgcgtctcttct

SEQ ID NO: 3693287 - DNA, 25 bp, Homo sapien
cccctgaaaaatggccaggaatggt

SEQ ID NO: 3693288 - DNA, 25 bp, Homo sapien
gaaatttgaaattgcaggactggga

SEQ ID NO: 3693289 - DNA, 25 bp, Homo sapien
gtgtctgaccctctacttccctatg

SEQ ID NO: 3693290 - DNA, 25 bp, Homo sapien
cttctgccgtgtaattgtgctgcat

SEQ ID NO: 3693291 - DNA, 25 bp, Homo sapien
tctgccgtgtaattgtgctgcatat

SEQ ID NO: 3693292 - DNA, 25 bp, Homo sapien
gccgtgtaattgtgctgcatattta

SEQ ID NO: 3693293 - DNA, 25 bp, Homo sapien
ctgccgtgtaattgtgctgcatatt

SEQ ID NO: 3693294 - DNA, 25 bp, Homo sapien
gcccattgcctatcaccaaactaag

SEQ ID NO: 3693295 - DNA, 25 bp, Homo sapien
tgaagtaaccaaattgttcacgaag

SEQ ID NO: 3693296 - DNA, 25 bp, Homo sapien
attgttcacgaagcccattgcctat

SEQ ID NO: 3693297 - DNA, 25 bp, Homo sapien
caaattgttgaagtaaccaaattgt

SEQ ID NO: 3693298 - DNA, 25 bp, Homo sapien
caaccgagttcctggtctagtggat

SEQ ID NO: 3693299 - DNA, 25 bp, Homo sapien
gatggccactccgtaaacaactgtg

SEQ ID NO: 3693300 - DNA, 25 bp, Homo sapien
ggtgcctaatgagaaatcccagcag

SEQ ID NO: 3693301 - DNA, 25 bp, Homo sapien
ggcaaatctctgaactgacgcaggg

SEQ ID NO: 3693302 - DNA, 25 bp, Homo sapien
gatgtatggcaggagtgtgactccc

SEQ ID NO: 3693303 - DNA, 25 bp, Homo sapien
caactcccacagtggaagatgtatg

SEQ ID NO: 3693304 - DNA, 25 bp, Homo sapien
ttccagagtggaatggtcttccttc

SEQ ID NO: 3693305 - DNA, 25 bp, Homo sapien
ctccccgatgccgtgtggtgtgcct

SEQ ID NO: 3693306 - DNA, 25 bp, Homo sapien
taggaaatggctagcccatccaacc

SEQ ID NO: 3693307 - DNA, 25 bp, Homo sapien
gacagactgctctatagaatcagat

SEQ ID NO: 3693308 - DNA, 25 bp, Homo sapien
ggcaacaaagttcccagcaaacaca

SEQ ID NO: 3693309 - DNA, 25 bp, Homo sapien
tgaggaacctaaaaaccattccatg

SEQ ID NO: 3693310 - DNA, 25 bp, Homo sapien
tgagaccatgtgcactaaacaaaga

SEQ ID NO: 3693311 - DNA, 25 bp, Homo sapien
cacccagcttgctagattttcatag

SEQ ID NO: 3693312 - DNA, 25 bp, Homo sapien
tacgacagatcgtgagaggctctat

SEQ ID NO: 3693313 - DNA, 25 bp, Homo sapien
tatgaccttgtagactccctgaacc

SEQ ID NO: 3693314 - DNA, 25 bp, Homo sapien
cagcaaatcctgctgaaaggtctgt

SEQ ID NO: 3693315 - DNA, 25 bp, Homo sapien
tctgtatcagtcgacggcactgggt

SEQ ID NO: 3693316 - DNA, 25 bp, Homo sapien
agtcgacggcactgggtttgcaagc

SEQ ID NO: 3693317 - DNA, 25 bp, Homo sapien
aaaggtctgtatcagtcgacggcac

SEQ ID NO: 3693318 - DNA, 25 bp, Homo sapien
ggtagagatactccaagatgacgct

SEQ ID NO: 3693319 - DNA, 25 bp, Homo sapien
cggcccagatcggagagaggctttt

SEQ ID NO: 3693320 - DNA, 25 bp, Homo sapien
gatgacgctcttccaatatgccagg

SEQ ID NO: 3693321 - DNA, 25 bp, Homo sapien
atatgccaggtaggagagacggccc

SEQ ID NO: 3693322 - DNA, 25 bp, Homo sapien
gtggctcaatatcaacttttcccgt

SEQ ID NO: 3693323 - DNA, 25 bp, Homo sapien
ttggggtccacctcagactgtctgg

SEQ ID NO: 3693324 - DNA, 25 bp, Homo sapien
gcttctcgctcttcttcagacactg

SEQ ID NO: 3693325 - DNA, 25 bp, Homo sapien
caacttttcccgtctaatgatgaca

SEQ ID NO: 3693326 - DNA, 25 bp, Homo sapien
tgttagctctagttgacaggatttc

SEQ ID NO: 3693327 - DNA, 25 bp, Homo sapien
tagcttgttccattagccgctcagc

SEQ ID NO: 3693328 - DNA, 25 bp, Homo sapien
ggtgattgcctactgttagctctag

SEQ ID NO: 3693329 - DNA, 25 bp, Homo sapien
tctcccagcagctagcttgttccat

SEQ ID NO: 3693330 - DNA, 25 bp, Homo sapien
gctctctttagacagctccagcagc

SEQ ID NO: 3693331 - DNA, 25 bp, Homo sapien
ctgactgtggtttcgtcaatcttgg

SEQ ID NO: 3693332 - DNA, 25 bp, Homo sapien
tctctttatggcaactgactgtggt

SEQ ID NO: 3693333 - DNA, 25 bp, Homo sapien
tcccctgtgactggccggctctccg

SEQ ID NO: 3693334 - DNA, 25 bp, Homo sapien
tgaagcacacacgtagccagttaat

SEQ ID NO: 3693335 - DNA, 25 bp, Homo sapien
caggttgagtccagttcagatcatg

SEQ ID NO: 3693336 - DNA, 25 bp, Homo sapien
taacgctctgaatgctcactgaagc

SEQ ID NO: 3693337 - DNA, 25 bp, Homo sapien
tatgagggaagccaaggtagagaac

SEQ ID NO: 3693338 - DNA, 25 bp, Homo sapien
ccctgagctcaagtggtccacccgc

SEQ ID NO: 3693339 - DNA, 25 bp, Homo sapien
gagtgctgggattataggtgtgagc

SEQ ID NO: 3693340 - DNA, 25 bp, Homo sapien
tcgaacccctgagctcaagtggtcc

SEQ ID NO: 3693341 - DNA, 25 bp, Homo sapien
gtccacccgccttggcctcccagag

SEQ ID NO: 3693342 - DNA, 25 bp, Homo sapien
ttcatctgagttgtcaaagggctca

SEQ ID NO: 3693343 - DNA, 25 bp, Homo sapien
gctgttgatcctcctgcgtttacga

SEQ ID NO: 3693344 - DNA, 25 bp, Homo sapien
tctgtcgtctctgaaatggtctctg

SEQ ID NO: 3693345 - DNA, 25 bp, Homo sapien
tccacttcaatctcacaggtaggct

SEQ ID NO: 3693346 - DNA, 25 bp, Homo sapien
ttctggtaagtaagatgaacccacc

SEQ ID NO: 3693347 - DNA, 25 bp, Homo sapien
tgctctttggcacccagtcagatac

SEQ ID NO: 3693348 - DNA, 25 bp, Homo sapien
cagatacagacattctcaagggtaa

SEQ ID NO: 3693349 - DNA, 25 bp, Homo sapien
gaacccacctagaggaatgttctgg

SEQ ID NO: 3693350 - DNA, 25 bp, Homo sapien
tcctcttgaggcaacagggcttccc

SEQ ID NO: 3693351 - DNA, 25 bp, Homo sapien
tttgcctccacttagatagaccgcg

SEQ ID NO: 3693352 - DNA, 25 bp, Homo sapien
actgttacctgctcgtcaggctcca

SEQ ID NO: 3693353 - DNA, 25 bp, Homo sapien
gaggttcgggattgtctttactgcc

SEQ ID NO: 3693354 - DNA, 25 bp, Homo sapien
ttcctcaggtttgatgagatcatct

SEQ ID NO: 3693355 - DNA, 25 bp, Homo sapien
tgtggctgtcatcctcgtcatcggc

SEQ ID NO: 3693356 - DNA, 25 bp, Homo sapien
taagacctctgggttcgagtgacca

SEQ ID NO: 3693357 - DNA, 25 bp, Homo sapien
gtgatcatccaaacgtgcagagtct

SEQ ID NO: 3693358 - DNA, 25 bp, Homo sapien
gattcgggtacagcttcagggtccc

SEQ ID NO: 3693359 - DNA, 25 bp, Homo sapien
agttgtgctctcgatactgcccagg

SEQ ID NO: 3693360 - DNA, 25 bp, Homo sapien
tgagtctcggcacaatcctgaaagg

SEQ ID NO: 3693361 - DNA, 25 bp, Homo sapien
tgttgacagaacgtacggactggcc

SEQ ID NO: 3693362 - DNA, 25 bp, Homo sapien
tgaaactgggctactgtggtccgac

SEQ ID NO: 3693363 - DNA, 25 bp, Homo sapien
gaagttagcagccatgctgcactga

SEQ ID NO: 3693364 - DNA, 25 bp, Homo sapien
gttagcagccatgctgcactgagcc

SEQ ID NO: 3693365 - DNA, 25 bp, Homo sapien
agttagcagccatgctgcactgagc

SEQ ID NO: 3693366 - DNA, 25 bp, Homo sapien
ggtgaagttagcagccatgctgcac

SEQ ID NO: 3693367 - DNA, 25 bp, Homo sapien
catgttccgttgcaaaagaggcggc

SEQ ID NO: 3693368 - DNA, 25 bp, Homo sapien
gcatcgttaaagtccgtgcaggacc

SEQ ID NO: 3693369 - DNA, 25 bp, Homo sapien
ggagcgcccatagatttgtgactga

SEQ ID NO: 3693370 - DNA, 25 bp, Homo sapien
tcattggctgggacatgctgtaccc

SEQ ID NO: 3693371 - DNA, 25 bp, Homo sapien
tgccccgtaggttttgtggactgcc

SEQ ID NO: 3693372 - DNA, 25 bp, Homo sapien
ggctgcctccaaattgtagtccaaa

SEQ ID NO: 3693373 - DNA, 25 bp, Homo sapien
taacaaagacattagcggcatgctg

SEQ ID NO: 3693374 - DNA, 25 bp, Homo sapien
taaatacaagagtgtcgctggatcc

SEQ ID NO: 3693375 - DNA, 25 bp, Homo sapien
tgttctgaggcgtgacacatgatac

SEQ ID NO: 3693376 - DNA, 25 bp, Homo sapien
tgtatgtgttctgaggcgtgacaca

SEQ ID NO: 3693377 - DNA, 25 bp, Homo sapien
tccattggtcattctctatcaatca

SEQ ID NO: 3693378 - DNA, 25 bp, Homo sapien
gacacatgatacagttccattggtc

SEQ ID NO: 3693379 - DNA, 25 bp, Homo sapien
aataggtatttggtatatgtgatgg

SEQ ID NO: 3693380 - DNA, 25 bp, Homo sapien
tgattggcatacagaaggtatgcac

SEQ ID NO: 3693381 - DNA, 25 bp, Homo sapien
ttttaaagacaatgattggcataca

SEQ ID NO: 3693382 - DNA, 25 bp, Homo sapien
ggtatgcactcgcataaaataaact

SEQ ID NO: 3693383 - DNA, 25 bp, Homo sapien
agcctcttgcccgatgtgtggccca

SEQ ID NO: 3693384 - DNA, 25 bp, Homo sapien
tttgtgcaggcatagaccaccactt

SEQ ID NO: 3693385 - DNA, 25 bp, Homo sapien
acgcagtgttcgatttgtgcaggca

SEQ ID NO: 3693386 - DNA, 25 bp, Homo sapien
tccttggccactcctgaatggacgc

SEQ ID NO: 3693387 - DNA, 25 bp, Homo sapien
aaatccttggcgtcacattcagatg

SEQ ID NO: 3693388 - DNA, 25 bp, Homo sapien
tgtggcctgttaatgaatctcaatc

SEQ ID NO: 3693389 - DNA, 25 bp, Homo sapien
aagttcctgtttcgccaaatccttg

SEQ ID NO: 3693390 - DNA, 25 bp, Homo sapien
gaatctcaatcgaatgaattcagct

SEQ ID NO: 3693391 - DNA, 25 bp, Homo sapien
tctttgtgggactctgggtcctgct

SEQ ID NO: 3693392 - DNA, 25 bp, Homo sapien
gctgagaatggcaaagttgcggttc

SEQ ID NO: 3693393 - DNA, 25 bp, Homo sapien
catctctttgtgggactctgggtcc

SEQ ID NO: 3693394 - DNA, 25 bp, Homo sapien
tgagaatggcaaagttgcggttctg

SEQ ID NO: 3693395 - DNA, 25 bp, Homo sapien
cggccgtcaaggaccaggcatggaa

SEQ ID NO: 3693396 - DNA, 25 bp, Homo sapien
gagaaaacggcagcagacatgaagc

SEQ ID NO: 3693397 - DNA, 25 bp, Homo sapien
tgctgttggagatgccggccgtcaa

SEQ ID NO: 3693398 - DNA, 25 bp, Homo sapien
gctgcgtgatttccactctgaagga

SEQ ID NO: 3693399 - DNA, 25 bp, Homo sapien
tcttgcatgtcacgcaggaggcgat

SEQ ID NO: 3693400 - DNA, 25 bp, Homo sapien
gcctgacacagcgaccagaggctga

SEQ ID NO: 3693401 - DNA, 25 bp, Homo sapien
ggtcagatctcctagcagcctgaca

SEQ ID NO: 3693402 - DNA, 25 bp, Homo sapien
gaggcgatgggtcctgtcacccaca

SEQ ID NO: 3693403 - DNA, 25 bp, Homo sapien
ctgtctgcgggtggcactcccgtgg

SEQ ID NO: 3693404 - DNA, 25 bp, Homo sapien
tcctgtctgcgggtggcactcccgt

SEQ ID NO: 3693405 - DNA, 25 bp, Homo sapien
ggtcctgtctgcgggtggcactccc

SEQ ID NO: 3693406 - DNA, 25 bp, Homo sapien
cctgtctgcgggtggcactcccgtg

SEQ ID NO: 3693407 - DNA, 25 bp, Homo sapien
gaaggatcttcatgggcaaaggcag

SEQ ID NO: 3693408 - DNA, 25 bp, Homo sapien
tcagacaaactggagcccttactgg

SEQ ID NO: 3693409 - DNA, 25 bp, Homo sapien
gggtgaggagagagccagtggtcct

SEQ ID NO: 3693410 - DNA, 25 bp, Homo sapien
cagtggtcctctgccatcagacaaa

SEQ ID NO: 3693411 - DNA, 25 bp, Homo sapien
agaatatcatttggtcccaccgaca

SEQ ID NO: 3693412 - DNA, 25 bp, Homo sapien
ttggtcccaccgacaaatccgagga

SEQ ID NO: 3693413 - DNA, 25 bp, Homo sapien
gccctggatgttttttccgctgccc

SEQ ID NO: 3693414 - DNA, 25 bp, Homo sapien
ggccctggatgttttttccgctgcc

SEQ ID NO: 3693415 - DNA, 25 bp, Homo sapien
gctctgatcgttcgggaaagcggaa

SEQ ID NO: 3693416 - DNA, 25 bp, Homo sapien
gaagggcacgaggaggatgtctgga

SEQ ID NO: 3693417 - DNA, 25 bp, Homo sapien
agcggaaaatgctccagcgaacagg

SEQ ID NO: 3693418 - DNA, 25 bp, Homo sapien
atgtctggagaggttgccacactca

SEQ ID NO: 3693419 - DNA, 25 bp, Homo sapien
ggcaggaagtgggacgggcctgcgt

SEQ ID NO: 3693420 - DNA, 25 bp, Homo sapien
agtgggacgggcctgcgtctcagac

SEQ ID NO: 3693421 - DNA, 25 bp, Homo sapien
acgggcctgcgtctcagaccagggc

SEQ ID NO: 3693422 - DNA, 25 bp, Homo sapien
caggaagtgggacgggcctgcgtct

SEQ ID NO: 3693423 - DNA, 25 bp, Homo sapien
agagagaggccctggagtgactcgg

SEQ ID NO: 3693424 - DNA, 25 bp, Homo sapien
gagaggccctggagtgactcggatc

SEQ ID NO: 3693425 - DNA, 25 bp, Homo sapien
gagagagagaggccctggagtgact

SEQ ID NO: 3693426 - DNA, 25 bp, Homo sapien
agagagagagaggccctggagtgac

SEQ ID NO: 3693427 - DNA, 25 bp, Homo sapien
tcatcgagcccttgtgaagcattgg

SEQ ID NO: 3693428 - DNA, 25 bp, Homo sapien
ctaagtcaagggtttcaggtcgcac

SEQ ID NO: 3693429 - DNA, 25 bp, Homo sapien
ccttttacgagagacaccatggaat

SEQ ID NO: 3693430 - DNA, 25 bp, Homo sapien
tcctcttagactggacggcacgcaa

SEQ ID NO: 3693431 - DNA, 25 bp, Homo sapien
gggcctagccaataattttcaaaga

SEQ ID NO: 3693432 - DNA, 25 bp, Homo sapien
tggagaggccacagcagaattgact

SEQ ID NO: 3693433 - DNA, 25 bp, Homo sapien
aagatggtggtgtcaagctcagaat

SEQ ID NO: 3693434 - DNA, 25 bp, Homo sapien
caatcgcatgtacagagaggagcct

SEQ ID NO: 3693435 - DNA, 25 bp, Homo sapien
acagaggtatgtggccgatctcact

SEQ ID NO: 3693436 - DNA, 25 bp, Homo sapien
ttgataggaccatgggcaccacctg

SEQ ID NO: 3693437 - DNA, 25 bp, Homo sapien
ggtcgatggatccaggactgtccca

SEQ ID NO: 3693438 - DNA, 25 bp, Homo sapien
cacttcttgaaccttgataggacca

SEQ ID NO: 3693439 - DNA, 25 bp, Homo sapien
cagaggagagtctccgtaaccagag

SEQ ID NO: 3693440 - DNA, 25 bp, Homo sapien
gaggagagtctccgtaaccagagca

SEQ ID NO: 3693441 - DNA, 25 bp, Homo sapien
agaggagagtctccgtaaccagagc

SEQ ID NO: 3693442 - DNA, 25 bp, Homo sapien
gcagaggagagtctccgtaaccaga

SEQ ID NO: 3693443 - DNA, 25 bp, Homo sapien
aggtggcaggttgggttggaaggtg

SEQ ID NO: 3693444 - DNA, 25 bp, Homo sapien
ggtggcaggttgggttggaaggtgc

SEQ ID NO: 3693445 - DNA, 25 bp, Homo sapien
tcagaggtggcaggttgggttggaa

SEQ ID NO: 3693446 - DNA, 25 bp, Homo sapien
agaggtggcaggttgggttggaagg

SEQ ID NO: 3693447 - DNA, 25 bp, Homo sapien
ccccatttgacatacaaggccctct

SEQ ID NO: 3693448 - DNA, 25 bp, Homo sapien
ctcggagccgaaccggaactgcttc

SEQ ID NO: 3693449 - DNA, 25 bp, Homo sapien
gcagctgctcggagccgaaccggaa

SEQ ID NO: 3693450 - DNA, 25 bp, Homo sapien
gagccgaaccggaactgcttcggga

SEQ ID NO: 3693451 - DNA, 25 bp, Homo sapien
gccggcagctgctcggagccgaacc

SEQ ID NO: 3693452 - DNA, 25 bp, Homo sapien
cccgcctcgccggagtgaagcgcct

SEQ ID NO: 3693453 - DNA, 25 bp, Homo sapien
gtcggcgtccgagccgccgtcggag

SEQ ID NO: 3693454 - DNA, 25 bp, Homo sapien
tcgccggagtgaagcgcctcaagcg

SEQ ID NO: 3693455 - DNA, 25 bp, Homo sapien
acccacctccgagtcggcgtccgag

SEQ ID NO: 3693456 - DNA, 25 bp, Homo sapien
gcaggcgccccccaagctcccctct

SEQ ID NO: 3693457 - DNA, 25 bp, Homo sapien
ggcagcaggcgccccccaagctccc

SEQ ID NO: 3693458 - DNA, 25 bp, Homo sapien
ccttggcagcaggcgccccccaagc

SEQ ID NO: 3693459 - DNA, 25 bp, Homo sapien
cttggcagcaggcgccccccaagct

SEQ ID NO: 3693460 - DNA, 25 bp, Homo sapien
aatgcagcggcgtgatctcagccca

SEQ ID NO: 3693461 - DNA, 25 bp, Homo sapien
aacaattctcctgcctctgcctccc

SEQ ID NO: 3693462 - DNA, 25 bp, Homo sapien
gggactataggggcacaccaccaca

SEQ ID NO: 3693463 - DNA, 25 bp, Homo sapien
ctgcagcctctgcctcccaggttca

SEQ ID NO: 3693464 - DNA, 25 bp, Homo sapien
taaactatgatgtaggaggataagg

SEQ ID NO: 3693465 - DNA, 25 bp, Homo sapien
gggcatatatggctaaactttgtga

SEQ ID NO: 3693466 - DNA, 25 bp, Homo sapien
gaggataaggtttaatttgggcata

SEQ ID NO: 3693467 - DNA, 25 bp, Homo sapien
aactttgtgattaataactctgtag

SEQ ID NO: 3693468 - DNA, 25 bp, Homo sapien
cagaagagagagctactcttcagta

SEQ ID NO: 3693469 - DNA, 25 bp, Homo sapien
tatgtgtaccgttttgctctctaga

SEQ ID NO: 3693470 - DNA, 25 bp, Homo sapien
cttcagtatgtgtaccgttttgctc

SEQ ID NO: 3693471 - DNA, 25 bp, Homo sapien
tgctctctagatttttctgacaggt

SEQ ID NO: 3693472 - DNA, 25 bp, Homo sapien
ataatcagagtgtgttttagaaaga

SEQ ID NO: 3693473 - DNA, 25 bp, Homo sapien
gcactctggtagctggaggcgggag

SEQ ID NO: 3693474 - DNA, 25 bp, Homo sapien
atcctagcactctggtagctggagg

SEQ ID NO: 3693475 - DNA, 25 bp, Homo sapien
tagaaagaataattggctaggtgtg

SEQ ID NO: 3693476 - DNA, 25 bp, Homo sapien
tggaaacgaggacctgagagagcca

SEQ ID NO: 3693477 - DNA, 25 bp, Homo sapien
aataggctgcataaggcagtagccc

SEQ ID NO: 3693478 - DNA, 25 bp, Homo sapien
gcagtagcccttttagacacaacag

SEQ ID NO: 3693479 - DNA, 25 bp, Homo sapien
gacacaacagttgttccttcttgga

SEQ ID NO: 3693480 - DNA, 25 bp, Homo sapien
ggaagcacataggtgcccaaggtac

SEQ ID NO: 3693481 - DNA, 25 bp, Homo sapien
tggcacaactcatgtagttatgtag

SEQ ID NO: 3693482 - DNA, 25 bp, Homo sapien
ctttggaagcacataggtgcccaag

SEQ ID NO: 3693483 - DNA, 25 bp, Homo sapien
acaactcatgtagttatgtagcttc

SEQ ID NO: 3693484 - DNA, 25 bp, Homo sapien
ttcagtccttaaggagtcggctcct

SEQ ID NO: 3693485 - DNA, 25 bp, Homo sapien
taagtcaggtagacatgtttggtcc

SEQ ID NO: 3693486 - DNA, 25 bp, Homo sapien
tcggctccttatacggactttggtg

SEQ ID NO: 3693487 - DNA, 25 bp, Homo sapien
catggggcagcactcaaaagtctaa

SEQ ID NO: 3693488 - DNA, 25 bp, Homo sapien
ttttgcttggagaaacacctactca

SEQ ID NO: 3693489 - DNA, 25 bp, Homo sapien
agatggcgcattctcaaactcagca

SEQ ID NO: 3693490 - DNA, 25 bp, Homo sapien
ttctgactgtagcaaaggtagcatt

SEQ ID NO: 3693491 - DNA, 25 bp, Homo sapien
tcatgttggcctcctaatgccaacc

SEQ ID NO: 3693492 - DNA, 25 bp, Homo sapien
gatgctgacgttttagctgctagaa

SEQ ID NO: 3693493 - DNA, 25 bp, Homo sapien
ttacaacctcaatcaggctaatagg

SEQ ID NO: 3693494 - DNA, 25 bp, Homo sapien
tcttggaagtctttgagcctgctgt

SEQ ID NO: 3693495 - DNA, 25 bp, Homo sapien
aagttatacgtggaagtctcttgga

SEQ ID NO: 3693496 - DNA, 25 bp, Homo sapien
accaatgggttccatgtcactccca

SEQ ID NO: 3693497 - DNA, 25 bp, Homo sapien
ccaatgggttccatgtcactcccat

SEQ ID NO: 3693498 - DNA, 25 bp, Homo sapien
caccaatgggttccatgtcactccc

SEQ ID NO: 3693499 - DNA, 25 bp, Homo sapien
acactaactacatgagcaccattta

SEQ ID NO: 3693500 - DNA, 25 bp, Homo sapien
tggcaaaggcagacactaactacat

SEQ ID NO: 3693501 - DNA, 25 bp, Homo sapien
cttggcaaaggcagacactaactac

SEQ ID NO: 3693502 - DNA, 25 bp, Homo sapien
gtaacttggcaaaggcagacactaa

SEQ ID NO: 3693503 - DNA, 25 bp, Homo sapien
ttctcaggtttataaagtatatcag

SEQ ID NO: 3693504 - DNA, 25 bp, Homo sapien
ctcaggtttataaagtatatcagat

SEQ ID NO: 3693505 - DNA, 25 bp, Homo sapien
tgggccttctcaggtttataaagta

SEQ ID NO: 3693506 - DNA, 25 bp, Homo sapien
caggtttataaagtatatcagatac

SEQ ID NO: 3693507 - DNA, 25 bp, Homo sapien
tacatgcttggtagtccagcggcga

SEQ ID NO: 3693508 - DNA, 25 bp, Homo sapien
gaaagctccccattacagagccagt

SEQ ID NO: 3693509 - DNA, 25 bp, Homo sapien
caggcactcgctcatggactataac

SEQ ID NO: 3693510 - DNA, 25 bp, Homo sapien
caagtcagttatgggtccgtcacag

SEQ ID NO: 3693511 - DNA, 25 bp, Homo sapien
tctctctgaacttctgctcatattt

SEQ ID NO: 3693512 - DNA, 25 bp, Homo sapien
cagatggtcaggttaaaaatcttgg

SEQ ID NO: 3693513 - DNA, 25 bp, Homo sapien
tgacatgtcgaaaaccaaaccctta

SEQ ID NO: 3693514 - DNA, 25 bp, Homo sapien
acctgcagtcgtagtgactcgggag

SEQ ID NO: 3693515 - DNA, 25 bp, Homo sapien
tacttccgtcatggcaaaggcccat

SEQ ID NO: 3693516 - DNA, 25 bp, Homo sapien
gccaaatatagcacagaatcatgcc

SEQ ID NO: 3693517 - DNA, 25 bp, Homo sapien
aatcatgccacatacttccgtcatg

SEQ ID NO: 3693518 - DNA, 25 bp, Homo sapien
ccaggagccaaatatagcacagaat

SEQ ID NO: 3693519 - DNA, 25 bp, Homo sapien
gtcatttaatggagtaatgaggtac

SEQ ID NO: 3693520 - DNA, 25 bp, Homo sapien
tcagtcatttaatggagtaatgagg

SEQ ID NO: 3693521 - DNA, 25 bp, Homo sapien
cagtcatttaatggagtaatgaggt

SEQ ID NO: 3693522 - DNA, 25 bp, Homo sapien
agtcatttaatggagtaatgaggta

SEQ ID NO: 3693523 - DNA, 25 bp, Homo sapien
tacagttcccatcagactacagagc

SEQ ID NO: 3693524 - DNA, 25 bp, Homo sapien
gcaggtgttgtcctggcacggagag

SEQ ID NO: 3693525 - DNA, 25 bp, Homo sapien
acagagccttcgcagaagtattgac

SEQ ID NO: 3693526 - DNA, 25 bp, Homo sapien
catggtaaagcagcgaagcaagaat

SEQ ID NO: 3693527 - DNA, 25 bp, Homo sapien
gggtcataccaaagccactccaaat

SEQ ID NO: 3693528 - DNA, 25 bp, Homo sapien
aaagaaattcagcatagttaggacg

SEQ ID NO: 3693529 - DNA, 25 bp, Homo sapien
cacatgtgtgaacgccagtcagggt

SEQ ID NO: 3693530 - DNA, 25 bp, Homo sapien
ggacgactgtgtggccactaaacat

SEQ ID NO: 3693531 - DNA, 25 bp, Homo sapien
taatacgcatagaagcactaaaaag

SEQ ID NO: 3693532 - DNA, 25 bp, Homo sapien
ttacctaatacgcatagaagcacta

SEQ ID NO: 3693533 - DNA, 25 bp, Homo sapien
cctaatacgcatagaagcactaaaa

SEQ ID NO: 3693534 - DNA, 25 bp, Homo sapien
atacgcatagaagcactaaaaagat

SEQ ID NO: 3693535 - DNA, 25 bp, Homo sapien
aggtcaggctgttttgccattcttc

SEQ ID NO: 3693536 - DNA, 25 bp, Homo sapien
tctcaggtcaggctgttttgccatt

SEQ ID NO: 3693537 - DNA, 25 bp, Homo sapien
ctcagtcacgtttctcaggtcaggc

SEQ ID NO: 3693538 - DNA, 25 bp, Homo sapien
tcacgtttctcaggtcaggctgttt

SEQ ID NO: 3693539 - DNA, 25 bp, Homo sapien
gttgagaacccaggataaagtgtgc

SEQ ID NO: 3693540 - DNA, 25 bp, Homo sapien
tctcctactctgctgatatgctctg

SEQ ID NO: 3693541 - DNA, 25 bp, Homo sapien
tattggccagagtatggtagtacaa

SEQ ID NO: 3693542 - DNA, 25 bp, Homo sapien
taggtactgtgccattaacattgca

SEQ ID NO: 3693543 - DNA, 25 bp, Homo sapien
tactcaacaggtaagggtacagcct

SEQ ID NO: 3693544 - DNA, 25 bp, Homo sapien
gcatgcatacctccctacttaacgg

SEQ ID NO: 3693545 - DNA, 25 bp, Homo sapien
taattgcaggcctcagaatgccagc

SEQ ID NO: 3693546 - DNA, 25 bp, Homo sapien
tactttgtcaacacataagccaggc

SEQ ID NO: 3693547 - DNA, 25 bp, Homo sapien
acaactttttgtggggatgaggtct

SEQ ID NO: 3693548 - DNA, 25 bp, Homo sapien
cgcccagctaattttctaaacaact

SEQ ID NO: 3693549 - DNA, 25 bp, Homo sapien
gatgaggtctcactttgttgcccag

SEQ ID NO: 3693550 - DNA, 25 bp, Homo sapien
aggcatgcatcaccacgcccagcta

SEQ ID NO: 3693551 - DNA, 25 bp, Homo sapien
gatgtaagccttcacaagtctgcaa

SEQ ID NO: 3693552 - DNA, 25 bp, Homo sapien
gcagcacagccacgaaaggtttccc

SEQ ID NO: 3693553 - DNA, 25 bp, Homo sapien
gaaaactatggagaggatagccaca

SEQ ID NO: 3693554 - DNA, 25 bp, Homo sapien
taaagtctccatgatgatgtaagcc

SEQ ID NO: 3693555 - DNA, 25 bp, Homo sapien
cattacatccgggtgaggtgagaag

SEQ ID NO: 3693556 - DNA, 25 bp, Homo sapien
gatccaatgggttctggtctctctg

SEQ ID NO: 3693557 - DNA, 25 bp, Homo sapien
taaagagttataatccctgcaggtc

SEQ ID NO: 3693558 - DNA, 25 bp, Homo sapien
cagtatgggataattcaggctaaac

SEQ ID NO: 3693559 - DNA, 25 bp, Homo sapien
tcaaggtatggctaccacaggaact

SEQ ID NO: 3693560 - DNA, 25 bp, Homo sapien
ccacaggaactttcacatcttcaag

SEQ ID NO: 3693561 - DNA, 25 bp, Homo sapien
ggctaccacaggaactttcacatct

SEQ ID NO: 3693562 - DNA, 25 bp, Homo sapien
tatggctaccacaggaactttcaca

SEQ ID NO: 3693563 - DNA, 25 bp, Homo sapien
ggatttaatttagaatcaagatatt

SEQ ID NO: 3693564 - DNA, 25 bp, Homo sapien
tttacttatgtacaaacactgtgct

SEQ ID NO: 3693565 - DNA, 25 bp, Homo sapien
taatttagaatcaagatatttactt

SEQ ID NO: 3693566 - DNA, 25 bp, Homo sapien
tatttacttatgtacaaacactgtg

SEQ ID NO: 3693567 - DNA, 25 bp, Homo sapien
gatactggacccattcaggaactct

SEQ ID NO: 3693568 - DNA, 25 bp, Homo sapien
ccaaggctttgcctcagagtcccct

SEQ ID NO: 3693569 - DNA, 25 bp, Homo sapien
tcagagtcccctcggatgccacagc

SEQ ID NO: 3693570 - DNA, 25 bp, Homo sapien
ccacagctcagatactggacccatt

SEQ ID NO: 3693571 - DNA, 25 bp, Homo sapien
ccgggaagccagtccacaggatggg

SEQ ID NO: 3693572 - DNA, 25 bp, Homo sapien
gaagctgtgtaaacaggagctgctt

SEQ ID NO: 3693573 - DNA, 25 bp, Homo sapien
cagagggtggatgaagctgtgtaaa

SEQ ID NO: 3693574 - DNA, 25 bp, Homo sapien
aagggaggcgatgctccctgtgcct

SEQ ID NO: 3693575 - DNA, 25 bp, Homo sapien
cttaataggaaggattgcagagggt

SEQ ID NO: 3693576 - DNA, 25 bp, Homo sapien
ttagatggctttcttaataggaagg

SEQ ID NO: 3693577 - DNA, 25 bp, Homo sapien
tgcagagggtgaggggttgagtcca

SEQ ID NO: 3693578 - DNA, 25 bp, Homo sapien
ccagagtggaggccaaaggcttgct

SEQ ID NO: 3693579 - DNA, 25 bp, Homo sapien
ctggagtgcagtggcacgatctcac

SEQ ID NO: 3693580 - DNA, 25 bp, Homo sapien
tctcactgcaacctctgcctcctgg

SEQ ID NO: 3693581 - DNA, 25 bp, Homo sapien
aggcgtcggccaccacgcccgacta

SEQ ID NO: 3693582 - DNA, 25 bp, Homo sapien
ttggagtctcgccctgttgcccagc

SEQ ID NO: 3693583 - DNA, 25 bp, Homo sapien
taatagccatcagccatagtctctg

SEQ ID NO: 3693584 - DNA, 25 bp, Homo sapien
catgtctgctcaaatgctctcaacg

SEQ ID NO: 3693585 - DNA, 25 bp, Homo sapien
gacaaatgaaacgaagtgatcttta

SEQ ID NO: 3693586 - DNA, 25 bp, Homo sapien
tgaaagccatgtctgctcaaatgct

SEQ ID NO: 3693587 - DNA, 25 bp, Homo sapien
actgccttgctgtgctgggttgtgt

SEQ ID NO: 3693588 - DNA, 25 bp, Homo sapien
tggtgtgactgccttgctgtgctgg

SEQ ID NO: 3693589 - DNA, 25 bp, Homo sapien
tgtgactgccttgctgtgctgggtt

SEQ ID NO: 3693590 - DNA, 25 bp, Homo sapien
cttggtgtgactgccttgctgtgct

SEQ ID NO: 3693591 - DNA, 25 bp, Homo sapien
ctaagctagcgcagcctgcgcttct

SEQ ID NO: 3693592 - DNA, 25 bp, Homo sapien
cagggagaacgagtgggacacaggg

SEQ ID NO: 3693593 - DNA, 25 bp, Homo sapien
gcttctgagggaccgcttctctttc

SEQ ID NO: 3693594 - DNA, 25 bp, Homo sapien
cagcccagggagaacgagtgggaca

SEQ ID NO: 3693595 - DNA, 25 bp, Homo sapien
gggagtcagctgagcgttacccacg

SEQ ID NO: 3693596 - DNA, 25 bp, Homo sapien
cagggtcacgtagatctctcctact

SEQ ID NO: 3693597 - DNA, 25 bp, Homo sapien
tcctactccccttacgcgctggtgc

SEQ ID NO: 3693598 - DNA, 25 bp, Homo sapien
tccccttacgcgctggtgcgggttc

SEQ ID NO: 3693599 - DNA, 25 bp, Homo sapien
cgcgaacgcgtcacggacggggcgg

SEQ ID NO: 3693600 - DNA, 25 bp, Homo sapien
aggccccgcgcgaacgcgtcacgga

SEQ ID NO: 3693601 - DNA, 25 bp, Homo sapien
gcgtcggcgcgtggccggggcgata

SEQ ID NO: 3693602 - DNA, 25 bp, Homo sapien
gccggggcgatagggcgcggctgcg

SEQ ID NO: 3693603 - DNA, 25 bp, Homo sapien
gggcggggaacggcggaggcagcgc

SEQ ID NO: 3693604 - DNA, 25 bp, Homo sapien
ctcagaggcgagggggcggggaacg

SEQ ID NO: 3693605 - DNA, 25 bp, Homo sapien
acggcggaggcagcgcgctggggac

SEQ ID NO: 3693606 - DNA, 25 bp, Homo sapien
gcggaggcagcgcgctggggaccgc

SEQ ID NO: 3693607 - DNA, 25 bp, Homo sapien
acagcgccccggtcctgcaggtggg

SEQ ID NO: 3693608 - DNA, 25 bp, Homo sapien
tccagagcggccacgtggaccgaca

SEQ ID NO: 3693609 - DNA, 25 bp, Homo sapien
tggggatccggaaggcagaagctgc

SEQ ID NO: 3693610 - DNA, 25 bp, Homo sapien
ggtgggctgcctccgtccgtcggtg

SEQ ID NO: 3693611 - DNA, 25 bp, Homo sapien
agcgcagcccgctgccaactccaac

SEQ ID NO: 3693612 - DNA, 25 bp, Homo sapien
gtccctgcagcgcagcccgctgcca

SEQ ID NO: 3693613 - DNA, 25 bp, Homo sapien
ggagggcgaagtgaaggagacaccg

SEQ ID NO: 3693614 - DNA, 25 bp, Homo sapien
agtgaaggagacaccgttccgcccg

SEQ ID NO: 3693615 - DNA, 25 bp, Homo sapien
gtgtcctgaggggggccgccgccac

SEQ ID NO: 3693616 - DNA, 25 bp, Homo sapien
gtggtgtcctgaggggggccgccgc

SEQ ID NO: 3693617 - DNA, 25 bp, Homo sapien
ctggtggtgtcctgaggggggccgc

SEQ ID NO: 3693618 - DNA, 25 bp, Homo sapien
tggtgtcctgaggggggccgccgcc

SEQ ID NO: 3693619 - DNA, 25 bp, Homo sapien
agggacaagaagtgcggtaagctgg

SEQ ID NO: 3693620 - DNA, 25 bp, Homo sapien
agggccaaagggagatcccgggcag

SEQ ID NO: 3693621 - DNA, 25 bp, Homo sapien
gggacaagaagtgcggtaagctggg

SEQ ID NO: 3693622 - DNA, 25 bp, Homo sapien
ccaaagggagatcccgggcagagag

SEQ ID NO: 3693623 - DNA, 25 bp, Homo sapien
gcgcaagtctgtccgtgggtcgcca

SEQ ID NO: 3693624 - DNA, 25 bp, Homo sapien
cgcgcgcaagtctgtccgtgggtcg

SEQ ID NO: 3693625 - DNA, 25 bp, Homo sapien
gacgcgcgcaagtctgtccgtgggt

SEQ ID NO: 3693626 - DNA, 25 bp, Homo sapien
cgcgcaagtctgtccgtgggtcgcc

SEQ ID NO: 3693627 - DNA, 25 bp, Homo sapien
tcctctagaaaagtgattgatccga

SEQ ID NO: 3693628 - DNA, 25 bp, Homo sapien
acaaagcacgtccacgcccttagga

SEQ ID NO: 3693629 - DNA, 25 bp, Homo sapien
cacaagtaatgaccttgcgctctca

SEQ ID NO: 3693630 - DNA, 25 bp, Homo sapien
ttgcgctctcacaagagggactgct

SEQ ID NO: 3693631 - DNA, 25 bp, Homo sapien
ctgcttaagggcaggcaatctgagc

SEQ ID NO: 3693632 - DNA, 25 bp, Homo sapien
gggcaggcaatctgagctcattaca

SEQ ID NO: 3693633 - DNA, 25 bp, Homo sapien
caagtcctcggccaatgctgtgctg

SEQ ID NO: 3693634 - DNA, 25 bp, Homo sapien
ggcaatctgagctcattacaccagc

SEQ ID NO: 3693635 - DNA, 25 bp, Homo sapien
cagcatatgatggaggaatacacat

SEQ ID NO: 3693636 - DNA, 25 bp, Homo sapien
gaaaatatctctggcagctttgcca

SEQ ID NO: 3693637 - DNA, 25 bp, Homo sapien
ctttgttgaaaatatctctggcagc

SEQ ID NO: 3693638 - DNA, 25 bp, Homo sapien
gctttgccaaggtcagcatatgatg

SEQ ID NO: 3693639 - DNA, 25 bp, Homo sapien
gactttgttttcacatccagtttca

SEQ ID NO: 3693640 - DNA, 25 bp, Homo sapien
cacgccactgcaagactttgttttc

SEQ ID NO: 3693641 - DNA, 25 bp, Homo sapien
ctttgttttcacatccagtttcacc

SEQ ID NO: 3693642 - DNA, 25 bp, Homo sapien
ttgttttcacatccagtttcaccaa

SEQ ID NO: 3693643 - DNA, 25 bp, Homo sapien
acgccaagcctaaggaagacagctg

SEQ ID NO: 3693644 - DNA, 25 bp, Homo sapien
gaaaataataaagagactacagcca

SEQ ID NO: 3693645 - DNA, 25 bp, Homo sapien
gaaaaaatacggagggcttatctga

SEQ ID NO: 3693646 - DNA, 25 bp, Homo sapien
tgtgccaatccctggttgcacacga

SEQ ID NO: 3693647 - DNA, 25 bp, Homo sapien
cccaagctggaacacaatgatgtga

SEQ ID NO: 3693648 - DNA, 25 bp, Homo sapien
cctggttgcacacgaactgaaaaag

SEQ ID NO: 3693649 - DNA, 25 bp, Homo sapien
tgtattagatgaaccggacgttgaa

SEQ ID NO: 3693650 - DNA, 25 bp, Homo sapien
attagatgaaccggacgttgaaaat

SEQ ID NO: 3693651 - DNA, 25 bp, Homo sapien
gtattagatgaaccggacgttgaaa

SEQ ID NO: 3693652 - DNA, 25 bp, Homo sapien
tagatgaaccggacgttgaaaattc

SEQ ID NO: 3693653 - DNA, 25 bp, Homo sapien
aaagtcagaccatactcacaccact

SEQ ID NO: 3693654 - DNA, 25 bp, Homo sapien
gaccatactcacaccacttgtattt

SEQ ID NO: 3693655 - DNA, 25 bp, Homo sapien
tactcacaccacttgtatttggtct

SEQ ID NO: 3693656 - DNA, 25 bp, Homo sapien
gtcagaccatactcacaccacttgt

SEQ ID NO: 3693657 - DNA, 25 bp, Homo sapien
gtgtttggtgagaaggtagtatcaa

SEQ ID NO: 3693658 - DNA, 25 bp, Homo sapien
ctgtgtttggtgagaaggtagtatc

SEQ ID NO: 3693659 - DNA, 25 bp, Homo sapien
ttggtgagaaggtagtatcaaatgt

SEQ ID NO: 3693660 - DNA, 25 bp, Homo sapien
ggtgagaaggtagtatcaaatgtca

SEQ ID NO: 3693661 - DNA, 25 bp, Homo sapien
gaacaaactgatgtcattgggaaaa

SEQ ID NO: 3693662 - DNA, 25 bp, Homo sapien
tgtcattgggaaaaatttacacaca

SEQ ID NO: 3693663 - DNA, 25 bp, Homo sapien
actgatgtcattgggaaaaatttac

SEQ ID NO: 3693664 - DNA, 25 bp, Homo sapien
aaaagaacaaactgatgtcattggg

SEQ ID NO: 3693665 - DNA, 25 bp, Homo sapien
caaggtttatacactccctcttgta

SEQ ID NO: 3693666 - DNA, 25 bp, Homo sapien
aagtcaacatcacaaccaaggttta

SEQ ID NO: 3693667 - DNA, 25 bp, Homo sapien
aatcaaagtcaacatcacaaccaag

SEQ ID NO: 3693668 - DNA, 25 bp, Homo sapien
caacatcacaaccaaggtttataca

SEQ ID NO: 3693669 - DNA, 25 bp, Homo sapien
tactctctcagcaccaaaggtcaga

SEQ ID NO: 3693670 - DNA, 25 bp, Homo sapien
gaatgtactggtagcagtctgccaa

SEQ ID NO: 3693671 - DNA, 25 bp, Homo sapien
gagccgagatcgcaaaagagcaaga

SEQ ID NO: 3693672 - DNA, 25 bp, Homo sapien
tagggtgcacccagatcaataagat

SEQ ID NO: 3693673 - DNA, 25 bp, Homo sapien
tgtaataatgtctaaggcacaggct

SEQ ID NO: 3693674 - DNA, 25 bp, Homo sapien
taaattagtagatctagaatagaca

SEQ ID NO: 3693675 - DNA, 25 bp, Homo sapien
catacagggattggtaaaatgaacc

SEQ ID NO: 3693676 - DNA, 25 bp, Homo sapien
gctcaagtgggtctttagtgttcca

SEQ ID NO: 3693677 - DNA, 25 bp, Homo sapien
ccaactgatatttagctgcaatgcc

SEQ ID NO: 3693678 - DNA, 25 bp, Homo sapien
taatgtgtaacatccaaagagccca

SEQ ID NO: 3693679 - DNA, 25 bp, Homo sapien
acttcaagggctggaatgaaccctg

SEQ ID NO: 3693680 - DNA, 25 bp, Homo sapien
catttccagggcctaggttgcctag

SEQ ID NO: 3693681 - DNA, 25 bp, Homo sapien
tgaaccctgaagagtaagacatagt

SEQ ID NO: 3693682 - DNA, 25 bp, Homo sapien
gagacaaagcccctacatgtttccc

SEQ ID NO: 3693683 - DNA, 25 bp, Homo sapien
tcaaattctcagtaggacacaatac

SEQ ID NO: 3693684 - DNA, 25 bp, Homo sapien
gcacaaaagcctaagcactctcata

SEQ ID NO: 3693685 - DNA, 25 bp, Homo sapien
tgtattaagccaaacaaaccaggta

SEQ ID NO: 3693686 - DNA, 25 bp, Homo sapien
ggcctcagagtctgagtatagccta

SEQ ID NO: 3693687 - DNA, 25 bp, Homo sapien
gcctactccaattaagctagagttg

SEQ ID NO: 3693688 - DNA, 25 bp, Homo sapien
cagagtctgagtatagcctactcca

SEQ ID NO: 3693689 - DNA, 25 bp, Homo sapien
tagcctactccaattaagctagagt

SEQ ID NO: 3693690 - DNA, 25 bp, Homo sapien
tactcttaggatacacatgctaggg

SEQ ID NO: 3693691 - DNA, 25 bp, Homo sapien
gggttaccattctagctaaggcacc

SEQ ID NO: 3693692 - DNA, 25 bp, Homo sapien
tacctggcacgtcactcagtctggg

SEQ ID NO: 3693693 - DNA, 25 bp, Homo sapien
tatctgagacaccagaagaactggg

SEQ ID NO: 3693694 - DNA, 25 bp, Homo sapien
actccagggcgagcccaaccttgtg

SEQ ID NO: 3693695 - DNA, 25 bp, Homo sapien
agagcagagagtgtaagcttcacac

SEQ ID NO: 3693696 - DNA, 25 bp, Homo sapien
tctaccagagcagagagtgtaagct

SEQ ID NO: 3693697 - DNA, 25 bp, Homo sapien
aactccagggcgagcccaaccttgt

SEQ ID NO: 3693698 - DNA, 25 bp, Homo sapien
ttctgatatccattcccaaaggttt

SEQ ID NO: 3693699 - DNA, 25 bp, Homo sapien
gcctgctgctggtcacaatggaaat

SEQ ID NO: 3693700 - DNA, 25 bp, Homo sapien
ggaaatatattaaggccaaatcttc

SEQ ID NO: 3693701 - DNA, 25 bp, Homo sapien
gttttgatcatcttcttgggggaaa

SEQ ID NO: 3693702 - DNA, 25 bp, Homo sapien
gataaccaactagaaaccagctaac

SEQ ID NO: 3693703 - DNA, 25 bp, Homo sapien
gaaaccagctaacaaagaactgtct

SEQ ID NO: 3693704 - DNA, 25 bp, Homo sapien
atacttaaaatacagctcttgttga

SEQ ID NO: 3693705 - DNA, 25 bp, Homo sapien
aaatacagctcttgttgagatcatc

SEQ ID NO: 3693706 - DNA, 25 bp, Homo sapien
aaatttgtaacctcatcttaatatc

SEQ ID NO: 3693707 - DNA, 25 bp, Homo sapien
aatatccactgatccatctcattca

SEQ ID NO: 3693708 - DNA, 25 bp, Homo sapien
tcatcttaatatccactgatccatc

SEQ ID NO: 3693709 - DNA, 25 bp, Homo sapien
ttcaatggtaacagtcaatgttttc

SEQ ID NO: 3693710 - DNA, 25 bp, Homo sapien
cctagctggcaaacgtggaactccg

SEQ ID NO: 3693711 - DNA, 25 bp, Homo sapien
taaaaagctcgtggaatctagggac

SEQ ID NO: 3693712 - DNA, 25 bp, Homo sapien
ggcacagatttaggtacagagcaaa

SEQ ID NO: 3693713 - DNA, 25 bp, Homo sapien
tcaagtattggctagctaccacggg

SEQ ID NO: 3693714 - DNA, 25 bp, Homo sapien
caccttcgacgtggccgtggtggat

SEQ ID NO: 3693715 - DNA, 25 bp, Homo sapien
tggatgcggacaaggagaactgctc

SEQ ID NO: 3693716 - DNA, 25 bp, Homo sapien
cctcgccgtcctcagagtaagggat

SEQ ID NO: 3693717 - DNA, 25 bp, Homo sapien
agcacaagatcgacctccggctgaa

SEQ ID NO: 3693718 - DNA, 25 bp, Homo sapien
tggccctccctgggcttccggcttc

SEQ ID NO: 3693719 - DNA, 25 bp, Homo sapien
tgaccttgggctgggccctggccct

SEQ ID NO: 3693720 - DNA, 25 bp, Homo sapien
ctggccctccctgggcttccggctt

SEQ ID NO: 3693721 - DNA, 25 bp, Homo sapien
gtgtgaccttgggctgggccctggc

SEQ ID NO: 3693722 - DNA, 25 bp, Homo sapien
gtagtgccccgacaaggtggagccc

SEQ ID NO: 3693723 - DNA, 25 bp, Homo sapien
gcgcggcgtggctcaggttaatcca

SEQ ID NO: 3693724 - DNA, 25 bp, Homo sapien
tgtggccgccagatgatgcccgaga

SEQ ID NO: 3693725 - DNA, 25 bp, Homo sapien
ttgcagtaaggctgtgtggccgcca

SEQ ID NO: 3693726 - DNA, 25 bp, Homo sapien
ggcagcgccagaactctagtcaaga

SEQ ID NO: 3693727 - DNA, 25 bp, Homo sapien
tcaagggagaggtacgcgcgtttcc

SEQ ID NO: 3693728 - DNA, 25 bp, Homo sapien
cctgctgtatgctcaggcctgggaa

SEQ ID NO: 3693729 - DNA, 25 bp, Homo sapien
tagtcaagagcatttatttagcgcc

SEQ ID NO: 3693730 - DNA, 25 bp, Homo sapien
ggagctttattaagccaggacacaa

SEQ ID NO: 3693731 - DNA, 25 bp, Homo sapien
catgcccagccaacgatccaatatt

SEQ ID NO: 3693732 - DNA, 25 bp, Homo sapien
tgtatagctcagagatatgagcccc

SEQ ID NO: 3693733 - DNA, 25 bp, Homo sapien
tctgcagggcttcgctgtatagctc

SEQ ID NO: 3693734 - DNA, 25 bp, Homo sapien
gaactcagcaggacttactgctatc

SEQ ID NO: 3693735 - DNA, 25 bp, Homo sapien
acagtctagagttgtccagtttcct

SEQ ID NO: 3693736 - DNA, 25 bp, Homo sapien
tgctatccaactagagacttcattt

SEQ ID NO: 3693737 - DNA, 25 bp, Homo sapien
acagcaactgctgaactcagcagga

SEQ ID NO: 3693738 - DNA, 25 bp, Homo sapien
tgatggaggacagcgtggtaaaggc

SEQ ID NO: 3693739 - DNA, 25 bp, Homo sapien
tgtagcccaactgcacagacttcac

SEQ ID NO: 3693740 - DNA, 25 bp, Homo sapien
taaaggccttggacatgtagcccaa

SEQ ID NO: 3693741 - DNA, 25 bp, Homo sapien
gacagcgtggtaaaggccttggaca

SEQ ID NO: 3693742 - DNA, 25 bp, Homo sapien
gcagtaaaagccagggttctagtcg

SEQ ID NO: 3693743 - DNA, 25 bp, Homo sapien
atttgggcaagtccaggactttcct

SEQ ID NO: 3693744 - DNA, 25 bp, Homo sapien
ggttctagtcgcagccatgagaatt

SEQ ID NO: 3693745 - DNA, 25 bp, Homo sapien
taaaagccagggttctagtcgcagc

SEQ ID NO: 3693746 - DNA, 25 bp, Homo sapien
cgtgacaggctgacagaaaaacccg

SEQ ID NO: 3693747 - DNA, 25 bp, Homo sapien
ctgcgccgtgacaggctgacagaaa

SEQ ID NO: 3693748 - DNA, 25 bp, Homo sapien
gccgtgacaggctgacagaaaaacc

SEQ ID NO: 3693749 - DNA, 25 bp, Homo sapien
gacaggctgacagaaaaacccgggc

SEQ ID NO: 3693750 - DNA, 25 bp, Homo sapien
ggatgatgaatgacccgtaggcctt

SEQ ID NO: 3693751 - DNA, 25 bp, Homo sapien
agtcataacaaatccctggcgcggg

SEQ ID NO: 3693752 - DNA, 25 bp, Homo sapien
ctgccagttcagctgggtccgcggt

SEQ ID NO: 3693753 - DNA, 25 bp, Homo sapien
caacagcgtaaccaataatgagaac

SEQ ID NO: 3693754 - DNA, 25 bp, Homo sapien
ggtgtctgagccaccctctacttgg

SEQ ID NO: 3693755 - DNA, 25 bp, Homo sapien
caagacctgcatggatccaatgaag

SEQ ID NO: 3693756 - DNA, 25 bp, Homo sapien
ttccgggcttcaccagttacagatg

SEQ ID NO: 3693757 - DNA, 25 bp, Homo sapien
cttgaacaacaagctcttccgggct

SEQ ID NO: 3693758 - DNA, 25 bp, Homo sapien
cccgggttcacgcactgagctttct

SEQ ID NO: 3693759 - DNA, 25 bp, Homo sapien
tgttctttggcagtgttacgtttcc

SEQ ID NO: 3693760 - DNA, 25 bp, Homo sapien
tcttgcactgttgtggtatcttcac

SEQ ID NO: 3693761 - DNA, 25 bp, Homo sapien
ttatttgtctagcaattcgcagatc

SEQ ID NO: 3693762 - DNA, 25 bp, Homo sapien
ccttaagtaccatcgtctgttgtct

SEQ ID NO: 3693763 - DNA, 25 bp, Homo sapien
caggatcagaatccaggtatctctt

SEQ ID NO: 3693764 - DNA, 25 bp, Homo sapien
cagaatccaggtatctctttttcca

SEQ ID NO: 3693765 - DNA, 25 bp, Homo sapien
gccaaagccttaagtaccatcgtct

SEQ ID NO: 3693766 - DNA, 25 bp, Homo sapien
ccaaagaatggatgattcccacagg

SEQ ID NO: 3693767 - DNA, 25 bp, Homo sapien
aagaatggatgattcccacaggcat

SEQ ID NO: 3693768 - DNA, 25 bp, Homo sapien
tccctgcaagattctcgaagcaggg

SEQ ID NO: 3693769 - DNA, 25 bp, Homo sapien
cacaccgctggtgcccaatctgtgt

SEQ ID NO: 3693770 - DNA, 25 bp, Homo sapien
caacagataacaggatacattcagt

SEQ ID NO: 3693771 - DNA, 25 bp, Homo sapien
cagataacaggatacattcagtgag

SEQ ID NO: 3693772 - DNA, 25 bp, Homo sapien
agcaacagataacaggatacattca

SEQ ID NO: 3693773 - DNA, 25 bp, Homo sapien
gataacaggatacattcagtgagca

SEQ ID NO: 3693774 - DNA, 25 bp, Homo sapien
cacatgaatcttgtacaagataagg

SEQ ID NO: 3693775 - DNA, 25 bp, Homo sapien
caacacatgaatcttgtacaagata

SEQ ID NO: 3693776 - DNA, 25 bp, Homo sapien
aacacatgaatcttgtacaagataa

SEQ ID NO: 3693777 - DNA, 25 bp, Homo sapien
acacatgaatcttgtacaagataag

SEQ ID NO: 3693778 - DNA, 25 bp, Homo sapien
gaaagaacatccgggtgcaggtgat

SEQ ID NO: 3693779 - DNA, 25 bp, Homo sapien
ccagaaagaacatccgggtgcaggt

SEQ ID NO: 3693780 - DNA, 25 bp, Homo sapien
cagaaagaacatccgggtgcaggtg

SEQ ID NO: 3693781 - DNA, 25 bp, Homo sapien
cccagaaagaacatccgggtgcagg

SEQ ID NO: 3693782 - DNA, 25 bp, Homo sapien
ctacagacaagaagggcccacccaa

SEQ ID NO: 3693783 - DNA, 25 bp, Homo sapien
aggagcctgatttcccctgagcccc

SEQ ID NO: 3693784 - DNA, 25 bp, Homo sapien
cagacaagaagggcccacccaagga

SEQ ID NO: 3693785 - DNA, 25 bp, Homo sapien
ttctccttcggtgattaatggtgct

SEQ ID NO: 3693786 - DNA, 25 bp, Homo sapien
acagtcatctcaactgccacgccac

SEQ ID NO: 3693787 - DNA, 25 bp, Homo sapien
gtcatctcaactgccacgccacacg

SEQ ID NO: 3693788 - DNA, 25 bp, Homo sapien
actgccacgccacacggccccaggg

SEQ ID NO: 3693789 - DNA, 25 bp, Homo sapien
atctcaactgccacgccacacggcc

SEQ ID NO: 3693790 - DNA, 25 bp, Homo sapien
tctgctttctctgttgctggtgaaa

SEQ ID NO: 3693791 - DNA, 25 bp, Homo sapien
tcaaaggggacttcaggtttcacac

SEQ ID NO: 3693792 - DNA, 25 bp, Homo sapien
aggtttcacacggtgaccacctgtc

SEQ ID NO: 3693793 - DNA, 25 bp, Homo sapien
ggttgtaaccagatgggaggatcaa

SEQ ID NO: 3693794 - DNA, 25 bp, Homo sapien
tgggggatgagtgagagcctgggtg

SEQ ID NO: 3693795 - DNA, 25 bp, Homo sapien
gggggatgagtgagagcctgggtgg

SEQ ID NO: 3693796 - DNA, 25 bp, Homo sapien
ctgggggatgagtgagagcctgggt

SEQ ID NO: 3693797 - DNA, 25 bp, Homo sapien
aggaattggccgctcagccagcact

SEQ ID NO: 3693798 - DNA, 25 bp, Homo sapien
gtcagccaggaattggccgctcagc

SEQ ID NO: 3693799 - DNA, 25 bp, Homo sapien
ctgagggtcctggccgcactgccct

SEQ ID NO: 3693800 - DNA, 25 bp, Homo sapien
tcctggccgcactgccctccatctg

SEQ ID NO: 3693801 - DNA, 25 bp, Homo sapien
aactttattccggtggctcggtgag

SEQ ID NO: 3693802 - DNA, 25 bp, Homo sapien
ctttattccggtggctcggtgagtg

SEQ ID NO: 3693803 - DNA, 25 bp, Homo sapien
ccggtggctcggtgagtgaggagga

SEQ ID NO: 3693804 - DNA, 25 bp, Homo sapien
ccaactttattccggtggctcggtg

SEQ ID NO: 3693805 - DNA, 25 bp, Homo sapien
ggttggcactgtacgaactcgctca

SEQ ID NO: 3693806 - DNA, 25 bp, Homo sapien
aagtttctgggaatgtggttggcac

SEQ ID NO: 3693807 - DNA, 25 bp, Homo sapien
caaacaatgaattttcgactgggtc

SEQ ID NO: 3693808 - DNA, 25 bp, Homo sapien
caggattaacctctgctggaagttt

SEQ ID NO: 3693809 - DNA, 25 bp, Homo sapien
gatagcatgttagcgcagccttagg

SEQ ID NO: 3693810 - DNA, 25 bp, Homo sapien
ggaatcctcccgaaaataatagctg

SEQ ID NO: 3693811 - DNA, 25 bp, Homo sapien
tggcattagctaacacagggagtcc

SEQ ID NO: 3693812 - DNA, 25 bp, Homo sapien
cagggtggaccggagctgaatcact

SEQ ID NO: 3693813 - DNA, 25 bp, Homo sapien
gattataactggacctccctgcctg

SEQ ID NO: 3693814 - DNA, 25 bp, Homo sapien
aaagtctagagaatgggccaagccc

SEQ ID NO: 3693815 - DNA, 25 bp, Homo sapien
cagagagctcatactaggtgttcaa

SEQ ID NO: 3693816 - DNA, 25 bp, Homo sapien
caatgatatccattctcagagggct

SEQ ID NO: 3693817 - DNA, 25 bp, Homo sapien
tcgcctaccttttggtagcaggcaa

SEQ ID NO: 3693818 - DNA, 25 bp, Homo sapien
taagtggggtgaagcacccaagttc

SEQ ID NO: 3693819 - DNA, 25 bp, Homo sapien
agctgaaaagtcaggtcgcctacct

SEQ ID NO: 3693820 - DNA, 25 bp, Homo sapien
agtcaggtcgcctaccttttggtag

SEQ ID NO: 3693821 - DNA, 25 bp, Homo sapien
ctgggaatgaagcagtctccggagc

SEQ ID NO: 3693822 - DNA, 25 bp, Homo sapien
tgggaatgaagcagtctccggagcg

SEQ ID NO: 3693823 - DNA, 25 bp, Homo sapien
aatgaagcagtctccggagcgccat

SEQ ID NO: 3693824 - DNA, 25 bp, Homo sapien
ggaatgaagcagtctccggagcgcc

SEQ ID NO: 3693825 - DNA, 25 bp, Homo sapien
gtatggccccgtccggcagaccagg

SEQ ID NO: 3693826 - DNA, 25 bp, Homo sapien
tctttttagcacgaagttgctcaag

SEQ ID NO: 3693827 - DNA, 25 bp, Homo sapien
acgaagttgctcaaggttcatctga

SEQ ID NO: 3693828 - DNA, 25 bp, Homo sapien
taacaatgtaaaatgacacgatgat

SEQ ID NO: 3693829 - DNA, 25 bp, Homo sapien
aaaatccatcccagcaacgtgaagc

SEQ ID NO: 3693830 - DNA, 25 bp, Homo sapien
gcagtgatttattgtgacatggaat

SEQ ID NO: 3693831 - DNA, 25 bp, Homo sapien
gagccaagaacagtccgtgctgggc

SEQ ID NO: 3693832 - DNA, 25 bp, Homo sapien
tgacatggaatgtgggacatttccc

SEQ ID NO: 3693833 - DNA, 25 bp, Homo sapien
taatttttaagtccacccgctgaga

SEQ ID NO: 3693834 - DNA, 25 bp, Homo sapien
tgttagctccaagcggaccggtggt

SEQ ID NO: 3693835 - DNA, 25 bp, Homo sapien
catctgaggactgcatcggtggaca

SEQ ID NO: 3693836 - DNA, 25 bp, Homo sapien
ggttccttgagaatcctggccggcg

SEQ ID NO: 3693837 - DNA, 25 bp, Homo sapien
gaagtccggatacccgctggtgtac

SEQ ID NO: 3693838 - DNA, 25 bp, Homo sapien
acgcacccgctgcacggtgtgcact

SEQ ID NO: 3693839 - DNA, 25 bp, Homo sapien
cctacggctttatgctccctaacga

SEQ ID NO: 3693840 - DNA, 25 bp, Homo sapien
gtgtgcactcctcgctaacggccgc

SEQ ID NO: 3693841 - DNA, 25 bp, Homo sapien
cctgctcccggggcgagcgcgcagc

SEQ ID NO: 3693842 - DNA, 25 bp, Homo sapien
gcgctgggcgcccgtggccgccgcg

SEQ ID NO: 3693843 - DNA, 25 bp, Homo sapien
gcgcgctgggcgcccgtggccgccg

SEQ ID NO: 3693844 - DNA, 25 bp, Homo sapien
tcgcgtctggctccaggcgccgaga

SEQ ID NO: 3693845 - DNA, 25 bp, Homo sapien
ggctcccatttgattggaaggcggc

SEQ ID NO: 3693846 - DNA, 25 bp, Homo sapien
gctggacacgcagcggctcgcatcg

SEQ ID NO: 3693847 - DNA, 25 bp, Homo sapien
tgaagtgagtttcctcgccagagcc

SEQ ID NO: 3693848 - DNA, 25 bp, Homo sapien
gaaggcggcaaaggctttaatctcc

SEQ ID NO: 3693849 - DNA, 25 bp, Homo sapien
tctcgtcctcccagcgaaatcgagg

SEQ ID NO: 3693850 - DNA, 25 bp, Homo sapien
ttcgcccctggagttgacagtccgg

SEQ ID NO: 3693851 - DNA, 25 bp, Homo sapien
ttaaaaccggcactgagagtcctgg

SEQ ID NO: 3693852 - DNA, 25 bp, Homo sapien
gcggcggatggcaaacgtagaataa

SEQ ID NO: 3693853 - DNA, 25 bp, Homo sapien
tgcgctgcgccgcgcgggatctcga

SEQ ID NO: 3693854 - DNA, 25 bp, Homo sapien
ctggtggctgcgctgcgccgcgcgg

SEQ ID NO: 3693855 - DNA, 25 bp, Homo sapien
gctgcgccgcgcgggatctcgatta

SEQ ID NO: 3693856 - DNA, 25 bp, Homo sapien
ggctgcgctgcgccgcgcgggatct

SEQ ID NO: 3693857 - DNA, 25 bp, Homo sapien
aagggcggagagcccagcgctcctc

SEQ ID NO: 3693858 - DNA, 25 bp, Homo sapien
cagcgctcctcgcggtgttgagccg

SEQ ID NO: 3693859 - DNA, 25 bp, Homo sapien
catctagcttctggtttctccgccg

SEQ ID NO: 3693860 - DNA, 25 bp, Homo sapien
ccgcggaatctgaggaaattagagc

SEQ ID NO: 3693861 - DNA, 25 bp, Homo sapien
tgcggtcgaggaacattgacaattg

SEQ ID NO: 3693862 - DNA, 25 bp, Homo sapien
aggaacattgacaattgatggaggg

SEQ ID NO: 3693863 - DNA, 25 bp, Homo sapien
cggtcgaggaacattgacaattgat

SEQ ID NO: 3693864 - DNA, 25 bp, Homo sapien
tgattgcggtcgaggaacattgaca

SEQ ID NO: 3693865 - DNA, 25 bp, Homo sapien
tggtctcgggtacccggagccgcgc

SEQ ID NO: 3693866 - DNA, 25 bp, Homo sapien
aagttgccgccgctggtctcgggta

SEQ ID NO: 3693867 - DNA, 25 bp, Homo sapien
cccagaggtggaagggcgtctctcc

SEQ ID NO: 3693868 - DNA, 25 bp, Homo sapien
gtggcgggaaatctcccgtgttaga

SEQ ID NO: 3693869 - DNA, 25 bp, Homo sapien
tccaggactagaagttccttggtgg

SEQ ID NO: 3693870 - DNA, 25 bp, Homo sapien
ttagggaactacagagggtggcagc

SEQ ID NO: 3693871 - DNA, 25 bp, Homo sapien
cttagccctgcttacgacccgaggg

SEQ ID NO: 3693872 - DNA, 25 bp, Homo sapien
aattgaggcgaggtttgccccacca

SEQ ID NO: 3693873 - DNA, 25 bp, Homo sapien
cccagcctgcggggatggcggcagg

SEQ ID NO: 3693874 - DNA, 25 bp, Homo sapien
ccagcctgcggggatggcggcaggt

SEQ ID NO: 3693875 - DNA, 25 bp, Homo sapien
tgagatgtttcttcccccatacacc

SEQ ID NO: 3693876 - DNA, 25 bp, Homo sapien
gcatgagtgagcctgagatgtttct

SEQ ID NO: 3693877 - DNA, 25 bp, Homo sapien
caaatcgaggggaacgcggcagtcc

SEQ ID NO: 3693878 - DNA, 25 bp, Homo sapien
ggcatccaggtccaggtacccggtg

SEQ ID NO: 3693879 - DNA, 25 bp, Homo sapien
caggtacccggtggcacgcacagcg

SEQ ID NO: 3693880 - DNA, 25 bp, Homo sapien
caacccgagtgacggtgcaaatcga

SEQ ID NO: 3693881 - DNA, 25 bp, Homo sapien
tgcgcgccggtcgaaaccgggtctc

SEQ ID NO: 3693882 - DNA, 25 bp, Homo sapien
tcaaagtcttctaagtcgttccgag

SEQ ID NO: 3693883 - DNA, 25 bp, Homo sapien
caccatttatcaaaaggacttgaca

SEQ ID NO: 3693884 - DNA, 25 bp, Homo sapien
agactggctcccgactcccagagct

SEQ ID NO: 3693885 - DNA, 25 bp, Homo sapien
ggtacccgtgcggagtgggagacag

SEQ ID NO: 3693886 - DNA, 25 bp, Homo sapien
aagttctcggtacccgtgcggagtg

SEQ ID NO: 3693887 - DNA, 25 bp, Homo sapien
gatgggccaagaggagagggcgagc

SEQ ID NO: 3693888 - DNA, 25 bp, Homo sapien
ttctcggtacccgtgcggagtggga

SEQ ID NO: 3693889 - DNA, 25 bp, Homo sapien
tgagccgccggcgtaataagctgct

SEQ ID NO: 3693890 - DNA, 25 bp, Homo sapien
cattggttgggtcgacacctagacg

SEQ ID NO: 3693891 - DNA, 25 bp, Homo sapien
taagagtgcttcacagacgcgctgc

SEQ ID NO: 3693892 - DNA, 25 bp, Homo sapien
agttttgagaaaagcgaacgcacgc

SEQ ID NO: 3693893 - DNA, 25 bp, Homo sapien
aaatttcctacaaggtcggcagtgg

SEQ ID NO: 3693894 - DNA, 25 bp, Homo sapien
cactgaacccgacatatgaggtggc

SEQ ID NO: 3693895 - DNA, 25 bp, Homo sapien
tatctataaccagagtgagtcccgc

SEQ ID NO: 3693896 - DNA, 25 bp, Homo sapien
catcgctgagggttacggtatctac

SEQ ID NO: 3693897 - DNA, 25 bp, Homo sapien
gctttcatttttcaccgcgggcgaa

SEQ ID NO: 3693898 - DNA, 25 bp, Homo sapien
aaaccacctcgagtcctgcgttggg

SEQ ID NO: 3693899 - DNA, 25 bp, Homo sapien
gatgtattcggataaatgcagcgca

SEQ ID NO: 3693900 - DNA, 25 bp, Homo sapien
gaatctctcttgctaacttgcagcg

SEQ ID NO: 3693901 - DNA, 25 bp, Homo sapien
ctagcgtttcaccccggaccaggct

SEQ ID NO: 3693902 - DNA, 25 bp, Homo sapien
taaagagagtttttcgccctgacac

SEQ ID NO: 3693903 - DNA, 25 bp, Homo sapien
taagcactggctcgaagtgaggaca

SEQ ID NO: 3693904 - DNA, 25 bp, Homo sapien
gagcgcgcacattcccaggtttgca

SEQ ID NO: 3693905 - DNA, 25 bp, Homo sapien
tatggccgcggaaaatgtgttccca

SEQ ID NO: 3693906 - DNA, 25 bp, Homo sapien
catttctcggttacctgcgcggctg

SEQ ID NO: 3693907 - DNA, 25 bp, Homo sapien
tgtgtcgggcggtgctctctgtcct

SEQ ID NO: 3693908 - DNA, 25 bp, Homo sapien
ggactgcacaggtaaaagtctcggc

SEQ ID NO: 3693909 - DNA, 25 bp, Homo sapien
gctcaatttcggctcccggagctgg

SEQ ID NO: 3693910 - DNA, 25 bp, Homo sapien
tgggaccctatgagcacggactata

SEQ ID NO: 3693911 - DNA, 25 bp, Homo sapien
aagaggacggctgatcacatccgca

SEQ ID NO: 3693912 - DNA, 25 bp, Homo sapien
catccgcagagagagcgtgaggacc

SEQ ID NO: 3693913 - DNA, 25 bp, Homo sapien
aaatctcacgtgcaagtttgggcct

SEQ ID NO: 3693914 - DNA, 25 bp, Homo sapien
ccttaacaatggatgtcttgggaga

SEQ ID NO: 3693915 - DNA, 25 bp, Homo sapien
tacactgtatcatagggagccactg

SEQ ID NO: 3693916 - DNA, 25 bp, Homo sapien
caaaagtagtttggaagtgggctat

SEQ ID NO: 3693917 - DNA, 25 bp, Homo sapien
taacccagcaggagtatgtatgatg

SEQ ID NO: 3693918 - DNA, 25 bp, Homo sapien
gttgaataggtgcagtatatacatc

SEQ ID NO: 3693919 - DNA, 25 bp, Homo sapien
ggaatggttgaataggtgcagtata

SEQ ID NO: 3693920 - DNA, 25 bp, Homo sapien
cctggtaacaatctatgtgcccact

SEQ ID NO: 3693921 - DNA, 25 bp, Homo sapien
aacaatctatgtgcccactaatagg

SEQ ID NO: 3693922 - DNA, 25 bp, Homo sapien
caaagggagaatcagtcaacacagt

SEQ ID NO: 3693923 - DNA, 25 bp, Homo sapien
agaatcagtcaacacagtctgggtg

SEQ ID NO: 3693924 - DNA, 25 bp, Homo sapien
aagggagaatcagtcaacacagtct

SEQ ID NO: 3693925 - DNA, 25 bp, Homo sapien
gggagaatcagtcaacacagtctgg

SEQ ID NO: 3693926 - DNA, 25 bp, Homo sapien
tgacgtctgcaccacgcttagggtg

SEQ ID NO: 3693927 - DNA, 25 bp, Homo sapien
cattttaatgcatctccttgggcct

SEQ ID NO: 3693928 - DNA, 25 bp, Homo sapien
tctgggtgtgacagtgacctgaaga

SEQ ID NO: 3693929 - DNA, 25 bp, Homo sapien
ttttggtggtgttatgtccacgcat

SEQ ID NO: 3693930 - DNA, 25 bp, Homo sapien
cacctactatgtgtcgaacactggg

SEQ ID NO: 3693931 - DNA, 25 bp, Homo sapien
cctgtgaggcttacattatggtggg

SEQ ID NO: 3693932 - DNA, 25 bp, Homo sapien
gatacagtccttactcctgtgaggc

SEQ ID NO: 3693933 - DNA, 25 bp, Homo sapien
tgggagaagacagctaacaagttga

SEQ ID NO: 3693934 - DNA, 25 bp, Homo sapien
tgaacccggggcaaagcaagtgtca

SEQ ID NO: 3693935 - DNA, 25 bp, Homo sapien
aagcaagtgtcaagtgcacctggca

SEQ ID NO: 3693936 - DNA, 25 bp, Homo sapien
ctgtgaacccggggcaaagcaagtg

SEQ ID NO: 3693937 - DNA, 25 bp, Homo sapien
caaagcaagtgtcaagtgcacctgg

SEQ ID NO: 3693938 - DNA, 25 bp, Homo sapien
cttctccgaaagaagcccaggctct

SEQ ID NO: 3693939 - DNA, 25 bp, Homo sapien
cccacttctccgaaagaagcccagg

SEQ ID NO: 3693940 - DNA, 25 bp, Homo sapien
cacttctccgaaagaagcccaggct

SEQ ID NO: 3693941 - DNA, 25 bp, Homo sapien
ttctccgaaagaagcccaggctctc

SEQ ID NO: 3693942 - DNA, 25 bp, Homo sapien
gcaaattgtattcactactcagtgc

SEQ ID NO: 3693943 - DNA, 25 bp, Homo sapien
tcactactcagtgctccaatttgtc

SEQ ID NO: 3693944 - DNA, 25 bp, Homo sapien
tactcagtgctccaatttgtcccac

SEQ ID NO: 3693945 - DNA, 25 bp, Homo sapien
attgcctatttgcaaattgtattca

SEQ ID NO: 3693946 - DNA, 25 bp, Homo sapien
gccgcaactccaagtccttggctgg

SEQ ID NO: 3693947 - DNA, 25 bp, Homo sapien
actcgccgcaactccaagtccttgg

SEQ ID NO: 3693948 - DNA, 25 bp, Homo sapien
tggaactcgccgcaactccaagtcc

SEQ ID NO: 3693949 - DNA, 25 bp, Homo sapien
caactccaagtccttggctgggcat

SEQ ID NO: 3693950 - DNA, 25 bp, Homo sapien
tttatttccaatcaagggagttgat

SEQ ID NO: 3693951 - DNA, 25 bp, Homo sapien
gttgattctggggtcggccagaacc

SEQ ID NO: 3693952 - DNA, 25 bp, Homo sapien
acaggaactgattccttaaatcttc

SEQ ID NO: 3693953 - DNA, 25 bp, Homo sapien
gaaccagtgaaacaggaactgattc

SEQ ID NO: 3693954 - DNA, 25 bp, Homo sapien
tgatctcggagggttgaccttcctg

SEQ ID NO: 3693955 - DNA, 25 bp, Homo sapien
cctgtctggatgaaagtaggcccag

SEQ ID NO: 3693956 - DNA, 25 bp, Homo sapien
gacagccccggtcctaacacattgt

SEQ ID NO: 3693957 - DNA, 25 bp, Homo sapien
tcttgctgcagctaagagccagccc

SEQ ID NO: 3693958 - DNA, 25 bp, Homo sapien
ggaaggataattggctggtgacccc

SEQ ID NO: 3693959 - DNA, 25 bp, Homo sapien
taaaacgctggcttggtgaagacca

SEQ ID NO: 3693960 - DNA, 25 bp, Homo sapien
gttgaaggactcctggtgcggccca

SEQ ID NO: 3693961 - DNA, 25 bp, Homo sapien
tccctgtggcctctaagagttgaca

SEQ ID NO: 3693962 - DNA, 25 bp, Homo sapien
ttatcgcgtttgtctgggccacgcc

SEQ ID NO: 3693963 - DNA, 25 bp, Homo sapien
ccgttagccgggctgtagccagccg

SEQ ID NO: 3693964 - DNA, 25 bp, Homo sapien
agccagccgggcctttcctgcattt

SEQ ID NO: 3693965 - DNA, 25 bp, Homo sapien
ggcgccctttctgagccgttagccg

SEQ ID NO: 3693966 - DNA, 25 bp, Homo sapien
tggccgcccgctgcaacaggtggcc

SEQ ID NO: 3693967 - DNA, 25 bp, Homo sapien
cgggcgcacagttccgcactgggca

SEQ ID NO: 3693968 - DNA, 25 bp, Homo sapien
gcggaagccggaggcgcgggctagc

SEQ ID NO: 3693969 - DNA, 25 bp, Homo sapien
ggtctccgcgcaggtgagccctggc

SEQ ID NO: 3693970 - DNA, 25 bp, Homo sapien
gcccttgggctgtttggagtaggct

SEQ ID NO: 3693971 - DNA, 25 bp, Homo sapien
ccttgggctgtttggagtaggctaa

SEQ ID NO: 3693972 - DNA, 25 bp, Homo sapien
ggctgtttggagtaggctaagaaca

SEQ ID NO: 3693973 - DNA, 25 bp, Homo sapien
ctgtttggagtaggctaagaacagg

SEQ ID NO: 3693974 - DNA, 25 bp, Homo sapien
ctacgatcgtattacgttgtcataa

SEQ ID NO: 3693975 - DNA, 25 bp, Homo sapien
tacgatcgtattacgttgtcataag

SEQ ID NO: 3693976 - DNA, 25 bp, Homo sapien
gagttttcttgatcagcaaatgcca

SEQ ID NO: 3693977 - DNA, 25 bp, Homo sapien
gccagtggtgcatctatcatcatgt

SEQ ID NO: 3693978 - DNA, 25 bp, Homo sapien
aacaggagcaccaaggagagctatc

SEQ ID NO: 3693979 - DNA, 25 bp, Homo sapien
ggcaagaacttctcccacggtgcta

SEQ ID NO: 3693980 - DNA, 25 bp, Homo sapien
gccaaggtgctctggaatttctctg

SEQ ID NO: 3693981 - DNA, 25 bp, Homo sapien
aagcctctttgcgaaatgtccacag

SEQ ID NO: 3693982 - DNA, 25 bp, Homo sapien
ctctgcagtcctggcctatgtagga

SEQ ID NO: 3693983 - DNA, 25 bp, Homo sapien
ctcagaaggttaaagctcagatcaa

SEQ ID NO: 3693984 - DNA, 25 bp, Homo sapien
caacacggacaagaacaggctcctg

SEQ ID NO: 3693985 - DNA, 25 bp, Homo sapien
agggcccctggacatcacaaagatg

SEQ ID NO: 3693986 - DNA, 25 bp, Homo sapien
tcctgaccagatgtgaaaccaactc

SEQ ID NO: 3693987 - DNA, 25 bp, Homo sapien
gaaatgtctctcctctcaacaaagg

SEQ ID NO: 3693988 - DNA, 25 bp, Homo sapien
tatggctgacttggttcctggctga

SEQ ID NO: 3693989 - DNA, 25 bp, Homo sapien
cacagcaggaagaatcagatccagg

SEQ ID NO: 3693990 - DNA, 25 bp, Homo sapien
gatcacagcaggaagaatcagatcc

SEQ ID NO: 3693991 - DNA, 25 bp, Homo sapien
tggttcctggctgatcacagcagga

SEQ ID NO: 3693992 - DNA, 25 bp, Homo sapien
caggctggtcacaactgagacatta

SEQ ID NO: 3693993 - DNA, 25 bp, Homo sapien
ccttgcctcctaggaatcagtcagg

SEQ ID NO: 3693994 - DNA, 25 bp, Homo sapien
gatggccagtgatattcttggaaca

SEQ ID NO: 3693995 - DNA, 25 bp, Homo sapien
cagtcaggatatatcagtgccctag

SEQ ID NO: 3693996 - DNA, 25 bp, Homo sapien
tacgtatgacttcagggcctctagg

SEQ ID NO: 3693997 - DNA, 25 bp, Homo sapien
tcagaccctggtatagtgacttcca

SEQ ID NO: 3693998 - DNA, 25 bp, Homo sapien
caggcttggcagtagctgtcttctc

SEQ ID NO: 3693999 - DNA, 25 bp, Homo sapien
ggtggtctcaggcaattactctgct

SEQ ID NO: 3694000 - DNA, 25 bp, Homo sapien
taagtgaccttgtgctaggacagtg

SEQ ID NO: 3694001 - DNA, 25 bp, Homo sapien
gggcaagcagctgatctccataatg

SEQ ID NO: 3694002 - DNA, 25 bp, Homo sapien
tctacgcgaaacctgaacatgtgtg

SEQ ID NO: 3694003 - DNA, 25 bp, Homo sapien
tctctcatttaaaaccctaagtgac

SEQ ID NO: 3694004 - DNA, 25 bp, Homo sapien
tgtcgggcatcaagaaagcaaactg

SEQ ID NO: 3694005 - DNA, 25 bp, Homo sapien
tctcggcaaactggcggatgtggct

SEQ ID NO: 3694006 - DNA, 25 bp, Homo sapien
taactcctcaagacgtagcgaaagc

SEQ ID NO: 3694007 - DNA, 25 bp, Homo sapien
tttgctagtgtctccccagaaacgg

SEQ ID NO: 3694008 - DNA, 25 bp, Homo sapien
tattaataagagtgatgaggactcc

SEQ ID NO: 3694009 - DNA, 25 bp, Homo sapien
gaggtggagcctaatacgaggcatt

SEQ ID NO: 3694010 - DNA, 25 bp, Homo sapien
aagttcaatcacttgctctcttgcc

SEQ ID NO: 3694011 - DNA, 25 bp, Homo sapien
ggagcaatgcagattataaaagggc

SEQ ID NO: 3694012 - DNA, 25 bp, Homo sapien
agaggaaacacggacaggcttgtat

SEQ ID NO: 3694013 - DNA, 25 bp, Homo sapien
tctcattgagctcccatcctccatc

SEQ ID NO: 3694014 - DNA, 25 bp, Homo sapien
caggcttgtatcaagatgctcaaga

SEQ ID NO: 3694015 - DNA, 25 bp, Homo sapien
gaccagtgtaagcatacacaagcat

SEQ ID NO: 3694016 - DNA, 25 bp, Homo sapien
taagacaatgacagccaagaaggcc

SEQ ID NO: 3694017 - DNA, 25 bp, Homo sapien
gtatctcacagaatgagcacgcact

SEQ ID NO: 3694018 - DNA, 25 bp, Homo sapien
aatgagcacgcactaagacaatgac

SEQ ID NO: 3694019 - DNA, 25 bp, Homo sapien
ctaagacaatgacagccaagaaggc

SEQ ID NO: 3694020 - DNA, 25 bp, Homo sapien
cttcctgacgcacaatggcatttaa

SEQ ID NO: 3694021 - DNA, 25 bp, Homo sapien
acatgtgtgacctctcgaaccctag

SEQ ID NO: 3694022 - DNA, 25 bp, Homo sapien
taattgcttatggttctcgcctggg

SEQ ID NO: 3694023 - DNA, 25 bp, Homo sapien
aggcaagcacccacaattcatcaca

SEQ ID NO: 3694024 - DNA, 25 bp, Homo sapien
gagtgccattaatcagaacgaagcc

SEQ ID NO: 3694025 - DNA, 25 bp, Homo sapien
catctcccagttttggcagggaaac

SEQ ID NO: 3694026 - DNA, 25 bp, Homo sapien
tcgtcctagtttggtgcacttccag

SEQ ID NO: 3694027 - DNA, 25 bp, Homo sapien
aaaaagccaagagagccagcaccat

SEQ ID NO: 3694028 - DNA, 25 bp, Homo sapien
tctggcaactcaaccctaatacaaa

SEQ ID NO: 3694029 - DNA, 25 bp, Homo sapien
ggtgcatccaagaaccagaagtgtg

SEQ ID NO: 3694030 - DNA, 25 bp, Homo sapien
ggtcctcaaaccatgttgatggtgg

SEQ ID NO: 3694031 - DNA, 25 bp, Homo sapien
caaataaatgcaacgtaggcagaac

SEQ ID NO: 3694032 - DNA, 25 bp, Homo sapien
gcatagagaatggatttgggactag

SEQ ID NO: 3694033 - DNA, 25 bp, Homo sapien
tagggagtaagacgatcaaactggt

SEQ ID NO: 3694034 - DNA, 25 bp, Homo sapien
gggagtaagacgatcaaactggtgg

SEQ ID NO: 3694035 - DNA, 25 bp, Homo sapien
gggactagggagtaagacgatcaaa

SEQ ID NO: 3694036 - DNA, 25 bp, Homo sapien
ttaccacagatatgacaaggaggcc

SEQ ID NO: 3694037 - DNA, 25 bp, Homo sapien
catgcacagagttaaggagaagttc

SEQ ID NO: 3694038 - DNA, 25 bp, Homo sapien
tcccagaacataaaaggcagctaag

SEQ ID NO: 3694039 - DNA, 25 bp, Homo sapien
taccctgagtgatgcttagcccaag

SEQ ID NO: 3694040 - DNA, 25 bp, Homo sapien
gaagagacagtagtaaggtggctta

SEQ ID NO: 3694041 - DNA, 25 bp, Homo sapien
aacctctccatactagccaatgcaa

SEQ ID NO: 3694042 - DNA, 25 bp, Homo sapien
cacatggtcatgtccataaatgcca

SEQ ID NO: 3694043 - DNA, 25 bp, Homo sapien
attatacgctcccaaatcccaggag

SEQ ID NO: 3694044 - DNA, 25 bp, Homo sapien
ccttcgtctccctgattaatgttca

SEQ ID NO: 3694045 - DNA, 25 bp, Homo sapien
tgacaaaacaactccatatagcaag

SEQ ID NO: 3694046 - DNA, 25 bp, Homo sapien
tgctatcaaactgaggtgcgtgcca

SEQ ID NO: 3694047 - DNA, 25 bp, Homo sapien
tatagcaagtacatatcagacactg

SEQ ID NO: 3694048 - DNA, 25 bp, Homo sapien
tctctgaaactattacactcagaga

SEQ ID NO: 3694049 - DNA, 25 bp, Homo sapien
ttctctgaaactattacactcagag

SEQ ID NO: 3694050 - DNA, 25 bp, Homo sapien
gaggcagggcatacaccatttagca

SEQ ID NO: 3694051 - DNA, 25 bp, Homo sapien
gaagtagctcaaaccctcagagtga

SEQ ID NO: 3694052 - DNA, 25 bp, Homo sapien
tctcaaggtccagagtggcatcaaa

SEQ ID NO: 3694053 - DNA, 25 bp, Homo sapien
gatacatcatgtgctgccaacagag

SEQ ID NO: 3694054 - DNA, 25 bp, Homo sapien
gaacataagtgactgcgcttctggg

SEQ ID NO: 3694055 - DNA, 25 bp, Homo sapien
tccagaaccatagggacagtgacag

SEQ ID NO: 3694056 - DNA, 25 bp, Homo sapien
gaggtccctctctggttcttacaag

SEQ ID NO: 3694057 - DNA, 25 bp, Homo sapien
tactccatggtcgaggcggttcagc

SEQ ID NO: 3694058 - DNA, 25 bp, Homo sapien
gcctcaagacatccgttatattcct

SEQ ID NO: 3694059 - DNA, 25 bp, Homo sapien
ttacagcagcggaaagcctcaagac

SEQ ID NO: 3694060 - DNA, 25 bp, Homo sapien
agattttcttttaccgaggccatga

SEQ ID NO: 3694061 - DNA, 25 bp, Homo sapien
gaggccatgaacaatactgtccctt

SEQ ID NO: 3694062 - DNA, 25 bp, Homo sapien
tgtgggggctccctcggcttcccat

SEQ ID NO: 3694063 - DNA, 25 bp, Homo sapien
gctggacttctagttgccatcctgg

SEQ ID NO: 3694064 - DNA, 25 bp, Homo sapien
gatcccataccctagagacagcaga

SEQ ID NO: 3694065 - DNA, 25 bp, Homo sapien
taggtgtggccttacatctggacgg

SEQ ID NO: 3694066 - DNA, 25 bp, Homo sapien
agaatctacaggtggcctaccccaa

SEQ ID NO: 3694067 - DNA, 25 bp, Homo sapien
gggcctgtctttcctagagcttggg

SEQ ID NO: 3694068 - DNA, 25 bp, Homo sapien
gggctgacttgtaagaagggacaca

SEQ ID NO: 3694069 - DNA, 25 bp, Homo sapien
aagggacacagcaatgtcatctgca

SEQ ID NO: 3694070 - DNA, 25 bp, Homo sapien
ggaaaactccactgctgccaaagga

SEQ ID NO: 3694071 - DNA, 25 bp, Homo sapien
ttcatcctcccaaaaccaactcact

SEQ ID NO: 3694072 - DNA, 25 bp, Homo sapien
tcatcctcccaaaaccaactcactc

SEQ ID NO: 3694073 - DNA, 25 bp, Homo sapien
agttcatcctcccaaaaccaactca

SEQ ID NO: 3694074 - DNA, 25 bp, Homo sapien
tccagttcatcctcccaaaaccaac

SEQ ID NO: 3694075 - DNA, 25 bp, Homo sapien
ttaccattagaagggctcagttgtg

SEQ ID NO: 3694076 - DNA, 25 bp, Homo sapien
gaagactcctgtaaggagcaacagg

SEQ ID NO: 3694077 - DNA, 25 bp, Homo sapien
tctcaaccgatgaggaaatgaggtg

SEQ ID NO: 3694078 - DNA, 25 bp, Homo sapien
aaagggctctattgcttagcaggaa

SEQ ID NO: 3694079 - DNA, 25 bp, Homo sapien
tgacaggggcaataagtgttaaaaa

SEQ ID NO: 3694080 - DNA, 25 bp, Homo sapien
aaaattcacctaaaggagcagctgg

SEQ ID NO: 3694081 - DNA, 25 bp, Homo sapien
gcatgagaactgctgtcattacacc

SEQ ID NO: 3694082 - DNA, 25 bp, Homo sapien
ggtggagggatcagggacagcttta

SEQ ID NO: 3694083 - DNA, 25 bp, Homo sapien
cactgtaggaattcaatttggaaac

SEQ ID NO: 3694084 - DNA, 25 bp, Homo sapien
tttcactcctagcagaaggcgaagg

SEQ ID NO: 3694085 - DNA, 25 bp, Homo sapien
cgaaggagggcctgacacatggcaa

SEQ ID NO: 3694086 - DNA, 25 bp, Homo sapien
cagttctccagggactaatagagca

SEQ ID NO: 3694087 - DNA, 25 bp, Homo sapien
cacatcctgaacagacactggaagg

SEQ ID NO: 3694088 - DNA, 25 bp, Homo sapien
aaactcatacccactaccattcatt

SEQ ID NO: 3694089 - DNA, 25 bp, Homo sapien
tacccactaccattcattccctact

SEQ ID NO: 3694090 - DNA, 25 bp, Homo sapien
accattcattccctactccccacca

SEQ ID NO: 3694091 - DNA, 25 bp, Homo sapien
aaaaactcatacccactaccattca

SEQ ID NO: 3694092 - DNA, 25 bp, Homo sapien
gagagcctaattcctatgtatgcca

SEQ ID NO: 3694093 - DNA, 25 bp, Homo sapien
tatacagatgagtaaccccaagacc

SEQ ID NO: 3694094 - DNA, 25 bp, Homo sapien
cacaatccactctacctgaaggtca

SEQ ID NO: 3694095 - DNA, 25 bp, Homo sapien
cacagagaactccattagggtgatc

SEQ ID NO: 3694096 - DNA, 25 bp, Homo sapien
aatcctgggcattttcattaccagc

SEQ ID NO: 3694097 - DNA, 25 bp, Homo sapien
atcctgggcattttcattaccagct

SEQ ID NO: 3694098 - DNA, 25 bp, Homo sapien
ttaatcctgggcattttcattacca

SEQ ID NO: 3694099 - DNA, 25 bp, Homo sapien
taatcctgggcattttcattaccag

SEQ ID NO: 3694100 - DNA, 25 bp, Homo sapien
gaacttcaattatgttggacctctg

SEQ ID NO: 3694101 - DNA, 25 bp, Homo sapien
gctatctcgttttatctctccaagg

SEQ ID NO: 3694102 - DNA, 25 bp, Homo sapien
gaactattctctattcttggctgga

SEQ ID NO: 3694103 - DNA, 25 bp, Homo sapien
gaatctttcaatctggaaccttttg

SEQ ID NO: 3694104 - DNA, 25 bp, Homo sapien
ttcctcatgctataattgtgtaaga

SEQ ID NO: 3694105 - DNA, 25 bp, Homo sapien
ttcctgtgccacaagcatagaccct

SEQ ID NO: 3694106 - DNA, 25 bp, Homo sapien
gagttagaccatattttgtgttcat

SEQ ID NO: 3694107 - DNA, 25 bp, Homo sapien
ccattgatttcctactgtggttcac

SEQ ID NO: 3694108 - DNA, 25 bp, Homo sapien
gaacaagagtgctggctttagagcc

SEQ ID NO: 3694109 - DNA, 25 bp, Homo sapien
agactctgctgaccctaaaaggcca

SEQ ID NO: 3694110 - DNA, 25 bp, Homo sapien
ccttttggcctagctggactgtaaa

SEQ ID NO: 3694111 - DNA, 25 bp, Homo sapien
ggtgcaatcagcttaccacagcctc

SEQ ID NO: 3694112 - DNA, 25 bp, Homo sapien
aatctgaccctccattacctaagta

SEQ ID NO: 3694113 - DNA, 25 bp, Homo sapien
taagctcatactagcaagactttcc

SEQ ID NO: 3694114 - DNA, 25 bp, Homo sapien
agaaacatcatatctatttccttag

SEQ ID NO: 3694115 - DNA, 25 bp, Homo sapien
aaattctggtgtatagtttaagctc

SEQ ID NO: 3694116 - DNA, 25 bp, Homo sapien
tgaatgctgcggttgcctaggctat

SEQ ID NO: 3694117 - DNA, 25 bp, Homo sapien
caatagtgtgggataagcactgcaa

SEQ ID NO: 3694118 - DNA, 25 bp, Homo sapien
ggcccaaacatgagtaatagctgct

SEQ ID NO: 3694119 - DNA, 25 bp, Homo sapien
tcttataacaggtagccaggtaaca

SEQ ID NO: 3694120 - DNA, 25 bp, Homo sapien
tgtcaggttttggtggcttaagccc

SEQ ID NO: 3694121 - DNA, 25 bp, Homo sapien
gaaaacgcatttctcagggctccct

SEQ ID NO: 3694122 - DNA, 25 bp, Homo sapien
cagactgtcagcaccctttgtcagg

SEQ ID NO: 3694123 - DNA, 25 bp, Homo sapien
tgcaacagctgacatacaaaaggga

SEQ ID NO: 3694124 - DNA, 25 bp, Homo sapien
tattacataccataaacacatgtgg

SEQ ID NO: 3694125 - DNA, 25 bp, Homo sapien
tatttagtctggaaactcagatggg

SEQ ID NO: 3694126 - DNA, 25 bp, Homo sapien
cagtaagctgctgctgcaatcagga

SEQ ID NO: 3694127 - DNA, 25 bp, Homo sapien
gcaatcaggaaatgccatgtgacat

SEQ ID NO: 3694128 - DNA, 25 bp, Homo sapien
catggatgcttaaatcccagcccct

SEQ ID NO: 3694129 - DNA, 25 bp, Homo sapien
gcccctcaggactaactgaaaagga

SEQ ID NO: 3694130 - DNA, 25 bp, Homo sapien
caagttatctatcttcccacatggc

SEQ ID NO: 3694131 - DNA, 25 bp, Homo sapien
taaggttgtcctgaactctagtctc

SEQ ID NO: 3694132 - DNA, 25 bp, Homo sapien
taatctgactcttgcgctgtcatct

SEQ ID NO: 3694133 - DNA, 25 bp, Homo sapien
tattagagcttctgatattgtccca

SEQ ID NO: 3694134 - DNA, 25 bp, Homo sapien
tgattgagcttcttgactctacatt

SEQ ID NO: 3694135 - DNA, 25 bp, Homo sapien
caccccatcctatgacaacatgtat

SEQ ID NO: 3694136 - DNA, 25 bp, Homo sapien
aaggcaagggcacctgaatgtggaa

SEQ ID NO: 3694137 - DNA, 25 bp, Homo sapien
ggcctagcatagagcacttgcaggg

SEQ ID NO: 3694138 - DNA, 25 bp, Homo sapien
cattagttagtagggggatgccaca

SEQ ID NO: 3694139 - DNA, 25 bp, Homo sapien
gaaatgggccacagtttggcctagc

SEQ ID NO: 3694140 - DNA, 25 bp, Homo sapien
tcccttgtctaggaaacccagtgct

SEQ ID NO: 3694141 - DNA, 25 bp, Homo sapien
ttccagagagctatgacaatacaga

SEQ ID NO: 3694142 - DNA, 25 bp, Homo sapien
gagaagagacgtgccctcaagaaat

SEQ ID NO: 3694143 - DNA, 25 bp, Homo sapien
ccagccataggttttcaggtttgac

SEQ ID NO: 3694144 - DNA, 25 bp, Homo sapien
tctaatcagtcccaatgagacaaac

SEQ ID NO: 3694145 - DNA, 25 bp, Homo sapien
tgatacagtccctaatgccttcctt

SEQ ID NO: 3694146 - DNA, 25 bp, Homo sapien
tgagacaaacaaggtacctcagttg

SEQ ID NO: 3694147 - DNA, 25 bp, Homo sapien
tgaaaactgcgggaaaagctcagta

SEQ ID NO: 3694148 - DNA, 25 bp, Homo sapien
taccaatcaatgtacatttggtctt

SEQ ID NO: 3694149 - DNA, 25 bp, Homo sapien
ctccaggagtatcttcacggtgttc

SEQ ID NO: 3694150 - DNA, 25 bp, Homo sapien
ccaggagtatcttcacggtgttctc

SEQ ID NO: 3694151 - DNA, 25 bp, Homo sapien
aggtataccaatcaatgtacatttg

SEQ ID NO: 3694152 - DNA, 25 bp, Homo sapien
aggtgtttgtagtatcccctgaagg

SEQ ID NO: 3694153 - DNA, 25 bp, Homo sapien
caggcagctcctagcctagggaaca

SEQ ID NO: 3694154 - DNA, 25 bp, Homo sapien
ctcaagcaatatgccatgaggaatg

SEQ ID NO: 3694155 - DNA, 25 bp, Homo sapien
tagagtaaagtctgaatgagggcag

SEQ ID NO: 3694156 - DNA, 25 bp, Homo sapien
taaggagacgattcctagcagaggt

SEQ ID NO: 3694157 - DNA, 25 bp, Homo sapien
aatgtaacactatatacctataaaa

SEQ ID NO: 3694158 - DNA, 25 bp, Homo sapien
cataaaatgtaacactatataccta

SEQ ID NO: 3694159 - DNA, 25 bp, Homo sapien
ttatgcaaaaaagcaagggcacaaa

SEQ ID NO: 3694160 - DNA, 25 bp, Homo sapien
atagttacctttaggggttgtcatg

SEQ ID NO: 3694161 - DNA, 25 bp, Homo sapien
acaacaacataaaagcgcccaggcc

SEQ ID NO: 3694162 - DNA, 25 bp, Homo sapien
tcccttgacagcactttctgaaaag

SEQ ID NO: 3694163 - DNA, 25 bp, Homo sapien
tctgaaaagcaatggcgtgcctcct

SEQ ID NO: 3694164 - DNA, 25 bp, Homo sapien
ttgacacattgacagctcccactga

SEQ ID NO: 3694165 - DNA, 25 bp, Homo sapien
gtttattagcgagccatagcccagg

SEQ ID NO: 3694166 - DNA, 25 bp, Homo sapien
ggctagggacacgacgactctcttt

SEQ ID NO: 3694167 - DNA, 25 bp, Homo sapien
aaaatgctaccgaaagttggactca

SEQ ID NO: 3694168 - DNA, 25 bp, Homo sapien
taggctaaacagcatcaacccactg

SEQ ID NO: 3694169 - DNA, 25 bp, Homo sapien
ggccctgctaatgctgtagctgtca

SEQ ID NO: 3694170 - DNA, 25 bp, Homo sapien
tgttctacacctcttaatggccctg

SEQ ID NO: 3694171 - DNA, 25 bp, Homo sapien
ggagccagcattgtcatttttcaaa

SEQ ID NO: 3694172 - DNA, 25 bp, Homo sapien
tttccctggaaatgttctacacctc

SEQ ID NO: 3694173 - DNA, 25 bp, Homo sapien
caaaggcttgtttatatagggtaat

SEQ ID NO: 3694174 - DNA, 25 bp, Homo sapien
cacagtcaggaataacaaaggcttg

SEQ ID NO: 3694175 - DNA, 25 bp, Homo sapien
ttcccaggtctattttcctcttcaa

SEQ ID NO: 3694176 - DNA, 25 bp, Homo sapien
ttcaacaagagccagcaccacatct

SEQ ID NO: 3694177 - DNA, 25 bp, Homo sapien
aggcatctcagaccaacaggcaaga

SEQ ID NO: 3694178 - DNA, 25 bp, Homo sapien
ctcggaggcatctcagaccaacagg

SEQ ID NO: 3694179 - DNA, 25 bp, Homo sapien
gagcagctcggaggcatctcagacc

SEQ ID NO: 3694180 - DNA, 25 bp, Homo sapien
gtccctttgagcagctcggaggcat

SEQ ID NO: 3694181 - DNA, 25 bp, Homo sapien
gggcccacgaagaaagctctgccag

SEQ ID NO: 3694182 - DNA, 25 bp, Homo sapien
cttacagctttgaacaaggattgtc

SEQ ID NO: 3694183 - DNA, 25 bp, Homo sapien
tactgctatctaaaggactgaaagg

SEQ ID NO: 3694184 - DNA, 25 bp, Homo sapien
tgtgtgcagaccctgacaatgtcac

SEQ ID NO: 3694185 - DNA, 25 bp, Homo sapien
tatgttgtcaaaatcggttgctttc

SEQ ID NO: 3694186 - DNA, 25 bp, Homo sapien
caaacagtctgctataattgcttct

SEQ ID NO: 3694187 - DNA, 25 bp, Homo sapien
aatcggttgctttctagcttgctgc

SEQ ID NO: 3694188 - DNA, 25 bp, Homo sapien
cattctgttagccacaaacaaacag

SEQ ID NO: 3694189 - DNA, 25 bp, Homo sapien
tattctctccaacatctcataagtg

SEQ ID NO: 3694190 - DNA, 25 bp, Homo sapien
catgtgcacatgaaggataggaaca

SEQ ID NO: 3694191 - DNA, 25 bp, Homo sapien
ccatgtttatcacccatgttggtaa

SEQ ID NO: 3694192 - DNA, 25 bp, Homo sapien
tctgtcatcgacaaccaagatccag

SEQ ID NO: 3694193 - DNA, 25 bp, Homo sapien
agaaagatatgtgcccattcacagc

SEQ ID NO: 3694194 - DNA, 25 bp, Homo sapien
tgtcttccagagaccccaaaagaat

SEQ ID NO: 3694195 - DNA, 25 bp, Homo sapien
ttcacagccaaactgtttcggctcc

SEQ ID NO: 3694196 - DNA, 25 bp, Homo sapien
agaatctgaagaaagatatgtgccc

SEQ ID NO: 3694197 - DNA, 25 bp, Homo sapien
taaagcccaagtaatgcggaagctg

SEQ ID NO: 3694198 - DNA, 25 bp, Homo sapien
gcacatcaatgcaagtggcccaggc

SEQ ID NO: 3694199 - DNA, 25 bp, Homo sapien
cagcctgaccgctatgggaatgcag

SEQ ID NO: 3694200 - DNA, 25 bp, Homo sapien
gcacatcactttggtatggcaacaa

SEQ ID NO: 3694201 - DNA, 25 bp, Homo sapien
taaaaagtcctaccgtgctgaggtg

SEQ ID NO: 3694202 - DNA, 25 bp, Homo sapien
gatcatgggaacactaggaagcctg

SEQ ID NO: 3694203 - DNA, 25 bp, Homo sapien
taaccctacagtgaccagaaacagc

SEQ ID NO: 3694204 - DNA, 25 bp, Homo sapien
gagcctgggtctgctaactctagag

SEQ ID NO: 3694205 - DNA, 25 bp, Homo sapien
ctcctgccagaagacaccaagttcc

SEQ ID NO: 3694206 - DNA, 25 bp, Homo sapien
cctcctgccagaagacaccaagttc

SEQ ID NO: 3694207 - DNA, 25 bp, Homo sapien
tcctgccagaagacaccaagttcca

SEQ ID NO: 3694208 - DNA, 25 bp, Homo sapien
cctgccagaagacaccaagttccat

SEQ ID NO: 3694209 - DNA, 25 bp, Homo sapien
gactgccggccaagtttgctctctg

SEQ ID NO: 3694210 - DNA, 25 bp, Homo sapien
gggatgcacttcctacgacttgttg

SEQ ID NO: 3694211 - DNA, 25 bp, Homo sapien
tgtacacactgcctcgggatgcact

SEQ ID NO: 3694212 - DNA, 25 bp, Homo sapien
caaggcctcaggaaagtctggcagc

SEQ ID NO: 3694213 - DNA, 25 bp, Homo sapien
gtttcagagacacagaaccttggtt

SEQ ID NO: 3694214 - DNA, 25 bp, Homo sapien
ccagagagagactaagagagaccta

SEQ ID NO: 3694215 - DNA, 25 bp, Homo sapien
caccatgatctagggcaagttctca

SEQ ID NO: 3694216 - DNA, 25 bp, Homo sapien
tcttcaggcaaaccacaactgcgag

SEQ ID NO: 3694217 - DNA, 25 bp, Homo sapien
gatggtcaacctccatgaactgcag

SEQ ID NO: 3694218 - DNA, 25 bp, Homo sapien
catgcgatggtctcctgatggtctc

SEQ ID NO: 3694219 - DNA, 25 bp, Homo sapien
cacatgaccagatgcatggcaggct

SEQ ID NO: 3694220 - DNA, 25 bp, Homo sapien
catgtacccgttaaaatgtcgaggt

SEQ ID NO: 3694221 - DNA, 25 bp, Homo sapien
tagtctgaacactccagtcttacaa

SEQ ID NO: 3694222 - DNA, 25 bp, Homo sapien
cgctccagaacttgggttccataga

SEQ ID NO: 3694223 - DNA, 25 bp, Homo sapien
tgaactctggtaagcaactctagag

SEQ ID NO: 3694224 - DNA, 25 bp, Homo sapien
cagtccctcttagatgcaaatgtgc

SEQ ID NO: 3694225 - DNA, 25 bp, Homo sapien
catctacatgcattctcatctagcg

SEQ ID NO: 3694226 - DNA, 25 bp, Homo sapien
tacatgcattctcatctagcgagcc

SEQ ID NO: 3694227 - DNA, 25 bp, Homo sapien
tgcattctcatctagcgagcctgct

SEQ ID NO: 3694228 - DNA, 25 bp, Homo sapien
catctagcgagcctgcttcactttt

SEQ ID NO: 3694229 - DNA, 25 bp, Homo sapien
cagagatttgctcccctcggtattt

SEQ ID NO: 3694230 - DNA, 25 bp, Homo sapien
agggaccacagagatttgctcccct

SEQ ID NO: 3694231 - DNA, 25 bp, Homo sapien
gctcccctcggtattttgaatcaaa

SEQ ID NO: 3694232 - DNA, 25 bp, Homo sapien
gatttgctcccctcggtattttgaa

SEQ ID NO: 3694233 - DNA, 25 bp, Homo sapien
caggaagcggaggatgaaataagct

SEQ ID NO: 3694234 - DNA, 25 bp, Homo sapien
gcaggaagcggaggatgaaataagc

SEQ ID NO: 3694235 - DNA, 25 bp, Homo sapien
aaataagctgggctgactctctgca

SEQ ID NO: 3694236 - DNA, 25 bp, Homo sapien
ggatgaaataagctgggctgactct

SEQ ID NO: 3694237 - DNA, 25 bp, Homo sapien
gccaaaatccacactgttaatcatc

SEQ ID NO: 3694238 - DNA, 25 bp, Homo sapien
aactcagtgcatagttggcctcaat

SEQ ID NO: 3694239 - DNA, 25 bp, Homo sapien
caaaatccacactgttaatcatcaa

SEQ ID NO: 3694240 - DNA, 25 bp, Homo sapien
aatataagactccaagccaaaatcc

SEQ ID NO: 3694241 - DNA, 25 bp, Homo sapien
acttgctcaggacaacgaaatttcg

SEQ ID NO: 3694242 - DNA, 25 bp, Homo sapien
gtaatgtgcgcagaggccctaagtg

SEQ ID NO: 3694243 - DNA, 25 bp, Homo sapien
ttggcgtggctctggtactccactg

SEQ ID NO: 3694244 - DNA, 25 bp, Homo sapien
cactgatactggtctaggccatgag

SEQ ID NO: 3694245 - DNA, 25 bp, Homo sapien
tcaaatccttgccagagctaggcag

SEQ ID NO: 3694246 - DNA, 25 bp, Homo sapien
aaggcaagggcatcatacgactcca

SEQ ID NO: 3694247 - DNA, 25 bp, Homo sapien
tagctcaaagagaataaggcgcatt

SEQ ID NO: 3694248 - DNA, 25 bp, Homo sapien
tcagtcccagttaagcgctgacagc

SEQ ID NO: 3694249 - DNA, 25 bp, Homo sapien
ctctattagagattaaaaagtggga

SEQ ID NO: 3694250 - DNA, 25 bp, Homo sapien
ctgtgtgcaaatgtgaaagttggca

SEQ ID NO: 3694251 - DNA, 25 bp, Homo sapien
tgtgcaaatgtgaaagttggcaaca

SEQ ID NO: 3694252 - DNA, 25 bp, Homo sapien
ctgagagattccccgtactctatta

SEQ ID NO: 3694253 - DNA, 25 bp, Homo sapien
gaaaatggtggagtgtgttgaaata

SEQ ID NO: 3694254 - DNA, 25 bp, Homo sapien
tagtactggataacaaatgattgct

SEQ ID NO: 3694255 - DNA, 25 bp, Homo sapien
tgattgctattaaccgtattgttag

SEQ ID NO: 3694256 - DNA, 25 bp, Homo sapien
taccaaatgagtattctcagttcag

SEQ ID NO: 3694257 - DNA, 25 bp, Homo sapien
ctcatctgaagcatcacgcctagta

SEQ ID NO: 3694258 - DNA, 25 bp, Homo sapien
tctgccacggctggtaggaaaatct

SEQ ID NO: 3694259 - DNA, 25 bp, Homo sapien
tgcaaagatgcaaacggtccttggg

SEQ ID NO: 3694260 - DNA, 25 bp, Homo sapien
tccttgggtgttcagttagcagtaa

SEQ ID NO: 3694261 - DNA, 25 bp, Homo sapien
agggcgggcatactttagcaggcaa

SEQ ID NO: 3694262 - DNA, 25 bp, Homo sapien
tacctgcctcaaaaccaggtgtgtg

SEQ ID NO: 3694263 - DNA, 25 bp, Homo sapien
caggtgtgtggacatgtaaaccagc

SEQ ID NO: 3694264 - DNA, 25 bp, Homo sapien
caagaccttggctttaattgtgaag

SEQ ID NO: 3694265 - DNA, 25 bp, Homo sapien
gaaggcagctgttcatgcattctgg

SEQ ID NO: 3694266 - DNA, 25 bp, Homo sapien
agccagctctgaactcatatcatcc

SEQ ID NO: 3694267 - DNA, 25 bp, Homo sapien
caatataatatccaagcagttagcc

SEQ ID NO: 3694268 - DNA, 25 bp, Homo sapien
gctctgaactcatatcatccccaaa

SEQ ID NO: 3694269 - DNA, 25 bp, Homo sapien
tatccaagcagttagccagctctga

SEQ ID NO: 3694270 - DNA, 25 bp, Homo sapien
gtaaatgggctcctgaaattaccat

SEQ ID NO: 3694271 - DNA, 25 bp, Homo sapien
ggagtaaatgggctcctgaaattac

SEQ ID NO: 3694272 - DNA, 25 bp, Homo sapien
tgtggagtaaatgggctcctgaaat

SEQ ID NO: 3694273 - DNA, 25 bp, Homo sapien
aatgggctcctgaaattaccattta

SEQ ID NO: 3694274 - DNA, 25 bp, Homo sapien
ggttaaccacatggagcatctacag

SEQ ID NO: 3694275 - DNA, 25 bp, Homo sapien
taagggccgtgccattaaaggcaag

SEQ ID NO: 3694276 - DNA, 25 bp, Homo sapien
caccaagaggacatcgaaggacagc

SEQ ID NO: 3694277 - DNA, 25 bp, Homo sapien
tctgcagcgtggcaataagggccgt

SEQ ID NO: 3694278 - DNA, 25 bp, Homo sapien
tacgaagatctatgcaaaaagcaag

SEQ ID NO: 3694279 - DNA, 25 bp, Homo sapien
taatgattgccagcatttagccact

SEQ ID NO: 3694280 - DNA, 25 bp, Homo sapien
gcaaggatccctatagagtgtgtga

SEQ ID NO: 3694281 - DNA, 25 bp, Homo sapien
tagccactggttgttgctacgaaga

SEQ ID NO: 3694282 - DNA, 25 bp, Homo sapien
gcagagcattataggttgtcagact

SEQ ID NO: 3694283 - DNA, 25 bp, Homo sapien
gaaacgtctacaaattgcctctgca

SEQ ID NO: 3694284 - DNA, 25 bp, Homo sapien
gattatactccacaaccaagtagag

SEQ ID NO: 3694285 - DNA, 25 bp, Homo sapien
ttttgctggcactctgtgaaacgtc

SEQ ID NO: 3694286 - DNA, 25 bp, Homo sapien
atggtttggtcttccgcatcaattg

SEQ ID NO: 3694287 - DNA, 25 bp, Homo sapien
tcttccgcatcaattgatgcttcct

SEQ ID NO: 3694288 - DNA, 25 bp, Homo sapien
gattcctacccatggtttggtcttc

SEQ ID NO: 3694289 - DNA, 25 bp, Homo sapien
aggattcctacccatggtttggtct

SEQ ID NO: 3694290 - DNA, 25 bp, Homo sapien
ggaaaacacagaacatgtcagccat

SEQ ID NO: 3694291 - DNA, 25 bp, Homo sapien
gggaaaacacagaacatgtcagcca

SEQ ID NO: 3694292 - DNA, 25 bp, Homo sapien
tgggaaaacacagaacatgtcagcc

SEQ ID NO: 3694293 - DNA, 25 bp, Homo sapien
aaaacacagaacatgtcagccatat

SEQ ID NO: 3694294 - DNA, 25 bp, Homo sapien
tcttagtacaacaccaatttctctc

SEQ ID NO: 3694295 - DNA, 25 bp, Homo sapien
cgccgcactggctacatgtgacatg

SEQ ID NO: 3694296 - DNA, 25 bp, Homo sapien
tttctctcactctgacccgagacta

SEQ ID NO: 3694297 - DNA, 25 bp, Homo sapien
ggtcaccctgcagtactttgtcaaa

SEQ ID NO: 3694298 - DNA, 25 bp, Homo sapien
tgatttcccgtcagtctcacagaac

SEQ ID NO: 3694299 - DNA, 25 bp, Homo sapien
tggcctgaccaacaagaacagctgt

SEQ ID NO: 3694300 - DNA, 25 bp, Homo sapien
tgtgctaaggcaacaatagcattcg

SEQ ID NO: 3694301 - DNA, 25 bp, Homo sapien
caaacccgccaacgataatatatgg

SEQ ID NO: 3694302 - DNA, 25 bp, Homo sapien
ggcacatggtacagtttccgcctct

SEQ ID NO: 3694303 - DNA, 25 bp, Homo sapien
cactatttgccaagtctgttgctga

SEQ ID NO: 3694304 - DNA, 25 bp, Homo sapien
cttaggaagccaatgactctagcac

SEQ ID NO: 3694305 - DNA, 25 bp, Homo sapien
tccgcctctctgtgtagggataagg

SEQ ID NO: 3694306 - DNA, 25 bp, Homo sapien
tgatactctttaccaggcaggcttg

SEQ ID NO: 3694307 - DNA, 25 bp, Homo sapien
tcagaaaggtaaggaggagtcaaca

SEQ ID NO: 3694308 - DNA, 25 bp, Homo sapien
aaggaagtgcattctgctaacgaca

SEQ ID NO: 3694309 - DNA, 25 bp, Homo sapien
gcagaagcgtatgtcagagagatca

SEQ ID NO: 3694310 - DNA, 25 bp, Homo sapien
tgcggcaggtgctctacatgtactt

SEQ ID NO: 3694311 - DNA, 25 bp, Homo sapien
gttgatggaacccacccagagttgg

SEQ ID NO: 3694312 - DNA, 25 bp, Homo sapien
tccaggccaggttgtaggacaccaa

SEQ ID NO: 3694313 - DNA, 25 bp, Homo sapien
gatcctggcgtgagccctcttctag

SEQ ID NO: 3694314 - DNA, 25 bp, Homo sapien
gaggtactccctgaccattggtatc

SEQ ID NO: 3694315 - DNA, 25 bp, Homo sapien
gctgctattaaagtcacctggagaa

SEQ ID NO: 3694316 - DNA, 25 bp, Homo sapien
cttggccagctgctattaaagtcac

SEQ ID NO: 3694317 - DNA, 25 bp, Homo sapien
accaccagaaatctgatcgagttgg

SEQ ID NO: 3694318 - DNA, 25 bp, Homo sapien
tcaggacaaagccttgatgataaag

SEQ ID NO: 3694319 - DNA, 25 bp, Homo sapien
gtcaaacctcagtaattcggattaa

SEQ ID NO: 3694320 - DNA, 25 bp, Homo sapien
aatctcagagaaactgaacatggag

SEQ ID NO: 3694321 - DNA, 25 bp, Homo sapien
gaaggtcaggttggatcaggacaaa

SEQ ID NO: 3694322 - DNA, 25 bp, Homo sapien
cgtgtacacagagccaccgggagaa

SEQ ID NO: 3694323 - DNA, 25 bp, Homo sapien
agagcgtgtacacagagccaccggg

SEQ ID NO: 3694324 - DNA, 25 bp, Homo sapien
cacgggcagagcgtgtacacagagc

SEQ ID NO: 3694325 - DNA, 25 bp, Homo sapien
ggcagagcgtgtacacagagccacc

SEQ ID NO: 3694326 - DNA, 25 bp, Homo sapien
gagttaccagacgaaacaggaagca

SEQ ID NO: 3694327 - DNA, 25 bp, Homo sapien
ggcaggcttaggagttaccagacga

SEQ ID NO: 3694328 - DNA, 25 bp, Homo sapien
cagacgaaacaggaagcagttctca

SEQ ID NO: 3694329 - DNA, 25 bp, Homo sapien
gcttaggagttaccagacgaaacag

SEQ ID NO: 3694330 - DNA, 25 bp, Homo sapien
gaaaaattgatctcctccaaacttc

SEQ ID NO: 3694331 - DNA, 25 bp, Homo sapien
tgaaaaattgatctcctccaaactt

SEQ ID NO: 3694332 - DNA, 25 bp, Homo sapien
atgaaaaattgatctcctccaaact

SEQ ID NO: 3694333 - DNA, 25 bp, Homo sapien
aaaattgatctcctccaaacttcaa

SEQ ID NO: 3694334 - DNA, 25 bp, Homo sapien
gagtttaccttcctacatgctcaga

SEQ ID NO: 3694335 - DNA, 25 bp, Homo sapien
gccatgcttgctcagagtcagttta

SEQ ID NO: 3694336 - DNA, 25 bp, Homo sapien
gaagcacgtggtgtatttcccaagc

SEQ ID NO: 3694337 - DNA, 25 bp, Homo sapien
tctttggtctccagaggtggttgaa

SEQ ID NO: 3694338 - DNA, 25 bp, Homo sapien
cagcacaaggatgtcatcaagggca

SEQ ID NO: 3694339 - DNA, 25 bp, Homo sapien
tcaggctaaccaaaggcatggaagg

SEQ ID NO: 3694340 - DNA, 25 bp, Homo sapien
ccattctgggaaacatctttgattc

SEQ ID NO: 3694341 - DNA, 25 bp, Homo sapien
gaaccttgccttcccatagccgtaa

SEQ ID NO: 3694342 - DNA, 25 bp, Homo sapien
gttatccagcaacaatctatggctc

SEQ ID NO: 3694343 - DNA, 25 bp, Homo sapien
tgcaggaaaagttatccagcaacaa

SEQ ID NO: 3694344 - DNA, 25 bp, Homo sapien
gcacaccatccactatttatttaat

SEQ ID NO: 3694345 - DNA, 25 bp, Homo sapien
ctcctacggaccgtggatggatgtg

SEQ ID NO: 3694346 - DNA, 25 bp, Homo sapien
ccacaagttcccaattcagcttcct

SEQ ID NO: 3694347 - DNA, 25 bp, Homo sapien
tccttgatgaaatagcgtggcatga

SEQ ID NO: 3694348 - DNA, 25 bp, Homo sapien
attccttgatgaaatagcgtggcat

SEQ ID NO: 3694349 - DNA, 25 bp, Homo sapien
acaagttcccaattcagcttcctat

SEQ ID NO: 3694350 - DNA, 25 bp, Homo sapien
ggacacgtctacacactcgccccat

SEQ ID NO: 3694351 - DNA, 25 bp, Homo sapien
ccagggacagttccctatcatccat

SEQ ID NO: 3694352 - DNA, 25 bp, Homo sapien
agtggcaaggcgtctattacctccc

SEQ ID NO: 3694353 - DNA, 25 bp, Homo sapien
gttccctatcatccattttctcatg

SEQ ID NO: 3694354 - DNA, 25 bp, Homo sapien
ggatcatttgagactgaatcagtga

SEQ ID NO: 3694355 - DNA, 25 bp, Homo sapien
aatagccattatcccctacggccat

SEQ ID NO: 3694356 - DNA, 25 bp, Homo sapien
atcccctacggccattttccaagca

SEQ ID NO: 3694357 - DNA, 25 bp, Homo sapien
ctcccttggatcatttgagactgaa

SEQ ID NO: 3694358 - DNA, 25 bp, Homo sapien
tctcatagacagcttcattggcgtc

SEQ ID NO: 3694359 - DNA, 25 bp, Homo sapien
tttctcatagacagcttcattggcg

SEQ ID NO: 3694360 - DNA, 25 bp, Homo sapien
catagacagcttcattggcgtcccc

SEQ ID NO: 3694361 - DNA, 25 bp, Homo sapien
tgtttctcatagacagcttcattgg

SEQ ID NO: 3694362 - DNA, 25 bp, Homo sapien
ttcaaattcttgatggctacactga

SEQ ID NO: 3694363 - DNA, 25 bp, Homo sapien
cggcgctggctaaaggttctcaaca

SEQ ID NO: 3694364 - DNA, 25 bp, Homo sapien
caagaggcatgagagcaacagcagg

SEQ ID NO: 3694365 - DNA, 25 bp, Homo sapien
gaaagttgcgggtctttcagccaga

SEQ ID NO: 3694366 - DNA, 25 bp, Homo sapien
cttttatttgaagaatgattgccgc

SEQ ID NO: 3694367 - DNA, 25 bp, Homo sapien
tatttgaagaatgattgccgctgag

SEQ ID NO: 3694368 - DNA, 25 bp, Homo sapien
tgaagaatgattgccgctgagtgac

SEQ ID NO: 3694369 - DNA, 25 bp, Homo sapien
atgattgccgctgagtgacaaatac

SEQ ID NO: 3694370 - DNA, 25 bp, Homo sapien
tatgaggactatgtgatcgaggaca

SEQ ID NO: 3694371 - DNA, 25 bp, Homo sapien
tagaacaatgcatgcctaaaagcct

SEQ ID NO: 3694372 - DNA, 25 bp, Homo sapien
tgtgctacacactcaacttccgaat

SEQ ID NO: 3694373 - DNA, 25 bp, Homo sapien
gaggacacacctaggatactgcata

SEQ ID NO: 3694374 - DNA, 25 bp, Homo sapien
caggcctcaggctgcccaggcccat

SEQ ID NO: 3694375 - DNA, 25 bp, Homo sapien
gcaggcctcaggctgcccaggccca

SEQ ID NO: 3694376 - DNA, 25 bp, Homo sapien
caggcaggcctcaggctgcccaggc

SEQ ID NO: 3694377 - DNA, 25 bp, Homo sapien
aggcaggcctcaggctgcccaggcc

SEQ ID NO: 3694378 - DNA, 25 bp, Homo sapien
cagtttaatcccctgccattttcgg

SEQ ID NO: 3694379 - DNA, 25 bp, Homo sapien
ctgctgcctttaaagtaaaagtttg

SEQ ID NO: 3694380 - DNA, 25 bp, Homo sapien
aagtaaaagtttgtcgaatgtgcaa

SEQ ID NO: 3694381 - DNA, 25 bp, Homo sapien
cactgttcgtcaagctgaatgaaaa

SEQ ID NO: 3694382 - DNA, 25 bp, Homo sapien
agagaatattaaatcaaatcccttg

SEQ ID NO: 3694383 - DNA, 25 bp, Homo sapien
tcatgctacattgacgggcttgaca

SEQ ID NO: 3694384 - DNA, 25 bp, Homo sapien
caaatcccttgtcatcggcataaaa

SEQ ID NO: 3694385 - DNA, 25 bp, Homo sapien
aagagtttataactgcagcagtgtt

SEQ ID NO: 3694386 - DNA, 25 bp, Homo sapien
agtttctccccgtgggtcggcactg

SEQ ID NO: 3694387 - DNA, 25 bp, Homo sapien
tggaagcaactctgagtggacctcc

SEQ ID NO: 3694388 - DNA, 25 bp, Homo sapien
tcaagaaactctggtctggtagttt

SEQ ID NO: 3694389 - DNA, 25 bp, Homo sapien
ttctccccgtgggtcggcactggaa

SEQ ID NO: 3694390 - DNA, 25 bp, Homo sapien
gacctgtggagtaacgcgtatctgt

SEQ ID NO: 3694391 - DNA, 25 bp, Homo sapien
tctgtcccacgtcgtccaaagagca

SEQ ID NO: 3694392 - DNA, 25 bp, Homo sapien
ggagtaacgcgtatctgtcccacgt

SEQ ID NO: 3694393 - DNA, 25 bp, Homo sapien
tttctcaaatggacctgtggagtaa

SEQ ID NO: 3694394 - DNA, 25 bp, Homo sapien
tgaatgtttcaggtggcggggccaa

SEQ ID NO: 3694395 - DNA, 25 bp, Homo sapien
gaggaagaacatgaatgtttcaggt

SEQ ID NO: 3694396 - DNA, 25 bp, Homo sapien
catgaatgtttcaggtggcggggcc

SEQ ID NO: 3694397 - DNA, 25 bp, Homo sapien
aatgtttcaggtggcggggccaagg

SEQ ID NO: 3694398 - DNA, 25 bp, Homo sapien
taccaagaggggaatcattttcaga

SEQ ID NO: 3694399 - DNA, 25 bp, Homo sapien
gctgcctgcacttggttggtattct

SEQ ID NO: 3694400 - DNA, 25 bp, Homo sapien
tatcactgggcttgataccaagagg

SEQ ID NO: 3694401 - DNA, 25 bp, Homo sapien
gatctggttgtgtcaaccggctgcc

SEQ ID NO: 3694402 - DNA, 25 bp, Homo sapien
ctggaccagtggtcagaaaactttc

SEQ ID NO: 3694403 - DNA, 25 bp, Homo sapien
gtgatccggtttggaaagaacactg

SEQ ID NO: 3694404 - DNA, 25 bp, Homo sapien
cagaaaactttcgtctctgcaaata

SEQ ID NO: 3694405 - DNA, 25 bp, Homo sapien
tctgccagtgatccggtttggaaag

SEQ ID NO: 3694406 - DNA, 25 bp, Homo sapien
tagaaaatacaagtacctggcacgg

SEQ ID NO: 3694407 - DNA, 25 bp, Homo sapien
tcatgaggagccttgaatgcctgct

SEQ ID NO: 3694408 - DNA, 25 bp, Homo sapien
cctgctaatggatttcaacgtgccc

SEQ ID NO: 3694409 - DNA, 25 bp, Homo sapien
tgccctgcaataacagttgccatga

SEQ ID NO: 3694410 - DNA, 25 bp, Homo sapien
ttttatgcaggcatttaatccttta

SEQ ID NO: 3694411 - DNA, 25 bp, Homo sapien
ttatgcaggcatttaatcctttaaa

SEQ ID NO: 3694412 - DNA, 25 bp, Homo sapien
tttatgcaggcatttaatcctttaa

SEQ ID NO: 3694413 - DNA, 25 bp, Homo sapien
tccattccaggagcacaagatgttt

SEQ ID NO: 3694414 - DNA, 25 bp, Homo sapien
cttgactgagtgctgtagctaggac

SEQ ID NO: 3694415 - DNA, 25 bp, Homo sapien
taggacttccagttgaatcagagtg

SEQ ID NO: 3694416 - DNA, 25 bp, Homo sapien
cattggtagttcgacaggaattggg

SEQ ID NO: 3694417 - DNA, 25 bp, Homo sapien
gaagccacagcatgataaacaaatt

SEQ ID NO: 3694418 - DNA, 25 bp, Homo sapien
ggcaaactgtttgcaacaaatgtta

SEQ ID NO: 3694419 - DNA, 25 bp, Homo sapien
tcctggataacaagatggataacgt

SEQ ID NO: 3694420 - DNA, 25 bp, Homo sapien
cgtacattctgcaacatatgcgagg

SEQ ID NO: 3694421 - DNA, 25 bp, Homo sapien
tgtacaagcaaagttactgcgttcc

SEQ ID NO: 3694422 - DNA, 25 bp, Homo sapien
gcaatgccggctcttatgctgtagt

SEQ ID NO: 3694423 - DNA, 25 bp, Homo sapien
tactgcgttccccaaagataattgc

SEQ ID NO: 3694424 - DNA, 25 bp, Homo sapien
gaatgttacaacagctggaacacca

SEQ ID NO: 3694425 - DNA, 25 bp, Homo sapien
gatgtaaaaataacacgtaccgcta

SEQ ID NO: 3694426 - DNA, 25 bp, Homo sapien
aggtcaggttgacaaaacttcttgg

SEQ ID NO: 3694427 - DNA, 25 bp, Homo sapien
cagcgtcataagagtagagaaggtc

SEQ ID NO: 3694428 - DNA, 25 bp, Homo sapien
aatatatatgccttgcaacttccag

SEQ ID NO: 3694429 - DNA, 25 bp, Homo sapien
ggctgctttgctccttactagtgga

SEQ ID NO: 3694430 - DNA, 25 bp, Homo sapien
tcccgagaactgtgcagccatgatc

SEQ ID NO: 3694431 - DNA, 25 bp, Homo sapien
tcttctggaacatcatctcatggga

SEQ ID NO: 3694432 - DNA, 25 bp, Homo sapien
gaagggctcagcacaccatctagag

SEQ ID NO: 3694433 - DNA, 25 bp, Homo sapien
tgtactaatgtacatggaatctcag

SEQ ID NO: 3694434 - DNA, 25 bp, Homo sapien
gactaatacagtgtactaatgtaca

SEQ ID NO: 3694435 - DNA, 25 bp, Homo sapien
taatacagtgtactaatgtacatgg

SEQ ID NO: 3694436 - DNA, 25 bp, Homo sapien
tgtacatggaatctcagaatccaag

SEQ ID NO: 3694437 - DNA, 25 bp, Homo sapien
tatattaatgatggactggtggatg

SEQ ID NO: 3694438 - DNA, 25 bp, Homo sapien
catgcactttgtttgtgcttattaa

SEQ ID NO: 3694439 - DNA, 25 bp, Homo sapien
ccttcaactatattaatgatggact

SEQ ID NO: 3694440 - DNA, 25 bp, Homo sapien
gaagtgcattcagcagaatcacaac

SEQ ID NO: 3694441 - DNA, 25 bp, Homo sapien
cattgctctgacatggatggatttg

SEQ ID NO: 3694442 - DNA, 25 bp, Homo sapien
cataggccattgctctgacatggat

SEQ ID NO: 3694443 - DNA, 25 bp, Homo sapien
catggatggatttggctgtcactac

SEQ ID NO: 3694444 - DNA, 25 bp, Homo sapien
cagaaaagcactggtgaaatttgat

SEQ ID NO: 3694445 - DNA, 25 bp, Homo sapien
ttcctgtttgtaggcaaaaagtgcc

SEQ ID NO: 3694446 - DNA, 25 bp, Homo sapien
ccacaagtaaattcaaggcactgtg

SEQ ID NO: 3694447 - DNA, 25 bp, Homo sapien
tgctggaatctcagaacctctatta

SEQ ID NO: 3694448 - DNA, 25 bp, Homo sapien
tgagcccgggtaaaagagacacatc

SEQ ID NO: 3694449 - DNA, 25 bp, Homo sapien
tatgtgcccaacaatctgctgggac

SEQ ID NO: 3694450 - DNA, 25 bp, Homo sapien
gccagaggtcacatgccagggagta

SEQ ID NO: 3694451 - DNA, 25 bp, Homo sapien
gttcggaaacatgccaaagcctctg

SEQ ID NO: 3694452 - DNA, 25 bp, Homo sapien
catcaactggaaaggaggttcggaa

SEQ ID NO: 3694453 - DNA, 25 bp, Homo sapien
catagagtatgacagattcacagga

SEQ ID NO: 3694454 - DNA, 25 bp, Homo sapien
tgtaagggacagttaggatcaagga

SEQ ID NO: 3694455 - DNA, 25 bp, Homo sapien
gaaaggctggttcatataaacgaag

SEQ ID NO: 3694456 - DNA, 25 bp, Homo sapien
ccttccttaggacatcagagcttag

SEQ ID NO: 3694457 - DNA, 25 bp, Homo sapien
tgcccagagagtgcccgatggtttt

SEQ ID NO: 3694458 - DNA, 25 bp, Homo sapien
gaaggaacatagcacctgaactctg

SEQ ID NO: 3694459 - DNA, 25 bp, Homo sapien
tcaaaatgagagcactggagcaacc

SEQ ID NO: 3694460 - DNA, 25 bp, Homo sapien
gaaagtgcggccttggtccataaaa

SEQ ID NO: 3694461 - DNA, 25 bp, Homo sapien
gtcacataaaggatggtggtaacca

SEQ ID NO: 3694462 - DNA, 25 bp, Homo sapien
cacataaaggatggtggtaaccaca

SEQ ID NO: 3694463 - DNA, 25 bp, Homo sapien
tctccaggacttcaagttcttctga

SEQ ID NO: 3694464 - DNA, 25 bp, Homo sapien
cttctccaggacttcaagttcttct

SEQ ID NO: 3694465 - DNA, 25 bp, Homo sapien
cttttgaagtactggcgtgtaacca

SEQ ID NO: 3694466 - DNA, 25 bp, Homo sapien
actggattataaggttcttcatggc

SEQ ID NO: 3694467 - DNA, 25 bp, Homo sapien
gaaccaagtttggtagaaacagctc

SEQ ID NO: 3694468 - DNA, 25 bp, Homo sapien
ttattctagcatcgcatctggtaag

SEQ ID NO: 3694469 - DNA, 25 bp, Homo sapien
tgtcaaatcctttactgacacattc

SEQ ID NO: 3694470 - DNA, 25 bp, Homo sapien
gtcaaatcctttactgacacattca

SEQ ID NO: 3694471 - DNA, 25 bp, Homo sapien
tcaaatcctttactgacacattcat

SEQ ID NO: 3694472 - DNA, 25 bp, Homo sapien
taacggctttgaaaatttgggctga

SEQ ID NO: 3694473 - DNA, 25 bp, Homo sapien
tcaggccgcaaagagcgctgattaa

SEQ ID NO: 3694474 - DNA, 25 bp, Homo sapien
gatgttgacttggtctcaggccgca

SEQ ID NO: 3694475 - DNA, 25 bp, Homo sapien
gacagggacaaacaattccctcgct

SEQ ID NO: 3694476 - DNA, 25 bp, Homo sapien
tcattacactggatgcacgctgcag

SEQ ID NO: 3694477 - DNA, 25 bp, Homo sapien
caacttgtgaaattgtgcctgtcca

SEQ ID NO: 3694478 - DNA, 25 bp, Homo sapien
cccatgcctgtgaagcaaagggaca

SEQ ID NO: 3694479 - DNA, 25 bp, Homo sapien
tatcagatagccgagtaaaacagcc

SEQ ID NO: 3694480 - DNA, 25 bp, Homo sapien
ctgtcaaacactaggtctgatttag

SEQ ID NO: 3694481 - DNA, 25 bp, Homo sapien
cattttgtttttagagggtctatga

SEQ ID NO: 3694482 - DNA, 25 bp, Homo sapien
tctactgttctgtcaaacactaggt

SEQ ID NO: 3694483 - DNA, 25 bp, Homo sapien
ctatagtcattctactgttctgtca

SEQ ID NO: 3694484 - DNA, 25 bp, Homo sapien
cttctctgacattataatataaagc

SEQ ID NO: 3694485 - DNA, 25 bp, Homo sapien
gagaatttctaaggcctcttcagct

SEQ ID NO: 3694486 - DNA, 25 bp, Homo sapien
cagtgctgagatcacgatcatgcca

SEQ ID NO: 3694487 - DNA, 25 bp, Homo sapien
aaagctatagtatttgtagtcagtc

SEQ ID NO: 3694488 - DNA, 25 bp, Homo sapien
agtccttcctgacagaccactgtca

SEQ ID NO: 3694489 - DNA, 25 bp, Homo sapien
agccagtccttcctgacagaccact

SEQ ID NO: 3694490 - DNA, 25 bp, Homo sapien
gccagtccttcctgacagaccactg

SEQ ID NO: 3694491 - DNA, 25 bp, Homo sapien
cttcctgacagaccactgtcacttc

SEQ ID NO: 3694492 - DNA, 25 bp, Homo sapien
aagcgtggttgccaaatgtactgcc

SEQ ID NO: 3694493 - DNA, 25 bp, Homo sapien
gcagctgccggccttttaaattgta

SEQ ID NO: 3694494 - DNA, 25 bp, Homo sapien
gcccgagcaatagatttccagataa

SEQ ID NO: 3694495 - DNA, 25 bp, Homo sapien
cgcaatcctgcttttgcccgagcaa

SEQ ID NO: 3694496 - DNA, 25 bp, Homo sapien
cacttagctgggtcataaaaatgca

SEQ ID NO: 3694497 - DNA, 25 bp, Homo sapien
gagtttatgggctctcttcttgaag

SEQ ID NO: 3694498 - DNA, 25 bp, Homo sapien
catttgtatgataaacactgagttt

SEQ ID NO: 3694499 - DNA, 25 bp, Homo sapien
ggctgcacgtcgctgaggaagggta

SEQ ID NO: 3694500 - DNA, 25 bp, Homo sapien
cgcaagtggttaactaccgagccca

SEQ ID NO: 3694501 - DNA, 25 bp, Homo sapien
ctgcccttaacttcccgcaagtggt

SEQ ID NO: 3694502 - DNA, 25 bp, Homo sapien
tcccgcaagtggttaactaccgagc

SEQ ID NO: 3694503 - DNA, 25 bp, Homo sapien
gcaagtggttaactaccgagcccat

SEQ ID NO: 3694504 - DNA, 25 bp, Homo sapien
ctcaggatttatggctggtgcacca

SEQ ID NO: 3694505 - DNA, 25 bp, Homo sapien
gcacagcggagaattggtaacctta

SEQ ID NO: 3694506 - DNA, 25 bp, Homo sapien
cagtgacatttggtgacaggacaga

SEQ ID NO: 3694507 - DNA, 25 bp, Homo sapien
caaatagctcacatgggcacagcgg

SEQ ID NO: 3694508 - DNA, 25 bp, Homo sapien
aggagctaggatgggcaatccgaac

SEQ ID NO: 3694509 - DNA, 25 bp, Homo sapien
tgggcaatccgaaccatattttccc

SEQ ID NO: 3694510 - DNA, 25 bp, Homo sapien
ccaccatactcctctaagaggttgt

SEQ ID NO: 3694511 - DNA, 25 bp, Homo sapien
agaggttgtgcgacctttcacacac

SEQ ID NO: 3694512 - DNA, 25 bp, Homo sapien
atatttactgtttccatttgcctac

SEQ ID NO: 3694513 - DNA, 25 bp, Homo sapien
ccagatctggaatcccaaatattta

SEQ ID NO: 3694514 - DNA, 25 bp, Homo sapien
taaggacaaagttactaatgttata

SEQ ID NO: 3694515 - DNA, 25 bp, Homo sapien
ttataaaatgggaaaggaccagatc

SEQ ID NO: 3694516 - DNA, 25 bp, Homo sapien
agtccctccaggaccgcaggtaacg

SEQ ID NO: 3694517 - DNA, 25 bp, Homo sapien
aagtggccgccaccaccgtggcctc

SEQ ID NO: 3694518 - DNA, 25 bp, Homo sapien
gaccgcaggtaacgtttctcagcct

SEQ ID NO: 3694519 - DNA, 25 bp, Homo sapien
ctccaggaccgcaggtaacgtttct

SEQ ID NO: 3694520 - DNA, 25 bp, Homo sapien
tcacaataccgtgcagcagaaactc

SEQ ID NO: 3694521 - DNA, 25 bp, Homo sapien
cagggagatattaaaactgtactgg

SEQ ID NO: 3694522 - DNA, 25 bp, Homo sapien
aaggaagggcgtttctgacacttgc

SEQ ID NO: 3694523 - DNA, 25 bp, Homo sapien
gttcctcataggcccgttggtgaca

SEQ ID NO: 3694524 - DNA, 25 bp, Homo sapien
tctcctcctcacataagtagcagtg

SEQ ID NO: 3694525 - DNA, 25 bp, Homo sapien
ttctcctcctcacataagtagcagt

SEQ ID NO: 3694526 - DNA, 25 bp, Homo sapien
ctcacataagtagcagtgtaaccct

SEQ ID NO: 3694527 - DNA, 25 bp, Homo sapien
cacataagtagcagtgtaaccctgg

SEQ ID NO: 3694528 - DNA, 25 bp, Homo sapien
ctggtcctggcatccaagcagctcc

SEQ ID NO: 3694529 - DNA, 25 bp, Homo sapien
gcaggcttgctgcaccagggacctg

SEQ ID NO: 3694530 - DNA, 25 bp, Homo sapien
ctgatgggctgttatgaagcagccc

SEQ ID NO: 3694531 - DNA, 25 bp, Homo sapien
ggctgttatgaagcagccccagtcc

SEQ ID NO: 3694532 - DNA, 25 bp, Homo sapien
tgggctgttatgaagcagccccagt

SEQ ID NO: 3694533 - DNA, 25 bp, Homo sapien
gatgggctgttatgaagcagcccca

SEQ ID NO: 3694534 - DNA, 25 bp, Homo sapien
tcaataacaggatgtttctaaatct

SEQ ID NO: 3694535 - DNA, 25 bp, Homo sapien
tgtttctaaatctaggtccgtgggc

SEQ ID NO: 3694536 - DNA, 25 bp, Homo sapien
ggccttcatgtataatccatacatc

SEQ ID NO: 3694537 - DNA, 25 bp, Homo sapien
gtccgtgggccaagccatctcgctg

SEQ ID NO: 3694538 - DNA, 25 bp, Homo sapien
actgtgcagattaacacaattcatc

SEQ ID NO: 3694539 - DNA, 25 bp, Homo sapien
gcttcatactgtgcagattaacaca

SEQ ID NO: 3694540 - DNA, 25 bp, Homo sapien
ctgtgcagattaacacaattcatca

SEQ ID NO: 3694541 - DNA, 25 bp, Homo sapien
cgctggcttcatactgtgcagatta

SEQ ID NO: 3694542 - DNA, 25 bp, Homo sapien
cttgccggttctgtgccccatccat

SEQ ID NO: 3694543 - DNA, 25 bp, Homo sapien
tgccggttctgtgccccatccatct

SEQ ID NO: 3694544 - DNA, 25 bp, Homo sapien
ttgccggttctgtgccccatccatc

SEQ ID NO: 3694545 - DNA, 25 bp, Homo sapien
gccggttctgtgccccatccatctt

SEQ ID NO: 3694546 - DNA, 25 bp, Homo sapien
ccagagattgctgtctgctgactga

SEQ ID NO: 3694547 - DNA, 25 bp, Homo sapien
ggcctctctccgatctctcatgtat

SEQ ID NO: 3694548 - DNA, 25 bp, Homo sapien
caggcccatcagaatccagagattg

SEQ ID NO: 3694549 - DNA, 25 bp, Homo sapien
agaagatgacggcttctgacgcaca

SEQ ID NO: 3694550 - DNA, 25 bp, Homo sapien
gacctggaccctcagagggactggc

SEQ ID NO: 3694551 - DNA, 25 bp, Homo sapien
agacctggaccctcagagggactgg

SEQ ID NO: 3694552 - DNA, 25 bp, Homo sapien
ctggcttcttcgaagctcaaagggc

SEQ ID NO: 3694553 - DNA, 25 bp, Homo sapien
tcttcgaagctcaaagggcttcacc

SEQ ID NO: 3694554 - DNA, 25 bp, Homo sapien
ttcgagtcccagcagcccctggcat

SEQ ID NO: 3694555 - DNA, 25 bp, Homo sapien
tcattcgagtcccagcagcccctgg

SEQ ID NO: 3694556 - DNA, 25 bp, Homo sapien
attcgagtcccagcagcccctggca

SEQ ID NO: 3694557 - DNA, 25 bp, Homo sapien
ccctcattcgagtcccagcagcccc

SEQ ID NO: 3694558 - DNA, 25 bp, Homo sapien
tatggtcccacgatggcctccacaa

SEQ ID NO: 3694559 - DNA, 25 bp, Homo sapien
gtcctccagccctgatctttcccat

SEQ ID NO: 3694560 - DNA, 25 bp, Homo sapien
ttcccttcctgcaagtccccagaag

SEQ ID NO: 3694561 - DNA, 25 bp, Homo sapien
gatggcctccacaaggcttcccttc

SEQ ID NO: 3694562 - DNA, 25 bp, Homo sapien
atcagcagcaatgagagcaattctc

SEQ ID NO: 3694563 - DNA, 25 bp, Homo sapien
gcagcaatgagagcaattctcattg

SEQ ID NO: 3694564 - DNA, 25 bp, Homo sapien
cagcagcaatgagagcaattctcat

SEQ ID NO: 3694565 - DNA, 25 bp, Homo sapien
caatgagagcaattctcattgctat

SEQ ID NO: 3694566 - DNA, 25 bp, Homo sapien
gacatgctatttcccggctttctgg

SEQ ID NO: 3694567 - DNA, 25 bp, Homo sapien
tattaactcaagagagcttctgctc

SEQ ID NO: 3694568 - DNA, 25 bp, Homo sapien
gagggaacagccaaggtcctagacg

SEQ ID NO: 3694569 - DNA, 25 bp, Homo sapien
catgagccacgcactggaaagaagg

SEQ ID NO: 3694570 - DNA, 25 bp, Homo sapien
ggttcaccactcgattcacattcac

SEQ ID NO: 3694571 - DNA, 25 bp, Homo sapien
aatctccaaagataaaacaggcatc

SEQ ID NO: 3694572 - DNA, 25 bp, Homo sapien
caaagataaaacaggcatctggatt

SEQ ID NO: 3694573 - DNA, 25 bp, Homo sapien
tgtcttcctaaactcgaggttcacc

SEQ ID NO: 3694574 - DNA, 25 bp, Homo sapien
gcagaacaagggttaatgacccaaa

SEQ ID NO: 3694575 - DNA, 25 bp, Homo sapien
tctgacgatgaagtcatttgctgcc

SEQ ID NO: 3694576 - DNA, 25 bp, Homo sapien
tgacccaaaatcgaataaattactg

SEQ ID NO: 3694577 - DNA, 25 bp, Homo sapien
ggaacactcatcatctctgacgatg

SEQ ID NO: 3694578 - DNA, 25 bp, Homo sapien
gctcgagagagccaagtatccccac

SEQ ID NO: 3694579 - DNA, 25 bp, Homo sapien
tgagagctcgagagagccaagtatc

SEQ ID NO: 3694580 - DNA, 25 bp, Homo sapien
ttttcagatgagagctcgagagagc

SEQ ID NO: 3694581 - DNA, 25 bp, Homo sapien
tcagatgagagctcgagagagccaa

SEQ ID NO: 3694582 - DNA, 25 bp, Homo sapien
agaagaaaaacctggatagcaacca

SEQ ID NO: 3694583 - DNA, 25 bp, Homo sapien
atagcaaccagtctggccgagatga

SEQ ID NO: 3694584 - DNA, 25 bp, Homo sapien
agtctggccgagatgaccacaaaga

SEQ ID NO: 3694585 - DNA, 25 bp, Homo sapien
gaaaaacctggatagcaaccagtct

SEQ ID NO: 3694586 - DNA, 25 bp, Homo sapien
gaggcagccgtctgtcaggactgat

SEQ ID NO: 3694587 - DNA, 25 bp, Homo sapien
ggactgatgactcggcagctgaagt

SEQ ID NO: 3694588 - DNA, 25 bp, Homo sapien
ctgggatatttacccacccatttca

SEQ ID NO: 3694589 - DNA, 25 bp, Homo sapien
cagctgaagtcagactgggatattt

SEQ ID NO: 3694590 - DNA, 25 bp, Homo sapien
ttagctctcggaaaagatttctgcc

SEQ ID NO: 3694591 - DNA, 25 bp, Homo sapien
ctcggaaaagatttctgccagaggg

SEQ ID NO: 3694592 - DNA, 25 bp, Homo sapien
ctttgaggctcacatttagctctcg

SEQ ID NO: 3694593 - DNA, 25 bp, Homo sapien
ggctcacatttagctctcggaaaag

SEQ ID NO: 3694594 - DNA, 25 bp, Homo sapien
cctcccgttcctgtggccaggccac

SEQ ID NO: 3694595 - DNA, 25 bp, Homo sapien
agggctggccatgcttgcatctctg

SEQ ID NO: 3694596 - DNA, 25 bp, Homo sapien
ggctggccatgcttgcatctctgca

SEQ ID NO: 3694597 - DNA, 25 bp, Homo sapien
gggctggccatgcttgcatctctgc

SEQ ID NO: 3694598 - DNA, 25 bp, Homo sapien
tcaagtctcaggattcctagtggaa

SEQ ID NO: 3694599 - DNA, 25 bp, Homo sapien
ggacaggagtcagtggctgtggatg

SEQ ID NO: 3694600 - DNA, 25 bp, Homo sapien
gacaggagtcagtggctgtggatgc

SEQ ID NO: 3694601 - DNA, 25 bp, Homo sapien
acaggagtcagtggctgtggatgcc

SEQ ID NO: 3694602 - DNA, 25 bp, Homo sapien
aaatgagaggcaaagcgtcacacgc

SEQ ID NO: 3694603 - DNA, 25 bp, Homo sapien
ctttgtatgtgcataatggctgagc

SEQ ID NO: 3694604 - DNA, 25 bp, Homo sapien
gaattgaccattggttgtgaagtga

SEQ ID NO: 3694605 - DNA, 25 bp, Homo sapien
gagcaacccaaactaggaaatgaga

SEQ ID NO: 3694606 - DNA, 25 bp, Homo sapien
aaaaacggccaataaatccaagcat

SEQ ID NO: 3694607 - DNA, 25 bp, Homo sapien
gcctgttctgtatggatctctctga

SEQ ID NO: 3694608 - DNA, 25 bp, Homo sapien
taagtgtacagtgagggctcggtac

SEQ ID NO: 3694609 - DNA, 25 bp, Homo sapien
tccatactcctagaaagctgttaag

SEQ ID NO: 3694610 - DNA, 25 bp, Homo sapien
tctgatgtctactaccctggctagg

SEQ ID NO: 3694611 - DNA, 25 bp, Homo sapien
cttcctggagtagtgcgatgtctga

SEQ ID NO: 3694612 - DNA, 25 bp, Homo sapien
gacgccaactgtcagtccagcatca

SEQ ID NO: 3694613 - DNA, 25 bp, Homo sapien
accagatccccggtggagacgccaa

SEQ ID NO: 3694614 - DNA, 25 bp, Homo sapien
tgtgtatggacagcaaaatgcaccc

SEQ ID NO: 3694615 - DNA, 25 bp, Homo sapien
tgacagctgagctacgatgtggacg

SEQ ID NO: 3694616 - DNA, 25 bp, Homo sapien
cagacccaggagatgtgctgagcct

SEQ ID NO: 3694617 - DNA, 25 bp, Homo sapien
acacagactcccagctcgttcacct

SEQ ID NO: 3694618 - DNA, 25 bp, Homo sapien
atgtggacgggagggagacacgtag

SEQ ID NO: 3694619 - DNA, 25 bp, Homo sapien
ccaacatgaaggatgagggtcactt

SEQ ID NO: 3694620 - DNA, 25 bp, Homo sapien
cacttagtgagtagccaggatccaa

SEQ ID NO: 3694621 - DNA, 25 bp, Homo sapien
tgagggtcacttagtgagtagccag

SEQ ID NO: 3694622 - DNA, 25 bp, Homo sapien
atccttcacgcattgccaacatgaa

SEQ ID NO: 3694623 - DNA, 25 bp, Homo sapien
cctgcactaaatcagggaggccatt

SEQ ID NO: 3694624 - DNA, 25 bp, Homo sapien
gaggccattatgagccgaaataaat

SEQ ID NO: 3694625 - DNA, 25 bp, Homo sapien
cactaaatcagggaggccattatga

SEQ ID NO: 3694626 - DNA, 25 bp, Homo sapien
atgatcctgcactaaatcagggagg

SEQ ID NO: 3694627 - DNA, 25 bp, Homo sapien
tccaggctcctgaatgcgctcagtc

SEQ ID NO: 3694628 - DNA, 25 bp, Homo sapien
agctgattgttgtccaagatgagtt

SEQ ID NO: 3694629 - DNA, 25 bp, Homo sapien
ctgattgttgtccaagatgagttcc

SEQ ID NO: 3694630 - DNA, 25 bp, Homo sapien
tcctgaatgcgctcagtccttccag

SEQ ID NO: 3694631 - DNA, 25 bp, Homo sapien
tcttgttgagggttaaggtatgcag

SEQ ID NO: 3694632 - DNA, 25 bp, Homo sapien
tgttgagggttaaggtatgcagtct

SEQ ID NO: 3694633 - DNA, 25 bp, Homo sapien
ttcttgttgagggttaaggtatgca

SEQ ID NO: 3694634 - DNA, 25 bp, Homo sapien
ggttaaggtatgcagtctgggtaac

SEQ ID NO: 3694635 - DNA, 25 bp, Homo sapien
attttgcaggtatttgtgcagggtg

SEQ ID NO: 3694636 - DNA, 25 bp, Homo sapien
cattttgcaggtatttgtgcagggt

SEQ ID NO: 3694637 - DNA, 25 bp, Homo sapien
gacattttgcaggtatttgtgcagg

SEQ ID NO: 3694638 - DNA, 25 bp, Homo sapien
tttgacattttgcaggtatttgtgc

SEQ ID NO: 3694639 - DNA, 25 bp, Homo sapien
gtccttcgcctttatgctgatagca

SEQ ID NO: 3694640 - DNA, 25 bp, Homo sapien
tagcaccaccagaggataaaacatg

SEQ ID NO: 3694641 - DNA, 25 bp, Homo sapien
tgcatgcatgctctagaccagtcct

SEQ ID NO: 3694642 - DNA, 25 bp, Homo sapien
gcaccaccagaggataaaacatgag

SEQ ID NO: 3694643 - DNA, 25 bp, Homo sapien
tcatccttttccaagctgaccagct

SEQ ID NO: 3694644 - DNA, 25 bp, Homo sapien
agctcgttgggacaggccacgttgc

SEQ ID NO: 3694645 - DNA, 25 bp, Homo sapien
cacttctgccaagtgatccagcagg

SEQ ID NO: 3694646 - DNA, 25 bp, Homo sapien
gactgaggtactccagagctggtgt

SEQ ID NO: 3694647 - DNA, 25 bp, Homo sapien
tgctcactgggttatgtaagccaca

SEQ ID NO: 3694648 - DNA, 25 bp, Homo sapien
tcctattcgtctgggaaatggtggc

SEQ ID NO: 3694649 - DNA, 25 bp, Homo sapien
tgtagattagctggagaatgctcac

SEQ ID NO: 3694650 - DNA, 25 bp, Homo sapien
tgatctctgggtcgtgacctttgct

SEQ ID NO: 3694651 - DNA, 25 bp, Homo sapien
gcattcatgaatgcctgacaactgg

SEQ ID NO: 3694652 - DNA, 25 bp, Homo sapien
tttcctcacagttcaccggcagcat

SEQ ID NO: 3694653 - DNA, 25 bp, Homo sapien
ctacagcattcatgaatgcctgaca

SEQ ID NO: 3694654 - DNA, 25 bp, Homo sapien
cagaggccagctgattttcctcaca

SEQ ID NO: 3694655 - DNA, 25 bp, Homo sapien
tattcaagaagtaccaagtttccaa

SEQ ID NO: 3694656 - DNA, 25 bp, Homo sapien
tctgacactctattcaagaagtacc

SEQ ID NO: 3694657 - DNA, 25 bp, Homo sapien
gatgggcctccacggtctgcgaatg

SEQ ID NO: 3694658 - DNA, 25 bp, Homo sapien
gaatggggttggctgacatgttttt

SEQ ID NO: 3694659 - DNA, 25 bp, Homo sapien
tgctctagtcccaacactcaggcat

SEQ ID NO: 3694660 - DNA, 25 bp, Homo sapien
ccaaaatcaattttctctgctctag

SEQ ID NO: 3694661 - DNA, 25 bp, Homo sapien
atcaattttctctgctctagtccca

SEQ ID NO: 3694662 - DNA, 25 bp, Homo sapien
tctagtcccaacactcaggcatttt

SEQ ID NO: 3694663 - DNA, 25 bp, Homo sapien
catttgcttaaaggactcctctaag

SEQ ID NO: 3694664 - DNA, 25 bp, Homo sapien
tctgaccaacgcctcctctcgttct

SEQ ID NO: 3694665 - DNA, 25 bp, Homo sapien
tgaagactcctctgaccaacgcctc

SEQ ID NO: 3694666 - DNA, 25 bp, Homo sapien
aaatttcaagttgggcagcttgtac

SEQ ID NO: 3694667 - DNA, 25 bp, Homo sapien
catccagaaatttcaagttgggcag

SEQ ID NO: 3694668 - DNA, 25 bp, Homo sapien
tcagaggacattctgcatgccctgg

SEQ ID NO: 3694669 - DNA, 25 bp, Homo sapien
tgtaaatcccttgtgaagaacagca

SEQ ID NO: 3694670 - DNA, 25 bp, Homo sapien
gaagaacagcaagtaggcagctcac

SEQ ID NO: 3694671 - DNA, 25 bp, Homo sapien
ccctggggtgtaagcactgccatga

SEQ ID NO: 3694672 - DNA, 25 bp, Homo sapien
tgagtgccccatccagatatggtgg

SEQ ID NO: 3694673 - DNA, 25 bp, Homo sapien
gaaatactgatccactctgcacaca

SEQ ID NO: 3694674 - DNA, 25 bp, Homo sapien
tttgtgtgacaatgtagagctgccc

SEQ ID NO: 3694675 - DNA, 25 bp, Homo sapien
caaagtcaatgagcgcaggagaaat

SEQ ID NO: 3694676 - DNA, 25 bp, Homo sapien
tcagttccctcacccataaagcgag

SEQ ID NO: 3694677 - DNA, 25 bp, Homo sapien
acaattactagccaggtgacctggg

SEQ ID NO: 3694678 - DNA, 25 bp, Homo sapien
taaatatgtagctcactgctccagg

SEQ ID NO: 3694679 - DNA, 25 bp, Homo sapien
caactaatgctggattttaaggagc

SEQ ID NO: 3694680 - DNA, 25 bp, Homo sapien
tttctacaagaaaagtaccactgcc

SEQ ID NO: 3694681 - DNA, 25 bp, Homo sapien
ccattcaatgtaggcatccagttcg

SEQ ID NO: 3694682 - DNA, 25 bp, Homo sapien
caaggagctcatttggcgtctttct

SEQ ID NO: 3694683 - DNA, 25 bp, Homo sapien
catgaaacgggagcacagactaggt

SEQ ID NO: 3694684 - DNA, 25 bp, Homo sapien
gctgaataagcacaacaggccttgg

SEQ ID NO: 3694685 - DNA, 25 bp, Homo sapien
ctgaataagcacaacaggccttggc

SEQ ID NO: 3694686 - DNA, 25 bp, Homo sapien
catcagagcattctgctgaataagc

SEQ ID NO: 3694687 - DNA, 25 bp, Homo sapien
ttaatcatccatcagagcattctgc

SEQ ID NO: 3694688 - DNA, 25 bp, Homo sapien
cagtaccaccccgagtgacgaggag

SEQ ID NO: 3694689 - DNA, 25 bp, Homo sapien
aacgcagcttcagatcacacccttg

SEQ ID NO: 3694690 - DNA, 25 bp, Homo sapien
taaaagccctaatatgagcaggtgg

SEQ ID NO: 3694691 - DNA, 25 bp, Homo sapien
accccgagtgacgaggagaacgcag

SEQ ID NO: 3694692 - DNA, 25 bp, Homo sapien
ctcttgatacatccatctaagcatc

SEQ ID NO: 3694693 - DNA, 25 bp, Homo sapien
tacatccatctaagcatctttggac

SEQ ID NO: 3694694 - DNA, 25 bp, Homo sapien
atccatctaagcatctttggacagc

SEQ ID NO: 3694695 - DNA, 25 bp, Homo sapien
gatacatccatctaagcatctttgg

SEQ ID NO: 3694696 - DNA, 25 bp, Homo sapien
ccttcaaggatacacaatggcctga

SEQ ID NO: 3694697 - DNA, 25 bp, Homo sapien
tgcacatgtcattgaaggcagcttc

SEQ ID NO: 3694698 - DNA, 25 bp, Homo sapien
gacagagctctattaagctgtagag

SEQ ID NO: 3694699 - DNA, 25 bp, Homo sapien
gagttcagtctctagaatcctacag

SEQ ID NO: 3694700 - DNA, 25 bp, Homo sapien
cagctgtctgggaacttggatgttc

SEQ ID NO: 3694701 - DNA, 25 bp, Homo sapien
gatgttctagaggtgttggtgagga

SEQ ID NO: 3694702 - DNA, 25 bp, Homo sapien
aagccggatccaacagctgtctggg

SEQ ID NO: 3694703 - DNA, 25 bp, Homo sapien
gagggttgtagcagactctcaagcc

SEQ ID NO: 3694704 - DNA, 25 bp, Homo sapien
taaattgtgtcaagaacaaaagtaa

SEQ ID NO: 3694705 - DNA, 25 bp, Homo sapien
attgtgtcaagaacaaaagtaaagg

SEQ ID NO: 3694706 - DNA, 25 bp, Homo sapien
ttaaattgtgtcaagaacaaaagta

SEQ ID NO: 3694707 - DNA, 25 bp, Homo sapien
aattgtgtcaagaacaaaagtaaag

SEQ ID NO: 3694708 - DNA, 25 bp, Homo sapien
ggcctctggcatctaaaagtgtaga

SEQ ID NO: 3694709 - DNA, 25 bp, Homo sapien
gctgcaagttggtattgaggctttt

SEQ ID NO: 3694710 - DNA, 25 bp, Homo sapien
aggcctctggcatctaaaagtgtag

SEQ ID NO: 3694711 - DNA, 25 bp, Homo sapien
agtgtagaggctgcaagttggtatt

SEQ ID NO: 3694712 - DNA, 25 bp, Homo sapien
ctgtgcttaaatagctgaaggtcac

SEQ ID NO: 3694713 - DNA, 25 bp, Homo sapien
tccagtaataacaggtccaataatt

SEQ ID NO: 3694714 - DNA, 25 bp, Homo sapien
tgcccttccattatggaacgtctgt

SEQ ID NO: 3694715 - DNA, 25 bp, Homo sapien
ttatggaacgtctgtgcttaaatag

SEQ ID NO: 3694716 - DNA, 25 bp, Homo sapien
tttttataatgggatgttggtcttc

SEQ ID NO: 3694717 - DNA, 25 bp, Homo sapien
tccaaactgcctccaactcaatgag

SEQ ID NO: 3694718 - DNA, 25 bp, Homo sapien
tttattgttgaaagccacatagggc

SEQ ID NO: 3694719 - DNA, 25 bp, Homo sapien
tcttctggtatccatctaatgtggg

SEQ ID NO: 3694720 - DNA, 25 bp, Homo sapien
caggcaaggtaagcagaagtaggac

SEQ ID NO: 3694721 - DNA, 25 bp, Homo sapien
tagcttactctagttcccaagagga

SEQ ID NO: 3694722 - DNA, 25 bp, Homo sapien
caaaggcacacctctaagtgagtca

SEQ ID NO: 3694723 - DNA, 25 bp, Homo sapien
gcatgccatgttacacagggcccca

SEQ ID NO: 3694724 - DNA, 25 bp, Homo sapien
ctcaggagttcaagaccagcccggc

SEQ ID NO: 3694725 - DNA, 25 bp, Homo sapien
taaaaatacaaaaattagctggtca

SEQ ID NO: 3694726 - DNA, 25 bp, Homo sapien
caacactttgggagaatcacttgag

SEQ ID NO: 3694727 - DNA, 25 bp, Homo sapien
caacatggtgaaaccccgtctctac

SEQ ID NO: 3694728 - DNA, 25 bp, Homo sapien
gactcagtctgtctagaaaactctt

SEQ ID NO: 3694729 - DNA, 25 bp, Homo sapien
ggctgctcttgagataaagactaag

SEQ ID NO: 3694730 - DNA, 25 bp, Homo sapien
tgcccctaagggaagaaatatccca

SEQ ID NO: 3694731 - DNA, 25 bp, Homo sapien
gataaagactaagtgattctgactc

SEQ ID NO: 3694732 - DNA, 25 bp, Homo sapien
gagaggggctgaatgaaccccccac

SEQ ID NO: 3694733 - DNA, 25 bp, Homo sapien
ggagaggggctgaatgaacccccca

SEQ ID NO: 3694734 - DNA, 25 bp, Homo sapien
tggcagaagggaagttgcccggtgg

SEQ ID NO: 3694735 - DNA, 25 bp, Homo sapien
cctggcagaagggaagttgcccggt

SEQ ID NO: 3694736 - DNA, 25 bp, Homo sapien
agggagctgcgcagacgccccatac

SEQ ID NO: 3694737 - DNA, 25 bp, Homo sapien
ataagcagggagctgcgcagacgcc

SEQ ID NO: 3694738 - DNA, 25 bp, Homo sapien
ttagcgataagcagggagctgcgca

SEQ ID NO: 3694739 - DNA, 25 bp, Homo sapien
cgcagacgccccataccctgctcct

SEQ ID NO: 3694740 - DNA, 25 bp, Homo sapien
gatccagggtgctgaaggctgcgga

SEQ ID NO: 3694741 - DNA, 25 bp, Homo sapien
gggcttggggtcaggcgctgcacag

SEQ ID NO: 3694742 - DNA, 25 bp, Homo sapien
gaaaatccagggcagtaccagggcc

SEQ ID NO: 3694743 - DNA, 25 bp, Homo sapien
aggctccgcgtggaagcgcccccct

SEQ ID NO: 3694744 - DNA, 25 bp, Homo sapien
ctgattttaaaccactctcaggttg

SEQ ID NO: 3694745 - DNA, 25 bp, Homo sapien
tgattttaaaccactctcaggttgg

SEQ ID NO: 3694746 - DNA, 25 bp, Homo sapien
tctgttctgattttaaaccactctc

SEQ ID NO: 3694747 - DNA, 25 bp, Homo sapien
caacactctgttctgattttaaacc

SEQ ID NO: 3694748 - DNA, 25 bp, Homo sapien
gagaaacgcggcatcaaatggaggc

SEQ ID NO: 3694749 - DNA, 25 bp, Homo sapien
tacctggagacacatctcaatttct

SEQ ID NO: 3694750 - DNA, 25 bp, Homo sapien
tgtggcttttacctggagacacatc

SEQ ID NO: 3694751 - DNA, 25 bp, Homo sapien
gctgggagagaaacgcggcatcaaa

SEQ ID NO: 3694752 - DNA, 25 bp, Homo sapien
ctgacaagtctgacaggccgaaaaa

SEQ ID NO: 3694753 - DNA, 25 bp, Homo sapien
ggcatcttcgctttaaactgtgctg

SEQ ID NO: 3694754 - DNA, 25 bp, Homo sapien
caaagcagctttgtataagcaccaa

SEQ ID NO: 3694755 - DNA, 25 bp, Homo sapien
aactgtgctgcaaaccaacctcgat

SEQ ID NO: 3694756 - DNA, 25 bp, Homo sapien
tacttgatgcattgaggacctggga

SEQ ID NO: 3694757 - DNA, 25 bp, Homo sapien
tcccacgatgatctctgtgcctgct

SEQ ID NO: 3694758 - DNA, 25 bp, Homo sapien
gacattaatcatataacagccggag

SEQ ID NO: 3694759 - DNA, 25 bp, Homo sapien
ttggatcagagaaaggtcgccggct

SEQ ID NO: 3694760 - DNA, 25 bp, Homo sapien
taaatcccctttgagcgtcagcttc

SEQ ID NO: 3694761 - DNA, 25 bp, Homo sapien
ggaagaagtggaaacagcgatttct

SEQ ID NO: 3694762 - DNA, 25 bp, Homo sapien
cacagccgaacgcaagaagacattc

SEQ ID NO: 3694763 - DNA, 25 bp, Homo sapien
gcgatttctattgcagtcagctgac

SEQ ID NO: 3694764 - DNA, 25 bp, Homo sapien
tgagctaccacttcccacacattcc

SEQ ID NO: 3694765 - DNA, 25 bp, Homo sapien
acaagagttgcacgggctgacgtca

SEQ ID NO: 3694766 - DNA, 25 bp, Homo sapien
ctctttgttgacaagagttgcacgg

SEQ ID NO: 3694767 - DNA, 25 bp, Homo sapien
cacattcccagtcaaagtttgcttt

SEQ ID NO: 3694768 - DNA, 25 bp, Homo sapien
tgaccctgaacatcatcttgctgtg

SEQ ID NO: 3694769 - DNA, 25 bp, Homo sapien
tcttgctgtgccttagggtcattcg

SEQ ID NO: 3694770 - DNA, 25 bp, Homo sapien
gacctttaactccaatgtgaccctg

SEQ ID NO: 3694771 - DNA, 25 bp, Homo sapien
cattcgtatgaatatgatgtaataa

SEQ ID NO: 3694772 - DNA, 25 bp, Homo sapien
tgcaggcgaagctccatcaggtgag

SEQ ID NO: 3694773 - DNA, 25 bp, Homo sapien
ctgcaggcgaagctccatcaggtga

SEQ ID NO: 3694774 - DNA, 25 bp, Homo sapien
gcaggcgaagctccatcaggtgaga

SEQ ID NO: 3694775 - DNA, 25 bp, Homo sapien
gagcggttgacaaagtgtacttcag

SEQ ID NO: 3694776 - DNA, 25 bp, Homo sapien
tgtcgtcgagtaattgatgcaaacc

SEQ ID NO: 3694777 - DNA, 25 bp, Homo sapien
ttcagtgccgcaggcagctcatcaa

SEQ ID NO: 3694778 - DNA, 25 bp, Homo sapien
gaggttgtcctatcttttgttctgg

SEQ ID NO: 3694779 - DNA, 25 bp, Homo sapien
gtgggcacccaacaactttgcctga

SEQ ID NO: 3694780 - DNA, 25 bp, Homo sapien
aacaactttgcctgacttgcctccc

SEQ ID NO: 3694781 - DNA, 25 bp, Homo sapien
cctgtgggcacccaacaactttgcc

SEQ ID NO: 3694782 - DNA, 25 bp, Homo sapien
tccctgtgggcacccaacaactttg

SEQ ID NO: 3694783 - DNA, 25 bp, Homo sapien
tctgaggcaacagcaggggcctcac

SEQ ID NO: 3694784 - DNA, 25 bp, Homo sapien
tcatcagatgccccaatttcccaaa

SEQ ID NO: 3694785 - DNA, 25 bp, Homo sapien
tctctcagaaactggatccacgggc

SEQ ID NO: 3694786 - DNA, 25 bp, Homo sapien
atccacgggccgtgattcatctttg

SEQ ID NO: 3694787 - DNA, 25 bp, Homo sapien
cgtgattcatctttgtcagggatgg

SEQ ID NO: 3694788 - DNA, 25 bp, Homo sapien
caaaggaagggcctagctacagcac

SEQ ID NO: 3694789 - DNA, 25 bp, Homo sapien
tgttgtttacgatggacttcagtca

SEQ ID NO: 3694790 - DNA, 25 bp, Homo sapien
cagtctagcctgcacagacaatgga

SEQ ID NO: 3694791 - DNA, 25 bp, Homo sapien
cattgtgacatctggctatagcata

SEQ ID NO: 3694792 - DNA, 25 bp, Homo sapien
tgttttgctgttattgaggggtaca

SEQ ID NO: 3694793 - DNA, 25 bp, Homo sapien
ttggacccaggaatctgttttgctg

SEQ ID NO: 3694794 - DNA, 25 bp, Homo sapien
ccaaaggcatatggcagctgtcagc

SEQ ID NO: 3694795 - DNA, 25 bp, Homo sapien
tgtcagctccggaaaaccacttttg

SEQ ID NO: 3694796 - DNA, 25 bp, Homo sapien
caaggagtggttctctggaagctgt

SEQ ID NO: 3694797 - DNA, 25 bp, Homo sapien
tggttctctggaagctgtccagaac

SEQ ID NO: 3694798 - DNA, 25 bp, Homo sapien
tggaagctgtccagaacctgtcccc

SEQ ID NO: 3694799 - DNA, 25 bp, Homo sapien
tcaaggagtggttctctggaagctg

SEQ ID NO: 3694800 - DNA, 25 bp, Homo sapien
tgtctggaatactagatctgtgttc

SEQ ID NO: 3694801 - DNA, 25 bp, Homo sapien
tccttgaaataaaagttcatggatg

SEQ ID NO: 3694802 - DNA, 25 bp, Homo sapien
agggtgccccatagcaacacatcct

SEQ ID NO: 3694803 - DNA, 25 bp, Homo sapien
gccagcaaatgaagggtgccccata

SEQ ID NO: 3694804 - DNA, 25 bp, Homo sapien
aatcatcataacaacacaacaaggt

SEQ ID NO: 3694805 - DNA, 25 bp, Homo sapien
taacaacacaacaaggtaggtagtg

SEQ ID NO: 3694806 - DNA, 25 bp, Homo sapien
acacaacaaggtaggtagtgatcac

SEQ ID NO: 3694807 - DNA, 25 bp, Homo sapien
acggtgatggatttctcacaaatgc

SEQ ID NO: 3694808 - DNA, 25 bp, Homo sapien
atggctattgagtttacctatttct

SEQ ID NO: 3694809 - DNA, 25 bp, Homo sapien
ggctattgagtttacctatttcttc

SEQ ID NO: 3694810 - DNA, 25 bp, Homo sapien
tggctattgagtttacctatttctt

SEQ ID NO: 3694811 - DNA, 25 bp, Homo sapien
gcacttcatggagactgaggtatct

SEQ ID NO: 3694812 - DNA, 25 bp, Homo sapien
tcttattctagttttgatatcagga

SEQ ID NO: 3694813 - DNA, 25 bp, Homo sapien
tatcaggataatgctaacatcacag

SEQ ID NO: 3694814 - DNA, 25 bp, Homo sapien
atgaaacggaaagtgtatgtttctc

SEQ ID NO: 3694815 - DNA, 25 bp, Homo sapien
gctgcctgctttagaagaagcccat

SEQ ID NO: 3694816 - DNA, 25 bp, Homo sapien
cccttttgatagacgccggatgcca

SEQ ID NO: 3694817 - DNA, 25 bp, Homo sapien
ttgaaaagtgtcatgtgagctgcct

SEQ ID NO: 3694818 - DNA, 25 bp, Homo sapien
tgccaagctggtacaggacagagtg

SEQ ID NO: 3694819 - DNA, 25 bp, Homo sapien
ttgactcatcgtaaagcagtgtgaa

SEQ ID NO: 3694820 - DNA, 25 bp, Homo sapien
acgcgtttccccttgactcatcgta

SEQ ID NO: 3694821 - DNA, 25 bp, Homo sapien
tgactcatcgtaaagcagtgtgaac

SEQ ID NO: 3694822 - DNA, 25 bp, Homo sapien
tcccaacgcgtttccccttgactca

SEQ ID NO: 3694823 - DNA, 25 bp, Homo sapien
tttggatgtatttgggcccaggagc

SEQ ID NO: 3694824 - DNA, 25 bp, Homo sapien
tgcatagattctgtttcctcggcaa

SEQ ID NO: 3694825 - DNA, 25 bp, Homo sapien
tgtctaacaccaacccacaagaaag

SEQ ID NO: 3694826 - DNA, 25 bp, Homo sapien
aaggctcttgcactcatagttcctc

SEQ ID NO: 3694827 - DNA, 25 bp, Homo sapien
gatctttgggaatcagtgcaccttc

SEQ ID NO: 3694828 - DNA, 25 bp, Homo sapien
tcaaggtcagcctagaaatgtatca

SEQ ID NO: 3694829 - DNA, 25 bp, Homo sapien
tcatcaaagcttgcaatgtgccacc

SEQ ID NO: 3694830 - DNA, 25 bp, Homo sapien
tctccagctgaagaatgataactca

SEQ ID NO: 3694831 - DNA, 25 bp, Homo sapien
tactgtatgcactatcaattcccat

SEQ ID NO: 3694832 - DNA, 25 bp, Homo sapien
ctgctttaaagctactgtatgcact

SEQ ID NO: 3694833 - DNA, 25 bp, Homo sapien
gccatgtggtctggttcatactcca

SEQ ID NO: 3694834 - DNA, 25 bp, Homo sapien
tttctttcggaatgatttaaatcta

SEQ ID NO: 3694835 - DNA, 25 bp, Homo sapien
tcagtaaagagcatgcaattgcccc

SEQ ID NO: 3694836 - DNA, 25 bp, Homo sapien
tgcccattatgaggtaagactcgag

SEQ ID NO: 3694837 - DNA, 25 bp, Homo sapien
tgagctggaataaagcaaggtgccc

SEQ ID NO: 3694838 - DNA, 25 bp, Homo sapien
ctttgtggacaggatgtgcacggca

SEQ ID NO: 3694839 - DNA, 25 bp, Homo sapien
gatatctcatttcctacagtcggca

SEQ ID NO: 3694840 - DNA, 25 bp, Homo sapien
tggtggaacacaagcctatgatgga

SEQ ID NO: 3694841 - DNA, 25 bp, Homo sapien
ctctctggcaggctatggatcgtgg

SEQ ID NO: 3694842 - DNA, 25 bp, Homo sapien
ggtcgacgcaggctgaaatactttc

SEQ ID NO: 3694843 - DNA, 25 bp, Homo sapien
tcccaggattttcaaaccaggtctc

SEQ ID NO: 3694844 - DNA, 25 bp, Homo sapien
agaatccaggccaaagatactggcc

SEQ ID NO: 3694845 - DNA, 25 bp, Homo sapien
tagagggagaaacgaagctctcagc

SEQ ID NO: 3694846 - DNA, 25 bp, Homo sapien
tactcagtggagtggactatgccta

SEQ ID NO: 3694847 - DNA, 25 bp, Homo sapien
tgaaatgatttagcctcaacgcaag

SEQ ID NO: 3694848 - DNA, 25 bp, Homo sapien
tccagaataaagattgccgaatatg

SEQ ID NO: 3694849 - DNA, 25 bp, Homo sapien
aatgtatgctacagcgactctttga

SEQ ID NO: 3694850 - DNA, 25 bp, Homo sapien
tcaacgcaaggtcagtcccacatat

SEQ ID NO: 3694851 - DNA, 25 bp, Homo sapien
tcggtccatggaagtagtcttggga

SEQ ID NO: 3694852 - DNA, 25 bp, Homo sapien
ctgtctcggtccatggaagtagtct

SEQ ID NO: 3694853 - DNA, 25 bp, Homo sapien
tctcggtccatggaagtagtcttgg

SEQ ID NO: 3694854 - DNA, 25 bp, Homo sapien
cagccaccatgtggctccctatcca

SEQ ID NO: 3694855 - DNA, 25 bp, Homo sapien
tggacactggctcctgactgaagct

SEQ ID NO: 3694856 - DNA, 25 bp, Homo sapien
catcagaaaggtgcctgctgtcagc

SEQ ID NO: 3694857 - DNA, 25 bp, Homo sapien
gaagcttcaaaggtgccaatcacac

SEQ ID NO: 3694858 - DNA, 25 bp, Homo sapien
tgagaagccctcctcgtaatcctgc

SEQ ID NO: 3694859 - DNA, 25 bp, Homo sapien
gtgtgaggtttggggacctggtcat

SEQ ID NO: 3694860 - DNA, 25 bp, Homo sapien
cacagtctgctctgtgtgaggtttg

SEQ ID NO: 3694861 - DNA, 25 bp, Homo sapien
tctgtgtgaggtttggggacctggt

SEQ ID NO: 3694862 - DNA, 25 bp, Homo sapien
acagtctgctctgtgtgaggtttgg

SEQ ID NO: 3694863 - DNA, 25 bp, Homo sapien
atcctgtctagagccagaagccaag

SEQ ID NO: 3694864 - DNA, 25 bp, Homo sapien
taattcaacacgaaagtgtgggcca

SEQ ID NO: 3694865 - DNA, 25 bp, Homo sapien
tctcacagattaaggtgccatgcct

SEQ ID NO: 3694866 - DNA, 25 bp, Homo sapien
gattatgtcaaaaacctctctggaa

SEQ ID NO: 3694867 - DNA, 25 bp, Homo sapien
gaggctaaggcaggagaatggcgtg

SEQ ID NO: 3694868 - DNA, 25 bp, Homo sapien
aaatacaaaaacttctccaggcatg

SEQ ID NO: 3694869 - DNA, 25 bp, Homo sapien
ggtgcctgtagtcccagctattctg

SEQ ID NO: 3694870 - DNA, 25 bp, Homo sapien
aaaaacttctccaggcatggtggcg

SEQ ID NO: 3694871 - DNA, 25 bp, Homo sapien
aattcaagcccctttccaataggtg

SEQ ID NO: 3694872 - DNA, 25 bp, Homo sapien
agtccggtggatatctctgaatgtc

SEQ ID NO: 3694873 - DNA, 25 bp, Homo sapien
tcaatgaaaaactacagtccggtgg

SEQ ID NO: 3694874 - DNA, 25 bp, Homo sapien
ttctacaacagacgtgcaaagcgag

SEQ ID NO: 3694875 - DNA, 25 bp, Homo sapien
atctctgactgtgctacacattaga

SEQ ID NO: 3694876 - DNA, 25 bp, Homo sapien
tgtaaccaagcgtaaaagagatatt

SEQ ID NO: 3694877 - DNA, 25 bp, Homo sapien
gactgtgctacacattagaattctg

SEQ ID NO: 3694878 - DNA, 25 bp, Homo sapien
tgtttcgtactgtaggtagagcaaa

SEQ ID NO: 3694879 - DNA, 25 bp, Homo sapien
gtgtagctgctagtagcaagaagca

SEQ ID NO: 3694880 - DNA, 25 bp, Homo sapien
agtgtagctgctagtagcaagaagc

SEQ ID NO: 3694881 - DNA, 25 bp, Homo sapien
tgtagctgctagtagcaagaagcat

SEQ ID NO: 3694882 - DNA, 25 bp, Homo sapien
caagggcgtgtagtggcgctccggg

SEQ ID NO: 3694883 - DNA, 25 bp, Homo sapien
gagctggcaacgtcctcactagaag

SEQ ID NO: 3694884 - DNA, 25 bp, Homo sapien
cgctccggggagctggcaacgtcct

SEQ ID NO: 3694885 - DNA, 25 bp, Homo sapien
gaaggcaagggcgtgtagtggcgct

SEQ ID NO: 3694886 - DNA, 25 bp, Homo sapien
ctaaagtgccgaggcagcagtaatg

SEQ ID NO: 3694887 - DNA, 25 bp, Homo sapien
tccctgcacccactgagagcaataa

SEQ ID NO: 3694888 - DNA, 25 bp, Homo sapien
aatgctagaatagcccctgttcact

SEQ ID NO: 3694889 - DNA, 25 bp, Homo sapien
tcactttcacctttacgtgtacaag

SEQ ID NO: 3694890 - DNA, 25 bp, Homo sapien
gacaatgctagaatagcccctgttc

SEQ ID NO: 3694891 - DNA, 25 bp, Homo sapien
tacgtgtacaagtggaatttccttc

SEQ ID NO: 3694892 - DNA, 25 bp, Homo sapien
tccaagccacagacatcggaaatcc

SEQ ID NO: 3694893 - DNA, 25 bp, Homo sapien
caaacaccaaacaggcaacacaggt

SEQ ID NO: 3694894 - DNA, 25 bp, Homo sapien
aatcctgcactactctcttcttcgt

SEQ ID NO: 3694895 - DNA, 25 bp, Homo sapien
accaaacaggcaacacaggtccaag

SEQ ID NO: 3694896 - DNA, 25 bp, Homo sapien
gacatgttactatccctgtgatata

SEQ ID NO: 3694897 - DNA, 25 bp, Homo sapien
gcaaaatacgacatgttactatccc

SEQ ID NO: 3694898 - DNA, 25 bp, Homo sapien
tactatccctgtgatatatggatta

SEQ ID NO: 3694899 - DNA, 25 bp, Homo sapien
catgcaggaagcaaaatacgacatg

SEQ ID NO: 3694900 - DNA, 25 bp, Homo sapien
aaactttccagcaagctcctgagaa

SEQ ID NO: 3694901 - DNA, 25 bp, Homo sapien
gagaatcactggttcagtgctgagg

SEQ ID NO: 3694902 - DNA, 25 bp, Homo sapien
ggtggcagcacctctaattccttcc

SEQ ID NO: 3694903 - DNA, 25 bp, Homo sapien
tgaacgtgagaatcccctcactggt

SEQ ID NO: 3694904 - DNA, 25 bp, Homo sapien
gaagatgagtacctaacaactgtgt

SEQ ID NO: 3694905 - DNA, 25 bp, Homo sapien
gaaaggttatcatctctaagcaagt

SEQ ID NO: 3694906 - DNA, 25 bp, Homo sapien
ggcaagattgccaacaatagtcaaa

SEQ ID NO: 3694907 - DNA, 25 bp, Homo sapien
taaattactttgtgacagtcccagc

SEQ ID NO: 3694908 - DNA, 25 bp, Homo sapien
taggtgagacctatgtggcaaaggc

SEQ ID NO: 3694909 - DNA, 25 bp, Homo sapien
taaccaagaggcagtaggcaaaaga

SEQ ID NO: 3694910 - DNA, 25 bp, Homo sapien
gctgtctcactcatagggcctgacc

SEQ ID NO: 3694911 - DNA, 25 bp, Homo sapien
gatgcttagctctcttgaaagacta

SEQ ID NO: 3694912 - DNA, 25 bp, Homo sapien
tccaaagagtcatgcctgagtagtc

SEQ ID NO: 3694913 - DNA, 25 bp, Homo sapien
aattacccctggatactgcttgcag

SEQ ID NO: 3694914 - DNA, 25 bp, Homo sapien
gaggcatcacagtctatgggcacag

SEQ ID NO: 3694915 - DNA, 25 bp, Homo sapien
tgtggacctatcctacataaggaac

SEQ ID NO: 3694916 - DNA, 25 bp, Homo sapien
aaccatcagcaacctcatacaacaa

SEQ ID NO: 3694917 - DNA, 25 bp, Homo sapien
gatgcctgagccctcgtgaccaaac

SEQ ID NO: 3694918 - DNA, 25 bp, Homo sapien
gtgaccaaaccatcagcaacctcat

SEQ ID NO: 3694919 - DNA, 25 bp, Homo sapien
tgagccctcgtgaccaaaccatcag

SEQ ID NO: 3694920 - DNA, 25 bp, Homo sapien
gaaatagcttcctgtcttagtcaca

SEQ ID NO: 3694921 - DNA, 25 bp, Homo sapien
gaaccacgtgcaatctagtgctgcc

SEQ ID NO: 3694922 - DNA, 25 bp, Homo sapien
gctacaagttctagcccctggtatt

SEQ ID NO: 3694923 - DNA, 25 bp, Homo sapien
acattctcagggttccatgcctcac

SEQ ID NO: 3694924 - DNA, 25 bp, Homo sapien
tcataggagatgtgctaaagtcttc

SEQ ID NO: 3694925 - DNA, 25 bp, Homo sapien
tacagacaatgtgacccatgtggct

SEQ ID NO: 3694926 - DNA, 25 bp, Homo sapien
catgtggctgtacccactgaggaag

SEQ ID NO: 3694927 - DNA, 25 bp, Homo sapien
gcccaaattattgcctgctatgagg

SEQ ID NO: 3694928 - DNA, 25 bp, Homo sapien
ttgctttggctagcacatccaaggg

SEQ ID NO: 3694929 - DNA, 25 bp, Homo sapien
catccaagggaatgtagaatagtcc

SEQ ID NO: 3694930 - DNA, 25 bp, Homo sapien
tgtcttctggcctacaatccctaaa

SEQ ID NO: 3694931 - DNA, 25 bp, Homo sapien
tgctataggtttctggtagatacac

SEQ ID NO: 3694932 - DNA, 25 bp, Homo sapien
tttaccagcatatttgattcatgtg

SEQ ID NO: 3694933 - DNA, 25 bp, Homo sapien
ggattctcaacactggaatatttaa

SEQ ID NO: 3694934 - DNA, 25 bp, Homo sapien
tgaatgtcccattcctcaacagtga

SEQ ID NO: 3694935 - DNA, 25 bp, Homo sapien
gcatatttgattcatgtgaatgtcc

SEQ ID NO: 3694936 - DNA, 25 bp, Homo sapien
ccaggaagtgcagcgtttatatcaa

SEQ ID NO: 3694937 - DNA, 25 bp, Homo sapien
tatgactacctgcacactagaatgc

SEQ ID NO: 3694938 - DNA, 25 bp, Homo sapien
tcatggcaaagactgacctgcaatg

SEQ ID NO: 3694939 - DNA, 25 bp, Homo sapien
acctatacatatagcaggagtggca

SEQ ID NO: 3694940 - DNA, 25 bp, Homo sapien
tgagactctgataagacctgctaga

SEQ ID NO: 3694941 - DNA, 25 bp, Homo sapien
tacactgagactctgataagacctg

SEQ ID NO: 3694942 - DNA, 25 bp, Homo sapien
tcagtctacactgagactctgataa

SEQ ID NO: 3694943 - DNA, 25 bp, Homo sapien
tctgataagacctgctagaaccaaa

SEQ ID NO: 3694944 - DNA, 25 bp, Homo sapien
cctgggtttacagccacacgctggt

SEQ ID NO: 3694945 - DNA, 25 bp, Homo sapien
cacgctggtgttatgagagagattc

SEQ ID NO: 3694946 - DNA, 25 bp, Homo sapien
gagcaaactgaaggatagtactgaa

SEQ ID NO: 3694947 - DNA, 25 bp, Homo sapien
tactgaaaggcatagaaagcatctt

SEQ ID NO: 3694948 - DNA, 25 bp, Homo sapien
gcacaaataagccaaccaagtctga

SEQ ID NO: 3694949 - DNA, 25 bp, Homo sapien
ggatcaatgccctaagccaggtact

SEQ ID NO: 3694950 - DNA, 25 bp, Homo sapien
gtaatggtagataagcttgacccca

SEQ ID NO: 3694951 - DNA, 25 bp, Homo sapien
cgtgtcccatactatcccttagatg

SEQ ID NO: 3694952 - DNA, 25 bp, Homo sapien
gaaggatcaatataggccaagcact

SEQ ID NO: 3694953 - DNA, 25 bp, Homo sapien
gataggtacatttgaagcccaaccc

SEQ ID NO: 3694954 - DNA, 25 bp, Homo sapien
gctaggtcgatgttagcaagcacat

SEQ ID NO: 3694955 - DNA, 25 bp, Homo sapien
tatcatgactttgtggaggagctct

SEQ ID NO: 3694956 - DNA, 25 bp, Homo sapien
agtgctaaaaggaaagttcacagcc

SEQ ID NO: 3694957 - DNA, 25 bp, Homo sapien
aagttcacagccctaaacgcctaca

SEQ ID NO: 3694958 - DNA, 25 bp, Homo sapien
aaagagcacagaagaacaatttaca

SEQ ID NO: 3694959 - DNA, 25 bp, Homo sapien
gaacaatttacagtaacacctcaaa

SEQ ID NO: 3694960 - DNA, 25 bp, Homo sapien
ttgagcaacccagctaaccacagca

SEQ ID NO: 3694961 - DNA, 25 bp, Homo sapien
agaatctgaggaattgagcaaccca

SEQ ID NO: 3694962 - DNA, 25 bp, Homo sapien
cagtggaagaggataaattttctcc

SEQ ID NO: 3694963 - DNA, 25 bp, Homo sapien
tcaactttgcagattaatggccaaa

SEQ ID NO: 3694964 - DNA, 25 bp, Homo sapien
tagagtgatcagaaaagtgaggtac

SEQ ID NO: 3694965 - DNA, 25 bp, Homo sapien
gactcaccccacaaaaatgtctgat

SEQ ID NO: 3694966 - DNA, 25 bp, Homo sapien
tttgaatttcaaaggcagatgcccc

SEQ ID NO: 3694967 - DNA, 25 bp, Homo sapien
tcttcgtctgacagtctgggtagag

SEQ ID NO: 3694968 - DNA, 25 bp, Homo sapien
taaaaggcagaagcagcccaaatga

SEQ ID NO: 3694969 - DNA, 25 bp, Homo sapien
tcaattcttagacattgccccaaag

SEQ ID NO: 3694970 - DNA, 25 bp, Homo sapien
gatggtggtcatcgtggtaccacaa

SEQ ID NO: 3694971 - DNA, 25 bp, Homo sapien
tcagaagaatcggaaacaaggtctc

SEQ ID NO: 3694972 - DNA, 25 bp, Homo sapien
tgtagaaaagagcaaggtatttcag

SEQ ID NO: 3694973 - DNA, 25 bp, Homo sapien
tgattcagaaatgtgtagaaaagag

SEQ ID NO: 3694974 - DNA, 25 bp, Homo sapien
atgtgtagaaaagagcaaggtattt

SEQ ID NO: 3694975 - DNA, 25 bp, Homo sapien
ctgattcagaaatgtgtagaaaaga

SEQ ID NO: 3694976 - DNA, 25 bp, Homo sapien
gagtcctttccaggtcactgacatc

SEQ ID NO: 3694977 - DNA, 25 bp, Homo sapien
ctgagtcctttccaggtcactgaca

SEQ ID NO: 3694978 - DNA, 25 bp, Homo sapien
cctttccaggtcactgacatcttgg

SEQ ID NO: 3694979 - DNA, 25 bp, Homo sapien
gtcctttccaggtcactgacatctt

SEQ ID NO: 3694980 - DNA, 25 bp, Homo sapien
taagtcagttctagtggtgcggaga

SEQ ID NO: 3694981 - DNA, 25 bp, Homo sapien
tgccctgggccaaacaacacatatc

SEQ ID NO: 3694982 - DNA, 25 bp, Homo sapien
gagacacccactggatcatcggcat

SEQ ID NO: 3694983 - DNA, 25 bp, Homo sapien
tatctagttatttgactatcttccc

SEQ ID NO: 3694984 - DNA, 25 bp, Homo sapien
tgccgagagggaatcgtaaaataaa

SEQ ID NO: 3694985 - DNA, 25 bp, Homo sapien
ataaattatgccgtgtggttttgga

SEQ ID NO: 3694986 - DNA, 25 bp, Homo sapien
aaataaattatgccgtgtggttttg

SEQ ID NO: 3694987 - DNA, 25 bp, Homo sapien
ctggtgccgagagggaatcgtaaaa

SEQ ID NO: 3694988 - DNA, 25 bp, Homo sapien
agcgaaggcacagcctccaaactca

SEQ ID NO: 3694989 - DNA, 25 bp, Homo sapien
cgaaggcacagcctccaaactcaag

SEQ ID NO: 3694990 - DNA, 25 bp, Homo sapien
ctccaaactcaaggttagcccagac

SEQ ID NO: 3694991 - DNA, 25 bp, Homo sapien
cacagcctccaaactcaaggttagc

SEQ ID NO: 3694992 - DNA, 25 bp, Homo sapien
aggtctgttttgctgggcccatggc

SEQ ID NO: 3694993 - DNA, 25 bp, Homo sapien
aactgttgaggcgagcatgccttca

SEQ ID NO: 3694994 - DNA, 25 bp, Homo sapien
tgccccttgtgaactacagcagtcc

SEQ ID NO: 3694995 - DNA, 25 bp, Homo sapien
gttgaggcgagcatgccttcaaaat

SEQ ID NO: 3694996 - DNA, 25 bp, Homo sapien
cattatattggaagctcaagggcat

SEQ ID NO: 3694997 - DNA, 25 bp, Homo sapien
tcattatattggaagctcaagggca

SEQ ID NO: 3694998 - DNA, 25 bp, Homo sapien
gtcattatattggaagctcaagggc

SEQ ID NO: 3694999 - DNA, 25 bp, Homo sapien
tcatccactgagagcataccatcca

SEQ ID NO: 3695000 - DNA, 25 bp, Homo sapien
ctggagcataccatccattgagtct

SEQ ID NO: 3695001 - DNA, 25 bp, Homo sapien
gtcactggagcataccatccattga

SEQ ID NO: 3695002 - DNA, 25 bp, Homo sapien
atccattgagtctcatccactgaga

SEQ ID NO: 3695003 - DNA, 25 bp, Homo sapien
atcttctgctgggtttttggtacag

SEQ ID NO: 3695004 - DNA, 25 bp, Homo sapien
ctgaatcttctgctgggtttttggt

SEQ ID NO: 3695005 - DNA, 25 bp, Homo sapien
gaatcttctgctgggtttttggtac

SEQ ID NO: 3695006 - DNA, 25 bp, Homo sapien
cttctgctgggtttttggtacaggg

SEQ ID NO: 3695007 - DNA, 25 bp, Homo sapien
tgagggtgtccagctttgctaagac

SEQ ID NO: 3695008 - DNA, 25 bp, Homo sapien
ttcactagtggagagcgggcaccat

SEQ ID NO: 3695009 - DNA, 25 bp, Homo sapien
aaggtgactcatgggcaattgggtg

SEQ ID NO: 3695010 - DNA, 25 bp, Homo sapien
ggcagttgcgaaagagggaaaggaa

SEQ ID NO: 3695011 - DNA, 25 bp, Homo sapien
gacattaccacagttgtgcgctggt

SEQ ID NO: 3695012 - DNA, 25 bp, Homo sapien
taccacagttgtgcgctggtgtcct

SEQ ID NO: 3695013 - DNA, 25 bp, Homo sapien
cacagttgtgcgctggtgtcctcat

SEQ ID NO: 3695014 - DNA, 25 bp, Homo sapien
cacagacattaccacagttgtgcgc

SEQ ID NO: 3695015 - DNA, 25 bp, Homo sapien
tgttttccatcactgtccccgctgt

SEQ ID NO: 3695016 - DNA, 25 bp, Homo sapien
atatttgttatgtctccaaagtggc

SEQ ID NO: 3695017 - DNA, 25 bp, Homo sapien
agagctctaccctggttatatttgt

SEQ ID NO: 3695018 - DNA, 25 bp, Homo sapien
ctgtccccgctgttgctttctggca

SEQ ID NO: 3695019 - DNA, 25 bp, Homo sapien
taagaggtgtcccaatagcactcgg

SEQ ID NO: 3695020 - DNA, 25 bp, Homo sapien
tcccaatagcactcggagattttgc

SEQ ID NO: 3695021 - DNA, 25 bp, Homo sapien
tagcactcggagattttgcaaacat

SEQ ID NO: 3695022 - DNA, 25 bp, Homo sapien
ggtgtcccaatagcactcggagatt

SEQ ID NO: 3695023 - DNA, 25 bp, Homo sapien
actgctttgtatgtaaggacactta

SEQ ID NO: 3695024 - DNA, 25 bp, Homo sapien
tgtatctttcccctagacagcgaat

SEQ ID NO: 3695025 - DNA, 25 bp, Homo sapien
attcctagagtcatacaccatcatc

SEQ ID NO: 3695026 - DNA, 25 bp, Homo sapien
tagacagcgaatcatactgctttgt

SEQ ID NO: 3695027 - DNA, 25 bp, Homo sapien
ggacattcacgtcttttgcatcttg

SEQ ID NO: 3695028 - DNA, 25 bp, Homo sapien
aataggatataactttctcaaaggg

SEQ ID NO: 3695029 - DNA, 25 bp, Homo sapien
acttgtgggcaggattgagttgtac

SEQ ID NO: 3695030 - DNA, 25 bp, Homo sapien
ccttgctataaaagaggacattcac

SEQ ID NO: 3695031 - DNA, 25 bp, Homo sapien
caactccatatagaaggtgaaccag

SEQ ID NO: 3695032 - DNA, 25 bp, Homo sapien
caaacacctcctcggttgattaggg

SEQ ID NO: 3695033 - DNA, 25 bp, Homo sapien
tcatgagggtcactagatcagactc

SEQ ID NO: 3695034 - DNA, 25 bp, Homo sapien
gtgatattttccctcgcagcctaga

SEQ ID NO: 3695035 - DNA, 25 bp, Homo sapien
gcttgtacgcgcctccctgacaaga

SEQ ID NO: 3695036 - DNA, 25 bp, Homo sapien
tttaatgaaacgcaacccgtcatcc

SEQ ID NO: 3695037 - DNA, 25 bp, Homo sapien
aaaagagtttctttcctcagtgact

SEQ ID NO: 3695038 - DNA, 25 bp, Homo sapien
catcttctggccatcctcgcttgta

SEQ ID NO: 3695039 - DNA, 25 bp, Homo sapien
acaggctggagcaatctcagggctg

SEQ ID NO: 3695040 - DNA, 25 bp, Homo sapien
cactgcaggtgaagaacaggctgga

SEQ ID NO: 3695041 - DNA, 25 bp, Homo sapien
gaacaggctggagcaatctcagggc

SEQ ID NO: 3695042 - DNA, 25 bp, Homo sapien
aagaacaggctggagcaatctcagg

SEQ ID NO: 3695043 - DNA, 25 bp, Homo sapien
ggatttctaaacaagctgggctgca

SEQ ID NO: 3695044 - DNA, 25 bp, Homo sapien
tgggctgcaggccatcaaatgagct

SEQ ID NO: 3695045 - DNA, 25 bp, Homo sapien
acactgaactcagaccagggctcga

SEQ ID NO: 3695046 - DNA, 25 bp, Homo sapien
tctgagttgagagcaacctaaggct

SEQ ID NO: 3695047 - DNA, 25 bp, Homo sapien
gaatcctcaatgcaatcacccaaag

SEQ ID NO: 3695048 - DNA, 25 bp, Homo sapien
tgtgattctcagttcagactctgct

SEQ ID NO: 3695049 - DNA, 25 bp, Homo sapien
tgaaacggttgtcgtggtaagccag

SEQ ID NO: 3695050 - DNA, 25 bp, Homo sapien
catactacatgtgagtgatggcccc

SEQ ID NO: 3695051 - DNA, 25 bp, Homo sapien
tactgaacgattgctcctaaggaag

SEQ ID NO: 3695052 - DNA, 25 bp, Homo sapien
tgcagcagctacaccctataaagtc

SEQ ID NO: 3695053 - DNA, 25 bp, Homo sapien
caagcttcgatccaagtgaaatggc

SEQ ID NO: 3695054 - DNA, 25 bp, Homo sapien
tagagcatatgaggcacgcacatcc

SEQ ID NO: 3695055 - DNA, 25 bp, Homo sapien
agatgatcatataatcaagcatatg

SEQ ID NO: 3695056 - DNA, 25 bp, Homo sapien
cttagatcaaagagcatatcatgtg

SEQ ID NO: 3695057 - DNA, 25 bp, Homo sapien
gagcatatcatgtgccctattgtct

SEQ ID NO: 3695058 - DNA, 25 bp, Homo sapien
tcacatgtcctccacgagatgatca

SEQ ID NO: 3695059 - DNA, 25 bp, Homo sapien
aaggatagctattgtcagatgtgta

SEQ ID NO: 3695060 - DNA, 25 bp, Homo sapien
taaaggatagctattgtcagatgtg

SEQ ID NO: 3695061 - DNA, 25 bp, Homo sapien
ttaaaggatagctattgtcagatgt

SEQ ID NO: 3695062 - DNA, 25 bp, Homo sapien
gatagctattgtcagatgtgtatac

SEQ ID NO: 3695063 - DNA, 25 bp, Homo sapien
cttttgtccatgtgaataaggctgc

SEQ ID NO: 3695064 - DNA, 25 bp, Homo sapien
tttgtccatgtgaataaggctgcta

SEQ ID NO: 3695065 - DNA, 25 bp, Homo sapien
tgtccatgtgaataaggctgctatg

SEQ ID NO: 3695066 - DNA, 25 bp, Homo sapien
gtccatgtgaataaggctgctatga

SEQ ID NO: 3695067 - DNA, 25 bp, Homo sapien
tttgtacacattgctagatgggatg

SEQ ID NO: 3695068 - DNA, 25 bp, Homo sapien
cattaagtacgatggtaaccaagag

SEQ ID NO: 3695069 - DNA, 25 bp, Homo sapien
ttctttccaatctgcatccagttga

SEQ ID NO: 3695070 - DNA, 25 bp, Homo sapien
ttgcattaccgaaataaatcctact

SEQ ID NO: 3695071 - DNA, 25 bp, Homo sapien
taggcaatccgtgagaagcttggaa

SEQ ID NO: 3695072 - DNA, 25 bp, Homo sapien
ttgatctcacacactaaggccactg

SEQ ID NO: 3695073 - DNA, 25 bp, Homo sapien
gatagtccctatacactggagcccc

SEQ ID NO: 3695074 - DNA, 25 bp, Homo sapien
gcttaccataagctgccccgtgtag

SEQ ID NO: 3695075 - DNA, 25 bp, Homo sapien
tgaattgtcttgagaagggcaaatg

SEQ ID NO: 3695076 - DNA, 25 bp, Homo sapien
cttgagaagggcaaatgttttaata

SEQ ID NO: 3695077 - DNA, 25 bp, Homo sapien
gaattgtcttgagaagggcaaatgt

SEQ ID NO: 3695078 - DNA, 25 bp, Homo sapien
ttgtcttgagaagggcaaatgtttt

SEQ ID NO: 3695079 - DNA, 25 bp, Homo sapien
taggacttagtctcagctgcaaata

SEQ ID NO: 3695080 - DNA, 25 bp, Homo sapien
tttattaagaaagcactaggactta

SEQ ID NO: 3695081 - DNA, 25 bp, Homo sapien
agctgcaaatatcccacagatagta

SEQ ID NO: 3695082 - DNA, 25 bp, Homo sapien
gaaagcactaggacttagtctcagc

SEQ ID NO: 3695083 - DNA, 25 bp, Homo sapien
ggagaaccaaagagtctccctcacc

SEQ ID NO: 3695084 - DNA, 25 bp, Homo sapien
ctgtcttcttttgtccgctggagaa

SEQ ID NO: 3695085 - DNA, 25 bp, Homo sapien
tttcagttgcaagcaccgatgaaga

SEQ ID NO: 3695086 - DNA, 25 bp, Homo sapien
tcagttgcaagcaccgatgaagatg

SEQ ID NO: 3695087 - DNA, 25 bp, Homo sapien
tgaagaagactgcataggtgcagca

SEQ ID NO: 3695088 - DNA, 25 bp, Homo sapien
cctgaagaagactgcataggtgcag

SEQ ID NO: 3695089 - DNA, 25 bp, Homo sapien
gaagactgcataggtgcagcatatg

SEQ ID NO: 3695090 - DNA, 25 bp, Homo sapien
agactgcataggtgcagcatatgag

SEQ ID NO: 3695091 - DNA, 25 bp, Homo sapien
cattatgatacatggactgggtgca

SEQ ID NO: 3695092 - DNA, 25 bp, Homo sapien
taaacataaatacctgtcattatga

SEQ ID NO: 3695093 - DNA, 25 bp, Homo sapien
ctgatgtttattacatccaaacaac

SEQ ID NO: 3695094 - DNA, 25 bp, Homo sapien
gatgtttattacatccaaacaactg

SEQ ID NO: 3695095 - DNA, 25 bp, Homo sapien
cctgggcgacaagaatgaaacttca

SEQ ID NO: 3695096 - DNA, 25 bp, Homo sapien
ctgggcgacaagaatgaaacttcat

SEQ ID NO: 3695097 - DNA, 25 bp, Homo sapien
caacatgaagaaactccatctttac

SEQ ID NO: 3695098 - DNA, 25 bp, Homo sapien
aaatacaaaattagctgggcatggt

SEQ ID NO: 3695099 - DNA, 25 bp, Homo sapien
attagctgggcatggtggcacatgc

SEQ ID NO: 3695100 - DNA, 25 bp, Homo sapien
catgaagaaactccatctttactaa

SEQ ID NO: 3695101 - DNA, 25 bp, Homo sapien
taacacgtgcctcataacatgatgc

SEQ ID NO: 3695102 - DNA, 25 bp, Homo sapien
tccatctggcggtaaccacgttagc

SEQ ID NO: 3695103 - DNA, 25 bp, Homo sapien
ccggagaccccagtgatgtgacact

SEQ ID NO: 3695104 - DNA, 25 bp, Homo sapien
tgggaacatgctctagatcaatcgc

SEQ ID NO: 3695105 - DNA, 25 bp, Homo sapien
cttcctagagtatctacaacccttg

SEQ ID NO: 3695106 - DNA, 25 bp, Homo sapien
ccttggggtttctatcagagacaga

SEQ ID NO: 3695107 - DNA, 25 bp, Homo sapien
ctcacatagtggacatcatgataca

SEQ ID NO: 3695108 - DNA, 25 bp, Homo sapien
gacatcatgatacagaccttctctt

SEQ ID NO: 3695109 - DNA, 25 bp, Homo sapien
tcttcctgtactgatatcaccataa

SEQ ID NO: 3695110 - DNA, 25 bp, Homo sapien
ccaaacaaactcttcctgtactgat

SEQ ID NO: 3695111 - DNA, 25 bp, Homo sapien
taattccagcacaccctaaattgct

SEQ ID NO: 3695112 - DNA, 25 bp, Homo sapien
tttcctaattccagcacaccctaaa

SEQ ID NO: 3695113 - DNA, 25 bp, Homo sapien
ggaccaggcacccatacaactctat

SEQ ID NO: 3695114 - DNA, 25 bp, Homo sapien
taactgtattggaggattctcaagc

SEQ ID NO: 3695115 - DNA, 25 bp, Homo sapien
ataagatactgccttggcgacagga

SEQ ID NO: 3695116 - DNA, 25 bp, Homo sapien
tttggaaagtgacagaaccggacca

SEQ ID NO: 3695117 - DNA, 25 bp, Homo sapien
caatgaattgcttatactgtcctat

SEQ ID NO: 3695118 - DNA, 25 bp, Homo sapien
aaacaatgaattgcttatactgtcc

SEQ ID NO: 3695119 - DNA, 25 bp, Homo sapien
aacaatgaattgcttatactgtcct

SEQ ID NO: 3695120 - DNA, 25 bp, Homo sapien
acaatgaattgcttatactgtccta

SEQ ID NO: 3695121 - DNA, 25 bp, Homo sapien
gatactgacagagataccagcgcca

SEQ ID NO: 3695122 - DNA, 25 bp, Homo sapien
tcaagtgcattaacgacaaaagggc

SEQ ID NO: 3695123 - DNA, 25 bp, Homo sapien
cccaggattgtgtgcggtgacagaa

SEQ ID NO: 3695124 - DNA, 25 bp, Homo sapien
ggcaacagcctgatctgaaaagaca

SEQ ID NO: 3695125 - DNA, 25 bp, Homo sapien
tgaatggcaagtgccgccctagaaa

SEQ ID NO: 3695126 - DNA, 25 bp, Homo sapien
agtgccgccctagaaacaggctgga

SEQ ID NO: 3695127 - DNA, 25 bp, Homo sapien
atgcaacttgaatggcaagtgccgc

SEQ ID NO: 3695128 - DNA, 25 bp, Homo sapien
gatgctcctggaacgtgggctggga

SEQ ID NO: 3695129 - DNA, 25 bp, Homo sapien
cccatgagtaagtttactgtggctc

SEQ ID NO: 3695130 - DNA, 25 bp, Homo sapien
tctcattagttttacttcctgccat

SEQ ID NO: 3695131 - DNA, 25 bp, Homo sapien
gagctggtcatctcggataaacctg

SEQ ID NO: 3695132 - DNA, 25 bp, Homo sapien
agtaaacgtagcgacacttccccag

SEQ ID NO: 3695133 - DNA, 25 bp, Homo sapien
ttttcccatagtaaacgtagcgaca

SEQ ID NO: 3695134 - DNA, 25 bp, Homo sapien
tcggataaacctgttgccctctgag

SEQ ID NO: 3695135 - DNA, 25 bp, Homo sapien
gaaatgggtgaaggtatacagaagt

SEQ ID NO: 3695136 - DNA, 25 bp, Homo sapien
gggtgaaggtatacagaagttggct

SEQ ID NO: 3695137 - DNA, 25 bp, Homo sapien
aatgggtgaaggtatacagaagttg

SEQ ID NO: 3695138 - DNA, 25 bp, Homo sapien
tgaaatgggtgaaggtatacagaag

SEQ ID NO: 3695139 - DNA, 25 bp, Homo sapien
tgcttctaaacaatgacccagggtg

SEQ ID NO: 3695140 - DNA, 25 bp, Homo sapien
tgtcaccctggtggatgagacctgc

SEQ ID NO: 3695141 - DNA, 25 bp, Homo sapien
gagaatggccatcccctaaactgtg

SEQ ID NO: 3695142 - DNA, 25 bp, Homo sapien
taatactgggaggacaatgaacact

SEQ ID NO: 3695143 - DNA, 25 bp, Homo sapien
tgggcttacagtggcttgacacaga

SEQ ID NO: 3695144 - DNA, 25 bp, Homo sapien
gacacagagtttcttaccccaggca

SEQ ID NO: 3695145 - DNA, 25 bp, Homo sapien
gtctgagtaaaagtgtcaaggccca

SEQ ID NO: 3695146 - DNA, 25 bp, Homo sapien
tcaaggcccaataggtcaagaggaa

SEQ ID NO: 3695147 - DNA, 25 bp, Homo sapien
tggagaatgatgcatcttgaggaaa

SEQ ID NO: 3695148 - DNA, 25 bp, Homo sapien
gaggcatgacatgaggctatctctg

SEQ ID NO: 3695149 - DNA, 25 bp, Homo sapien
tctgccctttggaaacacgctgctt

SEQ ID NO: 3695150 - DNA, 25 bp, Homo sapien
gacccagtcgccttgtcatttagaa

SEQ ID NO: 3695151 - DNA, 25 bp, Homo sapien
gctctaatccaaccatcggtgtcag

SEQ ID NO: 3695152 - DNA, 25 bp, Homo sapien
tgcagttcccgggtctttaggcaac

SEQ ID NO: 3695153 - DNA, 25 bp, Homo sapien
ttcaggccgtactggagcagatgcc

SEQ ID NO: 3695154 - DNA, 25 bp, Homo sapien
taggcaaccataatcccagtccctc

SEQ ID NO: 3695155 - DNA, 25 bp, Homo sapien
cccctggtgattgaagtatacgaat

SEQ ID NO: 3695156 - DNA, 25 bp, Homo sapien
tccaccatgcagctttatccaagag

SEQ ID NO: 3695157 - DNA, 25 bp, Homo sapien
tcattttgtgggcatgacatgccat

SEQ ID NO: 3695158 - DNA, 25 bp, Homo sapien
tgtttaaggctttcattgcatgaaa

SEQ ID NO: 3695159 - DNA, 25 bp, Homo sapien
aacagatacagggttctgagatgga

SEQ ID NO: 3695160 - DNA, 25 bp, Homo sapien
ttctgggtcacggataatttttctg

SEQ ID NO: 3695161 - DNA, 25 bp, Homo sapien
gggtcacggataatttttctgacag

SEQ ID NO: 3695162 - DNA, 25 bp, Homo sapien
cacggataatttttctgacagccat

SEQ ID NO: 3695163 - DNA, 25 bp, Homo sapien
cttctgggtcacggataatttttct

SEQ ID NO: 3695164 - DNA, 25 bp, Homo sapien
taacatatcattagtgcaacggcag

SEQ ID NO: 3695165 - DNA, 25 bp, Homo sapien
tgtggacataccataaatcagggac

SEQ ID NO: 3695166 - DNA, 25 bp, Homo sapien
gaaaactcaggacagcctcggaagg

SEQ ID NO: 3695167 - DNA, 25 bp, Homo sapien
caacggcagagcaaggagctttgat

SEQ ID NO: 3695168 - DNA, 25 bp, Homo sapien
aaacccttataaagcccatctctgc

SEQ ID NO: 3695169 - DNA, 25 bp, Homo sapien
gctgcacaaggggagctgagccatt

SEQ ID NO: 3695170 - DNA, 25 bp, Homo sapien
caaaacccttataaagcccatctct

SEQ ID NO: 3695171 - DNA, 25 bp, Homo sapien
tgcatcccacttccagttgttcctc

SEQ ID NO: 3695172 - DNA, 25 bp, Homo sapien
tggaggtctcccagtctccaatggg

SEQ ID NO: 3695173 - DNA, 25 bp, Homo sapien
actttggaggcgtccttgctggcaa

SEQ ID NO: 3695174 - DNA, 25 bp, Homo sapien
tctctgggggcaaggtatgtaataa

SEQ ID NO: 3695175 - DNA, 25 bp, Homo sapien
caaggtatgtaataactttggaggc

SEQ ID NO: 3695176 - DNA, 25 bp, Homo sapien
ctgcatatctgcccttctaggggac

SEQ ID NO: 3695177 - DNA, 25 bp, Homo sapien
tctgcccttctaggggacaatacca

SEQ ID NO: 3695178 - DNA, 25 bp, Homo sapien
gcatatctgcccttctaggggacaa

SEQ ID NO: 3695179 - DNA, 25 bp, Homo sapien
tatctgcccttctaggggacaatac

SEQ ID NO: 3695180 - DNA, 25 bp, Homo sapien
caaagtaagtgggaatcggaatgac

SEQ ID NO: 3695181 - DNA, 25 bp, Homo sapien
ccaaagtaagtgggaatcggaatga

SEQ ID NO: 3695182 - DNA, 25 bp, Homo sapien
cccaaagtaagtgggaatcggaatg

SEQ ID NO: 3695183 - DNA, 25 bp, Homo sapien
agatacctttctgttgatggccacc

SEQ ID NO: 3695184 - DNA, 25 bp, Homo sapien
gatacctttctgttgatggccacca

SEQ ID NO: 3695185 - DNA, 25 bp, Homo sapien
ctctgccctcctagccacagcttca

SEQ ID NO: 3695186 - DNA, 25 bp, Homo sapien
acagatacctttctgttgatggcca

SEQ ID NO: 3695187 - DNA, 25 bp, Homo sapien
ttacattgactaatccatacaatgc

SEQ ID NO: 3695188 - DNA, 25 bp, Homo sapien
gatttttccatcaggattaatatcc

SEQ ID NO: 3695189 - DNA, 25 bp, Homo sapien
gactaatccatacaatgctaaagat

SEQ ID NO: 3695190 - DNA, 25 bp, Homo sapien
actctgtctgttgtatggctctgct

SEQ ID NO: 3695191 - DNA, 25 bp, Homo sapien
cactatgatgtttgggatgctcact

SEQ ID NO: 3695192 - DNA, 25 bp, Homo sapien
ttgcaattagcaccctccccttgtt

SEQ ID NO: 3695193 - DNA, 25 bp, Homo sapien
gagctcttctgataccatcactatg

SEQ ID NO: 3695194 - DNA, 25 bp, Homo sapien
ccccttgttcacctatgggaatata

SEQ ID NO: 3695195 - DNA, 25 bp, Homo sapien
cacccaaagggagaccaggtctgca

SEQ ID NO: 3695196 - DNA, 25 bp, Homo sapien
tttgcagaaatggaagctacagagc

SEQ ID NO: 3695197 - DNA, 25 bp, Homo sapien
aatggcagcagggattttgcagaaa

SEQ ID NO: 3695198 - DNA, 25 bp, Homo sapien
tacagagctgaagtgaggaggcctc

SEQ ID NO: 3695199 - DNA, 25 bp, Homo sapien
tgcctgactccacgcttcagacttt

SEQ ID NO: 3695200 - DNA, 25 bp, Homo sapien
gtgttgagctgcattgctaaagggc

SEQ ID NO: 3695201 - DNA, 25 bp, Homo sapien
gactttcctgtatattcctgtccat

SEQ ID NO: 3695202 - DNA, 25 bp, Homo sapien
catgctctcagagtattggtgttga

SEQ ID NO: 3695203 - DNA, 25 bp, Homo sapien
tgtcggggccgattaaggcatcttc

SEQ ID NO: 3695204 - DNA, 25 bp, Homo sapien
aagaaggtcattacagcaacttgtc

SEQ ID NO: 3695205 - DNA, 25 bp, Homo sapien
ttctctcgcagctgacacagtgtca

SEQ ID NO: 3695206 - DNA, 25 bp, Homo sapien
tttcaagtaaacagtaatccttcag

SEQ ID NO: 3695207 - DNA, 25 bp, Homo sapien
ttctgtccatgtgtattaattcctc

SEQ ID NO: 3695208 - DNA, 25 bp, Homo sapien
aaatccctctgttgttattaataga

SEQ ID NO: 3695209 - DNA, 25 bp, Homo sapien
tcattcggcacaaatccctctgttg

SEQ ID NO: 3695210 - DNA, 25 bp, Homo sapien
ggcacaaatccctctgttgttatta

SEQ ID NO: 3695211 - DNA, 25 bp, Homo sapien
tctcttgtaaagttaactgcatttt

SEQ ID NO: 3695212 - DNA, 25 bp, Homo sapien
cagcctgattcggtgtgcaggagca

SEQ ID NO: 3695213 - DNA, 25 bp, Homo sapien
ggcttgtctacagcctgattcggtg

SEQ ID NO: 3695214 - DNA, 25 bp, Homo sapien
tagtcctggcatagaggcttgtcta

SEQ ID NO: 3695215 - DNA, 25 bp, Homo sapien
tccatgttccctgcggggatctagt

SEQ ID NO: 3695216 - DNA, 25 bp, Homo sapien
ggaagctgagatagcaagtactggt

SEQ ID NO: 3695217 - DNA, 25 bp, Homo sapien
tcacccttagatgcctaggaagctg

SEQ ID NO: 3695218 - DNA, 25 bp, Homo sapien
tccttgtggactctgctcaccctta

SEQ ID NO: 3695219 - DNA, 25 bp, Homo sapien
tttgcaaaaatcctcttcctgaagg

SEQ ID NO: 3695220 - DNA, 25 bp, Homo sapien
gctccttttagctcttgtatctgcc

SEQ ID NO: 3695221 - DNA, 25 bp, Homo sapien
ctagcagccaggcatcttgtaggag

SEQ ID NO: 3695222 - DNA, 25 bp, Homo sapien
ctggccgatatagctccttttagct

SEQ ID NO: 3695223 - DNA, 25 bp, Homo sapien
ctgcctccaccctagcagccaggca

SEQ ID NO: 3695224 - DNA, 25 bp, Homo sapien
tgttctctggtgggcaggggtggat

SEQ ID NO: 3695225 - DNA, 25 bp, Homo sapien
ttgttctctggtgggcaggggtgga

SEQ ID NO: 3695226 - DNA, 25 bp, Homo sapien
gttctctggtgggcaggggtggatc

SEQ ID NO: 3695227 - DNA, 25 bp, Homo sapien
ttctctggtgggcaggggtggatct

SEQ ID NO: 3695228 - DNA, 25 bp, Homo sapien
gatgagctactttgcgtgcttataa

SEQ ID NO: 3695229 - DNA, 25 bp, Homo sapien
catgatgatgagctactttgcgtgc

SEQ ID NO: 3695230 - DNA, 25 bp, Homo sapien
caagcttgttaccaagagctcacat

SEQ ID NO: 3695231 - DNA, 25 bp, Homo sapien
ccaagagctcacattgagaatcctg

SEQ ID NO: 3695232 - DNA, 25 bp, Homo sapien
ctgctgtgtcaatgttccgtgagac

SEQ ID NO: 3695233 - DNA, 25 bp, Homo sapien
caatgttccgtgagacaacactggt

SEQ ID NO: 3695234 - DNA, 25 bp, Homo sapien
tgtcaatgttccgtgagacaacact

SEQ ID NO: 3695235 - DNA, 25 bp, Homo sapien
gctgtgtcaatgttccgtgagacaa

SEQ ID NO: 3695236 - DNA, 25 bp, Homo sapien
tatttgctaacaaatctgaatgttg

SEQ ID NO: 3695237 - DNA, 25 bp, Homo sapien
tatggtccccattagttaggcaaac

SEQ ID NO: 3695238 - DNA, 25 bp, Homo sapien
gaatgtgccagttcctgactgtcct

SEQ ID NO: 3695239 - DNA, 25 bp, Homo sapien
tgtaattgcagagcatatggtcccc

SEQ ID NO: 3695240 - DNA, 25 bp, Homo sapien
aaggcattgacacacgcctgcggga

SEQ ID NO: 3695241 - DNA, 25 bp, Homo sapien
taaaaacgttgcattcccaggtggc

SEQ ID NO: 3695242 - DNA, 25 bp, Homo sapien
tcaatgcagcctgacacgcctttga

SEQ ID NO: 3695243 - DNA, 25 bp, Homo sapien
gcttccctcccatgggactcagggt

SEQ ID NO: 3695244 - DNA, 25 bp, Homo sapien
cagaagtgacaccaatgctctcggc

SEQ ID NO: 3695245 - DNA, 25 bp, Homo sapien
aaatgctacgaccaccttgctttgg

SEQ ID NO: 3695246 - DNA, 25 bp, Homo sapien
tcctttgcttatcccttgaggactt

SEQ ID NO: 3695247 - DNA, 25 bp, Homo sapien
tgaacaggcattgtgagaagagatg

SEQ ID NO: 3695248 - DNA, 25 bp, Homo sapien
agcacacacactgcatccttagttt

SEQ ID NO: 3695249 - DNA, 25 bp, Homo sapien
tctgtcacaggaccatcagacgtag

SEQ ID NO: 3695250 - DNA, 25 bp, Homo sapien
agacgtagaacgtcctgactctcct

SEQ ID NO: 3695251 - DNA, 25 bp, Homo sapien
gaccatcagacgtagaacgtcctga

SEQ ID NO: 3695252 - DNA, 25 bp, Homo sapien
ctttgctttctgtcacaggaccatc

SEQ ID NO: 3695253 - DNA, 25 bp, Homo sapien
acgctcttctttccttcgtgaacca

SEQ ID NO: 3695254 - DNA, 25 bp, Homo sapien
ttagagtgatttggtctcctctggc

SEQ ID NO: 3695255 - DNA, 25 bp, Homo sapien
tcttcactcctgctcgtaataacca

SEQ ID NO: 3695256 - DNA, 25 bp, Homo sapien
ttcgtgaaccatagtgggctcttca

SEQ ID NO: 3695257 - DNA, 25 bp, Homo sapien
taagaatgtgccagttaaagtgctc

SEQ ID NO: 3695258 - DNA, 25 bp, Homo sapien
taatggttctgcatgacctagccac

SEQ ID NO: 3695259 - DNA, 25 bp, Homo sapien
cctagtattggatcatgaagagctc

SEQ ID NO: 3695260 - DNA, 25 bp, Homo sapien
ttctctctctaaagtgcaacaagga

SEQ ID NO: 3695261 - DNA, 25 bp, Homo sapien
gctgtaccatctctaaaaaggtgtt

SEQ ID NO: 3695262 - DNA, 25 bp, Homo sapien
caatttcccttatggatggactagg

SEQ ID NO: 3695263 - DNA, 25 bp, Homo sapien
cttttactgacaaatggtgaggctc

SEQ ID NO: 3695264 - DNA, 25 bp, Homo sapien
taggcagtgcggtatttcttaaaaa

SEQ ID NO: 3695265 - DNA, 25 bp, Homo sapien
taaggaccacacttggtgaccactg

SEQ ID NO: 3695266 - DNA, 25 bp, Homo sapien
gctgacctgtgtggcctaaggacca

SEQ ID NO: 3695267 - DNA, 25 bp, Homo sapien
gcttgttcaaccacagattgctgga

SEQ ID NO: 3695268 - DNA, 25 bp, Homo sapien
cactgctctaagtgaaacagcgtga

SEQ ID NO: 3695269 - DNA, 25 bp, Homo sapien
gacaatatcctcaccctgatacgga

SEQ ID NO: 3695270 - DNA, 25 bp, Homo sapien
agacactggccaatagggaccgctg

SEQ ID NO: 3695271 - DNA, 25 bp, Homo sapien
ctgatacggaccctggtgaccggag

SEQ ID NO: 3695272 - DNA, 25 bp, Homo sapien
gattgctgaggaaaacgcccttaga

SEQ ID NO: 3695273 - DNA, 25 bp, Homo sapien
ctgaagagataggtgtgcagagcac

SEQ ID NO: 3695274 - DNA, 25 bp, Homo sapien
cgtcagcaatgctcagagtcctttt

SEQ ID NO: 3695275 - DNA, 25 bp, Homo sapien
gggtatcaaaacaggagcaaaagca

SEQ ID NO: 3695276 - DNA, 25 bp, Homo sapien
tctgcatccgaatattggggtatca

SEQ ID NO: 3695277 - DNA, 25 bp, Homo sapien
gctgaatgctccgtgaagtgcccta

SEQ ID NO: 3695278 - DNA, 25 bp, Homo sapien
tcaaactttagaggccaagcgggcc

SEQ ID NO: 3695279 - DNA, 25 bp, Homo sapien
cacaggtatcatggtaaggcacaga

SEQ ID NO: 3695280 - DNA, 25 bp, Homo sapien
gaagcatccctgaagactaaccctg

SEQ ID NO: 3695281 - DNA, 25 bp, Homo sapien
ctcctgcgttttgcttctaatctta

SEQ ID NO: 3695282 - DNA, 25 bp, Homo sapien
cctgcgttttgcttctaatcttatg

SEQ ID NO: 3695283 - DNA, 25 bp, Homo sapien
cagcctcctgcgttttgcttctaat

SEQ ID NO: 3695284 - DNA, 25 bp, Homo sapien
gcctcctgcgttttgcttctaatct

SEQ ID NO: 3695285 - DNA, 25 bp, Homo sapien
gttgcttcctgcttacccttccatg

SEQ ID NO: 3695286 - DNA, 25 bp, Homo sapien
agggagcatgccatggcatttccca

SEQ ID NO: 3695287 - DNA, 25 bp, Homo sapien
gctttcatattgttttgaaatgatg

SEQ ID NO: 3695288 - DNA, 25 bp, Homo sapien
gatcttgtagttgcttcctgcttac

SEQ ID NO: 3695289 - DNA, 25 bp, Homo sapien
gaatgggagacgcttcataacttcc

SEQ ID NO: 3695290 - DNA, 25 bp, Homo sapien
ttgagtacctcaagcgggaatggga

SEQ ID NO: 3695291 - DNA, 25 bp, Homo sapien
aagtgaagctgccatgaccgtcctg

SEQ ID NO: 3695292 - DNA, 25 bp, Homo sapien
tgcatctttggcgacgtcagctcag

SEQ ID NO: 3695293 - DNA, 25 bp, Homo sapien
cactagacgggaggcctttatggaa

SEQ ID NO: 3695294 - DNA, 25 bp, Homo sapien
ttcatagcagcagtgggctcaccca

SEQ ID NO: 3695295 - DNA, 25 bp, Homo sapien
tgacttcccaaacccgaggtgctga

SEQ ID NO: 3695296 - DNA, 25 bp, Homo sapien
tgttgtccaactgaccaggagtgca

SEQ ID NO: 3695297 - DNA, 25 bp, Homo sapien
tgaaaagcatgcctgtgtcagtttg

SEQ ID NO: 3695298 - DNA, 25 bp, Homo sapien
tgctttcattcgttgctggagaggg

SEQ ID NO: 3695299 - DNA, 25 bp, Homo sapien
tacaggactttctgcccgaaggcct

SEQ ID NO: 3695300 - DNA, 25 bp, Homo sapien
taagtaatgatcaacagattggctg

SEQ ID NO: 3695301 - DNA, 25 bp, Homo sapien
tccttaaaagttctctgccttccac

SEQ ID NO: 3695302 - DNA, 25 bp, Homo sapien
ccagccttccttgggtttggctgat

SEQ ID NO: 3695303 - DNA, 25 bp, Homo sapien
catatcaccatctattcctgttaaa

SEQ ID NO: 3695304 - DNA, 25 bp, Homo sapien
cttccttgggtttggctgatttgca

SEQ ID NO: 3695305 - DNA, 25 bp, Homo sapien
tatgcaggggttaggaaccagctaa

SEQ ID NO: 3695306 - DNA, 25 bp, Homo sapien
ttttcaacgctctttctctggtatg

SEQ ID NO: 3695307 - DNA, 25 bp, Homo sapien
ggattattgagccagcatgcaccaa

SEQ ID NO: 3695308 - DNA, 25 bp, Homo sapien
tgccccgatctgattgaaacattgg

SEQ ID NO: 3695309 - DNA, 25 bp, Homo sapien
ccagagactgcgctcttgtggccat

SEQ ID NO: 3695310 - DNA, 25 bp, Homo sapien
gccaggcaccattccatcctccaat

SEQ ID NO: 3695311 - DNA, 25 bp, Homo sapien
tccaatccagagactgcgctcttgt

SEQ ID NO: 3695312 - DNA, 25 bp, Homo sapien
ccgtctggttcgtgtgagaaacagc

SEQ ID NO: 3695313 - DNA, 25 bp, Homo sapien
ttgttatttggctgtcttggcaggt

SEQ ID NO: 3695314 - DNA, 25 bp, Homo sapien
ttatttggctgtcttggcaggttgg

SEQ ID NO: 3695315 - DNA, 25 bp, Homo sapien
atttggctgtcttggcaggttggga

SEQ ID NO: 3695316 - DNA, 25 bp, Homo sapien
gttatttggctgtcttggcaggttg

SEQ ID NO: 3695317 - DNA, 25 bp, Homo sapien
tagggacagtagagtcactaagcta

SEQ ID NO: 3695318 - DNA, 25 bp, Homo sapien
tgactcatgacctcaaacacgagcg

SEQ ID NO: 3695319 - DNA, 25 bp, Homo sapien
tggtagggacagtagagtcactaag

SEQ ID NO: 3695320 - DNA, 25 bp, Homo sapien
gaccagcagggctaatagcaggttg

SEQ ID NO: 3695321 - DNA, 25 bp, Homo sapien
gcttgtatctattaagcactattgc

SEQ ID NO: 3695322 - DNA, 25 bp, Homo sapien
gctttgtaagctccagctgatgatt

SEQ ID NO: 3695323 - DNA, 25 bp, Homo sapien
caatgatgattttagacacacagct

SEQ ID NO: 3695324 - DNA, 25 bp, Homo sapien
tgatgattttagacacacagctcag

SEQ ID NO: 3695325 - DNA, 25 bp, Homo sapien
tccttggtccagtagggatcacagt

SEQ ID NO: 3695326 - DNA, 25 bp, Homo sapien
gtcacataatcccaaagcatctccg

SEQ ID NO: 3695327 - DNA, 25 bp, Homo sapien
cacagtagatcgtaggacattgagg

SEQ ID NO: 3695328 - DNA, 25 bp, Homo sapien
gtatcagcagggtggtgccaagctc

SEQ ID NO: 3695329 - DNA, 25 bp, Homo sapien
tatgtcattgggtatttgagtcggg

SEQ ID NO: 3695330 - DNA, 25 bp, Homo sapien
cagccaattcctttgactgctggac

SEQ ID NO: 3695331 - DNA, 25 bp, Homo sapien
aacagaacctttgtttctgaacagc

SEQ ID NO: 3695332 - DNA, 25 bp, Homo sapien
cacatggtgggctctgtagtggatc

SEQ ID NO: 3695333 - DNA, 25 bp, Homo sapien
ggtcctgtgaggaacaattatgtgt

SEQ ID NO: 3695334 - DNA, 25 bp, Homo sapien
cccaacatcgtggtaggtcctgtga

SEQ ID NO: 3695335 - DNA, 25 bp, Homo sapien
tagaaacctcgtagtatatcagtgt

SEQ ID NO: 3695336 - DNA, 25 bp, Homo sapien
taaatccttctaaaatgctgatgtc

SEQ ID NO: 3695337 - DNA, 25 bp, Homo sapien
ttatgtcagcatccgtgattgtggc

SEQ ID NO: 3695338 - DNA, 25 bp, Homo sapien
aaagcacttgagtcctgggttccct

SEQ ID NO: 3695339 - DNA, 25 bp, Homo sapien
aacttctggaagtgcaatgtggcaa

SEQ ID NO: 3695340 - DNA, 25 bp, Homo sapien
catgctgagaatgccaacttctgga

SEQ ID NO: 3695341 - DNA, 25 bp, Homo sapien
ctgctggtgtgaagtattggctcag

SEQ ID NO: 3695342 - DNA, 25 bp, Homo sapien
tgtgaagtattggctcaggctgagc

SEQ ID NO: 3695343 - DNA, 25 bp, Homo sapien
agacacaaagcaagtgggagccacc

SEQ ID NO: 3695344 - DNA, 25 bp, Homo sapien
gcagcagacacaaagcaagtgggag

SEQ ID NO: 3695345 - DNA, 25 bp, Homo sapien
tggtgtttgatcagggaagtgacct

SEQ ID NO: 3695346 - DNA, 25 bp, Homo sapien
aagtgacctaacagaggctttgttt

SEQ ID NO: 3695347 - DNA, 25 bp, Homo sapien
ctttgttttgggagggctgctgtgg

SEQ ID NO: 3695348 - DNA, 25 bp, Homo sapien
catattggtgtttgatcagggaagt

SEQ ID NO: 3695349 - DNA, 25 bp, Homo sapien
tctggcccagcacatttaggacatt

SEQ ID NO: 3695350 - DNA, 25 bp, Homo sapien
tttgactcccagtgaagcctagaag

SEQ ID NO: 3695351 - DNA, 25 bp, Homo sapien
tgccagcatgctcttcaaaacgatc

SEQ ID NO: 3695352 - DNA, 25 bp, Homo sapien
caaaacgatcttaacatttgggatc

SEQ ID NO: 3695353 - DNA, 25 bp, Homo sapien
aaatccattccaatttgagcccctt

SEQ ID NO: 3695354 - DNA, 25 bp, Homo sapien
tttttgggcctgcataagcccttct

SEQ ID NO: 3695355 - DNA, 25 bp, Homo sapien
tgtctctatgtgaaattccactggc

SEQ ID NO: 3695356 - DNA, 25 bp, Homo sapien
cactggcagtgctccaatagcaatc

SEQ ID NO: 3695357 - DNA, 25 bp, Homo sapien
gcagcaagacaccaagttcaaagat

SEQ ID NO: 3695358 - DNA, 25 bp, Homo sapien
ctgtctacgatgtgcagcaagacac

SEQ ID NO: 3695359 - DNA, 25 bp, Homo sapien
tgcagcaagacaccaagttcaaaga

SEQ ID NO: 3695360 - DNA, 25 bp, Homo sapien
tctacgatgtgcagcaagacaccaa

SEQ ID NO: 3695361 - DNA, 25 bp, Homo sapien
cgtggtaacgtggacacccttgaga

SEQ ID NO: 3695362 - DNA, 25 bp, Homo sapien
taatgattgctccaccagtttccgt

SEQ ID NO: 3695363 - DNA, 25 bp, Homo sapien
ccagtgtgaactcctgtgtgctgac

SEQ ID NO: 3695364 - DNA, 25 bp, Homo sapien
catgtcaggccgtgtgcgtggtaac

SEQ ID NO: 3695365 - DNA, 25 bp, Homo sapien
tctgaacaacagactagctaggaca

SEQ ID NO: 3695366 - DNA, 25 bp, Homo sapien
tcataaaggtcttagaacaggactt

SEQ ID NO: 3695367 - DNA, 25 bp, Homo sapien
gatataccaccattgaacagggctg

SEQ ID NO: 3695368 - DNA, 25 bp, Homo sapien
cataacgttacccttgcttgacaaa

SEQ ID NO: 3695369 - DNA, 25 bp, Homo sapien
taggatggaatccaattcttccttc

SEQ ID NO: 3695370 - DNA, 25 bp, Homo sapien
atccaccctggaaattaagattctg

SEQ ID NO: 3695371 - DNA, 25 bp, Homo sapien
gtgctgaggataggatggaatccaa

SEQ ID NO: 3695372 - DNA, 25 bp, Homo sapien
ctcttccaatccaccctggaaatta

SEQ ID NO: 3695373 - DNA, 25 bp, Homo sapien
tttattagtaacgttagttgctgca

SEQ ID NO: 3695374 - DNA, 25 bp, Homo sapien
ttattagtaacgttagttgctgcag

SEQ ID NO: 3695375 - DNA, 25 bp, Homo sapien
ttttattagtaacgttagttgctgc

SEQ ID NO: 3695376 - DNA, 25 bp, Homo sapien
tattagtaacgttagttgctgcaga

SEQ ID NO: 3695377 - DNA, 25 bp, Homo sapien
tggaaatcctgtgatagtatagttt

SEQ ID NO: 3695378 - DNA, 25 bp, Homo sapien
tagtatagtttaacgtttgcatttc

SEQ ID NO: 3695379 - DNA, 25 bp, Homo sapien
caggtgcggacattccatttctgga

SEQ ID NO: 3695380 - DNA, 25 bp, Homo sapien
tcacgtcatctcatccggagaaata

SEQ ID NO: 3695381 - DNA, 25 bp, Homo sapien
agcagcacggatgagttgaccagac

SEQ ID NO: 3695382 - DNA, 25 bp, Homo sapien
tgaccagacatctcctgaatcattt

SEQ ID NO: 3695383 - DNA, 25 bp, Homo sapien
tgagttgaccagacatctcctgaat

SEQ ID NO: 3695384 - DNA, 25 bp, Homo sapien
cacggatgagttgaccagacatctc

SEQ ID NO: 3695385 - DNA, 25 bp, Homo sapien
tctgcctttgactgattgctgaatg

SEQ ID NO: 3695386 - DNA, 25 bp, Homo sapien
tgatgtgacagccaaaggataaatt

SEQ ID NO: 3695387 - DNA, 25 bp, Homo sapien
tgctcatctttgctaggcgctcttc

SEQ ID NO: 3695388 - DNA, 25 bp, Homo sapien
taattctggcacctttccctaagtc

SEQ ID NO: 3695389 - DNA, 25 bp, Homo sapien
gtgagatacggagtcagcagaattt

SEQ ID NO: 3695390 - DNA, 25 bp, Homo sapien
agctctttgtggtgagatacggagt

SEQ ID NO: 3695391 - DNA, 25 bp, Homo sapien
tttgtggtgagatacggagtcagca

SEQ ID NO: 3695392 - DNA, 25 bp, Homo sapien
aatgactgatgtcggggaaggtccc

SEQ ID NO: 3695393 - DNA, 25 bp, Homo sapien
tgttccagacagtgcgctaatccca

SEQ ID NO: 3695394 - DNA, 25 bp, Homo sapien
gcgctaatcccatcagcatccttag

SEQ ID NO: 3695395 - DNA, 25 bp, Homo sapien
tatgggcacatgtttgcatagctcc

SEQ ID NO: 3695396 - DNA, 25 bp, Homo sapien
gcatccttaggtctaggaagctctg

SEQ ID NO: 3695397 - DNA, 25 bp, Homo sapien
tcaatatttccatggggacaagcag

SEQ ID NO: 3695398 - DNA, 25 bp, Homo sapien
atcaatatttccatggggacaagca

SEQ ID NO: 3695399 - DNA, 25 bp, Homo sapien
aatatttccatggggacaagcaggc

SEQ ID NO: 3695400 - DNA, 25 bp, Homo sapien
caatatttccatggggacaagcagg

SEQ ID NO: 3695401 - DNA, 25 bp, Homo sapien
aggtatgagacctcctgccttttgc

SEQ ID NO: 3695402 - DNA, 25 bp, Homo sapien
tgagtcagcacgaggtccataaagg

SEQ ID NO: 3695403 - DNA, 25 bp, Homo sapien
tcatgtggctacctaattgactgcc

SEQ ID NO: 3695404 - DNA, 25 bp, Homo sapien
gctggaagctctgcaatcaaaggta

SEQ ID NO: 3695405 - DNA, 25 bp, Homo sapien
gagtagaaggattgagaagaatttg

SEQ ID NO: 3695406 - DNA, 25 bp, Homo sapien
tggaggcagcgatgcttaaatggca

SEQ ID NO: 3695407 - DNA, 25 bp, Homo sapien
aaggattgagaagaatttgtgggat

SEQ ID NO: 3695408 - DNA, 25 bp, Homo sapien
tgcttaaatggcaggagaagcacac

SEQ ID NO: 3695409 - DNA, 25 bp, Homo sapien
ttctggctcaacttgggcatgcagg

SEQ ID NO: 3695410 - DNA, 25 bp, Homo sapien
gttctggctcaacttgggcatgcag

SEQ ID NO: 3695411 - DNA, 25 bp, Homo sapien
tgttgggatctatttgctcagactt

SEQ ID NO: 3695412 - DNA, 25 bp, Homo sapien
ctgctttagaggtgcctttgctgca

SEQ ID NO: 3695413 - DNA, 25 bp, Homo sapien
ggctctgctttagaggtgcctttgc

SEQ ID NO: 3695414 - DNA, 25 bp, Homo sapien
ctttgctgcactgttgggatctatt

SEQ ID NO: 3695415 - DNA, 25 bp, Homo sapien
gcccaggtgggacatcccggtattc

SEQ ID NO: 3695416 - DNA, 25 bp, Homo sapien
tgactgtctgcatgcgataagatgc

SEQ ID NO: 3695417 - DNA, 25 bp, Homo sapien
agatgcaaagttttggcccaggtgg

SEQ ID NO: 3695418 - DNA, 25 bp, Homo sapien
tgggacatcccggtattccccactg

SEQ ID NO: 3695419 - DNA, 25 bp, Homo sapien
aaaatgaaatcgggcaaatctgctt

SEQ ID NO: 3695420 - DNA, 25 bp, Homo sapien
aaaaatgaaatcgggcaaatctgct

SEQ ID NO: 3695421 - DNA, 25 bp, Homo sapien
taaaaatgaaatcgggcaaatctgc

SEQ ID NO: 3695422 - DNA, 25 bp, Homo sapien
caaaggcaaatgtcagctagtgtat

SEQ ID NO: 3695423 - DNA, 25 bp, Homo sapien
aggcaaatgtcagctagtgtataga

SEQ ID NO: 3695424 - DNA, 25 bp, Homo sapien
tatagaacagccttaggaaaactcc

SEQ ID NO: 3695425 - DNA, 25 bp, Homo sapien
agctagtgtatagaacagccttagg

SEQ ID NO: 3695426 - DNA, 25 bp, Homo sapien
gtactggtgttgcatcacaatggcc

SEQ ID NO: 3695427 - DNA, 25 bp, Homo sapien
tttccagagctgtgcaaaatggttc

SEQ ID NO: 3695428 - DNA, 25 bp, Homo sapien
ccaggaaactttctaactggccaag

SEQ ID NO: 3695429 - DNA, 25 bp, Homo sapien
tgtacctttctaacaagaggacatg

SEQ ID NO: 3695430 - DNA, 25 bp, Homo sapien
aattgcagccatccagactaggttg

SEQ ID NO: 3695431 - DNA, 25 bp, Homo sapien
tccttgccgggtagattcagaatct

SEQ ID NO: 3695432 - DNA, 25 bp, Homo sapien
cagaatctcaggaacaattgcagcc

SEQ ID NO: 3695433 - DNA, 25 bp, Homo sapien
ctttgattgggtgaatccttgccgg

SEQ ID NO: 3695434 - DNA, 25 bp, Homo sapien
gctaggtatcccttcctgatgagag

SEQ ID NO: 3695435 - DNA, 25 bp, Homo sapien
tacttctgaaacgtggtgctgaggg

SEQ ID NO: 3695436 - DNA, 25 bp, Homo sapien
ccaaagcgcttgtcattagatgcca

SEQ ID NO: 3695437 - DNA, 25 bp, Homo sapien
tactgatagaatgaagctcccctcc

SEQ ID NO: 3695438 - DNA, 25 bp, Homo sapien
acagagtccgtcctgtcatcagcac

SEQ ID NO: 3695439 - DNA, 25 bp, Homo sapien
cgggcctgttcactactttatgcat

SEQ ID NO: 3695440 - DNA, 25 bp, Homo sapien
ctgtcatcagcaccgggcctgttca

SEQ ID NO: 3695441 - DNA, 25 bp, Homo sapien
cagcaccgggcctgttcactacttt

SEQ ID NO: 3695442 - DNA, 25 bp, Homo sapien
ggtgctgatgacttcagatcacaga

SEQ ID NO: 3695443 - DNA, 25 bp, Homo sapien
ccactcaaactttcaggtgctgatg

SEQ ID NO: 3695444 - DNA, 25 bp, Homo sapien
tgtaatcttttatcaccgcttttag

SEQ ID NO: 3695445 - DNA, 25 bp, Homo sapien
ccgatccggtcatctttcaccctgg

SEQ ID NO: 3695446 - DNA, 25 bp, Homo sapien
ctttcggtgccagctgacccagatg

SEQ ID NO: 3695447 - DNA, 25 bp, Homo sapien
gcagctttcggtgccagctgaccca

SEQ ID NO: 3695448 - DNA, 25 bp, Homo sapien
gccggcagctttcggtgccagctga

SEQ ID NO: 3695449 - DNA, 25 bp, Homo sapien
tggaggccggcagctttcggtgcca

SEQ ID NO: 3695450 - DNA, 25 bp, Homo sapien
tgggagttagatgtggcagcctctc

SEQ ID NO: 3695451 - DNA, 25 bp, Homo sapien
tggctgactgcagccgggttcatcc

SEQ ID NO: 3695452 - DNA, 25 bp, Homo sapien
tgcacagtaattccatcaagctggt

SEQ ID NO: 3695453 - DNA, 25 bp, Homo sapien
cctgctaagcgggtgctgttaccct

SEQ ID NO: 3695454 - DNA, 25 bp, Homo sapien
agtgcagagcggggaagctgaagca

SEQ ID NO: 3695455 - DNA, 25 bp, Homo sapien
tcagtgcagagcggggaagctgaag

SEQ ID NO: 3695456 - DNA, 25 bp, Homo sapien
ctctctcagtgcagagcggggaagc

SEQ ID NO: 3695457 - DNA, 25 bp, Homo sapien
tctcagtgcagagcggggaagctga

SEQ ID NO: 3695458 - DNA, 25 bp, Homo sapien
tgacctgccggcttgcagagctggc

SEQ ID NO: 3695459 - DNA, 25 bp, Homo sapien
tgccgaatgcaccatgaatacttct

SEQ ID NO: 3695460 - DNA, 25 bp, Homo sapien
taactgcgttatgatctggaaaaca

SEQ ID NO: 3695461 - DNA, 25 bp, Homo sapien
aatacttctgttaactgcgttatga

SEQ ID NO: 3695462 - DNA, 25 bp, Homo sapien
tatcttggtctcctctcttagcctg

SEQ ID NO: 3695463 - DNA, 25 bp, Homo sapien
gcctgaagtcgctgtctgtagtctt

SEQ ID NO: 3695464 - DNA, 25 bp, Homo sapien
gctgtctgtagtcttctgggctctt

SEQ ID NO: 3695465 - DNA, 25 bp, Homo sapien
tctcttagcctgaagtcgctgtctg

SEQ ID NO: 3695466 - DNA, 25 bp, Homo sapien
ttagaatgctcggtcttctggtatg

SEQ ID NO: 3695467 - DNA, 25 bp, Homo sapien
ccagggtaggatttaatgcccatgc

SEQ ID NO: 3695468 - DNA, 25 bp, Homo sapien
tcttctggtatgcagatcaccaggg

SEQ ID NO: 3695469 - DNA, 25 bp, Homo sapien
tggtatgcagatcaccagggtagga

SEQ ID NO: 3695470 - DNA, 25 bp, Homo sapien
cgaacttccggcagtcattggtgtc

SEQ ID NO: 3695471 - DNA, 25 bp, Homo sapien
taagattctggtgtaccgccaccca

SEQ ID NO: 3695472 - DNA, 25 bp, Homo sapien
gaaccggcacagagctttacagacc

SEQ ID NO: 3695473 - DNA, 25 bp, Homo sapien
ctaccgggtgaagtctgggcctgct

SEQ ID NO: 3695474 - DNA, 25 bp, Homo sapien
ggctccaccaggacatagatgctgg

SEQ ID NO: 3695475 - DNA, 25 bp, Homo sapien
tgcccagagcatgccggggttcttg

SEQ ID NO: 3695476 - DNA, 25 bp, Homo sapien
acccacactgcgctggacaggagga

SEQ ID NO: 3695477 - DNA, 25 bp, Homo sapien
tttgcagcacgggtcagaggaacac

SEQ ID NO: 3695478 - DNA, 25 bp, Homo sapien
agaggtcaatttcgtctgagttcat

SEQ ID NO: 3695479 - DNA, 25 bp, Homo sapien
ctgaagaggtcaatttcgtctgagt

SEQ ID NO: 3695480 - DNA, 25 bp, Homo sapien
gagggaattagatatgacttcactg

SEQ ID NO: 3695481 - DNA, 25 bp, Homo sapien
ttcactgaagaggtcaatttcgtct

SEQ ID NO: 3695482 - DNA, 25 bp, Homo sapien
agttctcttctttgagttcaggttt

SEQ ID NO: 3695483 - DNA, 25 bp, Homo sapien
agtgggataagggaggattattcca

SEQ ID NO: 3695484 - DNA, 25 bp, Homo sapien
gataagggaggattattccagttct

SEQ ID NO: 3695485 - DNA, 25 bp, Homo sapien
taagggaggattattccagttctct

SEQ ID NO: 3695486 - DNA, 25 bp, Homo sapien
accatctgtcccctgtgggtccaga

SEQ ID NO: 3695487 - DNA, 25 bp, Homo sapien
tacttcagtgaccagggaccaccat

SEQ ID NO: 3695488 - DNA, 25 bp, Homo sapien
ggccatgtgtcagcgtcccagctgg

SEQ ID NO: 3695489 - DNA, 25 bp, Homo sapien
aagttggggccatgtgtcagcgtcc

SEQ ID NO: 3695490 - DNA, 25 bp, Homo sapien
cagtagtaaactcatggcaggtgca

SEQ ID NO: 3695491 - DNA, 25 bp, Homo sapien
ccataggtgacaggcaatgcagagc

SEQ ID NO: 3695492 - DNA, 25 bp, Homo sapien
tacatgttgtgcctgaagtgtccct

SEQ ID NO: 3695493 - DNA, 25 bp, Homo sapien
ctatgcaaaggcagggtcagtccca

SEQ ID NO: 3695494 - DNA, 25 bp, Homo sapien
tgctgccacatgaccactaagcaga

SEQ ID NO: 3695495 - DNA, 25 bp, Homo sapien
tcatcagtgaagtcatatgctgcga

SEQ ID NO: 3695496 - DNA, 25 bp, Homo sapien
ggacttctgagatactgtctgctgc

SEQ ID NO: 3695497 - DNA, 25 bp, Homo sapien
tcaagaatccctgctcaagtgtgat

SEQ ID NO: 3695498 - DNA, 25 bp, Homo sapien
catagcccgagaccaacttctggag

SEQ ID NO: 3695499 - DNA, 25 bp, Homo sapien
ttcttatctgtgagattgttcctgt

SEQ ID NO: 3695500 - DNA, 25 bp, Homo sapien
ttttcatagcccgagaccaacttct

SEQ ID NO: 3695501 - DNA, 25 bp, Homo sapien
cagaaattttcatagcccgagacca

SEQ ID NO: 3695502 - DNA, 25 bp, Homo sapien
ggccttagtggggagcgccacattt

SEQ ID NO: 3695503 - DNA, 25 bp, Homo sapien
ttagtggggagcgccacattttcca

SEQ ID NO: 3695504 - DNA, 25 bp, Homo sapien
ccttagtggggagcgccacattttc

SEQ ID NO: 3695505 - DNA, 25 bp, Homo sapien
tagtggggagcgccacattttccat

SEQ ID NO: 3695506 - DNA, 25 bp, Homo sapien
caggaggagagccttcccagttacc

SEQ ID NO: 3695507 - DNA, 25 bp, Homo sapien
tagggaccttctctttgaccgtgtc

SEQ ID NO: 3695508 - DNA, 25 bp, Homo sapien
cgttgacacccttggagaagagcag

SEQ ID NO: 3695509 - DNA, 25 bp, Homo sapien
agagccttcccagttaccctgttag

SEQ ID NO: 3695510 - DNA, 25 bp, Homo sapien
tagatagcgaagagaaatggtggct

SEQ ID NO: 3695511 - DNA, 25 bp, Homo sapien
gcttctgttacctccggactaagag

SEQ ID NO: 3695512 - DNA, 25 bp, Homo sapien
taagagggatcctgatagtagctgt

SEQ ID NO: 3695513 - DNA, 25 bp, Homo sapien
gaaggaacacctctattatctggct

SEQ ID NO: 3695514 - DNA, 25 bp, Homo sapien
aaaatgtgttgtgacgtgctgccac

SEQ ID NO: 3695515 - DNA, 25 bp, Homo sapien
aaaaatgtgttgtgacgtgctgcca

SEQ ID NO: 3695516 - DNA, 25 bp, Homo sapien
caaaagagtgtacattggatgccag

SEQ ID NO: 3695517 - DNA, 25 bp, Homo sapien
gtagtggatttcttcacggtgcccc

SEQ ID NO: 3695518 - DNA, 25 bp, Homo sapien
tattgcagccaacgataaattgtgg

SEQ ID NO: 3695519 - DNA, 25 bp, Homo sapien
cagaagttggcttggtaagtcagcc

SEQ ID NO: 3695520 - DNA, 25 bp, Homo sapien
acacagaagtcttgtaccagtttgt

SEQ ID NO: 3695521 - DNA, 25 bp, Homo sapien
tagtagtacccttttgaactggcga

SEQ ID NO: 3695522 - DNA, 25 bp, Homo sapien
actcttgaagtagagtgtgctaggg

SEQ ID NO: 3695523 - DNA, 25 bp, Homo sapien
ttgacacaggaaagcacacagaagt

SEQ ID NO: 3695524 - DNA, 25 bp, Homo sapien
tttgtgagattcttcagtacagaga

SEQ ID NO: 3695525 - DNA, 25 bp, Homo sapien
ttcatctgggggcttggcgaaggaa

SEQ ID NO: 3695526 - DNA, 25 bp, Homo sapien
ttgtgagattcttcagtacagagac

SEQ ID NO: 3695527 - DNA, 25 bp, Homo sapien
ggcgaaggaaacatctgattctctt

SEQ ID NO: 3695528 - DNA, 25 bp, Homo sapien
gatcatcagtcctacatgttcctga

SEQ ID NO: 3695529 - DNA, 25 bp, Homo sapien
tcagtcctacatgttcctgactcca

SEQ ID NO: 3695530 - DNA, 25 bp, Homo sapien
cctacatgttcctgactccacctgg

SEQ ID NO: 3695531 - DNA, 25 bp, Homo sapien
ctgatcatcagtcctacatgttcct

SEQ ID NO: 3695532 - DNA, 25 bp, Homo sapien
gcgagcattccaatacactgaagca

SEQ ID NO: 3695533 - DNA, 25 bp, Homo sapien
gagcactggacgcatgcatgaatta

SEQ ID NO: 3695534 - DNA, 25 bp, Homo sapien
tgaattaaagcagcgagcattccaa

SEQ ID NO: 3695535 - DNA, 25 bp, Homo sapien
tccaatacactgaagcactgggcct

SEQ ID NO: 3695536 - DNA, 25 bp, Homo sapien
tgcactgcccaagcatgttgacgtg

SEQ ID NO: 3695537 - DNA, 25 bp, Homo sapien
atgttgacgtgctttccccgatggc

SEQ ID NO: 3695538 - DNA, 25 bp, Homo sapien
tttgcatgatgcaacctcccccttt

SEQ ID NO: 3695539 - DNA, 25 bp, Homo sapien
tcggttgtcgcctccaggttaacca

SEQ ID NO: 3695540 - DNA, 25 bp, Homo sapien
ctctcatatcgactcttacccagga

SEQ ID NO: 3695541 - DNA, 25 bp, Homo sapien
tctcatatcgactcttacccaggag

SEQ ID NO: 3695542 - DNA, 25 bp, Homo sapien
ctctctcatatcgactcttacccag

SEQ ID NO: 3695543 - DNA, 25 bp, Homo sapien
tctctcatatcgactcttacccagg

SEQ ID NO: 3695544 - DNA, 25 bp, Homo sapien
cagtgttctgtttagagtggtttga

SEQ ID NO: 3695545 - DNA, 25 bp, Homo sapien
gcgtgtaatgccagcgctctgtaca

SEQ ID NO: 3695546 - DNA, 25 bp, Homo sapien
tgccagcgctctgtacagtgttctg

SEQ ID NO: 3695547 - DNA, 25 bp, Homo sapien
gctgcctcttctcgcgtgtaatgcc

SEQ ID NO: 3695548 - DNA, 25 bp, Homo sapien
ttaagcaggtatcacttgttggctc

SEQ ID NO: 3695549 - DNA, 25 bp, Homo sapien
ccttcattaagcaggtatcacttgt

SEQ ID NO: 3695550 - DNA, 25 bp, Homo sapien
cctgcaccttcattaagcaggtatc

SEQ ID NO: 3695551 - DNA, 25 bp, Homo sapien
acttgttggctcctcagtgtggtga

SEQ ID NO: 3695552 - DNA, 25 bp, Homo sapien
cccggattgagctgttctagttgtt

SEQ ID NO: 3695553 - DNA, 25 bp, Homo sapien
aaattgttgtgattaggataggacc

SEQ ID NO: 3695554 - DNA, 25 bp, Homo sapien
gtgattaggataggacccttcttca

SEQ ID NO: 3695555 - DNA, 25 bp, Homo sapien
catttgttcccggattgagctgttc

SEQ ID NO: 3695556 - DNA, 25 bp, Homo sapien
cacacatgaggtgagataacctgaa

SEQ ID NO: 3695557 - DNA, 25 bp, Homo sapien
ggtcttggacctctcatggctagtg

SEQ ID NO: 3695558 - DNA, 25 bp, Homo sapien
catggctagtgaggtcaaatggctt

SEQ ID NO: 3695559 - DNA, 25 bp, Homo sapien
gaatcttgttacctccaaggtcatt

SEQ ID NO: 3695560 - DNA, 25 bp, Homo sapien
cttgacttgtgaaggtaaggagatg

SEQ ID NO: 3695561 - DNA, 25 bp, Homo sapien
ctgccaatcgggtattcagctgaag

SEQ ID NO: 3695562 - DNA, 25 bp, Homo sapien
tgcacgctggtgcttcttgacttgt

SEQ ID NO: 3695563 - DNA, 25 bp, Homo sapien
tgaagcattgcacgctggtgcttct

SEQ ID NO: 3695564 - DNA, 25 bp, Homo sapien
cagaagattttggaggaagctagtg

SEQ ID NO: 3695565 - DNA, 25 bp, Homo sapien
ttgacaccaacctttgcaagacctt

SEQ ID NO: 3695566 - DNA, 25 bp, Homo sapien
attttggaggaagctagtgctgtac

SEQ ID NO: 3695567 - DNA, 25 bp, Homo sapien
gcaagaccttctgagtgcagaagat

SEQ ID NO: 3695568 - DNA, 25 bp, Homo sapien
ccaatggcctcagcccttcgtgaag

SEQ ID NO: 3695569 - DNA, 25 bp, Homo sapien
cccttcgtgaagagatattagagta

SEQ ID NO: 3695570 - DNA, 25 bp, Homo sapien
tcattttaccatgtcccttgggctt

SEQ ID NO: 3695571 - DNA, 25 bp, Homo sapien
ttgtccctgaaactatagaagcttg

SEQ ID NO: 3695572 - DNA, 25 bp, Homo sapien
atgctgccattacctggaactgcat

SEQ ID NO: 3695573 - DNA, 25 bp, Homo sapien
actttcaccagggatcccctggatg

SEQ ID NO: 3695574 - DNA, 25 bp, Homo sapien
ccactttcaccagggatcccctgga

SEQ ID NO: 3695575 - DNA, 25 bp, Homo sapien
ttcaccagggatcccctggatgctg

SEQ ID NO: 3695576 - DNA, 25 bp, Homo sapien
tcaaacaaatgccccacacatgtag

SEQ ID NO: 3695577 - DNA, 25 bp, Homo sapien
aaatgccccacacatgtagaggatg

SEQ ID NO: 3695578 - DNA, 25 bp, Homo sapien
aacaaatgccccacacatgtagagg

SEQ ID NO: 3695579 - DNA, 25 bp, Homo sapien
gactgtttatctccagtgagccaga

SEQ ID NO: 3695580 - DNA, 25 bp, Homo sapien
ggatctgtgttggtaacttcacatc

SEQ ID NO: 3695581 - DNA, 25 bp, Homo sapien
cctggatctgtgttggtaacttcac

SEQ ID NO: 3695582 - DNA, 25 bp, Homo sapien
tctgtgttggtaacttcacatccat

SEQ ID NO: 3695583 - DNA, 25 bp, Homo sapien
gagcctggatctgtgttggtaactt

SEQ ID NO: 3695584 - DNA, 25 bp, Homo sapien
cgcagactagtcaatgggagcacca

SEQ ID NO: 3695585 - DNA, 25 bp, Homo sapien
gaactaagtctgtttggctccaaag

SEQ ID NO: 3695586 - DNA, 25 bp, Homo sapien
tcctaagacgaaggttggccttcac

SEQ ID NO: 3695587 - DNA, 25 bp, Homo sapien
ggccttcactggtctgactcaaaag

SEQ ID NO: 3695588 - DNA, 25 bp, Homo sapien
ggcggcagctggaattgtcgacttt

SEQ ID NO: 3695589 - DNA, 25 bp, Homo sapien
tagtgcacttagaggaattacctgg

SEQ ID NO: 3695590 - DNA, 25 bp, Homo sapien
aattgtcgactttgctgttatctgg

SEQ ID NO: 3695591 - DNA, 25 bp, Homo sapien
gcttcatttcctgacaaggcggcag

SEQ ID NO: 3695592 - DNA, 25 bp, Homo sapien
gactcatgaaactgatctcatggtc

SEQ ID NO: 3695593 - DNA, 25 bp, Homo sapien
ctttactacatgtgatgtactttga

SEQ ID NO: 3695594 - DNA, 25 bp, Homo sapien
catgtgatgtactttgatagtttct

SEQ ID NO: 3695595 - DNA, 25 bp, Homo sapien
tcatttataaaatgacggtcaggac

SEQ ID NO: 3695596 - DNA, 25 bp, Homo sapien
caagatggcagctatgttgttatca

SEQ ID NO: 3695597 - DNA, 25 bp, Homo sapien
tatcagcatgctctgtacgagactc

SEQ ID NO: 3695598 - DNA, 25 bp, Homo sapien
tgttatcatcaacagaaccgagaat

SEQ ID NO: 3695599 - DNA, 25 bp, Homo sapien
cacgtatctgtaatagttatcagca

SEQ ID NO: 3695600 - DNA, 25 bp, Homo sapien
tcaatcttcagattgcttttgcttt

SEQ ID NO: 3695601 - DNA, 25 bp, Homo sapien
ttcagattgcttttgctttctaatc

SEQ ID NO: 3695602 - DNA, 25 bp, Homo sapien
caatcttcagattgcttttgctttc

SEQ ID NO: 3695603 - DNA, 25 bp, Homo sapien
tcttcagattgcttttgctttctaa

SEQ ID NO: 3695604 - DNA, 25 bp, Homo sapien
cagccaggacaattatgcaagttgg

SEQ ID NO: 3695605 - DNA, 25 bp, Homo sapien
tgaacagctgtggtgtaaaccagcc

SEQ ID NO: 3695606 - DNA, 25 bp, Homo sapien
gtctccagtaaattgatgctacttt

SEQ ID NO: 3695607 - DNA, 25 bp, Homo sapien
gattaggttggttctccaaagacaa

SEQ ID NO: 3695608 - DNA, 25 bp, Homo sapien
tgtgaaatcttcaacagtctgtgtt

SEQ ID NO: 3695609 - DNA, 25 bp, Homo sapien
aatcttcaacagtctgtgttgttcc

SEQ ID NO: 3695610 - DNA, 25 bp, Homo sapien
gaaatcttcaacagtctgtgttgtt

SEQ ID NO: 3695611 - DNA, 25 bp, Homo sapien
gtgaaatcttcaacagtctgtgttg

SEQ ID NO: 3695612 - DNA, 25 bp, Homo sapien
catcctgaagcgtactcccttgtgg

SEQ ID NO: 3695613 - DNA, 25 bp, Homo sapien
aactgaatggaactagaactttcta

SEQ ID NO: 3695614 - DNA, 25 bp, Homo sapien
cttctagttcttggcgtgtttgggt

SEQ ID NO: 3695615 - DNA, 25 bp, Homo sapien
taggaaccctttcaagctgcagtaa

SEQ ID NO: 3695616 - DNA, 25 bp, Homo sapien
gaatgatctagaactttgtagcaac

SEQ ID NO: 3695617 - DNA, 25 bp, Homo sapien
gggcaacagacgtgatgccgcattt

SEQ ID NO: 3695618 - DNA, 25 bp, Homo sapien
tcagtcctcaaatggtgaaaaaaag

SEQ ID NO: 3695619 - DNA, 25 bp, Homo sapien
atgtcctaggccttttccagagctg

SEQ ID NO: 3695620 - DNA, 25 bp, Homo sapien
ctcagaatcacagtgggaggtgaaa

SEQ ID NO: 3695621 - DNA, 25 bp, Homo sapien
gcctcagaatcacagtgggaggtga

SEQ ID NO: 3695622 - DNA, 25 bp, Homo sapien
gaggcctcagaatcacagtgggagg

SEQ ID NO: 3695623 - DNA, 25 bp, Homo sapien
aggcctcagaatcacagtgggaggt

SEQ ID NO: 3695624 - DNA, 25 bp, Homo sapien
tagggttaggcttctcttcaggctt

SEQ ID NO: 3695625 - DNA, 25 bp, Homo sapien
gaggaactgcatgtatcttcaggga

SEQ ID NO: 3695626 - DNA, 25 bp, Homo sapien
tagaactcactctcattggatcagg

SEQ ID NO: 3695627 - DNA, 25 bp, Homo sapien
tgctaccagaatgactgtcccaggg

SEQ ID NO: 3695628 - DNA, 25 bp, Homo sapien
tgggcaggctgttaaacattgctcc

SEQ ID NO: 3695629 - DNA, 25 bp, Homo sapien
aggctgttaaacattgctccacaga

SEQ ID NO: 3695630 - DNA, 25 bp, Homo sapien
cttgggcaggctgttaaacattgct

SEQ ID NO: 3695631 - DNA, 25 bp, Homo sapien
gcaggctgttaaacattgctccaca

SEQ ID NO: 3695632 - DNA, 25 bp, Homo sapien
gcctctactaaagtccacatcaatt

SEQ ID NO: 3695633 - DNA, 25 bp, Homo sapien
cacatcaattaaatagtcaattaga

SEQ ID NO: 3695634 - DNA, 25 bp, Homo sapien
caattagatagatccagagtgaaaa

SEQ ID NO: 3695635 - DNA, 25 bp, Homo sapien
actgcctctactaaagtccacatca

SEQ ID NO: 3695636 - DNA, 25 bp, Homo sapien
acaccctgaggggactacccttcat

SEQ ID NO: 3695637 - DNA, 25 bp, Homo sapien
tcctttatctccatcgcagccattc

SEQ ID NO: 3695638 - DNA, 25 bp, Homo sapien
gctcttctgatattggtaggagttt

SEQ ID NO: 3695639 - DNA, 25 bp, Homo sapien
ctgaggggactacccttcatccttt

SEQ ID NO: 3695640 - DNA, 25 bp, Homo sapien
ccatgaaaccattccacccagatga

SEQ ID NO: 3695641 - DNA, 25 bp, Homo sapien
tccacccagatgagtgagtcagtgg

SEQ ID NO: 3695642 - DNA, 25 bp, Homo sapien
gaaaccattccacccagatgagtga

SEQ ID NO: 3695643 - DNA, 25 bp, Homo sapien
cattccacccagatgagtgagtcag

SEQ ID NO: 3695644 - DNA, 25 bp, Homo sapien
tgagtgctcttcatgttaataaacc

SEQ ID NO: 3695645 - DNA, 25 bp, Homo sapien
aagaagggtcgtgatggtacaagca

SEQ ID NO: 3695646 - DNA, 25 bp, Homo sapien
taaacctttcgtgggcactttgcag

SEQ ID NO: 3695647 - DNA, 25 bp, Homo sapien
cagaagtggcatgaattgagtgctc

SEQ ID NO: 3695648 - DNA, 25 bp, Homo sapien
tgatactctgctccacgaagggtga

SEQ ID NO: 3695649 - DNA, 25 bp, Homo sapien
tgaatttatggttccgggcaggttc

SEQ ID NO: 3695650 - DNA, 25 bp, Homo sapien
catagagaaccgtggttcttagcag

SEQ ID NO: 3695651 - DNA, 25 bp, Homo sapien
gatggaactgccctccataggcaca

SEQ ID NO: 3695652 - DNA, 25 bp, Homo sapien
gacacccactgtctagcagtgatga

SEQ ID NO: 3695653 - DNA, 25 bp, Homo sapien
cacccactgtctagcagtgatgaca

SEQ ID NO: 3695654 - DNA, 25 bp, Homo sapien
cagacacccactgtctagcagtgat

SEQ ID NO: 3695655 - DNA, 25 bp, Homo sapien
cccagcgcagacacccactgtctag

SEQ ID NO: 3695656 - DNA, 25 bp, Homo sapien
gctaggccctgtgtagacaacgagc

SEQ ID NO: 3695657 - DNA, 25 bp, Homo sapien
gagaccagcattgaacaaataaatc

SEQ ID NO: 3695658 - DNA, 25 bp, Homo sapien
ctcatggtctagtgtgggagaccag

SEQ ID NO: 3695659 - DNA, 25 bp, Homo sapien
tgtgtagacaacgagcacagttgca

SEQ ID NO: 3695660 - DNA, 25 bp, Homo sapien
taaagtaaacatagagtagaggaag

SEQ ID NO: 3695661 - DNA, 25 bp, Homo sapien
gtgaagatacattgtcagggtgaga

SEQ ID NO: 3695662 - DNA, 25 bp, Homo sapien
gaagaagaagtcagatctgcatttg

SEQ ID NO: 3695663 - DNA, 25 bp, Homo sapien
tgggcagagggatgatttctagtct

SEQ ID NO: 3695664 - DNA, 25 bp, Homo sapien
ctctggatccagaggagtccattcc

SEQ ID NO: 3695665 - DNA, 25 bp, Homo sapien
gctctggatccagaggagtccattc

SEQ ID NO: 3695666 - DNA, 25 bp, Homo sapien
ggctctggatccagaggagtccatt

SEQ ID NO: 3695667 - DNA, 25 bp, Homo sapien
tctggatccagaggagtccattcct

SEQ ID NO: 3695668 - DNA, 25 bp, Homo sapien
cttgagtccctgttgcatgaagttg

SEQ ID NO: 3695669 - DNA, 25 bp, Homo sapien
gagtccctgttgcatgaagttggat

SEQ ID NO: 3695670 - DNA, 25 bp, Homo sapien
ttttgtgatttgatggaggaggaga

SEQ ID NO: 3695671 - DNA, 25 bp, Homo sapien
tggaggaggagagatagagcggccc

SEQ ID NO: 3695672 - DNA, 25 bp, Homo sapien
ctgccttttggccgaaaagggccat

SEQ ID NO: 3695673 - DNA, 25 bp, Homo sapien
ctgtgtttccagcctcttgtgttta

SEQ ID NO: 3695674 - DNA, 25 bp, Homo sapien
tgccttttggccgaaaagggccata

SEQ ID NO: 3695675 - DNA, 25 bp, Homo sapien
tccagcctcttgtgtttatctctct

SEQ ID NO: 3695676 - DNA, 25 bp, Homo sapien
gatatctatttctgagaactctgac

SEQ ID NO: 3695677 - DNA, 25 bp, Homo sapien
ctttatgagaatgggcacactctgg

SEQ ID NO: 3695678 - DNA, 25 bp, Homo sapien
tcacccctttatgagaatgggcaca

SEQ ID NO: 3695679 - DNA, 25 bp, Homo sapien
ggcacactctggatatctatttctg

SEQ ID NO: 3695680 - DNA, 25 bp, Homo sapien
attctctcagggagtcatatacaat

SEQ ID NO: 3695681 - DNA, 25 bp, Homo sapien
cagggagtcatatacaatgacagag

SEQ ID NO: 3695682 - DNA, 25 bp, Homo sapien
tctcagggagtcatatacaatgaca

SEQ ID NO: 3695683 - DNA, 25 bp, Homo sapien
tctctcagggagtcatatacaatga

SEQ ID NO: 3695684 - DNA, 25 bp, Homo sapien
gggacaagttgaggcacttagcaaa

SEQ ID NO: 3695685 - DNA, 25 bp, Homo sapien
aacacgtgcactcctattatctcat

SEQ ID NO: 3695686 - DNA, 25 bp, Homo sapien
ctcatttacagatgcccgggagggg

SEQ ID NO: 3695687 - DNA, 25 bp, Homo sapien
ctttcactggtacacaacacgtgca

SEQ ID NO: 3695688 - DNA, 25 bp, Homo sapien
cttgtcctctttcgtaatggtgagc

SEQ ID NO: 3695689 - DNA, 25 bp, Homo sapien
gtccttgtcctctttcgtaatggtg

SEQ ID NO: 3695690 - DNA, 25 bp, Homo sapien
tgtcctctttcgtaatggtgagcat

SEQ ID NO: 3695691 - DNA, 25 bp, Homo sapien
tccttgtcctctttcgtaatggtga

SEQ ID NO: 3695692 - DNA, 25 bp, Homo sapien
gtgggaggtggattggatttagggc

SEQ ID NO: 3695693 - DNA, 25 bp, Homo sapien
gagtgggaggtggattggatttagg

SEQ ID NO: 3695694 - DNA, 25 bp, Homo sapien
ggagtgggaggtggattggatttag

SEQ ID NO: 3695695 - DNA, 25 bp, Homo sapien
agtgggaggtggattggatttaggg

SEQ ID NO: 3695696 - DNA, 25 bp, Homo sapien
aataagtagttcaggggttgactgc

SEQ ID NO: 3695697 - DNA, 25 bp, Homo sapien
taagtagttcaggggttgactgcag

SEQ ID NO: 3695698 - DNA, 25 bp, Homo sapien
ataagtagttcaggggttgactgca

SEQ ID NO: 3695699 - DNA, 25 bp, Homo sapien
taataagtagttcaggggttgactg

SEQ ID NO: 3695700 - DNA, 25 bp, Homo sapien
atgagcagagcgttcatctgctcag

SEQ ID NO: 3695701 - DNA, 25 bp, Homo sapien
gtcatgagcagagcgttcatctgct

SEQ ID NO: 3695702 - DNA, 25 bp, Homo sapien
tgagcagagcgttcatctgctcagt

SEQ ID NO: 3695703 - DNA, 25 bp, Homo sapien
agtcatgagcagagcgttcatctgc

SEQ ID NO: 3695704 - DNA, 25 bp, Homo sapien
ccatcaacatcgctgactgagttta

SEQ ID NO: 3695705 - DNA, 25 bp, Homo sapien
gactgagtttatggggaacactgct

SEQ ID NO: 3695706 - DNA, 25 bp, Homo sapien
gaacactgctggtatttcatcctgc

SEQ ID NO: 3695707 - DNA, 25 bp, Homo sapien
tcctaccatcaacatcgctgactga

SEQ ID NO: 3695708 - DNA, 25 bp, Homo sapien
cctggcctttgctgcatgggtgctt

SEQ ID NO: 3695709 - DNA, 25 bp, Homo sapien
gtctgccatcttgtcgacatcgttg

SEQ ID NO: 3695710 - DNA, 25 bp, Homo sapien
gcatgggtgcttattaataggcata

SEQ ID NO: 3695711 - DNA, 25 bp, Homo sapien
tgggccacctaatgaccagggctgg

SEQ ID NO: 3695712 - DNA, 25 bp, Homo sapien
agcttgctgccatccgaaccaccag

SEQ ID NO: 3695713 - DNA, 25 bp, Homo sapien
gtgttctgctgccttacttctgctt

SEQ ID NO: 3695714 - DNA, 25 bp, Homo sapien
ctcagcgaggcttctccaagtgttc

SEQ ID NO: 3695715 - DNA, 25 bp, Homo sapien
tctgctttcgaagcaccatgcctgt

SEQ ID NO: 3695716 - DNA, 25 bp, Homo sapien
gattctgttgtcaaggaggtggtag

SEQ ID NO: 3695717 - DNA, 25 bp, Homo sapien
gggagggccaggctgtatggtcagg

SEQ ID NO: 3695718 - DNA, 25 bp, Homo sapien
gccaggctgtatggtcaggtgggca

SEQ ID NO: 3695719 - DNA, 25 bp, Homo sapien
caggctgtatggtcaggtgggcaca

SEQ ID NO: 3695720 - DNA, 25 bp, Homo sapien
ggggcccagatcgggtcagcctctg

SEQ ID NO: 3695721 - DNA, 25 bp, Homo sapien
gggcccagatcgggtcagcctctgc

SEQ ID NO: 3695722 - DNA, 25 bp, Homo sapien
acttgcccaggagtccgctgcatgc

SEQ ID NO: 3695723 - DNA, 25 bp, Homo sapien
aacttgcccaggagtccgctgcatg

SEQ ID NO: 3695724 - DNA, 25 bp, Homo sapien
cttgcccaggagtccgctgcatgct

SEQ ID NO: 3695725 - DNA, 25 bp, Homo sapien
gaaagtttgcaaggatctgggctag

SEQ ID NO: 3695726 - DNA, 25 bp, Homo sapien
gatgaaggttacacttgaagagcag

SEQ ID NO: 3695727 - DNA, 25 bp, Homo sapien
tcagggctgtcatgggaaagtttgc

SEQ ID NO: 3695728 - DNA, 25 bp, Homo sapien
tggcacccctctcggttgctcggtt

SEQ ID NO: 3695729 - DNA, 25 bp, Homo sapien
tatgaatgcaggaaatcaaaacgat

SEQ ID NO: 3695730 - DNA, 25 bp, Homo sapien
atttgcaaacccatcttcataacag

SEQ ID NO: 3695731 - DNA, 25 bp, Homo sapien
tcaaaacgatatttgcaaacccatc

SEQ ID NO: 3695732 - DNA, 25 bp, Homo sapien
cacaataaccaagaggtagggccgg

SEQ ID NO: 3695733 - DNA, 25 bp, Homo sapien
atccacagacacctgttccccagtg

SEQ ID NO: 3695734 - DNA, 25 bp, Homo sapien
tccacagacacctgttccccagtga

SEQ ID NO: 3695735 - DNA, 25 bp, Homo sapien
tgatgcacatttgctcacacacctg

SEQ ID NO: 3695736 - DNA, 25 bp, Homo sapien
ccacagacacctgttccccagtgat

SEQ ID NO: 3695737 - DNA, 25 bp, Homo sapien
cataaaggcctgggacaagtgagtg

SEQ ID NO: 3695738 - DNA, 25 bp, Homo sapien
tgtgtggcttgaatggaaaggtcat

SEQ ID NO: 3695739 - DNA, 25 bp, Homo sapien
ctgtggagcagacgtggtgtgtggc

SEQ ID NO: 3695740 - DNA, 25 bp, Homo sapien
gagccaatggcactgtctggtaaca

SEQ ID NO: 3695741 - DNA, 25 bp, Homo sapien
aggcacttgcgtgctctttcagtag

SEQ ID NO: 3695742 - DNA, 25 bp, Homo sapien
tgcaaaggcacttgcgtgctctttc

SEQ ID NO: 3695743 - DNA, 25 bp, Homo sapien
ggcacttgcgtgctctttcagtagc

SEQ ID NO: 3695744 - DNA, 25 bp, Homo sapien
aaaggcacttgcgtgctctttcagt

SEQ ID NO: 3695745 - DNA, 25 bp, Homo sapien
ttcgacatctcacatactcctgctg

SEQ ID NO: 3695746 - DNA, 25 bp, Homo sapien
ggagacctcgctttctttataggtg

SEQ ID NO: 3695747 - DNA, 25 bp, Homo sapien
ttaggcattccacgttctccttcga

SEQ ID NO: 3695748 - DNA, 25 bp, Homo sapien
gtgagtggagacctcgctttcttta

SEQ ID NO: 3695749 - DNA, 25 bp, Homo sapien
caattgcagaaaatgtgagtgggga

SEQ ID NO: 3695750 - DNA, 25 bp, Homo sapien
tgtcaattgcagaaaatgtgagtgg

SEQ ID NO: 3695751 - DNA, 25 bp, Homo sapien
gatgtcaattgcagaaaatgtgagt

SEQ ID NO: 3695752 - DNA, 25 bp, Homo sapien
gtcaattgcagaaaatgtgagtggg

SEQ ID NO: 3695753 - DNA, 25 bp, Homo sapien
tgccatttcttgtaggaatgatcgg

SEQ ID NO: 3695754 - DNA, 25 bp, Homo sapien
caagtcagtgccatttcttgtagga

SEQ ID NO: 3695755 - DNA, 25 bp, Homo sapien
gaatgatcgggccactaacatttgt

SEQ ID NO: 3695756 - DNA, 25 bp, Homo sapien
ttcttgtaggaatgatcgggccact

SEQ ID NO: 3695757 - DNA, 25 bp, Homo sapien
gaaaacacttcagagagataatgag

SEQ ID NO: 3695758 - DNA, 25 bp, Homo sapien
cacttcagagagataatgagctggg

SEQ ID NO: 3695759 - DNA, 25 bp, Homo sapien
tcagagagataatgagctgggtagt

SEQ ID NO: 3695760 - DNA, 25 bp, Homo sapien
gagataatgagctgggtagttttcc

SEQ ID NO: 3695761 - DNA, 25 bp, Homo sapien
gagattatttctgattcgtattgag

SEQ ID NO: 3695762 - DNA, 25 bp, Homo sapien
gctgcttctcgtaggagattatttc

SEQ ID NO: 3695763 - DNA, 25 bp, Homo sapien
gggattctcatcgtgctggaatgca

SEQ ID NO: 3695764 - DNA, 25 bp, Homo sapien
tcgtgctggaatgcatggccagccc

SEQ ID NO: 3695765 - DNA, 25 bp, Homo sapien
aaatgacgtgttagcacacgcctgc

SEQ ID NO: 3695766 - DNA, 25 bp, Homo sapien
caaagtcatctcgtgttggagtcaa

SEQ ID NO: 3695767 - DNA, 25 bp, Homo sapien
gagaatctgtcccttttgcgcacat

SEQ ID NO: 3695768 - DNA, 25 bp, Homo sapien
gcagttggcatattgcgtgacacac

SEQ ID NO: 3695769 - DNA, 25 bp, Homo sapien
gagtgatttcaggttgccaagagaa

SEQ ID NO: 3695770 - DNA, 25 bp, Homo sapien
gtatcatcaggatagcccggactca

SEQ ID NO: 3695771 - DNA, 25 bp, Homo sapien
ctctcatagagccaataggaaggtt

SEQ ID NO: 3695772 - DNA, 25 bp, Homo sapien
catactcagagaggcatgatagctt

SEQ ID NO: 3695773 - DNA, 25 bp, Homo sapien
aagcagcatagtgggccagctttgg

SEQ ID NO: 3695774 - DNA, 25 bp, Homo sapien
caccaagcagcatagtgggccagct

SEQ ID NO: 3695775 - DNA, 25 bp, Homo sapien
tagtgggccagctttggcatagatg

SEQ ID NO: 3695776 - DNA, 25 bp, Homo sapien
agcatagtgggccagctttggcata

SEQ ID NO: 3695777 - DNA, 25 bp, Homo sapien
tccatatccttaggttttaaggaga

SEQ ID NO: 3695778 - DNA, 25 bp, Homo sapien
ctctgttgggtcagattttaactcc

SEQ ID NO: 3695779 - DNA, 25 bp, Homo sapien
gaacaggttcatagaggccctctgt

SEQ ID NO: 3695780 - DNA, 25 bp, Homo sapien
gattagatgccttttgtggcacgag

SEQ ID NO: 3695781 - DNA, 25 bp, Homo sapien
gccttgcactgggtgatttgcaaac

SEQ ID NO: 3695782 - DNA, 25 bp, Homo sapien
cctgcttcatacatggagccttctg

SEQ ID NO: 3695783 - DNA, 25 bp, Homo sapien
tgtcacaatgacctaaagataccct

SEQ ID NO: 3695784 - DNA, 25 bp, Homo sapien
ccattgcaaagggataaggttggag

SEQ ID NO: 3695785 - DNA, 25 bp, Homo sapien
caggcgttgtccacgttaggcttcc

SEQ ID NO: 3695786 - DNA, 25 bp, Homo sapien
taaggctgcatgattgcaccaggca

SEQ ID NO: 3695787 - DNA, 25 bp, Homo sapien
ccacgttaggcttccaagtgttggg

SEQ ID NO: 3695788 - DNA, 25 bp, Homo sapien
tgcagggtaaggctgcatgattgca

SEQ ID NO: 3695789 - DNA, 25 bp, Homo sapien
gagaaggtgacttctacatctgtcc

SEQ ID NO: 3695790 - DNA, 25 bp, Homo sapien
tgtaagcttagaactgtacggtccc

SEQ ID NO: 3695791 - DNA, 25 bp, Homo sapien
ccaggttggattggaaggtctcagt

SEQ ID NO: 3695792 - DNA, 25 bp, Homo sapien
gcttgaatagatgtgctggccaggt

SEQ ID NO: 3695793 - DNA, 25 bp, Homo sapien
gccttccagtggggctggtctgttc

SEQ ID NO: 3695794 - DNA, 25 bp, Homo sapien
ggccttccagtggggctggtctgtt

SEQ ID NO: 3695795 - DNA, 25 bp, Homo sapien
cctggagttgggcatcaggcacttg

SEQ ID NO: 3695796 - DNA, 25 bp, Homo sapien
tccaccagatgcagcataatcacgg

SEQ ID NO: 3695797 - DNA, 25 bp, Homo sapien
gttgggatgctcatgacccagggat

SEQ ID NO: 3695798 - DNA, 25 bp, Homo sapien
gagtccttattgtactgtatcctgg

SEQ ID NO: 3695799 - DNA, 25 bp, Homo sapien
gactgggcatctgtgttatctatcc

SEQ ID NO: 3695800 - DNA, 25 bp, Homo sapien
catctgtgttatctatcctgggccc

SEQ ID NO: 3695801 - DNA, 25 bp, Homo sapien
cagggactgggcatctgtgttatct

SEQ ID NO: 3695802 - DNA, 25 bp, Homo sapien
tgtgttatctatcctgggcccatct

SEQ ID NO: 3695803 - DNA, 25 bp, Homo sapien
tgtttcttgagtttattttgcgcca

SEQ ID NO: 3695804 - DNA, 25 bp, Homo sapien
ttattttgcgccatctgccttcttc

SEQ ID NO: 3695805 - DNA, 25 bp, Homo sapien
tgagtttattttgcgccatctgcct

SEQ ID NO: 3695806 - DNA, 25 bp, Homo sapien
ttcccattgtctgtttcttgagttt

SEQ ID NO: 3695807 - DNA, 25 bp, Homo sapien
tcatgttcagatgctttccacagca

SEQ ID NO: 3695808 - DNA, 25 bp, Homo sapien
tgcttctgccgagggacttttcagg

SEQ ID NO: 3695809 - DNA, 25 bp, Homo sapien
gaaacttcatgttcagatgctttcc

SEQ ID NO: 3695810 - DNA, 25 bp, Homo sapien
ttccacagcattcacgcatggcgag

SEQ ID NO: 3695811 - DNA, 25 bp, Homo sapien
tcccagccagccttggaactcagtg

SEQ ID NO: 3695812 - DNA, 25 bp, Homo sapien
cagccagccttggaactcagtgctg

SEQ ID NO: 3695813 - DNA, 25 bp, Homo sapien
ccagccagccttggaactcagtgct

SEQ ID NO: 3695814 - DNA, 25 bp, Homo sapien
ttcccagccagccttggaactcagt

SEQ ID NO: 3695815 - DNA, 25 bp, Homo sapien
agaggacggtatctgccagggctcc

SEQ ID NO: 3695816 - DNA, 25 bp, Homo sapien
ctagaggacggtatctgccagggct

SEQ ID NO: 3695817 - DNA, 25 bp, Homo sapien
ccagggctcccccagggcctgagct

SEQ ID NO: 3695818 - DNA, 25 bp, Homo sapien
agggctcccccagggcctgagctcc

SEQ ID NO: 3695819 - DNA, 25 bp, Homo sapien
gccctgtattcagggagctgatgct

SEQ ID NO: 3695820 - DNA, 25 bp, Homo sapien
ttgccctgtattcagggagctgatg

SEQ ID NO: 3695821 - DNA, 25 bp, Homo sapien
tgtattcagggagctgatgctgtca

SEQ ID NO: 3695822 - DNA, 25 bp, Homo sapien
cctgtattcagggagctgatgctgt

SEQ ID NO: 3695823 - DNA, 25 bp, Homo sapien
taaaattcaggcttcttcgcacaca

SEQ ID NO: 3695824 - DNA, 25 bp, Homo sapien
caggcttcttcgcacacacctgtgg

SEQ ID NO: 3695825 - DNA, 25 bp, Homo sapien
aattcaggcttcttcgcacacacct

SEQ ID NO: 3695826 - DNA, 25 bp, Homo sapien
aggcttcttcgcacacacctgtggc

SEQ ID NO: 3695827 - DNA, 25 bp, Homo sapien
actgggccagtgatgcattgacctc

SEQ ID NO: 3695828 - DNA, 25 bp, Homo sapien
cctgcataagactgaccaggaagaa

SEQ ID NO: 3695829 - DNA, 25 bp, Homo sapien
tctgatgggcttcatagtgggacta

SEQ ID NO: 3695830 - DNA, 25 bp, Homo sapien
tagtgggactagttgtggtcagacc

SEQ ID NO: 3695831 - DNA, 25 bp, Homo sapien
agacaagatcaggtgtgtccagggt

SEQ ID NO: 3695832 - DNA, 25 bp, Homo sapien
catccaagtattaactgggccagac

SEQ ID NO: 3695833 - DNA, 25 bp, Homo sapien
ccaagtattaactgggccagaccct

SEQ ID NO: 3695834 - DNA, 25 bp, Homo sapien
tccatccaagtattaactgggccag

SEQ ID NO: 3695835 - DNA, 25 bp, Homo sapien
ctgcactggatgcggggcagggatg

SEQ ID NO: 3695836 - DNA, 25 bp, Homo sapien
ggatgcggggcagggatgggttctt

SEQ ID NO: 3695837 - DNA, 25 bp, Homo sapien
ttcccaggacgcttgctgcactgga

SEQ ID NO: 3695838 - DNA, 25 bp, Homo sapien
cttcccaggacgcttgctgcactgg

SEQ ID NO: 3695839 - DNA, 25 bp, Homo sapien
taggtgagggatggcgatgagcccc

SEQ ID NO: 3695840 - DNA, 25 bp, Homo sapien
agggatggcgatgagccccggagaa

SEQ ID NO: 3695841 - DNA, 25 bp, Homo sapien
caaagcactggttaggtgagggatg

SEQ ID NO: 3695842 - DNA, 25 bp, Homo sapien
cgatgagccccggagaattccgcat

SEQ ID NO: 3695843 - DNA, 25 bp, Homo sapien
gaatggtgaatggaccagaggcacc

SEQ ID NO: 3695844 - DNA, 25 bp, Homo sapien
aatggtgaatggaccagaggcacct

SEQ ID NO: 3695845 - DNA, 25 bp, Homo sapien
gtgaatggtgaatggaccagaggca

SEQ ID NO: 3695846 - DNA, 25 bp, Homo sapien
tgaatggtgaatggaccagaggcac

SEQ ID NO: 3695847 - DNA, 25 bp, Homo sapien
cagcctcaggcagttggagatgatg

SEQ ID NO: 3695848 - DNA, 25 bp, Homo sapien
ttggagatgatgtcaaaaggaacag

SEQ ID NO: 3695849 - DNA, 25 bp, Homo sapien
cagttggagatgatgtcaaaaggaa

SEQ ID NO: 3695850 - DNA, 25 bp, Homo sapien
caggcagttggagatgatgtcaaaa

SEQ ID NO: 3695851 - DNA, 25 bp, Homo sapien
catacctggccagttgccagttacc

SEQ ID NO: 3695852 - DNA, 25 bp, Homo sapien
agttgccagttaccacaccacgctg

SEQ ID NO: 3695853 - DNA, 25 bp, Homo sapien
ggaccatatttatggtatctagact

SEQ ID NO: 3695854 - DNA, 25 bp, Homo sapien
ctggaccatatttatggtatctaga

SEQ ID NO: 3695855 - DNA, 25 bp, Homo sapien
tctctggcaataccggtaaccacat

SEQ ID NO: 3695856 - DNA, 25 bp, Homo sapien
tggtcatgaatgaagccctctggag

SEQ ID NO: 3695857 - DNA, 25 bp, Homo sapien
attgcatgattccagggcgccactc

SEQ ID NO: 3695858 - DNA, 25 bp, Homo sapien
caaatctttattagcatggctggcc

SEQ ID NO: 3695859 - DNA, 25 bp, Homo sapien
tttctaggtgttgactctttttcac

SEQ ID NO: 3695860 - DNA, 25 bp, Homo sapien
cgtgccttgtatctccaaggtttag

SEQ ID NO: 3695861 - DNA, 25 bp, Homo sapien
tccttatcaatgtcacgtgccttgt

SEQ ID NO: 3695862 - DNA, 25 bp, Homo sapien
ctttgttaggaaactcgagttggat

SEQ ID NO: 3695863 - DNA, 25 bp, Homo sapien
caagccttggtggatggtagatttc

SEQ ID NO: 3695864 - DNA, 25 bp, Homo sapien
tccatgtccgcagtgttgagacgta

SEQ ID NO: 3695865 - DNA, 25 bp, Homo sapien
gagttcagaaaacgacccattctgg

SEQ ID NO: 3695866 - DNA, 25 bp, Homo sapien
ggttcttcgtcctcctgagacagtg

SEQ ID NO: 3695867 - DNA, 25 bp, Homo sapien
cattcgattgcaatgccaggacctc

SEQ ID NO: 3695868 - DNA, 25 bp, Homo sapien
tcagggagcagaccaaggatgtctc

SEQ ID NO: 3695869 - DNA, 25 bp, Homo sapien
tgggtggaaccccacgcattaggca

SEQ ID NO: 3695870 - DNA, 25 bp, Homo sapien
gaaggtcgcctttgtggttccagtg

SEQ ID NO: 3695871 - DNA, 25 bp, Homo sapien
gtcaggggcgcttgccgggccgctg

SEQ ID NO: 3695872 - DNA, 25 bp, Homo sapien
gcgctctaccttgcgccctgggggt

SEQ ID NO: 3695873 - DNA, 25 bp, Homo sapien
ggctgggggcgctctaccttgcgcc

SEQ ID NO: 3695874 - DNA, 25 bp, Homo sapien
ccaggcgagccagcgcggcgagcct

SEQ ID NO: 3695875 - DNA, 25 bp, Homo sapien
agccacacgcgggaccctgggcaca

SEQ ID NO: 3695876 - DNA, 25 bp, Homo sapien
ggtcctcctcactcccgaagcccga

SEQ ID NO: 3695877 - DNA, 25 bp, Homo sapien
taggggtgggtagctgtgtgtatcc

SEQ ID NO: 3695878 - DNA, 25 bp, Homo sapien
acgcgggaccctgggcacataggta

SEQ ID NO: 3695879 - DNA, 25 bp, Homo sapien
gattcccctggtggtgtacggagac

SEQ ID NO: 3695880 - DNA, 25 bp, Homo sapien
gtagcacgaggacggacgctgttca

SEQ ID NO: 3695881 - DNA, 25 bp, Homo sapien
tacggagacacgctacggaacaaac

SEQ ID NO: 3695882 - DNA, 25 bp, Homo sapien
cctcgatttaattagcgctggaaaa

SEQ ID NO: 3695883 - DNA, 25 bp, Homo sapien
agagagccgagcgagccctctgggc

SEQ ID NO: 3695884 - DNA, 25 bp, Homo sapien
gagagccgagcgagccctctgggca

SEQ ID NO: 3695885 - DNA, 25 bp, Homo sapien
agagccgagcgagccctctgggcag

SEQ ID NO: 3695886 - DNA, 25 bp, Homo sapien
gccacgattaggcacaatgcttcct

SEQ ID NO: 3695887 - DNA, 25 bp, Homo sapien
gatatccggacgagtgccacgatta

SEQ ID NO: 3695888 - DNA, 25 bp, Homo sapien
caatgcttccttgcggtcgctctca

SEQ ID NO: 3695889 - DNA, 25 bp, Homo sapien
agcctccctgaaatatccgtccagg

SEQ ID NO: 3695890 - DNA, 25 bp, Homo sapien
agtgctttccctagcatgacacacc

SEQ ID NO: 3695891 - DNA, 25 bp, Homo sapien
ctctgtgccattcttggaaaaagct

SEQ ID NO: 3695892 - DNA, 25 bp, Homo sapien
agctgaacaccttgacaccgccagt

SEQ ID NO: 3695893 - DNA, 25 bp, Homo sapien
cagtctgccgcaggccgtgtggtca

SEQ ID NO: 3695894 - DNA, 25 bp, Homo sapien
gagctcctccatttgtagaatatcc

SEQ ID NO: 3695895 - DNA, 25 bp, Homo sapien
cagagctcctccatttgtagaatat

SEQ ID NO: 3695896 - DNA, 25 bp, Homo sapien
ccatttgtagaatatccacaggcat

SEQ ID NO: 3695897 - DNA, 25 bp, Homo sapien
tcctccatttgtagaatatccacag

SEQ ID NO: 3695898 - DNA, 25 bp, Homo sapien
ctgatgaattgggaaagtatgtgtt

SEQ ID NO: 3695899 - DNA, 25 bp, Homo sapien
tgggaaagtatgtgtttccagacac

SEQ ID NO: 3695900 - DNA, 25 bp, Homo sapien
gaattgggaaagtatgtgtttccag

SEQ ID NO: 3695901 - DNA, 25 bp, Homo sapien
gatgaattgggaaagtatgtgtttc

SEQ ID NO: 3695902 - DNA, 25 bp, Homo sapien
ggaacattgataagttcctgaatga

SEQ ID NO: 3695903 - DNA, 25 bp, Homo sapien
caggagtggaacattgataagttcc

SEQ ID NO: 3695904 - DNA, 25 bp, Homo sapien
gagtggaacattgataagttcctga

SEQ ID NO: 3695905 - DNA, 25 bp, Homo sapien
ctccacaggagtggaacattgataa

SEQ ID NO: 3695906 - DNA, 25 bp, Homo sapien
gggatgtgaaacattctgcctgggt

SEQ ID NO: 3695907 - DNA, 25 bp, Homo sapien
ttgcatggatctgccagcgtgggct

SEQ ID NO: 3695908 - DNA, 25 bp, Homo sapien
gggtgcctggacagccgccaatgat

SEQ ID NO: 3695909 - DNA, 25 bp, Homo sapien
gatccgagcctctatgcattgccag

SEQ ID NO: 3695910 - DNA, 25 bp, Homo sapien
tgccccggtgactctgccggcctgt

SEQ ID NO: 3695911 - DNA, 25 bp, Homo sapien
ccccggtgactctgccggcctgtgt

SEQ ID NO: 3695912 - DNA, 25 bp, Homo sapien
ctgccccggtgactctgccggcctg

SEQ ID NO: 3695913 - DNA, 25 bp, Homo sapien
cccggtgactctgccggcctgtgtg

SEQ ID NO: 3695914 - DNA, 25 bp, Homo sapien
gagaagcactcgttctgggcgttac

SEQ ID NO: 3695915 - DNA, 25 bp, Homo sapien
ggagaagcactcgttctgggcgtta

SEQ ID NO: 3695916 - DNA, 25 bp, Homo sapien
cgggagaagcactcgttctgggcgt

SEQ ID NO: 3695917 - DNA, 25 bp, Homo sapien
gggagaagcactcgttctgggcgtt

SEQ ID NO: 3695918 - DNA, 25 bp, Homo sapien
cggtggcgccagtgtgcaggccagg

SEQ ID NO: 3695919 - DNA, 25 bp, Homo sapien
cgctccccgccaggcggtggcgcca

SEQ ID NO: 3695920 - DNA, 25 bp, Homo sapien
gctccccgccaggcggtggcgccag

SEQ ID NO: 3695921 - DNA, 25 bp, Homo sapien
ctccccgccaggcggtggcgccagt

SEQ ID NO: 3695922 - DNA, 25 bp, Homo sapien
ctatcgtttgcaccgaatcttccca

SEQ ID NO: 3695923 - DNA, 25 bp, Homo sapien
tttgcaccgaatcttcccaggagac

SEQ ID NO: 3695924 - DNA, 25 bp, Homo sapien
ttgcaactatcgtttgcaccgaatc

SEQ ID NO: 3695925 - DNA, 25 bp, Homo sapien
cgtttgcaccgaatcttcccaggag

SEQ ID NO: 3695926 - DNA, 25 bp, Homo sapien
cttccatagcgacaccgtgtggcag

SEQ ID NO: 3695927 - DNA, 25 bp, Homo sapien
catagcgacaccgtgtggcagcatc

SEQ ID NO: 3695928 - DNA, 25 bp, Homo sapien
gctggagttgttctttgtccatctg

SEQ ID NO: 3695929 - DNA, 25 bp, Homo sapien
gcgacaccgtgtggcagcatccagc

SEQ ID NO: 3695930 - DNA, 25 bp, Homo sapien
tccaaacaatataagcagttatttt

SEQ ID NO: 3695931 - DNA, 25 bp, Homo sapien
gttggacatcacaattcaatatgag

SEQ ID NO: 3695932 - DNA, 25 bp, Homo sapien
taaaaaagtcttggaatatgtgcgg

SEQ ID NO: 3695933 - DNA, 25 bp, Homo sapien
tgatgcaccataacttaaacccagg

SEQ ID NO: 3695934 - DNA, 25 bp, Homo sapien
tctgccagatactgtcaataatcac

SEQ ID NO: 3695935 - DNA, 25 bp, Homo sapien
gacctctagggcaagagcagaatgc

SEQ ID NO: 3695936 - DNA, 25 bp, Homo sapien
tctgaatgtggactgttagaagcag

SEQ ID NO: 3695937 - DNA, 25 bp, Homo sapien
cttcctgttcatatataaatttcaa

SEQ ID NO: 3695938 - DNA, 25 bp, Homo sapien
aacccattatgtaggccattgccag

SEQ ID NO: 3695939 - DNA, 25 bp, Homo sapien
cattatgtaggccattgccagtggg

SEQ ID NO: 3695940 - DNA, 25 bp, Homo sapien
ctgtgagaaacccattatgtaggcc

SEQ ID NO: 3695941 - DNA, 25 bp, Homo sapien
gagaaacccattatgtaggccattg

SEQ ID NO: 3695942 - DNA, 25 bp, Homo sapien
tcgagtctttcgaagtcacctcaga

SEQ ID NO: 3695943 - DNA, 25 bp, Homo sapien
ggctgaacgtcgagtctttcgaagt

SEQ ID NO: 3695944 - DNA, 25 bp, Homo sapien
aacgtcgagtctttcgaagtcacct

SEQ ID NO: 3695945 - DNA, 25 bp, Homo sapien
tgaacgtcgagtctttcgaagtcac

SEQ ID NO: 3695946 - DNA, 25 bp, Homo sapien
ctgatggagagagtccagttttact

SEQ ID NO: 3695947 - DNA, 25 bp, Homo sapien
tccaaatgccttcagcttatcatag

SEQ ID NO: 3695948 - DNA, 25 bp, Homo sapien
tggagagagtccagttttactggag

SEQ ID NO: 3695949 - DNA, 25 bp, Homo sapien
ccaaatgccttcagcttatcatagt

SEQ ID NO: 3695950 - DNA, 25 bp, Homo sapien
ttcttctcggagctcagcttcccat

SEQ ID NO: 3695951 - DNA, 25 bp, Homo sapien
tttggtcccgtttatgagattctgg

SEQ ID NO: 3695952 - DNA, 25 bp, Homo sapien
ttcaggagacttgtcggtggctctc

SEQ ID NO: 3695953 - DNA, 25 bp, Homo sapien
tgggattcaggagacttgtcggtgg

SEQ ID NO: 3695954 - DNA, 25 bp, Homo sapien
ttttggtcccgtttatgagattctg

SEQ ID NO: 3695955 - DNA, 25 bp, Homo sapien
gaggacggggaactcttgctgctgt

SEQ ID NO: 3695956 - DNA, 25 bp, Homo sapien
tgcggactttgaggattgctggtgc

SEQ ID NO: 3695957 - DNA, 25 bp, Homo sapien
actttgaggattgctggtgcggacc

SEQ ID NO: 3695958 - DNA, 25 bp, Homo sapien
cggactttgaggattgctggtgcgg

SEQ ID NO: 3695959 - DNA, 25 bp, Homo sapien
gccgtctgctcagaagatttcttcc

SEQ ID NO: 3695960 - DNA, 25 bp, Homo sapien
tggagatgacagaaggaatgtcaca

SEQ ID NO: 3695961 - DNA, 25 bp, Homo sapien
aaggatggcagctgatgctggagat

SEQ ID NO: 3695962 - DNA, 25 bp, Homo sapien
atgctggagatgacagaaggaatgt

SEQ ID NO: 3695963 - DNA, 25 bp, Homo sapien
ggagagaggaaaggatggcagctga

SEQ ID NO: 3695964 - DNA, 25 bp, Homo sapien
tgcattggtcatgaccgtggactgg

SEQ ID NO: 3695965 - DNA, 25 bp, Homo sapien
aaactgcattggtcatgaccgtgga

SEQ ID NO: 3695966 - DNA, 25 bp, Homo sapien
cattggtcatgaccgtggactggag

SEQ ID NO: 3695967 - DNA, 25 bp, Homo sapien
actgcattggtcatgaccgtggact

SEQ ID NO: 3695968 - DNA, 25 bp, Homo sapien
ctgggaggaaagcagtagccacagg

SEQ ID NO: 3695969 - DNA, 25 bp, Homo sapien
tgggaggaaagcagtagccacaggc

SEQ ID NO: 3695970 - DNA, 25 bp, Homo sapien
ctgtggtgttgttagcgagcttcaa

SEQ ID NO: 3695971 - DNA, 25 bp, Homo sapien
ttagcgagcttcaaattaatgactc

SEQ ID NO: 3695972 - DNA, 25 bp, Homo sapien
aaattaatgactcgggatcctgccg

SEQ ID NO: 3695973 - DNA, 25 bp, Homo sapien
gcttcaaattaatgactcgggatcc

SEQ ID NO: 3695974 - DNA, 25 bp, Homo sapien
gcagcagatatgactgtggctttca

SEQ ID NO: 3695975 - DNA, 25 bp, Homo sapien
gaggcagcagatatgactgtggctt

SEQ ID NO: 3695976 - DNA, 25 bp, Homo sapien
acagaggcagcagatatgactgtgg

SEQ ID NO: 3695977 - DNA, 25 bp, Homo sapien
ggcagcagatatgactgtggctttc

SEQ ID NO: 3695978 - DNA, 25 bp, Homo sapien
gatgcgcatgctctgtctgtcatag

SEQ ID NO: 3695979 - DNA, 25 bp, Homo sapien
gttggcccggctgggtgccggcacc

SEQ ID NO: 3695980 - DNA, 25 bp, Homo sapien
ttcgatgcgcatgctctgtctgtca

SEQ ID NO: 3695981 - DNA, 25 bp, Homo sapien
cgagtttggcgttggcccggctggg

SEQ ID NO: 3695982 - DNA, 25 bp, Homo sapien
gaggctgcatttgttgtaaaaaatg

SEQ ID NO: 3695983 - DNA, 25 bp, Homo sapien
aaaatgaggttctttgtaccatggt

SEQ ID NO: 3695984 - DNA, 25 bp, Homo sapien
tctttgtaccatggttgcatgttac

SEQ ID NO: 3695985 - DNA, 25 bp, Homo sapien
gaggttctttgtaccatggttgcat

SEQ ID NO: 3695986 - DNA, 25 bp, Homo sapien
ccgatatgactgtcccagttatgcc

SEQ ID NO: 3695987 - DNA, 25 bp, Homo sapien
tcccagttatgccagactgaatttt

SEQ ID NO: 3695988 - DNA, 25 bp, Homo sapien
ccagttatgccagactgaatttttg

SEQ ID NO: 3695989 - DNA, 25 bp, Homo sapien
aaggagccgatatgactgtcccagt

SEQ ID NO: 3695990 - DNA, 25 bp, Homo sapien
ctgaagacttcattacactccaaac

SEQ ID NO: 3695991 - DNA, 25 bp, Homo sapien
ctggaaatgtgtagccattgatgtc

SEQ ID NO: 3695992 - DNA, 25 bp, Homo sapien
aatgtgtagccattgatgtctcata

SEQ ID NO: 3695993 - DNA, 25 bp, Homo sapien
gaaatgtgtagccattgatgtctca

SEQ ID NO: 3695994 - DNA, 25 bp, Homo sapien
tggaaatgtgtagccattgatgtct

SEQ ID NO: 3695995 - DNA, 25 bp, Homo sapien
aagtcttttgtccacgtgtatctgc

SEQ ID NO: 3695996 - DNA, 25 bp, Homo sapien
gcttggggcggacttacatgccatt

SEQ ID NO: 3695997 - DNA, 25 bp, Homo sapien
gggcggacttacatgccattggaca

SEQ ID NO: 3695998 - DNA, 25 bp, Homo sapien
gtgcttggggcggacttacatgcca

SEQ ID NO: 3695999 - DNA, 25 bp, Homo sapien
ggacttacatgccattggacaaata

SEQ ID NO: 3696000 - DNA, 25 bp, Homo sapien
tggcggcagggatgtttcttcattt

SEQ ID NO: 3696001 - DNA, 25 bp, Homo sapien
tttgcttcccttgctccttcctcac

SEQ ID NO: 3696002 - DNA, 25 bp, Homo sapien
ttcttcatttgcttcccttgctcct

SEQ ID NO: 3696003 - DNA, 25 bp, Homo sapien
catttgcttcccttgctccttcctc

SEQ ID NO: 3696004 - DNA, 25 bp, Homo sapien
gggtccttgaggctgtgcatcagct

SEQ ID NO: 3696005 - DNA, 25 bp, Homo sapien
cttccacttgggactggggaacttg

SEQ ID NO: 3696006 - DNA, 25 bp, Homo sapien
ttcctcctcattggtggcatctgtc

SEQ ID NO: 3696007 - DNA, 25 bp, Homo sapien
tgggactggggaacttggtgtcttc

SEQ ID NO: 3696008 - DNA, 25 bp, Homo sapien
cctcctcattggtggcatctgtcat

SEQ ID NO: 3696009 - DNA, 25 bp, Homo sapien
ctcaggaaggcctgagctccagaac

SEQ ID NO: 3696010 - DNA, 25 bp, Homo sapien
tttcagctttttcagtggttgagtg

SEQ ID NO: 3696011 - DNA, 25 bp, Homo sapien
gctttttcagtggttgagtgattgc

SEQ ID NO: 3696012 - DNA, 25 bp, Homo sapien
cagctttttcagtggttgagtgatt

SEQ ID NO: 3696013 - DNA, 25 bp, Homo sapien
tcagctttttcagtggttgagtgat

SEQ ID NO: 3696014 - DNA, 25 bp, Homo sapien
gacagagagacgtgagacgtgtacc

SEQ ID NO: 3696015 - DNA, 25 bp, Homo sapien
tggcactggtaggaagaactatcag

SEQ ID NO: 3696016 - DNA, 25 bp, Homo sapien
ggaagaactatcagatttgtgctga

SEQ ID NO: 3696017 - DNA, 25 bp, Homo sapien
acgtgtaccagaggccacactcctg

SEQ ID NO: 3696018 - DNA, 25 bp, Homo sapien
cacggtgccattgggggattcatcc

SEQ ID NO: 3696019 - DNA, 25 bp, Homo sapien
tatccgcatgtgagtatttaaggca

SEQ ID NO: 3696020 - DNA, 25 bp, Homo sapien
gccatgccatgtatccgcatgtgag

SEQ ID NO: 3696021 - DNA, 25 bp, Homo sapien
ctgacacggtgccattgggggattc

SEQ ID NO: 3696022 - DNA, 25 bp, Homo sapien
gccccaaaatggaattgaggaaatc

SEQ ID NO: 3696023 - DNA, 25 bp, Homo sapien
gagcgagcattagatttagagagca

SEQ ID NO: 3696024 - DNA, 25 bp, Homo sapien
gacctatgtggcctaccacacaggc

SEQ ID NO: 3696025 - DNA, 25 bp, Homo sapien
ctaatatgcaaagccacttaccagc

SEQ ID NO: 3696026 - DNA, 25 bp, Homo sapien
gtacataaccacatagagcgagcat

SEQ ID NO: 3696027 - DNA, 25 bp, Homo sapien
tttagtatcataagtggctttgtga

SEQ ID NO: 3696028 - DNA, 25 bp, Homo sapien
gtttagtatcataagtggctttgtg

SEQ ID NO: 3696029 - DNA, 25 bp, Homo sapien
tagtatcataagtggctttgtgatc

SEQ ID NO: 3696030 - DNA, 25 bp, Homo sapien
ttagtatcataagtggctttgtgat

SEQ ID NO: 3696031 - DNA, 25 bp, Homo sapien
caatatcaagtaactgattgccact

SEQ ID NO: 3696032 - DNA, 25 bp, Homo sapien
ggaataacaatatcaagtaactgat

SEQ ID NO: 3696033 - DNA, 25 bp, Homo sapien
caagtaactgattgccacttgactc

SEQ ID NO: 3696034 - DNA, 25 bp, Homo sapien
taacaatatcaagtaactgattgcc

SEQ ID NO: 3696035 - DNA, 25 bp, Homo sapien
tcttctcaacttgcccagtaatttg

SEQ ID NO: 3696036 - DNA, 25 bp, Homo sapien
tttagggttggtagcattcttctca

SEQ ID NO: 3696037 - DNA, 25 bp, Homo sapien
gtttagggttggtagcattcttctc

SEQ ID NO: 3696038 - DNA, 25 bp, Homo sapien
atttgctctttctcaatttgtgtgc

SEQ ID NO: 3696039 - DNA, 25 bp, Homo sapien
gggacagtcgagaggagtgacttaa

SEQ ID NO: 3696040 - DNA, 25 bp, Homo sapien
ctctagttaagtcaggggacagtcg

SEQ ID NO: 3696041 - DNA, 25 bp, Homo sapien
tcaggggacagtcgagaggagtgac

SEQ ID NO: 3696042 - DNA, 25 bp, Homo sapien
ctagttaagtcaggggacagtcgag

SEQ ID NO: 3696043 - DNA, 25 bp, Homo sapien
agaagtgtttcctgaagtttcctca

SEQ ID NO: 3696044 - DNA, 25 bp, Homo sapien
ctggccaactgtgtccaggctttct

SEQ ID NO: 3696045 - DNA, 25 bp, Homo sapien
tctccattatcttatctttcaggac

SEQ ID NO: 3696046 - DNA, 25 bp, Homo sapien
ccaactgtgtccaggctttcttttg

SEQ ID NO: 3696047 - DNA, 25 bp, Homo sapien
cattcgcacggctacaacctgggtt

SEQ ID NO: 3696048 - DNA, 25 bp, Homo sapien
catccatggctcctataactagtga

SEQ ID NO: 3696049 - DNA, 25 bp, Homo sapien
tgcaaagaccacaggctatttaccc

SEQ ID NO: 3696050 - DNA, 25 bp, Homo sapien
caggctcagtcaagggtgagtccca

SEQ ID NO: 3696051 - DNA, 25 bp, Homo sapien
tttccagaggttaccagccaaattc

SEQ ID NO: 3696052 - DNA, 25 bp, Homo sapien
tctctcttgagatcctaaatttaac

SEQ ID NO: 3696053 - DNA, 25 bp, Homo sapien
gaccacttcatctgttacatccctt

SEQ ID NO: 3696054 - DNA, 25 bp, Homo sapien
ttttgacatgcaacacagggctgat

SEQ ID NO: 3696055 - DNA, 25 bp, Homo sapien
ccctccaatttcatgaacggcatca

SEQ ID NO: 3696056 - DNA, 25 bp, Homo sapien
tctgtacaactcattttactcaggg

SEQ ID NO: 3696057 - DNA, 25 bp, Homo sapien
caggatccgggagtttccctccaat

SEQ ID NO: 3696058 - DNA, 25 bp, Homo sapien
agggcagttgtaacctctatggaca

SEQ ID NO: 3696059 - DNA, 25 bp, Homo sapien
cacctcgactcttgtttccctttct

SEQ ID NO: 3696060 - DNA, 25 bp, Homo sapien
gaccccgtggctggcggcattcagc

SEQ ID NO: 3696061 - DNA, 25 bp, Homo sapien
tcagcaggggccactttagcaggaa

SEQ ID NO: 3696062 - DNA, 25 bp, Homo sapien
caggaggagcatcacctcagagaga

SEQ ID NO: 3696063 - DNA, 25 bp, Homo sapien
tctaaaaaacgcacagcagtgtggc

SEQ ID NO: 3696064 - DNA, 25 bp, Homo sapien
gaaggaagttctgctatcgcctcca

SEQ ID NO: 3696065 - DNA, 25 bp, Homo sapien
gagtatcaggcgacattgctttgag

SEQ ID NO: 3696066 - DNA, 25 bp, Homo sapien
tacgtgtgaacagaaaacgctgtca

SEQ ID NO: 3696067 - DNA, 25 bp, Homo sapien
aacagaaaacgctgtcatatgctgc

SEQ ID NO: 3696068 - DNA, 25 bp, Homo sapien
tcttgtacgtgtgaacagaaaacgc

SEQ ID NO: 3696069 - DNA, 25 bp, Homo sapien
ttgatctttcttgtacgtgtgaaca

SEQ ID NO: 3696070 - DNA, 25 bp, Homo sapien
cactgggcctgctactaatctggaa

SEQ ID NO: 3696071 - DNA, 25 bp, Homo sapien
ctttggaggacagatcacaggttga

SEQ ID NO: 3696072 - DNA, 25 bp, Homo sapien
gcttcaaatatctgtgtgggcggag

SEQ ID NO: 3696073 - DNA, 25 bp, Homo sapien
gagccacctctagcgattcttggga

SEQ ID NO: 3696074 - DNA, 25 bp, Homo sapien
tgtgtagatcagagcccaaaccagg

SEQ ID NO: 3696075 - DNA, 25 bp, Homo sapien
tgtgtccctccgcaagatgagtggg

SEQ ID NO: 3696076 - DNA, 25 bp, Homo sapien
tatccaaggagatgacatggcggcg

SEQ ID NO: 3696077 - DNA, 25 bp, Homo sapien
caaaccaggatctttgcttggagga

SEQ ID NO: 3696078 - DNA, 25 bp, Homo sapien
gaaactgaccatgactaagagcctc

SEQ ID NO: 3696079 - DNA, 25 bp, Homo sapien
taaagaaagggagtcggcggctcta

SEQ ID NO: 3696080 - DNA, 25 bp, Homo sapien
gatagaacgtaggatgctgaccagg

SEQ ID NO: 3696081 - DNA, 25 bp, Homo sapien
caggtgtgctcatccctcaagggac

SEQ ID NO: 3696082 - DNA, 25 bp, Homo sapien
tcaaaggcagtcagcggagtgagaa

SEQ ID NO: 3696083 - DNA, 25 bp, Homo sapien
caggtactgatcaagtccgggccat

SEQ ID NO: 3696084 - DNA, 25 bp, Homo sapien
tcaaggctttaaatccaactgctgg

SEQ ID NO: 3696085 - DNA, 25 bp, Homo sapien
tgaagtaaaaagtctgagtccatcg

SEQ ID NO: 3696086 - DNA, 25 bp, Homo sapien
ctggtgagtacttcttcttagaaag

SEQ ID NO: 3696087 - DNA, 25 bp, Homo sapien
aaagggtgcagctcaagaagtacca

SEQ ID NO: 3696088 - DNA, 25 bp, Homo sapien
cggaggcacctggtgagtacttctt

SEQ ID NO: 3696089 - DNA, 25 bp, Homo sapien
ttcttagaaagggtgcagctcaaga

SEQ ID NO: 3696090 - DNA, 25 bp, Homo sapien
gatcgcgatgagctggtggccatca

SEQ ID NO: 3696091 - DNA, 25 bp, Homo sapien
caagaaagggaagctgcctatcgtc

SEQ ID NO: 3696092 - DNA, 25 bp, Homo sapien
gatcctgcagcgtaacaagaaaggg

SEQ ID NO: 3696093 - DNA, 25 bp, Homo sapien
gaaagaggcaaatgagatcctgcag

SEQ ID NO: 3696094 - DNA, 25 bp, Homo sapien
gctgacatggcaatcgggatggctc

SEQ ID NO: 3696095 - DNA, 25 bp, Homo sapien
gctaagaaggagcacgccaccttca

SEQ ID NO: 3696096 - DNA, 25 bp, Homo sapien
gcagactacctgatcagcagcggca

SEQ ID NO: 3696097 - DNA, 25 bp, Homo sapien
gagacgtcgactttcttgctaagaa

SEQ ID NO: 3696098 - DNA, 25 bp, Homo sapien
tatgacaactgaaccattctgtggg

SEQ ID NO: 3696099 - DNA, 25 bp, Homo sapien
tcttccaaaactgcgggcctcagat

SEQ ID NO: 3696100 - DNA, 25 bp, Homo sapien
gagccagcccgtctgtgggaactgc

SEQ ID NO: 3696101 - DNA, 25 bp, Homo sapien
tgcatgaaggatctcgcaggccaca

SEQ ID NO: 3696102 - DNA, 25 bp, Homo sapien
gggaacaatgccaaagcaatgcttg

SEQ ID NO: 3696103 - DNA, 25 bp, Homo sapien
caatatctacgctgcctgggaacgg

SEQ ID NO: 3696104 - DNA, 25 bp, Homo sapien
actccctggtcagcaaaatcctgtg

SEQ ID NO: 3696105 - DNA, 25 bp, Homo sapien
tcattgccaatgctgatcaggttca

SEQ ID NO: 3696106 - DNA, 25 bp, Homo sapien
gactcagcagttgattccaggaggc

SEQ ID NO: 3696107 - DNA, 25 bp, Homo sapien
tgtgtccatgtacatatccttgaag

SEQ ID NO: 3696108 - DNA, 25 bp, Homo sapien
taagggctacaagatttggactcag

SEQ ID NO: 3696109 - DNA, 25 bp, Homo sapien
taattggcccttagaaatggaacca

SEQ ID NO: 3696110 - DNA, 25 bp, Homo sapien
ttctaagttacaggcagagtgggac

SEQ ID NO: 3696111 - DNA, 25 bp, Homo sapien
cacagacaggtactgagctgacaga

SEQ ID NO: 3696112 - DNA, 25 bp, Homo sapien
gatgtggttcctccttaagctatgc

SEQ ID NO: 3696113 - DNA, 25 bp, Homo sapien
ggtattaactcgcagaccctctggg

SEQ ID NO: 3696114 - DNA, 25 bp, Homo sapien
gcattcttacaaactcgtctctcgg

SEQ ID NO: 3696115 - DNA, 25 bp, Homo sapien
tgtgctgatgcctgccattgggtcc

SEQ ID NO: 3696116 - DNA, 25 bp, Homo sapien
gaaggacgtcacaactccaggtgct

SEQ ID NO: 3696117 - DNA, 25 bp, Homo sapien
cgtcttcagcaaaacgaccttggaa

SEQ ID NO: 3696118 - DNA, 25 bp, Homo sapien
tgctaatgattagaccaccgccaca

SEQ ID NO: 3696119 - DNA, 25 bp, Homo sapien
aattacgacgtcctgtttccatagc

SEQ ID NO: 3696120 - DNA, 25 bp, Homo sapien
tatgtggagcacactggagtacccc

SEQ ID NO: 3696121 - DNA, 25 bp, Homo sapien
tcctatagtacagggctggcccaag

SEQ ID NO: 3696122 - DNA, 25 bp, Homo sapien
gcaaagcctcttgagttcacaggga

SEQ ID NO: 3696123 - DNA, 25 bp, Homo sapien
gatggagccgtcaacagtatctctg

SEQ ID NO: 3696124 - DNA, 25 bp, Homo sapien
cacagggaaccgagttttgcttctc

SEQ ID NO: 3696125 - DNA, 25 bp, Homo sapien
tgactcagtccttgcgatggagccg

SEQ ID NO: 3696126 - DNA, 25 bp, Homo sapien
aattaggcagatgtgggccccacac

SEQ ID NO: 3696127 - DNA, 25 bp, Homo sapien
tcaaagtgtcagtgaggccacgcag

SEQ ID NO: 3696128 - DNA, 25 bp, Homo sapien
tgaccatgatggatgcagacacctt

SEQ ID NO: 3696129 - DNA, 25 bp, Homo sapien
gaaacaccgaagtccagatctgctg

SEQ ID NO: 3696130 - DNA, 25 bp, Homo sapien
ttttcagatgaaaatcgccggctgg

SEQ ID NO: 3696131 - DNA, 25 bp, Homo sapien
ctgcatgatgatggcagctcggtgt

SEQ ID NO: 3696132 - DNA, 25 bp, Homo sapien
ccagcaggccctaggaaatatgaaa

SEQ ID NO: 3696133 - DNA, 25 bp, Homo sapien
taaactaagaagttgggagcccagc

SEQ ID NO: 3696134 - DNA, 25 bp, Homo sapien
gcagctcagcatccgtgttggcagg

SEQ ID NO: 3696135 - DNA, 25 bp, Homo sapien
cagtggttcaggtatggtcagagca

SEQ ID NO: 3696136 - DNA, 25 bp, Homo sapien
tgagctatgagaggtgtggccacat

SEQ ID NO: 3696137 - DNA, 25 bp, Homo sapien
tacttcctaggatggttgtcaacca

SEQ ID NO: 3696138 - DNA, 25 bp, Homo sapien
tgagccaacctgcagaaagaggcag

SEQ ID NO: 3696139 - DNA, 25 bp, Homo sapien
gctccggagtcagtgttcccgcatg

SEQ ID NO: 3696140 - DNA, 25 bp, Homo sapien
gtgagcttttcagcacaccagccct

SEQ ID NO: 3696141 - DNA, 25 bp, Homo sapien
ttcaaagttatacagccagcaagca

SEQ ID NO: 3696142 - DNA, 25 bp, Homo sapien
cagccgcgtgactcgtgtgccgtca

SEQ ID NO: 3696143 - DNA, 25 bp, Homo sapien
gggcccagccgcgtgactcgtgtgc

SEQ ID NO: 3696144 - DNA, 25 bp, Homo sapien
gactcgtgtgccgtcaggagctgct

SEQ ID NO: 3696145 - DNA, 25 bp, Homo sapien
tgaagggatagacgcggggcccagc

SEQ ID NO: 3696146 - DNA, 25 bp, Homo sapien
cctggccctctcaggcatgcacagg

SEQ ID NO: 3696147 - DNA, 25 bp, Homo sapien
ctggccctctcaggcatgcacaggc

SEQ ID NO: 3696148 - DNA, 25 bp, Homo sapien
gcatgcacaggcctgtcaggagcca

SEQ ID NO: 3696149 - DNA, 25 bp, Homo sapien
tctcaggcatgcacaggcctgtcag

SEQ ID NO: 3696150 - DNA, 25 bp, Homo sapien
cccactgtgggtcctggcgtcctta

SEQ ID NO: 3696151 - DNA, 25 bp, Homo sapien
gcgtccttatgtccaggtcagcaaa

SEQ ID NO: 3696152 - DNA, 25 bp, Homo sapien
tgctccaccgttggagccgggtgct

SEQ ID NO: 3696153 - DNA, 25 bp, Homo sapien
gccaggccagatctgggaagagtgt

SEQ ID NO: 3696154 - DNA, 25 bp, Homo sapien
gagaattctgggacatataattcag

SEQ ID NO: 3696155 - DNA, 25 bp, Homo sapien
aaaaggcactgcttacaatgtggca

SEQ ID NO: 3696156 - DNA, 25 bp, Homo sapien
aagaccggcccttatgattcagtta

SEQ ID NO: 3696157 - DNA, 25 bp, Homo sapien
tcagttgagatttgaatagggacac

SEQ ID NO: 3696158 - DNA, 25 bp, Homo sapien
cagaaactctgggtgctggctgccg

SEQ ID NO: 3696159 - DNA, 25 bp, Homo sapien
tatctaaattgagtgctgagtcggg

SEQ ID NO: 3696160 - DNA, 25 bp, Homo sapien
ggctttctggatgtagacgtaggac

SEQ ID NO: 3696161 - DNA, 25 bp, Homo sapien
tctgatgctggcagggagacccatg

SEQ ID NO: 3696162 - DNA, 25 bp, Homo sapien
ggattacaggtgtgtgccatcaccc

SEQ ID NO: 3696163 - DNA, 25 bp, Homo sapien
ggtgtgtgccatcacccccggctaa

SEQ ID NO: 3696164 - DNA, 25 bp, Homo sapien
cttgtctcagccttccgagtggctg

SEQ ID NO: 3696165 - DNA, 25 bp, Homo sapien
tctcttgtctcagccttccgagtgg

SEQ ID NO: 3696166 - DNA, 25 bp, Homo sapien
tctggaggaccttaatggctaggct

SEQ ID NO: 3696167 - DNA, 25 bp, Homo sapien
gcaagggacataagtaaaagctcca

SEQ ID NO: 3696168 - DNA, 25 bp, Homo sapien
gagccatgtgtttacccagcctgag

SEQ ID NO: 3696169 - DNA, 25 bp, Homo sapien
tgccaggcttttctagtgggactaa

SEQ ID NO: 3696170 - DNA, 25 bp, Homo sapien
cgggtgagtggcagacccttggccc

SEQ ID NO: 3696171 - DNA, 25 bp, Homo sapien
ccgccgctccacctggcgatggcct

SEQ ID NO: 3696172 - DNA, 25 bp, Homo sapien
cattctctacctgaacggcgtcgtc

SEQ ID NO: 3696173 - DNA, 25 bp, Homo sapien
tgctggccgagggtacctcgccggg

SEQ ID NO: 3696174 - DNA, 25 bp, Homo sapien
gagggggagcatgcccggctggagc

SEQ ID NO: 3696175 - DNA, 25 bp, Homo sapien
ggagttgtagtcttgctctgggggc

SEQ ID NO: 3696176 - DNA, 25 bp, Homo sapien
ctgggaaacacggcccaggcgactt

SEQ ID NO: 3696177 - DNA, 25 bp, Homo sapien
caggcgactttctcccgggagttgt

SEQ ID NO: 3696178 - DNA, 25 bp, Homo sapien
ccttggagagggaaagcctcacgga

SEQ ID NO: 3696179 - DNA, 25 bp, Homo sapien
gggaacagcctatttaccgcagttg

SEQ ID NO: 3696180 - DNA, 25 bp, Homo sapien
gattcggcggaggtcttaatctgga

SEQ ID NO: 3696181 - DNA, 25 bp, Homo sapien
tactgggaaattctcttaggagctc

SEQ ID NO: 3696182 - DNA, 25 bp, Homo sapien
tctacagaggagcactgcgggatca

SEQ ID NO: 3696183 - DNA, 25 bp, Homo sapien
catcaaaggaagcaaggtagtccgc

SEQ ID NO: 3696184 - DNA, 25 bp, Homo sapien
cacaggtgccggatgaaaggtgcct

SEQ ID NO: 3696185 - DNA, 25 bp, Homo sapien
tatgtgtccacaaacggctgtcgtg

SEQ ID NO: 3696186 - DNA, 25 bp, Homo sapien
cactgcagttgttttattggctcac

SEQ ID NO: 3696187 - DNA, 25 bp, Homo sapien
tctggatactctcagggagaatctg

SEQ ID NO: 3696188 - DNA, 25 bp, Homo sapien
atctgtgctggcgtctcccctagct

SEQ ID NO: 3696189 - DNA, 25 bp, Homo sapien
cacacttctcaaggtcagaagtctg

SEQ ID NO: 3696190 - DNA, 25 bp, Homo sapien
caagagtctgattgggcccatgggc

SEQ ID NO: 3696191 - DNA, 25 bp, Homo sapien
agagtctgattgggcccatgggccc

SEQ ID NO: 3696192 - DNA, 25 bp, Homo sapien
aagagtctgattgggcccatgggcc

SEQ ID NO: 3696193 - DNA, 25 bp, Homo sapien
tccaagagtctgattgggcccatgg

SEQ ID NO: 3696194 - DNA, 25 bp, Homo sapien
ccgaacttagcacccgatcggcata

SEQ ID NO: 3696195 - DNA, 25 bp, Homo sapien
gatgccgaacttagcacccgatcgg

SEQ ID NO: 3696196 - DNA, 25 bp, Homo sapien
tgccgaacttagcacccgatcggca

SEQ ID NO: 3696197 - DNA, 25 bp, Homo sapien
gccgaacttagcacccgatcggcat

SEQ ID NO: 3696198 - DNA, 25 bp, Homo sapien
ctagatctcaggtgtcgatgaatat

SEQ ID NO: 3696199 - DNA, 25 bp, Homo sapien
gactggtcgtcctagatctcaggtg

SEQ ID NO: 3696200 - DNA, 25 bp, Homo sapien
atgaatatgtcccactgggaactgc

SEQ ID NO: 3696201 - DNA, 25 bp, Homo sapien
acccacatgcccatgactggtcgtc

SEQ ID NO: 3696202 - DNA, 25 bp, Homo sapien
ttccccatcagagatctgtgagtgt

SEQ ID NO: 3696203 - DNA, 25 bp, Homo sapien
catcagcaactgtagcctcgatgac

SEQ ID NO: 3696204 - DNA, 25 bp, Homo sapien
tcttccccatcagagatctgtgagt

SEQ ID NO: 3696205 - DNA, 25 bp, Homo sapien
ctgtagcctcgatgacagaatccaa

SEQ ID NO: 3696206 - DNA, 25 bp, Homo sapien
tagaatgcagaaattggtcagttgg

SEQ ID NO: 3696207 - DNA, 25 bp, Homo sapien
gaaattggtcagttggaaagctaat

SEQ ID NO: 3696208 - DNA, 25 bp, Homo sapien
gactagaatgcagaaattggtcagt

SEQ ID NO: 3696209 - DNA, 25 bp, Homo sapien
tgcagaaattggtcagttggaaagc

SEQ ID NO: 3696210 - DNA, 25 bp, Homo sapien
ctactgatcaactgatcagcatggg

SEQ ID NO: 3696211 - DNA, 25 bp, Homo sapien
actgaggtgcaactgtcatgaggcc

SEQ ID NO: 3696212 - DNA, 25 bp, Homo sapien
agttgatgctgttaaggtacccggg

SEQ ID NO: 3696213 - DNA, 25 bp, Homo sapien
tgtaagcgtcactggaaaaactggt

SEQ ID NO: 3696214 - DNA, 25 bp, Homo sapien
tggtttaagcaaatagagccgtctg

SEQ ID NO: 3696215 - DNA, 25 bp, Homo sapien
gatgagtacatcgaagccctgaaca

SEQ ID NO: 3696216 - DNA, 25 bp, Homo sapien
gagttgctgaatgccggctacaaga

SEQ ID NO: 3696217 - DNA, 25 bp, Homo sapien
tcacacctggccaaggactgctgaa

SEQ ID NO: 3696218 - DNA, 25 bp, Homo sapien
caattgggatcggtgatgtcacacc

SEQ ID NO: 3696219 - DNA, 25 bp, Homo sapien
tatcaacgcgcacggaaggaccccg

SEQ ID NO: 3696220 - DNA, 25 bp, Homo sapien
ggccaatcatatcaacgcgcacgga

SEQ ID NO: 3696221 - DNA, 25 bp, Homo sapien
gattcgccggccaatcatatcaacg

SEQ ID NO: 3696222 - DNA, 25 bp, Homo sapien
gaggaaaagagaaccacgattcgcc

SEQ ID NO: 3696223 - DNA, 25 bp, Homo sapien
ctatagctcaagtactgggacccag

SEQ ID NO: 3696224 - DNA, 25 bp, Homo sapien
gggaccacggatggctcggatacgc

SEQ ID NO: 3696225 - DNA, 25 bp, Homo sapien
atggctcggatacgcggcagatgac

SEQ ID NO: 3696226 - DNA, 25 bp, Homo sapien
tagctcaagtactgggacccaggga

SEQ ID NO: 3696227 - DNA, 25 bp, Homo sapien
ttcttcacctcttgtactgccatca

SEQ ID NO: 3696228 - DNA, 25 bp, Homo sapien
ctcttgtactgccatcacctgcaag

SEQ ID NO: 3696229 - DNA, 25 bp, Homo sapien
ttgtactgccatcacctgcaagccg

SEQ ID NO: 3696230 - DNA, 25 bp, Homo sapien
cacctcttgtactgccatcacctgc

SEQ ID NO: 3696231 - DNA, 25 bp, Homo sapien
gaagatccatccagctgacaagttt

SEQ ID NO: 3696232 - DNA, 25 bp, Homo sapien
gaatggtttcacttgccgcaactcg

SEQ ID NO: 3696233 - DNA, 25 bp, Homo sapien
ttttctagcttacacgtgggaatgg

SEQ ID NO: 3696234 - DNA, 25 bp, Homo sapien
tgaaacatgaagatccatccagctg

SEQ ID NO: 3696235 - DNA, 25 bp, Homo sapien
aacgacaccgtaactatccgcacta

SEQ ID NO: 3696236 - DNA, 25 bp, Homo sapien
gacaccgtaactatccgcactagaa

SEQ ID NO: 3696237 - DNA, 25 bp, Homo sapien
caccgtaactatccgcactagaaag

SEQ ID NO: 3696238 - DNA, 25 bp, Homo sapien
cgtaactatccgcactagaaagttc

SEQ ID NO: 3696239 - DNA, 25 bp, Homo sapien
cgacaccgtaactatccgcactaga

SEQ ID NO: 3696240 - DNA, 25 bp, Homo sapien
acgacaccgtaactatccgcactag

SEQ ID NO: 3696241 - DNA, 25 bp, Homo sapien
tagtgcggatagttacggtgtcgtt

SEQ ID NO: 3696242 - DNA, 25 bp, Homo sapien
tctagtgcggatagttacggtgtcg

SEQ ID NO: 3696243 - DNA, 25 bp, Homo sapien
tttctagtgcggatagttacggtgt

SEQ ID NO: 3696244 - DNA, 25 bp, Homo sapien
ttctagtgcggatagttacggtgtc

SEQ ID NO: 3696245 - DNA, 25 bp, Homo sapien
ctttctagtgcggatagttacggtg

SEQ ID NO: 3696246 - DNA, 25 bp, Homo sapien
gaactttctagtgcggatagttacg

SEQ ID NO: 3696247 - DNA, 25 bp, Homo sapien
tgaccaaccgactacttcagaggaa

SEQ ID NO: 3696248 - DNA, 25 bp, Homo sapien
caaccgactacttcagaggaaacaa

SEQ ID NO: 3696249 - DNA, 25 bp, Homo sapien
ccaaccgactacttcagaggaaaca

SEQ ID NO: 3696250 - DNA, 25 bp, Homo sapien
ccgactacttcagaggaaacaaatg

SEQ ID NO: 3696251 - DNA, 25 bp, Homo sapien
gaccaaccgactacttcagaggaaa

SEQ ID NO: 3696252 - DNA, 25 bp, Homo sapien
atgaccaaccgactacttcagagga

SEQ ID NO: 3696253 - DNA, 25 bp, Homo sapien
tcctctgaagtagtcggttggtcat

SEQ ID NO: 3696254 - DNA, 25 bp, Homo sapien
catttgtttcctctgaagtagtcgg

SEQ ID NO: 3696255 - DNA, 25 bp, Homo sapien
tttcctctgaagtagtcggttggtc

SEQ ID NO: 3696256 - DNA, 25 bp, Homo sapien
ttgtttcctctgaagtagtcggttg

SEQ ID NO: 3696257 - DNA, 25 bp, Homo sapien
tgtttcctctgaagtagtcggttgg

SEQ ID NO: 3696258 - DNA, 25 bp, Homo sapien
ttcctctgaagtagtcggttggtca

SEQ ID NO: 3696259 - DNA, 25 bp, Homo sapien
gaccacaccggatgtcatctttgta

SEQ ID NO: 3696260 - DNA, 25 bp, Homo sapien
cccgggaaggcgacagtgcctaaga

SEQ ID NO: 3696261 - DNA, 25 bp, Homo sapien
tcaccccgggaaggcgacagtgcct

SEQ ID NO: 3696262 - DNA, 25 bp, Homo sapien
gtcattgatgtccttcaccccggga

SEQ ID NO: 3696263 - DNA, 25 bp, Homo sapien
gacagtgcctaagacagaaattcgg

SEQ ID NO: 3696264 - DNA, 25 bp, Homo sapien
cgggaaggcgacagtgcctaagaca

SEQ ID NO: 3696265 - DNA, 25 bp, Homo sapien
tcttaggcactgtcgccttcccggg

SEQ ID NO: 3696266 - DNA, 25 bp, Homo sapien
aggcactgtcgccttcccggggtga

SEQ ID NO: 3696267 - DNA, 25 bp, Homo sapien
tacaaagatgacatccggtgtggtc

SEQ ID NO: 3696268 - DNA, 25 bp, Homo sapien
gaatttctgtcttaggcactgtcgc

SEQ ID NO: 3696269 - DNA, 25 bp, Homo sapien
taatccagggaatcataaatcatgc

SEQ ID NO: 3696270 - DNA, 25 bp, Homo sapien
tgtcttaggcactgtcgccttcccg

SEQ ID NO: 3696271 - DNA, 25 bp, Homo sapien
taaaccttcccatacgatagctgtg

SEQ ID NO: 3696272 - DNA, 25 bp, Homo sapien
cataaaatgcacaggtggagtacgg

SEQ ID NO: 3696273 - DNA, 25 bp, Homo sapien
gcaatctgggatacaactctgaaag

SEQ ID NO: 3696274 - DNA, 25 bp, Homo sapien
ggtagcctggcaccaaattcactta

SEQ ID NO: 3696275 - DNA, 25 bp, Homo sapien
taagtctgcatctgggcttaaaccc

SEQ ID NO: 3696276 - DNA, 25 bp, Homo sapien
ctacagcagtgatctgggcaagctc

SEQ ID NO: 3696277 - DNA, 25 bp, Homo sapien
gagcttgcccagatcactgctgtag

SEQ ID NO: 3696278 - DNA, 25 bp, Homo sapien
cacagctatcgtatgggaaggttta

SEQ ID NO: 3696279 - DNA, 25 bp, Homo sapien
taagtgaatttggtgccaggctacc

SEQ ID NO: 3696280 - DNA, 25 bp, Homo sapien
taatcctttcagagttgtatcccag

SEQ ID NO: 3696281 - DNA, 25 bp, Homo sapien
gggtttaagcccagatgcagactta

SEQ ID NO: 3696282 - DNA, 25 bp, Homo sapien
aacaagcacttcgaggtgatgatgc

SEQ ID NO: 3696283 - DNA, 25 bp, Homo sapien
tgaagaaagtcagggggactgcaaa

SEQ ID NO: 3696284 - DNA, 25 bp, Homo sapien
gaacgcaagaacagaatgaagaaag

SEQ ID NO: 3696285 - DNA, 25 bp, Homo sapien
ctgcaaaggccaatgttggtgctgg

SEQ ID NO: 3696286 - DNA, 25 bp, Homo sapien
cgaaaggaacgcaagaacagaatga

SEQ ID NO: 3696287 - DNA, 25 bp, Homo sapien
gactgcaaaggccaatgttggtgct

SEQ ID NO: 3696288 - DNA, 25 bp, Homo sapien
ctcaagaaagcaacgaaaggaacgc

SEQ ID NO: 3696289 - DNA, 25 bp, Homo sapien
tttgcagtccccctgactttcttca

SEQ ID NO: 3696290 - DNA, 25 bp, Homo sapien
ccagcaccaacattggcctttgcag

SEQ ID NO: 3696291 - DNA, 25 bp, Homo sapien
tcattctgttcttgcgttcctttcg

SEQ ID NO: 3696292 - DNA, 25 bp, Homo sapien
tgactttcttcattctgttcttgcg

SEQ ID NO: 3696293 - DNA, 25 bp, Homo sapien
gcgttcctttcgttgctttcttgag

SEQ ID NO: 3696294 - DNA, 25 bp, Homo sapien
agcaccaacattggcctttgcagtc

SEQ ID NO: 3696295 - DNA, 25 bp, Homo sapien
cattaattgtaggtctttagtttct

SEQ ID NO: 3696296 - DNA, 25 bp, Homo sapien
tatagaaacgtcattaattgtaggt

SEQ ID NO: 3696297 - DNA, 25 bp, Homo sapien
cgtcattaattgtaggtctttagtt

SEQ ID NO: 3696298 - DNA, 25 bp, Homo sapien
aacgtcattaattgtaggtctttag

SEQ ID NO: 3696299 - DNA, 25 bp, Homo sapien
tagaaacgtcattaattgtaggtct

SEQ ID NO: 3696300 - DNA, 25 bp, Homo sapien
agaaacgtcattaattgtaggtctt

SEQ ID NO: 3696301 - DNA, 25 bp, Homo sapien
agaaactaaagacctacaattaatg

SEQ ID NO: 3696302 - DNA, 25 bp, Homo sapien
gacctacaattaatgacgtttctat

SEQ ID NO: 3696303 - DNA, 25 bp, Homo sapien
ctaaagacctacaattaatgacgtt

SEQ ID NO: 3696304 - DNA, 25 bp, Homo sapien
aagacctacaattaatgacgtttct

SEQ ID NO: 3696305 - DNA, 25 bp, Homo sapien
gaaactaaagacctacaattaatga

SEQ ID NO: 3696306 - DNA, 25 bp, Homo sapien
aactaaagacctacaattaatgacg

SEQ ID NO: 3696307 - DNA, 25 bp, Homo sapien
tttaagaaactatgtagcatagtgt

SEQ ID NO: 3696308 - DNA, 25 bp, Homo sapien
catgttttaagaaactatgtagcat

SEQ ID NO: 3696309 - DNA, 25 bp, Homo sapien
tgttttaagaaactatgtagcatag

SEQ ID NO: 3696310 - DNA, 25 bp, Homo sapien
gttttaagaaactatgtagcatagt

SEQ ID NO: 3696311 - DNA, 25 bp, Homo sapien
ttaagaaactatgtagcatagtgtc

SEQ ID NO: 3696312 - DNA, 25 bp, Homo sapien
atgttttaagaaactatgtagcata

SEQ ID NO: 3696313 - DNA, 25 bp, Homo sapien
ctatgctacatagtttcttaaaaca

SEQ ID NO: 3696314 - DNA, 25 bp, Homo sapien
acactatgctacatagtttcttaaa

SEQ ID NO: 3696315 - DNA, 25 bp, Homo sapien
actatgctacatagtttcttaaaac

SEQ ID NO: 3696316 - DNA, 25 bp, Homo sapien
atgctacatagtttcttaaaacatg

SEQ ID NO: 3696317 - DNA, 25 bp, Homo sapien
tatgctacatagtttcttaaaacat

SEQ ID NO: 3696318 - DNA, 25 bp, Homo sapien
gacactatgctacatagtttcttaa

SEQ ID NO: 3696319 - DNA, 25 bp, Homo sapien
catgttttaagaaactatgtagcat

SEQ ID NO: 3696320 - DNA, 25 bp, Homo sapien
taagaaactatgtagcatagtgtct

SEQ ID NO: 3696321 - DNA, 25 bp, Homo sapien
tgttttaagaaactatgtagcatag

SEQ ID NO: 3696322 - DNA, 25 bp, Homo sapien
gaaactatgtagcatagtgtcttaa

SEQ ID NO: 3696323 - DNA, 25 bp, Homo sapien
ttaagaaactatgtagcatagtgtc

SEQ ID NO: 3696324 - DNA, 25 bp, Homo sapien
gttttaagaaactatgtagcatagt

SEQ ID NO: 3696325 - DNA, 25 bp, Homo sapien
ctatgctacatagtttcttaaaaca

SEQ ID NO: 3696326 - DNA, 25 bp, Homo sapien
actatgctacatagtttcttaaaac

SEQ ID NO: 3696327 - DNA, 25 bp, Homo sapien
atgctacatagtttcttaaaacatg

SEQ ID NO: 3696328 - DNA, 25 bp, Homo sapien
gacactatgctacatagtttcttaa

SEQ ID NO: 3696329 - DNA, 25 bp, Homo sapien
taagacactatgctacatagtttct

SEQ ID NO: 3696330 - DNA, 25 bp, Homo sapien
ttaagacactatgctacatagtttc

SEQ ID NO: 3696331 - DNA, 25 bp, Homo sapien
ggccacattggttcattgatcccag

SEQ ID NO: 3696332 - DNA, 25 bp, Homo sapien
catagaaccttcaatgcagagcgga

SEQ ID NO: 3696333 - DNA, 25 bp, Homo sapien
taatatggacactggtttaagaagc

SEQ ID NO: 3696334 - DNA, 25 bp, Homo sapien
cacctcagtaaagtagcttggccca

SEQ ID NO: 3696335 - DNA, 25 bp, Homo sapien
acaagtgattttagcgataagcagc

SEQ ID NO: 3696336 - DNA, 25 bp, Homo sapien
ctccagttggccaagacaagtgatt

SEQ ID NO: 3696337 - DNA, 25 bp, Homo sapien
tgggccaagctactttactgaggtg

SEQ ID NO: 3696338 - DNA, 25 bp, Homo sapien
gaaaacacgggccacattgatccaa

SEQ ID NO: 3696339 - DNA, 25 bp, Homo sapien
aatcacttgtcttggccaactggag

SEQ ID NO: 3696340 - DNA, 25 bp, Homo sapien
gaggaaagcaatcctgagatctcag

SEQ ID NO: 3696341 - DNA, 25 bp, Homo sapien
tccgctctgcattgaaggttctatg

SEQ ID NO: 3696342 - DNA, 25 bp, Homo sapien
tgggatcaatgaaccaatgtggcct

SEQ ID NO: 3696343 - DNA, 25 bp, Homo sapien
tcattgacaagtgggcaaggccatc

SEQ ID NO: 3696344 - DNA, 25 bp, Homo sapien
gaaatctggcaaagcctctgtcctg

SEQ ID NO: 3696345 - DNA, 25 bp, Homo sapien
acattgatgtcccagcgccatggag

SEQ ID NO: 3696346 - DNA, 25 bp, Homo sapien
gaagtccggctacctcgtttgcata

SEQ ID NO: 3696347 - DNA, 25 bp, Homo sapien
cacaagcacttggttagaatggccc

SEQ ID NO: 3696348 - DNA, 25 bp, Homo sapien
catgggttactgtacctcccgggct

SEQ ID NO: 3696349 - DNA, 25 bp, Homo sapien
tataaaactgtcgtccaaaggccaa

SEQ ID NO: 3696350 - DNA, 25 bp, Homo sapien
gaatagtgatggctcaggtccccac

SEQ ID NO: 3696351 - DNA, 25 bp, Homo sapien
cattacatactccatggcgctggga

SEQ ID NO: 3696352 - DNA, 25 bp, Homo sapien
tcttatgcaaacgaggtagccggac

SEQ ID NO: 3696353 - DNA, 25 bp, Homo sapien
tgaagtacatacctgagcctctgcc

SEQ ID NO: 3696354 - DNA, 25 bp, Homo sapien
caatgtgattacagtcctgggcagg

SEQ ID NO: 3696355 - DNA, 25 bp, Homo sapien
tcatgtagatcactagactccttgg

SEQ ID NO: 3696356 - DNA, 25 bp, Homo sapien
ttaaggtttagcaatatttagccca

SEQ ID NO: 3696357 - DNA, 25 bp, Homo sapien
catgtgtagtacatctagaagtaga

SEQ ID NO: 3696358 - DNA, 25 bp, Homo sapien
ttttaaaatactaacagtgacatgg

SEQ ID NO: 3696359 - DNA, 25 bp, Homo sapien
tagactccttggtgtactgacgtag

SEQ ID NO: 3696360 - DNA, 25 bp, Homo sapien
tgtactgacgtagcaatttaaaagc

SEQ ID NO: 3696361 - DNA, 25 bp, Homo sapien
gcttttaaattgctacgtcagtaca

SEQ ID NO: 3696362 - DNA, 25 bp, Homo sapien
gctacgtcagtacaccaaggagtct

SEQ ID NO: 3696363 - DNA, 25 bp, Homo sapien
gcacaacaattattagtaacctaga

SEQ ID NO: 3696364 - DNA, 25 bp, Homo sapien
tctacttctagatgtactacacatg

SEQ ID NO: 3696365 - DNA, 25 bp, Homo sapien
caaggagtctagtgatctacatgac

SEQ ID NO: 3696366 - DNA, 25 bp, Homo sapien
taatgggctaaatattgctaaacct

SEQ ID NO: 3696367 - DNA, 25 bp, Homo sapien
ctgtggatttttcgcaagaacatta

SEQ ID NO: 3696368 - DNA, 25 bp, Homo sapien
cactgtggatttttcgcaagaacat

SEQ ID NO: 3696369 - DNA, 25 bp, Homo sapien
ccactgtggatttttcgcaagaaca

SEQ ID NO: 3696370 - DNA, 25 bp, Homo sapien
gccactgtggatttttcgcaagaac

SEQ ID NO: 3696371 - DNA, 25 bp, Homo sapien
actgtggatttttcgcaagaacatt

SEQ ID NO: 3696372 - DNA, 25 bp, Homo sapien
aatgttcttgcgaaaaatccacagt

SEQ ID NO: 3696373 - DNA, 25 bp, Homo sapien
atgttcttgcgaaaaatccacagtg

SEQ ID NO: 3696374 - DNA, 25 bp, Homo sapien
gttcttgcgaaaaatccacagtggc

SEQ ID NO: 3696375 - DNA, 25 bp, Homo sapien
tgttcttgcgaaaaatccacagtgg

SEQ ID NO: 3696376 - DNA, 25 bp, Homo sapien
taatgttcttgcgaaaaatccacag

SEQ ID NO: 3696377 - DNA, 25 bp, Homo sapien
gggatcgtcattaactacctcagag

SEQ ID NO: 3696378 - DNA, 25 bp, Homo sapien
tactggagtgcctgaaaaaatgcag

SEQ ID NO: 3696379 - DNA, 25 bp, Homo sapien
ccacttcatgggtgagacactggta

SEQ ID NO: 3696380 - DNA, 25 bp, Homo sapien
ccaacttgcagaacagggacacagc

SEQ ID NO: 3696381 - DNA, 25 bp, Homo sapien
ggtcttgacaacaaagcagaccgct

SEQ ID NO: 3696382 - DNA, 25 bp, Homo sapien
ccttgtgggagtctgcatagtgcat

SEQ ID NO: 3696383 - DNA, 25 bp, Homo sapien
tcatgcttccacaagggtagcggtc

SEQ ID NO: 3696384 - DNA, 25 bp, Homo sapien
aaagcagaccgcttccacgtctgtg

SEQ ID NO: 3696385 - DNA, 25 bp, Homo sapien
caaacggctcacttgctgtcagagg

SEQ ID NO: 3696386 - DNA, 25 bp, Homo sapien
catgctgcgtgaaggtgccaaagga

SEQ ID NO: 3696387 - DNA, 25 bp, Homo sapien
aaacagcacttgagtagcaaacggc

SEQ ID NO: 3696388 - DNA, 25 bp, Homo sapien
gggaagacgcctgaagcttactcct

SEQ ID NO: 3696389 - DNA, 25 bp, Homo sapien
caaggcttctggcaagtggaggacc

SEQ ID NO: 3696390 - DNA, 25 bp, Homo sapien
ggcaggcgacatgaaggctccgttt

SEQ ID NO: 3696391 - DNA, 25 bp, Homo sapien
gcagtgacattagtggcccagacca

SEQ ID NO: 3696392 - DNA, 25 bp, Homo sapien
gaggtgccagctcatgtgactccga

SEQ ID NO: 3696393 - DNA, 25 bp, Homo sapien
gaagatatccatctgggagacaagg

SEQ ID NO: 3696394 - DNA, 25 bp, Homo sapien
aaaagaagatatccatctgggagac

SEQ ID NO: 3696395 - DNA, 25 bp, Homo sapien
agaagatatccatctgggagacaag

SEQ ID NO: 3696396 - DNA, 25 bp, Homo sapien
gctaggttctgcccctaacttggtg

SEQ ID NO: 3696397 - DNA, 25 bp, Homo sapien
gatctgcacattatgacctctggag

SEQ ID NO: 3696398 - DNA, 25 bp, Homo sapien
gcatttcagcttccaaaccgactgg

SEQ ID NO: 3696399 - DNA, 25 bp, Homo sapien
gatacttcagggaggcttgagcaag

SEQ ID NO: 3696400 - DNA, 25 bp, Homo sapien
gggtcactgcctattcctgagctat

SEQ ID NO: 3696401 - DNA, 25 bp, Homo sapien
cacaccccgttctaatggcttaata

SEQ ID NO: 3696402 - DNA, 25 bp, Homo sapien
taataccctgggtactggagcaggg

SEQ ID NO: 3696403 - DNA, 25 bp, Homo sapien
agatgcctggatgttcacaccccgt

SEQ ID NO: 3696404 - DNA, 25 bp, Homo sapien
tttccgttggaagacagatgcctgg

SEQ ID NO: 3696405 - DNA, 25 bp, Homo sapien
ggtgtggtccaggtacacgtccata

SEQ ID NO: 3696406 - DNA, 25 bp, Homo sapien
tggtccaggtacacgtccataaaga

SEQ ID NO: 3696407 - DNA, 25 bp, Homo sapien
caggtacacgtccataaagaacata

SEQ ID NO: 3696408 - DNA, 25 bp, Homo sapien
tccaggtacacgtccataaagaaca

SEQ ID NO: 3696409 - DNA, 25 bp, Homo sapien
gttgacagagcacctccgatggctc

SEQ ID NO: 3696410 - DNA, 25 bp, Homo sapien
ggttgacagagcacctccgatggct

SEQ ID NO: 3696411 - DNA, 25 bp, Homo sapien
tgccatgggcctcctcgctgcccat

SEQ ID NO: 3696412 - DNA, 25 bp, Homo sapien
gctgccatgggcctcctcgctgccc

SEQ ID NO: 3696413 - DNA, 25 bp, Homo sapien
cgggctgccatgggcctcctcgctg

SEQ ID NO: 3696414 - DNA, 25 bp, Homo sapien
gggctgccatgggcctcctcgctgc

SEQ ID NO: 3696415 - DNA, 25 bp, Homo sapien
cagatttgggctaatgcattattga

SEQ ID NO: 3696416 - DNA, 25 bp, Homo sapien
attattgacagcaccctcgcagacc

SEQ ID NO: 3696417 - DNA, 25 bp, Homo sapien
tcaggttcccatgaatatcgtgtaa

SEQ ID NO: 3696418 - DNA, 25 bp, Homo sapien
caggataattatttcacaacagatt

SEQ ID NO: 3696419 - DNA, 25 bp, Homo sapien
agccactacacccatccccaaagaa

SEQ ID NO: 3696420 - DNA, 25 bp, Homo sapien
catccccaaagaacatctgtatttc

SEQ ID NO: 3696421 - DNA, 25 bp, Homo sapien
gaggattctctcctttcctattgtt

SEQ ID NO: 3696422 - DNA, 25 bp, Homo sapien
ctggtttggccttgggagggtgtag

SEQ ID NO: 3696423 - DNA, 25 bp, Homo sapien
tgccacccagcggtcctccacagcc

SEQ ID NO: 3696424 - DNA, 25 bp, Homo sapien
ccacccagcggtcctccacagccat

SEQ ID NO: 3696425 - DNA, 25 bp, Homo sapien
cttgccacccagcggtcctccacag

SEQ ID NO: 3696426 - DNA, 25 bp, Homo sapien
gccacccagcggtcctccacagcca

SEQ ID NO: 3696427 - DNA, 25 bp, Homo sapien
cgcaaaagtcagctccctggtcctt

SEQ ID NO: 3696428 - DNA, 25 bp, Homo sapien
tcagtaggttgaacaaattccggtc

SEQ ID NO: 3696429 - DNA, 25 bp, Homo sapien
gcagatgcagtctccccgcaaaagt

SEQ ID NO: 3696430 - DNA, 25 bp, Homo sapien
ggatattcacacatgttacgttagc

SEQ ID NO: 3696431 - DNA, 25 bp, Homo sapien
gaggctccgaggaagggtgccccat

SEQ ID NO: 3696432 - DNA, 25 bp, Homo sapien
ctgcgccttcatcacagagagcttg

SEQ ID NO: 3696433 - DNA, 25 bp, Homo sapien
ctgcctgcgccttcatcacagagag

SEQ ID NO: 3696434 - DNA, 25 bp, Homo sapien
gacagaggctccgaggaagggtgcc

SEQ ID NO: 3696435 - DNA, 25 bp, Homo sapien
aggtctggggtctgatggcagggcc

SEQ ID NO: 3696436 - DNA, 25 bp, Homo sapien
tttctcagcagcatggaggtctggg

SEQ ID NO: 3696437 - DNA, 25 bp, Homo sapien
catttctcagcagcatggaggtctg

SEQ ID NO: 3696438 - DNA, 25 bp, Homo sapien
tctggggtctgatggcagggcctgg

SEQ ID NO: 3696439 - DNA, 25 bp, Homo sapien
agccggaaagaagaagttttcactg

SEQ ID NO: 3696440 - DNA, 25 bp, Homo sapien
tcccttgcagagaaatcaagtgtct

SEQ ID NO: 3696441 - DNA, 25 bp, Homo sapien
caagtgtctgcaagggagccggaaa

SEQ ID NO: 3696442 - DNA, 25 bp, Homo sapien
gaagaagttttcactgtgtcatatt

SEQ ID NO: 3696443 - DNA, 25 bp, Homo sapien
gggaagaagatttcagactcatgcc

SEQ ID NO: 3696444 - DNA, 25 bp, Homo sapien
tcagaactcatacagagaaagaatc

SEQ ID NO: 3696445 - DNA, 25 bp, Homo sapien
gaacattctgggtaatgatcaaaga

SEQ ID NO: 3696446 - DNA, 25 bp, Homo sapien
ttggtgggtggctgaacattctggg

SEQ ID NO: 3696447 - DNA, 25 bp, Homo sapien
cagaactcatacagagaaagaatcc

SEQ ID NO: 3696448 - DNA, 25 bp, Homo sapien
aatcctgcttgaattgtgctgtacg

SEQ ID NO: 3696449 - DNA, 25 bp, Homo sapien
gacggttttgtgcaagctttatcca

SEQ ID NO: 3696450 - DNA, 25 bp, Homo sapien
tgtacgaatcctgtgagggcccgag

SEQ ID NO: 3696451 - DNA, 25 bp, Homo sapien
tccctagcccttcaggaaaaatgag

SEQ ID NO: 3696452 - DNA, 25 bp, Homo sapien
aagtaagatgctgtacacccatggc

SEQ ID NO: 3696453 - DNA, 25 bp, Homo sapien
agctctgggtgttcaatgagattat

SEQ ID NO: 3696454 - DNA, 25 bp, Homo sapien
taagatgctgtacacccatggcctc

SEQ ID NO: 3696455 - DNA, 25 bp, Homo sapien
aaagtaagatgctgtacacccatgg

SEQ ID NO: 3696456 - DNA, 25 bp, Homo sapien
catagagcaccgacaggtgcggcat

SEQ ID NO: 3696457 - DNA, 25 bp, Homo sapien
tcctccgcatagagcaccgacaggt

SEQ ID NO: 3696458 - DNA, 25 bp, Homo sapien
gcatagagcaccgacaggtgcggca

SEQ ID NO: 3696459 - DNA, 25 bp, Homo sapien
tccgcatagagcaccgacaggtgcg

SEQ ID NO: 3696460 - DNA, 25 bp, Homo sapien
aggtcagccccacatgctgtctcag

SEQ ID NO: 3696461 - DNA, 25 bp, Homo sapien
tgtgcctagactatagcctcaggac

SEQ ID NO: 3696462 - DNA, 25 bp, Homo sapien
gccccacatgctgtctcagagaagc

SEQ ID NO: 3696463 - DNA, 25 bp, Homo sapien
gcctagactatagcctcaggactca

SEQ ID NO: 3696464 - DNA, 25 bp, Homo sapien
ctgattgccattggctccattcaaa

SEQ ID NO: 3696465 - DNA, 25 bp, Homo sapien
gattgccattggctccattcaaagg

SEQ ID NO: 3696466 - DNA, 25 bp, Homo sapien
ctcctgattgccattggctccattc

SEQ ID NO: 3696467 - DNA, 25 bp, Homo sapien
cctgattgccattggctccattcaa

SEQ ID NO: 3696468 - DNA, 25 bp, Homo sapien
tgccatatgtggtccccgtggccaa

SEQ ID NO: 3696469 - DNA, 25 bp, Homo sapien
ttaagaaacgcgacgtgaaggcgat

SEQ ID NO: 3696470 - DNA, 25 bp, Homo sapien
ggtcatttgtccctctggtccctag

SEQ ID NO: 3696471 - DNA, 25 bp, Homo sapien
tgaaggcgatgagaaaaatactacc

SEQ ID NO: 3696472 - DNA, 25 bp, Homo sapien
tggcacttaagaacgtcctgggtcc

SEQ ID NO: 3696473 - DNA, 25 bp, Homo sapien
catgactgaggtctggaatgccggt

SEQ ID NO: 3696474 - DNA, 25 bp, Homo sapien
aatgccggtgagagtgatgtctgct

SEQ ID NO: 3696475 - DNA, 25 bp, Homo sapien
tccccacagtgtgcacaagagagat

SEQ ID NO: 3696476 - DNA, 25 bp, Homo sapien
tgttgcttctcctcttggcgacaca

SEQ ID NO: 3696477 - DNA, 25 bp, Homo sapien
ttttaaggagcccatctggtcctgt

SEQ ID NO: 3696478 - DNA, 25 bp, Homo sapien
tcccttttaaggagcccatctggtc

SEQ ID NO: 3696479 - DNA, 25 bp, Homo sapien
ctcttggcgacacaattgctaccat

SEQ ID NO: 3696480 - DNA, 25 bp, Homo sapien
aaatgcatgcattatgtataactct

SEQ ID NO: 3696481 - DNA, 25 bp, Homo sapien
gttggcaaattgtctctgatattta

SEQ ID NO: 3696482 - DNA, 25 bp, Homo sapien
cgaatcattcggactaaagagggct

SEQ ID NO: 3696483 - DNA, 25 bp, Homo sapien
gctctagtgcgtggcccattaaaat

SEQ ID NO: 3696484 - DNA, 25 bp, Homo sapien
gccatacttccagaacatgcacagg

SEQ ID NO: 3696485 - DNA, 25 bp, Homo sapien
tggacaggtactgggtaaccggcac

SEQ ID NO: 3696486 - DNA, 25 bp, Homo sapien
gctgaagaggtaatgaaagtactgg

SEQ ID NO: 3696487 - DNA, 25 bp, Homo sapien
ggtaaccggcacagcgttacccagc

SEQ ID NO: 3696488 - DNA, 25 bp, Homo sapien
cccttgagtctgtgtgagtggaaaa

SEQ ID NO: 3696489 - DNA, 25 bp, Homo sapien
tctggaaagctggaaagagtccgga

SEQ ID NO: 3696490 - DNA, 25 bp, Homo sapien
gagccacagtgacgctacatgggac

SEQ ID NO: 3696491 - DNA, 25 bp, Homo sapien
cacagagatcctcgtgggactgcca

SEQ ID NO: 3696492 - DNA, 25 bp, Homo sapien
gcccagcataagacgcattgccagt

SEQ ID NO: 3696493 - DNA, 25 bp, Homo sapien
tccttgagtctaactgggacctctg

SEQ ID NO: 3696494 - DNA, 25 bp, Homo sapien
caagaaggagttatgtgttcctccc

SEQ ID NO: 3696495 - DNA, 25 bp, Homo sapien
tccctactgagggtgaaactccagc

SEQ ID NO: 3696496 - DNA, 25 bp, Homo sapien
taattattagctgtctcggcgggtg

SEQ ID NO: 3696497 - DNA, 25 bp, Homo sapien
cacgggaacctctaagctgagcgta

SEQ ID NO: 3696498 - DNA, 25 bp, Homo sapien
gctgcttaacatgcacacgggaacc

SEQ ID NO: 3696499 - DNA, 25 bp, Homo sapien
ggtatatttgtctccggaaacctgc

SEQ ID NO: 3696500 - DNA, 25 bp, Homo sapien
gcggccaggcagcactgataatgat

SEQ ID NO: 3696501 - DNA, 25 bp, Homo sapien
gagccgtgaacacctcgccaaatat

SEQ ID NO: 3696502 - DNA, 25 bp, Homo sapien
aatatcttccagaagtccccggagg

SEQ ID NO: 3696503 - DNA, 25 bp, Homo sapien
gccatgagttaggtgactcccacga

SEQ ID NO: 3696504 - DNA, 25 bp, Homo sapien
ttgtcaacacctcagctatttccac

SEQ ID NO: 3696505 - DNA, 25 bp, Homo sapien
tcaacacctcagctatttccaccat

SEQ ID NO: 3696506 - DNA, 25 bp, Homo sapien
tgtcaacacctcagctatttccacc

SEQ ID NO: 3696507 - DNA, 25 bp, Homo sapien
cattgtcaacacctcagctatttcc

SEQ ID NO: 3696508 - DNA, 25 bp, Homo sapien
acagcccgccatgataaagccaaat

SEQ ID NO: 3696509 - DNA, 25 bp, Homo sapien
ccaccttcaccagagcgccggaagt

SEQ ID NO: 3696510 - DNA, 25 bp, Homo sapien
tgagaacacagcccgccatgataaa

SEQ ID NO: 3696511 - DNA, 25 bp, Homo sapien
caaatctgccatgtaccaccttcac

SEQ ID NO: 3696512 - DNA, 25 bp, Homo sapien
gatggcagctgtcaatcctgcctcc

SEQ ID NO: 3696513 - DNA, 25 bp, Homo sapien
ggaagatggcagctgtcaatcctgc

SEQ ID NO: 3696514 - DNA, 25 bp, Homo sapien
aagatggcagctgtcaatcctgcct

SEQ ID NO: 3696515 - DNA, 25 bp, Homo sapien
aggaagatggcagctgtcaatcctg

SEQ ID NO: 3696516 - DNA, 25 bp, Homo sapien
ggtagtcaggtacatagactgttcc

SEQ ID NO: 3696517 - DNA, 25 bp, Homo sapien
tccaacacactgtagtgaatttctt

SEQ ID NO: 3696518 - DNA, 25 bp, Homo sapien
gtagtgaatttcttgatggaaggtc

SEQ ID NO: 3696519 - DNA, 25 bp, Homo sapien
cttgtgtggtagtcaggtacataga

SEQ ID NO: 3696520 - DNA, 25 bp, Homo sapien
ctgctctgttctgttggcattctga

SEQ ID NO: 3696521 - DNA, 25 bp, Homo sapien
tgttggcattctgaggacccctcca

SEQ ID NO: 3696522 - DNA, 25 bp, Homo sapien
ctgttctgttggcattctgaggacc

SEQ ID NO: 3696523 - DNA, 25 bp, Homo sapien
ccaacctggtgactccaccaggaga

SEQ ID NO: 3696524 - DNA, 25 bp, Homo sapien
ctttggtctctctgagccgtgttct

SEQ ID NO: 3696525 - DNA, 25 bp, Homo sapien
ccgtgttcttggtagagctctttgc

SEQ ID NO: 3696526 - DNA, 25 bp, Homo sapien
tgcctctccaacgcaccgtgggagg

SEQ ID NO: 3696527 - DNA, 25 bp, Homo sapien
tctgagccgtgttcttggtagagct

SEQ ID NO: 3696528 - DNA, 25 bp, Homo sapien
tattgaaatatctgctttgggcgcc

SEQ ID NO: 3696529 - DNA, 25 bp, Homo sapien
tgtgagttcgatgcatctgaatggg

SEQ ID NO: 3696530 - DNA, 25 bp, Homo sapien
tgggcgcctcttttgcgaagggaaa

SEQ ID NO: 3696531 - DNA, 25 bp, Homo sapien
aggccgttagcaagctggcagaagt

SEQ ID NO: 3696532 - DNA, 25 bp, Homo sapien
agagatgaagtgatacacgtatgca

SEQ ID NO: 3696533 - DNA, 25 bp, Homo sapien
gagatgaagtgatacacgtatgcac

SEQ ID NO: 3696534 - DNA, 25 bp, Homo sapien
gagagatgaagtgatacacgtatgc

SEQ ID NO: 3696535 - DNA, 25 bp, Homo sapien
tttccttggcaacaacatccatgtt

SEQ ID NO: 3696536 - DNA, 25 bp, Homo sapien
gggcactaggtagacttcggaactg

SEQ ID NO: 3696537 - DNA, 25 bp, Homo sapien
actgtggcaggatatccacgtcaga

SEQ ID NO: 3696538 - DNA, 25 bp, Homo sapien
tcggaactgtggcaggatatccacg

SEQ ID NO: 3696539 - DNA, 25 bp, Homo sapien
tatccacgtcagatctagattcaag

SEQ ID NO: 3696540 - DNA, 25 bp, Homo sapien
gggccaccataacccgtcttgcagc

SEQ ID NO: 3696541 - DNA, 25 bp, Homo sapien
agtcatggggccaccataacccgtc

SEQ ID NO: 3696542 - DNA, 25 bp, Homo sapien
ggagggatgtcacagatgtccatac

SEQ ID NO: 3696543 - DNA, 25 bp, Homo sapien
gatgtcacagatgtccataccccac

SEQ ID NO: 3696544 - DNA, 25 bp, Homo sapien
gccacgttcacagtagctcaggaga

SEQ ID NO: 3696545 - DNA, 25 bp, Homo sapien
catgcttggagacggtgatttcccc

SEQ ID NO: 3696546 - DNA, 25 bp, Homo sapien
aacactgaacctgcgagagccttga

SEQ ID NO: 3696547 - DNA, 25 bp, Homo sapien
gcgggccaggagcaactacacatat

SEQ ID NO: 3696548 - DNA, 25 bp, Homo sapien
tgccttctggacacaacgagtcagg

SEQ ID NO: 3696549 - DNA, 25 bp, Homo sapien
tctgaggttcgctaccaaggttgac

SEQ ID NO: 3696550 - DNA, 25 bp, Homo sapien
gcataactggttgggcaatggtgcc

SEQ ID NO: 3696551 - DNA, 25 bp, Homo sapien
cacacttagaggcagataacccagg

SEQ ID NO: 3696552 - DNA, 25 bp, Homo sapien
cccctatcgatgaagagaccctggg

SEQ ID NO: 3696553 - DNA, 25 bp, Homo sapien
cagatcaccccctatcgatgaagag

SEQ ID NO: 3696554 - DNA, 25 bp, Homo sapien
aggaatctgtccacgatgctgcttg

SEQ ID NO: 3696555 - DNA, 25 bp, Homo sapien
gtccacgatgctgcttgaaggaaac

SEQ ID NO: 3696556 - DNA, 25 bp, Homo sapien
gccatgatcaaagccgccagatgag

SEQ ID NO: 3696557 - DNA, 25 bp, Homo sapien
cttccctgggcagacgccatgatca

SEQ ID NO: 3696558 - DNA, 25 bp, Homo sapien
agacgccatgatcaaagccgccaga

SEQ ID NO: 3696559 - DNA, 25 bp, Homo sapien
tgggcagacgccatgatcaaagccg

SEQ ID NO: 3696560 - DNA, 25 bp, Homo sapien
cccaaggggtccactgcagactgtt

SEQ ID NO: 3696561 - DNA, 25 bp, Homo sapien
tggatgacccaaggggtccactgca

SEQ ID NO: 3696562 - DNA, 25 bp, Homo sapien
ttgcttgtcgagtctagtccatttg

SEQ ID NO: 3696563 - DNA, 25 bp, Homo sapien
gcagactgtttgcttgtcgagtcta

SEQ ID NO: 3696564 - DNA, 25 bp, Homo sapien
gagtagcccaaattcaaagacttag

SEQ ID NO: 3696565 - DNA, 25 bp, Homo sapien
ctgagagagtcaatgagtagcccaa

SEQ ID NO: 3696566 - DNA, 25 bp, Homo sapien
aagacttaggattaattcgactcac

SEQ ID NO: 3696567 - DNA, 25 bp, Homo sapien
aagctgagagagtcaatgagtagcc

SEQ ID NO: 3696568 - DNA, 25 bp, Homo sapien
agacctgcagtgagaatgtaagacg

SEQ ID NO: 3696569 - DNA, 25 bp, Homo sapien
cagtgagaatgtaagacgctctgct

SEQ ID NO: 3696570 - DNA, 25 bp, Homo sapien
atgtaagacgctctgctaggcttcc

SEQ ID NO: 3696571 - DNA, 25 bp, Homo sapien
gagaatgtaagacgctctgctaggc

SEQ ID NO: 3696572 - DNA, 25 bp, Homo sapien
ctgcattatagatgatttttaaatt

SEQ ID NO: 3696573 - DNA, 25 bp, Homo sapien
acatttccccaataaaaggtgtcag

SEQ ID NO: 3696574 - DNA, 25 bp, Homo sapien
ttccccaataaaaggtgtcagtaga

SEQ ID NO: 3696575 - DNA, 25 bp, Homo sapien
cccaataaaaggtgtcagtagagag

SEQ ID NO: 3696576 - DNA, 25 bp, Homo sapien
cataacgcaaggtggttgggcccga

SEQ ID NO: 3696577 - DNA, 25 bp, Homo sapien
tctctgtgctccataacgcaaggtg

SEQ ID NO: 3696578 - DNA, 25 bp, Homo sapien
cacttaggtgctatgtgaccacagc

SEQ ID NO: 3696579 - DNA, 25 bp, Homo sapien
ctccaccgggctggaattctatttc

SEQ ID NO: 3696580 - DNA, 25 bp, Homo sapien
gcagtgatcacgaggaacgactcag

SEQ ID NO: 3696581 - DNA, 25 bp, Homo sapien
gagagtggtacttgctagaccagca

SEQ ID NO: 3696582 - DNA, 25 bp, Homo sapien
tagaccagcagtgccgttgctcctg

SEQ ID NO: 3696583 - DNA, 25 bp, Homo sapien
cagcaggagaaacgccagcagtgat

SEQ ID NO: 3696584 - DNA, 25 bp, Homo sapien
ctgtaatcccgcttgccctttagga

SEQ ID NO: 3696585 - DNA, 25 bp, Homo sapien
agatgacttgaacacgggagtttga

SEQ ID NO: 3696586 - DNA, 25 bp, Homo sapien
aggcagatgacttgaacacgggagt

SEQ ID NO: 3696587 - DNA, 25 bp, Homo sapien
cccgcttgccctttaggaggtcgag

SEQ ID NO: 3696588 - DNA, 25 bp, Homo sapien
gtgctgatgactccctcactgtggc

SEQ ID NO: 3696589 - DNA, 25 bp, Homo sapien
ccgggttccagtgctgatgactccc

SEQ ID NO: 3696590 - DNA, 25 bp, Homo sapien
ggccaagttcctcaaatgcggaggg

SEQ ID NO: 3696591 - DNA, 25 bp, Homo sapien
ctcaaatgcggagggtccggatcct

SEQ ID NO: 3696592 - DNA, 25 bp, Homo sapien
agtagaactcttgagtctggtctat

SEQ ID NO: 3696593 - DNA, 25 bp, Homo sapien
tagaactcttgagtctggtctatca

SEQ ID NO: 3696594 - DNA, 25 bp, Homo sapien
tcaggagtagaactcttgagtctgg

SEQ ID NO: 3696595 - DNA, 25 bp, Homo sapien
aactcttgagtctggtctatcagct

SEQ ID NO: 3696596 - DNA, 25 bp, Homo sapien
aggctgagatcaccaggcggcgatc

SEQ ID NO: 3696597 - DNA, 25 bp, Homo sapien
caaaagccgttagatgccagcaaaa

SEQ ID NO: 3696598 - DNA, 25 bp, Homo sapien
agacacttcacagcccacttggagg

SEQ ID NO: 3696599 - DNA, 25 bp, Homo sapien
tacatggctgtcacccgggagataa

SEQ ID NO: 3696600 - DNA, 25 bp, Homo sapien
tctgcttttaacgattttgtttgca

SEQ ID NO: 3696601 - DNA, 25 bp, Homo sapien
aaatatggcctgctagtgctctgaa

SEQ ID NO: 3696602 - DNA, 25 bp, Homo sapien
tttgtttgcaaagacctgagattaa

SEQ ID NO: 3696603 - DNA, 25 bp, Homo sapien
cctgctagtgctctgaagcatctga

SEQ ID NO: 3696604 - DNA, 25 bp, Homo sapien
accaagagaacagggccgatccaca

SEQ ID NO: 3696605 - DNA, 25 bp, Homo sapien
gggtgctgagcaggatccgggtcct

SEQ ID NO: 3696606 - DNA, 25 bp, Homo sapien
gctgagcaggatccgggtcctcacc

SEQ ID NO: 3696607 - DNA, 25 bp, Homo sapien
gtgctgagcaggatccgggtcctca

SEQ ID NO: 3696608 - DNA, 25 bp, Homo sapien
caatttatgcttgcagagtaacgtg

SEQ ID NO: 3696609 - DNA, 25 bp, Homo sapien
tgcagagtaacgtgaccattctggt

SEQ ID NO: 3696610 - DNA, 25 bp, Homo sapien
gaccattctggtgtatctggtttgt

SEQ ID NO: 3696611 - DNA, 25 bp, Homo sapien
tctggtttgtctatgccatatctcc

SEQ ID NO: 3696612 - DNA, 25 bp, Homo sapien
tgtgtggtcccctttccatccagaa

SEQ ID NO: 3696613 - DNA, 25 bp, Homo sapien
ccattaaaggtggtgtttgaggatg

SEQ ID NO: 3696614 - DNA, 25 bp, Homo sapien
tgccattaaaggtggtgtttgagga

SEQ ID NO: 3696615 - DNA, 25 bp, Homo sapien
gtgtggtcccctttccatccagaaa

SEQ ID NO: 3696616 - DNA, 25 bp, Homo sapien
tctatgagggaggatagtcaaccca

SEQ ID NO: 3696617 - DNA, 25 bp, Homo sapien
catggtgctcaggtgaaacatctcc

SEQ ID NO: 3696618 - DNA, 25 bp, Homo sapien
ttgagggtctcaggttctccaccag

SEQ ID NO: 3696619 - DNA, 25 bp, Homo sapien
gggccatattgctctcctggacgct

SEQ ID NO: 3696620 - DNA, 25 bp, Homo sapien
gcgtagtgtccttctcaatgtggcc

SEQ ID NO: 3696621 - DNA, 25 bp, Homo sapien
gatgctgccacaagataaggaagtc

SEQ ID NO: 3696622 - DNA, 25 bp, Homo sapien
aatttgtctccgaaaggcatgcgca

SEQ ID NO: 3696623 - DNA, 25 bp, Homo sapien
gagagggactgctcgttctggcact

SEQ ID NO: 3696624 - DNA, 25 bp, Homo sapien
ccgcgtcctcgcgggctggctgcca

SEQ ID NO: 3696625 - DNA, 25 bp, Homo sapien
cccctggcggggagccgcgtcctcg

SEQ ID NO: 3696626 - DNA, 25 bp, Homo sapien
gttccctgcactgcccctggcgggg

SEQ ID NO: 3696627 - DNA, 25 bp, Homo sapien
cgcgtcctcgcgggctggctgccaa

SEQ ID NO: 3696628 - DNA, 25 bp, Homo sapien
tgcatataggctccggtatgggccg

SEQ ID NO: 3696629 - DNA, 25 bp, Homo sapien
tgaacacgcatgaacaagcacaggt

SEQ ID NO: 3696630 - DNA, 25 bp, Homo sapien
tgtacaatgcatgacagcacgtgtg

SEQ ID NO: 3696631 - DNA, 25 bp, Homo sapien
tgtttgcagccgctagtgaggccgt

SEQ ID NO: 3696632 - DNA, 25 bp, Homo sapien
agcagctgacaaaatccagttctcc

SEQ ID NO: 3696633 - DNA, 25 bp, Homo sapien
ccttcttgtgtctgtagtaacaact

SEQ ID NO: 3696634 - DNA, 25 bp, Homo sapien
ggtttggataagtccccagaaatga

SEQ ID NO: 3696635 - DNA, 25 bp, Homo sapien
tggctgcgggtgcaggtacccaaag

SEQ ID NO: 3696636 - DNA, 25 bp, Homo sapien
cgggtgcaggtacccaaaggtgcag

SEQ ID NO: 3696637 - DNA, 25 bp, Homo sapien
caaaggtgcagaagggtttggataa

SEQ ID NO: 3696638 - DNA, 25 bp, Homo sapien
tactcccgattggtactagttctcc

SEQ ID NO: 3696639 - DNA, 25 bp, Homo sapien
ctactcccgattggtactagttctc

SEQ ID NO: 3696640 - DNA, 25 bp, Homo sapien
ctgaaggtgagtaactccagggctg

SEQ ID NO: 3696641 - DNA, 25 bp, Homo sapien
atctcatgcatctgcttctcatgga

SEQ ID NO: 3696642 - DNA, 25 bp, Homo sapien
tcatggaaagattctaacctggaac

SEQ ID NO: 3696643 - DNA, 25 bp, Homo sapien
ggagccacctcccatatggcttcgt

SEQ ID NO: 3696644 - DNA, 25 bp, Homo sapien
gcaggaatttatttacgagctcatt

SEQ ID NO: 3696645 - DNA, 25 bp, Homo sapien
tatttacgagctcattatccctgtg

SEQ ID NO: 3696646 - DNA, 25 bp, Homo sapien
tttatttacgagctcattatccctg

SEQ ID NO: 3696647 - DNA, 25 bp, Homo sapien
gaatttatttacgagctcattatcc

SEQ ID NO: 3696648 - DNA, 25 bp, Homo sapien
cagagggctggaaatatagggcaca

SEQ ID NO: 3696649 - DNA, 25 bp, Homo sapien
agagtcagattcttcaacataaggc

SEQ ID NO: 3696650 - DNA, 25 bp, Homo sapien
gctgacagcctcaccagtagtccaa

SEQ ID NO: 3696651 - DNA, 25 bp, Homo sapien
ctttgcgaccaggaagatgagttct

SEQ ID NO: 3696652 - DNA, 25 bp, Homo sapien
ttagtaatgactggcttggatgctg

SEQ ID NO: 3696653 - DNA, 25 bp, Homo sapien
ggaatgagtcagccccactggagga

SEQ ID NO: 3696654 - DNA, 25 bp, Homo sapien
gaccaattagctcgtccacaggcag

SEQ ID NO: 3696655 - DNA, 25 bp, Homo sapien
gcagcccattaactcttcccaggac

SEQ ID NO: 3696656 - DNA, 25 bp, Homo sapien
ctgcacccagatgggtgggggcctt

SEQ ID NO: 3696657 - DNA, 25 bp, Homo sapien
ccagatgggtgggggccttgggcac

SEQ ID NO: 3696658 - DNA, 25 bp, Homo sapien
gtgggggccttgggcacttcctcca

SEQ ID NO: 3696659 - DNA, 25 bp, Homo sapien
gatgggtgggggccttgggcacttc

SEQ ID NO: 3696660 - DNA, 25 bp, Homo sapien
tcatgtgggcctttggtgacgtgat

SEQ ID NO: 3696661 - DNA, 25 bp, Homo sapien
aacttctgatagcattcatgtgggc

SEQ ID NO: 3696662 - DNA, 25 bp, Homo sapien
tacattcatcattgcaaacttctga

SEQ ID NO: 3696663 - DNA, 25 bp, Homo sapien
gcaaacttctgatagcattcatgtg

SEQ ID NO: 3696664 - DNA, 25 bp, Homo sapien
aaattggaccacccatcaagaaaag

SEQ ID NO: 3696665 - DNA, 25 bp, Homo sapien
attggaccacccatcaagaaaagtg

SEQ ID NO: 3696666 - DNA, 25 bp, Homo sapien
ttggaccacccatcaagaaaagtgg

SEQ ID NO: 3696667 - DNA, 25 bp, Homo sapien
tggaccacccatcaagaaaagtgga

SEQ ID NO: 3696668 - DNA, 25 bp, Homo sapien
tgctgatgaaatgcgagttgccgca

SEQ ID NO: 3696669 - DNA, 25 bp, Homo sapien
ctgatgaaatgcgagttgccgcacc

SEQ ID NO: 3696670 - DNA, 25 bp, Homo sapien
gatgaaatgcgagttgccgcaccat

SEQ ID NO: 3696671 - DNA, 25 bp, Homo sapien
ctgctgatgaaatgcgagttgccgc

SEQ ID NO: 3696672 - DNA, 25 bp, Homo sapien
caactagtctttgccagttcacagg

SEQ ID NO: 3696673 - DNA, 25 bp, Homo sapien
tgagcaggtctctatccgtggcaat

SEQ ID NO: 3696674 - DNA, 25 bp, Homo sapien
tctggaaccccatgatagccttgta

SEQ ID NO: 3696675 - DNA, 25 bp, Homo sapien
ggccccactagggtgcaagtcctgc

SEQ ID NO: 3696676 - DNA, 25 bp, Homo sapien
caaactgggctttgacaaatccaag

SEQ ID NO: 3696677 - DNA, 25 bp, Homo sapien
agccaaactgggctttgacaaatcc

SEQ ID NO: 3696678 - DNA, 25 bp, Homo sapien
agtttccagggagtggaagttatga

SEQ ID NO: 3696679 - DNA, 25 bp, Homo sapien
ccagggagtggaagttatgaacaga

SEQ ID NO: 3696680 - DNA, 25 bp, Homo sapien
tccagaggactacttggtcagtgag

SEQ ID NO: 3696681 - DNA, 25 bp, Homo sapien
gaagatcctggtccactccagagga

SEQ ID NO: 3696682 - DNA, 25 bp, Homo sapien
gccttggacattggtagactttaca

SEQ ID NO: 3696683 - DNA, 25 bp, Homo sapien
tcagtgagtagcagtagtggtcctc

SEQ ID NO: 3696684 - DNA, 25 bp, Homo sapien
aaagggctgtctcttaaaatctaga

SEQ ID NO: 3696685 - DNA, 25 bp, Homo sapien
aaaatctagataaggttgaggctgc

SEQ ID NO: 3696686 - DNA, 25 bp, Homo sapien
ggctcttctgcttattggctgttgc

SEQ ID NO: 3696687 - DNA, 25 bp, Homo sapien
gaagtccatacaagtcagtgcagaa

SEQ ID NO: 3696688 - DNA, 25 bp, Homo sapien
tcatcctgaggcttcttcgtatggg

SEQ ID NO: 3696689 - DNA, 25 bp, Homo sapien
aatcaaggtgttggtcaggtagctt

SEQ ID NO: 3696690 - DNA, 25 bp, Homo sapien
tatgggctcataggcagccgagttc

SEQ ID NO: 3696691 - DNA, 25 bp, Homo sapien
tttcccatgttctagaagagtccaa

SEQ ID NO: 3696692 - DNA, 25 bp, Homo sapien
cttccagagaggagaacaatggaca

SEQ ID NO: 3696693 - DNA, 25 bp, Homo sapien
ccagagaggagaacaatggacaccc

SEQ ID NO: 3696694 - DNA, 25 bp, Homo sapien
gaggagaacaatggacacccagctg

SEQ ID NO: 3696695 - DNA, 25 bp, Homo sapien
gaacaatggacacccagctgaggat

SEQ ID NO: 3696696 - DNA, 25 bp, Homo sapien
gcagcaactagcttctgtgccacct

SEQ ID NO: 3696697 - DNA, 25 bp, Homo sapien
tgctgggagtcctacaaaagctcag

SEQ ID NO: 3696698 - DNA, 25 bp, Homo sapien
gccttggcttttacgcagcaactag

SEQ ID NO: 3696699 - DNA, 25 bp, Homo sapien
cggtcaaactcgctggccttggctt

SEQ ID NO: 3696700 - DNA, 25 bp, Homo sapien
ttgtaactaatcttaagaccacgtg

SEQ ID NO: 3696701 - DNA, 25 bp, Homo sapien
tatctccagggctgggttgagcctg

SEQ ID NO: 3696702 - DNA, 25 bp, Homo sapien
aatcttaagaccacgtgtgaatggg

SEQ ID NO: 3696703 - DNA, 25 bp, Homo sapien
tgctgaaggcccatgtctgggctat

SEQ ID NO: 3696704 - DNA, 25 bp, Homo sapien
cagtaggagcgttgaatacatggtt

SEQ ID NO: 3696705 - DNA, 25 bp, Homo sapien
agcagtaggagcgttgaatacatgg

SEQ ID NO: 3696706 - DNA, 25 bp, Homo sapien
gagcgttgaatacatggttgctcca

SEQ ID NO: 3696707 - DNA, 25 bp, Homo sapien
taggagcgttgaatacatggttgct

SEQ ID NO: 3696708 - DNA, 25 bp, Homo sapien
ctggaaagagaagcagccagaaccc

SEQ ID NO: 3696709 - DNA, 25 bp, Homo sapien
cctgctctccagctgacttgatggg

SEQ ID NO: 3696710 - DNA, 25 bp, Homo sapien
gaaagagaagcagccagaacccagg

SEQ ID NO: 3696711 - DNA, 25 bp, Homo sapien
acccagggaggtcctgctctccagc

SEQ ID NO: 3696712 - DNA, 25 bp, Homo sapien
tctctagttacttgtctggctacag

SEQ ID NO: 3696713 - DNA, 25 bp, Homo sapien
tacagtcagactgttcccatggaaa

SEQ ID NO: 3696714 - DNA, 25 bp, Homo sapien
gaaaagtcaaccatggctgttggga

SEQ ID NO: 3696715 - DNA, 25 bp, Homo sapien
tcccatggaaacgtgaaaagtcaac

SEQ ID NO: 3696716 - DNA, 25 bp, Homo sapien
gagacaaattgcagcgagttttcaa

SEQ ID NO: 3696717 - DNA, 25 bp, Homo sapien
agacaaattgcagcgagttttcaag

SEQ ID NO: 3696718 - DNA, 25 bp, Homo sapien
gacaaattgcagcgagttttcaaga

SEQ ID NO: 3696719 - DNA, 25 bp, Homo sapien
cgaatataggggcgcaaaatttcaa

SEQ ID NO: 3696720 - DNA, 25 bp, Homo sapien
aatataggggcgcaaaatttcaaag

SEQ ID NO: 3696721 - DNA, 25 bp, Homo sapien
tataggggcgcaaaatttcaaagac

SEQ ID NO: 3696722 - DNA, 25 bp, Homo sapien
ttcgaatataggggcgcaaaatttc

SEQ ID NO: 3696723 - DNA, 25 bp, Homo sapien
gtttctctccctgcactgtcaatga

SEQ ID NO: 3696724 - DNA, 25 bp, Homo sapien
atgctttcagcagtttctctccctg

SEQ ID NO: 3696725 - DNA, 25 bp, Homo sapien
agcagtttctctccctgcactgtca

SEQ ID NO: 3696726 - DNA, 25 bp, Homo sapien
gggggaatgctttcagcagtttctc

SEQ ID NO: 3696727 - DNA, 25 bp, Homo sapien
cttcatgcctcgagaaagatcctga

SEQ ID NO: 3696728 - DNA, 25 bp, Homo sapien
tgtctgctaccacaagcttctcctt

SEQ ID NO: 3696729 - DNA, 25 bp, Homo sapien
catgagaacaccagggtcatcccgt

SEQ ID NO: 3696730 - DNA, 25 bp, Homo sapien
gtcctgctccacgtgctcttgtctg

SEQ ID NO: 3696731 - DNA, 25 bp, Homo sapien
gaggcagcactggtgagtgtggcca

SEQ ID NO: 3696732 - DNA, 25 bp, Homo sapien
agcactggtgagtgtggccagcaca

SEQ ID NO: 3696733 - DNA, 25 bp, Homo sapien
tgagtgtggccagcacatccagcat

SEQ ID NO: 3696734 - DNA, 25 bp, Homo sapien
gtgagtgtggccagcacatccagca

SEQ ID NO: 3696735 - DNA, 25 bp, Homo sapien
tgcccgtattgataaaaagaagcag

SEQ ID NO: 3696736 - DNA, 25 bp, Homo sapien
ctagagaattatttgcccgtattga

SEQ ID NO: 3696737 - DNA, 25 bp, Homo sapien
attatttgcccgtattgataaaaag

SEQ ID NO: 3696738 - DNA, 25 bp, Homo sapien
agagaattatttgcccgtattgata

SEQ ID NO: 3696739 - DNA, 25 bp, Homo sapien
tcagtattgattgtggtcctcggga

SEQ ID NO: 3696740 - DNA, 25 bp, Homo sapien
tcatgccggaataggatgttcagct

SEQ ID NO: 3696741 - DNA, 25 bp, Homo sapien
tgtgtcaatggagctgcaaaatgcc

SEQ ID NO: 3696742 - DNA, 25 bp, Homo sapien
tcccatcatggaaagacctcgtcgg

SEQ ID NO: 3696743 - DNA, 25 bp, Homo sapien
gaaccgtgtaatgtggcagttgcca

SEQ ID NO: 3696744 - DNA, 25 bp, Homo sapien
tatctcagaggcatcgtcagtacag

SEQ ID NO: 3696745 - DNA, 25 bp, Homo sapien
ccaaataatgtctcaagaccaggct

SEQ ID NO: 3696746 - DNA, 25 bp, Homo sapien
gctaagtcgattgaaaggccccaaa

SEQ ID NO: 3696747 - DNA, 25 bp, Homo sapien
gactgttcgatgctgggctgtcccc

SEQ ID NO: 3696748 - DNA, 25 bp, Homo sapien
gagactgttcgatgctgggctgtcc

SEQ ID NO: 3696749 - DNA, 25 bp, Homo sapien
agactgttcgatgctgggctgtccc

SEQ ID NO: 3696750 - DNA, 25 bp, Homo sapien
ctgagactgttcgatgctgggctgt

SEQ ID NO: 3696751 - DNA, 25 bp, Homo sapien
gcctacaaagccctccatagccaag

SEQ ID NO: 3696752 - DNA, 25 bp, Homo sapien
aggggcctacaaagccctccatagc

SEQ ID NO: 3696753 - DNA, 25 bp, Homo sapien
cctccatagccaagcttttccagga

SEQ ID NO: 3696754 - DNA, 25 bp, Homo sapien
cccaggggcctacaaagccctccat

SEQ ID NO: 3696755 - DNA, 25 bp, Homo sapien
gaccaaagctggtggccaaatgggt

SEQ ID NO: 3696756 - DNA, 25 bp, Homo sapien
cagatgggccatgtttacagcagaa

SEQ ID NO: 3696757 - DNA, 25 bp, Homo sapien
tgttcaaaacgtggcacctgggctt

SEQ ID NO: 3696758 - DNA, 25 bp, Homo sapien
gacagtgctggtctgcgcagagcct

SEQ ID NO: 3696759 - DNA, 25 bp, Homo sapien
taccctgaaggctttgcgcatgcag

SEQ ID NO: 3696760 - DNA, 25 bp, Homo sapien
gaatctgggctaaactctgggctaa

SEQ ID NO: 3696761 - DNA, 25 bp, Homo sapien
tgacaacatcaagccccaaagaagg

SEQ ID NO: 3696762 - DNA, 25 bp, Homo sapien
gacttggcatcacactcagggtaaa

SEQ ID NO: 3696763 - DNA, 25 bp, Homo sapien
cctgatcagagagaagtagaaccac

SEQ ID NO: 3696764 - DNA, 25 bp, Homo sapien
gacacgatgtagttgggcctggcat

SEQ ID NO: 3696765 - DNA, 25 bp, Homo sapien
caaaccaatggaggtggaccagtca

SEQ ID NO: 3696766 - DNA, 25 bp, Homo sapien
tctgagcagaaagtgtcatgggcca

SEQ ID NO: 3696767 - DNA, 25 bp, Homo sapien
caagttccccagagtctgaatagag

SEQ ID NO: 3696768 - DNA, 25 bp, Homo sapien
agtctgaatagagcagcccagggaa

SEQ ID NO: 3696769 - DNA, 25 bp, Homo sapien
atttcatcatctacaagttccccag

SEQ ID NO: 3696770 - DNA, 25 bp, Homo sapien
catctacaagttccccagagtctga

SEQ ID NO: 3696771 - DNA, 25 bp, Homo sapien
tgtcagaggcatacgaatcagcccc

SEQ ID NO: 3696772 - DNA, 25 bp, Homo sapien
ccccatggtcactaggaggagcaga

SEQ ID NO: 3696773 - DNA, 25 bp, Homo sapien
tccaggtacagtgggattcaggcac

SEQ ID NO: 3696774 - DNA, 25 bp, Homo sapien
aacgcaaggttaagggctggagcaa

SEQ ID NO: 3696775 - DNA, 25 bp, Homo sapien
gggaagccttcttgaagatctaccc

SEQ ID NO: 3696776 - DNA, 25 bp, Homo sapien
ttttccacatgatgagtggaatggc

SEQ ID NO: 3696777 - DNA, 25 bp, Homo sapien
cttttccacatgatgagtggaatgg

SEQ ID NO: 3696778 - DNA, 25 bp, Homo sapien
agccttcttgaagatctacccctgg

SEQ ID NO: 3696779 - DNA, 25 bp, Homo sapien
gagcctatgtcaagccccaacaatt

SEQ ID NO: 3696780 - DNA, 25 bp, Homo sapien
tatgtcaagccccaacaattatgtg

SEQ ID NO: 3696781 - DNA, 25 bp, Homo sapien
gatgagagagcctatgtcaagcccc

SEQ ID NO: 3696782 - DNA, 25 bp, Homo sapien
aaaccatattaactgtgtggagatg

SEQ ID NO: 3696783 - DNA, 25 bp, Homo sapien
acggacaaggagaaggaccgctgca

SEQ ID NO: 3696784 - DNA, 25 bp, Homo sapien
agaaggaccgctgcagagaaaggcc

SEQ ID NO: 3696785 - DNA, 25 bp, Homo sapien
caggcttcaggccaacggacaagga

SEQ ID NO: 3696786 - DNA, 25 bp, Homo sapien
caggccaacggacaaggagaaggac

SEQ ID NO: 3696787 - DNA, 25 bp, Homo sapien
tggggacaagttgcacttcacaaac

SEQ ID NO: 3696788 - DNA, 25 bp, Homo sapien
ggggacaagttgcacttcacaaaca

SEQ ID NO: 3696789 - DNA, 25 bp, Homo sapien
gggacaagttgcacttcacaaacag

SEQ ID NO: 3696790 - DNA, 25 bp, Homo sapien
ccagggccatgcagacagaggtcat

SEQ ID NO: 3696791 - DNA, 25 bp, Homo sapien
cagacagaggtcatttgctgggtcc

SEQ ID NO: 3696792 - DNA, 25 bp, Homo sapien
agaatgcctggaaccccgccagacg

SEQ ID NO: 3696793 - DNA, 25 bp, Homo sapien
gtcatttgctgggtcccttcaggcc

SEQ ID NO: 3696794 - DNA, 25 bp, Homo sapien
ggcatctatacatgtagcacctaca

SEQ ID NO: 3696795 - DNA, 25 bp, Homo sapien
ctggcatctatacatgtagcaccta

SEQ ID NO: 3696796 - DNA, 25 bp, Homo sapien
tctatacatgtagcacctacactga

SEQ ID NO: 3696797 - DNA, 25 bp, Homo sapien
catgtagcacctacactgagctgag

SEQ ID NO: 3696798 - DNA, 25 bp, Homo sapien
gaatgaaacaccccgatctttagag

SEQ ID NO: 3696799 - DNA, 25 bp, Homo sapien
tgaaacaccccgatctttagagcct

SEQ ID NO: 3696800 - DNA, 25 bp, Homo sapien
ctggaatgaaacaccccgatcttta

SEQ ID NO: 3696801 - DNA, 25 bp, Homo sapien
tggaatgaaacaccccgatctttag

SEQ ID NO: 3696802 - DNA, 25 bp, Homo sapien
catgaggtctttagcaaagtagcca

SEQ ID NO: 3696803 - DNA, 25 bp, Homo sapien
tggacaccggtgctattgttggacg

SEQ ID NO: 3696804 - DNA, 25 bp, Homo sapien
ctgaagtttctattgtggacaccgg

SEQ ID NO: 3696805 - DNA, 25 bp, Homo sapien
acagtgtgcaaagccgccatggctg

SEQ ID NO: 3696806 - DNA, 25 bp, Homo sapien
tctgaatcttccaggtaatttcctg

SEQ ID NO: 3696807 - DNA, 25 bp, Homo sapien
aactctctgaatcttccaggtaatt

SEQ ID NO: 3696808 - DNA, 25 bp, Homo sapien
aatgtgtcttcctacttaagaatac

SEQ ID NO: 3696809 - DNA, 25 bp, Homo sapien
catcagctccaccatagtctgggaa

SEQ ID NO: 3696810 - DNA, 25 bp, Homo sapien
cacagacatagcagtcatggacaca

SEQ ID NO: 3696811 - DNA, 25 bp, Homo sapien
tcagggacacggtggtcatagacac

SEQ ID NO: 3696812 - DNA, 25 bp, Homo sapien
tcagggacatagtggtcagggacac

SEQ ID NO: 3696813 - DNA, 25 bp, Homo sapien
tcatagacacagtgatcacacacac

SEQ ID NO: 3696814 - DNA, 25 bp, Homo sapien
ggtcatggacacagcaatcagacac

SEQ ID NO: 3696815 - DNA, 25 bp, Homo sapien
gtcatggacacagcaatcagacaca

SEQ ID NO: 3696816 - DNA, 25 bp, Homo sapien
tcatggacacagcaatcagacacac

SEQ ID NO: 3696817 - DNA, 25 bp, Homo sapien
caagtcagggtcattatactcccca

SEQ ID NO: 3696818 - DNA, 25 bp, Homo sapien
ccactgagaacaagtcagggtcatt

SEQ ID NO: 3696819 - DNA, 25 bp, Homo sapien
tgtccttggcaggtggtaactaaca

SEQ ID NO: 3696820 - DNA, 25 bp, Homo sapien
aaacgggccaccactagtcatttca

SEQ ID NO: 3696821 - DNA, 25 bp, Homo sapien
agaagtgtgaggagtgccctgcatc

SEQ ID NO: 3696822 - DNA, 25 bp, Homo sapien
gaagtgtgaggagtgccctgcatca

SEQ ID NO: 3696823 - DNA, 25 bp, Homo sapien
agtgccctgcatcacctacaggatc

SEQ ID NO: 3696824 - DNA, 25 bp, Homo sapien
tgccctgcatcacctacaggatcac

SEQ ID NO: 3696825 - DNA, 25 bp, Homo sapien
tgccaccttggtttgcaacaacttg

SEQ ID NO: 3696826 - DNA, 25 bp, Homo sapien
tagtcactgttttgcaagcaggtgc

SEQ ID NO: 3696827 - DNA, 25 bp, Homo sapien
agcaggtgcctgagtgaatgccacc

SEQ ID NO: 3696828 - DNA, 25 bp, Homo sapien
cagacatgccacaaataagctgctc

SEQ ID NO: 3696829 - DNA, 25 bp, Homo sapien
ggaacctgtactgtctcctgaatgt

SEQ ID NO: 3696830 - DNA, 25 bp, Homo sapien
gacaaatctgagtgagtcgttgcat

SEQ ID NO: 3696831 - DNA, 25 bp, Homo sapien
gagtgagtcgttgcatctgggaacc

SEQ ID NO: 3696832 - DNA, 25 bp, Homo sapien
tgcatctgggaacctgtactgtctc

SEQ ID NO: 3696833 - DNA, 25 bp, Homo sapien
gatccaatgggacagggagccctta

SEQ ID NO: 3696834 - DNA, 25 bp, Homo sapien
gcccagccacctggcagggttgtag

SEQ ID NO: 3696835 - DNA, 25 bp, Homo sapien
agcccagccacctggcagggttgta

SEQ ID NO: 3696836 - DNA, 25 bp, Homo sapien
gttgtagtgaggatccaatgggaca

SEQ ID NO: 3696837 - DNA, 25 bp, Homo sapien
tctcgatgactgacccatttggccc

SEQ ID NO: 3696838 - DNA, 25 bp, Homo sapien
ggcttctcgatgactgacccatttg

SEQ ID NO: 3696839 - DNA, 25 bp, Homo sapien
cgatgactgacccatttggccctca

SEQ ID NO: 3696840 - DNA, 25 bp, Homo sapien
gactgacccatttggccctcatttc

SEQ ID NO: 3696841 - DNA, 25 bp, Homo sapien
agagccctccacaattacccttgat

SEQ ID NO: 3696842 - DNA, 25 bp, Homo sapien
caaactgggatctctgctcaagctc

SEQ ID NO: 3696843 - DNA, 25 bp, Homo sapien
gctcccacataaggggcttatctgg

SEQ ID NO: 3696844 - DNA, 25 bp, Homo sapien
cagagccctccacaattacccttga

SEQ ID NO: 3696845 - DNA, 25 bp, Homo sapien
aatctgtgccgccagctggctatgc

SEQ ID NO: 3696846 - DNA, 25 bp, Homo sapien
gcaagtgggaatctgtgccgccagc

SEQ ID NO: 3696847 - DNA, 25 bp, Homo sapien
agacccaggcccatggaggcaagtg

SEQ ID NO: 3696848 - DNA, 25 bp, Homo sapien
ccagctggctatgcggtgacaccag

SEQ ID NO: 3696849 - DNA, 25 bp, Homo sapien
agctgctggggaagcaccctcccca

SEQ ID NO: 3696850 - DNA, 25 bp, Homo sapien
cagctgctcaggcccaagggcagcc

SEQ ID NO: 3696851 - DNA, 25 bp, Homo sapien
agccagcatcaccatccattctgct

SEQ ID NO: 3696852 - DNA, 25 bp, Homo sapien
gtccctgcagcaccaagctgctggg

SEQ ID NO: 3696853 - DNA, 25 bp, Homo sapien
tcagcttcgaggaaagagtcccaga

SEQ ID NO: 3696854 - DNA, 25 bp, Homo sapien
cctccaccataatcagaaagctggg

SEQ ID NO: 3696855 - DNA, 25 bp, Homo sapien
gaaagctgggggacccaactgctgt

SEQ ID NO: 3696856 - DNA, 25 bp, Homo sapien
tgctgtttccaagaactgcattatt

SEQ ID NO: 3696857 - DNA, 25 bp, Homo sapien
tgttggtaactgcaactttcctcgc

SEQ ID NO: 3696858 - DNA, 25 bp, Homo sapien
taactgcaactttcctcgcaagggc

SEQ ID NO: 3696859 - DNA, 25 bp, Homo sapien
actgcaactttcctcgcaagggcat

SEQ ID NO: 3696860 - DNA, 25 bp, Homo sapien
tggtaactgcaactttcctcgcaag

SEQ ID NO: 3696861 - DNA, 25 bp, Homo sapien
gcacagggagcttcgggaattctca

SEQ ID NO: 3696862 - DNA, 25 bp, Homo sapien
cagctgtggagctctagacgcagtt

SEQ ID NO: 3696863 - DNA, 25 bp, Homo sapien
gcttttccatcaggcgcagctgtgg

SEQ ID NO: 3696864 - DNA, 25 bp, Homo sapien
agctctagacgcagttgggctcaag

SEQ ID NO: 3696865 - DNA, 25 bp, Homo sapien
agaaaacttcttggcaggtgagaga

SEQ ID NO: 3696866 - DNA, 25 bp, Homo sapien
gttttctgggacagcgccatcaaga

SEQ ID NO: 3696867 - DNA, 25 bp, Homo sapien
ctgggacagcgccatcaagaaaact

SEQ ID NO: 3696868 - DNA, 25 bp, Homo sapien
atctgccatggttttctgggacagc

SEQ ID NO: 3696869 - DNA, 25 bp, Homo sapien
agccctctgatttcctcgggtacct

SEQ ID NO: 3696870 - DNA, 25 bp, Homo sapien
ctctgatttcctcgggtacctttct

SEQ ID NO: 3696871 - DNA, 25 bp, Homo sapien
ccctgcttggagtcaccccgtgact

SEQ ID NO: 3696872 - DNA, 25 bp, Homo sapien
ctgcttggagtcaccccgtgacttc

SEQ ID NO: 3696873 - DNA, 25 bp, Homo sapien
gggccctgcttggagtcaccccgtg

SEQ ID NO: 3696874 - DNA, 25 bp, Homo sapien
ggccctgcttggagtcaccccgtga

SEQ ID NO: 3696875 - DNA, 25 bp, Homo sapien
taaaatcctgacctttgccctctgt

SEQ ID NO: 3696876 - DNA, 25 bp, Homo sapien
gacctttgccctctgtgctttacca

SEQ ID NO: 3696877 - DNA, 25 bp, Homo sapien
caaataggtaactcttaaaatcctg

SEQ ID NO: 3696878 - DNA, 25 bp, Homo sapien
tggccggtccagttccaaataggta

SEQ ID NO: 3696879 - DNA, 25 bp, Homo sapien
ttaggtgcaggtccaccaaggacat

SEQ ID NO: 3696880 - DNA, 25 bp, Homo sapien
cttaggtgcaggtccaccaaggaca

SEQ ID NO: 3696881 - DNA, 25 bp, Homo sapien
acttaggtgcaggtccaccaaggac

SEQ ID NO: 3696882 - DNA, 25 bp, Homo sapien
gctctttctgccataatgaccagca

SEQ ID NO: 3696883 - DNA, 25 bp, Homo sapien
tttcttccatcaagtgctctttctg

SEQ ID NO: 3696884 - DNA, 25 bp, Homo sapien
agtgctctttctgccataatgacca

SEQ ID NO: 3696885 - DNA, 25 bp, Homo sapien
tgtctttcttccatcaagtgctctt

SEQ ID NO: 3696886 - DNA, 25 bp, Homo sapien
tcagaagaagtgagttgcaccaagg

SEQ ID NO: 3696887 - DNA, 25 bp, Homo sapien
gggcatgcagatagtaggcattcag

SEQ ID NO: 3696888 - DNA, 25 bp, Homo sapien
gaagtgagttgcaccaaggctctgc

SEQ ID NO: 3696889 - DNA, 25 bp, Homo sapien
ggctctgctggatttatacaagaac

SEQ ID NO: 3696890 - DNA, 25 bp, Homo sapien
gtaagccccagaggtccagacattt

SEQ ID NO: 3696891 - DNA, 25 bp, Homo sapien
tactattaccgggagctgcttctgt

SEQ ID NO: 3696892 - DNA, 25 bp, Homo sapien
tcgagggcccggaagctgttactat

SEQ ID NO: 3696893 - DNA, 25 bp, Homo sapien
tcacatgtcacaaatcagaagaggg

SEQ ID NO: 3696894 - DNA, 25 bp, Homo sapien
ctgcagattttcaaccaagcgtgtc

SEQ ID NO: 3696895 - DNA, 25 bp, Homo sapien
tgcagattttcaaccaagcgtgtcc

SEQ ID NO: 3696896 - DNA, 25 bp, Homo sapien
ccaagcgtgtcccagagagggacat

SEQ ID NO: 3696897 - DNA, 25 bp, Homo sapien
accaagcgtgtcccagagagggaca

SEQ ID NO: 3696898 - DNA, 25 bp, Homo sapien
cttttgtttggctttcccagagctt

SEQ ID NO: 3696899 - DNA, 25 bp, Homo sapien
gtccctgaatctgcagcccaaaatg

SEQ ID NO: 3696900 - DNA, 25 bp, Homo sapien
cttggggaacatctcctcagtgccc

SEQ ID NO: 3696901 - DNA, 25 bp, Homo sapien
tggcccagtgccgagccttgagctc

SEQ ID NO: 3696902 - DNA, 25 bp, Homo sapien
ccctgaatctgcagcccaaaatgct

SEQ ID NO: 3696903 - DNA, 25 bp, Homo sapien
gaatagttaccgagcagtgagggaa

SEQ ID NO: 3696904 - DNA, 25 bp, Homo sapien
cggaagctgacaaacaagccagggt

SEQ ID NO: 3696905 - DNA, 25 bp, Homo sapien
gttctctttcaagcccctataggga

SEQ ID NO: 3696906 - DNA, 25 bp, Homo sapien
tcaagtgctaaccatgaccagtggg

SEQ ID NO: 3696907 - DNA, 25 bp, Homo sapien
ctgggcaaagctcctcttggccttt

SEQ ID NO: 3696908 - DNA, 25 bp, Homo sapien
tggcccggttccccagagcactgag

SEQ ID NO: 3696909 - DNA, 25 bp, Homo sapien
gtggagctgatggcccggttcccca

SEQ ID NO: 3696910 - DNA, 25 bp, Homo sapien
tgggcaaagctcctcttggcctttc

SEQ ID NO: 3696911 - DNA, 25 bp, Homo sapien
aaagtgttgggcttatgatggcctg

SEQ ID NO: 3696912 - DNA, 25 bp, Homo sapien
ggtgtttgaggtccagcccatattt

SEQ ID NO: 3696913 - DNA, 25 bp, Homo sapien
ttgggcttatgatggcctggcagat

SEQ ID NO: 3696914 - DNA, 25 bp, Homo sapien
atggtgtttgaggtccagcccatat

SEQ ID NO: 3696915 - DNA, 25 bp, Homo sapien
gtgctgagccgaagactatttgtcc

SEQ ID NO: 3696916 - DNA, 25 bp, Homo sapien
caactgcgtggatgtcgatgtggtc

SEQ ID NO: 3696917 - DNA, 25 bp, Homo sapien
gctggagccagaccgattgatttcc

SEQ ID NO: 3696918 - DNA, 25 bp, Homo sapien
tcttggctcctagtttcgacagctg

SEQ ID NO: 3696919 - DNA, 25 bp, Homo sapien
tatgtacagtgcgcatcacagtttt

SEQ ID NO: 3696920 - DNA, 25 bp, Homo sapien
atgtacagtgcgcatcacagttttc

SEQ ID NO: 3696921 - DNA, 25 bp, Homo sapien
tgtacagtgcgcatcacagttttcc

SEQ ID NO: 3696922 - DNA, 25 bp, Homo sapien
gtatgtacagtgcgcatcacagttt

SEQ ID NO: 3696923 - DNA, 25 bp, Homo sapien
ccaccaaatatctgtccaagtgatc

SEQ ID NO: 3696924 - DNA, 25 bp, Homo sapien
tcatggagttactgaaggaaccaag

SEQ ID NO: 3696925 - DNA, 25 bp, Homo sapien
gacaagttacgctgagagttgaaaa

SEQ ID NO: 3696926 - DNA, 25 bp, Homo sapien
tagacagctgtgtattctgtgatga

SEQ ID NO: 3696927 - DNA, 25 bp, Homo sapien
tggttccatcgttaatagacagctg

SEQ ID NO: 3696928 - DNA, 25 bp, Homo sapien
gctgctgctctttgataatctattc

SEQ ID NO: 3696929 - DNA, 25 bp, Homo sapien
ccttagcattgccacctttttcata

SEQ ID NO: 3696930 - DNA, 25 bp, Homo sapien
ctattcccttagcattgccaccttt

SEQ ID NO: 3696931 - DNA, 25 bp, Homo sapien
gcattgccacctttttcataaaata

SEQ ID NO: 3696932 - DNA, 25 bp, Homo sapien
tagcattgccacctttttcataaaa

SEQ ID NO: 3696933 - DNA, 25 bp, Homo sapien
tggcagtccgtgtttgtagggaggc

SEQ ID NO: 3696934 - DNA, 25 bp, Homo sapien
gcaaggtggcagtccgtgtttgtag

SEQ ID NO: 3696935 - DNA, 25 bp, Homo sapien
aggtggcagtccgtgtttgtaggga

SEQ ID NO: 3696936 - DNA, 25 bp, Homo sapien
caaggtggcagtccgtgtttgtagg

SEQ ID NO: 3696937 - DNA, 25 bp, Homo sapien
gaaccacacgactacgctgtctttg

SEQ ID NO: 3696938 - DNA, 25 bp, Homo sapien
accagcacatccacaaggtgccgga

SEQ ID NO: 3696939 - DNA, 25 bp, Homo sapien
catccacaaggtgccggagggagca

SEQ ID NO: 3696940 - DNA, 25 bp, Homo sapien
tggttgggtgtcaggaggtaggcag

SEQ ID NO: 3696941 - DNA, 25 bp, Homo sapien
aacaggtggaattgaacaggtggaa

SEQ ID NO: 3696942 - DNA, 25 bp, Homo sapien
ggtggaattgaacaggtggaattcg

SEQ ID NO: 3696943 - DNA, 25 bp, Homo sapien
ctcagaacaggtggaattgaacagg

SEQ ID NO: 3696944 - DNA, 25 bp, Homo sapien
caggtggaattgaacaggtggaatt

SEQ ID NO: 3696945 - DNA, 25 bp, Homo sapien
cctgcatgccttaagccgcttctcc

SEQ ID NO: 3696946 - DNA, 25 bp, Homo sapien
cccctgcatgccttaagccgcttct

SEQ ID NO: 3696947 - DNA, 25 bp, Homo sapien
ctcccctgcatgccttaagccgctt

SEQ ID NO: 3696948 - DNA, 25 bp, Homo sapien
ccctgcatgccttaagccgcttctc

SEQ ID NO: 3696949 - DNA, 25 bp, Homo sapien
ctaagcaatgtcctccaagatggct

SEQ ID NO: 3696950 - DNA, 25 bp, Homo sapien
atggctttatcaagatcaaaggcta

SEQ ID NO: 3696951 - DNA, 25 bp, Homo sapien
gctttatcaagatcaaaggctactg

SEQ ID NO: 3696952 - DNA, 25 bp, Homo sapien
tatcaagatcaaaggctactgcctg

SEQ ID NO: 3696953 - DNA, 25 bp, Homo sapien
cattttctgaatcatgaactgggag

SEQ ID NO: 3696954 - DNA, 25 bp, Homo sapien
gtgaatgtggtagaaggtcttgatt

SEQ ID NO: 3696955 - DNA, 25 bp, Homo sapien
ttctgaatcatgaactgggaggcgg

SEQ ID NO: 3696956 - DNA, 25 bp, Homo sapien
tgggaggcggagtgaatgtggtaga

SEQ ID NO: 3696957 - DNA, 25 bp, Homo sapien
ttgcgacacagttcactgagtgtat

SEQ ID NO: 3696958 - DNA, 25 bp, Homo sapien
agttcactgagtgtatatgcgagga

SEQ ID NO: 3696959 - DNA, 25 bp, Homo sapien
gcgacacagttcactgagtgtatat

SEQ ID NO: 3696960 - DNA, 25 bp, Homo sapien
cacagttcactgagtgtatatgcga

SEQ ID NO: 3696961 - DNA, 25 bp, Homo sapien
taataagtcagtccaactcgctcgg

SEQ ID NO: 3696962 - DNA, 25 bp, Homo sapien
gcctggctgcagacaaagagctgta

SEQ ID NO: 3696963 - DNA, 25 bp, Homo sapien
gccgcctccgctgatatactgttca

SEQ ID NO: 3696964 - DNA, 25 bp, Homo sapien
gagctgtaaaggaccgagtgtgccc

SEQ ID NO: 3696965 - DNA, 25 bp, Homo sapien
tctttctgtctttcttgaggtttaa

SEQ ID NO: 3696966 - DNA, 25 bp, Homo sapien
ctgtctttcttgaggtttaaggaag

SEQ ID NO: 3696967 - DNA, 25 bp, Homo sapien
ttctgtctttcttgaggtttaagga

SEQ ID NO: 3696968 - DNA, 25 bp, Homo sapien
tcttaaggttgtctttctgtctttc

SEQ ID NO: 3696969 - DNA, 25 bp, Homo sapien
cacctgtgacctgggtatgatgcca

SEQ ID NO: 3696970 - DNA, 25 bp, Homo sapien
tttcctcatgagtctgcagcagctc

SEQ ID NO: 3696971 - DNA, 25 bp, Homo sapien
gaacttctgttcacgtggcatgcct

SEQ ID NO: 3696972 - DNA, 25 bp, Homo sapien
cactgtggcagtttgatcagggcaa

SEQ ID NO: 3696973 - DNA, 25 bp, Homo sapien
tatagtttatatataatgggaaaca

SEQ ID NO: 3696974 - DNA, 25 bp, Homo sapien
aggaataaacttcctttgcttatag

SEQ ID NO: 3696975 - DNA, 25 bp, Homo sapien
tcattccagatataaaaataagcca

SEQ ID NO: 3696976 - DNA, 25 bp, Homo sapien
taaaaataagccataaaaccagcaa

SEQ ID NO: 3696977 - DNA, 25 bp, Homo sapien
attgattgcaggatggtgcggacta

SEQ ID NO: 3696978 - DNA, 25 bp, Homo sapien
atggtgcggactagagcagaagctt

SEQ ID NO: 3696979 - DNA, 25 bp, Homo sapien
ctcgcctttgcgttcgcacaggttg

SEQ ID NO: 3696980 - DNA, 25 bp, Homo sapien
cacaggttgtcctgattgattgcag

SEQ ID NO: 3696981 - DNA, 25 bp, Homo sapien
taagaaccagttctcggggcgtctc

SEQ ID NO: 3696982 - DNA, 25 bp, Homo sapien
agaaccagttctcggggcgtctcag

SEQ ID NO: 3696983 - DNA, 25 bp, Homo sapien
tctgcataataagaaccagttctcg

SEQ ID NO: 3696984 - DNA, 25 bp, Homo sapien
tgcataataagaaccagttctcggg

SEQ ID NO: 3696985 - DNA, 25 bp, Homo sapien
cacttcatcctggtgggatttcctg

SEQ ID NO: 3696986 - DNA, 25 bp, Homo sapien
ggctggcacttcatcctggtgggat

SEQ ID NO: 3696987 - DNA, 25 bp, Homo sapien
ggcacttcatcctggtgggatttcc

SEQ ID NO: 3696988 - DNA, 25 bp, Homo sapien
gagaaattgatggagctggctggtc

SEQ ID NO: 3696989 - DNA, 25 bp, Homo sapien
caaacggtatcatctggactggaaa

SEQ ID NO: 3696990 - DNA, 25 bp, Homo sapien
ggactggaaagacaaaggtcatttc

SEQ ID NO: 3696991 - DNA, 25 bp, Homo sapien
tttcagttcaaacggtatcatctgg

SEQ ID NO: 3696992 - DNA, 25 bp, Homo sapien
ctcctttcagttcaaacggtatcat

SEQ ID NO: 3696993 - DNA, 25 bp, Homo sapien
cagggttcggaggaaagagaattca

SEQ ID NO: 3696994 - DNA, 25 bp, Homo sapien
tcggaggaaagagaattcatgggcc

SEQ ID NO: 3696995 - DNA, 25 bp, Homo sapien
agcagccagggttcggaggaaagag

SEQ ID NO: 3696996 - DNA, 25 bp, Homo sapien
ggaaagagaattcatgggcctgcat

SEQ ID NO: 3696997 - DNA, 25 bp, Homo sapien
gaaagcctgtgttggtccccatcag

SEQ ID NO: 3696998 - DNA, 25 bp, Homo sapien
caaatatcatgatctctgagagata

SEQ ID NO: 3696999 - DNA, 25 bp, Homo sapien
catccttgacaaatatcatgatctc

SEQ ID NO: 3697000 - DNA, 25 bp, Homo sapien
gggcacgtgtaagcctgtgtatata

SEQ ID NO: 3697001 - DNA, 25 bp, Homo sapien
ctcctctggccagtaagctacctcc

SEQ ID NO: 3697002 - DNA, 25 bp, Homo sapien
tggccagtaagctacctcctgcctc

SEQ ID NO: 3697003 - DNA, 25 bp, Homo sapien
cctctggccagtaagctacctcctg

SEQ ID NO: 3697004 - DNA, 25 bp, Homo sapien
ctctggccagtaagctacctcctgc

SEQ ID NO: 3697005 - DNA, 25 bp, Homo sapien
aaagcatcaagtcccacaatgtggg

SEQ ID NO: 3697006 - DNA, 25 bp, Homo sapien
cctgccgtgaccaccaccagtattg

SEQ ID NO: 3697007 - DNA, 25 bp, Homo sapien
tgtgaaagcatcaagtcccacaatg

SEQ ID NO: 3697008 - DNA, 25 bp, Homo sapien
agtattgtgaaagcatcaagtccca

SEQ ID NO: 3697009 - DNA, 25 bp, Homo sapien
tgagcaagttgtgggagaagggcaa

SEQ ID NO: 3697010 - DNA, 25 bp, Homo sapien
ctgagcaagttgtgggagaagggca

SEQ ID NO: 3697011 - DNA, 25 bp, Homo sapien
agttgtgggagaagggcaaagatgg

SEQ ID NO: 3697012 - DNA, 25 bp, Homo sapien
gcaagttgtgggagaagggcaaaga

SEQ ID NO: 3697013 - DNA, 25 bp, Homo sapien
caccagtcttatttgcaggtccacc

SEQ ID NO: 3697014 - DNA, 25 bp, Homo sapien
catcttggatgtgcaccagtcttat

SEQ ID NO: 3697015 - DNA, 25 bp, Homo sapien
ttggatgtgcaccagtcttatttgc

SEQ ID NO: 3697016 - DNA, 25 bp, Homo sapien
tgtgcaccagtcttatttgcaggtc

SEQ ID NO: 3697017 - DNA, 25 bp, Homo sapien
gtcaaattttggtgctaatatgtac

SEQ ID NO: 3697018 - DNA, 25 bp, Homo sapien
aattttggtgctaatatgtactcag

SEQ ID NO: 3697019 - DNA, 25 bp, Homo sapien
ttggaagtcaaattttggtgctaat

SEQ ID NO: 3697020 - DNA, 25 bp, Homo sapien
gaagtcaaattttggtgctaatatg

SEQ ID NO: 3697021 - DNA, 25 bp, Homo sapien
gggagcctgatgccgaaaggtggtg

SEQ ID NO: 3697022 - DNA, 25 bp, Homo sapien
gcctgatgccgaaaggtggtgggta

SEQ ID NO: 3697023 - DNA, 25 bp, Homo sapien
gggaacagacatccggatgagctgt

SEQ ID NO: 3697024 - DNA, 25 bp, Homo sapien
ctgggaacagacatccggatgagct

SEQ ID NO: 3697025 - DNA, 25 bp, Homo sapien
caagtgtcgttccttagagcagtct

SEQ ID NO: 3697026 - DNA, 25 bp, Homo sapien
ccctggagggccagagttgagcatg

SEQ ID NO: 3697027 - DNA, 25 bp, Homo sapien
gctccaacccccttgcaagtgtcgt

SEQ ID NO: 3697028 - DNA, 25 bp, Homo sapien
gtcgttccttagagcagtctctgac

SEQ ID NO: 3697029 - DNA, 25 bp, Homo sapien
tccaactgggagcaaacctgtctcc

SEQ ID NO: 3697030 - DNA, 25 bp, Homo sapien
gatttgatattgtcgtgaatggagg

SEQ ID NO: 3697031 - DNA, 25 bp, Homo sapien
gttttcatcccccagctagtcgtct

SEQ ID NO: 3697032 - DNA, 25 bp, Homo sapien
agctagtcgtctgccctccatggcg

SEQ ID NO: 3697033 - DNA, 25 bp, Homo sapien
ggctgtccaggagacgtggggaagc

SEQ ID NO: 3697034 - DNA, 25 bp, Homo sapien
aggctgtccaggagacgtggggaag

SEQ ID NO: 3697035 - DNA, 25 bp, Homo sapien
gctgtccaggagacgtggggaagct

SEQ ID NO: 3697036 - DNA, 25 bp, Homo sapien
cactgatttgtaactctccattttc

SEQ ID NO: 3697037 - DNA, 25 bp, Homo sapien
ctcctttgcataggcacagcacact

SEQ ID NO: 3697038 - DNA, 25 bp, Homo sapien
actgtgcacggtcctttgtagcccc

SEQ ID NO: 3697039 - DNA, 25 bp, Homo sapien
gggctggtcgcccactcctttgcat

SEQ ID NO: 3697040 - DNA, 25 bp, Homo sapien
ctgaaaatccagggaggccatgcag

SEQ ID NO: 3697041 - DNA, 25 bp, Homo sapien
tcatcactctcccatcgttgtcttt

SEQ ID NO: 3697042 - DNA, 25 bp, Homo sapien
cccatcgttgtctttggcaggaccc

SEQ ID NO: 3697043 - DNA, 25 bp, Homo sapien
ggtcaggccgtgagtggttccagca

SEQ ID NO: 3697044 - DNA, 25 bp, Homo sapien
cagtatacaagcttaccctggttgt

SEQ ID NO: 3697045 - DNA, 25 bp, Homo sapien
ggccagagtccagtatacaagctta

SEQ ID NO: 3697046 - DNA, 25 bp, Homo sapien
cagagtccagtatacaagcttaccc

SEQ ID NO: 3697047 - DNA, 25 bp, Homo sapien
gagtccagtatacaagcttaccctg

SEQ ID NO: 3697048 - DNA, 25 bp, Homo sapien
catgcagcgagtgaggccattcagg

SEQ ID NO: 3697049 - DNA, 25 bp, Homo sapien
cacatgcagcgagtgaggccattca

SEQ ID NO: 3697050 - DNA, 25 bp, Homo sapien
agggagggcatgggcgagaggctga

SEQ ID NO: 3697051 - DNA, 25 bp, Homo sapien
gccacatgcagcgagtgaggccatt

SEQ ID NO: 3697052 - DNA, 25 bp, Homo sapien
gcctttccgtgggaaatcaggctgc

SEQ ID NO: 3697053 - DNA, 25 bp, Homo sapien
tgacctggtttgccgagtcgggctg

SEQ ID NO: 3697054 - DNA, 25 bp, Homo sapien
cagaactgtaaacatggggcctttc

SEQ ID NO: 3697055 - DNA, 25 bp, Homo sapien
cctggtttgccgagtcgggctgaga

SEQ ID NO: 3697056 - DNA, 25 bp, Homo sapien
tgtgtctcatgcaactcagcttggc

SEQ ID NO: 3697057 - DNA, 25 bp, Homo sapien
gcaactcagcttggcttgctttggg

SEQ ID NO: 3697058 - DNA, 25 bp, Homo sapien
tcatgcaactcagcttggcttgctt

SEQ ID NO: 3697059 - DNA, 25 bp, Homo sapien
gtctcatgcaactcagcttggcttg

SEQ ID NO: 3697060 - DNA, 25 bp, Homo sapien
gatttgtccatgaccctgattcctg

SEQ ID NO: 3697061 - DNA, 25 bp, Homo sapien
aacatgcccaaaccgcctggtagct

SEQ ID NO: 3697062 - DNA, 25 bp, Homo sapien
tgctgtcccaatcggcctgcaagat

SEQ ID NO: 3697063 - DNA, 25 bp, Homo sapien
cctggtagctatcacctggccttgt

SEQ ID NO: 3697064 - DNA, 25 bp, Homo sapien
tgcttactcgagtgaccagatgact

SEQ ID NO: 3697065 - DNA, 25 bp, Homo sapien
gagtgggctcttacctggactggac

SEQ ID NO: 3697066 - DNA, 25 bp, Homo sapien
caagagtttgttcagctcaggaaaa

SEQ ID NO: 3697067 - DNA, 25 bp, Homo sapien
agtggcatcccagccaaaccggtgg

SEQ ID NO: 3697068 - DNA, 25 bp, Homo sapien
aagcaatcggcaggtctccagtgag

SEQ ID NO: 3697069 - DNA, 25 bp, Homo sapien
gaaagcaatcggcaggtctccagtg

SEQ ID NO: 3697070 - DNA, 25 bp, Homo sapien
tccagtgagaagtatccgggaaaaa

SEQ ID NO: 3697071 - DNA, 25 bp, Homo sapien
gtatccgggaaaaatgctgtgagtt

SEQ ID NO: 3697072 - DNA, 25 bp, Homo sapien
caacagcattgggagaccaatgacc

SEQ ID NO: 3697073 - DNA, 25 bp, Homo sapien
ttgggagaccaatgaccacctccag

SEQ ID NO: 3697074 - DNA, 25 bp, Homo sapien
agttcccgaatcaggccatcagccc

SEQ ID NO: 3697075 - DNA, 25 bp, Homo sapien
gcacccattctttcaacagcattgg

SEQ ID NO: 3697076 - DNA, 25 bp, Homo sapien
tgggacttggtccagaacctggctt

SEQ ID NO: 3697077 - DNA, 25 bp, Homo sapien
tcctgggacttggtccagaacctgg

SEQ ID NO: 3697078 - DNA, 25 bp, Homo sapien
gggacttggtccagaacctggctta

SEQ ID NO: 3697079 - DNA, 25 bp, Homo sapien
ctgggacttggtccagaacctggct

SEQ ID NO: 3697080 - DNA, 25 bp, Homo sapien
gttgttgttaagtgactgtcctcag

SEQ ID NO: 3697081 - DNA, 25 bp, Homo sapien
ggctatatagtcatacacacctgtt

SEQ ID NO: 3697082 - DNA, 25 bp, Homo sapien
ctcggagtttgaaggctatatagtc

SEQ ID NO: 3697083 - DNA, 25 bp, Homo sapien
ttctttcatcatagccttctcggag

SEQ ID NO: 3697084 - DNA, 25 bp, Homo sapien
ggcatctagaaagaaagggacctct

SEQ ID NO: 3697085 - DNA, 25 bp, Homo sapien
gacctctaataagacacatgctgcc

SEQ ID NO: 3697086 - DNA, 25 bp, Homo sapien
tggtcccccagcaaatcgacagcat

SEQ ID NO: 3697087 - DNA, 25 bp, Homo sapien
agaaagggacctctaataagacaca

SEQ ID NO: 3697088 - DNA, 25 bp, Homo sapien
cattatgcaaatgccggccaggagc

SEQ ID NO: 3697089 - DNA, 25 bp, Homo sapien
cagacattatgcaaatgccggccag

SEQ ID NO: 3697090 - DNA, 25 bp, Homo sapien
aatcgcctattgaccgggcacctgt

SEQ ID NO: 3697091 - DNA, 25 bp, Homo sapien
cctgccccagacattatgcaaatgc

SEQ ID NO: 3697092 - DNA, 25 bp, Homo sapien
tggatgggtggaccagtctgctcac

SEQ ID NO: 3697093 - DNA, 25 bp, Homo sapien
cctttggcctcagacaaagcgggca

SEQ ID NO: 3697094 - DNA, 25 bp, Homo sapien
gcagatttcgctgtggcatacccag

SEQ ID NO: 3697095 - DNA, 25 bp, Homo sapien
gagaagccgcagagtttcattctaa

SEQ ID NO: 3697096 - DNA, 25 bp, Homo sapien
gatctttacgtccaggtaatgtgtc

SEQ ID NO: 3697097 - DNA, 25 bp, Homo sapien
ttgatctttacgtccaggtaatgtg

SEQ ID NO: 3697098 - DNA, 25 bp, Homo sapien
attgttgatctttacgtccaggtaa

SEQ ID NO: 3697099 - DNA, 25 bp, Homo sapien
tgttgatctttacgtccaggtaatg

SEQ ID NO: 3697100 - DNA, 25 bp, Homo sapien
gttggggtagatttctggttccgca

SEQ ID NO: 3697101 - DNA, 25 bp, Homo sapien
ggttccgcagctgcctttatggtca

SEQ ID NO: 3697102 - DNA, 25 bp, Homo sapien
gctggatgggccggttgtttaacac

SEQ ID NO: 3697103 - DNA, 25 bp, Homo sapien
tggatgggccggttgtttaacacgc

SEQ ID NO: 3697104 - DNA, 25 bp, Homo sapien
agcggagatcggctatttcgggagt

SEQ ID NO: 3697105 - DNA, 25 bp, Homo sapien
ctgcaaagcggagatcggctatttc

SEQ ID NO: 3697106 - DNA, 25 bp, Homo sapien
gcggagatcggctatttcgggagtg

SEQ ID NO: 3697107 - DNA, 25 bp, Homo sapien
caaagcggagatcggctatttcggg

SEQ ID NO: 3697108 - DNA, 25 bp, Homo sapien
attgagtttgcttctcgcagcagaa

SEQ ID NO: 3697109 - DNA, 25 bp, Homo sapien
cgcagcagaatttgatttagggcca

SEQ ID NO: 3697110 - DNA, 25 bp, Homo sapien
acttgggagagagaagattgagttt

SEQ ID NO: 3697111 - DNA, 25 bp, Homo sapien
cccaatttattgccaatctcataaa

SEQ ID NO: 3697112 - DNA, 25 bp, Homo sapien
cagtatctggcaggcgtatggctct

SEQ ID NO: 3697113 - DNA, 25 bp, Homo sapien
actgcatttgaggtgccatccaggg

SEQ ID NO: 3697114 - DNA, 25 bp, Homo sapien
tgccatccagggggcagtatctggc

SEQ ID NO: 3697115 - DNA, 25 bp, Homo sapien
ccatggatggggcttactgcatttg

SEQ ID NO: 3697116 - DNA, 25 bp, Homo sapien
tcagtagtgataaggcagcagcaaa

SEQ ID NO: 3697117 - DNA, 25 bp, Homo sapien
cagtagtgataaggcagcagcaaac

SEQ ID NO: 3697118 - DNA, 25 bp, Homo sapien
ctgcctgaatccatcctttgcctgg

SEQ ID NO: 3697119 - DNA, 25 bp, Homo sapien
gaatccatcctttgcctggctggtg

SEQ ID NO: 3697120 - DNA, 25 bp, Homo sapien
ttctctgcctgaatccatcctttgc

SEQ ID NO: 3697121 - DNA, 25 bp, Homo sapien
ggctggtgtgcacactcccctgcag

SEQ ID NO: 3697122 - DNA, 25 bp, Homo sapien
tgcagtccacccaatgctcatgcca

SEQ ID NO: 3697123 - DNA, 25 bp, Homo sapien
caatgctcatgccatgcacttcttc

SEQ ID NO: 3697124 - DNA, 25 bp, Homo sapien
cttgggtgcaggctcaactctgtgt

SEQ ID NO: 3697125 - DNA, 25 bp, Homo sapien
caggcaggccggagttgaccagcct

SEQ ID NO: 3697126 - DNA, 25 bp, Homo sapien
cctccagtcttgcctgcccagatcc

SEQ ID NO: 3697127 - DNA, 25 bp, Homo sapien
ctccagtcttgcctgcccagatccc

SEQ ID NO: 3697128 - DNA, 25 bp, Homo sapien
ttcttgtcaggcctccagtcttgcc

SEQ ID NO: 3697129 - DNA, 25 bp, Homo sapien
cttcttgtcaggcctccagtcttgc

SEQ ID NO: 3697130 - DNA, 25 bp, Homo sapien
gggctcgtgtgatgagatgaaactg

SEQ ID NO: 3697131 - DNA, 25 bp, Homo sapien
taagtctgtggttccatcgaggtgg

SEQ ID NO: 3697132 - DNA, 25 bp, Homo sapien
gaaactggacagatgtgtggattga

SEQ ID NO: 3697133 - DNA, 25 bp, Homo sapien
cacattggggtggactttgaagagc

SEQ ID NO: 3697134 - DNA, 25 bp, Homo sapien
agggagtcgatggaacatcagcagc

SEQ ID NO: 3697135 - DNA, 25 bp, Homo sapien
ggagtcgatggaacatcagcagcat

SEQ ID NO: 3697136 - DNA, 25 bp, Homo sapien
agagggagtcgatggaacatcagca

SEQ ID NO: 3697137 - DNA, 25 bp, Homo sapien
ccgagagggagtcgatggaacatca

SEQ ID NO: 3697138 - DNA, 25 bp, Homo sapien
ctctttggacacatcggtctgtgtt

SEQ ID NO: 3697139 - DNA, 25 bp, Homo sapien
cagatacctggtggtgcctttcacc

SEQ ID NO: 3697140 - DNA, 25 bp, Homo sapien
tgttcagcttgtggtgaacatgggt

SEQ ID NO: 3697141 - DNA, 25 bp, Homo sapien
gaatcccaaacggaggatgcgttct

SEQ ID NO: 3697142 - DNA, 25 bp, Homo sapien
tctttccatcttcaaacgcttgatc

SEQ ID NO: 3697143 - DNA, 25 bp, Homo sapien
tttgtacaatatctaggtgaccttc

SEQ ID NO: 3697144 - DNA, 25 bp, Homo sapien
gacctcgtctcctgattttgtacaa

SEQ ID NO: 3697145 - DNA, 25 bp, Homo sapien
caaacgcttgatcattgatgctccc

SEQ ID NO: 3697146 - DNA, 25 bp, Homo sapien
tggtgcatacaggtagtgcccgagc

SEQ ID NO: 3697147 - DNA, 25 bp, Homo sapien
ggcagagggacacatcagctcttct

SEQ ID NO: 3697148 - DNA, 25 bp, Homo sapien
tggcagagggacacatcagctcttc

SEQ ID NO: 3697149 - DNA, 25 bp, Homo sapien
gtagtgcccgagctcttctcccagt

SEQ ID NO: 3697150 - DNA, 25 bp, Homo sapien
gcccgtgcccctggcataacgagcc

SEQ ID NO: 3697151 - DNA, 25 bp, Homo sapien
agcccgtgcccctggcataacgagc

SEQ ID NO: 3697152 - DNA, 25 bp, Homo sapien
ccgtgcccctggcataacgagccat

SEQ ID NO: 3697153 - DNA, 25 bp, Homo sapien
gagcccgtgcccctggcataacgag

SEQ ID NO: 3697154 - DNA, 25 bp, Homo sapien
cttctgtaaactttgggtccatgca

SEQ ID NO: 3697155 - DNA, 25 bp, Homo sapien
tctgtaaactttgggtccatgcaac

SEQ ID NO: 3697156 - DNA, 25 bp, Homo sapien
tcttctgtaaactttgggtccatgc

SEQ ID NO: 3697157 - DNA, 25 bp, Homo sapien
ttctgtaaactttgggtccatgcaa

SEQ ID NO: 3697158 - DNA, 25 bp, Homo sapien
tacaaggattttccaaaatagccat

SEQ ID NO: 3697159 - DNA, 25 bp, Homo sapien
ctacaaggattttccaaaatagcca

SEQ ID NO: 3697160 - DNA, 25 bp, Homo sapien
tgaaatcactgctggatcgcattct

SEQ ID NO: 3697161 - DNA, 25 bp, Homo sapien
taccttctttgtcacactgagccat

SEQ ID NO: 3697162 - DNA, 25 bp, Homo sapien
gatacgtgacaaatcaattcattta

SEQ ID NO: 3697163 - DNA, 25 bp, Homo sapien
atgataccttctttgtcacactgag

SEQ ID NO: 3697164 - DNA, 25 bp, Homo sapien
ggtgacttcaggtgggctaccatac

SEQ ID NO: 3697165 - DNA, 25 bp, Homo sapien
gctaccatactttctagggagccag

SEQ ID NO: 3697166 - DNA, 25 bp, Homo sapien
caggaacccctttgaggagtgtgga

SEQ ID NO: 3697167 - DNA, 25 bp, Homo sapien
tccctagcggctggcacaggttctt

SEQ ID NO: 3697168 - DNA, 25 bp, Homo sapien
tggaagctctgggtctgtgggagtg

SEQ ID NO: 3697169 - DNA, 25 bp, Homo sapien
ttgtggaagctctgggtctgtggga

SEQ ID NO: 3697170 - DNA, 25 bp, Homo sapien
ggagagcgcagtgagtaggcactgc

SEQ ID NO: 3697171 - DNA, 25 bp, Homo sapien
gctctgggtctgtgggagtgatgcc

SEQ ID NO: 3697172 - DNA, 25 bp, Homo sapien
tgctgagggcttccttagtgttccc

SEQ ID NO: 3697173 - DNA, 25 bp, Homo sapien
cacatgtacttgccccttgccaggg

SEQ ID NO: 3697174 - DNA, 25 bp, Homo sapien
catgctgagggcttccttagtgttc

SEQ ID NO: 3697175 - DNA, 25 bp, Homo sapien
gctcatgctgagggcttccttagtg

SEQ ID NO: 3697176 - DNA, 25 bp, Homo sapien
actgtgagtgttagcgtctgtggcc

SEQ ID NO: 3697177 - DNA, 25 bp, Homo sapien
gacactgtgagtgttagcgtctgtg

SEQ ID NO: 3697178 - DNA, 25 bp, Homo sapien
gtagacactgtgagtgttagcgtct

SEQ ID NO: 3697179 - DNA, 25 bp, Homo sapien
tgtgagtgttagcgtctgtggccat

SEQ ID NO: 3697180 - DNA, 25 bp, Homo sapien
aaggttgtatgttcaaggcacactc

SEQ ID NO: 3697181 - DNA, 25 bp, Homo sapien
agggcatattaggagaagggtctac

SEQ ID NO: 3697182 - DNA, 25 bp, Homo sapien
ctagcctgggcggtgggaacaagca

SEQ ID NO: 3697183 - DNA, 25 bp, Homo sapien
tcaagcactttcaggggtggtggtc

SEQ ID NO: 3697184 - DNA, 25 bp, Homo sapien
tatgatgatgtaagttcaccaggaa

SEQ ID NO: 3697185 - DNA, 25 bp, Homo sapien
ttatgatgatgtaagttcaccagga

SEQ ID NO: 3697186 - DNA, 25 bp, Homo sapien
atgatgtaagttcaccaggaagagg

SEQ ID NO: 3697187 - DNA, 25 bp, Homo sapien
tgatgatgtaagttcaccaggaaga

SEQ ID NO: 3697188 - DNA, 25 bp, Homo sapien
ggcaaaaagtagaccttatcaacca

SEQ ID NO: 3697189 - DNA, 25 bp, Homo sapien
tggcaaaaagtagaccttatcaacc

SEQ ID NO: 3697190 - DNA, 25 bp, Homo sapien
caaaaagtagaccttatcaaccaat

SEQ ID NO: 3697191 - DNA, 25 bp, Homo sapien
gcaaaaagtagaccttatcaaccaa

SEQ ID NO: 3697192 - DNA, 25 bp, Homo sapien
tctggggggttttgcagtttccaga

SEQ ID NO: 3697193 - DNA, 25 bp, Homo sapien
acaaatatgttcactgggcttccag

SEQ ID NO: 3697194 - DNA, 25 bp, Homo sapien
aggaagtgcctcaccctctgagctc

SEQ ID NO: 3697195 - DNA, 25 bp, Homo sapien
tttccagaagaggggcacaaatatg

SEQ ID NO: 3697196 - DNA, 25 bp, Homo sapien
tcagtgcagttttctgtggcccacc

SEQ ID NO: 3697197 - DNA, 25 bp, Homo sapien
gcactcccagttgcctgtacttcta

SEQ ID NO: 3697198 - DNA, 25 bp, Homo sapien
tgtacttctacgatggcctttttgc

SEQ ID NO: 3697199 - DNA, 25 bp, Homo sapien
cggagacccgtggtgatctggcata

SEQ ID NO: 3697200 - DNA, 25 bp, Homo sapien
ctccagaggagcaagtacatgcggc

SEQ ID NO: 3697201 - DNA, 25 bp, Homo sapien
atgaggaagtctgggacaagcgacc

SEQ ID NO: 3697202 - DNA, 25 bp, Homo sapien
aagtacatgcggcactgatgaggaa

SEQ ID NO: 3697203 - DNA, 25 bp, Homo sapien
gcactgatgaggaagtctgggacaa

SEQ ID NO: 3697204 - DNA, 25 bp, Homo sapien
gaattaagcttgcagaacggtggct

SEQ ID NO: 3697205 - DNA, 25 bp, Homo sapien
ctgagaaacctccgaaggtaggaat

SEQ ID NO: 3697206 - DNA, 25 bp, Homo sapien
cttgcagaacggtggctgcagccac

SEQ ID NO: 3697207 - DNA, 25 bp, Homo sapien
cactcccagcaatccacagcattgc

SEQ ID NO: 3697208 - DNA, 25 bp, Homo sapien
ggtgtggcagtgactccgcgctcca

SEQ ID NO: 3697209 - DNA, 25 bp, Homo sapien
tttgcaggctgccaccgtgtcggag

SEQ ID NO: 3697210 - DNA, 25 bp, Homo sapien
gcggagcccgcttcggattccaggt

SEQ ID NO: 3697211 - DNA, 25 bp, Homo sapien
agcccgcttcggattccaggtgtgg

SEQ ID NO: 3697212 - DNA, 25 bp, Homo sapien
cacccctgattttcggcacccccag

SEQ ID NO: 3697213 - DNA, 25 bp, Homo sapien
ccccagtcccaatcataattggcgc

SEQ ID NO: 3697214 - DNA, 25 bp, Homo sapien
gtcccaatcataattggcgcccgcg

SEQ ID NO: 3697215 - DNA, 25 bp, Homo sapien
ccaatcataattggcgcccgcgcag

SEQ ID NO: 3697216 - DNA, 25 bp, Homo sapien
tggtaactggacctccaaagccttc

SEQ ID NO: 3697217 - DNA, 25 bp, Homo sapien
tggaattgttcctacagcccgggga

SEQ ID NO: 3697218 - DNA, 25 bp, Homo sapien
gcgagttggtaactggacctccaaa

SEQ ID NO: 3697219 - DNA, 25 bp, Homo sapien
gtaagcgagttggtaactggacctc

SEQ ID NO: 3697220 - DNA, 25 bp, Homo sapien
gcctggagtgcactcgtggccccgg

SEQ ID NO: 3697221 - DNA, 25 bp, Homo sapien
cccgcgctggcacgcccccgcctgg

SEQ ID NO: 3697222 - DNA, 25 bp, Homo sapien
cccgcctggagtgcactcgtggccc

SEQ ID NO: 3697223 - DNA, 25 bp, Homo sapien
gagtgcactcgtggccccgggcgct

SEQ ID NO: 3697224 - DNA, 25 bp, Homo sapien
ccgccgccgctcgcttttttaatgt

SEQ ID NO: 3697225 - DNA, 25 bp, Homo sapien
cgccgccgctcgcttttttaatgtc

SEQ ID NO: 3697226 - DNA, 25 bp, Homo sapien
gccgccgctcgcttttttaatgtcc

SEQ ID NO: 3697227 - DNA, 25 bp, Homo sapien
ggcgttgctcgctcgctcggccgcc

SEQ ID NO: 3697228 - DNA, 25 bp, Homo sapien
cgctcgctcggccgcccgatcgctg

SEQ ID NO: 3697229 - DNA, 25 bp, Homo sapien
gccggcgttgctcgctcgctcggcc

SEQ ID NO: 3697230 - DNA, 25 bp, Homo sapien
gcgccggcgttgctcgctcgctcgg

SEQ ID NO: 3697231 - DNA, 25 bp, Homo sapien
agggcgccgagatccgctcggctcc

SEQ ID NO: 3697232 - DNA, 25 bp, Homo sapien
gggcgccgagatccgctcggctccg

SEQ ID NO: 3697233 - DNA, 25 bp, Homo sapien
ccgccgctggaggacgcgccgccgc

SEQ ID NO: 3697234 - DNA, 25 bp, Homo sapien
cgccgagatccgctcggctccggct

SEQ ID NO: 3697235 - DNA, 25 bp, Homo sapien
cccggtcaggcaagggtaccaagca

SEQ ID NO: 3697236 - DNA, 25 bp, Homo sapien
ctgggagcggccctcgctctgtgac

SEQ ID NO: 3697237 - DNA, 25 bp, Homo sapien
gcacccttggcccacctgggagcgg

SEQ ID NO: 3697238 - DNA, 25 bp, Homo sapien
gggctccgggcaccgaagcagggac

SEQ ID NO: 3697239 - DNA, 25 bp, Homo sapien
gcaagctctggctgtaagacactgt

SEQ ID NO: 3697240 - DNA, 25 bp, Homo sapien
ctgggcagtcaaggcaggatttgtg

SEQ ID NO: 3697241 - DNA, 25 bp, Homo sapien
aaagggacacagctactgggggcat

SEQ ID NO: 3697242 - DNA, 25 bp, Homo sapien
aagacactgtgccaaaagaaaggga

SEQ ID NO: 3697243 - DNA, 25 bp, Homo sapien
ccagcggcggtcaaggtccaccggg

SEQ ID NO: 3697244 - DNA, 25 bp, Homo sapien
actgtgcttcccagcggcggtcaag

SEQ ID NO: 3697245 - DNA, 25 bp, Homo sapien
cctgctgatccttggctaggtcgct

SEQ ID NO: 3697246 - DNA, 25 bp, Homo sapien
gctaggtcgctgagtggttagagct

SEQ ID NO: 3697247 - DNA, 25 bp, Homo sapien
tcttgggttgatcccgtgtggccaa

SEQ ID NO: 3697248 - DNA, 25 bp, Homo sapien
ttccatagtaaccaactactgctcc

SEQ ID NO: 3697249 - DNA, 25 bp, Homo sapien
caactactgctccaggaatacactg

SEQ ID NO: 3697250 - DNA, 25 bp, Homo sapien
caagttcaggaagttgcaacacttc

SEQ ID NO: 3697251 - DNA, 25 bp, Homo sapien
ccggctcgcttgtgccgaggaagcc

SEQ ID NO: 3697252 - DNA, 25 bp, Homo sapien
tcgcttgtgccgaggaagccaggtc

SEQ ID NO: 3697253 - DNA, 25 bp, Homo sapien
ctcgcttgtgccgaggaagccaggt

SEQ ID NO: 3697254 - DNA, 25 bp, Homo sapien
tgtgccgaggaagccaggtcggagg

SEQ ID NO: 3697255 - DNA, 25 bp, Homo sapien
gcagggacaacggacagatacatct

SEQ ID NO: 3697256 - DNA, 25 bp, Homo sapien
gcagtacccatttcatggccaagga

SEQ ID NO: 3697257 - DNA, 25 bp, Homo sapien
tagaaagccaaagtaaccgacagtg

SEQ ID NO: 3697258 - DNA, 25 bp, Homo sapien
cagtgtgcgagaaggtttgaaccca

SEQ ID NO: 3697259 - DNA, 25 bp, Homo sapien
gagagtcagagctcctgtagccagc

SEQ ID NO: 3697260 - DNA, 25 bp, Homo sapien
ggctctgcacaagggttattgccaa

SEQ ID NO: 3697261 - DNA, 25 bp, Homo sapien
tgatagcgttctgccctcaaaacag

SEQ ID NO: 3697262 - DNA, 25 bp, Homo sapien
ggcggtcttctaactatcggtatca

SEQ ID NO: 3697263 - DNA, 25 bp, Homo sapien
gggtctgcacgatgtgtccagatga

SEQ ID NO: 3697264 - DNA, 25 bp, Homo sapien
tgaagattaaccgggagccacacgg

SEQ ID NO: 3697265 - DNA, 25 bp, Homo sapien
tccaagcccaaggtaatagatcagg

SEQ ID NO: 3697266 - DNA, 25 bp, Homo sapien
tagcctttgttaggtgcgttccaag

SEQ ID NO: 3697267 - DNA, 25 bp, Homo sapien
aggcttagaacaatgaagtctggcc

SEQ ID NO: 3697268 - DNA, 25 bp, Homo sapien
ggcttagaacaatgaagtctggcct

SEQ ID NO: 3697269 - DNA, 25 bp, Homo sapien
cacgtagtacacacaaggtgccttt

SEQ ID NO: 3697270 - DNA, 25 bp, Homo sapien
caaggtgcctttagcgctgctgtct

SEQ ID NO: 3697271 - DNA, 25 bp, Homo sapien
tgctgtctgctggtgcttcaaactg

SEQ ID NO: 3697272 - DNA, 25 bp, Homo sapien
ctagatggccacacgtagtacacac

SEQ ID NO: 3697273 - DNA, 25 bp, Homo sapien
ggggatctgcaggttcagcaacaga

SEQ ID NO: 3697274 - DNA, 25 bp, Homo sapien
gggatctgcaggttcagcaacagag

SEQ ID NO: 3697275 - DNA, 25 bp, Homo sapien
ggatctgcaggttcagcaacagagg

SEQ ID NO: 3697276 - DNA, 25 bp, Homo sapien
aataaacaaaggttgcagggccagg

SEQ ID NO: 3697277 - DNA, 25 bp, Homo sapien
gaagatatgcatggtgcccaccgtg

SEQ ID NO: 3697278 - DNA, 25 bp, Homo sapien
gctactagttttgagcaaggcccaa

SEQ ID NO: 3697279 - DNA, 25 bp, Homo sapien
gagttcgtcacattgcattccaggc

SEQ ID NO: 3697280 - DNA, 25 bp, Homo sapien
agagcggtcgagtcacttccctgag

SEQ ID NO: 3697281 - DNA, 25 bp, Homo sapien
gagtccttcgagataggtggtcaac

SEQ ID NO: 3697282 - DNA, 25 bp, Homo sapien
tccaggattcatcatgcttcagggc

SEQ ID NO: 3697283 - DNA, 25 bp, Homo sapien
tcaggtgcttgcaatggaccaggca

SEQ ID NO: 3697284 - DNA, 25 bp, Homo sapien
ggcttctatgcacgcggactctata

SEQ ID NO: 3697285 - DNA, 25 bp, Homo sapien
catggcttctatgcacgcggactct

SEQ ID NO: 3697286 - DNA, 25 bp, Homo sapien
ctatgcacgcggactctatactcat

SEQ ID NO: 3697287 - DNA, 25 bp, Homo sapien
tgcacatggcttctatgcacgcgga

SEQ ID NO: 3697288 - DNA, 25 bp, Homo sapien
ctcttcttcggtgggacggatggac

SEQ ID NO: 3697289 - DNA, 25 bp, Homo sapien
tcttcttcggtgggacggatggaca

SEQ ID NO: 3697290 - DNA, 25 bp, Homo sapien
gaagagacaggggtaaatgtaacca

SEQ ID NO: 3697291 - DNA, 25 bp, Homo sapien
aagacatcatgttcccctgtgggcc

SEQ ID NO: 3697292 - DNA, 25 bp, Homo sapien
ctggctcaggcaagacatcatgttc

SEQ ID NO: 3697293 - DNA, 25 bp, Homo sapien
atgttcccctgtgggccttctttca

SEQ ID NO: 3697294 - DNA, 25 bp, Homo sapien
tctgtcctctgaactggttaacaag

SEQ ID NO: 3697295 - DNA, 25 bp, Homo sapien
gaactggttaacaaggaccacagag

SEQ ID NO: 3697296 - DNA, 25 bp, Homo sapien
cctctgaactggttaacaaggacca

SEQ ID NO: 3697297 - DNA, 25 bp, Homo sapien
tggttaacaaggaccacagagattc

SEQ ID NO: 3697298 - DNA, 25 bp, Homo sapien
ctcctggaagatggaactggcccac

SEQ ID NO: 3697299 - DNA, 25 bp, Homo sapien
tcgagacactggataccgtcctgcc

SEQ ID NO: 3697300 - DNA, 25 bp, Homo sapien
tgccaaataaaggtcgcagctcctg

SEQ ID NO: 3697301 - DNA, 25 bp, Homo sapien
caccaacgtggagctactcgagaca

SEQ ID NO: 3697302 - DNA, 25 bp, Homo sapien
ccaggactcaagtctgctgagagcg

SEQ ID NO: 3697303 - DNA, 25 bp, Homo sapien
ggaccaggactcaagtctgctgaga

SEQ ID NO: 3697304 - DNA, 25 bp, Homo sapien
ctcaagtctgctgagagcgtctgga

SEQ ID NO: 3697305 - DNA, 25 bp, Homo sapien
gactcaagtctgctgagagcgtctg

SEQ ID NO: 3697306 - DNA, 25 bp, Homo sapien
ctggctccatcgtcggtcgctttat

SEQ ID NO: 3697307 - DNA, 25 bp, Homo sapien
tcgtcggtcgctttatcttgcagca

SEQ ID NO: 3697308 - DNA, 25 bp, Homo sapien
catcgtcggtcgctttatcttgcag

SEQ ID NO: 3697309 - DNA, 25 bp, Homo sapien
gctccatcgtcggtcgctttatctt

SEQ ID NO: 3697310 - DNA, 25 bp, Homo sapien
ctgctgataggagaggcatgagaga

SEQ ID NO: 3697311 - DNA, 25 bp, Homo sapien
tgctgataggagaggcatgagagag

SEQ ID NO: 3697312 - DNA, 25 bp, Homo sapien
tgtagtccaaggagcccatggctgg

SEQ ID NO: 3697313 - DNA, 25 bp, Homo sapien
gaatttgcgcaatcccggggacttg

SEQ ID NO: 3697314 - DNA, 25 bp, Homo sapien
tgctgggggaatttgcgcaatcccg

SEQ ID NO: 3697315 - DNA, 25 bp, Homo sapien
gggacttgtagtccaaggagcccat

SEQ ID NO: 3697316 - DNA, 25 bp, Homo sapien
ggaccgaggcaaacaaaacaggcac

SEQ ID NO: 3697317 - DNA, 25 bp, Homo sapien
acaggcacgacagctcagagaagag

SEQ ID NO: 3697318 - DNA, 25 bp, Homo sapien
acaaaacaggcacgacagctcagag

SEQ ID NO: 3697319 - DNA, 25 bp, Homo sapien
gggaccgaggcaaacaaaacaggca

SEQ ID NO: 3697320 - DNA, 25 bp, Homo sapien
tccaggttgggagaaagcctagcta

SEQ ID NO: 3697321 - DNA, 25 bp, Homo sapien
tgggccatgggctaagtgctccttt

SEQ ID NO: 3697322 - DNA, 25 bp, Homo sapien
catgtgtccggatagcccacagggt

SEQ ID NO: 3697323 - DNA, 25 bp, Homo sapien
tgacaacagcatacaacagtgggat

SEQ ID NO: 3697324 - DNA, 25 bp, Homo sapien
gggtatggcagctcagtgaaaaaca

SEQ ID NO: 3697325 - DNA, 25 bp, Homo sapien
tcagtgaaaaacagcggctcctctc

SEQ ID NO: 3697326 - DNA, 25 bp, Homo sapien
gcattggtccgacgccaacgggcct

SEQ ID NO: 3697327 - DNA, 25 bp, Homo sapien
tcacaccccttgcagcattggtccg

SEQ ID NO: 3697328 - DNA, 25 bp, Homo sapien
aggcactccggaatgcagcttcggg

SEQ ID NO: 3697329 - DNA, 25 bp, Homo sapien
ctcgcaggcactccggaatgcagct

SEQ ID NO: 3697330 - DNA, 25 bp, Homo sapien
gcaggcactccggaatgcagcttcg

SEQ ID NO: 3697331 - DNA, 25 bp, Homo sapien
tcgcaggcactccggaatgcagctt

SEQ ID NO: 3697332 - DNA, 25 bp, Homo sapien
caccctggaatgttgctggattcca

SEQ ID NO: 3697333 - DNA, 25 bp, Homo sapien
tgggcccaccctggaatgttgctgg

SEQ ID NO: 3697334 - DNA, 25 bp, Homo sapien
cccaccctggaatgttgctggattc

SEQ ID NO: 3697335 - DNA, 25 bp, Homo sapien
ggcccaccctggaatgttgctggat

SEQ ID NO: 3697336 - DNA, 25 bp, Homo sapien
agattaccccaatcaaacaggccct

SEQ ID NO: 3697337 - DNA, 25 bp, Homo sapien
acttgtccagattaccccaatcaaa

SEQ ID NO: 3697338 - DNA, 25 bp, Homo sapien
ggctgccagcgcaggccactgatga

SEQ ID NO: 3697339 - DNA, 25 bp, Homo sapien
ggccacgtacagacccagcttgatg

SEQ ID NO: 3697340 - DNA, 25 bp, Homo sapien
caggccagggttgggtttcgcctca

SEQ ID NO: 3697341 - DNA, 25 bp, Homo sapien
aggccagggttgggtttcgcctcat

SEQ ID NO: 3697342 - DNA, 25 bp, Homo sapien
cctaaaaggctggacccccatggtg

SEQ ID NO: 3697343 - DNA, 25 bp, Homo sapien
caggtccaggaatccccgaatattt

SEQ ID NO: 3697344 - DNA, 25 bp, Homo sapien
aggcctaaaaggctggacccccatg

SEQ ID NO: 3697345 - DNA, 25 bp, Homo sapien
tcaacagacagaacccatcctctgg

SEQ ID NO: 3697346 - DNA, 25 bp, Homo sapien
ccagcgacacggtgagattctcagg

SEQ ID NO: 3697347 - DNA, 25 bp, Homo sapien
tccagcgacacggtgagattctcag

SEQ ID NO: 3697348 - DNA, 25 bp, Homo sapien
cagcgacacggtgagattctcaggg

SEQ ID NO: 3697349 - DNA, 25 bp, Homo sapien
tcagtccagcgacacggtgagattc

SEQ ID NO: 3697350 - DNA, 25 bp, Homo sapien
actcaggagaggcttcatagacccc

SEQ ID NO: 3697351 - DNA, 25 bp, Homo sapien
taaggtgtcaagcatcctccaggtg

SEQ ID NO: 3697352 - DNA, 25 bp, Homo sapien
aagattaggcccatatgcacgtgca

SEQ ID NO: 3697353 - DNA, 25 bp, Homo sapien
gatgagtccgagaccaactcaggag

SEQ ID NO: 3697354 - DNA, 25 bp, Homo sapien
accagtgttccacacgccggtcagc

SEQ ID NO: 3697355 - DNA, 25 bp, Homo sapien
agtgatctgcaaaccaccagtgttc

SEQ ID NO: 3697356 - DNA, 25 bp, Homo sapien
ctcagtgatctgcaaaccaccagtg

SEQ ID NO: 3697357 - DNA, 25 bp, Homo sapien
gccggtcagcagcttgcggcccctc

SEQ ID NO: 3697358 - DNA, 25 bp, Homo sapien
ctcccgccagccccgtggcacacct

SEQ ID NO: 3697359 - DNA, 25 bp, Homo sapien
cccgccagccccgtggcacacctac

SEQ ID NO: 3697360 - DNA, 25 bp, Homo sapien
ctgcgtccgacccagccacctcccg

SEQ ID NO: 3697361 - DNA, 25 bp, Homo sapien
acctcccgccagccccgtggcacac

SEQ ID NO: 3697362 - DNA, 25 bp, Homo sapien
gttcgtgtccatcctggcactggtg

SEQ ID NO: 3697363 - DNA, 25 bp, Homo sapien
gaaaggtgggtcctagcacccttga

SEQ ID NO: 3697364 - DNA, 25 bp, Homo sapien
taaacagggattacacaggtcaccc

SEQ ID NO: 3697365 - DNA, 25 bp, Homo sapien
tgctctcagttgctcctcaaggtgc

SEQ ID NO: 3697366 - DNA, 25 bp, Homo sapien
cagaaatggagtggctttccccaag

SEQ ID NO: 3697367 - DNA, 25 bp, Homo sapien
caaagaatcaactcgaagctgctcc

SEQ ID NO: 3697368 - DNA, 25 bp, Homo sapien
catccgaaaagagaacccaccgtga

SEQ ID NO: 3697369 - DNA, 25 bp, Homo sapien
caaaggttaccagacaattagcagg

SEQ ID NO: 3697370 - DNA, 25 bp, Homo sapien
cactgtgcgtggatatttctggaaa

SEQ ID NO: 3697371 - DNA, 25 bp, Homo sapien
actgtgcgtggatatttctggaaag

SEQ ID NO: 3697372 - DNA, 25 bp, Homo sapien
agggcggccatgagcactcgaatgg

SEQ ID NO: 3697373 - DNA, 25 bp, Homo sapien
tcagtaagcagtgccttggtagcag

SEQ ID NO: 3697374 - DNA, 25 bp, Homo sapien
tgcaggttgtcagtaagcagtgcct

SEQ ID NO: 3697375 - DNA, 25 bp, Homo sapien
agcagtgccttggtagcaggctgaa

SEQ ID NO: 3697376 - DNA, 25 bp, Homo sapien
tctgttcacgaccaactgagtaagg

SEQ ID NO: 3697377 - DNA, 25 bp, Homo sapien
taggcactctgttcacgaccaactg

SEQ ID NO: 3697378 - DNA, 25 bp, Homo sapien
ccaactgagtaagggactgcgtggc

SEQ ID NO: 3697379 - DNA, 25 bp, Homo sapien
cacagtaggcactctgttcacgacc

SEQ ID NO: 3697380 - DNA, 25 bp, Homo sapien
tacagtaagtgttttatgtgctagc

SEQ ID NO: 3697381 - DNA, 25 bp, Homo sapien
taagtgttttatgtgctagcatccc

SEQ ID NO: 3697382 - DNA, 25 bp, Homo sapien
gttttatgtgctagcatccctcttc

SEQ ID NO: 3697383 - DNA, 25 bp, Homo sapien
tatgtgctagcatccctcttcttct

SEQ ID NO: 3697384 - DNA, 25 bp, Homo sapien
ttcatcttcatggtgctgtgggggc

SEQ ID NO: 3697385 - DNA, 25 bp, Homo sapien
caggcagcccgtttgtaggcagggc

SEQ ID NO: 3697386 - DNA, 25 bp, Homo sapien
gaagcaggcagcccgtttgtaggca

SEQ ID NO: 3697387 - DNA, 25 bp, Homo sapien
agcaggcagcccgtttgtaggcagg

SEQ ID NO: 3697388 - DNA, 25 bp, Homo sapien
agaagcaggcagcccgtttgtaggc

SEQ ID NO: 3697389 - DNA, 25 bp, Homo sapien
gcagtcacccagtcgatactcctgg

SEQ ID NO: 3697390 - DNA, 25 bp, Homo sapien
ccacagagctctctcgagaagcagg

SEQ ID NO: 3697391 - DNA, 25 bp, Homo sapien
ctctcgggggtctgcagtcacccag

SEQ ID NO: 3697392 - DNA, 25 bp, Homo sapien
gggtctgcagtcacccagtcgatac

SEQ ID NO: 3697393 - DNA, 25 bp, Homo sapien
gcagacacgtcgtgaattcccaaga

SEQ ID NO: 3697394 - DNA, 25 bp, Homo sapien
agccttggctcccttgtgctccctg

SEQ ID NO: 3697395 - DNA, 25 bp, Homo sapien
tgcgacaggcagacacgtcgtgaat

SEQ ID NO: 3697396 - DNA, 25 bp, Homo sapien
cttccttatcgaggtacttgcgaca

SEQ ID NO: 3697397 - DNA, 25 bp, Homo sapien
gatgctgccgactcaacaattttgg

SEQ ID NO: 3697398 - DNA, 25 bp, Homo sapien
taacagctaaagtgctgtggtttcc

SEQ ID NO: 3697399 - DNA, 25 bp, Homo sapien
gggcgtcttaacagctaaagtgctg

SEQ ID NO: 3697400 - DNA, 25 bp, Homo sapien
tttctatcgtttcagcaggctcagg

SEQ ID NO: 3697401 - DNA, 25 bp, Homo sapien
gcctcgaaacctcctgaaccaggtg

SEQ ID NO: 3697402 - DNA, 25 bp, Homo sapien
agagttccagcctccctgtacaggg

SEQ ID NO: 3697403 - DNA, 25 bp, Homo sapien
ttccaaggtccagtgttgtcagcaa

SEQ ID NO: 3697404 - DNA, 25 bp, Homo sapien
cggaacagagagtcacttcgaggta

SEQ ID NO: 3697405 - DNA, 25 bp, Homo sapien
tctgaatccagtatcatgtccagct

SEQ ID NO: 3697406 - DNA, 25 bp, Homo sapien
gacgtctgtgcgaagagaagccaca

SEQ ID NO: 3697407 - DNA, 25 bp, Homo sapien
gaagccacagaaagatcggaatcct

SEQ ID NO: 3697408 - DNA, 25 bp, Homo sapien
ttggatatacccaaccagccacgag

SEQ ID NO: 3697409 - DNA, 25 bp, Homo sapien
atgctggatgccaacacagatgcac

SEQ ID NO: 3697410 - DNA, 25 bp, Homo sapien
gatgcacttgagcacacacatctca

SEQ ID NO: 3697411 - DNA, 25 bp, Homo sapien
acacatctcatgacagcttgcacag

SEQ ID NO: 3697412 - DNA, 25 bp, Homo sapien
tgtgagcagtggtgtgcagaaatga

SEQ ID NO: 3697413 - DNA, 25 bp, Homo sapien
cagaggtcgcccttcgccacaagag

SEQ ID NO: 3697414 - DNA, 25 bp, Homo sapien
tcgctacaaatcctccgtggctgca

SEQ ID NO: 3697415 - DNA, 25 bp, Homo sapien
tcctttaagcctttacaagtcgcta

SEQ ID NO: 3697416 - DNA, 25 bp, Homo sapien
gccacaagagcgccactcagctggg

SEQ ID NO: 3697417 - DNA, 25 bp, Homo sapien
atcactgggctccctgcacaccggc

SEQ ID NO: 3697418 - DNA, 25 bp, Homo sapien
actgggctccctgcacaccggccac

SEQ ID NO: 3697419 - DNA, 25 bp, Homo sapien
tcactgggctccctgcacaccggcc

SEQ ID NO: 3697420 - DNA, 25 bp, Homo sapien
cactgggctccctgcacaccggcca

SEQ ID NO: 3697421 - DNA, 25 bp, Homo sapien
tctctggagtaaaagggtcaaaggc

SEQ ID NO: 3697422 - DNA, 25 bp, Homo sapien
tccagtctctggagtaaaagggtca

SEQ ID NO: 3697423 - DNA, 25 bp, Homo sapien
cagtctctggagtaaaagggtcaaa

SEQ ID NO: 3697424 - DNA, 25 bp, Homo sapien
aggagatggaggctccagtctctgg

SEQ ID NO: 3697425 - DNA, 25 bp, Homo sapien
gaaccgaggggtgagtgtctgggct

SEQ ID NO: 3697426 - DNA, 25 bp, Homo sapien
aggggtgagtgtctgggcttgcaac

SEQ ID NO: 3697427 - DNA, 25 bp, Homo sapien
gggtgagtgtctgggcttgcaacac

SEQ ID NO: 3697428 - DNA, 25 bp, Homo sapien
aggaaccgaggggtgagtgtctggg

SEQ ID NO: 3697429 - DNA, 25 bp, Homo sapien
tgtggaggttccaggtgtgcttcca

SEQ ID NO: 3697430 - DNA, 25 bp, Homo sapien
ataaaaacaaatgcccgcctgttca

SEQ ID NO: 3697431 - DNA, 25 bp, Homo sapien
ttatctatcgaaatacctgcctggg

SEQ ID NO: 3697432 - DNA, 25 bp, Homo sapien
cacttgctcatctgtacatgcttct

SEQ ID NO: 3697433 - DNA, 25 bp, Homo sapien
catgtcacaccctgaagcccaattt

SEQ ID NO: 3697434 - DNA, 25 bp, Homo sapien
ggatgtgtagctcttggtgcaattc

SEQ ID NO: 3697435 - DNA, 25 bp, Homo sapien
caggtaattcatttgcatggttcaa

SEQ ID NO: 3697436 - DNA, 25 bp, Homo sapien
caaagatatcgagtcctgggtccag

SEQ ID NO: 3697437 - DNA, 25 bp, Homo sapien
ggtgccctttctaggagaaccagtg

SEQ ID NO: 3697438 - DNA, 25 bp, Homo sapien
caccaggggataaggaactgcacat

SEQ ID NO: 3697439 - DNA, 25 bp, Homo sapien
ccagccaggtgcacacatttctgta

SEQ ID NO: 3697440 - DNA, 25 bp, Homo sapien
tgtgtggcacatgtgagcactgggc

SEQ ID NO: 3697441 - DNA, 25 bp, Homo sapien
caggttccagagtcctttgctgggc

SEQ ID NO: 3697442 - DNA, 25 bp, Homo sapien
ccgagagccatgaacgttgtccagc

SEQ ID NO: 3697443 - DNA, 25 bp, Homo sapien
ttctacccgagagccatgaacgttg

SEQ ID NO: 3697444 - DNA, 25 bp, Homo sapien
tctggccgtttcactaggttctacc

SEQ ID NO: 3697445 - DNA, 25 bp, Homo sapien
tttcactaggttctacccgagagcc

SEQ ID NO: 3697446 - DNA, 25 bp, Homo sapien
tgcttgatgcactgcagtcggtcat

SEQ ID NO: 3697447 - DNA, 25 bp, Homo sapien
ctgcagtcggtcattggtctgctgg

SEQ ID NO: 3697448 - DNA, 25 bp, Homo sapien
gcactgcagtcggtcattggtctgc

SEQ ID NO: 3697449 - DNA, 25 bp, Homo sapien
gatgcactgcagtcggtcattggtc

SEQ ID NO: 3697450 - DNA, 25 bp, Homo sapien
tgaaacccaggcatgtgattccagc

SEQ ID NO: 3697451 - DNA, 25 bp, Homo sapien
taacggcctcgataggtaggtggtc

SEQ ID NO: 3697452 - DNA, 25 bp, Homo sapien
ggaagtgccaggtgcatcactacat

SEQ ID NO: 3697453 - DNA, 25 bp, Homo sapien
ttgcacataaacagagcccagagag

SEQ ID NO: 3697454 - DNA, 25 bp, Homo sapien
gggaatacaatgatggctactgtgc

SEQ ID NO: 3697455 - DNA, 25 bp, Homo sapien
actgtgcagctctttggccttggtc

SEQ ID NO: 3697456 - DNA, 25 bp, Homo sapien
caaagtgatctagtgagataagcag

SEQ ID NO: 3697457 - DNA, 25 bp, Homo sapien
caaccaagaggtgactgaagtgcac

SEQ ID NO: 3697458 - DNA, 25 bp, Homo sapien
cccattgccttggtactgggagaaa

SEQ ID NO: 3697459 - DNA, 25 bp, Homo sapien
tctttcgcttaaggttccgtgactg

SEQ ID NO: 3697460 - DNA, 25 bp, Homo sapien
caatgtagttcatgcgaggcaaggt

SEQ ID NO: 3697461 - DNA, 25 bp, Homo sapien
cactgacgtaggatggtcccctcag

SEQ ID NO: 3697462 - DNA, 25 bp, Homo sapien
gggctctggcccaatttggctgtaa

SEQ ID NO: 3697463 - DNA, 25 bp, Homo sapien
caaggagcagattaggggcaaaggt

SEQ ID NO: 3697464 - DNA, 25 bp, Homo sapien
caaaagatgtggctaggagcaagga

SEQ ID NO: 3697465 - DNA, 25 bp, Homo sapien
cttcactcttatccgtctcctcagg

SEQ ID NO: 3697466 - DNA, 25 bp, Homo sapien
tgtgtgacgtactgggccctgcctg

SEQ ID NO: 3697467 - DNA, 25 bp, Homo sapien
gtgaaggaagcacacgtgcctgtac

SEQ ID NO: 3697468 - DNA, 25 bp, Homo sapien
gtgtgtgacgtactgggccctgcct

SEQ ID NO: 3697469 - DNA, 25 bp, Homo sapien
tactgtcctcacactaggggctgct

SEQ ID NO: 3697470 - DNA, 25 bp, Homo sapien
ccctagccacataaggtgatgggtt

SEQ ID NO: 3697471 - DNA, 25 bp, Homo sapien
cctagccacataaggtgatgggttg

SEQ ID NO: 3697472 - DNA, 25 bp, Homo sapien
tgccctagccacataaggtgatggg

SEQ ID NO: 3697473 - DNA, 25 bp, Homo sapien
gccctagccacataaggtgatgggt

SEQ ID NO: 3697474 - DNA, 25 bp, Homo sapien
tagtagccccattgcaaagacagga

SEQ ID NO: 3697475 - DNA, 25 bp, Homo sapien
tccctccctgatccaggacaggttg

SEQ ID NO: 3697476 - DNA, 25 bp, Homo sapien
gttggccctggagattccttcctga

SEQ ID NO: 3697477 - DNA, 25 bp, Homo sapien
gagaaggctggtgactaatagcaga

SEQ ID NO: 3697478 - DNA, 25 bp, Homo sapien
gggtagctgggatcagtaagtttcc

SEQ ID NO: 3697479 - DNA, 25 bp, Homo sapien
aagtttcctcatgctcgatttcaca

SEQ ID NO: 3697480 - DNA, 25 bp, Homo sapien
gatcagtaagtttcctcatgctcga

SEQ ID NO: 3697481 - DNA, 25 bp, Homo sapien
ctcatgctcgatttcacaccctgtg

SEQ ID NO: 3697482 - DNA, 25 bp, Homo sapien
gaaaggaaaaggaggcggctgaggc

SEQ ID NO: 3697483 - DNA, 25 bp, Homo sapien
tgggaaaggaaaaggaggcggctga

SEQ ID NO: 3697484 - DNA, 25 bp, Homo sapien
aaaggaggcggctgaggctccaaga

SEQ ID NO: 3697485 - DNA, 25 bp, Homo sapien
ggaaaaggaggcggctgaggctcca

SEQ ID NO: 3697486 - DNA, 25 bp, Homo sapien
aaggcccgtgggtctccgcaccagt

SEQ ID NO: 3697487 - DNA, 25 bp, Homo sapien
ccgtggcggcattgtggaagttggc

SEQ ID NO: 3697488 - DNA, 25 bp, Homo sapien
gtcaaacagcccatcaggctctgct

SEQ ID NO: 3697489 - DNA, 25 bp, Homo sapien
ctcgaagggccgctggaaggcccgt

SEQ ID NO: 3697490 - DNA, 25 bp, Homo sapien
aggaatgcaggcggacagggtgcag

SEQ ID NO: 3697491 - DNA, 25 bp, Homo sapien
gcaggcggacagggtgcagactcac

SEQ ID NO: 3697492 - DNA, 25 bp, Homo sapien
tgcaggcggacagggtgcagactca

SEQ ID NO: 3697493 - DNA, 25 bp, Homo sapien
aatgcaggcggacagggtgcagact

SEQ ID NO: 3697494 - DNA, 25 bp, Homo sapien
gacaggcacgctagcactcagctga

SEQ ID NO: 3697495 - DNA, 25 bp, Homo sapien
tggacaggcacgctagcactcagct

SEQ ID NO: 3697496 - DNA, 25 bp, Homo sapien
ggacaggcacgctagcactcagctg

SEQ ID NO: 3697497 - DNA, 25 bp, Homo sapien
acaggcacgctagcactcagctgac

SEQ ID NO: 3697498 - DNA, 25 bp, Homo sapien
caatcaatgcttacctgaatggatg

SEQ ID NO: 3697499 - DNA, 25 bp, Homo sapien
tgtgggaacccacacaatccctagg

SEQ ID NO: 3697500 - DNA, 25 bp, Homo sapien
tgaacactgcgtctttctcatcaag

SEQ ID NO: 3697501 - DNA, 25 bp, Homo sapien
aatccctagggactgtgcctcctca

SEQ ID NO: 3697502 - DNA, 25 bp, Homo sapien
ggggcagggctggggctgaggatgc

SEQ ID NO: 3697503 - DNA, 25 bp, Homo sapien
cacattccgttcttctccatggggc

SEQ ID NO: 3697504 - DNA, 25 bp, Homo sapien
ctcccacattccgttcttctccatg

SEQ ID NO: 3697505 - DNA, 25 bp, Homo sapien
tggggcagggctggggctgaggatg

SEQ ID NO: 3697506 - DNA, 25 bp, Homo sapien
gagaaatgtcccgtgctaaatcagg

SEQ ID NO: 3697507 - DNA, 25 bp, Homo sapien
tggcccctagatccaacagaatcgt

SEQ ID NO: 3697508 - DNA, 25 bp, Homo sapien
ctatggctgagtagggagagcaccc

SEQ ID NO: 3697509 - DNA, 25 bp, Homo sapien
tcatttagaaagcagctggagtggc

SEQ ID NO: 3697510 - DNA, 25 bp, Homo sapien
tgtctctagccttaagccccagcaa

SEQ ID NO: 3697511 - DNA, 25 bp, Homo sapien
acctcagctagaaaccgcaggactc

SEQ ID NO: 3697512 - DNA, 25 bp, Homo sapien
aatcgactaaggcttccgggatggg

SEQ ID NO: 3697513 - DNA, 25 bp, Homo sapien
gatttagaacaagctgcttcccaca

SEQ ID NO: 3697514 - DNA, 25 bp, Homo sapien
gggtgaacttgtctcggtttgcagc

SEQ ID NO: 3697515 - DNA, 25 bp, Homo sapien
cagcagtctgtagccgaggtccagg

SEQ ID NO: 3697516 - DNA, 25 bp, Homo sapien
ttgtctcggtttgcagcacacacag

SEQ ID NO: 3697517 - DNA, 25 bp, Homo sapien
tagccgaggtccaggtcaaagcctt

SEQ ID NO: 3697518 - DNA, 25 bp, Homo sapien
gcagcaaacaggcatggtttatagt

SEQ ID NO: 3697519 - DNA, 25 bp, Homo sapien
catggtttatagtcagttcccctcc

SEQ ID NO: 3697520 - DNA, 25 bp, Homo sapien
caggcatggtttatagtcagttccc

SEQ ID NO: 3697521 - DNA, 25 bp, Homo sapien
cacctcccagtgacatcgcagagtc

SEQ ID NO: 3697522 - DNA, 25 bp, Homo sapien
tcttcctcaggggttcgcactacac

SEQ ID NO: 3697523 - DNA, 25 bp, Homo sapien
tggtggatgagttgctcttcctcag

SEQ ID NO: 3697524 - DNA, 25 bp, Homo sapien
ggcacgaggacagccccaactgtgg

SEQ ID NO: 3697525 - DNA, 25 bp, Homo sapien
tcccagagcctggtggatgagttgc

SEQ ID NO: 3697526 - DNA, 25 bp, Homo sapien
caaagttgcaatacggaaccctgag

SEQ ID NO: 3697527 - DNA, 25 bp, Homo sapien
gagctcacagtgcttatgccaaggg

SEQ ID NO: 3697528 - DNA, 25 bp, Homo sapien
ccagacacggtgctaggtactttat

SEQ ID NO: 3697529 - DNA, 25 bp, Homo sapien
tccggcttaaagctagcagggtgcc

SEQ ID NO: 3697530 - DNA, 25 bp, Homo sapien
tgcatgatctcatcctggccctcct

SEQ ID NO: 3697531 - DNA, 25 bp, Homo sapien
tggccctccttggctggcctggcct

SEQ ID NO: 3697532 - DNA, 25 bp, Homo sapien
ggccctccttggctggcctggcctc

SEQ ID NO: 3697533 - DNA, 25 bp, Homo sapien
atgatctcatcctggccctccttgg

SEQ ID NO: 3697534 - DNA, 25 bp, Homo sapien
aagggagcatcaggatgccgggcca

SEQ ID NO: 3697535 - DNA, 25 bp, Homo sapien
aatcaagggagcatcaggatgccgg

SEQ ID NO: 3697536 - DNA, 25 bp, Homo sapien
agggagcatcaggatgccgggccag

SEQ ID NO: 3697537 - DNA, 25 bp, Homo sapien
gagaatcaagggagcatcaggatgc

SEQ ID NO: 3697538 - DNA, 25 bp, Homo sapien
ctggtgcttggtgcccacgttgcca

SEQ ID NO: 3697539 - DNA, 25 bp, Homo sapien
tcgacatggcgactgcctggtgctt

SEQ ID NO: 3697540 - DNA, 25 bp, Homo sapien
tcttcaagcatggacaggagctgag

SEQ ID NO: 3697541 - DNA, 25 bp, Homo sapien
gacatttcagtgctgcccgccaagt

SEQ ID NO: 3697542 - DNA, 25 bp, Homo sapien
tgagagtccaccattcagccaggtg

SEQ ID NO: 3697543 - DNA, 25 bp, Homo sapien
caagttgttatagaagctccctggg

SEQ ID NO: 3697544 - DNA, 25 bp, Homo sapien
gatcgagagctccagtgaagtaccc

SEQ ID NO: 3697545 - DNA, 25 bp, Homo sapien
gatcggagtcaagccaccaaaagag

SEQ ID NO: 3697546 - DNA, 25 bp, Homo sapien
tcccagtaacgggaaggcggctgca

SEQ ID NO: 3697547 - DNA, 25 bp, Homo sapien
tccctgaataaggccatttgtcctc

SEQ ID NO: 3697548 - DNA, 25 bp, Homo sapien
cctcccagtaacgggaaggcggctg

SEQ ID NO: 3697549 - DNA, 25 bp, Homo sapien
catttgtcctcccagtaacgggaag

SEQ ID NO: 3697550 - DNA, 25 bp, Homo sapien
gcatgctgataagagcgccagttgc

SEQ ID NO: 3697551 - DNA, 25 bp, Homo sapien
gggcatgctgataagagcgccagtt

SEQ ID NO: 3697552 - DNA, 25 bp, Homo sapien
atgctgataagagcgccagttgcct

SEQ ID NO: 3697553 - DNA, 25 bp, Homo sapien
tgataagagcgccagttgcctttcc

SEQ ID NO: 3697554 - DNA, 25 bp, Homo sapien
tggccctgcatctccagagaagctg

SEQ ID NO: 3697555 - DNA, 25 bp, Homo sapien
ccagagaagctgttccagctcctcg

SEQ ID NO: 3697556 - DNA, 25 bp, Homo sapien
agctcctcgggagcaccactgagtc

SEQ ID NO: 3697557 - DNA, 25 bp, Homo sapien
ctcgggagcaccactgagtccctgg

SEQ ID NO: 3697558 - DNA, 25 bp, Homo sapien
aattgctgccaatggcttttttaac

SEQ ID NO: 3697559 - DNA, 25 bp, Homo sapien
gcttttttaactccttgggcagcca

SEQ ID NO: 3697560 - DNA, 25 bp, Homo sapien
ttaattgctgccaatggctttttta

SEQ ID NO: 3697561 - DNA, 25 bp, Homo sapien
cttttttaactccttgggcagccat

SEQ ID NO: 3697562 - DNA, 25 bp, Homo sapien
tgagtgttgaatgagcccaaagatg

SEQ ID NO: 3697563 - DNA, 25 bp, Homo sapien
gaccctgagtgttgaatgagcccaa

SEQ ID NO: 3697564 - DNA, 25 bp, Homo sapien
ccctgagtgttgaatgagcccaaag

SEQ ID NO: 3697565 - DNA, 25 bp, Homo sapien
tgggaccctgagtgttgaatgagcc

SEQ ID NO: 3697566 - DNA, 25 bp, Homo sapien
tacagggttccctaagtacggatca

SEQ ID NO: 3697567 - DNA, 25 bp, Homo sapien
taaactgatggcagatgactatccc

SEQ ID NO: 3697568 - DNA, 25 bp, Homo sapien
tatcctgtgcgctgagtttctgccg

SEQ ID NO: 3697569 - DNA, 25 bp, Homo sapien
cacacagggtgcaacgagtcagttc

SEQ ID NO: 3697570 - DNA, 25 bp, Homo sapien
ggtctacagaaatacgggcactcca

SEQ ID NO: 3697571 - DNA, 25 bp, Homo sapien
taatatacgctcctccggcttgaga

SEQ ID NO: 3697572 - DNA, 25 bp, Homo sapien
tctttctagttacacgcctccggtc

SEQ ID NO: 3697573 - DNA, 25 bp, Homo sapien
atccattcaccagactgcacgggag

SEQ ID NO: 3697574 - DNA, 25 bp, Homo sapien
tgaaatatcgctttcaggatggcat

SEQ ID NO: 3697575 - DNA, 25 bp, Homo sapien
aatgcagttgtcatgggctttccct

SEQ ID NO: 3697576 - DNA, 25 bp, Homo sapien
ggctttccctccgagaagctggtta

SEQ ID NO: 3697577 - DNA, 25 bp, Homo sapien
taacttgagccttttggacacgaac

SEQ ID NO: 3697578 - DNA, 25 bp, Homo sapien
agaagttgcaccggtcgcgatcccg

SEQ ID NO: 3697579 - DNA, 25 bp, Homo sapien
cggtcgcgatcccgccctggcgccc

SEQ ID NO: 3697580 - DNA, 25 bp, Homo sapien
ggtcgcgatcccgccctggcgccct

SEQ ID NO: 3697581 - DNA, 25 bp, Homo sapien
ctagaagttgcaccggtcgcgatcc

SEQ ID NO: 3697582 - DNA, 25 bp, Homo sapien
ctatttgctccaagatgtctcaggc

SEQ ID NO: 3697583 - DNA, 25 bp, Homo sapien
tgagagttacacaagctgtccccac

SEQ ID NO: 3697584 - DNA, 25 bp, Homo sapien
caatggcttctgtccgttttccagg

SEQ ID NO: 3697585 - DNA, 25 bp, Homo sapien
gttttccagggcatcccgggactgc

SEQ ID NO: 3697586 - DNA, 25 bp, Homo sapien
gccgcctggaaacagggtggcagat

SEQ ID NO: 3697587 - DNA, 25 bp, Homo sapien
agcagggcagtgtcgtgagctcagt

SEQ ID NO: 3697588 - DNA, 25 bp, Homo sapien
ggagcagggcagtgtcgtgagctca

SEQ ID NO: 3697589 - DNA, 25 bp, Homo sapien
atggcacctggggactcaggtggca

SEQ ID NO: 3697590 - DNA, 25 bp, Homo sapien
tcacttctgtttatgatcgatgcgg

SEQ ID NO: 3697591 - DNA, 25 bp, Homo sapien
gatcgatgcggaaatcactattgtt

SEQ ID NO: 3697592 - DNA, 25 bp, Homo sapien
tctgtttatgatcgatgcggaaatc

SEQ ID NO: 3697593 - DNA, 25 bp, Homo sapien
gatgcggaaatcactattgttttcc

SEQ ID NO: 3697594 - DNA, 25 bp, Homo sapien
gaataaacaggtgaggacggagcat

SEQ ID NO: 3697595 - DNA, 25 bp, Homo sapien
catgtgctcactcgggcttgcttaa

SEQ ID NO: 3697596 - DNA, 25 bp, Homo sapien
tccagggtgtattagcagaggctca

SEQ ID NO: 3697597 - DNA, 25 bp, Homo sapien
tctcaaggcaggtcagcgacaaggt

SEQ ID NO: 3697598 - DNA, 25 bp, Homo sapien
caaatgctcaacaaaagcgaggtcc

SEQ ID NO: 3697599 - DNA, 25 bp, Homo sapien
taagctccaattagcacatggggat

SEQ ID NO: 3697600 - DNA, 25 bp, Homo sapien
caattagcacatggggatactggct

SEQ ID NO: 3697601 - DNA, 25 bp, Homo sapien
ttctgactaccttcttggggttgct

SEQ ID NO: 3697602 - DNA, 25 bp, Homo sapien
ttgtcagtgctgtttcccaaaccgg

SEQ ID NO: 3697603 - DNA, 25 bp, Homo sapien
cagggaacctcagagccgtcagggc

SEQ ID NO: 3697604 - DNA, 25 bp, Homo sapien
ccgtcagggctagttttgtcagtgc

SEQ ID NO: 3697605 - DNA, 25 bp, Homo sapien
ctcagagccgtcagggctagttttg

SEQ ID NO: 3697606 - DNA, 25 bp, Homo sapien
cgggggcagtgactactgggcccca

SEQ ID NO: 3697607 - DNA, 25 bp, Homo sapien
gaccgggggcagtgactactgggcc

SEQ ID NO: 3697608 - DNA, 25 bp, Homo sapien
ggaccgggggcagtgactactgggc

SEQ ID NO: 3697609 - DNA, 25 bp, Homo sapien
gggcagtgactactgggccccagga

SEQ ID NO: 3697610 - DNA, 25 bp, Homo sapien
ggctccctggagatagtgctgctcc

SEQ ID NO: 3697611 - DNA, 25 bp, Homo sapien
ggccgtgctcccctaccctctgatc

SEQ ID NO: 3697612 - DNA, 25 bp, Homo sapien
cgtgctcccctaccctctgatcctc

SEQ ID NO: 3697613 - DNA, 25 bp, Homo sapien
tccctggagatagtgctgctccttc

SEQ ID NO: 3697614 - DNA, 25 bp, Homo sapien
actgagacccggacaactggagcag

SEQ ID NO: 3697615 - DNA, 25 bp, Homo sapien
gaatcacagctagaaataacccaat

SEQ ID NO: 3697616 - DNA, 25 bp, Homo sapien
taacccaatatgctgagacgactgg

SEQ ID NO: 3697617 - DNA, 25 bp, Homo sapien
gctcagcggcctttaaacctaccag

SEQ ID NO: 3697618 - DNA, 25 bp, Homo sapien
acgttcattcaacaactggctgctg

SEQ ID NO: 3697619 - DNA, 25 bp, Homo sapien
ttcattcaacaactggctgctgagc

SEQ ID NO: 3697620 - DNA, 25 bp, Homo sapien
gttcattcaacaactggctgctgag

SEQ ID NO: 3697621 - DNA, 25 bp, Homo sapien
cgttcattcaacaactggctgctga

SEQ ID NO: 3697622 - DNA, 25 bp, Homo sapien
aactgcatccttgtgaccagactcc

SEQ ID NO: 3697623 - DNA, 25 bp, Homo sapien
acagtaccaaggtgttctatcactc

SEQ ID NO: 3697624 - DNA, 25 bp, Homo sapien
tctccaaactgcatccttgtgacca

SEQ ID NO: 3697625 - DNA, 25 bp, Homo sapien
cctcgatccattctaacctacagta

SEQ ID NO: 3697626 - DNA, 25 bp, Homo sapien
cgtgttctccttatggtgcaaacca

SEQ ID NO: 3697627 - DNA, 25 bp, Homo sapien
tatggtgcaaaccaacacaagttgt

SEQ ID NO: 3697628 - DNA, 25 bp, Homo sapien
aggccacgctggcagccgcatgcgg

SEQ ID NO: 3697629 - DNA, 25 bp, Homo sapien
gcagtggatgttgtgcgtgttctcc

SEQ ID NO: 3697630 - DNA, 25 bp, Homo sapien
gagctcttcgcaccaggaggacaac

SEQ ID NO: 3697631 - DNA, 25 bp, Homo sapien
aggcggccgagctcttcgcaccagg

SEQ ID NO: 3697632 - DNA, 25 bp, Homo sapien
cagggggatcgctctggcggctctt

SEQ ID NO: 3697633 - DNA, 25 bp, Homo sapien
gtgcgacagagtgggtttcatggag

SEQ ID NO: 3697634 - DNA, 25 bp, Homo sapien
cagcccctggtttctctgggtttgc

SEQ ID NO: 3697635 - DNA, 25 bp, Homo sapien
cctggtttctctgggtttgcccaat

SEQ ID NO: 3697636 - DNA, 25 bp, Homo sapien
tggtttctctgggtttgcccaatac

SEQ ID NO: 3697637 - DNA, 25 bp, Homo sapien
tcagcccctggtttctctgggtttg

SEQ ID NO: 3697638 - DNA, 25 bp, Homo sapien
taaggaacactgctacagaagagaa

SEQ ID NO: 3697639 - DNA, 25 bp, Homo sapien
ctaaggaacactgctacagaagaga

SEQ ID NO: 3697640 - DNA, 25 bp, Homo sapien
tcccatttgttcgtcctcagagcct

SEQ ID NO: 3697641 - DNA, 25 bp, Homo sapien
ttcagacaaagacccagagccttca

SEQ ID NO: 3697642 - DNA, 25 bp, Homo sapien
cctgcagcagacatgattgtgacac

SEQ ID NO: 3697643 - DNA, 25 bp, Homo sapien
tgacacccgagctctccaaatatga

SEQ ID NO: 3697644 - DNA, 25 bp, Homo sapien
tgggatgtgttggttactccccaaa

SEQ ID NO: 3697645 - DNA, 25 bp, Homo sapien
gacagagtcataggggaacgaccca

SEQ ID NO: 3697646 - DNA, 25 bp, Homo sapien
ccaagggacagagtcataggggaac

SEQ ID NO: 3697647 - DNA, 25 bp, Homo sapien
cgtggtgaccacggaaagggagccg

SEQ ID NO: 3697648 - DNA, 25 bp, Homo sapien
gcgacaaccggtcagcccagtggct

SEQ ID NO: 3697649 - DNA, 25 bp, Homo sapien
aggcgacaaccggtcagcccagtgg

SEQ ID NO: 3697650 - DNA, 25 bp, Homo sapien
agcaggcgacaaccggtcagcccag

SEQ ID NO: 3697651 - DNA, 25 bp, Homo sapien
caggagcaggcgacaaccggtcagc

SEQ ID NO: 3697652 - DNA, 25 bp, Homo sapien
ttggcattggccatagggttcccaa

SEQ ID NO: 3697653 - DNA, 25 bp, Homo sapien
cgccatggggttgccgcctggattc

SEQ ID NO: 3697654 - DNA, 25 bp, Homo sapien
tctgctggatgtagggctgagcggg

SEQ ID NO: 3697655 - DNA, 25 bp, Homo sapien
gttgctggtggtcatgcccgacgcc

SEQ ID NO: 3697656 - DNA, 25 bp, Homo sapien
atacctgctcttcgactttcccaat

SEQ ID NO: 3697657 - DNA, 25 bp, Homo sapien
tctatacctgctcttcgactttccc

SEQ ID NO: 3697658 - DNA, 25 bp, Homo sapien
tatacctgctcttcgactttcccaa

SEQ ID NO: 3697659 - DNA, 25 bp, Homo sapien
tacctgctcttcgactttcccaatc

SEQ ID NO: 3697660 - DNA, 25 bp, Homo sapien
gaagggtggaagagttaggtactgc

SEQ ID NO: 3697661 - DNA, 25 bp, Homo sapien
agaagggtggaagagttaggtactg

SEQ ID NO: 3697662 - DNA, 25 bp, Homo sapien
gcctggtgtgcggagggatgcccat

SEQ ID NO: 3697663 - DNA, 25 bp, Homo sapien
gatgcccatgcctgcgggggcgtta

SEQ ID NO: 3697664 - DNA, 25 bp, Homo sapien
tgcagcggctgccgcgggctgagtg

SEQ ID NO: 3697665 - DNA, 25 bp, Homo sapien
cggctgccgcgggctgagtgaagtc

SEQ ID NO: 3697666 - DNA, 25 bp, Homo sapien
ggtccatactggtttatatccttgt

SEQ ID NO: 3697667 - DNA, 25 bp, Homo sapien
gtccatactggtttatatccttgtt

SEQ ID NO: 3697668 - DNA, 25 bp, Homo sapien
cggtccatactggtttatatccttg

SEQ ID NO: 3697669 - DNA, 25 bp, Homo sapien
tccatactggtttatatccttgttc

SEQ ID NO: 3697670 - DNA, 25 bp, Homo sapien
gcccgggctggttcatgaattggct

SEQ ID NO: 3697671 - DNA, 25 bp, Homo sapien
ggttcatgaattggctgttatacgc

SEQ ID NO: 3697672 - DNA, 25 bp, Homo sapien
tgttatacgcctgggtgggacccat

SEQ ID NO: 3697673 - DNA, 25 bp, Homo sapien
aattggctgttatacgcctgggtgg

SEQ ID NO: 3697674 - DNA, 25 bp, Homo sapien
gcggccggggctggttcatgcccat

SEQ ID NO: 3697675 - DNA, 25 bp, Homo sapien
tgcccatgggagggccgctcatccc

SEQ ID NO: 3697676 - DNA, 25 bp, Homo sapien
cagccgccatgctcgcggggttcat

SEQ ID NO: 3697677 - DNA, 25 bp, Homo sapien
gctcatccccgagggcgtcatgcca

SEQ ID NO: 3697678 - DNA, 25 bp, Homo sapien
atgttctgaataggaagggactggg

SEQ ID NO: 3697679 - DNA, 25 bp, Homo sapien
tatgttctgaataggaagggactgg

SEQ ID NO: 3697680 - DNA, 25 bp, Homo sapien
ggtatggcctctttatgttctgaat

SEQ ID NO: 3697681 - DNA, 25 bp, Homo sapien
ggcaggaggaactaaacccaggtca

SEQ ID NO: 3697682 - DNA, 25 bp, Homo sapien
ttccagacaggatcaggccgcatag

SEQ ID NO: 3697683 - DNA, 25 bp, Homo sapien
ctttggcgtgggctaacagatgcac

SEQ ID NO: 3697684 - DNA, 25 bp, Homo sapien
tatagattggaaacacgctctctgc

SEQ ID NO: 3697685 - DNA, 25 bp, Homo sapien
ggaaacacgttcaatgttgccaacg

SEQ ID NO: 3697686 - DNA, 25 bp, Homo sapien
ccccttgaggccgttcttcctggag

SEQ ID NO: 3697687 - DNA, 25 bp, Homo sapien
cagataatgctttgggccccttctc

SEQ ID NO: 3697688 - DNA, 25 bp, Homo sapien
tcacctgaacaacgggatggggccc

SEQ ID NO: 3697689 - DNA, 25 bp, Homo sapien
taatactgccccatgttgaccgtgg

SEQ ID NO: 3697690 - DNA, 25 bp, Homo sapien
tgggcatcctctgtcctgggtagtt

SEQ ID NO: 3697691 - DNA, 25 bp, Homo sapien
gtactgcccggagctcggctggctg

SEQ ID NO: 3697692 - DNA, 25 bp, Homo sapien
gggaactggctgtttggtccatatt

SEQ ID NO: 3697693 - DNA, 25 bp, Homo sapien
gagaaaagccactctgacattctgg

SEQ ID NO: 3697694 - DNA, 25 bp, Homo sapien
catccgagacgaatgagaataggaa

SEQ ID NO: 3697695 - DNA, 25 bp, Homo sapien
tgagtgccgtgaataagaaaaggag

SEQ ID NO: 3697696 - DNA, 25 bp, Homo sapien
ccgaacttcgccctgaacacatggg

SEQ ID NO: 3697697 - DNA, 25 bp, Homo sapien
cgagaacgtgttattttgtccatta

SEQ ID NO: 3697698 - DNA, 25 bp, Homo sapien
tagctgcttcccgagaacgtgttat

SEQ ID NO: 3697699 - DNA, 25 bp, Homo sapien
gctgtagttactgtagctgcttccc

SEQ ID NO: 3697700 - DNA, 25 bp, Homo sapien
cccttggctgtagttactgtagctg

SEQ ID NO: 3697701 - DNA, 25 bp, Homo sapien
gtaatttgccacaggaaccggcctg

SEQ ID NO: 3697702 - DNA, 25 bp, Homo sapien
ggacaggtatggagggatgctgctc

SEQ ID NO: 3697703 - DNA, 25 bp, Homo sapien
gcgctcatatttggcttgatgtcag

SEQ ID NO: 3697704 - DNA, 25 bp, Homo sapien
gaagggtggtttgacgtcttggctg

SEQ ID NO: 3697705 - DNA, 25 bp, Homo sapien
cagggaatgtgagccgcagctcgtc

SEQ ID NO: 3697706 - DNA, 25 bp, Homo sapien
cgcaggtggaacacatggttgctga

SEQ ID NO: 3697707 - DNA, 25 bp, Homo sapien
ttgctgaccgccaggttgtgctcca

SEQ ID NO: 3697708 - DNA, 25 bp, Homo sapien
tccacatcagcgtctggtggaccgt

SEQ ID NO: 3697709 - DNA, 25 bp, Homo sapien
gacctccttcatcccgcctgggctg

SEQ ID NO: 3697710 - DNA, 25 bp, Homo sapien
tgcagacttcccatgacaaccgcag

SEQ ID NO: 3697711 - DNA, 25 bp, Homo sapien
gatgctgaacacgtgaaggtgtcag

SEQ ID NO: 3697712 - DNA, 25 bp, Homo sapien
catgacaaccgcaggacagggccca

SEQ ID NO: 3697713 - DNA, 25 bp, Homo sapien
ggctggcacacgtgcttcaggtgca

SEQ ID NO: 3697714 - DNA, 25 bp, Homo sapien
ccggctggcacacgtgcttcaggtg

SEQ ID NO: 3697715 - DNA, 25 bp, Homo sapien
ggggcgtggcgttcacgctgacctg

SEQ ID NO: 3697716 - DNA, 25 bp, Homo sapien
gttgtcgccgcgctcaatggtgagg

SEQ ID NO: 3697717 - DNA, 25 bp, Homo sapien
tcttgaggagtccttgcagcacaga

SEQ ID NO: 3697718 - DNA, 25 bp, Homo sapien
gacggagggccggtgtaccagctgc

SEQ ID NO: 3697719 - DNA, 25 bp, Homo sapien
aggaggcgcttcttgaggagtcctt

SEQ ID NO: 3697720 - DNA, 25 bp, Homo sapien
cgcttcttgaggagtccttgcagca

SEQ ID NO: 3697721 - DNA, 25 bp, Homo sapien
cacttcagagacaccttgatggccg

SEQ ID NO: 3697722 - DNA, 25 bp, Homo sapien
gccacgctgctgaaattccgcttga

SEQ ID NO: 3697723 - DNA, 25 bp, Homo sapien
gcttgcaatcgtgtcctcgagcagg

SEQ ID NO: 3697724 - DNA, 25 bp, Homo sapien
catcctccccgttgagggtcgtgtt

SEQ ID NO: 3697725 - DNA, 25 bp, Homo sapien
ggtccctctctcgcaattcagctgc

SEQ ID NO: 3697726 - DNA, 25 bp, Homo sapien
aggtccctctctcgcaattcagctg

SEQ ID NO: 3697727 - DNA, 25 bp, Homo sapien
caggtccctctctcgcaattcagct

SEQ ID NO: 3697728 - DNA, 25 bp, Homo sapien
cagctgcaggtatgactccagatca

SEQ ID NO: 3697729 - DNA, 25 bp, Homo sapien
tcaggattccccacatgtactgatc

SEQ ID NO: 3697730 - DNA, 25 bp, Homo sapien
gcattcaggattccccacatgtact

SEQ ID NO: 3697731 - DNA, 25 bp, Homo sapien
ggattccccacatgtactgatccac

SEQ ID NO: 3697732 - DNA, 25 bp, Homo sapien
ggatggcattcaggattccccacat

SEQ ID NO: 3697733 - DNA, 25 bp, Homo sapien
gactcatggtcttgaaccgcttgga

SEQ ID NO: 3697734 - DNA, 25 bp, Homo sapien
ctgtagtcgttggagttggtgcccc

SEQ ID NO: 3697735 - DNA, 25 bp, Homo sapien
tgatcatctggctgggactcatggt

SEQ ID NO: 3697736 - DNA, 25 bp, Homo sapien
tgtaagtccgacttgatgggcaccg

SEQ ID NO: 3697737 - DNA, 25 bp, Homo sapien
gttgccatggccttggtagttgttg

SEQ ID NO: 3697738 - DNA, 25 bp, Homo sapien
gtttctcgagggcggccatgttgtt

SEQ ID NO: 3697739 - DNA, 25 bp, Homo sapien
gggaagtcaaagttgccatggcctt

SEQ ID NO: 3697740 - DNA, 25 bp, Homo sapien
cccgtgcatgaagtcattcatggat

SEQ ID NO: 3697741 - DNA, 25 bp, Homo sapien
tctccagagaatccgaaatcctagg

SEQ ID NO: 3697742 - DNA, 25 bp, Homo sapien
ggaacagggtatccagatcccaagg

SEQ ID NO: 3697743 - DNA, 25 bp, Homo sapien
aggacactgacagggcacgacgtag

SEQ ID NO: 3697744 - DNA, 25 bp, Homo sapien
acgacgtagcctcagttagacccct

SEQ ID NO: 3697745 - DNA, 25 bp, Homo sapien
tgtcaacccgccaccaagtatgggc

SEQ ID NO: 3697746 - DNA, 25 bp, Homo sapien
gcatctggatagagcgctctggcca

SEQ ID NO: 3697747 - DNA, 25 bp, Homo sapien
cctggatcttcagaggcagctgtgc

SEQ ID NO: 3697748 - DNA, 25 bp, Homo sapien
tgggccaccacccatggtcagtgag

SEQ ID NO: 3697749 - DNA, 25 bp, Homo sapien
ctggggtgtggtacgtgcaaacctt

SEQ ID NO: 3697750 - DNA, 25 bp, Homo sapien
tgtggtacgtgcaaaccttgttgta

SEQ ID NO: 3697751 - DNA, 25 bp, Homo sapien
tacgtgcaaaccttgttgtatggag

SEQ ID NO: 3697752 - DNA, 25 bp, Homo sapien
ggtgtggtacgtgcaaaccttgttg

SEQ ID NO: 3697753 - DNA, 25 bp, Homo sapien
atccagcgaaggctccggcatgtcg

SEQ ID NO: 3697754 - DNA, 25 bp, Homo sapien
ttaaaggtcaggtcgctgtgtggat

SEQ ID NO: 3697755 - DNA, 25 bp, Homo sapien
ggcctgaccctctaaggctgaggag

SEQ ID NO: 3697756 - DNA, 25 bp, Homo sapien
aaggctccggcatgtcggacgctcc

SEQ ID NO: 3697757 - DNA, 25 bp, Homo sapien
ggcaggccccgggtgaggaatgcag

SEQ ID NO: 3697758 - DNA, 25 bp, Homo sapien
gtaatgaagttcagatgaggtgtgc

SEQ ID NO: 3697759 - DNA, 25 bp, Homo sapien
cagatgaggtgtgcctgagaggcag

SEQ ID NO: 3697760 - DNA, 25 bp, Homo sapien
ctggaaaagaaggagtaatgaagtt

SEQ ID NO: 3697761 - DNA, 25 bp, Homo sapien
tcgtcaggatttgtgagttcgggaa

SEQ ID NO: 3697762 - DNA, 25 bp, Homo sapien
cgttactattgctcggcaggtcggg

SEQ ID NO: 3697763 - DNA, 25 bp, Homo sapien
ctcaaatagagacaggaggtcatcg

SEQ ID NO: 3697764 - DNA, 25 bp, Homo sapien
tccagataagacaggagctcgtcag

SEQ ID NO: 3697765 - DNA, 25 bp, Homo sapien
aggctcccaggtggaaaagtgtgtt

SEQ ID NO: 3697766 - DNA, 25 bp, Homo sapien
tggtcttcaggcctgcgctgggcat

SEQ ID NO: 3697767 - DNA, 25 bp, Homo sapien
tacagtctagaagatggaagaacct

SEQ ID NO: 3697768 - DNA, 25 bp, Homo sapien
ggaaggtcatctggaatcggcacac

SEQ ID NO: 3697769 - DNA, 25 bp, Homo sapien
aactgccagtgctcctccaaggctc

SEQ ID NO: 3697770 - DNA, 25 bp, Homo sapien
aaagaatttacagatgggaccccag

SEQ ID NO: 3697771 - DNA, 25 bp, Homo sapien
agaaaaccttgtgccgtctgggaca

SEQ ID NO: 3697772 - DNA, 25 bp, Homo sapien
tccggtaaaacccacagaggagagc

SEQ ID NO: 3697773 - DNA, 25 bp, Homo sapien
gcttctgacaggttatatgcccgcg

SEQ ID NO: 3697774 - DNA, 25 bp, Homo sapien
taaccaggtcatgaaaatgttgaat

SEQ ID NO: 3697775 - DNA, 25 bp, Homo sapien
ttgaatattatcaaagacgatacta

SEQ ID NO: 3697776 - DNA, 25 bp, Homo sapien
tcaaagacgatactaaaatattcac

SEQ ID NO: 3697777 - DNA, 25 bp, Homo sapien
cagcaaaggctataaccaggtcatg

SEQ ID NO: 3697778 - DNA, 25 bp, Homo sapien
tggctctaaatagcgggctgcccgg

SEQ ID NO: 3697779 - DNA, 25 bp, Homo sapien
taattcccagatggtctgacacagg

SEQ ID NO: 3697780 - DNA, 25 bp, Homo sapien
tatcaacgcaagaagcaagaactcc

SEQ ID NO: 3697781 - DNA, 25 bp, Homo sapien
ccagctgactgagggatggctctaa

SEQ ID NO: 3697782 - DNA, 25 bp, Homo sapien
actctccgcactggaaagccgtgga

SEQ ID NO: 3697783 - DNA, 25 bp, Homo sapien
gcccagagatggttgcaggaggtgc

SEQ ID NO: 3697784 - DNA, 25 bp, Homo sapien
gcatctcgactctccgcactggaaa

SEQ ID NO: 3697785 - DNA, 25 bp, Homo sapien
ccagagatggttgcaggaggtgccc

SEQ ID NO: 3697786 - DNA, 25 bp, Homo sapien
gaagagcttgtctccagactgcagg

SEQ ID NO: 3697787 - DNA, 25 bp, Homo sapien
tatggctccaagtagtcgtccgaaa

SEQ ID NO: 3697788 - DNA, 25 bp, Homo sapien
tatgtacacacgtcccttgagtcgc

SEQ ID NO: 3697789 - DNA, 25 bp, Homo sapien
catcttgcggagtggcggcagaaac

SEQ ID NO: 3697790 - DNA, 25 bp, Homo sapien
gtgatcatgatatcaaaaattatac

SEQ ID NO: 3697791 - DNA, 25 bp, Homo sapien
tgtgatcatgatatcaaaaattata

SEQ ID NO: 3697792 - DNA, 25 bp, Homo sapien
tatacaaagtatgaatttggttaca

SEQ ID NO: 3697793 - DNA, 25 bp, Homo sapien
caaagtatgaatttggttacaattt

SEQ ID NO: 3697794 - DNA, 25 bp, Homo sapien
tacatacgatgtacaaagacgatga

SEQ ID NO: 3697795 - DNA, 25 bp, Homo sapien
gaggttgtcacatcatctaactaca

SEQ ID NO: 3697796 - DNA, 25 bp, Homo sapien
cagctttgcaagactagaaatcaca

SEQ ID NO: 3697797 - DNA, 25 bp, Homo sapien
gaaatgattgcattgtacatacgat

SEQ ID NO: 3697798 - DNA, 25 bp, Homo sapien
gagatacctcagtgttacaacagag

SEQ ID NO: 3697799 - DNA, 25 bp, Homo sapien
tacaaaataaccacatgaacaccta

SEQ ID NO: 3697800 - DNA, 25 bp, Homo sapien
tacaacagagtatagaaatgtctag

SEQ ID NO: 3697801 - DNA, 25 bp, Homo sapien
taacatgggcaaatgagatacctca

SEQ ID NO: 3697802 - DNA, 25 bp, Homo sapien
gcgggacacgggcggggagaacaca

SEQ ID NO: 3697803 - DNA, 25 bp, Homo sapien
tcgcgcgcgcccagaaggccgagtc

SEQ ID NO: 3697804 - DNA, 25 bp, Homo sapien
gggacacgggcggggagaacacaga

SEQ ID NO: 3697805 - DNA, 25 bp, Homo sapien
agaactcaaactgacgtcgcgcgcg

SEQ ID NO: 3697806 - DNA, 25 bp, Homo sapien
cgttggcgtccacgtccaggtacac

SEQ ID NO: 3697807 - DNA, 25 bp, Homo sapien
accacgcggccgagcggcttcccgt

SEQ ID NO: 3697808 - DNA, 25 bp, Homo sapien
ggagagcaggccgagccagcgggag

SEQ ID NO: 3697809 - DNA, 25 bp, Homo sapien
cagcggcacggagcgcgggacggag

SEQ ID NO: 3697810 - DNA, 25 bp, Homo sapien
caggccggccctgcgagcggtctca

SEQ ID NO: 3697811 - DNA, 25 bp, Homo sapien
aggccggccctgcgagcggtctcac

SEQ ID NO: 3697812 - DNA, 25 bp, Homo sapien
cgctccagtgctccgagggaggccg

SEQ ID NO: 3697813 - DNA, 25 bp, Homo sapien
cggaagaaatcattctgacgcccat

SEQ ID NO: 3697814 - DNA, 25 bp, Homo sapien
tccgagggaggccggaagaaatcat

SEQ ID NO: 3697815 - DNA, 25 bp, Homo sapien
tctgacgcccattctcagaaatggg

SEQ ID NO: 3697816 - DNA, 25 bp, Homo sapien
aagcgctccgtgttgtgcaagggcc

SEQ ID NO: 3697817 - DNA, 25 bp, Homo sapien
tctctgcgatctgaccttgagcttt

SEQ ID NO: 3697818 - DNA, 25 bp, Homo sapien
tcggagctccggatctaggctcagc

SEQ ID NO: 3697819 - DNA, 25 bp, Homo sapien
cgacacccacctcggagctccggat

SEQ ID NO: 3697820 - DNA, 25 bp, Homo sapien
cattctggggtccaccaggtggccg

SEQ ID NO: 3697821 - DNA, 25 bp, Homo sapien
gaggggcattctggggtccaccagg

SEQ ID NO: 3697822 - DNA, 25 bp, Homo sapien
ggaggggcattctggggtccaccag

SEQ ID NO: 3697823 - DNA, 25 bp, Homo sapien
gggcattctggggtccaccaggtgg

SEQ ID NO: 3697824 - DNA, 25 bp, Homo sapien
ccaaggaggctaaggaagaagcacg

SEQ ID NO: 3697825 - DNA, 25 bp, Homo sapien
gaggcagctctatcatttctgggag

SEQ ID NO: 3697826 - DNA, 25 bp, Homo sapien
tatcttggcctacttctgtggacac

SEQ ID NO: 3697827 - DNA, 25 bp, Homo sapien
caatgtgtggccgacctgaaggctc

SEQ ID NO: 3697828 - DNA, 25 bp, Homo sapien
tctttgggacgacatctgccttcag

SEQ ID NO: 3697829 - DNA, 25 bp, Homo sapien
gctgtctttgggacgacatctgcct

SEQ ID NO: 3697830 - DNA, 25 bp, Homo sapien
agctgtctttgggacgacatctgcc

SEQ ID NO: 3697831 - DNA, 25 bp, Homo sapien
tgtctttgggacgacatctgccttc

SEQ ID NO: 3697832 - DNA, 25 bp, Homo sapien
gcacggactcaagggctgtgtgccc

SEQ ID NO: 3697833 - DNA, 25 bp, Homo sapien
gaaatttacatgtgccttccactgg

SEQ ID NO: 3697834 - DNA, 25 bp, Homo sapien
tgtgacaagagtacaggctcatggc

SEQ ID NO: 3697835 - DNA, 25 bp, Homo sapien
ccagctactatgagagaggagggca

SEQ ID NO: 3697836 - DNA, 25 bp, Homo sapien
gtagccgaagcccttctcaccagtg

SEQ ID NO: 3697837 - DNA, 25 bp, Homo sapien
ggtggagcctttgtagccgaagccc

SEQ ID NO: 3697838 - DNA, 25 bp, Homo sapien
aagcccttctcaccagtgcacaggg

SEQ ID NO: 3697839 - DNA, 25 bp, Homo sapien
gcctttgtagccgaagcccttctca

SEQ ID NO: 3697840 - DNA, 25 bp, Homo sapien
aagcctggatacagggctaatgcag

SEQ ID NO: 3697841 - DNA, 25 bp, Homo sapien
ttccatgtgcagtgaagcctggata

SEQ ID NO: 3697842 - DNA, 25 bp, Homo sapien
ctgccactgacctggagtggcagcg

SEQ ID NO: 3697843 - DNA, 25 bp, Homo sapien
ccaggcatcttcacacacccacaag

SEQ ID NO: 3697844 - DNA, 25 bp, Homo sapien
caacggatgactcaggactctggtc

SEQ ID NO: 3697845 - DNA, 25 bp, Homo sapien
acttaccacggtacgatgacggcca

SEQ ID NO: 3697846 - DNA, 25 bp, Homo sapien
tctagtctgtgggagtaccagcagc

SEQ ID NO: 3697847 - DNA, 25 bp, Homo sapien
caagtcctggcgtgtgtgttcctgc

SEQ ID NO: 3697848 - DNA, 25 bp, Homo sapien
ggacttcccgcctgtgccattgtgg

SEQ ID NO: 3697849 - DNA, 25 bp, Homo sapien
tcagtgtaaagttctcgtcaggaaa

SEQ ID NO: 3697850 - DNA, 25 bp, Homo sapien
tccgtagatggacttcccgcctgtg

SEQ ID NO: 3697851 - DNA, 25 bp, Homo sapien
ttctcgtcaggaaagcggcttccgt

SEQ ID NO: 3697852 - DNA, 25 bp, Homo sapien
gatgctgccacaataaccactctgg

SEQ ID NO: 3697853 - DNA, 25 bp, Homo sapien
tactggacggtgactgcatgtggcc

SEQ ID NO: 3697854 - DNA, 25 bp, Homo sapien
gacattcgagtctgcagatcctggg

SEQ ID NO: 3697855 - DNA, 25 bp, Homo sapien
cagcctacagtgtcgcagggaggaa

SEQ ID NO: 3697856 - DNA, 25 bp, Homo sapien
ccacgctgcccctggaggcacctgc

SEQ ID NO: 3697857 - DNA, 25 bp, Homo sapien
agggctgagccacgctgcccctgga

SEQ ID NO: 3697858 - DNA, 25 bp, Homo sapien
gagccacgctgcccctggaggcacc

SEQ ID NO: 3697859 - DNA, 25 bp, Homo sapien
ctgagccacgctgcccctggaggca

SEQ ID NO: 3697860 - DNA, 25 bp, Homo sapien
ttaggaccagcattagccatggaca

SEQ ID NO: 3697861 - DNA, 25 bp, Homo sapien
cgttggtgttaggaccagcattagc

SEQ ID NO: 3697862 - DNA, 25 bp, Homo sapien
ggtgttaggaccagcattagccatg

SEQ ID NO: 3697863 - DNA, 25 bp, Homo sapien
gagccgttggtgttaggaccagcat

SEQ ID NO: 3697864 - DNA, 25 bp, Homo sapien
tgacagcaacaatgggaacccgaac

SEQ ID NO: 3697865 - DNA, 25 bp, Homo sapien
tgtaaactgcctgcccctaaaagtg

SEQ ID NO: 3697866 - DNA, 25 bp, Homo sapien
gagacatccctaaaatccatgggca

SEQ ID NO: 3697867 - DNA, 25 bp, Homo sapien
tgtatctggtagagaaaccctttcg

SEQ ID NO: 3697868 - DNA, 25 bp, Homo sapien
tgtaaaaggcggctcagtccagctc

SEQ ID NO: 3697869 - DNA, 25 bp, Homo sapien
caagagtcaaaggaacaagggtggt

SEQ ID NO: 3697870 - DNA, 25 bp, Homo sapien
tggtaaccccatctatcaaaagtgg

SEQ ID NO: 3697871 - DNA, 25 bp, Homo sapien
tccagcgaagctggcgtggttccag

SEQ ID NO: 3697872 - DNA, 25 bp, Homo sapien
gccccaaatacaccccagaggatgc

SEQ ID NO: 3697873 - DNA, 25 bp, Homo sapien
ttagttaccgaaaacagcaattctg

SEQ ID NO: 3697874 - DNA, 25 bp, Homo sapien
tccccatggaatagctagatctacc

SEQ ID NO: 3697875 - DNA, 25 bp, Homo sapien
cgatcaagccttgttgagcgcccca

SEQ ID NO: 3697876 - DNA, 25 bp, Homo sapien
cgcaatgtcatccaatgccatggac

SEQ ID NO: 3697877 - DNA, 25 bp, Homo sapien
tgaggacgggtgacccgggtgagca

SEQ ID NO: 3697878 - DNA, 25 bp, Homo sapien
ggtgagcaacagtgtagcgcaatgt

SEQ ID NO: 3697879 - DNA, 25 bp, Homo sapien
cagtgtagcgcaatgtcatccaatg

SEQ ID NO: 3697880 - DNA, 25 bp, Homo sapien
cccactcttagagccgaaagattct

SEQ ID NO: 3697881 - DNA, 25 bp, Homo sapien
gacaatcttcttggatgtcctccca

SEQ ID NO: 3697882 - DNA, 25 bp, Homo sapien
gacgtgaccgaacacaacatgcttg

SEQ ID NO: 3697883 - DNA, 25 bp, Homo sapien
gattctattttcttcacgacgtcca

SEQ ID NO: 3697884 - DNA, 25 bp, Homo sapien
caaagatgcccagaaatgaggtcgt

SEQ ID NO: 3697885 - DNA, 25 bp, Homo sapien
tgggcacacgtatcgtttcaggcac

SEQ ID NO: 3697886 - DNA, 25 bp, Homo sapien
tcacattgtctaggcacagctcaag

SEQ ID NO: 3697887 - DNA, 25 bp, Homo sapien
cagctcaagtgaggtttgttcccag

SEQ ID NO: 3697888 - DNA, 25 bp, Homo sapien
tgatccaaacacctcgtagcaggcc

SEQ ID NO: 3697889 - DNA, 25 bp, Homo sapien
gaaaccatccacatgaacgtcctga

SEQ ID NO: 3697890 - DNA, 25 bp, Homo sapien
ccacggcgagctcagtaaagatcag

SEQ ID NO: 3697891 - DNA, 25 bp, Homo sapien
tatatcgcctccttatgcagctgag

SEQ ID NO: 3697892 - DNA, 25 bp, Homo sapien
tcttcacttactagcggtctattca

SEQ ID NO: 3697893 - DNA, 25 bp, Homo sapien
gagtgataggtagaatgcagcccag

SEQ ID NO: 3697894 - DNA, 25 bp, Homo sapien
tctttgcaggtagattttgattact

SEQ ID NO: 3697895 - DNA, 25 bp, Homo sapien
tattcataagcgatattggtccata

SEQ ID NO: 3697896 - DNA, 25 bp, Homo sapien
gccttcagcgagatggccaagcggt

SEQ ID NO: 3697897 - DNA, 25 bp, Homo sapien
gaacttggaaatgtcaaccggagcc

SEQ ID NO: 3697898 - DNA, 25 bp, Homo sapien
tatttgactaaccagcccctctgtg

SEQ ID NO: 3697899 - DNA, 25 bp, Homo sapien
tgtccatacgtgtgagtccagctaa

SEQ ID NO: 3697900 - DNA, 25 bp, Homo sapien
gagctgttcagcaggtagccactgc

SEQ ID NO: 3697901 - DNA, 25 bp, Homo sapien
cccaaagtgaccttgccagtgagct

SEQ ID NO: 3697902 - DNA, 25 bp, Homo sapien
tcaaaagggacaatcgcttgcagtt

SEQ ID NO: 3697903 - DNA, 25 bp, Homo sapien
caggccaggtgccattgagaattaa

SEQ ID NO: 3697904 - DNA, 25 bp, Homo sapien
gcccaaacctgaagtgggccttcat

SEQ ID NO: 3697905 - DNA, 25 bp, Homo sapien
gtcttgctgagcaaacgggacccaa

SEQ ID NO: 3697906 - DNA, 25 bp, Homo sapien
tggcccaactcaggcggtgactgca

SEQ ID NO: 3697907 - DNA, 25 bp, Homo sapien
gtgcagtcggaagaaaggtcttgct

SEQ ID NO: 3697908 - DNA, 25 bp, Homo sapien
ggtgattggtgctccaaagccttcc

SEQ ID NO: 3697909 - DNA, 25 bp, Homo sapien
ctgcagacaacaagcgggatccctg

SEQ ID NO: 3697910 - DNA, 25 bp, Homo sapien
catagttgtcgagggcacatgtgga

SEQ ID NO: 3697911 - DNA, 25 bp, Homo sapien
cttacttttcttccgcgcctggctg

SEQ ID NO: 3697912 - DNA, 25 bp, Homo sapien
ctgagagggagggaaacagagagaa

SEQ ID NO: 3697913 - DNA, 25 bp, Homo sapien
gagggaaacagagagaagagacaca

SEQ ID NO: 3697914 - DNA, 25 bp, Homo sapien
agggagggaaacagagagaagagac

SEQ ID NO: 3697915 - DNA, 25 bp, Homo sapien
agagggagggaaacagagagaagag

SEQ ID NO: 3697916 - DNA, 25 bp, Homo sapien
tcttccctcagattcactgggttgg

SEQ ID NO: 3697917 - DNA, 25 bp, Homo sapien
ctttgacctcaggacaagctggatt

SEQ ID NO: 3697918 - DNA, 25 bp, Homo sapien
ggttggaagtggaagaatcccaatc

SEQ ID NO: 3697919 - DNA, 25 bp, Homo sapien
ctcaggacaagctggattaggcaga

SEQ ID NO: 3697920 - DNA, 25 bp, Homo sapien
tttctgtcctccgggacctcatcca

SEQ ID NO: 3697921 - DNA, 25 bp, Homo sapien
gtttctgtcctccgggacctcatcc

SEQ ID NO: 3697922 - DNA, 25 bp, Homo sapien
ttctgtcctccgggacctcatccat

SEQ ID NO: 3697923 - DNA, 25 bp, Homo sapien
agctccttgtcctcccggaccttat

SEQ ID NO: 3697924 - DNA, 25 bp, Homo sapien
cagctccttgtcctcccggacctta

SEQ ID NO: 3697925 - DNA, 25 bp, Homo sapien
ttgtcctcccggaccttatccatct

SEQ ID NO: 3697926 - DNA, 25 bp, Homo sapien
ctcccggaccttatccatcttctgc

SEQ ID NO: 3697927 - DNA, 25 bp, Homo sapien
tggcgcaaacggcactgactcgacc

SEQ ID NO: 3697928 - DNA, 25 bp, Homo sapien
ctggcgcaaacggcactgactcgac

SEQ ID NO: 3697929 - DNA, 25 bp, Homo sapien
aaagccattcttacgtaatgctgag

SEQ ID NO: 3697930 - DNA, 25 bp, Homo sapien
acaaagccattcttacgtaatgctg

SEQ ID NO: 3697931 - DNA, 25 bp, Homo sapien
agccattcttacgtaatgctgagca

SEQ ID NO: 3697932 - DNA, 25 bp, Homo sapien
gcctttgagcaccacaaagccattc

SEQ ID NO: 3697933 - DNA, 25 bp, Homo sapien
ctggaagtcattccttttgatgttg

SEQ ID NO: 3697934 - DNA, 25 bp, Homo sapien
ggaagtcattccttttgatgttggg

SEQ ID NO: 3697935 - DNA, 25 bp, Homo sapien
agtcattccttttgatgttggggac

SEQ ID NO: 3697936 - DNA, 25 bp, Homo sapien
gaagtcattccttttgatgttgggg

SEQ ID NO: 3697937 - DNA, 25 bp, Homo sapien
tctccctcagggagacgaaggtcct

SEQ ID NO: 3697938 - DNA, 25 bp, Homo sapien
ggtctccctcagggagacgaaggtc

SEQ ID NO: 3697939 - DNA, 25 bp, Homo sapien
caaggtctccctcagggagacgaag

SEQ ID NO: 3697940 - DNA, 25 bp, Homo sapien
tccctcagggagacgaaggtcctct

SEQ ID NO: 3697941 - DNA, 25 bp, Homo sapien
gggagggcacaaggaccatttgcca

SEQ ID NO: 3697942 - DNA, 25 bp, Homo sapien
cacaaggaccatttgccagaatcca

SEQ ID NO: 3697943 - DNA, 25 bp, Homo sapien
cgtcaaataaattgtgtaggaggag

SEQ ID NO: 3697944 - DNA, 25 bp, Homo sapien
ggtggtgctcagggtaaagggctat

SEQ ID NO: 3697945 - DNA, 25 bp, Homo sapien
cattatctcacaaaccaggacatcg

SEQ ID NO: 3697946 - DNA, 25 bp, Homo sapien
ccaggacatcgtgattgccatgaaa

SEQ ID NO: 3697947 - DNA, 25 bp, Homo sapien
cacaaaccaggacatcgtgattgcc

SEQ ID NO: 3697948 - DNA, 25 bp, Homo sapien
catcgtgattgccatgaaatgttca

SEQ ID NO: 3697949 - DNA, 25 bp, Homo sapien
tctctgtcaattgtacaggggcctt

SEQ ID NO: 3697950 - DNA, 25 bp, Homo sapien
tctgtcaattgtacaggggccttcc

SEQ ID NO: 3697951 - DNA, 25 bp, Homo sapien
tgtcaattgtacaggggccttccca

SEQ ID NO: 3697952 - DNA, 25 bp, Homo sapien
ctgtcaattgtacaggggccttccc

SEQ ID NO: 3697953 - DNA, 25 bp, Homo sapien
cacttcagacctcggtgggcattca

SEQ ID NO: 3697954 - DNA, 25 bp, Homo sapien
ccagagccgttactacacacaaagg

SEQ ID NO: 3697955 - DNA, 25 bp, Homo sapien
cacaaaggctattgaccgagcacat

SEQ ID NO: 3697956 - DNA, 25 bp, Homo sapien
atcaggatgagcagtaccggccaag

SEQ ID NO: 3697957 - DNA, 25 bp, Homo sapien
tctgcagcccactgcctgcccagtg

SEQ ID NO: 3697958 - DNA, 25 bp, Homo sapien
ctctgcagcccactgcctgcccagt

SEQ ID NO: 3697959 - DNA, 25 bp, Homo sapien
ctgcagcccactgcctgcccagtgc

SEQ ID NO: 3697960 - DNA, 25 bp, Homo sapien
cagggaggatcctgtctggccttca

SEQ ID NO: 3697961 - DNA, 25 bp, Homo sapien
tggccttcagtttccatccccagga

SEQ ID NO: 3697962 - DNA, 25 bp, Homo sapien
ggctattagagctggaggcaccctt

SEQ ID NO: 3697963 - DNA, 25 bp, Homo sapien
gctattagagctggaggcaccctta

SEQ ID NO: 3697964 - DNA, 25 bp, Homo sapien
ggtgccccagaatggtggtgcccaa

SEQ ID NO: 3697965 - DNA, 25 bp, Homo sapien
cctaactgtgtggagctaaggacac

SEQ ID NO: 3697966 - DNA, 25 bp, Homo sapien
gcagctggcctatgcctctagggaa

SEQ ID NO: 3697967 - DNA, 25 bp, Homo sapien
tttggatgccaactcagtcccctga

SEQ ID NO: 3697968 - DNA, 25 bp, Homo sapien
cacacagagcctccagctgcttggg

SEQ ID NO: 3697969 - DNA, 25 bp, Homo sapien
ccacacacagagcctccagctgctt

SEQ ID NO: 3697970 - DNA, 25 bp, Homo sapien
acacagagcctccagctgcttgggt

SEQ ID NO: 3697971 - DNA, 25 bp, Homo sapien
acacacagagcctccagctgcttgg

SEQ ID NO: 3697972 - DNA, 25 bp, Homo sapien
tcactgactcacaccatctgtcctc

SEQ ID NO: 3697973 - DNA, 25 bp, Homo sapien
actcacaccatctgtcctcatccct

SEQ ID NO: 3697974 - DNA, 25 bp, Homo sapien
atctgtcctcatccctgctgtgtta

SEQ ID NO: 3697975 - DNA, 25 bp, Homo sapien
catctgtcctcatccctgctgtgtt

SEQ ID NO: 3697976 - DNA, 25 bp, Homo sapien
agctctggggagcccggggacctgg

SEQ ID NO: 3697977 - DNA, 25 bp, Homo sapien
gggacctgggctccagtgcagtctc

SEQ ID NO: 3697978 - DNA, 25 bp, Homo sapien
gaggaagagtaaggagctctgggga

SEQ ID NO: 3697979 - DNA, 25 bp, Homo sapien
ccagtgcagtctcctttctttcagt

SEQ ID NO: 3697980 - DNA, 25 bp, Homo sapien
tcaggcctccggctggaggttgtgg

SEQ ID NO: 3697981 - DNA, 25 bp, Homo sapien
acctggcatggcctcatgcttcagg

SEQ ID NO: 3697982 - DNA, 25 bp, Homo sapien
tggcacctggcatggcctcatgctt

SEQ ID NO: 3697983 - DNA, 25 bp, Homo sapien
ggcatggcctcatgcttcaggcctc

SEQ ID NO: 3697984 - DNA, 25 bp, Homo sapien
agtgctgggaagacccgaagctccc

SEQ ID NO: 3697985 - DNA, 25 bp, Homo sapien
gcagggcgggcgagaccagagtgct

SEQ ID NO: 3697986 - DNA, 25 bp, Homo sapien
cgagaccagagtgctgggaagaccc

SEQ ID NO: 3697987 - DNA, 25 bp, Homo sapien
ccccactgtgctctgtcaggactca

SEQ ID NO: 3697988 - DNA, 25 bp, Homo sapien
gggatggccgtgagcccatctgcca

SEQ ID NO: 3697989 - DNA, 25 bp, Homo sapien
ggatggccgtgagcccatctgccac

SEQ ID NO: 3697990 - DNA, 25 bp, Homo sapien
agggatggccgtgagcccatctgcc

SEQ ID NO: 3697991 - DNA, 25 bp, Homo sapien
cagggcttccaacacaaacgtcctt

SEQ ID NO: 3697992 - DNA, 25 bp, Homo sapien
gggcttccaacacaaacgtccttca

SEQ ID NO: 3697993 - DNA, 25 bp, Homo sapien
tccaacacaaacgtccttcacttcg

SEQ ID NO: 3697994 - DNA, 25 bp, Homo sapien
aacacaaacgtccttcacttcgcac

SEQ ID NO: 3697995 - DNA, 25 bp, Homo sapien
gccagggtctcctttgagaccatct

SEQ ID NO: 3697996 - DNA, 25 bp, Homo sapien
gggtctcctttgagaccatctctcc

SEQ ID NO: 3697997 - DNA, 25 bp, Homo sapien
cctgcctggcaggccgtgggatcca

SEQ ID NO: 3697998 - DNA, 25 bp, Homo sapien
ggccgtgggatccaggagtgccggg

SEQ ID NO: 3697999 - DNA, 25 bp, Homo sapien
ggacatggcatttctccaggtggac

SEQ ID NO: 3698000 - DNA, 25 bp, Homo sapien
tccaggcagcccatcatttccagga

SEQ ID NO: 3698001 - DNA, 25 bp, Homo sapien
atcatttccaggaggacatggcatt

SEQ ID NO: 3698002 - DNA, 25 bp, Homo sapien
tttccaggaggacatggcatttctc

SEQ ID NO: 3698003 - DNA, 25 bp, Homo sapien
agtcgtggagtgtggcttggagctc

SEQ ID NO: 3698004 - DNA, 25 bp, Homo sapien
gtcgtggagtgtggcttggagctcc

SEQ ID NO: 3698005 - DNA, 25 bp, Homo sapien
aagtcgtggagtgtggcttggagct

SEQ ID NO: 3698006 - DNA, 25 bp, Homo sapien
ggagtccgggtcaggccactgacca

SEQ ID NO: 3698007 - DNA, 25 bp, Homo sapien
agtccgggtcaggccactgaccact

SEQ ID NO: 3698008 - DNA, 25 bp, Homo sapien
cgggtcaggccactgaccactttgt

SEQ ID NO: 3698009 - DNA, 25 bp, Homo sapien
aggagtccgggtcaggccactgacc

SEQ ID NO: 3698010 - DNA, 25 bp, Homo sapien
gattccttgggacagcaatgcggcc

SEQ ID NO: 3698011 - DNA, 25 bp, Homo sapien
tctgagtagcggaagtctccagggc

SEQ ID NO: 3698012 - DNA, 25 bp, Homo sapien
tcagtcgggagtacaggcagttcct

SEQ ID NO: 3698013 - DNA, 25 bp, Homo sapien
catcaaaagtgatggactgcccatt

SEQ ID NO: 3698014 - DNA, 25 bp, Homo sapien
tgaaggcggctctaggtcaccctag

SEQ ID NO: 3698015 - DNA, 25 bp, Homo sapien
cctggccttctaacctcatggagag

SEQ ID NO: 3698016 - DNA, 25 bp, Homo sapien
tactcgggtcacatctgaaggcggc

SEQ ID NO: 3698017 - DNA, 25 bp, Homo sapien
gaatgcccactgaaatctgaagtag

SEQ ID NO: 3698018 - DNA, 25 bp, Homo sapien
cacagatatggagtgtttcatgcta

SEQ ID NO: 3698019 - DNA, 25 bp, Homo sapien
tccttatggcagttagagacaatat

SEQ ID NO: 3698020 - DNA, 25 bp, Homo sapien
tatgaatgtaatttgtgaaacaaca

SEQ ID NO: 3698021 - DNA, 25 bp, Homo sapien
catgaaatgggtaaggggactgcac

SEQ ID NO: 3698022 - DNA, 25 bp, Homo sapien
cattgcaaatgacgcaagtagagaa

SEQ ID NO: 3698023 - DNA, 25 bp, Homo sapien
ttgcaaatgacgcaagtagagaatc

SEQ ID NO: 3698024 - DNA, 25 bp, Homo sapien
gcaaatgacgcaagtagagaatctg

SEQ ID NO: 3698025 - DNA, 25 bp, Homo sapien
tccattgcaaatgacgcaagtagag

SEQ ID NO: 3698026 - DNA, 25 bp, Homo sapien
attaagtcttgtagggtgaatacat

SEQ ID NO: 3698027 - DNA, 25 bp, Homo sapien
tcttgtagggtgaatacatctttac

SEQ ID NO: 3698028 - DNA, 25 bp, Homo sapien
acatctttacttccagttttcatcc

SEQ ID NO: 3698029 - DNA, 25 bp, Homo sapien
aagtcttgtagggtgaatacatctt

SEQ ID NO: 3698030 - DNA, 25 bp, Homo sapien
tctcagtgcatcataactgacagca

SEQ ID NO: 3698031 - DNA, 25 bp, Homo sapien
tcatcttagggctggaacaccagta

SEQ ID NO: 3698032 - DNA, 25 bp, Homo sapien
gctggaacaccagtaaagcttctct

SEQ ID NO: 3698033 - DNA, 25 bp, Homo sapien
gtgcatcataactgacagcagcagg

SEQ ID NO: 3698034 - DNA, 25 bp, Homo sapien
aggtcacatccattagtgaagtcaa

SEQ ID NO: 3698035 - DNA, 25 bp, Homo sapien
aaccaggtcacatccattagtgaag

SEQ ID NO: 3698036 - DNA, 25 bp, Homo sapien
ccaaccaggtcacatccattagtga

SEQ ID NO: 3698037 - DNA, 25 bp, Homo sapien
gtcacatccattagtgaagtcaatg

SEQ ID NO: 3698038 - DNA, 25 bp, Homo sapien
gacttgcttggatgtggtaccattg

SEQ ID NO: 3698039 - DNA, 25 bp, Homo sapien
gcagcactaggaaactagttaatac

SEQ ID NO: 3698040 - DNA, 25 bp, Homo sapien
cagtgttgattatggtaagcataca

SEQ ID NO: 3698041 - DNA, 25 bp, Homo sapien
gttttaaccatacaagacttgcttg

SEQ ID NO: 3698042 - DNA, 25 bp, Homo sapien
ctgaaaagtgtcttgtctgttaatg

SEQ ID NO: 3698043 - DNA, 25 bp, Homo sapien
tgtcttgtctgttaatgtcatatga

SEQ ID NO: 3698044 - DNA, 25 bp, Homo sapien
agtgtcttgtctgttaatgtcatat

SEQ ID NO: 3698045 - DNA, 25 bp, Homo sapien
tcttgtctgttaatgtcatatgagc

SEQ ID NO: 3698046 - DNA, 25 bp, Homo sapien
gggcagtaaagacgctgtccagaag

SEQ ID NO: 3698047 - DNA, 25 bp, Homo sapien
cagctgagtcctggagggcagtaaa

SEQ ID NO: 3698048 - DNA, 25 bp, Homo sapien
cctggagggcagtaaagacgctgtc

SEQ ID NO: 3698049 - DNA, 25 bp, Homo sapien
agtcctggagggcagtaaagacgct

SEQ ID NO: 3698050 - DNA, 25 bp, Homo sapien
ctcctctccacgctggggatggagt

SEQ ID NO: 3698051 - DNA, 25 bp, Homo sapien
ggggatggagtctggctggccattg

SEQ ID NO: 3698052 - DNA, 25 bp, Homo sapien
gatggagtctggctggccattgctg

SEQ ID NO: 3698053 - DNA, 25 bp, Homo sapien
atggagtctggctggccattgctga

SEQ ID NO: 3698054 - DNA, 25 bp, Homo sapien
accttgtgggagatgccatacagag

SEQ ID NO: 3698055 - DNA, 25 bp, Homo sapien
tggcatggttgcggggctcctcctt

SEQ ID NO: 3698056 - DNA, 25 bp, Homo sapien
tccatgaccttgtgggagatgccat

SEQ ID NO: 3698057 - DNA, 25 bp, Homo sapien
ttctccatgaccttgtgggagatgc

SEQ ID NO: 3698058 - DNA, 25 bp, Homo sapien
caggaagtagatgttagggtcactg

SEQ ID NO: 3698059 - DNA, 25 bp, Homo sapien
ggaagtagatgttagggtcactgtt

SEQ ID NO: 3698060 - DNA, 25 bp, Homo sapien
aagtagatgttagggtcactgttgg

SEQ ID NO: 3698061 - DNA, 25 bp, Homo sapien
agatgttagggtcactgttggtggc

SEQ ID NO: 3698062 - DNA, 25 bp, Homo sapien
tctggtccaagatctgcttaagctc

SEQ ID NO: 3698063 - DNA, 25 bp, Homo sapien
tctgcttaagctccatgcccgtgag

SEQ ID NO: 3698064 - DNA, 25 bp, Homo sapien
gctctggtccaagatctgcttaagc

SEQ ID NO: 3698065 - DNA, 25 bp, Homo sapien
ggtccaagatctgcttaagctccat

SEQ ID NO: 3698066 - DNA, 25 bp, Homo sapien
gcagcaggccaggaccccgcctgac

SEQ ID NO: 3698067 - DNA, 25 bp, Homo sapien
cgggcagcaggccaggaccccgcct

SEQ ID NO: 3698068 - DNA, 25 bp, Homo sapien
ctgcaccagcgggcagcaggccagg

SEQ ID NO: 3698069 - DNA, 25 bp, Homo sapien
tgcaccagcgggcagcaggccagga

SEQ ID NO: 3698070 - DNA, 25 bp, Homo sapien
tgtggctgaagagcttggggaagag

SEQ ID NO: 3698071 - DNA, 25 bp, Homo sapien
cactgcagcctcgggagaagttgac

SEQ ID NO: 3698072 - DNA, 25 bp, Homo sapien
ggtagtagacctccatgtagttgtg

SEQ ID NO: 3698073 - DNA, 25 bp, Homo sapien
tctccttcaccgaggggtagtagac

SEQ ID NO: 3698074 - DNA, 25 bp, Homo sapien
cttaagcttggcctcaaagctgcag

SEQ ID NO: 3698075 - DNA, 25 bp, Homo sapien
gggcccagaagtggctgaagaactt

SEQ ID NO: 3698076 - DNA, 25 bp, Homo sapien
gcccagaagtggctgaagaacttat

SEQ ID NO: 3698077 - DNA, 25 bp, Homo sapien
ccagaagtggctgaagaacttattc

SEQ ID NO: 3698078 - DNA, 25 bp, Homo sapien
ctgggcccagaagtggctgaagaac

SEQ ID NO: 3698079 - DNA, 25 bp, Homo sapien
aagctggcagcctggccaccgggct

SEQ ID NO: 3698080 - DNA, 25 bp, Homo sapien
aggccctcctcctcgtctttgtggt

SEQ ID NO: 3698081 - DNA, 25 bp, Homo sapien
ggtctgaggcgatggtgctgctcca

SEQ ID NO: 3698082 - DNA, 25 bp, Homo sapien
gggtccactgctcagcctcaagctg

SEQ ID NO: 3698083 - DNA, 25 bp, Homo sapien
tggaggaggaagacggcaaactcgc

SEQ ID NO: 3698084 - DNA, 25 bp, Homo sapien
agggaagagccagtggaggaggaag

SEQ ID NO: 3698085 - DNA, 25 bp, Homo sapien
ccagtggaggaggaagacggcaaac

SEQ ID NO: 3698086 - DNA, 25 bp, Homo sapien
aagagccagtggaggaggaagacgg

SEQ ID NO: 3698087 - DNA, 25 bp, Homo sapien
ggaagtagacctccgtgaagttgca

SEQ ID NO: 3698088 - DNA, 25 bp, Homo sapien
ccccgtagcagctgtcctgctcgcc

SEQ ID NO: 3698089 - DNA, 25 bp, Homo sapien
gctcgcccagcttgcggtagtggaa

SEQ ID NO: 3698090 - DNA, 25 bp, Homo sapien
ggtccaggtcctgcttgccgccagg

SEQ ID NO: 3698091 - DNA, 25 bp, Homo sapien
tcctcctgcatgtgggggaagtaga

SEQ ID NO: 3698092 - DNA, 25 bp, Homo sapien
cctcctcctgcatgtgggggaagta

SEQ ID NO: 3698093 - DNA, 25 bp, Homo sapien
ctcctcctcctgcatgtgggggaag

SEQ ID NO: 3698094 - DNA, 25 bp, Homo sapien
cctcctgcatgtgggggaagtagac

SEQ ID NO: 3698095 - DNA, 25 bp, Homo sapien
ttggagcggcaccgctcgcccttga

SEQ ID NO: 3698096 - DNA, 25 bp, Homo sapien
tggagcggcaccgctcgcccttgaa

SEQ ID NO: 3698097 - DNA, 25 bp, Homo sapien
cttggagcggcaccgctcgcccttg

SEQ ID NO: 3698098 - DNA, 25 bp, Homo sapien
ggagcggcaccgctcgcccttgaag

SEQ ID NO: 3698099 - DNA, 25 bp, Homo sapien
caatttgaccaagtcgataggtacc

SEQ ID NO: 3698100 - DNA, 25 bp, Homo sapien
ctccaatttgaccaagtcgataggt

SEQ ID NO: 3698101 - DNA, 25 bp, Homo sapien
agtcgataggtaccagtcagatctt

SEQ ID NO: 3698102 - DNA, 25 bp, Homo sapien
ttgaccaagtcgataggtaccagtc

SEQ ID NO: 3698103 - DNA, 25 bp, Homo sapien
cgttgctgagcaggccgtcggcgcc

SEQ ID NO: 3698104 - DNA, 25 bp, Homo sapien
ctcgttgctgagcaggccgtcggcg

SEQ ID NO: 3698105 - DNA, 25 bp, Homo sapien
gtcggcgccgggcacctccaagttg

SEQ ID NO: 3698106 - DNA, 25 bp, Homo sapien
actgtgaagatgctcgttgctgagc

SEQ ID NO: 3698107 - DNA, 25 bp, Homo sapien
atagccacttccctgtggtacaaat

SEQ ID NO: 3698108 - DNA, 25 bp, Homo sapien
tagccacttccctgtggtacaaatg

SEQ ID NO: 3698109 - DNA, 25 bp, Homo sapien
tcttgccaataaaatgtgccaacat

SEQ ID NO: 3698110 - DNA, 25 bp, Homo sapien
ggtgaatcctcttgccaataaaatg

SEQ ID NO: 3698111 - DNA, 25 bp, Homo sapien
cttttcttcctcgtggtgaatcctc

SEQ ID NO: 3698112 - DNA, 25 bp, Homo sapien
tcgtggtgaatcctcttgccaataa

SEQ ID NO: 3698113 - DNA, 25 bp, Homo sapien
aggtcttagttgcaccttggcaggg

SEQ ID NO: 3698114 - DNA, 25 bp, Homo sapien
tgggcagccagattcgctccggcct

SEQ ID NO: 3698115 - DNA, 25 bp, Homo sapien
aaggtcttagttgcaccttggcagg

SEQ ID NO: 3698116 - DNA, 25 bp, Homo sapien
attcgctccggcctgggttgtgggt

SEQ ID NO: 3698117 - DNA, 25 bp, Homo sapien
caacaaggaagtggtggggagcaca

SEQ ID NO: 3698118 - DNA, 25 bp, Homo sapien
tagggacaaagtggaggagcaacaa

SEQ ID NO: 3698119 - DNA, 25 bp, Homo sapien
ctagggacaaagtggaggagcaaca

SEQ ID NO: 3698120 - DNA, 25 bp, Homo sapien
gggagcacacctttagaacctgggc

SEQ ID NO: 3698121 - DNA, 25 bp, Homo sapien
cacaagggcctgaatctgacttctt

SEQ ID NO: 3698122 - DNA, 25 bp, Homo sapien
tcccacctagagctgggctgtaatt

SEQ ID NO: 3698123 - DNA, 25 bp, Homo sapien
tcttgtggaaagcattgggcagagc

SEQ ID NO: 3698124 - DNA, 25 bp, Homo sapien
cagagcttcacagtcccacctagag

SEQ ID NO: 3698125 - DNA, 25 bp, Homo sapien
ctcctggtcatgctcccactggtca

SEQ ID NO: 3698126 - DNA, 25 bp, Homo sapien
ggcgaccccacattgtgaccagagc

SEQ ID NO: 3698127 - DNA, 25 bp, Homo sapien
tcctggtcatgctcccactggtcac

SEQ ID NO: 3698128 - DNA, 25 bp, Homo sapien
cggggcgaccccacattgtgaccag

SEQ ID NO: 3698129 - DNA, 25 bp, Homo sapien
cttcgctctcatggcgtccttcttg

SEQ ID NO: 3698130 - DNA, 25 bp, Homo sapien
cggccttcgctctcatggcgtcctt

SEQ ID NO: 3698131 - DNA, 25 bp, Homo sapien
gccttcgctctcatggcgtccttct

SEQ ID NO: 3698132 - DNA, 25 bp, Homo sapien
cgctctcatggcgtccttcttggtg

SEQ ID NO: 3698133 - DNA, 25 bp, Homo sapien
ttgcaggaaaatgtaacagcggcca

SEQ ID NO: 3698134 - DNA, 25 bp, Homo sapien
ttttgaagacatttggactcaagaa

SEQ ID NO: 3698135 - DNA, 25 bp, Homo sapien
gcaggaaaatgtaacagcggccaca

SEQ ID NO: 3698136 - DNA, 25 bp, Homo sapien
tttggactcaagaaggcagagttgc

SEQ ID NO: 3698137 - DNA, 25 bp, Homo sapien
gagaatcactgtccgtttattagtg

SEQ ID NO: 3698138 - DNA, 25 bp, Homo sapien
tagaagaaactggtcaaaggagatg

SEQ ID NO: 3698139 - DNA, 25 bp, Homo sapien
ttagtgtcaaaatgataggaaagag

SEQ ID NO: 3698140 - DNA, 25 bp, Homo sapien
gagcactcatgttctgtgttgtgaa

SEQ ID NO: 3698141 - DNA, 25 bp, Homo sapien
cagcggcctcacttcgtgaacaaag

SEQ ID NO: 3698142 - DNA, 25 bp, Homo sapien
tccaggaaagagtggctatgtgacc

SEQ ID NO: 3698143 - DNA, 25 bp, Homo sapien
tcttgacgaatttcaacagcggcct

SEQ ID NO: 3698144 - DNA, 25 bp, Homo sapien
tctcagccgatccagactattaggt

SEQ ID NO: 3698145 - DNA, 25 bp, Homo sapien
ctgcagagggggaggggcagtgggc

SEQ ID NO: 3698146 - DNA, 25 bp, Homo sapien
tgcagagggggaggggcagtgggca

SEQ ID NO: 3698147 - DNA, 25 bp, Homo sapien
cagagggggaggggcagtgggcagc

SEQ ID NO: 3698148 - DNA, 25 bp, Homo sapien
gagggggaggggcagtgggcagctg

SEQ ID NO: 3698149 - DNA, 25 bp, Homo sapien
tgaaagtaaacaggttcctggaaca

SEQ ID NO: 3698150 - DNA, 25 bp, Homo sapien
gcagtttccgcaataagaaaagcca

SEQ ID NO: 3698151 - DNA, 25 bp, Homo sapien
actgaccaccgccgtctggcagttt

SEQ ID NO: 3698152 - DNA, 25 bp, Homo sapien
aaagccaagggtaagacccagagag

SEQ ID NO: 3698153 - DNA, 25 bp, Homo sapien
accgccgtctggcagtttccgcaat

SEQ ID NO: 3698154 - DNA, 25 bp, Homo sapien
atctggacaaagacgttggaagccc

SEQ ID NO: 3698155 - DNA, 25 bp, Homo sapien
tctggacaaagacgttggaagcccc

SEQ ID NO: 3698156 - DNA, 25 bp, Homo sapien
gtctgcgcctgagcggccttcacag

SEQ ID NO: 3698157 - DNA, 25 bp, Homo sapien
ttaggaccaaggtctgcgcctgagc

SEQ ID NO: 3698158 - DNA, 25 bp, Homo sapien
ggacacacaacacctccgcagaggg

SEQ ID NO: 3698159 - DNA, 25 bp, Homo sapien
aggtggacacacaacacctccgcag

SEQ ID NO: 3698160 - DNA, 25 bp, Homo sapien
cacctgggcagccataacaggcacc

SEQ ID NO: 3698161 - DNA, 25 bp, Homo sapien
acctgggcagccataacaggcacca

SEQ ID NO: 3698162 - DNA, 25 bp, Homo sapien
ttcccttgggacacaatggggggca

SEQ ID NO: 3698163 - DNA, 25 bp, Homo sapien
ggttacaggagtcatctggcggggc

SEQ ID NO: 3698164 - DNA, 25 bp, Homo sapien
ttacaggagtcatctggcggggcct

SEQ ID NO: 3698165 - DNA, 25 bp, Homo sapien
tggggttacaggagtcatctggcgg

SEQ ID NO: 3698166 - DNA, 25 bp, Homo sapien
tacaggagtcatctggcggggcctt

SEQ ID NO: 3698167 - DNA, 25 bp, Homo sapien
ccagagtcggaagttctcatagaca

SEQ ID NO: 3698168 - DNA, 25 bp, Homo sapien
tgctgccagagtcggaagttctcat

SEQ ID NO: 3698169 - DNA, 25 bp, Homo sapien
gccaggggcttgtagtgctgccaga

SEQ ID NO: 3698170 - DNA, 25 bp, Homo sapien
agtgctgccagagtcggaagttctc

SEQ ID NO: 3698171 - DNA, 25 bp, Homo sapien
tccagaaccaaagcagagcggtgtc

SEQ ID NO: 3698172 - DNA, 25 bp, Homo sapien
cagaaccaaagcagagcggtgtcca

SEQ ID NO: 3698173 - DNA, 25 bp, Homo sapien
ccagaaccaaagcagagcggtgtcc

SEQ ID NO: 3698174 - DNA, 25 bp, Homo sapien
caaagttgctcgtgtgctgccattc

SEQ ID NO: 3698175 - DNA, 25 bp, Homo sapien
tcaaagttgctcgtgtgctgccatt

SEQ ID NO: 3698176 - DNA, 25 bp, Homo sapien
gtcaaagttgctcgtgtgctgccat

SEQ ID NO: 3698177 - DNA, 25 bp, Homo sapien
aaagttgctcgtgtgctgccattcc

SEQ ID NO: 3698178 - DNA, 25 bp, Homo sapien
ctggctgcttgaccacctcaggggc

SEQ ID NO: 3698179 - DNA, 25 bp, Homo sapien
gccggcgggccttggtcactggcct

SEQ ID NO: 3698180 - DNA, 25 bp, Homo sapien
cggcgggccttggtcactggcctct

SEQ ID NO: 3698181 - DNA, 25 bp, Homo sapien
tggccggcgggccttggtcactggc

SEQ ID NO: 3698182 - DNA, 25 bp, Homo sapien
ggtggtggccggcgggccttggtca

SEQ ID NO: 3698183 - DNA, 25 bp, Homo sapien
ggtggtggcaggcgggccttggtct

SEQ ID NO: 3698184 - DNA, 25 bp, Homo sapien
tgggtggtggcaggcgggccttggt

SEQ ID NO: 3698185 - DNA, 25 bp, Homo sapien
ctgggtggtggcaggcgggccttgg

SEQ ID NO: 3698186 - DNA, 25 bp, Homo sapien
gggtggtggcaggcgggccttggtc

SEQ ID NO: 3698187 - DNA, 25 bp, Homo sapien
tcctccatgatgtccacatactcct

SEQ ID NO: 3698188 - DNA, 25 bp, Homo sapien
ctccatgatgtccacatactcctgc

SEQ ID NO: 3698189 - DNA, 25 bp, Homo sapien
cctccatgatgtccacatactcctg

SEQ ID NO: 3698190 - DNA, 25 bp, Homo sapien
acagcttgtcaatgtagctcaggag

SEQ ID NO: 3698191 - DNA, 25 bp, Homo sapien
gtgacgaagtctttctgggaacaca

SEQ ID NO: 3698192 - DNA, 25 bp, Homo sapien
gacgaagtctttctgggaacacagc

SEQ ID NO: 3698193 - DNA, 25 bp, Homo sapien
tgggaacacagcttgtcaatgtagc

SEQ ID NO: 3698194 - DNA, 25 bp, Homo sapien
ccaagaaatccatctgtggatctgg

SEQ ID NO: 3698195 - DNA, 25 bp, Homo sapien
caagaaatccatctgtggatctggg

SEQ ID NO: 3698196 - DNA, 25 bp, Homo sapien
ctgggcaagggtgagtccttcctcc

SEQ ID NO: 3698197 - DNA, 25 bp, Homo sapien
cttagaagaacttgagtccaaccgg

SEQ ID NO: 3698198 - DNA, 25 bp, Homo sapien
tctgcctcgtccctgagagtcccgg

SEQ ID NO: 3698199 - DNA, 25 bp, Homo sapien
aagaacttgagtccaaccgggctgt

SEQ ID NO: 3698200 - DNA, 25 bp, Homo sapien
gggctgccctcgcatgctgtttctc

SEQ ID NO: 3698201 - DNA, 25 bp, Homo sapien
tgggaacccaagaggaaggccaggc

SEQ ID NO: 3698202 - DNA, 25 bp, Homo sapien
gagaggttggccaggcagccctcag

SEQ ID NO: 3698203 - DNA, 25 bp, Homo sapien
ccttggtacccacgccagggcaggt

SEQ ID NO: 3698204 - DNA, 25 bp, Homo sapien
aaggcatccttggtacccacgccag

SEQ ID NO: 3698205 - DNA, 25 bp, Homo sapien
gccctgggtagggtgtcttttcagc

SEQ ID NO: 3698206 - DNA, 25 bp, Homo sapien
tccaaagagaggtcgcttcttggcc

SEQ ID NO: 3698207 - DNA, 25 bp, Homo sapien
tcagcagatggggactgatgagttc

SEQ ID NO: 3698208 - DNA, 25 bp, Homo sapien
ggtgctaggttgaggcctcttctct

SEQ ID NO: 3698209 - DNA, 25 bp, Homo sapien
ctgtcagtccctggagcatctgaag

SEQ ID NO: 3698210 - DNA, 25 bp, Homo sapien
tcagcatctgtcagtccctggagca

SEQ ID NO: 3698211 - DNA, 25 bp, Homo sapien
atctgtcagtccctggagcatctga

SEQ ID NO: 3698212 - DNA, 25 bp, Homo sapien
gcatctgtcagtccctggagcatct

SEQ ID NO: 3698213 - DNA, 25 bp, Homo sapien
ggtcacctcaacgtctcccctcagc

SEQ ID NO: 3698214 - DNA, 25 bp, Homo sapien
tctgtggatttagaaccaacatttg

SEQ ID NO: 3698215 - DNA, 25 bp, Homo sapien
ttctgtggatttagaaccaacattt

SEQ ID NO: 3698216 - DNA, 25 bp, Homo sapien
gcttgcctaaactccatctgaacaa

SEQ ID NO: 3698217 - DNA, 25 bp, Homo sapien
gaaccaaccaacataaggaattgca

SEQ ID NO: 3698218 - DNA, 25 bp, Homo sapien
gctctgctgaaccaaccaacataag

SEQ ID NO: 3698219 - DNA, 25 bp, Homo sapien
actcttttgctgatagtaagtaccc

SEQ ID NO: 3698220 - DNA, 25 bp, Homo sapien
aaactgctacaacccttctcaaggg

SEQ ID NO: 3698221 - DNA, 25 bp, Homo sapien
cacattttgttagccagatcttagg

SEQ ID NO: 3698222 - DNA, 25 bp, Homo sapien
gggaaacttggcaatacctaatata

SEQ ID NO: 3698223 - DNA, 25 bp, Homo sapien
gctgttaaggaatacaaactgctac

SEQ ID NO: 3698224 - DNA, 25 bp, Homo sapien
tcaaatacttcctcatgagccttat

SEQ ID NO: 3698225 - DNA, 25 bp, Homo sapien
tacttcctcatgagccttatatccc

SEQ ID NO: 3698226 - DNA, 25 bp, Homo sapien
tatttcattatattcccattccatc

SEQ ID NO: 3698227 - DNA, 25 bp, Homo sapien
tctttgcattctttcagtagttgcc

SEQ ID NO: 3698228 - DNA, 25 bp, Homo sapien
gaaaagtagcgtagcaattccttga

SEQ ID NO: 3698229 - DNA, 25 bp, Homo sapien
gaagtaaggtatgctcactgcaaaa

SEQ ID NO: 3698230 - DNA, 25 bp, Homo sapien
tgtgttcatacaaactgctcagtca

SEQ ID NO: 3698231 - DNA, 25 bp, Homo sapien
gaagtatctgatacataacaggcaa

SEQ ID NO: 3698232 - DNA, 25 bp, Homo sapien
gtcttgaattcatccctcttctcca

SEQ ID NO: 3698233 - DNA, 25 bp, Homo sapien
gactgtgtcttgaattcatccctct

SEQ ID NO: 3698234 - DNA, 25 bp, Homo sapien
ttagtcctttggactgtgtcttgaa

SEQ ID NO: 3698235 - DNA, 25 bp, Homo sapien
catttagtcctttggactgtgtctt

SEQ ID NO: 3698236 - DNA, 25 bp, Homo sapien
cattagatgatacctcagctgggct

SEQ ID NO: 3698237 - DNA, 25 bp, Homo sapien
caattgggatgaacagactgcctgc

SEQ ID NO: 3698238 - DNA, 25 bp, Homo sapien
aaagcgccggcttggttagcaggac

SEQ ID NO: 3698239 - DNA, 25 bp, Homo sapien
tacggcatggtgacagaaaagcgcc

SEQ ID NO: 3698240 - DNA, 25 bp, Homo sapien
ggtacatgagggcacagtcgtttct

SEQ ID NO: 3698241 - DNA, 25 bp, Homo sapien
catggtacatgagggcacagtcgtt

SEQ ID NO: 3698242 - DNA, 25 bp, Homo sapien
tgagggcacagtcgtttctcctaac

SEQ ID NO: 3698243 - DNA, 25 bp, Homo sapien
tacatgagggcacagtcgtttctcc

SEQ ID NO: 3698244 - DNA, 25 bp, Homo sapien
gcatgcatgttgctttctgtgatag

SEQ ID NO: 3698245 - DNA, 25 bp, Homo sapien
catgcatgttgctttctgtgatagt

SEQ ID NO: 3698246 - DNA, 25 bp, Homo sapien
tgttgctttctgtgatagtatccat

SEQ ID NO: 3698247 - DNA, 25 bp, Homo sapien
atgttgctttctgtgatagtatcca

SEQ ID NO: 3698248 - DNA, 25 bp, Homo sapien
catgcttaagcaccaaggcacttgc

SEQ ID NO: 3698249 - DNA, 25 bp, Homo sapien
gagggaaagaatgatgacagaactg

SEQ ID NO: 3698250 - DNA, 25 bp, Homo sapien
tattccaaatgctgtgatgatgagc

SEQ ID NO: 3698251 - DNA, 25 bp, Homo sapien
gaatgagtttggaaggttcatctct

SEQ ID NO: 3698252 - DNA, 25 bp, Homo sapien
aacaggaaattggtgagtgtctgaa

SEQ ID NO: 3698253 - DNA, 25 bp, Homo sapien
acaggaaattggtgagtgtctgaag

SEQ ID NO: 3698254 - DNA, 25 bp, Homo sapien
gaacaggaaattggtgagtgtctga

SEQ ID NO: 3698255 - DNA, 25 bp, Homo sapien
gctggggagattgacgtcctacccc

SEQ ID NO: 3698256 - DNA, 25 bp, Homo sapien
gggagattgacgtcctaccccactg

SEQ ID NO: 3698257 - DNA, 25 bp, Homo sapien
cagctggggagattgacgtcctacc

SEQ ID NO: 3698258 - DNA, 25 bp, Homo sapien
agcagctggggagattgacgtccta

SEQ ID NO: 3698259 - DNA, 25 bp, Homo sapien
tagccaggtataacacgatgaaacc

SEQ ID NO: 3698260 - DNA, 25 bp, Homo sapien
gccgtttggggcacatattctataa

SEQ ID NO: 3698261 - DNA, 25 bp, Homo sapien
aatatttgtaaggcaagcccagtgg

SEQ ID NO: 3698262 - DNA, 25 bp, Homo sapien
cgaatattggccgtttggggcacat

SEQ ID NO: 3698263 - DNA, 25 bp, Homo sapien
ttgagacaatcaatgacaagacttt

SEQ ID NO: 3698264 - DNA, 25 bp, Homo sapien
cccctaccagttctaggtcatctaa

SEQ ID NO: 3698265 - DNA, 25 bp, Homo sapien
tcaacaatcccctggattagaaccc

SEQ ID NO: 3698266 - DNA, 25 bp, Homo sapien
tatagacattgtgttcagtagaaat

SEQ ID NO: 3698267 - DNA, 25 bp, Homo sapien
tccattgggcctgtgacaattgcag

SEQ ID NO: 3698268 - DNA, 25 bp, Homo sapien
agccagctggtgtgaaaggtccatt

SEQ ID NO: 3698269 - DNA, 25 bp, Homo sapien
caattgcaggccgaaacatggagtt

SEQ ID NO: 3698270 - DNA, 25 bp, Homo sapien
aacatggagttttgacacagaggaa

SEQ ID NO: 3698271 - DNA, 25 bp, Homo sapien
tgtccttgtccatgagatctgaata

SEQ ID NO: 3698272 - DNA, 25 bp, Homo sapien
caacttgtaagtgctctccacttcc

SEQ ID NO: 3698273 - DNA, 25 bp, Homo sapien
tccttgtccatgagatctgaataaa

SEQ ID NO: 3698274 - DNA, 25 bp, Homo sapien
agcaaagcaacttgtaagtgctctc

SEQ ID NO: 3698275 - DNA, 25 bp, Homo sapien
ctagccaggagtttccagaagcttc

SEQ ID NO: 3698276 - DNA, 25 bp, Homo sapien
tagccaggagtttccagaagcttct

SEQ ID NO: 3698277 - DNA, 25 bp, Homo sapien
ttccagaagcttctgtgggagatca

SEQ ID NO: 3698278 - DNA, 25 bp, Homo sapien
cagaagcttctgtgggagatcatcc

SEQ ID NO: 3698279 - DNA, 25 bp, Homo sapien
cacaggtatggtctcatttgggccc

SEQ ID NO: 3698280 - DNA, 25 bp, Homo sapien
tatggtctcatttgggccctccagc

SEQ ID NO: 3698281 - DNA, 25 bp, Homo sapien
caaccctttcacaggtatggtctca

SEQ ID NO: 3698282 - DNA, 25 bp, Homo sapien
ttcacaggtatggtctcatttgggc

SEQ ID NO: 3698283 - DNA, 25 bp, Homo sapien
tctggtgatgcacagcacatctaga

SEQ ID NO: 3698284 - DNA, 25 bp, Homo sapien
caagactctggtgatgcacagcaca

SEQ ID NO: 3698285 - DNA, 25 bp, Homo sapien
aaaaaatagttggagagggcagaat

SEQ ID NO: 3698286 - DNA, 25 bp, Homo sapien
aggccaagactctggtgatgcacag

SEQ ID NO: 3698287 - DNA, 25 bp, Homo sapien
aagatgttaaattgcaactgcatgc

SEQ ID NO: 3698288 - DNA, 25 bp, Homo sapien
tgagtgagtggttgagtgataatgc

SEQ ID NO: 3698289 - DNA, 25 bp, Homo sapien
ttgagtgataatgcatcatcagatc

SEQ ID NO: 3698290 - DNA, 25 bp, Homo sapien
agtggttgagtgataatgcatcatc

SEQ ID NO: 3698291 - DNA, 25 bp, Homo sapien
catcatcagatctgtcttttccaca

SEQ ID NO: 3698292 - DNA, 25 bp, Homo sapien
agctccttgtcctcccggaccttat

SEQ ID NO: 3698293 - DNA, 25 bp, Homo sapien
cagctccttgtcctcccggacctta

SEQ ID NO: 3698294 - DNA, 25 bp, Homo sapien
ttgtcctcccggaccttatccatct

SEQ ID NO: 3698295 - DNA, 25 bp, Homo sapien
ctcccggaccttatccatcttctgc

SEQ ID NO: 3698296 - DNA, 25 bp, Homo sapien
tggcgcaaacggcactgactcgacc

SEQ ID NO: 3698297 - DNA, 25 bp, Homo sapien
ctggcgcaaacggcactgactcgac

SEQ ID NO: 3698298 - DNA, 25 bp, Homo sapien
acaaagccattcttacgtaatgctg

SEQ ID NO: 3698299 - DNA, 25 bp, Homo sapien
gcctttgagcaccacaaagccattc

SEQ ID NO: 3698300 - DNA, 25 bp, Homo sapien
agccattcttacgtaatgctgagca

SEQ ID NO: 3698301 - DNA, 25 bp, Homo sapien
aaagccattcttacgtaatgctgag

SEQ ID NO: 3698302 - DNA, 25 bp, Homo sapien
ggaagtcattccttttgatgttggg

SEQ ID NO: 3698303 - DNA, 25 bp, Homo sapien
agtcattccttttgatgttggggac

SEQ ID NO: 3698304 - DNA, 25 bp, Homo sapien
gaagtcattccttttgatgttgggg

SEQ ID NO: 3698305 - DNA, 25 bp, Homo sapien
ctggaagtcattccttttgatgttg

SEQ ID NO: 3698306 - DNA, 25 bp, Homo sapien
tctccctcagggagacgaaggtcct

SEQ ID NO: 3698307 - DNA, 25 bp, Homo sapien
ggtctccctcagggagacgaaggtc

SEQ ID NO: 3698308 - DNA, 25 bp, Homo sapien
caaggtctccctcagggagacgaag

SEQ ID NO: 3698309 - DNA, 25 bp, Homo sapien
tccctcagggagacgaaggtcctct

SEQ ID NO: 3698310 - DNA, 25 bp, Homo sapien
gggagggcacaaggaccatttgcca

SEQ ID NO: 3698311 - DNA, 25 bp, Homo sapien
cacaaggaccatttgccagaatcca

SEQ ID NO: 3698312 - DNA, 25 bp, Homo sapien
ggtggtgctcagggtaaagggctat

SEQ ID NO: 3698313 - DNA, 25 bp, Homo sapien
cgtcaaataaattgtgtaggaggag

SEQ ID NO: 3698314 - DNA, 25 bp, Homo sapien
tctaggcacattgaacagtctctac

SEQ ID NO: 3698315 - DNA, 25 bp, Homo sapien
tgacttgaaccactttgtaccttct

SEQ ID NO: 3698316 - DNA, 25 bp, Homo sapien
tacccaacttagtcctgaagagaga

SEQ ID NO: 3698317 - DNA, 25 bp, Homo sapien
tttggcactgcccttcaacatacgt

SEQ ID NO: 3698318 - DNA, 25 bp, Homo sapien
cctcattgcattttctactttcact

SEQ ID NO: 3698319 - DNA, 25 bp, Homo sapien
ctttgaagacttggatacattttcc

SEQ ID NO: 3698320 - DNA, 25 bp, Homo sapien
tgcattttctactttcactcttgct

SEQ ID NO: 3698321 - DNA, 25 bp, Homo sapien
acattttcctcattgcattttctac

SEQ ID NO: 3698322 - DNA, 25 bp, Homo sapien
tctgtcaattgtacaggggccttcc

SEQ ID NO: 3698323 - DNA, 25 bp, Homo sapien
tgtcaattgtacaggggccttccca

SEQ ID NO: 3698324 - DNA, 25 bp, Homo sapien
ctgtcaattgtacaggggccttccc

SEQ ID NO: 3698325 - DNA, 25 bp, Homo sapien
tctctgtcaattgtacaggggcctt

SEQ ID NO: 3698326 - DNA, 25 bp, Homo sapien
cacttcagacctcggtgggcattca

SEQ ID NO: 3698327 - DNA, 25 bp, Homo sapien
cacaaaggctattgaccgagcacat

SEQ ID NO: 3698328 - DNA, 25 bp, Homo sapien
ccagagccgttactacacacaaagg

SEQ ID NO: 3698329 - DNA, 25 bp, Homo sapien
atcaggatgagcagtaccggccaag

SEQ ID NO: 3698330 - DNA, 25 bp, Homo sapien
tctgcagcccactgcctgcccagtg

SEQ ID NO: 3698331 - DNA, 25 bp, Homo sapien
ctctgcagcccactgcctgcccagt

SEQ ID NO: 3698332 - DNA, 25 bp, Homo sapien
ctgcagcccactgcctgcccagtgc

SEQ ID NO: 3698333 - DNA, 25 bp, Homo sapien
tggccttcagtttccatccccagga

SEQ ID NO: 3698334 - DNA, 25 bp, Homo sapien
cagggaggatcctgtctggccttca

SEQ ID NO: 3698335 - DNA, 25 bp, Homo sapien
ggctattagagctggaggcaccctt

SEQ ID NO: 3698336 - DNA, 25 bp, Homo sapien
gctattagagctggaggcaccctta

SEQ ID NO: 3698337 - DNA, 25 bp, Homo sapien
ccttgcagcacgcaggcgagtgcat

SEQ ID NO: 3698338 - DNA, 25 bp, Homo sapien
atagtgtcccttgcagcacgcaggc

SEQ ID NO: 3698339 - DNA, 25 bp, Homo sapien
tctcaacatcaaactcggatagtgt

SEQ ID NO: 3698340 - DNA, 25 bp, Homo sapien
caaactcggatagtgtcccttgcag

SEQ ID NO: 3698341 - DNA, 25 bp, Homo sapien
tgctgcaatgatccaaaacgacggg

SEQ ID NO: 3698342 - DNA, 25 bp, Homo sapien
ttcccactgctagcacccagtgcag

SEQ ID NO: 3698343 - DNA, 25 bp, Homo sapien
aaaacgacgggaaagctctagcagc

SEQ ID NO: 3698344 - DNA, 25 bp, Homo sapien
tctctgtacgcctcatagagtgctg

SEQ ID NO: 3698345 - DNA, 25 bp, Homo sapien
tgccaaggagaataaggccatccag

SEQ ID NO: 3698346 - DNA, 25 bp, Homo sapien
ccaggatgtggccaaagacactgcc

SEQ ID NO: 3698347 - DNA, 25 bp, Homo sapien
agaatgccaaggagaataaggccat

SEQ ID NO: 3698348 - DNA, 25 bp, Homo sapien
ggatgtggccaaagacactgccttc

SEQ ID NO: 3698349 - DNA, 25 bp, Homo sapien
ggaagaagcttttcatgaccaacgg

SEQ ID NO: 3698350 - DNA, 25 bp, Homo sapien
aaaatgtctgggaagaagcttttca

SEQ ID NO: 3698351 - DNA, 25 bp, Homo sapien
cttttcatgaccaacggtgagcgga

SEQ ID NO: 3698352 - DNA, 25 bp, Homo sapien
aacggtgagcggatgcctttctcca

SEQ ID NO: 3698353 - DNA, 25 bp, Homo sapien
tgctgaggctaagctggccaacttg

SEQ ID NO: 3698354 - DNA, 25 bp, Homo sapien
gagagctacagagcctgagatcaga

SEQ ID NO: 3698355 - DNA, 25 bp, Homo sapien
gagatcagaactggaccacacgaag

SEQ ID NO: 3698356 - DNA, 25 bp, Homo sapien
tccctattgcgttgcagttgctgag

SEQ ID NO: 3698357 - DNA, 25 bp, Homo sapien
aggagactcccataggtgcccaggt

SEQ ID NO: 3698358 - DNA, 25 bp, Homo sapien
cctttagcagatgggccccggcttt

SEQ ID NO: 3698359 - DNA, 25 bp, Homo sapien
tacagacattcaagccacgtagggc

SEQ ID NO: 3698360 - DNA, 25 bp, Homo sapien
tttcttcagcggaaacagtccagtg

SEQ ID NO: 3698361 - DNA, 25 bp, Homo sapien
gacctgggcagcttgactaggctct

SEQ ID NO: 3698362 - DNA, 25 bp, Homo sapien
caaagatcgtatccgggacctgggc

SEQ ID NO: 3698363 - DNA, 25 bp, Homo sapien
gaggaaggcaagcatcaaagatcgt

SEQ ID NO: 3698364 - DNA, 25 bp, Homo sapien
ctaggctctggcgacaagaactgga

SEQ ID NO: 3698365 - DNA, 25 bp, Homo sapien
agggcctgatgacatgagtacacaa

SEQ ID NO: 3698366 - DNA, 25 bp, Homo sapien
gacacagccttgagagggatcttct

SEQ ID NO: 3698367 - DNA, 25 bp, Homo sapien
ggtgaggacccttgagaagccaaaa

SEQ ID NO: 3698368 - DNA, 25 bp, Homo sapien
ttctttaccacggaagcacctcttg

SEQ ID NO: 3698369 - DNA, 25 bp, Homo sapien
ggtgccccagaatggtggtgcccaa

SEQ ID NO: 3698370 - DNA, 25 bp, Homo sapien
gcagctggcctatgcctctagggaa

SEQ ID NO: 3698371 - DNA, 25 bp, Homo sapien
cctaactgtgtggagctaaggacac

SEQ ID NO: 3698372 - DNA, 25 bp, Homo sapien
tttggatgccaactcagtcccctga

SEQ ID NO: 3698373 - DNA, 25 bp, Homo sapien
ctaaagaaggaagggaatgaggcat

SEQ ID NO: 3698374 - DNA, 25 bp, Homo sapien
caccctgagttttcactaaagaagg

SEQ ID NO: 3698375 - DNA, 25 bp, Homo sapien
ctgagttttcactaaagaaggaagg

SEQ ID NO: 3698376 - DNA, 25 bp, Homo sapien
cacaccctgagttttcactaaagaa

SEQ ID NO: 3698377 - DNA, 25 bp, Homo sapien
cctctgcagggatatcctcttcaca

SEQ ID NO: 3698378 - DNA, 25 bp, Homo sapien
tctgcagggatatcctcttcacact

SEQ ID NO: 3698379 - DNA, 25 bp, Homo sapien
ccttgggcgcccatgccaagccacc

SEQ ID NO: 3698380 - DNA, 25 bp, Homo sapien
gggcgcccatgccaagccacctcag

SEQ ID NO: 3698381 - DNA, 25 bp, Homo sapien
caggttgatccaggccaacttgtct

SEQ ID NO: 3698382 - DNA, 25 bp, Homo sapien
tggtcaggttgatccaggccaactt

SEQ ID NO: 3698383 - DNA, 25 bp, Homo sapien
caggccaacttgtctgtcctgcgac

SEQ ID NO: 3698384 - DNA, 25 bp, Homo sapien
tccaggccaacttgtctgtcctgcg

SEQ ID NO: 3698385 - DNA, 25 bp, Homo sapien
acacagagcctccagctgcttgggt

SEQ ID NO: 3698386 - DNA, 25 bp, Homo sapien
acagagcctccagctgcttgggtct

SEQ ID NO: 3698387 - DNA, 25 bp, Homo sapien
ccacacacagagcctccagctgctt

SEQ ID NO: 3698388 - DNA, 25 bp, Homo sapien
acacacagagcctccagctgcttgg

SEQ ID NO: 3698389 - DNA, 25 bp, Homo sapien
tcactgactcacaccatctgtcctc

SEQ ID NO: 3698390 - DNA, 25 bp, Homo sapien
actcacaccatctgtcctcatccct

SEQ ID NO: 3698391 - DNA, 25 bp, Homo sapien
atctgtcctcatccctgctgtgtta

SEQ ID NO: 3698392 - DNA, 25 bp, Homo sapien
catctgtcctcatccctgctgtgtt

SEQ ID NO: 3698393 - DNA, 25 bp, Homo sapien
agctctggggagcccggggacctgg

SEQ ID NO: 3698394 - DNA, 25 bp, Homo sapien
gggacctgggctccagtgcagtctc

SEQ ID NO: 3698395 - DNA, 25 bp, Homo sapien
gaggaagagtaaggagctctgggga

SEQ ID NO: 3698396 - DNA, 25 bp, Homo sapien
ccagtgcagtctcctttctttcagt

SEQ ID NO: 3698397 - DNA, 25 bp, Homo sapien
ggcatggcctcatgcttcaggcctc

SEQ ID NO: 3698398 - DNA, 25 bp, Homo sapien
tcaggcctccggctggaggttgtgg

SEQ ID NO: 3698399 - DNA, 25 bp, Homo sapien
tggcacctggcatggcctcatgctt

SEQ ID NO: 3698400 - DNA, 25 bp, Homo sapien
acctggcatggcctcatgcttcagg

SEQ ID NO: 3698401 - DNA, 25 bp, Homo sapien
agtgctgggaagacccgaagctccc

SEQ ID NO: 3698402 - DNA, 25 bp, Homo sapien
gcagggcgggcgagaccagagtgct

SEQ ID NO: 3698403 - DNA, 25 bp, Homo sapien
cgagaccagagtgctgggaagaccc

SEQ ID NO: 3698404 - DNA, 25 bp, Homo sapien
ccccactgtgctctgtcaggactca

SEQ ID NO: 3698405 - DNA, 25 bp, Homo sapien
cagggcttccaacacaaacgtcctt

SEQ ID NO: 3698406 - DNA, 25 bp, Homo sapien
tccaacacaaacgtccttcacttcg

SEQ ID NO: 3698407 - DNA, 25 bp, Homo sapien
aacacaaacgtccttcacttcgcac

SEQ ID NO: 3698408 - DNA, 25 bp, Homo sapien
gggcttccaacacaaacgtccttca

SEQ ID NO: 3698409 - DNA, 25 bp, Homo sapien
cctgcctggcaggccgtgggatcca

SEQ ID NO: 3698410 - DNA, 25 bp, Homo sapien
gggtctcctttgagaccatctctcc

SEQ ID NO: 3698411 - DNA, 25 bp, Homo sapien
gccagggtctcctttgagaccatct

SEQ ID NO: 3698412 - DNA, 25 bp, Homo sapien
ggccgtgggatccaggagtgccggg

SEQ ID NO: 3698413 - DNA, 25 bp, Homo sapien
tccaggcagcccatcatttccagga

SEQ ID NO: 3698414 - DNA, 25 bp, Homo sapien
ggacatggcatttctccaggtggac

SEQ ID NO: 3698415 - DNA, 25 bp, Homo sapien
atcatttccaggaggacatggcatt

SEQ ID NO: 3698416 - DNA, 25 bp, Homo sapien
tttccaggaggacatggcatttctc

SEQ ID NO: 3698417 - DNA, 25 bp, Homo sapien
caggccagtgaagactcccacttgc

SEQ ID NO: 3698418 - DNA, 25 bp, Homo sapien
ggcaggccagtgaagactcccactt

SEQ ID NO: 3698419 - DNA, 25 bp, Homo sapien
gggcaggccagtgaagactcccact

SEQ ID NO: 3698420 - DNA, 25 bp, Homo sapien
ggccagtgaagactcccacttgctg

SEQ ID NO: 3698421 - DNA, 25 bp, Homo sapien
aagtcgtggagtgtggcttggagct

SEQ ID NO: 3698422 - DNA, 25 bp, Homo sapien
gtcgtggagtgtggcttggagctcc

SEQ ID NO: 3698423 - DNA, 25 bp, Homo sapien
agtcgtggagtgtggcttggagctc

SEQ ID NO: 3698424 - DNA, 25 bp, Homo sapien
tctgagtagcggaagtctccagggc

SEQ ID NO: 3698425 - DNA, 25 bp, Homo sapien
tcagtcgggagtacaggcagttcct

SEQ ID NO: 3698426 - DNA, 25 bp, Homo sapien
gattccttgggacagcaatgcggcc

SEQ ID NO: 3698427 - DNA, 25 bp, Homo sapien
catcaaaagtgatggactgcccatt

SEQ ID NO: 3698428 - DNA, 25 bp, Homo sapien
gaatgcccactgaaatctgaagtag

SEQ ID NO: 3698429 - DNA, 25 bp, Homo sapien
cctggccttctaacctcatggagag

SEQ ID NO: 3698430 - DNA, 25 bp, Homo sapien
tgaaggcggctctaggtcaccctag

SEQ ID NO: 3698431 - DNA, 25 bp, Homo sapien
tactcgggtcacatctgaaggcggc

SEQ ID NO: 3698432 - DNA, 25 bp, Homo sapien
gtcaaggttcttggcaaatgatagg

SEQ ID NO: 3698433 - DNA, 25 bp, Homo sapien
agtacataatatgctgtattagaag

SEQ ID NO: 3698434 - DNA, 25 bp, Homo sapien
tatgctgtattagaagtgcttgtca

SEQ ID NO: 3698435 - DNA, 25 bp, Homo sapien
gtattagaagtgcttgtcaaggttc

SEQ ID NO: 3698436 - DNA, 25 bp, Homo sapien
gaggtgggacacatatgtagctgcc

SEQ ID NO: 3698437 - DNA, 25 bp, Homo sapien
ggtcatgagagtgtggtcccattcc

SEQ ID NO: 3698438 - DNA, 25 bp, Homo sapien
taggatggctcactaaggcctggga

SEQ ID NO: 3698439 - DNA, 25 bp, Homo sapien
cattccatgcagacctgagactagg

SEQ ID NO: 3698440 - DNA, 25 bp, Homo sapien
gtatttatctatataattgggaatg

SEQ ID NO: 3698441 - DNA, 25 bp, Homo sapien
aagtatttatctatataattgggaa

SEQ ID NO: 3698442 - DNA, 25 bp, Homo sapien
agtatttatctatataattgggaat

SEQ ID NO: 3698443 - DNA, 25 bp, Homo sapien
taaaatagtatagtaacaacagaaa

SEQ ID NO: 3698444 - DNA, 25 bp, Homo sapien
ggtataagatcaacaaataatatat

SEQ ID NO: 3698445 - DNA, 25 bp, Homo sapien
tccaaaaagatggtagggtataaga

SEQ ID NO: 3698446 - DNA, 25 bp, Homo sapien
tcttacaaactagcaataattaatt

SEQ ID NO: 3698447 - DNA, 25 bp, Homo sapien
atgtataggttctcccggcccctat

SEQ ID NO: 3698448 - DNA, 25 bp, Homo sapien
tgtataggttctcccggcccctata

SEQ ID NO: 3698449 - DNA, 25 bp, Homo sapien
tcaggccccatccagcggtcctcct

SEQ ID NO: 3698450 - DNA, 25 bp, Homo sapien
gtcctcctggttcccattcagggcg

SEQ ID NO: 3698451 - DNA, 25 bp, Homo sapien
cctgtgtactcatgtcatcaggccc

SEQ ID NO: 3698452 - DNA, 25 bp, Homo sapien
tgtgtactcatgtcatcaggcccca

SEQ ID NO: 3698453 - DNA, 25 bp, Homo sapien
tcagagcctggagttagtgacaggg

SEQ ID NO: 3698454 - DNA, 25 bp, Homo sapien
tgtccaatccaatcagtgtgatgac

SEQ ID NO: 3698455 - DNA, 25 bp, Homo sapien
ggcaggtgcctcagcgatgtccaat

SEQ ID NO: 3698456 - DNA, 25 bp, Homo sapien
tcagcgatgtccaatccaatcagtg

SEQ ID NO: 3698457 - DNA, 25 bp, Homo sapien
tcaaggcttgtacctgtcgctagcg

SEQ ID NO: 3698458 - DNA, 25 bp, Homo sapien
tcctgttggcgctgaattggcattg

SEQ ID NO: 3698459 - DNA, 25 bp, Homo sapien
tccttcctccaagatgcagtgagag

SEQ ID NO: 3698460 - DNA, 25 bp, Homo sapien
cattggatgccacagtcaaggcttg

SEQ ID NO: 3698461 - DNA, 25 bp, Homo sapien
gactcaatttagttgcaagccacaa

SEQ ID NO: 3698462 - DNA, 25 bp, Homo sapien
tatgcacacactaaacaacagggcc

SEQ ID NO: 3698463 - DNA, 25 bp, Homo sapien
gaagtaaactttccaattgagaggc

SEQ ID NO: 3698464 - DNA, 25 bp, Homo sapien
caattggaacaagggcattaaacac

SEQ ID NO: 3698465 - DNA, 25 bp, Homo sapien
attaagtcttgtagggtgaatacat

SEQ ID NO: 3698466 - DNA, 25 bp, Homo sapien
tcttgtagggtgaatacatctttac

SEQ ID NO: 3698467 - DNA, 25 bp, Homo sapien
aagtcttgtagggtgaatacatctt

SEQ ID NO: 3698468 - DNA, 25 bp, Homo sapien
acatctttacttccagttttcatcc

SEQ ID NO: 3698469 - DNA, 25 bp, Homo sapien
gtgcatcataactgacagcagcagg

SEQ ID NO: 3698470 - DNA, 25 bp, Homo sapien
tcatcttagggctggaacaccagta

SEQ ID NO: 3698471 - DNA, 25 bp, Homo sapien
tctcagtgcatcataactgacagca

SEQ ID NO: 3698472 - DNA, 25 bp, Homo sapien
gctggaacaccagtaaagcttctct

SEQ ID NO: 3698473 - DNA, 25 bp, Homo sapien
ccaaccaggtcacatccattagtga

SEQ ID NO: 3698474 - DNA, 25 bp, Homo sapien
aggtcacatccattagtgaagtcaa

SEQ ID NO: 3698475 - DNA, 25 bp, Homo sapien
aaccaggtcacatccattagtgaag

SEQ ID NO: 3698476 - DNA, 25 bp, Homo sapien
gtcacatccattagtgaagtcaatg

SEQ ID NO: 3698477 - DNA, 25 bp, Homo sapien
tagtatcaggacaatctccagtgga

SEQ ID NO: 3698478 - DNA, 25 bp, Homo sapien
tcaggacaatctccagtggattcaa

SEQ ID NO: 3698479 - DNA, 25 bp, Homo sapien
tatcaggacaatctccagtggattc

SEQ ID NO: 3698480 - DNA, 25 bp, Homo sapien
atacttgtccttagtatcaggacaa

SEQ ID NO: 3698481 - DNA, 25 bp, Homo sapien
ctgaaaagtgtcttgtctgttaatg

SEQ ID NO: 3698482 - DNA, 25 bp, Homo sapien
tgtcttgtctgttaatgtcatatga

SEQ ID NO: 3698483 - DNA, 25 bp, Homo sapien
agtgtcttgtctgttaatgtcatat

SEQ ID NO: 3698484 - DNA, 25 bp, Homo sapien
tcttgtctgttaatgtcatatgagc

SEQ ID NO: 3698485 - DNA, 25 bp, Homo sapien
gacttatctgtggaaatatgataga

SEQ ID NO: 3698486 - DNA, 25 bp, Homo sapien
ccactttttccatacagtacacaca

SEQ ID NO: 3698487 - DNA, 25 bp, Homo sapien
tgcacttagatgaggtaattttttc

SEQ ID NO: 3698488 - DNA, 25 bp, Homo sapien
ttctgtgaaagtacaatagaacaca

SEQ ID NO: 3698489 - DNA, 25 bp, Homo sapien
gaatatacttgaacacatactttgc

SEQ ID NO: 3698490 - DNA, 25 bp, Homo sapien
tacagaccaacaataaacaataagg

SEQ ID NO: 3698491 - DNA, 25 bp, Homo sapien
aaattacagaccaacaataaacaat

SEQ ID NO: 3698492 - DNA, 25 bp, Homo sapien
actttgccagaggaaattcagagac

SEQ ID NO: 3698493 - DNA, 25 bp, Homo sapien
tggcttttggctagacaaagatttc

SEQ ID NO: 3698494 - DNA, 25 bp, Homo sapien
gagaaaccaaatgcctaaatacaaa

SEQ ID NO: 3698495 - DNA, 25 bp, Homo sapien
ttaatcaaattagataacagtccca

SEQ ID NO: 3698496 - DNA, 25 bp, Homo sapien
tagtagtacgaagtaagaggaaata

SEQ ID NO: 3698497 - DNA, 25 bp, Homo sapien
aagtcattagagtggcaattcaaca

SEQ ID NO: 3698498 - DNA, 25 bp, Homo sapien
aatgtcattaacttgctagtctgtc

SEQ ID NO: 3698499 - DNA, 25 bp, Homo sapien
tgtacgtacctacaagatacttgaa

SEQ ID NO: 3698500 - DNA, 25 bp, Homo sapien
tctagtgttgataatgagttggctg

SEQ ID NO: 3698501 - DNA, 25 bp, Homo sapien
gggcagtaaagacgctgtccagaag

SEQ ID NO: 3698502 - DNA, 25 bp, Homo sapien
cctggagggcagtaaagacgctgtc

SEQ ID NO: 3698503 - DNA, 25 bp, Homo sapien
ctgagtcctggagggcagtaaagac

SEQ ID NO: 3698504 - DNA, 25 bp, Homo sapien
ggccattgctgaccagctgagtcct

SEQ ID NO: 3698505 - DNA, 25 bp, Homo sapien
ctgctaggagcgcctctgggatcag

SEQ ID NO: 3698506 - DNA, 25 bp, Homo sapien
taggagcgcctctgggatcagctac

SEQ ID NO: 3698507 - DNA, 25 bp, Homo sapien
gctaggagcgcctctgggatcagct

SEQ ID NO: 3698508 - DNA, 25 bp, Homo sapien
gcctgctaggagcgcctctgggatc

SEQ ID NO: 3698509 - DNA, 25 bp, Homo sapien
gggcgagctgttctcgggttccaca

SEQ ID NO: 3698510 - DNA, 25 bp, Homo sapien
ggcgagctgttctcgggttccacat

SEQ ID NO: 3698511 - DNA, 25 bp, Homo sapien
ggccacacagagcccgagctcctgc

SEQ ID NO: 3698512 - DNA, 25 bp, Homo sapien
tggccacacagagcccgagctcctg

SEQ ID NO: 3698513 - DNA, 25 bp, Homo sapien
gcatggttgcggggctcctccttgc

SEQ ID NO: 3698514 - DNA, 25 bp, Homo sapien
ggtggcatggttgcggggctcctcc

SEQ ID NO: 3698515 - DNA, 25 bp, Homo sapien
agtaaggggtggtggcatggttgcg

SEQ ID NO: 3698516 - DNA, 25 bp, Homo sapien
agaggcttcttgtagtaaggggtgg

SEQ ID NO: 3698517 - DNA, 25 bp, Homo sapien
tccatgaccttgtgggagatgccat

SEQ ID NO: 3698518 - DNA, 25 bp, Homo sapien
ccgagggagggttcttcttctccat

SEQ ID NO: 3698519 - DNA, 25 bp, Homo sapien
tcttctccatgaccttgtgggagat

SEQ ID NO: 3698520 - DNA, 25 bp, Homo sapien
ttctccatgaccttgtgggagatgc

SEQ ID NO: 3698521 - DNA, 25 bp, Homo sapien
caggaagtagatgttagggtcactg

SEQ ID NO: 3698522 - DNA, 25 bp, Homo sapien
ggaagtagatgttagggtcactgtt

SEQ ID NO: 3698523 - DNA, 25 bp, Homo sapien
agatgttagggtcactgttggtggc

SEQ ID NO: 3698524 - DNA, 25 bp, Homo sapien
aagtagatgttagggtcactgttgg

SEQ ID NO: 3698525 - DNA, 25 bp, Homo sapien
tctgcttaagctccatgcccgtgag

SEQ ID NO: 3698526 - DNA, 25 bp, Homo sapien
gcttaagctccatgcccgtgagctg

SEQ ID NO: 3698527 - DNA, 25 bp, Homo sapien
gctctggtccaagatctgcttaagc

SEQ ID NO: 3698528 - DNA, 25 bp, Homo sapien
ggtccaagatctgcttaagctccat

SEQ ID NO: 3698529 - DNA, 25 bp, Homo sapien
agcctcgggagaagttgactgtggc

SEQ ID NO: 3698530 - DNA, 25 bp, Homo sapien
tctccttcaccgaggggtagtagac

SEQ ID NO: 3698531 - DNA, 25 bp, Homo sapien
ggtagtagacctccatgtagttgtg

SEQ ID NO: 3698532 - DNA, 25 bp, Homo sapien
gactccagcttaagcttggcctcaa

SEQ ID NO: 3698533 - DNA, 25 bp, Homo sapien
agaacttattcagctggggcaagca

SEQ ID NO: 3698534 - DNA, 25 bp, Homo sapien
acttattcagctggggcaagcactc

SEQ ID NO: 3698535 - DNA, 25 bp, Homo sapien
gaacttattcagctggggcaagcac

SEQ ID NO: 3698536 - DNA, 25 bp, Homo sapien
gaagaacttattcagctggggcaag

SEQ ID NO: 3698537 - DNA, 25 bp, Homo sapien
aagctggcagcctggccaccgggct

SEQ ID NO: 3698538 - DNA, 25 bp, Homo sapien
aggccctcctcctcgtctttgtggt

SEQ ID NO: 3698539 - DNA, 25 bp, Homo sapien
ggtctgaggcgatggtgctgctcca

SEQ ID NO: 3698540 - DNA, 25 bp, Homo sapien
gggtccactgctcagcctcaagctg

SEQ ID NO: 3698541 - DNA, 25 bp, Homo sapien
cagcttgcggtagtggaagagctca

SEQ ID NO: 3698542 - DNA, 25 bp, Homo sapien
ggaagtagacctccgtgaagttgca

SEQ ID NO: 3698543 - DNA, 25 bp, Homo sapien
ccccgtagcagctgtcctgctcgcc

SEQ ID NO: 3698544 - DNA, 25 bp, Homo sapien
ggtccaggtcctgcttgccgccagg

SEQ ID NO: 3698545 - DNA, 25 bp, Homo sapien
tcctcctgcatgtgggggaagtaga

SEQ ID NO: 3698546 - DNA, 25 bp, Homo sapien
cctcctcctgcatgtgggggaagta

SEQ ID NO: 3698547 - DNA, 25 bp, Homo sapien
ctcctcctcctgcatgtgggggaag

SEQ ID NO: 3698548 - DNA, 25 bp, Homo sapien
cctcctgcatgtgggggaagtagac

SEQ ID NO: 3698549 - DNA, 25 bp, Homo sapien
caggctggaggagttgtagcagttg

SEQ ID NO: 3698550 - DNA, 25 bp, Homo sapien
aggctggaggagttgtagcagttgt

SEQ ID NO: 3698551 - DNA, 25 bp, Homo sapien
gcaggctggaggagttgtagcagtt

SEQ ID NO: 3698552 - DNA, 25 bp, Homo sapien
ttgaccaagtcgataggtaccagtc

SEQ ID NO: 3698553 - DNA, 25 bp, Homo sapien
agtcgataggtaccagtcagatctt

SEQ ID NO: 3698554 - DNA, 25 bp, Homo sapien
caatttgaccaagtcgataggtacc

SEQ ID NO: 3698555 - DNA, 25 bp, Homo sapien
ctccaatttgaccaagtcgataggt

SEQ ID NO: 3698556 - DNA, 25 bp, Homo sapien
cgttgctgagcaggccgtcggcgcc

SEQ ID NO: 3698557 - DNA, 25 bp, Homo sapien
actgtgaagatgctcgttgctgagc

SEQ ID NO: 3698558 - DNA, 25 bp, Homo sapien
ctcgttgctgagcaggccgtcggcg

SEQ ID NO: 3698559 - DNA, 25 bp, Homo sapien
gtcggcgccgggcacctccaagttg

SEQ ID NO: 3698560 - DNA, 25 bp, Homo sapien
ccgggaagctcagtgagggaccacc

SEQ ID NO: 3698561 - DNA, 25 bp, Homo sapien
accgggaagctcagtgagggaccac

SEQ ID NO: 3698562 - DNA, 25 bp, Homo sapien
cgggaagctcagtgagggaccacca

SEQ ID NO: 3698563 - DNA, 25 bp, Homo sapien
atagccacttccctgtggtacaaat

SEQ ID NO: 3698564 - DNA, 25 bp, Homo sapien
ccaataaaatgtgccaacatcactt

SEQ ID NO: 3698565 - DNA, 25 bp, Homo sapien
tagccacttccctgtggtacaaatg

SEQ ID NO: 3698566 - DNA, 25 bp, Homo sapien
gccaataaaatgtgccaacatcact

SEQ ID NO: 3698567 - DNA, 25 bp, Homo sapien
catgatgttagatcctgttagggcg

SEQ ID NO: 3698568 - DNA, 25 bp, Homo sapien
ttagatcctgttagggcgacctccc

SEQ ID NO: 3698569 - DNA, 25 bp, Homo sapien
tcagcaatctggagcatgatgttag

SEQ ID NO: 3698570 - DNA, 25 bp, Homo sapien
tgttagggcgacctcccactcgcat

SEQ ID NO: 3698571 - DNA, 25 bp, Homo sapien
aggtcttagttgcaccttggcaggg

SEQ ID NO: 3698572 - DNA, 25 bp, Homo sapien
tgggcagccagattcgctccggcct

SEQ ID NO: 3698573 - DNA, 25 bp, Homo sapien
attcgctccggcctgggttgtgggt

SEQ ID NO: 3698574 - DNA, 25 bp, Homo sapien
aaggtcttagttgcaccttggcagg

SEQ ID NO: 3698575 - DNA, 25 bp, Homo sapien
tgtcaggctgagagctaggccacca

SEQ ID NO: 3698576 - DNA, 25 bp, Homo sapien
ctcaaccaacctgtccccatgggaa

SEQ ID NO: 3698577 - DNA, 25 bp, Homo sapien
tccccatgggaacctgaggcttcgg

SEQ ID NO: 3698578 - DNA, 25 bp, Homo sapien
acccagtgttgagaatatgtgttgg

SEQ ID NO: 3698579 - DNA, 25 bp, Homo sapien
atggcgagtgacgaggacaccctct

SEQ ID NO: 3698580 - DNA, 25 bp, Homo sapien
tacgttccacgagatgaaagcctgc

SEQ ID NO: 3698581 - DNA, 25 bp, Homo sapien
tccaggacaggaggtcagatgtgcc

SEQ ID NO: 3698582 - DNA, 25 bp, Homo sapien
gaggacaccctctaacatacgttcc

SEQ ID NO: 3698583 - DNA, 25 bp, Homo sapien
tatctgtgtgttcctagcatctggg

SEQ ID NO: 3698584 - DNA, 25 bp, Homo sapien
aataggtggttcattcttagggcca

SEQ ID NO: 3698585 - DNA, 25 bp, Homo sapien
actgtgcagagcagaacttttctag

SEQ ID NO: 3698586 - DNA, 25 bp, Homo sapien
ccttaggcaggtggttgctccttca

SEQ ID NO: 3698587 - DNA, 25 bp, Homo sapien
ggggcgaccccacattgtgaccaga

SEQ ID NO: 3698588 - DNA, 25 bp, Homo sapien
gggcgaccccacattgtgaccagag

SEQ ID NO: 3698589 - DNA, 25 bp, Homo sapien
ggcgaccccacattgtgaccagagc

SEQ ID NO: 3698590 - DNA, 25 bp, Homo sapien
cggggcgaccccacattgtgaccag

SEQ ID NO: 3698591 - DNA, 25 bp, Homo sapien
cttcgctctcatggcgtccttcttg

SEQ ID NO: 3698592 - DNA, 25 bp, Homo sapien
cggccttcgctctcatggcgtcctt

SEQ ID NO: 3698593 - DNA, 25 bp, Homo sapien
cgctctcatggcgtccttcttggtg

SEQ ID NO: 3698594 - DNA, 25 bp, Homo sapien
gccttcgctctcatggcgtccttct

SEQ ID NO: 3698595 - DNA, 25 bp, Homo sapien
gttgcggcggttgatggcagggaga

SEQ ID NO: 3698596 - DNA, 25 bp, Homo sapien
cggttgatggcagggagacgcgcag

SEQ ID NO: 3698597 - DNA, 25 bp, Homo sapien
gcggcggttgatggcagggagacgc

SEQ ID NO: 3698598 - DNA, 25 bp, Homo sapien
ggcggttgatggcagggagacgcgc

SEQ ID NO: 3698599 - DNA, 25 bp, Homo sapien
cgaaaattaggagtgatcgttgcgg

SEQ ID NO: 3698600 - DNA, 25 bp, Homo sapien
aattaggagtgatcgttgcggacgc

SEQ ID NO: 3698601 - DNA, 25 bp, Homo sapien
aaaattaggagtgatcgttgcggac

SEQ ID NO: 3698602 - DNA, 25 bp, Homo sapien
ggagtgatcgttgcggacgcgctgg

SEQ ID NO: 3698603 - DNA, 25 bp, Homo sapien
catgagttctcggttttgtcccaac

SEQ ID NO: 3698604 - DNA, 25 bp, Homo sapien
cccactgccccagttgtgtgagaag

SEQ ID NO: 3698605 - DNA, 25 bp, Homo sapien
tgcaagtctcaagcccagggttctc

SEQ ID NO: 3698606 - DNA, 25 bp, Homo sapien
catttcctaactcctgtccaatatc

SEQ ID NO: 3698607 - DNA, 25 bp, Homo sapien
gagaatcactgtccgtttattagtg

SEQ ID NO: 3698608 - DNA, 25 bp, Homo sapien
tagaagaaactggtcaaaggagatg

SEQ ID NO: 3698609 - DNA, 25 bp, Homo sapien
gagcactcatgttctgtgttgtgaa

SEQ ID NO: 3698610 - DNA, 25 bp, Homo sapien
ttagtgtcaaaatgataggaaagag

SEQ ID NO: 3698611 - DNA, 25 bp, Homo sapien
cagcggcctcacttcgtgaacaaag

SEQ ID NO: 3698612 - DNA, 25 bp, Homo sapien
tccaggaaagagtggctatgtgacc

SEQ ID NO: 3698613 - DNA, 25 bp, Homo sapien
tctcagccgatccagactattaggt

SEQ ID NO: 3698614 - DNA, 25 bp, Homo sapien
tcttgacgaatttcaacagcggcct

SEQ ID NO: 3698615 - DNA, 25 bp, Homo sapien
tgaaagtaaacaggttcctggaaca

SEQ ID NO: 3698616 - DNA, 25 bp, Homo sapien
ggaaccctgaagataatccataact

SEQ ID NO: 3698617 - DNA, 25 bp, Homo sapien
aagccagcgccctaggaaccctgaa

SEQ ID NO: 3698618 - DNA, 25 bp, Homo sapien
aagtgattgtcctggcaccacccac

SEQ ID NO: 3698619 - DNA, 25 bp, Homo sapien
cataactcgtcatgcccagcatgca

SEQ ID NO: 3698620 - DNA, 25 bp, Homo sapien
tggaggagcccctgcagtcacaagg

SEQ ID NO: 3698621 - DNA, 25 bp, Homo sapien
ggaggtgccagggttcgcagtcacg

SEQ ID NO: 3698622 - DNA, 25 bp, Homo sapien
tgcagtcacaaggagcggcccgtgt

SEQ ID NO: 3698623 - DNA, 25 bp, Homo sapien
tgccagggttcgcagtcacgcccgg

SEQ ID NO: 3698624 - DNA, 25 bp, Homo sapien
atctggacaaagacgttggaagccc

SEQ ID NO: 3698625 - DNA, 25 bp, Homo sapien
tctggacaaagacgttggaagcccc

SEQ ID NO: 3698626 - DNA, 25 bp, Homo sapien
agcctgccagacgaggggggcctga

SEQ ID NO: 3698627 - DNA, 25 bp, Homo sapien
gcctgccagacgaggggggcctgag

SEQ ID NO: 3698628 - DNA, 25 bp, Homo sapien
gccagacgaggggggcctgagttag

SEQ ID NO: 3698629 - DNA, 25 bp, Homo sapien
tggagcctgccagacgaggggggcc

SEQ ID NO: 3698630 - DNA, 25 bp, Homo sapien
acctgggcagccataacaggcacca

SEQ ID NO: 3698631 - DNA, 25 bp, Homo sapien
ttcccttgggacacaatggggggca

SEQ ID NO: 3698632 - DNA, 25 bp, Homo sapien
cacctgggcagccataacaggcacc

SEQ ID NO: 3698633 - DNA, 25 bp, Homo sapien
ggttacaggagtcatctggcggggc

SEQ ID NO: 3698634 - DNA, 25 bp, Homo sapien
ttacaggagtcatctggcggggcct

SEQ ID NO: 3698635 - DNA, 25 bp, Homo sapien
tggggttacaggagtcatctggcgg

SEQ ID NO: 3698636 - DNA, 25 bp, Homo sapien
tacaggagtcatctggcggggcctt

SEQ ID NO: 3698637 - DNA, 25 bp, Homo sapien
ccagagtcggaagttctcatagaca

SEQ ID NO: 3698638 - DNA, 25 bp, Homo sapien
tgctgccagagtcggaagttctcat

SEQ ID NO: 3698639 - DNA, 25 bp, Homo sapien
gccaggggcttgtagtgctgccaga

SEQ ID NO: 3698640 - DNA, 25 bp, Homo sapien
agtgctgccagagtcggaagttctc

SEQ ID NO: 3698641 - DNA, 25 bp, Homo sapien
tccagaaccaaagcagagcggtgtc

SEQ ID NO: 3698642 - DNA, 25 bp, Homo sapien
cagaaccaaagcagagcggtgtcca

SEQ ID NO: 3698643 - DNA, 25 bp, Homo sapien
ccagaaccaaagcagagcggtgtcc

SEQ ID NO: 3698644 - DNA, 25 bp, Homo sapien
ggtgggcttccgccgggccagcgat

SEQ ID NO: 3698645 - DNA, 25 bp, Homo sapien
ttccgccgggccagcgatcggagaa

SEQ ID NO: 3698646 - DNA, 25 bp, Homo sapien
ggcttccgccgggccagcgatcgga

SEQ ID NO: 3698647 - DNA, 25 bp, Homo sapien
tgggcttccgccgggccagcgatcg

SEQ ID NO: 3698648 - DNA, 25 bp, Homo sapien
aaagttgctcgtgtgctgccattcc

SEQ ID NO: 3698649 - DNA, 25 bp, Homo sapien
gtcaaagttgctcgtgtgctgccat

SEQ ID NO: 3698650 - DNA, 25 bp, Homo sapien
caaagttgctcgtgtgctgccattc

SEQ ID NO: 3698651 - DNA, 25 bp, Homo sapien
tcaaagttgctcgtgtgctgccatt

SEQ ID NO: 3698652 - DNA, 25 bp, Homo sapien
ctggctgcttgaccacctcaggggc

SEQ ID NO: 3698653 - DNA, 25 bp, Homo sapien
cctccatgatgtccacatactcctg

SEQ ID NO: 3698654 - DNA, 25 bp, Homo sapien
ctccatgatgtccacatactcctgc

SEQ ID NO: 3698655 - DNA, 25 bp, Homo sapien
tcctccatgatgtccacatactcct

SEQ ID NO: 3698656 - DNA, 25 bp, Homo sapien
gtgacgaagtctttctgggaacaca

SEQ ID NO: 3698657 - DNA, 25 bp, Homo sapien
acagcttgtcaatgtagctcaggag

SEQ ID NO: 3698658 - DNA, 25 bp, Homo sapien
gacgaagtctttctgggaacacagc

SEQ ID NO: 3698659 - DNA, 25 bp, Homo sapien
tgggaacacagcttgtcaatgtagc

SEQ ID NO: 3698660 - DNA, 25 bp, Homo sapien
gcacggagtaacctggagccaagga

SEQ ID NO: 3698661 - DNA, 25 bp, Homo sapien
tcctgggcacggagtaacctggagc

SEQ ID NO: 3698662 - DNA, 25 bp, Homo sapien
tgggcacggagtaacctggagccaa

SEQ ID NO: 3698663 - DNA, 25 bp, Homo sapien
cacggagtaacctggagccaaggac

SEQ ID NO: 3698664 - DNA, 25 bp, Homo sapien
ccaagaaatccatctgtggatctgg

SEQ ID NO: 3698665 - DNA, 25 bp, Homo sapien
caagaaatccatctgtggatctggg

SEQ ID NO: 3698666 - DNA, 25 bp, Homo sapien
ctgggcaagggtgagtccttcctcc

SEQ ID NO: 3698667 - DNA, 25 bp, Homo sapien
tctgcctcgtccctgagagtcccgg

SEQ ID NO: 3698668 - DNA, 25 bp, Homo sapien
cttagaagaacttgagtccaaccgg

SEQ ID NO: 3698669 - DNA, 25 bp, Homo sapien
aagaacttgagtccaaccgggctgt

SEQ ID NO: 3698670 - DNA, 25 bp, Homo sapien
tagaagaacttgagtccaaccgggc

SEQ ID NO: 3698671 - DNA, 25 bp, Homo sapien
atccttggtacccacgccagggcag

SEQ ID NO: 3698672 - DNA, 25 bp, Homo sapien
tccaaggcatccttggtacccacgc

SEQ ID NO: 3698673 - DNA, 25 bp, Homo sapien
ccttggtacccacgccagggcaggt

SEQ ID NO: 3698674 - DNA, 25 bp, Homo sapien
aaggcatccttggtacccacgccag

SEQ ID NO: 3698675 - DNA, 25 bp, Homo sapien
ggtagccaccagggcagaagcttgt

SEQ ID NO: 3698676 - DNA, 25 bp, Homo sapien
ctaggttgaggcctcttctctcagc

SEQ ID NO: 3698677 - DNA, 25 bp, Homo sapien
tccccacttttctgggctgagaagg

SEQ ID NO: 3698678 - DNA, 25 bp, Homo sapien
gactgatgagttccctggggtcccc

SEQ ID NO: 3698679 - DNA, 25 bp, Homo sapien
catgtccatgttgcaggcggctgcc

SEQ ID NO: 3698680 - DNA, 25 bp, Homo sapien
tttccagggatgctgataacgatgg

SEQ ID NO: 3698681 - DNA, 25 bp, Homo sapien
ctgtgtggatggtcacctcaacgtc

SEQ ID NO: 3698682 - DNA, 25 bp, Homo sapien
tgctgataacgatggggggccccaa

SEQ ID NO: 3698683 - DNA, 25 bp, Homo sapien
gctgaccctcggcccctcttggcct

SEQ ID NO: 3698684 - DNA, 25 bp, Homo sapien
cctggcagaagggcggctgaccctc

SEQ ID NO: 3698685 - DNA, 25 bp, Homo sapien
tctgcccttggggtctgtgcctggc

SEQ ID NO: 3698686 - DNA, 25 bp, Homo sapien
ccagacagccaatgccacatcccag

SEQ ID NO: 3698687 - DNA, 25 bp, Homo sapien
cacctagcccccaactcccaggtca

SEQ ID NO: 3698688 - DNA, 25 bp, Homo sapien
aagtctccctttggcgaacacctag

SEQ ID NO: 3698689 - DNA, 25 bp, Homo sapien
actctggaagtctccctttggcgaa

SEQ ID NO: 3698690 - DNA, 25 bp, Homo sapien
ctggaagtctccctttggcgaacac

SEQ ID NO: 3698691 - DNA, 25 bp, Homo sapien
cacagctctgcacgcaggcagtgct

SEQ ID NO: 3698692 - DNA, 25 bp, Homo sapien
cccccagcgccgtgaccacagctct

SEQ ID NO: 3698693 - DNA, 25 bp, Homo sapien
gcagtgctgggaccagtgccctggc

SEQ ID NO: 3698694 - DNA, 25 bp, Homo sapien
acaggggtcctgagccaataagcgc

SEQ ID NO: 3698695 - DNA, 25 bp, Homo sapien
ggagtcacgggagctgcccacatca

SEQ ID NO: 3698696 - DNA, 25 bp, Homo sapien
gagtcacgggagctgcccacatcac

SEQ ID NO: 3698697 - DNA, 25 bp, Homo sapien
gaggagtcacgggagctgcccacat

SEQ ID NO: 3698698 - DNA, 25 bp, Homo sapien
aggagtcacgggagctgcccacatc

SEQ ID NO: 3698699 - DNA, 25 bp, Homo sapien
cccgtgcttcataaaccatgatcat

SEQ ID NO: 3698700 - DNA, 25 bp, Homo sapien
tccttcccgtgcttcataaaccatg

SEQ ID NO: 3698701 - DNA, 25 bp, Homo sapien
ccagtccttcccgtgcttcataaac

SEQ ID NO: 3698702 - DNA, 25 bp, Homo sapien
ttcccgtgcttcataaaccatgatc

SEQ ID NO: 3698703 - DNA, 25 bp, Homo sapien
actcttttgctgatagtaagtaccc

SEQ ID NO: 3698704 - DNA, 25 bp, Homo sapien
gcttgcctaaactccatctgaacaa

SEQ ID NO: 3698705 - DNA, 25 bp, Homo sapien
gaaccaaccaacataaggaattgca

SEQ ID NO: 3698706 - DNA, 25 bp, Homo sapien
gctctgctgaaccaaccaacataag

SEQ ID NO: 3698707 - DNA, 25 bp, Homo sapien
aaactgctacaacccttctcaaggg

SEQ ID NO: 3698708 - DNA, 25 bp, Homo sapien
cacattttgttagccagatcttagg

SEQ ID NO: 3698709 - DNA, 25 bp, Homo sapien
gctgttaaggaatacaaactgctac

SEQ ID NO: 3698710 - DNA, 25 bp, Homo sapien
gggaaacttggcaatacctaatata

SEQ ID NO: 3698711 - DNA, 25 bp, Homo sapien
cccactcccttgctggaagatggaa

SEQ ID NO: 3698712 - DNA, 25 bp, Homo sapien
tgggcctacagaggtggcccactcc

SEQ ID NO: 3698713 - DNA, 25 bp, Homo sapien
ttagacacacttaaggaccttggcc

SEQ ID NO: 3698714 - DNA, 25 bp, Homo sapien
aaaaagtgggaacatgagaattgga

SEQ ID NO: 3698715 - DNA, 25 bp, Homo sapien
cattgatgcactaagtatagatgcc

SEQ ID NO: 3698716 - DNA, 25 bp, Homo sapien
ccattgatgcactaagtatagatgc

SEQ ID NO: 3698717 - DNA, 25 bp, Homo sapien
accattgatgcactaagtatagatg

SEQ ID NO: 3698718 - DNA, 25 bp, Homo sapien
tcaaatacttcctcatgagccttat

SEQ ID NO: 3698719 - DNA, 25 bp, Homo sapien
tatttcattatattcccattccatc

SEQ ID NO: 3698720 - DNA, 25 bp, Homo sapien
tctttgcattctttcagtagttgcc

SEQ ID NO: 3698721 - DNA, 25 bp, Homo sapien
tacttcctcatgagccttatatccc

SEQ ID NO: 3698722 - DNA, 25 bp, Homo sapien
gaaaagtagcgtagcaattccttga

SEQ ID NO: 3698723 - DNA, 25 bp, Homo sapien
tgtgttcatacaaactgctcagtca

SEQ ID NO: 3698724 - DNA, 25 bp, Homo sapien
gaagtatctgatacataacaggcaa

SEQ ID NO: 3698725 - DNA, 25 bp, Homo sapien
gaagtaaggtatgctcactgcaaaa

SEQ ID NO: 3698726 - DNA, 25 bp, Homo sapien
aagtactcagggagccctgcattgc

SEQ ID NO: 3698727 - DNA, 25 bp, Homo sapien
cctttaaagtactcagggagccctg

SEQ ID NO: 3698728 - DNA, 25 bp, Homo sapien
gagccctgcattgcttcttgaagcc

SEQ ID NO: 3698729 - DNA, 25 bp, Homo sapien
tctttctataacgtcctccttgtcc

SEQ ID NO: 3698730 - DNA, 25 bp, Homo sapien
tatccatcatggtacatgagggcac

SEQ ID NO: 3698731 - DNA, 25 bp, Homo sapien
gcatgcatgttgctttctgtgatag

SEQ ID NO: 3698732 - DNA, 25 bp, Homo sapien
tctgtgatagtatccatcatggtac

SEQ ID NO: 3698733 - DNA, 25 bp, Homo sapien
tgagggcacagtcgtttctcctaac

SEQ ID NO: 3698734 - DNA, 25 bp, Homo sapien
catgcttaagcaccaaggcacttgc

SEQ ID NO: 3698735 - DNA, 25 bp, Homo sapien
gaatgagtttggaaggttcatctct

SEQ ID NO: 3698736 - DNA, 25 bp, Homo sapien
gagggaaagaatgatgacagaactg

SEQ ID NO: 3698737 - DNA, 25 bp, Homo sapien
tattccaaatgctgtgatgatgagc

SEQ ID NO: 3698738 - DNA, 25 bp, Homo sapien
aacaggaaattggtgagtgtctgaa

SEQ ID NO: 3698739 - DNA, 25 bp, Homo sapien
acaggaaattggtgagtgtctgaag

SEQ ID NO: 3698740 - DNA, 25 bp, Homo sapien
gaacaggaaattggtgagtgtctga

SEQ ID NO: 3698741 - DNA, 25 bp, Homo sapien
gctggggagattgacgtcctacccc

SEQ ID NO: 3698742 - DNA, 25 bp, Homo sapien
cagctggggagattgacgtcctacc

SEQ ID NO: 3698743 - DNA, 25 bp, Homo sapien
gggagattgacgtcctaccccactg

SEQ ID NO: 3698744 - DNA, 25 bp, Homo sapien
agcagctggggagattgacgtccta

SEQ ID NO: 3698745 - DNA, 25 bp, Homo sapien
taactgatcttttacatcaccgttc

SEQ ID NO: 3698746 - DNA, 25 bp, Homo sapien
actgatcttttacatcaccgttcat

SEQ ID NO: 3698747 - DNA, 25 bp, Homo sapien
aactgatcttttacatcaccgttca

SEQ ID NO: 3698748 - DNA, 25 bp, Homo sapien
agcagaagacagcttactgtgttcc

SEQ ID NO: 3698749 - DNA, 25 bp, Homo sapien
taatctctaaccgaaattcagtctt

SEQ ID NO: 3698750 - DNA, 25 bp, Homo sapien
cagaacctataaatttgtcactgtg

SEQ ID NO: 3698751 - DNA, 25 bp, Homo sapien
ttccactaatctctaaccgaaattc

SEQ ID NO: 3698752 - DNA, 25 bp, Homo sapien
ttttaaattaagatgactcttggga

SEQ ID NO: 3698753 - DNA, 25 bp, Homo sapien
tcaggtcaatggcacatgcgtaggt

SEQ ID NO: 3698754 - DNA, 25 bp, Homo sapien
gaaccatcttgtgttggttaaagac

SEQ ID NO: 3698755 - DNA, 25 bp, Homo sapien
gatgactcttgggatgaaccatctt

SEQ ID NO: 3698756 - DNA, 25 bp, Homo sapien
ttgagacaatcaatgacaagacttt

SEQ ID NO: 3698757 - DNA, 25 bp, Homo sapien
cccctaccagttctaggtcatctaa

SEQ ID NO: 3698758 - DNA, 25 bp, Homo sapien
tcaacaatcccctggattagaaccc

SEQ ID NO: 3698759 - DNA, 25 bp, Homo sapien
tatagacattgtgttcagtagaaat

SEQ ID NO: 3698760 - DNA, 25 bp, Homo sapien
catcactttttccttgatactacga

SEQ ID NO: 3698761 - DNA, 25 bp, Homo sapien
gaggccatcactttttccttgatac

SEQ ID NO: 3698762 - DNA, 25 bp, Homo sapien
ctttttccttgatactacgaaccat

SEQ ID NO: 3698763 - DNA, 25 bp, Homo sapien
tgaggccatcactttttccttgata

SEQ ID NO: 3698764 - DNA, 25 bp, Homo sapien
actaatggatgtgacctggttggca

SEQ ID NO: 3698765 - DNA, 25 bp, Homo sapien
tggttggcagcagtagcttgcacaa

SEQ ID NO: 3698766 - DNA, 25 bp, Homo sapien
gcacaacatgcttgtttgcagtgag

SEQ ID NO: 3698767 - DNA, 25 bp, Homo sapien
catggagagaggaattggaagcccc

SEQ ID NO: 3698768 - DNA, 25 bp, Homo sapien
ttttccacattccttcatcctttcc

SEQ ID NO: 3698769 - DNA, 25 bp, Homo sapien
ccttcatcctttccaccttcctaca

SEQ ID NO: 3698770 - DNA, 25 bp, Homo sapien
ttccacattccttcatcctttccac

SEQ ID NO: 3698771 - DNA, 25 bp, Homo sapien
acattccttcatcctttccaccttc

SEQ ID NO: 3698772 - DNA, 25 bp, Homo sapien
tccagccgcccggggaatacctcta

SEQ ID NO: 3698773 - DNA, 25 bp, Homo sapien
ccagccgcccggggaatacctctag

SEQ ID NO: 3698774 - DNA, 25 bp, Homo sapien
cagccgcccggggaatacctctagt

SEQ ID NO: 3698775 - DNA, 25 bp, Homo sapien
ccaataaagcgcacggatggaggcc

SEQ ID NO: 3698776 - DNA, 25 bp, Homo sapien
tcggtcccacgaatggcaggcagcg

SEQ ID NO: 3698777 - DNA, 25 bp, Homo sapien
gcctgaaactcggtcccacgaatgg

SEQ ID NO: 3698778 - DNA, 25 bp, Homo sapien
tgatctctatggtttccgcggctcg

SEQ ID NO: 3698779 - DNA, 25 bp, Homo sapien
tagtcggctcgatttaaggctggta

SEQ ID NO: 3698780 - DNA, 25 bp, Homo sapien
gaagcctttgcactgctagagctga

SEQ ID NO: 3698781 - DNA, 25 bp, Homo sapien
gctcgagagcgaaagacacagatgg

SEQ ID NO: 3698782 - DNA, 25 bp, Homo sapien
cacagtaggtattccgctgaagcca

SEQ ID NO: 3698783 - DNA, 25 bp, Homo sapien
gtgagcatggggctgtattttaata

SEQ ID NO: 3698784 - DNA, 25 bp, Homo sapien
ttttaatacaagaaagacattgctc

SEQ ID NO: 3698785 - DNA, 25 bp, Homo sapien
aatacaagaaagacattgctctaga

SEQ ID NO: 3698786 - DNA, 25 bp, Homo sapien
gagcatggggctgtattttaataca

SEQ ID NO: 3698787 - DNA, 25 bp, Homo sapien
atagagcttgatagaatttgacatt

SEQ ID NO: 3698788 - DNA, 25 bp, Homo sapien
taaacttgtatactctcaacagtta

SEQ ID NO: 3698789 - DNA, 25 bp, Homo sapien
tattaaacttgtatactctcaacag

SEQ ID NO: 3698790 - DNA, 25 bp, Homo sapien
gagcttgatagaatttgacattgta

SEQ ID NO: 3698791 - DNA, 25 bp, Homo sapien
cctagactatttacccttacatggt

SEQ ID NO: 3698792 - DNA, 25 bp, Homo sapien
actgtagtatatcacccctgtccca

SEQ ID NO: 3698793 - DNA, 25 bp, Homo sapien
ccacaacgaagacctagactattta

SEQ ID NO: 3698794 - DNA, 25 bp, Homo sapien
tgtagtatatcacccctgtcccaca

SEQ ID NO: 3698795 - DNA, 25 bp, Homo sapien
cacttgctgagacctagggtgtcag

SEQ ID NO: 3698796 - DNA, 25 bp, Homo sapien
tatagttcagtgtagtgctaccagc

SEQ ID NO: 3698797 - DNA, 25 bp, Homo sapien
gcaggccatttagctacgtatttcc

SEQ ID NO: 3698798 - DNA, 25 bp, Homo sapien
aataaataccgtaagtcactgaggg

SEQ ID NO: 3698799 - DNA, 25 bp, Homo sapien
tgattatacttcctaggcacactag

SEQ ID NO: 3698800 - DNA, 25 bp, Homo sapien
aattagagaagacaacccgcctaca

SEQ ID NO: 3698801 - DNA, 25 bp, Homo sapien
cactaggccagatgtcaagaatcaa

SEQ ID NO: 3698802 - DNA, 25 bp, Homo sapien
gaaacactgagatgcctacgtggta

SEQ ID NO: 3698803 - DNA, 25 bp, Homo sapien
gattaaatcagttgacaaccagctc

SEQ ID NO: 3698804 - DNA, 25 bp, Homo sapien
tattatccagattctcaatccgctg

SEQ ID NO: 3698805 - DNA, 25 bp, Homo sapien
gaaagctcagtcaccaactatgcct

SEQ ID NO: 3698806 - DNA, 25 bp, Homo sapien
aaccctagtccccagtgtgatagta

SEQ ID NO: 3698807 - DNA, 25 bp, Homo sapien
ccccagatttgtgctcttcaggtaa

SEQ ID NO: 3698808 - DNA, 25 bp, Homo sapien
caggtaatgacatttctgcacagtt

SEQ ID NO: 3698809 - DNA, 25 bp, Homo sapien
taatctgagtaaatagagtccatag

SEQ ID NO: 3698810 - DNA, 25 bp, Homo sapien
tgtaggtattctgtcataaaaacac

SEQ ID NO: 3698811 - DNA, 25 bp, Homo sapien
tagctataaaactactacaagagat

SEQ ID NO: 3698812 - DNA, 25 bp, Homo sapien
tgaggttctgacaattatgagggaa

SEQ ID NO: 3698813 - DNA, 25 bp, Homo sapien
tatttctccacttgcgcaagagagc

SEQ ID NO: 3698814 - DNA, 25 bp, Homo sapien
caaaacaataaatggtgaggttctg

SEQ ID NO: 3698815 - DNA, 25 bp, Homo sapien
gatcagaatgatcagccagcatgca

SEQ ID NO: 3698816 - DNA, 25 bp, Homo sapien
gaaaacctcagcagttgaaaccgtg

SEQ ID NO: 3698817 - DNA, 25 bp, Homo sapien
tgggaacctcaaagtgtgtctcggc

SEQ ID NO: 3698818 - DNA, 25 bp, Homo sapien
gcagttcagcaaagaagtagctcct

SEQ ID NO: 3698819 - DNA, 25 bp, Homo sapien
ggggcgaccccacattgtgaccaga

SEQ ID NO: 3698820 - DNA, 25 bp, Homo sapien
gggcgaccccacattgtgaccagag

SEQ ID NO: 3698821 - DNA, 25 bp, Homo sapien
ggcgaccccacattgtgaccagagc

SEQ ID NO: 3698822 - DNA, 25 bp, Homo sapien
cggggcgaccccacattgtgaccag

SEQ ID NO: 3698823 - DNA, 25 bp, Homo sapien
cgccgcaggagccttgaggcgggcg

SEQ ID NO: 3698824 - DNA, 25 bp, Homo sapien
ggcgaggttccagcgcgaggccggc

SEQ ID NO: 3698825 - DNA, 25 bp, Homo sapien
ctcaaccgctcccagcgccagttgc

SEQ ID NO: 3698826 - DNA, 25 bp, Homo sapien
cttgaggcgggcgaggttccagcgc

SEQ ID NO: 3698827 - DNA, 25 bp, Homo sapien
tttgccctttcgaagacacttggac

SEQ ID NO: 3698828 - DNA, 25 bp, Homo sapien
ttgccctttcgaagacacttggact

SEQ ID NO: 3698829 - DNA, 25 bp, Homo sapien
cagcggcctcacttcgtgaacaaag

SEQ ID NO: 3698830 - DNA, 25 bp, Homo sapien
tccaggaaagagtggctatgtgacc

SEQ ID NO: 3698831 - DNA, 25 bp, Homo sapien
tcttgacgaatttcaacagcggcct

SEQ ID NO: 3698832 - DNA, 25 bp, Homo sapien
tctcagccgatccagactattaggt

SEQ ID NO: 3698833 - DNA, 25 bp, Homo sapien
tgaaagtaaacaggttcctggaaca

SEQ ID NO: 3698834 - DNA, 25 bp, Homo sapien
actgaccaccgccgtctggcagttt

SEQ ID NO: 3698835 - DNA, 25 bp, Homo sapien
gcagtttccgcaataagaaaagcca

SEQ ID NO: 3698836 - DNA, 25 bp, Homo sapien
aaagccaagggtaagacccagagag

SEQ ID NO: 3698837 - DNA, 25 bp, Homo sapien
accgccgtctggcagtttccgcaat

SEQ ID NO: 3698838 - DNA, 25 bp, Homo sapien
gagaggcagtggtggagtcccctga

SEQ ID NO: 3698839 - DNA, 25 bp, Homo sapien
ggaaccctgaagataatccataact

SEQ ID NO: 3698840 - DNA, 25 bp, Homo sapien
cataactcgtcatgcccagcatgca

SEQ ID NO: 3698841 - DNA, 25 bp, Homo sapien
aagccagcgccctaggaaccctgaa

SEQ ID NO: 3698842 - DNA, 25 bp, Homo sapien
aagtgattgtcctggcaccacccac

SEQ ID NO: 3698843 - DNA, 25 bp, Homo sapien
tgaagggcagagccgtgaacacaga

SEQ ID NO: 3698844 - DNA, 25 bp, Homo sapien
ccgggagcgggtgtggtgaagggca

SEQ ID NO: 3698845 - DNA, 25 bp, Homo sapien
gaggtgccagggttcgcggtcacgc

SEQ ID NO: 3698846 - DNA, 25 bp, Homo sapien
acgcccggtcccagcactgggtatg

SEQ ID NO: 3698847 - DNA, 25 bp, Homo sapien
tggaggagcccctgcagtcacaagg

SEQ ID NO: 3698848 - DNA, 25 bp, Homo sapien
agcccctgcagtcacaaggagcggc

SEQ ID NO: 3698849 - DNA, 25 bp, Homo sapien
gaggagcccctgcagtcacaaggag

SEQ ID NO: 3698850 - DNA, 25 bp, Homo sapien
tgcagtcacaaggagcggcccgtgt

SEQ ID NO: 3698851 - DNA, 25 bp, Homo sapien
atctggacaaagacgttggaagccc

SEQ ID NO: 3698852 - DNA, 25 bp, Homo sapien
tctggacaaagacgttggaagcccc

SEQ ID NO: 3698853 - DNA, 25 bp, Homo sapien
cacctgggcagccataacaggcacc

SEQ ID NO: 3698854 - DNA, 25 bp, Homo sapien
acctgggcagccataacaggcacca

SEQ ID NO: 3698855 - DNA, 25 bp, Homo sapien
ttcccttgggacacaatggggggca

SEQ ID NO: 3698856 - DNA, 25 bp, Homo sapien
ggttacaggagtcatctggcggggc

SEQ ID NO: 3698857 - DNA, 25 bp, Homo sapien
ttacaggagtcatctggcggggcct

SEQ ID NO: 3698858 - DNA, 25 bp, Homo sapien
tacaggagtcatctggcggggcctt

SEQ ID NO: 3698859 - DNA, 25 bp, Homo sapien
tggggttacaggagtcatctggcgg

SEQ ID NO: 3698860 - DNA, 25 bp, Homo sapien
ccagagtcggaagttctcatagaca

SEQ ID NO: 3698861 - DNA, 25 bp, Homo sapien
tgctgccagagtcggaagttctcat

SEQ ID NO: 3698862 - DNA, 25 bp, Homo sapien
gccaggggcttgtagtgctgccaga

SEQ ID NO: 3698863 - DNA, 25 bp, Homo sapien
agtgctgccagagtcggaagttctc

SEQ ID NO: 3698864 - DNA, 25 bp, Homo sapien
cttctgtaaacattgttgtgaaaat

SEQ ID NO: 3698865 - DNA, 25 bp, Homo sapien
taaggattggctggactcacgggac

SEQ ID NO: 3698866 - DNA, 25 bp, Homo sapien
actcacgggacagtgacgggcagtt

SEQ ID NO: 3698867 - DNA, 25 bp, Homo sapien
aattattgaaagtaaggattggctg

SEQ ID NO: 3698868 - DNA, 25 bp, Homo sapien
caaggaggaatgcaaccagttccag

SEQ ID NO: 3698869 - DNA, 25 bp, Homo sapien
tgcaccgggactccgctccaaggag

SEQ ID NO: 3698870 - DNA, 25 bp, Homo sapien
caaccagttccagggtgcgggaaca

SEQ ID NO: 3698871 - DNA, 25 bp, Homo sapien
gcagctccaccccaagaatcagggt

SEQ ID NO: 3698872 - DNA, 25 bp, Homo sapien
tgggcttccgccgggccagcgatcg

SEQ ID NO: 3698873 - DNA, 25 bp, Homo sapien
ggtgggcttccgccgggccagcgat

SEQ ID NO: 3698874 - DNA, 25 bp, Homo sapien
ttccgccgggccagcgatcggagaa

SEQ ID NO: 3698875 - DNA, 25 bp, Homo sapien
ggcttccgccgggccagcgatcgga

SEQ ID NO: 3698876 - DNA, 25 bp, Homo sapien
aaagttgctcgtgtgctgccattcc

SEQ ID NO: 3698877 - DNA, 25 bp, Homo sapien
gtcaaagttgctcgtgtgctgccat

SEQ ID NO: 3698878 - DNA, 25 bp, Homo sapien
tcaaagttgctcgtgtgctgccatt

SEQ ID NO: 3698879 - DNA, 25 bp, Homo sapien
caaagttgctcgtgtgctgccattc

SEQ ID NO: 3698880 - DNA, 25 bp, Homo sapien
ctggctgcttgaccacctcaggggc

SEQ ID NO: 3698881 - DNA, 25 bp, Homo sapien
ctccatgatgtccacatactcctgc

SEQ ID NO: 3698882 - DNA, 25 bp, Homo sapien
cctccatgatgtccacatactcctg

SEQ ID NO: 3698883 - DNA, 25 bp, Homo sapien
tcctccatgatgtccacatactcct

SEQ ID NO: 3698884 - DNA, 25 bp, Homo sapien
gtgacgaagtctttctgggaacaca

SEQ ID NO: 3698885 - DNA, 25 bp, Homo sapien
acagcttgtcaatgtagctcaggag

SEQ ID NO: 3698886 - DNA, 25 bp, Homo sapien
gacgaagtctttctgggaacacagc

SEQ ID NO: 3698887 - DNA, 25 bp, Homo sapien
tgggaacacagcttgtcaatgtagc

SEQ ID NO: 3698888 - DNA, 25 bp, Homo sapien
gcacggagtaacctggagccaagga

SEQ ID NO: 3698889 - DNA, 25 bp, Homo sapien
tcctgggcacggagtaacctggagc

SEQ ID NO: 3698890 - DNA, 25 bp, Homo sapien
tgggcacggagtaacctggagccaa

SEQ ID NO: 3698891 - DNA, 25 bp, Homo sapien
cacggagtaacctggagccaaggac

SEQ ID NO: 3698892 - DNA, 25 bp, Homo sapien
ccaagaaatccatctgtggatctgg

SEQ ID NO: 3698893 - DNA, 25 bp, Homo sapien
caagaaatccatctgtggatctggg

SEQ ID NO: 3698894 - DNA, 25 bp, Homo sapien
ctgggcaagggtgagtccttcctcc

SEQ ID NO: 3698895 - DNA, 25 bp, Homo sapien
cttagaagaacttgagtccaaccgg

SEQ ID NO: 3698896 - DNA, 25 bp, Homo sapien
aagaacttgagtccaaccgggctgt

SEQ ID NO: 3698897 - DNA, 25 bp, Homo sapien
tagaagaacttgagtccaaccgggc

SEQ ID NO: 3698898 - DNA, 25 bp, Homo sapien
tctgcctcgtccctgagagtcccgg

SEQ ID NO: 3698899 - DNA, 25 bp, Homo sapien
atccttggtacccacgccagggcag

SEQ ID NO: 3698900 - DNA, 25 bp, Homo sapien
tccaaggcatccttggtacccacgc

SEQ ID NO: 3698901 - DNA, 25 bp, Homo sapien
ccttggtacccacgccagggcaggt

SEQ ID NO: 3698902 - DNA, 25 bp, Homo sapien
aaggcatccttggtacccacgccag

SEQ ID NO: 3698903 - DNA, 25 bp, Homo sapien
ttgcttcttggccttgttggcagga

SEQ ID NO: 3698904 - DNA, 25 bp, Homo sapien
cagaagcttgtgctgggaacccaag

SEQ ID NO: 3698905 - DNA, 25 bp, Homo sapien
caggagaaggtgctaggttgaggcc

SEQ ID NO: 3698906 - DNA, 25 bp, Homo sapien
gaggttgcttcttggccttgttggc

SEQ ID NO: 3698907 - DNA, 25 bp, Homo sapien
cacacttacacacgaggcccccaac

SEQ ID NO: 3698908 - DNA, 25 bp, Homo sapien
atgccagagccccatccttggggat

SEQ ID NO: 3698909 - DNA, 25 bp, Homo sapien
cttttgaccgctttggggcatcgga

SEQ ID NO: 3698910 - DNA, 25 bp, Homo sapien
accgctttggggcatcggatgccag

SEQ ID NO: 3698911 - DNA, 25 bp, Homo sapien
cagggccttgtgagtcggtagtggg

SEQ ID NO: 3698912 - DNA, 25 bp, Homo sapien
tgagtcggtagtgggagggatcagg

SEQ ID NO: 3698913 - DNA, 25 bp, Homo sapien
ccttgtgagtcggtagtgggaggga

SEQ ID NO: 3698914 - DNA, 25 bp, Homo sapien
caggcagggccttgtgagtcggtag

SEQ ID NO: 3698915 - DNA, 25 bp, Homo sapien
ggattttccagggatgctgatgacg

SEQ ID NO: 3698916 - DNA, 25 bp, Homo sapien
atgctgatgacgatggggggcccca

SEQ ID NO: 3698917 - DNA, 25 bp, Homo sapien
ggatgctgatgacgatggggggccc

SEQ ID NO: 3698918 - DNA, 25 bp, Homo sapien
tttccagggatgctgatgacgatgg

SEQ ID NO: 3698919 - DNA, 25 bp, Homo sapien
ggtcacctcaacgtctcccctcagc

SEQ ID NO: 3698920 - DNA, 25 bp, Homo sapien
tctgcccttggggtctgtgcctggc

SEQ ID NO: 3698921 - DNA, 25 bp, Homo sapien
gctgaccctcggcccctcttggcct

SEQ ID NO: 3698922 - DNA, 25 bp, Homo sapien
cctggcagaagggcggctgaccctc

SEQ ID NO: 3698923 - DNA, 25 bp, Homo sapien
ccagacagccaatgccacatcccag

SEQ ID NO: 3698924 - DNA, 25 bp, Homo sapien
cacctagcccccaactcccaggtca

SEQ ID NO: 3698925 - DNA, 25 bp, Homo sapien
aagtctccctttggcgaacacctag

SEQ ID NO: 3698926 - DNA, 25 bp, Homo sapien
actctggaagtctccctttggcgaa

SEQ ID NO: 3698927 - DNA, 25 bp, Homo sapien
ctggaagtctccctttggcgaacac

SEQ ID NO: 3698928 - DNA, 25 bp, Homo sapien
cacagctctgcacgcaggcagtgct

SEQ ID NO: 3698929 - DNA, 25 bp, Homo sapien
cccccagcgccgtgaccacagctct

SEQ ID NO: 3698930 - DNA, 25 bp, Homo sapien
acaggggtcctgagccaataagcgc

SEQ ID NO: 3698931 - DNA, 25 bp, Homo sapien
gcagtgctgggaccagtgccctggc

SEQ ID NO: 3698932 - DNA, 25 bp, Homo sapien
ggagtcacgggagctgcccacatca

SEQ ID NO: 3698933 - DNA, 25 bp, Homo sapien
gagtcacgggagctgcccacatcac

SEQ ID NO: 3698934 - DNA, 25 bp, Homo sapien
gaggagtcacgggagctgcccacat

SEQ ID NO: 3698935 - DNA, 25 bp, Homo sapien
aggagtcacgggagctgcccacatc

SEQ ID NO: 3698936 - DNA, 25 bp, Homo sapien
gttgtcagatggagtttcccaggag

SEQ ID NO: 3698937 - DNA, 25 bp, Homo sapien
ggtctctggaggcaaacctgccagg

SEQ ID NO: 3698938 - DNA, 25 bp, Homo sapien
ttcccaggaggctatggcttcttcg

SEQ ID NO: 3698939 - DNA, 25 bp, Homo sapien
ggcttcttcggggatctgacatcca

SEQ ID NO: 3698940 - DNA, 25 bp, Homo sapien
ggccaactgacaggaaagggcctct

SEQ ID NO: 3698941 - DNA, 25 bp, Homo sapien
gccaactgacaggaaagggcctctc

SEQ ID NO: 3698942 - DNA, 25 bp, Homo sapien
gggccaactgacaggaaagggcctc

SEQ ID NO: 3698943 - DNA, 25 bp, Homo sapien
tgcaatctcggtcttcacatggaga

SEQ ID NO: 3698944 - DNA, 25 bp, Homo sapien
cacatggagaccaaatgtgtcccaa

SEQ ID NO: 3698945 - DNA, 25 bp, Homo sapien
gggctccaagcgcagaaagttgcaa

SEQ ID NO: 3698946 - DNA, 25 bp, Homo sapien
gaaagttgcaatctcggtcttcaca

SEQ ID NO: 3698947 - DNA, 25 bp, Homo sapien
ctgtaacattagtcttagccctttt

SEQ ID NO: 3698948 - DNA, 25 bp, Homo sapien
tctgtaacattagtcttagcccttt

SEQ ID NO: 3698949 - DNA, 25 bp, Homo sapien
ctgtgtgtaccaggtgggccttggg

SEQ ID NO: 3698950 - DNA, 25 bp, Homo sapien
ggggtgggcctggagaatatgaatg

SEQ ID NO: 3698951 - DNA, 25 bp, Homo sapien
tgttcagttgcagcagttgtggtgc

SEQ ID NO: 3698952 - DNA, 25 bp, Homo sapien
tgtgcactgaatttgggaaattaag

SEQ ID NO: 3698953 - DNA, 25 bp, Homo sapien
cctagaagtgtcaagccttccctgg

SEQ ID NO: 3698954 - DNA, 25 bp, Homo sapien
ctcctagaagtgtcaagccttccct

SEQ ID NO: 3698955 - DNA, 25 bp, Homo sapien
tcctagaagtgtcaagccttccctg

SEQ ID NO: 3698956 - DNA, 25 bp, Homo sapien
tgggtccctccaatacctccacttg

SEQ ID NO: 3698957 - DNA, 25 bp, Homo sapien
tcattttggtgggtccctccaatac

SEQ ID NO: 3698958 - DNA, 25 bp, Homo sapien
cctccaatacctccacttgccctgt

SEQ ID NO: 3698959 - DNA, 25 bp, Homo sapien
ttggtgggtccctccaatacctcca

SEQ ID NO: 3698960 - DNA, 25 bp, Homo sapien
ctgggaagacattcaagaactgttt

SEQ ID NO: 3698961 - DNA, 25 bp, Homo sapien
ggaagacattcaagaactgtttcat

SEQ ID NO: 3698962 - DNA, 25 bp, Homo sapien
aagaactgtttcattacaaggggca

SEQ ID NO: 3698963 - DNA, 25 bp, Homo sapien
cattcaagaactgtttcattacaag

SEQ ID NO: 3698964 - DNA, 25 bp, Homo sapien
gaacggcggtagataggtgctctcc

SEQ ID NO: 3698965 - DNA, 25 bp, Homo sapien
gcgggaacggcggtagataggtgct

SEQ ID NO: 3698966 - DNA, 25 bp, Homo sapien
gataggtgctctccttcccagtttg

SEQ ID NO: 3698967 - DNA, 25 bp, Homo sapien
gcaggaccgcgggaacggcggtaga

SEQ ID NO: 3698968 - DNA, 25 bp, Homo sapien
tggagagttggcaggactggcccac

SEQ ID NO: 3698969 - DNA, 25 bp, Homo sapien
agttggagagttggcaggactggcc

SEQ ID NO: 3698970 - DNA, 25 bp, Homo sapien
tgcgaggggagttggagagttggca

SEQ ID NO: 3698971 - DNA, 25 bp, Homo sapien
ctgcgaggggagttggagagttggc

SEQ ID NO: 3698972 - DNA, 25 bp, Homo sapien
actctggcgtccggtggttcggcca

SEQ ID NO: 3698973 - DNA, 25 bp, Homo sapien
actggggactctggcgtccggtggt

SEQ ID NO: 3698974 - DNA, 25 bp, Homo sapien
ctggcgtccggtggttcggccacct

SEQ ID NO: 3698975 - DNA, 25 bp, Homo sapien
ggactctggcgtccggtggttcggc

SEQ ID NO: 3698976 - DNA, 25 bp, Homo sapien
cgacccttctcttcgtagcccccag

SEQ ID NO: 3698977 - DNA, 25 bp, Homo sapien
aaggggactgagctgctccacatgc

SEQ ID NO: 3698978 - DNA, 25 bp, Homo sapien
cgcccagcggctggcgcagccaatc

SEQ ID NO: 3698979 - DNA, 25 bp, Homo sapien
ctggcgcagccaatcgcagagcggg

SEQ ID NO: 3698980 - DNA, 25 bp, Homo sapien
aaacggaaattcactgtcgcgccga

SEQ ID NO: 3698981 - DNA, 25 bp, Homo sapien
gtcgcgccgactcgccgggagggaa

SEQ ID NO: 3698982 - DNA, 25 bp, Homo sapien
gctgcaactcctcaggtccgcttgg

SEQ ID NO: 3698983 - DNA, 25 bp, Homo sapien
caggtccgcttggacaccgcgggaa

SEQ ID NO: 3698984 - DNA, 25 bp, Homo sapien
gctatttaccaataacaagtaactc

SEQ ID NO: 3698985 - DNA, 25 bp, Homo sapien
tatttaccaataacaagtaactcta

SEQ ID NO: 3698986 - DNA, 25 bp, Homo sapien
tggctatttaccaataacaagtaac

SEQ ID NO: 3698987 - DNA, 25 bp, Homo sapien
agtggctatttaccaataacaagta

SEQ ID NO: 3698988 - DNA, 25 bp, Homo sapien
cttttcatctttgggtccactgttt

SEQ ID NO: 3698989 - DNA, 25 bp, Homo sapien
tgaaaggatcgagccatccacacag

SEQ ID NO: 3698990 - DNA, 25 bp, Homo sapien
cttctgggcatcttcttcgtctcct

SEQ ID NO: 3698991 - DNA, 25 bp, Homo sapien
tgggcatcttcttcgtctcctagct

SEQ ID NO: 3698992 - DNA, 25 bp, Homo sapien
ggggctctagtggagttcgatcaac

SEQ ID NO: 3698993 - DNA, 25 bp, Homo sapien
cactggaatacgatgcttttttgtc

SEQ ID NO: 3698994 - DNA, 25 bp, Homo sapien
ggagttcgatcaaccactggaatac

SEQ ID NO: 3698995 - DNA, 25 bp, Homo sapien
tcgatcaaccactggaatacgatgc

SEQ ID NO: 3698996 - DNA, 25 bp, Homo sapien
gtgctctttccaactttggaggccc

SEQ ID NO: 3698997 - DNA, 25 bp, Homo sapien
aaagtgctctttccaactttggagg

SEQ ID NO: 3698998 - DNA, 25 bp, Homo sapien
tcaaagtgctctttccaactttgga

SEQ ID NO: 3698999 - DNA, 25 bp, Homo sapien
aagtgctctttccaactttggaggc

SEQ ID NO: 3699000 - DNA, 25 bp, Homo sapien
gccaatgaagttctgaatgaggcat

SEQ ID NO: 3699001 - DNA, 25 bp, Homo sapien
tgccaatgaagttctgaatgaggca

SEQ ID NO: 3699002 - DNA, 25 bp, Homo sapien
tgacacgatcatcacagggcctctg

SEQ ID NO: 3699003 - DNA, 25 bp, Homo sapien
atcacagggcctctgatctcagtca

SEQ ID NO: 3699004 - DNA, 25 bp, Homo sapien
cacagggcctctgatctcagtcaac

SEQ ID NO: 3699005 - DNA, 25 bp, Homo sapien
tcatcacagggcctctgatctcagt

SEQ ID NO: 3699006 - DNA, 25 bp, Homo sapien
actcggaaaggtcgccatctcccaa

SEQ ID NO: 3699007 - DNA, 25 bp, Homo sapien
gcttcgtaagggcaagcatgtgcac

SEQ ID NO: 3699008 - DNA, 25 bp, Homo sapien
gaaaaagagaaaacgcgcacttcca

SEQ ID NO: 3699009 - DNA, 25 bp, Homo sapien
ccaccagcatgtggcttcgtaaggg

SEQ ID NO: 3699010 - DNA, 25 bp, Homo sapien
ggagcacaggagttctatatagata

SEQ ID NO: 3699011 - DNA, 25 bp, Homo sapien
cacagagtgaaatggacggataaac

SEQ ID NO: 3699012 - DNA, 25 bp, Homo sapien
ggataaacaattcactttccaggag

SEQ ID NO: 3699013 - DNA, 25 bp, Homo sapien
tatatagatagacctgtatgacttc

SEQ ID NO: 3699014 - DNA, 25 bp, Homo sapien
tattttgcgatttatgagggcctat

SEQ ID NO: 3699015 - DNA, 25 bp, Homo sapien
actttgctctagacatgtgattctc

SEQ ID NO: 3699016 - DNA, 25 bp, Homo sapien
cactgtgtgctcctatgaggagttc

SEQ ID NO: 3699017 - DNA, 25 bp, Homo sapien
cacctagtggtgatttagtatgtat

SEQ ID NO: 3699018 - DNA, 25 bp, Homo sapien
cccacagggcttgaggattatccat

SEQ ID NO: 3699019 - DNA, 25 bp, Homo sapien
tctaaagtgccaaaggagccatggt

SEQ ID NO: 3699020 - DNA, 25 bp, Homo sapien
tcattgcctgtgtgagctttggccc

SEQ ID NO: 3699021 - DNA, 25 bp, Homo sapien
ctttggcccctggattgctcggatt

SEQ ID NO: 3699022 - DNA, 25 bp, Homo sapien
tttaaatagcatttgctacccactg

SEQ ID NO: 3699023 - DNA, 25 bp, Homo sapien
tccttaccttgaggtgaagaaagtg

SEQ ID NO: 3699024 - DNA, 25 bp, Homo sapien
aatagcatttgctacccactgtggt

SEQ ID NO: 3699025 - DNA, 25 bp, Homo sapien
catttgctacccactgtggtgtgct

SEQ ID NO: 3699026 - DNA, 25 bp, Homo sapien
cagggaatgatggaaacaggaacat

SEQ ID NO: 3699027 - DNA, 25 bp, Homo sapien
tgtcaccacagacaggagaaggaca

SEQ ID NO: 3699028 - DNA, 25 bp, Homo sapien
aggacagggaatgatggaaacagga

SEQ ID NO: 3699029 - DNA, 25 bp, Homo sapien
ctgtcaccacagacaggagaaggac

SEQ ID NO: 3699030 - DNA, 25 bp, Homo sapien
agcaggtcttctgggtatctgcaca

SEQ ID NO: 3699031 - DNA, 25 bp, Homo sapien
tgccattggtgacggggatgccaca

SEQ ID NO: 3699032 - DNA, 25 bp, Homo sapien
ttgggtctatctcgcccatctctgc

SEQ ID NO: 3699033 - DNA, 25 bp, Homo sapien
ccacaggtaatcatggagcaggtct

SEQ ID NO: 3699034 - DNA, 25 bp, Homo sapien
acctgccggaggtggagatttagga

SEQ ID NO: 3699035 - DNA, 25 bp, Homo sapien
ttaaccctcgtgtggcaggctcaag

SEQ ID NO: 3699036 - DNA, 25 bp, Homo sapien
agtctgtgctttaaccctcgtgtgg

SEQ ID NO: 3699037 - DNA, 25 bp, Homo sapien
tggcaggctcaagcacagatttgct

SEQ ID NO: 3699038 - DNA, 25 bp, Homo sapien
tgggatcccagagagtccacgaaca

SEQ ID NO: 3699039 - DNA, 25 bp, Homo sapien
tggcattttacaggggttgttctga

SEQ ID NO: 3699040 - DNA, 25 bp, Homo sapien
cagagagtccacgaacagctttgtt

SEQ ID NO: 3699041 - DNA, 25 bp, Homo sapien
tggaaatatgggatcccagagagtc

SEQ ID NO: 3699042 - DNA, 25 bp, Homo sapien
tgacccagtggctgtcactcttttt

SEQ ID NO: 3699043 - DNA, 25 bp, Homo sapien
aagaagaaagactctcctgcaacct

SEQ ID NO: 3699044 - DNA, 25 bp, Homo sapien
tcctgcaacctagtggagggcctgc

SEQ ID NO: 3699045 - DNA, 25 bp, Homo sapien
gcaggacacccctctgaagggacaa

SEQ ID NO: 3699046 - DNA, 25 bp, Homo sapien
ctggaattccagaagtccctgtgtt

SEQ ID NO: 3699047 - DNA, 25 bp, Homo sapien
ggaattccagaagtccctgtgtttc

SEQ ID NO: 3699048 - DNA, 25 bp, Homo sapien
gaattccagaagtccctgtgtttcc

SEQ ID NO: 3699049 - DNA, 25 bp, Homo sapien
aattccagaagtccctgtgtttcct

SEQ ID NO: 3699050 - DNA, 25 bp, Homo sapien
ccaagtaaagttgagagggccaggc

SEQ ID NO: 3699051 - DNA, 25 bp, Homo sapien
tgcacctgggcacctatgggagtct

SEQ ID NO: 3699052 - DNA, 25 bp, Homo sapien
gccctacatggcttgaacgtctgca

SEQ ID NO: 3699053 - DNA, 25 bp, Homo sapien
ccccggaggtgcacactgaactgtt

SEQ ID NO: 3699054 - DNA, 25 bp, Homo sapien
caaatatgaataagtggattgtcat

SEQ ID NO: 3699055 - DNA, 25 bp, Homo sapien
actctgaactaagttggctgtgatg

SEQ ID NO: 3699056 - DNA, 25 bp, Homo sapien
tgacaggctggtagacaaatatgaa

SEQ ID NO: 3699057 - DNA, 25 bp, Homo sapien
tgtgacaatggacgtaaacccaacc

SEQ ID NO: 3699058 - DNA, 25 bp, Homo sapien
ctgatctcaggctctatagctttct

SEQ ID NO: 3699059 - DNA, 25 bp, Homo sapien
tgaaaccacaaatggtgagtgaggc

SEQ ID NO: 3699060 - DNA, 25 bp, Homo sapien
gctcaccattggtcacgaaaagctt

SEQ ID NO: 3699061 - DNA, 25 bp, Homo sapien
ccttcactttggagaaaggcatccg

SEQ ID NO: 3699062 - DNA, 25 bp, Homo sapien
aaaggcatccgctcaccattggtca

SEQ ID NO: 3699063 - DNA, 25 bp, Homo sapien
tttggagaaaggcatccgctcacca

SEQ ID NO: 3699064 - DNA, 25 bp, Homo sapien
tgcccgtcaagtacatgaactggcc

SEQ ID NO: 3699065 - DNA, 25 bp, Homo sapien
ggagaataacgcagtcctcccctga

SEQ ID NO: 3699066 - DNA, 25 bp, Homo sapien
ccagagcccgttgttcaggagaata

SEQ ID NO: 3699067 - DNA, 25 bp, Homo sapien
gaggaggtgcaggagatgccattcc

SEQ ID NO: 3699068 - DNA, 25 bp, Homo sapien
gctgaaccagaacccttgtgcctga

SEQ ID NO: 3699069 - DNA, 25 bp, Homo sapien
tttccagggtagactccgacccagc

SEQ ID NO: 3699070 - DNA, 25 bp, Homo sapien
ttccaaagcagcagagagttcagca

SEQ ID NO: 3699071 - DNA, 25 bp, Homo sapien
ccagcgctgtgctcctagtgggatg

SEQ ID NO: 3699072 - DNA, 25 bp, Homo sapien
gcctgcggagaagggtacactctgc

SEQ ID NO: 3699073 - DNA, 25 bp, Homo sapien
cctagagaggtctgggctcaccatg

SEQ ID NO: 3699074 - DNA, 25 bp, Homo sapien
tctggcgcagctcatgaacaactag

SEQ ID NO: 3699075 - DNA, 25 bp, Homo sapien
tgttgcccacgtaggatattgccaa

SEQ ID NO: 3699076 - DNA, 25 bp, Homo sapien
tcagaagcctgctccgaaagtggat

SEQ ID NO: 3699077 - DNA, 25 bp, Homo sapien
tctgtactgataatgggcccactga

SEQ ID NO: 3699078 - DNA, 25 bp, Homo sapien
tgtgggtcccaatggcatcagaagc

SEQ ID NO: 3699079 - DNA, 25 bp, Homo sapien
taacccgtagggtatgaagctcacc

SEQ ID NO: 3699080 - DNA, 25 bp, Homo sapien
aatggcatacggcaggtctggaatc

SEQ ID NO: 3699081 - DNA, 25 bp, Homo sapien
cccatctcattgtgtgaatggcata

SEQ ID NO: 3699082 - DNA, 25 bp, Homo sapien
tctcattgtgtgaatggcatacggc

SEQ ID NO: 3699083 - DNA, 25 bp, Homo sapien
ttttcccatctcattgtgtgaatgg

SEQ ID NO: 3699084 - DNA, 25 bp, Homo sapien
cctgatggtcccaatgcccttggca

SEQ ID NO: 3699085 - DNA, 25 bp, Homo sapien
accctgatggtcccaatgcccttgg

SEQ ID NO: 3699086 - DNA, 25 bp, Homo sapien
tcaccctgatggtcccaatgccctt

SEQ ID NO: 3699087 - DNA, 25 bp, Homo sapien
ccctgatggtcccaatgcccttggc

SEQ ID NO: 3699088 - DNA, 25 bp, Homo sapien
cacgaaaatactcctctcattgacc

SEQ ID NO: 3699089 - DNA, 25 bp, Homo sapien
cagtgtggattgtattggaagcagt

SEQ ID NO: 3699090 - DNA, 25 bp, Homo sapien
gtgtcctgttccctcggtaagcagt

SEQ ID NO: 3699091 - DNA, 25 bp, Homo sapien
tgaccccaattttggcacctttaga

SEQ ID NO: 3699092 - DNA, 25 bp, Homo sapien
tcttggaggcaaccagcagggggca

SEQ ID NO: 3699093 - DNA, 25 bp, Homo sapien
tctctctgggtttgctggccttgtc

SEQ ID NO: 3699094 - DNA, 25 bp, Homo sapien
ttctgaaattgcctcggccacagag

SEQ ID NO: 3699095 - DNA, 25 bp, Homo sapien
gactgcatttgagagagatacccaa

SEQ ID NO: 3699096 - DNA, 25 bp, Homo sapien
tccgcaaagggaacccagagagaag

SEQ ID NO: 3699097 - DNA, 25 bp, Homo sapien
gaacctgattcagagaaaagtccag

SEQ ID NO: 3699098 - DNA, 25 bp, Homo sapien
acctgaagtcccagatacttgtgag

SEQ ID NO: 3699099 - DNA, 25 bp, Homo sapien
tgcacctgaagtcccagatacttgt

SEQ ID NO: 3699100 - DNA, 25 bp, Homo sapien
gcgtgcacctgaagtcccagatact

SEQ ID NO: 3699101 - DNA, 25 bp, Homo sapien
cgtgcacctgaagtcccagatactt

SEQ ID NO: 3699102 - DNA, 25 bp, Homo sapien
cagcctggacaacatacggagatcc

SEQ ID NO: 3699103 - DNA, 25 bp, Homo sapien
tgggaggctgattggggaggatcac

SEQ ID NO: 3699104 - DNA, 25 bp, Homo sapien
tggacaacatacggagatcctgtct

SEQ ID NO: 3699105 - DNA, 25 bp, Homo sapien
ttgaggtcaggagttaaagaccagc

SEQ ID NO: 3699106 - DNA, 25 bp, Homo sapien
gatagagttacagctatactcagag

SEQ ID NO: 3699107 - DNA, 25 bp, Homo sapien
tagttgaactaagtgttcatcttct

SEQ ID NO: 3699108 - DNA, 25 bp, Homo sapien
cataaaggaagaaatactaatggcc

SEQ ID NO: 3699109 - DNA, 25 bp, Homo sapien
taatggccaatagtactgatacgtg

SEQ ID NO: 3699110 - DNA, 25 bp, Homo sapien
cctcttcttgcctggtgattccagg

SEQ ID NO: 3699111 - DNA, 25 bp, Homo sapien
ctttccccattcaaccttagagata

SEQ ID NO: 3699112 - DNA, 25 bp, Homo sapien
cattcaaccttagagataatctagt

SEQ ID NO: 3699113 - DNA, 25 bp, Homo sapien
aatcctcctcgtcattttccaaata

SEQ ID NO: 3699114 - DNA, 25 bp, Homo sapien
cagaagtcaaggcttagaccctcat

SEQ ID NO: 3699115 - DNA, 25 bp, Homo sapien
agtcaaggcttagaccctcatgctg

SEQ ID NO: 3699116 - DNA, 25 bp, Homo sapien
cttgtggagaaaagcgtcttgtggt

SEQ ID NO: 3699117 - DNA, 25 bp, Homo sapien
gtctgcgagttctgagccaactggg

SEQ ID NO: 3699118 - DNA, 25 bp, Homo sapien
cttcttttaccccagggtctgctgg

SEQ ID NO: 3699119 - DNA, 25 bp, Homo sapien
tgctgctacaggtttgccaggagct

SEQ ID NO: 3699120 - DNA, 25 bp, Homo sapien
gatgcctggacaagctggcccagtt

SEQ ID NO: 3699121 - DNA, 25 bp, Homo sapien
ttaatccgcctccaactctggaagg

SEQ ID NO: 3699122 - DNA, 25 bp, Homo sapien
acggtggaagtctcatgctctgcag

SEQ ID NO: 3699123 - DNA, 25 bp, Homo sapien
taagccagttgcctcagtggtacag

SEQ ID NO: 3699124 - DNA, 25 bp, Homo sapien
gatggccccagtgaggaatgctaca

SEQ ID NO: 3699125 - DNA, 25 bp, Homo sapien
tagtccatgcaaggcagcaagagag

SEQ ID NO: 3699126 - DNA, 25 bp, Homo sapien
cttcttgatgtgacagatggcccca

SEQ ID NO: 3699127 - DNA, 25 bp, Homo sapien
gaacacctggaagatgctttacaag

SEQ ID NO: 3699128 - DNA, 25 bp, Homo sapien
tccctggtcttgctagagaattaga

SEQ ID NO: 3699129 - DNA, 25 bp, Homo sapien
taatttcagagcctgaaggccagtc

SEQ ID NO: 3699130 - DNA, 25 bp, Homo sapien
tcataaaggcatatcgtcatcagac

SEQ ID NO: 3699131 - DNA, 25 bp, Homo sapien
caagaagatagcagcacagaagatc

SEQ ID NO: 3699132 - DNA, 25 bp, Homo sapien
ggtagtttcaagcactctcactttg

SEQ ID NO: 3699133 - DNA, 25 bp, Homo sapien
gattcagcccattgacaattgttgc

SEQ ID NO: 3699134 - DNA, 25 bp, Homo sapien
gtaaagtgcctagaattctcatcca

SEQ ID NO: 3699135 - DNA, 25 bp, Homo sapien
tgtacgtggtacagacttccaagga

SEQ ID NO: 3699136 - DNA, 25 bp, Homo sapien
ttggttccagtttgtacgtggtaca

SEQ ID NO: 3699137 - DNA, 25 bp, Homo sapien
cagtttgtacgtggtacagacttcc

SEQ ID NO: 3699138 - DNA, 25 bp, Homo sapien
ggttccagtttgtacgtggtacaga

SEQ ID NO: 3699139 - DNA, 25 bp, Homo sapien
caggtttgacttttgaacttgccaa

SEQ ID NO: 3699140 - DNA, 25 bp, Homo sapien
tcaatgtttaaagggaaactcacac

SEQ ID NO: 3699141 - DNA, 25 bp, Homo sapien
aaagggaagcttcatgatatgcatg

SEQ ID NO: 3699142 - DNA, 25 bp, Homo sapien
ccatttgcccgccttcaggtttgac

SEQ ID NO: 3699143 - DNA, 25 bp, Homo sapien
tatgattgactcagtagccagggac

SEQ ID NO: 3699144 - DNA, 25 bp, Homo sapien
tccactgtgcaagcctggatctcag

SEQ ID NO: 3699145 - DNA, 25 bp, Homo sapien
tgtggtttcccagagcagtagatat

SEQ ID NO: 3699146 - DNA, 25 bp, Homo sapien
gacttctgggagcatgcagatgtgt

SEQ ID NO: 3699147 - DNA, 25 bp, Homo sapien
tatcatctgataaaaaccaaaaggc

SEQ ID NO: 3699148 - DNA, 25 bp, Homo sapien
gcacccctatgttaggtcccataga

SEQ ID NO: 3699149 - DNA, 25 bp, Homo sapien
aacagactgcaagtggttaggctca

SEQ ID NO: 3699150 - DNA, 25 bp, Homo sapien
tgtaactacaaattatggcaaagct

SEQ ID NO: 3699151 - DNA, 25 bp, Homo sapien
cctccggctcccagggctgctggcg

SEQ ID NO: 3699152 - DNA, 25 bp, Homo sapien
ctccggctcccagggctgctggcgg

SEQ ID NO: 3699153 - DNA, 25 bp, Homo sapien
ggcggctcaggtgtccgtgtggctg

SEQ ID NO: 3699154 - DNA, 25 bp, Homo sapien
agcaggaagaggcggctcaggtgtc

SEQ ID NO: 3699155 - DNA, 25 bp, Homo sapien
tctggtgcgccatgaaggccactgc

SEQ ID NO: 3699156 - DNA, 25 bp, Homo sapien
gaagaggcggctcaggtgtccgtgt

SEQ ID NO: 3699157 - DNA, 25 bp, Homo sapien
tgctactggaaggtagatccgagcc

SEQ ID NO: 3699158 - DNA, 25 bp, Homo sapien
gtcctgtaagccctataggccgctg

SEQ ID NO: 3699159 - DNA, 25 bp, Homo sapien
taggccgctgctactgttcggcatg

SEQ ID NO: 3699160 - DNA, 25 bp, Homo sapien
gtgcaccgagtcctgtaagccctat

SEQ ID NO: 3699161 - DNA, 25 bp, Homo sapien
tgtaagccctataggccgctgctac

SEQ ID NO: 3699162 - DNA, 25 bp, Homo sapien
caaaagttgttaagaggaggccgca

SEQ ID NO: 3699163 - DNA, 25 bp, Homo sapien
gggagcatgcggagaggctgcgtgg

SEQ ID NO: 3699164 - DNA, 25 bp, Homo sapien
gcccacgggcaggtatgtatggtcc

SEQ ID NO: 3699165 - DNA, 25 bp, Homo sapien
cgcgcaatgtgggaactgcacgtgc

SEQ ID NO: 3699166 - DNA, 25 bp, Homo sapien
aaagacctctgtaccctctcggaag

SEQ ID NO: 3699167 - DNA, 25 bp, Homo sapien
gtcccacagtgagcacccggtggag

SEQ ID NO: 3699168 - DNA, 25 bp, Homo sapien
tggaggtcaaagttccttctgaggc

SEQ ID NO: 3699169 - DNA, 25 bp, Homo sapien
tcctgcactgagtggttttgtagca

SEQ ID NO: 3699170 - DNA, 25 bp, Homo sapien
agacctggtgattggctgcctgaga

SEQ ID NO: 3699171 - DNA, 25 bp, Homo sapien
tgctgcatgtgagaagacctggtga

SEQ ID NO: 3699172 - DNA, 25 bp, Homo sapien
tctgggtatgggagatagggtttac

SEQ ID NO: 3699173 - DNA, 25 bp, Homo sapien
tgagaggtactgagctcgttggaac

SEQ ID NO: 3699174 - DNA, 25 bp, Homo sapien
acatgaccctgtgcttgcaggattg

SEQ ID NO: 3699175 - DNA, 25 bp, Homo sapien
caacatgaccctgtgcttgcaggat

SEQ ID NO: 3699176 - DNA, 25 bp, Homo sapien
atgaccctgtgcttgcaggattgga

SEQ ID NO: 3699177 - DNA, 25 bp, Homo sapien
tcacccctcactggtgagggacaaa

SEQ ID NO: 3699178 - DNA, 25 bp, Homo sapien
tttgagcctgagagaatgacaagcg

SEQ ID NO: 3699179 - DNA, 25 bp, Homo sapien
tctgtacatcacgtgaccacctgag

SEQ ID NO: 3699180 - DNA, 25 bp, Homo sapien
ctccccatgatcttcgatgtgataa

SEQ ID NO: 3699181 - DNA, 25 bp, Homo sapien
tatgtagaacccctaggttaaagca

SEQ ID NO: 3699182 - DNA, 25 bp, Homo sapien
cccagactttgtatggaggggtgtc

SEQ ID NO: 3699183 - DNA, 25 bp, Homo sapien
atctccatcgaccgggacagcatct

SEQ ID NO: 3699184 - DNA, 25 bp, Homo sapien
gaggggtgtctaaggtggctacagc

SEQ ID NO: 3699185 - DNA, 25 bp, Homo sapien
taaggtggctacagcaaagctgtca

SEQ ID NO: 3699186 - DNA, 25 bp, Homo sapien
accgtcgagcgcgagcgcggaggca

SEQ ID NO: 3699187 - DNA, 25 bp, Homo sapien
ctcgccatccccgcagggagaagat

SEQ ID NO: 3699188 - DNA, 25 bp, Homo sapien
gagcgcgcttcaggacaccgtcgag

SEQ ID NO: 3699189 - DNA, 25 bp, Homo sapien
aagatggtgctggttgggaagtccc

SEQ ID NO: 3699190 - DNA, 25 bp, Homo sapien
actgcctcgctgaaagtaggtcgcg

SEQ ID NO: 3699191 - DNA, 25 bp, Homo sapien
agctgagggtgatgactgtgaacca

SEQ ID NO: 3699192 - DNA, 25 bp, Homo sapien
tgaaccagaacagactgcctcgctg

SEQ ID NO: 3699193 - DNA, 25 bp, Homo sapien
tcgctgaaagtaggtcgcgccggct

SEQ ID NO: 3699194 - DNA, 25 bp, Homo sapien
gtagcgctccagcggctgtccttac

SEQ ID NO: 3699195 - DNA, 25 bp, Homo sapien
cgtagcgctccagcggctgtcctta

SEQ ID NO: 3699196 - DNA, 25 bp, Homo sapien
agacacagagttggctgggagctcc

SEQ ID NO: 3699197 - DNA, 25 bp, Homo sapien
cggtagccgcattgctggcctccga

SEQ ID NO: 3699198 - DNA, 25 bp, Homo sapien
gcaagggtcttgctggacggaaata

SEQ ID NO: 3699199 - DNA, 25 bp, Homo sapien
cggaaataggcggtagccgcattgc

SEQ ID NO: 3699200 - DNA, 25 bp, Homo sapien
caagggtcttgctggacggaaatag

SEQ ID NO: 3699201 - DNA, 25 bp, Homo sapien
atgagtaaccgagacaaccgtcaga

SEQ ID NO: 3699202 - DNA, 25 bp, Homo sapien
caaccgtcagatgcgcgtgcgcaca

SEQ ID NO: 3699203 - DNA, 25 bp, Homo sapien
taaccgagacaaccgtcagatgcgc

SEQ ID NO: 3699204 - DNA, 25 bp, Homo sapien
cgagacaaccgtcagatgcgcgtgc

SEQ ID NO: 3699205 - DNA, 25 bp, Homo sapien
ggaagccctattctgacttggcagg

SEQ ID NO: 3699206 - DNA, 25 bp, Homo sapien
catgcagaggtgaggacccaaagac

SEQ ID NO: 3699207 - DNA, 25 bp, Homo sapien
taacttgactttccgcttcgtgaga

SEQ ID NO: 3699208 - DNA, 25 bp, Homo sapien
taacccgttagtaaccatgcagagg

SEQ ID NO: 3699209 - DNA, 25 bp, Homo sapien
gtctccattcttggcttctattttc

SEQ ID NO: 3699210 - DNA, 25 bp, Homo sapien
gggtctccattcttggcttctattt

SEQ ID NO: 3699211 - DNA, 25 bp, Homo sapien
aagaaactctgaacagtcatttggg

SEQ ID NO: 3699212 - DNA, 25 bp, Homo sapien
aaactctgaacagtcatttgggtct

SEQ ID NO: 3699213 - DNA, 25 bp, Homo sapien
ccaaggttctgataagggatactct

SEQ ID NO: 3699214 - DNA, 25 bp, Homo sapien
tctgataagggatactctgaggcca

SEQ ID NO: 3699215 - DNA, 25 bp, Homo sapien
gataagggatactctgaggccagaa

SEQ ID NO: 3699216 - DNA, 25 bp, Homo sapien
gttctgataagggatactctgaggc

SEQ ID NO: 3699217 - DNA, 25 bp, Homo sapien
gagctccagtgtccacagtccactt

SEQ ID NO: 3699218 - DNA, 25 bp, Homo sapien
cagtccacttgtgcagctctcctta

SEQ ID NO: 3699219 - DNA, 25 bp, Homo sapien
atgagaccagagctccagtgtccac

SEQ ID NO: 3699220 - DNA, 25 bp, Homo sapien
tccaggtttcccatgagaccagagc

SEQ ID NO: 3699221 - DNA, 25 bp, Homo sapien
tacaaggactctcccacatgaatca

SEQ ID NO: 3699222 - DNA, 25 bp, Homo sapien
tactatggcatacaaggactctccc

SEQ ID NO: 3699223 - DNA, 25 bp, Homo sapien
ccacatgaatcagccaggcaagcca

SEQ ID NO: 3699224 - DNA, 25 bp, Homo sapien
acaatactatggcatacaaggactc

SEQ ID NO: 3699225 - DNA, 25 bp, Homo sapien
aaatcctacgatctgtttgaaattc

SEQ ID NO: 3699226 - DNA, 25 bp, Homo sapien
tttgaaattccatccagagatacgg

SEQ ID NO: 3699227 - DNA, 25 bp, Homo sapien
ctggaaatcctacgatctgtttgaa

SEQ ID NO: 3699228 - DNA, 25 bp, Homo sapien
tgactggaaatcctacgatctgttt

SEQ ID NO: 3699229 - DNA, 25 bp, Homo sapien
gcactcctacattccaagttgaggg

SEQ ID NO: 3699230 - DNA, 25 bp, Homo sapien
tgccaacaacaaaataggtgtcacg

SEQ ID NO: 3699231 - DNA, 25 bp, Homo sapien
aaaataggtgtcacgcactcctaca

SEQ ID NO: 3699232 - DNA, 25 bp, Homo sapien
gggctggaccggacacttccaatct

SEQ ID NO: 3699233 - DNA, 25 bp, Homo sapien
taatgattccaccaagacccaagca

SEQ ID NO: 3699234 - DNA, 25 bp, Homo sapien
tgccctgtcacagagtacttctact

SEQ ID NO: 3699235 - DNA, 25 bp, Homo sapien
ttttggtcattcgaggctgccctgt

SEQ ID NO: 3699236 - DNA, 25 bp, Homo sapien
aaatgttacctctgatacttgaaaa

SEQ ID NO: 3699237 - DNA, 25 bp, Homo sapien
tatccgtattcttagctcattttgc

SEQ ID NO: 3699238 - DNA, 25 bp, Homo sapien
ttatccgtattcttagctcattttg

SEQ ID NO: 3699239 - DNA, 25 bp, Homo sapien
tttatccgtattcttagctcatttt

SEQ ID NO: 3699240 - DNA, 25 bp, Homo sapien
ctttatccgtattcttagctcattt

SEQ ID NO: 3699241 - DNA, 25 bp, Homo sapien
atgatcctgtaaatgtgtatgatat

SEQ ID NO: 3699242 - DNA, 25 bp, Homo sapien
gaacagcagtgcttgtttcctcctc

SEQ ID NO: 3699243 - DNA, 25 bp, Homo sapien
cctggggtcatcataacttgttctc

SEQ ID NO: 3699244 - DNA, 25 bp, Homo sapien
cagttggtggctaggtaacccggag

SEQ ID NO: 3699245 - DNA, 25 bp, Homo sapien
caaggagtgcctataaacaggtaag

SEQ ID NO: 3699246 - DNA, 25 bp, Homo sapien
acaggtaagaataggacagacagcc

SEQ ID NO: 3699247 - DNA, 25 bp, Homo sapien
tatttgcaagacacctaaaggacaa

SEQ ID NO: 3699248 - DNA, 25 bp, Homo sapien
caataagtagctctgggataacggc

SEQ ID NO: 3699249 - DNA, 25 bp, Homo sapien
gcagaagtggcatttgacaaatttc

SEQ ID NO: 3699250 - DNA, 25 bp, Homo sapien
atgaatatcttaataaatgcagaag

SEQ ID NO: 3699251 - DNA, 25 bp, Homo sapien
ccacgcccggctgcatttgacaaat

SEQ ID NO: 3699252 - DNA, 25 bp, Homo sapien
tttctacagtaacagattaaaacag

SEQ ID NO: 3699253 - DNA, 25 bp, Homo sapien
cactcagaatctctcagaatcagtt

SEQ ID NO: 3699254 - DNA, 25 bp, Homo sapien
gtgacctgggcaaatcactcagaat

SEQ ID NO: 3699255 - DNA, 25 bp, Homo sapien
agaatctctcagaatcagttttctc

SEQ ID NO: 3699256 - DNA, 25 bp, Homo sapien
tgtgacctgggcaaatcactcagaa

SEQ ID NO: 3699257 - DNA, 25 bp, Homo sapien
cgcttccgtttgtaagcaatcaaga

SEQ ID NO: 3699258 - DNA, 25 bp, Homo sapien
cgtttgtaagcaatcaagatggtga

SEQ ID NO: 3699259 - DNA, 25 bp, Homo sapien
ttggcgcttccgtttgtaagcaatc

SEQ ID NO: 3699260 - DNA, 25 bp, Homo sapien
tttttggcgcttccgtttgtaagca

SEQ ID NO: 3699261 - DNA, 25 bp, Homo sapien
gtgtagagcaagctttcagacaact

SEQ ID NO: 3699262 - DNA, 25 bp, Homo sapien
aagggtgaggatgaatgtaaaagtg

SEQ ID NO: 3699263 - DNA, 25 bp, Homo sapien
gtttgagaggataggatcctacctc

SEQ ID NO: 3699264 - DNA, 25 bp, Homo sapien
tgtgtggaattgacatatagtggaa

SEQ ID NO: 3699265 - DNA, 25 bp, Homo sapien
ttaaagagctttgaaggacagtttc

SEQ ID NO: 3699266 - DNA, 25 bp, Homo sapien
ctgtagcatgagaaatggaagtttg

SEQ ID NO: 3699267 - DNA, 25 bp, Homo sapien
caggttctcagcgtgcctctatgcc

SEQ ID NO: 3699268 - DNA, 25 bp, Homo sapien
ccctccaggttctcagcgtgcctct

SEQ ID NO: 3699269 - DNA, 25 bp, Homo sapien
tcccctccaggttctcagcgtgcct

SEQ ID NO: 3699270 - DNA, 25 bp, Homo sapien
tccaggttctcagcgtgcctctatg

SEQ ID NO: 3699271 - DNA, 25 bp, Homo sapien
aaatgagggctagtgtccccagaaa

SEQ ID NO: 3699272 - DNA, 25 bp, Homo sapien
gaggtaataactagccagataaccc

SEQ ID NO: 3699273 - DNA, 25 bp, Homo sapien
gagaggtaataactagccagataac

SEQ ID NO: 3699274 - DNA, 25 bp, Homo sapien
ggtaataactagccagataacccat

SEQ ID NO: 3699275 - DNA, 25 bp, Homo sapien
ctcaggtccaccctagtgattcctt

SEQ ID NO: 3699276 - DNA, 25 bp, Homo sapien
accctagtgattccttgtatgtgga

SEQ ID NO: 3699277 - DNA, 25 bp, Homo sapien
cagttccctagtagtctatttgaga

SEQ ID NO: 3699278 - DNA, 25 bp, Homo sapien
aaacagttccctagtagtctatttg

SEQ ID NO: 3699279 - DNA, 25 bp, Homo sapien
gtgccacagtaaacatacatgtgta

SEQ ID NO: 3699280 - DNA, 25 bp, Homo sapien
tttgagtggcatttcaattctttta

SEQ ID NO: 3699281 - DNA, 25 bp, Homo sapien
ataagtaagaacacgtggtgtttgg

SEQ ID NO: 3699282 - DNA, 25 bp, Homo sapien
caccgacaggccctggtgtttgatg

SEQ ID NO: 3699283 - DNA, 25 bp, Homo sapien
tcctggcgatttggttggaagcacc

SEQ ID NO: 3699284 - DNA, 25 bp, Homo sapien
tggaagcaccggtggaggaactacc

SEQ ID NO: 3699285 - DNA, 25 bp, Homo sapien
tgctccgggcactatgttaactgtc

SEQ ID NO: 3699286 - DNA, 25 bp, Homo sapien
actacctgagggctgtctgcgtcta

SEQ ID NO: 3699287 - DNA, 25 bp, Homo sapien
cgtctatgattccatattctacggg

SEQ ID NO: 3699288 - DNA, 25 bp, Homo sapien
aattggcagcgtctatgattccata

SEQ ID NO: 3699289 - DNA, 25 bp, Homo sapien
agttcactttgatcctctcttgcag

SEQ ID NO: 3699290 - DNA, 25 bp, Homo sapien
ccacaagctttttcccgggagccat

SEQ ID NO: 3699291 - DNA, 25 bp, Homo sapien
tcctggctgtggctatgcaattgtc

SEQ ID NO: 3699292 - DNA, 25 bp, Homo sapien
tggctatgcaattgtccaaaacagt

SEQ ID NO: 3699293 - DNA, 25 bp, Homo sapien
caaaacagttaccacgctaaccagt

SEQ ID NO: 3699294 - DNA, 25 bp, Homo sapien
aaacagttaccacgctaaccagtga

SEQ ID NO: 3699295 - DNA, 25 bp, Homo sapien
gggtttgttacgagccagtttcaca

SEQ ID NO: 3699296 - DNA, 25 bp, Homo sapien
ttcacaggcgggcagactaagactc

SEQ ID NO: 3699297 - DNA, 25 bp, Homo sapien
cggcccgagaggaaatgcactcagt

SEQ ID NO: 3699298 - DNA, 25 bp, Homo sapien
gactttctggctcgagagaacccgc

SEQ ID NO: 3699299 - DNA, 25 bp, Homo sapien
ccagtccggtcagcgcgcagagcag

SEQ ID NO: 3699300 - DNA, 25 bp, Homo sapien
cggccaaagagcccgcggcgcggag

SEQ ID NO: 3699301 - DNA, 25 bp, Homo sapien
aaagagcccgcggcgcggagcaggg

SEQ ID NO: 3699302 - DNA, 25 bp, Homo sapien
gcggagcagggccagtccggtcagc

SEQ ID NO: 3699303 - DNA, 25 bp, Homo sapien
gccatctgcgggtctccccggctcc

SEQ ID NO: 3699304 - DNA, 25 bp, Homo sapien
cgccatctgcgggtctccccggctc

SEQ ID NO: 3699305 - DNA, 25 bp, Homo sapien
ctcgccatctgcgggtctccccggc

SEQ ID NO: 3699306 - DNA, 25 bp, Homo sapien
ccatctgcgggtctccccggctcca

SEQ ID NO: 3699307 - DNA, 25 bp, Homo sapien
tgggaaaacaagtcttgtcactgtg

SEQ ID NO: 3699308 - DNA, 25 bp, Homo sapien
ggaaaacaagtcttgtcactgtggg

SEQ ID NO: 3699309 - DNA, 25 bp, Homo sapien
gggaaaacaagtcttgtcactgtgg

SEQ ID NO: 3699310 - DNA, 25 bp, Homo sapien
tgtgggaaaacaagtcttgtcactg

SEQ ID NO: 3699311 - DNA, 25 bp, Homo sapien
ctgagtctcctcgcggagggctgaa

SEQ ID NO: 3699312 - DNA, 25 bp, Homo sapien
gctctgagctgagtctcctcgcgga

SEQ ID NO: 3699313 - DNA, 25 bp, Homo sapien
agctgagtctcctcgcggagggctg

SEQ ID NO: 3699314 - DNA, 25 bp, Homo sapien
tctgagctgagtctcctcgcggagg

SEQ ID NO: 3699315 - DNA, 25 bp, Homo sapien
catctagacggcgttgcacagccat

SEQ ID NO: 3699316 - DNA, 25 bp, Homo sapien
tagacggcgttgcacagccatgtgt

SEQ ID NO: 3699317 - DNA, 25 bp, Homo sapien
ctcctccatgacatctagacggcgt

SEQ ID NO: 3699318 - DNA, 25 bp, Homo sapien
tccatgacatctagacggcgttgca

SEQ ID NO: 3699319 - DNA, 25 bp, Homo sapien
ggtggtatctctgccaaatgacagg

SEQ ID NO: 3699320 - DNA, 25 bp, Homo sapien
tagtcacagatttggatgaagcgcc

SEQ ID NO: 3699321 - DNA, 25 bp, Homo sapien
ccatggaccccattggcagtgtggt

SEQ ID NO: 3699322 - DNA, 25 bp, Homo sapien
ttttccctgtgtatgccatggaccc

SEQ ID NO: 3699323 - DNA, 25 bp, Homo sapien
tcgaggacagaagtggttccacgtt

SEQ ID NO: 3699324 - DNA, 25 bp, Homo sapien
agtggttccacgttccgcttcatca

SEQ ID NO: 3699325 - DNA, 25 bp, Homo sapien
taaagtcgaggacagaagtggttcc

SEQ ID NO: 3699326 - DNA, 25 bp, Homo sapien
ccacgttccgcttcatcagctaggt

SEQ ID NO: 3699327 - DNA, 25 bp, Homo sapien
ggtgatccacggtcttctctaccat

SEQ ID NO: 3699328 - DNA, 25 bp, Homo sapien
aggtgatccacggtcttctctacca

SEQ ID NO: 3699329 - DNA, 25 bp, Homo sapien
ctaaggaaggaagtcgagaggacag

SEQ ID NO: 3699330 - DNA, 25 bp, Homo sapien
cctggcaggtgcaccacctccaact

SEQ ID NO: 3699331 - DNA, 25 bp, Homo sapien
aaggaaggaagtcgagaggacaggg

SEQ ID NO: 3699332 - DNA, 25 bp, Homo sapien
acagggctggttctgtgggcgctgc

SEQ ID NO: 3699333 - DNA, 25 bp, Homo sapien
taaacagtctgggtgggtcctgaga

SEQ ID NO: 3699334 - DNA, 25 bp, Homo sapien
gagaagcaaggccactcaaagggcc

SEQ ID NO: 3699335 - DNA, 25 bp, Homo sapien
taaacgggttactctgtcagcagac

SEQ ID NO: 3699336 - DNA, 25 bp, Homo sapien
tctgcccctataaatgacaggagtg

SEQ ID NO: 3699337 - DNA, 25 bp, Homo sapien
catcattactcagtccacaacctgg

SEQ ID NO: 3699338 - DNA, 25 bp, Homo sapien
tcagtccacaacctggactcatgta

SEQ ID NO: 3699339 - DNA, 25 bp, Homo sapien
aagggatagggacatcattactcag

SEQ ID NO: 3699340 - DNA, 25 bp, Homo sapien
cacaacctggactcatgtagggtcc

SEQ ID NO: 3699341 - DNA, 25 bp, Homo sapien
gacctggctccttatttctgctgta

SEQ ID NO: 3699342 - DNA, 25 bp, Homo sapien
cttaggacctggctccttatttctg

SEQ ID NO: 3699343 - DNA, 25 bp, Homo sapien
aggacctggctccttatttctgctg

SEQ ID NO: 3699344 - DNA, 25 bp, Homo sapien
tttctgctgtaggctctttcctgcc

SEQ ID NO: 3699345 - DNA, 25 bp, Homo sapien
cttgcatcaggggtctccacccact

SEQ ID NO: 3699346 - DNA, 25 bp, Homo sapien
atcaggggtctccacccactccttt

SEQ ID NO: 3699347 - DNA, 25 bp, Homo sapien
tgcatcaggggtctccacccactcc

SEQ ID NO: 3699348 - DNA, 25 bp, Homo sapien
catcaggggtctccacccactcctt

SEQ ID NO: 3699349 - DNA, 25 bp, Homo sapien
tttgcagggactcgtaaggacatgg

SEQ ID NO: 3699350 - DNA, 25 bp, Homo sapien
tgtggtgcgaagaatgcagtccttc

SEQ ID NO: 3699351 - DNA, 25 bp, Homo sapien
gagatttgtgtgcaggaaaccctga

SEQ ID NO: 3699352 - DNA, 25 bp, Homo sapien
gaggttcccgaaatccaggcaggag

SEQ ID NO: 3699353 - DNA, 25 bp, Homo sapien
gtgtcacgagctttgttactgccaa

SEQ ID NO: 3699354 - DNA, 25 bp, Homo sapien
gagagaaagggaggcgtgcctgaga

SEQ ID NO: 3699355 - DNA, 25 bp, Homo sapien
tgagaaggtagcctgtgcatctggt

SEQ ID NO: 3699356 - DNA, 25 bp, Homo sapien
catctggtgagtgtgtcacgagctt

SEQ ID NO: 3699357 - DNA, 25 bp, Homo sapien
caagtctgtttgctgcatacacatt

SEQ ID NO: 3699358 - DNA, 25 bp, Homo sapien
gacagaggcatacaagtctgtttgc

SEQ ID NO: 3699359 - DNA, 25 bp, Homo sapien
tgggtgggtgaagcaccgtgtcctc

SEQ ID NO: 3699360 - DNA, 25 bp, Homo sapien
catttctggtgagggcgactgggtg

SEQ ID NO: 3699361 - DNA, 25 bp, Homo sapien
aaatccacaaatagccccgagattc

SEQ ID NO: 3699362 - DNA, 25 bp, Homo sapien
acctgggtcggtctagaactctctc

SEQ ID NO: 3699363 - DNA, 25 bp, Homo sapien
cccgtatagtgtgccacaggacctg

SEQ ID NO: 3699364 - DNA, 25 bp, Homo sapien
gagattcaccgtcctagagcttagg

SEQ ID NO: 3699365 - DNA, 25 bp, Homo sapien
atatcaggacccagaaggctgaaag

SEQ ID NO: 3699366 - DNA, 25 bp, Homo sapien
gaatatcaggacccagaaggctgaa

SEQ ID NO: 3699367 - DNA, 25 bp, Homo sapien
cctcccttaacggatgtcttccttg

SEQ ID NO: 3699368 - DNA, 25 bp, Homo sapien
ctcccttaacggatgtcttccttgt

SEQ ID NO: 3699369 - DNA, 25 bp, Homo sapien
ctaattaggtaggctgcggcaggag

SEQ ID NO: 3699370 - DNA, 25 bp, Homo sapien
cagctaattaggtaggctgcggcag

SEQ ID NO: 3699371 - DNA, 25 bp, Homo sapien
gctaattaggtaggctgcggcagga

SEQ ID NO: 3699372 - DNA, 25 bp, Homo sapien
ccagctaattaggtaggctgcggca

SEQ ID NO: 3699373 - DNA, 25 bp, Homo sapien
ctggagaggcaggcaggaggagaga

SEQ ID NO: 3699374 - DNA, 25 bp, Homo sapien
ggcaggaggagagaagatggcccca

SEQ ID NO: 3699375 - DNA, 25 bp, Homo sapien
gcaggaggagagaagatggccccat

SEQ ID NO: 3699376 - DNA, 25 bp, Homo sapien
gaggcaggcaggaggagagaagatg

SEQ ID NO: 3699377 - DNA, 25 bp, Homo sapien
gatctgcgtgtgacgctgtgtgctc

SEQ ID NO: 3699378 - DNA, 25 bp, Homo sapien
aagcctgccatggaggagcgtgacg

SEQ ID NO: 3699379 - DNA, 25 bp, Homo sapien
tgtgtgctctcggtctgcgttgtat

SEQ ID NO: 3699380 - DNA, 25 bp, Homo sapien
tatggaaagtgagttcctcctcact

SEQ ID NO: 3699381 - DNA, 25 bp, Homo sapien
tgagtgcccatcacgtgctggcctg

SEQ ID NO: 3699382 - DNA, 25 bp, Homo sapien
tgcgaggcagccagatattagcact

SEQ ID NO: 3699383 - DNA, 25 bp, Homo sapien
tgtgtctgttgcaagaacctcagcg

SEQ ID NO: 3699384 - DNA, 25 bp, Homo sapien
tcttatgtgagcctgtttggtgtgg

SEQ ID NO: 3699385 - DNA, 25 bp, Homo sapien
tggactttgcagtaactggagtgac

SEQ ID NO: 3699386 - DNA, 25 bp, Homo sapien
ctgggttggactttgcagtaactgg

SEQ ID NO: 3699387 - DNA, 25 bp, Homo sapien
ctgtgggcccaggagatctgggaga

SEQ ID NO: 3699388 - DNA, 25 bp, Homo sapien
gagatctgggagaagctgggttgga

SEQ ID NO: 3699389 - DNA, 25 bp, Homo sapien
tcttgtagatagtaactaccacagg

SEQ ID NO: 3699390 - DNA, 25 bp, Homo sapien
ctgctgcaagggttgtcttgtagat

SEQ ID NO: 3699391 - DNA, 25 bp, Homo sapien
caagggttgtcttgtagatagtaac

SEQ ID NO: 3699392 - DNA, 25 bp, Homo sapien
taactaccacaggacttggggtgtg

SEQ ID NO: 3699393 - DNA, 25 bp, Homo sapien
gtggcctagcagcagtgttagaaga

SEQ ID NO: 3699394 - DNA, 25 bp, Homo sapien
gagctggtttagagtgtgtgagaga

SEQ ID NO: 3699395 - DNA, 25 bp, Homo sapien
gtgtgggctgcggtaaaactcatgc

SEQ ID NO: 3699396 - DNA, 25 bp, Homo sapien
agcagtgttagaagatgatatcaga

SEQ ID NO: 3699397 - DNA, 25 bp, Homo sapien
tactcctgtgatcacaaatgcagat

SEQ ID NO: 3699398 - DNA, 25 bp, Homo sapien
actcctgtgatcacaaatgcagatt

SEQ ID NO: 3699399 - DNA, 25 bp, Homo sapien
ctactcctgtgatcacaaatgcaga

SEQ ID NO: 3699400 - DNA, 25 bp, Homo sapien
gatatttggaaaggtttcctgaggc

SEQ ID NO: 3699401 - DNA, 25 bp, Homo sapien
cttgataagggatatttggaaaggt

SEQ ID NO: 3699402 - DNA, 25 bp, Homo sapien
atatttggaaaggtttcctgaggct

SEQ ID NO: 3699403 - DNA, 25 bp, Homo sapien
tcccaagtgaaggtgttttctcctc

SEQ ID NO: 3699404 - DNA, 25 bp, Homo sapien
gaacttccagttgcatgcggctgac

SEQ ID NO: 3699405 - DNA, 25 bp, Homo sapien
ggctccagactgcttgacacagctt

SEQ ID NO: 3699406 - DNA, 25 bp, Homo sapien
ccagtgtgagtgactcttggctcca

SEQ ID NO: 3699407 - DNA, 25 bp, Homo sapien
cctgtcctacagcctgtagcactga

SEQ ID NO: 3699408 - DNA, 25 bp, Homo sapien
gcctgtcctacagcctgtagcactg

SEQ ID NO: 3699409 - DNA, 25 bp, Homo sapien
gttgggttaagtttctcatcgtcat

SEQ ID NO: 3699410 - DNA, 25 bp, Homo sapien
ttgcatgcattcctttcctgatttt

SEQ ID NO: 3699411 - DNA, 25 bp, Homo sapien
tgatactatagaaagggcccaccct

SEQ ID NO: 3699412 - DNA, 25 bp, Homo sapien
ccaccctgggtggatgtgtctagaa

SEQ ID NO: 3699413 - DNA, 25 bp, Homo sapien
gacgcctttatgcatgatactatag

SEQ ID NO: 3699414 - DNA, 25 bp, Homo sapien
gccaggatcgattagtgatgcctag

SEQ ID NO: 3699415 - DNA, 25 bp, Homo sapien
tcctcattccttttatgcggcagtc

SEQ ID NO: 3699416 - DNA, 25 bp, Homo sapien
cattctttgtgctgcaaggtgttcc

SEQ ID NO: 3699417 - DNA, 25 bp, Homo sapien
ttttatgcggcagtcaattgttggg

SEQ ID NO: 3699418 - DNA, 25 bp, Homo sapien
aacagggcccctttcctcaaggcat

SEQ ID NO: 3699419 - DNA, 25 bp, Homo sapien
aggagggcgaatgcggctctgcgcg

SEQ ID NO: 3699420 - DNA, 25 bp, Homo sapien
gggcggcagagggacctccggagcc

SEQ ID NO: 3699421 - DNA, 25 bp, Homo sapien
cggagcccgagacttcctggagcag

SEQ ID NO: 3699422 - DNA, 25 bp, Homo sapien
gaatgcggctctgcgcggcactggg

SEQ ID NO: 3699423 - DNA, 25 bp, Homo sapien
gccgactcatgtccaaaaaatgcag

SEQ ID NO: 3699424 - DNA, 25 bp, Homo sapien
tccgagcggctctggagactttggc

SEQ ID NO: 3699425 - DNA, 25 bp, Homo sapien
cacggaatatgactgagcgcccggg

SEQ ID NO: 3699426 - DNA, 25 bp, Homo sapien
gggtaataacccactctgagagtct

SEQ ID NO: 3699427 - DNA, 25 bp, Homo sapien
cccgggcccagagagagcgcctgga

SEQ ID NO: 3699428 - DNA, 25 bp, Homo sapien
gggctgggtaggcgccaggagacct

SEQ ID NO: 3699429 - DNA, 25 bp, Homo sapien
gccaggagaccttcccggaccaatc

SEQ ID NO: 3699430 - DNA, 25 bp, Homo sapien
tgggtaggcgccaggagaccttccc

SEQ ID NO: 3699431 - DNA, 25 bp, Homo sapien
tattctaggagcattcgctcagcca

SEQ ID NO: 3699432 - DNA, 25 bp, Homo sapien
gctcagccacggagaaaaatgggcc

SEQ ID NO: 3699433 - DNA, 25 bp, Homo sapien
ttataaacgtggtattctaggagca

SEQ ID NO: 3699434 - DNA, 25 bp, Homo sapien
tgggcctttcgaagaagctggcctt

SEQ ID NO: 3699435 - DNA, 25 bp, Homo sapien
cagaaaggtgtatacatccagcagg

SEQ ID NO: 3699436 - DNA, 25 bp, Homo sapien
atgcagaaaggtgtatacatccagc

SEQ ID NO: 3699437 - DNA, 25 bp, Homo sapien
aaggtgtatacatccagcaggaatt

SEQ ID NO: 3699438 - DNA, 25 bp, Homo sapien
tgatgcagaaaggtgtatacatcca

SEQ ID NO: 3699439 - DNA, 25 bp, Homo sapien
tgacccctgccattggccttgagga

SEQ ID NO: 3699440 - DNA, 25 bp, Homo sapien
tcctcagtccctagcaacttgctgg

SEQ ID NO: 3699441 - DNA, 25 bp, Homo sapien
ttataggtgagaaagccgaggctcg

SEQ ID NO: 3699442 - DNA, 25 bp, Homo sapien
aggattagggcctcagctcgggtcc

SEQ ID NO: 3699443 - DNA, 25 bp, Homo sapien
tgtgtgcttgcatccaactgtgata

SEQ ID NO: 3699444 - DNA, 25 bp, Homo sapien
cctatgtatgtcaagttggtgaagg

SEQ ID NO: 3699445 - DNA, 25 bp, Homo sapien
tatgtatgtcaagttggtgaaggcc

SEQ ID NO: 3699446 - DNA, 25 bp, Homo sapien
tgcatccaactgtgataagcctatg

SEQ ID NO: 3699447 - DNA, 25 bp, Homo sapien
acagggtttggaactcttgcggcca

SEQ ID NO: 3699448 - DNA, 25 bp, Homo sapien
taacatgaagctttctccgtggagg

SEQ ID NO: 3699449 - DNA, 25 bp, Homo sapien
tatccatctgtgtggcgtcagctga

SEQ ID NO: 3699450 - DNA, 25 bp, Homo sapien
ttgcgcttcgtcagttcccgggtgg

SEQ ID NO: 3699451 - DNA, 25 bp, Homo sapien
ggtcaggacaatcaacaccttcacg

SEQ ID NO: 3699452 - DNA, 25 bp, Homo sapien
tcaggacaatcaacaccttcacgac

SEQ ID NO: 3699453 - DNA, 25 bp, Homo sapien
agctggtccttgtcacgggacagaa

SEQ ID NO: 3699454 - DNA, 25 bp, Homo sapien
tggtccttgtcacgggacagaaact

SEQ ID NO: 3699455 - DNA, 25 bp, Homo sapien
ggacttgcatgagactgtcactgac

SEQ ID NO: 3699456 - DNA, 25 bp, Homo sapien
cttccttggggacttgcatgagact

SEQ ID NO: 3699457 - DNA, 25 bp, Homo sapien
cttggggacttgcatgagactgtca

SEQ ID NO: 3699458 - DNA, 25 bp, Homo sapien
tggggacttgcatgagactgtcact

SEQ ID NO: 3699459 - DNA, 25 bp, Homo sapien
ccagtgacagttttcggcagctccg

SEQ ID NO: 3699460 - DNA, 25 bp, Homo sapien
actctgggtcgccggagagagttat

SEQ ID NO: 3699461 - DNA, 25 bp, Homo sapien
aggaggactctgggtcgccggagag

SEQ ID NO: 3699462 - DNA, 25 bp, Homo sapien
aggactctgggtcgccggagagagt

SEQ ID NO: 3699463 - DNA, 25 bp, Homo sapien
ctctgggtcgccggagagagttata

SEQ ID NO: 3699464 - DNA, 25 bp, Homo sapien
ttgtgcacctcggaagttggcagtc

SEQ ID NO: 3699465 - DNA, 25 bp, Homo sapien
ggtttgtgcacctcggaagttggca

SEQ ID NO: 3699466 - DNA, 25 bp, Homo sapien
tggcagtcacagagaggcctctcca

SEQ ID NO: 3699467 - DNA, 25 bp, Homo sapien
cacctcggaagttggcagtcacaga

SEQ ID NO: 3699468 - DNA, 25 bp, Homo sapien
ctgtccgtgggccatactcctgagt

SEQ ID NO: 3699469 - DNA, 25 bp, Homo sapien
tccgtgggccatactcctgagtgcc

SEQ ID NO: 3699470 - DNA, 25 bp, Homo sapien
gtgtctctgtgcttgcggtatctgt

SEQ ID NO: 3699471 - DNA, 25 bp, Homo sapien
tgtgtctctgtgcttgcggtatctg

SEQ ID NO: 3699472 - DNA, 25 bp, Homo sapien
ctccataatgtaaagaggtattttg

SEQ ID NO: 3699473 - DNA, 25 bp, Homo sapien
tctctccccgacacatttgttaaaa

SEQ ID NO: 3699474 - DNA, 25 bp, Homo sapien
gggctctctccccgacacatttgtt

SEQ ID NO: 3699475 - DNA, 25 bp, Homo sapien
ggattctggcaaatggtccttgtgc

SEQ ID NO: 3699476 - DNA, 25 bp, Homo sapien
agccccctcgcctgcctgtgtctct

SEQ ID NO: 3699477 - DNA, 25 bp, Homo sapien
gaacccagacaatcagcctcagaga

SEQ ID NO: 3699478 - DNA, 25 bp, Homo sapien
agaacccagacaatcagcctcagag

SEQ ID NO: 3699479 - DNA, 25 bp, Homo sapien
aacccagacaatcagcctcagagag

SEQ ID NO: 3699480 - DNA, 25 bp, Homo sapien
tctcgttcacgttctttcattctca

SEQ ID NO: 3699481 - DNA, 25 bp, Homo sapien
ttgcagatgggtattttttctagag

SEQ ID NO: 3699482 - DNA, 25 bp, Homo sapien
tttctagagccaatttcatggtttc

SEQ ID NO: 3699483 - DNA, 25 bp, Homo sapien
ctagagccaatttcatggtttcttc

SEQ ID NO: 3699484 - DNA, 25 bp, Homo sapien
cagttgttgaggcctttcttgcagc

SEQ ID NO: 3699485 - DNA, 25 bp, Homo sapien
aggcctttcttgcagcagaaggggc

SEQ ID NO: 3699486 - DNA, 25 bp, Homo sapien
ccagttgttgaggcctttcttgcag

SEQ ID NO: 3699487 - DNA, 25 bp, Homo sapien
cctttcttgcagcagaaggggcgat

SEQ ID NO: 3699488 - DNA, 25 bp, Homo sapien
tgtgctgcttgccggcagccttcct

SEQ ID NO: 3699489 - DNA, 25 bp, Homo sapien
gctgcttgccggcagccttcctctc

SEQ ID NO: 3699490 - DNA, 25 bp, Homo sapien
ctccctctgcaaggcttgagcacag

SEQ ID NO: 3699491 - DNA, 25 bp, Homo sapien
ctgtgctgcttgccggcagccttcc

SEQ ID NO: 3699492 - DNA, 25 bp, Homo sapien
caagtcccatcgtgtgtgatcagag

SEQ ID NO: 3699493 - DNA, 25 bp, Homo sapien
taaaagggatcagtcagggtctact

SEQ ID NO: 3699494 - DNA, 25 bp, Homo sapien
tgtggcacgtgagaaaaacggtcct

SEQ ID NO: 3699495 - DNA, 25 bp, Homo sapien
cagaagttaagtgggtgccttccca

SEQ ID NO: 3699496 - DNA, 25 bp, Homo sapien
caactgagtccttccaacagcaggg

SEQ ID NO: 3699497 - DNA, 25 bp, Homo sapien
tgcaaatgtacgcaggctggggcct

SEQ ID NO: 3699498 - DNA, 25 bp, Homo sapien
cttatgcctcaggtgatagtccctt

SEQ ID NO: 3699499 - DNA, 25 bp, Homo sapien
tcaatgccataaagtgtcccttcaa

SEQ ID NO: 3699500 - DNA, 25 bp, Homo sapien
aacaccaaaaccaacacaagctgca

SEQ ID NO: 3699501 - DNA, 25 bp, Homo sapien
aaatatatgaatatgatggacacaa

SEQ ID NO: 3699502 - DNA, 25 bp, Homo sapien
gaatatgatggacacaaaaacacca

SEQ ID NO: 3699503 - DNA, 25 bp, Homo sapien
aaacaccaaaaccaacacaagctgc

SEQ ID NO: 3699504 - DNA, 25 bp, Homo sapien
ggactctctagtgcaggaggtggct

SEQ ID NO: 3699505 - DNA, 25 bp, Homo sapien
acaacacccaggtagaggaggcggc

SEQ ID NO: 3699506 - DNA, 25 bp, Homo sapien
accttcagatggagggagtgtttga

SEQ ID NO: 3699507 - DNA, 25 bp, Homo sapien
aagttttcaggggactctctagtgc

SEQ ID NO: 3699508 - DNA, 25 bp, Homo sapien
ggccccagagaacaatcgagtggag

SEQ ID NO: 3699509 - DNA, 25 bp, Homo sapien
cccagagaacaatcgagtggaggag

SEQ ID NO: 3699510 - DNA, 25 bp, Homo sapien
agagaacaatcgagtggaggaggtg

SEQ ID NO: 3699511 - DNA, 25 bp, Homo sapien
gataaggccccagagaacaatcgag

SEQ ID NO: 3699512 - DNA, 25 bp, Homo sapien
ttgacagccgcaggtggtggatgag

SEQ ID NO: 3699513 - DNA, 25 bp, Homo sapien
caggtggtggatgaggtccggaaag

SEQ ID NO: 3699514 - DNA, 25 bp, Homo sapien
ctggaggattgacagccgcaggtgg

SEQ ID NO: 3699515 - DNA, 25 bp, Homo sapien
ggtggatgaggtccggaaagacagg

SEQ ID NO: 3699516 - DNA, 25 bp, Homo sapien
ggtcagatgcatgccgtgggtcaat

SEQ ID NO: 3699517 - DNA, 25 bp, Homo sapien
tcgaggtcctacaggcaacaatggg

SEQ ID NO: 3699518 - DNA, 25 bp, Homo sapien
tcatggaggaccaacaggtgcagca

SEQ ID NO: 3699519 - DNA, 25 bp, Homo sapien
ggtcccggaagacagacacatgtag

SEQ ID NO: 3699520 - DNA, 25 bp, Homo sapien
gtttactcccaggagattctgtctc

SEQ ID NO: 3699521 - DNA, 25 bp, Homo sapien
gggctggtcagaagctctgtgccct

SEQ ID NO: 3699522 - DNA, 25 bp, Homo sapien
gctggtcagaagctctgtgcccttc

SEQ ID NO: 3699523 - DNA, 25 bp, Homo sapien
tgtttactcccaggagattctgtct

SEQ ID NO: 3699524 - DNA, 25 bp, Homo sapien
gccatatctgtgtctgtatgtcatg

SEQ ID NO: 3699525 - DNA, 25 bp, Homo sapien
tgctgaatacttctgtgtgtggcca

SEQ ID NO: 3699526 - DNA, 25 bp, Homo sapien
ttaggatctcttcatctcgtaagga

SEQ ID NO: 3699527 - DNA, 25 bp, Homo sapien
gcctgagctgctacaccctaaggtt

SEQ ID NO: 3699528 - DNA, 25 bp, Homo sapien
cagaaagataggactgcaaatgttt

SEQ ID NO: 3699529 - DNA, 25 bp, Homo sapien
catggcgctgggccttaaggaggtc

SEQ ID NO: 3699530 - DNA, 25 bp, Homo sapien
tccccatgtgatgggctttcatggc

SEQ ID NO: 3699531 - DNA, 25 bp, Homo sapien
tgtccccatgtgatgggctttcatg

SEQ ID NO: 3699532 - DNA, 25 bp, Homo sapien
catgtgatgggctttcatggcgctg

SEQ ID NO: 3699533 - DNA, 25 bp, Homo sapien
tctcagtgaaaaagggagaagcatt

SEQ ID NO: 3699534 - DNA, 25 bp, Homo sapien
ctcagtgaaaaagggagaagcattt

SEQ ID NO: 3699535 - DNA, 25 bp, Homo sapien
tatcttccacaggtcatatgagctg

SEQ ID NO: 3699536 - DNA, 25 bp, Homo sapien
caggtcatatgagctgaggctctta

SEQ ID NO: 3699537 - DNA, 25 bp, Homo sapien
ccgatagggatttcatacagattcc

SEQ ID NO: 3699538 - DNA, 25 bp, Homo sapien
tgttcctaggaccaggatggatgcc

SEQ ID NO: 3699539 - DNA, 25 bp, Homo sapien
ttcagagcccccgagagatcaagac

SEQ ID NO: 3699540 - DNA, 25 bp, Homo sapien
gagatcaagactctccccagctttc

SEQ ID NO: 3699541 - DNA, 25 bp, Homo sapien
aggaggccgttcagagcccccgaga

SEQ ID NO: 3699542 - DNA, 25 bp, Homo sapien
cagacactctgaccaggtttccggg

SEQ ID NO: 3699543 - DNA, 25 bp, Homo sapien
attgtggaccgaacacactctggca

SEQ ID NO: 3699544 - DNA, 25 bp, Homo sapien
gtggtcattgtggaccgaacacact

SEQ ID NO: 3699545 - DNA, 25 bp, Homo sapien
ggctgggcctggtccgtaactgtgg

SEQ ID NO: 3699546 - DNA, 25 bp, Homo sapien
gcctggtccgtaactgtggtcattg

SEQ ID NO: 3699547 - DNA, 25 bp, Homo sapien
tctgtacaatgcgtgtgctaaaggc

SEQ ID NO: 3699548 - DNA, 25 bp, Homo sapien
ccatctgtacaatgcgtgtgctaaa

SEQ ID NO: 3699549 - DNA, 25 bp, Homo sapien
tacaatgcgtgtgctaaaggcctca

SEQ ID NO: 3699550 - DNA, 25 bp, Homo sapien
tgcgtgtgctaaaggcctcagggca

SEQ ID NO: 3699551 - DNA, 25 bp, Homo sapien
ctctctctagggtacatggtgctgg

SEQ ID NO: 3699552 - DNA, 25 bp, Homo sapien
caagcttctgagacgtcatgaggag

SEQ ID NO: 3699553 - DNA, 25 bp, Homo sapien
ccttagcctggacctctgacagcag

SEQ ID NO: 3699554 - DNA, 25 bp, Homo sapien
tgccttctggtgttggacaagcttc

SEQ ID NO: 3699555 - DNA, 25 bp, Homo sapien
ttgcgttagactcctagaagagctg

SEQ ID NO: 3699556 - DNA, 25 bp, Homo sapien
gctgtttgagccgtctgattttacc

SEQ ID NO: 3699557 - DNA, 25 bp, Homo sapien
acggtgcattgcatcttgtggaacc

SEQ ID NO: 3699558 - DNA, 25 bp, Homo sapien
aattcttatgggtggagtcatgtac

SEQ ID NO: 3699559 - DNA, 25 bp, Homo sapien
tatactttagccagtggtttttgac

SEQ ID NO: 3699560 - DNA, 25 bp, Homo sapien
atatactttagccagtggtttttga

SEQ ID NO: 3699561 - DNA, 25 bp, Homo sapien
gaaccactgctcttggagacccctg

SEQ ID NO: 3699562 - DNA, 25 bp, Homo sapien
cttgtcaagacaacagagggctggg

SEQ ID NO: 3699563 - DNA, 25 bp, Homo sapien
gggatagatgtacagacttctatag

SEQ ID NO: 3699564 - DNA, 25 bp, Homo sapien
tgggagaggctcgagaatttgcatt

SEQ ID NO: 3699565 - DNA, 25 bp, Homo sapien
ccagtgttgattaacttatgtctat

SEQ ID NO: 3699566 - DNA, 25 bp, Homo sapien
ggcttttctggaataggatactctg

SEQ ID NO: 3699567 - DNA, 25 bp, Homo sapien
taaggactggctagaagttttacca

SEQ ID NO: 3699568 - DNA, 25 bp, Homo sapien
gactggctagaagttttaccatatt

SEQ ID NO: 3699569 - DNA, 25 bp, Homo sapien
cgttgagcgaatggagatacaaacc

SEQ ID NO: 3699570 - DNA, 25 bp, Homo sapien
gattctcacagctgatcgttgagcg

SEQ ID NO: 3699571 - DNA, 25 bp, Homo sapien
cagaacccactgtgttcgtaggcac

SEQ ID NO: 3699572 - DNA, 25 bp, Homo sapien
tcgtaggcacttagctattcatact

SEQ ID NO: 3699573 - DNA, 25 bp, Homo sapien
ctgttgctggatgacatcctaggct

SEQ ID NO: 3699574 - DNA, 25 bp, Homo sapien
tctgttgctggatgacatcctaggc

SEQ ID NO: 3699575 - DNA, 25 bp, Homo sapien
tgttgctggatgacatcctaggctc

SEQ ID NO: 3699576 - DNA, 25 bp, Homo sapien
ttctgttgctggatgacatcctagg

SEQ ID NO: 3699577 - DNA, 25 bp, Homo sapien
ccaggcaagagtgtccaagggagac

SEQ ID NO: 3699578 - DNA, 25 bp, Homo sapien
caggtaccctggagcgatatatgat

SEQ ID NO: 3699579 - DNA, 25 bp, Homo sapien
agcccaaagggcaccatcatagagg

SEQ ID NO: 3699580 - DNA, 25 bp, Homo sapien
gacaaggagcagagtgtacttccag

SEQ ID NO: 3699581 - DNA, 25 bp, Homo sapien
agaagtggcaagagttcgcccagtg

SEQ ID NO: 3699582 - DNA, 25 bp, Homo sapien
ttaactcaaggtcttgcagaagtgg

SEQ ID NO: 3699583 - DNA, 25 bp, Homo sapien
gaaaatgtgaccatggaacaactgg

SEQ ID NO: 3699584 - DNA, 25 bp, Homo sapien
cgcccagtggatccgatagaatatt

SEQ ID NO: 3699585 - DNA, 25 bp, Homo sapien
agggctttcttatgttgagccaaga

SEQ ID NO: 3699586 - DNA, 25 bp, Homo sapien
tgggaaagggctttcttatgttgag

SEQ ID NO: 3699587 - DNA, 25 bp, Homo sapien
ctgtgggaaagggctttcttatgtt

SEQ ID NO: 3699588 - DNA, 25 bp, Homo sapien
gctttcttatgttgagccaagatgc

SEQ ID NO: 3699589 - DNA, 25 bp, Homo sapien
tgtggcaccttcttcacgctggagg

SEQ ID NO: 3699590 - DNA, 25 bp, Homo sapien
ccccgggaggttgccagatacaata

SEQ ID NO: 3699591 - DNA, 25 bp, Homo sapien
tcccaggtgtgggtaaggaatctcc

SEQ ID NO: 3699592 - DNA, 25 bp, Homo sapien
tacaatactgtatctggcacccctg

SEQ ID NO: 3699593 - DNA, 25 bp, Homo sapien
cggggagcgctgcgtctcctgcggg

SEQ ID NO: 3699594 - DNA, 25 bp, Homo sapien
gcggggagcgctgcgtctcctgcgg

SEQ ID NO: 3699595 - DNA, 25 bp, Homo sapien
agcggggagcgctgcgtctcctgcg

SEQ ID NO: 3699596 - DNA, 25 bp, Homo sapien
gagcggggagcgctgcgtctcctgc

SEQ ID NO: 3699597 - DNA, 25 bp, Homo sapien
gggctcccgaaagcggccagctgtc

SEQ ID NO: 3699598 - DNA, 25 bp, Homo sapien
ggagagaggccgcttcgcgcctggg

SEQ ID NO: 3699599 - DNA, 25 bp, Homo sapien
gcggagagaggccgcttcgcgcctg

SEQ ID NO: 3699600 - DNA, 25 bp, Homo sapien
gcgcctggggctcccgaaagcggcc

SEQ ID NO: 3699601 - DNA, 25 bp, Homo sapien
ttgggatttgttcccctagcttcgc

SEQ ID NO: 3699602 - DNA, 25 bp, Homo sapien
ttctgaccgttgggccttgggcgtc

SEQ ID NO: 3699603 - DNA, 25 bp, Homo sapien
gccttgggcgtcgagcaggactcac

SEQ ID NO: 3699604 - DNA, 25 bp, Homo sapien
gcttcgctgggtccggcgggcagag

SEQ ID NO: 3699605 - DNA, 25 bp, Homo sapien
gcgccccttccgctttgcggcgcct

SEQ ID NO: 3699606 - DNA, 25 bp, Homo sapien
cgcgcgccccttccgctttgcggcg

SEQ ID NO: 3699607 - DNA, 25 bp, Homo sapien
tccgcgcgccccttccgctttgcgg

SEQ ID NO: 3699608 - DNA, 25 bp, Homo sapien
ctatccgcgcgccccttccgctttg

SEQ ID NO: 3699609 - DNA, 25 bp, Homo sapien
tctgcttacacagttcctggacttg

SEQ ID NO: 3699610 - DNA, 25 bp, Homo sapien
cctggacttgcactcagtaggcaag

SEQ ID NO: 3699611 - DNA, 25 bp, Homo sapien
gtttactgtataccgcccacgcttg

SEQ ID NO: 3699612 - DNA, 25 bp, Homo sapien
caaggtgataagaataggggttgtc

SEQ ID NO: 3699613 - DNA, 25 bp, Homo sapien
ggaaatgtgtttgcccaacagtcgc

SEQ ID NO: 3699614 - DNA, 25 bp, Homo sapien
gacagtagagccagcatagagccat

SEQ ID NO: 3699615 - DNA, 25 bp, Homo sapien
tttgcctggatcactgtagaactgt

SEQ ID NO: 3699616 - DNA, 25 bp, Homo sapien
tacatgtggcaagccgtattggcat

SEQ ID NO: 3699617 - DNA, 25 bp, Homo sapien
cacctcttcaggtagttagtttcca

SEQ ID NO: 3699618 - DNA, 25 bp, Homo sapien
ccagtgagccaggtattctattggg

SEQ ID NO: 3699619 - DNA, 25 bp, Homo sapien
tctattgggtcactgggccgaacct

SEQ ID NO: 3699620 - DNA, 25 bp, Homo sapien
aaagcacctcttcaggtagttagtt

SEQ ID NO: 3699621 - DNA, 25 bp, Homo sapien
tgcttttgctgttttcctgtaatga

SEQ ID NO: 3699622 - DNA, 25 bp, Homo sapien
ttgctgttttcctgtaatgataaag

SEQ ID NO: 3699623 - DNA, 25 bp, Homo sapien
cttttgctgttttcctgtaatgata

SEQ ID NO: 3699624 - DNA, 25 bp, Homo sapien
tttgctgttttcctgtaatgataaa

SEQ ID NO: 3699625 - DNA, 25 bp, Homo sapien
tctgatactcttcctgtttcagcat

SEQ ID NO: 3699626 - DNA, 25 bp, Homo sapien
cacagttctgttgaatctgatactc

SEQ ID NO: 3699627 - DNA, 25 bp, Homo sapien
tgaggctactgtcatattcctcctg

SEQ ID NO: 3699628 - DNA, 25 bp, Homo sapien
tccttgaggctactgtcatattcct

SEQ ID NO: 3699629 - DNA, 25 bp, Homo sapien
tatggtcttcttcgtggaaacagtt

SEQ ID NO: 3699630 - DNA, 25 bp, Homo sapien
tgaatatggtcttcttcgtggaaac

SEQ ID NO: 3699631 - DNA, 25 bp, Homo sapien
gaatatggtcttcttcgtggaaaca

SEQ ID NO: 3699632 - DNA, 25 bp, Homo sapien
gtcttcttcgtggaaacagtttcag

SEQ ID NO: 3699633 - DNA, 25 bp, Homo sapien
ggtcaatctggccagcagactctga

SEQ ID NO: 3699634 - DNA, 25 bp, Homo sapien
ttttgaagttctggtcaatctggcc

SEQ ID NO: 3699635 - DNA, 25 bp, Homo sapien
atctggccagcagactctgaaggag

SEQ ID NO: 3699636 - DNA, 25 bp, Homo sapien
gaagttctggtcaatctggccagca

SEQ ID NO: 3699637 - DNA, 25 bp, Homo sapien
tcctataactagttcaaatgttcac

SEQ ID NO: 3699638 - DNA, 25 bp, Homo sapien
tgaacttgccttttacagcccctta

SEQ ID NO: 3699639 - DNA, 25 bp, Homo sapien
tcttggttctagctggccattttct

SEQ ID NO: 3699640 - DNA, 25 bp, Homo sapien
aaatcagaagcatctaccttctgta

SEQ ID NO: 3699641 - DNA, 25 bp, Homo sapien
aagagttttgcagccggatggtgat

SEQ ID NO: 3699642 - DNA, 25 bp, Homo sapien
cattgtgtagtctccaaaacgttga

SEQ ID NO: 3699643 - DNA, 25 bp, Homo sapien
tgtaaaaaatactcggagaggcctg

SEQ ID NO: 3699644 - DNA, 25 bp, Homo sapien
tatcagtgacataggtagactccag

SEQ ID NO: 3699645 - DNA, 25 bp, Homo sapien
gacagaaagaatggtggttgccagg

SEQ ID NO: 3699646 - DNA, 25 bp, Homo sapien
gagacagaaagaatggtggttgcca

SEQ ID NO: 3699647 - DNA, 25 bp, Homo sapien
cagaaagaatggtggttgccagggg

SEQ ID NO: 3699648 - DNA, 25 bp, Homo sapien
agagtaatctaaatcacagagacag

SEQ ID NO: 3699649 - DNA, 25 bp, Homo sapien
tgtatgagtctatttatacaacata

SEQ ID NO: 3699650 - DNA, 25 bp, Homo sapien
aacattgtatgagtctatttataca

SEQ ID NO: 3699651 - DNA, 25 bp, Homo sapien
tgagtctatttatacaacatactta

SEQ ID NO: 3699652 - DNA, 25 bp, Homo sapien
tatgagtctatttatacaacatact

SEQ ID NO: 3699653 - DNA, 25 bp, Homo sapien
ccaattccagttgccttgaggtgat

SEQ ID NO: 3699654 - DNA, 25 bp, Homo sapien
gcttcatattaaggatggttctccc

SEQ ID NO: 3699655 - DNA, 25 bp, Homo sapien
ggttctccctatggtcataggatga

SEQ ID NO: 3699656 - DNA, 25 bp, Homo sapien
gatgtcatcaacagtcgaggttctc

SEQ ID NO: 3699657 - DNA, 25 bp, Homo sapien
catgaaagtaggaggttgtgtccgg

SEQ ID NO: 3699658 - DNA, 25 bp, Homo sapien
aggaggttgtgtccggcgcgctggc

SEQ ID NO: 3699659 - DNA, 25 bp, Homo sapien
gaaagtaggaggttgtgtccggcgc

SEQ ID NO: 3699660 - DNA, 25 bp, Homo sapien
aagtaggaggttgtgtccggcgcgc

SEQ ID NO: 3699661 - DNA, 25 bp, Homo sapien
ggccccgcgcttgcgcagcctctag

SEQ ID NO: 3699662 - DNA, 25 bp, Homo sapien
aagtgcctcccttctgccggccttt

SEQ ID NO: 3699663 - DNA, 25 bp, Homo sapien
gcgcttgcgcagcctctagcctgtg

SEQ ID NO: 3699664 - DNA, 25 bp, Homo sapien
tagcctgtgctgcatcgcgcgctac

SEQ ID NO: 3699665 - DNA, 25 bp, Homo sapien
ctggtccagcagggcggcccccggg

SEQ ID NO: 3699666 - DNA, 25 bp, Homo sapien
ccagcagggcggcccccgggcccat

SEQ ID NO: 3699667 - DNA, 25 bp, Homo sapien
ctggggctggtccagcagggcggcc

SEQ ID NO: 3699668 - DNA, 25 bp, Homo sapien
tggggctggtccagcagggcggccc

SEQ ID NO: 3699669 - DNA, 25 bp, Homo sapien
gacagctgccctattgcttagatag

SEQ ID NO: 3699670 - DNA, 25 bp, Homo sapien
gaaatgtcttttgtaccccttcaga

SEQ ID NO: 3699671 - DNA, 25 bp, Homo sapien
gctgtaatttccctgtgccagaggc

SEQ ID NO: 3699672 - DNA, 25 bp, Homo sapien
aagaagcaagaacccaactggcagg

SEQ ID NO: 3699673 - DNA, 25 bp, Homo sapien
ctctagcttgggacttaggtaacct

SEQ ID NO: 3699674 - DNA, 25 bp, Homo sapien
tgctcactagcagggcaatctgact

SEQ ID NO: 3699675 - DNA, 25 bp, Homo sapien
cagcactcaacacagatcctggtaa

SEQ ID NO: 3699676 - DNA, 25 bp, Homo sapien
taaccttaggctgggtcctcgctct

SEQ ID NO: 3699677 - DNA, 25 bp, Homo sapien
tacacagcgtccacacctctgcttc

SEQ ID NO: 3699678 - DNA, 25 bp, Homo sapien
catacacagcgtccacacctctgct

SEQ ID NO: 3699679 - DNA, 25 bp, Homo sapien
atacacagcgtccacacctctgctt

SEQ ID NO: 3699680 - DNA, 25 bp, Homo sapien
cacagcgtccacacctctgcttctc

SEQ ID NO: 3699681 - DNA, 25 bp, Homo sapien
caaatggactctgactcctaggaca

SEQ ID NO: 3699682 - DNA, 25 bp, Homo sapien
ggcatgtttgctcctaggcacaaga

SEQ ID NO: 3699683 - DNA, 25 bp, Homo sapien
tctgcgtcagtatacaaagaccagt

SEQ ID NO: 3699684 - DNA, 25 bp, Homo sapien
tatgactcaggagcacatagaatgg

SEQ ID NO: 3699685 - DNA, 25 bp, Homo sapien
acagaacattacagacgtgcacaca

SEQ ID NO: 3699686 - DNA, 25 bp, Homo sapien
tggccatcagccaccagaataaagt

SEQ ID NO: 3699687 - DNA, 25 bp, Homo sapien
tcaggacttcgtgcttggttggcca

SEQ ID NO: 3699688 - DNA, 25 bp, Homo sapien
ggcaggcaattcataagcacgttaa

SEQ ID NO: 3699689 - DNA, 25 bp, Homo sapien
accgtggagctcaccagggcatcag

SEQ ID NO: 3699690 - DNA, 25 bp, Homo sapien
tgtgccgagctatgtcccctgtagg

SEQ ID NO: 3699691 - DNA, 25 bp, Homo sapien
gatgcagcacacacatggaggttcc

SEQ ID NO: 3699692 - DNA, 25 bp, Homo sapien
tactgctcccacagggtagctggaa

SEQ ID NO: 3699693 - DNA, 25 bp, Homo sapien
ctttctggggcttggacagaaacac

SEQ ID NO: 3699694 - DNA, 25 bp, Homo sapien
tctggggcttggacagaaacacgtc

SEQ ID NO: 3699695 - DNA, 25 bp, Homo sapien
tggggcttggacagaaacacgtctg

SEQ ID NO: 3699696 - DNA, 25 bp, Homo sapien
cagaaacacgtctgtgttggcaagc

SEQ ID NO: 3699697 - DNA, 25 bp, Homo sapien
agagacccggcctagtagaggacct

SEQ ID NO: 3699698 - DNA, 25 bp, Homo sapien
aagaatcctgttatatacccggtag

SEQ ID NO: 3699699 - DNA, 25 bp, Homo sapien
agctcatgaaccacactaagtccag

SEQ ID NO: 3699700 - DNA, 25 bp, Homo sapien
gacagaatacacaccttcctgaaga

SEQ ID NO: 3699701 - DNA, 25 bp, Homo sapien
ctctcgacagaggaaacagcctggc

SEQ ID NO: 3699702 - DNA, 25 bp, Homo sapien
gcctggcctccgcacggccataatc

SEQ ID NO: 3699703 - DNA, 25 bp, Homo sapien
ctccgcacggccataatcacagctc

SEQ ID NO: 3699704 - DNA, 25 bp, Homo sapien
tttcccatagctcctttgctttgaa

SEQ ID NO: 3699705 - DNA, 25 bp, Homo sapien
tacataggtggcctctaacagctgg

SEQ ID NO: 3699706 - DNA, 25 bp, Homo sapien
aattaatacatctccccgatccggg

SEQ ID NO: 3699707 - DNA, 25 bp, Homo sapien
cagtttgcctacctataaagggaca

SEQ ID NO: 3699708 - DNA, 25 bp, Homo sapien
gatgtgttgctaaccccagtaggag

SEQ ID NO: 3699709 - DNA, 25 bp, Homo sapien
cacatagggtgtcaggttccctctg

SEQ ID NO: 3699710 - DNA, 25 bp, Homo sapien
gcctccacatagggtgtcaggttcc

SEQ ID NO: 3699711 - DNA, 25 bp, Homo sapien
tccacatagggtgtcaggttccctc

SEQ ID NO: 3699712 - DNA, 25 bp, Homo sapien
cctccacatagggtgtcaggttccc

SEQ ID NO: 3699713 - DNA, 25 bp, Homo sapien
cagctggtccaacatgcttttcagg

SEQ ID NO: 3699714 - DNA, 25 bp, Homo sapien
caacatgcttttcagggaggacaga

SEQ ID NO: 3699715 - DNA, 25 bp, Homo sapien
acatgcttttcagggaggacagatc

SEQ ID NO: 3699716 - DNA, 25 bp, Homo sapien
ggtccaacatgcttttcagggagga

SEQ ID NO: 3699717 - DNA, 25 bp, Homo sapien
ggaagaagttgtaccacactcccag

SEQ ID NO: 3699718 - DNA, 25 bp, Homo sapien
tccaggctcggaagaagttgtacca

SEQ ID NO: 3699719 - DNA, 25 bp, Homo sapien
tccgttccaggctcggaagaagttg

SEQ ID NO: 3699720 - DNA, 25 bp, Homo sapien
aagcctccgttccaggctcggaaga

SEQ ID NO: 3699721 - DNA, 25 bp, Homo sapien
ttgggcctatagagaccccattcct

SEQ ID NO: 3699722 - DNA, 25 bp, Homo sapien
gcttgtggagcctcacagccaggac

SEQ ID NO: 3699723 - DNA, 25 bp, Homo sapien
tgcttgtggagcctcacagccagga

SEQ ID NO: 3699724 - DNA, 25 bp, Homo sapien
accagatgagtcatcgccaggcaag

SEQ ID NO: 3699725 - DNA, 25 bp, Homo sapien
gagtcatcgccaggcaagaaaaggc

SEQ ID NO: 3699726 - DNA, 25 bp, Homo sapien
gtagggcccatgagcaccagatgag

SEQ ID NO: 3699727 - DNA, 25 bp, Homo sapien
aaacatgccagtagggcccatgagc

SEQ ID NO: 3699728 - DNA, 25 bp, Homo sapien
ccaaattctttttctcggtgctcaa

SEQ ID NO: 3699729 - DNA, 25 bp, Homo sapien
tctttttctcggtgctcaagaagaa

SEQ ID NO: 3699730 - DNA, 25 bp, Homo sapien
tttctcggtgctcaagaagaatgcc

SEQ ID NO: 3699731 - DNA, 25 bp, Homo sapien
caaattctttttctcggtgctcaag

SEQ ID NO: 3699732 - DNA, 25 bp, Homo sapien
tgtggtttgatcatcttagcagctt

SEQ ID NO: 3699733 - DNA, 25 bp, Homo sapien
ctgtggtttgatcatcttagcagct

SEQ ID NO: 3699734 - DNA, 25 bp, Homo sapien
tctgtggtttgatcatcttagcagc

SEQ ID NO: 3699735 - DNA, 25 bp, Homo sapien
ccagcctggcagtcaattttaagcc

SEQ ID NO: 3699736 - DNA, 25 bp, Homo sapien
ccctgagctgggcagtttcacacaa

SEQ ID NO: 3699737 - DNA, 25 bp, Homo sapien
ggtttctcactccttagggacacga

SEQ ID NO: 3699738 - DNA, 25 bp, Homo sapien
gggacacgagtggaaacaatacatc

SEQ ID NO: 3699739 - DNA, 25 bp, Homo sapien
gctttcctgggtaaacactgattcc

SEQ ID NO: 3699740 - DNA, 25 bp, Homo sapien
tgagtagactccctgtggccgagct

SEQ ID NO: 3699741 - DNA, 25 bp, Homo sapien
tcctatcagtagctggagtcccaag

SEQ ID NO: 3699742 - DNA, 25 bp, Homo sapien
tagatagctagaaccagaggaatcc

SEQ ID NO: 3699743 - DNA, 25 bp, Homo sapien
tatccgagattgagaaccaccagct

SEQ ID NO: 3699744 - DNA, 25 bp, Homo sapien
aaatctgttgggtacggtggcatcc

SEQ ID NO: 3699745 - DNA, 25 bp, Homo sapien
cccggacacggagagacttgaacaa

SEQ ID NO: 3699746 - DNA, 25 bp, Homo sapien
tagtttctagcagctcaaggccctg

SEQ ID NO: 3699747 - DNA, 25 bp, Homo sapien
gagaggacatagaaccaggtaaaca

SEQ ID NO: 3699748 - DNA, 25 bp, Homo sapien
aacaaaacagactagactcctccgt

SEQ ID NO: 3699749 - DNA, 25 bp, Homo sapien
aaatctgcatactgggagagaggac

SEQ ID NO: 3699750 - DNA, 25 bp, Homo sapien
ttgagaaatctgcatactgggagag

SEQ ID NO: 3699751 - DNA, 25 bp, Homo sapien
cactgcaatggtatgctttgctctg

SEQ ID NO: 3699752 - DNA, 25 bp, Homo sapien
tcccctacactgcaatggtatgctt

SEQ ID NO: 3699753 - DNA, 25 bp, Homo sapien
gcaatggtatgctttgctctgggaa

SEQ ID NO: 3699754 - DNA, 25 bp, Homo sapien
tacactgcaatggtatgctttgctc

SEQ ID NO: 3699755 - DNA, 25 bp, Homo sapien
agaattttgactgactcagactgtg

SEQ ID NO: 3699756 - DNA, 25 bp, Homo sapien
ttgactgactcagactgtgctggga

SEQ ID NO: 3699757 - DNA, 25 bp, Homo sapien
ttttgactgactcagactgtgctgg

SEQ ID NO: 3699758 - DNA, 25 bp, Homo sapien
gggagagcatttagtgtagcaagtg

SEQ ID NO: 3699759 - DNA, 25 bp, Homo sapien
actgcaacctccaccgcccgcggtt

SEQ ID NO: 3699760 - DNA, 25 bp, Homo sapien
acctccaccgcccgcggttcaagca

SEQ ID NO: 3699761 - DNA, 25 bp, Homo sapien
caacctccaccgcccgcggttcaag

SEQ ID NO: 3699762 - DNA, 25 bp, Homo sapien
tcttggctcactgctcactgcaacc

SEQ ID NO: 3699763 - DNA, 25 bp, Homo sapien
caggatgggacagcaacatctgggc

SEQ ID NO: 3699764 - DNA, 25 bp, Homo sapien
accgtggagagtctgggtgcctcca

SEQ ID NO: 3699765 - DNA, 25 bp, Homo sapien
cccggtccagtcgatgtgcccagga

SEQ ID NO: 3699766 - DNA, 25 bp, Homo sapien
ctccaatggaaggtgtggcatggcc

SEQ ID NO: 3699767 - DNA, 25 bp, Homo sapien
ggtgatttctgctcaatcctgcatg

SEQ ID NO: 3699768 - DNA, 25 bp, Homo sapien
aggaagttagagcaagttccgcggc

SEQ ID NO: 3699769 - DNA, 25 bp, Homo sapien
cccggctcggccgaggaagttagag

SEQ ID NO: 3699770 - DNA, 25 bp, Homo sapien
gagggcgcgactcgggccgtccgag

SEQ ID NO: 3699771 - DNA, 25 bp, Homo sapien
ggcgcctgccgtctgccgaggaagg

SEQ ID NO: 3699772 - DNA, 25 bp, Homo sapien
gaaaggcacaggctctaggccttct

SEQ ID NO: 3699773 - DNA, 25 bp, Homo sapien
gaagccactttagagacaactgccc

SEQ ID NO: 3699774 - DNA, 25 bp, Homo sapien
cagtacagaccgcaaggggtgaaga

SEQ ID NO: 3699775 - DNA, 25 bp, Homo sapien
ccagttcctccagctatctagctga

SEQ ID NO: 3699776 - DNA, 25 bp, Homo sapien
agggctccctgctttcgactccacc

SEQ ID NO: 3699777 - DNA, 25 bp, Homo sapien
tccctgctttcgactccaccccaag

SEQ ID NO: 3699778 - DNA, 25 bp, Homo sapien
gctccctgctttcgactccacccca

SEQ ID NO: 3699779 - DNA, 25 bp, Homo sapien
gggctccctgctttcgactccaccc

SEQ ID NO: 3699780 - DNA, 25 bp, Homo sapien
gctgtctgcaggcagcttctggtgt

SEQ ID NO: 3699781 - DNA, 25 bp, Homo sapien
ccgtagctgtctgcaggcagcttct

SEQ ID NO: 3699782 - DNA, 25 bp, Homo sapien
tgtctgcaggcagcttctggtgttt

SEQ ID NO: 3699783 - DNA, 25 bp, Homo sapien
tctgcaggcagcttctggtgtttcc

SEQ ID NO: 3699784 - DNA, 25 bp, Homo sapien
aactagaatctgagaacacatgatg

SEQ ID NO: 3699785 - DNA, 25 bp, Homo sapien
gggggatcttgacagaggcagaaac

SEQ ID NO: 3699786 - DNA, 25 bp, Homo sapien
cagggacttgagaagggcgaagggg

SEQ ID NO: 3699787 - DNA, 25 bp, Homo sapien
atctgagaacacatgatgggccttg

SEQ ID NO: 3699788 - DNA, 25 bp, Homo sapien
aggcagacggacagcttgaacccag

SEQ ID NO: 3699789 - DNA, 25 bp, Homo sapien
agtccgaggcagacggacagcttga

SEQ ID NO: 3699790 - DNA, 25 bp, Homo sapien
tgaacccagaagatgagttcgagac

SEQ ID NO: 3699791 - DNA, 25 bp, Homo sapien
caaggcaacattgcaagagttcgtc

SEQ ID NO: 3699792 - DNA, 25 bp, Homo sapien
tggagacccctcaagattctacagc

SEQ ID NO: 3699793 - DNA, 25 bp, Homo sapien
ttcagctgatctggatggagacccc

SEQ ID NO: 3699794 - DNA, 25 bp, Homo sapien
tgattcagctgatctggatggagac

SEQ ID NO: 3699795 - DNA, 25 bp, Homo sapien
caagattctacagcgcagcaagctc

SEQ ID NO: 3699796 - DNA, 25 bp, Homo sapien
tctgcaatgggtcctaaaaccagtc

SEQ ID NO: 3699797 - DNA, 25 bp, Homo sapien
aaggaaggcttcacaaggtgcacac

SEQ ID NO: 3699798 - DNA, 25 bp, Homo sapien
aaccatgggcctactgtgactgacg

SEQ ID NO: 3699799 - DNA, 25 bp, Homo sapien
gaaacccaacatggaagcaggcaga

SEQ ID NO: 3699800 - DNA, 25 bp, Homo sapien
gggtctgagggtctcagtgcctggc

SEQ ID NO: 3699801 - DNA, 25 bp, Homo sapien
gatcttagtgactgaaacactgtga

SEQ ID NO: 3699802 - DNA, 25 bp, Homo sapien
aactcacaacccaaaacctgccaag

SEQ ID NO: 3699803 - DNA, 25 bp, Homo sapien
gcctggcatcctgtaaaaaccctga

SEQ ID NO: 3699804 - DNA, 25 bp, Homo sapien
tgttaagagcatgaaaatggctgca

SEQ ID NO: 3699805 - DNA, 25 bp, Homo sapien
gtggtggtggacttacaagtgattt

SEQ ID NO: 3699806 - DNA, 25 bp, Homo sapien
gctacaatatataaggctggcagtc

SEQ ID NO: 3699807 - DNA, 25 bp, Homo sapien
cacacttaccattaccacctttgta

SEQ ID NO: 3699808 - DNA, 25 bp, Homo sapien
tgcagcacacggattcgcagagagg

SEQ ID NO: 3699809 - DNA, 25 bp, Homo sapien
ccacggtgatactgacatgccagca

SEQ ID NO: 3699810 - DNA, 25 bp, Homo sapien
gatcttacaaggtagacgggcctgt

SEQ ID NO: 3699811 - DNA, 25 bp, Homo sapien
catgcccagcagatcaggtatcagc

SEQ ID NO: 3699812 - DNA, 25 bp, Homo sapien
tgacctgctccaatgtcactggcat

SEQ ID NO: 3699813 - DNA, 25 bp, Homo sapien
ttttagtgacctgctccaatgtcac

SEQ ID NO: 3699814 - DNA, 25 bp, Homo sapien
ctcagcccatgcaagtccctgctct

SEQ ID NO: 3699815 - DNA, 25 bp, Homo sapien
gcatcctcaactaaagtggggcttt

SEQ ID NO: 3699816 - DNA, 25 bp, Homo sapien
ctggggagaatgacaggcagacggc

SEQ ID NO: 3699817 - DNA, 25 bp, Homo sapien
gggagaatgacaggcagacggctac

SEQ ID NO: 3699818 - DNA, 25 bp, Homo sapien
tggggagaatgacaggcagacggct

SEQ ID NO: 3699819 - DNA, 25 bp, Homo sapien
gagaatgacaggcagacggctaccc

SEQ ID NO: 3699820 - DNA, 25 bp, Homo sapien
gtgtggaattgacgggcacagccta

SEQ ID NO: 3699821 - DNA, 25 bp, Homo sapien
cgctccacctctcccacggtgtgga

SEQ ID NO: 3699822 - DNA, 25 bp, Homo sapien
aattgacgggcacagcctagacacc

SEQ ID NO: 3699823 - DNA, 25 bp, Homo sapien
tcccacggtgtggaattgacgggca

SEQ ID NO: 3699824 - DNA, 25 bp, Homo sapien
gaagggacatgaaaccacactcctc

SEQ ID NO: 3699825 - DNA, 25 bp, Homo sapien
agaagggacatgaaaccacactcct

SEQ ID NO: 3699826 - DNA, 25 bp, Homo sapien
aagggacatgaaaccacactcctct

SEQ ID NO: 3699827 - DNA, 25 bp, Homo sapien
agcttccacggagtggctacttgca

SEQ ID NO: 3699828 - DNA, 25 bp, Homo sapien
cacatccgccagtgagaaaccagct

SEQ ID NO: 3699829 - DNA, 25 bp, Homo sapien
tgagaaaccagcttccacggagtgg

SEQ ID NO: 3699830 - DNA, 25 bp, Homo sapien
gagtggctacttgcaaaaccccttc

SEQ ID NO: 3699831 - DNA, 25 bp, Homo sapien
gggacaggatcagaggcccgtaggg

SEQ ID NO: 3699832 - DNA, 25 bp, Homo sapien
aaggagggagtgcctcaagtgcaca

SEQ ID NO: 3699833 - DNA, 25 bp, Homo sapien
tcagaggcccgtagggcagtggtcc

SEQ ID NO: 3699834 - DNA, 25 bp, Homo sapien
gtgcctcaagtgcacaggtagggac

SEQ ID NO: 3699835 - DNA, 25 bp, Homo sapien
ccagtggcaatccaggtggaccccg

SEQ ID NO: 3699836 - DNA, 25 bp, Homo sapien
agtggcaatccaggtggaccccgaa

SEQ ID NO: 3699837 - DNA, 25 bp, Homo sapien
tggcaatccaggtggaccccgaagt

SEQ ID NO: 3699838 - DNA, 25 bp, Homo sapien
caatccaggtggaccccgaagtcct

SEQ ID NO: 3699839 - DNA, 25 bp, Homo sapien
cagcagctgaccttggcgttagagt

SEQ ID NO: 3699840 - DNA, 25 bp, Homo sapien
tagctgaaaaggaggtacttgtacc

SEQ ID NO: 3699841 - DNA, 25 bp, Homo sapien
gcgttagagtatctataatagtgca

SEQ ID NO: 3699842 - DNA, 25 bp, Homo sapien
ccagaagatgatgttgtagctgaaa

SEQ ID NO: 3699843 - DNA, 25 bp, Homo sapien
tactgggcaagttagtagagctccc

SEQ ID NO: 3699844 - DNA, 25 bp, Homo sapien
tagtgctgcaaacgtgttactgggc

SEQ ID NO: 3699845 - DNA, 25 bp, Homo sapien
cagacttgctaccatgctggattca

SEQ ID NO: 3699846 - DNA, 25 bp, Homo sapien
gaagaaatgaagataccagggccct

SEQ ID NO: 3699847 - DNA, 25 bp, Homo sapien
gcttgtggccacttgaaatgctgac

SEQ ID NO: 3699848 - DNA, 25 bp, Homo sapien
tatgacagagggaaacagagcccag

SEQ ID NO: 3699849 - DNA, 25 bp, Homo sapien
cagagtcagggtctcgaggaagcca

SEQ ID NO: 3699850 - DNA, 25 bp, Homo sapien
tagggctcggcttccttatgacaga

SEQ ID NO: 3699851 - DNA, 25 bp, Homo sapien
tgttccaatcgccccttccccacat

SEQ ID NO: 3699852 - DNA, 25 bp, Homo sapien
agggccgctgtagggccgcttaccg

SEQ ID NO: 3699853 - DNA, 25 bp, Homo sapien
cccacatgcagggccgctgtagggc

SEQ ID NO: 3699854 - DNA, 25 bp, Homo sapien
tgtagggccgcttaccgctctgcat

SEQ ID NO: 3699855 - DNA, 25 bp, Homo sapien
cacagcccgactccaaggaagacaa

SEQ ID NO: 3699856 - DNA, 25 bp, Homo sapien
agcccgactccaaggaagacaactc

SEQ ID NO: 3699857 - DNA, 25 bp, Homo sapien
cccgactccaaggaagacaactcca

SEQ ID NO: 3699858 - DNA, 25 bp, Homo sapien
cagcccgactccaaggaagacaact

SEQ ID NO: 3699859 - DNA, 25 bp, Homo sapien
aaagagacagagaaagcagggcagc

SEQ ID NO: 3699860 - DNA, 25 bp, Homo sapien
tgaaagagacagagaaagcagggca

SEQ ID NO: 3699861 - DNA, 25 bp, Homo sapien
aagagacagagaaagcagggcagca

SEQ ID NO: 3699862 - DNA, 25 bp, Homo sapien
ctgaaagagacagagaaagcagggc

SEQ ID NO: 3699863 - DNA, 25 bp, Homo sapien
catccgggtcactttggtgaggtcg

SEQ ID NO: 3699864 - DNA, 25 bp, Homo sapien
actttggtgaggtcggacagcacac

SEQ ID NO: 3699865 - DNA, 25 bp, Homo sapien
gattccatgcatccgggtcactttg

SEQ ID NO: 3699866 - DNA, 25 bp, Homo sapien
agggtcgattccatgcatccgggtc

SEQ ID NO: 3699867 - DNA, 25 bp, Homo sapien
acgcagccggcgaaccccagggtga

SEQ ID NO: 3699868 - DNA, 25 bp, Homo sapien
gcaagcagatattctcccgcagagc

SEQ ID NO: 3699869 - DNA, 25 bp, Homo sapien
agttgagcaagcagatattctcccg

SEQ ID NO: 3699870 - DNA, 25 bp, Homo sapien
gcagccggcgaaccccagggtgaac

SEQ ID NO: 3699871 - DNA, 25 bp, Homo sapien
cactcttgtctctgtggccactcac

SEQ ID NO: 3699872 - DNA, 25 bp, Homo sapien
attgcatcctatcccactcttgtct

SEQ ID NO: 3699873 - DNA, 25 bp, Homo sapien
cccattgcatcctatcccactcttg

SEQ ID NO: 3699874 - DNA, 25 bp, Homo sapien
tatcccactcttgtctctgtggcca

SEQ ID NO: 3699875 - DNA, 25 bp, Homo sapien
cagatcgatatcgtcccggtaggac

SEQ ID NO: 3699876 - DNA, 25 bp, Homo sapien
tgaggttttgcagatcgatatcgtc

SEQ ID NO: 3699877 - DNA, 25 bp, Homo sapien
cggtaggacttgatgttgctctcga

SEQ ID NO: 3699878 - DNA, 25 bp, Homo sapien
tgctctcgaagaactcccggaaccg

SEQ ID NO: 3699879 - DNA, 25 bp, Homo sapien
ggtgcatgctctatcgggggcccgc

SEQ ID NO: 3699880 - DNA, 25 bp, Homo sapien
cacagggaggtgcatgctctatcgg

SEQ ID NO: 3699881 - DNA, 25 bp, Homo sapien
tgcatgctctatcgggggcccgctg

SEQ ID NO: 3699882 - DNA, 25 bp, Homo sapien
agcacagggaggtgcatgctctatc

SEQ ID NO: 3699883 - DNA, 25 bp, Homo sapien
cccaatcccaatgggaaagggctgg

SEQ ID NO: 3699884 - DNA, 25 bp, Homo sapien
accaggcaaccacaagccggcaaag

SEQ ID NO: 3699885 - DNA, 25 bp, Homo sapien
cacaagccggcaaagtggaacagac

SEQ ID NO: 3699886 - DNA, 25 bp, Homo sapien
gaacagaccagaggtggagtggctt

SEQ ID NO: 3699887 - DNA, 25 bp, Homo sapien
tggctattgggcaggattggaaaga

SEQ ID NO: 3699888 - DNA, 25 bp, Homo sapien
gtatgcagcgcctaaggaggattgc

SEQ ID NO: 3699889 - DNA, 25 bp, Homo sapien
cgcctaaggaggattgcagctggta

SEQ ID NO: 3699890 - DNA, 25 bp, Homo sapien
attgcagctggtatggctattgggc

SEQ ID NO: 3699891 - DNA, 25 bp, Homo sapien
gctgtgacagctatggtccaagcgt

SEQ ID NO: 3699892 - DNA, 25 bp, Homo sapien
tgcagccacacatgagagagataag

SEQ ID NO: 3699893 - DNA, 25 bp, Homo sapien
ctggaactgcttagacaaacccctg

SEQ ID NO: 3699894 - DNA, 25 bp, Homo sapien
ggaggtcacattccactagatctga

SEQ ID NO: 3699895 - DNA, 25 bp, Homo sapien
tgtggtcctctacttgccacaagag

SEQ ID NO: 3699896 - DNA, 25 bp, Homo sapien
gagtggcgtcctctcctttgtggcc

SEQ ID NO: 3699897 - DNA, 25 bp, Homo sapien
caagagaacacttcctagtgtgcag

SEQ ID NO: 3699898 - DNA, 25 bp, Homo sapien
tgagaaacttgcaagtgaattcccc

SEQ ID NO: 3699899 - DNA, 25 bp, Homo sapien
cccagcatagggcatcattcatagt

SEQ ID NO: 3699900 - DNA, 25 bp, Homo sapien
tgttaggggctccaagacagggcca

SEQ ID NO: 3699901 - DNA, 25 bp, Homo sapien
gctgcccagcatagggcatcattca

SEQ ID NO: 3699902 - DNA, 25 bp, Homo sapien
atggctgcccagcatagggcatcat

SEQ ID NO: 3699903 - DNA, 25 bp, Homo sapien
acgttgaggtcccagtcttcagggc

SEQ ID NO: 3699904 - DNA, 25 bp, Homo sapien
gctggcaccgctgcaattgaagtag

SEQ ID NO: 3699905 - DNA, 25 bp, Homo sapien
gtcttcagggccatatgcgccacag

SEQ ID NO: 3699906 - DNA, 25 bp, Homo sapien
cacttctctcggctgtagctggcac

SEQ ID NO: 3699907 - DNA, 25 bp, Homo sapien
tgtgccccagcacaagccaactcac

SEQ ID NO: 3699908 - DNA, 25 bp, Homo sapien
catataatagtggtgatgctctgcc

SEQ ID NO: 3699909 - DNA, 25 bp, Homo sapien
ttcacagtcgcagtggagacctcag

SEQ ID NO: 3699910 - DNA, 25 bp, Homo sapien
taactgcaccgagagctggcaactg

SEQ ID NO: 3699911 - DNA, 25 bp, Homo sapien
ccacagtttgctaggaggtaagacc

SEQ ID NO: 3699912 - DNA, 25 bp, Homo sapien
cctgacatcatatccacactgtgtg

SEQ ID NO: 3699913 - DNA, 25 bp, Homo sapien
tcctgacatcatatccacactgtgt

SEQ ID NO: 3699914 - DNA, 25 bp, Homo sapien
tgacatcatatccacactgtgtgtt

SEQ ID NO: 3699915 - DNA, 25 bp, Homo sapien
aatcctgacatcatatccacactgt

SEQ ID NO: 3699916 - DNA, 25 bp, Homo sapien
gaggccagaacaaggcacctacact

SEQ ID NO: 3699917 - DNA, 25 bp, Homo sapien
tgcctccctctttgtcactactgcc

SEQ ID NO: 3699918 - DNA, 25 bp, Homo sapien
aaggcacctacactcctgcagctgt

SEQ ID NO: 3699919 - DNA, 25 bp, Homo sapien
ccacacggaggccagaacaaggcac

SEQ ID NO: 3699920 - DNA, 25 bp, Homo sapien
taaaatgaggccatcagggtgcccc

SEQ ID NO: 3699921 - DNA, 25 bp, Homo sapien
gggtgtcagtaaccatcccagcaca

SEQ ID NO: 3699922 - DNA, 25 bp, Homo sapien
taatccaatatgaagagcatcctgc

SEQ ID NO: 3699923 - DNA, 25 bp, Homo sapien
gcaacatgatggagtattagcccct

SEQ ID NO: 3699924 - DNA, 25 bp, Homo sapien
aggaaaatgtgcctctaaagggaga

SEQ ID NO: 3699925 - DNA, 25 bp, Homo sapien
gaaaatgtgcctctaaagggagaga

SEQ ID NO: 3699926 - DNA, 25 bp, Homo sapien
aaaatgtgcctctaaagggagagaa

SEQ ID NO: 3699927 - DNA, 25 bp, Homo sapien
ggaggaaaatgtgcctctaaaggga

SEQ ID NO: 3699928 - DNA, 25 bp, Homo sapien
agcccaactttctcaagataccctt

SEQ ID NO: 3699929 - DNA, 25 bp, Homo sapien
aggagatgctcgtcagctcctctca

SEQ ID NO: 3699930 - DNA, 25 bp, Homo sapien
actgtgccatcgcaccacctgtctg

SEQ ID NO: 3699931 - DNA, 25 bp, Homo sapien
tcaggtctccagagatttaaagccc

SEQ ID NO: 3699932 - DNA, 25 bp, Homo sapien
gagcctttggcacacacgatgtccc

SEQ ID NO: 3699933 - DNA, 25 bp, Homo sapien
gtctgagcctttggcacacacgatg

SEQ ID NO: 3699934 - DNA, 25 bp, Homo sapien
atgtccccacctgatcccctagtga

SEQ ID NO: 3699935 - DNA, 25 bp, Homo sapien
gggtctgagcctttggcacacacga

SEQ ID NO: 3699936 - DNA, 25 bp, Homo sapien
gccagctttccagcgcctggatgca

SEQ ID NO: 3699937 - DNA, 25 bp, Homo sapien
cacaatgtaaatgttccgcgggagc

SEQ ID NO: 3699938 - DNA, 25 bp, Homo sapien
ctgcaacagcgagatggcgatgaag

SEQ ID NO: 3699939 - DNA, 25 bp, Homo sapien
cgatgaagacgccagccacaatgta

SEQ ID NO: 3699940 - DNA, 25 bp, Homo sapien
ccagataggcagtgacccttctgca

SEQ ID NO: 3699941 - DNA, 25 bp, Homo sapien
cagataggcagtgacccttctgcag

SEQ ID NO: 3699942 - DNA, 25 bp, Homo sapien
gataggcagtgacccttctgcagcc

SEQ ID NO: 3699943 - DNA, 25 bp, Homo sapien
agataggcagtgacccttctgcagc

SEQ ID NO: 3699944 - DNA, 25 bp, Homo sapien
ccaacaccagcagagtcagcggcca

SEQ ID NO: 3699945 - DNA, 25 bp, Homo sapien
aaccaacaccagcagagtcagcggc

SEQ ID NO: 3699946 - DNA, 25 bp, Homo sapien
acaccagcagagtcagcggccattg

SEQ ID NO: 3699947 - DNA, 25 bp, Homo sapien
ctgaaaccaacaccagcagagtcag

SEQ ID NO: 3699948 - DNA, 25 bp, Homo sapien
tgcctcgatgtctgagatcagcgtc

SEQ ID NO: 3699949 - DNA, 25 bp, Homo sapien
tcactgcctcgatgtctgagatcag

SEQ ID NO: 3699950 - DNA, 25 bp, Homo sapien
actgcctcgatgtctgagatcagcg

SEQ ID NO: 3699951 - DNA, 25 bp, Homo sapien
ttcactgcctcgatgtctgagatca

SEQ ID NO: 3699952 - DNA, 25 bp, Homo sapien
ccagcgtggctcagctcggctccct

SEQ ID NO: 3699953 - DNA, 25 bp, Homo sapien
ctcccagcgtggctcagctcggctc

SEQ ID NO: 3699954 - DNA, 25 bp, Homo sapien
tcccagcgtggctcagctcggctcc

SEQ ID NO: 3699955 - DNA, 25 bp, Homo sapien
cccagcgtggctcagctcggctccc

SEQ ID NO: 3699956 - DNA, 25 bp, Homo sapien
ctggctctgggggtgtcggctcctc

SEQ ID NO: 3699957 - DNA, 25 bp, Homo sapien
gcactggctctgggggtgtcggctc

SEQ ID NO: 3699958 - DNA, 25 bp, Homo sapien
ggctcctctccctctggacgtaggg

SEQ ID NO: 3699959 - DNA, 25 bp, Homo sapien
gctctgggggtgtcggctcctctcc

SEQ ID NO: 3699960 - DNA, 25 bp, Homo sapien
cagatgtggatgacccaaagcagat

SEQ ID NO: 3699961 - DNA, 25 bp, Homo sapien
gcaagcagaaacagagaggtcacgt

SEQ ID NO: 3699962 - DNA, 25 bp, Homo sapien
cacaagtttgggcaggtaacaaggg

SEQ ID NO: 3699963 - DNA, 25 bp, Homo sapien
tccagagggatgcagtcacaagttt

SEQ ID NO: 3699964 - DNA, 25 bp, Homo sapien
atcaagaccagaggcagttccggcg

SEQ ID NO: 3699965 - DNA, 25 bp, Homo sapien
gatatgtgcatgtcccagcagactg

SEQ ID NO: 3699966 - DNA, 25 bp, Homo sapien
gaacatggctgaggatcctgcaaac

SEQ ID NO: 3699967 - DNA, 25 bp, Homo sapien
catggacactatctaaggctgctca

SEQ ID NO: 3699968 - DNA, 25 bp, Homo sapien
agtgatcaccgatatcccattaggg

SEQ ID NO: 3699969 - DNA, 25 bp, Homo sapien
agccagccctgggtacatggccaca

SEQ ID NO: 3699970 - DNA, 25 bp, Homo sapien
tgtggttgcagaagaacggctgtct

SEQ ID NO: 3699971 - DNA, 25 bp, Homo sapien
agaggcaaatggcaggccagccagc

SEQ ID NO: 3699972 - DNA, 25 bp, Homo sapien
tccctgaacgatgagaagtggtctg

SEQ ID NO: 3699973 - DNA, 25 bp, Homo sapien
taaggttgcagtccatccctgaacg

SEQ ID NO: 3699974 - DNA, 25 bp, Homo sapien
acactagaatgtacactccggcaag

SEQ ID NO: 3699975 - DNA, 25 bp, Homo sapien
caaagtgttagaaagtagcccagct

SEQ ID NO: 3699976 - DNA, 25 bp, Homo sapien
ctgtgcctctgtgcggacagccgat

SEQ ID NO: 3699977 - DNA, 25 bp, Homo sapien
cgtgaccggctctcatccttgcttt

SEQ ID NO: 3699978 - DNA, 25 bp, Homo sapien
cgatgctgggcggagactgccacgt

SEQ ID NO: 3699979 - DNA, 25 bp, Homo sapien
cctctgtgcggacagccgatgctgg

SEQ ID NO: 3699980 - DNA, 25 bp, Homo sapien
ctttaaagttagcatgtgcatggtg

SEQ ID NO: 3699981 - DNA, 25 bp, Homo sapien
aaagttagcatgtgcatggtgaggt

SEQ ID NO: 3699982 - DNA, 25 bp, Homo sapien
ttaaagttagcatgtgcatggtgag

SEQ ID NO: 3699983 - DNA, 25 bp, Homo sapien
agaagagggtgcaaatgccacagct

SEQ ID NO: 3699984 - DNA, 25 bp, Homo sapien
gagaccttcccatgacagcaggatg

SEQ ID NO: 3699985 - DNA, 25 bp, Homo sapien
cacgttccaggaaggttgtgcatcc

SEQ ID NO: 3699986 - DNA, 25 bp, Homo sapien
ccaggcttcttgtggaccatgcaga

SEQ ID NO: 3699987 - DNA, 25 bp, Homo sapien
gcatctgacatttgggcggagacct

SEQ ID NO: 3699988 - DNA, 25 bp, Homo sapien
ctcctgggcacgatgacagagggaa

SEQ ID NO: 3699989 - DNA, 25 bp, Homo sapien
ttctgtggaccgacacccgtaagac

SEQ ID NO: 3699990 - DNA, 25 bp, Homo sapien
ggacaggttcccatagccccggaca

SEQ ID NO: 3699991 - DNA, 25 bp, Homo sapien
tgtctctaccaagatccatcatggg

SEQ ID NO: 3699992 - DNA, 25 bp, Homo sapien
tgaacaggaattggccaagccttgc

SEQ ID NO: 3699993 - DNA, 25 bp, Homo sapien
tggtgaacatgcctttaatgcagcc

SEQ ID NO: 3699994 - DNA, 25 bp, Homo sapien
caagccttgccaacttgataaggag

SEQ ID NO: 3699995 - DNA, 25 bp, Homo sapien
tctaaaggtgtatggctccccagat

SEQ ID NO: 3699996 - DNA, 25 bp, Homo sapien
ccctggagacgccaaaagcatttga

SEQ ID NO: 3699997 - DNA, 25 bp, Homo sapien
taaaccatgcattggaagaccctgc

SEQ ID NO: 3699998 - DNA, 25 bp, Homo sapien
gagccttgtaaggaatactcacgtc

SEQ ID NO: 3699999 - DNA, 25 bp, Homo sapien
catgttttcctgaggcaccctggag

SEQ ID NO: 3700000 - DNA, 25 bp, Homo sapien
caagatcctgttgacgtcactgagc

SEQ ID NO: 3700001 - DNA, 25 bp, Homo sapien
aaatgattccatgggtgtgatgacc

SEQ ID NO: 3700002 - DNA, 25 bp, Homo sapien
tggactcctctggtacaaaggcaag

SEQ ID NO: 3700003 - DNA, 25 bp, Homo sapien
caactgatggcgtgaccgtgaaaac

SEQ ID NO: 3700004 - DNA, 25 bp, Homo sapien
ttgtctccccacctctatggcacag

SEQ ID NO: 3700005 - DNA, 25 bp, Homo sapien
tgaggcttgccacagacctcgaagc

SEQ ID NO: 3700006 - DNA, 25 bp, Homo sapien
aaatgcctgctgaggcttgccacag

SEQ ID NO: 3700007 - DNA, 25 bp, Homo sapien
gagaacagaccttgaactccaaatg

SEQ ID NO: 3700008 - DNA, 25 bp, Homo sapien
cactgcctttgagctatttttacaa

SEQ ID NO: 3700009 - DNA, 25 bp, Homo sapien
caacagagattctggttgtcttcag

SEQ ID NO: 3700010 - DNA, 25 bp, Homo sapien
ctgattctagtctttcactgccttt

SEQ ID NO: 3700011 - DNA, 25 bp, Homo sapien
gcattgcttagggtgcacccttcca

SEQ ID NO: 3700012 - DNA, 25 bp, Homo sapien
aaagttcagcggtttgggatgcagc

SEQ ID NO: 3700013 - DNA, 25 bp, Homo sapien
tcagagcccaggtgatacacacatt

SEQ ID NO: 3700014 - DNA, 25 bp, Homo sapien
tggatgatagtaccctcagctgaga

SEQ ID NO: 3700015 - DNA, 25 bp, Homo sapien
tgttgcaaacaaggcgagtcccagg

SEQ ID NO: 3700016 - DNA, 25 bp, Homo sapien
agtgtgacaaggagcccaccatctc

SEQ ID NO: 3700017 - DNA, 25 bp, Homo sapien
cccacatccccaaccagtgtgacaa

SEQ ID NO: 3700018 - DNA, 25 bp, Homo sapien
gtgtgacaaggagcccaccatctcc

SEQ ID NO: 3700019 - DNA, 25 bp, Homo sapien
catccccaaccagtgtgacaaggag

SEQ ID NO: 3700020 - DNA, 25 bp, Homo sapien
aattcatgtgccgtctgtcccttaa

SEQ ID NO: 3700021 - DNA, 25 bp, Homo sapien
ccctccccagtgaccaaatctggag

SEQ ID NO: 3700022 - DNA, 25 bp, Homo sapien
tgaaggaattcatgtgccgtctgtc

SEQ ID NO: 3700023 - DNA, 25 bp, Homo sapien
cgtctgtcccttaatctgaacacag

SEQ ID NO: 3700024 - DNA, 25 bp, Homo sapien
cataggctccattagagagatgcgg

SEQ ID NO: 3700025 - DNA, 25 bp, Homo sapien
ctgaggtctgcttcccacatgaagt

SEQ ID NO: 3700026 - DNA, 25 bp, Homo sapien
ggtctgcttcccacatgaagtcctc

SEQ ID NO: 3700027 - DNA, 25 bp, Homo sapien
ttgttggacataggctccattagag

SEQ ID NO: 3700028 - DNA, 25 bp, Homo sapien
caggacaggagactaaggaggtgag

SEQ ID NO: 3700029 - DNA, 25 bp, Homo sapien
taaggaggtgagaaccctggcccac

SEQ ID NO: 3700030 - DNA, 25 bp, Homo sapien
ctgcggagatggacaggacaggaga

SEQ ID NO: 3700031 - DNA, 25 bp, Homo sapien
acaggagactaaggaggtgagaacc

SEQ ID NO: 3700032 - DNA, 25 bp, Homo sapien
ccatctatgagagcctgtaaactcc

SEQ ID NO: 3700033 - DNA, 25 bp, Homo sapien
tgtttctccgcttcttttgcctagg

SEQ ID NO: 3700034 - DNA, 25 bp, Homo sapien
tctgcgtgccctaagagagagctgc

SEQ ID NO: 3700035 - DNA, 25 bp, Homo sapien
cctaaccaccccagtggcttgagtg

SEQ ID NO: 3700036 - DNA, 25 bp, Homo sapien
tagacaaggtatgcatgagccagcc

SEQ ID NO: 3700037 - DNA, 25 bp, Homo sapien
ggacctgtgtcacccaacttgccag

SEQ ID NO: 3700038 - DNA, 25 bp, Homo sapien
tttcctcatgatgggagcagtggca

SEQ ID NO: 3700039 - DNA, 25 bp, Homo sapien
cttgagtgctggacaagcctgtgac

SEQ ID NO: 3700040 - DNA, 25 bp, Homo sapien
cagctcaaagtagtgcaacaaggat

SEQ ID NO: 3700041 - DNA, 25 bp, Homo sapien
tacaagaacaggtaggttgaaccaa

SEQ ID NO: 3700042 - DNA, 25 bp, Homo sapien
taaatgagagcacatccgtaggata

SEQ ID NO: 3700043 - DNA, 25 bp, Homo sapien
tgaatatcatttcgagccaaaggtg

SEQ ID NO: 3700044 - DNA, 25 bp, Homo sapien
caaatgtgatataaaagaacagact

SEQ ID NO: 3700045 - DNA, 25 bp, Homo sapien
aaaccagaccttcctatgccaggaa

SEQ ID NO: 3700046 - DNA, 25 bp, Homo sapien
tggagaaaccatccatgttccctgg

SEQ ID NO: 3700047 - DNA, 25 bp, Homo sapien
agaacagacttctggagcctcagca

SEQ ID NO: 3700048 - DNA, 25 bp, Homo sapien
tgagcgtcacccagccgcggatggc

SEQ ID NO: 3700049 - DNA, 25 bp, Homo sapien
gggcccgcctatcaattctcctggg

SEQ ID NO: 3700050 - DNA, 25 bp, Homo sapien
ggcagcccgggagcgggtgaagtcc

SEQ ID NO: 3700051 - DNA, 25 bp, Homo sapien
gaagacgtgcttcggggcccgccta

SEQ ID NO: 3700052 - DNA, 25 bp, Homo sapien
gggcagggacaacgctgtagggagc

SEQ ID NO: 3700053 - DNA, 25 bp, Homo sapien
cagggacaacgctgtagggagcagc

SEQ ID NO: 3700054 - DNA, 25 bp, Homo sapien
caacgctgtagggagcagcaggaat

SEQ ID NO: 3700055 - DNA, 25 bp, Homo sapien
gcacggggcagggacaacgctgtag

SEQ ID NO: 3700056 - DNA, 25 bp, Homo sapien
tcagtttctgagaccgggggtcttc

SEQ ID NO: 3700057 - DNA, 25 bp, Homo sapien
gagacccccgagtccaaagaggaga

SEQ ID NO: 3700058 - DNA, 25 bp, Homo sapien
tccccctcgccgtggctggtgggag

SEQ ID NO: 3700059 - DNA, 25 bp, Homo sapien
tttgtctttcccgggccgccagata

SEQ ID NO: 3700060 - DNA, 25 bp, Homo sapien
ttccttgcccatgagggtggaaggt

SEQ ID NO: 3700061 - DNA, 25 bp, Homo sapien
gggtggagagttggcattcttcccc

SEQ ID NO: 3700062 - DNA, 25 bp, Homo sapien
tggaaggtggatcaggtacccaaga

SEQ ID NO: 3700063 - DNA, 25 bp, Homo sapien
ggtacccaagagtgatggaagaggg

SEQ ID NO: 3700064 - DNA, 25 bp, Homo sapien
atcaatgacactgccccggccagct

SEQ ID NO: 3700065 - DNA, 25 bp, Homo sapien
atatcaatgacactgccccggccag

SEQ ID NO: 3700066 - DNA, 25 bp, Homo sapien
ccggccagctgggaactgatctctc

SEQ ID NO: 3700067 - DNA, 25 bp, Homo sapien
agctatatcaatgacactgccccgg

SEQ ID NO: 3700068 - DNA, 25 bp, Homo sapien
gggagcaaccaccaggagcaatcta

SEQ ID NO: 3700069 - DNA, 25 bp, Homo sapien
gagcaatctagtccttctcctgggt

SEQ ID NO: 3700070 - DNA, 25 bp, Homo sapien
gagagcccatgtcttggcatcacct

SEQ ID NO: 3700071 - DNA, 25 bp, Homo sapien
accaagcacggcatcccaggagagc

SEQ ID NO: 3700072 - DNA, 25 bp, Homo sapien
ctacccaggacagcaaaagaggcca

SEQ ID NO: 3700073 - DNA, 25 bp, Homo sapien
tctctgtgcagcattgtcagttggc

SEQ ID NO: 3700074 - DNA, 25 bp, Homo sapien
tcaatccggggccactctcggtgcc

SEQ ID NO: 3700075 - DNA, 25 bp, Homo sapien
gccagcgacgaactcatctcctcta

SEQ ID NO: 3700076 - DNA, 25 bp, Homo sapien
ggccaggcagaacgcccgaggggct

SEQ ID NO: 3700077 - DNA, 25 bp, Homo sapien
aggcagaacgcccgaggggctgctc

SEQ ID NO: 3700078 - DNA, 25 bp, Homo sapien
ctgggatgcacgcaccagaagggca

SEQ ID NO: 3700079 - DNA, 25 bp, Homo sapien
agggccaggcagaacgcccgagggg

SEQ ID NO: 3700080 - DNA, 25 bp, Homo sapien
tttgtagaagaggatgtgcttctgc

SEQ ID NO: 3700081 - DNA, 25 bp, Homo sapien
tctgcacatcgctgagctcggcaag

SEQ ID NO: 3700082 - DNA, 25 bp, Homo sapien
gctcctcccgcattttgtagaagag

SEQ ID NO: 3700083 - DNA, 25 bp, Homo sapien
tcgatgtacatgtcgtgcaggatct

SEQ ID NO: 3700084 - DNA, 25 bp, Homo sapien
ctctctgtgactcccagccacgtac

SEQ ID NO: 3700085 - DNA, 25 bp, Homo sapien
aggcaaaagcacaggctcatgggac

SEQ ID NO: 3700086 - DNA, 25 bp, Homo sapien
aaaggcaaaagcacaggctcatggg

SEQ ID NO: 3700087 - DNA, 25 bp, Homo sapien
ccaaaaggcaaaagcacaggctcat

SEQ ID NO: 3700088 - DNA, 25 bp, Homo sapien
tggccaaaaggcaaaagcacaggct

SEQ ID NO: 3700089 - DNA, 25 bp, Homo sapien
aataagggccgctggacagcctctg

SEQ ID NO: 3700090 - DNA, 25 bp, Homo sapien
tcgggccttccacaacaagacaaag

SEQ ID NO: 3700091 - DNA, 25 bp, Homo sapien
cccgactccaataagggccgctgga

SEQ ID NO: 3700092 - DNA, 25 bp, Homo sapien
cacgtcggagcacaatctgaagtct

SEQ ID NO: 3700093 - DNA, 25 bp, Homo sapien
tcattcattgtgtgggacgttccct

SEQ ID NO: 3700094 - DNA, 25 bp, Homo sapien
tgggacgttccctgatgccctctct

SEQ ID NO: 3700095 - DNA, 25 bp, Homo sapien
aacacctgaaatgtaggctaggccc

SEQ ID NO: 3700096 - DNA, 25 bp, Homo sapien
tctgcagttgctacgaccatttggg

SEQ ID NO: 3700097 - DNA, 25 bp, Homo sapien
aggtgtaccagtccataggattgac

SEQ ID NO: 3700098 - DNA, 25 bp, Homo sapien
cagtccataggattgactggcacat

SEQ ID NO: 3700099 - DNA, 25 bp, Homo sapien
taccagtccataggattgactggca

SEQ ID NO: 3700100 - DNA, 25 bp, Homo sapien
tgtaccagtccataggattgactgg

SEQ ID NO: 3700101 - DNA, 25 bp, Homo sapien
agagaagattcctccgtggagcccg

SEQ ID NO: 3700102 - DNA, 25 bp, Homo sapien
tccccgcacaattcccgccctggga

SEQ ID NO: 3700103 - DNA, 25 bp, Homo sapien
ctggcaacatcaagggaaggaagag

SEQ ID NO: 3700104 - DNA, 25 bp, Homo sapien
acaattcccgccctgggacacggca

SEQ ID NO: 3700105 - DNA, 25 bp, Homo sapien
ccacgtcatgctcagggatcccaag

SEQ ID NO: 3700106 - DNA, 25 bp, Homo sapien
acgtcatgctcagggatcccaaggg

SEQ ID NO: 3700107 - DNA, 25 bp, Homo sapien
cccaaggggccagcaaacagctcag

SEQ ID NO: 3700108 - DNA, 25 bp, Homo sapien
tcagcagggctacagcaggtgcttc

SEQ ID NO: 3700109 - DNA, 25 bp, Homo sapien
tctgtgggttccaaatgtggatctc

SEQ ID NO: 3700110 - DNA, 25 bp, Homo sapien
tcagaatcaagaaaacctcctaggt

SEQ ID NO: 3700111 - DNA, 25 bp, Homo sapien
ggttctcaggcacaaggcacacctt

SEQ ID NO: 3700112 - DNA, 25 bp, Homo sapien
cctcctaggttctgtaaacgagaat

SEQ ID NO: 3700113 - DNA, 25 bp, Homo sapien
cctggtggcctttgcaagtggagct

SEQ ID NO: 3700114 - DNA, 25 bp, Homo sapien
gcctcactaagaacctcactgctgg

SEQ ID NO: 3700115 - DNA, 25 bp, Homo sapien
tcggaaagcactggtgctaaagatg

SEQ ID NO: 3700116 - DNA, 25 bp, Homo sapien
tggtaagtcgaggttgtgcagcttc

SEQ ID NO: 3700117 - DNA, 25 bp, Homo sapien
aggccacatggattcagaccctgga

SEQ ID NO: 3700118 - DNA, 25 bp, Homo sapien
caccagagctagaccaatcagactc

SEQ ID NO: 3700119 - DNA, 25 bp, Homo sapien
catgaagcctctcagtttaaagaca

SEQ ID NO: 3700120 - DNA, 25 bp, Homo sapien
tcagactcccactgaatggaattca

SEQ ID NO: 3700121 - DNA, 25 bp, Homo sapien
ggaagaatgtcgagttgagaaatat

SEQ ID NO: 3700122 - DNA, 25 bp, Homo sapien
gaagaatgtcgagttgagaaatatg

SEQ ID NO: 3700123 - DNA, 25 bp, Homo sapien
aaggaagaatgtcgagttgagaaat

SEQ ID NO: 3700124 - DNA, 25 bp, Homo sapien
caaaggaagaatgtcgagttgagaa

SEQ ID NO: 3700125 - DNA, 25 bp, Homo sapien
gggtgggcgtccaagactgagctct

SEQ ID NO: 3700126 - DNA, 25 bp, Homo sapien
gggggtgggcgtccaagactgagct

SEQ ID NO: 3700127 - DNA, 25 bp, Homo sapien
agcctgcgggggtgggcgtccaaga

SEQ ID NO: 3700128 - DNA, 25 bp, Homo sapien
gcgggggtgggcgtccaagactgag

SEQ ID NO: 3700129 - DNA, 25 bp, Homo sapien
catctgcccctaggagccattggat

SEQ ID NO: 3700130 - DNA, 25 bp, Homo sapien
ctgcccctaggagccattggatgtg

SEQ ID NO: 3700131 - DNA, 25 bp, Homo sapien
atccagacccagacctcgccatctg

SEQ ID NO: 3700132 - DNA, 25 bp, Homo sapien
gccatctgcccctaggagccattgg

SEQ ID NO: 3700133 - DNA, 25 bp, Homo sapien
ctcagagatctcttcgtagggcttg

SEQ ID NO: 3700134 - DNA, 25 bp, Homo sapien
tcgtagggcttgtcaccagggcctt

SEQ ID NO: 3700135 - DNA, 25 bp, Homo sapien
gatctcttcgtagggcttgtcacca

SEQ ID NO: 3700136 - DNA, 25 bp, Homo sapien
tcttcgtagggcttgtcaccagggc

SEQ ID NO: 3700137 - DNA, 25 bp, Homo sapien
cgtggatgcgttcctccaggacttt

SEQ ID NO: 3700138 - DNA, 25 bp, Homo sapien
cacttctccgccaagatccgggctt

SEQ ID NO: 3700139 - DNA, 25 bp, Homo sapien
ggcagccttgcggtcttccatctcc

SEQ ID NO: 3700140 - DNA, 25 bp, Homo sapien
cagagcatcccggaacttcttggtg

SEQ ID NO: 3700141 - DNA, 25 bp, Homo sapien
gttcttcccactctcgctcctcttt

SEQ ID NO: 3700142 - DNA, 25 bp, Homo sapien
gcttggcaatgcagctgagcctgct

SEQ ID NO: 3700143 - DNA, 25 bp, Homo sapien
cttcagggtccagtagagctccttc

SEQ ID NO: 3700144 - DNA, 25 bp, Homo sapien
tgctcttcctggaggcgaatctgct

SEQ ID NO: 3700145 - DNA, 25 bp, Homo sapien
cctctaaattcttagcaggactgag

SEQ ID NO: 3700146 - DNA, 25 bp, Homo sapien
gacgaatgagtacatcagcattggg

SEQ ID NO: 3700147 - DNA, 25 bp, Homo sapien
ggatgaagcctaacttaccctctaa

SEQ ID NO: 3700148 - DNA, 25 bp, Homo sapien
tggccgggtccaagtaaaggctgat

SEQ ID NO: 3700149 - DNA, 25 bp, Homo sapien
tgaggccagcgaccgtgcccttctg

SEQ ID NO: 3700150 - DNA, 25 bp, Homo sapien
tcatcagccgccttggaccggcgca

SEQ ID NO: 3700151 - DNA, 25 bp, Homo sapien
tgcccttctggatagcacggagcga

SEQ ID NO: 3700152 - DNA, 25 bp, Homo sapien
agcgagtggtgtcggtactcgtccc

SEQ ID NO: 3700153 - DNA, 25 bp, Homo sapien
cagcggacgatgacatctctggaga

SEQ ID NO: 3700154 - DNA, 25 bp, Homo sapien
gaacttggtgttcctctcgaagcca

SEQ ID NO: 3700155 - DNA, 25 bp, Homo sapien
tcgaagccagctcggcgaggcagct

SEQ ID NO: 3700156 - DNA, 25 bp, Homo sapien
tcctccttaaaccagcggacgatga

SEQ ID NO: 3700157 - DNA, 25 bp, Homo sapien
tgccaaaggcagttggagcacccgg

SEQ ID NO: 3700158 - DNA, 25 bp, Homo sapien
agctgcccactctcacccacgtgcc

SEQ ID NO: 3700159 - DNA, 25 bp, Homo sapien
tgagttacactccacagctccctaa

SEQ ID NO: 3700160 - DNA, 25 bp, Homo sapien
tcacccacgtgccactcctgagtta

SEQ ID NO: 3700161 - DNA, 25 bp, Homo sapien
aaattagctacataaattgtgagac

SEQ ID NO: 3700162 - DNA, 25 bp, Homo sapien
aaaataatttgagcaccttggtcgc

SEQ ID NO: 3700163 - DNA, 25 bp, Homo sapien
aattgtgagacttaaatcttggttc

SEQ ID NO: 3700164 - DNA, 25 bp, Homo sapien
gaactgtcagaacatgaaattagct

SEQ ID NO: 3700165 - DNA, 25 bp, Homo sapien
acccaccgggtagtcccattctgtg

SEQ ID NO: 3700166 - DNA, 25 bp, Homo sapien
taccaatgccaatgatgtcacccac

SEQ ID NO: 3700167 - DNA, 25 bp, Homo sapien
taatttaccaatgccaatgatgtca

SEQ ID NO: 3700168 - DNA, 25 bp, Homo sapien
tttaccaatgccaatgatgtcaccc

SEQ ID NO: 3700169 - DNA, 25 bp, Homo sapien
aggccacgcttgagatccactccca

SEQ ID NO: 3700170 - DNA, 25 bp, Homo sapien
ggtgaggccacgcttgagatccact

SEQ ID NO: 3700171 - DNA, 25 bp, Homo sapien
cacgcttgagatccactcccagcac

SEQ ID NO: 3700172 - DNA, 25 bp, Homo sapien
ccaggtgaggccacgcttgagatcc

SEQ ID NO: 3700173 - DNA, 25 bp, Homo sapien
atggctggggagtatcctcctccca

SEQ ID NO: 3700174 - DNA, 25 bp, Homo sapien
gggtcccccgtttgtgcttgctcac

SEQ ID NO: 3700175 - DNA, 25 bp, Homo sapien
cgtttgtgcttgctcacgaagaagc

SEQ ID NO: 3700176 - DNA, 25 bp, Homo sapien
tcacgaagaagcatgccagtaacac

SEQ ID NO: 3700177 - DNA, 25 bp, Homo sapien
ggagctctcgcatctcataagaaag

SEQ ID NO: 3700178 - DNA, 25 bp, Homo sapien
gctctcgcatctcataagaaagctg

SEQ ID NO: 3700179 - DNA, 25 bp, Homo sapien
tctcgcatctcataagaaagctgcc

SEQ ID NO: 3700180 - DNA, 25 bp, Homo sapien
ttggagctctcgcatctcataagaa

SEQ ID NO: 3700181 - DNA, 25 bp, Homo sapien
gtccacactgccaagatcccaagaa

SEQ ID NO: 3700182 - DNA, 25 bp, Homo sapien
tttttagtgcctgggtccacactgc

SEQ ID NO: 3700183 - DNA, 25 bp, Homo sapien
taactgtcccctctcaacagattcc

SEQ ID NO: 3700184 - DNA, 25 bp, Homo sapien
caattccttgctaaacacgaatttt

SEQ ID NO: 3700185 - DNA, 25 bp, Homo sapien
aagtggacaccagaactacagatag

SEQ ID NO: 3700186 - DNA, 25 bp, Homo sapien
gaagcaaagtggacaccagaactac

SEQ ID NO: 3700187 - DNA, 25 bp, Homo sapien
acagacagccccatacaggatgcga

SEQ ID NO: 3700188 - DNA, 25 bp, Homo sapien
catacaggatgcgaggcttggaagc

SEQ ID NO: 3700189 - DNA, 25 bp, Homo sapien
gactttgcagactatatgggaaccc

SEQ ID NO: 3700190 - DNA, 25 bp, Homo sapien
gactatatgggaacccagatggcat

SEQ ID NO: 3700191 - DNA, 25 bp, Homo sapien
ctataggagggtggcaccggcctca

SEQ ID NO: 3700192 - DNA, 25 bp, Homo sapien
attaaggactttgcagactatatgg

SEQ ID NO: 3700193 - DNA, 25 bp, Homo sapien
gtagctaccctctctcccatggtta

SEQ ID NO: 3700194 - DNA, 25 bp, Homo sapien
gacacagggacagagatccttcagg

SEQ ID NO: 3700195 - DNA, 25 bp, Homo sapien
atccttcagggtagctaccctctct

SEQ ID NO: 3700196 - DNA, 25 bp, Homo sapien
cacagggacagagatccttcagggt

SEQ ID NO: 3700197 - DNA, 25 bp, Homo sapien
aggagagacacatttgggcccatct

SEQ ID NO: 3700198 - DNA, 25 bp, Homo sapien
gagagacacatttgggcccatctgc

SEQ ID NO: 3700199 - DNA, 25 bp, Homo sapien
ggagagacacatttgggcccatctg

SEQ ID NO: 3700200 - DNA, 25 bp, Homo sapien
caggagagacacatttgggcccatc

SEQ ID NO: 3700201 - DNA, 25 bp, Homo sapien
ttaagggaactgaggcagaagccca

SEQ ID NO: 3700202 - DNA, 25 bp, Homo sapien
taagggaactgaggcagaagcccag

SEQ ID NO: 3700203 - DNA, 25 bp, Homo sapien
gggaactgaggcagaagcccagcat

SEQ ID NO: 3700204 - DNA, 25 bp, Homo sapien
agggaactgaggcagaagcccagca

SEQ ID NO: 3700205 - DNA, 25 bp, Homo sapien
ctgtggctcagtgcacatgccatcc

SEQ ID NO: 3700206 - DNA, 25 bp, Homo sapien
tgtggctcagtgcacatgccatcca

SEQ ID NO: 3700207 - DNA, 25 bp, Homo sapien
gtggctcagtgcacatgccatccac

SEQ ID NO: 3700208 - DNA, 25 bp, Homo sapien
gatccgtgagcgttgcatggcgatt

SEQ ID NO: 3700209 - DNA, 25 bp, Homo sapien
agtgtttgaaccctttctgcaggcg

SEQ ID NO: 3700210 - DNA, 25 bp, Homo sapien
gaccaggaatgctccctcagtcatg

SEQ ID NO: 3700211 - DNA, 25 bp, Homo sapien
agattttctcactgacccggaccag

SEQ ID NO: 3700212 - DNA, 25 bp, Homo sapien
ccccattagtatccctgtgagggat

SEQ ID NO: 3700213 - DNA, 25 bp, Homo sapien
tgcccgcatgccccagagagtgaag

SEQ ID NO: 3700214 - DNA, 25 bp, Homo sapien
gagcagaacagtgggccctcgggcc

SEQ ID NO: 3700215 - DNA, 25 bp, Homo sapien
tgccctgatgctctacatctctgag

SEQ ID NO: 3700216 - DNA, 25 bp, Homo sapien
ggccacacgaacataaacgttgctt

SEQ ID NO: 3700217 - DNA, 25 bp, Homo sapien
tactaatgatgccaacggccacacg

SEQ ID NO: 3700218 - DNA, 25 bp, Homo sapien
gcttcttactacatacactgcttgg

SEQ ID NO: 3700219 - DNA, 25 bp, Homo sapien
tagggtccatggcaggaggacaaat

SEQ ID NO: 3700220 - DNA, 25 bp, Homo sapien
cgtgaaacgtgtgaaaagatcctca

SEQ ID NO: 3700221 - DNA, 25 bp, Homo sapien
agaagaaatccaagtggccgtgaaa

SEQ ID NO: 3700222 - DNA, 25 bp, Homo sapien
atccaagtggccgtgaaacgtgtga

SEQ ID NO: 3700223 - DNA, 25 bp, Homo sapien
agaaatccaagtggccgtgaaacgt

SEQ ID NO: 3700224 - DNA, 25 bp, Homo sapien
cctctgtccgcagggttcctgaagt

SEQ ID NO: 3700225 - DNA, 25 bp, Homo sapien
atggtagtctggtgggctgtccctc

SEQ ID NO: 3700226 - DNA, 25 bp, Homo sapien
ctggtgggctgtccctctgtccgca

SEQ ID NO: 3700227 - DNA, 25 bp, Homo sapien
aacaacagatggtagtctggtgggc

SEQ ID NO: 3700228 - DNA, 25 bp, Homo sapien
cagccatcgggtaaagtaaatcgtt

SEQ ID NO: 3700229 - DNA, 25 bp, Homo sapien
taacctgcatagagagggccacatc

SEQ ID NO: 3700230 - DNA, 25 bp, Homo sapien
tttacggcagccatgacaaacaggc

SEQ ID NO: 3700231 - DNA, 25 bp, Homo sapien
gacggtgtcaatcagctgccctgga

SEQ ID NO: 3700232 - DNA, 25 bp, Homo sapien
ggaagagcagaacccacgcaaaact

SEQ ID NO: 3700233 - DNA, 25 bp, Homo sapien
caaaactggttatagtgctggtggc

SEQ ID NO: 3700234 - DNA, 25 bp, Homo sapien
tgacactgatcaacatagggaggaa

SEQ ID NO: 3700235 - DNA, 25 bp, Homo sapien
tggcttgtggtagagaagtgaccaa

SEQ ID NO: 3700236 - DNA, 25 bp, Homo sapien
cacatagttggtaaatcagagagcc

SEQ ID NO: 3700237 - DNA, 25 bp, Homo sapien
tagtgacggccatacagaaaactcc

SEQ ID NO: 3700238 - DNA, 25 bp, Homo sapien
gcagggtgtcatactgatccggcca

SEQ ID NO: 3700239 - DNA, 25 bp, Homo sapien
ggaaaaagcgatctaccagcctatg

SEQ ID NO: 3700240 - DNA, 25 bp, Homo sapien
tttcatgactccagatctttgctga

SEQ ID NO: 3700241 - DNA, 25 bp, Homo sapien
tgactccagatctttgctgatgcca

SEQ ID NO: 3700242 - DNA, 25 bp, Homo sapien
catgactccagatctttgctgatgc

SEQ ID NO: 3700243 - DNA, 25 bp, Homo sapien
agtttcatgactccagatctttgct

SEQ ID NO: 3700244 - DNA, 25 bp, Homo sapien
ccagcagttcctggatcttcttttc

SEQ ID NO: 3700245 - DNA, 25 bp, Homo sapien
tcagggcggtaactagtacagacac

SEQ ID NO: 3700246 - DNA, 25 bp, Homo sapien
cggtaactagtacagacaccagcag

SEQ ID NO: 3700247 - DNA, 25 bp, Homo sapien
ctttcctatcagggcggtaactagt

SEQ ID NO: 3700248 - DNA, 25 bp, Homo sapien
gggtcacgtagactccacagcaaag

SEQ ID NO: 3700249 - DNA, 25 bp, Homo sapien
gaaacaggagaataggcagagacac

SEQ ID NO: 3700250 - DNA, 25 bp, Homo sapien
ggtagcgtgtcatcccagggttcag

SEQ ID NO: 3700251 - DNA, 25 bp, Homo sapien
caaatgggatacaaagaaatgcatc

SEQ ID NO: 3700252 - DNA, 25 bp, Homo sapien
caaagggccaagatgctttccgaag

SEQ ID NO: 3700253 - DNA, 25 bp, Homo sapien
gcaatcaagccaaagggccaagatg

SEQ ID NO: 3700254 - DNA, 25 bp, Homo sapien
ccaagatgctttccgaagggctctg

SEQ ID NO: 3700255 - DNA, 25 bp, Homo sapien
agaacacagacgacccacggtcaca

SEQ ID NO: 3700256 - DNA, 25 bp, Homo sapien
gaggactgtgccaaggactcttggg

SEQ ID NO: 3700257 - DNA, 25 bp, Homo sapien
ccaacaagtgaagagcctgacagag

SEQ ID NO: 3700258 - DNA, 25 bp, Homo sapien
tgacgccggtgtcaaagagccagag

SEQ ID NO: 3700259 - DNA, 25 bp, Homo sapien
agagcctgacagagagaccaggtac

SEQ ID NO: 3700260 - DNA, 25 bp, Homo sapien
ggacagcgccagaggaattcatcca

SEQ ID NO: 3700261 - DNA, 25 bp, Homo sapien
cagggacagcgccagaggaattcat

SEQ ID NO: 3700262 - DNA, 25 bp, Homo sapien
cgccagaggaattcatccaggcagc

SEQ ID NO: 3700263 - DNA, 25 bp, Homo sapien
cagcgccagaggaattcatccaggc

SEQ ID NO: 3700264 - DNA, 25 bp, Homo sapien
actcataagccgctgacagatgcac

SEQ ID NO: 3700265 - DNA, 25 bp, Homo sapien
ggcaggactggacagactcataagc

SEQ ID NO: 3700266 - DNA, 25 bp, Homo sapien
ggactggacagactcataagccgct

SEQ ID NO: 3700267 - DNA, 25 bp, Homo sapien
gacagactcataagccgctgacaga

SEQ ID NO: 3700268 - DNA, 25 bp, Homo sapien
gcagccgtgggctattgaaagtgcc

SEQ ID NO: 3700269 - DNA, 25 bp, Homo sapien
gaaacataaactctgagacgcctcc

SEQ ID NO: 3700270 - DNA, 25 bp, Homo sapien
aaagtgactccattaccctagaaca

SEQ ID NO: 3700271 - DNA, 25 bp, Homo sapien
gaaagtgccgtgtcagtagcagcaa

SEQ ID NO: 3700272 - DNA, 25 bp, Homo sapien
ccaagagggtgccttttcacaactc

SEQ ID NO: 3700273 - DNA, 25 bp, Homo sapien
ttcctcaatcctcgccaaacttgtg

SEQ ID NO: 3700274 - DNA, 25 bp, Homo sapien
tgtgactcaaggactaggcagggct

SEQ ID NO: 3700275 - DNA, 25 bp, Homo sapien
tcacaactctgtgcctgttcacatg

SEQ ID NO: 3700276 - DNA, 25 bp, Homo sapien
taagtagagagcgttctcctaggac

SEQ ID NO: 3700277 - DNA, 25 bp, Homo sapien
gagatgactacagcatatgaagcca

SEQ ID NO: 3700278 - DNA, 25 bp, Homo sapien
agaacttcgaggtgatcttatgcac

SEQ ID NO: 3700279 - DNA, 25 bp, Homo sapien
caaagtcccgctgtgagttactagc

SEQ ID NO: 3700280 - DNA, 25 bp, Homo sapien
gtaaagttgacatcagacccagttc

SEQ ID NO: 3700281 - DNA, 25 bp, Homo sapien
tggtggacctctcaatcagtgaact

SEQ ID NO: 3700282 - DNA, 25 bp, Homo sapien
cacacaggatgtagggagtaaagtt

SEQ ID NO: 3700283 - DNA, 25 bp, Homo sapien
cctctgtcgatgaaaagacatattc

SEQ ID NO: 3700284 - DNA, 25 bp, Homo sapien
cctccccctgacaggacatatcctc

SEQ ID NO: 3700285 - DNA, 25 bp, Homo sapien
cctgacaggacatatcctctgggca

SEQ ID NO: 3700286 - DNA, 25 bp, Homo sapien
tccccctgacaggacatatcctctg

SEQ ID NO: 3700287 - DNA, 25 bp, Homo sapien
cccctgacaggacatatcctctggg

SEQ ID NO: 3700288 - DNA, 25 bp, Homo sapien
ttttccccactcagcggtcacacag

SEQ ID NO: 3700289 - DNA, 25 bp, Homo sapien
cttttccccactcagcggtcacaca

SEQ ID NO: 3700290 - DNA, 25 bp, Homo sapien
ccccactcagcggtcacacagcggg

SEQ ID NO: 3700291 - DNA, 25 bp, Homo sapien
ctcagcggtcacacagcggggcagt

SEQ ID NO: 3700292 - DNA, 25 bp, Homo sapien
cagccactcaagacttggtcctgca

SEQ ID NO: 3700293 - DNA, 25 bp, Homo sapien
ctctgtcctcaaggcctgatgtcaa

SEQ ID NO: 3700294 - DNA, 25 bp, Homo sapien
ggtgaacaaagaacctgcagccact

SEQ ID NO: 3700295 - DNA, 25 bp, Homo sapien
tgatgtcaagatccaaaagtttcca

SEQ ID NO: 3700296 - DNA, 25 bp, Homo sapien
aacacactgctgactgaggagttct

SEQ ID NO: 3700297 - DNA, 25 bp, Homo sapien
tggaacacactgctgactgaggagt

SEQ ID NO: 3700298 - DNA, 25 bp, Homo sapien
ggggtgagagctgatcagggtagtg

SEQ ID NO: 3700299 - DNA, 25 bp, Homo sapien
aggggtgagagctgatcagggtagt

SEQ ID NO: 3700300 - DNA, 25 bp, Homo sapien
cagggaacccggtagttcagaatgt

SEQ ID NO: 3700301 - DNA, 25 bp, Homo sapien
cctgggtagccagaagcttcatgaa

SEQ ID NO: 3700302 - DNA, 25 bp, Homo sapien
gacatgctttctcctaacctctgag

SEQ ID NO: 3700303 - DNA, 25 bp, Homo sapien
tgcacccacggattcacaccaatgg

SEQ ID NO: 3700304 - DNA, 25 bp, Homo sapien
agaatgatgacttcttgcaatcctt

SEQ ID NO: 3700305 - DNA, 25 bp, Homo sapien
gcaatccttcctctatttgtcatga

SEQ ID NO: 3700306 - DNA, 25 bp, Homo sapien
ttgtcatgagttcttggttgcacat

SEQ ID NO: 3700307 - DNA, 25 bp, Homo sapien
aatgatgacttcttgcaatccttcc

SEQ ID NO: 3700308 - DNA, 25 bp, Homo sapien
caaaaagggtcaaaggttctgactg

SEQ ID NO: 3700309 - DNA, 25 bp, Homo sapien
tgcaaaaagggtcaaaggttctgac

SEQ ID NO: 3700310 - DNA, 25 bp, Homo sapien
tgtccctctaaagacatagctgtgt

SEQ ID NO: 3700311 - DNA, 25 bp, Homo sapien
accctgatgtccctctaaagacata

SEQ ID NO: 3700312 - DNA, 25 bp, Homo sapien
tgctggcagacctggcttgtcggca

SEQ ID NO: 3700313 - DNA, 25 bp, Homo sapien
tctgtagacatggagcacatttgct

SEQ ID NO: 3700314 - DNA, 25 bp, Homo sapien
tctgaattgccaaatgacgtctgaa

SEQ ID NO: 3700315 - DNA, 25 bp, Homo sapien
tgaagctggcggaaactaggagccc

SEQ ID NO: 3700316 - DNA, 25 bp, Homo sapien
cacgggtacctattttctgaattgc

SEQ ID NO: 3700317 - DNA, 25 bp, Homo sapien
gcttcagcaggtcacgggtacctat

SEQ ID NO: 3700318 - DNA, 25 bp, Homo sapien
ctggtggcgtaaagagcagctctct

SEQ ID NO: 3700319 - DNA, 25 bp, Homo sapien
ggatgggtatccctgtggcccttga

SEQ ID NO: 3700320 - DNA, 25 bp, Homo sapien
tatttcccttgcacggatcccgacg

SEQ ID NO: 3700321 - DNA, 25 bp, Homo sapien
ccttcccttggagctagactctatt

SEQ ID NO: 3700322 - DNA, 25 bp, Homo sapien
gctcatcttgtctgcctcaaattcc

SEQ ID NO: 3700323 - DNA, 25 bp, Homo sapien
tctcctttgaggctaagaccttgga

SEQ ID NO: 3700324 - DNA, 25 bp, Homo sapien
cataaagacttgctatttccactgt

SEQ ID NO: 3700325 - DNA, 25 bp, Homo sapien
cctctagtctcaggggaaatccttc

SEQ ID NO: 3700326 - DNA, 25 bp, Homo sapien
gataccccgctttccaagggcagag

SEQ ID NO: 3700327 - DNA, 25 bp, Homo sapien
cttggacgataccccgctttccaag

SEQ ID NO: 3700328 - DNA, 25 bp, Homo sapien
gacgataccccgctttccaagggca

SEQ ID NO: 3700329 - DNA, 25 bp, Homo sapien
gacggtcagatctttctcatcccaa

SEQ ID NO: 3700330 - DNA, 25 bp, Homo sapien
catatattcaaattgttgcaaggcc

SEQ ID NO: 3700331 - DNA, 25 bp, Homo sapien
gcaggagtcaaacaccagtcatggt

SEQ ID NO: 3700332 - DNA, 25 bp, Homo sapien
gcatagctggaaggtagaacactta

SEQ ID NO: 3700333 - DNA, 25 bp, Homo sapien
tatgctacaggaatgctttggtaag

SEQ ID NO: 3700334 - DNA, 25 bp, Homo sapien
ggatgaaattcagggcagctgtttt

SEQ ID NO: 3700335 - DNA, 25 bp, Homo sapien
tgggaattgggcaaggatggatgaa

SEQ ID NO: 3700336 - DNA, 25 bp, Homo sapien
gatggatgaaattcagggcagctgt

SEQ ID NO: 3700337 - DNA, 25 bp, Homo sapien
catgcagttcccactataaattaag

SEQ ID NO: 3700338 - DNA, 25 bp, Homo sapien
tataaaattagacccctcgcagcct

SEQ ID NO: 3700339 - DNA, 25 bp, Homo sapien
cttgggtcattgtataaaattagac

SEQ ID NO: 3700340 - DNA, 25 bp, Homo sapien
gattcagggcccaaacacaagttct

SEQ ID NO: 3700341 - DNA, 25 bp, Homo sapien
aatccctggatctaagtgattcagg

SEQ ID NO: 3700342 - DNA, 25 bp, Homo sapien
agagtttccacacacaggttctcca

SEQ ID NO: 3700343 - DNA, 25 bp, Homo sapien
gttctccaaggccctaccagagcag

SEQ ID NO: 3700344 - DNA, 25 bp, Homo sapien
aaggccctaccagagcagctagata

SEQ ID NO: 3700345 - DNA, 25 bp, Homo sapien
acagagtttccacacacaggttctc

SEQ ID NO: 3700346 - DNA, 25 bp, Homo sapien
tactggttgacctactatggaagca

SEQ ID NO: 3700347 - DNA, 25 bp, Homo sapien
ttgacctactatggaagcagaagaa

SEQ ID NO: 3700348 - DNA, 25 bp, Homo sapien
gcctgggctactggttgacctacta

SEQ ID NO: 3700349 - DNA, 25 bp, Homo sapien
tgagcctgggctactggttgaccta

SEQ ID NO: 3700350 - DNA, 25 bp, Homo sapien
aaaaccttctcatagcatgagtcat

SEQ ID NO: 3700351 - DNA, 25 bp, Homo sapien
tcgtgccttccttatctatctggaa

SEQ ID NO: 3700352 - DNA, 25 bp, Homo sapien
acatccattccacaggtccttcaga

SEQ ID NO: 3700353 - DNA, 25 bp, Homo sapien
tccttcagaaacacgagggtaatcc

SEQ ID NO: 3700354 - DNA, 25 bp, Homo sapien
gctgctccatcattggcacaggtgt

SEQ ID NO: 3700355 - DNA, 25 bp, Homo sapien
tggagagatcggagcaagcccttgc

SEQ ID NO: 3700356 - DNA, 25 bp, Homo sapien
tctatcacattcaaggcagtctgcc

SEQ ID NO: 3700357 - DNA, 25 bp, Homo sapien
tctgacggttgatgtaaattggccc

SEQ ID NO: 3700358 - DNA, 25 bp, Homo sapien
agagcagcaggtaagcactgggaac

SEQ ID NO: 3700359 - DNA, 25 bp, Homo sapien
cattcgtcttttacaccagagcagc

SEQ ID NO: 3700360 - DNA, 25 bp, Homo sapien
tgttcaattcacattcgtcttttac

SEQ ID NO: 3700361 - DNA, 25 bp, Homo sapien
cagagcagcaggtaagcactgggaa

SEQ ID NO: 3700362 - DNA, 25 bp, Homo sapien
aaggcagagcaagcaagccagaatc

SEQ ID NO: 3700363 - DNA, 25 bp, Homo sapien
cagggaaaggcagagcaagcaagcc

SEQ ID NO: 3700364 - DNA, 25 bp, Homo sapien
ggcagagcaagcaagccagaatcat

SEQ ID NO: 3700365 - DNA, 25 bp, Homo sapien
accagggaaaggcagagcaagcaag

SEQ ID NO: 3700366 - DNA, 25 bp, Homo sapien
tgtggagcatgttgaagggcaccag

SEQ ID NO: 3700367 - DNA, 25 bp, Homo sapien
tcctgagccattcctagtttccgtg

SEQ ID NO: 3700368 - DNA, 25 bp, Homo sapien
gacccagccaaacgtcagtcttctt

SEQ ID NO: 3700369 - DNA, 25 bp, Homo sapien
atgggattcaaagatgttgtgagtc

SEQ ID NO: 3700370 - DNA, 25 bp, Homo sapien
cctctcccttacatactctgggtat

SEQ ID NO: 3700371 - DNA, 25 bp, Homo sapien
agccattaatcttcagtctgtaccc

SEQ ID NO: 3700372 - DNA, 25 bp, Homo sapien
tgccaaagtcaccagaactcaggga

SEQ ID NO: 3700373 - DNA, 25 bp, Homo sapien
gaatgcagcataaacctctgggact

SEQ ID NO: 3700374 - DNA, 25 bp, Homo sapien
atactttaaagaatatccatgtact

SEQ ID NO: 3700375 - DNA, 25 bp, Homo sapien
gttctgtctaatgttttggtgatta

SEQ ID NO: 3700376 - DNA, 25 bp, Homo sapien
tactttaaagaatatccatgtactt

SEQ ID NO: 3700377 - DNA, 25 bp, Homo sapien
ctgtctaatgttttggtgattacaa

SEQ ID NO: 3700378 - DNA, 25 bp, Homo sapien
tgtccaatatcttatcaatgaacta

SEQ ID NO: 3700379 - DNA, 25 bp, Homo sapien
caacacagttagcatttttgtcata

SEQ ID NO: 3700380 - DNA, 25 bp, Homo sapien
gatatagtacaataaacacccatgt

SEQ ID NO: 3700381 - DNA, 25 bp, Homo sapien
agcatgcaattcctaagaataaaga

SEQ ID NO: 3700382 - DNA, 25 bp, Homo sapien
tcagtggcgaaagacgccactctga

SEQ ID NO: 3700383 - DNA, 25 bp, Homo sapien
actttgcatttaggaatttggcaaa

SEQ ID NO: 3700384 - DNA, 25 bp, Homo sapien
gacttccatgagcattctgcttact

SEQ ID NO: 3700385 - DNA, 25 bp, Homo sapien
tctgacttccatgagcattctgctt

SEQ ID NO: 3700386 - DNA, 25 bp, Homo sapien
catttccctacaactccatctgcta

SEQ ID NO: 3700387 - DNA, 25 bp, Homo sapien
aaaacgttagatctttcagaccaag

SEQ ID NO: 3700388 - DNA, 25 bp, Homo sapien
ctcgccagctgctaaggctcccaga

SEQ ID NO: 3700389 - DNA, 25 bp, Homo sapien
cactcccaaaacgttagatctttca

SEQ ID NO: 3700390 - DNA, 25 bp, Homo sapien
gcacagccaaaacgctgagcactgt

SEQ ID NO: 3700391 - DNA, 25 bp, Homo sapien
cagccaaaacgctgagcactgttct

SEQ ID NO: 3700392 - DNA, 25 bp, Homo sapien
tgcacagccaaaacgctgagcactg

SEQ ID NO: 3700393 - DNA, 25 bp, Homo sapien
tggtgcacagccaaaacgctgagca

SEQ ID NO: 3700394 - DNA, 25 bp, Homo sapien
acatttgggacacagattcttaggc

SEQ ID NO: 3700395 - DNA, 25 bp, Homo sapien
gctgggcttgttctcgaggcacatt

SEQ ID NO: 3700396 - DNA, 25 bp, Homo sapien
tttccagttcccaagctaaatgtgc

SEQ ID NO: 3700397 - DNA, 25 bp, Homo sapien
gtggttctggtgctcctttgacaca

SEQ ID NO: 3700398 - DNA, 25 bp, Homo sapien
tactaaacactttatctgagactac

SEQ ID NO: 3700399 - DNA, 25 bp, Homo sapien
tatctgagactaccctttcattatt

SEQ ID NO: 3700400 - DNA, 25 bp, Homo sapien
cttaatgtctcagtttgagtgtcac

SEQ ID NO: 3700401 - DNA, 25 bp, Homo sapien
ttgtattcccatgcttaatgtctca

SEQ ID NO: 3700402 - DNA, 25 bp, Homo sapien
ggtgctggtgaataaggcatcctag

SEQ ID NO: 3700403 - DNA, 25 bp, Homo sapien
gctggtgaataaggcatcctagact

SEQ ID NO: 3700404 - DNA, 25 bp, Homo sapien
ctggtgaataaggcatcctagactc

SEQ ID NO: 3700405 - DNA, 25 bp, Homo sapien
tgctggtgaataaggcatcctagac

SEQ ID NO: 3700406 - DNA, 25 bp, Homo sapien
gaaggatatactgagatgattcaat

SEQ ID NO: 3700407 - DNA, 25 bp, Homo sapien
agatgattcaatgccagaaactggg

SEQ ID NO: 3700408 - DNA, 25 bp, Homo sapien
gatatactgagatgattcaatgcca

SEQ ID NO: 3700409 - DNA, 25 bp, Homo sapien
actgagatgattcaatgccagaaac

SEQ ID NO: 3700410 - DNA, 25 bp, Homo sapien
cagggctatttctgctatctgttgt

SEQ ID NO: 3700411 - DNA, 25 bp, Homo sapien
agggctatttctgctatctgttgta

SEQ ID NO: 3700412 - DNA, 25 bp, Homo sapien
atctgttgtattaattccatcccct

SEQ ID NO: 3700413 - DNA, 25 bp, Homo sapien
gttgtattaattccatccccttcat

SEQ ID NO: 3700414 - DNA, 25 bp, Homo sapien
gtttgctttgtcaagctctgattct

SEQ ID NO: 3700415 - DNA, 25 bp, Homo sapien
tctgactttatgactatatcgaaat

SEQ ID NO: 3700416 - DNA, 25 bp, Homo sapien
gtcaagctctgattctgactttatg

SEQ ID NO: 3700417 - DNA, 25 bp, Homo sapien
gactatatcgaaatcaatttctcta

SEQ ID NO: 3700418 - DNA, 25 bp, Homo sapien
tccactctgacctgctttactctga

SEQ ID NO: 3700419 - DNA, 25 bp, Homo sapien
ttcatgcacgcgagaaccatggctt

SEQ ID NO: 3700420 - DNA, 25 bp, Homo sapien
gaaactctcctctaactctgctggg

SEQ ID NO: 3700421 - DNA, 25 bp, Homo sapien
tactctgaattttcggcaacatccg

SEQ ID NO: 3700422 - DNA, 25 bp, Homo sapien
tggtgctggttatccattaggtgct

SEQ ID NO: 3700423 - DNA, 25 bp, Homo sapien
ggttatccattaggtgcttccatcc

SEQ ID NO: 3700424 - DNA, 25 bp, Homo sapien
ttaggtgcttccatcccttggtgct

SEQ ID NO: 3700425 - DNA, 25 bp, Homo sapien
aagactttggtgctggttatccatt

SEQ ID NO: 3700426 - DNA, 25 bp, Homo sapien
tctgtgtaccttcacagcatgtagg

SEQ ID NO: 3700427 - DNA, 25 bp, Homo sapien
ccactctatgttttggtacaagata

SEQ ID NO: 3700428 - DNA, 25 bp, Homo sapien
gggccacagaaagatcaccactttt

SEQ ID NO: 3700429 - DNA, 25 bp, Homo sapien
tggtacaagataagcagaaatctct

SEQ ID NO: 3700430 - DNA, 25 bp, Homo sapien
tggaaggccggatattatttgtgta

SEQ ID NO: 3700431 - DNA, 25 bp, Homo sapien
ggaaggccggatattatttgtgtaa

SEQ ID NO: 3700432 - DNA, 25 bp, Homo sapien
ctggaaggccggatattatttgtgt

SEQ ID NO: 3700433 - DNA, 25 bp, Homo sapien
gagtcacagaattccgagcttgcca

SEQ ID NO: 3700434 - DNA, 25 bp, Homo sapien
aatcatggatattggtgtcacgtta

SEQ ID NO: 3700435 - DNA, 25 bp, Homo sapien
cagagctaatcaggggacgtctttc

SEQ ID NO: 3700436 - DNA, 25 bp, Homo sapien
taaggttaatggtaatcatggatat

SEQ ID NO: 3700437 - DNA, 25 bp, Homo sapien
aaattatcaaatttgagagcatcaa

SEQ ID NO: 3700438 - DNA, 25 bp, Homo sapien
tggatgtaggcctagtcagattacg

SEQ ID NO: 3700439 - DNA, 25 bp, Homo sapien
gtaggcctagtcagattacgtattt

SEQ ID NO: 3700440 - DNA, 25 bp, Homo sapien
tatcaaatttgagagcatcaattta

SEQ ID NO: 3700441 - DNA, 25 bp, Homo sapien
tacaagaccattcaccccctgggga

SEQ ID NO: 3700442 - DNA, 25 bp, Homo sapien
tcagcagcacttgatacaggggatc

SEQ ID NO: 3700443 - DNA, 25 bp, Homo sapien
taaacatatctttggtacaagacca

SEQ ID NO: 3700444 - DNA, 25 bp, Homo sapien
ctgttaaacatatctttggtacaag

SEQ ID NO: 3700445 - DNA, 25 bp, Homo sapien
tctttctgtttcacatggaaagtta

SEQ ID NO: 3700446 - DNA, 25 bp, Homo sapien
tcaatagaggacctgtcctctttct

SEQ ID NO: 3700447 - DNA, 25 bp, Homo sapien
caatagaggacctgtcctctttctg

SEQ ID NO: 3700448 - DNA, 25 bp, Homo sapien
tcctctttctgtttcacatggaaag

SEQ ID NO: 3700449 - DNA, 25 bp, Homo sapien
tgtggctatcatggatggcatccct

SEQ ID NO: 3700450 - DNA, 25 bp, Homo sapien
gatgcaggcctcatcagacttctcc

SEQ ID NO: 3700451 - DNA, 25 bp, Homo sapien
gatggcatcccttaacactccatgg

SEQ ID NO: 3700452 - DNA, 25 bp, Homo sapien
tccaagatgcatacgggcccaagga

SEQ ID NO: 3700453 - DNA, 25 bp, Homo sapien
taagagttggcagaaatgttcgact

SEQ ID NO: 3700454 - DNA, 25 bp, Homo sapien
tttaagagttggcagaaatgttcga

SEQ ID NO: 3700455 - DNA, 25 bp, Homo sapien
attatttaagagttggcagaaatgt

SEQ ID NO: 3700456 - DNA, 25 bp, Homo sapien
gagttggcagaaatgttcgacttct

SEQ ID NO: 3700457 - DNA, 25 bp, Homo sapien
tgtaatttcgccttctgcgtggccc

SEQ ID NO: 3700458 - DNA, 25 bp, Homo sapien
caaatttaacttgagtctcctcttc

SEQ ID NO: 3700459 - DNA, 25 bp, Homo sapien
cactttccatattgcactagagggc

SEQ ID NO: 3700460 - DNA, 25 bp, Homo sapien
attaaacctgtttgtacctctatca

SEQ ID NO: 3700461 - DNA, 25 bp, Homo sapien
caccacctataggacggaaacctga

SEQ ID NO: 3700462 - DNA, 25 bp, Homo sapien
gaaagataatgtccaaagtcatgac

SEQ ID NO: 3700463 - DNA, 25 bp, Homo sapien
ctgggaaagataatgtccaaagtca

SEQ ID NO: 3700464 - DNA, 25 bp, Homo sapien
tgactgagccctggaaaatgtagag

SEQ ID NO: 3700465 - DNA, 25 bp, Homo sapien
ccctgaattcatgtagtctattttg

SEQ ID NO: 3700466 - DNA, 25 bp, Homo sapien
aattcatgtagtctattttgagctc

SEQ ID NO: 3700467 - DNA, 25 bp, Homo sapien
atcttccctgaattcatgtagtcta

SEQ ID NO: 3700468 - DNA, 25 bp, Homo sapien
gaattcatgtagtctattttgagct

SEQ ID NO: 3700469 - DNA, 25 bp, Homo sapien
tagatggacatgttggataataatg

SEQ ID NO: 3700470 - DNA, 25 bp, Homo sapien
gtagatggacatgttggataataat

SEQ ID NO: 3700471 - DNA, 25 bp, Homo sapien
taaatgtgtcgttgaatgtctgggc

SEQ ID NO: 3700472 - DNA, 25 bp, Homo sapien
cccaaaaagggagactctaaatgtg

SEQ ID NO: 3700473 - DNA, 25 bp, Homo sapien
ttcgtgctagcaatcccaaaaaggg

SEQ ID NO: 3700474 - DNA, 25 bp, Homo sapien
tcagcaaaatgaccatgattcgtgc

SEQ ID NO: 3700475 - DNA, 25 bp, Homo sapien
tgccttcgttcctgtctcctactct

SEQ ID NO: 3700476 - DNA, 25 bp, Homo sapien
ccttcgttcctgtctcctactctgc

SEQ ID NO: 3700477 - DNA, 25 bp, Homo sapien
gccttcgttcctgtctcctactctg

SEQ ID NO: 3700478 - DNA, 25 bp, Homo sapien
gtctgattgttacatttggaggaat

SEQ ID NO: 3700479 - DNA, 25 bp, Homo sapien
tgtctgattgttacatttggaggaa

SEQ ID NO: 3700480 - DNA, 25 bp, Homo sapien
tcttgggatcatccttacaagtagg

SEQ ID NO: 3700481 - DNA, 25 bp, Homo sapien
atttgctgcatcatttctagtgaca

SEQ ID NO: 3700482 - DNA, 25 bp, Homo sapien
tccatacagtattcctcagcagtga

SEQ ID NO: 3700483 - DNA, 25 bp, Homo sapien
cattatgagtggcaaaatttgacga

SEQ ID NO: 3700484 - DNA, 25 bp, Homo sapien
gatgtcctccacgaacaaataggca

SEQ ID NO: 3700485 - DNA, 25 bp, Homo sapien
cccatggggttccttgatgtcctcc

SEQ ID NO: 3700486 - DNA, 25 bp, Homo sapien
tttgatatattccaaaacccatggg

SEQ ID NO: 3700487 - DNA, 25 bp, Homo sapien
tgtcctccacgaacaaataggcatt

SEQ ID NO: 3700488 - DNA, 25 bp, Homo sapien
gggtttatgggtgtgtgaactgaac

SEQ ID NO: 3700489 - DNA, 25 bp, Homo sapien
tgatgcagtgaagcgcttcctgaca

SEQ ID NO: 3700490 - DNA, 25 bp, Homo sapien
tggccacaggtactaggagatggac

SEQ ID NO: 3700491 - DNA, 25 bp, Homo sapien
gctatagatccaagctgtcttctcc

SEQ ID NO: 3700492 - DNA, 25 bp, Homo sapien
agggtccacaatccacttccagagg

SEQ ID NO: 3700493 - DNA, 25 bp, Homo sapien
ggaggctctgtatggggctgcacca

SEQ ID NO: 3700494 - DNA, 25 bp, Homo sapien
acaatccacttccagaggtgtgccc

SEQ ID NO: 3700495 - DNA, 25 bp, Homo sapien
ggctgcaccagtgcatgtccctggg

SEQ ID NO: 3700496 - DNA, 25 bp, Homo sapien
cttgctttcagatctctccactgcc

SEQ ID NO: 3700497 - DNA, 25 bp, Homo sapien
tattgatatgtcataggacagtggt

SEQ ID NO: 3700498 - DNA, 25 bp, Homo sapien
ccttgctttcagatctctccactgc

SEQ ID NO: 3700499 - DNA, 25 bp, Homo sapien
tatatccacaaggtaaatgccttca

SEQ ID NO: 3700500 - DNA, 25 bp, Homo sapien
gaaaatggtgcttaaatctcctaca

SEQ ID NO: 3700501 - DNA, 25 bp, Homo sapien
tgcaaaatgcctaaacttccatgtc

SEQ ID NO: 3700502 - DNA, 25 bp, Homo sapien
cataagatcccattgtggagattca

SEQ ID NO: 3700503 - DNA, 25 bp, Homo sapien
tagttagtgagtgcgcaccttgtgc

SEQ ID NO: 3700504 - DNA, 25 bp, Homo sapien
cacaaaagttggacgttgaagaggt

SEQ ID NO: 3700505 - DNA, 25 bp, Homo sapien
tgtgtcccaagcagcataaagtagt

SEQ ID NO: 3700506 - DNA, 25 bp, Homo sapien
caccttgtgcttggtatcagcctta

SEQ ID NO: 3700507 - DNA, 25 bp, Homo sapien
tcttccaatttacatttatgaccga

SEQ ID NO: 3700508 - DNA, 25 bp, Homo sapien
catttatgaccgaagtcaggtaaat

SEQ ID NO: 3700509 - DNA, 25 bp, Homo sapien
ttctgaaactgctgcatgctttgac

SEQ ID NO: 3700510 - DNA, 25 bp, Homo sapien
cgaagtcaggtaaatacacctggtt

SEQ ID NO: 3700511 - DNA, 25 bp, Homo sapien
tgagcagtgtgctctctctaacaca

SEQ ID NO: 3700512 - DNA, 25 bp, Homo sapien
ctgctaatcttatgagtgtttttac

SEQ ID NO: 3700513 - DNA, 25 bp, Homo sapien
taatcttatgagtgtttttactagg

SEQ ID NO: 3700514 - DNA, 25 bp, Homo sapien
acacagctctgctaatcttatgagt

SEQ ID NO: 3700515 - DNA, 25 bp, Homo sapien
ccttttgctgggatccaggaaaata

SEQ ID NO: 3700516 - DNA, 25 bp, Homo sapien
tgacgccctcttgggaaatatcagc

SEQ ID NO: 3700517 - DNA, 25 bp, Homo sapien
ccaggaaaatatagtcgtggctgcc

SEQ ID NO: 3700518 - DNA, 25 bp, Homo sapien
aatatcagctcccaagctctttttc

SEQ ID NO: 3700519 - DNA, 25 bp, Homo sapien
tcctcagatgctctgaatacaaggg

SEQ ID NO: 3700520 - DNA, 25 bp, Homo sapien
ctctgaatacaagggtcagcctcac

SEQ ID NO: 3700521 - DNA, 25 bp, Homo sapien
tcagatgctctgaatacaagggtca

SEQ ID NO: 3700522 - DNA, 25 bp, Homo sapien
gatgctctgaatacaagggtcagcc

SEQ ID NO: 3700523 - DNA, 25 bp, Homo sapien
gtccaatatatgatatttcaatcca

SEQ ID NO: 3700524 - DNA, 25 bp, Homo sapien
ttttgttcatgtactgttaccatca

SEQ ID NO: 3700525 - DNA, 25 bp, Homo sapien
cctggcgttcttggtgtgacttttc

SEQ ID NO: 3700526 - DNA, 25 bp, Homo sapien
tactgttaccatcacacaaaatgcc

SEQ ID NO: 3700527 - DNA, 25 bp, Homo sapien
caagaggagagccaaaacaatgcaa

SEQ ID NO: 3700528 - DNA, 25 bp, Homo sapien
caatagggtctgtagagtgctgaac

SEQ ID NO: 3700529 - DNA, 25 bp, Homo sapien
agtgaatttagaaacatcctgccga

SEQ ID NO: 3700530 - DNA, 25 bp, Homo sapien
catcctgccgaacaaaggcaattca

SEQ ID NO: 3700531 - DNA, 25 bp, Homo sapien
tagaagccacatcatatgtatttga

SEQ ID NO: 3700532 - DNA, 25 bp, Homo sapien
acttaaatcaataagacaccttgga

SEQ ID NO: 3700533 - DNA, 25 bp, Homo sapien
taaatcaataagacaccttggaaaa

SEQ ID NO: 3700534 - DNA, 25 bp, Homo sapien
aaaggaggaactctagagatggaga

SEQ ID NO: 3700535 - DNA, 25 bp, Homo sapien
tcttctttccttgccagctgtttta

SEQ ID NO: 3700536 - DNA, 25 bp, Homo sapien
ttctttccttgccagctgttttatt

SEQ ID NO: 3700537 - DNA, 25 bp, Homo sapien
tttccttgccagctgttttattcat

SEQ ID NO: 3700538 - DNA, 25 bp, Homo sapien
ggtgtgtcttctttccttgccagct

SEQ ID NO: 3700539 - DNA, 25 bp, Homo sapien
tgggtgtgcgcaccgtgcgcgagcc

SEQ ID NO: 3700540 - DNA, 25 bp, Homo sapien
atgggcgcaggtcagtgggtgtgcg

SEQ ID NO: 3700541 - DNA, 25 bp, Homo sapien
ggtgtgcgcaccgtgcgcgagccga

SEQ ID NO: 3700542 - DNA, 25 bp, Homo sapien
acaatgggcgcaggtcagtgggtgt

SEQ ID NO: 3700543 - DNA, 25 bp, Homo sapien
gcccaaaccaacgtcacctctggtg

SEQ ID NO: 3700544 - DNA, 25 bp, Homo sapien
ccaaaccaacgtcacctctggtgat

SEQ ID NO: 3700545 - DNA, 25 bp, Homo sapien
caaaccaacgtcacctctggtgatt

SEQ ID NO: 3700546 - DNA, 25 bp, Homo sapien
accaacgtcacctctggtgattcca

SEQ ID NO: 3700547 - DNA, 25 bp, Homo sapien
gtccccactgatgtaacttaaatga

SEQ ID NO: 3700548 - DNA, 25 bp, Homo sapien
tagtcatgcagtccccactgatgta

SEQ ID NO: 3700549 - DNA, 25 bp, Homo sapien
tcatgcagtccccactgatgtaact

SEQ ID NO: 3700550 - DNA, 25 bp, Homo sapien
gcagtccccactgatgtaacttaaa

SEQ ID NO: 3700551 - DNA, 25 bp, Homo sapien
acacttaaaaacaggttgctgattt

SEQ ID NO: 3700552 - DNA, 25 bp, Homo sapien
cacaacaattgctgattggcataga

SEQ ID NO: 3700553 - DNA, 25 bp, Homo sapien
ctattgcacaacaattgctgattgg

SEQ ID NO: 3700554 - DNA, 25 bp, Homo sapien
aacacttaaaaacaggttgctgatt

SEQ ID NO: 3700555 - DNA, 25 bp, Homo sapien
tggacactgaatttctcgaatattg

SEQ ID NO: 3700556 - DNA, 25 bp, Homo sapien
ggacactgaatttctcgaatattga

SEQ ID NO: 3700557 - DNA, 25 bp, Homo sapien
gaacaaaagagatgcattggcccac

SEQ ID NO: 3700558 - DNA, 25 bp, Homo sapien
cagagtctgcacgttctccaaatcc

SEQ ID NO: 3700559 - DNA, 25 bp, Homo sapien
tttcaatgatcatcccagagtctgc

SEQ ID NO: 3700560 - DNA, 25 bp, Homo sapien
gttcctgcagatgacctagaagatc

SEQ ID NO: 3700561 - DNA, 25 bp, Homo sapien
tgaaacagcaaggagccacagtttc

SEQ ID NO: 3700562 - DNA, 25 bp, Homo sapien
aaacagcaaggagccacagtttcat

SEQ ID NO: 3700563 - DNA, 25 bp, Homo sapien
gaaacagcaaggagccacagtttca

SEQ ID NO: 3700564 - DNA, 25 bp, Homo sapien
aacagcaaggagccacagtttcata

SEQ ID NO: 3700565 - DNA, 25 bp, Homo sapien
atgaaattggtagtgctggagtata

SEQ ID NO: 3700566 - DNA, 25 bp, Homo sapien
aattggtagtgctggagtatattgg

SEQ ID NO: 3700567 - DNA, 25 bp, Homo sapien
gcagcagcagggatgaaattggtag

SEQ ID NO: 3700568 - DNA, 25 bp, Homo sapien
ctggagtatattggactctggattt

SEQ ID NO: 3700569 - DNA, 25 bp, Homo sapien
ttaacaatttgtgctaagatctctg

SEQ ID NO: 3700570 - DNA, 25 bp, Homo sapien
gaagccttatccacttctctgacta

SEQ ID NO: 3700571 - DNA, 25 bp, Homo sapien
ctgtaaatatggagtcctttgcatc

SEQ ID NO: 3700572 - DNA, 25 bp, Homo sapien
gaggagaagccttatccacttctct

SEQ ID NO: 3700573 - DNA, 25 bp, Homo sapien
gggcttccggtctgaacttcattag

SEQ ID NO: 3700574 - DNA, 25 bp, Homo sapien
tatctttctttgtccgctgtctggc

SEQ ID NO: 3700575 - DNA, 25 bp, Homo sapien
tctttgtccgctgtctggcttgttt

SEQ ID NO: 3700576 - DNA, 25 bp, Homo sapien
cattagtcatccctactttcaagtc

SEQ ID NO: 3700577 - DNA, 25 bp, Homo sapien
agttcccgcttgtcatgttgttcca

SEQ ID NO: 3700578 - DNA, 25 bp, Homo sapien
cactctaagtgggagctctcttcca

SEQ ID NO: 3700579 - DNA, 25 bp, Homo sapien
gtaagccatcgcctctacagggcat

SEQ ID NO: 3700580 - DNA, 25 bp, Homo sapien
ttactgggttgctcgtggaaaatcc

SEQ ID NO: 3700581 - DNA, 25 bp, Homo sapien
atttttgatggcagtaatgcggctg

SEQ ID NO: 3700582 - DNA, 25 bp, Homo sapien
agtaatgcggctgtcacctctttca

SEQ ID NO: 3700583 - DNA, 25 bp, Homo sapien
gagtactttgcacagacaaggttaa

SEQ ID NO: 3700584 - DNA, 25 bp, Homo sapien
cctctttcagctataacattgagac

SEQ ID NO: 3700585 - DNA, 25 bp, Homo sapien
gggcaaagagccagtgttagcatga

SEQ ID NO: 3700586 - DNA, 25 bp, Homo sapien
tgacatatgccgacagtgcaaaacc

SEQ ID NO: 3700587 - DNA, 25 bp, Homo sapien
tatgccgacagtgcaaaaccttgct

SEQ ID NO: 3700588 - DNA, 25 bp, Homo sapien
gtgttagcatgacatatgccgacag

SEQ ID NO: 3700589 - DNA, 25 bp, Homo sapien
ctatttctccagcgctgtgtggtac

SEQ ID NO: 3700590 - DNA, 25 bp, Homo sapien
gggcgcgtctgcagccctccaagcc

SEQ ID NO: 3700591 - DNA, 25 bp, Homo sapien
gcgtgcgctccaggagcgccgacat

SEQ ID NO: 3700592 - DNA, 25 bp, Homo sapien
ctgcgtgcgctccaggagcgccgac

SEQ ID NO: 3700593 - DNA, 25 bp, Homo sapien
gcagccctccaagccgcctcctgcg

SEQ ID NO: 3700594 - DNA, 25 bp, Homo sapien
gcggccgcatgcaaatccgctccct

SEQ ID NO: 3700595 - DNA, 25 bp, Homo sapien
ggccgcatgcaaatccgctccctgc

SEQ ID NO: 3700596 - DNA, 25 bp, Homo sapien
ggccgcggcggccgcatgcaaatcc

SEQ ID NO: 3700597 - DNA, 25 bp, Homo sapien
gcggcggccgcatgcaaatccgctc

SEQ ID NO: 3700598 - DNA, 25 bp, Homo sapien
gcggcggctgccgaagcggcaccag

SEQ ID NO: 3700599 - DNA, 25 bp, Homo sapien
ctgccgaagcggcaccaggtggcga

SEQ ID NO: 3700600 - DNA, 25 bp, Homo sapien
gcggctgccgaagcggcaccaggtg

SEQ ID NO: 3700601 - DNA, 25 bp, Homo sapien
cgaagcggcaccaggtggcgaggca

SEQ ID NO: 3700602 - DNA, 25 bp, Homo sapien
gaagccgatgaacagaggtaccacg

SEQ ID NO: 3700603 - DNA, 25 bp, Homo sapien
gcagtcgctacagcgtaactcccgg

SEQ ID NO: 3700604 - DNA, 25 bp, Homo sapien
cgtctgctgccggttccacacgatg

SEQ ID NO: 3700605 - DNA, 25 bp, Homo sapien
acgatccatttgagaagcatgaggc

SEQ ID NO: 3700606 - DNA, 25 bp, Homo sapien
ggacgtggtggaagtggtagtggtg

SEQ ID NO: 3700607 - DNA, 25 bp, Homo sapien
agtccactaggtcggtgggcacgta

SEQ ID NO: 3700608 - DNA, 25 bp, Homo sapien
tggagtccactaggtcggtgggcac

SEQ ID NO: 3700609 - DNA, 25 bp, Homo sapien
cccttggagtccactaggtcggtgg

SEQ ID NO: 3700610 - DNA, 25 bp, Homo sapien
ggccgtggtggacgggaccgtcgca

SEQ ID NO: 3700611 - DNA, 25 bp, Homo sapien
ccgcagtgttccgtgctgtggtgga

SEQ ID NO: 3700612 - DNA, 25 bp, Homo sapien
gagcccagcgtgctgctactgaaga

SEQ ID NO: 3700613 - DNA, 25 bp, Homo sapien
tggtcaggcgagtgctaatccggtt

SEQ ID NO: 3700614 - DNA, 25 bp, Homo sapien
tagcgtatgccgcagtaggccagga

SEQ ID NO: 3700615 - DNA, 25 bp, Homo sapien
aaggtaggaggaggtagcgtatgcc

SEQ ID NO: 3700616 - DNA, 25 bp, Homo sapien
ctggtgctagtttctggtgtggtgg

SEQ ID NO: 3700617 - DNA, 25 bp, Homo sapien
tccaggagggagtagaatcgtgaag

SEQ ID NO: 3700618 - DNA, 25 bp, Homo sapien
ccttcatatttcctcctagttaact

SEQ ID NO: 3700619 - DNA, 25 bp, Homo sapien
actctcggcggtcacagaatctatg

SEQ ID NO: 3700620 - DNA, 25 bp, Homo sapien
ttaactcactctcggcggtcacaga

SEQ ID NO: 3700621 - DNA, 25 bp, Homo sapien
ttcctcctagttaactcactctcgg

SEQ ID NO: 3700622 - DNA, 25 bp, Homo sapien
ggtataccacactccattattctat

SEQ ID NO: 3700623 - DNA, 25 bp, Homo sapien
catacaagggttggaggtataccac

SEQ ID NO: 3700624 - DNA, 25 bp, Homo sapien
tctatcaactgcatcaaaagagcag

SEQ ID NO: 3700625 - DNA, 25 bp, Homo sapien
gaagcagcaagttactggctctact

SEQ ID NO: 3700626 - DNA, 25 bp, Homo sapien
cccggcagaatatcaaggtctcacc

SEQ ID NO: 3700627 - DNA, 25 bp, Homo sapien
tgatcagtctcagcatacactgcag

SEQ ID NO: 3700628 - DNA, 25 bp, Homo sapien
ggtacttcgcagtgtggctccaaga

SEQ ID NO: 3700629 - DNA, 25 bp, Homo sapien
taagttctagagatccgttgtacaa

SEQ ID NO: 3700630 - DNA, 25 bp, Homo sapien
cagaaaggaatcaacagcagcattc

SEQ ID NO: 3700631 - DNA, 25 bp, Homo sapien
tccttttgaatctgatgcgatgtca

SEQ ID NO: 3700632 - DNA, 25 bp, Homo sapien
ccagaagggtgatgtggcaatcaat

SEQ ID NO: 3700633 - DNA, 25 bp, Homo sapien
cctcaccatgtgatgagtacagaaa

SEQ ID NO: 3700634 - DNA, 25 bp, Homo sapien
tctgtctggtaacaaggagcaacca

SEQ ID NO: 3700635 - DNA, 25 bp, Homo sapien
ttagctgccgatatgtaaatgaacg

SEQ ID NO: 3700636 - DNA, 25 bp, Homo sapien
gagcaaccaagtaagcctgagcagg

SEQ ID NO: 3700637 - DNA, 25 bp, Homo sapien
cctgagcaggcgagagtgatgaact

SEQ ID NO: 3700638 - DNA, 25 bp, Homo sapien
gagatgccattggctattaatacta

SEQ ID NO: 3700639 - DNA, 25 bp, Homo sapien
gatgccattggctattaatactaat

SEQ ID NO: 3700640 - DNA, 25 bp, Homo sapien
agatgccattggctattaatactaa

SEQ ID NO: 3700641 - DNA, 25 bp, Homo sapien
caaccattgtcgtctttaggggcca

SEQ ID NO: 3700642 - DNA, 25 bp, Homo sapien
aagaatgagtgtgaggttgcactga

SEQ ID NO: 3700643 - DNA, 25 bp, Homo sapien
ctccaaagaatgagtgtgaggttgc

SEQ ID NO: 3700644 - DNA, 25 bp, Homo sapien
gaatgtgctcttcccctgatgtgac

SEQ ID NO: 3700645 - DNA, 25 bp, Homo sapien
tcagcaaagtcactagcatcacatg

SEQ ID NO: 3700646 - DNA, 25 bp, Homo sapien
tcctctcaggacagcaaaattgggt

SEQ ID NO: 3700647 - DNA, 25 bp, Homo sapien
tgatgcaatcggtatcactgtagcc

SEQ ID NO: 3700648 - DNA, 25 bp, Homo sapien
ggagctcccgacttcaccatgtgga

SEQ ID NO: 3700649 - DNA, 25 bp, Homo sapien
gaaaccatgcaatgctgaccatatg

SEQ ID NO: 3700650 - DNA, 25 bp, Homo sapien
tttaactctgcaccatcgccctgaa

SEQ ID NO: 3700651 - DNA, 25 bp, Homo sapien
ttcactggagtgttcgaaaccatgc

SEQ ID NO: 3700652 - DNA, 25 bp, Homo sapien
gaccatatgatatacgagttctcgg

SEQ ID NO: 3700653 - DNA, 25 bp, Homo sapien
gacggaaacatctgcctcggtgtca

SEQ ID NO: 3700654 - DNA, 25 bp, Homo sapien
caaatgggacttgacctgctgtacc

SEQ ID NO: 3700655 - DNA, 25 bp, Homo sapien
caaaggccttgtcaactgggatccc

SEQ ID NO: 3700656 - DNA, 25 bp, Homo sapien
tactctgtagtgatgcatgtgccaa

SEQ ID NO: 3700657 - DNA, 25 bp, Homo sapien
taccgcttgatacaagtgccacaag

SEQ ID NO: 3700658 - DNA, 25 bp, Homo sapien
agtgtgcatagctgtaccgcttgat

SEQ ID NO: 3700659 - DNA, 25 bp, Homo sapien
cacaagagctctggatgtatgccat

SEQ ID NO: 3700660 - DNA, 25 bp, Homo sapien
tacaagtgccacaagagctctggat

SEQ ID NO: 3700661 - DNA, 25 bp, Homo sapien
tgcatgcagaggtgatggtcgatat

SEQ ID NO: 3700662 - DNA, 25 bp, Homo sapien
gccagagaaaaccatcaggaatacg

SEQ ID NO: 3700663 - DNA, 25 bp, Homo sapien
taaaggtaatacgtgttcattgtaa

SEQ ID NO: 3700664 - DNA, 25 bp, Homo sapien
caggaatacgtcaataattactgct

SEQ ID NO: 3700665 - DNA, 25 bp, Homo sapien
tacttgtggattcaagaaacttctg

SEQ ID NO: 3700666 - DNA, 25 bp, Homo sapien
gattcaagaaacttctgtagctgag

SEQ ID NO: 3700667 - DNA, 25 bp, Homo sapien
aaacttctgtagctgagcaccaagg

SEQ ID NO: 3700668 - DNA, 25 bp, Homo sapien
aatagctccttattacttgtggatt

SEQ ID NO: 3700669 - DNA, 25 bp, Homo sapien
tcagggatctcacagagaggtgcta

SEQ ID NO: 3700670 - DNA, 25 bp, Homo sapien
cacagagaggtgctagataaactcc

SEQ ID NO: 3700671 - DNA, 25 bp, Homo sapien
tagataaactccaggtgtcctccac

SEQ ID NO: 3700672 - DNA, 25 bp, Homo sapien
ggtgctagataaactccaggtgtcc

SEQ ID NO: 3700673 - DNA, 25 bp, Homo sapien
gtgctccctgcacacttcttcaaaa

SEQ ID NO: 3700674 - DNA, 25 bp, Homo sapien
aaggctccctttctcatagtgtcat

SEQ ID NO: 3700675 - DNA, 25 bp, Homo sapien
tacacctcaggccataagacagctg

SEQ ID NO: 3700676 - DNA, 25 bp, Homo sapien
gaactccagcagaattctttccatc

SEQ ID NO: 3700677 - DNA, 25 bp, Homo sapien
ggtggtaacaattaatggcctgtaa

SEQ ID NO: 3700678 - DNA, 25 bp, Homo sapien
tcatgcctcccgagtgattacactg

SEQ ID NO: 3700679 - DNA, 25 bp, Homo sapien
catgcttgtcaagataggcttttac

SEQ ID NO: 3700680 - DNA, 25 bp, Homo sapien
tctgccagtataattggtggtaaca

SEQ ID NO: 3700681 - DNA, 25 bp, Homo sapien
tcaggaacgtcatgggaagctcagg

SEQ ID NO: 3700682 - DNA, 25 bp, Homo sapien
ggaccatcttgctggagaccatact

SEQ ID NO: 3700683 - DNA, 25 bp, Homo sapien
gaaacggtatgtgacttccccagct

SEQ ID NO: 3700684 - DNA, 25 bp, Homo sapien
tctgagtatgaagcgaggaccatct

SEQ ID NO: 3700685 - DNA, 25 bp, Homo sapien
cacaacccaaaatggtggaccaggg

SEQ ID NO: 3700686 - DNA, 25 bp, Homo sapien
gacagcctttgttctagagcccagg

SEQ ID NO: 3700687 - DNA, 25 bp, Homo sapien
catgatcccttggatcaaacttttg

SEQ ID NO: 3700688 - DNA, 25 bp, Homo sapien
ccaggtaatagaagagtctttgata

SEQ ID NO: 3700689 - DNA, 25 bp, Homo sapien
ttcttagagaacacacaataaggta

SEQ ID NO: 3700690 - DNA, 25 bp, Homo sapien
tgttagacccaatgcagtctgctcc

SEQ ID NO: 3700691 - DNA, 25 bp, Homo sapien
tgtgataggatatacattcggtacc

SEQ ID NO: 3700692 - DNA, 25 bp, Homo sapien
aagcctcatccaaatcaagatgtga

SEQ ID NO: 3700693 - DNA, 25 bp, Homo sapien
cacagggtgagttcacaggaatccc

SEQ ID NO: 3700694 - DNA, 25 bp, Homo sapien
tatgtgagctatatcccctgaaacc

SEQ ID NO: 3700695 - DNA, 25 bp, Homo sapien
tcagcagcggcatcatttggattca

SEQ ID NO: 3700696 - DNA, 25 bp, Homo sapien
tgtgtgatgcactctaaccagccca

SEQ ID NO: 3700697 - DNA, 25 bp, Homo sapien
tgcaggacagtatggaggaaatctc

SEQ ID NO: 3700698 - DNA, 25 bp, Homo sapien
catagtattgggctgggaaggtctc

SEQ ID NO: 3700699 - DNA, 25 bp, Homo sapien
caactatggcaaaggaacgcccagg

SEQ ID NO: 3700700 - DNA, 25 bp, Homo sapien
tgtgaatagaacatgtgccgcaacc

SEQ ID NO: 3700701 - DNA, 25 bp, Homo sapien
caaggataggcttggaggcaactct

SEQ ID NO: 3700702 - DNA, 25 bp, Homo sapien
caagaggtttcttcctaaagccagg

SEQ ID NO: 3700703 - DNA, 25 bp, Homo sapien
cattaagtaagacagtggtgctagc

SEQ ID NO: 3700704 - DNA, 25 bp, Homo sapien
taagccaaacatgaggtccccacat

SEQ ID NO: 3700705 - DNA, 25 bp, Homo sapien
tatgtttcaggcctccaaaagcagc

SEQ ID NO: 3700706 - DNA, 25 bp, Homo sapien
gatccagcaaaagcacggtcatgtc

SEQ ID NO: 3700707 - DNA, 25 bp, Homo sapien
caggagacctggcaagatggcttca

SEQ ID NO: 3700708 - DNA, 25 bp, Homo sapien
gatgctggagtcaaaaatcaccctc

SEQ ID NO: 3700709 - DNA, 25 bp, Homo sapien
tcagggcccattataacactgtgca

SEQ ID NO: 3700710 - DNA, 25 bp, Homo sapien
tacatccgggtttggaaatccatca

SEQ ID NO: 3700711 - DNA, 25 bp, Homo sapien
tatacacaaaacactaactcagggc

SEQ ID NO: 3700712 - DNA, 25 bp, Homo sapien
tctgggaagagacaggactctacca

SEQ ID NO: 3700713 - DNA, 25 bp, Homo sapien
cagagtcgcatttttctcaaggcca

SEQ ID NO: 3700714 - DNA, 25 bp, Homo sapien
catcaataacttgttggtcaccaaa

SEQ ID NO: 3700715 - DNA, 25 bp, Homo sapien
aatattccctcggagaaaacagaca

SEQ ID NO: 3700716 - DNA, 25 bp, Homo sapien
gtattgacacgactgatgcttccta

SEQ ID NO: 3700717 - DNA, 25 bp, Homo sapien
cagtcccttaagtttcatacatgat

SEQ ID NO: 3700718 - DNA, 25 bp, Homo sapien
aatttgccccctgaacaattagcct

SEQ ID NO: 3700719 - DNA, 25 bp, Homo sapien
gaacaattagccttctcctaattta

SEQ ID NO: 3700720 - DNA, 25 bp, Homo sapien
ttctccagcatcagtcccttaagtt

SEQ ID NO: 3700721 - DNA, 25 bp, Homo sapien
caaacacagtggagagatgcattcc

SEQ ID NO: 3700722 - DNA, 25 bp, Homo sapien
catagtaaacatgcattccggccac

SEQ ID NO: 3700723 - DNA, 25 bp, Homo sapien
ttccctcagaatagacagccacagc

SEQ ID NO: 3700724 - DNA, 25 bp, Homo sapien
gggtttcgagttgctgccaaacaca

SEQ ID NO: 3700725 - DNA, 25 bp, Homo sapien
aggttggcaggggaagtcgtgtaag

SEQ ID NO: 3700726 - DNA, 25 bp, Homo sapien
tggcaggggaagtcgtgtaaggaca

SEQ ID NO: 3700727 - DNA, 25 bp, Homo sapien
gggaagtcgtgtaaggacaggactg

SEQ ID NO: 3700728 - DNA, 25 bp, Homo sapien
aagtcgtgtaaggacaggactggaa

SEQ ID NO: 3700729 - DNA, 25 bp, Homo sapien
tccatctgtgccttgtaattcagga

SEQ ID NO: 3700730 - DNA, 25 bp, Homo sapien
tcctgagtcctgtgcttagaaagga

SEQ ID NO: 3700731 - DNA, 25 bp, Homo sapien
cagtgaggtttcttgcccttccaaa

SEQ ID NO: 3700732 - DNA, 25 bp, Homo sapien
gcaggtagtgctggctctcaaaaca

SEQ ID NO: 3700733 - DNA, 25 bp, Homo sapien
ccagatgattaaagaaattccaccg

SEQ ID NO: 3700734 - DNA, 25 bp, Homo sapien
caccagatgattaaagaaattccac

SEQ ID NO: 3700735 - DNA, 25 bp, Homo sapien
tccaccagatgattaaagaaattcc

SEQ ID NO: 3700736 - DNA, 25 bp, Homo sapien
aattccaccggaatttcttcaggag

SEQ ID NO: 3700737 - DNA, 25 bp, Homo sapien
gagctcatcaacaccgtcgttgcac

SEQ ID NO: 3700738 - DNA, 25 bp, Homo sapien
gcacttgctgcactcctaaatcgat

SEQ ID NO: 3700739 - DNA, 25 bp, Homo sapien
cactcctaaatcgattggaaatgcc

SEQ ID NO: 3700740 - DNA, 25 bp, Homo sapien
aacaccgtcgttgcacttgctgcac

SEQ ID NO: 3700741 - DNA, 25 bp, Homo sapien
tctggtagccatgtgaaataaagga

SEQ ID NO: 3700742 - DNA, 25 bp, Homo sapien
gctacctgaggagaccaagtcctag

SEQ ID NO: 3700743 - DNA, 25 bp, Homo sapien
tgcactccattccagacacgtagag

SEQ ID NO: 3700744 - DNA, 25 bp, Homo sapien
cacgtagagtgaatggctacctgag

SEQ ID NO: 3700745 - DNA, 25 bp, Homo sapien
ccaactagtgtgctggaagacgaac

SEQ ID NO: 3700746 - DNA, 25 bp, Homo sapien
agcaaggcaggtgagatcccaggaa

SEQ ID NO: 3700747 - DNA, 25 bp, Homo sapien
gagacgccagcagataatacagcaa

SEQ ID NO: 3700748 - DNA, 25 bp, Homo sapien
ctgggaaccctcaatgtaagaaagc

SEQ ID NO: 3700749 - DNA, 25 bp, Homo sapien
cagcagctgagactgtggctctttt

SEQ ID NO: 3700750 - DNA, 25 bp, Homo sapien
gaacttcccgttatatttcacatgt

SEQ ID NO: 3700751 - DNA, 25 bp, Homo sapien
gagtgtgctggtatgatctagctca

SEQ ID NO: 3700752 - DNA, 25 bp, Homo sapien
tccttggctttctcaatactagact

SEQ ID NO: 3700753 - DNA, 25 bp, Homo sapien
gattccactgtgacttattgaaagc

SEQ ID NO: 3700754 - DNA, 25 bp, Homo sapien
cattccatactttatagtctgagga

SEQ ID NO: 3700755 - DNA, 25 bp, Homo sapien
gttagtgactaacaagcccagcttg

SEQ ID NO: 3700756 - DNA, 25 bp, Homo sapien
tattgaaagcagtactcaatgtcat

SEQ ID NO: 3700757 - DNA, 25 bp, Homo sapien
tcctatacatggatacagccccaaa

SEQ ID NO: 3700758 - DNA, 25 bp, Homo sapien
ccattcaggtgtcattcctttggga

SEQ ID NO: 3700759 - DNA, 25 bp, Homo sapien
tatttgaagggtcaattggagaccc

SEQ ID NO: 3700760 - DNA, 25 bp, Homo sapien
gacaaccctgttatgaaccgcaaat

SEQ ID NO: 3700761 - DNA, 25 bp, Homo sapien
gctttaatgggtcttctgtgctcag

SEQ ID NO: 3700762 - DNA, 25 bp, Homo sapien
ctttaatgggtcttctgtgctcagc

SEQ ID NO: 3700763 - DNA, 25 bp, Homo sapien
tgctttaatgggtcttctgtgctca

SEQ ID NO: 3700764 - DNA, 25 bp, Homo sapien
cctgacagcccagattcttccatat

SEQ ID NO: 3700765 - DNA, 25 bp, Homo sapien
ccctgacagcccagattcttccata

SEQ ID NO: 3700766 - DNA, 25 bp, Homo sapien
ctgacagcccagattcttccatatc

SEQ ID NO: 3700767 - DNA, 25 bp, Homo sapien
tccctgacagcccagattcttccat

SEQ ID NO: 3700768 - DNA, 25 bp, Homo sapien
cgtcagccgtggcaatggataagct

SEQ ID NO: 3700769 - DNA, 25 bp, Homo sapien
agacggctgcgtcagccgtggcaat

SEQ ID NO: 3700770 - DNA, 25 bp, Homo sapien
tgcgtcagccgtggcaatggataag

SEQ ID NO: 3700771 - DNA, 25 bp, Homo sapien
ggctgcgtcagccgtggcaatggat

SEQ ID NO: 3700772 - DNA, 25 bp, Homo sapien
gagtacttgcgttgtatgaaggtgc

SEQ ID NO: 3700773 - DNA, 25 bp, Homo sapien
cacgttgagtacttgcgttgtatga

SEQ ID NO: 3700774 - DNA, 25 bp, Homo sapien
ctatgattcaatgatttcaattgat

SEQ ID NO: 3700775 - DNA, 25 bp, Homo sapien
tagcaaacacgttgagtacttgcgt

SEQ ID NO: 3700776 - DNA, 25 bp, Homo sapien
gccaaacagtaagcaggtgctcaca

SEQ ID NO: 3700777 - DNA, 25 bp, Homo sapien
cagggttatccgtcagatgctgaac

SEQ ID NO: 3700778 - DNA, 25 bp, Homo sapien
actgtttgagggcaaacactaggaa

SEQ ID NO: 3700779 - DNA, 25 bp, Homo sapien
gggcaaacactaggaacacagaagg

SEQ ID NO: 3700780 - DNA, 25 bp, Homo sapien
aggatgccagtgtccgtcctcagca

SEQ ID NO: 3700781 - DNA, 25 bp, Homo sapien
aatacactcttgatggaagtgtaca

SEQ ID NO: 3700782 - DNA, 25 bp, Homo sapien
tgaaaaaagcacaatatcagtgatc

SEQ ID NO: 3700783 - DNA, 25 bp, Homo sapien
attaacttaagagcgtctgcacagg

SEQ ID NO: 3700784 - DNA, 25 bp, Homo sapien
atctaattaacttaagagcgtctgc

SEQ ID NO: 3700785 - DNA, 25 bp, Homo sapien
accaaaatagcataatactgatgca

SEQ ID NO: 3700786 - DNA, 25 bp, Homo sapien
tgttgcccaccttcaaactatacta

SEQ ID NO: 3700787 - DNA, 25 bp, Homo sapien
catgttgcccaccttcaaactatac

SEQ ID NO: 3700788 - DNA, 25 bp, Homo sapien
tgtctggctgaaatttttatataaa

SEQ ID NO: 3700789 - DNA, 25 bp, Homo sapien
ccaagtgtttaggtccagtgagtta

SEQ ID NO: 3700790 - DNA, 25 bp, Homo sapien
tgaaagagcctcttcaacccagcag

SEQ ID NO: 3700791 - DNA, 25 bp, Homo sapien
ggtcgaccctaatgcctgccaagtg

SEQ ID NO: 3700792 - DNA, 25 bp, Homo sapien
cagcagggaaggtcgaccctaatgc

SEQ ID NO: 3700793 - DNA, 25 bp, Homo sapien
ctagcactttggctgactttcagtc

SEQ ID NO: 3700794 - DNA, 25 bp, Homo sapien
tttggctgactttcagtctgcaggt

SEQ ID NO: 3700795 - DNA, 25 bp, Homo sapien
cactttggctgactttcagtctgca

SEQ ID NO: 3700796 - DNA, 25 bp, Homo sapien
tagcactttggctgactttcagtct

SEQ ID NO: 3700797 - DNA, 25 bp, Homo sapien
aagtccataggcagcaggtacataa

SEQ ID NO: 3700798 - DNA, 25 bp, Homo sapien
ccataggcagcaggtacataagggc

SEQ ID NO: 3700799 - DNA, 25 bp, Homo sapien
caaaaagtaagcctgggccttgtgc

SEQ ID NO: 3700800 - DNA, 25 bp, Homo sapien
agcaggtacataagggccagaatct

SEQ ID NO: 3700801 - DNA, 25 bp, Homo sapien
caaccctccctgtaccacaccccag

SEQ ID NO: 3700802 - DNA, 25 bp, Homo sapien
tggtcaaccctccctgtaccacacc

SEQ ID NO: 3700803 - DNA, 25 bp, Homo sapien
cttggtcaaccctccctgtaccaca

SEQ ID NO: 3700804 - DNA, 25 bp, Homo sapien
tcaaccctccctgtaccacacccca

SEQ ID NO: 3700805 - DNA, 25 bp, Homo sapien
ttttgtcaggtcctgctgccagacc

SEQ ID NO: 3700806 - DNA, 25 bp, Homo sapien
cctgctgccagacctcacactccat

SEQ ID NO: 3700807 - DNA, 25 bp, Homo sapien
tcctgctgccagacctcacactcca

SEQ ID NO: 3700808 - DNA, 25 bp, Homo sapien
tgtcaggtcctgctgccagacctca

SEQ ID NO: 3700809 - DNA, 25 bp, Homo sapien
ttgattccgggtagacagtctctgc

SEQ ID NO: 3700810 - DNA, 25 bp, Homo sapien
tgatgcacacgtatggagaaccact

SEQ ID NO: 3700811 - DNA, 25 bp, Homo sapien
tcccaaggtgagaatcagtatcatc

SEQ ID NO: 3700812 - DNA, 25 bp, Homo sapien
tcagtgagtgataggcaagcaggac

SEQ ID NO: 3700813 - DNA, 25 bp, Homo sapien
catatctgcaccaagacagtgtgtg

SEQ ID NO: 3700814 - DNA, 25 bp, Homo sapien
aaagtattaggctctgttcccatgc

SEQ ID NO: 3700815 - DNA, 25 bp, Homo sapien
taaaccacagcggagttccatctcg

SEQ ID NO: 3700816 - DNA, 25 bp, Homo sapien
catctcgtcgggattcctggcacag

SEQ ID NO: 3700817 - DNA, 25 bp, Homo sapien
ctggaatagattgatgggaacagca

SEQ ID NO: 3700818 - DNA, 25 bp, Homo sapien
gggagtccagatgggtgcactcccc

SEQ ID NO: 3700819 - DNA, 25 bp, Homo sapien
agcagggagtccagatgggtgcact

SEQ ID NO: 3700820 - DNA, 25 bp, Homo sapien
tggaatagattgatgggaacagcag

SEQ ID NO: 3700821 - DNA, 25 bp, Homo sapien
gctcctgttaatcctttagttgctg

SEQ ID NO: 3700822 - DNA, 25 bp, Homo sapien
taatcctttagttgctggacagtag

SEQ ID NO: 3700823 - DNA, 25 bp, Homo sapien
cctttagttgctggacagtagggtg

SEQ ID NO: 3700824 - DNA, 25 bp, Homo sapien
tgttaatcctttagttgctggacag

SEQ ID NO: 3700825 - DNA, 25 bp, Homo sapien
tgacatgtttgcaacacctgccagc

SEQ ID NO: 3700826 - DNA, 25 bp, Homo sapien
gaagctgtctcctatcagctgggca

SEQ ID NO: 3700827 - DNA, 25 bp, Homo sapien
ggcagtggcctagcctctgatccat

SEQ ID NO: 3700828 - DNA, 25 bp, Homo sapien
ggcacttaccggtcttcaacacctg

SEQ ID NO: 3700829 - DNA, 25 bp, Homo sapien
ctctcactaccaaccttcagccaag

SEQ ID NO: 3700830 - DNA, 25 bp, Homo sapien
atttgtatgaattcgtcagcagcag

SEQ ID NO: 3700831 - DNA, 25 bp, Homo sapien
aaaatttgtatgaattcgtcagcag

SEQ ID NO: 3700832 - DNA, 25 bp, Homo sapien
gtatgaattcgtcagcagcagaccc

SEQ ID NO: 3700833 - DNA, 25 bp, Homo sapien
ttgtatgaattcgtcagcagcagac

SEQ ID NO: 3700834 - DNA, 25 bp, Homo sapien
ctggcaatcgaatggcaattttgaa

SEQ ID NO: 3700835 - DNA, 25 bp, Homo sapien
ttgaaaaagctgactctatttgtaa

SEQ ID NO: 3700836 - DNA, 25 bp, Homo sapien
ttttgaaaaagctgactctatttgt

SEQ ID NO: 3700837 - DNA, 25 bp, Homo sapien
actgaaggctggcaatcgaatggca

SEQ ID NO: 3700838 - DNA, 25 bp, Homo sapien
tgtaatagtccagatgatgcatgag

SEQ ID NO: 3700839 - DNA, 25 bp, Homo sapien
gagggctagacggactccaggtaat

SEQ ID NO: 3700840 - DNA, 25 bp, Homo sapien
tacccagtaatgatgtaccacacat

SEQ ID NO: 3700841 - DNA, 25 bp, Homo sapien
tccaggtaatttccggtagccactg

SEQ ID NO: 3700842 - DNA, 25 bp, Homo sapien
tactatcggtgcaaatgtcaagaca

SEQ ID NO: 3700843 - DNA, 25 bp, Homo sapien
ctgatttgtactaagcagccagcag

SEQ ID NO: 3700844 - DNA, 25 bp, Homo sapien
tattgttctcaactaagcagctgat

SEQ ID NO: 3700845 - DNA, 25 bp, Homo sapien
ggtcttagcctcaccatttggacaa

SEQ ID NO: 3700846 - DNA, 25 bp, Homo sapien
agtaacctgtcagtgaccaggatgg

SEQ ID NO: 3700847 - DNA, 25 bp, Homo sapien
atggagcctgtaagggcagcttgct

SEQ ID NO: 3700848 - DNA, 25 bp, Homo sapien
tcagtggtcacagccggagtaacct

SEQ ID NO: 3700849 - DNA, 25 bp, Homo sapien
gcctgtaagggcagcttgctcatgg

SEQ ID NO: 3700850 - DNA, 25 bp, Homo sapien
tagagaccttgtacagtgagagctg

SEQ ID NO: 3700851 - DNA, 25 bp, Homo sapien
gattcctgatctgctttcaagacgg

SEQ ID NO: 3700852 - DNA, 25 bp, Homo sapien
taagaggctttctaccgaggactac

SEQ ID NO: 3700853 - DNA, 25 bp, Homo sapien
tgagcatagatcctggacacagtgg

SEQ ID NO: 3700854 - DNA, 25 bp, Homo sapien
acctctgggcatatcaagttccttg

SEQ ID NO: 3700855 - DNA, 25 bp, Homo sapien
ccctggagcctttgtactatagaaa

SEQ ID NO: 3700856 - DNA, 25 bp, Homo sapien
caattaagttctagaatagcctcac

SEQ ID NO: 3700857 - DNA, 25 bp, Homo sapien
caggcataacattacctttagggaa

SEQ ID NO: 3700858 - DNA, 25 bp, Homo sapien
gaatggcatagtccccatgtgctcc

SEQ ID NO: 3700859 - DNA, 25 bp, Homo sapien
tgagccatggtagcagttgccatat

SEQ ID NO: 3700860 - DNA, 25 bp, Homo sapien
ccaacagcttgctaatgagccatgg

SEQ ID NO: 3700861 - DNA, 25 bp, Homo sapien
gatatttactctgggaagaccaaag

SEQ ID NO: 3700862 - DNA, 25 bp, Homo sapien
tggcaccttggcacctgactgaatt

SEQ ID NO: 3700863 - DNA, 25 bp, Homo sapien
ctgtgagatgggagccggactttaa

SEQ ID NO: 3700864 - DNA, 25 bp, Homo sapien
tcacatagccgccttctagctggag

SEQ ID NO: 3700865 - DNA, 25 bp, Homo sapien
gagagcttcacagtgcaatcacatg

SEQ ID NO: 3700866 - DNA, 25 bp, Homo sapien
ctgtgcacgcttattcagcctctgg

SEQ ID NO: 3700867 - DNA, 25 bp, Homo sapien
actggcgtggctatctgtgagttca

SEQ ID NO: 3700868 - DNA, 25 bp, Homo sapien
aaggatgcctttcgactccccagag

SEQ ID NO: 3700869 - DNA, 25 bp, Homo sapien
gagggattgcattctttgccaagga

SEQ ID NO: 3700870 - DNA, 25 bp, Homo sapien
gtatgtttcataatgcacatcagat

SEQ ID NO: 3700871 - DNA, 25 bp, Homo sapien
gcacatcagatgttacatctgccat

SEQ ID NO: 3700872 - DNA, 25 bp, Homo sapien
ttcataatgcacatcagatgttaca

SEQ ID NO: 3700873 - DNA, 25 bp, Homo sapien
taatgcacatcagatgttacatctg

SEQ ID NO: 3700874 - DNA, 25 bp, Homo sapien
gcttggaagctggtctgacttgatc

SEQ ID NO: 3700875 - DNA, 25 bp, Homo sapien
ggtcctcccttataagctgcatgct

SEQ ID NO: 3700876 - DNA, 25 bp, Homo sapien
atgcttatgttctagcttcactaag

SEQ ID NO: 3700877 - DNA, 25 bp, Homo sapien
ctgggtcctcccttataagctgcat

SEQ ID NO: 3700878 - DNA, 25 bp, Homo sapien
tgtaggacagactggaacacctgct

SEQ ID NO: 3700879 - DNA, 25 bp, Homo sapien
cctaaaggtggccatagttactctt

SEQ ID NO: 3700880 - DNA, 25 bp, Homo sapien
ggacaaatgtcacagcagaacagga

SEQ ID NO: 3700881 - DNA, 25 bp, Homo sapien
tcaggtggtctcactactgtaggac

SEQ ID NO: 3700882 - DNA, 25 bp, Homo sapien
ttgcaggaagcacaagtctgagacc

SEQ ID NO: 3700883 - DNA, 25 bp, Homo sapien
gagaccagaatacctacttaggact

SEQ ID NO: 3700884 - DNA, 25 bp, Homo sapien
taggacttccttcctagcctactta

SEQ ID NO: 3700885 - DNA, 25 bp, Homo sapien
tcagttccaaatcaagcctactcca

SEQ ID NO: 3700886 - DNA, 25 bp, Homo sapien
ttggttggctctccggcattccagc

SEQ ID NO: 3700887 - DNA, 25 bp, Homo sapien
tttcctagtgaattgctaactgaag

SEQ ID NO: 3700888 - DNA, 25 bp, Homo sapien
ggcacgtctgactgttctccccttt

SEQ ID NO: 3700889 - DNA, 25 bp, Homo sapien
gacagggttgttctggctgtcccat

SEQ ID NO: 3700890 - DNA, 25 bp, Homo sapien
actctgctctctcacggaggagcca

SEQ ID NO: 3700891 - DNA, 25 bp, Homo sapien
tccactctgctctctcacggaggag

SEQ ID NO: 3700892 - DNA, 25 bp, Homo sapien
ctctgctctctcacggaggagccag

SEQ ID NO: 3700893 - DNA, 25 bp, Homo sapien
tctccactctgctctctcacggagg

SEQ ID NO: 3700894 - DNA, 25 bp, Homo sapien
gaggagcttcctgtcgctcagcagg

SEQ ID NO: 3700895 - DNA, 25 bp, Homo sapien
ccttcttaggaagcaagatccatgc

SEQ ID NO: 3700896 - DNA, 25 bp, Homo sapien
ggataagatccttcttaggaagcaa

SEQ ID NO: 3700897 - DNA, 25 bp, Homo sapien
gcaggacaatggctttagaggataa

SEQ ID NO: 3700898 - DNA, 25 bp, Homo sapien
tgtgagggaatcctgattgtgatca

SEQ ID NO: 3700899 - DNA, 25 bp, Homo sapien
tggtcaggatcacgaagcagttcaa

SEQ ID NO: 3700900 - DNA, 25 bp, Homo sapien
tgatcactcccatgtggagtcagag

SEQ ID NO: 3700901 - DNA, 25 bp, Homo sapien
gagtcagagctgcatgaaaagcctt

SEQ ID NO: 3700902 - DNA, 25 bp, Homo sapien
tggttcttgtagtctagctttgcat

SEQ ID NO: 3700903 - DNA, 25 bp, Homo sapien
tcttgtagtctagctttgcatgatg

SEQ ID NO: 3700904 - DNA, 25 bp, Homo sapien
gttcttgtagtctagctttgcatga

SEQ ID NO: 3700905 - DNA, 25 bp, Homo sapien
ttgtagtctagctttgcatgatgtc

SEQ ID NO: 3700906 - DNA, 25 bp, Homo sapien
tctaagcaaggaagggacctatttg

SEQ ID NO: 3700907 - DNA, 25 bp, Homo sapien
taaggtagaacctgacaacagtatg

SEQ ID NO: 3700908 - DNA, 25 bp, Homo sapien
gacctatttgtaatgattgctttaa

SEQ ID NO: 3700909 - DNA, 25 bp, Homo sapien
ggtagaacctgacaacagtatgagg

SEQ ID NO: 3700910 - DNA, 25 bp, Homo sapien
tgcagctccctgatacgcagatatt

SEQ ID NO: 3700911 - DNA, 25 bp, Homo sapien
gtgggaacaattaaactctccatct

SEQ ID NO: 3700912 - DNA, 25 bp, Homo sapien
ttcatcacttgccatgtaccttttc

SEQ ID NO: 3700913 - DNA, 25 bp, Homo sapien
tggcgtctgcggtatgaaatcaaag

SEQ ID NO: 3700914 - DNA, 25 bp, Homo sapien
tatccaatctggtttacagtttaca

SEQ ID NO: 3700915 - DNA, 25 bp, Homo sapien
tgtgtgcgtgtacacgtgtactcct

SEQ ID NO: 3700916 - DNA, 25 bp, Homo sapien
ttctgagccccttgattaaatatcc

SEQ ID NO: 3700917 - DNA, 25 bp, Homo sapien
acagtttacactttaggccgagcca

SEQ ID NO: 3700918 - DNA, 25 bp, Homo sapien
gagtatctgccacccttccaatggg

SEQ ID NO: 3700919 - DNA, 25 bp, Homo sapien
tacctactgggaatctaagagaatc

SEQ ID NO: 3700920 - DNA, 25 bp, Homo sapien
ctataggagtacaagtggacaccac

SEQ ID NO: 3700921 - DNA, 25 bp, Homo sapien
ttgtggtgacggcaaacagggcaaa

SEQ ID NO: 3700922 - DNA, 25 bp, Homo sapien
aagctattaattgaaaccaaaggag

SEQ ID NO: 3700923 - DNA, 25 bp, Homo sapien
ggaacaattgtcactatttacagca

SEQ ID NO: 3700924 - DNA, 25 bp, Homo sapien
gaatatgctgaattcagtagcttgc

SEQ ID NO: 3700925 - DNA, 25 bp, Homo sapien
cagcagttagaattgtataagtaga

SEQ ID NO: 3700926 - DNA, 25 bp, Homo sapien
cagcagcacagactgaaaggataga

SEQ ID NO: 3700927 - DNA, 25 bp, Homo sapien
gatcatatgctatgtttcatccagc

SEQ ID NO: 3700928 - DNA, 25 bp, Homo sapien
tatttttcttgatcgacagctctaa

SEQ ID NO: 3700929 - DNA, 25 bp, Homo sapien
taagaacataaaccacctgtgatgc

SEQ ID NO: 3700930 - DNA, 25 bp, Homo sapien
ggaccatgacttgaagatgcagcca

SEQ ID NO: 3700931 - DNA, 25 bp, Homo sapien
ccaaccggattgacagattgagctg

SEQ ID NO: 3700932 - DNA, 25 bp, Homo sapien
ttctgaggcaattcagacagacagt

SEQ ID NO: 3700933 - DNA, 25 bp, Homo sapien
gacagacagttctctaaccatctgt

SEQ ID NO: 3700934 - DNA, 25 bp, Homo sapien
aatatagttgcttacctagatcccc

SEQ ID NO: 3700935 - DNA, 25 bp, Homo sapien
gtgctgacttaacttattgaacccc

SEQ ID NO: 3700936 - DNA, 25 bp, Homo sapien
gtacctacctgtcaatgagaatgat

SEQ ID NO: 3700937 - DNA, 25 bp, Homo sapien
aataaaggactcattctgctgagcc

SEQ ID NO: 3700938 - DNA, 25 bp, Homo sapien
cttgtgcacggccatgacaactttc

SEQ ID NO: 3700939 - DNA, 25 bp, Homo sapien
tgcacggccatgacaactttctctg

SEQ ID NO: 3700940 - DNA, 25 bp, Homo sapien
atccttgtgcacggccatgacaact

SEQ ID NO: 3700941 - DNA, 25 bp, Homo sapien
tgtgcacggccatgacaactttctc

SEQ ID NO: 3700942 - DNA, 25 bp, Homo sapien
cacagtagggcaaaccagggcatgg

SEQ ID NO: 3700943 - DNA, 25 bp, Homo sapien
taactttaaaatccacagtagggca

SEQ ID NO: 3700944 - DNA, 25 bp, Homo sapien
tctaaaaatcctcatgggctctcct

SEQ ID NO: 3700945 - DNA, 25 bp, Homo sapien
gggctctcctgtgggaataacttta

SEQ ID NO: 3700946 - DNA, 25 bp, Homo sapien
tccggtcagggtttcgatcacaaag

SEQ ID NO: 3700947 - DNA, 25 bp, Homo sapien
cagggtttgaagtgctcggatcgct

SEQ ID NO: 3700948 - DNA, 25 bp, Homo sapien
tcggatcgctctgtggaatatgtcg

SEQ ID NO: 3700949 - DNA, 25 bp, Homo sapien
tgcaaggtccttgtctcggcagggt

SEQ ID NO: 3700950 - DNA, 25 bp, Homo sapien
taagctccacatcataaacagacgc

SEQ ID NO: 3700951 - DNA, 25 bp, Homo sapien
tgccctttccatcagtggcctcagt

SEQ ID NO: 3700952 - DNA, 25 bp, Homo sapien
gtatcccggatatgacacataccag

SEQ ID NO: 3700953 - DNA, 25 bp, Homo sapien
tctgctattcaaacggtgggactgt

SEQ ID NO: 3700954 - DNA, 25 bp, Homo sapien
gaattctgacctccgggactgtgag

SEQ ID NO: 3700955 - DNA, 25 bp, Homo sapien
aaatttccatagtgaagccacccag

SEQ ID NO: 3700956 - DNA, 25 bp, Homo sapien
gaccatctataagtcaaggagggag

SEQ ID NO: 3700957 - DNA, 25 bp, Homo sapien
gcctgcatactgtggtgggacctga

SEQ ID NO: 3700958 - DNA, 25 bp, Homo sapien
gatgtgatctaatctaatatggctg

SEQ ID NO: 3700959 - DNA, 25 bp, Homo sapien
cacacacctacagaggaaacatgat

SEQ ID NO: 3700960 - DNA, 25 bp, Homo sapien
ccttagaggaaatttggaacacaca

SEQ ID NO: 3700961 - DNA, 25 bp, Homo sapien
gacatgagactcattgttatggact

SEQ ID NO: 3700962 - DNA, 25 bp, Homo sapien
gtcagattgttatacaagccatcag

SEQ ID NO: 3700963 - DNA, 25 bp, Homo sapien
gcaggaaggccggtgaaacatttaa

SEQ ID NO: 3700964 - DNA, 25 bp, Homo sapien
tgttaccaaagtatcaccctgggca

SEQ ID NO: 3700965 - DNA, 25 bp, Homo sapien
aagcgaattgcttggctgatttcca

SEQ ID NO: 3700966 - DNA, 25 bp, Homo sapien
cgcctagtaaaagaaatgatggtca

SEQ ID NO: 3700967 - DNA, 25 bp, Homo sapien
ggtcaaattctatcggttacactac

SEQ ID NO: 3700968 - DNA, 25 bp, Homo sapien
aacgttatttgcagaaatcccagcc

SEQ ID NO: 3700969 - DNA, 25 bp, Homo sapien
tatccttagtgactgaaagctcaag

SEQ ID NO: 3700970 - DNA, 25 bp, Homo sapien
aaacatgctggattcaggagccctc

SEQ ID NO: 3700971 - DNA, 25 bp, Homo sapien
cattgtatgaatgtaatccgctgcc

SEQ ID NO: 3700972 - DNA, 25 bp, Homo sapien
tattagcattgctggatggcattcc

SEQ ID NO: 3700973 - DNA, 25 bp, Homo sapien
aaaccgctgtgtcagaaaatgaaac

SEQ ID NO: 3700974 - DNA, 25 bp, Homo sapien
agctgggcgtgttactgtgtgcctg

SEQ ID NO: 3700975 - DNA, 25 bp, Homo sapien
tatgacatggtgtattggaaaagcc

SEQ ID NO: 3700976 - DNA, 25 bp, Homo sapien
aatttaagacaatgagcggattgga

SEQ ID NO: 3700977 - DNA, 25 bp, Homo sapien
ataagaggagttaaaacaagccaat

SEQ ID NO: 3700978 - DNA, 25 bp, Homo sapien
actctacctcatacccaaaccaggg

SEQ ID NO: 3700979 - DNA, 25 bp, Homo sapien
aagaagcctcacaaaactctacctc

SEQ ID NO: 3700980 - DNA, 25 bp, Homo sapien
gaaagtgctctcaagtgtttgataa

SEQ ID NO: 3700981 - DNA, 25 bp, Homo sapien
tgaaaagtagcatattccttctcag

SEQ ID NO: 3700982 - DNA, 25 bp, Homo sapien
gacaaagggattccatggcaaagag

SEQ ID NO: 3700983 - DNA, 25 bp, Homo sapien
aactttggcagcactactgatgaga

SEQ ID NO: 3700984 - DNA, 25 bp, Homo sapien
gagaattgctacaaccaagagagag

SEQ ID NO: 3700985 - DNA, 25 bp, Homo sapien
gcttcactaagttgcaacagaggat

SEQ ID NO: 3700986 - DNA, 25 bp, Homo sapien
caccctgagaaaagtaaggaggcca

SEQ ID NO: 3700987 - DNA, 25 bp, Homo sapien
gggacaccaattgccccatgctggg

SEQ ID NO: 3700988 - DNA, 25 bp, Homo sapien
gacacaacaggaaggcacaaagctc

SEQ ID NO: 3700989 - DNA, 25 bp, Homo sapien
cattaaaagttccaggctgtggagg

SEQ ID NO: 3700990 - DNA, 25 bp, Homo sapien
gtctaacctagtgattgacaggtca

SEQ ID NO: 3700991 - DNA, 25 bp, Homo sapien
gagagtctaacctagtgattgacag

SEQ ID NO: 3700992 - DNA, 25 bp, Homo sapien
tcaaagacagactgccctttgtggg

SEQ ID NO: 3700993 - DNA, 25 bp, Homo sapien
caaagacagactgccctttgtgggt

SEQ ID NO: 3700994 - DNA, 25 bp, Homo sapien
tagttctaagatccaagggccactc

SEQ ID NO: 3700995 - DNA, 25 bp, Homo sapien
ggcactctgactgttgcatagatta

SEQ ID NO: 3700996 - DNA, 25 bp, Homo sapien
aagccctgggtgtctggcactctga

SEQ ID NO: 3700997 - DNA, 25 bp, Homo sapien
tcccacttcccttgattctgttagt

SEQ ID NO: 3700998 - DNA, 25 bp, Homo sapien
tcattccaaaacctctctctttctc

SEQ ID NO: 3700999 - DNA, 25 bp, Homo sapien
tctttctcttgctgtccacagctga

SEQ ID NO: 3701000 - DNA, 25 bp, Homo sapien
ctctctttctcttgctgtccacagc

SEQ ID NO: 3701001 - DNA, 25 bp, Homo sapien
ctttctcttgctgtccacagctgac

SEQ ID NO: 3701002 - DNA, 25 bp, Homo sapien
cacatacacgaagccaagatgacta

SEQ ID NO: 3701003 - DNA, 25 bp, Homo sapien
tcactggcggaatttttggtactac

SEQ ID NO: 3701004 - DNA, 25 bp, Homo sapien
tgatttcaccgttgccaggcacaca

SEQ ID NO: 3701005 - DNA, 25 bp, Homo sapien
tgactagaagatcccagttggaacc

SEQ ID NO: 3701006 - DNA, 25 bp, Homo sapien
acacaaatgctctattacaactctg

SEQ ID NO: 3701007 - DNA, 25 bp, Homo sapien
ctgcttcacacaaatgctctattac

SEQ ID NO: 3701008 - DNA, 25 bp, Homo sapien
gcttcacacaaatgctctattacaa

SEQ ID NO: 3701009 - DNA, 25 bp, Homo sapien
caaatgctctattacaactctgtaa

SEQ ID NO: 3701010 - DNA, 25 bp, Homo sapien
gcactgcttgcaatttctctggctc

SEQ ID NO: 3701011 - DNA, 25 bp, Homo sapien
ctctggctctgaggcagtaagaagc

SEQ ID NO: 3701012 - DNA, 25 bp, Homo sapien
aaacaacacttcaggcactgcttgc

SEQ ID NO: 3701013 - DNA, 25 bp, Homo sapien
agaagcttggcaaacaacacttcag

SEQ ID NO: 3701014 - DNA, 25 bp, Homo sapien
tgaaggtcactgtggtaagaaaaat

SEQ ID NO: 3701015 - DNA, 25 bp, Homo sapien
aatggatctcatgaaaacagaaggt

SEQ ID NO: 3701016 - DNA, 25 bp, Homo sapien
acagaaggtagactgtttgagagga

SEQ ID NO: 3701017 - DNA, 25 bp, Homo sapien
ctcacatgtgagagctgaaaaaaat

SEQ ID NO: 3701018 - DNA, 25 bp, Homo sapien
cacagagagcccctaagaaggcatg

SEQ ID NO: 3701019 - DNA, 25 bp, Homo sapien
tttaataaattcaggctggtggcct

SEQ ID NO: 3701020 - DNA, 25 bp, Homo sapien
tggctcccaggcacatgtttagggt

SEQ ID NO: 3701021 - DNA, 25 bp, Homo sapien
tacaccaaccagcaagctaagggaa

SEQ ID NO: 3701022 - DNA, 25 bp, Homo sapien
ccaatactgcgtgagtttaaagtcc

SEQ ID NO: 3701023 - DNA, 25 bp, Homo sapien
tactgcgtgagtttaaagtccacag

SEQ ID NO: 3701024 - DNA, 25 bp, Homo sapien
tgccaatactgcgtgagtttaaagt

SEQ ID NO: 3701025 - DNA, 25 bp, Homo sapien
aatactgcgtgagtttaaagtccac

SEQ ID NO: 3701026 - DNA, 25 bp, Homo sapien
tggaagatataaagcagcattcccc

SEQ ID NO: 3701027 - DNA, 25 bp, Homo sapien
taaagcagcattccccaaagagagg

SEQ ID NO: 3701028 - DNA, 25 bp, Homo sapien
caataactcagggaagccgtctgga

SEQ ID NO: 3701029 - DNA, 25 bp, Homo sapien
ctataggcacccacaataactcagg

SEQ ID NO: 3701030 - DNA, 25 bp, Homo sapien
gacttcatagtcgtaaacagaattg

SEQ ID NO: 3701031 - DNA, 25 bp, Homo sapien
tgtagtgaatacataatccgtcatg

SEQ ID NO: 3701032 - DNA, 25 bp, Homo sapien
catgttctggatggacagtctgact

SEQ ID NO: 3701033 - DNA, 25 bp, Homo sapien
gattcagcagatgtagtgaatacat

SEQ ID NO: 3701034 - DNA, 25 bp, Homo sapien
tgttgggcaaatactcagggagact

SEQ ID NO: 3701035 - DNA, 25 bp, Homo sapien
catgtgctcaatggatgttgggcaa

SEQ ID NO: 3701036 - DNA, 25 bp, Homo sapien
tatagaaccccttgcatctaagtgg

SEQ ID NO: 3701037 - DNA, 25 bp, Homo sapien
gactgttggccacagaaacgtggac

SEQ ID NO: 3701038 - DNA, 25 bp, Homo sapien
tttgatatgcctcttgctccatggg

SEQ ID NO: 3701039 - DNA, 25 bp, Homo sapien
tgtctcaacgctttgtaaacacaag

SEQ ID NO: 3701040 - DNA, 25 bp, Homo sapien
caggagctctttgtgtctgaccatt

SEQ ID NO: 3701041 - DNA, 25 bp, Homo sapien
aaaagaactcaacaggccaagtgaa

SEQ ID NO: 3701042 - DNA, 25 bp, Homo sapien
tgtttttgcagaaagtgcatttctc

SEQ ID NO: 3701043 - DNA, 25 bp, Homo sapien
agactgcggtcaaatctagttttgc

SEQ ID NO: 3701044 - DNA, 25 bp, Homo sapien
cttgcagttttcatgaggcatcacc

SEQ ID NO: 3701045 - DNA, 25 bp, Homo sapien
gacaagttaggatgttgcaaactca

SEQ ID NO: 3701046 - DNA, 25 bp, Homo sapien
tttatacactgagttagtgacacct

SEQ ID NO: 3701047 - DNA, 25 bp, Homo sapien
gtctttatctagtaagctcagtgcc

SEQ ID NO: 3701048 - DNA, 25 bp, Homo sapien
gttattgtatgttttagctccataa

SEQ ID NO: 3701049 - DNA, 25 bp, Homo sapien
taagtcagctatttaaaagtcttta

SEQ ID NO: 3701050 - DNA, 25 bp, Homo sapien
tcaagttctatgattagttcttctg

SEQ ID NO: 3701051 - DNA, 25 bp, Homo sapien
taagtgccagcaccagtattgaaaa

SEQ ID NO: 3701052 - DNA, 25 bp, Homo sapien
tgtaccaaacctcataataaccctg

SEQ ID NO: 3701053 - DNA, 25 bp, Homo sapien
cctctctgtctataggtgtgatgtg

SEQ ID NO: 3701054 - DNA, 25 bp, Homo sapien
tatgtgccaagactacacacgcgtg

SEQ ID NO: 3701055 - DNA, 25 bp, Homo sapien
gactataccagatcacacaggaagg

SEQ ID NO: 3701056 - DNA, 25 bp, Homo sapien
gcaactaaggccattagaggcttta

SEQ ID NO: 3701057 - DNA, 25 bp, Homo sapien
ggatcagacacgctgcactttatga

SEQ ID NO: 3701058 - DNA, 25 bp, Homo sapien
tgagaagtttcaagtcataacgcag

SEQ ID NO: 3701059 - DNA, 25 bp, Homo sapien
cgtactccaaggttagtgccaggaa

SEQ ID NO: 3701060 - DNA, 25 bp, Homo sapien
gatggtgcctatccaagaatcacac

SEQ ID NO: 3701061 - DNA, 25 bp, Homo sapien
ccagaacacaggtctttgcagtaga

SEQ ID NO: 3701062 - DNA, 25 bp, Homo sapien
caagctccgtggtccctttgatggt

SEQ ID NO: 3701063 - DNA, 25 bp, Homo sapien
caaggctcattttggttcactcaga

SEQ ID NO: 3701064 - DNA, 25 bp, Homo sapien
tgcctaagtagagatgactatccct

SEQ ID NO: 3701065 - DNA, 25 bp, Homo sapien
gatctgtgctggttggtaaacttga

SEQ ID NO: 3701066 - DNA, 25 bp, Homo sapien
cagtaagatttactccctccaaggc

SEQ ID NO: 3701067 - DNA, 25 bp, Homo sapien
actgagaaccaccagtgtctaatgg

SEQ ID NO: 3701068 - DNA, 25 bp, Homo sapien
taggccagactcttcttctcaaggc

SEQ ID NO: 3701069 - DNA, 25 bp, Homo sapien
ccaccagtgtctaatggcatttcct

SEQ ID NO: 3701070 - DNA, 25 bp, Homo sapien
ggttcctgctactcaatatgtttcc

SEQ ID NO: 3701071 - DNA, 25 bp, Homo sapien
cactggaaggtatgagaagaaggaa

SEQ ID NO: 3701072 - DNA, 25 bp, Homo sapien
ctttgcccctgcaataaagcctttt

SEQ ID NO: 3701073 - DNA, 25 bp, Homo sapien
ttagcactggaaggtatgagaagaa

SEQ ID NO: 3701074 - DNA, 25 bp, Homo sapien
actttgcccctgcaataaagccttt

SEQ ID NO: 3701075 - DNA, 25 bp, Homo sapien
gaagtgccaggcattcaagattgaa

SEQ ID NO: 3701076 - DNA, 25 bp, Homo sapien
tgtacccaaggagccgatctcaatg

SEQ ID NO: 3701077 - DNA, 25 bp, Homo sapien
tgtgtccacagttataggccagtct

SEQ ID NO: 3701078 - DNA, 25 bp, Homo sapien
cagccttaccttttggcagcagatt

SEQ ID NO: 3701079 - DNA, 25 bp, Homo sapien
ctttagtggacagagcgaggcaata

SEQ ID NO: 3701080 - DNA, 25 bp, Homo sapien
cagcatttagcaaccaagaaccagg

SEQ ID NO: 3701081 - DNA, 25 bp, Homo sapien
caatatagattaagggcggagacca

SEQ ID NO: 3701082 - DNA, 25 bp, Homo sapien
ttcttactggtatcggtggactgca

SEQ ID NO: 3701083 - DNA, 25 bp, Homo sapien
ttccaaggctggattgtgcgtgtgc

SEQ ID NO: 3701084 - DNA, 25 bp, Homo sapien
tgccattgaaccagaagacaacccg

SEQ ID NO: 3701085 - DNA, 25 bp, Homo sapien
tgcccgactggacaagttcttaaat

SEQ ID NO: 3701086 - DNA, 25 bp, Homo sapien
tgttgaagctataggtaacaaggcc

SEQ ID NO: 3701087 - DNA, 25 bp, Homo sapien
gagtgacatggttagtgagaacagg

SEQ ID NO: 3701088 - DNA, 25 bp, Homo sapien
cattgcaaatgcttcagagtagctc

SEQ ID NO: 3701089 - DNA, 25 bp, Homo sapien
gcccttttctagtttgagattctat

SEQ ID NO: 3701090 - DNA, 25 bp, Homo sapien
caaaaaatgtcgcagccttcaggaa

SEQ ID NO: 3701091 - DNA, 25 bp, Homo sapien
taggtgtatgattttggcagctgca

SEQ ID NO: 3701092 - DNA, 25 bp, Homo sapien
tgtcttcagctttaggtgtatgatt

SEQ ID NO: 3701093 - DNA, 25 bp, Homo sapien
gccatgcagaccagcagatttgtgt

SEQ ID NO: 3701094 - DNA, 25 bp, Homo sapien
tctgaaggaagccttttttgaggtc

SEQ ID NO: 3701095 - DNA, 25 bp, Homo sapien
gaagccttgggtaatcaaaccctca

SEQ ID NO: 3701096 - DNA, 25 bp, Homo sapien
cattttgtctggcataaacttccca

SEQ ID NO: 3701097 - DNA, 25 bp, Homo sapien
acattcttccctctcataaactcat

SEQ ID NO: 3701098 - DNA, 25 bp, Homo sapien
cttccctctcataaactcatttatt

SEQ ID NO: 3701099 - DNA, 25 bp, Homo sapien
actcatttatttgcagtcttcgacg

SEQ ID NO: 3701100 - DNA, 25 bp, Homo sapien
tcatttatttgcagtcttcgacgca

SEQ ID NO: 3701101 - DNA, 25 bp, Homo sapien
ataatattcaattgatagagcacac

SEQ ID NO: 3701102 - DNA, 25 bp, Homo sapien
aaaagccaatatgaacactataata

SEQ ID NO: 3701103 - DNA, 25 bp, Homo sapien
tgaacctatcatccatgatttgcaa

SEQ ID NO: 3701104 - DNA, 25 bp, Homo sapien
taagctattgaatattaacgcagtt

SEQ ID NO: 3701105 - DNA, 25 bp, Homo sapien
taagatcaatagcaaggctttggtc

SEQ ID NO: 3701106 - DNA, 25 bp, Homo sapien
aagatcaatagcaaggctttggtcc

SEQ ID NO: 3701107 - DNA, 25 bp, Homo sapien
agatcaatagcaaggctttggtcca

SEQ ID NO: 3701108 - DNA, 25 bp, Homo sapien
gtaagatcaatagcaaggctttggt

SEQ ID NO: 3701109 - DNA, 25 bp, Homo sapien
tgtattaaaacagacatatatgttc

SEQ ID NO: 3701110 - DNA, 25 bp, Homo sapien
cttaaattaagcctgtgaagtaggt

SEQ ID NO: 3701111 - DNA, 25 bp, Homo sapien
ggtgttatttcaacatcttaacaga

SEQ ID NO: 3701112 - DNA, 25 bp, Homo sapien
gatcataatggatcactatgctaag

SEQ ID NO: 3701113 - DNA, 25 bp, Homo sapien
aaatgagcccaaccagtttgaaatg

SEQ ID NO: 3701114 - DNA, 25 bp, Homo sapien
accagggactgctgaatgccttttc

SEQ ID NO: 3701115 - DNA, 25 bp, Homo sapien
cagggactgctgaatgccttttcct

SEQ ID NO: 3701116 - DNA, 25 bp, Homo sapien
ccagggactgctgaatgccttttcc

SEQ ID NO: 3701117 - DNA, 25 bp, Homo sapien
catactgccggatttgcactgcaaa

SEQ ID NO: 3701118 - DNA, 25 bp, Homo sapien
tggcctccactctcagattgtctta

SEQ ID NO: 3701119 - DNA, 25 bp, Homo sapien
cactctcagattgtcttacatacac

SEQ ID NO: 3701120 - DNA, 25 bp, Homo sapien
gcaagccatactgccggatttgcac

SEQ ID NO: 3701121 - DNA, 25 bp, Homo sapien
aaaactctgctaggttgttcaggcc

SEQ ID NO: 3701122 - DNA, 25 bp, Homo sapien
gcattgacatctatattctctgagg

SEQ ID NO: 3701123 - DNA, 25 bp, Homo sapien
tgtagcaacacagcagagctctagg

SEQ ID NO: 3701124 - DNA, 25 bp, Homo sapien
gaaatatttgaagcgtctgctagct

SEQ ID NO: 3701125 - DNA, 25 bp, Homo sapien
caactggactttcatactcaccact

SEQ ID NO: 3701126 - DNA, 25 bp, Homo sapien
ataaaagggctcttatcaaagtcac

SEQ ID NO: 3701127 - DNA, 25 bp, Homo sapien
actcaccactccaataaaagggctc

SEQ ID NO: 3701128 - DNA, 25 bp, Homo sapien
cactccaataaaagggctcttatca

SEQ ID NO: 3701129 - DNA, 25 bp, Homo sapien
tggctagattttattagatccctcc

SEQ ID NO: 3701130 - DNA, 25 bp, Homo sapien
gctagattttattagatccctccac

SEQ ID NO: 3701131 - DNA, 25 bp, Homo sapien
tatatggctagattttattagatcc

SEQ ID NO: 3701132 - DNA, 25 bp, Homo sapien
tagattttattagatccctccacat

SEQ ID NO: 3701133 - DNA, 25 bp, Homo sapien
ctgattgtcgcttgcactgtctggc

SEQ ID NO: 3701134 - DNA, 25 bp, Homo sapien
gaaatgatgatgacaaagaggcaag

SEQ ID NO: 3701135 - DNA, 25 bp, Homo sapien
tgtctggcaccacagctccggctgg

SEQ ID NO: 3701136 - DNA, 25 bp, Homo sapien
tctgggtaggctgattgtcgcttgc

SEQ ID NO: 3701137 - DNA, 25 bp, Homo sapien
ctccttgcaaagtaggctctgcaag

SEQ ID NO: 3701138 - DNA, 25 bp, Homo sapien
cattccctgacccagatgggaaaag

SEQ ID NO: 3701139 - DNA, 25 bp, Homo sapien
cagctgtgatcattttttggccatt

SEQ ID NO: 3701140 - DNA, 25 bp, Homo sapien
catggacataaatttctcagctgtg

SEQ ID NO: 3701141 - DNA, 25 bp, Homo sapien
caagttttatatccttctttaattg

SEQ ID NO: 3701142 - DNA, 25 bp, Homo sapien
tactgagatctccattaagcccagg

SEQ ID NO: 3701143 - DNA, 25 bp, Homo sapien
gaaattggtttgtacgggcctctgc

SEQ ID NO: 3701144 - DNA, 25 bp, Homo sapien
cctttaggtaacacctgtgcatggg

SEQ ID NO: 3701145 - DNA, 25 bp, Homo sapien
cagggtccatacagccggtaggtta

SEQ ID NO: 3701146 - DNA, 25 bp, Homo sapien
gacaatactgggaaaaggttgcaca

SEQ ID NO: 3701147 - DNA, 25 bp, Homo sapien
cagcctgtactgatcccttgaatgc

SEQ ID NO: 3701148 - DNA, 25 bp, Homo sapien
ggacttcagggagaatggtagacat

SEQ ID NO: 3701149 - DNA, 25 bp, Homo sapien
gaatgctcctccctaatgttagtat

SEQ ID NO: 3701150 - DNA, 25 bp, Homo sapien
tgatccaacaacaaaggcccatgct

SEQ ID NO: 3701151 - DNA, 25 bp, Homo sapien
ggattcacctgaacacttcttctag

SEQ ID NO: 3701152 - DNA, 25 bp, Homo sapien
gctgctaatatctcatgggcccgtt

SEQ ID NO: 3701153 - DNA, 25 bp, Homo sapien
tagtccagtgttcagatgatccaac

SEQ ID NO: 3701154 - DNA, 25 bp, Homo sapien
tttgtcttaaggatatcttactccc

SEQ ID NO: 3701155 - DNA, 25 bp, Homo sapien
tcttccaatcccgtgaacaactgtc

SEQ ID NO: 3701156 - DNA, 25 bp, Homo sapien
ctaattatgttaatgttccacaccc

SEQ ID NO: 3701157 - DNA, 25 bp, Homo sapien
cccagagtagaggagggtatctgta

SEQ ID NO: 3701158 - DNA, 25 bp, Homo sapien
gatttccattctcaggacattcaag

SEQ ID NO: 3701159 - DNA, 25 bp, Homo sapien
catgactgctgatggagaagcaacc

SEQ ID NO: 3701160 - DNA, 25 bp, Homo sapien
tagacctgggcaaatggttcagaca

SEQ ID NO: 3701161 - DNA, 25 bp, Homo sapien
tcagacaggtggattgcagcaaaag

SEQ ID NO: 3701162 - DNA, 25 bp, Homo sapien
accctacttcgtgagttgctttgta

SEQ ID NO: 3701163 - DNA, 25 bp, Homo sapien
aggacagcaaacaatatgaatctat

SEQ ID NO: 3701164 - DNA, 25 bp, Homo sapien
cagtccaaagcctgcagggcacttc

SEQ ID NO: 3701165 - DNA, 25 bp, Homo sapien
tacctggtggacaaacagtccaaag

SEQ ID NO: 3701166 - DNA, 25 bp, Homo sapien
tcgagataatctggcacatgaaagg

SEQ ID NO: 3701167 - DNA, 25 bp, Homo sapien
tatcatgaggctaaactcccaccag

SEQ ID NO: 3701168 - DNA, 25 bp, Homo sapien
gatggaggctcagaacgcttctcag

SEQ ID NO: 3701169 - DNA, 25 bp, Homo sapien
gaattattcagtggacgcaacagct

SEQ ID NO: 3701170 - DNA, 25 bp, Homo sapien
tttattctgtgtccaacccaagaaa

SEQ ID NO: 3701171 - DNA, 25 bp, Homo sapien
ttgccccaaagcaccttagtactgg

SEQ ID NO: 3701172 - DNA, 25 bp, Homo sapien
caaaatctcaccctgcaaattgctg

SEQ ID NO: 3701173 - DNA, 25 bp, Homo sapien
ttttagaaaactgcgcattgcccca

SEQ ID NO: 3701174 - DNA, 25 bp, Homo sapien
tggatgcaggctagggtcccaagct

SEQ ID NO: 3701175 - DNA, 25 bp, Homo sapien
gaagcatgatgggttttccaggcac

SEQ ID NO: 3701176 - DNA, 25 bp, Homo sapien
taaggccatagtacgctgaagcatg

SEQ ID NO: 3701177 - DNA, 25 bp, Homo sapien
tgcatggactggcaacatattgtgg

SEQ ID NO: 3701178 - DNA, 25 bp, Homo sapien
tttgctgatattagagatcagtaag

SEQ ID NO: 3701179 - DNA, 25 bp, Homo sapien
ttgctgatattagagatcagtaagg

SEQ ID NO: 3701180 - DNA, 25 bp, Homo sapien
aattttgctgatattagagatcagt

SEQ ID NO: 3701181 - DNA, 25 bp, Homo sapien
ttttgctgatattagagatcagtaa

SEQ ID NO: 3701182 - DNA, 25 bp, Homo sapien
ggattgccagtcattattcaagaga

SEQ ID NO: 3701183 - DNA, 25 bp, Homo sapien
gatcaaaaggtatgctaacttcccc

SEQ ID NO: 3701184 - DNA, 25 bp, Homo sapien
gagtactagaactgaaactgccttt

SEQ ID NO: 3701185 - DNA, 25 bp, Homo sapien
taagccaagctagccttgggaggca

SEQ ID NO: 3701186 - DNA, 25 bp, Homo sapien
gaacatgaataagagggtggctggg

SEQ ID NO: 3701187 - DNA, 25 bp, Homo sapien
ctttagagttacaaagaatgcaaac

SEQ ID NO: 3701188 - DNA, 25 bp, Homo sapien
gatgtcctttcacctttagagttac

SEQ ID NO: 3701189 - DNA, 25 bp, Homo sapien
ccctgatgtcctttcacctttagag

SEQ ID NO: 3701190 - DNA, 25 bp, Homo sapien
tcttgagagctatcagtgcctttaa

SEQ ID NO: 3701191 - DNA, 25 bp, Homo sapien
agagcagcctcttgagagctatcag

SEQ ID NO: 3701192 - DNA, 25 bp, Homo sapien
gttgagaactgagcttacgcccacc

SEQ ID NO: 3701193 - DNA, 25 bp, Homo sapien
gtgttctattcagcaggcggttgtt

SEQ ID NO: 3701194 - DNA, 25 bp, Homo sapien
ggtcagcaggaatgctgagttgatt

SEQ ID NO: 3701195 - DNA, 25 bp, Homo sapien
atagaaagctggtcagcaggaatgc

SEQ ID NO: 3701196 - DNA, 25 bp, Homo sapien
gaaagctggtcagcaggaatgctga

SEQ ID NO: 3701197 - DNA, 25 bp, Homo sapien
atgaagtcatttggacccaagtatg

SEQ ID NO: 3701198 - DNA, 25 bp, Homo sapien
taggagcagccgtatgaactccttg

SEQ ID NO: 3701199 - DNA, 25 bp, Homo sapien
gttcaactcaacatgaaccagggaa

SEQ ID NO: 3701200 - DNA, 25 bp, Homo sapien
agctgacagtcaaatgactgcctgc

SEQ ID NO: 3701201 - DNA, 25 bp, Homo sapien
taaaagcacagaacttggttcaact

SEQ ID NO: 3701202 - DNA, 25 bp, Homo sapien
tggccactcttcagaatttagtcca

SEQ ID NO: 3701203 - DNA, 25 bp, Homo sapien
ctatatgcagcaccctcttctatct

SEQ ID NO: 3701204 - DNA, 25 bp, Homo sapien
tagctctgctcctaatatccctata

SEQ ID NO: 3701205 - DNA, 25 bp, Homo sapien
tctctacaccgaacacatcacatat

SEQ ID NO: 3701206 - DNA, 25 bp, Homo sapien
ctgtatcttatatactgtgtaggag

SEQ ID NO: 3701207 - DNA, 25 bp, Homo sapien
gtatcttatatactgtgtaggagtt

SEQ ID NO: 3701208 - DNA, 25 bp, Homo sapien
atatactgtgtaggagtttataagt

SEQ ID NO: 3701209 - DNA, 25 bp, Homo sapien
tactgtgtaggagtttataagtgca

SEQ ID NO: 3701210 - DNA, 25 bp, Homo sapien
tcataattctagacaaatcccacag

SEQ ID NO: 3701211 - DNA, 25 bp, Homo sapien
taattctagacaaatcccacagtca

SEQ ID NO: 3701212 - DNA, 25 bp, Homo sapien
acagtcagtgagatctggaatcatg

SEQ ID NO: 3701213 - DNA, 25 bp, Homo sapien
agatctggaatcatgtcagcaacca

SEQ ID NO: 3701214 - DNA, 25 bp, Homo sapien
gtcaaagtgtgatggcttatcttgc

SEQ ID NO: 3701215 - DNA, 25 bp, Homo sapien
aggatggtcaaagtgtgatggctta

SEQ ID NO: 3701216 - DNA, 25 bp, Homo sapien
gatggtcaaagtgtgatggcttatc

SEQ ID NO: 3701217 - DNA, 25 bp, Homo sapien
tggtcaaagtgtgatggcttatctt

SEQ ID NO: 3701218 - DNA, 25 bp, Homo sapien
tctcctcgagtgacaagacttacat

SEQ ID NO: 3701219 - DNA, 25 bp, Homo sapien
tagatgaatccatatttagtgtgcg

SEQ ID NO: 3701220 - DNA, 25 bp, Homo sapien
tctcgggcggaaattttcaatggat

SEQ ID NO: 3701221 - DNA, 25 bp, Homo sapien
cagtctaccatgtaacctagatgaa

SEQ ID NO: 3701222 - DNA, 25 bp, Homo sapien
tcccgacctgagaggattcacctgc

SEQ ID NO: 3701223 - DNA, 25 bp, Homo sapien
tccaacaaaggaacttgcatacttg

SEQ ID NO: 3701224 - DNA, 25 bp, Homo sapien
catatcctatgatctggcagctcca

SEQ ID NO: 3701225 - DNA, 25 bp, Homo sapien
tgcatacttgtgcagaagtgcaaga

SEQ ID NO: 3701226 - DNA, 25 bp, Homo sapien
tagagaataatacattgaataacac

SEQ ID NO: 3701227 - DNA, 25 bp, Homo sapien
taacacacaaatcagaaacattctt

SEQ ID NO: 3701228 - DNA, 25 bp, Homo sapien
atttaagctagagaataatacattg

SEQ ID NO: 3701229 - DNA, 25 bp, Homo sapien
ggcaaaggtgagaggaaaacttgag

SEQ ID NO: 3701230 - DNA, 25 bp, Homo sapien
ccttcggaagcgttggccatggaga

SEQ ID NO: 3701231 - DNA, 25 bp, Homo sapien
ggtttgagattcacagccctatgta

SEQ ID NO: 3701232 - DNA, 25 bp, Homo sapien
tgttccacgtgcctaagaagctcct

SEQ ID NO: 3701233 - DNA, 25 bp, Homo sapien
cacgtcggaaacaaatcaaggatac

SEQ ID NO: 3701234 - DNA, 25 bp, Homo sapien
cataaggggtcgaacaacaaccagg

SEQ ID NO: 3701235 - DNA, 25 bp, Homo sapien
tcaaagggcataaggggtcgaacaa

SEQ ID NO: 3701236 - DNA, 25 bp, Homo sapien
ctaagacatcaaagggcataagggg

SEQ ID NO: 3701237 - DNA, 25 bp, Homo sapien
catcaaagggcataaggggtcgaac

SEQ ID NO: 3701238 - DNA, 25 bp, Homo sapien
gctgatgttcccacagaaatgatca

SEQ ID NO: 3701239 - DNA, 25 bp, Homo sapien
tgctgatgttcccacagaaatgatc

SEQ ID NO: 3701240 - DNA, 25 bp, Homo sapien
ttgctgatgttcccacagaaatgat

SEQ ID NO: 3701241 - DNA, 25 bp, Homo sapien
ctgatgttcccacagaaatgatcat

SEQ ID NO: 3701242 - DNA, 25 bp, Homo sapien
taagatggaatcagttttcggcaga

SEQ ID NO: 3701243 - DNA, 25 bp, Homo sapien
cagttttcggcagaaattgatcaca

SEQ ID NO: 3701244 - DNA, 25 bp, Homo sapien
tcacaacggactccttggtagcctt

SEQ ID NO: 3701245 - DNA, 25 bp, Homo sapien
ttggatccgataagatggaatcagt

SEQ ID NO: 3701246 - DNA, 25 bp, Homo sapien
acaaccattgctcagaataaacgct

SEQ ID NO: 3701247 - DNA, 25 bp, Homo sapien
gaaatatagctttcagctgagttaa

SEQ ID NO: 3701248 - DNA, 25 bp, Homo sapien
tctgaggatgctttgaacatcaaca

SEQ ID NO: 3701249 - DNA, 25 bp, Homo sapien
aaacgctgcctatatattgcattag

SEQ ID NO: 3701250 - DNA, 25 bp, Homo sapien
ctatggaagctcaagttgctgcatt

SEQ ID NO: 3701251 - DNA, 25 bp, Homo sapien
agttgctgcattaagatatgaaaat

SEQ ID NO: 3701252 - DNA, 25 bp, Homo sapien
gttgctgcattaagatatgaaaatt

SEQ ID NO: 3701253 - DNA, 25 bp, Homo sapien
ttgctgcattaagatatgaaaattg

SEQ ID NO: 3701254 - DNA, 25 bp, Homo sapien
ccatcacagccaggaatatgctaag

SEQ ID NO: 3701255 - DNA, 25 bp, Homo sapien
tccacggaggggctagacgactcca

SEQ ID NO: 3701256 - DNA, 25 bp, Homo sapien
ttgccagagcttgagcctgcagact

SEQ ID NO: 3701257 - DNA, 25 bp, Homo sapien
gacgactccaagtgtttaagctgta

SEQ ID NO: 3701258 - DNA, 25 bp, Homo sapien
tgcatgtgccaccatgcccaggtaa

SEQ ID NO: 3701259 - DNA, 25 bp, Homo sapien
caaagaactaggattacatgcatgt

SEQ ID NO: 3701260 - DNA, 25 bp, Homo sapien
catgtgccaccatgcccaggtaatt

SEQ ID NO: 3701261 - DNA, 25 bp, Homo sapien
catgcatgtgccaccatgcccaggt

SEQ ID NO: 3701262 - DNA, 25 bp, Homo sapien
gacaatgatatgatcacattcctct

SEQ ID NO: 3701263 - DNA, 25 bp, Homo sapien
agcaatctaatcattctctactgaa

SEQ ID NO: 3701264 - DNA, 25 bp, Homo sapien
gcttaaggtcttttccatggatgtt

SEQ ID NO: 3701265 - DNA, 25 bp, Homo sapien
tgagcatatcaggtttatcccaggc

SEQ ID NO: 3701266 - DNA, 25 bp, Homo sapien
catgctgatatagaagtgcctctac

SEQ ID NO: 3701267 - DNA, 25 bp, Homo sapien
tctctgtatacacagtattggcaag

SEQ ID NO: 3701268 - DNA, 25 bp, Homo sapien
tgaccactcactgcaagacacattt

SEQ ID NO: 3701269 - DNA, 25 bp, Homo sapien
gctacagactactgaccaagacctt

SEQ ID NO: 3701270 - DNA, 25 bp, Homo sapien
gaggttatggtctaccctggtgtcc

SEQ ID NO: 3701271 - DNA, 25 bp, Homo sapien
gaggacaatgagtttcctgccagcc

SEQ ID NO: 3701272 - DNA, 25 bp, Homo sapien
tttgctccacttagctccaaggagg

SEQ ID NO: 3701273 - DNA, 25 bp, Homo sapien
catttttccctagagctcctgagta

SEQ ID NO: 3701274 - DNA, 25 bp, Homo sapien
tggaataagaacagattgccacact

SEQ ID NO: 3701275 - DNA, 25 bp, Homo sapien
atggaataagaacagattgccacac

SEQ ID NO: 3701276 - DNA, 25 bp, Homo sapien
cacattcactgtggtaatgctgctt

SEQ ID NO: 3701277 - DNA, 25 bp, Homo sapien
tccagagggctgcagcactttcaga

SEQ ID NO: 3701278 - DNA, 25 bp, Homo sapien
gctttgtcttggatggacattccat

SEQ ID NO: 3701279 - DNA, 25 bp, Homo sapien
tgctctatggtggacttgacaggct

SEQ ID NO: 3701280 - DNA, 25 bp, Homo sapien
tgaaaaaggccgatgtttcactgcc

SEQ ID NO: 3701281 - DNA, 25 bp, Homo sapien
tgtttcactgcccttttcactatcc

SEQ ID NO: 3701282 - DNA, 25 bp, Homo sapien
gccagtgaaaaaggccgatgtttca

SEQ ID NO: 3701283 - DNA, 25 bp, Homo sapien
ttgccagtgaaaaaggccgatgttt

SEQ ID NO: 3701284 - DNA, 25 bp, Homo sapien
tccatggaggatgcttttcactaat

SEQ ID NO: 3701285 - DNA, 25 bp, Homo sapien
tttcaaggttcagtgctgtgtatcc

SEQ ID NO: 3701286 - DNA, 25 bp, Homo sapien
cagtgctgtgtatccccctctaaaa

SEQ ID NO: 3701287 - DNA, 25 bp, Homo sapien
ggatgcttttcactaatgccctcat

SEQ ID NO: 3701288 - DNA, 25 bp, Homo sapien
tgctctcggaaaccatcctgtaagt

SEQ ID NO: 3701289 - DNA, 25 bp, Homo sapien
gttgctctcggaaaccatcctgtaa

SEQ ID NO: 3701290 - DNA, 25 bp, Homo sapien
gaaaccatcctgtaagtagactgat

SEQ ID NO: 3701291 - DNA, 25 bp, Homo sapien
tcggaaaccatcctgtaagtagact

SEQ ID NO: 3701292 - DNA, 25 bp, Homo sapien
cttacaaaagggcagtagggctgga

SEQ ID NO: 3701293 - DNA, 25 bp, Homo sapien
gaagaaatcagctgtaaaaaggccc

SEQ ID NO: 3701294 - DNA, 25 bp, Homo sapien
tgctcaggtgagttaaggtccatct

SEQ ID NO: 3701295 - DNA, 25 bp, Homo sapien
gcagagggacaacgtgatgccacaa

SEQ ID NO: 3701296 - DNA, 25 bp, Homo sapien
tcttggacgtagacccactggctag

SEQ ID NO: 3701297 - DNA, 25 bp, Homo sapien
tcctctgaggagtcaagcttggcaa

SEQ ID NO: 3701298 - DNA, 25 bp, Homo sapien
tagagcaagttatgaccccagagat

SEQ ID NO: 3701299 - DNA, 25 bp, Homo sapien
aggaactccccgtctcagatgtgca

SEQ ID NO: 3701300 - DNA, 25 bp, Homo sapien
agagaaagacttgcttctggcccca

SEQ ID NO: 3701301 - DNA, 25 bp, Homo sapien
aaggagaagggtggcccattctgct

SEQ ID NO: 3701302 - DNA, 25 bp, Homo sapien
gccaaaggagaagggtggcccattc

SEQ ID NO: 3701303 - DNA, 25 bp, Homo sapien
ctattcctctgaatggagccaaagg

SEQ ID NO: 3701304 - DNA, 25 bp, Homo sapien
attcctctgaatggagccaaaggag

SEQ ID NO: 3701305 - DNA, 25 bp, Homo sapien
cctcaaaatggacttagaatgggcc

SEQ ID NO: 3701306 - DNA, 25 bp, Homo sapien
taactgcaagacttagggtagcact

SEQ ID NO: 3701307 - DNA, 25 bp, Homo sapien
tatgtacctctcacttattcctggg

SEQ ID NO: 3701308 - DNA, 25 bp, Homo sapien
gccacagtacctgggacaagtcgtt

SEQ ID NO: 3701309 - DNA, 25 bp, Homo sapien
tcatctaagggaaggcggaagaagc

SEQ ID NO: 3701310 - DNA, 25 bp, Homo sapien
taggccattgaggaactatacacaa

SEQ ID NO: 3701311 - DNA, 25 bp, Homo sapien
tatgcttagaacctagaactgcagc

SEQ ID NO: 3701312 - DNA, 25 bp, Homo sapien
tacacaaaaggtgaggcaaacattg

SEQ ID NO: 3701313 - DNA, 25 bp, Homo sapien
ggatgtttccatcgctgcccataaa

SEQ ID NO: 3701314 - DNA, 25 bp, Homo sapien
gctctttcctcgaagaccagttcaa

SEQ ID NO: 3701315 - DNA, 25 bp, Homo sapien
ttccaaacagattgcctcatcctcg

SEQ ID NO: 3701316 - DNA, 25 bp, Homo sapien
catcctcgtcctgtttacgctgaca

SEQ ID NO: 3701317 - DNA, 25 bp, Homo sapien
ctttcttccggtttaaatgctgctc

SEQ ID NO: 3701318 - DNA, 25 bp, Homo sapien
tttcttccggtttaaatgctgctca

SEQ ID NO: 3701319 - DNA, 25 bp, Homo sapien
gagggcgtggtgtctactcactaca

SEQ ID NO: 3701320 - DNA, 25 bp, Homo sapien
gccacagctccagtcgctgaaagca

SEQ ID NO: 3701321 - DNA, 25 bp, Homo sapien
acactacctccattggctgcctctc

SEQ ID NO: 3701322 - DNA, 25 bp, Homo sapien
acactacctccattggcttcctctc

SEQ ID NO: 3701323 - DNA, 25 bp, Homo sapien
ctaatggggtccacgggagctacag

SEQ ID NO: 3701324 - DNA, 25 bp, Homo sapien
cagtcatctggggcgtggtgtctac

SEQ ID NO: 3701325 - DNA, 25 bp, Homo sapien
tggggtccacgggagctacagtcat

SEQ ID NO: 3701326 - DNA, 25 bp, Homo sapien
gctacagtcatctggggcgtggtgt

SEQ ID NO: 3701327 - DNA, 25 bp, Homo sapien
gaggtaactctaacatgaacagaca

SEQ ID NO: 3701328 - DNA, 25 bp, Homo sapien
tcaagtcaggcattagaggtaactc

SEQ ID NO: 3701329 - DNA, 25 bp, Homo sapien
tcagcataggagtcatacaatgggc

SEQ ID NO: 3701330 - DNA, 25 bp, Homo sapien
caaacagcatctgtagaacccacag

SEQ ID NO: 3701331 - DNA, 25 bp, Homo sapien
cagatgggcagtcctttgagcactt

SEQ ID NO: 3701332 - DNA, 25 bp, Homo sapien
aaaagctctgctcaagtagtgatgg

SEQ ID NO: 3701333 - DNA, 25 bp, Homo sapien
tctaaagccttgcagtccgtgttgg

SEQ ID NO: 3701334 - DNA, 25 bp, Homo sapien
gggtccctgagcaaggacagatggg

SEQ ID NO: 3701335 - DNA, 25 bp, Homo sapien
gcaccagcaaggagacaaggcctct

SEQ ID NO: 3701336 - DNA, 25 bp, Homo sapien
ccttcagcaccagcaaggagacaag

SEQ ID NO: 3701337 - DNA, 25 bp, Homo sapien
ttcagcaccagcaaggagacaaggc

SEQ ID NO: 3701338 - DNA, 25 bp, Homo sapien
cagcaccagcaaggagacaaggcct

SEQ ID NO: 3701339 - DNA, 25 bp, Homo sapien
tctgaaaggtaaaacggtacttgca

SEQ ID NO: 3701340 - DNA, 25 bp, Homo sapien
actgtttgcagatcctctgctcgga

SEQ ID NO: 3701341 - DNA, 25 bp, Homo sapien
tgcatcccttaggacatagaaatga

SEQ ID NO: 3701342 - DNA, 25 bp, Homo sapien
cggaaagataaatcttatacctggg

SEQ ID NO: 3701343 - DNA, 25 bp, Homo sapien
gcaccttggcagttttgctgactgt

SEQ ID NO: 3701344 - DNA, 25 bp, Homo sapien
caagcaccttggcagttttgctgac

SEQ ID NO: 3701345 - DNA, 25 bp, Homo sapien
tgatctgcaagcaccttggcagttt

SEQ ID NO: 3701346 - DNA, 25 bp, Homo sapien
tcttcactttgatctgcaagcacct

SEQ ID NO: 3701347 - DNA, 25 bp, Homo sapien
ttgaaaaacaaaattagaatggatg

SEQ ID NO: 3701348 - DNA, 25 bp, Homo sapien
tgtgaatttgaaaaacaaaattaga

SEQ ID NO: 3701349 - DNA, 25 bp, Homo sapien
ctgtgaatttgaaaaacaaaattag

SEQ ID NO: 3701350 - DNA, 25 bp, Homo sapien
gcttttgaagtagaatgctgcacag

SEQ ID NO: 3701351 - DNA, 25 bp, Homo sapien
tgctgcacagaacatgcccacgatg

SEQ ID NO: 3701352 - DNA, 25 bp, Homo sapien
tacatgaaattgacagcacctgcct

SEQ ID NO: 3701353 - DNA, 25 bp, Homo sapien
gacaattccaaagatgatacatgaa

SEQ ID NO: 3701354 - DNA, 25 bp, Homo sapien
gctaatatcatatggtaaggatggg

SEQ ID NO: 3701355 - DNA, 25 bp, Homo sapien
aattgatagttacaactgccacagc

SEQ ID NO: 3701356 - DNA, 25 bp, Homo sapien
gctaacacataagaagcccagtgtg

SEQ ID NO: 3701357 - DNA, 25 bp, Homo sapien
gagttgcctaggagatgtaacagct

SEQ ID NO: 3701358 - DNA, 25 bp, Homo sapien
cgcgtctggccatgattgcatttaa

SEQ ID NO: 3701359 - DNA, 25 bp, Homo sapien
accaaggctaagagacacgatataa

SEQ ID NO: 3701360 - DNA, 25 bp, Homo sapien
gcatttaatccttaacaaaattcta

SEQ ID NO: 3701361 - DNA, 25 bp, Homo sapien
cctttacactgtgattgcattgttt

SEQ ID NO: 3701362 - DNA, 25 bp, Homo sapien
ggtgtttgctggcaaacttggcgac

SEQ ID NO: 3701363 - DNA, 25 bp, Homo sapien
gcaaacttggcgactaaatcctcca

SEQ ID NO: 3701364 - DNA, 25 bp, Homo sapien
gctggcaaacttggcgactaaatcc

SEQ ID NO: 3701365 - DNA, 25 bp, Homo sapien
gtttgctggcaaacttggcgactaa

SEQ ID NO: 3701366 - DNA, 25 bp, Homo sapien
ttttgcagctggacatggctcttca

SEQ ID NO: 3701367 - DNA, 25 bp, Homo sapien
gacatggctcttcaccaagttctct

SEQ ID NO: 3701368 - DNA, 25 bp, Homo sapien
gctggatgctttgagactgtagctt

SEQ ID NO: 3701369 - DNA, 25 bp, Homo sapien
gctgctcttggatttgtttagcttg

SEQ ID NO: 3701370 - DNA, 25 bp, Homo sapien
tcatcagaaaaggcaggaaccggcc

SEQ ID NO: 3701371 - DNA, 25 bp, Homo sapien
aggaaccggccatctggatgtgcac

SEQ ID NO: 3701372 - DNA, 25 bp, Homo sapien
accggccatctggatgtgcacgtgc

SEQ ID NO: 3701373 - DNA, 25 bp, Homo sapien
gaaccggccatctggatgtgcacgt

SEQ ID NO: 3701374 - DNA, 25 bp, Homo sapien
gaaagtagggtcagttttggacagc

SEQ ID NO: 3701375 - DNA, 25 bp, Homo sapien
ccagtcaaatgaagcaggcgcatgt

SEQ ID NO: 3701376 - DNA, 25 bp, Homo sapien
ggtgcaccgaaatcaataggccagt

SEQ ID NO: 3701377 - DNA, 25 bp, Homo sapien
gctgataatcgcctggtctggaacc

SEQ ID NO: 3701378 - DNA, 25 bp, Homo sapien
gaaagacatttgttaccaggacaaa

SEQ ID NO: 3701379 - DNA, 25 bp, Homo sapien
cttatgggagaaagacatttgttac

SEQ ID NO: 3701380 - DNA, 25 bp, Homo sapien
ggagaaagacatttgttaccaggac

SEQ ID NO: 3701381 - DNA, 25 bp, Homo sapien
gacatttgttaccaggacaaaacac

SEQ ID NO: 3701382 - DNA, 25 bp, Homo sapien
gggccgacaaaacttgactccatca

SEQ ID NO: 3701383 - DNA, 25 bp, Homo sapien
tgactgggggccgacaaaacttgac

SEQ ID NO: 3701384 - DNA, 25 bp, Homo sapien
caatgcagtcacaggatgcctttcc

SEQ ID NO: 3701385 - DNA, 25 bp, Homo sapien
tctccaatgcagtcacaggatgcct

SEQ ID NO: 3701386 - DNA, 25 bp, Homo sapien
gtgtttgacagactggcttcctctg

SEQ ID NO: 3701387 - DNA, 25 bp, Homo sapien
ctgtggtgtttgacagactggcttc

SEQ ID NO: 3701388 - DNA, 25 bp, Homo sapien
tgtggtgtttgacagactggcttcc

SEQ ID NO: 3701389 - DNA, 25 bp, Homo sapien
tggtgtttgacagactggcttcctc

SEQ ID NO: 3701390 - DNA, 25 bp, Homo sapien
gattatccaagccatcatagctgtc

SEQ ID NO: 3701391 - DNA, 25 bp, Homo sapien
tgcaactttccagccaaggtaagag

SEQ ID NO: 3701392 - DNA, 25 bp, Homo sapien
tatgagacgctgacaaaaactgaac

SEQ ID NO: 3701393 - DNA, 25 bp, Homo sapien
ggctttctaggttagagcatgactg

SEQ ID NO: 3701394 - DNA, 25 bp, Homo sapien
atgctggtcccacaattccacctag

SEQ ID NO: 3701395 - DNA, 25 bp, Homo sapien
gaaggcattcctatggagcatgcca

SEQ ID NO: 3701396 - DNA, 25 bp, Homo sapien
ccttggcaaggtatcgtatcctggt

SEQ ID NO: 3701397 - DNA, 25 bp, Homo sapien
ttcttcgagttgctgatatgctggt

SEQ ID NO: 3701398 - DNA, 25 bp, Homo sapien
tatatagccagttaatgaataaatc

SEQ ID NO: 3701399 - DNA, 25 bp, Homo sapien
agctatggcattaaagacaccctcc

SEQ ID NO: 3701400 - DNA, 25 bp, Homo sapien
caaagatggcagtaagcatatatag

SEQ ID NO: 3701401 - DNA, 25 bp, Homo sapien
tggcattaaagacaccctccctaaa

SEQ ID NO: 3701402 - DNA, 25 bp, Homo sapien
tatcacagtcacactagtagtaagg

SEQ ID NO: 3701403 - DNA, 25 bp, Homo sapien
actatgggtgtgaggcagtgcgtct

SEQ ID NO: 3701404 - DNA, 25 bp, Homo sapien
tagcaccatgtgcactcagtatagc

SEQ ID NO: 3701405 - DNA, 25 bp, Homo sapien
gataagagcatctaagaccacatca

SEQ ID NO: 3701406 - DNA, 25 bp, Homo sapien
taaatctcctttcctcgactgccat

SEQ ID NO: 3701407 - DNA, 25 bp, Homo sapien
tagaggtctttccaccagacagtga

SEQ ID NO: 3701408 - DNA, 25 bp, Homo sapien
cagaaaatgggacaggtacgcagca

SEQ ID NO: 3701409 - DNA, 25 bp, Homo sapien
tgtaggctcatcctctcttactgtg

SEQ ID NO: 3701410 - DNA, 25 bp, Homo sapien
gggatatagtcttcctgacctctat

SEQ ID NO: 3701411 - DNA, 25 bp, Homo sapien
aacacaccacagctgtataggcagg

SEQ ID NO: 3701412 - DNA, 25 bp, Homo sapien
tgtataggcaggtgggatatagtct

SEQ ID NO: 3701413 - DNA, 25 bp, Homo sapien
gggtctttcaacacaccacagctgt

SEQ ID NO: 3701414 - DNA, 25 bp, Homo sapien
atttattgatgtatttcgttgggtt

SEQ ID NO: 3701415 - DNA, 25 bp, Homo sapien
tcgttctgatttggctgtgggactc

SEQ ID NO: 3701416 - DNA, 25 bp, Homo sapien
gacaaattgcgcctctcgttctgat

SEQ ID NO: 3701417 - DNA, 25 bp, Homo sapien
taagacaatcgctgactggaatact

SEQ ID NO: 3701418 - DNA, 25 bp, Homo sapien
agaattcggatctgctcctggacag

SEQ ID NO: 3701419 - DNA, 25 bp, Homo sapien
gagttttatacgaccccaccatgca

SEQ ID NO: 3701420 - DNA, 25 bp, Homo sapien
aaattttagcaagcgtaatacgcgc

SEQ ID NO: 3701421 - DNA, 25 bp, Homo sapien
gaagccttggtccacacatagcaga

SEQ ID NO: 3701422 - DNA, 25 bp, Homo sapien
tacagcatatgtgcccgcgtgagca

SEQ ID NO: 3701423 - DNA, 25 bp, Homo sapien
tatgtctactaataactcatgttcc

SEQ ID NO: 3701424 - DNA, 25 bp, Homo sapien
tctggatgacaatatgtctactaat

SEQ ID NO: 3701425 - DNA, 25 bp, Homo sapien
tctgagactttgaatttctattaag

SEQ ID NO: 3701426 - DNA, 25 bp, Homo sapien
ggaatgtgtcttccacaaagagatt

SEQ ID NO: 3701427 - DNA, 25 bp, Homo sapien
tagatgatctagacattacaaattt

SEQ ID NO: 3701428 - DNA, 25 bp, Homo sapien
aatgttcccacagatataatatttt

SEQ ID NO: 3701429 - DNA, 25 bp, Homo sapien
gaacttagatgatctagacattaca

SEQ ID NO: 3701430 - DNA, 25 bp, Homo sapien
gagaacttagatgatctagacatta

SEQ ID NO: 3701431 - DNA, 25 bp, Homo sapien
ttcagtttcaggcaagctcagtcgt

SEQ ID NO: 3701432 - DNA, 25 bp, Homo sapien
tagcacttggcgtgatgagagagaa

SEQ ID NO: 3701433 - DNA, 25 bp, Homo sapien
ggtcttctgaatgccgtagcacttg

SEQ ID NO: 3701434 - DNA, 25 bp, Homo sapien
gagaacagataccataggacctatc

SEQ ID NO: 3701435 - DNA, 25 bp, Homo sapien
tagtcacgttgctcctccgggtagt

SEQ ID NO: 3701436 - DNA, 25 bp, Homo sapien
catcctggtagtcacgttgctcctc

SEQ ID NO: 3701437 - DNA, 25 bp, Homo sapien
cacgttgctcctccgggtagtcttt

SEQ ID NO: 3701438 - DNA, 25 bp, Homo sapien
ctggtagtcacgttgctcctccggg

SEQ ID NO: 3701439 - DNA, 25 bp, Homo sapien
ggagaatgcaagaacattgtcctgc

SEQ ID NO: 3701440 - DNA, 25 bp, Homo sapien
tacagcaacttagtgctgttgagac

SEQ ID NO: 3701441 - DNA, 25 bp, Homo sapien
gagaccgtatttccaatctctggaa

SEQ ID NO: 3701442 - DNA, 25 bp, Homo sapien
agaacattgtcctgccttttgtcac

SEQ ID NO: 3701443 - DNA, 25 bp, Homo sapien
gaaacaccgtgtttggtcagtagca

SEQ ID NO: 3701444 - DNA, 25 bp, Homo sapien
gagagaggccagtaagctcacaagg

SEQ ID NO: 3701445 - DNA, 25 bp, Homo sapien
tctgatacttgacatctggcgcccc

SEQ ID NO: 3701446 - DNA, 25 bp, Homo sapien
tctagaccttgatcccacatgcagt

SEQ ID NO: 3701447 - DNA, 25 bp, Homo sapien
tgtcacccagctgagaagactcctt

SEQ ID NO: 3701448 - DNA, 25 bp, Homo sapien
cttcatagacatccaagcagctgtc

SEQ ID NO: 3701449 - DNA, 25 bp, Homo sapien
gctgagaagactccttttctgtggc

SEQ ID NO: 3701450 - DNA, 25 bp, Homo sapien
ccaagcagctgtcacccagctgaga

SEQ ID NO: 3701451 - DNA, 25 bp, Homo sapien
aaagcactcaattcaaggtgagaaa

SEQ ID NO: 3701452 - DNA, 25 bp, Homo sapien
cactcaattcaaggtgagaaactga

SEQ ID NO: 3701453 - DNA, 25 bp, Homo sapien
tcacccaaggtcctctctattggac

SEQ ID NO: 3701454 - DNA, 25 bp, Homo sapien
ggtcctctctattggacttagacaa

SEQ ID NO: 3701455 - DNA, 25 bp, Homo sapien
tgtagaaatgtgacagagttgcaga

SEQ ID NO: 3701456 - DNA, 25 bp, Homo sapien
ctgtgagagaggctacagacacttt

SEQ ID NO: 3701457 - DNA, 25 bp, Homo sapien
gctgtgagagaggctacagacactt

SEQ ID NO: 3701458 - DNA, 25 bp, Homo sapien
tgtgagagaggctacagacactttc

SEQ ID NO: 3701459 - DNA, 25 bp, Homo sapien
tggattatagggtataactatccaa

SEQ ID NO: 3701460 - DNA, 25 bp, Homo sapien
cattatcatcctcagggtggtagca

SEQ ID NO: 3701461 - DNA, 25 bp, Homo sapien
atggattatagggtataactatcca

SEQ ID NO: 3701462 - DNA, 25 bp, Homo sapien
tcatggattatagggtataactatc

SEQ ID NO: 3701463 - DNA, 25 bp, Homo sapien
tccacttgggggatcttctgagaaa

SEQ ID NO: 3701464 - DNA, 25 bp, Homo sapien
gatatatttcctaaagagttgtctc

SEQ ID NO: 3701465 - DNA, 25 bp, Homo sapien
agcagatatatttcctaaagagttg

SEQ ID NO: 3701466 - DNA, 25 bp, Homo sapien
atatttcctaaagagttgtctccac

SEQ ID NO: 3701467 - DNA, 25 bp, Homo sapien
ggagaagcctcacttagcacatgtc

SEQ ID NO: 3701468 - DNA, 25 bp, Homo sapien
tagatgtttgcaggtaggtagtccc

SEQ ID NO: 3701469 - DNA, 25 bp, Homo sapien
tgcatctgagttccctacaaaggct

SEQ ID NO: 3701470 - DNA, 25 bp, Homo sapien
tcccagggttggttaggctctcaag

SEQ ID NO: 3701471 - DNA, 25 bp, Homo sapien
gtgtgccgactcattactgccagct

SEQ ID NO: 3701472 - DNA, 25 bp, Homo sapien
caagcatgcatgtacttctcattga

SEQ ID NO: 3701473 - DNA, 25 bp, Homo sapien
tctggcaccattatggcagaggaag

SEQ ID NO: 3701474 - DNA, 25 bp, Homo sapien
caatcttgctgttggcatctattga

SEQ ID NO: 3701475 - DNA, 25 bp, Homo sapien
ccctctgaaatcttgccaccttatc

SEQ ID NO: 3701476 - DNA, 25 bp, Homo sapien
tccctctgaaatcttgccaccttat

SEQ ID NO: 3701477 - DNA, 25 bp, Homo sapien
acagatactaggaacagtaatttct

SEQ ID NO: 3701478 - DNA, 25 bp, Homo sapien
gatactaggaacagtaatttcttca

SEQ ID NO: 3701479 - DNA, 25 bp, Homo sapien
agatactaggaacagtaatttcttc

SEQ ID NO: 3701480 - DNA, 25 bp, Homo sapien
cagatactaggaacagtaatttctt

SEQ ID NO: 3701481 - DNA, 25 bp, Homo sapien
tgtattatcagtgtgattaagccac

SEQ ID NO: 3701482 - DNA, 25 bp, Homo sapien
cccatttgccacttagttgtttgtt

SEQ ID NO: 3701483 - DNA, 25 bp, Homo sapien
tctttgtggccttttaacaaagcca

SEQ ID NO: 3701484 - DNA, 25 bp, Homo sapien
cattgactagtggatgcttttgtaa

SEQ ID NO: 3701485 - DNA, 25 bp, Homo sapien
tgtagagatacaagacagcattgcc

SEQ ID NO: 3701486 - DNA, 25 bp, Homo sapien
cagctggctttagtacattgtttag

SEQ ID NO: 3701487 - DNA, 25 bp, Homo sapien
aatggtttcacagtacggtctcttg

SEQ ID NO: 3701488 - DNA, 25 bp, Homo sapien
gaattgttccctcttgtagttcaga

SEQ ID NO: 3701489 - DNA, 25 bp, Homo sapien
agtcgaccagaagggacgccgtcat

SEQ ID NO: 3701490 - DNA, 25 bp, Homo sapien
cagtcactggaagcagtcctaagct

SEQ ID NO: 3701491 - DNA, 25 bp, Homo sapien
tgaaatccccgacagcactgctgtg

SEQ ID NO: 3701492 - DNA, 25 bp, Homo sapien
gctcatgtgcgtggttggaactgca

SEQ ID NO: 3701493 - DNA, 25 bp, Homo sapien
ggagagggcagatggaaagaaggac

SEQ ID NO: 3701494 - DNA, 25 bp, Homo sapien
agagggcagatggaaagaaggacac

SEQ ID NO: 3701495 - DNA, 25 bp, Homo sapien
ttaaaggagagggcagatggaaaga

SEQ ID NO: 3701496 - DNA, 25 bp, Homo sapien
aaaggagagggcagatggaaagaag

SEQ ID NO: 3701497 - DNA, 25 bp, Homo sapien
gggaacctgaacacacactcagaga

SEQ ID NO: 3701498 - DNA, 25 bp, Homo sapien
ctaggtctgggaacctgaacacaca

SEQ ID NO: 3701499 - DNA, 25 bp, Homo sapien
caatgagtttataaatattttccgc

SEQ ID NO: 3701500 - DNA, 25 bp, Homo sapien
gagatgaagatttatgttcaatgag

SEQ ID NO: 3701501 - DNA, 25 bp, Homo sapien
ttatacatctttagttgttcgcatg

SEQ ID NO: 3701502 - DNA, 25 bp, Homo sapien
tacatctttagttgttcgcatggct

SEQ ID NO: 3701503 - DNA, 25 bp, Homo sapien
tctttagttgttcgcatggcttgtt

SEQ ID NO: 3701504 - DNA, 25 bp, Homo sapien
catctttagttgttcgcatggcttg

SEQ ID NO: 3701505 - DNA, 25 bp, Homo sapien
tacctgcttggagcacttgctccca

SEQ ID NO: 3701506 - DNA, 25 bp, Homo sapien
ctgcttggagcacttgctcccaccc

SEQ ID NO: 3701507 - DNA, 25 bp, Homo sapien
acctgcttggagcacttgctcccac

SEQ ID NO: 3701508 - DNA, 25 bp, Homo sapien
tctacctgcttggagcacttgctcc

SEQ ID NO: 3701509 - DNA, 25 bp, Homo sapien
ggactgaaatatccacaaagggtgg

SEQ ID NO: 3701510 - DNA, 25 bp, Homo sapien
gaacaatacgggaatttgagtaata

SEQ ID NO: 3701511 - DNA, 25 bp, Homo sapien
ttggtgttcttgtattagcaactgg

SEQ ID NO: 3701512 - DNA, 25 bp, Homo sapien
tcttgtattagcaactggactgaaa

SEQ ID NO: 3701513 - DNA, 25 bp, Homo sapien
caattcatttcagttaggcccaggg

SEQ ID NO: 3701514 - DNA, 25 bp, Homo sapien
acaattcatttcagttaggcccagg

SEQ ID NO: 3701515 - DNA, 25 bp, Homo sapien
ggtcgtgctgttgcgccctcctgta

SEQ ID NO: 3701516 - DNA, 25 bp, Homo sapien
caggtcgtgctgttgcgccctcctg

SEQ ID NO: 3701517 - DNA, 25 bp, Homo sapien
tcgtgctgttgcgccctcctgtagt

SEQ ID NO: 3701518 - DNA, 25 bp, Homo sapien
gtgctgttgcgccctcctgtagtcc

SEQ ID NO: 3701519 - DNA, 25 bp, Homo sapien
ttttcaattcagctgcttttgtagc

SEQ ID NO: 3701520 - DNA, 25 bp, Homo sapien
tcaccacttggtgttggttttcaat

SEQ ID NO: 3701521 - DNA, 25 bp, Homo sapien
attcagctgcttttgtagcaccaga

SEQ ID NO: 3701522 - DNA, 25 bp, Homo sapien
ggtgttggttttcaattcagctgct

SEQ ID NO: 3701523 - DNA, 25 bp, Homo sapien
gccagaagtacaataaggtgacagc

SEQ ID NO: 3701524 - DNA, 25 bp, Homo sapien
tgatgggccagaagtacaataaggt

SEQ ID NO: 3701525 - DNA, 25 bp, Homo sapien
tgggccagaagtacaataaggtgac

SEQ ID NO: 3701526 - DNA, 25 bp, Homo sapien
ccagaagtacaataaggtgacagcc

SEQ ID NO: 3701527 - DNA, 25 bp, Homo sapien
tagctagcctagcatattgcagggc

SEQ ID NO: 3701528 - DNA, 25 bp, Homo sapien
taattttaagcctatcctgggtcac

SEQ ID NO: 3701529 - DNA, 25 bp, Homo sapien
ttgaccacaagcctagtagctagcc

SEQ ID NO: 3701530 - DNA, 25 bp, Homo sapien
ccagcacatcctgactggaaaagag

SEQ ID NO: 3701531 - DNA, 25 bp, Homo sapien
gaaactcagttggatccttctcagg

SEQ ID NO: 3701532 - DNA, 25 bp, Homo sapien
gagctgggcctcgtatctcctggat

SEQ ID NO: 3701533 - DNA, 25 bp, Homo sapien
caagcaaagattgaatgactgagcg

SEQ ID NO: 3701534 - DNA, 25 bp, Homo sapien
tctcctggatccaatactttgaaca

SEQ ID NO: 3701535 - DNA, 25 bp, Homo sapien
gcagccagaggtaggacagtcctct

SEQ ID NO: 3701536 - DNA, 25 bp, Homo sapien
gacagcagccagaggtaggacagtc

SEQ ID NO: 3701537 - DNA, 25 bp, Homo sapien
gccagaggtaggacagtcctcttgt

SEQ ID NO: 3701538 - DNA, 25 bp, Homo sapien
gaggtaggacagtcctcttgtttct

SEQ ID NO: 3701539 - DNA, 25 bp, Homo sapien
tccctgtctctggattcttagtaca

SEQ ID NO: 3701540 - DNA, 25 bp, Homo sapien
caggattctgctgcaaatctctggg

SEQ ID NO: 3701541 - DNA, 25 bp, Homo sapien
gattcttagtacaaccaggattctg

SEQ ID NO: 3701542 - DNA, 25 bp, Homo sapien
tctctgggtggtcctgcattgctct

SEQ ID NO: 3701543 - DNA, 25 bp, Homo sapien
aaaactcccacttttctccttgatg

SEQ ID NO: 3701544 - DNA, 25 bp, Homo sapien
aaactcccacttttctccttgatga

SEQ ID NO: 3701545 - DNA, 25 bp, Homo sapien
ccacttttctccttgatgatccgac

SEQ ID NO: 3701546 - DNA, 25 bp, Homo sapien
ctcccacttttctccttgatgatcc

SEQ ID NO: 3701547 - DNA, 25 bp, Homo sapien
tgtattccctgttagagtctccggt

SEQ ID NO: 3701548 - DNA, 25 bp, Homo sapien
tatcaagtaataaccacacggtagt

SEQ ID NO: 3701549 - DNA, 25 bp, Homo sapien
tgagtccctcagttgaaagtgaatc

SEQ ID NO: 3701550 - DNA, 25 bp, Homo sapien
cacggtagtttgcatacaatccttg

SEQ ID NO: 3701551 - DNA, 25 bp, Homo sapien
caggctgggtaacaaagtgaaatcc

SEQ ID NO: 3701552 - DNA, 25 bp, Homo sapien
gctgggtaacaaagtgaaatcctgt

SEQ ID NO: 3701553 - DNA, 25 bp, Homo sapien
tccaggctgggtaacaaagtgaaat

SEQ ID NO: 3701554 - DNA, 25 bp, Homo sapien
ggctgggtaacaaagtgaaatcctg

SEQ ID NO: 3701555 - DNA, 25 bp, Homo sapien
tctaacatgactgagactcgctgca

SEQ ID NO: 3701556 - DNA, 25 bp, Homo sapien
gcaggagtcctgataccagtggaga

SEQ ID NO: 3701557 - DNA, 25 bp, Homo sapien
tcacaatgggttgcaacagaatggg

SEQ ID NO: 3701558 - DNA, 25 bp, Homo sapien
tgtaagagaccagtatatgcacccc

SEQ ID NO: 3701559 - DNA, 25 bp, Homo sapien
caaaattacttaggtcaacgcctca

SEQ ID NO: 3701560 - DNA, 25 bp, Homo sapien
ttggaattgttaacccctgtgccta

SEQ ID NO: 3701561 - DNA, 25 bp, Homo sapien
gtaccttagccagtgtatacacaga

SEQ ID NO: 3701562 - DNA, 25 bp, Homo sapien
tctcagcgaacagacataggtaaca

SEQ ID NO: 3701563 - DNA, 25 bp, Homo sapien
tggggtgcagctgtccacgtgaaca

SEQ ID NO: 3701564 - DNA, 25 bp, Homo sapien
gctgtccacgtgaacaaattgtctg

SEQ ID NO: 3701565 - DNA, 25 bp, Homo sapien
cagctgtccacgtgaacaaattgtc

SEQ ID NO: 3701566 - DNA, 25 bp, Homo sapien
caaattgtctggaagaatgatagca

SEQ ID NO: 3701567 - DNA, 25 bp, Homo sapien
cagggttcctcgcttggcaggctct

SEQ ID NO: 3701568 - DNA, 25 bp, Homo sapien
ctatttcacgaggagttcatctagt

SEQ ID NO: 3701569 - DNA, 25 bp, Homo sapien
cagctcattgcagtaggtgttcacc

SEQ ID NO: 3701570 - DNA, 25 bp, Homo sapien
agttcatcctcgctgctagtgtgca

SEQ ID NO: 3701571 - DNA, 25 bp, Homo sapien
tgatattttcagtgggagcccatca

SEQ ID NO: 3701572 - DNA, 25 bp, Homo sapien
tgtcagccctggttgttgctcagag

SEQ ID NO: 3701573 - DNA, 25 bp, Homo sapien
taccagtcggtgtgttctgagggaa

SEQ ID NO: 3701574 - DNA, 25 bp, Homo sapien
tacaaagaatggaggtgtaccagtc

SEQ ID NO: 3701575 - DNA, 25 bp, Homo sapien
catgaagtcaggtacagaaattcct

SEQ ID NO: 3701576 - DNA, 25 bp, Homo sapien
tcttgtcagcaatgaacacgttttg

SEQ ID NO: 3701577 - DNA, 25 bp, Homo sapien
tatgcttcccttgtatagcctcagc

SEQ ID NO: 3701578 - DNA, 25 bp, Homo sapien
gttaactctggcaacaactcatctg

SEQ ID NO: 3701579 - DNA, 25 bp, Homo sapien
attgtggggagaaaagttagtctga

SEQ ID NO: 3701580 - DNA, 25 bp, Homo sapien
aaagttagtctgagctaaatcactg

SEQ ID NO: 3701581 - DNA, 25 bp, Homo sapien
gggagaaaagttagtctgagctaaa

SEQ ID NO: 3701582 - DNA, 25 bp, Homo sapien
gaaaagttagtctgagctaaatcac

SEQ ID NO: 3701583 - DNA, 25 bp, Homo sapien
agggctgcaggcttgttccatatcc

SEQ ID NO: 3701584 - DNA, 25 bp, Homo sapien
gatctctggggagacctgtcatcca

SEQ ID NO: 3701585 - DNA, 25 bp, Homo sapien
ttcccctgccagatacaggtcccac

SEQ ID NO: 3701586 - DNA, 25 bp, Homo sapien
tgcaggcttgttccatatcctcttc

SEQ ID NO: 3701587 - DNA, 25 bp, Homo sapien
tttaccagccattccatctctgctt

SEQ ID NO: 3701588 - DNA, 25 bp, Homo sapien
tctctgctttcccagtcacttctac

SEQ ID NO: 3701589 - DNA, 25 bp, Homo sapien
catctgcaaatttgacccaccagtc

SEQ ID NO: 3701590 - DNA, 25 bp, Homo sapien
caaatttgacccaccagtcagcttt

SEQ ID NO: 3701591 - DNA, 25 bp, Homo sapien
tataacacgctctttctcgggaaac

SEQ ID NO: 3701592 - DNA, 25 bp, Homo sapien
gatggtaagattctaaaaggacagg

SEQ ID NO: 3701593 - DNA, 25 bp, Homo sapien
tatgtcctgccaaatcgatggagta

SEQ ID NO: 3701594 - DNA, 25 bp, Homo sapien
gaaatagaggatccaatgcaacaga

SEQ ID NO: 3701595 - DNA, 25 bp, Homo sapien
cttgagatgccagttgagtggctca

SEQ ID NO: 3701596 - DNA, 25 bp, Homo sapien
gctgatgatgtagctctaagtttgc

SEQ ID NO: 3701597 - DNA, 25 bp, Homo sapien
agcaagctggagaccttgagatgcc

SEQ ID NO: 3701598 - DNA, 25 bp, Homo sapien
gaaagctgatgatgtagctctaagt

SEQ ID NO: 3701599 - DNA, 25 bp, Homo sapien
ttaggggaattggcttacacagtta

SEQ ID NO: 3701600 - DNA, 25 bp, Homo sapien
gggaattggcttacacagttatgga

SEQ ID NO: 3701601 - DNA, 25 bp, Homo sapien
tagatatatcagaggaggtttatta

SEQ ID NO: 3701602 - DNA, 25 bp, Homo sapien
gaattggcttacacagttatggagg

SEQ ID NO: 3701603 - DNA, 25 bp, Homo sapien
ctgacaggtttataggtgtggtagt

SEQ ID NO: 3701604 - DNA, 25 bp, Homo sapien
tgacaggtttataggtgtggtagtt

SEQ ID NO: 3701605 - DNA, 25 bp, Homo sapien
tatttcttaaatcctgttcttcatc

SEQ ID NO: 3701606 - DNA, 25 bp, Homo sapien
ttaagctactgttaacttagctttc

SEQ ID NO: 3701607 - DNA, 25 bp, Homo sapien
taagctactgttaacttagctttct

SEQ ID NO: 3701608 - DNA, 25 bp, Homo sapien
ctctatttcttaaatcctgttcttc

SEQ ID NO: 3701609 - DNA, 25 bp, Homo sapien
tccacagtcttatttggtttcttgc

SEQ ID NO: 3701610 - DNA, 25 bp, Homo sapien
ggttggttaatatccacagtcttat

SEQ ID NO: 3701611 - DNA, 25 bp, Homo sapien
ttgggttggttaatatccacagtct

SEQ ID NO: 3701612 - DNA, 25 bp, Homo sapien
cacagtcttatttggtttcttgcct

SEQ ID NO: 3701613 - DNA, 25 bp, Homo sapien
ctgcagatgttcttatgcacccatg

SEQ ID NO: 3701614 - DNA, 25 bp, Homo sapien
gatgttcttatgcacccatgcctgg

SEQ ID NO: 3701615 - DNA, 25 bp, Homo sapien
cactgatgtgatgatgcttcactcc

SEQ ID NO: 3701616 - DNA, 25 bp, Homo sapien
catgggctctgacgcaggccagtgc

SEQ ID NO: 3701617 - DNA, 25 bp, Homo sapien
gggtagcaagaatatagccgtggcc

SEQ ID NO: 3701618 - DNA, 25 bp, Homo sapien
tcatcccacagctaaggactgggca

SEQ ID NO: 3701619 - DNA, 25 bp, Homo sapien
tcccctgtccaagaaattctccaaa

SEQ ID NO: 3701620 - DNA, 25 bp, Homo sapien
ccgtggcctatgaagtggtcactct

SEQ ID NO: 3701621 - DNA, 25 bp, Homo sapien
gcttctccaagattgaccaagtcat

SEQ ID NO: 3701622 - DNA, 25 bp, Homo sapien
tcttgaatcaccagtaattgcttct

SEQ ID NO: 3701623 - DNA, 25 bp, Homo sapien
tgaatcaccagtaattgcttctgat

SEQ ID NO: 3701624 - DNA, 25 bp, Homo sapien
agcttcctgcatttcaggtgttggt

SEQ ID NO: 3701625 - DNA, 25 bp, Homo sapien
cttggtgacccttgcaaatgccagg

SEQ ID NO: 3701626 - DNA, 25 bp, Homo sapien
ttggtgacccttgcaaatgccagga

SEQ ID NO: 3701627 - DNA, 25 bp, Homo sapien
tgtcccttggtgacccttgcaaatg

SEQ ID NO: 3701628 - DNA, 25 bp, Homo sapien
cccttggtgacccttgcaaatgcca

SEQ ID NO: 3701629 - DNA, 25 bp, Homo sapien
ttggggacatgtaaaccttcttcta

SEQ ID NO: 3701630 - DNA, 25 bp, Homo sapien
tggggacatgtaaaccttcttctac

SEQ ID NO: 3701631 - DNA, 25 bp, Homo sapien
aaaaacacagattgacctgaatata

SEQ ID NO: 3701632 - DNA, 25 bp, Homo sapien
aaaacacagattgacctgaatatac

SEQ ID NO: 3701633 - DNA, 25 bp, Homo sapien
aaacacagattgacctgaatataca

SEQ ID NO: 3701634 - DNA, 25 bp, Homo sapien
tcatcagaagtgcacgtagcatgac

SEQ ID NO: 3701635 - DNA, 25 bp, Homo sapien
ggctgaagacaatggcaatatctgt

SEQ ID NO: 3701636 - DNA, 25 bp, Homo sapien
gatgggcaaggagaccgcagagtgt

SEQ ID NO: 3701637 - DNA, 25 bp, Homo sapien
gtgttggagtatcatggctgaagac

SEQ ID NO: 3701638 - DNA, 25 bp, Homo sapien
tctttgctttccgatcctggtgcat

SEQ ID NO: 3701639 - DNA, 25 bp, Homo sapien
ggttctttgctttccgatcctggtg

SEQ ID NO: 3701640 - DNA, 25 bp, Homo sapien
ctgtgaggaaaccagggtgacccgg

SEQ ID NO: 3701641 - DNA, 25 bp, Homo sapien
acctgaatagccactacctgagtac

SEQ ID NO: 3701642 - DNA, 25 bp, Homo sapien
cattcttgcattccggcaggacttt

SEQ ID NO: 3701643 - DNA, 25 bp, Homo sapien
tggcattcttgcattccggcaggac

SEQ ID NO: 3701644 - DNA, 25 bp, Homo sapien
tcttgcattccggcaggactttgtc

SEQ ID NO: 3701645 - DNA, 25 bp, Homo sapien
ggcattcttgcattccggcaggact

SEQ ID NO: 3701646 - DNA, 25 bp, Homo sapien
gctgtgggtcaacccacctgcatct

SEQ ID NO: 3701647 - DNA, 25 bp, Homo sapien
aggctgtgggtcaacccacctgcat

SEQ ID NO: 3701648 - DNA, 25 bp, Homo sapien
gaggctgtgggtcaacccacctgca

SEQ ID NO: 3701649 - DNA, 25 bp, Homo sapien
ggctgtgggtcaacccacctgcatc

SEQ ID NO: 3701650 - DNA, 25 bp, Homo sapien
tcttcttctggtactggaaccactc

SEQ ID NO: 3701651 - DNA, 25 bp, Homo sapien
tcctgcttgtagaaactcaggcacc

SEQ ID NO: 3701652 - DNA, 25 bp, Homo sapien
gatgaataagtatcctgcttgtaga

SEQ ID NO: 3701653 - DNA, 25 bp, Homo sapien
tactggaaccactctatataaattg

SEQ ID NO: 3701654 - DNA, 25 bp, Homo sapien
cacagatacctcaatgggctgctgc

SEQ ID NO: 3701655 - DNA, 25 bp, Homo sapien
cagatacctcaatgggctgctgcct

SEQ ID NO: 3701656 - DNA, 25 bp, Homo sapien
ttccacagatacctcaatgggctgc

SEQ ID NO: 3701657 - DNA, 25 bp, Homo sapien
agatacctcaatgggctgctgcctc

SEQ ID NO: 3701658 - DNA, 25 bp, Homo sapien
gcccaggtaagactataaccatatt

SEQ ID NO: 3701659 - DNA, 25 bp, Homo sapien
gattagtaatcttgtcacaataaac

SEQ ID NO: 3701660 - DNA, 25 bp, Homo sapien
gggattagtaatcttgtcacaataa

SEQ ID NO: 3701661 - DNA, 25 bp, Homo sapien
caggtaagactataaccatattcta

SEQ ID NO: 3701662 - DNA, 25 bp, Homo sapien
tcactggccattactgtttgtgggt

SEQ ID NO: 3701663 - DNA, 25 bp, Homo sapien
ctggccattactgtttgtgggtatc

SEQ ID NO: 3701664 - DNA, 25 bp, Homo sapien
tactgtttgtgggtatcttccccaa

SEQ ID NO: 3701665 - DNA, 25 bp, Homo sapien
cattactgtttgtgggtatcttccc

SEQ ID NO: 3701666 - DNA, 25 bp, Homo sapien
aagatctcaaaattgggacttcacg

SEQ ID NO: 3701667 - DNA, 25 bp, Homo sapien
tcacattaaaagatctcaaaattgg

SEQ ID NO: 3701668 - DNA, 25 bp, Homo sapien
tctcaaaattgggacttcacgccgc

SEQ ID NO: 3701669 - DNA, 25 bp, Homo sapien
tcaaaattgggacttcacgccgcat

SEQ ID NO: 3701670 - DNA, 25 bp, Homo sapien
cctgtcatgaattgtggcttgttcc

SEQ ID NO: 3701671 - DNA, 25 bp, Homo sapien
tcttcagtaagtagcctgtcatgaa

SEQ ID NO: 3701672 - DNA, 25 bp, Homo sapien
taagtagcctgtcatgaattgtggc

SEQ ID NO: 3701673 - DNA, 25 bp, Homo sapien
catgaattgtggcttgttccctttc

SEQ ID NO: 3701674 - DNA, 25 bp, Homo sapien
aatattctcaatacctgtcagcaca

SEQ ID NO: 3701675 - DNA, 25 bp, Homo sapien
gcatcaaatccctcacagctatgga

SEQ ID NO: 3701676 - DNA, 25 bp, Homo sapien
aaaagtttggcctcgtcatccttag

SEQ ID NO: 3701677 - DNA, 25 bp, Homo sapien
ccaaggaacaatgcacctgtgcctc

SEQ ID NO: 3701678 - DNA, 25 bp, Homo sapien
tatgataagactatgttagctttat

SEQ ID NO: 3701679 - DNA, 25 bp, Homo sapien
caaattaattggacaaatatctagg

SEQ ID NO: 3701680 - DNA, 25 bp, Homo sapien
tttcaaattaattggacaaatatct

SEQ ID NO: 3701681 - DNA, 25 bp, Homo sapien
catatgataagactatgttagcttt

SEQ ID NO: 3701682 - DNA, 25 bp, Homo sapien
tttatgggatccttatgcagaggcc

SEQ ID NO: 3701683 - DNA, 25 bp, Homo sapien
cacaaagttttatgggatccttatg

SEQ ID NO: 3701684 - DNA, 25 bp, Homo sapien
agttttatgggatccttatgcagag

SEQ ID NO: 3701685 - DNA, 25 bp, Homo sapien
atgctaatttacttggtatcatttc

SEQ ID NO: 3701686 - DNA, 25 bp, Homo sapien
tttaagtaagatgccctgaagcttc

SEQ ID NO: 3701687 - DNA, 25 bp, Homo sapien
ttctatacctcttgaagttgcattc

SEQ ID NO: 3701688 - DNA, 25 bp, Homo sapien
tgcattcctctgctatacaattaac

SEQ ID NO: 3701689 - DNA, 25 bp, Homo sapien
gacaccattcaccaacataatcatc

SEQ ID NO: 3701690 - DNA, 25 bp, Homo sapien
tactgggaaggtgataaggatatct

SEQ ID NO: 3701691 - DNA, 25 bp, Homo sapien
tgggaaggtgataaggatatctgta

SEQ ID NO: 3701692 - DNA, 25 bp, Homo sapien
atactgggaaggtgataaggatatc

SEQ ID NO: 3701693 - DNA, 25 bp, Homo sapien
actgggaaggtgataaggatatctg

SEQ ID NO: 3701694 - DNA, 25 bp, Homo sapien
cagccacacataactgtagagttca

SEQ ID NO: 3701695 - DNA, 25 bp, Homo sapien
tctgcaaagtgtttttgcctagtag

SEQ ID NO: 3701696 - DNA, 25 bp, Homo sapien
agtgtttttgcctagtagtcttggg

SEQ ID NO: 3701697 - DNA, 25 bp, Homo sapien
tgcagctgaatggaccaacatttcc

SEQ ID NO: 3701698 - DNA, 25 bp, Homo sapien
agcacagctgaacatagacactcac

SEQ ID NO: 3701699 - DNA, 25 bp, Homo sapien
gagcacagctgaacatagacactca

SEQ ID NO: 3701700 - DNA, 25 bp, Homo sapien
tttccatggctggacctgtaggagc

SEQ ID NO: 3701701 - DNA, 25 bp, Homo sapien
agctgtttccatggctggacctgta

SEQ ID NO: 3701702 - DNA, 25 bp, Homo sapien
ccatggctggacctgtaggagcctg

SEQ ID NO: 3701703 - DNA, 25 bp, Homo sapien
tgtttccatggctggacctgtagga

SEQ ID NO: 3701704 - DNA, 25 bp, Homo sapien
aagcccacttaggcagcagcctcat

SEQ ID NO: 3701705 - DNA, 25 bp, Homo sapien
gaagcccacttaggcagcagcctca

SEQ ID NO: 3701706 - DNA, 25 bp, Homo sapien
caggaagcccacttaggcagcagcc

SEQ ID NO: 3701707 - DNA, 25 bp, Homo sapien
aggaagcccacttaggcagcagcct

SEQ ID NO: 3701708 - DNA, 25 bp, Homo sapien
aagcttggtggtcgtggcaggagtc

SEQ ID NO: 3701709 - DNA, 25 bp, Homo sapien
ctttgagaaagcttggtggtcgtgg

SEQ ID NO: 3701710 - DNA, 25 bp, Homo sapien
cttggtggtcgtggcaggagtcttc

SEQ ID NO: 3701711 - DNA, 25 bp, Homo sapien
agaaagcttggtggtcgtggcagga

SEQ ID NO: 3701712 - DNA, 25 bp, Homo sapien
ttgtattgggccataatcccagtgg

SEQ ID NO: 3701713 - DNA, 25 bp, Homo sapien
cccagtggtggagctttcaaagaaa

SEQ ID NO: 3701714 - DNA, 25 bp, Homo sapien
tctggattggttagattctaggaca

SEQ ID NO: 3701715 - DNA, 25 bp, Homo sapien
tctgtgtggtctcttgaagtggacc

SEQ ID NO: 3701716 - DNA, 25 bp, Homo sapien
ggtcattgtaccaacaccaaacata

SEQ ID NO: 3701717 - DNA, 25 bp, Homo sapien
gaggtcattgtaccaacaccaaaca

SEQ ID NO: 3701718 - DNA, 25 bp, Homo sapien
gggtggagaggtcattgtaccaaca

SEQ ID NO: 3701719 - DNA, 25 bp, Homo sapien
ggagaggtcattgtaccaacaccaa

SEQ ID NO: 3701720 - DNA, 25 bp, Homo sapien
cctcatgggcgggttctgccccact

SEQ ID NO: 3701721 - DNA, 25 bp, Homo sapien
ctcctcatgggcgggttctgcccca

SEQ ID NO: 3701722 - DNA, 25 bp, Homo sapien
catgggcgggttctgccccacttcc

SEQ ID NO: 3701723 - DNA, 25 bp, Homo sapien
tcatgggcgggttctgccccacttc

SEQ ID NO: 3701724 - DNA, 25 bp, Homo sapien
cctctgcatgcctagtttgagtttc

SEQ ID NO: 3701725 - DNA, 25 bp, Homo sapien
gaagaaggtttgctcctgaggatgc

SEQ ID NO: 3701726 - DNA, 25 bp, Homo sapien
tctctctgaacttcccaatttcccc

SEQ ID NO: 3701727 - DNA, 25 bp, Homo sapien
ttttcttctgcattcgcaccctctg

SEQ ID NO: 3701728 - DNA, 25 bp, Homo sapien
aggccaaaattatccctggaggatc

SEQ ID NO: 3701729 - DNA, 25 bp, Homo sapien
gtgcagaattgcaggccaaaattat

SEQ ID NO: 3701730 - DNA, 25 bp, Homo sapien
acagtgcagaattgcaggccaaaat

SEQ ID NO: 3701731 - DNA, 25 bp, Homo sapien
caggccaaaattatccctggaggat

SEQ ID NO: 3701732 - DNA, 25 bp, Homo sapien
aacctgacattgctggttgacccag

SEQ ID NO: 3701733 - DNA, 25 bp, Homo sapien
tagcaatgtccaagaaagctttcac

SEQ ID NO: 3701734 - DNA, 25 bp, Homo sapien
catggcccaaccgaaacctgacatt

SEQ ID NO: 3701735 - DNA, 25 bp, Homo sapien
cacctctgactcctacgattgactg

SEQ ID NO: 3701736 - DNA, 25 bp, Homo sapien
tcagagatcccaatggggagtccac

SEQ ID NO: 3701737 - DNA, 25 bp, Homo sapien
atcagagatcccaatggggagtcca

SEQ ID NO: 3701738 - DNA, 25 bp, Homo sapien
catcagagatcccaatggggagtcc

SEQ ID NO: 3701739 - DNA, 25 bp, Homo sapien
ccttgaatttctcatgctgtctgtg

SEQ ID NO: 3701740 - DNA, 25 bp, Homo sapien
tgattgtgctttccaccctgcgtgg

SEQ ID NO: 3701741 - DNA, 25 bp, Homo sapien
caggcatgtcctttgtacagctcca

SEQ ID NO: 3701742 - DNA, 25 bp, Homo sapien
gtggctgctctcctacccaacgaag

SEQ ID NO: 3701743 - DNA, 25 bp, Homo sapien
tgtctgggcttgaacagagaaaagc

SEQ ID NO: 3701744 - DNA, 25 bp, Homo sapien
aaattcatcttgtcgctggtggcaa

SEQ ID NO: 3701745 - DNA, 25 bp, Homo sapien
tgcagccgctgttcggatcacagta

SEQ ID NO: 3701746 - DNA, 25 bp, Homo sapien
gaaaagcatcagcaaggctcttgtt

SEQ ID NO: 3701747 - DNA, 25 bp, Homo sapien
tccctctagtccttcactagttaga

SEQ ID NO: 3701748 - DNA, 25 bp, Homo sapien
cttccctctagtccttcactagtta

SEQ ID NO: 3701749 - DNA, 25 bp, Homo sapien
cactagttagaaaaccaaaggccag

SEQ ID NO: 3701750 - DNA, 25 bp, Homo sapien
tagaaaaccaaaggccagagccctg

SEQ ID NO: 3701751 - DNA, 25 bp, Homo sapien
ggtgttgaggccttcttagctggca

SEQ ID NO: 3701752 - DNA, 25 bp, Homo sapien
gctggcagtgtacgttttctgaaac

SEQ ID NO: 3701753 - DNA, 25 bp, Homo sapien
ggacatttgggtgttgaggccttct

SEQ ID NO: 3701754 - DNA, 25 bp, Homo sapien
tcttagctggcagtgtacgttttct

SEQ ID NO: 3701755 - DNA, 25 bp, Homo sapien
gaatgacatgggcttcaatttcagg

SEQ ID NO: 3701756 - DNA, 25 bp, Homo sapien
gaagtgaatgacatgggcttcaatt

SEQ ID NO: 3701757 - DNA, 25 bp, Homo sapien
ccttgagcctttgcatgagaagtga

SEQ ID NO: 3701758 - DNA, 25 bp, Homo sapien
ggagccttgagcctttgcatgagaa

SEQ ID NO: 3701759 - DNA, 25 bp, Homo sapien
aggtcccatgacctcttgtgtctta

SEQ ID NO: 3701760 - DNA, 25 bp, Homo sapien
ggtcccatgacctcttgtgtcttag

SEQ ID NO: 3701761 - DNA, 25 bp, Homo sapien
cccatgacctcttgtgtcttagcag

SEQ ID NO: 3701762 - DNA, 25 bp, Homo sapien
atgacctcttgtgtcttagcagcaa

SEQ ID NO: 3701763 - DNA, 25 bp, Homo sapien
ctggagcaaccttcagtttggcaga

SEQ ID NO: 3701764 - DNA, 25 bp, Homo sapien
tggcctggagcaaccttcagtttgg

SEQ ID NO: 3701765 - DNA, 25 bp, Homo sapien
ggagcaaccttcagtttggcagaag

SEQ ID NO: 3701766 - DNA, 25 bp, Homo sapien
gtggcctggagcaaccttcagtttg

SEQ ID NO: 3701767 - DNA, 25 bp, Homo sapien
gactgcttccctacttgggaagaac

SEQ ID NO: 3701768 - DNA, 25 bp, Homo sapien
acattggatcttgtctgtctgagcc

SEQ ID NO: 3701769 - DNA, 25 bp, Homo sapien
ttgggaagaacattggatcttgtct

SEQ ID NO: 3701770 - DNA, 25 bp, Homo sapien
agcagactgcttccctacttgggaa

SEQ ID NO: 3701771 - DNA, 25 bp, Homo sapien
ccaatggctatcactagcgcacggg

SEQ ID NO: 3701772 - DNA, 25 bp, Homo sapien
tcttctgaggccaatggctatcact

SEQ ID NO: 3701773 - DNA, 25 bp, Homo sapien
tctgaggccaatggctatcactagc

SEQ ID NO: 3701774 - DNA, 25 bp, Homo sapien
gaggccaatggctatcactagcgca

SEQ ID NO: 3701775 - DNA, 25 bp, Homo sapien
gatcctacccttcaatgcaaggtga

SEQ ID NO: 3701776 - DNA, 25 bp, Homo sapien
tgacagctcagtcctgtgacttggg

SEQ ID NO: 3701777 - DNA, 25 bp, Homo sapien
cctcctcactgcttggtacttgctg

SEQ ID NO: 3701778 - DNA, 25 bp, Homo sapien
gcttggtacttgctgcttgctgtct

SEQ ID NO: 3701779 - DNA, 25 bp, Homo sapien
tgatgggccaccctagctgtttcct

SEQ ID NO: 3701780 - DNA, 25 bp, Homo sapien
tgatgatgggccaccctagctgttt

SEQ ID NO: 3701781 - DNA, 25 bp, Homo sapien
tctgatgatgggccaccctagctgt

SEQ ID NO: 3701782 - DNA, 25 bp, Homo sapien
gatctgatgatgggccaccctagct

SEQ ID NO: 3701783 - DNA, 25 bp, Homo sapien
gataattaatgagttgggctatcac

SEQ ID NO: 3701784 - DNA, 25 bp, Homo sapien
cttgtcttttgtattgatcagtatc

SEQ ID NO: 3701785 - DNA, 25 bp, Homo sapien
tccatgaatacctgagtttttcaaa

SEQ ID NO: 3701786 - DNA, 25 bp, Homo sapien
catgcctctaaggaatttccatgaa

SEQ ID NO: 3701787 - DNA, 25 bp, Homo sapien
gaagacttgatctgctagctccagc

SEQ ID NO: 3701788 - DNA, 25 bp, Homo sapien
gatgctgagtaacgacaacttcccc

SEQ ID NO: 3701789 - DNA, 25 bp, Homo sapien
ttccaaatggatgctgagtaacgac

SEQ ID NO: 3701790 - DNA, 25 bp, Homo sapien
ggattgaagacttgatctgctagct

SEQ ID NO: 3701791 - DNA, 25 bp, Homo sapien
gcagtgccagcaacttgacattctg

SEQ ID NO: 3701792 - DNA, 25 bp, Homo sapien
tggtgctgtcaactggagtcttgtt

SEQ ID NO: 3701793 - DNA, 25 bp, Homo sapien
tgctagggcccatccagcacttcta

SEQ ID NO: 3701794 - DNA, 25 bp, Homo sapien
tctgagtgaagccttgctagggccc

SEQ ID NO: 3701795 - DNA, 25 bp, Homo sapien
ctgtcatctgtgaacgtgactggag

SEQ ID NO: 3701796 - DNA, 25 bp, Homo sapien
tgaacgtgactggagatgccaaggc

SEQ ID NO: 3701797 - DNA, 25 bp, Homo sapien
tgccaaggctttcctcgacttctgc

SEQ ID NO: 3701798 - DNA, 25 bp, Homo sapien
tctgtgaacgtgactggagatgcca

SEQ ID NO: 3701799 - DNA, 25 bp, Homo sapien
ggctcttttggctcaacccaaagtg

SEQ ID NO: 3701800 - DNA, 25 bp, Homo sapien
gagggggctcttttggctcaaccca

SEQ ID NO: 3701801 - DNA, 25 bp, Homo sapien
tggctcaacccaaagtgtctggcac

SEQ ID NO: 3701802 - DNA, 25 bp, Homo sapien
tttggctcaacccaaagtgtctggc

SEQ ID NO: 3701803 - DNA, 25 bp, Homo sapien
aagaaaatctaactgtgctatgtcc

SEQ ID NO: 3701804 - DNA, 25 bp, Homo sapien
agaaaatctaactgtgctatgtcct

SEQ ID NO: 3701805 - DNA, 25 bp, Homo sapien
aaatgccagccagagagtgaatttt

SEQ ID NO: 3701806 - DNA, 25 bp, Homo sapien
ccaacctgtcctttaaattcttcag

SEQ ID NO: 3701807 - DNA, 25 bp, Homo sapien
taaattcttcaggacctgtccactt

SEQ ID NO: 3701808 - DNA, 25 bp, Homo sapien
agccagagagtgaattttctacacc

SEQ ID NO: 3701809 - DNA, 25 bp, Homo sapien
taatctggcagtggctacggtatgc

SEQ ID NO: 3701810 - DNA, 25 bp, Homo sapien
tggcaagagcccctacagggaggct

SEQ ID NO: 3701811 - DNA, 25 bp, Homo sapien
cagagctcctagttgcaccagatgt

SEQ ID NO: 3701812 - DNA, 25 bp, Homo sapien
ggtcgcatagagaggagagcaccct

SEQ ID NO: 3701813 - DNA, 25 bp, Homo sapien
tgaactgccccgcaacagggaggct

SEQ ID NO: 3701814 - DNA, 25 bp, Homo sapien
aactgccccgcaacagggaggcttc

SEQ ID NO: 3701815 - DNA, 25 bp, Homo sapien
ctgaactgccccgcaacagggaggc

SEQ ID NO: 3701816 - DNA, 25 bp, Homo sapien
tcataatttaatcatcgtcatttca

SEQ ID NO: 3701817 - DNA, 25 bp, Homo sapien
ttatctagggtgactcttgtgccag

SEQ ID NO: 3701818 - DNA, 25 bp, Homo sapien
taatcatcgtcatttcatttgtgaa

SEQ ID NO: 3701819 - DNA, 25 bp, Homo sapien
gagaagttattatctagggtgactc

SEQ ID NO: 3701820 - DNA, 25 bp, Homo sapien
gccaataattgggtgtttgccatga

SEQ ID NO: 3701821 - DNA, 25 bp, Homo sapien
gaggcaatatccatgccagcaatct

SEQ ID NO: 3701822 - DNA, 25 bp, Homo sapien
agcaatctgcagatgggagatctca

SEQ ID NO: 3701823 - DNA, 25 bp, Homo sapien
agaggcaatatccatgccagcaatc

SEQ ID NO: 3701824 - DNA, 25 bp, Homo sapien
agaagggctaaagggactcaggatt

SEQ ID NO: 3701825 - DNA, 25 bp, Homo sapien
tcaggattgtctggggaggatactc

SEQ ID NO: 3701826 - DNA, 25 bp, Homo sapien
taagaagggctaaagggactcagga

SEQ ID NO: 3701827 - DNA, 25 bp, Homo sapien
actcaggattgtctggggaggatac

SEQ ID NO: 3701828 - DNA, 25 bp, Homo sapien
agtggtagccatgtcagaagtctga

SEQ ID NO: 3701829 - DNA, 25 bp, Homo sapien
aggcctgagaagctagcttggcatc

SEQ ID NO: 3701830 - DNA, 25 bp, Homo sapien
ggttagcacaactgcatcgtctgag

SEQ ID NO: 3701831 - DNA, 25 bp, Homo sapien
tctgacatgatcaagggttagcaca

SEQ ID NO: 3701832 - DNA, 25 bp, Homo sapien
tcagtgtcctctgtccttgttccac

SEQ ID NO: 3701833 - DNA, 25 bp, Homo sapien
gcagaggggatcatgcgctgcatat

SEQ ID NO: 3701834 - DNA, 25 bp, Homo sapien
ggcttgctgaataggttctccaacc

SEQ ID NO: 3701835 - DNA, 25 bp, Homo sapien
tttagagatgaaaaagcaggcttgc

SEQ ID NO: 3701836 - DNA, 25 bp, Homo sapien
gggatcatgcgctgcatatttgcct

SEQ ID NO: 3701837 - DNA, 25 bp, Homo sapien
tgcttctgggaagacgaaagaagcc

SEQ ID NO: 3701838 - DNA, 25 bp, Homo sapien
cttctgggaagacgaaagaagcctt

SEQ ID NO: 3701839 - DNA, 25 bp, Homo sapien
gcttctgggaagacgaaagaagcct

SEQ ID NO: 3701840 - DNA, 25 bp, Homo sapien
ttgtgtacacggctctaattgcaga

SEQ ID NO: 3701841 - DNA, 25 bp, Homo sapien
cctgtggattgtgtacacggctcta

SEQ ID NO: 3701842 - DNA, 25 bp, Homo sapien
aagaagtcctcgctttccactaagg

SEQ ID NO: 3701843 - DNA, 25 bp, Homo sapien
ttgcagacagtttgtgtcgataaga

SEQ ID NO: 3701844 - DNA, 25 bp, Homo sapien
gagcaattaatgtggaacatgcaca

SEQ ID NO: 3701845 - DNA, 25 bp, Homo sapien
aaattcccaggtctgcccatttgga

SEQ ID NO: 3701846 - DNA, 25 bp, Homo sapien
gctatttaaatgtatggctacaaat

SEQ ID NO: 3701847 - DNA, 25 bp, Homo sapien
aatccaattgaaggaaggagcaatt

SEQ ID NO: 3701848 - DNA, 25 bp, Homo sapien
aggtcctgcagtctcccattggcaa

SEQ ID NO: 3701849 - DNA, 25 bp, Homo sapien
ccattggcaaaatctggggaggaag

SEQ ID NO: 3701850 - DNA, 25 bp, Homo sapien
tcccattggcaaaatctggggagga

SEQ ID NO: 3701851 - DNA, 25 bp, Homo sapien
ggcaggtcctgcagtctcccattgg

SEQ ID NO: 3701852 - DNA, 25 bp, Homo sapien
gctatgagcagggtattaattatcc

SEQ ID NO: 3701853 - DNA, 25 bp, Homo sapien
gaaagtcagtggtatgtaacagcag

SEQ ID NO: 3701854 - DNA, 25 bp, Homo sapien
taattatcctgtgccgcagacagag

SEQ ID NO: 3701855 - DNA, 25 bp, Homo sapien
gtgtttacgggttccatccagccag

SEQ ID NO: 3701856 - DNA, 25 bp, Homo sapien
ggcactttctctgggatgcaaactc

SEQ ID NO: 3701857 - DNA, 25 bp, Homo sapien
ccttaaatgttgaggggcactttct

SEQ ID NO: 3701858 - DNA, 25 bp, Homo sapien
ctgtcacaactccacacatgctatt

SEQ ID NO: 3701859 - DNA, 25 bp, Homo sapien
gggcgccaataagatgattatctga

SEQ ID NO: 3701860 - DNA, 25 bp, Homo sapien
tctcctgctctttgtttcttggagg

SEQ ID NO: 3701861 - DNA, 25 bp, Homo sapien
catttgattttactgccacttctac

SEQ ID NO: 3701862 - DNA, 25 bp, Homo sapien
tctgttcctctacattcctgcttct

SEQ ID NO: 3701863 - DNA, 25 bp, Homo sapien
cctccatgttcgtcctttctcctgc

SEQ ID NO: 3701864 - DNA, 25 bp, Homo sapien
ggtctgcggaccagggctgtgatta

SEQ ID NO: 3701865 - DNA, 25 bp, Homo sapien
aagtgttagtgcttcccctggctgg

SEQ ID NO: 3701866 - DNA, 25 bp, Homo sapien
cagctgctcttatggctctgcatgt

SEQ ID NO: 3701867 - DNA, 25 bp, Homo sapien
ctgtgattagggcatacagcagctg

SEQ ID NO: 3701868 - DNA, 25 bp, Homo sapien
ctctctcctgcagtaacttcaacag

SEQ ID NO: 3701869 - DNA, 25 bp, Homo sapien
tctcctgcagtaacttcaacagcat

SEQ ID NO: 3701870 - DNA, 25 bp, Homo sapien
tcctgcagtaacttcaacagcatgg

SEQ ID NO: 3701871 - DNA, 25 bp, Homo sapien
tccaaatcctggaactcactcatca

SEQ ID NO: 3701872 - DNA, 25 bp, Homo sapien
aaacagcaaccactggctggtcttc

SEQ ID NO: 3701873 - DNA, 25 bp, Homo sapien
aaccactggctggtcttctactgct

SEQ ID NO: 3701874 - DNA, 25 bp, Homo sapien
cactggctggtcttctactgcttct

SEQ ID NO: 3701875 - DNA, 25 bp, Homo sapien
gcaaccactggctggtcttctactg

SEQ ID NO: 3701876 - DNA, 25 bp, Homo sapien
cttgttctagttcaggctttgaatc

SEQ ID NO: 3701877 - DNA, 25 bp, Homo sapien
tagttcaggctttgaatccttgatt

SEQ ID NO: 3701878 - DNA, 25 bp, Homo sapien
cgctcctgcttcaccttgttctagt

SEQ ID NO: 3701879 - DNA, 25 bp, Homo sapien
gcttcaccttgttctagttcaggct

SEQ ID NO: 3701880 - DNA, 25 bp, Homo sapien
gaggctttgtacagaatccttgcct

SEQ ID NO: 3701881 - DNA, 25 bp, Homo sapien
aggcatatgggcctgtctccaggcc

SEQ ID NO: 3701882 - DNA, 25 bp, Homo sapien
gccgcagaggctttgtacagaatcc

SEQ ID NO: 3701883 - DNA, 25 bp, Homo sapien
ttccaggcatatgggcctgtctcca

SEQ ID NO: 3701884 - DNA, 25 bp, Homo sapien
tgtccactgacagcccattaaagga

SEQ ID NO: 3701885 - DNA, 25 bp, Homo sapien
tccactgacagcccattaaaggaag

SEQ ID NO: 3701886 - DNA, 25 bp, Homo sapien
gtccactgacagcccattaaaggaa

SEQ ID NO: 3701887 - DNA, 25 bp, Homo sapien
tcatttaattgtacagtccagattc

SEQ ID NO: 3701888 - DNA, 25 bp, Homo sapien
catttaattgtacagtccagattct

SEQ ID NO: 3701889 - DNA, 25 bp, Homo sapien
tttaattgtacagtccagattctta

SEQ ID NO: 3701890 - DNA, 25 bp, Homo sapien
ttaattgtacagtccagattcttac

SEQ ID NO: 3701891 - DNA, 25 bp, Homo sapien
ctggggagtgcactctgcctcttgc

SEQ ID NO: 3701892 - DNA, 25 bp, Homo sapien
tctggggagtgcactctgcctcttg

SEQ ID NO: 3701893 - DNA, 25 bp, Homo sapien
ggtctctggggagtgcactctgcct

SEQ ID NO: 3701894 - DNA, 25 bp, Homo sapien
tctctggggagtgcactctgcctct

SEQ ID NO: 3701895 - DNA, 25 bp, Homo sapien
gtgtggctcttaggttcctgtccat

SEQ ID NO: 3701896 - DNA, 25 bp, Homo sapien
tggtgtggctcttaggttcctgtcc

SEQ ID NO: 3701897 - DNA, 25 bp, Homo sapien
ctggtgtggctcttaggttcctgtc

SEQ ID NO: 3701898 - DNA, 25 bp, Homo sapien
ggtgtggctcttaggttcctgtcca

SEQ ID NO: 3701899 - DNA, 25 bp, Homo sapien
ctttttcttcctgagagtgatacta

SEQ ID NO: 3701900 - DNA, 25 bp, Homo sapien
atactatgagatccaggtcatcttc

SEQ ID NO: 3701901 - DNA, 25 bp, Homo sapien
cacagttcccaagcagggtctttcc

SEQ ID NO: 3701902 - DNA, 25 bp, Homo sapien
ttatttcttcagtgcagtctcttct

SEQ ID NO: 3701903 - DNA, 25 bp, Homo sapien
tggacctgcctgagcttgccaggtt

SEQ ID NO: 3701904 - DNA, 25 bp, Homo sapien
tctgacctctcttcctgtttgtggc

SEQ ID NO: 3701905 - DNA, 25 bp, Homo sapien
tggctcctgacaggcctggacctgc

SEQ ID NO: 3701906 - DNA, 25 bp, Homo sapien
tgtttgtggctcctgacaggcctgg

SEQ ID NO: 3701907 - DNA, 25 bp, Homo sapien
cccatttgggaacttgggatccaat

SEQ ID NO: 3701908 - DNA, 25 bp, Homo sapien
atcccatttgggaacttgggatcca

SEQ ID NO: 3701909 - DNA, 25 bp, Homo sapien
ggctgctgacctgcttatcccattt

SEQ ID NO: 3701910 - DNA, 25 bp, Homo sapien
tcccatttgggaacttgggatccaa

SEQ ID NO: 3701911 - DNA, 25 bp, Homo sapien
agatgtgaacctgtgggcaaactga

SEQ ID NO: 3701912 - DNA, 25 bp, Homo sapien
aactgaagcttgtcacttccgtcaa

SEQ ID NO: 3701913 - DNA, 25 bp, Homo sapien
tcccacagtgacacttcaatctgtg

SEQ ID NO: 3701914 - DNA, 25 bp, Homo sapien
caatctgtgagttagatgtgaacct

SEQ ID NO: 3701915 - DNA, 25 bp, Homo sapien
tgcagacgtcaacacatccagcgtg

SEQ ID NO: 3701916 - DNA, 25 bp, Homo sapien
gacgtcaacacatccagcgtgcaat

SEQ ID NO: 3701917 - DNA, 25 bp, Homo sapien
gtcaggtttcctgcagacgtcaaca

SEQ ID NO: 3701918 - DNA, 25 bp, Homo sapien
ggtttcctgcagacgtcaacacatc

SEQ ID NO: 3701919 - DNA, 25 bp, Homo sapien
agtcgggttctcctggtgaggaagc

SEQ ID NO: 3701920 - DNA, 25 bp, Homo sapien
cagagtcgggttctcctggtgagga

SEQ ID NO: 3701921 - DNA, 25 bp, Homo sapien
cgggttctcctggtgaggaagcagt

SEQ ID NO: 3701922 - DNA, 25 bp, Homo sapien
agagtcgggttctcctggtgaggaa

SEQ ID NO: 3701923 - DNA, 25 bp, Homo sapien
cataaaataaggctttttatctcgc

SEQ ID NO: 3701924 - DNA, 25 bp, Homo sapien
tcccatccacttctagagacacata

SEQ ID NO: 3701925 - DNA, 25 bp, Homo sapien
aacattcacgatagtatccacaggg

SEQ ID NO: 3701926 - DNA, 25 bp, Homo sapien
tgctctgggccatagccataaaata

SEQ ID NO: 3701927 - DNA, 25 bp, Homo sapien
tgtaaccagtgacataacaatgtct

SEQ ID NO: 3701928 - DNA, 25 bp, Homo sapien
tccttgagtcgtgatagagctttgt

SEQ ID NO: 3701929 - DNA, 25 bp, Homo sapien
tagagctttgttgtaaccagtgaca

SEQ ID NO: 3701930 - DNA, 25 bp, Homo sapien
gtctttaaagtccttgagtcgtgat

SEQ ID NO: 3701931 - DNA, 25 bp, Homo sapien
actttcaaaactcctggtgaagctg

SEQ ID NO: 3701932 - DNA, 25 bp, Homo sapien
gctgcccatggaggatgttactaaa

SEQ ID NO: 3701933 - DNA, 25 bp, Homo sapien
actcacatgaatccacctgtttagg

SEQ ID NO: 3701934 - DNA, 25 bp, Homo sapien
ctgctgaagctagggcactttcaaa

SEQ ID NO: 3701935 - DNA, 25 bp, Homo sapien
caaatggctactgagttgagtgtta

SEQ ID NO: 3701936 - DNA, 25 bp, Homo sapien
atggctactgagttgagtgttaagg

SEQ ID NO: 3701937 - DNA, 25 bp, Homo sapien
tccaaatggctactgagttgagtgt

SEQ ID NO: 3701938 - DNA, 25 bp, Homo sapien
tcatccaaatggctactgagttgag

SEQ ID NO: 3701939 - DNA, 25 bp, Homo sapien
tttcagttggatcttgctcgtggtt

SEQ ID NO: 3701940 - DNA, 25 bp, Homo sapien
ttcagttggatcttgctcgtggttt

SEQ ID NO: 3701941 - DNA, 25 bp, Homo sapien
ttttcagttggatcttgctcgtggt

SEQ ID NO: 3701942 - DNA, 25 bp, Homo sapien
ggaaatgtctgctcctttggtattc

SEQ ID NO: 3701943 - DNA, 25 bp, Homo sapien
gaaatgtctgctcctttggtattca

SEQ ID NO: 3701944 - DNA, 25 bp, Homo sapien
gaattgggagaggaaatgtctgctc

SEQ ID NO: 3701945 - DNA, 25 bp, Homo sapien
tgagtagccagggaattgggagagg

SEQ ID NO: 3701946 - DNA, 25 bp, Homo sapien
gccatgggctttggttgccagttcc

SEQ ID NO: 3701947 - DNA, 25 bp, Homo sapien
tagccatgggctttggttgccagtt

SEQ ID NO: 3701948 - DNA, 25 bp, Homo sapien
catgggctttggttgccagttccag

SEQ ID NO: 3701949 - DNA, 25 bp, Homo sapien
tttagccatgggctttggttgccag

SEQ ID NO: 3701950 - DNA, 25 bp, Homo sapien
cacttaaagggcacttcaggggcat

SEQ ID NO: 3701951 - DNA, 25 bp, Homo sapien
acacttaaagggcacttcaggggca

SEQ ID NO: 3701952 - DNA, 25 bp, Homo sapien
cggcgacagcggtgggacgtaggcg

SEQ ID NO: 3701953 - DNA, 25 bp, Homo sapien
aggtttggcagacagcctcatggat

SEQ ID NO: 3701954 - DNA, 25 bp, Homo sapien
taaaaaacgcacacatttcacttgg

SEQ ID NO: 3701955 - DNA, 25 bp, Homo sapien
cacagttataaaaaacgcacacatt

SEQ ID NO: 3701956 - DNA, 25 bp, Homo sapien
cgtctcttttggcatccccattttc

SEQ ID NO: 3701957 - DNA, 25 bp, Homo sapien
ctgtgcctcgtctcttttggcatcc

SEQ ID NO: 3701958 - DNA, 25 bp, Homo sapien
tatgcctcttcccccaaaaatagta

SEQ ID NO: 3701959 - DNA, 25 bp, Homo sapien
caaaaatagtaatgaagtgttctgt

SEQ ID NO: 3701960 - DNA, 25 bp, Homo sapien
cttcggagacattctatgagtgaca

SEQ ID NO: 3701961 - DNA, 25 bp, Homo sapien
tatgagtgacatatgcctcttcccc

SEQ ID NO: 3701962 - DNA, 25 bp, Homo sapien
ctcccttattcaatggactactgaa

SEQ ID NO: 3701963 - DNA, 25 bp, Homo sapien
ttattcaatggactactgaaatcaa

SEQ ID NO: 3701964 - DNA, 25 bp, Homo sapien
tcccttattcaatggactactgaaa

SEQ ID NO: 3701965 - DNA, 25 bp, Homo sapien
ccttattcaatggactactgaaatc

SEQ ID NO: 3701966 - DNA, 25 bp, Homo sapien
gtagagtgagctaggaatgaaatca

SEQ ID NO: 3701967 - DNA, 25 bp, Homo sapien
attgtgcctggaaccagatctcttc

SEQ ID NO: 3701968 - DNA, 25 bp, Homo sapien
gatctcttcaaatgtaatcattata

SEQ ID NO: 3701969 - DNA, 25 bp, Homo sapien
aaatcaggctcttctagaggaagtt

SEQ ID NO: 3701970 - DNA, 25 bp, Homo sapien
cttgtgatccgccgatctgatggtt

SEQ ID NO: 3701971 - DNA, 25 bp, Homo sapien
ccttgtgatccgccgatctgatggt

SEQ ID NO: 3701972 - DNA, 25 bp, Homo sapien
tccagaaatactcatatcacttccc

SEQ ID NO: 3701973 - DNA, 25 bp, Homo sapien
tttccagaaatactcatatcacttc

SEQ ID NO: 3701974 - DNA, 25 bp, Homo sapien
ccagatttcaaaacgcacaatcagc

SEQ ID NO: 3701975 - DNA, 25 bp, Homo sapien
acgcacaatcagcatgctcattctg

SEQ ID NO: 3701976 - DNA, 25 bp, Homo sapien
ttaaaatcaggtccattaacatggg

SEQ ID NO: 3701977 - DNA, 25 bp, Homo sapien
ctcgaataggtcattaaaatcaggt

SEQ ID NO: 3701978 - DNA, 25 bp, Homo sapien
tcaggtccattaacatgggaccatt

SEQ ID NO: 3701979 - DNA, 25 bp, Homo sapien
ctgcagatgcggcactcgaataggt

SEQ ID NO: 3701980 - DNA, 25 bp, Homo sapien
tcaatagatattgcctctaattctt

SEQ ID NO: 3701981 - DNA, 25 bp, Homo sapien
tagatattgcctctaattcttagat

SEQ ID NO: 3701982 - DNA, 25 bp, Homo sapien
gcctctaattcttagatcttctaca

SEQ ID NO: 3701983 - DNA, 25 bp, Homo sapien
tattgcctctaattcttagatcttc

SEQ ID NO: 3701984 - DNA, 25 bp, Homo sapien
ttaaggtagccatagaactatggta

SEQ ID NO: 3701985 - DNA, 25 bp, Homo sapien
tagccatagaactatggtaatagag

SEQ ID NO: 3701986 - DNA, 25 bp, Homo sapien
gaactatggtaatagagaacctggg

SEQ ID NO: 3701987 - DNA, 25 bp, Homo sapien
ccatagaactatggtaatagagaac

SEQ ID NO: 3701988 - DNA, 25 bp, Homo sapien
aaagagcacagttcctccggcgcac

SEQ ID NO: 3701989 - DNA, 25 bp, Homo sapien
aatagtacgagcagccaatcacggg

SEQ ID NO: 3701990 - DNA, 25 bp, Homo sapien
cctagcgtcggcctcaaagagcaca

SEQ ID NO: 3701991 - DNA, 25 bp, Homo sapien
tgcatgacgcaacatcgaaaggacg

SEQ ID NO: 3701992 - DNA, 25 bp, Homo sapien
ggtgcaccaggtctaccgagcagat

SEQ ID NO: 3701993 - DNA, 25 bp, Homo sapien
tgcaccaggtctaccgagcagatct

SEQ ID NO: 3701994 - DNA, 25 bp, Homo sapien
ggtggtgcaccaggtctaccgagca

SEQ ID NO: 3701995 - DNA, 25 bp, Homo sapien
caggtctaccgagcagatctgaaat

SEQ ID NO: 3701996 - DNA, 25 bp, Homo sapien
tgaaagctgggtggaaaaccctaga

SEQ ID NO: 3701997 - DNA, 25 bp, Homo sapien
ccctagaaggtagtgtccggagaca

SEQ ID NO: 3701998 - DNA, 25 bp, Homo sapien
gttaacagccattgattcttcgtga

SEQ ID NO: 3701999 - DNA, 25 bp, Homo sapien
gaattcttcacaacaggggaggcct

SEQ ID NO: 3702000 - DNA, 25 bp, Homo sapien
tataacacactaaaggcagagcagc

SEQ ID NO: 3702001 - DNA, 25 bp, Homo sapien
gaaactccagaagctgtaagcgaag

SEQ ID NO: 3702002 - DNA, 25 bp, Homo sapien
tattggccaactggtaatatccctg

SEQ ID NO: 3702003 - DNA, 25 bp, Homo sapien
taaacttctgactatgtgctccagg

SEQ ID NO: 3702004 - DNA, 25 bp, Homo sapien
ttcttggccagttctcccacgccgg

SEQ ID NO: 3702005 - DNA, 25 bp, Homo sapien
ttccatcgatggttccaatgctgcc

SEQ ID NO: 3702006 - DNA, 25 bp, Homo sapien
tcccacgccggatcccaattcttgt

SEQ ID NO: 3702007 - DNA, 25 bp, Homo sapien
tttttccatcgatggttccaatgct

SEQ ID NO: 3702008 - DNA, 25 bp, Homo sapien
gcaacaaaccatcttcccatctgat

SEQ ID NO: 3702009 - DNA, 25 bp, Homo sapien
tccagcaacaaaccatcttcccatc

SEQ ID NO: 3702010 - DNA, 25 bp, Homo sapien
ctccagcaacaaaccatcttcccat

SEQ ID NO: 3702011 - DNA, 25 bp, Homo sapien
acaaaccatcttcccatctgatcaa

SEQ ID NO: 3702012 - DNA, 25 bp, Homo sapien
gtcccaagccatagtagcacaatgc

SEQ ID NO: 3702013 - DNA, 25 bp, Homo sapien
catagtagcacaatgctccaagacc

SEQ ID NO: 3702014 - DNA, 25 bp, Homo sapien
tagacagtcccaagccatagtagca

SEQ ID NO: 3702015 - DNA, 25 bp, Homo sapien
caatctcattagacagtcccaagcc

SEQ ID NO: 3702016 - DNA, 25 bp, Homo sapien
aaggctggagttgtttaggaacagt

SEQ ID NO: 3702017 - DNA, 25 bp, Homo sapien
ttaaggctggagttgtttaggaaca

SEQ ID NO: 3702018 - DNA, 25 bp, Homo sapien
taaggctggagttgtttaggaacag

SEQ ID NO: 3702019 - DNA, 25 bp, Homo sapien
caggcgttctgctgattgctatggc

SEQ ID NO: 3702020 - DNA, 25 bp, Homo sapien
cacccaagagcctctcatcatgaag

SEQ ID NO: 3702021 - DNA, 25 bp, Homo sapien
gaattctatccttgacatactgagg

SEQ ID NO: 3702022 - DNA, 25 bp, Homo sapien
tgttaaaccaatactccctgctaag

SEQ ID NO: 3702023 - DNA, 25 bp, Homo sapien
taacaagggctccagagaaaccgat

SEQ ID NO: 3702024 - DNA, 25 bp, Homo sapien
ggaacttgcctaacagtccaagaca

SEQ ID NO: 3702025 - DNA, 25 bp, Homo sapien
taaatgtctccttcacggaacttgc

SEQ ID NO: 3702026 - DNA, 25 bp, Homo sapien
tctaccaaatagcaggagaataggg

SEQ ID NO: 3702027 - DNA, 25 bp, Homo sapien
gtattgatcgtaccagcattccagc

SEQ ID NO: 3702028 - DNA, 25 bp, Homo sapien
tagcaaccaagcaagatgctttggg

SEQ ID NO: 3702029 - DNA, 25 bp, Homo sapien
cagaatgtagcaaccaagcaagatg

SEQ ID NO: 3702030 - DNA, 25 bp, Homo sapien
ggcctgggctctggtcatatggtat

SEQ ID NO: 3702031 - DNA, 25 bp, Homo sapien
agaaacttttcactgggcgcacaca

SEQ ID NO: 3702032 - DNA, 25 bp, Homo sapien
tgaggacacaaagacgagacccagg

SEQ ID NO: 3702033 - DNA, 25 bp, Homo sapien
caatgccagctgtgtaccatgcagc

SEQ ID NO: 3702034 - DNA, 25 bp, Homo sapien
gggtgcacccatgttcagaaacttt

SEQ ID NO: 3702035 - DNA, 25 bp, Homo sapien
ctccatacattggtgatacttctgc

SEQ ID NO: 3702036 - DNA, 25 bp, Homo sapien
gtatcatacagaaggaacatgctga

SEQ ID NO: 3702037 - DNA, 25 bp, Homo sapien
taatccaccgtacattgccactgag

SEQ ID NO: 3702038 - DNA, 25 bp, Homo sapien
gtggtaggtggaagaaacatagatc

SEQ ID NO: 3702039 - DNA, 25 bp, Homo sapien
aatatatttaatgtatccatgtaga

SEQ ID NO: 3702040 - DNA, 25 bp, Homo sapien
ctccagttgccagcatagttgcaac

SEQ ID NO: 3702041 - DNA, 25 bp, Homo sapien
gttgcaactcgcataaatatattta

SEQ ID NO: 3702042 - DNA, 25 bp, Homo sapien
agcatagttgcaactcgcataaata

SEQ ID NO: 3702043 - DNA, 25 bp, Homo sapien
gtacaaactatttaatgcatatctg

SEQ ID NO: 3702044 - DNA, 25 bp, Homo sapien
taaacaagatatttgatgtagcaga

SEQ ID NO: 3702045 - DNA, 25 bp, Homo sapien
taatgcatatctgccccattaaaca

SEQ ID NO: 3702046 - DNA, 25 bp, Homo sapien
aacaagatatttgatgtagcagaga

SEQ ID NO: 3702047 - DNA, 25 bp, Homo sapien
atcacattaccggaacatttaaata

SEQ ID NO: 3702048 - DNA, 25 bp, Homo sapien
aggcatcacattaccggaacattta

SEQ ID NO: 3702049 - DNA, 25 bp, Homo sapien
gcatcacattaccggaacatttaaa

SEQ ID NO: 3702050 - DNA, 25 bp, Homo sapien
cacattaccggaacatttaaatatg

SEQ ID NO: 3702051 - DNA, 25 bp, Homo sapien
tgcgagaaaccaaaagtcttaggag

SEQ ID NO: 3702052 - DNA, 25 bp, Homo sapien
tttccagtgtaagccacaaagaagc

SEQ ID NO: 3702053 - DNA, 25 bp, Homo sapien
cacatctatattggaaagagagcac

SEQ ID NO: 3702054 - DNA, 25 bp, Homo sapien
cttagtctgagaggcaatgcgagaa

SEQ ID NO: 3702055 - DNA, 25 bp, Homo sapien
cattgtcttagcaaagtcagaagaa

SEQ ID NO: 3702056 - DNA, 25 bp, Homo sapien
gataaactgcctgataccatcactg

SEQ ID NO: 3702057 - DNA, 25 bp, Homo sapien
tacaactggtatgttttacaaacga

SEQ ID NO: 3702058 - DNA, 25 bp, Homo sapien
gcagtggctcaagctagtaatgccg

SEQ ID NO: 3702059 - DNA, 25 bp, Homo sapien
ccaatggcctatggccgtgtttaca

SEQ ID NO: 3702060 - DNA, 25 bp, Homo sapien
tcatccaatggcctatggccgtgtt

SEQ ID NO: 3702061 - DNA, 25 bp, Homo sapien
tgacactcatccaatggcctatggc

SEQ ID NO: 3702062 - DNA, 25 bp, Homo sapien
tggcctatggccgtgtttacacgga

SEQ ID NO: 3702063 - DNA, 25 bp, Homo sapien
tctgacgcaagccacaaatgaggca

SEQ ID NO: 3702064 - DNA, 25 bp, Homo sapien
taagatgcgggccataatggtcgtt

SEQ ID NO: 3702065 - DNA, 25 bp, Homo sapien
gaatgttcaccgtccatcttcctga

SEQ ID NO: 3702066 - DNA, 25 bp, Homo sapien
taactgcgcagcagcccataagatg

SEQ ID NO: 3702067 - DNA, 25 bp, Homo sapien
tagaaggtggaaggttgagagaagt

SEQ ID NO: 3702068 - DNA, 25 bp, Homo sapien
tgtagaaggtggaaggttgagagaa

SEQ ID NO: 3702069 - DNA, 25 bp, Homo sapien
ctgtagaaggtggaaggttgagaga

SEQ ID NO: 3702070 - DNA, 25 bp, Homo sapien
gaaggtggaaggttgagagaagtcc

SEQ ID NO: 3702071 - DNA, 25 bp, Homo sapien
gaaaaacgtccattcagtcctgcca

SEQ ID NO: 3702072 - DNA, 25 bp, Homo sapien
aattttatctcgagtgtagccacgg

SEQ ID NO: 3702073 - DNA, 25 bp, Homo sapien
tgtatccagtgaggttgcaacaacc

SEQ ID NO: 3702074 - DNA, 25 bp, Homo sapien
ttaacttggaggaatgatggcccac

SEQ ID NO: 3702075 - DNA, 25 bp, Homo sapien
gtgttttatagaccccaacattgat

SEQ ID NO: 3702076 - DNA, 25 bp, Homo sapien
acattgatcagaaatgactctccca

SEQ ID NO: 3702077 - DNA, 25 bp, Homo sapien
aagtgttttatagaccccaacattg

SEQ ID NO: 3702078 - DNA, 25 bp, Homo sapien
cccaacattgatcagaaatgactct

SEQ ID NO: 3702079 - DNA, 25 bp, Homo sapien
ccaggagtctaccagggacaattgc

SEQ ID NO: 3702080 - DNA, 25 bp, Homo sapien
gcaggctatgctctgagtcctgata

SEQ ID NO: 3702081 - DNA, 25 bp, Homo sapien
tcctgatatctgtgcgaagtggaca

SEQ ID NO: 3702082 - DNA, 25 bp, Homo sapien
ggccccagagagactctttgcaggc

SEQ ID NO: 3702083 - DNA, 25 bp, Homo sapien
ctccagtcgaccaggcgtgggctgc

SEQ ID NO: 3702084 - DNA, 25 bp, Homo sapien
tgattgtcccccttccactaaggtg

SEQ ID NO: 3702085 - DNA, 25 bp, Homo sapien
ttctacagcctggagtaataagtca

SEQ ID NO: 3702086 - DNA, 25 bp, Homo sapien
tgggctgcatggtagctgttttcca

SEQ ID NO: 3702087 - DNA, 25 bp, Homo sapien
caagtgactgtctcacagcattgta

SEQ ID NO: 3702088 - DNA, 25 bp, Homo sapien
cacagcattgtaagtgctgtctata

SEQ ID NO: 3702089 - DNA, 25 bp, Homo sapien
acacagaagacactgtgcctcgcct

SEQ ID NO: 3702090 - DNA, 25 bp, Homo sapien
aggaagctgtgcagacaagtgactg

SEQ ID NO: 3702091 - DNA, 25 bp, Homo sapien
gtgagaaggcagattttcacgtcct

SEQ ID NO: 3702092 - DNA, 25 bp, Homo sapien
gagaaggcagattttcacgtcctgg

SEQ ID NO: 3702093 - DNA, 25 bp, Homo sapien
aaggcagattttcacgtcctgggaa

SEQ ID NO: 3702094 - DNA, 25 bp, Homo sapien
cagattttcacgtcctgggaaggga

SEQ ID NO: 3702095 - DNA, 25 bp, Homo sapien
aagcagagaagcaggatacagagca

SEQ ID NO: 3702096 - DNA, 25 bp, Homo sapien
gaagcagagaagcaggatacagagc

SEQ ID NO: 3702097 - DNA, 25 bp, Homo sapien
gatacagagcaggctggaaaggact

SEQ ID NO: 3702098 - DNA, 25 bp, Homo sapien
acagagcaggctggaaaggactaga

SEQ ID NO: 3702099 - DNA, 25 bp, Homo sapien
cctgcccgccaaggcctgccctcca

SEQ ID NO: 3702100 - DNA, 25 bp, Homo sapien
aggcctgccctccaacaaatcctga

SEQ ID NO: 3702101 - DNA, 25 bp, Homo sapien
aaggcctgccctccaacaaatcctg

SEQ ID NO: 3702102 - DNA, 25 bp, Homo sapien
caaggcctgccctccaacaaatcct

SEQ ID NO: 3702103 - DNA, 25 bp, Homo sapien
caggccttggcaggacgcctcttcc

SEQ ID NO: 3702104 - DNA, 25 bp, Homo sapien
caggtttgttgagttggggctaggg

SEQ ID NO: 3702105 - DNA, 25 bp, Homo sapien
gttggggctagggactcggtggcag

SEQ ID NO: 3702106 - DNA, 25 bp, Homo sapien
gggctagggactcggtggcagcaga

SEQ ID NO: 3702107 - DNA, 25 bp, Homo sapien
tggggctgccttatctcctgccaag

SEQ ID NO: 3702108 - DNA, 25 bp, Homo sapien
tatctcctgccaagctatggctctc

SEQ ID NO: 3702109 - DNA, 25 bp, Homo sapien
ctggggctgccttatctcctgccaa

SEQ ID NO: 3702110 - DNA, 25 bp, Homo sapien
ctgccaagctatggctctctggacc

SEQ ID NO: 3702111 - DNA, 25 bp, Homo sapien
tggacaagaacgtgcaggctttggt

SEQ ID NO: 3702112 - DNA, 25 bp, Homo sapien
gcgttgcttacacaacaccctggga

SEQ ID NO: 3702113 - DNA, 25 bp, Homo sapien
gatgcacgggctttgtcatacatca

SEQ ID NO: 3702114 - DNA, 25 bp, Homo sapien
tcagtgaactggagcacacgaggcc

SEQ ID NO: 3702115 - DNA, 25 bp, Homo sapien
tgatagggagtctatttgcctgctc

SEQ ID NO: 3702116 - DNA, 25 bp, Homo sapien
ggttgactggttgcaaatatggttg

SEQ ID NO: 3702117 - DNA, 25 bp, Homo sapien
taatcctagtaatatatagcgtaac

SEQ ID NO: 3702118 - DNA, 25 bp, Homo sapien
taaaatctggactggacttgcaact

SEQ ID NO: 3702119 - DNA, 25 bp, Homo sapien
gctcaagcttgcatggtttacagag

SEQ ID NO: 3702120 - DNA, 25 bp, Homo sapien
ggcaccacccaaaggcggggctctg

SEQ ID NO: 3702121 - DNA, 25 bp, Homo sapien
cttgcatggtttacagagcctcaca

SEQ ID NO: 3702122 - DNA, 25 bp, Homo sapien
ctacacctgtgggagtgccccaggc

SEQ ID NO: 3702123 - DNA, 25 bp, Homo sapien
ggcatgaggttctccgctgtctgga

SEQ ID NO: 3702124 - DNA, 25 bp, Homo sapien
tctccgctgtctggagtcttgcttt

SEQ ID NO: 3702125 - DNA, 25 bp, Homo sapien
tcaggtgccaggcatgaggttctcc

SEQ ID NO: 3702126 - DNA, 25 bp, Homo sapien
ctgctgggtacctcaggtgccaggc

SEQ ID NO: 3702127 - DNA, 25 bp, Homo sapien
taaatgccaggaggctgaatggacc

SEQ ID NO: 3702128 - DNA, 25 bp, Homo sapien
caattgagacaaggacgtggagttc

SEQ ID NO: 3702129 - DNA, 25 bp, Homo sapien
cactctagcaggattgatggtctct

SEQ ID NO: 3702130 - DNA, 25 bp, Homo sapien
tggtttgcactggagaggcccacat

SEQ ID NO: 3702131 - DNA, 25 bp, Homo sapien
tgtggagaaatgattgcctctcaga

SEQ ID NO: 3702132 - DNA, 25 bp, Homo sapien
aatgattgcctctcagacatcaggg

SEQ ID NO: 3702133 - DNA, 25 bp, Homo sapien
ggagaaatgattgcctctcagacat

SEQ ID NO: 3702134 - DNA, 25 bp, Homo sapien
agctttgtggagaaatgattgcctc

SEQ ID NO: 3702135 - DNA, 25 bp, Homo sapien
gctcttgcattgctgctaggtgatt

SEQ ID NO: 3702136 - DNA, 25 bp, Homo sapien
cagctcttgcattgctgctaggtga

SEQ ID NO: 3702137 - DNA, 25 bp, Homo sapien
gctaggtgattcactttgccaaagg

SEQ ID NO: 3702138 - DNA, 25 bp, Homo sapien
gctgctaggtgattcactttgccaa

SEQ ID NO: 3702139 - DNA, 25 bp, Homo sapien
gcaataggtttctagtgccctgctt

SEQ ID NO: 3702140 - DNA, 25 bp, Homo sapien
gacagtcgcaataggtttctagtgc

SEQ ID NO: 3702141 - DNA, 25 bp, Homo sapien
agccaggtcgggtagacagtcgcaa

SEQ ID NO: 3702142 - DNA, 25 bp, Homo sapien
cgggtagacagtcgcaataggtttc

SEQ ID NO: 3702143 - DNA, 25 bp, Homo sapien
agcagcatgtgcctgcgattcaggc

SEQ ID NO: 3702144 - DNA, 25 bp, Homo sapien
ctgacagcagttgggccaggtgact

SEQ ID NO: 3702145 - DNA, 25 bp, Homo sapien
cagcagttgggccaggtgacttcca

SEQ ID NO: 3702146 - DNA, 25 bp, Homo sapien
tgtgcctgcgattcaggctcatttc

SEQ ID NO: 3702147 - DNA, 25 bp, Homo sapien
atcttatctccacgcatagacacac

SEQ ID NO: 3702148 - DNA, 25 bp, Homo sapien
cttatctccacgcatagacacacgt

SEQ ID NO: 3702149 - DNA, 25 bp, Homo sapien
tatctccacgcatagacacacgtgc

SEQ ID NO: 3702150 - DNA, 25 bp, Homo sapien
ctccacgcatagacacacgtgcata

SEQ ID NO: 3702151 - DNA, 25 bp, Homo sapien
gcccgtcacccctgaagggtggtga

SEQ ID NO: 3702152 - DNA, 25 bp, Homo sapien
caaatgcccgtcacccctgaagggt

SEQ ID NO: 3702153 - DNA, 25 bp, Homo sapien
ggcagcctcaggcacaccagtcaca

SEQ ID NO: 3702154 - DNA, 25 bp, Homo sapien
acccctgaagggtggtgagctccct

SEQ ID NO: 3702155 - DNA, 25 bp, Homo sapien
cttggtgggccgagaaaagccagct

SEQ ID NO: 3702156 - DNA, 25 bp, Homo sapien
gagtcttgccgtggatttcccagga

SEQ ID NO: 3702157 - DNA, 25 bp, Homo sapien
ctaattggccgaaacccttgttgag

SEQ ID NO: 3702158 - DNA, 25 bp, Homo sapien
gtattctgcaagtcccatataggga

SEQ ID NO: 3702159 - DNA, 25 bp, Homo sapien
ccacaatgggggtagcggcgactgc

SEQ ID NO: 3702160 - DNA, 25 bp, Homo sapien
cgagaccgggcgcaggggcacggag

SEQ ID NO: 3702161 - DNA, 25 bp, Homo sapien
tctccgccggcgcggagtgtcgcct

SEQ ID NO: 3702162 - DNA, 25 bp, Homo sapien
gggcgctaagaggatgacacggctc

SEQ ID NO: 3702163 - DNA, 25 bp, Homo sapien
gggccagggcggcccaccggcagcg

SEQ ID NO: 3702164 - DNA, 25 bp, Homo sapien
ggccagggcggcccaccggcagcgc

SEQ ID NO: 3702165 - DNA, 25 bp, Homo sapien
cagagccatgtttccgttggtgctg

SEQ ID NO: 3702166 - DNA, 25 bp, Homo sapien
ccgaccccgttgtcgaagaagtgcg

SEQ ID NO: 3702167 - DNA, 25 bp, Homo sapien
catgtttccgttggtgctgccgacc

SEQ ID NO: 3702168 - DNA, 25 bp, Homo sapien
gttggtgctgccgaccccgttgtcg

SEQ ID NO: 3702169 - DNA, 25 bp, Homo sapien
accactgtccccgatgcctggacct

SEQ ID NO: 3702170 - DNA, 25 bp, Homo sapien
actgtccccgatgcctggacctggt

SEQ ID NO: 3702171 - DNA, 25 bp, Homo sapien
ccactgtccccgatgcctggacctg

SEQ ID NO: 3702172 - DNA, 25 bp, Homo sapien
cactgtccccgatgcctggacctgg

SEQ ID NO: 3702173 - DNA, 25 bp, Homo sapien
tcaacagaaaagacgcttctagtgc

SEQ ID NO: 3702174 - DNA, 25 bp, Homo sapien
ggtctgtcccattcagggtgtatac

SEQ ID NO: 3702175 - DNA, 25 bp, Homo sapien
aagtggggtcaacagaaaagacgct

SEQ ID NO: 3702176 - DNA, 25 bp, Homo sapien
tgctggggtcaaagctgatgtggta

SEQ ID NO: 3702177 - DNA, 25 bp, Homo sapien
aatgctgatgatggcttcaatctca

SEQ ID NO: 3702178 - DNA, 25 bp, Homo sapien
cagattcaggccatcagaaatgctg

SEQ ID NO: 3702179 - DNA, 25 bp, Homo sapien
tcagaaatgctgatgatggcttcaa

SEQ ID NO: 3702180 - DNA, 25 bp, Homo sapien
gctgatgatggcttcaatctcatct

SEQ ID NO: 3702181 - DNA, 25 bp, Homo sapien
gggttagacccattagaagctcagc

SEQ ID NO: 3702182 - DNA, 25 bp, Homo sapien
tgctgggccctagcttaaacttgca

SEQ ID NO: 3702183 - DNA, 25 bp, Homo sapien
cagatggtgcccaacgaggagtcct

SEQ ID NO: 3702184 - DNA, 25 bp, Homo sapien
gaggccagttgttagtgctttccca

SEQ ID NO: 3702185 - DNA, 25 bp, Homo sapien
ccaggatcacgactttttcggccac

SEQ ID NO: 3702186 - DNA, 25 bp, Homo sapien
acataaggctcctggatgaacctgg

SEQ ID NO: 3702187 - DNA, 25 bp, Homo sapien
catcggtcaccaggatcacgacttt

SEQ ID NO: 3702188 - DNA, 25 bp, Homo sapien
gaacctgggcgcctcatcattggca

SEQ ID NO: 3702189 - DNA, 25 bp, Homo sapien
tgtccactgcatggaccttaaagat

SEQ ID NO: 3702190 - DNA, 25 bp, Homo sapien
gtccactgcatggaccttaaagatg

SEQ ID NO: 3702191 - DNA, 25 bp, Homo sapien
ccgctgtggcggtccacggcaaatg

SEQ ID NO: 3702192 - DNA, 25 bp, Homo sapien
ctctcgtagtccagagtggccccag

SEQ ID NO: 3702193 - DNA, 25 bp, Homo sapien
gcctggaggcgcagcacaccgctgt

SEQ ID NO: 3702194 - DNA, 25 bp, Homo sapien
tgatgtagtgggtccgggacctctc

SEQ ID NO: 3702195 - DNA, 25 bp, Homo sapien
agccatagtagggtgtgcccacgaa

SEQ ID NO: 3702196 - DNA, 25 bp, Homo sapien
cacattgaccgtgaccgtggtggtg

SEQ ID NO: 3702197 - DNA, 25 bp, Homo sapien
tggctgagaacaccacatcagcccc

SEQ ID NO: 3702198 - DNA, 25 bp, Homo sapien
tgaacatcctccacattgaccgtga

SEQ ID NO: 3702199 - DNA, 25 bp, Homo sapien
gagggcaaccgggaccagaccagcc

SEQ ID NO: 3702200 - DNA, 25 bp, Homo sapien
tctgtgtgaggagggcaaccgggac

SEQ ID NO: 3702201 - DNA, 25 bp, Homo sapien
gagctcatggtctagttgggggcaa

SEQ ID NO: 3702202 - DNA, 25 bp, Homo sapien
tgaggagggcaaccgggaccagacc

SEQ ID NO: 3702203 - DNA, 25 bp, Homo sapien
aactccaggctacttcttaacccag

SEQ ID NO: 3702204 - DNA, 25 bp, Homo sapien
ctcttcccttggagcctaccctgag

SEQ ID NO: 3702205 - DNA, 25 bp, Homo sapien
atccagagcagtccggcatctctct

SEQ ID NO: 3702206 - DNA, 25 bp, Homo sapien
tggcctgggcctacgctggcccacc

SEQ ID NO: 3702207 - DNA, 25 bp, Homo sapien
tcggggaaacaggaacagccgctgc

SEQ ID NO: 3702208 - DNA, 25 bp, Homo sapien
ctcggggaaacaggaacagccgctg

SEQ ID NO: 3702209 - DNA, 25 bp, Homo sapien
cgaccaccttcagtacctccgagcc

SEQ ID NO: 3702210 - DNA, 25 bp, Homo sapien
ggctgtagagaattcgattgggttt

SEQ ID NO: 3702211 - DNA, 25 bp, Homo sapien
tcgattgggtttgccccggtctcca

SEQ ID NO: 3702212 - DNA, 25 bp, Homo sapien
agagaattcgattgggtttgccccg

SEQ ID NO: 3702213 - DNA, 25 bp, Homo sapien
gtagagaattcgattgggtttgccc

SEQ ID NO: 3702214 - DNA, 25 bp, Homo sapien
gtcgtgccacaggatcgtcctgcat

SEQ ID NO: 3702215 - DNA, 25 bp, Homo sapien
gggagtcgtgccacaggatcgtcct

SEQ ID NO: 3702216 - DNA, 25 bp, Homo sapien
tgccacaggatcgtcctgcattgcc

SEQ ID NO: 3702217 - DNA, 25 bp, Homo sapien
acagggaggcgcaggggagtcgtgc

SEQ ID NO: 3702218 - DNA, 25 bp, Homo sapien
tgtcaagggagatgcaccctgaagt

SEQ ID NO: 3702219 - DNA, 25 bp, Homo sapien
gtcaagggagatgcaccctgaagtt

SEQ ID NO: 3702220 - DNA, 25 bp, Homo sapien
ctgtcaagggagatgcaccctgaag

SEQ ID NO: 3702221 - DNA, 25 bp, Homo sapien
ttaatttcaaaggctccatcgttcc

SEQ ID NO: 3702222 - DNA, 25 bp, Homo sapien
cagctcatacacctctctctggagc

SEQ ID NO: 3702223 - DNA, 25 bp, Homo sapien
gcagctcatacacctctctctggag

SEQ ID NO: 3702224 - DNA, 25 bp, Homo sapien
tgcagctcatacacctctctctgga

SEQ ID NO: 3702225 - DNA, 25 bp, Homo sapien
tcccctgcagaatgtataatcccct

SEQ ID NO: 3702226 - DNA, 25 bp, Homo sapien
gcaaagatggcaagctatcacttca

SEQ ID NO: 3702227 - DNA, 25 bp, Homo sapien
taatcccctccgtttgagtgtgtcc

SEQ ID NO: 3702228 - DNA, 25 bp, Homo sapien
gtggcaggtggacccttcatatggt

SEQ ID NO: 3702229 - DNA, 25 bp, Homo sapien
agtcattgacggtgatcttgaggcc

SEQ ID NO: 3702230 - DNA, 25 bp, Homo sapien
tgctcattcatggacagctcaaacc

SEQ ID NO: 3702231 - DNA, 25 bp, Homo sapien
tgaggtccacaatcctgatggtgac

SEQ ID NO: 3702232 - DNA, 25 bp, Homo sapien
gggtccgctctctccatagaatgtt

SEQ ID NO: 3702233 - DNA, 25 bp, Homo sapien
ccacttagctttgggaccttggctt

SEQ ID NO: 3702234 - DNA, 25 bp, Homo sapien
tcccggctacatacgcagagcaggt

SEQ ID NO: 3702235 - DNA, 25 bp, Homo sapien
tatagaagtcttcacgtgcccttaa

SEQ ID NO: 3702236 - DNA, 25 bp, Homo sapien
caggttgatgcagacccacttagct

SEQ ID NO: 3702237 - DNA, 25 bp, Homo sapien
tcattcaggactgtctgtggaacca

SEQ ID NO: 3702238 - DNA, 25 bp, Homo sapien
ggactgtctgtggaaccactcggaa

SEQ ID NO: 3702239 - DNA, 25 bp, Homo sapien
cacaatgattgtgacttgggcttca

SEQ ID NO: 3702240 - DNA, 25 bp, Homo sapien
tgcaagttgaatttggcattggctc

SEQ ID NO: 3702241 - DNA, 25 bp, Homo sapien
gggtgttcacttcaacagccaggag

SEQ ID NO: 3702242 - DNA, 25 bp, Homo sapien
caggaatcctggcaacgtagtagag

SEQ ID NO: 3702243 - DNA, 25 bp, Homo sapien
caacgtagtagagggagtcgaactt

SEQ ID NO: 3702244 - DNA, 25 bp, Homo sapien
gggcgttctcaggaatcctggcaac

SEQ ID NO: 3702245 - DNA, 25 bp, Homo sapien
agatttgtctggcttcacaaggcct

SEQ ID NO: 3702246 - DNA, 25 bp, Homo sapien
atttgtctggcttcacaaggcctcc

SEQ ID NO: 3702247 - DNA, 25 bp, Homo sapien
gtctggcttcacaaggcctcctatc

SEQ ID NO: 3702248 - DNA, 25 bp, Homo sapien
ttgtctggcttcacaaggcctccta

SEQ ID NO: 3702249 - DNA, 25 bp, Homo sapien
aggtctgccccagtcccataggtgg

SEQ ID NO: 3702250 - DNA, 25 bp, Homo sapien
cccagggtcctgtatctggatccac

SEQ ID NO: 3702251 - DNA, 25 bp, Homo sapien
ccataggtggaatatttcacttcgc

SEQ ID NO: 3702252 - DNA, 25 bp, Homo sapien
gaatatttcacttcgccccagggtc

SEQ ID NO: 3702253 - DNA, 25 bp, Homo sapien
ctgggtgtagataagcccagtggat

SEQ ID NO: 3702254 - DNA, 25 bp, Homo sapien
tgtagataagcccagtggatgggtg

SEQ ID NO: 3702255 - DNA, 25 bp, Homo sapien
ataagcccagtggatgggtggatca

SEQ ID NO: 3702256 - DNA, 25 bp, Homo sapien
cccagtggatgggtggatcaggaag

SEQ ID NO: 3702257 - DNA, 25 bp, Homo sapien
tacgctgtacttgccttccatgtcc

SEQ ID NO: 3702258 - DNA, 25 bp, Homo sapien
gacatccagcagtgtgataaacacc

SEQ ID NO: 3702259 - DNA, 25 bp, Homo sapien
gggtccctagcaccatcgtcttctt

SEQ ID NO: 3702260 - DNA, 25 bp, Homo sapien
cacatagaagttgtacctggcagtg

SEQ ID NO: 3702261 - DNA, 25 bp, Homo sapien
tgatgggaaatggtcctgatcctat

SEQ ID NO: 3702262 - DNA, 25 bp, Homo sapien
tgtactctggctaaatcagcacgtc

SEQ ID NO: 3702263 - DNA, 25 bp, Homo sapien
taggtcttacacatgggctagccga

SEQ ID NO: 3702264 - DNA, 25 bp, Homo sapien
gaatgcatgctctcctataagccag

SEQ ID NO: 3702265 - DNA, 25 bp, Homo sapien
gagcggatggaattcttgagccaga

SEQ ID NO: 3702266 - DNA, 25 bp, Homo sapien
caatcttgagtaaggctgtggtgct

SEQ ID NO: 3702267 - DNA, 25 bp, Homo sapien
tgcacctctagggaccataggcagt

SEQ ID NO: 3702268 - DNA, 25 bp, Homo sapien
ccccgtgtgggaattgatgtcgaac

SEQ ID NO: 3702269 - DNA, 25 bp, Homo sapien
cagccatggggctccgggagagggt

SEQ ID NO: 3702270 - DNA, 25 bp, Homo sapien
tatcaggaaggcagccatggggctc

SEQ ID NO: 3702271 - DNA, 25 bp, Homo sapien
gcagccatggggctccgggagaggg

SEQ ID NO: 3702272 - DNA, 25 bp, Homo sapien
ctgtatcaggaaggcagccatgggg

SEQ ID NO: 3702273 - DNA, 25 bp, Homo sapien
gagccagagacagtaggcacggtcc

SEQ ID NO: 3702274 - DNA, 25 bp, Homo sapien
gccgcattggcaggaccttgttaga

SEQ ID NO: 3702275 - DNA, 25 bp, Homo sapien
tgagccactcaatgcggatggtgcg

SEQ ID NO: 3702276 - DNA, 25 bp, Homo sapien
ctttgagcatgaacttggtagcggc

SEQ ID NO: 3702277 - DNA, 25 bp, Homo sapien
ctagaagtaagccttgttgtgcaca

SEQ ID NO: 3702278 - DNA, 25 bp, Homo sapien
tagaagtaagccttgttgtgcacac

SEQ ID NO: 3702279 - DNA, 25 bp, Homo sapien
gacgtatttgccaattgcatcctag

SEQ ID NO: 3702280 - DNA, 25 bp, Homo sapien
agccctgtcagagcgcaacttcttg

SEQ ID NO: 3702281 - DNA, 25 bp, Homo sapien
caaggccctgactagagccctgtca

SEQ ID NO: 3702282 - DNA, 25 bp, Homo sapien
tagtgccaaggatttgagtaacggg

SEQ ID NO: 3702283 - DNA, 25 bp, Homo sapien
tttcctacagcccacgaggttcgct

SEQ ID NO: 3702284 - DNA, 25 bp, Homo sapien
gctgcaggcgtcaggatccagattc

SEQ ID NO: 3702285 - DNA, 25 bp, Homo sapien
cagattctagtcagtgttgctccac

SEQ ID NO: 3702286 - DNA, 25 bp, Homo sapien
gcctgagacagtgctgagcctcctt

SEQ ID NO: 3702287 - DNA, 25 bp, Homo sapien
tttcccaaggttacgcgatgtgagc

SEQ ID NO: 3702288 - DNA, 25 bp, Homo sapien
gggactgtagaaaccccagcaagga

SEQ ID NO: 3702289 - DNA, 25 bp, Homo sapien
gaagaatggatccacctgctgaagc

SEQ ID NO: 3702290 - DNA, 25 bp, Homo sapien
cacaagctgataagggctgccctgg

SEQ ID NO: 3702291 - DNA, 25 bp, Homo sapien
tcctctttcctagtgtggctcatgc

SEQ ID NO: 3702292 - DNA, 25 bp, Homo sapien
tgccttaagtttggctgcaccctcc

SEQ ID NO: 3702293 - DNA, 25 bp, Homo sapien
gttgtccaagagaccaccctcggtc

SEQ ID NO: 3702294 - DNA, 25 bp, Homo sapien
gctgacaacacttgccggtgcctta

SEQ ID NO: 3702295 - DNA, 25 bp, Homo sapien
tcgtaacacagggacttggctggcc

SEQ ID NO: 3702296 - DNA, 25 bp, Homo sapien
gtaacacagggacttggctggcctc

SEQ ID NO: 3702297 - DNA, 25 bp, Homo sapien
attcgtaacacagggacttggctgg

SEQ ID NO: 3702298 - DNA, 25 bp, Homo sapien
cattcgtaacacagggacttggctg

SEQ ID NO: 3702299 - DNA, 25 bp, Homo sapien
tcctactgggacctagcagacagcc

SEQ ID NO: 3702300 - DNA, 25 bp, Homo sapien
caggaatgggcaagcctgcccagtg

SEQ ID NO: 3702301 - DNA, 25 bp, Homo sapien
ctgtcctactgggacctagcagaca

SEQ ID NO: 3702302 - DNA, 25 bp, Homo sapien
aggaatgggcaagcctgcccagtgt

SEQ ID NO: 3702303 - DNA, 25 bp, Homo sapien
catggtgttctagtatgtgggccac

SEQ ID NO: 3702304 - DNA, 25 bp, Homo sapien
gaaccagaattcagacctagggctg

SEQ ID NO: 3702305 - DNA, 25 bp, Homo sapien
caaagtcacaattaatggcagaacc

SEQ ID NO: 3702306 - DNA, 25 bp, Homo sapien
tgtaagtagatacaaagccggtgct

SEQ ID NO: 3702307 - DNA, 25 bp, Homo sapien
tagcatgaagtaaaagcttctggac

SEQ ID NO: 3702308 - DNA, 25 bp, Homo sapien
ctagcatgaagtaaaagcttctgga

SEQ ID NO: 3702309 - DNA, 25 bp, Homo sapien
gccggctacacaggccacagatgct

SEQ ID NO: 3702310 - DNA, 25 bp, Homo sapien
tgccggctacacaggccacagatgc

SEQ ID NO: 3702311 - DNA, 25 bp, Homo sapien
ccggctacacaggccacagatgctg

SEQ ID NO: 3702312 - DNA, 25 bp, Homo sapien
gagacctctcattgttcctaactcc

SEQ ID NO: 3702313 - DNA, 25 bp, Homo sapien
ttagagacctctcattgttcctaac

SEQ ID NO: 3702314 - DNA, 25 bp, Homo sapien
tctcattgttcctaactcccctgga

SEQ ID NO: 3702315 - DNA, 25 bp, Homo sapien
ctcattgttcctaactcccctggaa

SEQ ID NO: 3702316 - DNA, 25 bp, Homo sapien
tgatcaaatgatggtcgcttaagcc

SEQ ID NO: 3702317 - DNA, 25 bp, Homo sapien
ggatgtgccactgcctgtcaacaga

SEQ ID NO: 3702318 - DNA, 25 bp, Homo sapien
taggcccaggcgattagcaattaaa

SEQ ID NO: 3702319 - DNA, 25 bp, Homo sapien
aaacttgtcaccctaggaatggctg

SEQ ID NO: 3702320 - DNA, 25 bp, Homo sapien
gggctgccccttgaaaaactctaga

SEQ ID NO: 3702321 - DNA, 25 bp, Homo sapien
aaactctagagtacagattcacatt

SEQ ID NO: 3702322 - DNA, 25 bp, Homo sapien
cgcagtggggatgcaagaacagacc

SEQ ID NO: 3702323 - DNA, 25 bp, Homo sapien
tcacattactcagattgaataaggc
